United States Patent Application Publication US 2011/0183924 A1 - sequence listing, part 227

SEQ ID NO: 596007 - DNA, 480 bp, Homo sapiens
  misc_feature (46)..(46): n is a, c, g, or t
  misc_feature (48)..(48): n is a, c, g, or t
  misc_feature (124)..(124): n is a, c, g, or t
  misc_feature (199)..(199): n is a, c, g, or t
  misc_feature (230)..(230): n is a, c, g, or t
  misc_feature (250)..(250): n is a, c, g, or t
  misc_feature (256)..(256): n is a, c, g, or t
  misc_feature (281)..(281): n is a, c, g, or t
  misc_feature (367)..(367): n is a, c, g, or t
  misc_feature (398)..(398): n is a, c, g, or t
  misc_feature (446)..(446): n is a, c, g, or t
  misc_feature (466)..(466): n is a, c, g, or t
  misc_feature (473)..(473): n is a, c, g, or t
agagcccctgcgcctgggcgcgaaaatggcggcggcggcgacggcngngcggttcctgaagcagcagttatggagcttcctcaggccggggcggagcggatcatttgactcgcaccggcttccnggtgactgcttcctactgctcgtgctgctgctctacgcgccagtcgggttctgcctcctcgtcctgcgcctcttnctcgggatcacgtcttctggtcagctgcgcnatgccagacagcgtccttcncagatncgtagtgcggaccatgtgtgcggtnctagggctcgtggccggcaagaggactccggactccgggatcacagtgtcagggtctcatttcaaccatgtgacacctttctgacnacaacatagtcaatttgcttaccacctgtanaaccctctactcaataagtcccccaactttgtgtgctggtctcggggnttcatggagatgaatgggcnggggganttggtgg

SEQ ID NO: 596008 - DNA, 382 bp, Homo sapiens
atggccgcaccatcattacaattcttgtggcgtaaatgatccacggtgggacatctactgtcacttactctgtgtaggaactcgagttgaatcattactcttgcgctttacaccacgcctagggcatcatattccacttcctagaactgcacaccgggagaggatgtatttagattgtggaatcctgcgctggctctttgaggggagccatgaagctgtattgatgataggtctagggcaagtgttggcagctgctgagcttgtggatggtaagctgactgtgttggcgattaatgtcgtcctccatctgtcataggttcaggaagcccatctgtacaccatgaccatcagctgtggagcctatgatgcacgtcatgggttc

SEQ ID NO: 596009 - DNA, 699 bp, Homo sapiens
gcctgtaatcccagcactttgggaggccgaggcgggcggatcacgaggtcaggagatcgagaccatcccggctaaaacggtgaaaccccgtctctactaaaaaaaaaatacaaaaaattagccgggcgtagtggcgggcgcctgtagtcccagctacttgggaggctgaggcaggagaatggcgtgaacccgggaggcggagcttgcagtgagccgagatcccgccactgcactccagcctgggcgacagagcgagactccgtctcaaaaacaaaacaaaaacaaaaaaaaaaaaaaaaaaaaactctccgagactaagtttctctctcccccgtggggtgtgcccgggggctggcttccctaactctccgggtgggaaccgattgggttcgacagattttccccaaatttgtgggcgattctgggaccctaattcccccaagagagttcggtgggagccctctgtgaggggtttggggcccccggtgtgtgtggtgcccctcccatacaaggcgcttggtcgagcgccgtacccgggggcggggcaaaagggcgcctacccgggggggggtcgggggagtttttactctgggggggcgcttcctgggcccctatctcacacgtttgggtcacagggcgcccttccacggcaaggttggcccccgcttggggggtcccccaaatttggggcaaacccgg

SEQ ID NO: 596010 - DNA, 118 bp, Homo sapiens
gacagctccacaacaacctttattactttttatgatcgccacctacgccttactgcccgatccatctggaccagctgctttctgggctggagctttttgacccttctgtcgtcttctc

SEQ ID NO: 596011 - DNA, 404 bp, Homo sapiens
aagaaaatttaaatatcaagggaaaaaaaaacaaaaacaaaggggaaaaaaaaaaaaaaaattaaaaaaaaaaaaaaaaaaaaaaaaaaaaaaaaaaaaaaaaaaaaaattaaaaaaaaaaaaaaaaaaaaaaaaaaaaaaaaaaaattaaaaaaaaaaaaaaaaaaaaaattggggcccaaatttgggcctaattgtgcaaattccctttatggggggccatttaaaatataagggcccgggttttaaaaatggggatttgggaaaaccctgggtttccccaattaaaatgcttttgaaaaataccccctttttcaagatgggaataaatcaaaagggcccccccaaattggcttttcattttccccactctaaatggggggttgtatggcgttttttttttg

SEQ ID NO: 596012 - DNA, 891 bp, Homo sapiens
gcaacaggctatgaagactccctgcccggctgctatatgtctggtaaacagaataaatagtacttgagcatccctgacaaaaaaaaaaaaaaaaaaaaaaaaaaaaaaaaaaaaaaaaaaaaaaaaaaaaaaaaaaaaaaaaaaaaaaaaaaaaaaaaaaaacaaaacaaaacaaagacgaagagcaagcaacagaaacaaaatatacagaggaggaaacgagagaaagaacagatccacagagatacgataggagccgacccggcccggcgagcgcgcgaagaaacgagcgaacgggaagggaacaggaacacgggcgaggagcgacagaggagaaggagaagaagaaaaaggaacagtgaccgcactgcgagagagcacaaccgacagaagagaggaagaagagaggaggaccagccgacggcgagaggaacacaaagaggcgaagcagaagaaaaacgcacgacgaaggcgagagaaaaagaagcacaacaagaacacgagcacgagaacagagaagagccgagaacaaacagcgccagaaacaagaaacaaagacacacaagaggcaaacaacaccaagaagaccgcaacaaccaagagcgagacaaaacaaaactaacacacaatacaaagaaacaacagaaaagcaggagaagaaagacgacaagagcacaggaggaggaaacaagagcagggcagagacggaaagacagacgaaacaaagaacgggacagagagacagagagcacgcgaaacaaacagcgagcccacggaacgaaaacacaagaacaaagacaagaacacaacagaaaggaagagagaaaaagaagaaggcagaagagcaagaacagagccaacagcgcacagaaaagaagaagcagacaaaag

SEQ ID NO: 596013 - DNA, 625 bp, Homo sapiens
  misc_feature (376)..(376): n is a, c, g, or t
  misc_feature (392)..(392): n is a, c, g, or t
  misc_feature (420)..(420): n is a, c, g, or t
  misc_feature (477)..(477): n is a, c, g, or t
  misc_feature (482)..(482): n is a, c, g, or t
  misc_feature (562)..(562): n is a, c, g, or t
  misc_feature (566)..(566): n is a, c, g, or t
cgcggtggctcatgcctgtaatcccagcactttgggaggccgaggcaggcggatcatgaggtcaggagatcgagaccatactggctaacacggtgaaatcccgtctccgctaaaaatacataaattagctgagcgtggtggcacgtgcctgtggtccaggctactcgggaggctgaggcagggtctcaccatgttgtccagactggtcccaaactcccggtctcaagcaatcctcctgcctcagactcccaaagtgtttaattttataaattaaaatacagaactttaattaaaatacataattttaatttatacaaaacaggacaagtaattcatagcacaatttcttttattttgaaaacaaaataaacaaatntgtgtgtagatagaangggaaggttttccctctggcagtgcagngggggtgaagcaaaggggagtgtcacgttttgtgcttagttttatctgactcttacncagtnagagtgaatatatactacagggttttttttttgtctgtctgttttttgagacagagtctcactctgtcgccaggctggantgcngtggcgcgatcccaactcactacgacctccgcctgggccacagagcgagactctgtccc

SEQ ID NO: 596014 - DNA, 1061 bp, Homo sapiens
ttcttgttgcctgtggggtgttgtcctgctcgtgtgtaatcttgtgagtctgtggatctcgtggtgtttgtggtggcaacgtgtggtgttaggctgcggcttcgttgcctccgttgtggtcacatgtcccatgtctcgtgtgtgggtatcattgtagtaacttgcactgtgtgctgccccgggagttgtggtttgtttattccccgtggtgctacgcgtgtatgggggtgtgcgacccccggtggagtgccgcgccccgtgtggtggctcttctcttctgtgtttgtggtccctcgggccactgagtgcttattcagcgtgctatcccggtggagtgtgtcttttgtcgtgggtgtggtgtcggttcgcaccccgtggtgttttctcggtctcttggtgtgtgtgtctgtctcctcggtgtgttgtgcggcggtcgtgtgtcttgcgctcctcctgttgtgctcagcacacgttgcgcttggcttgtcgctgggggggtttgtttcactcgttctgcttgtccagggattgattattgatgtgtgtgtttggtcctctcatcgtctttctcactattctacctgtcactctttcgcgggggtcatcgtgttgttgtctcgcgtgcctcacactgagtggtgtgggatagtcgtgtcgctggcggcacacatcatggtctaccgtcgcggataggtggagatcgtgagtgacctccgatacgtgtgctaaactccgggggtctccctcacgcttttccgggtagctgtgccgacacctcccgcgaaggaaccacacgcggggcgcctgactgtggaacacagtggtgcaggggggcccgtttctctgacatctatccaggcgctggtgaggcccacaggtggtatgcgggttcctgaagggtgccctggttcctagcctgtcaagctctcaaggtgcctggaagccaacgtccacgcaccatgagtgcgacggattcacccgtggccgactctattatccctcgcttatggtttgtttgaaatctataatagaactactttatgagaaaaaagacaaaaaaa

SEQ ID NO: 596015 - DNA, 323 bp, Homo sapiens
  misc_feature (158)..(159): n is a, c, g, or t
actgaagaggcagaagaggctccacgaggcggggcccgtcagcagatcctcagacggcgacacgcgcacttccttttctgtttcctagaccttttaactgatggaattcagtaagcagaaaacgtgcttgaaacaagggcaccatggagcggaccctnnccctctcccctcgtggagtccttgaccctggggcaggtgacccttcttgctttgcaggcaggggctgtggctggagcttctcctacaaacgggctgtgctgggattagcccggctgtacatttgctttatgcttccgttggcatttaaaaatctgatgttcata

SEQ ID NO: 596016 - DNA, 1363 bp, Homo sapiens
cttaaaggagtgtccatacaagcatcgggaatccacgaagtgcctgggactcagagcttatgtgtattgctgaactcagcctgtcctgagctttgggcttcttatcagggccgttatggctgacttgtaggtgtgggattgtgcaacgagtgagttgtccgagtttcttgtaacataacctgatgctatttggcaggtgtgcagtaaagttgtccctacgattatggttaaagcttggaggctaggtaatagacactaggaggaaaaatgagaaccttccgaagcagtctgttgatagtgggttctagtcttggacagatgccgagcgttctgctcgtccattgttagtaaaggttcattgtggcttgttacgagcctttgaatctgtatgcagactcaagacatgttgagtggccaaaggaaaagataagccgaacttccgacctccgcgccgatcaaggcagagagaaaagagagagacgaaaacccaaccatctggtagtcattgaccattttggctacatgcatcattacagagctggatcttcaggctctcgggctaatttacgcctgagttctcacgaggaacgtgtggtacaaaagtgttcctcaatgtagttataaagtctcacgcgcaaataagtcgatcgttccaactggttgtatagcctgcgtggtcactgtgcgtcaggagagatgacttgggtttcggaacgcctttattggctggagatgaatgggaggggaagcccacccggttctgtggcaaagggcgttccctacaaacgtggcaagttgtgacttcctaggcacaggctggatactggcggaacttccacagaattgtcacgggaaggacttgaacagcttagaacaagctccggaaccgcagtggcgtaagagagagagggggcccacggcaggggcacagggacggaatcgacgcgagcatgaagatacgatgccgggcaggatctaaccctgagaagagttggggacaaagggcacgctaagtggctaaaaagccgccgtgaaaggggtaaccccgcatgtgatgggtagtggacgccgaggtactacccgaggtgcggccaacaacgacgagagtagatgaagcgcctacaagtgaatgaggatggcacatcgaacacaccccgacggtgtgctaaacccacggcgacaccaccgtcgctagtttcaggagaacgatagtgaccacgctaatcgactcaacacaacgaggggagtcttcatacagacagccagaccgcacgcctactgcacatagtaagtaccgcagacggaacgtagcaggaatgcagagtacagagtagcgatagataaatgacatactatgtaagaa

SEQ ID NO: 596017 - DNA, 296 bp, Homo sapiens
cgggtttactgtacggtagacctccagatatttatttcatataactgaaacttggtaccctttaaccaacacctccccattaccgtctcccctaacgcctggcaaccaccattctactctgtgcttcatgtgtttgcctatttagattccacatgtaagtgagatcacgtagcatgtgtctttctgtgtctggcttatttcatgtagcataaagttctgcaggaccatccatgttgttgtaattggcaggatttccatctttctaagggctgagtagtacagttagctttcgcatc

SEQ ID NO: 596018 - DNA, 823 bp, Homo sapiens
gaggccactcagaggcccccagtggggacagtggagggggacctagtccccgattctctcacccaccagctccacacattccagccaggcccaggccagtcccccacatcacacccccaggcctcctagcgggcacgcgcgggctgcaaccgcacctctgacccccaaccggcgacgggacaggcgcccaaccttgcactgcaccctacggcacttcggtcaacgatcgcacctcctcgagcaaaatgcacaccgacatcctcgcactgcgcacacatagctgaccacccgtaggtccctgggagaccaaagactgccccacgccctccacggatagccctgccatccactcgcctatcccacaatcacgccgtagaccccactcggcgccacactccaacagtgcgacgcaaatcgccatgtgcacaacacattcccacccgaaccatcacccccttgaaaccatctacactaagcccaaccggatacgacccgtagacccacccaccaaacccactctcccgacctgacatccaccatcgatccactggcccatgccacgtcgcacatagagaccctcgcattcaatataggtgatagcaacaccacggatcgagggccgcaccccaccgacggccaaacacaaccacggaggccaccacacccaaccaacgtacaccacgatgtcaaacagccccatcacacaaactcgctccgccaactacccctaccacacccacacaaccagcaacgagctacaaaggatgacacaaagcgacgtccccacacaactagcgcaagaacaacaacgcgaccacacaac

SEQ ID NO: 596019 - DNA, 107 bp, Homo sapiens
taaaatgccaagataagaaacgatttattatagagagaagaaaaatttctcatccaaaatatagaaatctgtacagttcatgtatattgattgtggcaaagttgtac

SEQ ID NO: 596020 - DNA, 383 bp, Homo sapiens
  misc_feature (125)..(125): n is a, c, g, or t
  misc_feature (209)..(209): n is a, c, g, or t
  misc_feature (271)..(271): n is a, c, g, or t
  misc_feature (280)..(280): n is a, c, g, or t
  misc_feature (379)..(379): n is a, c, g, or t
aaggtctcaccctgttccctagctgtagtgaagtggtgtcatcttggctcactgcaacctctgcctcccgagctcgagtgatcctccccacgtaagcctcctgagtagctggaaccacaaggtgngccaccatcccgggctaatttttgtattttttatagagacagtgtctcaccatgttcccagcccactggttttaactcctgggntcaacgatccgcctcctcagcctcccgaaatgctagattacagacgtagccactatcctagnccatttctnttattcaaaacacttcattatgtccagcacccttgtattagtcatcagaaggtttttcattaagtgtgaaccagagtgaagggaggggggtggttctgncagt

SEQ ID NO: 596021 - DNA, 981 bp, Homo sapiens
  misc_feature (350)..(350): n is a, c, g, or t
  misc_feature (975)..(975): n is a, c, g, or t
tctgtggtggcgctctacaactaagtggattccccgcgggctggacggaaattccgggcacgaaggctgggactccagctacacttccgaatatcttcccacggaatcctggtgccaaacagcacgtgacgaagattggactgtgacgacacgacattccaacgccacactggcttgagacaagaacttctcgggacaggcaccggttacacacttgtggaaacgtgtaacgcacgggataactctaacccctgaactaaacagctcttgaacacttggtatccactttacccacagggtgacacgacatgttgttggcgtcgccacattgttacttggggccagacatngagaccacaggagatctcacgattccacttggggagaaacacaaccaccaactcctcgggctcttggttcactacacacttgagcaacatgtgccacttacaccttgctactatcgttgcggtccgtaattaaccaagctcaccttggacccgagcgtgtttagcaacatcgtcgcttgaacttgggggaaaacaacgcatgggcaggtatacaccccacatattaaatcgacccaatgtgcagagaccaattcaccaccatatcgcgccaacatgtggcggttcaataagcggaaacgaaaggtcccggcacacggaatttgtcccatttccccaaccaggtttgtcgccagaccttgaacatgggcgaaatgcggcacattggttaggccggttacaacatatgtttgacaaattccgcggtaaaaattttcgtgtcaaatacaccgactacttttttaacccacggtgcgaccatccggcgtccccttatttatctccacgacattataaccgcgacactgtggtgtagctggtggttcccgctttgggcaccagggttctccctttaaggacggtggactcccaggtcacaggggggcaccgggccatcaggggcagtgcncacgtt

SEQ ID NO: 596022 - DNA, 1083 bp, Homo sapiens
  misc_feature (371)..(371): n is a, c, g, or t
  misc_feature (417)..(417): n is a, c, g, or t
  misc_feature (572)..(572): n is a, c, g, or t
agcggcgtgaaaagtcccatttgtatttgcatccttatgaccaatgggcttagctggcacatttcttccacatggtggacgtcatggccacagggcacgaagagatggccacgttccagttctggacaggctttccttagggtcctgtcctcactgaatgcacgttactgccggtaaagccctctcgagagtttctcgcgtacccataggcgttgactcaaggtccatagccaactgggcaagtccaccgacatggagaacatgaccagagttcctcgcattacaggactttccaagcaaaacccacatcttgctgcattcattcggtagccagggcctaaatcgctgcctgtctgaaccgggtagctcgnctggaaatgtacatgtgggtccaacaacattcttgggtctgggctnttgaaactagcacttcctgtggggcgcatcgatgaataccagatggtagtcatgaatcatgaagttcctagctggtagctatgtgcgatggatcttctctctctcgctggtcactggtgaaacgctcagtcttaggcaggaatgaggaattccanctttgcaacggcaatcgggaggccattacccgttgaagagtctgcagggtccacgctatactgaagcaggcggaaggtgtccgaagcgtcgtcttccctcgctttgttctggggagtctccaaacgtcggccaagtttgactagaattgtggcggtttatcgagtccatggcacaactcaaggtaaggccctacccaggaagccgacttctaaggatgggcggggagtcgagggtgcaccacgttccgctgccgggttgggcacacccgatttgggctggtcctggaccctattgtttacccctaatttcctttgtttgttcttctggagttgccagggtgcggtaaagggcagctccgggggatcccgaggggctatcgtccttccttgccgtggtgcgttcagggaggttcgcctgtccgaagtggctccgcgggcagagggtggccttttggctttccttgggcgctccccctttcttgagccttgcagggaacacgttttcccctgg

SEQ ID NO: 596023 - DNA, 1211 bp, Homo sapiens
  misc_feature (576)..(576): n is a, c, g, or t
gatattgccgttccagtcctctgctatgcacgacagacatatacgtgtatattccctctactcttattaccgccaagatcatcacaacacgtctgggaagagcacgcatgcgggtattaaccgcactcaaacccatggttctcgtggcctctgatatccacggattcgtgatttgctgtctcatgcgatagattcgagcaacagtaattgtcctaatggtctgggccaaggcagtttggccagattcggtatgtaacttacagtcgagtagctacttattgactaacttccatggatgctcttaagcgtgcgtaatgcggtgcatgtactagatgaagaagactctttcagctgcgttcgtatgacgtgattttagagggtagcaacggatggaccagatcctttgtcattcccacttgcgccacgttagctgaaatagcggtggctagcaccatggggatatcgttcctagaagcgcgtagaagctggggcgcgttgatcattgatccaaatttggaggggatggaattgttgacagaagattggagtttacctatgtaataaggttcgagcacntttgcaagtggccatggagatggaccccgtctcggtgtacgtggtagcacatgttgtgtttccgtaccttggtaggggttgcttgaacttgggttccattgcattacccaccacaggaaacctagttacccgcgttgatattgccggtgccaaataagtgcaaagtttcccggaatctctatatccatctctgggtttttcccaaacgaggataccttctcatggaactagaactatccctttggaggcaataggtccactagaaggctccaagtttgaccgatacccacacgccttaaggccctaatattctatataaccgattggttgtaataccccttacgtctgtacacgcatttggggcccagattagaagacagaaagcgggactttgcctgggtgcataacaattttccccccaaaatcagaaagaaccacttttgggaatcgcccatagcaactaaagcgttcgacattggccacgcgtacctttgggagacacgttggggcgacaagcggcttcgaagtccctatgtcagggaatcccgccgatttcatccagtctttgccatgtgtaaggcccacacgtaacaagacgtaaagaccttgagaactgcgcacaacacgggggaacg

SEQ ID NO: 596024 - DNA, 102 bp, Homo sapiens
tgtcggtaccccggtggtgtagacagcgcggccgcaccgtttgcgccgcgagcacggcgtagcgcatggcttcatgcaggcgggcgggcacaacgtcggcgg

SEQ ID NO: 596025 - DNA, 204 bp, Homo sapiens
tttcaattaaggatatagaattgatcttgtcacaatgcaatagttgtcgagagctaaaggcagtccgatccctgacgaacatacatgtatgactatttgtatatgcgattattgaatttacaatgttacctttttgaaagcactttttttggtgtctcaaagtgagtaactgcagccctcagctgcagctcgccccttagttga

SEQ ID NO: 596026 - DNA, 182 bp, Homo sapiens
  misc_feature (128)..(128): n is a, c, g, or t
tactttccaggggattaagaaaagccttctacacaaagttcatcagctctccaaatgacacaaccactgacaggattttgagactcgcagtagtgatgcacatgcaggctggtaggaaatgggctganagtctgcagcacctagtgccattatcttgcagggtgtcactgataagcatccaa

SEQ ID NO: 596027 - DNA, 362 bp, Homo sapiens
cgaccggaccatattgccccctagctgcagcatatccctccaaggaaagcatatctcattcttttgtaagatggcctgacctttaaaataactggagtcagctgggcacagtggctcacacctgtaatcccagcaccttgggaggccaaggcaggtggatcacctgaggtcaggagttcgagaccagcctagggggtattgacccctaggctgatattgcccactagggtgcatgtgcacattgtgcaggttagttacatatgtatacatgtgtcatgctggtgcgctgctcccactaactcgttatctagcattaggtatatatcccaatgctatccctcccccccagactaaggggcaat

SEQ ID NO: 596028 - DNA, 128 bp, Homo sapiens
ctgacattactagtcggaatgaagacagtctgggcacatagcgagatcacacctctacaaaaaaaagttaaattagccaggttgtggtatgtaccttagttcttagctattcgagaggctgaggtgga

SEQ ID NO: 596029 - DNA, 241 bp, Homo sapiens
tgtttcctcactatggttctaaatattgcttcatttcaaactttgagagatgtatggatttccaagtttttctttactttctcccagtatgttttaacaaaaaagaaaaaaggcaggaaaaaaggaatatttagcagtattgttcgttctgatttgtgaatttgttggtgacaactaaacaaggctttcagcagtttctgacaattaacatacttcattccacactcccgggggaaaagta

SEQ ID NO: 596030 - DNA, 109 bp, Homo sapiens
tgaacgttgtttctgacccagtttgtaagtttccgtcagcaggcgagttttacctattccatggaaagatcctcattatatatctgtgaagttaataaaacagttttac

SEQ ID NO: 596031 - DNA, 425 bp, Homo sapiens
  misc_feature (419)..(419): n is a, c, g, or t
gggctcatcggaggccatcagggaggctccacctctcccagcccactctctctgagttcttcatttattaaaaatgctcttttcaggaacggggaaaacgggctcaagaatcatggctgtggcacccggggcctattgtgtctcttgtcggcgtctcgctgtgaaagcacaatgagtgcttctattttatctgtaagagaagatgactctttattttgctcttcttagcaatgtggtttaataacacgcactgggtaaaaagagaagcgtaattaaacaagaacgacaaatctatagccttggtacaggaattaccaaaaggttaattttgtaccctacctaataaataatgacgtgttctggaaacctttattttctctctcctgaagaaaatccaaatgataataacagggggccantaaacc

SEQ ID NO: 596032 - DNA, 496 bp, Homo sapiens
  misc_feature (27)..(27): n is a, c, g, or t
  misc_feature (66)..(66): n is a, c, g, or t
  misc_feature (101)..(101): n is a, c, g, or t
  misc_feature (124)..(124): n is a, c, g, or t
  misc_feature (160)..(160): n is a, c, g, or t
  misc_feature (170)..(170): n is a, c, g, or t
  misc_feature (266)..(266): n is a, c, g, or t
  misc_feature (282)..(282): n is a, c, g, or t
  misc_feature (307)..(307): n is a, c, g, or t
acacccagccaaattctagagacaggntctttttttgcccaggctggactgcagtgatacatcatngctgactgaacctcaagttcccaggctaggtgatntctcacctcagcctttccaatanttgggtccgcagatgcaggccagtacacccagctcnttaaaaaaantttttttcttttttgaagagtcttgttttgttgcccaggctggaagtgcatggtgtgatctcggctcatgcaagctccacttcccggcttcagccntctcctgccctcagcntcccgagtagctgggactacaggtncccgccaccacacccggctaattttttgtatttttagcagagacggggtttcaccgtgttagccaggatggtcttgatctcctgacctcatgatccgcctgctttggcctcccaaagtgctgggattacaggcgtgagtcaccgcgcccggctcattttaaaatttttgtagatcagtgtactgttgtt

SEQ ID NO: 596033 - DNA, 1620 bp, Homo sapiens
cttcttgtaccctgtaaatagaccatgacttcgatcagtatttcttgtaccccaccccttcctatcccacagatgtgccccacatcccctgaaaggagctggctgtctcaggtcctgggctcgcgcacttcacacccgtgcagatggaccgcggcgtgaaccgaggcatgtgcacgtgaggaccgcttcgggactgaatatgtggccagctggaccacccctgacccaacacgtctgcagagcggccgaactactctgctatactaactactataatactgctactgctactaccggaaacacacgagaaaacagaaaccagcgaaccaaatgacacccctccagcacacgcgcacccgcacccccacactaacaacagaccagaccccgccacgaacacacacaaaaaacacccccactgcaggcacgcgaccgccaccacaaaacacacaacaccacccaccacacacgcgcaaccaacaaagcctcccaccccaccacccacacaccgcccaccaccacacagcgacaaaccaagaacgagcccccctctcacaccccgcgacaccccccccaccaccaccaacgccccaagcacacaccagcgcgcccaacgcacacacacacatcacaacacaacgatcccacgagcaccccccgcgcagcaccacactcgacgacgccgccaccaccatccgcccgcaccccccttccccgccatccacacgcgacccacccccaaacacaccccccctcggccgacctatgcacacccccctcagccgcctcgccccactacacaccgaaccatacaccagcaacgcactcccgctcacccaccgccctactcccagcacccgtccacaacactaccccgcacacccccacccacccaccacacgcccaacaccggcatccccacacaccctcaaacaccggcgcaccacgccccccacccacacgcccgcacaaacaccctcacgatcccaccaggccaccgacttcacatctccactgcgaccaccctctaccttataaatcatcacaccataaaactacaaccacacctccacaccactcgcaccacttaaccaccacacactcccatagacacctcactacaccaaatcaacagcagctgcctccctccacactaatacaacacacactcacactattcactacacacctcgtcaccacacccacaacacatcacacaactctacacaacaccaaccccaaacgataaaacacaactaacaacacgatacacaaactcaccacaccaaaaaccacagctgcaagcagactgacagggactagacgagcaggacaagagccgagagtgagtggatccggagaagcgaccgtcacatgaagatgacgagcagcgacccgacgacgcaccctcgcatgcccatggatacggcggaaggacggcagactccacttaccctcccatgcggcatcacacgcaagtggacacgagcggcgcggtcgtcagcgctagcgaagcgataaccgcgacacagaaagataatgatgccactacagaacgtggtctgacgatcagacgatcgacggggaagtgaggagcagaagctctcgggagagacagac

SEQ ID NO: 596034 - DNA, 362 bp, Homo sapiens
gctatttgggacattattggcagtgggccctggaggccagtccctagccccccttgccccttattttttccctgcttccctcgaacccaaaaatttttgagggatgaacgggtagacaaggactgaaattgcctctgacttccccctcccctgggttttgactttttcctccccttgcttccagggaaaatgaaaaaaaaaaaatttggaaggggctctggctccctaacccctgaatcccaaatgatgggaagtatgttttcaagtgtggggaggatatgaaaatgttttgttttcccttttggctttatgtcccttttacccctgtttttatccaataaactaagtcggtattttttgta

SEQ ID NO: 596035 - DNA, 369 bp, Homo sapiens
gtcgacaaaaaattagagtgttcaaagcaggcccgagccgcctggaatggcatggcatggaatggaatggaatggaatggaatggaatggaatggaatggaatgaaatggaatcaacccgattggaatgcaatgcagtggaacgcaatggaatggaatggaatggaacggaatggaattgaatggaacggaatggaatggaatggaattggatggaatgaagaagaatggaatggaatggaatggaatggatggaatcaacccgagtggaacggaatggaatggaatggaatggaatggaacggaacggaatggaatggatcggaatggagtgcaatggaatggaatggaatcaacccgagtgtcgacg

SEQ ID NO: 596036 - DNA, 587 bp, Homo sapiens
gctccacttctacctgcgcaacatgacatttccagaactagcttacaattcgtacaccggttataattggtttatggtttccaatgtaggaccaaattttagagataaatactgaagcaaatattgaatttcttctgtgttccacacgaagaatatgagtgaaccattattccggcttttgtttcctacagcaagatgtaagttatctggtttgcttattacttagaaaaagggctcctgctggtggaggtaaattagattatgcacctatcggcgggttagcgttgggctgtagccttttggtcgcttgcatttaccacgtatttttttctttcaatttattataagcttagagatacgatttcaaggcgcagctcttctgttagcagttttctcttcgactttgtatgaggatcatctcattttgttagcttctattcacatacctactataacactaatcctgctatggttcagacccaaatatcttcaacccctgccataggaactgtaaaaaatagattgtaattcaaagtaccttcagaaaaaaaaaagttatatacggcgcataccacacagtacgcaat

SEQ ID NO: 596037 - DNA, 191 bp, Homo sapiens
agaggatccccgtaacatctatgcatccgtataatgaataaccagctccactcccatatctgaagtccaacccacactattagtttgctgtacattcaatatctctgcattttgtctcaacaaaaacaataagcatcacacttttttttttttttttttttttttttttgggggaacaaaagggcttgggg

SEQ ID NO: 596038 - DNA, 402 bp, Homo sapiens
aggctgcggccgagcgcagtggttcatgcctgtaatcccaacactttgggaggccaaggagggcgaatcacgaggtcagaagttcaagaccagcctgtccaacatggtgaaactccgtctctaccaaaaatacattaaaaaaaaaaaaattagctgggcgtggcgatgggtgcctgtaatcccagctagtcgagaggcttaggcaggagaatggcttgaattcaggaggcggaggttgcagtgacccgagatcacgccactgcactccagcccaggtgacagtgcaagactctgtctcaaaataaataaataaaataaaataaaatagaagacctaaataaatggacaagcatccggtgtccccaattggaagacttgctattaagatggcgatatcctaaa

SEQ ID NO: 596039 - DNA, 123 bp, Homo sapiens
tactgaaattacaggcgtgagccaccacatccagcctgggctgattgggggtcctaagggtcaagggttgggtagttttataatagctcaggacagttcccggctcgggtaaggatgctcggg

SEQ ID NO: 596040 - DNA, 381 bp, Homo sapiens
cgcagatatgctctctgataaagaactgtgggctctactagaggaactcgagagacaggaggagttgctgtgtgaacttgatagtaagcctgatactgtgattgcaaatggagaagataccacatcttctgaagaggtatacttcttgtgataaggatggtgcaaggttataaccattcagaggtcaagtgaatagttagttgaactgtgtcaatgaatgggtccaggtcttaccacagtgatgaagatgatgatgatgatgacgacgacgactaccacattgacgaccatgatggtgataacgaccatgacgctttaggggttggagagtctataccaacactgtatttttcacatactggagagcctaagagggttcgt

SEQ ID NO: 596041 - DNA, 138 bp, Homo sapiens
  misc_feature (124)..(124): n is a, c, g, or t
ggggggttttgttttctaagatggggaaactgtaccccaccctgtctaagttctgccctaatgggcccccctggtgtaaccgggcggctatccatagggggggtttcttccttgggggccgtcnttttttgggaaaca

SEQ ID NO: 596042 - DNA, 106 bp, Homo sapiens
tatccccatacagagtagccacatcaccctcttacctctacttctacctacgcctaatctactccacctcaatcacactactctgtactctgtatgggggatctcg

SEQ ID NO: 596043 - DNA, 287 bp, Homo sapiens
  misc_feature (21)..(21): n is a, c, g, or t
  misc_feature (23)..(23): n is a, c, g, or t
caatttcttccagatagcctnantcatctctctccatctctcaagttcaaagttccacagatttctaggatggtggcaaaatgccaccagtctctttgcacagcaagtgtgacttttactccaggtcccaataagttcctcatctctacctgagacaaccccagcctggattttgttgtcatatcagtatcattttggtcagagccattcagtatgtctctaggaagttccacatgttcccacatggtcctgctttctgagccctccaagtctctaggaagttacca

SEQ ID NO: 596044 - DNA, 350 bp, Homo sapiens
  misc_feature (52)..(52): n is a, c, g, or t
gatgggtctccgtcccatcagatcacaaaatcacaaagcaccggagctggangaatcttaagagataatccaaggccaggagcggtggctcacggccctaatttttgtatttttagtagacatggggttgcatcatgttggctgggtgtggtggctcacgcctgtaatccctgcactttgggaagctgaggggggcagattgcttgaggccaggagttcaagaccagccagagtaacatggtgagaccttgtctctacaaaaaatacaaaaattagctgggtgttgtgacgcacacctggaatcccgatactcagggggctgatgggagaagactgcggggatcctgtaa

SEQ ID NO: 596045 - DNA, 1363 bp, Homo sapiens
  misc_feature (289)..(289): n is a, c, g, or t
  misc_feature (753)..(753): n is a, c, g, or t
tgtcgtgctctcgtcgggccctgggctaggcagaggatcagtgctgccaggtgcctcgaatggtgaattgtcctccgtgtagccagagggatggagtgtggagcagtgtaattcaatcggcgtccagcaaacgaagagcatcatcaacggacaccaagagcgtgaggcaagagatggatgcatatatcccaagacacccaactctatggtagctagcgcatgatgagggcgcattagcttggttcgagatcttcgcttctagattcaggcggacatctgatgccccacngtttgtgcatgacatggttgcgaatgcattgtggtctcaggtagacttgagtgcgaagaggcgcgtacaggacgtgttgtggtgttgtcagtgcctcctagagcccacgttggcaattcgtactctttccgcctgagacaatatgtgaatttccaactgtgtgctgtgaccacgcaaccagaacatgttgtcgtgcacaacggtaagttatgaagcaaatgcgcgaacatgtgttccatggattactaccatctccagtcgctccgtgaggtagcgaattgccaagggagaaatcgtcgatcgatatgattcagacattgtatagtaactagttgagactaaggctatgagcaaaagcatgtaattcctcagtgggacatggtcgccctttttgtgctgcacacgtgcactcacccaggacactggctggggaaacgcattcgatgaacctgggctcaccgttntgagcattgatcagacgtaaccgcagtttttgtggttcatcctattggttcatccgatattcgtcggagggggcccgttgggtgccaccaacgttccttccgcttctgtttacccgtcttcttccattacagctgacatggcctagtgaaacgtggctaaaaccagggttagaaacaagcggctttcccgggaagaaaccaggcctaacgataggcaggcccctgggataccatcctattacccatcggagggccatttgggaaatacttggggatggagatatagagttgaaatatgtgttagaggaaactatcgtggcaggggatataggagaattgaaagcccggtttaaaaagattatacgggagacccgtggcctcttaaacattcaagttacgcgggaagaaagagtttctctaaaacgggaatatctaaaccaggggggaaacacaacagcagctgcacacaggagctggaagaacatccaagaagattaatcggtcggcgacacaacttagcagcagctgataaacgaacataaacgaaaaggatgtgcgaagaagacaacaatgaggttactacacgaagacggtagatacagccagaagg

SEQ ID NO: 596046 - DNA, 149 bp, Homo sapiens
gggggggggaaccccgggggggggttttttttttgggggggaggggttttggggtccccttttttcccctccccaatttttgggggggggaagggggaaaaaaaatttgtttaaagtttttaaaatggtaataaaaaattttttcccca

SEQ ID NO: 596047 - DNA, 546 bp, Homo sapiens
agctggaatagagctcgcctcggctctgctggccttggctgcagctcttccagaaacccggggcgcccacagaagaatctcatacctggctctctcttcagggatgacatcatcggctcacaccagtcttccaggaccaccttctggatgccaaggctgctgctcgagtacctgctgtgcacctctacctcctgagccaaggagcacggattccaggaacccactaccatacagagcaactccttgtggacccccctgggatcaggacagcgagggacaagcgacaaagaggatcatcagtggccagctagtctctctggggttcaaaccttgaaccagtgccctagtgagggggcactggccatggcccttgacctttgctctgcttgtgtcttgagtctgagccctttcctgtacatctgtgctcgtgttcatctgctagtgaactggagtgctgccttccccgaggagggtcgtcccttgtgactgatcatgctgtcctaacaatgtcctgagcaaaagggtccctttgggaacctctcagga

SEQ ID NO: 596048 - DNA, 590 bp, Homo sapiens
agctggaatagagctcgcctcggctctgctggccttggctgcagctcttccagaaacccggggcgcccacagaagaatctcatacctggctctctcttcagggatgacatcatcggctcacaccagtcttccaggaccaccttctggatgccaaggctgctgctcgagtacctgctgtgcacctctacctcctggtaccccagccactccctcaagttgcctgcatgttatatggcctagccaaggagcacggattccaggaacccactaccatacagagcaactccttgtggacccccctgggatcaggacagcgagggacaagcgacaaagaggatcatcagtggccagctagtctctctggggttcaaaccttgaaccagtgccctagtgagggggcactggccatggcccttgacctttgctctgcttgtgtcttgagtctgagccctttcctgtacatctgtgctcgtgttcatctgctagtgaactggagtgctgccttccccgaggagggtcgtcccttgtgactgatcatgctgtcctaacaatgtcctgagcaaaagggtccctttgggaacctctcagga

SEQ ID NO: 596049 - DNA, 1739 bp, Homo sapiens
  misc_feature (76)..(76): n is a, c, g, or t
  misc_feature (771)..(771): n is a, c, g, or t
  misc_feature (1739)..(1739): n is a, c, g, or t
gagtagaagcgctgtccggagcttgcgcatttcgcaggcgctgccgcctcggcagttgctcctgtcgatgaatggnccatgtatccgacagcaccgatcatccaaccgagtgagagcggtaccagctcaaacggcctgtccacagagggcgtctcgagtcgaggagagggccacattccttttgtgcacctcatgcagctgcgaggtcgggtgaatggccaccgcagcactaagaatattgatgacgcgaacactcgaggtggtatgcgtggttcccattgcactgctctccaccctatcacgccaagagactctcgtgtattgcctaagagctagcattaggtgaatagccatgtgggctaagatacatctggaattggattcctttcgtttgctggggtgaaatttacgatcgcgagatgcttgcgtgctggacgtaccaagaaaggtgggtgtcgtgagagcgtgtaaagagcgacgattgggagtatgaatgatttcatacgcgagagggtttgtagactaggaatgacgttgataagggtgcgtgggttagcgctatgggacgcacactaggatcggcgctagtagtaattgtcgtccatagtggtgattgctatcctttgaacacgtaaatatcgagaggaaaagaaccactctgggtgcgtggcggagtgcccacgggggtcatctacaactggtattttggcattattgcccacgtggacttggaacacgtacgaagcggaggtatgtactgtgcgccatctnttagcacccgcacttagaggttccttttggagtaaccaaccaaaggtgcttatatattgctccattgaactcgcgcgggaaactaaccgtctcggttaaaagtggggcaccgtttttgccccttggagagttgaccgacccccggtggaagtttctgtaacacagcttccacacgttctacttagggttggccatggttgatttaactttgtccaagggaacttcctgcagggggttggctggcatgagcctttttgccccccattttcgacgaacaggttgccccaacacacccagaatcggtctaattaatatcactgggtgaggcacaggcacactgcaattttgacaaacgcagcgcgtgtacagagtgctttgtgagcactgaggacctttgacagtgggagaataggcccccctaaataagggggggcagacagttctcatcgaagacagccactgttcggtgcgcctcttgcgtcaaacattcacctcgtgtgcaggtcagcgaatacaaaagaggacaaccacccatacagtcccacaggggggcccacaaccaggacaatgcgggacggccggggccacagaggaggaagaccggaattgagactggacgaacgacaaaaccactacgtcggcacaaacaacattgcaagcaaagagcgcacacaagagagaagagagcgatacaggaaaagaagtcaccaaaaggtagcacacaccaagcccaccaggcacatgcagagaaaaacacctaatacgaccagcacaaagaagcacaagagcaacactgatgatccaaccgctacaaccaagacagcactcagaagagactctcggttaagagaaccacagcaacagtagagacaacgcagaagtcatacatctactctaccatccctcattctactcactctcaccgacgacgaaggagcaccaagagcaagcacaacagacaacatgcn

SEQ ID NO: 596050 - DNA, 305 bp, Homo sapiens
atttcctttcccccaagaagccgtggggtttgggatttttcccaagtcctgtttttgaatttgtgtccttggcctgcacagctttgtaaaaccccctccccggttggggggggggcctccccttttcccaagtggttagttttttttaccccccagaattggttgggtttcctgtgtaattgcccaaatgggataagcctggattgtggggtgggcccttttccccaaattttttttgtcccttttcatttaaaggctctttttttgagtttttgggaacttttggccaaatccaaaaaaaaaaa

SEQ ID NO: 596051 - DNA, 267 bp, Homo sapiens
agctggaatagagctcgcctcggctctgctggccttggctgcagctcttccagaaacccggggcgcccacagaagaatctcatacctggctctctcttcagggatgacatcatcggctcacaccagtcttccaggaccaccttctggatgccaaggctgctgctcgagtacctgctgtgcacctctacctcctggttcttcatttcctgtgggcctagtttccaggggctgagtgactagggtcttaaaacaggtttaaggcttggc

SEQ ID NO: 596052 - DNA, 731 bp, Homo sapiens
gccgccggttgggggagagtaattccggcgtgttgcgaccatggcgtccatggtggacccgtcggcctatcggatgcaagtatgtggcgccctttcctcatcatcaagatcaggaccgcaagtcccgtcttatgggacttgaggccctcaagtctcatagtaatggcgagcaaaggctgtagcgaaatacaatgagaacatcacttggaccaaatgggcttgataagatgatggtggataaggatggcggatgctcgactgtgaacctacactgatgagggccgaccgatctcaacgcactgcatagcgatcgtcgactcactcaggattgccaagcgtgatgcgatggaacatgtcccaaagcttctcagcgcatgcgtgaaattggagatggaacacaacacggcagatgcgcccgccccatgagcctggaatgccctacagaaaaagcaagcacaggcgagacgaccaaacgagcctaagaacccgagcgaccagtcccaccacaaaaacgagaagtacaccccgcaagacacccatgccacaaaagacgacctgagcgacgaaagaatggacaaagactgagacacaagacacaagaaagacaaggaaaccaagacagaataagagaagacccaggatagggaggcatagacacgagaaacaacacgcaacaacaccacaaaacaaccaccaaaagggcacagcaaccaagaccagagaagaaccca

SEQ ID NO: 596053 - DNA, 394 bp, Homo sapiens
  misc_feature (60)..(60): n is a, c, g, or t
  misc_feature (234)..(234): n is a, c, g, or t
  misc_feature (261)..(261): n is a, c, g, or t
  misc_feature (302)..(302): n is a, c, g, or t
  misc_feature (325)..(325): n is a, c, g, or t
  misc_feature (360)..(360): n is a, c, g, or t
gagagctccaagaccaaaagaagagacccccaagtggggtggaaaccagccaggtatgtntagaggctggaggaggcagtgtctgatttgcatagggcacaggggattggtttgaccagacatgtcattcatgtaacctgcaaaaacattggccctctcaccctagccttttaatatgcaaatacagggcaccatgatgttctacacacggggggatatgttgccaggcacgtntggggcaagggcaagaagacaacagtnagaatcgccatgtttgggtagacccagtttctaatggcctntatttgcatatccaaagggttanccggctcttaagagcttaggggcttttacaaaggnaacttgcttttcttgggagctgcttttaaaaaat

SEQ ID NO: 596054 - DNA, 624 bp, Homo sapiens
acgagtcgcgcggaggcggaggattgggtgcgtctcagagattcaacttcagccgtaacccatcgacatgggcgaggaaggcatagctgctggagcgtgtaagtgtggacggtctcatatgactgctgtataagcaaagagggttgtctgcataatgacatgcgccgtcactcgccgacgtagtggtcaccttaggcgacgatgggaaaggttccgcagatagacttggccaaacagcactttatgaacaagccgcccaaggtcccaatcgttggtgctgcttgacactcactaaactggtgacgagcctatgtatgtcaagtaggtgtaggccctatgggctgaactaccaaacttcataggcgtatagttagaggtgggactggacgaactagcaagatcgtaggacgaatgtgggtaggccttttgttataagattgtacaggatgagggggtaacacccaagtaaagatggttctggtggctgtctgtgtaggtattttgaggacttatggacgagcgagtctcaggccaaggtatgtcatgaaagagtatgtggatctgcaagattgtgaatgaaataaatctttggtacatcatgtaaatggtttgattaaattatac

SEQ ID NO: 596055 - DNA, 134 bp, Homo sapiens
tcgctcgacatcgatacgactttttttttttttttttttttttttttttccccccccctgcgccccgcccctcgccttgccgaagtcctgcccgatgcgcgggtggtgcatcaattcccttctgtcgtcttctc

SEQ ID NO: 596056 - DNA, 377 bp, Homo sapiens
  misc_feature (18)..(18): n is a, c, g, or t
ttatggccggcggaccanaatttgttaccttttatccacaaacaaacttacaaggcgggctttgggcttttaacctgtaaatccaaccaccccccagcaaatgtttgagacgccttatctctctatcttcaaaataacagtatactacatcaccgccattgttttggacccacgtgcccagaattcttaagagaattcctattacaatcaactactcagtccattatacttatactactgctccccaaaaccacaaattgtcccctatccgattaaaaaacctatccgcttccttaaaatctaaaatgtcaccagattataatatttatacgccctaatataactttctcattatatctcatctcgttttttatccg

SEQ ID NO: 596057 - DNA, 262 bp, Homo sapiens
ttttttttggaaaaaaaaggttttttttggggccgggggggccccaccccccgggttttaagggttttccccccccccccccccccagggggggggattaagggggggggcccccccccccccccctttttgtttttttgggggggccttgggggaaaaaattccccccttttttggggttttgggggttttttttttttttttgggggggggggggggggaaattttttttttttcccccccccttttgttttttttttta

SEQ ID NO: 596058 - DNA, 111 bp, Homo sapiens
cgagctcgtaccaagtctggcggggcttagaatcatattctctccatcaggcctgaccaggtgtgacctcggccacataaattcacagattcttcgtagcctctttgatct

SEQ ID NO: 596059 - DNA, 276 bp, Homo sapiens
cttttaaaggattttcctttggatgggggaatttgttatgcttataaacttgacggtcccattcctgagcaagggtggaaaaattcccaggggggacaacctttccatcaaatttgcttttttgagggaaaaaataaaaattttgtcaaaaattttttccgctaacacaacataggaagttttccggtttgaaaaacccagaatctaaaattttttgaggcaatagggacccttttttttgcccttaactctttttaccaatttattccaaaggct

SEQ ID NO: 596060 - DNA, 1613 bp, Homo sapiens
  misc_feature (574)..(574): n is a, c, g, or t
  misc_feature (1388)..(1388): n is a, c, g, or t
gtcgttgcctatatcatattcgcccgctcctacctattttgatttacatcattccaatccacatccagtgtgtgtatatattagcccctccgtcctgcggttttacaccccccacacacacgaggctgtgttctttttcaaataaagaagaaaggtgttaattataaataaagttgtatagaagtgaaactcttctccgccaagaatttgtgtctccccccccccccccttgtttgtcctcccacgaatgtagtcactctgacctcccctttgttagagcactctctccccccccggtgttttttttatggggggggtgccgcctcccctccctcctgggtcccccaccaggtgggaagacagcaaaacagatgattttttaatacacgcgggccccccgctgggggtgttgtcgctcccctatataacccgcgtgggcccaacacaaaggggggtgtgtcgaccacaataatagtagtcacaccacccgtgtgggctggtgccgtcccccttatagcatatttagtggggggagacaccctcccgcgtgtgatggattagagatagttggggngcctcacccacacccgcatagaggtggtttttaccaacagcgtggttggtgttctcgtataaaccgtgttttgtaaaacccaccccgctgggagaaaattgtgtaggagaccctcggtcgccccccccccttgcgagaaagaaagaggccgcgcgcggctcaacttgtgaagaacaaccactacggcttcacaaagttactcgcagcggtatagtgtagctcccccctcatttgggagagagtcctttttttatagattgtttatatttgatgagagcgcaccacaccactgtgtagctctcttactcacaaacacgcccacacacaggtgtctctcttaaaattttgccgcacaaacactctctgcactctgtatgacaaatattttcctgcgttgtttggggggcgagacacactctctggagagccacagagataccctcacacactcctctctcagagagacacgtggacacacatgggttataagagacttcttacacacacagttactcacaagctcggagagactatctatatatatacctacacacatgtggagatccccccacatataactgtggtgcctcacactcgggaggacacacacagtgtataccccctatagggaggataacacacggcgccacattgtcctatatttctatagagagtgcacacacaatcacaccacacataagaggtgttatcgacccctccgagatggtgtggagatacacggagacactccccgcagatggggcgcacacccactctatattataaagtgtttgtctttgttctcacccgagtnttaaagtctctaacgggagatttgaggttctcgacccccgtatatccacggtctggtttttatatttaacttctcaaatttcttctccctgtatcgaaaaggaacaaagagagaaaatataaggcctatctttctacacacaaggcgcctttccccgtaaaagaaatcatttctaacttagtattatacccaccccccaccccagaacacccgcctttgtttata

SEQ ID NO: 596061 - DNA, 217 bp, Homo sapiens
gagacgctgtctccataaacaaatcacacaaagtatggtgtcagtagctgtgttctagcaacctgtgctacgcactgaggacaaaaatgtgatcccaacagaacagggatgtcttctcgcccagccccttgagcagcagagccggggagcagatgcagggaaatgcctgatggtgtacccatgtggcagggcggatgtgtagggcaccgcagaacag

SEQ ID NO: 596062 - DNA, 175 bp, Homo sapiens
  misc_feature (132)..(133): n is a, c, g, or t
gcaggttcaagaagaaatatatttgatgagtttataataaacacctgcaaaactgcctgggtaccagctcgcatgcactgttttttgggtgcttcagaggcgctatgaagagcaccttttttttttttcgcnnccgcccaaccggaactccgaacatgatcaggagtattgggcc

SEQ ID NO: 596063 - DNA, 519 bp, Homo sapiens
ctgggaatccaactctgggcctctgctctctccccaagcctggttagtatcactttattgagacaggttctcactgtgtaacctggagtggcccagaactagtaaggaagaccagactacctcaaactgacaaagatccaactgcatcccaagcactggaactaacgacatgcattgctttcctttttaagtaggacttttatctacactgatagatgctgcccacatgaacagtagctcttgggtcactagtgacttaacagtacaggagcctggagtaatagctcagcactagagccatacataacgcatgaggctttgagtttaatccccagcacaaagaaatagctgtctaaaaagcaaaatagttgctgggggggggggggggtgacgcacacctttaatcccaggacttgggaggcagaggcaggtggatttctgagttcgaggccaacctggtctacagagtgaattccaggatagccagggctacccagagaaaccctgtctcaaaaacca

SEQ ID NO: 596064 - DNA, 100 bp, Homo sapiens
agcatgggcctcacatttcattgtgactcctagtttcaccgtgtaaatgctacacatgttatttctaccctcttatattgtgctatctaatctagatttt

SEQ ID NO: 596065 - DNA, 284 bp, Homo sapiens
cctgtaatccctgctagtcaggaggcggaggcaggagaattgcttgaacctgggaagcggaggttgcagtgagccgagatggcgccactgtactccacggtggtgtcagagcgatactacatctcaaaaaaaaaaaaaaaaaaattagctgggtttggtggcacacacctgtaataccaggtactcgggaggcccaggcaggatgatcacttgatcccgggaggggttggttttccgtgaaccaagattgtactactgcactccagcctgggggaacaggggca

SEQ ID NO: 596066 - DNA, 241 bp, Homo sapiens
ggatcccgtggctactgctggagacctgggggtgaacccagtcccgagggcactactggccagtcctacaaacagtattctcagagataccatcagagaacaaacactaatcgttaatagcccaattgagtgcttcatgcctttagaatgtacagagctgacatgagcaagattcccgacgagtaaatcatcatttccaagtccagtaggaacaaagcatagtctctctagccaaggatcc

SEQ ID NO: 596067 - DNA, 395 bp, Homo sapiens
ctctgtacagagttgagagatggggacgacatgtgacagagctccttgctgctcaaattatatgccagagaaaatattcaccttctcggactccctgacaccaggcatgggcatgtaatcctacagcacagctgatgaaagagaagacatcttgatgctatgtgacacgcacgaagataagagctttcctatgaagatgacggagcaaaacaagtagaaggggcactagactccctaccttcacacttcctgctataaaagcattgctatgataaggataatctgcagaaacagacttctatgtcatatgcgaaaatgcatgaaaagtcatacaatatccattaaattggcgcaaagatccattttgaaggagtaatctgagggacctacagacc

SEQ ID NO: 596068 - DNA, 335 bp, Homo sapiens
atttaaaagtcaatttggtatcacctccacacttgataagggagttgggtgcaatttggtttcaaaattgggaactttaaaaacttagggcctgactgcggtccttaacggacttaattaagtaacccgtagcttaattggcctgaacaagctccttgttccaaggttaaagacctgcctatcgttccaataatcctgtttcacttgaatgaagggagtatgtcttaaatgtaaagtttctggttctcacactgtactctgaggtccaaatactgtctgtcaatgtgtaacctgatgtctcaaccccctgtgagaagagtccattatttggtgtt

SEQ ID NO: 596069 - DNA, 190 bp, Homo sapiens
atcaggtactgatgagactgcattatagcacagctggaggggttcgtgaatactcccgctgtaaatcccgttctacttcactcggtcaggggagtgaagtgccttaagaaacaaatgccctgtcctacttgatctagctggtcagtccggtcttagagataccctcttccctgaagaacctgaagatcgt

SEQ ID NO: 596070 - DNA, 119 bp, Homo sapiens
tagcatgataaatcgagccggtaccctcgatatgcaagcgaaattggtcatctcgctaacaactgcccagctttgaggaaatctgaaatagagtactatgctatgttggcccttatccg

SEQ ID NO: 596071 - DNA, 399 bp, Homo sapiens
agccggttgttgaagtcatcctcgcgggtgaccaggacttccaaagaatggattccctgctccttagcagtcttgtaaacactgctgaaatcatccccaaggtttgggtcagcccccgcagctagcagaatctgcaccacactgtcgtttcggttgatggcagccaccatgagcgctgtccagcccagtttgtgccttgcattgacatctgcgccttctgacaatagcctgctgacctcctgcacgttgttggcccgggcagcttccatcagggctgcatccttgttggacggactcttgctgtagcaatgaaccatcagcgccgtgccagagcccacatgctgaggccggctctgttggggacctcattccagctgtcctgtcctggcagtgtttctt

SEQ ID NO: 596072 - DNA, 331 bp, Homo sapiens
acgtgtagcgggtgtgatggtgtgtgcctgtggtcccgctcccttggggctgggtgggcgggatcgcttgatcctgggaggttgaggctgcagtgagcaagttaacattttttgttaccaggtggatagcatcacttctcaagcaccatcacacagcgtgcagtcaatcaaggcagggaagccacaagcagatgacaacgtttctaggtaagttcacatgcattcttagtctgttaaactgtcttcagcaaaggcccttgaggtggtacacaaaataacaatactcaatgtgggaactccatgtcgttgcaacgcggggatccctctcgca

SEQ ID NO: 596073 - DNA, 130 bp, Homo sapiens
  misc_feature (13)..(13): n is a, c, g, or t
atgtctggatganctgctcggcattgtcggtagcagccttcatagcacgctgacggctagccaattccaaggcagccgattgcagcaaggcgtagtggacgcggttggcgacgtacagcggtagcaactc

SEQ ID NO: 596074 - DNA, 503 bp, Homo sapiens
  misc_feature (50)..(50): n is a, c, g, or t
  misc_feature (172)..(172): n is a, c, g, or t
  misc_feature (195)..(195): n is a, c, g, or t
  misc_feature (231)..(231): n is a, c, g, or t
  misc_feature (261)..(261): n is a, c, g, or t
  misc_feature (291)..(291): n is a, c, g, or t
  misc_feature (306)..(306): n is a, c, g, or t
  misc_feature (317)..(317): n is a, c, g, or t
  misc_feature (330)..(330): n is a, c, g, or t
aggaaaaaaagaggacttgcagaagaaaaagggattaaaacacttgaagnattccagaaggcaccccagggttccccacccccatagaagtcccacacccccattccccccatgttttttgcattgaagccctgctggggggcaggcccctgggtccccttccccttctganccctgttgtccctgagtcacaancttatcccctgtccttggaacccattggttcctaancagcactggagaatctgagacagctggaanaccagagcaccccattcagcccctctaaanttgtatgtggtaaanctggggccaanagagggcagctgnttgctcaaggccagccatagtaggaggtctaaaacttgtgtcaaccagcgtgctggctggattatttaggctgaggcacaagattcacttgaaccctggaggcggaggctgtagtgagccgagatgacaccactgcactccagcctgggtgacagaatgagtctctgtctcaa

SEQ ID NO: 596075 - DNA, 566 bp, Homo sapiens
  misc_feature (47)..(47): n is a, c, g, or t
agagaagaaggaagaggaaagaggagggaagaatagggaaggcaaancggaaaggaccaagacatgggagagcgagagcaaagagagagaggggagggatagagaaaagagaagaaagaaaggaggaggaagggaggaaggaagaggaaaagggggagaaagggggagagaaaaaggaagaggggaagaagaaaaggagaagagaagaagagggaaaagaaaaaggagggggaaagaaggagaagaggagagaggagaaaggagagaaagagaaaggaaggggagagagaaaagggaaaaagggaaggaagaggagagaagagaggagaagaaagaaagggaaggggaaagaagggagaaagagaggaaggaaggaagaaaaaggagggaaaaggaaaagaaagggaggagaaggggaagagaaagggggaaagagagaggaagagaaaaaagagaaaggaagagggaaggagaggaaggggaggagaaaaagaaggggagaaggaaaagagagagagaaaaaaagaagggggagaaagggggagagaggaggagggagggaaggg

SEQ ID NO: 596076 - DNA, 116 bp, Homo sapiens
cggtccaattatccagaggattatggttggacgggggcccgaggggcgctcctccgcgggcatgaccagttcgcctacgagggcaaggattacatctgccctgaactgaggacctg

SEQ ID NO: 596077 - DNA, 933 bp, Homo sapiens
tgaatcaataaacaatattattgaattgcatagctcatttcacaagaaattctggatgaaatgtgtttaataatatacttcaacaatccatttcttggcaattgttgaaacaaagtgagatattctatagatcttaaatgtgtaattcctatgtgttactgttctttctgggtaaattcctatggttagtataagtatggtgtacctaattggagtgtattctaatcattctctctttagagatcagcagtgcctggaccatacaagtcgagcaagtactaactcatcttaagcagccttacaacttgcgatccatctaatattcatgattgaatcaaggtagaccaatcgatatcaaaaccaagagttattaactggtgagaagagaattctgtagcaaattgcattgtatatattatatgtattgaggtcatgtgtgcattcatcctttgtgtgtagatgtattgaatttatttactagtgtgctaggagcattctgttgattttgtcaatagtaacattcaaatctttaggagtggtattatgcttactttcgcgtaaaagtaatcgtaatctaagttggattttgattgaatgacccttagaaaggcggttaaatatttagagtgatctgtccatctggattggtcgtgcagagaggttccgcgtatggcactgtaacttagctgcggttggaaacatctgggttgcgattagagtatcatcagagtttccatttctcaatccactcctgcgtgtctgcttcacccgtttgttctcggaacaactcaactcttattgcacattcaacggttacttcgaatggtttcccaactcccaggctctcttggagcctcacttaaaaggaataaacagactcagtttttaaccaattatgcgggggcatgtcccaattcttttaacctcaatgtc

SEQ ID NO: 596078 - DNA, 299 bp, Homo sapiens
ctcggcccagcattactgagtcagctaatttttgtatattgagtacacagtgttcaccatgtttggcaggctggcctcaaattcctgacctcagttgatccacccgccttggcctcccaaagtgctgagattacaggcttgagccaccgcagcctggccttttttttttggttgagacgggttgcagtgacacaattttcagctcactgcagctcttcaccgctcgggctcaagttgattttcccattgcagtctggtgaccatcaggttttgtgtccatcacacgtaatgcttctttt

SEQ ID NO: 596079 - DNA, 708 bp, Homo sapiens
ggctgttacggccctggaagttatgggatgggctgactcaagcgtgaggcgctgctggaacagtcgccgaggcgattcccgcccaggctcctgtaaccgccaggcagtgtgaccgcgccattgtccagcctccggtagcccagagcatggcactggatacaccgtgtggggactgcccccgcaggcaggatgagacgatggacgctaggggaggggatccacgtgctcccaacgctatgctcagcgttcagtgactgccctggtgtccatcatcgccaccgtctatgatcctgcctgtgacccacacggagatctccccagaacaggtaacggggcaggctgtgctctgcgtggtgtggccctgcgaagatatagggtccccgaggctcgacctggcacagggtgctgaccctgcacgcctcgaagcttctgaggcttaggaggcagaggcggtgaggctgggtggcctccttggaccagggagggagccaaccaagtcctgctcagcctgtgctcaccccggcggatagtccttggccctcctgggagggtggcgagactgggctcctagggcctctgtctcctgatgcttcagctgcgcacaaaggccagctaccctgggcgtgtgagccagaggacagggttggaagacggaaggttccggggccttgccccacggacacgcactgtcttcctcttgcgggacca

SEQ ID NO: 596080 - DNA, 616 bp, Homo sapiens
caagctgcgcacattacagtagacaataagaacaatgagacacaacttgagagtccagaaactaagaccgaacattcatggtctattgcttccaagaaaaaggtactatgcgattctgaaagtgaattaatcgtattcctcaacaaacaatgccaggtaagattgatagaagactacctcaaggaatctaataatcagtatccctaaggtcaaggataaagaaaggattctaaagtcgatggaaaatgaaaagaaagaaataatgtacaatgtgagctccgactacatctggcagcagacttgtcagtggaaaaaggccaggagacagtgatttgacatataagaattgcagaaggaaaaaagttagaggccagaaatagtgttactggagaaaatattcttcaaacatgaaagagaaagacttttccaaaccaacaaaagctgagggatttcataaacaccagatctgtcctataagaaatgttaaagggattacttcaatcagaaagaaaagggcattaatgagcaatatgtaatcacctaaagctataaaactcactggtaatagtaaggagacagaaaaacacagactagtataacactgtgagcagcgttg

SEQ ID NO: 596081 - DNA, 330 bp, Homo sapiens
gggggggcccccccccttttttcggggatttcgggggttttccccccccgggggtttttccccctttttccccaacctggggggggggggccggggccggggccccccccttttttttttttggggggggggggtttcggccccccaatttcccccggcgggttttttaacgttttccccccccccaaatttatgttctcctttcccccccggggttttgggcggggggcccaaccccctttttcccccccaggggcccccccctttttttttgggggggggcccctttcggggggggcccccatttttttcggggcccccccggtttta

SEQ ID NO: 596082 - DNA, 242 bp, Homo sapiens
gactcgacaagctagaacgctaaaccagagaactaatataagatagaacagggagaacactggcctggccattaccatttccataactagacgtcgaacacagaacctaaacactcaagatatgcttaatttaaaaattggacaatcatggaagtcttggtaagtcttggctatactttcccatcacatggaatgggtatttcatacaatgaaatacaaaaatgtcaaggaacttttctctt

SEQ ID NO: 596083 - DNA, 144 bp, Homo sapiens
gccttgcttacggcgtgcactccggcggccatggagcagcgccgcgtcaccgacttcttcgcgcgccgccgccccgggcctgatcgcgcgacagggcgcgacgccgaggaaagaaaggaaaggaatacgagaacagaaaaaaag

SEQ ID NO: 596084 - DNA, 1495 bp, Homo sapiens
  misc_feature (271)..(271): n is a, c, g, or t
  misc_feature (758)..(758): n is a, c, g, or t
  misc_feature (762)..(762): n is a, c, g, or t
gcaacaaacatgaacgtttctaccacagagaagaattaggcgctccgttctcaagtagacagagtccagctgccttgacatagcctcgaagacctgggagagagggcccagacctgggaccctctgggtcatgcatgtgggatccatctgcgcgcccagcagactccttatccgtcctagaggcacacgcacctacgcgtctggcgcttgcgattccattatcgccaagaatgatcgtggattctggttaatagttagagtactcgtcgtngatcaaagcgtttatctctaagcgtagttgtatctctctcgttaagatctagaaggtcgagaaacgtacgacacttatggtggcaagacacttagttctaggtgactacttaccccagaagggggtcctggggggtgtcgtaattgcacctgttaccatggcaccacaagccagatgcgtacctagataagctattcggacctagggggtagccttcgggtgaacattggaccacgtgttctctggtcgccacgcttttgaccttgttactacaagtcccagagatccaactagatctccttccccccctggggaagtgcccatttcctgcgcctcttagcccccttggcccctcgggcccttgaccggcgtccccccagaccttgctcaaggtccccgctgtgggcccctttgggaacgaacgccacggatttcgcgtagggtccctttggatttaatttgctaacccatgcgcaccggtagaccncttnttctttaacaacacacacacactttcaagcggtattatccctagttgtgtactctcgttggcttagggctaatgggtcccctggccaagttaacgccgccaataaagctcccgttgcataggtattttgctctcgcacaacacgggcggccacacaggggccccaaaactccaataggtttctccccgcgaactgttgttgcctcaaggcgccacttggcgcgcccaaccccgagaggaggggttccgttctacacggggcccccttcagagctcccccgtgctcttccccactctgtccgccttgctccccagagccccctttccctcggcacgcgaattggcgcctccaccgcgctggctctgtcttcccaatgtgggcgcggcacacaggtgcgcctcctaagccccgtctgccgaaggttctttccttggtccccaagcgttgtaccttcctttaccttggtgggaccccttgcggtcgcttccccccccgagtctttcccacagcgtcgcagctctgcgcgcccctaccggaacatgcgccggcggcttacaaccaagcgcgggcgccatttccccccttccccccttttccccgcgcatttcctttaacacgggaggcttggctctactttcccagcagtctcacacagctccgcattgcttcacccagggctccgctcttctcggggcgcccccccatggcacgcagacacgcactctctcttcga

SEQ ID NO: 596085 - DNA, 117 bp, Homo sapiens
tgtcgtacagcagtcggtgctagagcgagatcacaccactgcactgacccctgggcataccaagactgtcaaaacaaaaaaaaaggaaaaaggttacgtaccccacaagtcaaagga

SEQ ID NO: 596086 - DNA, 680 bp, Homo sapiens
gagttgcttgtcgtcaacctcattaaactttttaaatggggtctcaaaattctgtgacaaattttgggtcaagttgtttccattaaaaagtactgatttaaaaaactaataatcttaaaatctgccacacgcaaaaaaaaaaaccaaaggtggctccacaaaacattctccttttcctttctgaaggttttacgatgcattgtgttatcatttaaccagctcttttacctactaacacttaaagtggccaagttgaaacaaacagttctgagaccgttcttccaccacgtgattaagagtgggggttggcagggtatacaggagataatattcattatacgccttctgagctttctggggcagacttggtgaccttgccagctccagcagccttcttggtccactgctttgatgacacccaccgaaactggtctgtctcatatcacgaacagcaaagcgacccaaggggtggatagtcgtgaaaagcctctcaacacacatgtgggcttgccaggacccattttcaccaagtggcacgcttacaccagatcttcagagaaattatgagggccattcttccaggcttttatacccagaaaggggcgaatcaaactctttttccctttacagtctacaggcaaaaattttgtctgtgccacattgtgtgaagccccggatgg

SEQ ID NO: 596087 - DNA, 193 bp, Homo sapiens
tcctgtgactaagaatgcttaacctcctgggaatgcagcccagcaggtctcagccttattttacccagcccctattcaagaacggagttgctctgattcaaataactctaacactcgggcagactcctcggacacaaacacaacacggcggaaaacgttgcatagcgagtggattgcaggtaaaagatgagag

SEQ ID NO: 596088 - DNA, 356 bp, Homo sapiens
  misc_feature (38)..(38): n is a, c, g, or t
  misc_feature (40)..(40): n is a, c, g, or t
ttgtatgtatgaggtgacttggtgggtggggtggacananaaaggccgctgcgcctccctggacgagatcctatctcagcgggatgctgcctctgcccgcaccctccagctgcggtctgaggaaccctcaacccctgccctacccaactcggggcagttgtcctggatccaggacctgataacaaggaaactggatgagactcaggaccttctggcataggttcatggactgggagatgggaagctaaaggccaaggacccccctcggtctccgtcggattctgagtcaaatcatctgctgttcgagaccgaacggctgctgggagaggcatcattcaattgtaaccagtcaaaga

SEQ ID NO: 596089 - DNA, 445 bp, Homo sapiens
agcggtggctcacacctggaatcccagcactttgggaggccaaggtgagcagatctttcgaggtcaggagtgggagaccagcctcaccaacatggcaaaaccccatctctactaaaaatacaaaaattagctgagcgtggtggcatccacctgtagtcccagctactcaggaagctgaggcaggagaattgcttgaacctgggaggcagaggctgcctgagccgagatcatgccactgcactccagcctgggagacagagcaaggctctgactcaaaaaaaaaagaatctatagttgagtaaattgcatggtagtatggaattggctaatttctgagcattctgtggttacataagatgctcacattaggggctgagtgaaaggtacacaggaacgctctgtgctatctttgcaacagttcagtgagtctaattatttcatagtt

SEQ ID NO: 596090 - DNA, 184 bp, Homo sapiens
acatcccattggttgtgggtaggggctggacaggcatgtggtggggcagggtgggcctgcaaaggcactcacttgatgaggtctccagacaataccgtgcattgctcagatctgcgagcgatggacaggagggtgctgcccttttagtctggccacagggtactcaacccagatcctcccaaca

SEQ ID NO: 596091 - DNA, 333 bp, Homo sapiens
  misc_feature (279)..(279): n is a, c, g, or t
  misc_feature (301)..(301): n is a, c, g, or t
  misc_feature (317)..(317): n is a, c, g, or t
  misc_feature (327)..(327): n is a, c, g, or t
aaccatgagctttttgtgggaaaatgttatggaataactgccagaaaacattgtggtgaaaattaactattactttaggaaaatatgataaagagagcatgttccctttttatagactgaattctcacttgaatggcttaaatagctaaggcagggagggaagtccagttaatatctcagaagcacaactatttgtttcgaggctttttccagtatttttttcaaaaccactttaaaaatgtgaggggaattaagctgcttgttcggtttaagtagggnttacttagtgtttatgtctaangggttattttttgccntgtgaggggnaacagc

SEQ ID NO: 596092 - DNA, 822 bp, Homo sapiens
ctctgttgcccaggctcgagggcggtggtgtgatctcggctgactgcaacctctgcacctgggttcgagcggttcttctccctcagcctcctgaatagctgggattgcaggtgcccaacaccatgcctggctatcttttttatatttttagtagagatggggtttcatcacgttgggcaggatggtcttgaactcctggcctcaagtgatccatccaccttggcctcccaaagtgctgggattgcaggcatgagccactcacccagcctagaaaatattttaaactgagtgaaaactgtaaacacaatatactgaaattgtgggatccagctaaagcaaggttcttagaggcgtatttatcacttcaaatactttatttgacaaacaagaagggcccaggcacaagagggttacagtactgatagtcccagacacttggggaggccacggcgggcagatccacgaagggtcaggagtctgagaccagactgggacggaatgggaaaaaccccgctctactaaacatacagaaattaagcgcgcatgtaggtgagcacatggggacctagactactcggggggcctgagggcaggagaatcgcatgaactatggaggcagaggtgcaggagccgagatgtgcactacactcagacggggaagagcgagaaccgtttcaacagttaagagacgaggcaaaaaagaccaaaaaaaagtgtgagggccggccaagacaaacaccggggcgcgccacagagacacagaggacaagacgcaagagcgccaaaaacggcgggaaccaagggaggcaggaacaaaacaga

SEQ ID NO: 596093 - DNA, 182 bp, Homo sapiens
cctttcttgctcttcttcttttcggatataggtaggtcatcatcgagtgtcatcattgagaaattcatcaaactctcctcccttcttagaacgccgtccaccaccaccacctcttttcttctctttggtggcttcagtctcaccagtaaacataagaatatgttgggtcttctccacatact

SEQ ID NO: 596094 - DNA, 851 bp, Homo sapiens
ccacgcgtccgcacttatttgttggcttctgtgacatgaagaaagtctcaccaggaaaatgggatgcctaagaacaagcctaggcaccagtgaagtataaaggcatctcattgtcacttccccaggagaggtgggccagaggctggttctaattgggcatctcaaagtcacaggcaaaaaatcactcctgtaacacttagatgggcttacctttctagccctggggagttgtcacctagcccctgaagcccctgaggtaacaaagaatacatttgatctctctttcccaccaggacagggtgagcagctagtcttactgctccctgggaagctgaagctctgagtatgactctgcctcaaaacttgtctcagccaccaattactagggttttttacagaatgaggcaggtgctacctgaatcaacccctgttacaatgcagactcctaggctacaccccaagcctactatgtggtgatcttattttgtagttcaggctggttttaaacacatatcttcctgcttcagcctctggaattctaaggttacaggtgcatactaccatggaaactgtatctatactaagtatctcaaacttggtgcacttccccttgtccacttgctccatactgtagtgtgagaactattccccgggcctgtgagtatggcataccaaatgtgttttttgagagactgacaaatttggggtcttgagttgcgcggaaagaatccagctattcagcttcctatttttgattccaggcttccaaaggtcctggtttgaaaggagcctggggatggtcattctggaatcgttacccaaagccggtccggggaaaataatagcgggcc

SEQ ID NO: 596095 - DNA, 134 bp, Homo sapiens
  misc_feature (12)..(13): n is a, c, g, or t
  misc_feature (53)..(55): n is a, c, g, or t
  misc_feature (79)..(79): n is a, c, g, or t
  misc_feature (90)..(91): n is a, c, g, or t
  misc_feature (95)..(95): n is a, c, g, or t
atgtcgtagaanncaagtgagccaagagaatgcttttccacattccttacatnnntatggattcactctggagagaagncatatgaatgnnaggnatgtggaaaagcattctcttggctcacttccccggaatt

SEQ ID NO: 596096 - DNA, 845 bp, Homo sapiens
tgggggttcacacattggtggattttaattccgaattttttaaaaaacaatttaccccctcttccccaattcccagctcgtgatttatacaagtgcttaacggtggcaaaaaggctcttggaactacatccttctaacaaacaaacaggcaccaggctgttcgacaacctcactctcgcactgcaccagcgtcctatgaaggggtgggggcaacttgctccttgaacacagctcacacagagagttacaacaccagtgttcacctgggacgcaatttctcacgcccacaacagttctcttttctcaagctcaactcttttggactcttatggcgaccctcccaagtgtttttcaaaggaagtgccgtgttgtgtagaaaccctcagcatgtgtatacatgtgcaaaattctcccccccctttttgtgcctccaacataagggcgtggccctactccctcagctgtaatacgagggactcctcatctccgaaatgtttatctcacttaaactgctgtgtgatcaacaccgagagattccccccccgaagtgagtgtgtggtcttcacgcaacgaggactcctctctcttattataagggtgataaagctctactctccccggctgacgagaagatgttggtgcccccgatgtactgagcgctctctcctcttatccaccaatcgcaagaggtgccaaatccaacacaagaggccccgtttctcccctactgtaatgtgacgaccatcttctcttttccaggcgacaattctgttgtgctcccaccaatatctactaacaccgtcttctcttcgaacccccaaacaacgtgtggtggcctctccgca

SEQ ID NO: 596097 - DNA, 596 bp, Homo sapiens
acgggatccacggcagtgaatagaaccccgcagcagtgaatgaatagaaccccatggcagtgaacagaaccccacgacagtgagtgaatagaaccccacagcagtgaatgaatagaaccccacggcagtgaacagaaccccacggcagtgactagagccccatggcagtgaacagaaccccaaggcagtgagtgaatagaaccccaaggcagtgaatgaatagaacctcatggcagtgaatagaaccccaaggcagtgagtgaatagaaccccaaggcagtgaatgaatagaaccccacggcagtgaacagaaccccacggcggtgactagaaccccatggcagtgaacagaactccacggcagtgaatagaaccccatggcagtgaatagaaccctatgggagtgaacagaactccatgggagtgaatgaatagaaccccacggcagtgaatagaaccccacagcagtgaacagaaccccacggcagtgaggagaaccccatggcagtgaatgaatagaacccccatggcagtgaatagaacccatggcagtgatcagaacccacggcagtgaatataaggccatggcagtgatc

SEQ ID NO: 596098 - DNA, 274 bp, Homo sapiens
  misc_feature (15)..(15): n is a, c, g, or t
  misc_feature (36)..(36): n is a, c, g, or t
  misc_feature (52)..(52): n is a, c, g, or t
  misc_feature (178)..(178): n is a, c, g, or t
cagaagcacaggtancctggagcttgtgactggcanctgaaggtgggggtgnggtaaggggggggtgcagtcttgagccctcaacctataggatctgacactatctccaggtagatcgtgtcaaaatatggtacgtgcctgttgtcccagctacttgggaggttgaagtgagaagatngcttacggtcaggagtttgaggctgcagtgagctatgattgtgcctgtgactatcacttcactccagcctaggcaacaaagtgagacccccatctc

SEQ ID NO: 596099 - DNA, 161 bp, Homo sapiens
ggggggggtttggggggcgggccctttttttttccccccggggggaattttttgggggggaaagggaaagggggggggaattttcccccccccccctcccctttgggttttttttaatggggcccccccgaaaaatttggccggtttttttttggtgccca

SEQ ID NO: 596100 - DNA, 916 bp, Homo sapiens
  misc_feature (916)..(916): n is a, c, g, or t
gccggtgctcctccctcgcgcagcggtggctctgggcgctggagtaaacactgctttgttcctagcgctcgttttcgtcgcccgtgcctcacgcgccgggtctggctggcctgccctcggtcttgaacccatttcggctcgtgcgtgcgggatgcgtgcgggctggtttggcttgagcggagagagaggagcggggcgctgggggatgcgatggggaactgttgtggacgcagtgttcggaatgttcgcaaggaagggggggggttgcaggagtaggcggcggggagggaatccaagtattttagaacatgctcaagagggtgagcattaacaatagagttgagaatctagtagaaagtgatgaaggggagagcccaggaagcagtcataggcctctaactgaggaagaaatttgttgacctaagagaaaggcattatgattccatttgcctgaaaaacaaaaaagatctgtgataaagaaaattcaaaaagagcaagaagggcagagaatgggtgcagcaatatcatccttccaacaatggagaatatcagagttcaggaccagaagatgacttcggaatcttgttggggaaatatgagtcacagtatgaagttttcgaagtagtagactctcatcagatgctacagtttttgacagcaaatacagaagcagtgtgatttatgaacaaaaataaataatagtggaatgaggacggcattcgttagatctagaaatgggagatgaggaggatgatagaatgtttcatggaaaagtccaaagagagaatttaggggcgggttagttagcacaggatggagaatcaaaaaggctatgatcagggtgggggaaaatttttggcttgaagacgggaagagtgaaaatttaagtgttgagagtgaaaaaacagaagtggtn

SEQ ID NO: 596101 - DNA, 200 bp, Homo sapiens
acttaaacctttttatgatgatttaaatggaagttgttttttgtcccttaatgttggttccagtccttcaactgttcatatttactttataacattcccatactaaccctttttcaaaatggggtgggggggggaaatgcagtttagccatgtcctcaaaataaagttttggtaaaaataaataaatgtccttttgttta

SEQ ID NO: 596102 - DNA, 707 bp, Homo sapiens
tcacatagtacctggttttccacaagtaagccaagggcatgattttctgtgtacatttattaacagttctttggttttatgaaatactcatatgaagccagtccctggagtactgttttttaaaaggtccctttgaaccatttgtaaattatattttcattcataacctgcattcttagaaggcattcagtcaacatttacagcacttactgtgtattttccacatggagtggttcaactcaagcgtcccttccagtattcagggcattcttatttcatgttcaagtgagtgcattgtttagaaatcacagtttattaacatgtacatgatctattttaaaaaaaaaataagtactgacacctgacttctactcccaattagcagattgtaagaaatgtcctcagtttggtggatggtgtggtgcctgtaaccttatctttttgtgtttgtgagcacttttattttatgtatgtatttattattgtagtagatttttcttggtgagctacttggagtctttgacatgggaaggaaagagcagttataagatctccctgactcatgttcttccagtagttttattgtagattgtgaatgttactgaagttttacattttactgattttgcagaaaatataatttttatggaaaagaagcaaattgacaaagcactgttgtggtattataagctggctctggtgaccta

SEQ ID NO: 596103 - DNA, 799 bp, Homo sapiens
  misc_feature (376)..(376): n is a, c, g, or t
ggcgtgtcgctgtcagtgcgggtgtgcagggatgtgagggcagctggagtgcgttgtggcgaagcttgtgggagcacgcccatcgtctgaggggctaacttccgtgaccatggtccaagtctctgaagaagtcggtggaggagagccgggagaagaagcagcctcgaggtgggacatgagtgaccggggcagtctctctgacgtgctggaggtctcacggactcgtgtacgcttatcccatagtcacacaactggatccgtctgccataacaagctaacaatggtgccaccgaacatcgctgaactgaagactttggacggtgcctcaatctgttagctgattaaccggaagtcgagggaagcttgtgctcaccancacgactcagtgtaagcctttcagcataacgtcatgagcgacgcagtgaaattcccttggcagtgatcgaggcctgaagcatcttttggcgcacgacgggcttcggctccctgccagctcttgaggttcgggacttgacgtacaacaacttgagcgaaaattctcttcctggaaacttcttctacctgaccaccctgcgtgcactctatctaagtgacaacgatttttgaaatcctgccgccagatattgggaagctcacaaagttgcagatactcagccttagggataacgacctgatctcgctgccctaaggaaactcgggggagcttacccagcttaaagagctccacattcaggggaacccgctcaccgttctgccccagaactaggaaacttggatttaactggccagaagcaggtat

SEQ ID NO: 596104 - DNA, 818 bp, Homo sapiens
  misc_feature (818)..(818): n is a, c, g, or t
cttagaggcactgaaggatagcacagaagtagaaatggtggatgagaacactgagaaaaaagatagaaccagaaaaatggccaattccaggccctcctccacgcaggtggccaccaacagattctctcaatgatggatgtgtccagagtgtgtccccaggccaagctttgtgctcaccatacagtcagggtgatgatcttctgaaagctctgggatggtcatgggaccggaatatgcagtgacataggtgactcactggaaatgccttaataaatacggaacaaatcggttgcaaaattgaaagcgatcaagacggtctcctggtcaaggactgtctatccccacctctgtgtgggcgacatgtgtgggcccaaccacgtgcaggggagataacacacccttgtgcgcatactgagagacagaccagaaggattgctaactctttacataggagcggcctattctgtgtaatcggcctggctgcatgcgcggctttatccatggtgggcaaggttacttcatacatactcctgggaaataccgacaagatatgtctctggtcccagggtattgaccttggtggtccagcatgacagtaacggcgaaacagagggattgagttagcatttcccagatcctcaaagtacctgataatcagaatgtgctttaaagtgtagtggccctgtgtaacactcagattcggtcgatgtccctggcgctcccatataatgtggcttaagcgtaagcaattcaacacctgcgcgagtatctccgtcacctcacagtccttggacatactagcaggcacccctacaacn

SEQ ID NO: 596105 - DNA, 961 bp, Homo sapiens
tgactggaactagactccccatctcactcatatatccacatcactccctcacaaacagtaagccttctcctcaaatctctcaatactttatccatcatcagcaggacgagcttgaggtggataaaaacaaaaccagacatacgcaacaaagtcttaggcatactcctcaatatacccacataggacgaataatagcaggtgtctacccggtacaaagcctaagcataccccattcttaacgtttagcctactcaatatttagttccctaactactacacggagttgcctactacctcaaattataaaactccaggcacgcaggaccctactactatctcgcacctgaaagcaagctaacaatgactaacaaccttaaattccactcgagcctcctcgtccctaggaggcctgtcaccgctaaagcggctttttgcccaaaaatgggccatatatccgaagaattcacaaaaaacaaagaagcctccatcatcccccaacactcaatagccaccaattaaccaatcctttaaacctctaacttctaacatacgcctaatctactccaccgtcaattcagcaatacgtccccaatatctaaacacgcgtcagccagaacaagtgacagggcgaccataccagaacccccccagtcctcaccagcgatcatcggccctaccaagcacgcctacctacttcacccttgtatctacaacgtcgaccaccacagacacaacacaacaacacatcgagcgccaccgcacccacacagacctacacccctcagcgagcagcccacaagcacaaaacggaccacgcgccacagaaacgcggcacatacgcgcgcccaacaaaaacaccgcgccgacccaacaccaggcgcgggcacgcaccacgcgcgacccaccccccggcaccgcacacagcgccaccacacgcacaccccaccacgacaaccagccg

SEQ ID NO: 596106 - DNA, 142 bp, Homo sapiens
ggaccggtgttcctttgtctagtgggtctagtgtggagaaggtgagggaggctccaggccattcttctttttttttgtgatacggagtcttgcccttgttgaccaggctggagtgcagtgagccgagaatcacaccattgca

SEQ ID NO: 596107 - DNA, 5396 bp, Homo sapiens
  misc_feature (5373)..(5373): n is a, c, g, or t
ggcctgatagcgcggcgtgtggaccggccgaagagcgcgcccagagcggcgccgtcgcgagccacagcccgagccggtcccagccgagccgagccccagccgagccgagccggcccgagcgctccggtgcccgcagccatgccggccggccgcgcgcgcacctgtgcgctgctcgccctctgcctcctggggccccaggatttcgggccgacgcgcttcatctgcacttcggtgccggtggacgccgacatgtgtgccgcgtccgtggccgcgggcggcgcggaggagctccggagcagcaatgtgctgcagctccgggagaccgtgctgcagcagaaggagaccatcctgagccagaaggagaccatccgcgagctgaccgccaagctgggccgctgcgagagccagagcacgctggaccccggagccggcgaggcccgggcgggcggcggccgcaagcagccgggctcgggcaagaacaccatgggcgacctgtcccggacaccggccgccgagacgctcagccaactcgggcaaactttgcaatcgctcaaaacccgcctggagaacctcgagcagtacagccgcctcaattcctccagccagaccaacagcctcaaggatctgctgcagagcaagatcgatgagctggagaggcaggtgctgtcccgggtgaacaccctggaggagggcaaggggggccccaggaacgacaccgaggagagggtcaagatcgagaccgccctgacctccctgcaccagcggatcagcgagctcgagaaaggtcagaaagacaaccgccctggagacaagttccagctcacattcccactgcggaccaactatatgtatgccaaggtgaagaagagcctgccagagatgtacgccttcactgtctgcatgtggctcaagtccagcgccacgccaggtgtgggcacgcccttctcctacgctgtgcccggccaggccaacgagctggtcctcattgagtggggcaacaaccccatggagatcctcatcaatgacaaggtggccaagctgccttttgtcatcaatgatggcaagtggcaccacatctgtgtcacctggaccacccgggacggggtctgggaggcctaccaggatggcacgcagggtggcagtggcgagaacttggcgccctatcaccccatcaagccccagggcgtgctggtgctgggccaggagcaggacactctgggtggtgggtttgatgccacccaggcatttgtgggtgagctggcccacttcaacatctgggaccgcaagctgacccccggggaggtgtacaacctggccacctgcagcaccaaggctctgtccggcaatgtcatcgcctgggctgaatcccacatcgagatctacggcggggccaccaagtggaccttcgaggcctgtcgccagatcaactgagcacggcaggccaggctgagccgcccgccctcgccccctgcttgtgcggcgatgatctgtttgtgcgtctcttctctcccttttccccaggaatgaaccgaggccgtcgccctgcacacgcacacgcacacagcctggttttgtcctcatgcacacgaagcagcccctgctcccatctgtccctgaggaagccccacttctctgtaggagcccggactctctcagcatgccccattcacagctgaagtgggtgctgcaacgtcttgaacaaggcagaagttggtgagaggatctgtgtgtgcgtgtctacatgtgtgtgtctacgtgtgtgcgtgcgtggctgggggaggccttttctttgaggacgtacctcatttccttctttcttctggctttggaaaaatctcatgatgaaaattcatatttgccaactttgttagctgcgtgcgtgctttggggttggtgcaacctcagtacacgcatttgtctttgtttgcaaacctttctcagagcgacatatctttatattgatgtaataaatgtcttttagtggtttgtcaaaggccgggggcgggggctctctacagagaatttttattttgtaatagaagtgaactgtctctgaaggtgaaggcaggccgtcctgggatggtaccctgtgctctcccgtggaggagaggggatggctgaggacactggcccttacccagggcgaacagcatccatccctgctgtttgcatcttgagagcagcatggggcctgggaggtcggcctgtgtgcccagctcagctagctctgccccaggacggccctgccctcgaccttcccacctcctcagatcctgcaaggctgggtctgcccctcccttctcacctctggagctgtgctgcactgcttcccagagagggccctgagagaggagcgtgccacccaccagggaagccgggccccagcacccctctcctttggcctcccggagtgcagaccagaggggaccttttaaggaaagaagccgtgtttcgatgaagacctggccacatggggcactgggacttcaacccagcccatcggtgggaaggtcctttttgggggactttgacagccatatccctcccagcacaccaggcgccaggtgagctggttcagacccctccaggggtactccagagacctcacgtgtggagccaggcctggccagggcaggggcctgaaacccactcctccatctcatggggctcacggcctacagcagcccacaagctgccactggccggcgacactgacacctgagcagtgtccagaacctttttgcctttttttgttccccgtgaaaagcaacatggacatttccttctagtccttccaaggaggggagagaagtgtatgtgcatttgtgtgtgtgtgtgtgtgttgtgtgtgtgtgtgcgctaagtgagaaagagagcaggctcgggaggccctgcccagggtaggaggagcttcctgctttgcaccatctggtggtcgcaccctggagggcaccccgactctgtctccaggagtctcatcagcaaaccgctgacaagtctttctagaaattctactgcactgcctggctcagctgcagctgcagacatttctgcaggaggagcaggtgtttctgtcttctgttccttctagggccacctgtccccttaaacacaggtccacgttgtgtcaagaacctagtgcatctgtgtgtgtctgtcagtgtctctgtgtcagtgttctcgtgggtgtctgcacggtacccggccgccgttctgcaatgcatcactcccgcagaggggggtgcagatcaggcgccgtgctgcgcgttgttgttcaacagtggctttttcttagataatcgtgcttcctcagcgcccgtcgggttgtggcatccttggatctgcagggatcttctccgtttgcatgttcctcggggtggcgtgttccttgctccctgggtccgacatgtgttcccgcacctgcatggactgccccggttctgtgttgtgtgccgagtgccgcccagtgttctgtgaccacccgtgtagctactgaaaatggctgggtaagcaagtcaagggtgttggaggaggtcaagagagagctcagtttccctctccccctccccaaacacaccaagaagcatttttaacgtgtaggttgagaacaagcctaaaggattcccacagctgggagccagcaagagagcttggagtcgcctctctagaccagatctagccccaccctcactccagccatctcggagcccttgtgtaggcaacgccggtgcgcggctgtgtggggtgctccctgccagcacctccggccagccccgcccctgccgatctactggaccgcagaccaccttctgcccccgtggccaggtgggagctgtccgttcaggaccatgagccatcctctgccctgactagcgaggggcagagcacaccccagtgcttacgcctccacccctgcagcctcctggcccgctcaccttcctcacccctcctctgacccacccatggtgccagggccgaagctgacctttagctccctcctgcccttgctagggtctgagccaagcccctcgactcctcactgtgttgacacttggcactttgctggccccgagaaggtcgatgacacagccgcaaatctaatccacgtagttcccatttactccttaatctgattgatgttccctcttgcactgaataatacatgcctctctcaggtaagccattttataaaacaagaagataaaaagcactgttgaggcagtgtttgcttttgccgagctggtgtccgacagctccctgggtgtccggggtgggagagctgttgacagaagctctccgggccctcaggggcttagatcccacttgagtcgtaagccttcttgcttttgataacacagtattatttctcttactgtagaagaaaaagtttattaccaaacaagagtatttttatgaaagaaaaggacaaacctataaattaactcaacctatatctcccttgaaaatactttcaggctccaccaaaacgtagaactgaaagcatgtattttggaagaaagagatacattttgtatgctttcttttccttttgtagattcccagtttattttctaagactgcaaagatcactttgtcaccagccctgggacctgagaccaagggggtgtcttgtgggcagtgagggggtgaggagaggctggcatgaggttcagtcattccagtgagctccaaagaggggccacctgttctcaaaagcatgttggggaccaggaggtaaaactggccatttatggtgaacctgtgtcttggagctgacttactaagtggaatgagccgaggatttgaatatcagttctaaccttgatagaagaaccttgggttacatgtggttcacattaagaggatagaatcctttggaatcttatggcaaccaaatgtggcttgacgaagtcgtggtttcatctcttaaacacagtgtgtaaatttattcaactaacgatgggaaatgtattacttctgtacacagtggactgaagtgcaatttgttgaaagggaacaagtcattgaagagaaaaaaaaaagcccaatacttagagtcccaattttgtctcatttgccaaaaaaaaaaaaaaaaaaaaaaagcaaaccccctatggttgatattgttataatgtatatactgtataatatgaaagagaatcgatgtatctcactttttcattatttgctaaccaaagctgtacatttttcatatgatctgcagccttttgggtatcaaatgggtcaaaaccatgggacctgccacctcccatcagcaattctggaaatgcactatttctactggtattcttgcttttttttttttttcattttcttgctgaaatgacatgaattgttgagtttatttttacncagtaaagagtggagaaagaaaa

SEQ ID NO: 596108 - DNA, 843 bp, Homo sapiens
ctccttggcgatggatgacgtaccccttaccatcccattaaaacctgtaatcacccttaccctgctcaacatccagtatcccatcccacaggcaggctttcaaagcattaaagcctgtcatcactcgcctgttacagcatggtcctttgaaagcctataaacactccttagcaatttccccattttacctgtccaaaaactggacaagtcttacaggttagttcaggatctgcgccttatcaaccaaattgtcttgcctatctaccccgtggtgccaaacccatagactctcctattcctcagtacctccctccacaaccattctgtgctagataaacctagctgaccccataaatcctaagattctttccccactcccctttccatttcgttaaaaaacagacctaaaagctgctcccacactagctctcgctaactcatcccagactttttcattacacatagctgaacgtgcagggctgtgcagtcaaaattcttacacaaggactgtgatcgtgccctgtggcctttttatccaaacaacttgaccttactgttttagcctagccctcatgtcttgtgtgcggcagctgcaatgcttaatacttttagaggccctcaagatcacaatatgtctcaatactctctacagtctcataattcaaatctattctgcctctacctgagatattttttgccctcataactttggagtaatcttgttaatcagcctacctgtaggcccgtcattacggcaaagccaaccggccaccgtagggggagcccgagggcctatgtaaaattggcccgagggcgcggaacgcttgattgctccccctcgga

SEQ ID NO: 596109 - DNA, 2933 bp, Homo sapiens
  misc_feature (2850)..(2850): n is a, c, g, or t
ggcctgatagcgcggcgtgtggaccggccgaagagcgcgcccagagcggcgccgtcgcgagccacagcccgagccggtcccagccgagccgagccccagccgagccgagccggcccgagcgctccggtgcccgcagccatgccggccggccgcgcgcgcacctgtgcgctgctcgccctctgcctcctggggccccaggatttcgggccgacgcgcttcatctgcacttcggtgccggtggacgccgacatgtgtgccgcgtccgtggccgcgggcggcgcggaggagctccggagcagcaatgtgctgcagctccgggagaccgtgctgcagcagaaggagaccatcctgagccagaaggagaccatccgcgagctgaccgccaagctgggccgctgcgagagccagagcacgctggaccccggagccggcgaggcccgggcgggcggcggccgcaagcagccgggctcgggcaagaacaccatgggcgacctgtcccggacaccggccgccgagacgctcagccaactcgggcaaactttgcaatcgctcaaaacccgcctggagaacctcgagcagtacagccgcctcaattcctccagccagaccaacagcctcaaggatctgctgcagagcaagatcgatgagctggagaggcaggtgctgtcccgggtgaacaccctggaggagggcaaggggggccccaggaacgacaccgaggagagggtcaagatcgagaccgccctgacctccctgcaccagcggatcagcgagctcgagaaaggtcagaaagacaaccgccctggagacaagttccagctcacattcccactgcggaccaactatatgtatgccaaggtgaagaagagcctgccagagatgtacgccttcactgtctgcatgtggctcaagtccagcgccacgccaggtgtgggcacgcccttctcctacgctgtgcccggccaggccaacgagctggtcctcattgagtggggcaacaaccccatggagatcctcatcaatgacaaggtggccaagctgccttttgtcatcaatgatggcaagtggcaccacatctgtgtcacctggaccacccgggacggggtctgggaggcctaccaggatggcacgcagggtggcagtggcgagaacttggcgccctatcaccccatcaagccccagggcgtgctggtgctgggccaggagcaggacactctgggtggtgggtttgatgccacccaggcatttgtgggtgagctggcccacttcaacatctgggaccgcaagctgacccccggggaggtgtacaacctggccacctgcagcaccaaggctctgtccggcaatgtcatcgcctgggctgaatcccacatcgagatctacggcggggccaccaagtggaccttcgaggcctgtcgccagatcaactgagcacggcaggccaggctgagccgcccgccctcgccccctgcttgtgcggcgatgatctgtttgtgcgtctcttctctcccttttccccaggaatgaaccgaggccgtcgccctgcacacgcacacgcacacagcctggttttgtcctcatgcacacgaagcagcccctgctcccatctgtccctgaggaagccccacttctctgtaggagcccggactctctcagcatgccccattcacagctgaagtgggtgctgcaacgtcttgaacaaggcagaagttggtgagaggatctgtgtgtgcgtgtctacatgtgtgtgtctacgtgtgtgcgtgcgtggctgggggaggccttttctttgaggacgtacctcatttccttctttcttctggctttggaaaaatctcatgatgaaaattcatatttgccaactttgttagctgcgtgcgtgctttggggttggtgcaacctcagtacacgcatttgtctttgtttgcaaacctttctcagagcgacatatctttatattgatgtaataaatgtcttttagtggtttgtcaaaggccgggggcgggggctctctacagagaatttttattttgtaatagaagtgaactgtctctgaaggtgaaggcaggccgtcctgggatggtaccctgtgctctcccgtggaggagaggggatggctgaggacactggcccttacccagggcgaacagcatccatccctgctgtttgcatcttgagagcagcatggggcctgggaggtcggcctgtgtgcccagctcagctagctctgccccaggacggccctgccctcgaccttcccacctcctcagatcctgcaaggctgggtctgcccctcccttctcacctctggagctgtgctgcactgcttcccagagagggccctgagagaggagcgtgccacccaccagggaagccgggccccagcacccctctcctttggcctcccggagtgcagaccagaggggaccttttaaggaaagaagccgtgtttcgatgaagacctggccacatggggcactgggacttcaacccagcccatcggtgggaaggtcctttttgggggactttgacagccatatccctcccagcacaccaggcgccaggtgagctggttcagacccctccaggggtactccagagacctcacgtgtggagccaggcctggccagggcaggggcctgaaacccactcctccatctcatggggctcacggcctacagcagcccacaagctgccactggccggcgacactgacacctgagcagtgtccagaacctttttgcctttttttgttccccgtgaaaagcaacatggacatttccttctagtccttccaaggaggggagagaagtgtatgtgcatttgtgtgtgtgtgtggagtggccgccncccgaagaacgcacatgtattatatggtatgtctctgccttttttgtgaaatttatattgagggttttcagttttgtggcccc

SEQ ID NO: 596110 - DNA, 2064 bp, Homo sapiens
  misc_feature (2041)..(2041): n is a, c, g, or t
ttggcactacccaccccgtcgggtggagccgctcacccgacggggtggcgtgttccttgctccctgggtccgacatgtgttcccgcacctgcatggactgccccggttctgtgttgtgtgccgagtgccgcccagtgttctgtgaccacccgtgtagctactgaaaatggctgggtaagcaagtcaagggtgttggaggaggtcaagagagagctcagtttccctctccccctccccaaacacaccaagaagcatttttaacgtgtaggttgagaacaagcctaaaggattcccacagctgggagccagcaagagagcttggagtcgcctctctagaccagatctagccccaccctcactccagccatctcggagcccttgtgtaggcaacgccggtgcgcggctgtgtggggtgctccctgccagcacctccggccagccccgcccctgccgatctactggaccgcagaccaccttctgcccccgtggccaggtgggagctgtccgttcaggaccatgagccatcctctgccctgactagcgaggggcagagcacaccccagtgcttacgcctccacccctgcagcctcctggcccgctcaccttcctcacccctcctctgacccacccatggtgccagggccgaagctgacctttagctccctcctgcccttgctagggtctgagccaagcccctcgactcctcactgtgttgacacttggcactttgctggccccgagaaggtcgatgacacagccgcaaatctaatccacgtagttcccatttactccttaatctgattgatgttccctcttgcactgaataatacatgcctctctcaggtaagccattttataaaacaagaagataaaaagcactgttgaggcagtgtttgcttttgccgagctggtgtccgacagctccctgggtgtccggggtgggagagctgttgacagaagctctccgggccctcaggggcttagatcccacttgagtcgtaagccttcttgcttttgataacacagtattatttctcttactgtagaagaaaaagtttattaccaaacaagagtatttttatgaaagaaaaggacaaacctataaattaactcaacctatatctcccttgaaaatactttcaggctccaccaaaacgtagaactgaaagcatgtattttggaagaaagagatacattttgtatgctttcttttccttttgtagattcccagtttattttctaagactgcaaagatcactttgtcaccagccctgggacctgagaccaagggggtgtcttgtgggcagtgagggggtgaggagaggctggcatgaggttcagtcattccagtgagctccaaagaggggccacctgttctcaaaagcatgttggggaccaggaggtaaaactggccatttatggtgaacctgtgtcttggagctgacttactaagtggaatgagccgaggatttgaatatcagttctaaccttgatagaagaaccttgggttacatgtggttcacattaagaggatagaatcctttggaatcttatggcaaccaaatgtggcttgacgaagtcgtggtttcatctcttaaacacagtgtgtaaatttattcaactaacgatgggaaatgtattacttctgtacacagtggactgaagtgcaatttgttgaaagggaacaagtcattgaagagaaaaaaaaaagcccaatacttagagtcccaattttgtctcatttgccaaaaaaaaaaaaaaaaaaaaaaagcaaaccccctatggttgatattgttataatgtatatactgtataatatgaaagagaatcgatgtatctcactttttcattatttgctaaccaaagctgtacatttttcatatgatctgcagccttttgggtatcaaatgggtcaaaaccatgggacctgccacctcccatcagcaattctggaaatgcactatttctactggtattcttgcttttttttttttttcattttcttgctgaaatgacatgaattgttgagtttatttttacncagtaaagagtggagaaagaaaa

SEQ ID NO: 596111 - DNA, 1997 bp, Homo sapiens
  misc_feature (33)..(33): n is a, c, g, or t
  misc_feature (35)..(35): n is a, c, g, or t
  misc_feature (1974)..(1974): n is a, c, g, or t
atgttgttcaagaggatcccgcctaagtggaangnccggttctgtgttgtgtgccgagtgccgcccagtgttctgtgaccacccgtgtagctactgaaaatggctgggtaagcaagtcaagggtgttggaggaggtcaagagagagctcagtttccctctccccctccccaaacacaccaagaagcatttttaacgtgtaggttgagaacaagcctaaaggattcccacagctgggagccagcaagagagcttggagtcgcctctctagaccagatctagccccaccctcactccagccatctcggagcccttgtgtaggcaacgccggtgcgcggctgtgtggggtgctccctgccagcacctccggccagccccgcccctgccgatctactggaccgcagaccaccttctgcccccgtggccaggtgggagctgtccgttcaggaccatgagccatcctctgccctgactagcgaggggcagagcacaccccagtgcttacgcctccacccctgcagcctcctggcccgctcaccttcctcacccctcctctgacccacccatggtgccagggccgaagctgacctttagctccctcctgcccttgctagggtctgagccaagcccctcgactcctcactgtgttgacacttggcactttgctggccccgagaaggtcgatgacacagccgcaaatctaatccacgtagttcccatttactccttaatctgattgatgttccctcttgcactgaataatacatgcctctctcaggtaagccattttataaaacaagaagataaaaagcactgttgaggcagtgtttgcttttgccgagctggtgtccgacagctccctgggtgtccggggtgggagagctgttgacagaagctctccgggccctcaggggcttagatcccacttgagtcgtaagccttcttgcttttgataacacagtattatttctcttactgtagaagaaaaagtttattaccaaacaagagtatttttatgaaagaaaaggacaaacctataaattaactcaacctatatctcccttgaaaatactttcaggctccaccaaaacgtagaactgaaagcatgtattttggaagaaagagatacattttgtatgctttcttttccttttgtagattcccagtttattttctaagactgcaaagatcactttgtcaccagccctgggacctgagaccaagggggtgtcttgtgggcagtgagggggtgaggagaggctggcatgaggttcagtcattccagtgagctccaaagaggggccacctgttctcaaaagcatgttggggaccaggaggtaaaactggccatttatggtgaacctgtgtcttggagctgacttactaagtggaatgagccgaggatttgaatatcagttctaaccttgatagaagaaccttgggttacatgtggttcacattaagaggatagaatcctttggaatcttatggcaaccaaatgtggcttgacgaagtcgtggtttcatctcttaaacacagtgtgtaaatttattcaactaacgatgggaaatgtattacttctgtacacagtggactgaagtgcaatttgttgaaagggaacaagtcattgaagagaaaaaaaaaagcccaatacttagagtcccaattttgtctcatttgccaaaaaaaaaaaaaaaaaaaaaaagcaaaccccctatggttgatattgttataatgtatatactgtataatatgaaagagaatcgatgtatctcactttttcattatttgctaaccaaagctgtacatttttcatatgatctgcagccttttgggtatcaaatgggtcaaaaccatgggacctgccacctcccatcagcaattctggaaatgcactatttctactggtattcttgcttttttttttttttcattttcttgctgaaatgacatgaattgttgagtttatttttacncagtaaagagtggagaaagaaaa

SEQ ID NO: 596112 - DNA, 3761 bp, Homo sapiens
ggcctgatagcgcggcgtgtggaccggccgaagagcgcgcccagagcggcgccgtcgcgagccacagcccgagccggtcccagccgagccgagccccagccgagccgagccggcccgagcgctccggtgcccgcagccatgccggccggccgcgcgcgcacctgtgcgctgctcgccctctgcctcctggggccccaggatttcgggccgacgcgcttcatctgcacttcggtgccggtggacgccgacatgtgtgccgcgtccgtggccgcgggcggcgcggaggagctccggagcagcaatgtgctgcagctccgggagaccgtgctgcagcagaaggagaccatcctgagccagaaggagaccatccgcgagctgaccgccaagctgggccgctgcgagagccagagcacgctggaccccggagccggcgaggcccgggcgggcggcggccgcaagcagccgggctcgggcaagaacaccatgggcgacctgtcccggacaccggccgccgagacgctcagccaactcgggcaaactttgcaatcgctcaaaacccgcctggagaacctcgagcagtacagccgcctcaattcctccagccagaccaacagcctcaaggatctgctgcagagcaagatcgatgagctggagaggcaggtgctgtcccgggtgaacaccctggaggagggcaaggggggccccaggaacgacaccgaggagagggtcaagatcgagaccgccctgacctccctgcaccagcggatcagcgagctcgagaaaggtcagaaagacaaccgccctggagacaagttccagctcacattcccactgcggaccaactatatgtatgccaaggtgaagaagagcctgccagagatgtacgccttcactgtctgcatgtggctcaagtccagcgccacgccaggtgtgggcacgcccttctcctacgctgtgcccggccaggccaacgagctggtcctcattgagtggggcaacaaccccatggagatcctcatcaatgacaaggtggccaagctgccttttgtcatcaatgatggcaagtggcaccacatctgtgtcacctggaccacccgggacggggtctgggaggcctaccaggatggcacgcagggtggcagtggcgagaacttggcgccctatcaccccatcaagccccagggcgtgctggtgctgggccaggagcaggacactctgggtggtgggtttgatgccacccaggcatttgtgggtgagctggcccacttcaacatctgggaccgcaagctgacccccggggaggtgtacaacctggccacctgcagcaccaaggctctgtccggcaatgtcatcgcctgggctgaatcccacatcgagatctacggcggggccaccaagtggaccttcgaggcctgtcgccagatcaactgagcacggcaggccaggctgagccgcccgccctcgccccctgcttgtgcggcgatgatctgtttgtgcgtctcttctctcccttttccccaggaatgaaccgaggccgtcgccctgcacacgcacacgcacacagcctggttttgtcctcatgcacacgaagcagcccctgctcccatctgtccctgaggaagccccacttctctgtaggagcccggactctctcagcatgccccattcacagctgaagtgggtgctgcaacgtcttgaacaaggcagaagttggtgagaggatctgtgtgtgcgtgtctacatgtgtgtgtctacgtgtgtgcgtgcgtggctgggggaggccttttctttgaggacgtacctcatttccttctttcttctggctttggaaaaatctcatgatgaaaattcatatttgccaactttgttagctgcgtgcgtgctttggggttggtgcaacctcagtacacgcatttgtctttgtttgcaaacctttctcagagcgacatatctttatattgatgtaataaatgtcttttagtggtttgtcaaaggccgggggcgggggctctctacagagaatttttattttgtaatagaagtgaactgtctctgaaggtgaaggcaggccgtcctgggatggtaccctgtgctctcccgtggaggagaggggatggctgaggacactggcccttacccagggcgaacagcatccatccctgctgtttgcatcttgagagcagcatggggcctgggaggtcggcctgtgtgcccagctcagctagctctgccccaggacggccctgccctcgaccttcccacctcctcagatcctgcaaggctgggtctgcccctcccttctcacctctggagctgtgctgcactgcttcccagagagggccctgagagaggagcgtgccacccaccagggaagccgggccccagcacccctctcctttggcctcccggagtgcagaccagaggggaccttttaaggaaagaagccgtgtttcgatgaagacctggccacatggggcactgggacttcaacccagcccatcggtgggaaggtcctttttgggggactttgacagccatatccctcccagcacaccaggcgccaggtgagctggttcagacccctccaggggtactccagagacctcacgtgtggagccaggcctggccagggcaggggcctgaaacccactcctccatctcatggggctcacggcctacagcagcccacaagctgccactggccggcgacactgacacctgagcagtgtccagaacctttttgcctttttttgttccccgtgaaaagcaacatggacatttccttctagtccttccaaggaggggagagaagtgtatgtgcatttgtgtgtgtgtgtgtgtgttgtgtgtgtgtgtgcgctaagtgagaaagagagcaggctcgggaggccctgcccagggtaggaggagcttcctgctttgcaccatctggtggtcgcaccctggagggcaccccgactctgtctccaggagtctcatcagcaaaccgctgacaagtctttctagaaattctactgcactgcctggctcagctgcagctgcagacatttctgcaggaggagcaggtgtttctgtcttctgttccttctagggccacctgtccccttaaacacaggtccacgttgtgtcaagaacctagtgcatctgtgtgtgtctgtcagtgtctctgtgtcagtgttctcgtgggtgtctgcacggtacccggccgccgttctgcaatgcatcactcccgcagaggggggtgcagatcaggcgccgtgctgcgcgttgttgttcaacagtggctttttcttagataatcgtgcttcctcagcgcccgtcgggttgtggcatccttggatctgcagggatcttctccgtttgcatgttcctcggggtggcgtgttccttgctccctgggtccgacatgtgttcccgcacctgcatggactgccccggttctgtgttgtgtgccgagtgccgcccagtgttctgtgaccacccgtgtagctactgaaaatggctgggtaagcaagtcaagggtgttggaggaggtcaagagagagctcagtttccctctccccctccccaaacacaccaagaagcatttttaacgtgtaggttgagaacaagcctaaaggattcccacagctgggagccagcaagagagcttggagtcgcctctctagaccagatctagccccaccctcactccagccatctcggagcagttccacttaggccggagcagttccacataggccggagagtgccacttaggc

SEQ ID NO: 596113 - DNA, 3714 bp, Homo sapiens
ggcctgatagcgcggcgtgtggaccggccgaagagcgcgcccagagcggcgccgtcgcgagccacagcccgagccggtcccagccgagccgagccccagccgagccgagccggcccgagcgctccggtgcccgcagccatgccggccggccgcgcgcgcacctgtgcgctgctcgccctctgcctcctggggccccaggatttcgggccgacgcgcttcatctgcacttcggtgccggtggacgccgacatgtgtgccgcgtccgtggccgcgggcggcgcggaggagctccggagcagcaatgtgctgcagctccgggagaccgtgctgcagcagaaggagaccatcctgagccagaaggagaccatccgcgagctgaccgccaagctgggccgctgcgagagccagagcacgctggaccccggagccggcgaggcccgggcgggcggcggccgcaagcagccgggctcgggcaagaacaccatgggcgacctgtcccggacaccggccgccgagacgctcagccaactcgggcaaactttgcaatcgctcaaaacccgcctggagaacctcgagcagtacagccgcctcaattcctccagccagaccaacagcctcaaggatctgctgcagagcaagatcgatgagctggagaggcaggtgctgtcccgggtgaacaccctggaggagggcaaggggggccccaggaacgacaccgaggagagggtcaagatcgagaccgccctgacctccctgcaccagcggatcagcgagctcgagaaaggtcagaaagacaaccgccctggagacaagttccagctcacattcccactgcggaccaactatatgtatgccaaggtgaagaagagcctgccagagatgtacgccttcactgtctgcatgtggctcaagtccagcgccacgccaggtgtgggcacgcccttctcctacgctgtgcccggccaggccaacgagctggtcctcattgagtggggcaacaaccccatggagatcctcatcaatgacaaggtggccaagctgccttttgtcatcaatgatggcaagtggcaccacatctgtgtcacctggaccacccgggacggggtctgggaggcctaccaggatggcacgcagggtggcagtggcgagaacttggcgccctatcaccccatcaagccccagggcgtgctggtgctgggccaggagcaggacactctgggtggtgggtttgatgccacccaggcatttgtgggtgagctggcccacttcaacatctgggaccgcaagctgacccccggggaggtgtacaacctggccacctgcagcaccaaggctctgtccggcaatgtcatcgcctgggctgaatcccacatcgagatctacggcggggccaccaagtggaccttcgaggcctgtcgccagatcaactgagcacggcaggccaggctgagccgcccgccctcgccccctgcttgtgcggcgatgatctgtttgtgcgtctcttctctcccttttccccaggaatgaaccgaggccgtcgccctgcacacgcacacgcacacagcctggttttgtcctcatgcacacgaagcagcccctgctcccatctgtccctgaggaagccccacttctctgtaggagcccggactctctcagcatgccccattcacagctgaagtgggtgctgcaacgtcttgaacaaggcagaagttggtgagaggatctgtgtgtgcgtgtctacatgtgtgtgtctacgtgtgtgcgtgcgtggctgggggaggccttttctttgaggacgtacctcatttccttctttcttctggctttggaaaaatctcatgatgaaaattcatatttgccaactttgttagctgcgtgcgtgctttggggttggtgcaacctcagtacacgcatttgtctttgtttgcaaacctttctcagagcgacatatctttatattgatgtaataaatgtcttttagtggtttgtcaaaggccgggggcgggggctctctacagagaatttttattttgtaatagaagtgaactgtctctgaaggtgaaggcaggccgtcctgggatggtaccctgtgctctcccgtggaggagaggggatggctgaggacactggcccttacccagggcgaacagcatccatccctgctgtttgcatcttgagagcagcatggggcctgggaggtcggcctgtgtgcccagctcagctagctctgccccaggacggccctgccctcgaccttcccacctcctcagatcctgcaaggctgggtctgcccctcccttctcacctctggagctgtgctgcactgcttcccagagagggccctgagagaggagcgtgccacccaccagggaagccgggccccagcacccctctcctttggcctcccggagtgcagaccagaggggaccttttaaggaaagaagccgtgtttcgatgaagacctggccacatggggcactgggacttcaacccagcccatcggtgggaaggtcctttttgggggactttgacagccatatccctcccagcacaccaggcgccaggtgagctggttcagacccctccaggggtactccagagacctcacgtgtggagccaggcctggccagggcaggggcctgaaacccactcctccatctcatggggctcacggcctacagcagcccacaagctgccactggccggcgacactgacacctgagcagtgtccagaacctttttgcctttttttgttccccgtgaaaagcaacatggacatttccttctagtccttccaaggaggggagagaagtgtatgtgcatttgtgtgtgtgtgtgtgtgttgtgtgtgtgtgtgcgctaagtgagaaagagagcaggctcgggaggccctgcccagggtaggaggagcttcctgctttgcaccatctggtggtcgcaccctggagggcaccccgactctgtctccaggagtctcatcagcaaaccgctgacaagtctttctagaaattctactgcactgcctggctcagctgcagctgcagacatttctgcaggaggagcaggtgtttctgtcttctgttccttctagggccacctgtccccttaaacacaggtccacgttgtgtcaagaacctagtgcatctgtgtgtgtctgtcagtgtctctgtgtcagtgttctcgtgggtgtctgcacggtacccggccgccgttctgcaatgcatcactcccgcagaggggggtgcagatcaggcgccgtgctgcgcgttgttgttcaacagtggctttttcttagataatcgtgcttcctcagcgcccgtcgggttgtggcatccttggatctgcagggatcttctccgtttgcatgttcctcggggtggcgtgttccttgctccctgggtccgacatgtgttcccgcacctgcatggactgccccggttctgtgttgtgtgccgagtgccgcccagtgttctgtgaccacccgtgtagctactgaaaatggctgggtaagcaagtcaagggtgttggaggaggtcaagagagagctcagtttccctctccccctccccaaacacaccaagaagcatttttaacgtgtaggttgagaacaagcctaaaggattcccacagctgggagccagcaagagagcttggagtcgcctctctagaccagatctagcccaccccgtcgggtggagcgctccacccgtcggg

SEQ ID NO: 596114 - DNA, 804 bp, Homo sapiens
  misc_feature (2)..(2): n is a, c, g, or t
  misc_feature (395)..(395): n is a, c, g, or t
tntggagaggccgcggcggcaggcagcgggtgagtctctaatcttctaaaaggggttcctatagaaacgcggagcggggcgcgccccccgctcggcccaggcccgggctgcggcgcttcgcacagcgcgcccctccccaagagcccctctttgctgtgggcgctccccgtctccgttcggcccccaccggccgagcgaaagaaatcaggagctagaaagagaggcattagatcgagatgagcggcagaactggaatcccgtctcggattcgtgacatttcaggcctattagcatttctccaacggagccttctgaaaacctatttaaagtgtaatattaaaaacctcttggctgggggcctctctcgccttccatccgccgcagccccctccagngagggcgagaccgggaaaaaaataaaatctgttgagctcagaggaagtagccgccaagcccaaaaagtgcttggatggccacaggcaggccgtagggggaagggagccccaatcccccagactttgtacttttatttagcgctttcagcaaaatcctttctgggttgagtagccgtgagctgcccgcggacgacctacctgaccggggcgcagggagtgcggaccacgccagcaggacttgtcctgggggccccggagccctcatctctgcagacccccgagcccgggctaggcataacgtaccctggaagggaagcttggagggggcagaaaattcttccaatgctgcctcgaagagcaagtgcagtgataagattgacttaaaacaagagagcccgtctttcgcgcg

SEQ ID NO: 596115 - DNA, 168 bp, Homo sapiens
cccctccgcgcataactcttcctttataattacccagtctcaggtattctttagagagtagacgtagtacaagaatggactaatacaggtgcctagcccagtgtctggaacttcaggggaaaggttaaatgtcagctgtcttttggagcaaaaaaaaacacctttctc

SEQ ID NO: 596116 - DNA, 284 bp, Homo sapiens
  misc_feature (1)..(1): n is a, c, g, or t
  misc_feature (105)..(105): n is a, c, g, or t
  misc_feature (276)..(276): n is a, c, g, or t
nttcggcacaggaagtggcatgataatggctcacagaacctccaccttctgggctcaagcgctcctcccacctcagccaacagagtagctgggactacagtcgtngttcaccacaccagtccaactttgaaaccctgtctctactaaaaatacaaataattagacaggcatggtgacacacgcttgtaatcccaggttactctgaggactgagggcaggagaataacttggaaccaaggagggaggaggttgcagtggagccactcacgttccttnttgttctc

SEQ ID NO: 596117 - DNA, 897 bp, Homo sapiens
  misc_feature (30)..(30): n is a, c, g, or t
taatttaatttaagttgtgacaaaaaaaanttttggaaataaaatgttcaaattcacggggccaccttgatcttattttcgatttagacttcctttggaaactacctaattcccttccttatttagtgggcatctgtctcatcttgatagtcgttttcatgatcacaaaatttgagcaggatagacatagagctataagaaacagactttgtaaagaccaacttaagaaacttcctgtccataagttctataaaggagatgagtttgatgtatgagccattacggtggatgagtctgacgatggtaacatactcggagatctatactgtattcatgattatcattccaagctgtgttctactgtttgcttagctcatcttgtgcttctcttgtcttttgcgatttcacctatcctgcttctatctactagcgagcgacgagtttagacttttatttgtattgcgttatgatattcgatatatgccttttattttctctttttctattgctttcttttcgttttgtgatggttatgctcacgtcatcttatgttttttcgataaacttttctactttcactctttggattgatagttttcattttgcttgcgatttatcttttgccgtctctattggacgtatatttagtagatgggcggcgcatcgtaatcgggttcggtgcttgggtttgcctgtatcctttttttctcccctcgttatttccgctattgtctccagtcctcatggatctcttcgattcgttttatgttatttattatactctgccattacgtggtgcgtcggttttcagcattttgggtcggtttctcgtcacctcttggtgtggaaagtttgccgccgtcggcccactctaacccatttacgttctacgaaccg

SEQ ID NO: 596118 - DNA, 183 bp, Homo sapiens
cgactacaagagtcacctgagtgtgccatggccagcagccggctggccaagtccctcgtggtggccgaagagaagaagatgtttggaactgggttgtggccatggcctggcaagcatgcctggcctatgtctcccaaaccccaatggacttgtgattgggtacctgatgctcgcaattctgta

SEQ ID NO: 596119 - DNA, 1274 bp, Homo sapiens
gagacaattccgtaggcgactgaaggtcctatatgctagagtaggtgcaatgagatgagtaaattgaagtcctaacggcaggattctgtttcatgacttatgtgctgggattgatgatgcagttctacaactacttgtcaggtgagtatagctgtagttgatggttgcataggaatatatgaattgaggcttgatggatgatcgaagtagtgagaatctagtcaaggatggaagactggtgcagagcctcgctcttcaagattatatacgccacgagttactcgatggaggctggcggcacgcatcaaatcgttgacattcgcattgtgaccgcgaggatgtgtggatgggttgctttgctgacactccggagatcggtgcctgttgttttctcccaagttccctgtgtgtgaataaagcggacgtactgtagtcccacgaaatttaataccaattagacaggggcaagtgacttttaggattacgaactgaaggctgactataaaaacagttttaaagctttaagtttaagagagttgtagggtgcattaagagataactttgacatgggggactctttttaagaaacgcagatttaaaacctccgagagggtggatttacacacaggaccgttggaacaaatcccatggaaccgcagggagacgacacttgtggcggttcaatttaaacaggccttagttttaaacgccattttaactaaaagcggcaagcaccgagcaaactcggaaacaggacttcaacactttgaggaagggtgggtaagcgactggaacaacgcacacttttggcagcgcaagaattagaaccgcttggccaccttgtggcaccaaacacctggcgacacgacacacggaaacgttaccccggggcgaaacgggcccagagaccacgacaggaaacttaggacgcacacgactacggggcgaacaaaatccacagcaacaggcattagcaaaaccccttaccccttttctaaccgacacaggaacaacacaacacggagcttccaccattttaacccgcgctcggacaaaaagcggtaccggacaagcggccgtccaacgcacacacccactaaggaacccgtcggtctagaggcaacacagccaccacaaggacttacaagcgggcccacaaactggttaccaccacatttttcagacacgcgcaaacatttggcggacacacatataacgaaacaccaccaccgacgacaagagcgcacaacacacgcataaaacacagccagatc

SEQ ID NO: 596120 - DNA, 238 bp, Homo sapiens
tgtaatcccaatcattaggtggaagcagaggcgggagtgatcacctgaggtcaggaattcgaaaccagctgggactacatagtgaaaccctgtctctactagagatacaaaaaattagccgggtgcggttgtgggcgcctgtaatcctagctactcaggaggctgaggcaggagaatcgcctgaacccaggaagcggaggtttgtagtgagccaagattgggatcttggcctcgtgcg

SEQ ID NO: 596121 - DNA, 644 bp, Homo sapiens
  misc_feature (190)..(190): n is a, c, g, or t
  misc_feature (200)..(200): n is a, c, g, or t
  misc_feature (322)..(322): n is a, c, g, or t
  misc_feature (394)..(394): n is a, c, g, or t
tccccagatttatttattggttgaacagttctacttcagccaagaggggaggtgttcctggagaaaccagttgggtaaagcaggtgaaaaacgcaatacacatggtggcaagattccagcttcacaaaggggcaagggagctttcagtaaaatcactgagatcttattgatgggaaggatgaaagccacntcagcttccntgcaaggcaagcaggaaagcaatctacttcccaggcacactcttgacccagagttctggctattcagaccagacaggcacctattttcatctgcagaaatgttgatgttccaagtagagagnaattgtgaccctatctcccatgcaagcctgaacctgaagagtgctcctcctgtgtgaatgcagtcaccttanagtgttccagaaaggctgtctatatgtgcacccatcctgagtgcccatgggagaaccctcagctatgtctgcagtggtggatgggggaaaaataagtccccttctccaagattcttcaggagtaccaggactgcttgactgttggagtagagctgcagactttccccactgagcccagcactacaactgtgcctctgctgaaaggaacttcccaccaatggaaagatttaggactcaaggccttccatcc

SEQ ID NO: 596122 - DNA, 951 bp, Homo sapiens
aagtaggccaggcgcggtggctgacacctataatcccagcaccatgggaggccgaggcaggcggatcacctgaggtcaggagttcaagaccagcctggccaacatggtgaaaccccaactctattaaaaatgcaaaaaaatagctgagcgtggtggtgcatgcctgtcaagtcccagctacacaggaggctgacgcaggagaatcgcatgaacccgggaggcagaggttgcagtgatccaagatcacgccactgcactccagactaggtaacagagcaagacttcatcccaaaaaaaaaaaaaaaaaaaaaaaaaaaattcttgtaaaaaaaatttaaaaaagacggggaaatctggagtaagggaatttatttccctttaggggtataaaattttaaataaccgtggtttttttttgggaaaagagcgcttaataagggagagggaaaggtggatataacaatagttgggcacatttttcaaaggtataagaatccgagacgggagtttcggatcgtatgggtcggggcccttggtgaaacccttcacaaacaaaccggggagcatattttattaacccttaaaagtgtctctggtccgtggggaaatcccccttccttttaaacggggtcccattgtccttttgtctctaagagaaagcaatttaacccggttttgtgggtcaagggttaatggtacggttgaagttacacacttctttaagaaggtttctatcccagcgggcatccgtgaagttatgtaactcctatgggggcgagactctcttcctccaccggggagcgatcaccacattggtcaataccggttaagggtcatctttttatccttcacggttccagggtcagtctttcacagggtaccctacccggcgaaatgtgggggcccgactggacgggacaaagcagaatgggcacgcgaggaattcttctg

SEQ ID NO: 596123 - DNA, 620 bp, Homo sapiens
ggcagaaggcagtggcagcaggcagtggcccaggcagaaatagctcccgcgcgattcactggagccttccccgggccctggtcccggctaccgggactcgcgcgtccggatctcaaaagcggcagaggccaccgaagggacaggaagcactttggtccagaccacactcccggcacagtgcggaaagagccggcggggaagccactctgatcccggactgcctctagcggcacccttgggcttgtggctttgccctcgggccgggggaaggctgacggcgatgccaggacgccgctcccctccgaccgtaccgggcgccctgggttgcctggctgctgggcggctcttggggcctggacccctgtgcggcttggtgcagccctgggggcgggtgtggagccccagcgcccgtgccaaggcgccgcagcaagtgggaggggcggccagggttattgtacccagcaaagtaaagcgggcgcaaacaagccggcggccctgatctcctacgacgggcttccaacagcagccgttccgggtgctggaacgagaagggaaaggcgctgatcccctgcaagaagattatcttgaatatatttccgctgtataagcgatggacgtac

SEQ ID NO: 596124 - DNA, 437 bp, Homo sapiens
tagccgacctagcaggaccccccatgactcagtctcagacacactaacacttgtccacattcatcttgctagaatagctattcctaacattctggttcagatcctctgtaagtttctcaagacaaattctccataatctgatcgctgctcttccctgaattctttacttaccaaccctacaccccatccttctaacctgacaaccaaggtgtccagtttcatagttatgccctcctctgactgattaccattatgtcagctgtttcattgctggcaaagccacttaccttctctctcatcatgattccttcaagtcctccctggctcagcttaaatcttagcctggcttcacctatagagtgacagactcctttccaatgctctcacagaaactcatgcatttatccatcatagtgtgtgtgtgtgtgtatacatat

SEQ ID NO: 596125 - DNA, 268 bp, Homo sapiens
  misc_feature (44)..(44): n is a, c, g, or t
  misc_feature (127)..(128): n is a, c, g, or t
  misc_feature (136)..(136): n is a, c, g, or t
  misc_feature (178)..(178): n is a, c, g, or t
  misc_feature (211)..(211): n is a, c, g, or t
aaagtacttttaattatagtcctttctaaccagtgttgacagtnttctgtattgctgcttcacagtgaaagtacttgcattacctcttttgtattgaaaaggtttcatttaggtagttactcttttnntgcctctntttggtaagtagtttgcccacacaacagtttagataaaattngaaaataaccaaggatacctcaagccacctttnacctaaggcacattggttcttgacagcagacacatttcatgagccaagagagctagg

SEQ ID NO: 596126 - DNA, 103 bp, Homo sapiens
tacacattcaagggtggcagctgctttaaagcactagaagtggtagcagcttagctctagaaagcaggaaactaactttcagccagaataccaccgtccacag

SEQ ID NO: 596127 - DNA, 1000 bp, Homo sapiens
cgtggtggctcatgcctgtaatcccagcactttgggaggctacggtgggcagatcatctgaggccaggagttcgagacctgcctggccaacatggcaacaccccgtctctaataaaaatataaaaattagcctggcatggtagcatgcgcctatagtcccagctgctcaggaggctgaggcatgagaatcgcttgaacctaggaggtggaggttgcattcaactgagatcataccacttcattccagcctgggtgacagagcaagactctgtctcaaaaaaaaaaaaaagggaaacctctgggagggcctttggttcagtaaatccctttcagtatttatcccttccttttccccaaaagaagctttcttcccgtgttcaccctagaaagggagcaggatgctaataaatactttgtggggtgtgacttaggccacaccaactcttaatcatctcccaatttccctttaaaacctttctaatttcccagggcaaggttacccctcgtgttgttacctcagaaactttggcagagacagtcattgggctttccccaaaagtgccccactgcgggagataatgcgatggcgcctcccttaacaccttatggctcctcccaatattttttctccaaccacttgacaattcaaggtcctcctatggaggaagctcttacgaacacagacaagaacaagcaacaaaacaacgaacgacaaacacaatgttgttgcggcgggcactgtcggccctcggaaagaagagttcttcaagaacaccatctgcggagagggagcccgggggcccccccgatggctcatagcgcggaacacctggtgcacagaggcggctccacaaagaaaaacaccggcggcaacaaaacaacgggacgggaaactcccaccccactgaaaaaaaacgcgcggcggggggaacacacagaggcttcttgaaacaacaccacacagaaagcgcccgcgcgggcgctaaacaggggggcgtcc

SEQ ID NO: 596128 - DNA, 1033 bp, Homo sapiens
  misc_feature (485)..(485): n is a, c, g, or t
  misc_feature (489)..(489): n is a, c, g, or t
  misc_feature (500)..(500): n is a, c, g, or t
  misc_feature (509)..(509): n is a, c, g, or t
  misc_feature (526)..(527): n is a, c, g, or t
ggtacttgcgagcaaatacgattggagacaaggctggtgaggcaggcgggagaaagcagggctcagctgctgcccctgcctactgcgaactctgctccttgcctctggcgttgaaccactacgcaacgtgcactctcctgcgcgcacactacctgcacgcctgcgcctgctgcgggcgactgcactgccactacctgctctgcacgcgccctcgatccttacctctgcctcctccctcctcctactgcacaccacacgcgcccctctgcacacaccccgcccaacctcacgcctcaggcgcctcccttgcctcctctctcccacgcctctctctcccctctcctctctgctgcccaacattggcgcacctctactacaacgcacactcacgccctccacctacacacacgctcacacacgcctcccccacgaagcgccctgcgcaccctcccacgcctctgcaaaccaaaaagtgtctgtcatgntcgntgttttccgantatgcgaanccccctgaagcaatganncatcacaagaaaggctgcggcaccttctacaccccctccccacccccacaccacccctctgcctctccccctgcacgcacacccacccccctccaccgcaccaccccactccggcgccccctccctctgcgcctcgccacccgccactctttcctaccctccacccccacgccccccccccccctcacccagcacccactcctcacccctgcacccctacccgcgccctcccttccctcccctccccacctctgcacacttctgctttcccatcccccccttctctggcgctgcgcctccccccacccctcccccgcccacttcctgcttgaaaattaggccttcgaggcccccgaatatccaacggtggatgcccccgaaatttttgtgcgcgacggaaacccccgagttgcacggggccacagtgtcccttccccgtcgaccccctcgacccccccccgtctccgctcccctccgcgctgctcacactccctttaacccttggg

SEQ ID NO: 596129 - DNA, 319 bp, Homo sapiens
ttggggaattttttttgtttttgggaaccccaaaggttgggccccaatttaggcctttccttccaaccgggggtttagggtgggggggttccccaacccaaatggggggttataaaaaagggaccctcctaattccctccccccctagaattgggggggggggtttgggttttttaggggggtttttaccccttgggtttccttggggtttttgggttggggtaaaaaggggcccgggggaaaacccgcccccttctttttaggccgggggcccaaccgggaaaaaaagggggccgggggatggttttttggcccccca

SEQ ID NO: 596130 - DNA, 162 bp, Homo sapiens
gaaactccattggaagcttttcttcaatttcaatgcttttgacagagtagattactttttgggaaacactcctttctctgctcccgttacaccaaactctcctattttattttttggttggtttgttggcctcgggtggtacccctcggggaatcttctaaa

SEQ ID NO: 596131 - DNA, 300 bp, Homo sapiens
tgagcctccatgcccagctaaataaatattctttaattataaaataattattcgtgagttatggttttaagtttgacctatatatcagctgtctcaagaaatacaggaaataggccgggtgcagtggctcacacctgtaatgccggcactttgggaggctgatgcaggcggatcacgaggtcaggaaatggagaccatcctggccaacatggtgaaaacacgtctctaccaaaaaaatacaaaaaattagccatgcatggtggcacacacctgtagtcccagctactcaggaggctgagg

SEQ ID NO: 596132 - DNA, 717 bp, Homo sapiens
  misc_feature (95)..(95): n is a, c, g, or t
  misc_feature (140)..(140): n is a, c, g, or t
  misc_feature (149)..(149): n is a, c, g, or t
  misc_feature (193)..(194): n is a, c, g, or t
  misc_feature (205)..(205): n is a, c, g, or t
  misc_feature (208)..(208): n is a, c, g, or t
  misc_feature (215)..(215): n is a, c, g, or t
  misc_feature (218)..(218): n is a, c, g, or t
  misc_feature (225)..(225): n is a, c, g, or t
  misc_feature (230)..(230): n is a, c, g, or t
  misc_feature (254)..(254): n is a, c, g, or t
  misc_feature (265)..(265): n is a, c, g, or t
  misc_feature (270)..(270): n is a, c, g, or t
  misc_feature (277)..(277): n is a, c, g, or t
  misc_feature (279)..(279): n is a, c, g, or t
  misc_feature (286)..(286): n is a, c, g, or t
  misc_feature (289)..(289): n is a, c, g, or t
  misc_feature (292)..(292): n is a, c, g, or t
  misc_feature (294)..(294): n is a, c, g, or t
  misc_feature (296)..(297): n is a, c, g, or t
  misc_feature (299)..(299): n is a, c, g, or t
  misc_feature (327)..(327): n is a, c, g, or t
  misc_feature (332)..(332): n is a, c, g, or t
  misc_feature (342)..(343): n is a, c, g, or t
  misc_feature (352)..(352): n is a, c, g, or t
  misc_feature (354)..(354): n is a, c, g, or t
gaagttgctttctgtcccggcagaggaagccagatcgctgagggtccggtctccagtttgcctcctgctatatccattggaagagaaaagtttgngacttgggcccccaagttttgagagaactgggctttcggcgcggngggacagangaggctcgtggggagctttccccatggagcttacccagcctgcnnaagacctcatncanacccatnaancccctgnctcanaacttggggaccctgaagaccccnggagaggaggntgaanatggctnanacactgnggnccntnanntntttccctgcacccctgagcctgtgaatnctganccggatgccnntgtttcctntncacagggccagctccctgaagcagtccaccactctcaccaaccggtcatggagggaacgaagtgtcagctctgtcggcaccctagactccctgtggcatccaccagctcgcagcacagggggagctggaccagctgaaggagcatttgcggaaaggtgaccaacctcgtcaacaagccagacgagcgcggttcacccccctcatctgggctccgcctttggagagattgagagcgttcgcttcctgctggagtggggtgccgacccccagatcctggcaaagagcgagagagcgcctgtcgctggcagcaccaggcggtacacagacattgtggggctgctgctggagcgtgacgtggacatc

SEQ ID NO: 596133 - DNA, 285 bp, Homo sapiens
gacaatttaaccatcgttgctggtattttcataggcattgcattcctgcagatatttgtggatatgcctggcccagaatttgggtagcgatatcgaagctgtcagggcgagctggtaagaccccctccaaccgctgctgcaagacacttgacagacccagctttcgggaccctccccggtgccgaactgatcttcgagctgcatggacctaatacagatgcagcctgcaagtctcgcctaatggagctgccattaggggagtgtaaacctgggaaatgctgctac

SEQ ID NO: 596134 - DNA, 446 bp, Homo sapiens
  misc_feature (95)..(95): n is a, c, g, or t
  misc_feature (140)..(140): n is a, c, g, or t
  misc_feature (149)..(149): n is a, c, g, or t
  misc_feature (193)..(194): n is a, c, g, or t
  misc_feature (205)..(205): n is a, c, g, or t
  misc_feature (208)..(208): n is a, c, g, or t
  misc_feature (215)..(215): n is a, c, g, or t
  misc_feature (218)..(218): n is a, c, g, or t
  misc_feature (225)..(225): n is a, c, g, or t
  misc_feature (230)..(230): n is a, c, g, or t
  misc_feature (254)..(254): n is a, c, g, or t
  misc_feature (265)..(265): n is a, c, g, or t
  misc_feature (270)..(270): n is a, c, g, or t
  misc_feature (277)..(277): n is a, c, g, or t
  misc_feature (279)..(279): n is a, c, g, or t
  misc_feature (286)..(286): n is a, c, g, or t
  misc_feature (289)..(289): n is a, c, g, or t
  misc_feature (292)..(292): n is a, c, g, or t
  misc_feature (294)..(294): n is a, c, g, or t
  misc_feature (296)..(297): n is a, c, g, or t
  misc_feature (299)..(299): n is a, c, g, or t
  misc_feature (327)..(327): n is a, c, g, or t
  misc_feature (332)..(332): n is a, c, g, or t
  misc_feature (342)..(343): n is a, c, g, or t
  misc_feature (352)..(352): n is a, c, g, or t
  misc_feature (354)..(354): n is a, c, g, or t
gaagttgctttctgtcccggcagaggaagccagatcgctgagggtccggtctccagtttgcctcctgctatatccattggaagagaaaagtttgngacttgggcccccaagttttgagagaactgggctttcggcgcggngggacagangaggctcgtggggagctttccccatggagcttacccagcctgcnnaagacctcatncanacccatnaancccctgnctcanaacttggggaccctgaagaccccnggagaggaggntgaanatggctnanacactgnggnccntnanntntttccctgcacccctgagcctgtgaatnctganccggatgccnntgtttcctntncacaggcaggcagcttccttaaacactttaagaattttaaccaaccggggatcgagggaacgaggtggtaacttttggcgggccccccttaa

SEQ ID NO: 596135 - DNA, 164 bp, Homo sapiens
gaggaggctggaggaggcactgggggccctaatggctgtccatggcatgactaccgtggacagtttctcatgagctgcagggcctggagcaggaggtagagccgtctagaaagtctgctcgatgtcatgagacaaggtctgactcgcagccgtggcctccagta

SEQ ID NO: 596136 - DNA, 1008 bp, Homo sapiens
  misc_feature (743)..(743): n is a, c, g, or t
  misc_feature (1007)..(1007): n is a, c, g, or t
ggtccgcgtggcacctcgcctgctccagcctctggggcgcaattccaagcttccagacctgcgaactgactgcgagaagaagaattaccttattttctctgccccaatagcatacctggagtgcgaggctacacacaaaattgagaattttaaccatgatgggaagatcgtgctacatcgcagtgctggatcagtcgtggctacatccagaatcggtgccaagttctgggaggtgatcactgatgaacatggaatcgagcccaccggcacctatcacggggacagggacctggagttggatcgaactctctgatgtactaaaaagaatccagaggtggggaatatgttcctcgtgccatcctggatggatctaaaacctgggaccactggactctggtttcgcatcaggtccttgcggaccagatcttgagatgcagacaatcttgagtaatcgggtcaagtgctggggcaggtaacaactgggcacaaagggtcaccttgacagcagagggcgcctgagctgtgttgattctgtcctggatgtggtacgggaaggatgcatacagctgagactgactgccagggcttaccagactgacccgtctcctctggaacgggggcggccatgctcttcaatgggacaccctccttattagccagatccgagaagactggccttgatcgcatcatcatagctacagtgtggcgcctgcatccacagtgtctgacccgtgggccgaggnctacaatgcacctctccgtccaccaggtggcagagcatcagtgaatgagacgatgcgtgaaacaggcccctataaatctgcgccgactgagatagcacacaactaggggattgacactgccagcgccgaggggtacaacggtcggtcggcaacatcggccgcatgcggaaagcccccggccaaagcggtgcccacaggcatacagcggccaccgtcaaaagggaccacgccggcgccgggcagcacaggcagacgcccgcgaana

SEQ ID NO: 596137 - DNA, 786 bp, Homo sapiens
cgtcagggaaggtgggaagaggaccgcggcagggcgtttgggagctgcggctgcgctcgggggcgcggggctggctggcgggcgtctctccggcacacacagcccgtgcgccctggccctgggcgcctccccgagtctagcgagcctggtgtcctgggagccccgggggccgggctgctgggacctggtgctgtgtgggctgccctagaggccctggtggccgtcccccgtgtggccctgccgagaggggcgtgcgcagctccccggcgcctgcactgcgcgccttgcccgcctggcccggcagcaggggtttcatgctgcgctcacagctgtgcggtgcggcctccggtgcgccggctgaggcgcgaggatactggaagcgctcagcgcgtgcgcccgctccgagcgctgactagaggaccaggggcctcctctgtacggcagcggggtccacagagagcgcgctggtgatgtcgcccgagtgccctggcgcggagagaagggctgcgcaccagttcgccggcgcccgtggtcctgtgcgcccttaccagcctgggcaagtgggggagcggggctgccagagggggccgggggtggaagtctctcgggggcttccctcccgtgctcgtggaacccgcgccccggccttcccagtcccgggcctcccgcgattgctcgcccgacgtttgctgcagcgggcccaaagccgagattcagcctccgggaatctgccggccgagccgggggttaacgccgccaaacccgacccaggtctgcactttcccg

SEQ ID NO: 596138 - DNA, 651 bp, Homo sapiens
caaattattgagtatctcctaagcaaagggtactgtgtttagtgctaaggttgatactaagcagaattaaagatgtgaaatttaatgaataccctgttttaagagctttgctaaagatgtgtatggaatgttctgaatgaaacagacttagtaagacatgagtgttgaaaagttttctcagttaatttagcagcactcaggactgctttgtccatgcagatacggctgacttactggggacttttgtttctaacattagccaagcttactgtcaactctgaagagatgttggagttgtcctagaacacttaaacttggaagttaaattgtcttccaatgtgtttggcagagttataaaagtagacatgagccatattgatagaggcacggcatatgaagagcttcagaatacttatgacacttctttgacgttctgtgaaaggctatagataagtacctccaaacatcatgcctccagcctcactcttgcttaaggaaatactctgaaagtagattttctttcttttttgagacggtctctctgtctcccaggctggagtgcagtggcatgatcttggctcactgacacctccaactcctgggtttaaacaattcttgtgcctcagcctcctgagtagctgggattacagg

SEQ ID NO: 596139 - DNA, 697 bp, Homo sapiens
ttttaataagcggggcttgccttgtggtgtcggcaagctttatgagcgtcatgaggaaaatctgcatttgccaggttattgtctgcggaacgggtcttgctccaaaggggcttcagcagtccttggcctgatatggtcttggaacttgcttccttttccatccatggtaagcagcacctaccctacctgccccacttgtccttagcctggtcatttgacattagtatctcgaccttctcaccagctcccaggaccataggctcaggcaggggcctccatgggccccagcggaacactggggacttggcctctctctagggtacatggttctggttcaggctgggagaggcagcccagcaagtctcatgtggggagcagtcagacagcatctgggccttggcctggagcgcaaagacgttggctttctctttctctcaggtgaaaggtcattaaggcagcaaaacaagtttggatcctggtcacttaggaagcttcagattcctttgcatgcaggaagggagtggtttgcaggtggccaagttcttctattttggctcacactcgacatgaaaattgagaattttacactttccctaccctctagacaaataagatcttttttgtcagtttgtttgtatgtaactaaagcctttaggtgttatagctcctgcttaaacaatgattactacttcaagga

SEQ ID NO: 596140 - DNA, 193 bp, Homo sapiens
acacagggtgtcaccatgttggccaggctggtctcgagcgcctgacctcagatgatccgcccacctcagcttcccaaagttctgcgattacaggtgtgagccgccacacctggccctttgtgactatcctttttacttagcatactgttttcaaggtccatccatgttgttgcaaaagataagatttcattaa

SEQ ID NO: 596141 - DNA, 1009 bp, Homo sapiens
gaagggtctggccacgtgtgtgaaatggtcagacagatgtatgatggcatgaccttcctcaaccagaatgcttagagatcgagctggctgcggagaagccagttaaacgtccatcatcaccagtggaggagctaccagagatagagcgttggaagatctggatacctgtatgactctctgctgtacaagtatgaccctaaatccaaaaggaaagagtatccatagccgaatgctgcggcctgttattctagggcttatgaaactggagctctcgatcctagataaagcgcatggcaagaggtaccaaattcacatcgaaggagcaagaactacccatccgctccagacaggagaagcggaaacacgggattaatcaatatgaagatagacactcaacaaagaagggaagaaagctggaacaccaaaaaccaacgtaacaagccgaaccaaggacagaaacaagaaagacaacaccagccccacgacaatccggcccgtgcattgcacacaacctatccaaccagatagggtaaccagacatggtagcaatacgagagagaggacggcacgaggaccacactcaccgaagcacaacaacaacgcggaacaacacgcccaaccaagcaaccgccaacaccaacagccccgacacacacgaccccagaagcacacgaacacacacacaaaaatgaaagcaaacggaaaacaatgcgatgactacaagaaaagcaaatacagcgcgaaaagcacagaccacacaaggatgccgaaggaacgacaacacaaccacagagggaacgaagcacacggccgaccacaacaacgacgagcggcgacaagaaaaggaggacgaggacaaacacgaccgcaccatgcacagccaacagagaacgacaagacacagacccgacgagagcctcgcgcccgcgacacaaaacgaagaaacgatgagtgcaaaacgcagagcgtgacgaggacagagcagtcgcgaacacacgactacgtgaaa

SEQ ID NO: 596142 - DNA, 1464 bp, Homo sapiens
taaacctttccttataagcatgccggtgtggggttgacagggagggtaataatagacttgtgggtggatgtgtaaaatatgtgggcgtgtttaattgtgtcagttctcaggtgttttataactctcgacccaggctttatgcggagcgaaaagtgtttcacagtgtttcacttattactaaccattagtttcttcataataggggtagataagatagggtcccaactgtgggtgtgttgagagaagggcgcctccgcgaaagaagaactcttaagatagtgtgtgtggtgcgcccgtgcggaggaattaaaccccaacacccgccgaggtcgaagaggagtcctcgagggtttccctcaagacttttgcccagagggaagaacactccactcatcccgtgtggacacagtgtacagcggggcgaaccccaggtccaagagaaaacctacggggcgtgggcccacgcgggccactcacatgaagagaggcaccacagaccgccgcgggggggcacatatcccccacgcgcaacaggtgttgttcaccgttccagtgtcgcccagcgtgtgtcccacccagtgtccacccgcgcgcggggacaaccatgtggtgtgacccccgtgtgtgtccaccacagtgatatcctcccccgagactccagaagagaccagagacaccgttgtctcgcggggcatctttggccagcccctgtcgaacacggggggggacacccccagaaggttcgcctgttcgaccaaaggcgccataaaaaccgcctagagaggggcagcttttctcgcctaacatggaccttacctttcaaggggcccccccacccacaaaagccacaacagccgtagaagcccccgcgtccacgcgtggggttccaaaggccccccaagtgcaaagagacccggcctttggtgtgaagcccacccaccggccggggaaaccccgccctcacacaacaggcggcccgctcggcctcccaacaagaaagcctccctcgggccagagggcgacgcgcagctccccgccaaaaaagggcctaggctggggccccacaagagccgagacgctcaccactacacacgggcgcagcaccccgctccacaagaggaaccccccctcacaaaaaaacacgcgcacgcaaaactttgtggggggcccccgtaaaataccgacccccctaaaggagcaagccatcttttcggatcctccgcacatttcccggccacccctctgtcaggcacgggggtggagagactgtgtatcgggcttaccccacagaaaccctcccacgaagggtcctagtcaacagacccccatgtgcgggcccacccaaaaagtggagacccaccgtggtgcgggaacaccacatacagccctctcaccgccccggcgtatcaactacctctctccctctctcctctccctcatcaatccacctctccatcgagggtg

SEQ ID NO: 596143 - DNA, 118 bp, Homo sapiens
ccgcatgtttgcatggcagaagcgtctcccttggccccggcctgggagggtggttcctgttctcagcatcccctaatattcagtcctgtatattttaataaaataaacttgccaaagg

SEQ ID NO: 596144 - DNA, 116 bp, Homo sapiens
atcatgtagtctggactttgagcagtgtgaccgctaccagctgcaagctgctggcacatgatgggcctcatgaagggccgtgccaaccctcacacgtgcttagtggaggatgtcaa

SEQ ID NO: 596145 - DNA, 122 bp, Homo sapiens
tcggataatcatccaatagttggatgatctggaggaagtagtggacttccaggtcgccctggtttccctgggtcatcatggcggtgcgtcagggatggccgcgctgggctataaagacgatg

SEQ ID NO: 596146 - DNA, 258 bp, Homo sapiens
ccagcaggctatatggatatcagcgctgggccaggcgatcttcgggacagaacctgttcggcgatgcggtttgcctcggcattgagcaccggtttgagcattctgctggatgtatctggtctctcgccggttgtggaatgatccgcaaaaaagcctggtcagcaccttgctctacatgagtttcgtcagcgtggctgcgctgggcggatatgccaacctggacccgcagttcactttttgggtgcagggacccactcg

SEQ ID NO: 596147 - DNA, 339 bp, Homo sapiens
  misc_feature (7)..(7): n is a, c, g, or t
  misc_feature (200)..(200): n is a, c, g, or t
  misc_feature (205)..(207): n is a, c, g, or t
  misc_feature (244)..(244): n is a, c, g, or t
tctgaangctgacacataatggactagaccctgctgtgtccaagatggtttgctattaccagcaatgccacttctgggtatctgttcaaaagaattgaaagcaggatctcaaggagctacttgtgtatccatgttcctggcagcactattcacaatatctaagaggtagaaacaaccgaaatatccattggcagatgagnggatnnncaatatatagtatatatgttcaatgaaatgttattcnaccttaaaaaaagtaaatcctgcaatgtgtgacaacatagatgaaccttgaggacattaaaataagtgaaataaaacaatcacagaatgacgaaa

SEQ ID NO: 596148 - DNA, 714 bp, Homo sapiens
gcggccgcgccagcgcgcgctccagcagcgccgacttcccgcgcgtgaagcgcgcctccatgccgccgccacccaggaaccgcagcaggatttgttttctgcaaaagtttattttcaatgaagaatacttgtcctaatagctcataaaaagtacctttgcactttaaatcctaggaatagggaacaaggaaacttactgggaagttcaaaagaaagaataacaggaccttctagtcagcagggcatgtttggaaaatgttaatacgccatgatttttgaagaccaattttagttcaggaggtggttttaaatattggatgaaaacttacaggctgttttcaatattcatttctgaaatactttagtatgatagataaatttggttaagttcttgttcattgtgaaatactgttggaagaatttttttcaaaataaagacttctgaatttgtggtaccaaaaaaaaaaaaacaaaagcaagcaacaaaacttgtttcgggcgcccctgggagccctggagaaaagttctacaacaccatttcggggggcccggggggcccatcggttagttgaacgggggccaacgcggttaccaagagaaaacggggcataaacacgtcgcgggtttcccccaattaaaagcccgggcgaccgccgttctgaacaaccagggactccgggccacggcttcaacgggggccagggaccaatataa

SEQ ID NO: 596149 - DNA, 121 bp, Homo sapiens
cctatctcagaactcagtaacttcagatatcaaacatttattatcatagtatttctgtgtatccagaacccagatgtggctttgttgggtgcctctgtctctaagtctctcacgagttagg

SEQ ID NO: 596150 - DNA, 829 bp, Homo sapiens
gcgagatactggaggggcccatgcacgctcgggatggctggctggcatctggggttccagtggaccctctcgcttggctctggcagtgtggctggatactggcctgcctccgcttaccagagttcccccagcctcctccctgctgtgtggctgcctgcgaggagatggggtggggtgcacttacatttgtcgtctttccagcccctggtgcatctgattaaccagtttcttccatggccaagctgttgggggtgaggtgcagcccgaagcagccagaccagcccctgagcctcccgggtgctggcagctgtcatggggctaccctgggggcagtctcacctagggctgcagatgctcctcctggtcgttgatactgtctccggcccagtcctgagcctggagctggtgccctacacaccacagataacacgcattgggacctgtgaaggggaaggtcacagccaccagccttctcccatggagcagccgagctgtgatcttcgatgggcttgaccagcgcctagcggataccgtctggctcgtggtggccttcaacaatgcctccagggggcttccagaacccggagacactggcttgacattccgtgctccccacagaatgctgaccgatggccactacatgacagctgcccctgtctccggaccagtctgctcctgtggcgaccccatggctgggcagctggaggctgcccccgtgctgcgggtgggcccatgaacacggctgtcaccagcagtccttcttgcaacgcgcccatcctggcctggaccctatcgggtgaagttcctcctgatggacaccagggtcacc

SEQ ID NO: 596151 - DNA, 3106 bp, Homo sapiens
  misc_feature (116)..(116): n is a, c, g, or t
  misc_feature (212)..(212): n is a, c, g, or t
  misc_feature (289)..(289): n is a, c, g, or t
  misc_feature (567)..(567): n is a, c, g, or t
  misc_feature (594)..(594): n is a, c, g, or t
  misc_feature (610)..(610): n is a, c, g, or t
agcggtacagtttattcttggtttttttttttaactttagaagtaaattaatatggtaactagtggagcgtgctttagattgaagactcatctgaagtatcacagactcctatttngtaaagcattccacctttattgatacagttggtggcctatacacttttaaaatttattttttaaaaggtgatattaaaattggtatttaacctgtngtattcatcctcattagttaagtttttctttttatgttttaaaacttagtgacattaaacttttcacgtggttgttngtgaacagatgaatatataaccacgatgtaatccagtgttgtgctgctgaatgtttaacaaccatctttcatgaaagaaaaaaggccctgtttggtagcatttactaatatttatggtataaatactgtcttcatggtgattttacctgccaatctgatgtcattaaatgcagttggatgaaagagatagccaaccagtggctttcccaagccttggcaaaccagcttcagcacagcaaaggacatacaattccacaactcattaattaaatgtattngtcatttgatgattatatccagtattnggagagcttttatatngttaattcatttagcaagcatttgaacactgtgtttattttgtagagatatactgggcactgaggtatttaatctgcaaagacccaagtatcgtgaaccttggttttaaaaagtccaattatgtgctcttataggggttgcacattcaaggcttacactgaattctgtctgcagttctgtttgtgtgaccagcacagtgttttaaaacgttgcattctgaatccatctttttgaaatggggcatgtactcttaaggtggccactagcttaccattcccaatttttcttagtctcaaacattcacatgtttttcaaggccttggagttggcaaatcctgaatatatagtgaaggtaggaaatagctcttcttatgccacatcttagtctgattttgaagtcagttgtgtaagtttgggctgacagtggtattttccagtgaagactatcgccaagaatgcatatcattctgcttattttattctagtggataaaaattcaacgtatatttaagtgtatttttgacatctgtgcttgtccaacacagggctgtagggactgatgaaaagagaatgttgtgatttgagcttttataaaaaaagataagtgatcctagataaaatattttagatggtgattaaaatgcccatagattaattttttaatcggttctctgaaatcttgagatgttatccaagttacaatttaagcaatgagagtaaaatttgaattctaaattctcagcatcttccctcattcttgagtggagagacagaggaagcaaacgccaaggagccttctaattttgactatatgatcattaactaaaggcagcaagggattgtaaactaatcttacatagtcaatgtttcatagaatgctttggttacaatcaggttttttaaagactttaaaggtttttttgtatgctataatatatgcttatgatttctaaaaattatgcagtatacacaaagggcataaagtcaaaaagtgtgtctccctctgtgactttattctcataccccagaggtatataatttcttgtattcttgtgtagtctttaagaaatgttatcgtttattttatatatggctctctctctgtatgcctcttcctgttcttattttaaatgttcaagtttgtgacttggttcttgtttaacttggttgtctttccatattgccaccttccagctctaacattaatgtctccaggattccattatatggatgtccctttgggagaacatttgtttatagacttttctactaaaaatattgttataatgataatatccttatgcatatatgaagattactcttgattctgcctgactggaaactttattaataaagtagacattattctattttgaggctcaccagctgtgtaggtatgatcttgtgcttccatttaagaaattcttccatttaaagaagaaaaaaaatctctctaattgactatctgaagatatatgaaaaagcctatgcttttaaattaaactgttaagacagtccattgaaagattgtggaagttcacatctattttgcaccttaattttttcattgtccctactcatgactctaaaaagtgcatggcttggggctatactttgttttgcagtttgttggtatcgtgcctttccttatctacattagcttagactataccttatttttaagaagagaaagtggaaattaactgtggcaaaacctattttggcacaaccacatttgttcattatacaaaattagcttcctatgctttagaaaaaatgtgagttattactctgaaagttgtgattctgattcctcatggtttggagctcagaaatttcttaacatgtctttgctgttagtcaagcacaggatttgttttctgcaaaagtttattttcaatgaagaatacttgtcctaatagctcataaaaagtacctttgcactttaaatcctaggaatagggaacaaggaaacttactgggaagttcaaaagaaagaataacaggaccttctagtcagcagggcatgtttggaaaatgttaatacgccatgatttttgaagaccaattttagttcaggaggtggttttaaatattggatgaaaacttacaggctgttttcaatattcatttctgaaatactttagtatgatagataaatttggttaagttcttgttcattgtgaaatactgttggaagaatttttttcaaaataaagacttctgaatttgtggtaccaaaaaaaaaaaaacaaaagcaagcaacaaaacttgtttcgggcgcccctgggagccctggagaaaagttctacaacaccatttcggggggcccggggggcccatcggttagttgaacgggggccaacgcggttaccaagagaaaacggggcataaacacgtcgcgggtttcccccaattaaaagcccgggcgaccgccgttctgaacaaccagggactccgggccacggcttcaacgggggccagggaccaatataa

SEQ ID NO: 596152 - DNA, 124 bp, Homo sapiens
  misc_feature (8)..(8): n is a, c, g, or t
  misc_feature (38)..(38): n is a, c, g, or t
  misc_feature (77)..(77): n is a, c, g, or t
tacactgngaaaatgtacaaagaaagtatccccaaatnatttacaaagcctaaatgtccttgatacacatacacggnagtatgcagacaacaaagattaaatgaagacactttacacttttcgg

SEQ ID NO: 596153 - DNA, 2790 bp, Homo sapiens
  misc_feature (251)..(251): n is a, c, g, or t
  misc_feature (278)..(278): n is a, c, g, or t
  misc_feature (294)..(294): n is a, c, g, or t
tgagccggtcccatgtgatagtgttaaaaaataatgggtaaaatgctacaagaaaaggccctgtttggtagcatttactaatatttatggtataaatactgtcttcatggtgattttacctgccaatctgatgtcattaaatgcagttggatgaaagagatagccaaccagtggctttcccaagccttggcaaaccagcttcagcacagcaaaggacatacaattccacaactcattaattaaatgtattngtcatttgatgattatatccagtattnggagagcttttatatngttaattcatttagcaagcatttgaacactgtgtttattttgtagagatatactgggcactgaggtatttaatctgcaaagacccaagtatcgtgaaccttggttttaaaaagtccaattatgtgctcttataggggttgcacattcaaggcttacactgaattctgtctgcagttctgtttgtgtgaccagcacagtgttttaaaacgttgcattctgaatccatctttttgaaatggggcatgtactcttaaggtggccactagcttaccattcccaatttttcttagtctcaaacattcacatgtttttcaaggccttggagttggcaaatcctgaatatatagtgaaggtaggaaatagctcttcttatgccacatcttagtctgattttgaagtcagttgtgtaagtttgggctgacagtggtattttccagtgaagactatcgccaagaatgcatatcattctgcttattttattctagtggataaaaattcaacgtatatttaagtgtatttttgacatctgtgcttgtccaacacagggctgtagggactgatgaaaagagaatgttgtgatttgagcttttataaaaaaagataagtgatcctagataaaatattttagatggtgattaaaatgcccatagattaattttttaatcggttctctgaaatcttgagatgttatccaagttacaatttaagcaatgagagtaaaatttgaattctaaattctcagcatcttccctcattcttgagtggagagacagaggaagcaaacgccaaggagccttctaattttgactatatgatcattaactaaaggcagcaagggattgtaaactaatcttacatagtcaatgtttcatagaatgctttggttacaatcaggttttttaaagactttaaaggtttttttgtatgctataatatatgcttatgatttctaaaaattatgcagtatacacaaagggcataaagtcaaaaagtgtgtctccctctgtgactttattctcataccccagaggtatataatttcttgtattcttgtgtagtctttaagaaatgttatcgtttattttatatatggctctctctctgtatgcctcttcctgttcttattttaaatgttcaagtttgtgacttggttcttgtttaacttggttgtctttccatattgccaccttccagctctaacattaatgtctccaggattccattatatggatgtccctttgggagaacatttgtttatagacttttctactaaaaatattgttataatgataatatccttatgcatatatgaagattactcttgattctgcctgactggaaactttattaataaagtagacattattctattttgaggctcaccagctgtgtaggtatgatcttgtgcttccatttaagaaattcttccatttaaagaagaaaaaaaatctctctaattgactatctgaagatatatgaaaaagcctatgcttttaaattaaactgttaagacagtccattgaaagattgtggaagttcacatctattttgcaccttaattttttcattgtccctactcatgactctaaaaagtgcatggcttggggctatactttgttttgcagtttgttggtatcgtgcctttccttatctacattagcttagactataccttatttttaagaagagaaagtggaaattaactgtggcaaaacctattttggcacaaccacatttgttcattatacaaaattagcttcctatgctttagaaaaaatgtgagttattactctgaaagttgtgattctgattcctcatggtttggagctcagaaatttcttaacatgtctttgctgttagtcaagcacaggatttgttttctgcaaaagtttattttcaatgaagaatacttgtcctaatagctcataaaaagtacctttgcactttaaatcctaggaatagggaacaaggaaacttactgggaagttcaaaagaaagaataacaggaccttctagtcagcagggcatgtttggaaaatgttaatacgccatgatttttgaagaccaattttagttcaggaggtggttttaaatattggatgaaaacttacaggctgttttcaatattcatttctgaaatactttagtatgatagataaatttggttaagttcttgttcattgtgaaatactgttggaagaatttttttcaaaataaagacttctgaatttgtggtaccaaaaaaaaaaaaacaaaagcaagcaacaaaacttgtttcgggcgcccctgggagccctggagaaaagttctacaacaccatttcggggggcccggggggcccatcggttagttgaacgggggccaacgcggttaccaagagaaaacggggcataaacacgtcgcgggtttcccccaattaaaagcccgggcgaccgccgttctgaacaaccagggactccgggccacggcttcaacgggggccagggaccaatataa

SEQ ID NO: 596154 - DNA, 162 bp, Homo sapiens
gccccccccccttttttaaaggggggcccccccccggggggtccggggggggttgccccgccttttttttccccctggccggggggggggggggtgttttttgaattttaggcccccccccccttcgggccccctccccatttacccctttttttgggggga

SEQ ID NO: 596155 - DNA, 3052 bp, Homo sapiens
  misc_feature (116)..(116): n is a, c, g, or t
  misc_feature (212)..(212): n is a, c, g, or t
  misc_feature (289)..(289): n is a, c, g, or t
  misc_feature (567)..(567): n is a, c, g, or t
  misc_feature (594)..(594): n is a, c, g, or t
  misc_feature (610)..(610): n is a, c, g, or t
agcggtacagtttattcttggtttttttttttaactttagaagtaaattaatatggtaactagtggagcgtgctttagattgaagactcatctgaagtatcacagactcctatttngtaaagcattccacctttattgatacagttggtggcctatacacttttaaaatttattttttaaaaggtgatattaaaattggtatttaacctgtngtattcatcctcattagttaagtttttctttttatgttttaaaacttagtgacattaaacttttcacgtggttgttngtgaacagatgaatatataaccacgatgtaatccagtgttgtgctgctgaatgtttaacaaccatctttcatgaaagaaaaaaggccctgtttggtagcatttactaatatttatggtataaatactgtcttcatggtgattttacctgccaatctgatgtcattaaatgcagttggatgaaagagatagccaaccagtggctttcccaagccttggcaaaccagcttcagcacagcaaaggacatacaattccacaactcattaattaaatgtattngtcatttgatgattatatccagtattnggagagcttttatatngttaattcatttagcaagcatttgaacactgtgtttattttgtagagatatactgggcactgaggtatttaatctgcaaagacccaagtatcgtgaaccttggttttaaaaagtccaattatgtgctcttataggggttgcacattcaaggcttacactgaattctgtctgcagttctgtttgtgtgaccagcacagtgttttaaaacgttgcattctgaatccatctttttgaaatggggcatgtactcttaaggtggccactagcttaccattcccaatttttcttagtctcaaacattcacatgtttttcaaggccttggagttggcaaatcctgaatatatagtgaaggtaggaaatagctcttcttatgccacatcttagtctgattttgaagtcagttgtgtaagtttgggctgacagtggtattttccagtgaagactatcgccaagaatgcatatcattctgcttattttattctagtggataaaaattcaacgtatatttaagtgtatttttgacatctgtgcttgtccaacacagggctgtagggactgatgaaaagagaatgttgtgatttgagcttttataaaaaaagataagtgatcctagataaaatattttagatggtgattaaaatgcccatagattaattttttaatcggttctctgaaatcttgagatgttatccaagttacaatttaagcaatgagagtaaaatttgaattctaaattctcagcatcttccctcattcttgagtggagagacagaggaagcaaacgccaaggagccttctaattttgactatatgatcattaactaaaggcagcaagggattgtaaactaatcttacatagtcaatgtttcatagaatgctttggttacaatcaggttttttaaagactttaaaggtttttttgtatgctataatatatgcttatgatttctaaaaattatgcagtatacacaaagggcataaagtcacttgtattcttgtgtagtctttaagaaatgttatcgtttattttatatatggctctctctctgtatgcctcttcctgttcttattttaaatgttcaagtttgtgacttggttcttgtttaacttggttgtctttccatattgccaccttccagctctaacattaatgtctccaggattccattatatggatgtccctttgggagaacatttgtttatagacttttctactaaaaatattgttataatgataatatccttatgcatatatgaagattactcttgattctgcctgactggaaactttattaataaagtagacattattctattttgaggctcaccagctgtgtaggtatgatcttgtgcttccatttaagaaattcttccatttaaagaagaaaaaaaatctctctaattgactatctgaagatatatgaaaaagcctatgcttttaaattaaactgttaagacagtccattgaaagattgtggaagttcacatctattttgcaccttaattttttcattgtccctactcatgactctaaaaagtgcatggcttggggctatactttgttttgcagtttgttggtatcgtgcctttccttatctacattagcttagactataccttatttttaagaagagaaagtggaaattaactgtggcaaaacctattttggcacaaccacatttgttcattatacaaaattagcttcctatgctttagaaaaaatgtgagttattactctgaaagttgtgattctgattcctcatggtttggagctcagaaatttcttaacatgtctttgctgttagtcaagcacaggatttgttttctgcaaaagtttattttcaatgaagaatacttgtcctaatagctcataaaaagtacctttgcactttaaatcctaggaatagggaacaaggaaacttactgggaagttcaaaagaaagaataacaggaccttctagtcagcagggcatgtttggaaaatgttaatacgccatgatttttgaagaccaattttagttcaggaggtggttttaaatattggatgaaaacttacaggctgttttcaatattcatttctgaaatactttagtatgatagataaatttggttaagttcttgttcattgtgaaatactgttggaagaatttttttcaaaataaagacttctgaatttgtggtaccaaaaaaaaaaaaacaaaagcaagcaacaaaacttgtttcgggcgcccctgggagccctggagaaaagttctacaacaccatttcggggggcccggggggcccatcggttagttgaacgggggccaacgcggttaccaagagaaaacggggcataaacacgtcgcgggtttcccccaattaaaagcccgggcgaccgccgttctgaacaaccagggactccgggccacggcttcaacgggggccagggaccaatataa

SEQ ID NO: 596156 - DNA, 2740 bp, Homo sapiens
  misc_feature (116)..(116): n is a, c, g, or t
  misc_feature (212)..(212): n is a, c, g, or t
  misc_feature (289)..(289): n is a, c, g, or t
  misc_feature (567)..(567): n is a, c, g, or t
  misc_feature (594)..(594): n is a, c, g, or t
  misc_feature (610)..(610): n is a, c, g, or t
  misc_feature (2666)..(2666): n is a, c, g, or t
  misc_feature (2679)..(2679): n is a, c, g, or t
  misc_feature (2698)..(2698): n is a, c, g, or t
agcggtacagtttattcttggtttttttttttaactttagaagtaaattaatatggtaactagtggagcgtgctttagattgaagactcatctgaagtatcacagactcctatttngtaaagcattccacctttattgatacagttggtggcctatacacttttaaaatttattttttaaaaggtgatattaaaattggtatttaacctgtngtattcatcctcattagttaagtttttctttttatgttttaaaacttagtgacattaaacttttcacgtggttgttngtgaacagatgaatatataaccacgatgtaatccagtgttgtgctgctgaatgtttaacaaccatctttcatgaaagaaaaaaggccctgtttggtagcatttactaatatttatggtataaatactgtcttcatggtgattttacctgccaatctgatgtcattaaatgcagttggatgaaagagatagccaaccagtggctttcccaagccttggcaaaccagcttcagcacagcaaaggacatacaattccacaactcattaattaaatgtattngtcatttgatgattatatccagtattnggagagcttttatatngttaattcatttagcaagcatttgaacactgtgtttattttgtagagatatactgggcactgaggtatttaatctgcaaagacccaagtatcgtgaaccttggttttaaaaagtccaattatgtgctcttataggggttgcacattcaaggcttacactgaattctgtctgcagttctgtttgtgtgaccagcacagtgttttaaaacgttgcattctgaatccatctttttgaaatggggcatgtactcttaaggtggccactagcttaccattcccaatttttcttagtctcaaacattcacatgtttttcaaggccttggagttggcaaatcctgaatatatagtgaaggtaggaaatagctcttcttatgccacatcttagtctgattttgaagtcagttgtgtaagtttgggctgacagtggtattttccagtgaagactatcgccaagaatgcatatcattctgcttattttattctagtggataaaaattcaacgtatatttaagtgtatttttgacatctgtgcttgtccaacacagggctgtagggactgatgaaaagagaatgttgtgatttgagcttttataaaaaaagataagtgatcctagataaaatattttagatggtgattaaaatgcccatagattaattttttaatcggttctctgaaatcttgagatgttatccaagttacaatttaagcaatgagagtaaaatttgaattctaaattctcagcatcttccctcattcttgagtggagagacagaggaagcaaacgccaaggagccttctaattttgactatatgatcattaactaaaggcagcaagggattgtaaactaatcttacatagtcaatgtttcatagaatgctttggttacaatcaggttttttaaagactttaaaggtttttttgtatgctataatatatgcttatgatttctaaaaattatgcagtatacacaaagggcataaagtcaaaaagtgtgtctccctctgtgactttattctcataccccagaggtatataatttcttgtattcttgtgtagtctttaagaaatgttatcgtttattttatatatggctctctctctgtatgcctcttcctgttcttattttaaatgttcaagtttgtgacttggttcttgtttaacttggttgtctttccatattgccaccttccagctctaacattaatgtctccaggattccattatatggatgtccctttgggagaacatttgtttatagacttttctactaaaaatattgttataatgataatatccttatgcatatatgaagattactcttgattctgcctgactggaaactttattaataaagtagacattattctattttgaggctcaccagctgtgtaggtatgatcttgtgcttccatttaagaaattcttccatttaaagaagaaaaaaaatctctctaattgactatctgaagatatatgaaaaagcctatgcttttaaattaaactgttaagacagtccattgaaagattgtggaagttcacatctattttgcaccttaattttttcattgtccctactcatgactctaaaaagtgcatggcttggggctatactttgttttgcagtttgttggtatcgtgcctttccttatctacattagcttagactataccttatttttaagaagagaaagtggaaattaactgtggcaaaacctattttggcacaaccacatttgttcattatacaaaattagcttcctatgctttagaaaaaatgtgagttattactctgaaagttgtgattctgattcctcatggtttggagctcagaaatttcttaacatgtctttgctgttagtcaagcacaggatttgttttctgcaaaagtttattttcaatgaagaatacttgtcctaatagctcataaaaagtacctttgcactttaaatcctaggaatagggaacaaggaaacttactgggaagttcaaaagaaagaataacaggaccttctagtcagcagggcatgtttggaaatgtatccccagatttgagncattagttagagnggttaatatggtgaactangctgtcatatcatttgaacttagatgtgttgtaagctgctgg

SEQ ID NO: 596157 - DNA, 493 bp, Homo sapiens
taaacaaatccaaatataacatttctcatatcaggttgtaagaagtactttaataacagtaactcattatagacctggtaaacacgaatcttatgtcgtaactgttccctgggtctatcttgacccgaagagaaccatgatggcctaggtagagttgcctactgatcacccaataagagaaggagtcaaatttgaacccaagaaggctgatctccatattatacagtctaacacttcttctgcatccactctctaaataagataatacatgtatgtccttgattagagtctcttttttttcattttgacactttcaaaattgagatgtatcttacggaagctcgagatcatacgaagaagatacttactgtcttgctccctataaagctattattaaatcgcatggtatatcttaaaattattaggtgtccttgaataaaggaactatgataagccatgtgtatattgaacacatatagctccatagtaatag

SEQ ID NO: 596158 - DNA, 335 bp, Homo sapiens
ccccagactccccctttccatccttagtcacctgcggtgttcttcgtcatcattagtcacctgctgtgtcttagtcatccttagtcacctgctctgtaaccatccttcccaccaaaactactcaccccgcctctctggctcatacccctgctctctttaaaatagccagttggaattagcttagactgtgcagtccaaccccagccaataggggaaagacacagcagtagggactagctgcattaggaataagaaccccttcccctcccttgtccagtgtgctcttgccattgctccatccgtgagatgaacccttctgtggatggaaaggggat

SEQ ID NO: 596159 - DNA, 780 bp, Homo sapiens
aagaagagagaggacacaaaatactaatatcaaatgaaagagggaacatcactacagagatgtcccacagacttttaaagggtaataaaaacaaaaaagatgaacaactctggcgcccaaatttgatacctgaaccaattccttgacagtacacaatctcccaaaacacgggacgaaatagcacaatctgaatacgggctatgtctgtaaaaatacagtcaattcaccaattaccttccaaaatagaatccatcgggctcagcatgggttcacttcatgacttctaccaaacatttaaggaacagaaattataccaggctctctataatctcttccagcacacctaaccaacacagcagggacatccttcctaactcactcatgaggtcagtgtcatccaccccaaatgccaaaaaccaaacagacactttcccacgccaacaaacggaaactaccgaacagacacctcttcatgacaccatagacagtggcaagaattccccaacaacaattcattgacgcacaattcaatattcccaccaagtgtcctacaccaaggaactctaatcttacccactgaccagagtggggaattgggtccccagtgttacacagggcgtggtcccaaccttcacccgaacatcacatcacatcgttagtgtccactgctaccacaatcacccacgcggccgccacacccctgtggcctacaaatacatcgagcacaagcttggaccaaatccaacctgatcccgcactcccattaccaaccaacactag

SEQ ID NO: 596160 - DNA, 532 bp, Homo sapiens
gtgatatttttgcaagccaggccagcgctgcatggcctggcccagctcctcgtggagaaaacttccggcccatctccatccaccggggcatggcccaggaggagcgcctgtcacgctatcaccagttcaaggatttccaacggcggattctggtggccaccaatctgtttggccgggggatggacatcgagcgagtcaacatcgtctttaattacgacatgcctgaggactcggacccctacctgcaccgggtgggccgggcgggttgctttggccccaaaggcctaaccatcccttttgtgtttgacgagaatgatgccaaaatcctcaatgacgtccagggccggttttaagttaatgtggcagaacttccaaaggaaattgacatttccccatacatcgagcagagccggtaacccccccgtgccaaaaccgcccccccggaaccgcccgcatgcaggtttccctcccctttccaggggcccctgtttaaaagctaaagattgtattagaataaacttgtttttatgga

SEQ ID NO: 596161 - DNA, 467 bp, Homo sapiens
cagatttagggctcttcttaattgatcatgttcagaaagggactcatttggtcccactttgtaacatgggaagagtagaagagaaaattaaatgtggaaatcataaatgcttttctaacagggttatgctattctgtaacactaaatgtctgtcttttctcttaaaagattaagttttattaattttgtcatacatttctctatttgaatatttcttacccattttatgttccaaattggtttttggtccaaaccatttatcaagattttacctgcctttataattttgaaaaaggggtttaaaaatttccccctgcggtttttttaaaggttaagcttcatttctatgagcaaagagctcatttagcaatgtagttatttcagtatttatttctattatggaatccctggggttcagaatgtaactttgtacatgagatatatataaatatgtatatggacatgaa

SEQ ID NO: 596162 - DNA, 657 bp, Homo sapiens
ctagatctgcagcttgccacatcagcttaaaatctgtcatcccagtgcacggacaggaaaacaatatgtataacagaccacttcctgagtagaagagtttctttgtgaaaaggtcaaggattaagactaaaagttattgttaccatatgtattcatctgtaggatcttgtagaacatgagaagggctttattttcaaaaattgaatcttcaaaataagtgtataaaatgcaactgttgatttccgtcaagatggctcacaaatttctatcccaaatcgttttctgaagatgaagagtttagttttaaaactgcgactgccaacgaagttcacttgcatatataaagcgattattttgtactcttgtgaggtgaatataatttatattacaagtggaagaagcttcgtttaatactaagtatttgttcaggtcttcaccgaagtatcaaagtaataacacaagatgaatgtgtcgttatgtcaaaatagtccagatgactcctcacagtctgttatcttattataaagaactatttgtagtaactatcagaatctacatttctaaaagagaaatgtatttttgctatgccaattaacatcttttagagttgatgagaatcaagtatggcaccagtagggcatactcttactgatacct

SEQ ID NO: 596163 - DNA, 506 bp, Homo sapiens
catacagtgtaatgtcatagcctgatatcacattcataagaatatatatacagaggggtcatctagaggggtcaaggaagaatgtgcctaatcaattattggctccagcgaagagagatgggagcatttcccctcttgccattatcctccattggccgccttactccatagactgttaatcccttcacacttctatgatgtgtatgcatcgtgaagggaagatttgcatgtatatgtggggttgcagaacgaaagaaaagacccagtgaggtgaagtgctatgaagtgaggtaagatgagatactgaagttatacctttgtgaagtttgttgccacagcaatgtctgggtgaaaaggtatgcctacagcatgtcaggtgaggctcaatatattcccaatgcaacatttatttgaagtcaaaaaagaaacaacaaataaagggaagcaaaaagaatgcaatagcaaaaagagcggaaaataatgacataaaaacatgcaacagaaag

SEQ ID NO: 596164 - DNA, 442 bp, Homo sapiens
gacttgaggatcccgactagtccaaacatacagaggctgaagtgggaggattgttgaacccaggaggaaggttgcagtgagcatgatcatgccactgcactccagcctgagtgacagagcgagacgctatctcaaacgcccgcaaaaaacagatacaggtggatgattggatgggtcagtgatggatgaatggttggatgggtggaaggatggatacagggtgggtggattgttggatagatggtgggataaatattcgggtggtgtatggttggatggatggtaggatggtggatggtggataattggttggatggatagtaggatggatggatgttggatggatggattgaacagtgtggtggtagatgggtagataaatggttggatggacaggaaggatggtgagtggtaggatggatggattgatggatggaatgga

SEQ ID NO: 596165 - DNA, 707 bp, Homo sapiens
gccgggcgcggtggcgcgtgcctgtagtcccagctactcgggaggctgaggctcaagggatcctcccgcctcagcctcctgataagctggaaccacaggcgtgcaccaccgtgtccggctgatttgttgtgttttttttttatttggtagagacaaggtctcactaggttgcccagacagggtctcactatgttgcccatcctgagctcaagcaaccctccgacctcagcttcccagagtgctggggttctaggcgtgaactaccgcacccagcctgctatcaccttctaaaaatcctctcaaccaggtggaacaatgtggttaagaagagactttaattcgtgagaaacttctcagggtaaaaggcaggcatttgccatcagaaccacttttgacaaatggcacgaaacaactgtgtgtgtgtatatgtgcgtgtattccaattgtggtgcatacatgggaaccttctcatttgcctgagagatgcagtgcttattttaatagcagctgtcaaaattgagaggggattttcaatgaaatgcatttaaacatatttcaatcggaacttcagagcatggagtgtctctctgtcacccaggctggagtgcaagtggtgcagacctctgctcacttgaacccctgcctccccagtgtacaggtgattctccttcctcagcttctgagtggttgagaaccacaaggcaccc

SEQ ID NO: 596166 - DNA, 807 bp, Homo sapiens
  misc_feature (265)..(265): n is a, c, g, or t
tggtgtaagggccccaactgctgcaaacaaagtgtggtgatacccccaaaccatagggtaaaagttgggattagggggctatttcctgctagggggtgaacgcggatgattaaaaagattcctgctacaaatatattgtgcttaagtggagctatgggcgtgaaacggggttgtggcgccatactatggctagagtgggatctcagggttggatgacctaaatggggcgtgattgtgccttgtatgctagctagagagagaggcnctacgatagttgcagccagaggcggcatgtgccccagtcgcgcccgaaagaggagagcacaggagttcgcatgaatgaaagtgtccgcttggtgttcagcctgtaggaaatatcagaaacgtcgtgaggggtgcacccgtttggtcgcccccgagttatgccacgtatgagattgcttgctcttgtagcgcctattggtgctatttgtgccgttgccgcaattggctatattggagcagcgggtatcctcctggaggcgcggagtgctacacctcgagattctgttgaccctgtgaatatgttgcctcccctcttggctctcagttttccctcctgctggactaaatacacggcagcatttgcgccccgaaatgccggatccccccgtagtaccttgtccccttgttgcaatcactaaacatgccaaaacccgtgtggtgggccctcagcccatgttggtgcgtggagatccaaatgggtactcgcgggaaattccttccgcttggcctcctgtgccccttgatgtggtgtggattagaccc

SEQ ID NO: 596167 - DNA, 122 bp, Homo sapiens
gcggattgaggaaaccgcagatagtttttctctttgaagatagagattatacactacttaaaaatatagtcatagggactaagatattgcttagcgtaagtttttacgcaattttaatagct

SEQ ID NO: 596168 - DNA, 116 bp, Homo sapiens
ttgaacaggcttgtgacttcttacttcccccatcatcactactgtggtctcaggatcatcacctttcaaataggattattgcagtgacctacccattctcgtgcttgagctccttg

SEQ ID NO: 596169 - DNA, 264 bp, Homo sapiens
acctctcgcggcctgccggttagtcctgacactctgatgctggcaaccacttgtttatgccgggtcaggccggctaccgggataactctgcgggttacaactacgatcctgaagctgctaagaagggtctggacgaggccggctggaagaagcagggtggccaccgcgtcaaggatggcaagactctgaccattaattacgctaagttgactggcgtccccacctccgagaacgagggtgcgctgttcaagcaggacatgtcgt

SEQ ID NO: 596170 - DNA, 803 bp, Homo sapiens
gagcgaacaacaggtactcacaagaatggtcgtcagtggcgtgatgtgtccgcgccccagtactcatgtgacagagagaagaaagttctggaggtcaaactggtgggagcttgacaagtggtggatattgatgccggtgacttcagtcctagtggcattatctgcgagcgtttcagagaaggttactacggtgtagtaaaacaagtacatcattggtgaatgaacggggaggcatctcaggggatgtaccatgggtgtgggcattgcatacagtgactcttaaagcgtgactcctttgccctacaagcatctcaagcacgagtcggtccgcaaaagtaccagtgtagagagggacacactctgaaccgcaacctgagaataacgaacctgggtcccgagcctcctccgcggagggaagcatactcctccaagtcgtagctgcagatcctttgtcattatcgctaaatagggaaatgaagctccaagagtaaagagatgaggttgctagatataaaagggggaaaagggcgtgaaaattcaataatatgtcggagtggtcgggtgtgtagagccaagcaataaatgatctttgaagacagaacaaatttgtttgtggggagtgggcggggacaagagggggtggccaggaaggctctattggggaaacaaacgaggcagggtcacagcggaggagaaatatctggagggggtagacatgagactgttgggggtggcctatagagatacaaatggtgctcgtggtgaagatatggcggttgtatacagagaacagggggaataag

SEQ ID NO: 596171 - DNA, 127 bp, Homo sapiens
caggagaccctagagcacagaaactacctgattgtaccccaggactcaccgtggacacaggagggataaccaggatatcacatgaattacaatagacaaggggcagtgtactaatatcctggatgct

SEQ ID NO: 596172 - DNA, 178 bp, Homo sapiens
  misc_feature (77)..(77): n is a, c, g, or t
  misc_feature (82)..(83): n is a, c, g, or t
  misc_feature (122)..(123): n is a, c, g, or t
gcactgttacaacctttaaagaaggagctgtctgcactgaaacttgaacctttttccccaaatctaatggatatagnaaggnnattatatttatattaaataaatgtttgactacctttgannataactttatctcatcttgacctgttcctttgaaaagatataatactgatatgtg

SEQ ID NO: 596173 - DNA, 1078 bp, Homo sapiens
gtaaatcttcaaagcggcggaagactcgatgggcgttactatttatagacgtacaagcgtgtgtccccgatgccgtcgctgggctcctgtacgctgcgccgtctcaatggatgagtatccttcagacggggattacccgtgctaagatcattccctaattagatatccagacatgcggaggttcaccgccaggatcggctgcgtagtaagttgccagcacgtcagcccgcgtgagtggggcgtaatgtcgtgtcgcgtgatgcgcattgttggtctgccgtttgattgccgcggcggtggtgggcacgggacgccacggccatccactgaatcgcagtgctctgttgtccgagtggggcctgcctgtgatctcgctcttcggtcacgtccgactcagcagaccggtgcggtgctggagtagtcgtgtgggtgcggggttccgggcatcactgtaggctgccccttttatgttgacctgggaaggaggagtgctctcgtatggagaaaacgtgcacttctcgttgtgcttagcgggcatgcgtgagtgctcggtcgctgtgcggtgtgaggcggtatggatacctgcttcgtggggatctgcgatgtagcgcactcacggctgctcccctgtcacggtgggtgctggacgtgccattcgggagcgttaccccggagggctgtgcttgtgggctcagagttcgtgccgtttgcgggcttgtggctgagccaatgggggtgctgagcctgcgaatgatagatcacctcccgccgactccctgaggtctgatggccgtagcgtcctacattcgcagtaggctcgggacgacggcatgagtcggtgctcccggtggaccatgagcgtaacgatgtggttgagggcaaatgccaggtcggacgggggttggctcagcaggcgtgcccccgaagaaacaccgcgggtgggaaccgcctcttcgagaacgctggcaactcctatcgatgaccggggggggacataaacaggtgctggacggcacaaccagtccgtcagacggtagacagggaaacaccacgggtgggttcagcccctccctccgag

SEQ ID NO: 596174 - DNA, 176 bp, Homo sapiens
ttctcatgagctcgctagtaagtcaactgagttattcgtgttatacgctactactctagtatgcgatttgaggtaacagttttgtcttgtattaatactagaaccaaatatattgaccaataagcagtctagatttaaattatcttcttgggttggtctgaggttgctgatggatt

SEQ ID NO: 596175 - DNA, 1195 bp, Homo sapiens
  misc_feature (170)..(170): n is a, c, g, or t
  misc_feature (173)..(174): n is a, c, g, or t
  misc_feature (187)..(188): n is a, c, g, or t
  misc_feature (203)..(203): n is a, c, g, or t
  misc_feature (220)..(220): n is a, c, g, or t
  misc_feature (252)..(252): n is a, c, g, or t
ggaggatctactacgacactggggaaggcttactgactgtgtggtaatgagggattctgtcatgccacagatcaagaggatttggttttgtaactttttcatccatggctgatgtttgatgctgccatggttgtaagcatctccttcatttgttgggagagtagttgagncannacgtgctgtagcnngagaggaatctgganaaccaggtgctcatgtnactgtgaagaagctgtttgttggcggaattanagaagatactgaggaacatcaccttagagattactttgaggaatatggaaaaattgataccattgagataattactgataggcagtctggaaagaaaagaggctttggctttgttacttttgatgaccatgatcctgtggactaaaatcgtattgcagaaataccataccatcaatggtcataactgcacgaagcttcacgaacagcgcttcgtctagaccacacgcacaatgcaggaagttcacgagttctaccgaagtggaacgacgcacggccggacctggactactgcgcacaccacggctggtggcgctacccgaagcgtgcgctcatgaccaactatggacggacgcaaacttcatgcgcaacctggcaacttaccactgcatccttgcgtacaactcatacaccagccaaacccttctaaacctaacggctcccaatcgcaccgacgtgaaacacccttgagtttagcgtagccaacggcaactcattgtcacgagcgaaccacactaactgctactgcgcagagcagaaaccctaatgcgtcccccacgcagcacaaccatgccatccacacatataggtagcagccaaaatacaatgacagaacagaagccccgtccttatcctgagaccctacatctaccctaatttccgtccaacggtcgacaattcacccaccgtcatcataaccttcactagactcaaccaaaatcgcagcaaaccccctcaacaacagcgatacaacactaaacacccactccaatcttacagccttacaatccccaaacattcataacaacacttaaaacacaaaaacctccttctaatactaccaactccactattacaacctacaaattcatctacccatcgcaatcactgaccacaccaacataatcagctaacacaacaacaatctcccttccaacacccatat

SEQ ID NO: 596176 - DNA, 498 bp, Homo sapiens
  misc_feature (129)..(129): n is a, c, g, or t
agggaggggggaaggtgaattatggtacttttaatgatctattcaggcagtagagctcttaaggaaaaaaaaaacccagtttctctcaagcagtgtatttaggggttgttctcattggtgctgctgcancacctgtcttatgtagtacttgagaccatctgcaggagacatgatttagtgtgtctgtaattcaatcttcgctgtgtgtggtagaagcagtagtcacttttgtaagccagtctcttcatgcctaaaagacactaccagtcacctttgattcgcgacttttaatttatgattatacttagcctcctcctccttttttttttttcccaagtggatttgaatttggttttttcccccccaattaaaattattgttagtttccagtttgaaggtaaacttccagtgtggagtgattttggtgtctatttataaacttgtaaccaaaattcagacttctggtacggttcttggcttggaaatgggtccctgtgg

SEQ ID NO: 596177 - DNA, 142 bp, Homo sapiens
acttaagactgggatgaaggtgtgaaaacagatgtgaggatatgaagacgatgtgttaaggtgagaatgaggcctgggcatggtggctcacgcctgtaatcccatgtcactgtgtggaggccaaggtcagattgatcatctg

SEQ ID NO: 596178 - DNA, 142 bp, Homo sapiens
acccgaggaccaagcataagtgcggtacttgacgtcgatggagacatgagcagtaaccgcagctcccttacccttgatgagaggctgtacgacgagtttattcggcttggtggccttgccgatggataccgcgagagcacta

SEQ ID NO: 596179 - DNA, 455 bp, Homo sapiens
tgtccctatgccgtcatttccttttcagactagccatacgcctttccgataggagtagttgccgttggaacttgcggatataatctgccataaaaggcttacgagttctttatctccgctcatcacatcattgagccagtcatctacgttccaacccttaatattaggtgcttaggcattagcgttgtacttggtcgcaatcgttgaggtaaagacatacttaggacagaatggctctacattttgcattttcttattaaaaataccgttagcaactgggataagatgaggttctgcggtttgtttcttaacctctgctaaggtttcaagtttaaatataacttctttagcacgtgcttgactataagacggctctagccagtaaatgagccgatgaaagaaattttcgtttgtttcgtatattcctaattcaggtcgacgcggccgcgaattta

SEQ ID NO: 596180 - DNA, 220 bp, Homo sapiens
atctagaggatccttggaggcaggacactggtcccacctccgctcattgacagacactggccccgcctctgttcattgacactgtccctgcctctgctcgttgacagacactaaccccgcctctgctcattgacagacactaactccgcctctgctcattgacagacgctggccccgcctctgctcattgacagacactggtcccgcctccgctcattga

SEQ ID NO: 596181 - DNA, 379 bp, Homo sapiens
agatccccctttccatcctgagcttggcctatacccaggaatgagcaaagatagctttgaggttagaaccaagacagagtcagccatgtcaaacttcttttaccgtcacaattttgccatggcagtttcacaaacatatgcaaatggtcataccagccttattatatcatacaatggactaatgctcagcaataaaaaggaatgaactattgatacaagaaacatgaatgaatctcaagaataattatgctgagtgaaggtagctagacaaaaaaagagtattgtatgattccatttatataaaactctagaatatgtaaacaaatctacagtgacaaaaagatcactggtttcctgacagggatggaaagggggatct

SEQ ID NO: 596182 - DNA, 222 bp, Homo sapiens
aggtgataatcattcataagggtataacataccactggatacattttcaaaaaacaaggtaccagttttatttaaaaagtcaatattatacactatgccagaaaatgaattctgagcaactttaaaatatgatgaataatcttatacgtaaagctttaaaagttaagttttcggcgtgggagcagtgtctcatgccgggtaatcccattcgtaggggtggct

SEQ ID NO: 596183 - DNA, 1780 bp, Homo sapiens
  misc_feature (28)..(28): n is a, c, g, or t
  misc_feature (1158)..(1158): n is a, c, g, or t
ctacgatgggtcgagcggttgggcagcngctactgtgtgtaggtcgttgactggtctttggtcgcccgtctcactcaatggtctgcgtgcttgttcctgctagccattcttctctgtctgagctcctctcggctagttgagttggcttccttgttagcgactctgttagatgccccggctggcggtggtggtctctcgccgccatctccgccctcgagaggtcgctctcctacacttgttgctcctgtcgccgtacctttggttggtcgcacaccaaccgaagttgttccgggtgtgctgatcttgcccccagcgtgtctatggagcttttttatgtccccgccgtggagaatgttgtcactgagcggcgcctctacctctgtggtttctgtttgtcagcgtcacttatgtgtgttatcctgctgttgatgggtgtggtccccgatcatcgacactgtggtggatgcaccctctttgtggatgggaacgagggtgatgcctctcttgttgggggcgagcaccttgtgggggggggttatcctccagtaggactcgacttaccaacgtgggctgcgacgtgttccctcagcgagatcttgttgtctggtgctgcggactctcccccatggttgttttgtggtgtgttcgtcccggtgccgaactgttccccgaggttgccgcccacagtgtgtgcccaagggggttttgccaccccggggggcccccccccgccgtgtggtacacttgtctgagcaccgggagaggtttgcccctaagacgaattgtcttggtccccacacgggtgttgcggcgttgccccaagagtaaacccaatttccgacaggggcacacccccgcgcctacaccatgtggtcataggcgccagggagtccacacattggcgtgtgactatagaaggccgggtccccctgttggtgtgcgattgtttcacgaaaacgtttttccttttctcggggcggcccatacattcacacgatgttgatatgttgcccacgttgtgatgcgtctacgatagggtgtacccccagaccttgattagacgccgaggcatagacagtgttatgtaccatatgtacttggggcgcccccaactcctgtgcccgaagatatacatttggggacacccaccccaatggngcccgcaggggtgtcttggcccgacaacatggccccctgtgttctggaccctgtgagtgacaccacataccgctgcgcaactgtgagaccatcaccacgccattcggtgttggggcccgcggcgttctgataggcacccccccaggcctccccagttcttggagagcaatggcctcgtagcccccccaaaatgattcccaggagcctctgaggtatacccatgaaagagacgaccaccaccaggaacttgtagcatccacctgtcgcccgaggtgaagagacaggggtgttggcgttctcgctttgacccggccgaagggtctcaacccttctgtggccccaccaccaccaccccactacaggcagcaaagaagttgtattccctccatatctacttccgcccattccattccatactgtcccgtcccatacccattccagacaagccatttcatttacagacattttactccaggccatgatggccccataacttgtaatccccgcttattgggaagacgtatgagaatgggcgcgatggccttgaggcccgagagtttgaggccgacccacccgggccaccccgtgagacccccttctccaaacaaaaatactagataaa

SEQ ID NO: 596184 - DNA, 1001 bp, Homo sapiens
ggcctctcctgatcttgtgttcttgctctcttccccggtacaggtatgactttcagcgcacgtcaggactccaacatatcatcactaccgcacgctacctcgggttcctctgagcgctctgtccaggcgtgtcagaatacgtgcgtcccggtcgggtcaacgaagcgtccgcccagcgtgctatgccctgcgcatgggtggcgtctgcgtccccaggaatcatcgcgctggttcctcggctgcggacctagcgttcaagaggggcaggccatgtggggttcgggcggaggcacgtggcccaacacggagaattatgcgggtggtgttggctggaaatggcgcaggtatcacagatagaggatcagatggagcaccatgcgacgaactgtaacagaacgatctggccatcttacctggttccaggagtgaaggggagcctgtggagcaccgggagaagaccgggcaccgcagtggcatgagctgaacacatcacgggccacccatgttagagcagcaaggagagcggaaccccgcaggagtacaagaaggactcggagaatctatgtattgcaaagcatctcatacgagcgcaccctgcaagggttccgatgatcctttcgcaggatcaggtgctgtgaccacatcgtcacgccaatctgttcgtgcagcatttggcgaaatgtgctcgtgttagctcggtgggaaagagtgttccaacacgctcaaaggtgatgagcaatgaaacgtaggcgatgacgcccatccctgctgaggagaatgcatgatcctatggaccttggctgggggttggatagcatgaccagcaattattaaatgaagtgtccgtctgtgaaaacgaaggatcgcaggttctccaggaaggagctgctcttcatgtcagtgacgaaacatcaagggagaagttgtaggtctttaagccgggattggcagctctggattgccgcggggttcatcccccaatgggagaatcccattccggc

SEQ ID NO: 596185 - DNA, 239 bp, Homo sapiens
  misc_feature (64)..(64): n is a, c, g, or t
  misc_feature (160)..(160): n is a, c, g, or t
  misc_feature (234)..(234): n is a, c, g, or t
atttatgaaggataaagatctatcatgaacagcagaatgtataagctagcatttactagcatgnctctgatgcttttgtcattctgttaatcgtcatttctgcccctctcatggaattttatacttgctagggtaagagtttgtagactctttcagcagnacagattttaataaccaatttatttgttttattttaaaaattatttttgaataaccatttaatataaatttatntgaac

SEQ ID NO: 596186 - DNA, 110 bp, Homo sapiens
gacttctagctcggtaccccgaacaatcacgacatcgcttttaaccgccgcaggggtgaaggctgaaaatttccacagtcaagttgaaattcttgttaaagttctggacg

SEQ ID NO: 596187 - DNA, 426 bp, Homo sapiens
gctcaggatttggggtagagttggtgtaaaagcacagtgtcagtaggatttggtttggggctggaagaaagctccatcaagatggagttaagaccaggcacagtgcttatgcctttaatcccagcacattgggagaacagggtggacagatcatctgagctcaggagctcgagaccagcctggccaacgtggtgaaaccctgtctctataaaacatacaaaaatttccagcctggcaaacatggcgaaaccccgtctctactaaaaatacaaaaaagttaggcgggtgccgtggctcatgcctataatcccagtttcttgggaggctgaggtgggagatttgcttgaacctgggaggcggaggttgcagcgagccaagattgtgccactgcactctagcctgggcaacagagcaagactctgtctg

SEQ ID NO: 596188 - DNA, 97 bp, Homo sapiens
  misc_feature (9)..(9): n is a, c, g, or t
  misc_feature (61)..(61): n is a, c, g, or t
  misc_feature (89)..(89): n is a, c, g, or t
aaacaaaanacaaaacatacaacatagaaacaaagaagtataaataagcggtacaaaaaanagggttacaatacatcattagggctgtnaaacaaaa

SEQ ID NO: 596189 - DNA, 610 bp, Homo sapiens
  misc_feature (24)..(24): n is a, c, g, or t
cgagttaccgtgacattcaggtgntggccctatggttatgcgcttgtcggttgtgaggcgctgattcgtgacttcaaacagtatgacaacggcctgctgggcattcgcgtcgaaggtggccgtcgtttccgcgtgcgtgaggccggcgtgcagaaagaccagttgctggtggccgatgtgcaatggctgcaagaattgccggaccagccgctgggcgaagaggacgccgacttgctggcgttgcttgaggccttggccgaacacccgatggtggcctcgctggacatgggcggccaggccgaaggccagcaagccctgagcaatcagttggcctatctgcttccatttaacgaggccgacaagatcgacttgctgcaactggacgacccaggacagcgcctggatgcgatccaactgttgctcgatgaattgcagggtgaactgttcacctgatgttcggatttgtctggcaggactttcagactttggtcggtcgcctccactgcgccgcctgcactattttccgatcgcacaacaatgatcggagataaccatgattcggctgacccaatcacttaatgtcacgggtacgagccgaatcgtatcatgc

SEQ ID NO: 596190 - DNA, 148 bp, Homo sapiens
caggatcttccctcaatgctggacaggacaacttcaggcacaccacagatgatacccagagcagaacctcaaataagaatccctgccctttggtacagtggaatcacgcctgtaattccagcactttggaaggccagggaggatagtt

SEQ ID NO: 596191 - DNA, 205 bp, Homo sapiens
gacagtgacatgtgcaggacacagtcgatgaagcactgagcagaagctggaggcacaacgaaccagaaactcacagcaaggaaggaactaaaaacataacccacactgaccaggaggcactgggaaacctagaaaaggctgtgagctaaggaaggagggtcttcctttggcatgagatggggatgaagtaaagagagggactgga

SEQ ID NO: 596192 - DNA, 323 bp, Homo sapiens
  misc_feature (10)..(10): n is a, c, g, or t
  misc_feature (48)..(48): n is a, c, g, or t
  misc_feature (51)..(51): n is a, c, g, or t
  misc_feature (81)..(81): n is a, c, g, or t
  misc_feature (86)..(86): n is a, c, g, or t
  misc_feature (96)..(100): n is a, c, g, or t
  misc_feature (125)..(125): n is a, c, g, or t
  misc_feature (129)..(129): n is a, c, g, or t
  misc_feature (143)..(144): n is a, c, g, or t
  misc_feature (147)..(147): n is a, c, g, or t
  misc_feature (152)..(152): n is a, c, g, or t
  misc_feature (160)..(160): n is a, c, g, or t
  misc_feature (167)..(167): n is a, c, g, or t
  misc_feature (209)..(209): n is a, c, g, or t
  misc_feature (213)..(213): n is a, c, g, or t
tctgtgcaanctgcgaggatggcttgggccgaagggttgctctgcccnccncgctagctgtgagctgagcaaagccctggnctcanaggaccccannnnnctgtggctcatctgcgtctgcacanacantcaaaaggatcgtnngtnttgtnttaaaganaggtganattggcttggttcttcatgagcacatttgatatagctctttntctngttttccttgcccatttcgttttggggaagaaatctgtactgtattgggattgtaaagaacatctctgcactcagacagtttacagaaataaatgttttttttgtttttc

SEQ ID NO: 596193 - DNA, 894 bp, Homo sapiens
ttcgcccccccgtgggtatcgcgtgtctggttccccctcgcccgggttgttggctccttgccgcccgctcggtgcctgtttgctcgcgcgggttctgcccctgtatttggggtccgcccccgccgctctcgatgccaactcgagggctctgttgtcgtgctggcgacaaaagctttcggtccccccttgtcgtggtccaaacagctttgcgaggacgcggcttcgttgtcttcttgaagcgcctcggttggtccgccaccgctgtgttgctatcacggtccctggcggcacgcccccgctgttcgtgcgagcttttcccggcgcgttagcccccctggggctcgcccttctccgcttgtggcagtcttaagccgccaccccgagtaccgggcaggtgtccacccacagcccccacggggccaccaaagggcgtgttgcgcagccgtgtccacagggcatgccccctacaggtgggtacgcccaccaaagctccacaagaggcgcgcgtacacgtctgtaatttattgctccgcctgagtacggactcccccccccctgtgtctataccacgtcgggtcgtgagaagacgccgtctgtccataagccattctttttcccacaatggcgcgccccattacaccttgatattacattacaatgtgtggcaacataggactccacgcatcgttgtcaaccactctcccaacagaaagatgacatctatgcgtagccccctcctgtggtttttctttctattgtgctgcaccgctaatgtaactgatcttcttaatcaaaatcccccactatttttatatgaacctacccgtgccccacaatgttatccaccacgaagtttatcagccgccccctaaaaaaataacaacccacaaaaca

SEQ ID NO: 596194 - DNA, 384 bp, Homo sapiens
atttgtggagtccctagagttttgacaatcagagaatcagaagaggataaaattgaagaaactaaagaagtatgactgaataatttaacctaatagagaaaattatcattactgaaaaacagaaatattttcctaagtggcgtgaaagtaatacagtgaagcataatttttactacaaaaccaaaacaagtaggagtatactttacagctacctaagtggtgcaaagtcggggacagattttcaaagcattaaatgggagcttatccacctgatctctattagtgctaatgagaaccacaccactcatggctttgaacattcctcctaggtgtttccctatgaatatttatgcaatcagaagtaaaatgctaagtatcaccaaa

SEQ ID NO: 596195 - DNA, 121 bp, Homo sapiens
accattatgtactcactctgtcccccatactggagtgcagtggtgaatcacagctcacagcagctcgatctccccggtcaggaatcttccacctcagcctccgagtagctggaccaccatg

SEQ ID NO: 596196 - DNA, 656 bp, Homo sapiens
  misc_feature (249)..(249): n is a, c, g, or t
  misc_feature (264)..(265): n is a, c, g, or t
  misc_feature (268)..(268): n is a, c, g, or t
  misc_feature (271)..(271): n is a, c, g, or t
  misc_feature (274)..(274): n is a, c, g, or t
  misc_feature (285)..(285): n is a, c, g, or t
  misc_feature (297)..(297): n is a, c, g, or t
  misc_feature (299)..(300): n is a, c, g, or t
  misc_feature (305)..(306): n is a, c, g, or t
  misc_feature (311)..(311): n is a, c, g, or t
  misc_feature (318)..(319): n is a, c, g, or t
  misc_feature (335)..(335): n is a, c, g, or t
  misc_feature (338)..(338): n is a, c, g, or t
  misc_feature (366)..(366): n is a, c, g, or t
  misc_feature (369)..(369): n is a, c, g, or t
  misc_feature (381)..(381): n is a, c, g, or t
  misc_feature (398)..(398): n is a, c, g, or t
  misc_feature (400)..(400): n is a, c, g, or t
  misc_feature (421)..(421): n is a, c, g, or t
  misc_feature (434)..(434): n is a, c, g, or t
  misc_feature (447)..(447): n is a, c, g, or t
  misc_feature (454)..(454): n is a, c, g, or t
  misc_feature (456)..(456): n is a, c, g, or t
  misc_feature (463)..(463): n is a, c, g, or t
  misc_feature (469)..(469): n is a, c, g, or t
gtggggtcccctcaagcctcaggcttgttaatctgttgggtaactctgagggctttctatcagccgttccaagctcgggcaggtcaagctcggtgcgcaaattgtcgtacagaattcggcacgagctagtctcgagtatacttttccaacagtaattacattacaaggcattgtattagcaaccaggcgaatgagctgcttatccctctataacagtatagagcaggtcatcaggcccaggatggaganaggttatcaaaggtnntgnggngtnctttgctgcangtgcttagggcntnnaagannaggtngtggcannagaggttggcaggaantgntgttagtcaaaacaccaaaatcctgggnganagcccctatacnttccttctaactccacntnaggtgggagcattccaggagncagagaatgtgancaggatgcagcantgtcatntnaaccccnggcttngttcagtgctacttcactagccagccctccactcttctagcctaatagtgattaggtatttcaagcactcatactcagaccatgcgatgtctgtggagggcatctggtaatttaatgtggccagcacccctagacagtgagcgatagccacacagacagagagagagatagagagagagagagagag

SEQ ID NO: 596197 - DNA, 315 bp, Homo sapiens
gggacaggggctgctgagcagcctcccgcctctcccggctgttgggggccccactgagtatgtcgggaggagagcgacatggacaaaggccatcaagggaaacttcccattttgggaggaattacagttatcaattggggcttcagaaggctgggaagcctggaattgagtggtcccagttgagagtctgtgtaaaggaaatctactcaaggaccggtttgcgctgaaaattcttctagatcggcccaaagctagatatgaggtccgtctccacatgatgtgtccaaacaccaaacatggtccagatatggagtg

SEQ ID NO: 596198 - DNA, 101 bp, Homo sapiens
  misc_feature (26)..(26): n is a, c, g, or t
aataaccataactgcaaaaacccaancaaaaaaaaagggggaacaaaaaaccccaaacccccaaaaaaaccagaaaaaaccacaaaaaaaaacccctcctt

SEQ ID NO: 596199 - DNA, 411 bp, Homo sapiens
cttacttgtaacctgcgaaattgacctgtccgtgtagaggcgtccatgacacatcaagatgagaagaccctatggagctttaatctgttagtgcgaacagttcctatcacacccacaggtgctaaactaccacacctgcattataaattgccgatgaggcgacctcggtgctgaacctaacctacgagcagtacatgctaagacttcatccatcaaagcgaactactatactcaattgatccaataacttgaccaacggaacaagttaccctatgtataacatcgcattcctattctagagtccatataagcaatagggattactacctaaaggattgatcaggacatcccgatggtgcattcgatattaaagggttagtttgacaacgattgtactacgtgatctgtgtt

SEQ ID NO: 596200 - DNA, 220 bp, Homo sapiens
aataagttagaactaagattctatcattggacacaccagctatcaccaggcacggaaggttagtcagctctaactataaatctttccactcttttgctccagtcgccgggtgtgctcttttaggctgtacttcggtcgctcgtctgattacgggggtcttagcttaggctctccttgcaaagttctttctagttaatacattatgcagcagatgaggtgg

SEQ ID NO: 596201 - DNA, 1245 bp, Homo sapiens
cataaaatgtatgctttaaatgaatatggtttattatatgcaaaccatatttcaatgaaattgattttaaaaatcactgcatcagatagcatagacttgaaatccatttctaaagtatacaacaaccctttctccataagatttttcttcatgataattttatctgttgttcatcaaaattactccaaacacagtgtcaggcatgtaggtaccttttttttctttttttttttttgaggaaaggggatgtgccatcccgtgttgggccccaaacgcggggatgtaaatggggcacgatacctcaagcctcatgtgggaccaaccaaacacggggcgcaaatttcgggtagatttaacgacacaactgggggtgttccaccaattcttgtgggccaggggcgtggtctgagaacctcgtgtagaccctacataattatatctcgtggccgtgcatgtggggccttccacaaaagggggcgggagaaattaaccggcggtgtgagccacacacaacaccacagccacacgcgtgtgtttttgttccctctttaaaacaagaattaaagggcaacggctaaatttctcaccaatctcttcctatctccacagactgttcttcacaccccttctgtactggcggcgacagggtagtttggtcacagagccaagcgcagaatttatcccactctttacatatgtgggtcaccaggctcccattatgaaacacctcccataaaatattattcacccacgtggtcggcaaaaatcatctcaagaaagggtttccccagaggggccttccactaatttaaaaaattactcgcctcttatgtgggttggaaaaagacggctttagacaattttacaattttggtgggttgggcggcccccaatgtgtgaatccctttttttttatactcataccaaagcttcttttaaagagggggcagaaaatttttttcaccataaagggggccacaagaatttataagagggggggggaacaattttttttcgacagaaaaattctctggggggagtttaaaacagaggaagcgtggctgggatataccaggttcggggaataatctcggggggagagaaatctttttatatctcacaccctaaaattatctttcaagattattaaaccaaagggggtgttgagagaatccgggcggcatcaaacatttctgccggtggaagaaattttttcttcacaaaaataaaataaacgacaaacta

SEQ ID NO: 596202 - DNA, 889 bp, Homo sapiens
  misc_feature (1)..(1): n is a, c, g, or t
  misc_feature (32)..(32): n is a, c, g, or t
ncaggagagggcatggggggactgggtggcgncggtgcgtttcggtgcagtgtggcgtgtgtgtgtccacgcgtggtgcgggctgtcgcggcggtgtgccttgccagcgcccgtctcgtgccgccgatttcgcggccttggctgtcggcggggccgtgctcggtattgggggagcggccaccttggtggcgccacctacgcgttatgccgcgctggaatgccgggttcgccttgtctcgggcttttcctcggcccctttttcccgtatctccccctgcgcggaccacagggtaagggccggcgcgcaaatcgtttctttgggggttacaacccgcggggggtttcttgtgcgcgcaaattatttggccgctgaatcacaaagcggtgtcttctttaacccattcccgggatattggggatcatttctcccaagcaggaggccccccgcaacgggtgttcccgcggtgcacaactgtgccgtgatctctgctcgagttgcccaccccaaacttcgtcggtgggcatagctgtgctagcccccccctcacactttttgcgccgcggaacattcctttgcccgagcagcatctatggggggcttcttggagcacctcctagcaccctctgtgcgcacgccgaacaaattgttgcctcaatcctttccgcgcacagtttgcgcctctccccttgatgtttcccccccctattcacatggtcttactaggagttcccattatagccgccgccgtcggtcccccccccgcgaggtgagtacgctccttctggcggtagacccacaggtgaacgggttcgcgtactccctcggacgcctgtttgcctcccattcgccctgggttttacaaaaaaggcccccccgcccaccaaaaca

SEQ ID NO: 596203 - DNA, 395 bp, Homo sapiens
  misc_feature (22)..(22): n is a, c, g, or t
  misc_feature (57)..(57): n is a, c, g, or t
  misc_feature (70)..(70): n is a, c, g, or t
gcccccgggttaagaggttaangggaaaaacccggataaatggggcccctccatccngaattaccaaccnccctatgccatccaagaatgccctccccagggtgaaaaaaatagccgtatagaatggaagaaaatattgccaaatccatataatcctgataaaagtttaatgtcccagagtatgtaaagagtgccctaaaactcaataacaggaagacaatcctaatttttaaaatgagcgaaggatttcattagacatttctccaaagaagatatataaatggcaaataaatacatgaaaagatccttaacatcattagtcaatagagaaatgcaaatcgaaacctcaaggagagattacttcacacctactgggatggcaattaaaaaaaaaa

SEQ ID NO: 596204 - DNA, 803 bp, Homo sapiens
gttatgcccggttctcacgtcgcgcgtatcagtagcttggcctagactgatgcccacggatacctggacacaaattcatgctcgtccagactgtctgccgtggcctagatatcaactggcgtagagacttgtattcggtagccttgttccctgttgtgctgtccccgtacgcgcgtcgactgagaaggaggtaaggcgtcaatggcatggcggaaatctctgtagagggtccacaagtgccgggcgtgcacgtgtcgtgacgtgaactacacgttgtgacatccgttgcttcggcatgtgtatcatggtgatgtgatgacgctccatcgagcactatgatgtgattcactcaggcgaaatgtgacaggatctaaaccatttgcacaaataataagtaactatgcgctgcccattgtacatcgagtatgcctggatcgacactttgcaaaggtggctattgatcataaatactcccatgcctcttacggtgatccggtaatcggatcaacgcactttgcgcataatttgaaatctttcatgacgcgagcggacgacaatctttttaccttccgctagcgaatatgttgaccgcgtaacgggggaaaacggtcataccaggtcctcacttgaagtaccccccacgtaaatgtgggctttgggccaaaggtagtctaattctctgtgggccggcctaatcacttttcaggagtgggtccaatttcatatgcaattggcaccctgcacttggtctcctttcacccacggaaataaacacaaggcccgactttccatacacttagatt

SEQ ID NO: 596205 - DNA, 144 bp, Homo sapiens
gtcacattctggttatctgtgtacagcgtgcaaagcggagcccagacatcccgaagtcttgcttggtatgcccacatcacatgggtcctctgggggtcaggtagcctttccaggcttaggacactgcggtacccaacagacttc

SEQ ID NO: 596206 - DNA, 369 bp, Homo sapiens
tgtcggagtgcaatggctgtcaggaagcgtgtctggggaggcctcaggaaactgacaatcacggcagaaggcgaaggggaagcaggcacgtctggccatgttggagcaggagagacagagagagtgaagtgggagggctgcacgcttttaaacaaccagatcccacaagcgctcactcaatatcacgagaacagcaagggggaagtcggcccccatgagccaatcacctcccaccaggtccctcccacaacactgggaattacaatttgacatgagatttgggtgtggatacagagctgaaccatgtcaagggtagttcaaccgctgagattgattgattgattgattgactgagatggagtcctgctc

SEQ ID NO: 596207 - DNA, 291 bp, Homo sapiens
atcccgctcggtgacctgcccctcatccacagtagcccttcattttctccattatgtatctctggccccttgaactcttagacacaataaccctgctacctgaccagtcatctgaactgttccgttcgacagcagttaatgtgtatcatttcctccccttatgatattctgcaaagtcgtacagtagagatttagcacatgaaggacattgctacggcctagctctctcccaccccttctttccctggcccggtgatctgttgagctctagggtgagtctcatggacaacc

SEQ ID NO: 596208 - DNA, 191 bp, Homo sapiens
ggatccggttgcagtgagccgagatcacgccagtcacctccagcctgggcagcagagcgaagactccagcctcaacacccccgacaaaaaaaagagacactatcccagttgtcaagatgagttaataatgagactgcagtctagaatttattcaattttactcataattctaggcagagggcaatggtggt

SEQ ID NO: 596209 - DNA, 216 bp, Homo sapiens
agacgaccctagaggatcctcccaccgccagtttgtactcagccgcaaaaatgctctccgagtctctaaaaatagtgctcgctgtgattacaggcgtgagccaccgcgcccggcaattggtgtatttttagtagagacgtgaaatgtttctttggtaaactgtattctagatgaatatgtttcattctgtttgctggtagtacaacctgccggagg

SEQ ID NO: 596210 - DNA, 367 bp, Homo sapiens
atcgatgccaccataatagcctggagggttggttttcactggcaattagggctacttatgggaggcagttggatagacacggcagtgtcctcccgggagcaacttggagtaacactcatcctaggcggtcttatctaatcttcacttcaaccggcaagggggttataaacgtgggtttacagctgaggatcccaaggttccatatcataatcctgggtcaagtccagaccattggtgaccgaaagcttaaatccagcggccaggatacaaaagccggttctcttatcctctcggccctaccataattccatcagggctgggttcatagtacttgggattggtggcatcgataaacaccgggtaccga

SEQ ID NO: 596211 - DNA, 229 bp, Homo sapiens
  misc_feature (68)..(68): n is a, c, g, or t
  misc_feature (90)..(90): n is a, c, g, or t
  misc_feature (168)..(168): n is a, c, g, or t
  misc_feature (194)..(194): n is a, c, g, or t
  misc_feature (219)..(219): n is a, c, g, or t
acccgcctgctgttgtactgtagactgtccatgtatcggatttctacaaagaaagaacttcttttatnagaaagaaaagaggaggactcncatacaactctgcatgaaacaccaacaactgggaatcactaccgagcaatcaccagccttgaaaggcagcaggtgccnaggtgaagctggcctgttttctaaanggaaaatgattgccacatcggcaanagcgatcgca

SEQ ID NO: 596212 - DNA, 276 bp, Homo sapiens
tagacgtgatgcgagctcgagctggaccttttacagctttactgagatgtaatcatagactatacagttcacccatttcaagtgtataattcagtagctttttagtatattcacagacttgctgtcctcccccaaccacttgtattccctcaggtcccctagctctcaaagctagacaagccaagctggaaacgtgtcctactaattctcccagttctctttccaactttaatggtttcaagtcttctcatttccatcactccttcacccaagcta

SEQ ID NO: 596213 - DNA, 159 bp, Homo sapiens
atgcgcaataaggctgtatcaatggctgatctatgtaatcacagaggccagtatgtacagacaacagtgggaggtttatatattcttggtctcttcctcctagggtaaattcttgatgatctccgtccttcttggcctggaggcgctcttcacggcgct

SEQ ID NO: 596214 - DNA, 198 bp, Homo sapiens
gcatgtcacgaattataaataaactactgatttatttgttgcctgaaacattgttgcgaagacaaattatgtgttgagaaaaaaattaggcacagttaaataatgctacgcttaaagagaattttaaatacccttatgaataattctgatgaaatatatcccataatgttttttattcaatcatattaatttagcagg

SEQ ID NO: 596215 - DNA, 451 bp, Homo sapiens
  misc_feature (243)..(243): n is a, c, g, or t
gggcgtggtggcgcttgcctgtagtcccatctacccgagaggccggatcgcttgagcctggtaggcggaggttgcagcgagccgtgatcgtgccactgcactccaacttgatgacagggccagagccttcctctaaaaaaaaaaaaaaaaaaaaaaaaaaaaatttggtgggcccgtcctcgggccctcggaaaaggttctttctcttagaaccctttccgttggggcccgcgggccccaggntgttatgtggacctgggcccatagcgtgttccctaaggagaatccggggtcctggcacctggtggctgggtttctcccccaattaaaaaacgcccggggggcaccggaggcgtttctgaacaattcccaatggggttctcggaaggccatcaaggggtctccatttcacgggggtccagggagctcgattatcattttacccgctgtg

SEQ ID NO: 596216 - DNA, 824 bp, Homo sapiens
ggagctgcgagcgcgctccctgtgaggtgggcaagcggcgaaatggcgccctccggagtcttgcagttcccctgcagtcctggtgctgttgctttgtgggtgctccctggacgcactgggctgggggagcaaagtgtgggggtcaatcaggggactgagaacgtggagagaacttgcttggaaggagacttgatgatagaattttatgcccttgtgtgttgctgtgttttgttcaaaatcttcaacgggaagtgggaaagtttggctgaatggggagaagatcttggaggttaaatattgcggaaaagtagatgtcacagagcagccatggacttgagtgcaccggtttatcataacgtgctcttccttaatatttatcagtaagtatttgaaagactctaaattatggagaaggatgccttataggtgtactcagaaggtagtagggcctcctgggtgtggatcatgctggaagaagcttgagttgtaaaagaatggtgaattaaggcgctaatcaaggggtccaagggaccttaagaagggcctttcattacaactttttattcacgttgatacaaacgaacgtttgcgaccggagttcttcggcagcccgggttcccataccagtggttgggcgacccaaggcgttacttggttcctggagtgacgctagtatggtcccggcacttttttcacgctattctactatgtggacttcccggcatgtgccaataaacttacttttcttggaagcccttgggatttggccgtggggggaccactattccgggttccgctacgcaacttcttgttcccggcatggc

SEQ ID NO: 596217 - DNA, 393 bp, Homo sapiens
catcacgatccccgggtggggagtcggaatgtctaggtcctgagcgaaagcatgagttgagggacaagaactatattgtgcttcccatcaaattgccactacgttaccatgtaatggactagcctcagaaaaaattagataaactcaaatgtgaccatcaacgatgatctacgttgggtgccactgaatacaccatagttcctgatcaatgcgagattacgtgtatcaagttgaaaccacccagataccgagaatgctctcttggagtttgagaatactggatcttagcttgatgcagaccttgagatttaggtctatggagtgtcttcatattctatgacttgacagctaattacttttctggcaaacggatcactgattccgtattcccta

SEQ ID NO: 596218 - DNA, 101 bp, Homo sapiens
  misc_feature (66)..(66): n is a, c, g, or t
gtgacttagaggatccggcactatgtgtggtggaggccgtgtggtgctggctgagggttctgctgntgtgtgccaccccattaaagtgcagttccctccgg

SEQ ID NO: 596219 - DNA, 193 bp, Homo sapiens
gccttgctactcggatgttccacattaaaatttgtgctcaaatcttggggagctcactcaaatcccacttttttttacagcagaaagctaccccatgattaatcaaatttcttcgggggaaggtcaccaccacctcttgctccaaatcctccacggtcacgatcccggtcccgggaagtataaagcagttgag

SEQ ID NO: 596220 - DNA, 754 bp, Homo sapiens
gccgaataggaacagctccggtctacagctcccagcgtgagcgacgcagaagacgggtgatttctgcatttccatctgagaccaggtgaccttttctatttcatagtaaacaaacttcatgagtactgtgccggagtctagggataagaatgcactacaaatatcaaagccaaagggttgatgagctggtggcatgctatggaaattatacagaccctagtatggatgtcagagaaacagaaaccgagtcatcacgcctgaacacatgggcagctaagaaatggagtctcactctgtcacccaggctgagtgcaatggcatgatctcggctcatgcaacctctacctccatggttcaagcaattcccctgctcagctctcaagtagctggggatacaggggagcactatttaatctctgtggtaatttaattagtgagcctcagattccaaaatctgtgtccgtgtgtggatatccagtgggtggctgattcagctttagtcagacatgtcttttgacgctgagtacacgaagcttattcgtggagtataccaatagctgctacaggccctttttatattgagatcacttccgtggctttccagcaagggacactcccggatgtgggactccaccaaggtgtgctattacgcgtggaaaatggtccctttctacaaaagctggccccccatattaatttggtgcgccgattgtggaacacaggggggggggcccttcacaatcacaaaccaggg

SEQ ID NO: 596221 - DNA, 289 bp, Homo sapiens
  misc_feature (1)..(1): n is a, c, g, or t
  misc_feature (31)..(31): n is a, c, g, or t
  misc_feature (39)..(39): n is a, c, g, or t
  misc_feature (41)..(41): n is a, c, g, or t
  misc_feature (43)..(43): n is a, c, g, or t
  misc_feature (50)..(50): n is a, c, g, or t
ntttgagggtcatatccttcttgtgagcagnacttcacnananatcccanaagcattgttatcacaggtgatgacagctctaagcctgttattgctccaaaagacatccagtgggacaagatgtggaggtggaagagagtgatgttgattatctaactctgtgtaggcctagactaatgtgctaatttgtgtgtttgtgtcctagtttttttctaaaaacaaaaacgaaaaagtttaaaaaataaagaattcaataaatttaaaataaaacaaagaatataaattaaat

SEQ ID NO: 596222 - DNA, 180 bp, Homo sapiens
gtcggacgagtttattcgactcaggagaacgtggttactagcacagagagttctcccagtaggttaatagtggggggtaaagcgatggttagcagcggcttgctagcaagtcatcacaaaagctattcagtgggagtagagttttgacgtccttagagacgaggattatgcatggcagct

SEQ ID NO: 596223 - DNA, 719 bp, Homo sapiens
  misc_feature (229)..(229): n is a, c, g, or t
ggcccactcggtctggtgcccactttacgggttgtgggcccccctggccctcgggtctccacccctgggtttgggttgttatacttcctctgggggaatatatttctcttggggaggggccccccacggcgtgtgactaccaccagtcagtatccgttttgggtcagtcttgtgtcaaccacccagccatctgtttggtgggcccacaagaattgttttcttataatgngtgtctcttttttgcgcacagaactcttaatatagtgcacctctcgaccaccggagtgtatatatactttatactccacggctcggttataagagagtgagagcgccacaattgttctgtctcaacggtgtgttttgtccacccacagagaaattctcacacagagtctcacacacgcccacactctgtagagagggccacgccacactacccacccacgtttaaagagagaccctctgctaagggtataaggaattccctgagaacaccacgggggcgcgctacactcttctctctctctcgtgtgtgcccacaagcccacgttagaagagacacttccactggaaagaaattaattttaccgcttttataaagtcgtcagattttcccttatgtattgagttttgccacttaggatgtttttgagtcccactgggtcacttttgagattgtttaatctttgttatttaaattccttgttaaacccgga

SEQ ID NO: 596224 - DNA, 321 bp, Homo sapiens
  misc_feature (225)..(225): n is a, c, g, or t
ggcacggagggacatctgagtcattgtgtcgttccccaagcacccagaggatgagttgagactcggatgtccatttatggagaatgagagtttatagcattggggttggcagtttacaaagggatgctggctcataaaaactctgatcattgtacaactataaatgtaataaaattcactgagtaataaaaaaaactctctgaacatgcacattagtcccgagtngaatgatccattcatctgtccgtccattcattcaacagatagttactgagcctctgtatgaggtccagcactagggctccatggttatgaaataat

SEQ ID NO: 596225 - DNA, 387 bp, Homo sapiens
  misc_feature (116)..(116): n is a, c, g, or t
  misc_feature (122)..(122): n is a, c, g, or t
tgtttcagtcccttctgggggtagaacttgctttgatcacaatggtaactattttttaatttattttgtttctctattaaaaaaatttttttatctttttttttctgagacagggnactcanctctgttgcccaggctggagctatggtgtgattatggctcactgtagcctcaacctcccaggctcaagtaatcctcccacctcagcctcctgagtagctgggaccacaggcacgtgccaccatgcctgattaattttttgtttgtttgttttttgagacagagtctcgctctgtctcccaggctggagtgcagtggcgtgatctccactcactgcaagctctgcctcccgggttcacgccattctcctgcctcagccgtcgacgc

SEQ ID NO: 596226 - DNA, 275 bp, Homo sapiens
ttgagagaggatatgattgcgactgtgagtgcgtctgtatgtttgagtttgctagtgcggcatagtaatgaggatgtaatgtcctgtgggctgcttatgagaatgactgcgccggtgaagcttcagtggggtttggatgagaatggctgtaactacgagggctatgtggctgattgaagagtatgcaatgagctgattttatgtgtcttgtttgtcatatgtgcatgatgtgagcttgttatacattatgcctcataggtgatatgtacacatgg

SEQ ID NO: 596227 - DNA, 734 bp, Homo sapiens
ggagcccgtgtctgtcgggtgccgagccaactttcctgcgtccatgcagaccccgtgcgggcagacggctgcactgcctcccctgggtccgaggcgccagtgggcccgtagtcctccagcgacccgtctgctcgctgcatgctgctgttgcgtcgctcccggtggcggagcccgggggtccggggaccccgacgaccctgggcagcctcaggatgctggggtcccgcgcaggctcctgcagcaggcgggcgcgcggtgcttcacttcttcaacttccggtccggtcgcccagggcgctacgagtgctggccgaggtgcaggagggccgcgcgtggattaatccaaaacgagggatgtacagttcacgtggtcttcaccacagagcgctaaacccagagtctttacttcaggaaggtgagggacgtttggggaaaatgttctgctcgagtgtttccaagaaatcagaaacccagaccaacatcaatgtaacttgtacacggctcatcgagaacaagaagaagacaacacagaggattacctgctttacaagcaaatgaacgcactgaaaaaccccttggaaatagtcagcatacctgataatcatggactctattgatccctctcttgagatcatctgggattggcttccttggaagctcttacgtgatgtggggaaatgacaaccccaggtgtcacactactactttggaacagtccactagtgtgaggcagtg

SEQ ID NO: 596228 - DNA, 260 bp, Homo sapiens
  misc_feature (17)..(17): n is a, c, g, or t
  misc_feature (19)..(19): n is a, c, g, or t
  misc_feature (30)..(30): n is a, c, g, or t
  misc_feature (34)..(34): n is a, c, g, or t
  misc_feature (255)..(255): n is a, c, g, or t
attaggtttagcagtantnatttgtaaggntatnctgagattactggcagatattgaagagagattcaaggtgtaataaaattatttgtaggttaaatattgggaaatctgggttctttttccaactgtgctaatagttattgggggaaattcagccagatattgggcggaattcacccccaatatttcacgtaggttgttttcattttccctaaatgttggctggtctgagaaataaagggatagagtacagangtggt

SEQ ID NO: 596229 - DNA, 308 bp, Homo sapiens
cgaagacgtagccatgtctctgggcactttcagatcatactcgccgtccacacgtgggatcacattcagctttttgctcgatggccgaaaattgctggtcttgggcagagaactgaaggcatcagtaatctttcctgcagccttgtcggtcaccagcttggtcactttactctccacggctgtgagggtgtcccccgggggcctgctccgttaagaggccagctcttcgcagattggagaaagataacaaggtgcccaaggccataagctctgcagatacttgtgttttcaagagatcggtaatcctt

SEQ ID NO: 596230 - DNA, 879 bp, Homo sapiens
  misc_feature (59)..(59): n is a, c, g, or t
  misc_feature (107)..(107): n is a, c, g, or t
  misc_feature (164)..(164): n is a, c, g, or t
  misc_feature (366)..(366): n is a, c, g, or t
  misc_feature (387)..(387): n is a, c, g, or t
  misc_feature (512)..(512): n is a, c, g, or t
  misc_feature (609)..(611): n is a, c, g, or t
  misc_feature (613)..(613): n is a, c, g, or t
  misc_feature (627)..(627): n is a, c, g, or t
  misc_feature (641)..(641): n is a, c, g, or t
  misc_feature (643)..(643): n is a, c, g, or t
  misc_feature (647)..(647): n is a, c, g, or t
  misc_feature (666)..(666): n is a, c, g, or t
  misc_feature (670)..(670): n is a, c, g, or t
  misc_feature (710)..(710): n is a, c, g, or t
  misc_feature (722)..(722): n is a, c, g, or t
  misc_feature (755)..(755): n is a, c, g, or t
  misc_feature (801)..(801): n is a, c, g, or t
  misc_feature (806)..(806): n is a, c, g, or t
  misc_feature (809)..(809): n is a, c, g, or t
  misc_feature (830)..(830): n is a, c, g, or t
ggaacttcgttgcttgcttgcctgtgcgcgcgtgcggttcatggcctcaaacgattatncccaacaagcaacccaaagctatggggcctaccccacccagcccgggnagggctattcccagcagagcagtcagccctacgggcagcagagttacagtggttatngccagtccacggacacttcaggctatggccagagctgctattcttcttatggccagagccaagaacagctatggaactcagtcaactccccagggatatggctcgactggcggctatggcagttgccagagctcccaaatcagtcttacgggctgcagtcctcctaatcctggctatggccagctgccagctcccagcagcncctcgggaagtttcggttgcngttctcagagcagcagctatgggcagccccagagtgggagctacagccagctgcctagctttggtggacagcagcaaagctatggtcagctgctaagctatttatccccctcagggctttggtcngctgaacctgttcaacagctgctgtggtggtggtggtggtggtggaggtggaggttactttggccaagatctttcctccatgagttgtggtgagtannnantagtggcggttatngaaataaagaccanantggnggaggtggcagcggtggcnatgnacagcaggaccgtggaggccgcggcaggggtggcagtagnggcggcggcggnggcggcggtggtggttacaaccgcagcagtggnggatataaacccagaggtcgtggaggtggccgtggaggcagaggtngcatnggnggaagtaaccgtggtggcttnaataaatttggtggccctcgggaccaaggatcacgtcatgactccgaac

SEQ ID NO: 596231 - DNA, 351 bp, Homo sapiens
gagagtcttcatcaccctaaattattatgggaccattaactaggccacctttaacagagcacccctttgaaagttttataggtctgaaatatatgtagattttgtaaagggttttaatttttttttttttgatggggtgctgtgtaaatcttgtattaataaatgtaatgaaggtattgccagaaaaaaatatatacaacttttataaaggattgtgtactgactgaatacttttaaaagaaaatatatttggaaacctgttctgctatgaccagagataacatatcttttaactatgctatgggtttaaaggtaaagcttcctaatgcataataaattttagggttgatg

SEQ ID NO: 596232 - DNA, 133 bp, Homo sapiens
tgaggaccccctgcgcataggatgcatacttattgaatactatcttgggtttaccgtttttccaacacacgatagtaaggagcatctagcagtgattgaaaggattcttaggcctctaccaaaacatatgata

SEQ ID NO: 596233 - DNA, 94 bp, Homo sapiens
caagctgcctccacctctacctacaatggcccctccagtgttggctccttcattggcaccaccagtgatgccccctgccctccctgctacagag

SEQ ID NO: 596234 - DNA, 491 bp, Homo sapiens
cgcgccaaaacccctcccacggggtggtgttttttttttttgccaaaaattgcgcttttcctttggcggggaaaaaaacccccttttttaaaaaaatgccccaaacgccccccgggttcctttttaaaaaatggcgcccccccttaaattaaaaaaaaaaagaggggggtccccttttttttttaaccccaaattttggctttgaaaaaaagggggggttaaaaattttttttaaaaagtgttccccccgggaatttttggaaaaattcccaaaaaaaaaggttttaatattccccccggttttttttttttaaccccctgggaaaaaaaaaatgggggtttcttttttggagggcgggccctttttttccccttttggaaatgttgcccaggcccccccgggtgggggatttaaaatccttttgccccccccgaattggaaaaaatttgttttttaaaaattttttaatgggcggggggcaaaaccccca

SEQ ID NO: 596235 - DNA, 1838 bp, Homo sapiens
  misc_feature (1557)..(1557): n is a, c, g, or t
agttgtcgtgcgggtctagagcaacgggtggggtttgtgtatatcgccctttagtggggacggaacacatacgtggtgggggccacattcggcgataggtgtatgtgataaggtcgccgcctgagagatgtttgttggtccgtgctcgcggtacgccgtctgggtgggaggaacgtccacccgttggcagtgagttagatagtatggggcggactctcactatgtgagtgaggagttaataggaagtcgggtttggcgctagctgaggtgcagtcgtgggcgcggcagcacaaaaggagggggcgcacggcggtcgcgcaagactagttgtcgtctcacagggggaggaggggggagagtggtgtgtgtgtgcgccgcgtgggatgtgggggcaagatctgttgttactcaatgaaaggcgttggtgtgtagcgttgtgggaaagagtatggggggggttgtgtgctgttgagagacgtgcgggggggaagtcattgtgtgcgtccgtgtgaataagagagtgtggggcggttataagtgtctcgttgggggaaagtttttgagtggtggtgtgtgtcgtgacgagtgttaagcacagcagcccgaagtctcgacggggggcacacggtgagaagatgcccgcgtggtaggttgcgtgttgaggccgccggctctgcacgggagaggcacccacgaggagtggggtgtctctcgtggggcgggtgaatagagaagggggggcgccggcggcgggggtattttttcgggggaaaccttgggatgttgggcctgtgggagagtgtgcgacaagaagaagagagggttgggttgggggggtgtttggcgcagccaggggagggcgcccaccggggttaaagagaggcggcgttgtgaggaggtggccgtgtgagtagaaaaatgggggggggccgccaccacattatgaagagaggggtgtcttggtggtgtgggccccacatgtgggcccccacaggggcgagagagggggtctgtttttgtcggggggtcacgcaaaaacctccctctatagagagagagggcgctttggcgtctgtgtgtccggagagggggccccgctgtcgataatttggggggggtgtggctcgtgttcgcggggtttaactctctacgagtgtgagaagagagggttgtgggggccgcaccacaagaggcctgctcgcagagaaggtgtgtgtgggggcgtgtctgtgggggggagaaacactctccgcgagagggaacacagagagaggagcgggttgagaaattccccagtgtgagagagtgtgtgtgggtgaagagagtgtccctctgtgaggtgtgagtctctcacacaccgcgggagataccccgctgtgggtacacattatgttacaggcggttgtgacacacgtgggcgtgtgtggccgcccccacacatgtgttggcgtcgcagacacacagagaggtgtgtgtctgtgtggccacagtcaaagagagatgtgatagagatctcagagctgtgcgccacctggggagacaccccacacagtgggnggatagagagtagtgtgccctttaagagtagcccctgtcctgtacccacagtgagaccattggtggaacaccccaagatattagaattcttgccccacaccaccccctatttccaggcacacacaaagaggtgggaaacccagaaccccctgcccatagcgccccagaccccgtctccccccagcattaccgcggtcttcccttggccgctgtattttggaatcttggtgatattgctttcctataagaccctttaattaaattttggaccaagacccata

SEQ ID NO: 596236 - DNA, 168 bp, Homo sapiens
tggacaatggctatgggcactgtctcttagacaaaccagaggctccattgcatctgcctggtgactttccctggcacaggactatgatgctgacctgccagtgccagcgtgaccttcgtgtgcccgatctcactgccatatgtccacacgctgtgcgccgacccgtgt

SEQ ID NO: 596237 - DNA, 513 bp, Homo sapiens
gcttgcctgggcatattggcaggaatatgagaatctggaccacagaaggctggaagctcagggagaggagaagcggctgtgggttttattcagacccgtgtcagtaggtgtagataccagtctccattcatttccattcactaacattaaacactagtccacaagcgggttttcagtaaccccacactccgaacagggcatttttcctcctacaattttttgtctcagatataatgccatggttacatcttgacagatgttactggtttaaatcctgcttcaacactgctctgatttcccaggagcacctgcaaaggaatctttgggcaagtgcccaaattcctgggcccagagagaccaggctgtgcacagtgttggagtctgacaagggacagtatctgggaagatcaagtctagactcaccccaggccactctagttttaggcaccttgaccgtgttgtgtctccattcccgatactgcagctggacaaaaggaagagaggctgatctat

SEQ ID NO: 596238 - DNA, 83 bp, Homo sapiens
ctagaagattcagcaaagtacttttgtgctctggcttcgccttcttccagtactggggggatacgtacaccgataaactcact

SEQ ID NO: 596239 - DNA, 437 bp, Homo sapiens
  misc_feature (257)..(257): n is a, c, g, or t
cagtactcattgttttcccacttgcgcttggtgtagccagcaatgaaggtggctgctatatattgcatagagcccaagtccaaggtcaggtaatcactgccatcgtagccatactgccaatgccctgtggtcctgttgtaccgcatctcacagccgtatgtgaactggagggtgtgagggcctagaagccccggggacaggcatgtcagtgaccccacagatgtatttcccaggcctctccatcaatggtccctgcntgccctaagcactgctccccgattccttgggttctccttagaggacggcttgttcacactctagataacctaaggctggcttttccacttgatacctttggaagtgctgttgaagctctgacaggggaactagaactcggggcttttgctgttgtcacaggctcttcaacctctgtggct

SEQ ID NO: 596240 - DNA, 277 bp, Homo sapiens
agtatgaggaaattcctaattaagccattgctttgtgactgatgtataatacatgccctagttctccctctactgagaacaactttacctaaaattacaatgtctttctctgacactataacattaacagtactccgggctaccctacacgcttgaatttaggaggttggaatcgaagacttagcctttcacatagaaaatcgtcctggtctaagcggggagagtaggtgacatgcataatacatctttcgtggttcattacgactgtcactctgaa

SEQ ID NO: 596241 - DNA, 159 bp, Homo sapiens
ggacccactgctcatcatagcggctgccatcgggatgtctgtcaacatcgaggtcgtaaaccctattgttgatatggaccctagaataggattgcgctgttatccctagggtaacttgtcccgttggtcaagttattggatcaattgagtatagtagtt

SEQ ID NO: 596242 - DNA, 163 bp, Homo sapiens
ctagaggatccagttccttctctaattcagcaaactactttttatatgaaagtaaaaagtaacagggtcaccaggacagaatttggtggttcctcccccagtacacaccacggatgttggcctcattcttctgggctttggaaaatgggcttttgtggtccat

SEQ ID NO: 596243 - DNA, 162 bp, Homo sapiens
tccataccgcgtctatacgcgcgaagaatgggcgcgtctgcgcgacgatacgccgatgacgctggagccgggtgagttcgaccggctgcgttcgctgcacgaccgcctcgatctcaagggagtcgaggacatctatctgccgctgtcgcgcctgctctccgt

SEQ ID NO: 596244 - DNA, 305 bp, Homo sapiens
ttttttctgtccatatcgctgtccgaatggaaagactcattctgcatttctgtatccactcccttattctccctgtcgctgtcatcatctgactctggctactgtttgtgtctgaacgcatccacagtttctgattcactggcaggccccttctgaggcccctcactctcagagtcactgactcggggtttgggttgctcctcattttccgaatcactggcctggtaccttggggtatcctcactttccgaatcaatgattcggggttcgagaagctcttcattttctgagtcactgacctggtg

SEQ ID NO: 596245 - DNA, 369 bp, Homo sapiens
tgacccttcagcagacaacagcacagtagacgacaaccccgacttcgacaactctacattgtggcacagggattaagaggagaagttctttgattaagaagaaactgagggatgcgccagcccagagctgggatggggactgatggccgccacccttcccaccgcctgccccatccccatccccaacaaggcagctgattccaggcctgctcagtgaccctttctctagggggacatcagggcagtgccccacaacccacacacaccaccatctcactgggtctagtctcatctcagacaacccccacccccactgtttctggggttccctttctcatctctcccaccctgtctcctgcctctgtcttt

SEQ ID NO: 596246 - DNA, 133 bp, Homo sapiens
ctgggtcgagtgaaggagctggcatatactatatattgatctaggtggttgttacaccagtgtatacacatatataaattcaccagagctgtacacttaaagatctgtgtacttcaccgtattgtacaaaaaa

SEQ ID NO: 596247 - DNA, 245 bp, Homo sapiens
ttgcgcgcttgccccttggatgttccatatgagtgagcgacttactttagtcaatgaaatgtgagcaaagtgtggtgtatgactcttttggctggaagcgtttaagcactagcactcaattctccctactccctttctctgccacgatgaacactgaagtctcatgctgagatagtggcaacataaaatggatggcctagatggtcagataccacgtattagcacagctagagacacagcagact

SEQ ID NO: 596248 - DNA, 869 bp, Homo sapiens
  misc_feature (1)..(1): n is a, c, g, or t
  misc_feature (96)..(96): n is a, c, g, or t
  misc_feature (101)..(101): n is a, c, g, or t
  misc_feature (106)..(106): n is a, c, g, or t
  misc_feature (111)..(111): n is a, c, g, or t
  misc_feature (118)..(118): n is a, c, g, or t
  misc_feature (155)..(155): n is a, c, g, or t
  misc_feature (159)..(159): n is a, c, g, or t
  misc_feature (165)..(165): n is a, c, g, or t
  misc_feature (168)..(168): n is a, c, g, or t
  misc_feature (171)..(171): n is a, c, g, or t
  misc_feature (175)..(176): n is a, c, g, or t
  misc_feature (179)..(179): n is a, c, g, or t
  misc_feature (181)..(187): n is a, c, g, or t
  misc_feature (197)..(197): n is a, c, g, or t
  misc_feature (205)..(205): n is a, c, g, or t
  misc_feature (207)..(207): n is a, c, g, or t
  misc_feature (217)..(217): n is a, c, g, or t
  misc_feature (222)..(222): n is a, c, g, or t
  misc_feature (362)..(363): n is a, c, g, or t
  misc_feature (365)..(365): n is a, c, g, or t
  misc_feature (370)..(370): n is a, c, g, or t
  misc_feature (469)..(469): n is a, c, g, or t
  misc_feature (523)..(523): n is a, c, g, or t
  misc_feature (525)..(525): n is a, c, g, or t
  misc_feature (531)..(531): n is a, c, g, or t
  misc_feature (533)..(533): n is a, c, g, or t
  misc_feature (539)..(539): n is a, c, g, or t
  misc_feature (561)..(561): n is a, c, g, or t
  misc_feature (563)..(563): n is a, c, g, or t
  misc_feature (569)..(569): n is a, c, g, or t
  misc_feature (573)..(573): n is a, c, g, or t
  misc_feature (606)..(606): n is a, c, g, or t
  misc_feature (777)..(777): n is a, c, g, or t
ncacttggtggatatttaaacacagtaggaagaaataatgaccagagaggaagaatgtgccagtatttctccagagctattccacagagtattttnacagnggganatcangagcggngtgaccctgggtaagacctcttacctccctgactctngagngccccncanaanggannggncnnnnnnngagaggcagnggcacgcngnggcccaggcnggagngcaggggcacgagcggggcgcacggcaaccgcggccggccaggggcaagggaggcgcaggccacagccgcccgaggagggggaggacaggggcaggccaccaggcccagcgaaaggggggaggaggaggagagacagggnngngccangggggccaggcggggcgcaaacgccggaccgcaagggacccgccggccgcagccgcccaaagggcggggaggacaggcaggagccacgacaccgggccncagaagggagggcggaccccaagagggagagacgccgaaaaggggaggtgaaangncaaagngngggacnggcgggaacagaagagagaggnangaccgngggnccaagaggccagcaattataagagcacaagttnttgagaggaaggaaagaacgacaaggagaggaaggaacccagcaagggcaagagaggggcggagggcagaagcaggaaaaggggaagaaagggcgagcgggcaagggaaaaaaaagccgagaagaagaagaaggggggcgcccaggcggggcaccagaggccaggccgggnagcccagcacggggggaggccaaagcagaaggagcacgggaggccaggggggcaagaccagcccgggcaacacagcgagagcccagcgccac

SEQ ID NO: 596249 - DNA, 162 bp, Homo sapiens
tggcagtggcatgcacatggcttatgatgtgtctccgagtggaaaagactggttggtgggtggctggctgtaactcggctgtggagggctgtagctgctgacggtgggggtgctggtattggcgcttgagccatgttcatgccactgccattaaaggagctg

SEQ ID NO: 596250 - DNA, 697 bp, Homo sapiens
gcagaattatcaaaggagaccaatcctgtgggtatgagatgtggtgcggacggtgaaccgtctagggcggataactatggaattattttcaagcatgttcctcggactgctgagaacttcagagcactatgcacgggagagaaaggcttggtttcaagaattccatttttcacagagtaattccagatttggtgtggccaaggaggagatatcaccgaaactatgatggagcaggcggacagtccatttatggagacaaatttgaagatgaagattttgatgtgaaacatactggtcctggtttactatccatggccaagtcaaggccagaataccaataattctcaatttgttataacagctgaagaaagcagaacatttggactttaagcatgtagtatggggtcgtgaaggatggtatggatacggtgaaaaagatgtgaatcatttggttctcccaaagggtctgttggtcgaagaataacgtatcacgagaatgtggacgatataaaatcatgtgtgtgtgtcatagaaaatttcatctggtataagcagttgggatgtgaagcttagctattacaatttgatagttatgtcagcttggtgacaatggacgtttccgatttacaaagtgtaaaattgcagttatagttgttgtcactttctaatgtgttataattgacttgctggggtgaaa

SEQ ID NO: 596251 - DNA, 1128 bp, Homo sapiens
  misc_feature (575)..(575): n is a, c, g, or t
agcgggtggtctgtgtgccccagtcctcccaaagcgctgggattacatgcgtgtgcagcccactgtacgccccagccactttaaagacagtattcataaacgcgtcccttgaaagtcttgctaatgagaaagtgatatgggcgcttgtgtagtccaccctctgtctcagatacgagcaaactactgtacatttctctcttatccattacgactcttagagctattactcggacaggatttaccttaagaatggtaggaagagagatctcaaggctgctcgtaattagatttgacgcttgtacaatacaggacagatagcatggtttattcttactgaagtatacaacgaattggtgtaccagtaacgcagttgagaagtacgatcagcgctatatggggatgcacagatatccacgtatacatggagactttgtctgcaactgtactgtggcaattggttgtgtaatatcgtaccggtgctcggccccctcgcgattgcttgacacattactagcgaggactagaccgtccagcaaaggagagggccaagaccccctcgtaaactatggtgatgngcgtctaccgtagtagctccttaaaccgacagacagtacgaaatctatcttaatttgctctgtgccgattagggagaacacatagagtaagttggtccggctagtcgtcctcacagttaacgcttactttgccggaatatttttagtttacaatgagacggtagtttcatttaatcgttagttagtttcctaaccacgaggcataccactttctccacttcgaataagaaaccacctcattgtaacgtatgtcgattgaagtaagacctgggcattcctagaatttcgggcaactaactgtttcccgaactacggggtgataactttgccacggcacaatttaagagattttttatcgtccccttggcaactcaacgcttaaaaaaaccagtctttgaccaaaaccaatgtattaaggcttttcacacaggcgttgtttgcccacattggggaaccgacaacgaatgtcgcggtgaaaaggaagccttcggctaggtgtaaaagccaaggaaatctcgggccaatgtccctacttccaaaagggctagtccca

SEQ ID NO: 596252 - DNA, 107 bp, Homo sapiens
tctgagcagctgtgaagctgcaggagccagttctactggggttgataacggatggtgatggctgacacttttactgaatgtcggtctttttttgtgattattctagt

SEQ ID NO: 596253 - DNA, 266 bp, Homo sapiens
gccctaaataaatttaaaatctgaccatacccaggtcttgtgaggatccagggaaacaggaactctctaacacggctcaggacctaatcgcggtgagcaataggccaatttctaaaaatgtgaaaaatgggcccacccacagactcagcagctctaatgatatgccctgaaacgcagttcccaaaaggtgctctgcaacccctgtggctacctgaaacccttccaaaaacctgtgcagccaaaaggatctcctaaccactaaaacg

SEQ ID NO: 596254 - DNA, 310 bp, Homo sapiens
tgcaccatccggcgatgtactgatccaacatcgacggtcgtaaaccctattgttgatattgactctagaatagtggttgcgctgtttatcctctacggtaacttgttccgtctggtcaatttattggatcaattgagtatattagttcgctttgactggtcaattcttcacatgtactgctcgcgagcgttgggttctgctccgcagtgtcgtcccgaccgtaaatttcttatgcatgttcggttaactttaggacctgtgtgattgtttatctccctgataatgcattaataaattaaagctccatagg

SEQ ID NO: 596255 - DNA, 128 bp, Homo sapiens
tgtgtgtacgacgtaagagttgtaggcggcagcagcactagttttaatggacatgtacttatataggtatagatagggttgcaatgtttcataatgggcttgtgatatgtgtatagtactactaagtg

SEQ ID NO: 596256 - DNA, 102 bp, Homo sapiens
gaagcaaaaagtatactacattttccaagacaggaggatacagatagggaggaccataaagctgcttcaacatatattggttacatatctagttctagtagt

SEQ ID NO: 596257 - DNA, 393 bp, Homo sapiens
agcgtgtagtgagagagcaagagcttatctacaaaaaagaaaggccacgtatataaaaggtctaacaaaaagagagtaagcaagtgtctgctctcaaacagttaaacagctgctctcacattcctggatggaagtctccatggtgctctcaagccattgagtgatggtgctggcacacagcaaaggctggcctgttcagatcacatacgaactgaccaatcacttgtgatcctcagtgtcctgtgtgtgaggccaaacttgcccttgaaattgcccagtagaaggcccacagaaggatttggtgcaacaaagggggcggatggtgcgataagaatgctgggtcacatcccccatcagagcgggacctcaaactattctgcccaatagccccag

SEQ ID NO: 596258 - DNA, 401 bp, Homo sapiens
atagcgacaccgtacagatgcctttaaaaggcaaaagcacacgtgtgggtcctggtgagcacacagcaatgtacccatgaaggagataaagcaacgatgcttttgcttttttcatgaagtaagatgataggtggtcttccagtcctttttcgcttatttgagttttctacttaaacacatggaaatctgcatagcagaggtaaatgctttccaagcagcagacccccagtccttggtgtgtgaagcagtctgagaaggccatggataaagggaatgtgatgaggtctaatgaagaggggcaagagaatgtaggccatagttaacaagttggctttgactctgatgagatgccaagccctcaggagactttgagaagaggagtgactttatctgactttggt

SEQ ID NO: 596259 - DNA, 492 bp, Homo sapiens
catctagaggacccccaagccgtaatactgaccagactgttttgaaaaattagcaagagaagactggattgggaaagcatggtctacaatgggttgtgaaattctgaagctatgaagaataaatgtatcaactttggattatgaaaccccattaatgatttcctaaatacacttgaaataaaattgattaaactaaatttgggtccagtgacattactatgcactgcattaatccattatacgtatgtacgacttttttgtctttggttcaaattaatgacgtgagagtaggtgtgaagcaacagaaaatcaaaccagagaatatctgatccctaatacggtgaatgtatataatatggaggcataggtagtgcagctaaagcacggacattgatgccttgggtaaccgatgataggtataattttcttataaacatcctgggagtatgtctagcttaactgaatgaaattcaatggcccttgttaaaatga

SEQ ID NO: 596260 - DNA, 108 bp, Homo sapiens
  misc_feature (39)..(39): n is a, c, g, or t
atgtatcctgattactttgccacccccacacagtggaanaaactgcggagggaaagctgggaacgagaggttaagcagctgcaggaggaaacgccacctggtggtcct

SEQ ID NO: 596261 - DNA, 1074 bp, Homo sapiens
cctcttcctgagtctacacctaggtgtgacaacctggaattcggcattatgaaggcgaacaacctccgggacatgtagaccatgagattacagctgctacaatagcggtacatcaacgacttatctacttcgtagatctcattcgtgcctgactggcccaaggtatcagtgtccattagttcaatcagtgtggtgaatcagcgcgggtgcctcgattaaacgtcacacttggacggaatagtcgatacaaggaacggcgccacacgtgcacgtgtatgcgccggaaagccttggggtacgtgcctagaaggcatgcgaaagacgtgggggatcatagatacgactcactactagggccacgccctagagcaccaagcttccgtccccacctgggggtggcaacgactcgcgctctcctcgttctgcgcctcgtttggggagttcctgaggtgggacctccgtgagagaagcgacgctcggaaacaagttctccaacacgaccataggtggccgtcgatagctactccaaatcctcggcgcgctatcagctggaggttatcagcgcacatcaccccatttttttatatcacacttttgtgtaagcaaacacactcaacttgatctgcaaacgttccctcaatcacacactaaacagagcatccttggcccatgtgggacccaaggccctatcatctgttgaccatggttggacagcgatacgttccatagcggagggtgcggaagacattggaacggcttacgtgcttcccttgtcccccaaggtatgacgggcgttctacgaatttcttgtccaggcgcgattaggcgcatgaaagtttagaccgagcaaggagggacggccttctgcgtaattaaccatcggagggctctgtggacttgtttcgctccgaagaaagctaactaactagaggggtttgcccggaacttcgggtctcccgcacaacttgcctcccattccatggaagggatgagcccatgcttaattatcctgtcgataggttttcccctggatacaattgggggaatccatcagggaaccctgaaccccttacc

SEQ ID NO: 596262 - DNA, 278 bp, Homo sapiens
acggtgcatgatggcagagcgtgcccacagactcggctctcgcaccggggcaggagggaaccaggtgagctgtgcagcccacaggctgggcgggctgggtggccaccgccccccaagttggccacgctgagtctctgggcgagtggctcccaggcgaggcctggctgagccggccgagccccctgtgtaccccagggcagactgtgaccccctgccctccagtccccaagaaccaggcctgtctccactcataccacgccacctacatgtgaccgtcg

SEQ ID NO: 596263 - DNA, 155 bp, Homo sapiens
  misc_feature (20)..(20): n is a, c, g, or t
atatacagttcgttggagtntttaccactttttttttgcagttacctagtgtaaaattaatattgggtttcaccttatattacaggggttcccttaactcccattgaacacctatttttcccggacattggtttaccccttttttcttttggaaa

SEQ ID NO: 596264 - DNA, 959 bp, Homo sapiens
  misc_feature (92)..(92): n is a, c, g, or t
gagcggggggatgaccagggaagccaggtggtcccagggacagaagtggcggttgctgacgcctggaaattcccctgaaggtggagcaccanccaatccccctgggtccaaagacacttcacggcccgccatcaagccacgcaccaagcacaccccagagagtggcacgcggctgtacgcgcaggggcagattccctagagagacacgcgatacagaggcgagcgcggccagaggccgaagaacacgagcgtgcaggccaagcacaagcgaacgcacggcgacggcgccccagatcggaggagacactgcgcagcgtgcccacacaccacgcactctggcgacaccacaacacaggggatggacgagacaacacacagcaacaagagccaaacaacgagataacaaggagacaagacacagaacagcccacaaacacacaaacgagaagacaagcagcgacgcctacatatgcgagccacggacccgaccgaacccacacaggacaacccaacgcacaccaactacagacacaacacaccacggacagaacagggacgacacgcaccaccggacccaagcaaaaaagacagaacccacgcggaccaatcaggaccatcaaacggcacgaggcaccaacacagaagacgaggagaaccagcacaaagagcaggacaaggacagagaagcgcatgaaaccaaagcaagaagaaagaagacgacgaaaacgaccgcaaaagaaagcacgcagaaagcaacacaccaagaaaaacagcgacacaggaagacaaaaagacaaactacacaagaaaccagtaaaagcaaaccacaacagacaaaaggcaccaagaacaaagagaagagaacaacgacaacaaaaaaaaaaaacagagcaccaaaaaaaaacaaaaaagaagaaagagagaaaacgcaaaacacaagacacaaacgcaacaaaagc

SEQ ID NO: 596265 - DNA, 1102 bp, Homo sapiens
  misc_feature (1023)..(1023): n is a, c, g, or t
  misc_feature (1033)..(1033): n is a, c, g, or t
  misc_feature (1050)..(1050): n is a, c, g, or t
catttgtgccctctccccggtgtggtgttgctaaacacaatgggggcgccaaatgaggtggtgaagatcggggcaaggggggagagtacaaatcggggttgcttgtaaggtgcccgcgattgggtgagagtattctaaagggggttcaaatgcaaaaagcgacccgtcatttttattgtagtggggcggtttcacaaaatagctacaggggcagaataaaacgccggttacagatgaaaaagattactcgacaagcgtgttcgttccagaaggttataagagtgggacacagaggggggggggggggcggattatatttttgtgtataactgtgtgtccaccctcctttttagtgcaacacgggctatccaactgtgtaataacactaacccctctatgtgtatttcaacagacaccacactacacgaattttaaagggggagacaccctatattatgagaactccgataaggagttcccacccacaaggtttgttaccacacaaaaacccaaggccggttgtgataaactggccggcgcccccagtatacactatatataccggtctcctaaaaggtgatatctgagagcgccacttgggtggcggagaatttctggccaccgagggccccgggttgtctctgcgtcttgtcgtgtgggagagggtctattctctataggggggagaaaaaaccgtgggggttgagagaaaaaagagtctccttggtgctccgcgcgccacagaggccccaacagcgcgcgcgcgcctctgttctgcacacatgctcctctggagaaaaatttgagaggagaaatctacaaggaactttctctggtcaccacgcccgagcgagaaaggagatgcccaaatttgtctacagagtcacaagagaaaaataaaggagcacaacgtgagaagtttaaagtttgagatgcacgcaagagataaccctttaacacaccctggtcaatcacctgagacacaagagaaggcagaggaactgaagccgtccctgccccccngtttggccantgaagggactgaaatgnacccagacaccctgattgggactgtattatatttaaatacttaaaatccaaa

SEQ ID NO: 596266 - DNA, 407 bp, Homo sapiens
  misc_feature (338)..(338): n is a, c, g, or t
  misc_feature (400)..(400): n is a, c, g, or t
tctagcaggagctgaggttaagggctaccaaaaacaacagaatatacattcttcttggtgcacatggcacatactctaaaattgatcacataattggaagtagaacactcctcagcaaatgcaaaagaactgaaattataacagtctctcagaccacaggacaatcaaattagaactcaagactaagaaactaactcaaaactacacaactacatgaaaattgaacaacctgctcctgaatgactcctcggtaaataatgaaattaaggcagaaatcaagaagttatttgatactatgagaacaaagagacaacataccagaaatctctgggacacangttaaagcagtgttaaagagggaaatggatagcactaaattgcccattattcaaaaagctangaaagat

SEQ ID NO: 596267 - DNA, 433 bp, Homo sapiens
  misc_feature (339)..(339): n is a, c, g, or t
  misc_feature (354)..(354): n is a, c, g, or t
  misc_feature (364)..(364): n is a, c, g, or t
  misc_feature (381)..(381): n is a, c, g, or t
tctccggtggagaggttcttcttagaggtgtaaacacgtgggtggagaaaaggtctctctggtctccgccgccccgaagccccgcgcgccgccctctttctcgcccactgtccctctcgtggaaaattgtgagggaaatccaagagacatctcctgcgctccaccagccccgcaccaaagggaatgccccaatcctgctcaggatcccagaaaaaataagagacccacactgtgaagagttttaagagttctggaagccacccagataccctttaccacccctgggtctcatccacctgcacccaagaagaaagagccaggagaaaactgtgaacgacncctccctgccccccngtttggccantgaagggactgaaatgnacccagacaccctgattgggactgtattatatttaaatacttaaaatccaaa

SEQ ID NO: 596268 - DNA, 241 bp, Homo sapiens
cgatttgtaccggtagtatacacttagctttccttctggcttgttctttctctgcatctagtctaggcaaaatgctgtaacatggcactattttaggtcacctagggtatatcctggtgtgggaatctacacgtctatctagaataacgtgttctttggtcgtatacttgacatgtttgtttatgcttctccagtggcagcagtagtggtaactccttgtgcaccacactatattatcggg

SEQ ID NO: 596269 - DNA, 532 bp, Homo sapiens
  misc_feature (400)..(400): n is a, c, g, or t
atccaatgcccgtagacagcgggggaagtgggattccagcctttcatttattctttcacctatttgttctctttactctgtgtacaaaaaagagaggattatactatcatagactgttgtttctaaacagaaactcaggctgggcacagtggaatacgcctgtaatcccagcactttgggaggcagaggcgggcggatgacttgaggtcaggagttctcaaccagcctggccaaaatggtgaaaccccatctctactaaaaacacaaaaattaaccaggcgtggtggtgggcacctgtaatcctagctgcttgggaggctgaggcaggagaatgaatcgcttgaatccaggaggtggaggcttgcagtgaagcccgagacccgcaccaactgcactccangccctggggcaactaaagcaagactctgtcttcaaagataagaaggaaagaaagagagaggagagggagagagaaagaggaaggaaaggaaggaaggaaggaaggaagcgagcatcccatcactgagactta

SEQ ID NO: 596270 - DNA, 321 bp, Homo sapiens
cccccaaaagaaaagggggggggccccctttcccctcccctccggggggtccctcccctttaaaaatttttttaaaatagttcccaaaatttgatttttgaaaacccatcccagccgggggaaatggggatccctaataagtttcttcttttggatcagcttgggttgggcatgaaaaattttttttttttttgtccccccttgccccggggcaaattccatccccggggttttagtccccctgcccagccccgggccctggcttttgttttggttgcggttcctttttgtttcaaaataaaatcctttttggggccccca

SEQ ID NO: 596271 - DNA, 901 bp, Homo sapiens
  misc_feature (511)..(511): n is a, c, g, or t
cccgtcctttcgctatgaagagagcgacctggagcggggatacacgaagtgatcactttgtaacgtatgagcttctgaaagagagagaccattcaacttgaaatataaggtgtttaagatagaagtgctaatgaatggaagaaaacattttgttgaaaagagatacagcgaatttcatgctttgcacaaaaagcttaagaaatgtataaaaactccagaaatcccttctaaacatgttaggaactgggtccccaaagtcttggaacagcgacgacaaggcttggaaacatacttacaggctgtcattttagaaaatgaagaacttcccaaactgtttcttgatttcctaaatgtgcgacacttgccctctctaccaaaggcagaaagttgtggatcttttgatgaaacagagtctgaagagtcaagcaaactgtcccaccagcctgtgctgctgttcctcagggatccatatgtcttgcctgcagccagcgattttccaaatgtggttatngaaggagtcctccatgggatattttaccctcatctacagcccaggcatgcctggcccatattgctctacaggttgtgcattgcacaagtccaagcagtgtcattcacatggaccacagtgttaatagtattccaagtcatgcttggaaccctgcacttggcgaactatcaaaaactttaatcattcaaaccatggattcacaggcaatagacgaacgtacaggaccagagaacaggatacccgagcgaccggacccggactcccgtccaatccccattacccaccttaacgtcaggatgttcgggacctcatttgtccctgcctggttcctgcacctcgcgtcttttgcctggactgtcctccgatgcttcccttatgccgtgcctttta

SEQ ID NO: 596272 - DNA, 813 bp, Homo sapiens
gcggatgaagaagcagaccaaggtggaattgccgcaggaggcccgagatctatgaggagagactctacgtcctactctatgagactccccgcgtcccgacaagtcctgctgggaggccacaagccgtagccgcaggcagggttcccgccagtgaagatgaggagacctttgaactgcgggaccgggtccgacgcatgcacgtcaagcggctacagcagcttacgagtgaaccggacagactcaggtcaccgagatcgtacaccatcgcgatctgaccaggacccatcaggggagatcaggggcacgggaggccctatctcgcgcagtcctgctggaaacccgaccccagttggtccaaccaccaatgtgctgacgtggcctgcacatgtgggtacatcctgacgtcctaggcaacccgagagcgcagtgtacaaggggccactggcgtccacggatgagtccacgaagaggtcctagaggcgacgaaggatggggaccacgattcgcccatgccgttgcgcccggtgatgctacgtctctcgggagacctgcggtgctggtccctatcttggtcaccatcatccttcctgcccgagcggaagcatggttctggtccctgggggcatatgggactgacccaactcctgctgagaagcttcccctaggccctgtgcagaagggcgtactggcccttagcggctcagcctggggggactagggcgcctctggtggctgtgaagggcccctggtgcgcaccagctagggaccggcgacatccacctacgggtgacacatgcagccggcattgcatcc

SEQ ID NO: 596273 - DNA, 81 bp, Homo sapiens
gccgactccacattcagaagattttgtggagaaactcagtgagttaggaatgaaagagactgatgaggaaggcagtcgacg

SEQ ID NO: 596274 - DNA, 897 bp, Homo sapiens
  misc_feature (511)..(511): n is a, c, g, or t
cccgtcctttcgctatgaagagagcgacctggagcggggatacacgaagtgatcactttgtaacgtatgagcttctgaaagagagagaccattcaacttgaaatataaggtgtttaagatagaagtgctaatgaatggaagaaaacattttgttgaaaagagatacagcgaatttcatgctttgcacaaaaagcttaagaaatgtataaaaactccagaaatcccttctaaacatgttaggaactgggtccccaaagtcttggaacagcgacgacaaggcttggaaacatacttacaggctgtcattttagaaaatgaagaacttcccaaactgtttcttgatttcctaaatgtgcgacacttgccctctctaccaaaggcagaaagttgtggatcttttgatgaaacagagtctgaagagtcaagcaaactgtcccaccagcctgtgctgctgttcctcagggatccatatgtcttgcctgcagccagcgattttccaaatgtggttatngaaggagtcctccatgggatattttaccctcatctacagcccaggtagaaaatcctacatggctaaaagaagcagaagcaagtttcgaagtcacagtcaaggaaatcaatactaccaatttaacctaaacgctatgatatataacagctctagctagtggtaagtgcccagtcccaccttaatcaggtcaggaccattccattagaatggttctcttcacacatagaacctgaccggggcgagggtcgagctaagccagggttagaagaacatgtccgccacgtaaaaccagaaaggggcaaggaaaccgggacacgggtggcaaacaagccctcgttcaagccatttcatgaacaatcgcaaacggagaacggagaagtactaaa

SEQ ID NO: 596275 - DNA, 719 bp, Homo sapiens
gtgggctcgtgggttggcatgtatgagagctgtagtggcccgagtgttcgagatgaggggtgatctacggtggatcccaatggcttgtcgtctgagcgtttgacgcagatagccggaggtgcggggcacgatcgaggcactggctggggataggagacgggcggtcgcccagtgcgtttggggtgaatctgatcgtgggcgtcgatcgtggagtttcatggtgtcgtttgcttggaactgatcgtagctcgtggcagggggaactcggctagactgggcccacaggcaaccatgattgagtcaataacaactgagtagtaagacgttcatcgccgtgttatccttgagtaaatgaagcagggctttttgcgcaatgttgtccaggctggtcgtctacgtcctgtggctcaagcagtcctcctgccatcagtctcccaaaggtgctggaagttacagggaatgagactctggaagcccagccagggacaatgcacctttcacagagattctgaactaagtctgagtgaacggtctaacggtttggaatctccccctcatggagagaagcttgtatggctgtcatgcttagacagtgattcctgcaaggtaagaccgttcaggctggggagaggtggagagccatgccatgttcatccttccattgctatggacattttgcttgacagcaaaaatcttcccgcttggtgctgggcataatc

SEQ ID NO: 596276 - DNA, 756 bp, Homo sapiens
gaatggaatcacacagtatgtggttgactgcaatcagcttctttgacttagcatgttttcaaggttcatccatgtcgtaacagagtcttgcttagttgcccaggctggagtgcagcggtgtgatctccgggggtcaagtgatcctcccaccttaccctcccaagtagctggaactacaggcacgtgccagcacacccaactaattcttttgctgatctcaaactgctggcctcaagtaatactcctgccttaccctctcaaagcaatgggattacagtcatgagccaccatgcctggctcaattttttctttatagtagcaaacattttgataattattatacttaagaaagagatacagatgtcttttagttcattccctcattattagcatgttaaaattatactagttggataacttgatattctcattcttttttttggagatggagtcttgctctgttgcccaggctggagtgcagtggcatgatcttggctcactgcatgcaatcttctgcctctcaggttcaagtgactctcctgcctcagcactcccgagtagctgggactacaggcatgtgccactaccgacgactgttattcaataaatattagggtatttacaaagaaagaaacaggggacacaaccagtgtgcggacaggccggaaccacaaacatccggaaccctcggggaaacacaacccaccataagccaccacaagaaccggggacatcgcgggacatgagccaccaaaa

SEQ ID NO: 596277 - DNA, 362 bp, Homo sapiens
actctctagagatcccggttcgccatgtttccactgtgatatccacgtgcccccaagacaaatatgatcaacatttacatcgttagatatcacatactattacttctattttatcataccctatgtatatgagttagttttcatcctgctgttaaagatatacctgagactgggcaattgacacaagaaagagttttaatggacttacagttccacgatatgtgggaaggcctcacactcatggtggagggtgacaagtcatgtctatgtcgtgactgacaaaagcctagggcttgtgcaggccaactcccctttatataatcatcagatctcgtgacacttattcactattttgagaacag

SEQ ID NO: 596278 - DNA, 1490 bp, Homo sapiens
cagaacaagcccgacagtggtcgatgctaacagcacgatcacttcagcgttacacacgctattctctccagcgtggacgtttaagtctgatacgtgcaagccaacgacgttaaatcaaccagctcattagcaagcaagcaacgcgcaacaactgtagagatgaagtatcaggcacacgctatgcacgcctgcagcggcaccaacttgcaaccgcattctacgcagatcacaccactacctgcagactggctcgctctgtgcggcatatgcaggcgccggatccagcattcaacacggtggcgcacctcatccgctctgcattgctgaacatactggctgccacatttcctctcaccgcaaccagcccggacactgcacaaccgcctggcccgacgcacgcctcgcgcgggccgtcctacgcggaaacgcccaacactcagataaccgatgcaacgactagcgcagactcggaaacctctccgacaccatcgagatgcagcgaacccgtgctgaccggctacctgacgaccgcgctatagccatgcgtccttggctcacacaccacacgcccgactccctcatcacctcacgcgtcgatcacttgcaccgcccaagtctactcgggccgcaccactaacggcgctaacccggcacccttgggcagctcactcgaggtctcatacccagtccgaccctcaggcatcggacaaacaacccagacaaggcactcaacccataatccgccctaggacacgagaagcgaacacccgcccgagacgcgactgcacacaacgccagaaccccaacaccagccctcccccggcacggacgaaccactacaacccgcaaccacacgccacagcaaccaaccccagaccgaccgcgacaacccaacaacacaagcacacagcagaagcgcacacccaacccacggactaccacaagaccccgagacatccaccacctgccaccagcacgcgccaacacaaccgcacaaccaggaccacgccccactagacaccggcccactcgcaccgatgcccacaaacacaaccggcacaccgcgcacaccctccagcccaaaatatcccacaacgcacacaagccacacagcagccacaccgccacggccacacaccaacgaccacgcacacacacacacccacgcaacacacgaccagaccacacacaaggcacgtcaacacgacacgaacacagagcaaacagacaacacaaaggaaaaaagaaaaagagaaaagcaaacaaaacaaacaggaagaccacagagaaccacagcaagacgcgcaaccaaagcaacgctacagaaccacccgacaatcacaaacatcacagatagatctagcagatcacacagccaacaagctaaaccacgccaaaccacagacgagcgaacgagaccaacggagagcaaacaaaacacaaacgtacaaccaacccacgctcgagacacaacaacacacacacaacac

SEQ ID NO: 596279 - DNA, 403 bp, Homo sapiens
  misc_feature (208)..(208): n is a, c, g, or t
  misc_feature (223)..(223): n is a, c, g, or t
  misc_feature (246)..(246): n is a, c, g, or t
  misc_feature (256)..(256): n is a, c, g, or t
  misc_feature (271)..(272): n is a, c, g, or t
  misc_feature (285)..(285): n is a, c, g, or t
accccagaaaggaggggacccaggcccagtgaggggtacttcagtcaatcacaggaggaggagtttgcccaatcggaagagctctgtgcccaagccgcctcctgtgttctacaacaagcctccagagatcgacatcacatgctgggatgcagacccagttccagaagaggaggagggcttcgagggtggtgattagcggtggcgccancctaggctacccttncaaggccgcccacctgcattcancttctgccangacgcccgccgtgcnnatttcgcaagcantccgcctggcacccactccggattccggccctggctggggacttggccgcttccctaccacagggcctgacttttacagcttttctctttttttaaaaagttgataggagacttgtaa

SEQ ID NO: 596280 - DNA, 329 bp, Homo sapiens
  misc_feature (25)..(25): n is a, c, g, or t
  misc_feature (290)..(290): n is a, c, g, or t
  misc_feature (304)..(304): n is a, c, g, or t
ggtttgtggtctctgagtggatttnagccttcagtcatcggttgctttatacgtgaggttactagattgagacaccatttgtggggggaaaaggatgaaggatactcaaaggctaattgctacttgaaggcagaaaatagggaaaaacagcaaaaagactgcagttagcctctgctcatccttcctctaaataaatggtcacttgattgtacatgactatgactgccgcgtgacctggggcaaaagagaacatttatcattgaaggctcatttgctgtacagcgtgtgtnccacaacagatggncaaagcattgtttttataagatgga

SEQ ID NO: 596281 - DNA, 463 bp, Homo sapiens
taccagtttaatagttttttacctaacttacaggtccaaagggcaaatgacttgacccctttttttccccaatcccttgaactttttggatttaaaactttttttaggaaagcaaaggttaaaagccaaccgtaactaatttccaaataaagacaagatttcaaacctgaatttttttttgatagcaaaaggtccagtaaaaccaaaatttcttttctccacagtttacctttccatttaaaacttggatagtttaacccttgaaactgaaaaatttggtttcaggctttaaccaaatttaattgtttttggcaggtaagtacaggctttggcaaagttaccaacttttttggtcaacaaaagtaaagacaagtggataattttttttaggggagctttaaaaacctgtgagaagctcacattgactttttggccctccgccacaaaataaatactttttttg

SEQ ID NO: 596282 - DNA, 384 bp, Homo sapiens
  misc_feature (364)..(364): n is a, c, g, or t
attcgacacgaaggcgatgctaactaaaattaatctcttcctttaacattatataaatatatagttgactttatttctgaaattcagatgttccctaaatgactatagggcattgaattaaaacatactgtacaaatctgtagagagaaacttataagattttagtaatttgactaaagttgtcattgattcgactagttttgaccttttttaacttcctgcatttaaattgggaaacaaatattttgctatctcttgaaaggaacaagtaggagtttatttcccactgactcccatccaaaggggaaacttgacttccatggatttaatgctaggttttaaacaaggggaaaggccgcccaangcacatttttattttattaa

SEQ ID NO: 596283 - DNA, 772 bp, Homo sapiens
gagaggggcccgagccacccggtccggcgcgtcccgcggccgcggcggtcccccgccgggccgaccgagccgagccgggcggagcgggggtgcgcgcgccgggccgccatggacccaaaagcggttggttgcaggagcggccgccggctaaaatctggaagggccgggcaagggggataacggcgtggcggcccggaagggggtaacggggggcctattccccggggggggcccagggaggcgacgccactaaaacccataaactgtcggtcaaacgagggaataccacaaccaactctattccccgaggggggtttctacaagagaatttcacaagggggcgcgggaacctaggtcacacgcccggggttagtcacgggaccaaaactctacataattcgggggactacgaaatagagaagcggcagtctctacatggggttcaggacagagggctatggagtgtcgttgctgggccgggacactgggatttcacaccctgttttcgtggggccaagtactttcacggagggcacatgtaagattcactcgtttcccccctttgtggggctcaaccattaggggcattgtaatcgggccttttgagcacagaacgggccacattgcatgtgctccagccaaaactgggttggaagcccatatcttttccgctttgacagcgggcacacacacataagcgcccatggattttcacataacaccacaggcctcctctttcgtacccacacgatcaacattggttgtccaccac

SEQ ID NO: 596284 - DNA, 119 bp, Homo sapiens
tttgatatggctgagttgaagctgggcagtacatccacaggaagagtggtgctggtcagagcagacaggcccaatgcgccgggagtagaggcattagatacagccccagagctcaggca

SEQ ID NO: 596285 - DNA, 312 bp, Homo sapiens
agtaatattccatctctcgatgtaccaaatgtgttatcccctcacctcctgaaggatatctcagttcgcttctaagacttggcgattctttaaaaagctgctgtaatcatccatgtgcaggtttttgtatggacataagttttcaactcattcaagtacatgctaaagagattactgcatcgtatggcaagagtgtgtagttttgtaagaaactgccaacccgtctttcaaaacagctgtaccattttcattccaaccagcagtgaatgagagtccctgttattctacttcctccccagcacctgatgttgc

SEQ ID NO: 596286 - DNA, 130 bp, Homo sapiens
cctctgtcagtgtccagtagcccctgcgccctctttcccagcctctgctactccagagtccctcctcctcagacctgagcaagccaggcgaaaccccatcgctacaatatctgagacctgagcaagccag

SEQ ID NO: 596287 - DNA, 281 bp, Homo sapiens
gaggatccctgcagaggcgttagctggtgggctgcagaaaatggttgccttgtctacaacaaaacaaatgttaaattcttggctagtacgacagactgccttcaaattttagcttatggcaccaagaaagcaagctcatcatactggctagtggtggaccccacagctttagtaaatataatgaggacctatactttacgaaaatactactgtggacccccaagcagagtgcttgaagggtcctaatctggtctgctctagtaattagcccggctattgta

SEQ ID NO: 596288 - DNA, 284 bp, Homo sapiens
aaagggggggccccctttgggccccccggggcccccaaaggaaagttccctccggggggccccccccttaaaaatgggttagttgcccccaagggggactttttccccccgggcccctttgggggggtttttttgggccttttttcggtttttttccccaaaccaaatttgttttagttcccttgttgggaattttggggccgggtttttaagggtttttttttttacccgggtttttccccccggggccttttttttgggaaattaaattttttttcccccca

SEQ ID NO: 596289 - DNA, 399 bp, Homo sapiens
  misc_feature (160)..(160): n is a, c, g, or t
  misc_feature (180)..(180): n is a, c, g, or t
  misc_feature (198)..(198): n is a, c, g, or t
  misc_feature (211)..(211): n is a, c, g, or t
  misc_feature (216)..(216): n is a, c, g, or t
  misc_feature (375)..(375): n is a, c, g, or t
ccagctccttcccaaacccccatttaccattggcttttggctccaccgcacatgcagaatcggaacttaatcacagagcaacagttggaaatcttaggcatttccactaatccagataccaccctctctttgcactcaactcttcaaccatggtgtgtanaactacaacattcagttcanacattttccgttttaatntgaagtgataaanattcntgatttttatagcaggaatgtagtgctataagcatgtaatgttttcaagtatgtgaaagtacataggccagattatttgaaatgccctaaaataggataacccctctgctcttctcactctctgcacattgtccagttatgagtctctgtgtcagttcngtagacgcgcccgcgaatttagta

SEQ ID NO: 596290 - DNA, 581 bp, Homo sapiens
ttccggcggtgacgacctacgcacacgagaccatgcctttggcaagggatctccttaatccttttccagaagaggagaagaggaaccacaggaggaaacgcctggtgcaaagccccaattcctacttaatggatgtgaaaggcccaggatgctataaaatcaccacggtctttagccatgcacaaacggtagtttggggggttggctgttccactgtcctttgccagcctacaggaggaaaagcagggtttacagaaggatgttccttcaggaggaagcagcactaaaggcactctgagtcaagatgagtgggaaaccatttaaataaacacattttggccaaaaaaaaaaaaaaaaaaaaaaaaaaaaaccatgtcggccgcttgggccaagtcgactttagactcgggcaggctaatgcatgcggccgaaattggggctaattgggccaattggccctatagggagtcggattacaattaattggccgccgtttaacaacgtcgggactggaaaacccctggggtaacccaatttcgctttgaagtccccttttcgccggttgccgaataccgttggcc

SEQ ID NO: 596291 - DNA, 127 bp, Homo sapiens
tgaggcgacaggaactctgtcttcacttccaggacctccgctcctataaaagcctggctggaggagttggctgagagcaaggtaggcctcagagttgtacggatataacattggacgagatcaggtt

SEQ ID NO: 596292 - DNA, 224 bp, Homo sapiens
aggctccagcttaacgatatttggatgtcagcacggtgctcacgtgtcgacgcgaacttgtactgggaggcatgcaccgtagtggtgtatacacgtcgacctggctccatgtttacgtgcttgggacgtccgcacggttctcacgtgtccacggaacttgtccagggaggcatgccccgccgtggtgaatacccgtcgagctggagccatgcctgcatgctcgg

SEQ ID NO: 596293 - DNA, 322 bp, Homo sapiens
tgtggtagtctagaggtccccgagtgggtcctgcagcctgatatttggccaatttagtcctgattcccgacgagctcaatagcagtgatttgatttctccaggtgtgcagcatctcacgctgtagctgacgccgtgctgtgctggcagttctcagggatggcccctcctgcatgcaggattgtcatcagctgcttcatgagtcagaggagacctttgaaaggtctcagtgtggccatgagtggctctgcccacccattccttacaatatttgaagggagtgtaaaaacaggagggggaacggctgtttatgagggtggatgg

SEQ ID NO: 596294 - DNA, 509 bp, Homo sapiens
ctttttaaggagggagtcatggtggccaagaaggatgtccacatgcctaagcccccggagctggcagacaagaatgtgcccaaccttcatgtcatgaaggccatgcagtctctcaagtcccgaggctacgtgaaggaacagtttgcctggagacatttttactgggcccttaccaatgaggggatccagtatttccgtgattaccttcatttgcccccggagattgggcctgcccccctaccccgtaaccgtccaaaaattggcaggcctcggcctaaaggtttggagggtgagcgacctgcgagactccacagaggggaagctggcagaaaatccctccagacggagtgttgggccccctggggcccccaaaaaaaccgaggctgggggtgggtcaccaaccgaattccagtttaaagggggatttggttgtggagggggtcaccccccccagtaaaattggaggggatttttttgccttgaataaacttccagccaaaaacccttta

SEQ ID NO: 596295 - DNA, 127 bp, Homo sapiens
tgcacggtcccagccatcaggacatctggtccatggcgagagagccatgtgttgtcggtttggctttttctttgttattctctttcggacccggttgttgtgtgttctttgagtgctgccagtccca

SEQ ID NO: 596296 - DNA, 741 bp, Homo sapiens
  misc_feature (679)..(679): n is a, c, g, or t
  misc_feature (691)..(692): n is a, c, g, or t
ggcctgagttaagtctgcgtaaggacgatagctggaagtgcttcagtgtggggagcatggcgatgttgttgcagcagcagccttttactggcgcatatcgcaccgggaagccggcctgagctaatgagggccgacgtggatatgctcaagcattacgtcccaccaaaacccgaaacagctattgagcgtgacgacagcgccttggcgtcggtacttcaaaaggttgcagaggctttaccgtatccttccaaggatgcattggcgtacctaggcggccgtggaatatccgagcgtgtagctcgggaagcttgcgatcgcggcattctgatcacgatccccaacgacccctgtcaggcaaaagcatttttgacggaagtggccggcaaggaactgatggaaagggctggactttggaaaccagataaaaaagcaccagcgtgtgcgttccgaccgctctggtttcgctcgcagtcacactgtgccgcggaattcaggcttatgcgtgaacccagagagggggagaaaaaagccatgcgttacggtggtaaatctccatggatttgggaaggtgaacacactgaggagtacatgataattgaaggtccgattgacttgctctccgcagttgagatgggttcaaaacgaactatcttcggccttcctgggtgtgaaactgggnaccgactggttnnaatgatggctgaagaacgtgtcatgcgcggatctgacagctggtttgcg

SEQ ID NO: 596297 - DNA, 196 bp, Homo sapiens
tcatgcctcagagccagccattgccctcctcgcccgcccagtcacccgtggtctgacctcagagccataacctgtcactcgtctagctatgagtttgtccagtcacgacgttgttaagacggcagtgcctagatatatacgactcatatagggaccattagaaaagtggtcggtagttgggccctcgagggtatct

SEQ ID NO: 596298 - DNA, 893 bp, Homo sapiens
gactctggctgcctagcctggtctggggaagatgttgctaccatatctccctagaggcgcgaaatgctggtggaatcgcgtcgagttcgggcccaagcttggtcaacaaggtgaagcaaaagctcttcagcgagggtggaggggacctgcacagggaaggtatgggttggtcaagtggcgtgatcagcagcacttgacgaagtactaggtgcgtgggagtgatccagaccaggccgaggctttggtccttgtagtaccagtgaagatacaaggccagttgttttccggcgcattgtaaaggggaggtcgtggagtgctgttgtacagctcaggtcaacgaaggttggacgtctatcacatgaaattgggcccatgttcttgcttcatcatctcgagattccatcccttcagagatggagtttgatcctaactccaaaccaccatggttacaagacaatggatgaggatattgtgattcagcaggacgaatgagatccggttaaaagcacttgtggggacccgtgtggcacaggaatgacagtagatcgcgatggtgctcaccgtgactggaacgacttactttggcggctatgtaacgcttgtagctcgtaggtgggctcggtcactaagccttggggatcgcatagctctacggaagtgttgattggtcagcagacaatagatgtagtccaaaggtccacgtctaggcctggcttgctagcgaggagggacaaggacaaggcaaacctcaatccccaagaaaaggccgtcttggactgctttccttggtacgccttaggctactggacatccctcaatatttccaggggatcgtggtatctacggcaatcaacaaggtcgttgcgtcctccaggaagaacagataccacaac

SEQ ID NO: 596299 - DNA, 151 bp, Homo sapiens
cttatatttgctcaatagagttaatatgctcgtgcttgaggacaatatattgatatgcttggcacacggtgattcacgtgtggaagacttctttaaggtggagatcgagctatgatatcgtggacagcttagcgtgagtcatagatatgcc

SEQ ID NO: 596300 - DNA, 260 bp, Homo sapiens
cctgagtgaaggagtgcaagaggcagatgctgacggcttcacacaccctggccactgctccctaaggccagcctggtccatgcagggggctcctgggggttggggaggtgctcacatggtgcccctagcctttatatatggacatggcaggccgatttgggcaccaggctattcctatcccttcatcttcggcccatcagatgctcccttaatgcacaaggaagctggggagggacttttttttgggggatcaggcagcc

SEQ ID NO: 596301 - DNA, 294 bp, Homo sapiens
ttgagaatttagctgtaatatgctatctttttttttatccatatatccatccctggatatgtgcattgcttctgccttttggttactgtgaagaatgctgctgttaacacagatgtacaaatatctgttcaagtccctgcttttagttcttttgggtatatatctagaagcagaattgctggatcatatgataattgtacttttaattttttgaggaacctccattgtgtttttcatggtagctacactattttacattcttaccagcagtgcacaagaggtccaatcttccgg

SEQ ID NO: 596302 - DNA, 1462 bp, Homo sapiens
  misc_feature (1)..(1): n is a, c, g, or t
  misc_feature (1045)..(1045): n is a, c, g, or t
nactcccgcggcgtcgggtttacacccaccgctggtccgccgggatttttcctccccccgcggattaattcttgtttcatgactcccccacacgccgtgttctctccccgggaaatcgccctcttggtgtttattcttctgtgtgggcgtcccccctccgtggggggaggcccccttttccacactcgttgttttaagggttatattgtccacgcgatgttgtttcttcttcccccctctctttgaggaggttccccttcctttggggaccgcgtttttggtcgcgcaattctgtaaccccctcggggggcttccccgcgtcgggcctgtaatgtcaccctttccgcggcccaagccccggttgttttaatatagagttccacgccccacaaagacccttgggggggggaggggcctccgcgaggtagccccgtttcttctggccctacgccccccccactgagacgctcgtgtgtcctttcccctcgggggcccctctctgatttcgctcgcctctttggtgaatagtcttctggtggcacagactcggggattttcctcgggccgcccttttttaacacttcttgtgagagcgccctttctcttttgggacccctcgcaatattgccctgtttgtgttggtgccgccgccggcgttagttctcccgaggacccacattctcgctgtatgacctgtggggacactttctgttctctcacactgtgtgtcacccacactcaccacaaagggtgactctccacagagggaaaagagaagacctccagcagttttgcgcccagacacatatatagagtggcccccacaagagacccccactctcacccacgaccatctctggtctcctctctcagagggtgtcctctggcgacccagagagaagtctcttaccaccacaccgcacatatagggcacatataagagatgtcctgtgagatatccggagaaattactcacagagaatacctgttaactctctcttttgtgtgtgtgtcacagagatattgtgtcacactcacagcgtgnggcctctctgtgtgaataaacgcccacagagaggagatatatagaggcccacagagaaggtgttgtttctcgtgttatgaatggcactctctctcggcgctctaattctctcttgtgttatgtatatactcgttggtgaccacacaagagtgttgtgttgtacacaccacacaagagaaacttaaatgctgcgtgattaaatataatttccacacggtggtgttagagctctcacacttggggataagatttcccacaagatgtaaggattttgttggagggaattaagatgccacaatattttttttgtattttaaaaaatttctttggaaaacttcttaagattctttgtggttctgccacatagaaattgtactccttgaccgttgatagattaaatatttttccatccctcca

SEQ ID NO: 596303 - DNA, 996 bp, Homo sapiens
  misc_feature (703)..(704): n is a, c, g, or t
  misc_feature (827)..(827): n is a, c, g, or t
  misc_feature (845)..(845): n is a, c, g, or t
gtgtttcagtcgtgtcttacagtagtaaccgccagagtgtgcatgtcggaaagaggtctcatgaggctgttatcaccgtcatggcctagaattcaggttaaggctgtctgatactagggagtcgacggtgtaaaatatagatcatatgactctgggacacatgagaattggtgttataaatgatggtatggaacaaatgagttatggctcaggtttatcgacgatgtaggagtatatggtgggtatagtgaagacgttgatgtttttgaatggggtgtataagaagggttatggccatatgcagtgatgggaacttgttgaccctaagtgttggcataattattcaattcatggctatatactatgtagagtatcggatactagacggagactagtacatggatatatcaacatggactgtatgtaaattgtcttgcaaaggtgacccaaactggcggggagtgaaaagtttaacgaaaaggccctcgtaatgggtcatttagtgggcggagcgtaatttcctctgacataaactggctgattattttaccatagttgaaaaatcacgagggatcaggtttcagggtccactgggcatgtaattgatcgcattgcacacttcacatgtttgttgcagcgtggatcattcgtggaggaatagcatacgctagcaacgcacccatttcgcattagcatttattcnntacatatttgtggtagcgcccagagggtggtctgttttctcaacagtgggagcaaagggtttcttccatcggaaggaggaatgggttttcgtttaaccaaggtgtggcgcgactctttggggncgattcgatttccagacncagagggggaacagaaaggcaaagtgtccaacttcaaagaggtggatacggtttggtcgcgtggagagagaggcaagagacgtgtgatgtttattttcttccacattcgtggttatttaaacacgctgatttggagtatgcttattcagaa

SEQ ID NO: 596304 - DNA, 654 bp, Homo sapiens
  misc_feature (20)..(20): n is a, c, g, or t
  misc_feature (30)..(30): n is a, c, g, or t
  misc_feature (546)..(546): n is a, c, g, or t
  misc_feature (548)..(548): n is a, c, g, or t
gctgggtgactctacaggancctaactgtnaggcggattgaaccgcccactgtaagcggattgaaccgttcactgtcaaggcggattgcaaccgctcactgtcaagcggattgcaaccgctcactgtcaagcggattgcaaccgctcactgtcaagcggattgcaaccgctcactgtcaagcggattgcaaccgctcactgtcaagcggattgcaaccgctcactgtcaagcggattgcaaccgctcactgtcaagcggattgcaaccgctcactgtcaagcggattgcaaccgctcactgtcaagcggattgcaaccgctcactgtcaagcggattgcaaccgctcactgtcaagcggattgcaaccgctcactgtcaagcggattgcaaccgctcactgtcaagcggattgcaaccgctcactgtcaagcggattgcaaccgctcactgtcaagcggattgcaaccgctcactgtcaagcggattgcaaccgctcactgtcaagcggattgcaaccgctcactgtcaagcggatgcaacgtacntnagcgatgcaacgtacttaagcgatgcaacgtacttcagcgatcaaccattcaacagatgcacgtcattcaacgatcacgcacttaacgatacacgacttacgatgt

SEQ ID NO: 596305 - DNA, 208 bp, Homo sapiens
ctgttctcatgtgtgacgatggcatagtctattgcctcagatctgtaacgaaacgtacacgccaaatatctcgagatctgcccttctcctttgtccactccaccccagcctatgatagggggctgccatttccccccatgtggccagggatgactcttggtagagcacccaggagctgttgcacacgagaacaagaccagttaggggg

SEQ ID NO: 596306 - DNA, 904 bp, Homo sapiens
  misc_feature (253)..(253): n is a, c, g, or t
gaaccctggaggtggcggttgcagtgagcacagatcatgccactgcactccagcctgggcaacaaaacgagacttcgtctcaaaaaaaaaaaaaaaaaacacttacgacattggggactcctttgggtcggggttctcccaaaatttcttttggagggtgtccaatgcgctcatacttgggctgcaagcttttggttttgggaaacccccttgcccagaaagtctgcatatatggctgggttcttcaaccttntgttccccaagggctgaggaacagaaaagtacgcctctgtttggaggagagggtgggaacggtgaaaggtattacctttaatttttttacacgctggtgaacgttggttccggggacccacactttttttacaaaaatgggcctggttttcccttacagttggttgtcctgggacaaggcgaaaacgttcataataaacgtattggtttaaccttggaattattagggaaatacgtttttttaacataaggggggctaattttgggaaaaaatttcgtggaggttatatgtctccaattggtttgtcggccaattacctttccaaaaggtaggcggtaaatatttcaagagaccaggtgggttggtggactcagggatgggtttaaagaagaaattttcgtgagaattttttcacattttcgaaagatatttccttattaaagggaagtgtctttgggaccttaagtttttaacccaaaaagatgtgacaacatttaattcttgtgcgacattttcccttcatttatcggggttaaccaagccttaggtttgcacaaccaaattaaaaatactttagggcttaaagaaaaagaacagaaccagcagactaaaaaacaatattttggtgggcggcttggcgctcgtagaaaa

SEQ ID NO: 596307 - DNA, 223 bp, Homo sapiens
taaattcgcggcctgtcgaccagaataactgttatctgtctgtcttctgcagtttgtcaatttgaggtggcaattgtttttcttgaagagacttgccctgttgcccaggctggagttcagtggcatgcatttatggctcactatagcctcaagctcctgggcttaggtgatcctcctgcctcagcctcctgagtagctaggtgctcgcctgtaatcctagtcg

SEQ ID NO: 596308 - DNA, 367 bp, Homo sapiens
acaagtcagtaccagtaataatttaacagagatatgtataaacatgtgtactcagatataattatcttgaagtagacaaccgataccatgctgaaataatcaaatgacctagagagtatgatcaaagttcctttataacaagagaagaaagcactgcaaggctcaagtctcaataatattttgaattgccgaagctaatactaacaatgattgcctcttagagttcaagttatctatggctatattcgaaataatatttatgtttaccaatacagggtctcgtctctgtcacccaggctgtacgtacaacggtgcaagtcacgactcacggtagcgtcaatctcccaggcacaacatagcatcaggc

SEQ ID NO: 596309 - DNA, 292 bp, Homo sapiens
acgggcaactgtccatcactcttaatctcggtaattttctgcaactgaccgacgatccgctctatttcgatgcttatctccagtcgctacaggtggctgcgatttcgacattttgctgtttactgatcggctatccgctggcgtgggcggtggcgcacagtaagccttcgacccgtaatattttattactactggtgatcctgccgtcgtggacctcgtttctgatccgcgtttatgcctggatgggaatattaaaaaacaacggtgtgctgaataattttctgctgtggct

SEQ ID NO: 596310 - DNA, 1787 bp, Homo sapiens
  misc_feature (688)..(688): n is a, c, g, or t
  misc_feature (723)..(723): n is a, c, g, or t
  misc_feature (727)..(727): n is a, c, g, or t
  misc_feature (1087)..(1087): n is a, c, g, or t
  misc_feature (1097)..(1097): n is a, c, g, or t
  misc_feature (1143)..(1143): n is a, c, g, or t
gctcgagagctgagagtcactgtcccggcgctagcccagcccgacccaggcccaccgtgtgtgcacgcaaaccacttcctgtgccatgctgctccctcctgcttctcagctgccttctgcctcctggaggctggccctggcctgccgaggtgaagaaacctgcagccgcagcagctcctggcactgcggagaagttgagccccaatggctggccactgctttgcctgatgctgcagctgcctggcctggccttcagcttgtaccaggccatggccaatggaccaggcagtggagaacatcctggtgtcaccctgtggtgtgtggcctcgtctgctggggctcgtgtcgctgggctggcaaggcgaccacggctgtcgcaggccaaggcagttgctagagctgcctgatgcacgctgctgctgaccgatgtgacgtgttgcactgcctgtgccttgtggcgaagctgcttgctgctcactcagcaactccactggtgctgcaactgtgacctggaagctggtgcagcctgacttgtacggacccagctcagtgagcttcgctgatgacttcgtgcgcagcagcaagcagcactacaactgcgagcactccaagatcaacttccgcgacaagcgcagcgcgctgcagtccatcaacgagtgggccgcgcagaccaccgacggcaagctgnccgaggtcaccaaggacgtggagcgcacggacggngccntgctagtcaacgccatgttcttcaagccacactgggatgagaaattccaccacaagatggtggacaaccgtggcttcatggtgacatcggtcctatactgtgggtgtcatgatgatgcaccggacaggcctctacaactactacgacgacgagaaggaaaagctgcaaatcgtggagatgcccctggcccacaagctctccagcctcatcatcctcatgccccatcacgtggagcctctcgagcgccttgaaaagctgctaaccaaagagcagctgaagatctggatggggaagatgcagaagaaggctgttgccatctccttgcccaagggtgtggtggaggtgacccatgacctgcanaaacactggntgggctgggcctgactgaggccattgacaagaacaaggccgacttntcacgcattgtcatgtcacgaaggacctgtacctggccagcgtgttccacgccaccgcctttgagtttggactacagatggcaacccctttgaccaggacgatctacgggcgcgaggagctgcgcagccccaagctgttctacgccgagcaccccttcatcttcctagtgctgggtacacccaaagcggctcccttgctattcattggtgcgcctggtccggcctaagggtgacaagatgcgagacgagttcatagggcctcagggtgcacacaggatggcattgaggcatccaaaggctcctgagtacaccatggtgtgctattggaggttgcgacggcggaggtgcaggtaccagcctttggataactccatggggtgggggtggaaagaagcagtaccggggtttcccgtgtgcctgagcggacctttcccagctagaagttcagtccacttggacattggggcccagattccatgatgctgagcccggaaaactccagattctgtgggacctcggccattagtcatgctgcctgccctgaaagttcacagatcaagcctgcctcaatgagattcatatttatagccaggtacttctcacctgtgagaccaattgagcaaggggtcagcagcctctttgac

SEQ ID NO: 596311 - DNA, 395 bp, Homo sapiens
ccctgaggatcccacctaaatggctgtatgactgtgttatagcaagtctgaacaggacctagtttgaggcactaagaaggataagacatcagcttgaaaaggactcctatcagagcaacatgaattctgctaaaattgaaggaagaataaacatcaaatttatggtaaagcttgggtggaaggatggtgaaatcattgatgattcacaaaaagtttatggggacaacactccaaagaaatcagcagtttacaaatggataactcattttaggaagggacaagacaatgttagagatgaagcttgcaccaacagactatccacatcagttttcaaggaaaaaataaatcttgttcatgccctaattgaagactgacagttaacagccatttaggta

SEQ ID NO: 596312 - DNA, 344 bp, Homo sapiens
ccacatgacgctgttgtctatatcctctcctgtgcctcaaaatgtttttcctgccgcgtttgtttcaccctcatgcctccttcaggtcagctatgatgacttgaggtcttctggttctttgatgccttagaacaggcgtcggcagactttctctgtgaaaggtcagataatacttgaggcttagtgggctatcatgggctgtgtcacaactactcacctactgatatgtagcacaaaacaaaccacagacaaataacataaaaaaagtgggacatggctgtgccaccaaataaaaatatatatacacaacaacaggcaatcaaggctagggtaccgaagctcga

SEQ ID NO: 596313 - DNA, 984 bp, Homo sapiens
  misc_feature (641)..(641): n is a, c, g, or t
atccagccctgggtagtatgacccaactaggcagaacttctcttatgtgaccggcctggactgctctgagacagtggagtaagccaagtgaacgtggatgaaatgatctgtgtgcttggaacctgttaaatatgaagtggtaccggagtgaagagatattgatgtaccctccaatagttcgtagttctggaatcccttgggcacggtggaggaataacttgcgtcatattttcgcgatcactaagactacgaggatcgtggaaatccttctaaaatcttcgacgacaaactatgcaagtactcatcaatctgcacgataggatggatctcatagatgcttggttgccgagaacccgtgaagatcgatcttgtccattgatctagctctgaatgtgtttctctcagtccatcctcgttcactttgtagcgtctttgcggcgtctcggtgctcgtctcctgcttccattgttatagcatggggaaccctcttcccatccgagtccttctggttctgggataatcgctcccgtcttagggttgtgtcgagagaagggtcgtgcgctttgcgcgagtcgttcctctagcgggaggacattgcttgatcggccctctgcttgagcgcactctcttccccccgaggngcttctgcttgcctacccgattgtaaatgtccccacggacatgagtagccttttgtgtgccactctcgggtaagagggatgaggacaagaaacccgagtagtaagtttggactttgtgggcgtgcagttctctttgggggttcacttaagacgttggtgggctttgggaagatgaacctgaggtagtggggccccaagcattgttgggctagggaaagactgcgtgggctgcgcccatggttgcggtaacttaaaaagacccttttccaaggtacttcccttcaaaataatagcaatttggagggaaacaacatggtttgtgaaggcattagggggcacaaaa

SEQ ID NO: 596314 - DNA, 571 bp, Homo sapiens
gcggcagcggcatattgaggtcggcagcggcacagctaggtcggcagcggcacagcgaggtcggcagcggcacatttgaggtcggcagcggcacagcgaggtcggcagcggcagcgagtgtcggcagactgtgcacatgcgatgtgtctgtgcagctggcagcgaggtctggcagctgtgcgctgctgctgtgctcttcctgtggactctgaatcatggcgaccacgtgccacgatggcgacctcgggctcggcgcgaaagcggctgctcaaagaggaagacatgacctaaacgtggaattcgagaccagcgaggaggtggatgtgagccccacgttcgacaccatgggcctgctgggaaggaccatgctgcggggcatctacgcttacggttttgacaaaaccatcagcaatccaagcaacgagccatagcagatcatcaaagggagagatgtcatcgcacagtctcagtccggcacaggaaaaacagccaccttcagtatctcagtcctccagtgtttggatattcaggttcgtgaaagagcacagcgcgcgccgctgccgacctcgct

SEQ ID NO: 596315 - DNA, 1443 bp, Homo sapiens
gtcacatattatacctagcatttaccatcgcacatcgtaggaatactatgttatatcgctcacacggctcatgtgctccctactatgcctagaacgaatgatactatcgctgttcactaatagctagctctcatagaccctcaacagccatgtccctcttagccatgtattgtgcctatttgccattactagtgctttgccgacttgtcgaggcatccggtgggcctagtccacctagcgtagtctcaatcttccaatcactatatggtcctagacttacgctacataacctaagatctaactccaagtgactaaacacataactcgatccccagagcaactgtattatttacctatccacatgatcacgttgacctttccaagacaaaagcaccaatagaatgttgatacttcatagcagctaataccagccacagacaggcctcccctgtaagtatacgccactcaatcccttcgtacgtactttttattaatccgaaaagttctaacatatcagagccctaatgttcagggctaagtttcgccctcgaaaccacgtattttccccttctcgggactcgctcgcattaagagcaaatctccttcgctcttcccattacacttaaccttaagcttaaacccctagaaaccttccctttgcaccccatttgaccaacattccctttgagccaaaaagcctttcattcgcccctagcgtgtacttcctccacgcttggaaaccccatctttaattgccattcggacaatttacaataaggtttcttaaaacttccctccttagagttacacctaggaagtttcttgcgcgcctaaacgaaagatttctttctcgggcggttaaatctggacacatccgccaacagcattctgaatctcctggacagtacggcagggctttttagcaatctggttggccacggaattttaaaatatggcccccctcaattttgaaaccattgtcggttccacgttgcccaagatcgttccgccatctcccagtagttagtcactgcgaatggaaaaaccagtgagcagacaccgctaggaacgtttctaccaaggatgcttccccaattgagcccgtttcgccacaagggttggttaggcttctgcccctttgcggcgggaaatcctcacacggcgttgaattcgaccctggttcccacatcttcacggccttgggcggattgtagatccacgccatctcggcctgagtaatgtcacccctggtctgcaaacgtgcctcatctgcaccccttttggagccgtgcctgtggagagcgatttcctcattagccagcttgggggcccccaagggacaatatcccgggccaacttctccatttagttttggacccctcagcgatgtgcacaccgccgcgtttgtcacagttgccaagaacgccttcatctccagaataa

SEQ ID NO: 596316 - DNA, 317 bp, Homo sapiens
  misc_feature (66)..(66): n is a, c, g, or t
gtccgatttagactcgaccacacaattcatgacaggactcacgacattctcaagagatcgcgatgncaagacacaaagatgctcactcatagtatcaggaatgcaatcaaacacatgagagacacaccatgagatggctatattttaaatggcaaatagtgtggtggggtgtgagaaatggaacctcatacatcatggtggaggtaaacggacagctgtgagggaaagttgacagttctcaaaaagttaatgtgcgatttcaacatgaccagcaactccactccagagcgctaaatcatagatggcctaaatcacta

SEQ ID NO: 596317 - DNA, 532 bp, Homo sapiens
atctagaggactgaggggcggcctttttttatcttcatagaaacagacaaaaatgggaccaacgggtttcacccaaggtagcactacaaggacgtcttccagttccataaggggtcttaaattacacatggtatctggttggtaaattaagtcacatataatacaagaatgcgtaacaaaaaccaggtctccacatgtctggccctggccccaaacaacattttacagtgcaaggggcaaaccttacagccagatgaccaatggacaattccattattggcttccttcaaccacttaatgggaattatgtatattagatcttagacatcatgcctggatgagcgaagtaccacataatttaataatatattcaccatacactggtgacgtacgataaatggtgctcttaaagccaagtttcaaagtaattattttcatttctaacggggatggaaagggaagggtcacatgcagtgggaccaaaatgactactaccactcagttggcacggtctcccctagctaaccatggg

SEQ ID NO: 596318 - DNA, 141 bp, Homo sapiens
tcatagtagacctctataattaatactatactagtaatatacataaatcggtacgccatggtttagaagaccacctatactagattcaggactcctgttcttcccagacatgaccactcatttagatgaccccagcgtgtg

SEQ ID NO: 596319 - DNA, 839 bp, Homo sapiens
gggaccccgagcacgcgcctgacagcccctgctggcccggtgcagcggcgtcgccaggccagctatggcccccgacccggtggccgccgagaccgcggctcagggacctaccccgcgctacttcacctgggacgaggtggcccagctgctcagtggtgccgatgtgagctggtgtgctagtgatcgaccgtaacggtgtacaacatcagcgatgttcacccgcgcggcatccagtgggtgctccctgggtcatccgccactacgccgggcaggatgccactggatccctttgtggccttccacgtcatgcaagggccttgtgaagacgtctagtgagctctctccgtgattggagaactgtctccagatgcagcccagctttgagcccaccaagaatagacgagcttgacacgctgagttccgggagctgccgggccacatgctggcggcggcttgcgggctcattgcacgcggccagtccatgtcttgctatcttgctgctccctgctgccgccgtcttgcctgtctggcactggtgcacgcctgtcgtcagcccctgcgggctcttcgggacgtcctgctcgtggcccgttcctcccctccttgtgcggctgcgtgctcagggttgtcaacgtcttcccatcgtccccagctgccttgtgctctgcgcctgcccagcccagtgaccgtctgggcggcaccgtgattcggcacacttcccaaccgatgcccttctatagatgggaatcccactcattgctacacatccagaatctggtgcaattcgggtcccacctttcacaggggtcgcccccccgtccacacttggcatgggaacc

SEQ ID NO: 596320 - DNA, 116 bp, Homo sapiens
gtgaagaaggtgcttgtttcccctttgccttccgccatgagtgtaagtttcctgaggtctcccagtcatactgctggttatttctgcagaacggtgtacttgtttgaaatgtatct

SEQ ID NO: 596321 - DNA, 938 bp, Homo sapiens
gaggaacgagatgggggactctctggaggctgagtgccgtgtgcggtgccctaggaggcgcgagcgtctgttgcttcgaactccagttgtgtcaagacctgctcatatctcagagatgtcttcaggaccgacctatcccagaatggtgtggagtgcagcacatacttttgtcaccgagtccacatatcgtggctccaaggctgtcatctctccgaggtggactagcgagaagggattggtcatgtgatagatagctcccatgggatctagcttatcgcggcgtgcgtatactatagacatccttgactcctgccgactggacctactaccactggactgacatgacacactcagctcattcatggttcacatggggggccattggaacaaagattgttaacatagagcttatgttcgatggaggagtgccgttgcgaggaaaggctgtcgccaagtgtatggggacattagtgggctacattgacaagtcattataatcctttatgacttgaggatataggatgatttagaagctaattcacggaatggtggaggaattcatggaaaaagaggatggatgggacaattgacctgttgaggaaagcagttgtgaaaactgatgataggcactattcaataacgtttgggaagaagcaaattagcagtgataattggccgtcattttgtgacctttcttggagctttggatcaagttgacgcggtattaaagtggttcgaagtagaagtttaaggggacaggatagagtaaacaggaataaagattcccatttggggtggggaacaagggaggtgcagtaacattattaagggacgacaaaggtagttacagtataggaggaaaaatttgtagatcgttattgagagcacaaagggtagtgaggggggaactggattatttgaggtatgttgaggaaaag

SEQ ID NO: 596322 - DNA, 186 bp, Homo sapiens
ggatattctacacggatcccttcatttaggcaattgattatataatatattatctctcaatacaatacttctctgtcttggatactacatatataagcaaataatatattcatttctgaagtttctttccttcacttgtaatgatctgatctcctcccactatgcatatattccctttactgttat

SEQ ID NO: 596323 - DNA, 147 bp, Homo sapiens
tcaggatccaagcgctgatagcctcacacctggcagttctagacacactgggttccataccagttgttgaataaaccggagacagaaagtgggaattctggaagtagagaagattcccgaaattgtgcatatttcccagagactgtg

SEQ ID NO: 596324 - DNA, 228 bp, Homo sapiens
ctaattcaaatcatttgaacaaaaaaaaaaaatggactctgataaaactgctttacagcctgcaggacaccttgggcaagctgggtataactctagaatttcactgtcgtcccaccccatttcttccaccccatttcttccttcaccaacatgcaagttctttccttccctgccagccaaataaatagacagattgggaaaggcaggcgcggcccctcgtttgtcaga

SEQ ID NO: 596325 - DNA, 132 bp, Homo sapiens
tcttccacttgtagtctcagctatttaggaggctaggtgggaggccacttgagcatgggaaggcagagactgcagtgagccgagatcacaccactgcattccagcctgggcaacagagcaagaccctgtctc

SEQ ID NO: 596326 - DNA, 742 bp, Homo sapiens
  misc_feature (24)..(24): n is a, c, g, or t
  misc_feature (53)..(53): n is a, c, g, or t
  misc_feature (74)..(74): n is a, c, g, or t
  misc_feature (97)..(97): n is a, c, g, or t
  misc_feature (255)..(255): n is a, c, g, or t
  misc_feature (280)..(280): n is a, c, g, or t
  misc_feature (405)..(405): n is a, c, g, or t
  misc_feature (470)..(471): n is a, c, g, or t
  misc_feature (640)..(641): n is a, c, g, or t
  misc_feature (648)..(648): n is a, c, g, or t
  misc_feature (656)..(657): n is a, c, g, or t
  misc_feature (661)..(661): n is a, c, g, or t
  misc_feature (663)..(664): n is a, c, g, or t
  misc_feature (670)..(671): n is a, c, g, or t
  misc_feature (684)..(684): n is a, c, g, or t
gtaaccgggactggcggccctggncgcaatgcccctgtgctgctagcgggtcnactgtgtcgtagccgacagcncggccttcttcctcgcagcgcgnccgcgattcaccagcctggtcccttctgcggtagagcgatgccgcttcccgacaccatgttctgcgctcagcagatccacattcccccggagctgccggacatcctgaagcaattcaccaaggctgccatcctgcacccagccggccgacgtgctgcnggtggtccgcgtggctatttttcangctctgtcgagcaggagatccacttcctgtaaaggacatgaatggaaatgcccacggcaacccagaaaacagacacaggcctgactcaaggactcctgaaagttttgcacaagcagtgtcaccanaagcggtatgtggaattaacagatcttgagcagaagtggaagaacttgtgcctgccgaaggaaanncttcaaagcgctcttacaactggatccttgtgaaaacaaaatcaagtggataaacttttaagcgcttggatgcagcatgcttggtgggtccttgaacactgcgctgaagcacctgtgcgagatcctcacggacgatccggagggcgggcccgctcgcatccccttcaannacgtttncctacgtnnaccngnnacttgnncagattagactcngatgtgtctccctttggagacggaatcctaccttgcctctctacaaggaaactataca

SEQ ID NO: 596327 - DNA, 787 bp, Homo sapiens
  misc_feature (24)..(24): n is a, c, g, or t
  misc_feature (53)..(53): n is a, c, g, or t
  misc_feature (74)..(74): n is a, c, g, or t
  misc_feature (97)..(97): n is a, c, g, or t
  misc_feature (255)..(255): n is a, c, g, or t
  misc_feature (280)..(280): n is a, c, g, or t
  misc_feature (405)..(406): n is a, c, g, or t
  misc_feature (685)..(686): n is a, c, g, or t
  misc_feature (693)..(693): n is a, c, g, or t
  misc_feature (701)..(702): n is a, c, g, or t
  misc_feature (706)..(706): n is a, c, g, or t
  misc_feature (708)..(709): n is a, c, g, or t
  misc_feature (715)..(716): n is a, c, g, or t
  misc_feature (729)..(729): n is a, c, g, or t
gtaaccgggactggcggccctggncgcaatgcccctgtgctgctagcgggtcnactgtgtcgtagccgacagcncggccttcttcctcgcagcgcgnccgcgattcaccagcctggtcccttctgcggtagagcgatgccgcttcccgacaccatgttctgcgctcagcagatccacattcccccggagctgccggacatcctgaagcaattcaccaaggctgccatcctgcacccagccggccgacgtgctgcnggtggtccgcgtggctatttttcangctctgtcgagcaggagatccacttcctgtaaaggacatgaatggaaatgcccacggcaacccagaaaacagacacaggcctgactcaaggactcctgaaagttttgcagccaagcaagttggtnncaccgacaaagcgggtcatgtgggcaattaaccagaattcctttgaacgcaaggaaacggtggggaacggaaactttgggtggcccctgccccggacaggggcaaacaatttccaaagcgctcttacaactggatccttgtgaaaacaaaatcaagtggataaacttttaagcgcttggatgcagcatgcttggtgggtccttgaacactgcgctgaagcacctgtgcgagatcctcacggacgatccggagggcgggcccgctcgcatccccttcaannacgtttncctacgtnnaccngnnacttgnncagattagactcngatgtgtctccctttggagacggaatcctaccttgcctctctacaaggaaactataca

SEQ ID NO: 596328 - DNA, 423 bp, Homo sapiens
  misc_feature (24)..(24): n is a, c, g, or t
  misc_feature (34)..(34): n is a, c, g, or t
  misc_feature (50)..(50): n is a, c, g, or t
gcatccggtaggcaggaaatccanggctccctcngacatgctggattgtngaacttaattatttttcggacattttactatttaatcattttcttaagtaattatttaattaataaacaatttattttattaatagtatttcatatcaattttatatataactaacatgtatacaatacataaaatatgtaaatatattatctattaaaatatttgacaaaattaatttaataatttaattattaaatttaaatgtattttcattatgttcttttcctccttcaagttatcccagattttctttccctccatactcacccaactttaatttctttctcaaacataaacaaaaacaaaatgcagaactctcccaaaccaagaagatgaactcccctccccaccaaaaaaacacagcaccaaaac

SEQ ID NO: 596329 - DNA, 347 bp, Homo sapiens
  misc_feature (44)..(44): n is a, c, g, or t
  misc_feature (280)..(280): n is a, c, g, or t
taccctgtcactagtaaaaatacaaaaatcagcccagcatgctngcaggtgcctgaaatgtaatcccagctactcgggaggctgaggcaggagaatcacttgaacacaggaggcggaggttgcagtgagctgagaccacaccattgtactccagcctggctgacagagtgagacttggtctcaaaaaaaaataaataaataaaaataaaaataaaaatggccaaaggatttgaataaacatttttccaaagctaggaacaaaggccaataaggcaaatgnaaaaggatgcttcaacattcattacttcatcaggggaaggtggcaaaaacccacacttgaggtagga

SEQ ID NO: 596330 - DNA, 272 bp, Homo sapiens
actgatttattctttcttatatatgtgttagaagtaatccatcccagagtatctgagatttaactggaaattcttgctgtgctttcatttatttatttattgagacggagtctcactctgtcacccaggctgaagtgcagtggcacaatcttggctcactgcaacctccacctcccaggagaatcgcttgaacccgggaggcagaggttgcggtgagccgagatcgcgccattgcactccagcctgggtaactagagcaaaactttttctca

SEQ ID NO: 596331 - DNA, 185 bp, Homo sapiens
  misc_feature (45)..(45): n is a, c, g, or t
tatagccatagtggacacggtgcttactaggccaagggcactccntgctgacatacccgaggatcctgtctatctcaaagcttgtcttagaatgcagctggtcgtctggaaattgagagacagtacagaataaacccgtctttcccccacctccgcctgcagagaaaagaaatgctgggaacgca

SEQ ID NO: 596332 - DNA, 175 bp, Homo sapiens
aggctatatgggatctatatcctgcgagagcagagctcagtggagaccttgtggttaggctatttgaggccttcttgatattaccaagtgtcaatggcagacacgtcaatatttagtcttcactttcatggccacacgtagaaattcttcttgtatctactcttcctgtggcact

SEQ ID NO: 596333 - DNA, 757 bp, Homo sapiens
acccaacatacgctagtataggccgcgttaacagcgttcctaagaagaaggaggctaagatcaggaaggcttgtgacaggctatcgcaagaatgaggcacctgctccgtcggcagcgtgactgaggcggtgagttccccgtgatctccgtgtgtgtggtgtacaccaactgcgtgaaagaccacgctgatcaatggcactgactgggctgatgccagccatccatgccactggtgaccagctgtatttgccactgctgtgactgtcacggcccactgctgggcacgctgccctcacgcaatgacctgtcctgtacgttggacaccatctggacttcctctcccagctgccgcactggactacatcgagtccttctccgccaccctgtgatagacgtggcccactcggatctcatcttgcacgtgagggacgtcagccaccccgcaggcggagctccagcaatatgcagctgttctgtccacgctgcgtggcctgcagctgccctgcccgctcctgtgactccatggtggaggttcacaacaacggtggacctcgtgcccggtgtacagccccactggaaccgacccgtcgtgccctgtgtctgccctgcggggcccacggcgctccaggatcctgacagcctgagctcgacggccggcggcctccgaaggctgacgggcgccacggatcctcactctccgtgtgatgctccagtggcgcagctctctggctgtcttctgcggcccccttccgaagtg

SEQ ID NO: 596334 - DNA, 313 bp, Homo sapiens
cattccctccagttgtccccagtcaccattccctcccgttgtcaccattccctcccgttgtcaccattccctcccgttgtcaccattcccccccgttgtcaccattccctcccgttgtcaccattccctcccgttgtcaccattccctcccgttgtcaccattccctcccgttgtcaccattccctcccgttgtcaccattccctcccgttgtcaccattccctcccgttgtccccagtcaccattccctcccgttgtcaccattccctcccgttgtccccagtcaccattccctcccgttgtccgtcgacgc

SEQ ID NO: 596335 - DNA, 947 bp, Homo sapiens
  misc_feature (161)..(162): n is a, c, g, or t
tgggagggaggggcccatccagctgggctgtgtgtgtgtgtgtgtgtgtgtgtgtgtgtgtgtgtgtgtaatatcaacgcagtgggattacaggtgtgagccactgcacctagccagaacatcgttaatgtagttcaatatgagataaattattatcttcnntgaaacaagctctaaaagcattccattcctaaattgtatttcaaacttcctattttgttgatatttcttaacttctggccagttttggaccataatcttttaatgtgaaccaaagatggtacgtatttgaccaaagcagttagttttaaatgtataaaattgaaccaaatggaaaaaataggttggggatgcagtatagattagtgactaagtgcataggctctggagtaaatctgagtttttttttttttaaaggaactaaaaaatgtactgcattttctttgtggaataaaagccttgcctgagttgtgctattttcataaggcttttgaagtggtcttgacccactgtgtgtaacagtatttcaggtggtcctccccatggctgaataatgccatccattattctttaatttttatttttagaaacagtgtttcactctgtcaccgggggacgagcagagatccgtctcagagaaaaaacacaactcgagggggggccggacccaattggctaaagtagtcgttcaaatacgggcgcgttacacgtctgacggacaccgcgtcccatatgctgtgaaaccctacgcgggaaatcaaaggcggcgacccccatggccgagaagagcgagcgaatatagacgaggatacaccccaacggcaggagctaaaccaggtgtcgcgcacacagttgctaacatggccgcaacgcgaaccagtgacacaacgcgtacaccgacacagaaccgagatcacacaggcacacatgccaacggcccgtcggcg

SEQ ID NO: 596336 - DNA, 382 bp, Homo sapiens
tgcagctgacctacatctcgaaggtgagcatagctaccccaaaacagaaaccaaaaactccattttgctttgttatcaatgccctgtctcagagatatttccttcatactagatagagttcagataaagcaaacgtttggcaaaaacatactgtttgacctcctccccctctgcttatgaaggggtagcatgattctgtgttttaaagcagtgatgtttcagctgtgaaatgcactcgctgtaagctctaggctgagtgcatggaaactgttacgcttctcattttatgtgatctcctaattggtatgtagcaaaaattttctaaaactgttttgtggcttgttttgtaataaaaccatgtgaaatactgaaaaaaaaaaaa

SEQ ID NO: 596337 - DNA, 3907 bp, Homo sapiens
  misc_feature (1087)..(1087): n is a, c, g, or t
  misc_feature (2516)..(2517): n is a, c, g, or t
gtcactaggttagaactgtaggcatactcagtggagaggaagctacctattctattctaactattctgaggtcttcctggagagggattgttttagcagctcctctccagagggggctggaagtccagtttcaccaatgaccaagttttatttccttgtccttgttttagttttttcattttgttttcagtccaggtgcctcgcagctcttttggaatgggccagcattagtctaattttaagcgctatgtgttttgtacccttgcaaacttgctttctctttcttcttgctgttgccctttgaatgaagccttgtgtgcttgcatgatcagaccctgtaataggatgaatttccatgcacttaacatgaagagatacaaaaagaatctagagagagatatatatttttaatgaaatagaagcttggcatagaaacattgatttagatgttatgagttgctggccagagattcctcagataaaagagcctagaaaattgagttttgagcgggcatggtggctcacgcctgtaatgccagtagtttgggaggctgaggcgggtggatcacctgaggtcaggagttcgagatcagcctggccaacatggtgaaaccccgcctctactaaaaaatatgcaaaattagccgggcgtggtggtgcaggcctgtaatcccagctactcagaggctgaggcaggagattcacttgaacccaggaggtggaggttgcagtgagccaagatcgcgccattgcactccagtcagggcaacaagagtgaaactccgtctcaaaatataaaagaaaattgagtgtcccacccaaattttagggcgtacctccttccatttgataagaagatgctatttccagtgtccctgggagaattcttccatccagtttatatggtgaattgccaccagcgttccctaaaggaagagagaacttagcttatttctgtctgtgacttttatcagctagatcagttaattgtatttttaaattaaaaattagtaactagaggaagagactaagagaactatttttacctgagtaaatgctctcctcttcttgtgtccaaatctaatgnagaggtgaaaacacttgatgagaaaatcctttgtggcttgaggggaatcatgtttctttcaggacgtgttgtttccctgaagtctatgtcacactgagaactttttctgactgcactgctttggagctattcatttaaattgagtttggcctagttttcctggtataaaacaggaaatctacattgttccctctttctctcccttccatcccttcccctgcctttcctatacacgctggtgtgcttttgccctcagaaattcttggtttgggagttatgtatttttgagtgatcgaggttatgacatacttggagcggcatgatttcaagaagccattccaaattcttatagctccttagctctggttttactctcgtattttccccaagaaaattttttggctattcaaagaaagcacaaaatatgtgatgtggaactcatgaaaatagggacttttgatatctctttaaatattccctgactcacggaaaagatgtcctcttttggtgtatacattgtgaaaatctacccatttatctctctctctctcttttcttttaaataaattatctgataaggccggcaaggtggctcacgcctgtaatcccagcactttgggaggccgaggcgagcggatcacgaggtcaggagatcgagaccgcggtgaaaccccgtctctactaaaaatacgaaaaaaaaattagccgggcgcagtggcaggcgcctgtagtcccagctacttgggaggctgcggcaggagaatggtgtgaacctgggaggcggagcttgcagtgagccaagatcgcgccactgcactccagcctgggcgacagagcaagactccatctcaaaaaaaattatctgataggttactattgctaaattaattggccattataaataacgctgattgtttcttattcagcaagatctctttgagaatgtgacaaattaaacatacatagaatccatatggtattatcctgataaagggaaacgaggacactaagactgtcaaatggaaatcttctgtcaatggcaaacacttgggaattccacattagagcatgcttgtttttaattttttttttttaatttttaaaagacagggtctcactctcttacccaggctagagtgcagtggtgtgatcatagttcatcataactttgaatctctgggcttaagcaatcctcccatgttagcttcccaagtagctaggactacagggttgtgctaccacgcctggctaatttttaatttttttttatctacagagcctggctatgttgcccaggctctctcaaactcctggcccaagtgatcctcctgccttggcctcctaaagtgttgggattacaggtgtgagccactgcacctagccagaacatcgttaatgtagttcaatatgagataaattattatcttcnntgaaacaagctctaaaagcattccattcctaaattgtatttcaaacttcctattttgttgatatttcttaacttctggccagttttggaccataatcttttaatgtgaaccaaagatggtacgtatttgaccaaagcagttagttttaaatgtataaaattgaaccaaatggaaaaaataggttggggatgcagtatagattagtgactaagtgcataggctctggagtaaatctgagtttttttttttttaaaggaactaaaaaatgtactgcattttctttgtggaataaaagccttgcctgagttgtgctattttcataaggcttttgaagtggtcttgacccactgtgtgtaacagtatttcaggtggtcctccccatggctgaataatgccatccattattctttaatttttatttttagaaacagtgtttcactctgtcacccaggctggagtgcagtggcctgatcatggctcactgcagcctggacctcctgggctcaagtgatcttcctgcctcacagcctcccaaagtactcagattataggtgtgagccaccacgcctggccaccatctattacttttgaaatcttcaaaagacttgcttactcaatgtcagctgatggttggtaaaaataatttggcctttagtgttaagtgagacatcataagggtattgaggtatacattatggagattgatgtcaggtcagaatattggagttatacatctatttctgagttgaatactcagctcccacgagaaagaaagtagttttaaggtccagcttcttagtctacttgaagcaaattttttttcttttatatttctgaatataaatatactcttatatgggctaaaaagaccccatgaataaatagcaggttcagtagttgaggagtggagtttagtaggtttgttttcagtataaattagataacatgtggaggtcacagcattttggaaattgagtgtccccaagtgagctttgtttataaactttcgaaatgtcggaagtggacaggtttgttaaatcttgtctgccagcacccttttcttcctttgttccttttcctctctgtgttattgcctgcggcagccagtccttcatactagatagagttcagataaagcaaacgtttggcaaaaacatactgtttgacctcctccccctctgcttatgaaggggtagcatgattctgtgttttaaagcagtgatgtttcagctgtgaaatgcactcgctgtaagctctaggctgagtgcatggaaactgttacgcttctcattttatgtgatctcctaattggtatgtagcaaaaattttctaaaactgttttgtggcttgttttgtaataaaaccatgtgaaatactgaaaaaaaaaaaa

SEQ ID NO: 596338 - DNA, 161 bp, Homo sapiens
tctaatcttcttaaatgtaccctgaaatcttaccatgtacagaacaatatctgattactcaatttcttgtttaactaaattaaacaataatgcttataattggatgtatgataattaaaatgtatcaagcacttctatctgccaggctctgactgcactac

SEQ ID NO: 596339 - DNA, 3440 bp, Homo sapiens
  misc_feature (1087)..(1087): n is a, c, g, or t
  misc_feature (2049)..(2050): n is a, c, g, or t
gtcactaggttagaactgtaggcatactcagtggagaggaagctacctattctattctaactattctgaggtcttcctggagagggattgttttagcagctcctctccagagggggctggaagtccagtttcaccaatgaccaagttttatttccttgtccttgttttagttttttcattttgttttcagtccaggtgcctcgcagctcttttggaatgggccagcattagtctaattttaagcgctatgtgttttgtacccttgcaaacttgctttctctttcttcttgctgttgccctttgaatgaagccttgtgtgcttgcatgatcagaccctgtaataggatgaatttccatgcacttaacatgaagagatacaaaaagaatctagagagagatatatatttttaatgaaatagaagcttggcatagaaacattgatttagatgttatgagttgctggccagagattcctcagataaaagagcctagaaaattgagttttgagcgggcatggtggctcacgcctgtaatgccagtagtttgggaggctgaggcgggtggatcacctgaggtcaggagttcgagatcagcctggccaacatggtgaaaccccgcctctactaaaaaatatgcaaaattagccgggcgtggtggtgcaggcctgtaatcccagctactcagaggctgaggcaggagattcacttgaacccaggaggtggaggttgcagtgagccaagatcgcgccattgcactccagtcagggcaacaagagtgaaactccgtctcaaaatataaaagaaaattgagtgtcccacccaaattttagggcgtacctccttccatttgataagaagatgctatttccagtgtccctgggagaattcttccatccagtttatatggtgaattgccaccagcgttccctaaaggaagagagaacttagcttatttctgtctgtgacttttatcagctagatcagttaattgtatttttaaattaaaaattagtaactagaggaagagactaagagaactatttttacctgagtaaatgctctcctcttcttgtgtccaaatctaatgnagaggtgaaaacacttgatgagaaaatcctttgtggcttgaggggaatcatgtttctttcaggacgtgttgtttccctgaagtctatgtcacactgagaactttttctgactgcactgctttggagctattcatttaaattgagtttggcctagttttcctggtataaaacaggaaatctacattgttccctctttctctcccttccatcccttcccctgcctttcctatacacgctggtgtgcttttgccctcagaaattcttggtttgggagttatgtatttttgagtgatcgaggttatgacatacttggagcggcatgatttcaagaagccattccaaattcttatagctccttagctctggttttactctcgtattttccccaagaaaattttttggctattcaaagaaagcacaaaatatgtgatgtggaactcatgaaaatagggacttttgatatctctttaaatattccctgactcacggaaaagatgtcctcttttggtgtatacattgtgaaaatctacccatttatctctctctctctcttttcttttaaataaattatctgataaggccggcaaggtggctcacgcctgtaatcccagcactttgggaggccgaggcgagcggatcacgaggtcaggagatcgagaccgcggtgaaaccccgtctctactaaaaatacgaaaaaaaaattagccgggcgcagtggcaggcgcctgtagtgttagcttcccaagtagctaggactacagggttgtgctaccacgcctggctaatttttaatttttttttatctacagagcctggctatgttgcccaggctctctcaaactcctggcccaagtgatcctcctgccttggcctcctaaagtgttgggattacaggtgtgagccactgcacctagccagaacatcgttaatgtagttcaatatgagataaattattatcttcnntgaaacaagctctaaaagcattccattcctaaattgtatttcaaacttcctattttgttgatatttcttaacttctggccagttttggaccataatcttttaatgtgaaccaaagatggtacgtatttgaccaaagcagttagttttaaatgtataaaattgaaccaaatggaaaaaataggttggggatgcagtatagattagtgactaagtgcataggctctggagtaaatctgagtttttttttttttaaaggaactaaaaaatgtactgcattttctttgtggaataaaagccttgcctgagttgtgctattttcataaggcttttgaagtggtcttgacccactgtgtgtaacagtatttcaggtggtcctccccatggctgaataatgccatccattattctttaatttttatttttagaaacagtgtttcactctgtcacccaggctggagtgcagtggcctgatcatggctcactgcagcctggacctcctgggctcaagtgatcttcctgcctcacagcctcccaaagtactcagattataggtgtgagccaccacgcctggccaccatctattacttttgaaatcttcaaaagacttgcttactcaatgtcagctgatggttggtaaaaataatttggcctttagtgttaagtgagacatcataagggtattgaggtatacattatggagattgatgtcaggtcagaatattggagttatacatctatttctgagttgaatactcagctcccacgagaaagaaagtagttttaaggtccagcttcttagtctacttgaagcaaattttttttcttttatatttctgaatataaatatactcttatatgggctaaaaagaccccatgaataaatagcaggttcagtagttgaggagtggagtttagtaggtttgttttcagtataaattagataacatgtggaggtcacagcattttggaaattgagtgtccccaagtgagctttgtttataaactttcgaaatgtcggaagtggacaggtttgttaaatcttgtctgccagcacccttttcttcctttgttccttttcctctctgtgttattgcctgcggcagccagtccttcatactagatagagttcagataaagcaaacgtttggcaaaaacatactgtttgacctcctccccctctgcttatgaaggggtagcatgattctgtgttttaaagcagtgatgtttcagctgtgaaatgcactcgctgtaagctctaggctgagtgcatggaaactgttacgcttctcattttatgtgatctcctaattggtatgtagcaaaaattttctaaaactgttttgtggcttgttttgtaataaaaccatgtgaaatactgaaaaaaaaaaaa

SEQ ID NO: 596340 - DNA, 3189 bp, Homo sapiens
  misc_feature (1087)..(1087): n is a, c, g, or t
  misc_feature (1798)..(1799): n is a, c, g, or t
gtcactaggttagaactgtaggcatactcagtggagaggaagctacctattctattctaactattctgaggtcttcctggagagggattgttttagcagctcctctccagagggggctggaagtccagtttcaccaatgaccaagttttatttccttgtccttgttttagttttttcattttgttttcagtccaggtgcctcgcagctcttttggaatgggccagcattagtctaattttaagcgctatgtgttttgtacccttgcaaacttgctttctctttcttcttgctgttgccctttgaatgaagccttgtgtgcttgcatgatcagaccctgtaataggatgaatttccatgcacttaacatgaagagatacaaaaagaatctagagagagatatatatttttaatgaaatagaagcttggcatagaaacattgatttagatgttatgagttgctggccagagattcctcagataaaagagcctagaaaattgagttttgagcgggcatggtggctcacgcctgtaatgccagtagtttgggaggctgaggcgggtggatcacctgaggtcaggagttcgagatcagcctggccaacatggtgaaaccccgcctctactaaaaaatatgcaaaattagccgggcgtggtggtgcaggcctgtaatcccagctactcagaggctgaggcaggagattcacttgaacccaggaggtggaggttgcagtgagccaagatcgcgccattgcactccagtcagggcaacaagagtgaaactccgtctcaaaatataaaagaaaattgagtgtcccacccaaattttagggcgtacctccttccatttgataagaagatgctatttccagtgtccctgggagaattcttccatccagtttatatggtgaattgccaccagcgttccctaaaggaagagagaacttagcttatttctgtctgtgacttttatcagctagatcagttaattgtatttttaaattaaaaattagtaactagaggaagagactaagagaactatttttacctgagtaaatgctctcctcttcttgtgtccaaatctaatgnagaggtgaaaacacttgatgagaaaatcctttgtggcttgaggggaatcatgtttctttcaggacgtgttgtttccctgaagtctatgtcacactgagaactttttctgactgcactgctttggagctattcatttaaattgagtttggcctagttttcctggtataaaacaggaaatctacattgttccctctttctctcccttccatcccttcccctgcctttcctatacacgctggtgtgcttttgccctcagaaattcttggtttgggagttatgtatttttgagtgatcgaggttatgacatacttggagcggcatgatttcaagaagccattccaaattcttatagctccttagctctggttttactctcgtattttccccaagaaaattttttggctattcaaagaaagcacaaaatatgtgatgtggaactcatgaaaatagggacttttgatatctctttaaatattccctgactcacggaaaagatgtcctcttttggtgtatacattgtgaaaatctacctaatttttaatttttttttatctacagagcctggctatgttgcccaggctctctcaaactcctggcccaagtgatcctcctgccttggcctcctaaagtgttgggattacaggtgtgagccactgcacctagccagaacatcgttaatgtagttcaatatgagataaattattatcttcnntgaaacaagctctaaaagcattccattcctaaattgtatttcaaacttcctattttgttgatatttcttaacttctggccagttttggaccataatcttttaatgtgaaccaaagatggtacgtatttgaccaaagcagttagttttaaatgtataaaattgaaccaaatggaaaaaataggttggggatgcagtatagattagtgactaagtgcataggctctggagtaaatctgagtttttttttttttaaaggaactaaaaaatgtactgcattttctttgtggaataaaagccttgcctgagttgtgctattttcataaggcttttgaagtggtcttgacccactgtgtgtaacagtatttcaggtggtcctccccatggctgaataatgccatccattattctttaatttttatttttagaaacagtgtttcactctgtcacccaggctggagtgcagtggcctgatcatggctcactgcagcctggacctcctgggctcaagtgatcttcctgcctcacagcctcccaaagtactcagattataggtgtgagccaccacgcctggccaccatctattacttttgaaatcttcaaaagacttgcttactcaatgtcagctgatggttggtaaaaataatttggcctttagtgttaagtgagacatcataagggtattgaggtatacattatggagattgatgtcaggtcagaatattggagttatacatctatttctgagttgaatactcagctcccacgagaaagaaagtagttttaaggtccagcttcttagtctacttgaagcaaattttttttcttttatatttctgaatataaatatactcttatatgggctaaaaagaccccatgaataaatagcaggttcagtagttgaggagtggagtttagtaggtttgttttcagtataaattagataacatgtggaggtcacagcattttggaaattgagtgtccccaagtgagctttgtttataaactttcgaaatgtcggaagtggacaggtttgttaaatcttgtctgccagcacccttttcttcctttgttccttttcctctctgtgttattgcctgcggcagccagtccttcatactagatagagttcagataaagcaaacgtttggcaaaaacatactgtttgacctcctccccctctgcttatgaaggggtagcatgattctgtgttttaaagcagtgatgtttcagctgtgaaatgcactcgctgtaagctctaggctgagtgcatggaaactgttacgcttctcattttatgtgatctcctaattggtatgtagcaaaaattttctaaaactgttttgtggcttgttttgtaataaaaccatgtgaaatactgaaaaaaaaaaaa

SEQ ID NO: 596341 - DNA, 1999 bp, Homo sapiens
  misc_feature (608)..(609): n is a, c, g, or t
gtcactaggttagaactgtaggcatactcagtggagaggaagctacctattctattctaactattctgaggtcttcctggagagggattgttttagcagctcctctccagagggggctggaagtccagtttcaccaatgaccaagttttatttccttgtccttgttttagttttttcattttgttttcagtccaggtgcctcgcagctcttttggaatgggccagcattagtctaattttaagcgctatgtgttttgtacccttgcaaacttgctttctctttcttcttgctgttgccctttgaatgaagccttgtgtgcttgcatgatcagaccctgtaataggatgaatttccatgcacttaacatgaagagatacaaaaagaatctagagagagatatatatttttaatgaaatagaagcttggctaatttttaatttttttttatctacagagcctggctatgttgcccaggctctctcaaactcctggcccaagtgatcctcctgccttggcctcctaaagtgttgggattacaggtgtgagccactgcacctagccagaacatcgttaatgtagttcaatatgagataaattattatcttcnntgaaacaagctctaaaagcattccattcctaaattgtatttcaaacttcctattttgttgatatttcttaacttctggccagttttggaccataatcttttaatgtgaaccaaagatggtacgtatttgaccaaagcagttagttttaaatgtataaaattgaaccaaatggaaaaaataggttggggatgcagtatagattagtgactaagtgcataggctctggagtaaatctgagtttttttttttttaaaggaactaaaaaatgtactgcattttctttgtggaataaaagccttgcctgagttgtgctattttcataaggcttttgaagtggtcttgacccactgtgtgtaacagtatttcaggtggtcctccccatggctgaataatgccatccattattctttaatttttatttttagaaacagtgtttcactctgtcacccaggctggagtgcagtggcctgatcatggctcactgcagcctggacctcctgggctcaagtgatcttcctgcctcacagcctcccaaagtactcagattataggtgtgagccaccacgcctggccaccatctattacttttgaaatcttcaaaagacttgcttactcaatgtcagctgatggttggtaaaaataatttggcctttagtgttaagtgagacatcataagggtattgaggtatacattatggagattgatgtcaggtcagaatattggagttatacatctatttctgagttgaatactcagctcccacgagaaagaaagtagttttaaggtccagcttcttagtctacttgaagcaaattttttttcttttatatttctgaatataaatatactcttatatgggctaaaaagaccccatgaataaatagcaggttcagtagttgaggagtggagtttagtaggtttgttttcagtataaattagataacatgtggaggtcacagcattttggaaattgagtgtccccaagtgagctttgtttataaactttcgaaatgtcggaagtggacaggtttgttaaatcttgtctgccagcacccttttcttcctttgttccttttcctctctgtgttattgcctgcggcagccagtccttcatactagatagagttcagataaagcaaacgtttggcaaaaacatactgtttgacctcctccccctctgcttatgaaggggtagcatgattctgtgttttaaagcagtgatgtttcagctgtgaaatgcactcgctgtaagctctaggctgagtgcatggaaactgttacgcttctcattttatgtgatctcctaattggtatgtagcaaaaattttctaaaactgttttgtggcttgttttgtaataaaaccatgtgaaatactgaaaaaaaaaaaa

SEQ ID NO: 596342 - DNA, 1682 bp, Homo sapiens
  misc_feature (291)..(292): n is a, c, g, or t
ctggagtgcagtggcgcgatcttggctcactgcaagctccgcctcccaggttcacaccattctcctgccgcagcctcccaagtagctgggactacaggcgcctgccactgcgcccggctaatttttttttcgtatttttagtagagacggggtttcaccgcggtctcgatctcctgacctcgtgatccgctcgcctcggcctcccaaagtgctgggattacaggtgtgagccactgcacctagccagaacatcgttaatgtagttcaatatgagataaattattatcttcnntgaaacaagctctaaaagcattccattcctaaattgtatttcaaacttcctattttgttgatatttcttaacttctggccagttttggaccataatcttttaatgtgaaccaaagatggtacgtatttgaccaaagcagttagttttaaatgtataaaattgaaccaaatggaaaaaataggttggggatgcagtatagattagtgactaagtgcataggctctggagtaaatctgagtttttttttttttaaaggaactaaaaaatgtactgcattttctttgtggaataaaagccttgcctgagttgtgctattttcataaggcttttgaagtggtcttgacccactgtgtgtaacagtatttcaggtggtcctccccatggctgaataatgccatccattattctttaatttttatttttagaaacagtgtttcactctgtcacccaggctggagtgcagtggcctgatcatggctcactgcagcctggacctcctgggctcaagtgatcttcctgcctcacagcctcccaaagtactcagattataggtgtgagccaccacgcctggccaccatctattacttttgaaatcttcaaaagacttgcttactcaatgtcagctgatggttggtaaaaataatttggcctttagtgttaagtgagacatcataagggtattgaggtatacattatggagattgatgtcaggtcagaatattggagttatacatctatttctgagttgaatactcagctcccacgagaaagaaagtagttttaaggtccagcttcttagtctacttgaagcaaattttttttcttttatatttctgaatataaatatactcttatatgggctaaaaagaccccatgaataaatagcaggttcagtagttgaggagtggagtttagtaggtttgttttcagtataaattagataacatgtggaggtcacagcattttggaaattgagtgtccccaagtgagctttgtttataaactttcgaaatgtcggaagtggacaggtttgttaaatcttgtctgccagcacccttttcttcctttgttccttttcctctctgtgttattgcctgcggcagccagtccttcatactagatagagttcagataaagcaaacgtttggcaaaaacatactgtttgacctcctccccctctgcttatgaaggggtagcatgattctgtgttttaaagcagtgatgtttcagctgtgaaatgcactcgctgtaagctctaggctgagtgcatggaaactgttacgcttctcattttatgtgatctcctaattggtatgtagcaaaaattttctaaaactgttttgtggcttgttttgtaataaaaccatgtgaaatactgaaaaaaaaaaaa

SEQ ID NO: 596343 - DNA, 88 bp, Homo sapiens
aaatcagcattccctgtaaaaaaaaaaatcgccataatattctcataatgatttctcctaataaaaatggatattgttccagttccca

SEQ ID NO: 596344 - DNA, 2802 bp, Homo sapiens
  misc_feature (1087)..(1087): n is a, c, g, or t
gtcactaggttagaactgtaggcatactcagtggagaggaagctacctattctattctaactattctgaggtcttcctggagagggattgttttagcagctcctctccagagggggctggaagtccagtttcaccaatgaccaagttttatttccttgtccttgttttagttttttcattttgttttcagtccaggtgcctcgcagctcttttggaatgggccagcattagtctaattttaagcgctatgtgttttgtacccttgcaaacttgctttctctttcttcttgctgttgccctttgaatgaagccttgtgtgcttgcatgatcagaccctgtaataggatgaatttccatgcacttaacatgaagagatacaaaaagaatctagagagagatatatatttttaatgaaatagaagcttggcatagaaacattgatttagatgttatgagttgctggccagagattcctcagataaaagagcctagaaaattgagttttgagcgggcatggtggctcacgcctgtaatgccagtagtttgggaggctgaggcgggtggatcacctgaggtcaggagttcgagatcagcctggccaacatggtgaaaccccgcctctactaaaaaatatgcaaaattagccgggcgtggtggtgcaggcctgtaatcccagctactcagaggctgaggcaggagattcacttgaacccaggaggtggaggttgcagtgagccaagatcgcgccattgcactccagtcagggcaacaagagtgaaactccgtctcaaaatataaaagaaaattgagtgtcccacccaaattttagggcgtacctccttccatttgataagaagatgctatttccagtgtccctgggagaattcttccatccagtttatatggtgaattgccaccagcgttccctaaaggaagagagaacttagcttatttctgtctgtgacttttatcagctagatcagttaattgtatttttaaattaaaaattagtaactagaggaagagactaagagaactatttttacctgagtaaatgctctcctcttcttgtgtccaaatctaatgnagaggtgaaaacacttgatgagaaaatcctttgtggcttgaggggaatcatgtttctttcaggacgtgttgtttccctgaagtctatgtcacactgagaactttttctgactgcactgctttggagctattcatttaaattgagtttggcctagttttcctggtataaaacaggaaatctacattgttccctctttctctcccttccatcccttcccctgcctttcctatacacgctggtgtgcttttgccctcagaaattcttggtttgggagttatgtatttttgagtgatcgaggttatgacatacttggagcggcatgatttcaagaagccattccaaattcttatagctccttagctctggttttactctcgtattttccccaagaaaattttttggctattcaaagaaagcacaaaatatgtgatgtggaactcatgaaaatagggacttttgatatctctttaaatattccctgactcacggaaaagatgtcctcttttggtgtatacattgtgaaaatctacccatttatctctctctctctcttttcttttaaataaattatctgataaggccggcaaggtggctcacgcctgtaatcccagcactttgggaggccgaggcgagcggatcacgaggtcaggagatcgagaccgcggtgaaaccccgtctctactaaaaatacgaaaaaaaaattagccgggcgcagtggcaggcgcctgtagtcccagctacttgggaggctgcggcaggagaatggtgtgaaccaggctggagtgcagtggcctgatcatggctcactgcagcctggacctcctgggctcaagtgatcttcctgcctcacagcctcccaaagtactcagattataggtgtgagccaccacgcctggccaccatctattacttttgaaatcttcaaaagacttgcttactcaatgtcagctgatggttggtaaaaataatttggcctttagtgttaagtgagacatcataagggtattgaggtatacattatggagattgatgtcaggtcagaatattggagttatacatctatttctgagttgaatactcagctcccacgagaaagaaagtagttttaaggtccagcttcttagtctacttgaagcaaattttttttcttttatatttctgaatataaatatactcttatatgggctaaaaagaccccatgaataaatagcaggttcagtagttgaggagtggagtttagtaggtttgttttcagtataaattagataacatgtggaggtcacagcattttggaaattgagtgtccccaagtgagctttgtttataaactttcgaaatgtcggaagtggacaggtttgttaaatcttgtctgccagcacccttttcttcctttgttccttttcctctctgtgttattgcctgcggcagccagtccttcatactagatagagttcagataaagcaaacgtttggcaaaaacatactgtttgacctcctccccctctgcttatgaaggggtagcatgattctgtgttttaaagcagtgatgtttcagctgtgaaatgcactcgctgtaagctctaggctgagtgcatggaaactgttacgcttctcattttatgtgatctcctaattggtatgtagcaaaaattttctaaaactgttttgtggcttgttttgtaataaaaccatgtgaaatactgaaaaaaaaaaaa

SEQ ID NO: 596345 - DNA, 2679 bp, Homo sapiens
  misc_feature (1087)..(1087): n is a, c, g, or t
gtcactaggttagaactgtaggcatactcagtggagaggaagctacctattctattctaactattctgaggtcttcctggagagggattgttttagcagctcctctccagagggggctggaagtccagtttcaccaatgaccaagttttatttccttgtccttgttttagttttttcattttgttttcagtccaggtgcctcgcagctcttttggaatgggccagcattagtctaattttaagcgctatgtgttttgtacccttgcaaacttgctttctctttcttcttgctgttgccctttgaatgaagccttgtgtgcttgcatgatcagaccctgtaataggatgaatttccatgcacttaacatgaagagatacaaaaagaatctagagagagatatatatttttaatgaaatagaagcttggcatagaaacattgatttagatgttatgagttgctggccagagattcctcagataaaagagcctagaaaattgagttttgagcgggcatggtggctcacgcctgtaatgccagtagtttgggaggctgaggcgggtggatcacctgaggtcaggagttcgagatcagcctggccaacatggtgaaaccccgcctctactaaaaaatatgcaaaattagccgggcgtggtggtgcaggcctgtaatcccagctactcagaggctgaggcaggagattcacttgaacccaggaggtggaggttgcagtgagccaagatcgcgccattgcactccagtcagggcaacaagagtgaaactccgtctcaaaatataaaagaaaattgagtgtcccacccaaattttagggcgtacctccttccatttgataagaagatgctatttccagtgtccctgggagaattcttccatccagtttatatggtgaattgccaccagcgttccctaaaggaagagagaacttagcttatttctgtctgtgacttttatcagctagatcagttaattgtatttttaaattaaaaattagtaactagaggaagagactaagagaactatttttacctgagtaaatgctctcctcttcttgtgtccaaatctaatgnagaggtgaaaacacttgatgagaaaatcctttgtggcttgaggggaatcatgtttctttcaggacgtgttgtttccctgaagtctatgtcacactgagaactttttctgactgcactgctttggagctattcatttaaattgagtttggcctagttttcctggtataaaacaggaaatctacattgttccctctttctctcccttccatcccttcccctgcctttcctatacacgctggtgtgcttttgccctcagaaattcttggtttgggagttatgtatttttgagtgatcgaggttatgacatacttggagcggcatgatttcaagaagccattccaaattcttatagctccttagctctggttttactctcgtattttccccaagaaaattttttggctattcaaagaaagcacaaaatatgtgatgtggaactcatgaaaatagggacttttgatatctctttaaatattccctgactcacggaaaagatgtcctcttttggtgtatacattgtgaaaatctacccatttatctctctctctctcttttcttttaaataaattatctgataaggccggcaaggtggctcacgcctgtaatcccagcactttgggaggccgaggcgagcggatcacgaggtcaggagatcgagaccgcggtgaaaccccgtctctactaaaaatacgaaaaaaaaattagccgggcgcagtggcaggcgcctgtagtcccaaagtactcagattataggtgtgagccaccacgcctggccaccatctattacttttgaaatcttcaaaagacttgcttactcaatgtcagctgatggttggtaaaaataatttggcctttagtgttaagtgagacatcataagggtattgaggtatacattatggagattgatgtcaggtcagaatattggagttatacatctatttctgagttgaatactcagctcccacgagaaagaaagtagttttaaggtccagcttcttagtctacttgaagcaaattttttttcttttatatttctgaatataaatatactcttatatgggctaaaaagaccccatgaataaatagcaggttcagtagttgaggagtggagtttagtaggtttgttttcagtataaattagataacatgtggaggtcacagcattttggaaattgagtgtccccaagtgagctttgtttataaactttcgaaatgtcggaagtggacaggtttgttaaatcttgtctgccagcacccttttcttcctttgttccttttcctctctgtgttattgcctgcggcagccagtccttcatactagatagagttcagataaagcaaacgtttggcaaaaacatactgtttgacctcctccccctctgcttatgaaggggtagcatgattctgtgttttaaagcagtgatgtttcagctgtgaaatgcactcgctgtaagctctaggctgagtgcatggaaactgttacgcttctcattttatgtgatctcctaattggtatgtagcaaaaattttctaaaactgttttgtggcttgttttgtaataaaaccatgtgaaatactgaaaaaaaaaaaa

SEQ ID NO: 596346 - DNA, 2348 bp, Homo sapiens
  misc_feature (1087)..(1087): n is a, c, g, or t
gtcactaggttagaactgtaggcatactcagtggagaggaagctacctattctattctaactattctgaggtcttcctggagagggattgttttagcagctcctctccagagggggctggaagtccagtttcaccaatgaccaagttttatttccttgtccttgttttagttttttcattttgttttcagtccaggtgcctcgcagctcttttggaatgggccagcattagtctaattttaagcgctatgtgttttgtacccttgcaaacttgctttctctttcttcttgctgttgccctttgaatgaagccttgtgtgcttgcatgatcagaccctgtaataggatgaatttccatgcacttaacatgaagagatacaaaaagaatctagagagagatatatatttttaatgaaatagaagcttggcatagaaacattgatttagatgttatgagttgctggccagagattcctcagataaaagagcctagaaaattgagttttgagcgggcatggtggctcacgcctgtaatgccagtagtttgggaggctgaggcgggtggatcacctgaggtcaggagttcgagatcagcctggccaacatggtgaaaccccgcctctactaaaaaatatgcaaaattagccgggcgtggtggtgcaggcctgtaatcccagctactcagaggctgaggcaggagattcacttgaacccaggaggtggaggttgcagtgagccaagatcgcgccattgcactccagtcagggcaacaagagtgaaactccgtctcaaaatataaaagaaaattgagtgtcccacccaaattttagggcgtacctccttccatttgataagaagatgctatttccagtgtccctgggagaattcttccatccagtttatatggtgaattgccaccagcgttccctaaaggaagagagaacttagcttatttctgtctgtgacttttatcagctagatcagttaattgtatttttaaattaaaaattagtaactagaggaagagactaagagaactatttttacctgagtaaatgctctcctcttcttgtgtccaaatctaatgnagaggtgaaaacacttgatgagaaaatcctttgtggcttgaggggaatcatgtttctttcaggacgtgttgtttccctgaagtctatgtcacactgagaactttttctgactgcactgctttggagctattcatttaaattgagtttggcctagttttcctggtataaaacaggaaatctacattgttccctctttctctcccttccatcccttcccctgcctttcctatacacgctggtgtgcttttgccctcagaaattcttggtttgggagttatgtatttttgagtgatcgaggttatgacatacttggagcggcatgatttcaagaagccattccaaattcttatagctccttagctctggttttactctcgtattttccccaagaaaattttttggctattcaaagaaagcacaaaatatgtgatgtggaactcatgaaaatagggacttttgatatctctttaaatattccctgactcacggaaaagatgtcctcttttggtgtatacattgtgaaaatctacccatttatctctctctctctcttttcttttaaataaattatctgataaggccggcaaggtggctcacgcctgtaatcccagcactttgggaggccgaggcgagcggatcacgaggtcaggagatcgagaccgcggtgaaaccccgtctctactaaaaatacgaaaaaaaaattagccgggcgcagtggcaggcgcctgtagtcccagctacttgggaggctgcggcaggagaatggtgtgaacctgggaggcggagcttgcagtgagccaagatcgcgccactgcactccagcctgggcgacagagcaagactccatctcaaaaaaaattatctgataggttactattgctaaattaattggccattataaataacgctgattgtttcttattcagcaagatctctttgagaatgtgacaaattaaacatacatagaatccatatggtattatcctgataaagggaaacgaggacactaagactgtcaaatggaaatcttctgtcaatggcaaacacttgggaattccacattagagcatgcttgtttttaattttttttttttaatttttaaaagacagggtctcactctcttacccaggctagagtgcagtggtgtgatcatagttcatcataactttgaatctctgggcttaagcaatcctcccagctacttgggaggctgcggcaggagaatggtgtgaacctgggaggcggagcttgcagtgagcc

SEQ ID NO: 596347 - DNA, 755 bp, Homo sapiens
gggcagggaggaggtggtgggtccttctctaagggtagaagccagagctgctgctgagcatcccatagcacacagggtggtcctccatgagaaagaattatccagcccccagaagtccataatgctgctgtggagaagtcccacaggacatatggaaaatgagagtcagagggggcagtgatccgctccaagtcgcacagcttgttggcggcaggtccaagatataactgggttcctgactctgctgatctgtctgtggggccggcgttcagtgctgtgggtccatgggttgccaagtggactctttgtctccaggcactggttaggtattctttctaaatcatttcgatttccgggaaccatttatatcctgtgtcttgcatgtctcccctgtgtgtgtacacattttgtgcttctctctgggtaatcctaggcttgcaggcggtacagtacgacgtgtacctttccaactgacactgcccataacacatataattgaacaattacaagacgagaagaacaaagccaacaagcacaccaagcaacacaataccaacaaaaagacaacacgacaccgcgaccggcgacccacgaaaagccagacaaaaagtacggggagagcgaggcccaaaggcaaaaacagaagaggaaaggacaacagacaggaaacgaagcaacagaaagacaagacaaaaacaacggcgagagacagacagggagggagagagcgcaacaagaacacttaagaaaagccg

SEQ ID NO: 596348 - DNA, 124 bp, Homo sapiens
gactcttgaggatcccgagggagcatctgtcgtggccatggcaaatgaatacatttttaaatgaaatagaacctccaacagcctccccacaaccaccacacacaaagcacatgggtatcgatgt

SEQ ID NO: 596349 - DNA, 396 bp, Homo sapiens
  misc_feature (67)..(67): n is a, c, g, or t
  misc_feature (293)..(293): n is a, c, g, or t
  misc_feature (386)..(387): n is a, c, g, or t
  misc_feature (392)..(392): n is a, c, g, or t
ccccccccggaaaaatggggaaatccctccaaaaatcccggggtacaaagcccctttatccatatancctatgatttgccaaatattttcccctcattcccatagcttgtcttttcattattttaacaatgtcgtttgaagaagataagctttttattttgaatgaagtctaatttatcaatttcttttttaatggattgtgcttttggtgttgtatctaggaaatctttgcctaacccaaggacacaaagtcttcagttcctgaagctcaaaaagctgttgttgccaggcancaggtgtcacgcctgtaatcccagcactttgggaggccaaggtgggagggtcgcttgagcccagcttgggaatcataaggagaccctgtctcnntaagnatta

SEQ ID NO: 596350 - DNA, 1407 bp, Homo sapiens
tcacgcctcgcgtagctccaaacacgcgaaacacctaacaccaacatgaactacccctaagcgcgcacccaccccctaaggctctaccggcgggatttgatggcgtgatgtctcacagaaagttctccgctcccagacatgggtccctcggcttcctgcctcggaagcgcagcagcaggcatcgtgggaaggtgaagagcttccctaaggatgacccgtccaagccggtccacctcacagccttcctgggatacaaggctggcatgactcacatcgtgcgggaagtcgacaggccgggatccaaggtgaacaagaaggaggtggtggaggctgtgaccatttgtagagacaccacccatgggtggttgtgggcattgtgggctacgtggaaacccctcgaggcctccggaccttcaagactgtctttgctgagcacatcagtgatgaatgcaagaggcgtttctataagaatttggcataaatctaagaagaaggcctttaccaagtactgcaagaaatggcaggatgaggatggcaagaagcagctggagaaaggacttcagcagcatgaagaagtactgccaagtcatccgtgtcattgcccacacccagatgcgcctgcttcctctgcgccagaagaaggcccacctgatggagatccaggtgaacggaggcactgtggccgagaagctggactgggcccgcgagaggcttgagcagcaggtacctgtgaaccaagtgtttgggcagggatgagatgatcgacgtcatccggggtgaccaagggcaaaggctacaaaggggtcaccagtcgttggcacaccaagaagctgccccgcaagacccaccgaggcctgcgcaaggtggcctgtattggggcatggcatcctgctcgtgtagccttctctgtggcacgcgctgggcagaaaggctaccatcaccgcactgagatcaacaagaagatttataagattggccagggctaccttatcaaggacggcaagctgatcaagaacaatgcctccactgactatgacctatctgacaagagcatcaaccctctgggtggctttgtccactatggtgaagtgaccaatgactttgtcatgctgaaaggctgtgtggtgggaacccagaaagcgggtgctcaccctccgcaagtccttgctggtgcagacgaagcggcgggctctggagaagattgaccttaagttcattgacaccacctccaagtttggccatggccgcttccagaccatggaggagaagaaagcattcatgggacccctgaagaaagaccgaattgcaaaggaagaaggagcttaatgccaggaacagattttgcagttggtggggtttccaataaaagttattttcccctgttaacgaaaagaaaaaaaatatcga

SEQ ID NO: 596351 - DNA, 1484 bp, Homo sapiens
tcacgcctcgcgtagctccaaacacgcgaaacacctaacaccaacatgaactacccctaagcgcgcacccaccccctaaggctctaccggcgggatttgatggcgtgatgtctcacagaaagttctccgctcccagacatgggtccctcggcttcctgcctcggaagcgcagcagcaggcatcgtgggaaggtgaagagcttccctaaggatgacccgtccaagccggtccacctcacagccttcctgggatacaaggctggcatgactcacatcgtgcgggaagtcgacaggccgggatccaaggtgaacaagaaggaggtggtggaggctgtgaccatttgtagagacaccacccatgggtggttgtgggcattgtgggctacgtggaaacccctcgaggcctccggaccttcaagactgtctttgctgagcacatcagtgatgaatgcaagaggcgtttctataagaatttggcataaatctaagaagaaggcctttaccaagtactgcaagaaatggcaggatgaggatggcaagaagcagctggagaaaggacttcagcagcatgaagaagtactgccaagtcatccgtgtcattgcccacacccagatgcgcctgcttcctctgcgccagaagaaggcccacctgatggagatccaggtgaacggaggcactgtggccgagaagctggactgggcccgcgagaggcttgagcagcaggtacctgtgaaccaagtgtttgggcagggatgagatgatcgacgtcatccggggtgaccaagggcaaaggctacaaaggggtcaccagtcgttggcacaccaagaagctgccccgcaagacccaccgaggcctgcgcaaggtggcctgtattggggcatggcatcctgctcgtgtagccttctctgtggcacgcgctgggcagaaaggctaccatcaccgcactgagatcaacaagaagatttataagattggccagggctaccttatcaaggacggcaagctgatcaagaacaatgcctccactgactatgacctatctgacaagagcatcaaccctctgggtggctttgtccactatggtgaagtgaccaatgactttgtcatgctgaaaggctgtgtggtgggaacccagaaagaagcgggtgctcaccctctgggtggctttgtccactatggtgaagtgaccaatgactttgtcatgctgaaaggctgtgtggtgggaaccaagaagcgggtgctcaccctccgcaagtccttgctggtgcagacgaagcggcgggctctggagaagattgaccttaagttcattgacaccacctccaagtttggccatggccgcttccagaccatggaggagaagaaagcattcatgggacccctgaagaaagaccgaattgcaaaggaagaaggagcttaatgccaggaacagattttgcagttggtggggtctcaataaaagttattttcagtggaaaataac

SEQ ID NO: 596352 - DNA, 484 bp, Homo sapiens
cagcccagtttatgattcagtgaaaatcaatttcaacagtcactcatgagtatcctggcgccatctggtgactccccagaaattcactgtcagcctcttatatattgtcgtgggggaaagacttggtgccgtaaagtgattctgatcacactccttcaaggtcaaataaataatctcttgaaactggctggatatgcaaaccctaagggaattatgagaataaccctgtccacggttacaatccagcccccagccctgggcgaaaagcccctcactcctctttaccaccagagagatgagaccagaaggccctgattaaacactcaccccttcaggagaacccagagttatagaagggatgtcagtggcgctgagcagtagctttaagtcccagaaaagccttttcttactatgcaaacccactcgtgcctggatgcccactttacatttgtggtggctgcctccaccctggcagaacccattc

SEQ ID NO: 596353 - DNA, 1485 bp, Homo sapiens
  misc_feature (1362)..(1362): n is a, c, g, or t
  misc_feature (1374)..(1374): n is a, c, g, or t
  misc_feature (1389)..(1389): n is a, c, g, or t
  misc_feature (1440)..(1440): n is a, c, g, or t
tcacgcctcgcgtagctccaaacacgcgaaacacctaacaccaacatgaactacccctaagcgcgcacccaccccctaaggctctaccggcgggatttgatggcgtgatgtctcacagaaagttctccgctcccagacatgggtccctcggcttcctgcctcggaagcgcagcagcaggcatcgtgggaaggtgaagagcttccctaaggatgacccgtccaagccggtccacctcacagccttcctgggatacaaggctggcatgactcacatcgtgcgggaagtcgacaggccgggatccaaggtgaacaagaaggaggtggtggaggctgtgaccatttgtagagacaccacccatgggtggttgtgggcattgtgggctacgtggaaacccctcgaggcctccggaccttcaagactgtctttgctgagcacatcagtgatgaatgcaagaggcgtttctataagaatttggcataaatctaagaagaaggcctttaccaagtactgcaagaaatggcaggatgaggatggcaagaagcagctggagaaaggacttcagcagcatgaagaagtactgccaagtcatccgtgtcattgcccacacccagatgcgcctgcttcctctgcgccagaagaaggcccacctgatggagatccaggtgaacggaggcactgtggccgagaagctggactgggcccgcgagaggcttgagcagcaggtacctgtgaaccaagtgtttgggcagggatgagatgatcgacgtcatccggggtgaccaagggcaaaggctacaaaggggtcaccagtcgttggcacaccaagaagctgccccgcaagacccaccgaggcctgcgcaaggtggcctgtattggggcatggcatcctgctcgtgtagccttctctgtggcacgcgctgggcagaaaggctaccatcaccgcactgagatcaacaagaagatttataagattggccagggctaccttatcaaggacggcaagctgatcaagaacaatgcctccactgactatgacctatctgacaagagcatcaaccctctgggtggctttgtccactatggtgaagtgaccaatgactttgtcatgctgaaaggctgtgtggtgggaacccagaaagcgggtgctcaccctccgcaagtccttgctggtgcagacgaagcggcgggctctggagaagattgaccttaagttcattgacaccacctccaagtttggccatggccgcttccagaccatggaggagaagaaagcattcatgggacccctgaagaaagaccgaattgcaaaggaagaaggagcttaatgccaggaacagattttgcagttggtggggtcccanaattaaaatccnttcctctaccactanacttatgttgttacttaatctcttccatctctcggatattactagtatctnatataacaataactggtggtataaggggtaccgggagctcgaatt

SEQ ID NO: 596354 - DNA, 354 bp, Homo sapiens
cttctcaccctgcagattacacaaaatgtctcgggcttaaggtcacagtgaataattctagtcatagtgcaaagcatccaagcactgcagcatcgagtgggcaaactagcgaaccaaaggcagactgacgccctggcatttattcttcttgatgagctcatagaggttcatgctcagcagatcaaacgatcaatgcagatgatggattgcggaaggatgaaatatctccagcatatggatgacattcatagtgttatcctatgatccatgcttccgcaggatgttccaaggattcgagatctccatccgctgcttgccggagatggaaagcgcttctcacttccgcaccatcat

SEQ ID NO: 596355 - DNA, 1816 bp, Homo sapiens
  misc_feature (1382)..(1382): n is a, c, g, or t
tcacgcctcgcgtagctccaaacacgcgaaacacctaacaccaacatgaactacccctaagcgcgcacccaccccctaaggctctaccggcgggatttgatggcgtgatgtctcacagaaagttctccgctcccagacatgggtccctcggcttcctgcctcggaagcgcagcagcaggcatcgtgggaaggtgaagagcttccctaaggatgacccgtccaagccggtccacctcacagccttcctgggatacaaggctggcatgactcacatcgtgcgggaagtcgacaggccgggatccaaggtgaacaagaaggaggtggtggaggctgtgaccatttgtagagacaccacccatgggtggttgtgggcattgtgggctacgtggaaacccctcgaggcctccggaccttcaagactgtctttgctgagcacatcagtgatgaatgcaagaggcgtttctataagaatttggcataaatctaagaagaaggcctttaccaagtactgcaagaaatggcaggatgaggatggcaagaagcagctggagaaaggacttcagcagcatgaagaagtactgccaagtcatccgtgtcattgcccacacccagatgcgcctgcttcctctgcgccagaagaaggcccacctgatggagatccaggtgaacggaggcactgtggccgagaagctggactgggcccgcgagaggcttgagcagcaggtacctgtgaaccaagtgtttgggcagggatgagatgatcgacgtcatccggggtgaccaagggcaaaggctacaaaggggtcaccagtcgttggcacaccaagaagctgccccgcaagacccaccgaggcctgcgcaaggtggcctgtattggggcatggcatcctgctcgtgtagccttctctgtggcacgcgctgggcagaaaggctaccatcaccgcactgagatcaacaagaagatttataagattggccagggctaccttatcaaggacggcaagctgatcaagaacaatgcctccactgactatgacctatctgacaagagcatcaaccctctgggtggctttgtccactatggtgaagtgaccaatgactttgtcatgctgaaaggctgtgtggtgggaacccagaaagcgggtgctcaccctccgcaagtccttgctggtgcagacgaagcggcgggctctggagaagattgaccttaagttcattgacaccacctccaagtttggccatggccgcttccagaccatggaggagaagaaagcattcatgggacccctgaagaaagaccgaattgcaaaggaagaaggagcttaatgccaggaacagattttgcagttggtggggtctcaataaaagttattttccactgnaaaaaaaaaaaaaaaaaaaaaaaaaaaaaaaaaaaaaaaaaaaaaaaaaaaaaaaaaaaaaaaaaaaaaaaaaaaaaaaaaaaaaaaaaagaaaaaaaaaaacaaaaaaacaagagagagaggagggaggagcgagagaggaaagagagaaagagaaaaagaaacgacaggagggggggggagcggcgcgcggcggaagagagagagcgacaggaggagcgagagagagggaaggaacggagaagcagagccacgagaaccacggagaaaagcgcgagggggagagaagagacgacagaagaaacgaggagagggacgagcgcgccggaggggagaagagagagagacagagagagggagaaacacgagcaagagaagagcaaggcggaaggagagagcgaacgagccacacagaagcgagaagaggcacgggg

SEQ ID NO: 596356 - DNA, 1911 bp, Homo sapiens
  misc_feature (1477)..(1477): n is a, c, g, or t
tcacgcctcgcgtagctccaaacacgcgaaacacctaacaccaacatgaactacccctaagcgcgcacccaccccctaaggctctaccggcgggatttgatggcgtgatgtctcacagaaagttctccgctcccagacatgggtccctcggcttcctgcctcggaagcgcagcagcaggcatcgtgggaaggtgaagagcttccctaaggatgacccgtccaagccggtccacctcacagccttcctgggatacaaggctggcatgactcacatcgtgcgggaagtcgacaggccgggatccaaggtgaacaagaaggaggtggtggaggctgtgaccatttgtagagacaccacccatgggtggttgtgggcattgtgggctacgtggaaacccctcgaggcctccggaccttcaagactgtctttgctgagcacatcagtgatgaatgcaagaggcgtttctataagaatttggcataaatctaagaagaaggcctttaccaagtactgcaagaaatggcaggatgaggatggcaagaagcagctggagaaaggacttcagcagcatgaagaagtactgccaagtcatccgtgtcattgcccacacccagatgcgcctgcttcctctgcgccagaagaaggcccacctgatggagatccaggtgaacggaggcactgtggccgagaagctggactgggcccgcgagaggcttgagcagcaggtacctgtgaaccaagtgtttgggcagggatgagatgatcgacgtcatccggggtgaccaagggcaaaggctacaaaggggtcaccagtcgttggcacaccaagaagctgccccgcaagacccaccgaggcctgcgcaaggtggcctgtattggggcatggcatcctgctcgtgtagccttctctgtggcacgcgctgggcagaaaggctaccatcaccgcactgagatcaacaagaagatttataagattggccagggctaccttatcaaggacggcaagctgatcaagaacaatgcctccactgactatgacctatctgacaagagcatcaaccctctgggtggctttgtccactatggtgaagtgaccaatgactttgtcatgctgaaaggctgtgtggtgggaacccagaaagaagcgggtgctcaccctctgggtggctttgtccactatggtgaagtgaccaatgactttgtcatgctgaaaggctgtgtggtgggaaccaagaagcgggtgctcaccctccgcaagtccttgctggtgcagacgaagcggcgggctctggagaagattgaccttaagttcattgacaccacctccaagtttggccatggccgcttccagaccatggaggagaagaaagcattcatgggacccctgaagaaagaccgaattgcaaaggaagaaggagcttaatgccaggaacagattttgcagttggtggggtctcaataaaagttattttccactgnaaaaaaaaaaaaaaaaaaaaaaaaaaaaaaaaaaaaaaaaaaaaaaaaaaaaaaaaaaaaaaaaaaaaaaaaaaaaaaaaaaaaaaaaaagaaaaaaaaaaacaaaaaaacaagagagagaggagggaggagcgagagaggaaagagagaaagagaaaaagaaacgacaggagggggggggagcggcgcgcggcggaagagagagagcgacaggaggagcgagagagagggaaggaacggagaagcagagccacgagaaccacggagaaaagcgcgagggggagagaagagacgacagaagaaacgaggagagggacgagcgcgccggaggggagaagagagagagacagagagagggagaaacacgagcaagagaagagcaaggcggaaggagagagcgaacgagccacacagaagcgagaagaggcacgggg

SEQ ID NO: 596357 - DNA, 461 bp, Homo sapiens
tgagatggagtctcgctctgtcgcccaggctggagtgcagtggtgcgatctccactcactgcaagctccacctcccaaggttcacaccattctcctgcctcagcctcccaagtagctgggactacaggagcccgccactacgcccagctaattttttttttttatttttaatggagatggggtttcaccgtgtgttggccaggatggtctcgatctcctgacctcgtgatcctcccgccttggccgcccaaagtgctgggattacaggcatgagccaccatgcccggcaaggccaggaatttcaagaccactctgggtaacaaagcaagactgtctttacaaaaagttaaaaaatgagctgggcatggtggtgcacacctgtagtgttagctattcatggggccaaggtgggagcatcacttaagcccacaaattcgagacttcgagggctgcaggggtag

SEQ ID NO: 596358 - DNA, 323 bp, Homo sapiens
gccgatgaacccaccacttacactccagtcctgggccaaagaacaatgacccattcatcagaacatccaaaagattcttaaaaattgagaaacaagaaatgtcacatactatattagaaatactgtactggttttgttgtatattcttctctttttccttctgtcatctcccaccttctacaacatatattcagatagctatatccttccttcattataccacaagatatgaggctacttattgggggaagaaataactagaatgttctcctaacatttcactaaagaaggtaaaaaacatggtttcctagaatatacctaac

SEQ ID NO: 596359 - DNA, 1386 bp, Homo sapiens
tcacgcctcgcgtagctccaaacacgcgaaacacctaacaccaacatgaactacccctaagcgcgcacccaccccctaaggctctaccggcgggatttgatggcgtgatgtctcacagaaagttctccgctcccagacatgggtccctcggcttcctgcctcggaagcgcagcagcaggcatcgtgggaaggtgaagagcttccctaaggatgacccgtccaagccggtccacctcacagccttcctgggatacaaggctggcatgactcacatcgtgcgggaagtcgacaggccgggatccaaggtgaacaagaaggaggtggtggaggctgtgaccatttgtagagacaccacccatgggtggttgtgggcattgtgggctacgtggaaacccctcgaggcctccggaccttcaagactgtctttgctgagcacatcagtgatgaatgcaagaggcgtttctataagaatttggcataaatctaagaagaaggcctttaccaagtactgcaagaaatggcaggatgaggatggcaagaagcagctggagaaaggacttcagcagcatgaagaagtactgccaagtcatccgtgtcattgcccacacccagatgcgcctgcttcctctgcgccagaagaaggcccacctgatggagatccaggtgaacggaggcactgtggccgagaagctggactgggcccgcgagaggcttgagcagcaggtacctgtgaaccaagtgtttgggcaggcggggtgaccaagggcaaaggctacaaaggggtcaccagtcgttggcacaccaagaagctgccccgcaagacccaccgaggcctgcgcaaggtggcctgtattggggcatggcatcctgctcgtgtagccttctctgtggcacgcgctgggcagaaaggctaccatcaccgcactgagatcaacaagaagatttataagattggccagggctaccttatcaaggacggcaagctgatcaagaacaatgcctccactgactatgacctatctgacaagagcatcaaccctctgggtggctttgtccactatggtgaagtgaccaatgactttgtcatgctgaaaggctgtgtggtgggaacccagaaagcgggtgctcaccctccgcaagtccttgctggtgcagacgaagcggcgggctctggagaagattgaccttaagttcattgacaccacctccaagtttggccatggccgcttccagaccatggaggagaagaaagcattcatgggacccctgaagaaagaccgaattgcaaaggaagaaggagcttaatgccaggaacagattttgcagttggtggggtttccaataaaagttattttcccctgttaacgaaaagaaaaaaaatatcga

SEQ ID NO: 596360 - DNA, 559 bp, Homo sapiens
  misc_feature (1)..(1): n is a, c, g, or t
  misc_feature (69)..(69): n is a, c, g, or t
  misc_feature (87)..(91): n is a, c, g, or t
  misc_feature (93)..(94): n is a, c, g, or t
  misc_feature (100)..(100): n is a, c, g, or t
  misc_feature (102)..(102): n is a, c, g, or t
  misc_feature (106)..(106): n is a, c, g, or t
  misc_feature (109)..(109): n is a, c, g, or t
  misc_feature (111)..(111): n is a, c, g, or t
  misc_feature (192)..(192): n is a, c, g, or t
  misc_feature (224)..(224): n is a, c, g, or t
  misc_feature (245)..(245): n is a, c, g, or t
  misc_feature (250)..(250): n is a, c, g, or t
  misc_feature (253)..(253): n is a, c, g, or t
  misc_feature (271)..(271): n is a, c, g, or t
  misc_feature (274)..(274): n is a, c, g, or t
  misc_feature (278)..(278): n is a, c, g, or t
  misc_feature (326)..(326): n is a, c, g, or t
  misc_feature (330)..(330): n is a, c, g, or t
  misc_feature (337)..(337): n is a, c, g, or t
  misc_feature (342)..(342): n is a, c, g, or t
  misc_feature (381)..(381): n is a, c, g, or t
  misc_feature (395)..(395): n is a, c, g, or t
  misc_feature (402)..(402): n is a, c, g, or t
  misc_feature (405)..(405): n is a, c, g, or t
  misc_feature (434)..(434): n is a, c, g, or t
  misc_feature (436)..(436): n is a, c, g, or t
  misc_feature (439)..(441): n is a, c, g, or t
  misc_feature (443)..(444): n is a, c, g, or t
  misc_feature (446)..(447): n is a, c, g, or t
  misc_feature (449)..(450): n is a, c, g, or t
  misc_feature (454)..(454): n is a, c, g, or t
  misc_feature (457)..(457): n is a, c, g, or t
  misc_feature (460)..(460): n is a, c, g, or t
  misc_feature (490)..(490): n is a, c, g, or t
  misc_feature (495)..(496): n is a, c, g, or t
  misc_feature (528)..(528): n is a, c, g, or t
ngatatgggtataggtatcattagtatgctttataatttattcacgttagatatactctttatagatangagagagtagtgtgagcnnnnnannatttcntnaaancgngntgtggtggaaataaatgaacacatgaagtgtccgctgaaagaagaatcagtgtttcttgggaagaaccaagattccctganagaagctaccctatgtagaggacaaagtaggncttcaataaatattagttggnttacngcntttcccaaggatacatcnggngggnctgcattcctttctcattggtgccgcctgagcacagaactagcttttnccgngacagcnaaccnaaaccccgcagtgctaagtgctgagacggatgagaagangcggccaccggggngagacanaanatcagggaagcaaagcccgaccgacgcgngnaannnanngnngnncaanccntanccccgcccccccctcacccccgccctcccnccttnngctccttatcctcctccccccccacaaagatngtcgtgcccccccctctccctccctagcgct

SEQ ID NO: 596361 - DNA, 911 bp, Homo sapiens
tcacgcctcgcgtagctccaaacacgcgaaacacctaacaccaacatgaactacccctaagcgcgcacccaccccctaaggctctaccggcgggatttgatggcgtgatgtctcacagaaagttctccgctcccagacatgggtccctcggcttcctgcctcggaagcgcagcagcaggcatcgtgggaaggtgaagagcttccctaaggatgacccgtccaagccggtccacctcacagccttcctgggatacaaggctggcatgactcacatcgtgcgggaagtcgacaggccgggatccaaggtgaacaagaaggaggtggtggaggctgtgaccatttgtagagacaccacccatgggtggttgtgggcattgtgggctacgtggaaacccctcgaggcctccggaccttcaagactgtctttgctgagcacatcagtgatgaatgcaagaggcgtttctataagaatttggcataaatctaagaagaaggcctttaccaagtactgcaagaaatggcaggatgaggatggcaagaagcagctggagaaaggacttcagcagcatgaagaagtactgccaagtcatccgtgtcattgcccacacccagatgcgcctgcttcctctgcgccagaagaaggcccacctgatggagatccaggtgaacggaggcactgtggccgagaagctggactgggcccgcgagaggcttgagcagcaggtacctgtgaaccaagtgtttgggcagggatgagataatccacctcatccgggggagccaaggggcgggtttcaagaggggtaccaattcggttggcccaccacgttgcccgaagagacacccagggcttgccaaggggggcctttattggggactggatcctctccggtccttctcttggggcccgc

SEQ ID NO: 596362 - DNA, 1464 bp, Homo sapiens
  misc_feature (447)..(447): n is a, c, g, or t
tcacgcctcgcgtagctccaaacacgcgaaacacctaacaccaacatgaactacccctaagcgcgcacccaccccctaaggctctaccggcgggatttgatggcgtgatgtctcacagaaagttctccgctcccagacatgggtccctcggcttcctgcctcggaagcgcagcagcaggcatcgtgggaaggtgaagagcttccctaaggatgacccgtccaagccggtccacctcacagccttcctgggatacaaggctggcatgactcacatcgtgcgggaagtcgacaggccgggatccaaggtgaacaagaaggaggtggtggaggctgtgaccatttgtagagacaccacccatgggtggttgtgggcattgtgcgtgcatacgttggaacaatccctctcgcatgagcctccagggaccctgtcacacgcatcgtagttcntgttgtcatgacgcacgagtcatgtggactagtagatgccaagacggcgtcttcttataatgaattttgggcgaatacacaattcttgaacgaaggtacatgggctctttaaccagcgttacttgcgaagggactactgtgcaggcatgatggcatggcatacgtacacgctagctggggaaggacgtcgtcggcttgaatacgtactgcctatggttggtccgtgtcattgcccacacccagatgcgcctgcttcctctgcgccagaagaaggcccacctgatggagatccaggtgaacggaggcactgtggccgagaagctggactgggcccgcgagaggcttgagcagcaggtacctgtgaaccaagtgtttgggcaggcggggtgaccaagggcaaaggctacaaaggggtcaccagtcgttggcacaccaagaagctgccccgcaagacccaccgaggcctgcgcaaggtggcctgtattggggcatggcatcctgctcgtgtagccttctctgtggcacgcgctgggcagaaaggctaccatcaccgcactgagatcaacaagaagatttataagattggccagggctaccttatcaaggacggcaagctgatcaagaacaatgcctccactgactatgacctatctgacaagagcatcaaccctctgggtggctttgtccactatggtgaagtgaccaatgactttgtcatgctgaaaggctgtgtggtgggaacccagaaagcgggtgctcaccctccgcaagtccttgctggtgcagacgaagcggcgggctctggagaagattgaccttaagttcattgacaccacctccaagtttggccatggccgcttccagaccatggaggagaagaaagcattcatgggacccctgaagaaagaccgaattgcaaaggaagaaggagcttaatgccaggaacagattttgcagttggtggggtttccaataaaagttattttcccctgttaacgaaaagaaaaaaaatatcga

SEQ ID NO: 596363 - DNA, 992 bp, Homo sapiens
  misc_feature (558)..(558): n is a, c, g, or t
tcacgcctcgcgtagctccaaacacgcgaaacacctaacaccaacatgaactacccctaagcgcgcacccaccccctaaggctctaccggcgggatttgatggcgtgatgtctcacagaaagttctccgctcccagacatgggtccctcggcttcctgcctcggaagcgcagcagcaggcatcgtgggaaggtgaagagcttccctaaggatgacccgtccaagccggtccacctcacagccttcctgggatacaaggctggcatgactcacatcgtgcgggaagtcgacaggccgggatccaaggtgaacaagaaggaggtggtggaggctgtgaccatttgtagagacaccacccatgggtggttgtgggcattgtgggctacgtggaaacccctcgaggcctccggaccttcaagactgtctttgctgagcacatcagtgatgaatgcaagaggcgtttctataagaatttggcataaatctaagaagaaggagcttaatgccaggaacagattttgcagttggtggggtctcaataaaagttattttccactgnaaaaaaaaaaaaaaaaaaaaaaaaaaaaaaaaaaaaaaaaaaaaaaaaaaaaaaaaaaaaaaaaaaaaaaaaaaaaaaaaaaaaaaaaaagaaaaaaaaaaacaaaaaaacaagagagagaggagggaggagcgagagaggaaagagagaaagagaaaaagaaacgacaggagggggggggagcggcgcgcggcggaagagagagagcgacaggaggagcgagagagagggaaggaacggagaagcagagccacgagaaccacggagaaaagcgcgagggggagagaagagacgacagaagaaacgaggagagggacgagcgcgccggaggggagaagagagagagacagagagagggagaaacacgagcaagagaagagcaaggcggaaggagagagcgaacgagccacacagaagcgagaagaggcacgggg

SEQ ID NO: 596364 - DNA, 1208 bp, Homo sapiens
  misc_feature (662)..(662): n is a, c, g, or t
  misc_feature (761)..(761): n is a, c, g, or t
tcacgcctcgcgtagctccaaacacgcgaaacacctaacaccaacatgaactacccctaagcgcgcacccaccccctaaggctctaccggcgggatttgatggcgtgatgtctcacagaaagttctccgctcccagacatgggtccctcggcttcctgcctcggaagcgcagcagcaggcatcgtgggaaggtgaagagcttccctaaggatgacccgtccaagccggtccacctcacagccttcctgggatacaaggctggcatgactcacatcgtgcgggaagtcgacaggccgggatccaaggtgaacaagaaggaggtggtggaggctgtgaccatttgtagagacaccacccatgggtggttgtgggcattgtgggctacgtggaaacccctcgaggcctccggaccttcaagactgtctttgctgagcacatcagtgatgaatgcaagaggcgtttctataagaatttggcataaatctaaggaacgcacatggccgtttaccgatagtacttgccaagcaatatggacaggcatgacggataggcaacgaatgcatggctggatgcacacggatcttgcagcctaggcactgtagggaacgtactggaccggggatcactaccggtggtccatctcgtcgccagcaacgcacaanggagtagtcgcctgactatccctctggcgtcctaagacaagaagaggccccaaacactagaattgtgaggatgcaccagggtaggacaccggaagggcnacctaagttgcgccgcgaagaacatgccttgggcaactgggagggccccctgccgcaaggacgagcttccgaaggccatggccaattgggtagcccgtcgtttgcagacctccacaggtgggtctcctggggggaccaaggcgcacgttgaaggcacttggaaatccggaaactgggtgccaattacctgcgctggctttgaagcaccgagatgcgcggcacagaaaggtggcccttgaacgataaacgcgagggcttccaaacggccgaagataccagcttctcagggacgaaccaaccgcgaaaaggcaaaaggccctggactcccacggtccaccatggtagccccccaatcgcctggactggccccccttgcccaggtccaaaaagggctaggggcccccgtgggttacctgcacggggcggggccacttggggcacattccc

SEQ ID NO: 596365 - DNA, 446 bp, Homo sapiens
gttctagatcgcgagcgccgcccttttttttttggttggtgttttatcagaattggctggactatgctggcaagggacttggtttacgatcaaatggtactagtgtctgcagggttggtcagtactcgtcaaagccaagtccaattaaaaaaaaaaaaaaggggcggccgcccttttgtttataagtgcctaagatttggacagcaggaagaaaacaattttttaaaaatttctcattacaatagacgcacaagaatatgtcacattaaagaaaaatgtgtttagaatacgggttttctattatacgcatgatattttcctaagtaaaatggccaatgtgggacatgggaagtccagaaggaaaataatttacattaatggctgggtggatcttaacaatattttggtgcctacaacgctttaattaattaaaacaaaacaacaac

SEQ ID NO: 596366 - DNA, 120 bp, Homo sapiens
ggagagattaccaaggcagacttcttccagagactccagcaagccactgtaccaactatgccttattcaaactggtgtgcagtatattcttcattataataaaaggtctacccatacaat

SEQ ID NO: 596367 - DNA, 180 bp, Homo sapiens
tccccacccatggccacagtataatagtacctccctcctatgggttgctgagtgtttaacattgaatcaggcacacacaagcactcagcacagagcttttcctcagtacaggctgcttaggttatgacctttgccacaggctgtgtccagccacggtagggacgggtcgaaccaggacta

SEQ ID NO: 596368 - DNA, 327 bp, Homo sapiens
  misc_feature (31)..(31): n is a, c, g, or t
  misc_feature (70)..(70): n is a, c, g, or t
  misc_feature (81)..(81): n is a, c, g, or t
  misc_feature (223)..(223): n is a, c, g, or t
  misc_feature (237)..(237): n is a, c, g, or t
  misc_feature (267)..(267): n is a, c, g, or t
  misc_feature (270)..(270): n is a, c, g, or t
cctcaggagcatgcacaaaataagccctganatcctgggcctcttcagacagcttaatatccctaaagtnctgtaactcanagccctgcaggtggccagcatttgccgagagaggaccatcttcttgccctccccctcacctgcatcaccacactctgtggtgcggtcagaggctgggctagggagacagagggcatgggcacaagtcctggctctgcccctngctcaccagctctnaggccttagacaagcaacttgacctctctntgncactgtttctgtttccgtaaaatggtgataacaaagagtacctaactggtaggctgt

SEQ ID NO: 596369 - DNA, 125 bp, Homo sapiens
gccaagcgcatagctcagcaggcggcaggcggcctgagcttcagggcagccagctccctcccggtctcgcttaccctcgcggtcagcatgaaagccttcagtcccgtgagtcccttgggaaaaac

SEQ ID NO: 596370 - DNA, 404 bp, Homo sapiens
  misc_feature (404)..(404): n is a, c, g, or t
tctcatgagatctgatggttttataaagggctcctgcgcacgctctcttgcctgccaccatgtaagatgtgtctttgctcctcctttgtcttctgccatggttgtgaggcctctccagccatgtggagctgtgagtccattaaacctctctctctttttttttaaataaattacccattcttgagtatttctttatagcagtgtgaaaatggactaatataataggttggtaccagtagagtggggtactgctattaagatacctgaggccaggcatggtggcccatgcatgtaatcctagcactttgggaggccgagggaggcagatgatcatcacctaggtcaggaatttgagaccagcctggccaacatggcgaaatcccgtctctactaaaaaaaaaaan

SEQ ID NO: 596371 - DNA, 366 bp, Homo sapiens
taaagtagtaatatgggctatataacacaagtaaagtggtgtgggaaagttcctccattcattggattcctttaaaagcgaataccaacggttgtgcaatttatccatgaccacatacaatgatccaatgaactagataaggtacaatctctcaggtaactgtcaaatttggaggtaggattaaaaaaatacttcaggggttctactctgaccacgtactttactgatctgttgcccttggcattgggggtcatgggaagaaggagggagaaaatgtcgatgggagaaggatacaggggatgagaggagtacccattagaagttttgagcccatggggtaggcacttaacctccccaaatcacgga

SEQ ID NO: 596372 - DNA, 247 bp, Homo sapiens
acagaaatggaacgaacacatctaaaagcaaatgcttagcaagtaagttcagtaataatgtgaaggtagtatactatacagcactgtgatggacaagcaagttgttaggcacatccaccaaaaacaattacttactcctatcatcgctaggcacaagactgtgatgccatacacctagcatttaaacacaaacaacgagtttagaagccacccagaaacaccagtatggcccattttactactacag

SEQ ID NO: 596373 - DNA, 287 bp, Homo sapiens
  misc_feature (119)..(119): n is a, c, g, or t
  misc_feature (148)..(149): n is a, c, g, or t
  misc_feature (160)..(160): n is a, c, g, or t
  misc_feature (171)..(171): n is a, c, g, or t
  misc_feature (203)..(203): n is a, c, g, or t
  misc_feature (213)..(213): n is a, c, g, or t
  misc_feature (269)..(270): n is a, c, g, or t
  misc_feature (276)..(276): n is a, c, g, or t
caagggccaaaccctcctggttcccttcaaagtctttttggcctgatgatgactcttgagtgataccctgtgatgcaaacatgccccaaatgggtttttcctttctttaaaactagggnctttcaagattaaaaaaaagattgtcccnnctaatttgacncctaacttcanaagcttccctgtctacatgtgaacttttccanaaaaactgtnccatggacatttttcctctggggaattaacatttaaattttggtaactattaaaanncagatntggttaattta

SEQ ID NO: 596374 - DNA, 96 bp, Homo sapiens
ccaatctgaagtgggagcggccagtccttgcccacaacgatgtggagccctgtgaaagtcggattcgaataaagggccacgtgtgcacccagaaaa

SEQ ID NO: 596375 - DNA, 248 bp, Homo sapiens
tcataataaacgcagtgaggcaaatggtgacttatgctgggctagtagggggtgggcacgaaaggcctttgtgagacgccatttgagctgcagtgtacatacatgagtcaatttcatccctcacaccaaccctgtaatgtaagtactattatacctattttacaagggaagcacttggggctgcgagactttaaaaagctagcctaacatttcttagctagtatgcggcaaagaagacctttagactc

SEQ ID NO: 596376 - DNA, 246 bp, Homo sapiens
cggacgtacgcctgacatcatagatgacccgtctcttattaagaaacacaaaagttacacatattacgctcgtctgtggtgtccattgcccgctaatctcagctactcgggaggctaaggcacgagaatcacttgaactggggaggcggaggctgcagtgggctgaaattgcgccattgcaccccagcctgggcaacaagggcaaaacttccattctcaaaaaaaaaaacgtgtttccctttggtt

SEQ ID NO: 596377 - DNA, 749 bp, Homo sapiens
cgcggtggctcatgcctgtaatcccagcactttggtagtaccaggtggatcacaaggtcaggagatcaagactatcctggctaacacggtgaaaccccgtctctactaaaaaatacaaaaaaaaaattagcggggcacgggggcggacattggtagtcccagttactcgggaggctgaggcaggagagtggtgtgaacctgggaggcggagctggcagtgagctgagatcatgccactggcactccagcctgggcgacagagcgagactctgtctcagaaaaaaaaggaaatctcatgaaagcaggggagccaaagccttccttcctacatcctcaagtttaaaagcatgacggaggctgggcgcaggggctcactccgggtaatcccagaactctgggaggccaaggcaggaggatcattggagctcagaagcgggagatcagctggaaagcagagcggagaacccacctcggtgtgaaaagtaacaacacaactcaaatcaaataaaataaagcactatggaccctccaaaagtagtcactactcgggaaatgcaagcgattgccaaatcgaacagcttccgaggaccggggtgcaaaagctaaaagccggtggccccgaaagccatgagtggagaggggctactcaaccacgtcaggaatccaggaaaacggaagaaccaataagtaaccggcaagcctcgaggagtcaaaggaaaggatccctagggaagaggcgtccgagaaaa

SEQ ID NO: 596378 - DNA, 307 bp, Homo sapiens
atcgagctcggtacttcataggttcgcagagtggggatttggcagggtcataggacaatagtggagggaaggtcagcagataaacaagtgaacaaaggtctctggttttcctaggccagaggaccctgcggccttggccttccgcagtgttcgtgtccctgggtacttaagattagggagtggtgatgactcctaacgagcatgctgccttcaagcatctgtttaacaaagcacatcttgcaccgcccttaatccatttaaccctgagtggacacagcacatgtttcagagacctgcgaacctatga

SEQ ID NO: 596379 - DNA, 235 bp, Homo sapiens
tccttgtatccaagcagtcggaaaaaaaaaagaaaaagaaaaagagaaacattgacgaattagagagctagttagtgggctatagcacaagacgcattgggagtaaataataaggacctgaagtaggttgtggccaatagggattagaaacgaaccactatacactacagggtaagacattacagccaggacctgggattggctggcatcagtcaagtggggcacgacgcccaag

SEQ ID NO: 596380 - DNA, 824 bp, Homo sapiens
  misc_feature (22)..(22): n is a, c, g, or t
  misc_feature (92)..(92): n is a, c, g, or t
  misc_feature (118)..(118): n is a, c, g, or t
  misc_feature (146)..(146): n is a, c, g, or t
  misc_feature (149)..(149): n is a, c, g, or t
  misc_feature (167)..(167): n is a, c, g, or t
  misc_feature (254)..(254): n is a, c, g, or t
  misc_feature (291)..(291): n is a, c, g, or t
  misc_feature (297)..(297): n is a, c, g, or t
  misc_feature (365)..(365): n is a, c, g, or t
  misc_feature (385)..(385): n is a, c, g, or t
  misc_feature (420)..(420): n is a, c, g, or t
  misc_feature (476)..(476): n is a, c, g, or t
  misc_feature (480)..(480): n is a, c, g, or t
  misc_feature (503)..(503): n is a, c, g, or t
  misc_feature (514)..(514): n is a, c, g, or t
  misc_feature (526)..(526): n is a, c, g, or t
  misc_feature (547)..(547): n is a, c, g, or t
  misc_feature (560)..(560): n is a, c, g, or t
  misc_feature (564)..(564): n is a, c, g, or t
  misc_feature (589)..(589): n is a, c, g, or t
  misc_feature (637)..(637): n is a, c, g, or t
  misc_feature (642)..(642): n is a, c, g, or t
  misc_feature (702)..(702): n is a, c, g, or t
  misc_feature (730)..(730): n is a, c, g, or t
  misc_feature (741)..(741): n is a, c, g, or t
  misc_feature (763)..(763): n is a, c, g, or t
  misc_feature (787)..(787): n is a, c, g, or t
gagaagggcctccctagcaggngtgcactgcaggcctcagccctgtactggttagagtaatggagcaacaaccgctttcctaagcagaagtnaggcaagccactcccgcacagattgngaaaagggttaaaatttctccccccgcncgncgagaggccaagggtgtnccccaacagcctgcctacccagcaggtcacagaccatccccactctggctggcctggaagggtttgaccagagcggatcaagcagtnaccagggccagggcggctggcaggggcggcctccgtntccatnctgtctcctaagcagcctgggagaagtgggcctaagcttcggtgaggacgagagtttgttttggaatngggcctaaaaggggagagtncagagacagggccaggaaaagaaggtgagggtgtnacgtcatttagagaccagctgcacccagggctcacctcctggaggcacctagagtnagcngggggctaagtcagccgacagtntggctgcacancccaggcctgtnccagcagaaggcatgaaccancagcaaatgagtntctnttccaagaaacgaaaaggtcttgtncagagccggggccttgggagtgtcctgatgtttcaaccactgcgcccngcctncctgtttcgacgcccagggttccaactccaaggtggaatggccaacgtgtggtctcagtntggtggccgtctggggtgggtctcggcngccgcctagtnacctgggaggcagaagtttctntgccttgagggacaaacttcagcnagcggctgaatatcccgggaatccggaccggtacagc

SEQ ID NO: 596381 - DNA, 110 bp, Homo sapiens
ggcacaccccgctacggtcggtcctgtaacctctgcccgctggttttaagccattctcctgcctcagcttctgagtaggtgggattacaggcacccgcaacatgcccggc

SEQ ID NO: 596382 - DNA, 1105 bp, Homo sapiens
actgaataagaacatgtgagttacacctatactggtgtataatggaggctgtgggattgacgaaaagtgtcacattagtgttggaatgtaggtgattgtacagctttataagacctttagcaccaggaaataaaatatgtgtgtgtacacacacagtattttaagaaacgattgtgaattcatccaaaccttaagattaggaaactgattggctgtaagctgatagcctcaacgtaatgtgtcccccgaccccataacatgtctttaactgatgccaacgtatccaacatcctagtgatcagcatgtctcaacacttatattctactgaacgggcttactcacactaatactgcttatgtattctaactaccatgctatccctagcgccgtcccatgacccatgcacaatggcgtgacacgcatacagccactgcacttatctggatcagacttcccaacacataccccaacatgataagggcacggctacaacgcctatgcgaaaacacttccgctcattaacactagggccgagtatttctacaccaagacctctagctcaacacactaccaacgcatggcccacacatttactgcgcactgctcccacctacttactcacatccgttctataaacacacgacttggcaagaaacttgctaaaacacaactaactctattccacacaattctaaacacacatttaagccatccatctatacgcccgaacaccaactattcaacacacaactttacttcactccatgccccctccaactaatagcactactccactctacccactgaaaccaacatatatatacacccatctaccaaggcgcctataccacttgacttccaccaaatggatatcaataaaagcacatacaatcttgaaacgtcttctccccatcgcaaacacaaccccccaagctataccgcccactcgggtccaacacttctcctcacccctccactcaccccataagagcaccatcacttctaaacgcacattatattgccctacacaccgtagggctcttaacatctcacctattagcaaccatacttctcccacgtacacccacaataaaaccctattgc

SEQ ID NO: 596383 - DNA, 226 bp, Homo sapiens
  misc_feature (19)..(19): n is a, c, g, or t
acattgtctaacacttccntttattatttatttatttttaaaatttatttgtttatttttgaggcagaatctcgctctgtcgcccaggctgcagtgcagtggcatgacctcggctcactgcaacctccacctcctgggtacaagcgattctcctgcttcagcctcccaagtggctggggaggaggtcagaaggaagaaggaaatagatcggtgggtgaatggaggt

SEQ ID NO: 596384 - DNA, 181 bp, Homo sapiens
  misc_feature (111)..(112): n is a, c, g, or t
  misc_feature (156)..(156): n is a, c, g, or t
ggtcgcctctagacggatccccacctacgtccaccggttgggctaccaaacacgttgacgccgtagactgccgtcggacactggtgaacgggacgacctcgacacgtaccnntctgacggcttgtacggacgggtaacaactacgacgaccccagntaaacacttgtaactacacgcacgt

SEQ ID NO: 596385 - DNA, 450 bp, Homo sapiens
agatggacccttccagaagcgtgggcagctgatggtggtgtccttctgggagaagagcagagatacacgtgccatgttcagcacgaggggctgccgtgagcccctcagcctgacatggaagccgtcttcccagcccaccatccccatcgtgggcatcgttgctggcctgtcttgtaaagctgtcctagctgtcctaggagctatggtggctgttgtgatgtgtaggaggaagagctcaggtggaaaaggagggagctgctctcaggctgcgtccagcaacagtgcccagggctctgatgagtctctcatcgcttgtaaagcctgagacagctgcctgtgtgggactgagatgcaggatttcttcacacctctcctttgtgacttcaagagcctctggcatctctttctgcaaaggcatctgaatgtgcctgcgaacctatgagggtaccg

SEQ ID NO: 596386 - DNA, 231 bp, Homo sapiens
tccactttttgcattagttatggtaaatataacttagctttgttattatattgtagcaaagccacccccttatcacagaattcacatcattttaaaaatgcttacaaaattctatttgctaaattttaacctgctttacttgtattcattctaaatattttcactaagactcttagttttcgctttcggttaaatactcaaacacatttgattttttcatatttcactatc

SEQ ID NO: 596387 - DNA, 215 bp, Homo sapiens
cgacatgtggtagttcgcacctctttggctgtctgtcagtcaatgctactgtgaattctggtgtgtggggcttcttggctgttttgtatatcttcttgggcaacatgttgatccccgtcctttgtccgtgtttgaattgttttcatagttctttcctcttaaaacctgtgttatgattacattgattgagagtacgttgtaggaatggatttcta

SEQ ID NO: 596388 - DNA, 93 bp, Homo sapiens
ggtaacatgggggaggtgcagggtcgctgtgtgcttgctggtcgactgccatctcctggaactcgcctaggttgcccgatgcgctggcctaca

SEQ ID NO: 596389 - DNA, 237 bp, Homo sapiens
  misc_feature (174)..(174): n is a, c, g, or t
cccaagctactcgggaggctaaggaagaagaattgcttgaacctgggaggtagaggttgcagtgagccgagatcatgtcactgcactccagcctgatgacagagcaagactctgtctgaaaaaaaaaaagaaagaagtaacttacctcctgtaatattgtgatttttggccagncacggtggctcatggctgtaatcccaaaatgctgggatgacaggcgtacgttgctgcccagac

SEQ ID NO: 596390 - DNA, 138 bp, Homo sapiens
ccgttgtcagtatgcgttgcagtgggctgagatcgcgccactgtgctctagcctgggcaactttagtgcgaccccatcttggaaaacaaaaaaaaaaattttatacctcaaatttggacggacccttgacacgggctt

SEQ ID NO: 596391 - DNA, 106 bp, Homo sapiens
ggggaaaaaagggggggatttttttttttacccgggtttggggttgtttcccggccaaaggccagttttttttttccccccttttaaattaaccctttttttccca

SEQ ID NO: 596392 - DNA, 868 bp, Homo sapiens
agactctgtctcaaaaaaaaaaaaaaaaaaaaaagggatttttacctagttagcagcatggttctgggtagtgggggttgtgacctcattcaccccagggttgaaattcaatcaattccagtgggatgcgggaagttgcctcggggttctcgccgaaattctcccgggcagctttgcttgaaggcccaggggcaactcattatttggtggctcttccacctgtgggtctccagaggacggcgcacgctgttggattggtagtccacgcaggggcttggtttccaggggttcccactcttggcccagaattaaagggggaaaagcgcaagggtgtcaggctcagggcgattgcaagggcagacagggactacgctgaggtcacctggtctctggatttctttaaaaatctcccaaggaaggaaggagggaggcaaaattggaggaataaattacaatgttttatggtctggtgcccagggtttggaggggaaacagggcatggtggtggcttcgccgtggtggggaactgtgtttgaacggggcaaacactttttttctaaaggggggaggaaactttaaaaatacacccggaataaaggtgggatctaaacaatttccattttctaggaatttgtgtctccttaagaggagattaaggcagaaagacaacggtcgctaagattgattgtacccggggaatatttttacattacgcaaaccattgtgagaaacagattccaagattgttccaaaataagggggaagaagatataccatggttggcatattaaaactttatgtagggaggaaagattaggggagttgggacaaatagcatggatatactggaagatggaacagacggaat

SEQ ID NO: 596393 - DNA, 258 bp, Homo sapiens
gtttccccgatgctctcctctctagttcactatgcaaggctgtgatcatcctggggccaatgaaggaccgagtcaagtgatgacctggatctccgtaatttccaacataagatttcggatctctgtggtgccacgatacagagtccagggaaggcccaggaggacgtgacggcttgtgtgccctggagaattgtctgctctacatgttttattggaacaaggtctagggatcacgattcgtagggcctatattggagg

SEQ ID NO: 596394 - DNA, 92 bp, Homo sapiens
agacggctccaaggatctttcggcagctgctgttcttagggagagcagagaccatgtctgaacatagaagaggttgtggagcgtcaccaggg

SEQ ID NO: 596395 - DNA, 500 bp, Homo sapiens
gcagacagagtatgacattaattcctgcagtgaacaactctatagacccttcaccctaatgtgtccatttaaatggagccctatttgctatgcacacactttttcaaagaatctattagagaatgtgaatacccagttataagccacaaaaaagaaagcaacaaaatataatgaaatccccattacatccctttgccctataatactttcccttgactttgctataagcattcctctggcattcccactcctgacccacaagattattaaatgtttattgtctcaactaactatgccaacaggttcgtaatatcgatacagagaaagtggaagactctgtgaaagttatttacattaaacatgcaagtgtaaaaaaggattgttgagccacaggagtgagctaagaaggcagttgtgaattctgtgcattcaagatgaaacaatgttatttgtgtgtgttagctgcctggctgagtcaataaagaagattccaatttgga

SEQ ID NO: 596396 - DNA, 844 bp, Homo sapiens
atcacgttgtttgcaaatcactttcatgacaatacatctatttcaggtgtatcacacctgaaaaaaacatgagtactgtgaatttgtggattttcaggctcaatgcagaaaaacaccccccaaaacaaaaaatcacaacaatgaaaacaccatttccagagctgtgctgttattcgtgtgacgaatagtgaatgtatgatcataaaatagaataagctgtctttagatgaagtttgggcacagtttatggagtaggtaacagttaatcattgtttattaggtacataatccttaattgaaaacataaccatatagcagcagctttcatcttgtgtcacaaaaataactggtgtatcctctaaatttgatttgtctaataccttaaaggaaggcagaatagcatggacaagaacttgagttcttgagccagactcgatctgctccttgctaggtgattaaccttagattggtttcttggccatttgctggcccagagatttttgaaaaagttaccaactgctcagcttcatcatttgtaaaatgaggttaaaaaaaattctgcggcctggcgtggtgcctcacgcctgtaatcccagcactttgggaggccgaagtgggtggatcatgaggtcaagagatcgagaccatcctggccaaccaacatggtgaaagcctgtctctactaaaaatacaaaaattagctgggcgtcgtagcagtgcgcctgtaggtcccagctactctggaggctgaggccaggagaatcgcttgaacccgggaagttgaaggttgtagtgagccaagatggggcactgcacttcagcatggcaacagagttgagacttc

SEQ ID NO: 596397 - DNA, 691 bp, Homo sapiens
  misc_feature (242)..(242): n is a, c, g, or t
  misc_feature (260)..(260): n is a, c, g, or t
  misc_feature (289)..(289): n is a, c, g, or t
  misc_feature (291)..(291): n is a, c, g, or t
  misc_feature (307)..(307): n is a, c, g, or t
  misc_feature (356)..(356): n is a, c, g, or t
ggctccttagctgagcaggcgagagcatcatggataccgacttatatgatgagttgggaattatatggaccagagcttgattctgatgaagatgatgatgaattgggtagagagaccaaagatcttgatgagatggatgatgatgacgacgacgatgacgtaggagatcatgacgatgaccaccctgggatggaggtggtgctgctgaggacaagaagtactacccaagcagccgaggaggngtatggtcctgaggtggngaccatagttcaagaggaagacactcagncntctcacagaacccatnattaagccagagaaaagcaagaaatatcactctgatggagacagacatnacctgatacggtgtatgagactggcataccttgcgccggcatccgaacgcgcataacacacagaagaccacaacagaagactgctgaccccatacgccagacaccatcctccagccaatggcaacgaacacatgaacccccgcaaggaataggccgacacaccaaacagactcacccccgggaaaacacaggaaaggcggcccacagacccccacgcaacccaggagcacaccacccgccaccacccccgtcgcagcagcaagccacagcaagcagagcgcggtcaaggcacaccacaaagccaccaacccggccgaacagccggaccccgccca

SEQ ID NO: 596398 - DNA, 318 bp, Homo sapiens
agccggtccagtgctactccacaaacaggctgtagtgcagggcacactaagtatccatttcattccattccattccattccactccatttcactccactccactccactctattccattccactccactccactacactacactacactccattcaactccttgtgtttccattgcactccattccattccactcctttcaagtaaattgcactcaactcctttccactccatttcactccactccattccattccactcaactgcactgcacttcactacactccattccattccaccacattccactggctataca

SEQ ID NO: 596399 - DNA, 158 bp, Homo sapiens
ggggggcccccccgggggggccccccccccccggtttccccttggggtttttttggggcttttttaaaaaaaaccccctttgggggaaaggggaaagggccaaaaaaattttttttttttccttggcccccgggggggggggggggtttttttgggga

SEQ ID NO: 596400 - DNA, 145 bp, Homo sapiens
gtaaagcgtttggtcctcacttcgaagcaccaattatgcttgctaactcagcgcgtaaccgttctgcgtctatccgtattccttacgtttctaaccctaaaggtaaacgtatcgaagctcgtttcccagacccaatgatgaaccc

SEQ ID NO: 596401 - DNA, 215 bp, Homo sapiens
  misc_feature (77)..(78): n is a, c, g, or t
atgtgttttgtgtatttacctgtagacattggggggttttgtcatgttgaccatttttcattgtagagatggggggnnttgtcatgttgcctgaacttggcttaagggatccacccaccttaagcttccaaaggtcttgggttacaaggattagccccttcggccccggcaattttttccctttacacttctctgtgggcacacaactccctttt

SEQ ID NO: 596402 - DNA, 144 bp, Homo sapiens
tacatcctgcagcgcatgtcactcccgcagcccacgcacaggcacccagcgtgaccgggacaagtacttcattcgagcatgagtatctgaggatcagcactgccagtggcagcatgggcgtccgtcagcggcctggggcatcct

SEQ ID NO: 596403 - DNA, 396 bp, Homo sapiens
  misc_feature (59)..(59): n is a, c, g, or t
  misc_feature (87)..(88): n is a, c, g, or t
  misc_feature (143)..(143): n is a, c, g, or t
  misc_feature (187)..(187): n is a, c, g, or t
  misc_feature (204)..(204): n is a, c, g, or t
aaaaaaaaaaaaaaaaaaaaaaaaaaaaaaaaaaaaaaaaaaaaaaaaaaaaaaaaaanaaaaaaaaaaaaaaaaaaaaaaaaaaannaaaaaaaaaaaaaaaaaaaaaaaaaaaaaaaaaaaaaaaaaaaaaaaaaaaaaanaaaaaaaaaaaaaaaaaaaaaaaaaaaaaaaaaaaaaaaaaaanaaaaaaaaaaaaaaaanaaaaaaaaaaaaaaaaaaaaaaaaaaaaaacacaacaaagaaaaggacacaccccaacaggaaatcccacgcaccacacagagcgcgacgctcacaacctccccgcaccacgccctctatatcactcactcccccgctccccgtcctcccccctcaccgggggagcaccgcatgagggcggcagcaaaaaga

SEQ ID NO: 596404 - DNA, 358 bp, Homo sapiens
tacacagctccttatcccctggcagcactttaaaaaaaaaattaggttcagggggtacatgtgcaggtaactcgtgacaagggggtttgttatacagattatttagtgacccaggtactaagcctagtacccaatagttacttttctggtcctgtcccttttcccaccctccaccctcaggtaggccccagtatgttattcctttgtgtccatgttatttcactcccacttgtgagaacatggaatatttggtttcctgttcctatgttagtttgttaaggataatggcctccagccccatccatgttcctgcaaaggacatgatctttctttggcaaccactttttactgtcgccat

SEQ ID NO: 596405 - DNA, 406 bp, Homo sapiens
aagggtaccgtgaagaagatcactcccaccaggcccactccaacacgggaatcacatttcaacatgagatttggagaggacagacatccaaaccgtatcaggtagtgttgaggttgttgaggtaagtgtatacaaagctcttagcacagagtgaagctcagtgaacaaatggctcttcttatgaagagcagccctcagcggaggcatggcacctccttcaagagaaccaaacttggaaaccttgaattaggaagtgattactcactttacagggaatgactacggtaatgatatatttgctttctgttacctaaacttagcagcttacatatttatcatctaatggtttctttagctcagaaatgtgggcatagctttatgggtcctctacttagggtctctcaag

SEQ ID NO: 596406 - DNA, 244 bp, Homo sapiens
  misc_feature (16)..(16): n is a, c, g, or t
  misc_feature (25)..(25): n is a, c, g, or t
  misc_feature (30)..(31): n is a, c, g, or t
  misc_feature (64)..(64): n is a, c, g, or t
ccccaaacacaggtgnaggggcggncgggnntggaaaagatgtgcgaatttactaccaccctgnattcagcgtgcgttcctgggccttgtatgcactagagtgccctcatgcttggcattaggaatgggttggaactgcaggcatttaggctgtccttctacaaccacagaagagccatcactggcagagagatcctttggcggagttaagcagagatcttctcagaagagcttttgaatacat

SEQ ID NO: 596407 - DNA, 492 bp, Homo sapiens
  misc_feature (427)..(427): n is a, c, g, or t
agtactggatataggcatgaacactgcgtatggccatatatgggattttaacaggtaggtgatgggatcagacttgtagtcactttgttggctacagtgtgaagaaggagttgaaggagagaccgagaatagggagaccagacaggaggggtggtggtaattgtctaaacgtacattgatgagaacctaaattggaaacagatgtgagatctgttaggtcctggtggggatagcacatagcacattatttttgacaatttgcttgtctgtcattggactataggcaatttgagagcagggactgcttgtcttgttcaccattctgtcttctaccaggataccttgaacatcttcagtgctcaatagttgctgaatgaataaatgagtctgagtaactccccggggatacaggggagaacggtgaacncctgtaaccctagagcattaccaaccgggactgcatgtatgagtgggcaaaactggccacatggg

SEQ ID NO: 596408 - DNA, 274 bp, Homo sapiens
gttggggctcattcaggattccagcatccttcaccacggggcaggagtcggccacagagaggggtggatggccttccctcacatttccaggaacggagtatctaccaagatcaggaacaaaggatcttagagttccgggaagagctgggggaagggaaggccaccacagcacatgatctgtctgggaaactggggactccgaagaaagaaatcaatcgagtttaatactcccgggcaaagaagggcaagctacagaaagagggtaccgagctcg

SEQ ID NO: 596409 - DNA, 294 bp, Homo sapiens
  misc_feature (20)..(20): n is a, c, g, or t
  misc_feature (49)..(49): n is a, c, g, or t
  misc_feature (108)..(108): n is a, c, g, or t
  misc_feature (141)..(141): n is a, c, g, or t
  misc_feature (206)..(206): n is a, c, g, or t
  misc_feature (252)..(252): n is a, c, g, or t
ccagagagtaaaagtgtttnaagaaggagcaattctatcgattttgatnttgggaaatcaacacggcataattatgtcaccggagcctgaacaactccggtgacttcngcgctaaacggggacgtttatgcgcacatacantccaaactctcttctcccttcacagatgcagaaatgcacctgcaattctttgcatctagcgtttnacctctgcggaggggaagcgtgaacctctcacaagacggcatcaanttacatcgcggcaacttcaccgctatcggtcggcagatccag

SEQ ID NO: 596410 - DNA, 777 bp, Homo sapiens
ctgccgtatggtaacagatgtagccacgtgacactttctggtcagctttcacttcccagagggggtccttcctgagccacagctgctgcctgtgcagcccttgaactcgggcccataccctctcacttcctgggcccgaaatatccacaggggagtaaagccaggaacctggtgctcactctcatctgtaggtcagggtgcacacaggaagggccatgccccaaggaaagtgcttgctaggctaaccctggggccctggcgtgtctttcgatttcgacacgcgcctgaggccatggcacatctctagctctcgtcgttcttgacgaggctagagggtgcggtttcgttgtgcacactgcgggtagacgctagtggagaccaagtagtcgttcccctggtacatacagacatgccctgggctagtgcagtgtcgcgcattcctttgggaggacgagaacgggatcagtgttgctgacagtctggtctagtagccccataaagagctcatggagcaccggcgtagtggcagcgtgggctatccgtgcacagtctggagtataagagggaagcgatgttaacgccccccgtacacccgaggagctcttgcagacacgacgacagcagcaggcaggagcgtcaatggtgcaaaggggagggactggatgaggagttggtgaaaacacacgctggcctggacgcgagaacaagtttgaccctggggatctacatgcagatgaagctggggcaggcgcccatgcctggaacccacagtgggag

SEQ ID NO: 596411 - DNA, 105 bp, Homo sapiens
gtgcaatgattaaactagtatagaaaataaggaaagattatagtctgaataaagtaagatagaaagcagtttaaataatcgacaaaaaaatcttctaatgcatta

SEQ ID NO: 596412 - DNA, 421 bp, Homo sapiens
cagaatacggcttaccaacattggactcggacccaccgggaatcagtgtcgacgagagtaccgtcgacatcccacaagacagcggcaaagaaacggtcggcggtcgcagtgtgcgtctcacgtggcattagaatagtttgcctccgggtgatggacgacggaggcgtcggtggactggccaggatgaagcaggaactcctctgacagttgtacaccgaatccacgtcggatcgagtagttacaccaccttgacgcgatcttacgaggttcggacaggttggcggtaaccgaaactgtaccggcagccacgagaagtatggtgatcgatggcgccagtgccaagggattcaccgtcaaggcggaaccggtttccgaccccatgagcatggccccagtaagcgtcgtggactccggaaatgac

SEQ ID NO: 596413 - DNA, 509 bp, Homo sapiens
ttttttttttgtctttttttgtgggggtttccaaacttttattcttttattaaaaaaaaaaaagggccagatacccttttgttaaagggtttaacaaaaggggtgaaacccttcattttggccgccaattggggcccatctcccttaatcactgttgggggtaatcaaagcaaatatttttaaaaatccaaacctccttcagggttaaacccgccatctaagttttatttttccaaaaattaaaattaatggggaaccttaacacaaaaaggggctttaggtttttctcaaccctgggggaacatgtaaagaaataatgcttactggtcaggaaaatacttttaaagggtcactacagacttcctagactggggggccattaaatgggctgcccctttaagtcttccaaatttcatatgcaaagattttaccagttttttgaaaatggacagtttgttctacatgtataaatggcagttggcactgggggggggttggggaccttgctg

SEQ ID NO: 596414 - DNA, 446 bp, Homo sapiens
  misc_feature (7)..(7): n is a, c, g, or t
  misc_feature (443)..(443): n is a, c, g, or t
ctcgtgnggggctggatcgtgttgctgccctgttaaacatgatgccctttgaaactctccgcctttgaaactttcctaccccctcccttcaatcttatccctaacccaaatgagaataatgacatattgaaaacagcctctagcttcaggctgggcacggtggctcacagctataatctcagcactttgggaggctgaggtgggagaattgcctgagccccaggagttcaagaccagcttgtgcaatatagggagactccggctctacaaaaaagagtttttcaaaattagccaggcgaagtggcacacatctgtggtcccagctgctcaggaagctgaggtgggaggatcacttgagcccaattcaaagctgcagtgagctgtaattgcatcactgcactccaacctgggcaacagagtaagaccttgtcttaaaaaatcantaa

SEQ ID NO: 596415 - DNA, 159 bp, Homo sapiens
agttgcactggggtaaacgtatagctcccagtaattctgttactgatgttgctagggccaacagttatccctaccaaatcgcttgacagcaacctgcaagatattattcttgcagatagtgatattaggggtcagagaagcaagatcgcctggtactca

SEQ ID NO: 596416 - DNA, 212 bp, Homo sapiens
ccagcatgtacatacattattccatagctacttaagtaaatcgtgtcgggtgcagtggttcacacctgtaattccagcactttgggaggccgaggcgggcggatcacgaggtcaggagttagagaccagcctggccaacatggtgaaaccccatctctaccaaaaatacaaaacttagccaggcatggtggtgtgcgcctgtagtcccagct

SEQ ID NO: 596417 - DNA, 273 bp, Homo sapiens
tttgccaaagcgacggaacctgtcaggacgcggccatcgggggctacaaggactagccctccatctggtccgccggccccgggaaaacgttagtcaacatcacgccacctcaggtgggtgtcctgcttgccaaagaccgcccaagttcttacgtgaatgggctgacacttgggggccagaaatgatcggtgatccgggactcactgctgcaggatggggaattaagcatggatctttgtaccaagagcaccgatggggccggcaccttcaatg

SEQ ID NO: 596418 - DNA, 207 bp, Homo sapiens
ctagaggatcccgaggcttcaacggaactttaattaataatacatcaatactgggtcatcaattgcaattaatctaccacatcaatgcaagatattaataggggaaactgaggggggaggaaggtgagagggtttatgggagctctctgtattttcccttcagttttttctataaacctaaaattgctctaaaaaatatcctattta

SEQ ID NO: 596419 - DNA, 165 bp, Homo sapiens
  misc_feature (49)..(49): n is a, c, g, or t
  misc_feature (125)..(125): n is a, c, g, or t
  misc_feature (129)..(129): n is a, c, g, or t
  misc_feature (160)..(160): n is a, c, g, or t
gatccatgatgataattaagagaagagaaaaaaagatattatttttgtnaggcaaaccattgtagtttttaacaatgtgtatcctgtgtgccctcacaccgttttccttattctacgtttttttncctntttttaaaaatattatgtactatatttttangtctc

SEQ ID NO: 596420 - DNA, 198 bp, Homo sapiens
agctaccatagcaggaagtaatcctgtaaaaaaatgaagcaaggcaggtaagacagattctaagtcccatgcagctcaaaacgacaattacattgtcatttgcgttgtgaatacttctaggttctatatgggctgtgatcttggtactaactgctattatggagaatgtgttggcatcgcagcaaaaggaggctaaga

SEQ ID NO: 596421 - DNA, 589 bp, Homo sapiens
  misc_feature (168)..(168): n is a, c, g, or t
  misc_feature (188)..(189): n is a, c, g, or t
  misc_feature (331)..(331): n is a, c, g, or t
  misc_feature (377)..(377): n is a, c, g, or t
  misc_feature (469)..(469): n is a, c, g, or t
  misc_feature (483)..(483): n is a, c, g, or t
cttgaaggtcaagagtggtcccagcgatggtgggccctgcagaatgaagggaccctcaccccaggaaaccctgcagagcagggtccccactggggaggggccctccggatcggaggctctcactgtagggggcctcagccactctcctggcccatctgtttaattcangcagataaaatccaattagnncccctgattagctgcgtcttcagatttgctggcacataaaaccttgacctaaaagctcatttcctgcagatgtttcagatcgatgtacggactctgcgctttctcttaatgcattcatgaatttgtcagaacccggcccccnaatccatgatttaattaagctccgttccgtcagccagggctcaccnagatcctcatttgctttcttcctctcaaagcccattaataagagaaaaataggacagaaagctccacagaggcgggaagaagggctcccttncctggcccactggngcctggccctacacaccgggaatcggggcagaggcagaacctgagcgtgggggtctttgagggctccccggtcagctgtgcctgagccaggcacacctccagtgat

SEQ ID NO: 596422 - DNA, 588 bp, Homo sapiens
agcgggggggggggccagcgaagccgagtaaaaccgccgcccgggagaagactgaaggagcagttgccgccgttggtggggcccgagcagttttcgctgctgctacggatgttgccatgaggcgaggctagggaggacctcacttccccggggtgtaataatgttaactgaggccagatctatccatatggaggatggggaagcctgggcaatggtcctttttctgataaccttgtggaccctttgtaactattttagttggacatttaatatcctcggcgtttgtgaggtggagggttacacgatgagttacgtcatccttgtttgggaaaaacaaacttcagagaagtaccttagaacacgtggtgaacacgtcaatttcttcctccaagcatcaaccgggggtccctaagtgcttagaaagaaatgaaacggggaagaccaggcaatattaaagatgtgatagacagattgacgggtgccaaatataaatgtgatgaaaccgtctcaagaaaaggttatccagttattcacattgcagggattactgtccagatatgggaatttatacactaagacgatgatggc

SEQ ID NO: 596423 - DNA, 295 bp, Homo sapiens
cccttttcccgggggggggggggggccccccaggattttttgggggaagggccccaaaatccccccctggggggccttttgggggggccccctttttccccccccccttttttttttttccaaaaaaaccggggggggggggtttttttccccccccccccccccgggggggggggggggggggtttttttgccccgggaaacctttttttaaaaacccccccccccccccccccctttttttacccggggggatttttttttaattaaaaggggcccccctcccctttgggcca

SEQ ID NO: 596424 - DNA, 896 bp, Homo sapiens
cgtcctgctctccggcgtggcttctctaattccattgttttttttagattctctcgggcctagccgtccttggaacccgatattcgggctgggcggttccgcggctgggccctagggggcttaacagtagcaacagaagcggcggggcgggggcgcagcagcagcagcagcaatctcttcccgaacacgagcaccacaggcgcccgaaggccggaacaggcgttagagaaaatggcagaccgatattgatatgaagcaagtgctgaggctccttacaagaaggatgagaacaagttgagcagtgccaaccggccattgaagaacgtagcaaaaagaggaaaaaaagcaagagcagaagtcgtagtcattgaacgaaagagaacgcaaaagtagggaaccggaagcgaagttagacgcccgagacaggaaaacagagcaaaagcggtgaaagaaagcgaagttagaagcaaagagaggcgaggaccccgttcaagaagtcgagactcgaagatttagaggccgtacagaaagtccttactccggaccaaatatttagcaggtgccactccgaggaaacgtatggggtggcctcataagcattccaattaagccagacgatgttccccgagagcaagaaggtccattcagaaaagacacaggagccgttgtgaagaagaaacactattggataatttaaccttcctggaggaaagagacttgcacaggccagttcttcttgtatggcagctgggggaagaaatttcgacgccagcggtgtggaaggagttttctcctacaggaggcaaaggttcgccgatgtggggtgatttccggaggaacattcaggacgttcccaaggggtgctatttggggcgccatagcggcggtcacaaagg

SEQ ID NO: 596425 - DNA, 214 bp, Homo sapiens
ggggaaaaggtttttggcccccccaaatgggctcttcgctttcccgggggtcctgggcttctccctggtggacttggggtgggcaatttttcccctggggccggaattatggggcccctttttctatttttggggccctcttaccaaattggcggtttcttggccccatcaagttttgctgggtacatacccccttttttttgtgtttggtcca

SEQ ID NO: 596426 - DNA, 220 bp, Homo sapiens
  misc_feature (1)..(1): n is a, c, g, or t
nccagtcagtaaatatgcttgtataattacggtgttcatgcatgcatagcagtgcatgatgccgtatggaaaaagcatgtctttagctcaagaagagtaagggagacaaatgtagcaagcagaaagcaaacacagacttgggcaagatttagccagactggaagtctaacacttaaataagcattctcttggccacgtaagaaactgcagttgttgtggg

SEQ ID NO: 596427 - DNA, 495 bp, Homo sapiens
acctggggtagtcattcaaatagaaatatttctcatttgcttctcaggcatgtacacttttctcttactgcctttccgggtcagttggttaggatctccaggactctccactggttgtgatcagagctctggctccaagagctgtatcatgagctccgtgacttcaacagtgggaaccggggtgcctggacggtctgcgtccattgccgtcagaaggtggtgctggttctggggaagaaggtttggctgtgcttggttctgtgctcgttttcccttcaaaggggcttggcttggcagccgtaggtgacagtactttttttttcctttcttaatttttgatgcctggaacaggggctgaattaagagcatccagaaagcccaggccctccataggctgtggcgggatgatcttcactttgatctctttggtggcataaggtgttgtgttgagtggcttgtatatcttctctgcagggggagtggcatctcctggat

SEQ ID NO: 596428 - DNA, 969 bp, Homo sapiens
  misc_feature (323)..(323): n is a, c, g, or t
  misc_feature (326)..(326): n is a, c, g, or t
  misc_feature (362)..(362): n is a, c, g, or t
  misc_feature (386)..(386): n is a, c, g, or t
  misc_feature (419)..(419): n is a, c, g, or t
agattaaggtgatactatctgatggcttggaatgaaaaccaaactccctgccacaacatgatgatctttctctgcaacttcatattttgcctcttgttcctcatttgttaccactgagtcacaatggtctttttagtttctcaaacacaccaagatctttcttgcctcatgtgacctagaatgttttctccctttcttcatatctcagttgaaaggtctcctctcctcatcatcatactatctaaagtagattccctcccttgttaacctctagcgcagccattagttccttcataacacttaccctaacttgcaagtatttngtntgtgatataatttttatctgacttccccactaaaangtaagctccatgagggcaaaaatngtgtgtttgtatactgatgcatctctagcactnggtatagcaggcattcaataaatatcattaaataagtttcaaaaaaaaaaaaaaggaaaagaaaaaaaaaaaaaaaaaaagaaaaacaaaaaaaaaaaagaaaaaaaaaaaggaggggggggggcgggagacgccacgggaggggcaccaggcaccgccccaagaggcaaaaagaggagtccataggggagtcaaaaaaaagggaagccggcacgccagcggtaaaaacaaaaacaccgcgggacgagaggagaacacaaccggaccggacgtgctcccacttgggtggcagaaccaccccaatcatggcgggggggcgacaagagatcagaggggacccacaccacccacacacgagaggagaaatagaacccgacgagcaagaaaaaaaaacaacagcacagactgtgatactgtcggcacacccaagcgcatatgacagtccggcgggaaaaaaaaagactcgaccacccaactatcgttagtagagagacacacacctcacggcggcgggtcaaaaccaaaccacccgacacaaacacacgtaacg

SEQ ID NO: 596429 - DNA, 182 bp, Homo sapiens
ccccgggttgtaaacccctttcacattttcccttgggttgtcaaacaaacacggcccctttttttgaaattttttgttttttgggccccttaaaggggccgaaattttttccttgggggggtccggtttttagggttttgttttccggtttttccccttggataaaacccctcctttttcca

SEQ ID NO: 596430 - DNA, 307 bp, Homo sapiens
gctcccaaaggccccacctcctgataccatcacagtggtggttaggccttcaacatatgaattttggggagcataactttcctctataacaccatcagactcagattaaagtgcctcatcatgggccttcaaggctctgcttgttcctggccttgcctgagcctctaacccaggtgcttctcttgcccccccgggggacatttggcaatgtctggggcctttttgggtagtcacagcttgggatggagcaaaggaagggtgttactggcatcttagcgtacaggccagggatgctgcttaacatcct

SEQ ID NO: 596431 - DNA, 742 bp, Homo sapiens
gagaatcacgggcttcatcagtgaactgcactaatgaggactatatctgctatacactgctgaatactctgaaaatccatcctggcggcgctaggtgaacagctcatctacaccagaggtgcctacatagaaagcgcctcagactcctacgcaacttatgaaggctgtagggtgccaaagactcatgatgtcctgctgctgcttgatgagctgtgtgctggggaagccacatgctctgcggcgttcagaggctcatgcgcagccaacaagtaccacacatgaggtgcccttgctcctataatacctcttctgtgccctctattgacaaagcttataccctctctacatacatctctagcctctggtgcgctcaacattagtgagtgcagagctgcgatatatactgcatgtgctgcagagtgcacactgtacctgcactggagagaaccatacctgtgaagtgccacaaatagcacctgtatcattcagggggcctgtaagaaatgtcagtgcactcacatatggacagcttgagaagagtactctgtcatggacactacgcgtggagctacggacactcagacatgatgtagtcgttgctcacaccccccaataacatgtctactattatgctctattatgtctctgttcaacatgtgagcatatggtgctaccacagacacaagatgcatcttatatgatagagacaggtatattcccactacctgtggatagagtttcc

SEQ ID NO: 596432 - DNA, 164 bp, Homo sapiens
cccgctacgtgacacccgctacggccatccacacactgtagccacggtccatccacacactgtagccacgtgccatccacacactgtaaccacggtccatccacacactgtaaccacggtccatccacacactgtaaccacggcccatccccgtagcgggggtg

SEQ ID NO: 596433 - DNA, 291 bp, Homo sapiens
taatgcaccccagtaacccaagaaggaccatggggtccctataatcaaatccttggagtttttgtttttgttttgagagagggtctcgagtggatgtgtctatactgaacatgtatagacttttttccttgtcattattccctaaacaatatagctccatagcatttacactgtatgaggtattataagcaacatataatttaaagtatacaggaggaagtacatgggatatgtgaaatactacagcattttatatcaggaacttcaggatctgccgatattgatattcat

SEQ ID NO: 596434 - DNA, 174 bp, Homo sapiens
ttttcttgttttcccttttaaaagtttttttccttaatgtgaaagtaatttgccccagttataatgcatttttgtttttaacaaatcccccccttaaacggagctataagggggcccaatttgagacccattaaattccttttagttataataaatttaatatttgtaaatgta

SEQ ID NO: 596435 - DNA, 480 bp, Homo sapiens
gtatcaggtgtgtgtggttgggctgagtgtccttgtaacattgatacctaagttggccttggttgggaacatagccatgcagtgcccctcgtgggtggggctgccagtctgtcattgacctcattgtgtcagcaccttccccccaatggaggctgaccctgccctgccagctgagacttgggagacggagttgggctctgatcccagtggcttccaggaaatggctctggctttggagcagaagcgggttctaggacttagttgccctcactcggtgcctgggttccttgtgtgtgtggaaagggtagggctgcaccttgtgaaagagggttcagggagctctgaggacctggctcgtgctagattgctcagtcagtagtgtgtaaaagcagcagccggaagtgactgctttcagtgtgtagtggtgagtgctagttgggcacccttgggcttggtttcccagaaaatgtgtaaggcagg

SEQ ID NO: 596436 - DNA, 603 bp, Homo sapiens
ccaattttttttttgtttgtagaaatgaggtcttgccatgttgcccaggctggtctcaaactcctggtctcaagcgatcctcctgcctcagcctcccgaagtgctgggataaaaggtgtgaaccaccatagccctagccagtattatcttttcgctttcattttccaggttgaagtagtacttatggggctacaatttgcttacgctgaactaaacctagtacgtgttaagcgcgctggatgaacatgtgctaaagcttgtcaaggggataataattggtcataagggaagaatggtatgggtccaacagcgtaaagatatacacctattggccaacgaagggaactttgtgaacgctaggggccaaacaaattcatagggggcaaaaccacaccgaacaaaaccattacagggcccatgttgcaaaagcgttcccttttcattttaccgacgaaggtcactcaccacggactacaactccttaacgatgtacgacgtacagttcccctccaagtgtgtcgcccacttttgggcccatatagactttcgggttttgtacccgattttgacttcatctcctcgaccatttctccctttaatggg

SEQ ID NO: 596437 - DNA, 683 bp, Homo sapiens
tacaatagatctgtgctaaaagggggggaagaagggtacttacgaaacccatattaatggggcagcatcctctgaggcaattggttaccaataagacgctattgcattccaggagcacggtgagcataaaatgaggagcgtcagtacgcgatgagtttaataaatacatccaagagctagtttgggccgtggggagctacatgactggccaggaaactcctttgaccagatgaacaggggcttggacgtccataacgggggtctatataccagatgaaagttctcgctactgttccagacatttacatcattggatgagctcttgaggtctcaggaaaaggaggctttctttttgtgttaatggagccgatactccctatcacgggttaagtagagagaccgtgcataaagaacaggagcaggactcctagtttttgtaaacaggtgtcacccacaggggggaggaaggctttaacagacagccgcggagggaaagctgaactggggctattaagccgttttaacaagcccagttggggcactaagcccatttttgccttgagaaaggaaagcgtggctcttggggcgacagggggcacttgcgcggtaaaggccgggcctcttgagaaacaaatggtaaccgtctgctttaggggggcaccttgtgtagattttggggtgtg

SEQ ID NO: 596438 - DNA, 219 bp, Homo sapiens
gttcatctacataaagagatagtagcatacatctatcaatgttagctattgacaagacaatttaacatttcatcacattattgcatgtaacctccatataaacttagatgcggacagtattaatccagaattgacctttcgacttaaagcagagggactttgtatagaaggtatgggggctgtggggaaggagagtcccctgaaggtctgacacgtctg

SEQ ID NO: 596439 - DNA, 327 bp, Homo sapiens
  misc_feature (44)..(44): n is a, c, g, or t
  misc_feature (46)..(46): n is a, c, g, or t
  misc_feature (52)..(54): n is a, c, g, or t
  misc_feature (74)..(74): n is a, c, g, or t
  misc_feature (76)..(76): n is a, c, g, or t
  misc_feature (79)..(79): n is a, c, g, or t
  misc_feature (83)..(83): n is a, c, g, or t
  misc_feature (85)..(87): n is a, c, g, or t
  misc_feature (116)..(116): n is a, c, g, or t
  misc_feature (149)..(149): n is a, c, g, or t
  misc_feature (161)..(161): n is a, c, g, or t
  misc_feature (176)..(176): n is a, c, g, or t
  misc_feature (183)..(183): n is a, c, g, or t
  misc_feature (192)..(192): n is a, c, g, or t
  misc_feature (198)..(198): n is a, c, g, or t
  misc_feature (202)..(202): n is a, c, g, or t
  misc_feature (217)..(217): n is a, c, g, or t
  misc_feature (240)..(240): n is a, c, g, or t
  misc_feature (312)..(312): n is a, c, g, or t
  misc_feature (317)..(317): n is a, c, g, or t
aaagaataccaaaagctgaagtctagaaccgaagacacatatanangatttnnnaatggaaccagccaccttgnanaantatntnnnaagaacatgatataaactttagaaaatanaacttttaatacttaagagataacatgatgcanacgttgcttgtnggcctgactttccangactaanaccctctgngaatcnatgnggctcggtgacatgncgtaacctgctactggggtgtgntctcagacacaaaatcacactggatgttggtctacagaggcaggattctctcattgctggatgactctgganattangcctttgcaa

SEQ ID NO: 596440 - DNA, 413 bp, Homo sapiens
  misc_feature (28)..(28): n is a, c, g, or t
  misc_feature (49)..(49): n is a, c, g, or t
  misc_feature (64)..(64): n is a, c, g, or t
  misc_feature (68)..(68): n is a, c, g, or t
  misc_feature (111)..(111): n is a, c, g, or t
  misc_feature (120)..(120): n is a, c, g, or t
  misc_feature (137)..(137): n is a, c, g, or t
  misc_feature (201)..(201): n is a, c, g, or t
  misc_feature (228)..(228): n is a, c, g, or t
  misc_feature (270)..(270): n is a, c, g, or t
  misc_feature (274)..(274): n is a, c, g, or t
  misc_feature (294)..(294): n is a, c, g, or t
  misc_feature (325)..(325): n is a, c, g, or t
  misc_feature (327)..(327): n is a, c, g, or t
  misc_feature (346)..(347): n is a, c, g, or t
  misc_feature (354)..(354): n is a, c, g, or t
  misc_feature (360)..(360): n is a, c, g, or t
  misc_feature (366)..(366): n is a, c, g, or t
  misc_feature (408)..(408): n is a, c, g, or t
agcgcggattgcacgggttgccacctcnagcgcagacccctgtgcttgngcagactctgacggncatngtgggtgcctggcttgaccacattcttacccatgggattcggntcaacctgnaaggagcgctgcagctnaaacaagactttggagtggtcacaggagttgctggaagaggagcagtggagcctgtcccctgancttcggcagaccctggtcatgctcagnatctttcagcagctggatggggccctgctgtgtctgttgcancagnccctggccaagtctcaagtncacaggagggccccctgttgctgtgcttgtnangaggtccagaccacgttgnncagcagntggctnaatagnctggagagcttggagcccccgcttcagactggcatattcagnccagc

SEQ ID NO: 596441 - DNA, 745 bp, Homo sapiens
gcctgtaatcccagcactggaaggccaaggcattaggattgcatgagtccaggagttcgagaccagcctaggcatgataagaccttatgctaaaaaaaaaaaaaaggaaataaagatagaaaattgccatctgcaaatgaaaaagccttcagccgacaccagactgccagtgcctttgatatgggactttcagttccccagaatctgtgaaaaattaagttctatgtcgtttaagacacctagcctggggtatttggttagtcgcacatcagaaactgactgagacaggcagtaaggaggagaacagaggttccagcctggttcaggtccaggcagttctgccattgcccctaactcctcagtgccagtcatgggccaggcccctgggggactgggaatgagtaaacacatgcacctattggttaaggttcacggcggggtccagaaggggacggcaagacccatctgcgcactcatgacccggacagaggccataaataccgagcacctcatggcccaggcctggaggattcccacataccctaccaggccaataacagagggaccctggagttggtggtacgcaagatagcagttcagtgcttgcacacatactagttgagaacggcaaatcaggcctaattgaaacagtcaactgtctggcagagccagggtcctttctgcatgataccagttcggatgtttgtccctttctaatcttatatgggaaatttgatcccagtgg

SEQ ID NO: 596442 - DNA, 214 bp, Homo sapiens
gtcaacacgactaattcaccgcccaacaatgactaatcaaactaacctcaaaacaaatgatagccatacacaacactaaggacggacctgatctcttatactagtatccttaatcattctatttgccactatatagatccccagcttcatgtatctcatctatagcagcctatttaacagcgaatcccacggtgcgttgtccctcatgagtata

SEQ ID NO: 596443 - DNA, 142 bp, Homo sapiens
actagagcccatatatccatgctgcacttaataggggctatagtctcaagaggatctgtgcattctctcccatcaccctacctctcacctgaacttttggaaagataatctggccttctggatgatgtttcgcagagcaaaa

SEQ ID NO: 596444 - DNA, 160 bp, Homo sapiens
aataagataaatgcaagcgattttttaaagtttaaacctgactatttttatttttgaatttacagatcaaatgattctgatgatattgttcccgaaactgatgaagaaagtatttgtgtaattagtgaaagtgaagataatcatgatagaattgaagaag

SEQ ID NO: 596445 - DNA, 216 bp, Homo sapiens
ttctacctgccagtggacactatgatataggccaggtgagtgcacactgggacactatgatgaggcaggtgaggggacactggggcactattatgaggctaaggttagcgcacaactgggacactatgatgagggtaggtgagcacacactgggacactaataaatgaggctcggtgtgtgcacacggggacacctaatgattgaggctaagtgag

SEQ ID NO: 596446 - DNA, 128 bp, Homo sapiens
gccgcacatcatctcgtacatgaccacgcccagcccccaccagtccactgcacggccgtagtcattgtcttcaagcacctcgggggccaggtactcaggtgtgccgcaaaaaggtcttgggggggggg

SEQ ID NO: 596447 - DNA, 139 bp, Homo sapiens
  misc_feature (25)..(25): n is a, c, g, or t
  misc_feature (31)..(31): n is a, c, g, or t
  misc_feature (42)..(42): n is a, c, g, or t
  misc_feature (57)..(58): n is a, c, g, or t
  misc_feature (62)..(62): n is a, c, g, or t
  misc_feature (74)..(74): n is a, c, g, or t
  misc_feature (76)..(76): n is a, c, g, or t
  misc_feature (78)..(78): n is a, c, g, or t
  misc_feature (85)..(85): n is a, c, g, or t
  misc_feature (121)..(121): n is a, c, g, or t
tttccagcagcggtcagcatttccntctttngttttccaggngcctctttgacaggnncttnctcctcctcttntntntccgccncaaccaaccttcatcaaccaccaccttcaaccaacntcggcggcggcggcaacc

SEQ ID NO: 596448 - DNA, 116 bp, Homo sapiens
taagctgttaagggttaaattagaccggtttcaaagatatatttgagaatcatgtagtatctcttgacgatagtctagagatcttagagctacgttggggcctaaggactgagaat

SEQ ID NO: 596449 - DNA, 192 bp, Homo sapiens
cctgctgaaagcatcccagtaactgaacagtgtggtcgagcattccaagtccgtgacggtgcaggcgcggtacgacagatgccgtgactgggcacacatgcacctgcaccacggctccatatagacgctgacctggctctcgagaaacagcaggagatccttccatggtaaaccagctccagaatacccatg

SEQ ID NO: 596450 - DNA, 389 bp, Homo sapiens
ccctgaatcacattcatcctcttctctcctctgtactcatcctgtaatagtcccactaatgataggatattacctgctgcctacctggagatacagtaggatcttttgagtggaggtgggtagagagagcaaggagggcaggacacttaacaggcactgagcaagcaggttcccagctagccttaagtgatgttaggagtcgtattaccctcttctattgaattgccttcggatttcctatctccctattaccctgaccccacccatgatcccgctacaatattgtgcttctgaatagaggggcttcacctctgttgctgaggaatggtaaatgtgctatacctcagcacaatcccgcgaaaagtgtgaacacccaccatgtcgtaaca

SEQ ID NO: 596451 - DNA, 100 bp, Homo sapiens
ctcccttatgactaagttttcctcataatgggttaccccacattactgcttacgacgacatctctttagtcagaaaccagtagcttggtccagtcctagc

SEQ ID NO: 596452 - DNA, 586 bp, Homo sapiens
attctagaggccgaggcgggtggatcaactgtggtcaggagtttgagatcagccaggccaacctggtgaaaccccgtctctactaaaaatacaaaaattagctgggcgtgatggtgggcgcctgtaatcccagctacttgggaggctgaggcaggagaatcacttgaacccgggaggcggaggttgcagtgagccgagatcgcaccattgcactccagtctgggcacagagtgagattccgtctcaaaaaaaaaaaagaaaggaaaaaacaatggctttatacctcttccttgtttccaaccgccattgaaaaattcctgaacactccaaaattcggttgaaattaattccaaaaaccaaaatttcttacggtactacaaactgaatttgacttcttaatagtaaatagatataccttaaaaaagacctcagggtatataatctgttctaaaacaagctaccaatctcaagtggcaggctcagcttaacccaactaagttgttcttcctaggtggaagaacccactttagggcctaatttccactggctggtggtagccctcacggggcctaacactgcgtggcca

SEQ ID NO: 596453 - DNA, 251 bp, Homo sapiens
  misc_feature (66)..(66): n is a, c, g, or t
  misc_feature (69)..(69): n is a, c, g, or t
  misc_feature (76)..(76): n is a, c, g, or t
  misc_feature (103)..(103): n is a, c, g, or t
  misc_feature (111)..(111): n is a, c, g, or t
  misc_feature (115)..(115): n is a, c, g, or t
  misc_feature (122)..(123): n is a, c, g, or t
  misc_feature (137)..(137): n is a, c, g, or t
  misc_feature (139)..(139): n is a, c, g, or t
  misc_feature (167)..(168): n is a, c, g, or t
  misc_feature (171)..(171): n is a, c, g, or t
  misc_feature (179)..(179): n is a, c, g, or t
  misc_feature (184)..(184): n is a, c, g, or t
  misc_feature (221)..(222): n is a, c, g, or t
  misc_feature (230)..(230): n is a, c, g, or t
gagagagagagagagagagagagagagagagagagagagagagagagagagagagagagagagagngcnggcgcgngccaaaatggaagtttaatccctttgntgcacttncgcnccggaanncaagaatcgcaaancngcatttcaatgcaccttcccacattcgnnggnagattatntcttncccctctttccaaagagctgagacaaaagtacaacgnngcgttccntgcccatccgaacggatgatg

SEQ ID NO: 596454 - DNA, 206 bp, Homo sapiens
agatcgacaggcgtccagctataacgatattgaggaggtcagcacggtgctcacgtgtcgacggaactgtacagggaggcgatgcaccgcagctggtgaatacacgtcgacacaggctccaggtaagcgagtatgggaggtcagcacggagctcacgtgtcgacggaacttgtacaggaaggcatgcaccgcagtggtgaatacac

SEQ ID NO: 596455 - DNA, 107 bp, Homo sapiens
ctcatacactcgtgctttctacttctccagccaaagatgatcggttccatgttgaacttccagtctgtcctgcatcagcggagccctgtggctttttccagatgagt

SEQ ID NO: 596456 - DNA, 245 bp, Homo sapiens
ggctatcggaccatgggctatgtatcgatggccaagtgcggctcggagcgcgtctggtgcggagtgccaaagctgcttgggctgaggcggcaccggaccgatgtctcggtgagcagcctgtccgctcgggtggattgatggtcttagtataccacctgtccctctgggccctcttccctcctatgcctccgctggctatatttcttccatctccgtctatctcctctctatccatactcttcccg

SEQ ID NO: 596457 - DNA, 361 bp, Homo sapiens
ctggagtgatatttggctgtgcaggctagcatgagggataggaagtagctagccacaatgaagttcattttgagaaaagtcagctaacgttgtaagctacctaggtataactagctaccgttagctactagctagttcaatttctctcacgtgtagaaagccataaaaacattttttaaaacagcatgttactgacctaaaaggttatctgtgaacccagtatctagcttatccagggtcagtgataggactacatagagcaaccatgtactgtctatctccctcaaaactcaactctacaacctggaagccagttccactgcttttttctttgttccccgtcgacgcggccgcgaattta

SEQ ID NO: 596458 - DNA, 259 bp, Homo sapiens
gtcagatttgaaagaagataaacctaggaaaagtttgtttaatgttgcaggaaacaagaagaattctattataatgtggtttagccctcgaagtaagaaagtcagatttgttgtgagtaaagcttcagtgcaaatccagcctgcaataatatatgttgcaagtgctcagcatgacttcatatgtatttgtttctccatgtcctcctgcagatgtttctgagagggctaaaatggcttctgctagattttgaaaaaaaaa

SEQ ID NO: 596459 - DNA, 194 bp, Homo sapiens
cgactctagagcatccactaacatcgtgtctctggagagcagcagccatggccctacgctaccctatgtgccgtgggcctcaacaaggtgccacaaagtgaccaagaactgtgagcaagcccagtgcacagcctgacgccgcggtgcgtctgaccaacacacaccaatgttctgtgcgtggacacgacatgttc

SEQ ID NO: 596460 - DNA, 237 bp, Homo sapiens
gtacggtgtgcaagtgcttcttccccagacactgtctgagagcacattcgactccttcttttcctccttcaccagaagactgtgtcccgcgtgaacctctccttcttcctcgcagtgtcctcctcgactgcttcctcatcagaaaatgcgacactccgcttccgactccgggtagccggggagagtttgatgggtgactctgtcttcttcaccactggagtcttgatgactttggga

SEQ ID NO: 596461 - DNA, 1121 bp, Homo sapiens
  misc_feature (316)..(316): n is a, c, g, or t
ggggcggtagcttctcggggcttgagcccatggggctgctctgggccttgtagccctgagaatacctttggtgcggtctggtgaagcgcgagccgttgcgaacgcgcctttgcccggtggcagcgtgtgcaggtgcctgggagtggccgagcgagccccgagccccggtgcggcgtgtcctgtggccgagacagcggccgacggagtcgctgacgttcgctcgccgcgctcgggcgtgctgtgcggcgcagctctggtgccgcggtggagtccgggatgcagagtgccactgctcgttccatgctcagtcctcagnacactctcggtgccctttcactggagtattgtaggtccattggttcggcatacctcgtgagggtggccttgctgggaggtatcgaggtctaggtcatgacttgagtcgtggggaagggagtatttcgctagttgagtgggcctcgtgcgacttactttcactagagctacttgaaggatctcccccgaatgatccatggacgtacgctcgcactcctggtaggtactttgggatagtaaggcctgtgtacacactaggcttggcttgcagcatcagttccacgtagcggtggagggcgcttccagtgaactgttggcgctgcttttggcaattgttccccacggggcgggctgagggctcttgctgcttttgccaattggagcactcgtgttccctgaaccgggggcattcatcgcgcttgccataggtgcttgtgaccaatcagacccggaggtagtcgtggttgcgtgcaaacttggttttgagcgggggcatacactttcaccttgtttaccacaggggggcgagaagaatgcgcttagtccgctcccttgttgggaggcggtctagaccattgaaaaatcggcctagtctacaggggttgaacgcaatagggaattgggatatgttgctggatcaatttgttgaaattgtcgcgtggacatcgagccccgttttggcaactgggagccatgattccaggacaaaagggcttcacattcctgtgtggccaaaagggggccacaggaacaacgtcaaccctttcacttgttacccttcggataagaggttccgggattgagcc

SEQ ID NO: 596462 - DNA, 157 bp, Homo sapiens
ctgactcgccacactccgggaagcatatgaaatgatcgcgcaggctctgagccctaggattcatctttcttttcaccgtaggtggccgacgggcatgtattagcaaactcatcactagacaacgtagtacgtgtcgtgtagtacgatgtctagtgat

SEQ ID NO: 596463 - DNA, 164 bp, Homo sapiens
cagaggaccggaagcagcaagggagaaggactaggaaaggaagagaggagaagaccacacggaccgggggagcggcgcgggagggggggaacgagagaccaataggcagacacgtaggtgaacgagagagcgaagcgtggcgagccgagctagaccgagagagg

SEQ ID NO: 596464 - DNA, 121 bp, Homo sapiens
ttaggtgactctattgaggatccccttagaccgtcgtgacgagaggattacgatttaccctactgatgatgtgttgttgccatggtaatcctgctcagtacgagaggaacctgcagttcag

SEQ ID NO: 596465 - DNA, 523 bp, Homo sapiens
ttccaatggaaagagggtaaagagcatcccaggggcggagatagcatggaggagaggaaggcagtgtgtattatggggttctgtgtagccacacagtaatggtctgagagacggataaaccatgaacctggaaaggggaacgcggagcaaactcaccaaagatatgtcaggttggtgggaagctggatcgcagggggtgacgaatgcaaggttaagcagttgggacttgtggaatgtggggaagggacttgatgaaagccaggttttaaacggaaacttcggacaggcagagagaccaaaagcagaaaggaggccagtaaggagatcgctgcagtggtcctgtcacaaatggaagtcctgaaacagggtgctaaccatgggaacagaactgaggacgccgagaagagatccacgggggcctactttctctacctctggactaatccgggagtcattctgcaactttcccaacaccttctccctggataaccttaagggactcggggcctcaggtctaactcca

SEQ ID NO: 596466 - DNA, 424 bp, Homo sapiens
  misc_feature (17)..(17): n is a, c, g, or t
  misc_feature (42)..(42): n is a, c, g, or t
  misc_feature (113)..(113): n is a, c, g, or t
  misc_feature (118)..(118): n is a, c, g, or t
  misc_feature (195)..(195): n is a, c, g, or t
  misc_feature (199)..(199): n is a, c, g, or t
  misc_feature (281)..(281): n is a, c, g, or t
  misc_feature (300)..(300): n is a, c, g, or t
  misc_feature (313)..(313): n is a, c, g, or t
ccgctcgtgcggagcgncgagccgcgccccctctttgcaacncctgtgcagtgtcactcctaaccgagacctctttagagttgcagctcgcttccaatgacccgtttagaggncaggntcttttttcccgggaaggagcccttgatcgaagcagatggctatggtggcagacaagcccattttccggaagaaggntagnccacaagaagattttgctaaggctggaatgtgttgagctaactgcagatccaggggatgctggcccttaagagatgcaagcnttttgaactggggaggagntaagaagagaaangggccagtgatcccagttctaaactttgggatatttttcttcattttgaagagaaatggtgaagccatagaaaagttacccgagggaaataatacagtgatattcttacac

SEQ ID NO: 596467 - DNA, 297 bp, Homo sapiens
gttgcattatagctacagcagaggtctgcgctccgttgctgcgtcactctctatcattctcctcagtctcaatactcattcaatcgcaccctctggcgcttgtattagcttactgtggtgtagcagctaaccagcgcaggaaggaacagaaggaatggctggggtgagccctgcaggagaggtcgcagcacatgtgatgaagagggtagagcaggagcttggtcggtggaaggagagctcacttcctcctccaacacagcatggggacagcacagggaaacaggatcacccagggca

SEQ ID NO: 596468 - DNA, 1033 bp, Homo sapiens
tgttaattaaaaatcagaagtctttgatgtatgcgctgctgtaatcaaactctgctcattgcgaatctattttggttcgttctttggtattattcgtgggcacatacttggtttgatgactttcacttgggggttctttctgctgccttcagggttactgatggtatctccatgctctggctgtaacttgtatggtaaccagtcaaaactgcttatatttctggttagggcgaagccatttaggaagaagcatttcaccagaacaagtaaaagttaattgcagcaatgatgtcagttgatggcccctagtttaataaaaggataggcaagatatcataggaaatcttacatggtttgtaggaaatcagatgtttgcaacgtaggaagttacatgggatagggaaggtataaatcaagatagtaacgggttttgtttgatatgtcatttgtcttaccatgctccccactattaaatacgtttctgtcagaagctaaattatggattgcacctagctttatgagtggcagaagttcttaacaaccagtattgagaaataacgaagggatgtcgttacaaatggtattcctgtcactcttaaagctgcagaatgatattattgaccaagaagtggtgcataaatcccaagtttgcaaagaaacatacaatgtagagtgccgtggagggtcaactgggcataacaacgtcctgtgcgggaatccaccaaaaaaaggaggcagtaaaagtcgtaactgcaggaaggcatattacaacgcaagtggggagccataacgtattagaccaatagacacactcgacaaacttcacagcacgacacctggccaacatcaaacgacgggcgaccccagcctacatattgaaccgaagacaacaacaacacacacgaccaatcaacataattcttcttccttctcactcctcaatactacaaacaacaaaacaagaaaaacaacaccagagaacaggagtcgagagacaaaggcaagaacgaacgagaagaaacaacagacacaa

SEQ ID NO: 596469 - DNA, 886 bp, Homo sapiens
gaggggaaacgggcccccagacgaggtgacaaacaccaggcaggcagtaaacacccggggaatcagaagacatggcagacgaagagaaatcaatggggacaaattgcagggtccgacaacatggcccgagacaaggtatccttaaagaaaaaagaaaaacgccaaaaaaaaaatacaaaaaaaatatatgatctgcatttatagaagcgcaacttgaggacagggagttgacccatgatcaatgctgcattaaaaagaacaagaaaaacagaggcatgaatacaaatcaggacactagagaactgaaagagagagacatggaaattagcagaggacggttaaacatcaatgagcacagagttagaatccagcaaactgggagtgaagggcgacaaaaaactggacagattgacaggagccagcttcttgaaaaccccgcactgaagagcagagttcctacaggacagatgatgattcaaagcctcaaacagctaaacccttaaggtccggaaatgtgccagagaggagaaaaaaaggctatagaggacccgaaaggcaggtcaaagtcaataaatctaaaggggacgtagaccgaaaaatcaggctataatggaaagtaggagatgaagctccgaaggatcaaggaagcaactaacaggggaccaaactatgcccaatgacgaaccggattaagggcccaaagaggaaagggactaaagacaggaggggggaccaagaacaggaaggaagaaccgaaaggccacaggatcaatagtaaaggacccaaatcaaaacaatgggacgtaaaaagaggtcaaccgaaggaagaggaagagagggaggggcaaggaaaagcaccgaaaggggacgggcccaaggggggaac

SEQ ID NO: 596470 - DNA, 130 bp, Homo sapiens
gctgagacgaactagaggatccccctctgatcaaaaatagctgtcattatgcagtgtgtatattcaatatagataagactatgtacacatccacttttattcaactattgagtttattaacaacaagtgg

SEQ ID NO: 596471 - DNA, 1374 bp, Homo sapiens
  misc_feature (221)..(221): n is a, c, g, or t
  misc_feature (240)..(240): n is a, c, g, or t
gggacaccgggtgtagagggcggtcgcggagggcagtggctggcagaatgtttggctaccaggatattctatgcctagttggcaacgcgacgcaatttccacctcatgctgtgtagtacttgagctcgattgacaaagttgtttggttgaatgatgcgaacgacatgtttctgctccctagctttatatcgtgatctggctgttgaccaccactcattgcncggtaagagtggacccaantgatctagaggcgaccatgttctttgctcgaggccgagacatcggcacgttgtacgagggacgatatgtggacgaatgtgaccttcgcttgagaagaccagactcgtctacacattgggattggatggaagacgtcctggaggttctgtacttctgtcatttaaaccgtttacaaggggaaggacgcttgttctggcttgagagcacatgtatacgcaagtggtgagccgatcggaaagacctgaacgtctgtagataggcacccgcggttctgaatgtgggaccgttggtggctcgaactgttctatcttttccaaattccggggccatattcaaacctcggtggggccttcccggcatgctgcacctcccaacttggttgaggcccaagggaaaaacggcccaaggtgggtcaacctttcggttgtgccttcaacccttgagtgggccaccacctcacctgtttccggcgccatggctcaaaaaaagagacgcgcttctcttgctatgggaacccgcatcaccaaaagcgaaaaacgacttggcgcggggatgttgtcgggcccccaaaattcgtgcctccacgcggataacgccctaaaccactcgaaaatgtggcgaacgactttagcgcgcgctgggggggaattacacccattttctgcggaatacctggcgggcggtttgaaaaattttccggccgccgcccaaaattttcccgcgcgcaacgtggatgctgtggcccactttttttacaacgtgctctacccttttcccccctctcataacacagtgcgttcggtcgggcggcgggacaacccccttttaaaacagggggtaaacgtgcgcgcatctcggggcaccaaatcagcacgcggacaaaacgcatatgtcggtgccggatgcacagtggcaaacaaaagttttcttggtaaacctgtgacatcaagtgtaccaacatttctgcgcgccctttgtggcgtcgtaccacccccttggttgtgaacacggcgcccccactatgtagggcccaacattgcgccccccacttgttggcccagcggctccccacattatgggaggggtcactcaacctactgaggtggtgctctcctaatcacacccacgcgtgga

SEQ ID NO: 596472 - DNA, 274 bp, Homo sapiens
gattcagagtagcaactggtgtctggtgagggctactttcggattcatagagctctgttttctccctgtgtgctcacatggcagaaggggcaggcagctctccggggtccctcttataagggcactaatcccactcatgcaggctccaccctcatgacctaatcacctcccaaaggccctgctgcctgaaaccatcacattaagggttaggctttccgcctatgaattccgagggggaaaccagcattcagtccaggtccatctgacccatctt

SEQ ID NO: 596473 - DNA, 237 bp, Homo sapiens
agggtcccggctgggagacgcccagttgagaacaataatgaacaattatgtatgaacaatggttagaaacagctaatcacaaacaacctgcgggcgaatgacctcatgccacacgtagcacccttcagcaggaccctataaaactttcctccagcccttgcgtctttgcaggtagccccttctctgctgagctgcccactgcaacatattttcacaatttctctaataaatctgccc

SEQ ID NO: 596474 - DNA, 1125 bp, Homo sapiens
  misc_feature (291)..(291): n is a, c, g, or t
  misc_feature (793)..(793): n is a, c, g, or t
agcgggtgctaccatccttcaatccttcagcgtaccagccatccagacagggcttgagctgcagaaagctgagaccagacctctgggcctggccctccccaggggcctcctttccaatagctctacgtgcttgctcgtcgatcacgcattactattgcaggcgtgcgacagctcccgtgactggcgatggcgtgcgacccactattcaagggcaggataggatttatggttgacccgtaccgacgtgcacccgtaacactcgctagcggtctgtctacgtgccgtcgttgntgagcattaccagcgcatcgaagaggttgcagtacccctgcgtgaacaagcaactcatgacgttattgcggccaaatgccaccgccaaatgactcgtggtcggggaacaccagcgtgtgagagtatgtaggagaacgccctagcctctgtcgctctgggagtgagaccagggtggtcccagaggacgaagccaggcaggtaccgtgcactgtacgtatgagctagtttgcactgggcgcccgaagcgcccatgataggagagtagttccctcatcctaatccacacccacgtagctgtcccccaccttctccgggaggaactcgccattttccggcgtgagaaagtaacggttctgtcttgtgccatctacctgtactgaatggctacgcacgcgtgagtaccccgtatgcatacaataatgcttaccatcccgcctattgtgcgcctgcttcctgggggcgccatatgccgtatagggcatcaggtacatctgtccgtgangctctcctttcaaggctccttgttcatttcaccgaattctccctatagacctcgtttggcgcatgatccaaatgcctgaagggtttatccatgaaaggccaacacagggggcaccagctgctttcgaacctcttaattccttgggtccgaagctccccctagtttattccgtaaagcgcgaagacctttgttgcttgggacccgggaaggccccccaaatgtcgagccccccaaggaaagcaattagttggaggggcacccccccttttgggcgtcccaagcccccaacgaggtaagggcgggccccccggttcaggaacttgcttgcccca

SEQ ID NO: 596475 - DNA, 624 bp, Homo sapiens
tggggggccttcttgttttaacaaaaaaaacccctcaaaaaactgcgaaaaccccccccctggggggggagcacgggttaatttacgaggttatggaaaaaatttccccaaacccccatcgtggggggggcgtcctataaaacccggagactgggggggaaagaggcgccccgagggggtccccacccaaagaagcagcaaacattgcgccaacttcgtgaacatgtgttcgatccagctgcttgttctggccaaggaccacgagaacgatcgttacgtcgggcgcataagaatgtgtgtgccgccacagagctgttcctaccgtgaggcaaacatgtggcacccctttttcctccgacagacaagttattgtgatggccgccgcctctttcttcatcacttctcgcgtgcgggcacctctctcgagaagaaccgtcatttaacaacacgcagctaatccgcatcaaggtgtctgccgcccgtgaaaaacatctgtgcggttggcaacaaacaggcagtcggggtgatgcatcacccaagcggtcaaaacaatttctctcctttgttcccccagtgtagaggggtcaccgtggggaactcttcagcacaggttctgcttaagcc

SEQ ID NO: 596476 - DNA, 95 bp, Homo sapiens
acatcgagctcggtccgtttggttcattttgtacacgtttggaaaataatctgcaaacgagctgtgctgcaaagacttcatagttcccaagaatt

SEQ ID NO: 596477 - DNA, 89 bp, Homo sapiens
gcacgaggggcgtgatagacctggatgtcttccatagcgttttcttctgcatacagattcaggatctgtttgtataagggagctgtggg

SEQ ID NO: 596478 - DNA, 407 bp, Homo sapiens
tggggggggggggggcgtggggggggggttttccccctttggggcgggccggggtgtttaacaccccggggtttttccacccccgcggcggggggggttttctaagcccccctccccattgggcgccctttctttttgggggcccgggggggggcccccccccccccctctttgtggggggggggcgcccccccccttaaaaaggggggtttttttttgtgggccccccccccgcgggttgttggtgggggaggggaggtttttcccccctggttttttttttttgcccccccccccccgtggggggggggggttcccccccccccggggttttttttttattttttgtccccccagggggggggggggggttttttttcccccaaaactttgggtttcccccccca

SEQ ID NO: 596479 - DNA, 938 bp, Homo sapiens
acccgagcaaggcacactctccagcaccagcaggccggcggcaagcagcgcaagcacaacaaccaaatggccaccatcagcgccgccgcggcgaccaccgtcgtcgcccgtgccgccatcgccaggccgtcaggccctaggtctgccccagctgaggacgaggagcgagagggtgaggtgcagctactccaaggacgccaaggaggcgacccctgccgccgccgtccgcggggctggcgcgtccctactcgccgcggcgggcgcggtgaccgcgtccgcggggccggcgctggcgctggtcgacgagcggatgtcgacggagggcaccgggctgagcctggggctgagcaacaacctgctggggtggatcctcctgggcgtcttcggcctcatctggtcgctctacaccgtctacacctccggcctcgacgaggacgaggagtccggcggcctctcgctctaagctacacatagtttcctcgtcgtctcatgtaatccgctcgcgagcatcgccatgatcggtgtaatgtaattccagagatggatatttgtatctaagcgttccattctgagaaaacaaaaagaacagaaccaatacaaagaaaaaaagacaacaaagaaaaaaaagggggggggccaaaaaaaaatacccccgggaggggcccatataagggctcaccccgaatttgtgacacaagggggcccccaagaggagagagccattaaaaacacagaagagagaggcacacaaaaacacgaggacgcagcgaaacagacgcagagtgagaaatactgggagaagagacaaaaaggcggggagagaaaatttgttgaaaaaacacagagagatttagacacggggataaatataaaataagagatagaaggtaaaccagaaatatgtgggagaaattttagagatatttgaaaattttcgc

SEQ ID NO: 596480 - DNA, 193 bp, Homo sapiens
catctgttgttgagatggggtttcacccatgtcggccaggctggtctcgaactcttgagctcgtgatccacctgccttggcatccccaacattgctccacaggcttgacgccaccgatagcccggccctacatttttaaatattgttgtagaaacaaggtcttgctatgtagtccaggctggtctcaagcgcc

SEQ ID NO: 596481 - DNA, 879 bp, Homo sapiens
  misc_feature (279)..(279): n is a, c, g, or t
tgcaccgtgtcatttgattctgtaaagaaatacaatgactccctctgtgttctgttttctcccccttccacagcacacacacatacataaatgaattttctaatttgacaggctgtggaggttcatttaagtgaaatatcatgctggattatgtctttagattttaatgatttctgcatgcaaccctaaggtgttaagcattacttcctttccagtaagagtgataaatggtttaacaataacaggggaatgacctcccagattttcaggggtctatgntgaatgaataaggtatctaatggtctctacctaaaaatgcgcgcgcgcaaaaacaacacacagggcacacacacacgtacatgcacacacacacacatgtatgtccacacacagtctgtgaatgtgagggtgtctgggcagttcagtgcagttacagaccccttatcagattcacgaggcaacagaagtgtaatgttatcttcataaccaagggttgagaacaagggcgtggggatttattaagcaccactctcaggtgttcgtgcgaatcttacataaaatttaaatttcgggggtaggtgcttatattatttgtgttatagtgcttaacctattttacataatgattcttatggcgtagaactcacgttgctttttagtcacggaggaacggtgggattccatatagtataaggacttcttatcaatttttgtgctttttgaaaatctggcgaattacatgggtggccaggttaaaaatgtcttggtaattgggaagtttggtagaaagatgttggaacccgttggacttgggatttgggaaagggatagggggccaaatttttgcagggggggaaaataatacggagggggttttaa

SEQ ID NO: 596482 - DNA, 894 bp, Homo sapiens
attttaagtgtgaacactcccctatgtaaatatgctgagcaagtaaattgtatggagaatggtatttcaaaagtgtttggagactctttcacctgtcctataaaatttgaattgtgtatgtgatctacatagaaagaatattacagagtaggttgaactctttatagccgaatacagcctttaatatgcttgtatagcatccactggcagcaagtacatagtagtgcctcagacttgaggggttgcatgtgagcctgggggagttactagccttggaatgcatgaacggttcctattagacatcagtgggaactccagtactctgtatgtatccactaaaaggggaacttgagagccacagggtattcttaattcctgatcattaacaaaacgtacactactggctgaactttaactccacaatatttcacggtcacagtgacacagtggctggctttaaatggtagcactattcgcacatgaccttctccaagatggttatccacactggcaaagcgtagtagtacttccccagcacactggggattcctctcattcgcccacataccacaggtacacgaactttagaggactaaaatattgggactgtccaaacaacacgaagtattccgttacattcttcacagaccacgttcattcccacggtggcacgtggtccacggacaacccacttttgtcatctttggaacctccttagagagagccaaaccttccctagagtgtaacgtttaactagggaacttactggaaagaataacccctgggtgcaaaactggtttttaacacactctcaattgggggaatgggtcaatcaacttgtacctcacttatggagaactttcacagattcaaaaatgccttctattttagtac

SEQ ID NO: 596483 - DNA, 229 bp, Homo sapiens
  misc_feature (158)..(158): n is a, c, g, or t
cgagcacggcgcgggccaccagccgcccgtacgagaggaccgagaacatcgccgccgccgcccccccgaggaggcggggggccgggggagcaggaggacgcggaggcccggagccggctctctcctcagccgcatgccgccgcgctggggcgctcctntcacgcgcgcagtggccgccgccgcccctgcccgacgcgcggggctctcgttccgctcagccgcgcgcacc

SEQ ID NO: 596484 - DNA, 193 bp, Homo sapiens
  misc_feature (88)..(88): n is a, c, g, or t
  misc_feature (92)..(92): n is a, c, g, or t
  misc_feature (106)..(106): n is a, c, g, or t
  misc_feature (157)..(157): n is a, c, g, or t
  misc_feature (186)..(186): n is a, c, g, or t
caaagtgctgggattacaggcatgagatgagccactgtgcctggccatgagaaatgtttcatgatgtgagaaaatacaggagtttttngtcntgattccaccagtngtgaaggactgtcctgcagatgatggactctcagactgttggcaagagtancaagatgctgcagcacattgactatagantgagatg

SEQ ID NO: 596485 - DNA, 133 bp, Homo sapiens
  misc_feature (60)..(60): n is a, c, g, or t
agttagacctaacataaccattcttaataactatttatattattctaactactaccgtcntttcctactactcaactttaaactccagcatcacgcatccctatctactattctcgcacctcgaaacaagcta

SEQ ID NO: 596486 - DNA, 670 bp, Homo sapiens
  misc_feature (36)..(37): n is a, c, g, or t
  misc_feature (224)..(225): n is a, c, g, or t
  misc_feature (277)..(277): n is a, c, g, or t
  misc_feature (296)..(296): n is a, c, g, or t
  misc_feature (301)..(302): n is a, c, g, or t
  misc_feature (316)..(316): n is a, c, g, or t
  misc_feature (356)..(357): n is a, c, g, or t
  misc_feature (423)..(423): n is a, c, g, or t
  misc_feature (425)..(425): n is a, c, g, or t
  misc_feature (439)..(440): n is a, c, g, or t
  misc_feature (479)..(479): n is a, c, g, or t
  misc_feature (481)..(481): n is a, c, g, or t
  misc_feature (603)..(603): n is a, c, g, or t
taaagaccccaggcgccatgtcatgaaccggctggnngatgtcctgtcagaacccatgcggcagcaatggcctgccgccgcctcttcggcccagtggacagcgagcagctgagccgcgactgtgatgcgctaatggcgggctgcatccatggatggccctgtgagctgatggaacttctgactttgtcacctgagacaccactggatgggtgacttctgcctgnngagctgtgtgctggggccttgtgcctgcccaagctctaccttcccactgggngcccctggctgatggcctnggatnnagtttgggatgganggcatggctgtgccttggcacctcacctgctctgctgcannggtgacagcagatggaagaccatgtggaccttgtcacttgtcttgtacccttgtgcctcgctcagngngagcaggctgaagnngtccccaggtggacctggagactctcagggtcgaaaacngntggcagaccagcatgacagatttctaccactccaaacgccggctgatcttctccaagaggaagccctaatccgcccacaggaagcctgcagtcctggaagcgcgagggcctcaaaggcccgntctacatcttctgccttagtctcagttttgtgtgtcttaattattatttgttggtttaatttaaaca

SEQ ID NO: 596487 - DNA, 149 bp, Homo sapiens
aggatccttcgggagagagactgctgagattgatttgtcggtggcacattgtcatagtgacatctgcatcactggggcttgctgctgctgtttactacttggggcagaatagaaaggcaaggcaagcctgtgacacgaggagcgggtgc

SEQ ID NO: 596488 - DNA, 937 bp, Homo sapiens
gcgtaggatccattcgctagggagcacggacacaggtgatcctatggctctgtgcatcactggttatctcatacacctgctagggaagtaacattagtgcagtacttgcgtcggacacgaagaatacaggggaggatggtgaagaagacattctcgagattaaattggagataatcgccgatcttagtctgtctatgtagtggggataggatcgtgatagaggcaagtaagcaggatcgatgatgctgtaagaaaccaggaaggatggaagaaggaagaaaaagaaaacagcaagagaaagagtcggaagaaaactgaaattgaagcatgttggttctgatgaggcaagcaacgaaaagaaggtggtgacaagcaagaagaagaggaagattaaggaaaagtacatcgatcaagaagagctcaacaaaacaaagcccatctgaaccagaaatcccgagatattactaatgaggagtaccggagaattctataagagcttgaccaatgactggaagatcacttggcagtgaagcatttttcagttgaaggacagttggaatccaagagcccttctatttgtcccacgagtgctccttttgatctgttgaaaacagaaagaaaaagaaccaatatcaaatgtatgtacggcaggagtttcatcaatggatactggtgaggagtaatccctgaatatctgaattcattagagggtggtaactcgaggtctccttaaaatatccgtgagaagttgcaaagcacaatttgaagtacacggagattgccaaaatgtagactttatgatggggaaaagaagaacagatttgggttaaaaagtggagcgaacctaaaggaagtaagaggagaaaaccggagaggtttggagcgcaggagcacatttttgagcgcggaaggtggaaaatatagatcaggaataaaa

SEQ ID NO: 596489 - DNA, 200 bp, Homo sapiens
agtattgaggtttatattcatcttctctagatgttctgacatccttctgttcttctggttcgtcttgatcgtagttcttcttatttgctctttagcttttgttcattagcttgtgctctggttcgggtggaacgagttcttcctattgtagttctcaggttgttgaagatcagtgaatgtgactcccagtgtggagagag

SEQ ID NO: 596490 - DNA, 723 bp, Homo sapiens
  misc_feature (462)..(462): n is a, c, g, or t
  misc_feature (538)..(538): n is a, c, g, or t
  misc_feature (544)..(544): n is a, c, g, or t
  misc_feature (589)..(589): n is a, c, g, or t
aaaacattactgtgtctaaaagtagcggaggcctcgtgcggtgttttttaatcggccgagggttgtggtcagactgtcaggatggcaggcagaaggctagtggactagcagtgtatactccagtgcaatggacctttttcctctgggagaccagcctggaaggcaggggctggaaaagctgagcctgtaggtcactgctccaacagcctgggtttggggtcattgggtcagtggccaggcctccctcttgccttgtgttttggtatcaggtggctctgggctttctgggcagcatgtcggcctgatttgatgcccacgtgcatgtggtaacaccttccttgccccccttggctttgtttggttttcttccaagtgtccttggagtgtggcccctggtgtaatgaactcggacggacagtccccttgttccctatttaactaccagcactacctaattatttngcaacttgtttcccttgtttcacctgcactggcctcaacattctatttcttgtttaattaatgagcaaataaatcntgatcnccactaatactccactggcaactgctggccagtgaactgggaagncctgcagaaggcttaactcttttcagggcagaatgttcacgaattggagatttgggagaaggtagagggaaggggagtggataacacaggagattcctggggaggtcagggatctttgctggggaagtcattct

SEQ ID NO: 596491 - DNA, 846 bp, Homo sapiens
  misc_feature (41)..(41): n is a, c, g, or t
  misc_feature (367)..(367): n is a, c, g, or t
  misc_feature (446)..(446): n is a, c, g, or t
  misc_feature (536)..(536): n is a, c, g, or t
  misc_feature (546)..(546): n is a, c, g, or t
  misc_feature (692)..(692): n is a, c, g, or t
agctggcaccggtgcccgagacccgagctatgtcagcaaangctccgtggttctggcctacagtggcggcctggacacctcgtgcatcctcgtgtggctgaaggaacaaggctatgacgtcattgcctatctggccaacattggccagaaggaagacttcgaggaagccaggaagaaggcactgaagcttggggccaaaaaggtgttcattgaggatgtcagcagggagtttgtggaggagttcatctggccggccatccagtccagcgcactgtatgaggaccgctacctcctgggcacctctcttgccaggccctgcatcgcccgcaaaacaagtgagaaatcgcccagcgggagggtggccaangtatgtgtcccacggcagccacaggaaaggggaacgatcaggtccggtttgagctacatgctgctactcacttggaccnccaccagatacaaggtcatttgctccctggaggatgcctgaattctacaaccgtgttcaagggccgcaatgaccttgatggagtacgcanaagcaacacngggaattcccaatacccgggtacactcccaagaacccgtggagcatggatgagaacctcatgcacatcagctacgaggctggaatcctggaagaaccccaagaaccaagcgcctccaggtctctacacgaagacccaggacccagncaaagcccctaacacccctgacattctcgagatcgagttcaaagaaaggggtccctgtgagggtgaccaatgtcacggatggcaccaacgcacagacctccttggagctacttcatgtacctgaacgaagtcgcgggcagcatgggttgggcga

SEQ ID NO: 596492 - DNA, 152 bp, Homo sapiens
  misc_feature (67)..(67): n is a, c, g, or t
  misc_feature (106)..(106): n is a, c, g, or t
  misc_feature (122)..(122): n is a, c, g, or t
  misc_feature (126)..(126): n is a, c, g, or t
tcatggtaagctaaacataatcgatctgcttccattgcgagacgcatcctcatcgccctcgaagagnggggatctcatcaggaactgcagcattggattcctctgntgccacttcatcttcntcantacctagagcagtaaggtctacctgg

SEQ ID NO: 596493 - DNA, 852 bp, Homo sapiens
  misc_feature (373)..(373): n is a, c, g, or t
  misc_feature (452)..(452): n is a, c, g, or t
  misc_feature (542)..(542): n is a, c, g, or t
  misc_feature (552)..(552): n is a, c, g, or t
  misc_feature (698)..(698): n is a, c, g, or t
tggtcagcatgcgttcccggtatacaacgctagttacagtagagggtccgtgactgctgaaacaccctggggcggcctggacacctcgtgcatcctcgtgtggctgaaggaacaaggctatgacgtcattgcctatctggccaacattggccagaaggaagacttcgaggaagccaggaagaaggcactgaagcttggggccaaaaaggtgttcattgaggatgtcagcagggagtttgtggaggagttcatctggccggccatccagtccagcgcactgtatgaggaccgctacctcctgggcacctctcttgccaggccctgcatcgcccgcaaaacaagtgagaaatcgcccagcgggagggtggccaangtatgtgtcccacggcagccacaggaaaggggaacgatcaggtccggtttgagctacatgctgctactcacttggaccnccaccagatacaaggtcatttgctccctggaggatgcctgaattctacaaccgtgttcaagggccgcaatgaccttgatggagtacgcanaagcaacacngggaattcccaatacccgggtacactcccaagaacccgtggagcatggatgagaacctcatgcacatcagctacgaggctggaatcctggaagaaccccaagaaccaagcgcctccaggtctctacacgaagacccaggacccagncaaagcccctaacacccctgacattctcgagatcgagttcaaagaaaggggtccctgtgagggtgaccaatgtcacggatggcaccaacgcacagacctccttggagctacttcatgtacctgaacgaagtcgcgggcagcatgggttgggcga

SEQ ID NO: 596494 - DNA, 964 bp, Homo sapiens
gtagaaccttcttcaaacaaggaccactgagtataattgcctaagagacgatttttacgttgcatgtcaattacaagaatgcactggagatagaaaaatcagtaaagcatgagccccactttcaaagcgcccacagttgagaggggacagctgagacatgaggggcaccccagaagcatagtgtacacgtggcctccacagtgacgagcaaacccagctcccagaggaaggggcacggggagccttctgagggaaaccaggtctggagggcaccatcccagcatcccgagaagcggctgtcccacagagggtccttccacccacccgccaagctttcctgggtctgtgcacgctgtctctgccagaggacctcagtgagcaactgaagacaagtggagagaataaaacctgtgggaaaatgcagagggagtcacagcggacagtcctgcatcctaacagagcatttggtggcacggacggtggcaactttgtgtttcaaacctaagtgaattgtctcagtgttggctcctgcaggcttctctaaggcatagcaccagatgttgtcctgcaggggttcaaagttagcccacagggaggttgctgattctggcccacgtctcacctgccctggtcttccagtgccagctttggggctgcagactcagcacacgccatagccagtgtcctgctgggacaccactgcagaaggcgggattctccctattggtggagcaccaggcacagctgcgaaggcgcttaggaggctgaatgcaagtctgacagatcttccgggaagaccagggtatctgcctccttaagttaaggccaactaactctagggatggaaaaggtttctccaagaggtgttgggacggatagaggaatatactcacactggagaacgaggttaaacaccacgccaagaaaaaaaatagggcgtctccaccaagaagggaagcaaagc

SEQ ID NO: 596495 - DNA, 1059 bp, Homo sapiens
  misc_feature (364)..(364): n is a, c, g, or t
  misc_feature (366)..(366): n is a, c, g, or t
  misc_feature (368)..(369): n is a, c, g, or t
  misc_feature (372)..(372): n is a, c, g, or t
  misc_feature (641)..(641): n is a, c, g, or t
  misc_feature (785)..(785): n is a, c, g, or t
  misc_feature (840)..(840): n is a, c, g, or t
  misc_feature (848)..(848): n is a, c, g, or t
  misc_feature (854)..(854): n is a, c, g, or t
  misc_feature (859)..(859): n is a, c, g, or t
  misc_feature (866)..(866): n is a, c, g, or t
  misc_feature (888)..(888): n is a, c, g, or t
  misc_feature (900)..(900): n is a, c, g, or t
  misc_feature (942)..(942): n is a, c, g, or t
  misc_feature (948)..(948): n is a, c, g, or t
  misc_feature (961)..(961): n is a, c, g, or t
  misc_feature (985)..(985): n is a, c, g, or t
  misc_feature (1056)..(1056): n is a, c, g, or t
attggagtgatatagctgcttgtctctgtcatgcttcagcttaattgccacggttagtggccaaatccaggccagctgagttccactccagctgcagtatctgctgacaacttctgtgtacttaccagcaggacaccagattggcacagtcagtcccttgttccaaaaattggaaaatgaccagattgaaagtttaaggcagcgctttggagggggccaggcaaaaacgtccccgaagccctcaggccgattggcacagtcagtcccttgttccaaaaattggaaaatgaccagattgaaagtttaaggcagcgctttggagggggccaggcaaaaacgtccccgaagccagcagttgtagagncngnnacnacagccaagccacagcagatacaagcgctgatggatgaagtgacaaaacaaggaaacattgtccgagaactgaaagcacaaaaggcagacaagaacgaggttgctgcggaggtggcgaaactcttggatctaaagaaacagttggctgtagctgaggggaaaccccctgaagcccctaaaggcaagaagaaaaagtaaaagaccttggctcatagaaagtcactttaatagatagggacagtaataaataaatgtacaatctctatatncaagctgagacctttccttttgtctactccaagccttccccctgcgtatgtgggattgagggtcacatcattggcactagtgagagggtagtcagtagccacttcttggggaaaggtggggtagtgtggcccaagtggggggantggatgctcccaattgttcatgcttggtggcagattcaccattcgggtcaatcangaagctcnggcgangtcgnctctacnttccctgggtcagggcggctcngatttcctggcntgaagccggttcattctctttcagctagctggtgccactttncctttncattctcctgttnctttctcccttcatggcgctgctnttccagcccgggctgggggaatgaccactctgttttccgtttcctgggttctcccttgggtctttccttcntca

SEQ ID NO: 596496 - DNA, 316 bp, Homo sapiens
cactgtgtagctttctccactacactgtgaagttgttcaaaggcaagaggcagtcatctattggtccacattacttagaatagacttggttttagtttttccttttgctttagttaagtgaaaagacatattataagaccacgtataaaagcttcttttttcccctttctttactctccttcccagaagtttttattttaatttattgagatataattaacataccataacatttgccttcttaaactgtgccattcagtggcttttggcatattcacaggttgtgccaccatctctactttctaattccagaaca

SEQ ID NO: 596497 - DNA, 882 bp, Homo sapiens
tacctttttatttgggaacgggaatacagagcatgccaattcggctccctataaagtctgggtgaatttcaggaggggactggatccttaagaggtaattgtaagtccttagcatatggggggtaagctgaagggagcccttctttttgggaaggccaaaaggtccttacctctaaattgcggccaggaaaagtacctggtgtccggcaggtggcccggcactgatcctgcatgctatgagttcctgtggggtccaagggcccacgctgagacaagcaaaaatagagttcttgagtacatagccaatgccaatggaggggatcccacttcttacccatccctgtatgaagatgctttgagagaggagggagagggagtctgagcatgagatgcaacctgggccagcgggcagggaaatgggccaatgcatgcttcagggccacacccagcagtttccctgtcctgtgtgaaatcaggcccattcttccctctgtgtttgatgagagaagtcagtgttctcagtagtagaaggcacagtgaatggaagggaacacattgtatactgcctttaggtttctcttccatcgggtgacttggagatttctttttgtttccctttggtaattttcaaatattgttcctgtaataaaagttttagttagcttcaacatctaagtgtatggatgatactgaccacacatgttgttttgcttatccatttcaagtgcaagtgtttgccattttgtaaaacattttgggaaatcttccatcttgctgtgatttgcaataggtattttcttggagaatgtaagaacttaacaataaagctgaactggtgttgtgaaacagagaaataaaaggagaaggtcattaaaaaaaaaa

SEQ ID NO: 596498 - DNA, 150 bp, Homo sapiens
ctggccagtggtggacaacgtggcgtcccccaaaactcagtcctggcacctcaactgtgacaatcagcaaatgccccacccaggcccacatcgttggatgatagggagagctctggcagtatgtcccaagtcctgggaggggtacacgag

SEQ ID NO: 596499 - DNA, 1732 bp, Homo sapiens
  misc_feature (964)..(964): n is a, c, g, or t
  misc_feature (1129)..(1129): n is a, c, g, or t
  misc_feature (1134)..(1134): n is a, c, g, or t
  misc_feature (1214)..(1214): n is a, c, g, or t
  misc_feature (1401)..(1401): n is a, c, g, or t
ccttgggcttgacgtgtgtgaggttggcttcgcgtaccgctcggtttgtgttcgtcgcccgccacacactgatgtcgtcgtggtgcgctgccccgccaaaagttattgtgtgttaggatatttccttcgcgcgatgagtgtgagagtatttcgtgtccgggtggcgggcggtttttcgtcgatccgtggggagcgctgccgtgtggcgccgccccagacacggtggtgggggcacaaatggtctctggtgtgttgccccaccaacgcttgcccaagacgtttttttttgtgggggaggcgcttctttgtgggggccgctgttgggccgttgccatatatggccacacaaggtcctctcaaatcgtacctcgttgttgggcgcgtactcgctggtggcccgcgccacattgttctaggggggacggccctctcctgttggtaagctcgtttttttgccgttttgtataaggggcgcccgctcttgagagggtgtgccgcccccccccccccgccccccggtgtttatctccttgttagacgcgctgcccccgagtagttggtaaccccgcgccggtgttagccccccgggttgtccacgctcgtattatagcggctgtgttgcttttgtggttgtattttggtgttgttttatgtgggagggccacaacatgatggaaggggagccttcctcgcgggtgtttgcgttgtgtcgtttgtggtgggtgtgctatgtatggcggccgccaccatgtgtccttttttccttggggaagagaagggcccccacccccatagcgcaccgttggagtataggatgtttacactcggctgcgcccctcgggtgtgttgtgttgcacaccgagaataattgtagagaggtgtttgtgacccaccgtcggagagaagttgtttttcgtatcaccccaccgaagtacccgcacctcgtcgtagaaaagggaagagntgtttcctcttcgtgagaaaggcgcccccctcctcgcccggttgtaagtctctaatcgcgccgctctggagaagggagcttcgtactattttgttgtctctcaaatattggggtgatatatataacccccggccccctcccccctcttgagacagaggggaaaanaaagnggggaggaaaatgccccacaagtattgtaaatatgttgttgtctcgccccgtttttaggagccactaataagggagaaanattttttataaaagcgagagaaaccaccgcgctgctttatagagagacacaccgctgtgattctctctcacgcgcgctatagagatagtgtgtgggtgtgtcacacacccacacagatggggtctctctctccacttcttcacagtggttgtgtcactatgggtggagatattgggggagtggtggngagtgtctcttgtctctgttagagggtgtagagaaagagaagctctcctctctaccccacgccacacaccccagtgtagaacacccccaagagattggaacaacaacactcggatagcacacagcgaccacactccagccataggaagatggccataatttggatagtccacctttggttctttttgtccccagaaggcgttatacaccagtgacatccacatccgggaagcctttcccagcgttcccagccccttgaatagtgaagtgtccattggccatgtctggccgtagtctttcattcactcctccattaaccaccttgaatacca

SEQ ID NO: 596500 - DNA, 1313 bp, Homo sapiens
  misc_feature (826)..(826): n is a, c, g, or t
ggctcctttctgcccgctggacgccgccgaacgaagcatcgttcaagtctctcttcaccctgacgtcatgtctaagtcagcacgtctcctcatagaatgagcccgtaacagcatgaggcaagctgcttcatgtgggagggtctgagcttttgaaacaactggatgagagcctaggggtagccattattggagcactaggggaacgctcacggacttgtgtggtcaatgagagatccaatacacctaagcgctctcatggggcttatgggtcttcgtccaccattatcgccactgtgcgagcgagggtggcatgccagcgtcattgatattgctagaggctcacacgaagggtgcgcatcggaacgagtctgtggaaccgacgagcagagctgtctaccagcagcaagcattctcaatgggcaccaaggggtgcccgagcgttaacgtggtgcagacaagactagtatcgctctgcgtggccatcccacacgcacggcacacgtgcaacgcacacgagtccaccttaatacgagccatttacttctgtgaatcagctaatgcggacatggtctgcacgtgtgcatttggaccattcactggactaggaagcgggagggcaagttgctcacagacacactaggggggtgcttttggcacgtattgttcacagccatttttgcagcggacccaatggacattctccgttggcgcattacagggatctggtccagtttccaagaaatataccgccattagcttaggttggacattgggcccacatatgcgttggtctgcacacgttcaaggagacacaggtggcactggntaacaaacaggaccaaagggcaagaaatctgcggcctacaagcatggccatttacaattccccaagaccccacacacgcaagggggccgcaaacagctggggttcgcttgcggaccaacgccttacacggggcccgggcatagggggcaaagggagagaacgaggactagtgaggtccaccaaggatgggaggcagacatggcacgaacgcgtgaccaggaaccagtgtgacaagtggaaaacactttgcaagaagggagaacaaggaggagagggcacgtaaggtgaggaggggcaaggccggggcccgccgaccccccggcgcacaccattcggcactcgccacggcggatcggtccagcgcgctataatcaactgggaacccgacaggaacggaatggcaccgaccacacagtcccggaccatcggtggaccggcgaaagccgtcgacaacctcgaacgcatcatgccggccacatgtcacgac

SEQ ID NO: 596501 - DNA, 284 bp, Homo sapiens
actagtgtgatgaaagaataaaataatattaagaaaatagtgaacacttacctcagagaagtatataatatgtaacaattaagtatataagaaagagatctgtgcattcatctctcagatgggctgctataaatgattctttacttagcgtaatgaatagaagtagattctgattgatgaacatatacagacacacaccatataaagatgtatcagatcaatgacagaaccgaaaataccaatgtggtcccataagataataatggcggtaagaaattctatct

SEQ ID NO: 596502 - DNA, 168 bp, Homo sapiens
gcggcacaatcacttgaggacaggagttagagatcagcctgggcaacgtggcgaaagcccgtctctactaaaaacacaaaaagattagccaggcatggatggtatgcatctaggtcccagagtactcggagagtgccgaggtgatagagatcacctgacgcctggggg

SEQ ID NO: 596503 - DNA, 198 bp, Homo sapiens
cgcttgccactatgcccagctaatttttgtctttttagtagaaacagggtttcaccatgttggccaggctggtctcaaactgccgacctcaagtgatctgcctaccttggcctcccaaaatgttgggattacaggcgtgagccactgcacccaagcctcctttctcttttgcctattaaacctctgctcttaacctta

SEQ ID NO: 596504 - DNA, 482 bp, Homo sapiens
gtcagggatagacccctgatgtttttctgattcgcgtggcttaacctggaaataactttgtgtcggtgtctgcttctacggttggtgtttcagggtgtgccattgcctaattgtttgctatctatggacactaaaatttgaacatttattaagcttagccttattaggcatgaacatactctgggtatctataataatctcactttttcatggtatctatgaaattgagcaaggcacacatctcgtggcctttgtggctgtagaggtgcttcaagacctttagtacatcttctgtcgattccataatggtcagataatcaactccggattctttcatgatatcagacagacgcagtttggggtgtgaaagaggtttggataagtggatatgcttggaatgttgtcttagctgtattatttgtctgaatatggtgacagttagaatgatcagttcgtgaggggtactatccattgttcttcaa

SEQ ID NO: 596505 - DNA, 270 bp, Homo sapiens
cggttggtcggggtggagtaaagtgacagaatgccgagttcactgcggcctggagctgccaggctcaagtgatgctcgccacctcagcctcgcgagtacagggacgactcacatgtgccaccacctcgagctaattgttctctagttgttgtggagacatggtctcgctacgttgcccaggctggtcctgaactctggggctcaagtgatcctcccgcctcaatgtcccaaagtgctgggattataggcgtgacagccatcccgtcgacg

SEQ ID NO: 596506 - DNA, 102 bp, Homo sapiens
ttggtagacagaccctgtttgagtcccagctttcagttcttacgggtatattcctagaagtggaattgctggaccatatataattctatatttaattccctg

SEQ ID NO: 596507 - DNA, 257 bp, Homo sapiens
tccacgaagcagaagtcggcagttctgaccctgcagactatgtgcagctttgagtctcagcatagaacatacatctcacagccccaggttgggttcgcagagtggtgatgagaccggcctcatgtcgggaacattccgacaaacagaggtctcggacagcagagaaatcgctggtggcagcagtgctgacatgggcaccactcaaacgtgcctaagtggactggactcaagcaaccactgaagagggacggcagcag

SEQ ID NO: 596508 - DNA, 1077 bp, Homo sapiens
agcggaagtaggtagcgggtgcggtgctgggaggggcaggcggtgctccggcgtgcgagtggccttgtgccatgctggacgcgtttctgcggctccgtgtcgtcactaatggcggctggccattttctgctgggctggaggctggccctggctgggccctggtgagatgctagggacctgtggcgtgcgagccgggtgagcctcggcacaccctgctaacttgcactcttttaccctggccgtctcgtctagcacgagtgtgatgcacttattgtcttgcgcgaacgtcccctgatgggcatgcctcccgcggcactgcacgcccagcacacgggacaattgtgacagcaatacacacgtgaacttaagtttcccagcgaagacaaaggcctgtaacccgaaagcccttcacatttaccgcatggctcacgcattaattcacttcgattcttggcgcacccacacaacgcccttggcgcaagcgtttccaaacaattgtctctttaaccgggacaaacggggcttagccaagaaaaaagtgggcccaactagcaattattccattgaatcttccctgggaggcaattctaccacaaccattggggccttaacaggcaagacacacattgaacaatgaaacacagagggccaagacagcctttttcgtcctacccactgggcaatcgccttccacatggggaattacaaggaacccgggaaagcggcaccaacgttgggtgtttgatcgcaatacatatatgtcccacaaccttcccgccgtcgaaacgaaacccttttgccgatctacagttggcgaaatagcgccgggtgacccatttggcttgggagcctaaacccaacggtacctggtgcattggagcctggtgactttcagtgcgaacgaggctcattggaatccctggcccactttgaaacgttcactgggtggtacaatagttcttccacgattaagtttgcaccattccgcattataagagaaagaggtcaacctcaaactacataaaccttatttttaattacaacccagattcaaaattccgaaccgttacggcgcaa

SEQ ID NO: 596509 - DNA, 212 bp, Homo sapiens
cggctcgatctatgctaggtgatatattgctgcactgagtgtgtgcagattgttattcaatggttcatcaatgatgctaaacatgtttcgttgataacctgtccatctctagtttcaaccgtcttaatcagaagtgtcctttttgagtgggtatcaaccagagggagtgaatccagattagtttccctcaggttcagggaggaaaagtttgg

SEQ ID NO: 596510 - DNA, 317 bp, Homo sapiens
ccttttgggtttttaaaacccccccagggctttttttttttcgccccccctttttaggggccccccaaaagaaaaggttttaattaatgggggggggcaaaggggccccccccccccctttttttaaaaagggaaaaccttgggttaagggtttaggggcgccctttcccctttttttggaggggggggggggggggggttccccctttttacccaccggtaaaaggggggggggggggggggaaaaataggggggggggttctggtttaaaaaagggggggggggggaaaaaaaaaaaccgggcttctttttttta

SEQ ID NO: 596511 - DNA, 546 bp, Homo sapiens
  misc_feature (289)..(289): n is a, c, g, or t
ggtgcagccggtgcctcagacacaacaagtaaaacccaagtcctgaaaacactgggcccacattagaagtgggataactatgatttaagggaagatgctttggatgataatgttagtagtactctcagtacatgattctccgttgggcaagctagccctgtgcagcaaaaagaatattcttccgcctttgatgagttcaacaacaggatttaaccttcagttcttaaaatctgtctttgcaggtctatctaaggtctcctgccaggttgaatcagagtgggacttcagnttgggcactgatgaagcaatctgatgttactcaagaagaagagcagagatggacagtcactttgaaacctgctctgttcctttacctgagtctacgttgatagtgatccatgtggctgcaggcatcaatggatacctagcttgctagtcgttagccgacgattgggcatgaactcgtacagcatcttcatcgatcatgtatggttcgatcggtagagcaaaggggcgctcggtgatttcccgatggcatagcactca

SEQ ID NO: 596512 - DNA, 922 bp, Homo sapiens
gagacactgaccttcagcgcctcggtccagcgccatggcgcctccaggaagttcttcgttgggggaaactggaagatgaacgggcggaagcaagagtctgggggagctcatcggcactctgaacgcggccaaggtgccggccgacaccgaggtgttggtgctccccttatgcttatatgatttcgcccgaagaagttagatccaaagatgtgctgtggttgcgcaggaaagtgttacaaagtgactaatggggctttaactggggagatcagccctggcatgatcaaaagattgcggagccaacgtggttggtcctgggccactccagagagacgggggcgtgttcttgggggaagcagatgagcttgattgggccacgacaagggtggcccatatggcccctgacagcaggggcactcgagagataacctcgccgtgcatggggggacgagcaccgcctacattcaaggcggaacgctggcaatcaccgtgaaaacgggttggttcggccgcaggacaaggggtcatcgcagatacacgtgaaggacgtggaagccaagggtccgcctgccaatatggacgccttgtggtggccatgggtaccgtgcaagatgtgatacatcccaaagaggtctcgggatagttcaagagaagctccgagagtgttgaaagtacagcgcctcagatgcggggatcaagaggccccggattattatggaggctctgtgactgggcaccctgcatgaagtggcacgcacatgtgggatgctcttggggggggctccccaagccgaattgggattatatccaaagagccatacatttccaccttgcaccgggtaggccgaacgaatgcccagaatagggggaagcctcgggcaccacgattttggtattcccggggggcgccctatgggagagg

SEQ ID NO: 596513 - DNA, 111 bp, Homo sapiens
atttaggacataagctcctaatattacttaaatcagttgattttaaatttataccagtgtaatcaacatattaacctcttatatcttatttttgtagaaaagccactcccg

SEQ ID NO: 596514 - DNA, 178 bp, Homo sapiens
agcacctggtggtagtcaagaatgccccatctgctatctggcctggtacagtggctctccgcgagattctgccgctaccagaagtccaccgagctgctgatcagaaagctgccttttcatgcgtctggtgctgtgagatcgcgcatggacttcaatgacctgacttgcgaccagtgcg

SEQ ID NO: 596515 - DNA, 652 bp, Homo sapiens
ccgagccgtgcgtaacaggcgcgggcgctcccatcttgagttagagccaggccgtgccggggctctccagccccggggttcggcctcgactctcctggctgtccagatccgcggtgccccggcgggtgatagcccaatacagccatgtaagaaaaaggtgctgctgataggggaagagacgggtctggggaagaccagacatgtagagtctgagtaatacttctgccacattacacttgcgtcgacgacacccgcgcgacctgtggtggccaccacttgtagcgtgtgagacactctccacagtctcgcattccatagaggagaccctggatgcgtgcaacctcgtgtgagacatgtgtgcaggatcacggagcacactatcactggagaacattactatctacacagagcacacgcagacaactatcattccgctaacagtgtgacagttttgagtttacagtgatttgacagtgtgagaagaccgcggaacatgtgggaaacgggagcacatgtcactttatatatcccgatctgtgatactgggagagcgcactacctcacaagaacatcttcactggacagccaaaaatcttctgaccatgggtgtcacaacacatgggatcctgaggatcacagagagaatcacacg

SEQ ID NO: 596516 - DNA, 318 bp, Homo sapiens
aaaccgctaataaatccagataacgctcaacgtgcgcccttgcctgctcatcgccttgatcataaagcgcaataatttcgggagcctgcaacggttgatgataatagtgttgatacagccacgcaaaaccgcgaccagacagataattttcaatgcagccatgctgaccacagccgcagcggcgtaacgggaaatccaaccccatcatggttaacgcatcaaccggcagacgcatatggccaaactcgccggtaatgtagcttttaccggtaatcggtttgccgttgaaaatcagcccgccgccaacaccggtgccga

SEQ ID NO: 596517 - DNA, 341 bp, Homo sapiens
gggggggaaccccttgtttttgggccccctggggggggttaaattaatggttttgttgggcccctaggttccccctttaagggggtttcccccgccaattcttgggggggttttaaaaggggttggggggcccccccttcccaatttttttatttgtatttgggggccccataaaattttaagggggggggggggttggggtcccctttttttgggggtcccaaaccgggtttttttttttttggaggaaaagccccctggtggggtttggggggggggggggtttgggttttcccccccccccccccccccttaaataaggtttttttttttttccccca

SEQ ID NO: 596518 - DNA, 524 bp, Homo sapiens
  misc_feature (14)..(14): n is a, c, g, or t
  misc_feature (185)..(185): n is a, c, g, or t
  misc_feature (288)..(288): n is a, c, g, or t
  misc_feature (325)..(325): n is a, c, g, or t
  misc_feature (329)..(329): n is a, c, g, or t
  misc_feature (347)..(347): n is a, c, g, or t
  misc_feature (358)..(358): n is a, c, g, or t
  misc_feature (373)..(373): n is a, c, g, or t
  misc_feature (377)..(377): n is a, c, g, or t
  misc_feature (442)..(442): n is a, c, g, or t
  misc_feature (470)..(470): n is a, c, g, or t
cagaatctgacctnacctttgcaaagttacagatgcaccccaacattgagatgtgtttttaatgttaaaatattgatttctacgttatgcagatgcccccgtgaatgcttacctgtgagataaccacaaccaggaagaacaaatctgggcattgagcaagctatgagggtccccgggagcacacnaaccctgcaggcccccgctggctcctccaggcacgtcccgacctgtgggccccagagaggggacatttccctcctgggagagaaggagatcagggcaactcgnagagggctgcgagcatttcctccgggagaggagatanggcnacctgcaccactgcgtanagcctggaagnaagtgagaaaccagncgancggcctgccctcttccgggacacttaatgaccacgtgtttgacatcatgttaacctaagccctanagatgattcggatttgcaaatacatttngtatcgattcgccataccctacccagaatggcaattacttcatgcctgacctgg

SEQ ID NO: 596519 - DNA, 143 bp, Homo sapiens
cttcttgctaccaccctatttctctgctgcctttgacagcaaaactcttggaaagggttgcctatacatgttttccccccactcgtctctgtcttctcttgaactcatagccatcaggttttagtttccaccacttccctgca

SEQ ID NO: 596520 - DNA, 233 bp, Homo sapiens
ggatttctagtatcttaatataatacagttccaatcagtgtgtctggttcagttcagttcctacactgccaaaccggggggcagggactgattcagtttctctaccttctctatgtcagtgatgaccagggtgtaaaggtatctgatgcatagaactttaaacatcacgttgtccatattttttatgatcgtggcagatttggcaccctctgtggtgttctctcacacgtata

SEQ ID NO: 596521 - DNA, 471 bp, Homo sapiens
tctacagagcaagttcagggacattcagggctacacagggggaggaagcagaagaagaaagagaaagaaaggagacagacagacagacagagagacagatggacagacagatgaaagggagagggagagggagatgtgtcaagataatcctgagtcaacctggacacttaatccctttggacctctatctggagagcatcctatcagacttcactagaagatgacagctggaccttcctgttagatttcctcctgttagatttcaaaggctcttgtggatagatgctactcactctatttgcatgatccttcagtcccaggcaaattattacatctcttccaggctccgtatggaatgcctgtgtgttggatgcttgctgtgtttttggcctggatagcacgaagcattttacacatctgacagctggtagcagaaaggccctccatcacttcaggaagctcaaaaattta

SEQ ID NO: 596522 - DNA, 668 bp, Homo sapiens
tgaggaagatactctaagatcttagaacaggaaggatcgtatgattcagtgcagagagcctcaaaggaattgtgtggacgagaaggtcggtcacctattgaattgggaatgattcttcgtgaagttaccggtagataatggtcccaggatgctctatatgtgagggcagagaagaacgtagcgcctggattggcgaggagtgggttggacgactagactgaggctggacatgcgaagcggtggacggaccttgggaaggcagggatgatccatttcgatgttcctgtaagctgcgacatggatacgtaacacttcatatcaaccctctgggaaatcatgcgaagtggcaccttgagtagctactacgttgaggcgactgcgcaactccgtgccttggcttggttccctgctgcttgacgactaacatgagacgtccctgacgtctgtgagcacgggaggtttcctacttgtttgcatgctgacaagcctagttggtgtagcattggttgcgatgcgctgaagagccctggacacttagtagagtgaatggcgagtttgttgacatccattgccttcccatcgcccttatgtggcatccctctttggggcttcctagggatctatagtgaagcttcaggcgcttgggtatttacctttgggcccaattc

SEQ ID NO: 596523 - DNA, 180 bp, Homo sapiens
gacggattgctttccaagggagttgtatcatttatttaagtactaatctctaatcactgtgtacagctctaatgcttggatgatgagtttttttaaattactggctaattggataggtaagtatatgggatctaattaatttgcctttctttggtgctaggtgaattatatagttttaat

SEQ ID NO: 596524 - DNA, 345 bp, Homo sapiens
acgtctctacagttaatatgacgaggatagattggtatatgatttaagaatggtgggctacgtttttgtcagtgtgacgaagaacgcaggtccgtgatgtctatagtgggtgcctgtggttaaactctgggactcagaagtgaaagggggctattcctagttttattgctatagccattatgattattaatgatgagtattgattggtagtattggttatggttcattgtccggagagtatattgttgaagaggaaagctattagaaggattatggatgcggttgcttgtgtgaggaaatacttgatggcagcttctgtggaacgagggtttatttttttggtta

SEQ ID NO: 596525 - DNA, 328 bp, Homo sapiens
  misc_feature (39)..(39): n is a, c, g, or t
  misc_feature (300)..(300): n is a, c, g, or t
ctgtaatcccagcacttcgggaggctgtattcgtctgtnctcacactgctaataaagacatactcaagactgggtaatttatcaaggaaagaggtttaattgactcacacttctacgtggctgggaaggcctcacaatcatagctgaaggcaaaggaggagcaaagtcacatcttacatggtggcagccaagagagcttgtgcaagggaactctcatttataaaaccatcagctcttttgagacctactaccacaaaaacagtatgggggaaccacccctgtgattcagtttatcttcanctgggccccacccttggacaatttggcg

SEQ ID NO: 596526 - DNA, 111 bp, Homo sapiens
tgtcaccttgcccactgggtgcctatgctgacccaggataggcagactgcccctccaaactccacagtatgggagcctggagggctaggccacggccttctcatgcctcca

SEQ ID NO: 596527 - DNA, 392 bp, Homo sapiens
tcactgacaaatgtgtcaagctctcgaatggatagtggtatgcacagcgctgtgtctttgctcataatgttggtcatagcagtcagggtacgtcatgcgaatgggtgtaaagtcgcactcatctatctgtactctacaaggtgctcattcaactcgcagtcagttttacatcattctcctcggataagccgcaatactgtggccatatgctccaacttcttcgcagagcaatcagatcagtgatatggcgccatgctgatctcaattgtggtctaaaaagtctgggccaggttcagcgtcagcgagtctcaggcaccagcatgcgttctcgaagactgcagcggacacacgcgctcccagacagcgaggtcttcagcatagtagggcctcag

SEQ ID NO: 596528 - DNA, 329 bp, Homo sapiens
ctgctgccacttacgcgcataagttaagtcaagagatctgctcggccgaacactacgagccacatcttaaaactcaggggaccaggcggagcttcatattcatatagaggagcctgtcctgaaatccataaaccggggacaaccttaccacctatagctcagcctatataccgccatcttcagcaaaccctgattacggctacatagaaagcgcacggacccacgtaaagacgttagctcaaggactaacccatgggcggtcaagaaaggggctacattttctaccccagaaaactacgatcgcctttatgaaacttaaggtacgaagg

SEQ ID NO: 596529 - DNA, 1603 bp, Homo sapiens
ctttttaaacgggccgtaaatctgtgacaaatttttgggtcaatttgttcccatttaaaaagtactgattttaaaaactaataacttaaaactgccacacgcaaaaaaaaaaaccaaagtgttccacaaaacattctcctttccttcgtgaaggtttaacaatgtgcattgtgttattcatttaaccagctcttttactacataaactttaaagtggccaattgtgaaacaaacagtttctgaaaccgttctttccaccacgtgatttaaaaggtggggtgtggcaggatatttagggagatataaatattctcacttataacccttctcttagaccttttctgtggagcaagacttgtgggtagcaccttgtgcacagctctcccacgcagcctattcttgtgttccaccagtgcgtttttgaaataaccaccccaccgcgcacaagtgtgttctgtgttcttcatttattcaccagaaaacagggcaaaaggacaccccacaaaagggtgtgagaatacgttcttagagaaaaagctctctctcaaacaacaacatgttgggcttttgcccagagagaacccattatttcataaccaatatggacagaattttacaccaaaaactttcagagacaaatattatagaggccatctcttctacagcacttttttatcccccagagaaacgcggcaaaatacaaaactctttatattcctatatcagaatcttcagaacaaaaacattgttctattgtcaaactgttgtgtgtaccccccgcttggtgtgcggacacaactccccaaatataacagggggggggccaatatatgcggaggggcggctataatttctggggcccatgagaatgtgggctccccacgggataatactaatccacctgttgataaacacaagtatagaacaacccccaagagtagtgggatcaccccaaatatggagggagggaggcctcaaccatatatagtgggtgtggttgctccaacacccaagcaaacagtgtatttgaccccaagcgaagaaagaaacagcctatctccgtatgaaacgagaaaagccaccacagtctccttttgacacattttgtgaagaggcccccccactatttatgtgtcccccccagaggaaaaagagaggcgattactactgttccacaaaaggactttcacagagggggtcgatcaattttgcgcgacgaggaaatgttgaaaacattctcgctggatgtgactaacactcggtttgtaacatcgtgggtgccacacaaaagtggtgttgacctccaccaaaattcagccaggggtgtttactgagagaaaacacaccccagtggtttctactccaactactgtgggcgaacaagaggtgaaaacaggcgttcccacaacattagctccctcagtttctggtgtgtgactcccacttctgtgtaagaaggacaaagggccaacaaaggagggattgtactacgtttgggccagcaaatttatggtagcgttaagtgtagagagtcagagacgcaagaagccgcctataacgagcaggtagatgttccactagggtagaagtaccacctatcagg

SEQ ID NO: 596530 - DNA, 334 bp, Homo sapiens
gtgtgttcccgttgtctaaatagtacattcttttttttgtaattggtaactatttgtggggcgaggggctcacgccggtaatcctagcacttggggaggccgagggggcagatggcttgagctcaggagttggacaccagccggggcaacagggtgaaacccggtctcggtgaaaacatagaaaaaatataatgagcggggggtggtggcacatgcctgtagtcccagctacttggggggctgaggcaagaggatcacttgaaaccaggaagtcgaggctgcagtgagcagagatggcgccactgcactccagcctagtagacaaagggaaaca

SEQ ID NO: 596531 - DNA, 393 bp, Homo sapiens
tattacacatcatctgctccagtaggtccttctgcttgcagggtccacgtcatccttgctgatggggtctgacaggaagcacaggcccaaagcaagcctgaccttctgccagaaggagagcgctgacgatggccctcttgaaggtgacgggaattgggtcggtcacccaggtggaacttttgcaaaaaggcaccttgcttggccttccttgaaagggctccctgaactcgccaccttgggccttgcccaagttgctcggtagatgtgtgcaaacccctttcagcagcaggatgttgcatcagccccggacatttgtgcccgttctgcctcagggcctgttgcagctttctcaaggctgagctccttgggcctcccgcagcagggtgttctcgt

SEQ ID NO: 596532 - DNA, 1219 bp, Homo sapiens
tctttcggaagaagggctctctgtagtctcgcttctcccgggcccggctgtcccgcctcctctccttgctgtcctcctttcaccgtcttccaagattgagctgggccacagagttcgctcttcagtgttcccgtgatagtcgtgtcacgtggcgagtctcccagcgtgtccttccccttttgaaattcaagggatgaatcggacaagttcagagaaaccacgcgatctcgctgaatcgtcagaaagaggctaaattggggtgtcttcattctccagaaaacgtgattttggttacaatattcgtcaaaagcagaatcttccctataaacctttttctttttggagtttttccttatatcttcttttaaaaactcttcctccttctcttgtggaaattttggtccctctttttaaattcatttctccttccaaaaaaaaaaaacaacaaacaaaaaaaccacaaaaaaacaacaaaaaaaaaaagagagaggggggcgcgccacaaaaagaaataacccccagaggggggcgccccaattagagcccatcccccacattttttccacacagggggcccccaatagaggagggccatcaaatataacacacaagaaaagagcagatttaataacacacgacgccaactggaaacacggcgcaaaaagaggagacacctcggagaagagagaccctaaaaacgggggggggggaaacaattgtggggcacacaccctcacccgagaataagttatacaaccccctcatcaaggggagaacacattaccattacccacaggtagtttatcgtgggtggtgaaacacacatcgcgcgcattactatcgccggcgacgacaactttccgcccagaggactgtttatattgaaaactttaccgggggtgtctcctaatacacatacatatgacgcatcacaccagcgacaaacaagcgagtgcacaggtgcgcaacacagcaagccccaagaccacgcagtgagaagcgctaacccgcaagacgaggaggaaagggcgaaccacgccacaaacagcggtccaccaaccaaaagaagacggccacgcccgacaatcgcagcacgtcagcaccaagagacacagaagacgacaatcaaaacctagaatgcagaaaacagccacgcacagacgaaccgaacgcaactaaaagtcacgccggcagcacaaaccaacacgacgccacacta

SEQ ID NO: 596533 - DNA, 483 bp, Homo sapiens
gcttgaactcctgatgccaggtgatccacccacctcggcctcccaaagtactggaattacaggcatgagggacccctcccaggcccccccctttttttttaatcctaaaaagcttcctaagggttggccagagcaattaactccagtgaatacctcttctaaagacttaccaaaagggtcatttgtgcctatttaactgtttttaccaaactgccctgtctcttttctgctgccaactaagcagtttcctagggacaaaaaaatatcccatatttttttttttttttgcttacaaaacaagacccacctgtattttctttcttcaaaaaggccctggggaagaataggacagcttattaataagttcctccagacaacagttaacccctttgttaaaactttttattgaggaaaaaggggccttcatgacctgctttttcccttcacctgaattttagctgccgttcttttttttttgtcctt

SEQ ID NO: 596534 - DNA, 359 bp, Homo sapiens
gcagagcacagcattgtcaggaccagactcgtgtcaggccaggtgcagccttctcagtcaaacgccgaccaaggctcactaccatgagaattgcagcgatttgcttttgcctactaggcatcacctgtgccataccagttaaacaggctgattctggaagttctgaggactcatcttatgagcagactctcctagccccacagaatgctgtgtcctctgaagaaaccaatgactttaaacacgagacccttccacgtaagaccaacggccatgaccacatggatgatatggatgatgaagatgatgatgaccatgtggacagtcaggactacattgactcgaacgactctgatgatgtc

SEQ ID NO: 596535 - DNA, 426 bp, Homo sapiens
agcttagccgcttactggtgaggtaggactggatggagggtgaatgcgagaggaggaacaggaggaggacgctggaggaagaggatccggcatctcagggcgggatgactggttcgctctcatgagctgtcctgaaaagcgatatgagtttgaagcagaagatcgagaaggagccagaggaagcaggccaagacacaccctccactctccccatgcttgctgtcccacagataccctcttacaggttgaacaagatctgtagtggtctctcctttcagaggaaaaaccagtttatgcagcggcttcacaattattggctgttgaagcggcaggcacggaatggtgtccctcttatccggcgcttgcactcccatctgcagtcccaaagaaacgctgagcagcgagagcaggatgagaagacaagtg

SEQ ID NO: 596536 - DNA, 144 bp, Homo sapiens
gtatatgggttatagttttaattattaggaggatgatggttgtctttggatatactacaggatggtattgaggagtatctgcagcatgggggtcagggttgagggtcttggtgagtgtatcagtggggttagcgatggaggtag

SEQ ID NO: 596537 - DNA, 384 bp, Homo sapiens
cctttgttgggatccgaaggaactgtactccccctgccctccccgacccgcccagtttagccgatgacctgcacatcgctcccctgtggtccaaaaaaggaggcctttcgatgtttgaaaaaaaggcccccccctgtagagtcccgaaagcccaggagtgaagggggttcctggagtctttagggtgcttcttccaaagtctgttttcttgcttccaaatgtggtcaacttttggaaccctcgctgtagctttattgtttagccccaagcaaaatttttttcctcctgccccgcatgtgtatggtgggcctctgtacccttgaaatgtgcaatgtgcccaattgttgactcccaaaaaaaaaggtttggggttgtaaaaaaaaa

SEQ ID NO: 596538 - DNA, 108 bp, Homo sapiens
cacgagggggggacccatccgagaccctgcagggggagctaactctcaagtcggccatgatcgagatcagggcatccagagcctgatctgcaggcagctgggcaacgc

SEQ ID NO: 596539 - DNA, 318 bp, Homo sapiens
gaatgactctgatgcccttaccttttcaaactaaactaagctttgtcaccttcattgactttgattattttaagacttttattactaattttggaatcacgaacacacccccccctccattaatttacagctaggggttggccagcactggagaccctcctaaattaccatatacctttgaattcatggactggatggtttatatctactttctctgtcccatagagttatacccgtcggtgattgaactgagttcccccggatgtcgaaggaaaaatcactttatgtgattattgttcgtaacaaacatgggcacat

SEQ ID NO: 596540 - DNA, 517 bp, Homo sapiens
  misc_feature (10)..(10): n is a, c, g, or t
  misc_feature (99)..(99): n is a, c, g, or t
  misc_feature (140)..(140): n is a, c, g, or t
  misc_feature (146)..(146): n is a, c, g, or t
  misc_feature (152)..(152): n is a, c, g, or t
  misc_feature (189)..(189): n is a, c, g, or t
  misc_feature (211)..(211): n is a, c, g, or t
  misc_feature (251)..(251): n is a, c, g, or t
  misc_feature (315)..(315): n is a, c, g, or t
  misc_feature (369)..(369): n is a, c, g, or t
  misc_feature (376)..(376): n is a, c, g, or t
  misc_feature (420)..(420): n is a, c, g, or t
  misc_feature (422)..(422): n is a, c, g, or t
  misc_feature (509)..(509): n is a, c, g, or t
gcggcctgancttcaaggcagccagctccctcccggtctcgccttccctcgcggtcaacatgaaagccttcagtcccgtgaagtccgttagaaaaacancctgtcggaccacagcctgggcatctcccggagacaaaacncctgtngacganccgatgaacctgctatacaacatgaacgactgcaacnccaaactcaaagagctggtgcncaacatcccccaaaacaagaaagtgaacaagatagaaatnctacagcacgtcatcgactacatcttggacctgcagatcgccctggactcgcatcccacatatngtcaacctacatcacacagagacccgggcagaaccaaacgtccaagacaccgcngaccacnctcaacacagatatcagcatcctgtccttacaggcttctgaatncncttctgaataaaaacaaaagacagcaaaacactgtgtggctgaataaacagtgaatgtatgcatgtaccacccgtaggtaacagccnctcagatg

SEQ ID NO: 596541 - DNA, 159 bp, Homo sapiens
catggtcctgtcggtttaagggtactgtagagccgaactttgagttactgtgcaagatttttttttgcaatggtcctgtcggtttattcactgtatgtccttggtgcctggagcctactaaatgctcaataaataatgatcacaggaaaaaaaaaaaag

SEQ ID NO: 596542 - DNA, 805 bp, Homo sapiens
tgtagagattatattaaatacctctgatctaactaaatgtgaatgggtaatgtccgaaaattacctgtaaggtttcttcaagcaattccagcagtttatcaaaagctgagcatccaactgcaaatgaataaggaggataaagttggaatgatgtaaaggagtaaataaattaacaaatttagaagaacaatatataattttaatttttcaaaatggcttgatcctccggcaaatatggtatttgaaagtatcattaatgaaattggtataaagaataaattttcaatttttttgggaaaattccctttggagaaagtctatgggcgagattggtggctcggtacaggaacctatgagagagagctatcaacaggaagttgtgggcaaagaggaaaacaaaattaaaagtgtatcatgtgactctaaaatacaacttagaagcaaaacaagaatttcagtttttgatgaagaagaagaaactggagaaaacacacatcttcatttggccagtagaaaagtggatagtatatccacaactccagctaagggaggatctctgttaccaatgaggactgaactgtctaaatgaaggagaattttaaatgatgttattatagactttcattgaaatacttgggtgttgacaaactgaaaaaagcaggagctgacgaattgatatatacagtgtttttctataaagccttaatcgagagaggggagaatttgaaacaataatctgcaatcaggacaaaggggggagaataaaaatggcgggagggaattttcgaacgatcatttgggccta

SEQ ID NO: 596543 - DNA, 700 bp, Homo sapiens
  misc_feature (144)..(144): n is a, c, g, or t
agtatggggagtcaattcttccacgttagcggagaccccccttcttccgctcatatgttactctcgccccccggctcgcacaaaaataatcaattgtcgaaagcgtacttcactaggcgatcatacttacacggctgtgtctgncgcacgactcttcttttggcggcgaattctccacagataaggtgtttattcttaaggacgtagtgaaatattgacattcaatttgcagtagttgaagtctctcggtagaacacgctatcatcgttagggtgtgtgatgaaaacgactggggcccctttatagcccttctggatataattacctctcttcggcttggaactcatactactaccactgcaataaactttcttcccactttcacccccccgtgacaaaaaattggttttttcaatccaacaatttgtaaaaataatttggcatttatacaccaacttctctggaaaccaccgtggccccgcgataatagtatcccctctctctctgcacagtggagccctctctggtgcacaacatgctgtgcgatgcccccccccccctcttgggaggcctgtggcacggcgggtgtgtgtctctagggccacgcgggcattcggtgcacctctcttggtccaccacgggggcagtcatcgtcccttgtttttgtctaaaaagatataaatcaatagataagagaaaa

SEQ ID NO: 596544 - DNA, 109 bp, Homo sapiens
agtgggtcctgcacgttgtggggcagctcggggcaggcggttagctggcggtgcaggcctcgtgcgcgggtcagcacgtcctccacgctcagcttcatagtcagcgtgg

SEQ ID NO: 596545 - DNA, 1753 bp, Homo sapiens
  misc_feature (844)..(844): n is a, c, g, or t
  misc_feature (929)..(929): n is a, c, g, or t
  misc_feature (1752)..(1752): n is a, c, g, or t
gctgagagctcagtgagcatcctgcatgggaggtggatggtggagagagcaaccacgggggcatacggtgtgcccctcgcgccgggaaggggggggcgaaaccctaagcccctacgcccgccttcatgcatccgcacctgatcgttaccctggcaccaagagaacaccgtcgtcgcgcctacaaaacgtccgagactggacggtagtacgcacaggtgcacgggcgttctcacatgtgaggtcaggcgcgggcgatgaaccaggaatcggggctacgcggcgcctacgtgaaaggtagtcgaccaaggcaagcgtatcccaagcgcagggggagatgcgatgagcgacgcagaacaattttcacatcccgttacacgcaattgagagcacgtgaggaagccgtcttgagcggccgtacacttgaactgattttgacgtggttgtgcgctagtggttcattttgagctaatctctatggaatccgcagcactggaaattgattgcgactttgtatggggacagaacaccatgtgtagcctcgagatacttaacgtggtttcatttaccatcgcaaaattccatcgagtgcaaagggtatgtagggagaaacaagtgcctttgcaggaaacataatgaggtgaaagacgtgccagaaaactgatggtgaaggttcgggaacgtggactctattactgtgatcgaatatttcaatgcatacaccacaagaacctgttgcattgaagcatggagtaggaggctggggtactgacactgacaagaggaagcatgctgctattgtcaacactatatcgagacattacaacagcaatgtgagaattgtgangctcagcgtaagcgggagcaattggccacccaataatcctcgcgtctcacgggggatcaaaaacaatttgaactccccaacgganttattaaggtgggatcgaaccattgcggactttttgaaacactatcccatggaaccgcgttcgaattgggaaaagcgttggcgctggagattattcgacgcacttcttgacaagcttataattttggagggccttagaccccaaaacaggaatttagttaccaaagttttgccccgcccaattgatgagttagggggcaagacaaaggcggcccgaggaaagtttgggggacaccttgggggcagggcgcaccttatttaagtggctatattgggaacttggggcagtcacgcggggggaccaaggtccccaggtcgacataagatcggataaagcttcaatgggctgtcgtacagcgggaaacttttgcacacgtacagtgaatccgcgcaaggaaaaatgtaccccagcttgcggttggggaagacgtgagaacgtgtggcccgacgatgcggtggtctgggcgagggggttcccccataaaagaacatatttacaatgtattgacactttccccaagaaattgttggcgtgtaaagtggaagttgcactctagacacggtacggggcgtcccatatgggtaatggattacactccgagttaagggagttagtgaactcaccgtcaaatgtttgtgtggaaaaaccgctgttattaggtatgccccaaaggtaagtatagcctatcaacaaagtagtgatgcacgggccgaaaattagtaagtcggtacagcactaatatagcagaaaatacgacagtgtatctcaccaacaggtatatgagagtgatagtatactaggtataccgttgagtggtgcttgnt

SEQ ID NO: 596546 - DNA, 218 bp, Homo sapiens
atgataggcggaccacttgatgtcaccgctcatagctaattttgtatttttagtagacacaaggtttcactgtgtggccaggctggtctcaaactcctgacctcaggcgatccacccacttcaccctcccaaagtgctgggattacaggcgtgagccactgtgcccggaatgttttgggttttttttagagataggatctcactctgtcacccaggct

SEQ ID NO: 596547 - DNA, 313 bp, Homo sapiens
caaaaaaaaaaaaaaaaaaaaaaagcccggcatggtggtgggctactttggaggcccttgaggatcccttgagcccaggagattgaggctccagtgacccatgattgtgcccctgcccctttagtttgggggacagagcaagcccctgtttaaaaaaaaaaaaggccaggcccggtggctcatgcctgtaatcccagctacgcagggggccaaggcaggaaaatcccttgaacctgggaggtgggggttccagtgagctgaaattgtgtcattgccccccagcctgggcaccaaaagcaaaactttgttccca

SEQ ID NO: 596548 - DNA, 337 bp, Homo sapiens
gtacctaggatttatagtaggactacttgctattgtgagtcctccccgactctgggcttgtgctactactgtacccagacgtcacgtctttcccctacccttctctcctttccgtcatcctaagtgcctggctagatgaaggagttttacaggagcttttgacactatataaccgccctttttgtatgcacacacgggcggcttattatatgtaattgacagcgtgggagtgggtgagcatgagaggtaggggtgggacctggagatgaggagggtgggccatccttaccccacacttttattggttgtcgtataacgtctgtggtgttttttgttt

SEQ ID NO: 596549 - DNA, 250 bp, Homo sapiens
gagatgcgggtcacggcgccccgaaccgtcctcctgctgctcttgggggcaagtgcccttaaccagaacttgggccgcttccacttcatgagggaattctacaaccgcaatgtcccgccccggccgcgggagagcccctctcacatgcgcagtggctctacgtgagacgacacccagttgcgtagaggttgcgacagcaacggccgcgagtcccgaggacggagccccggcgcgccattgtatagagcag

SEQ ID NO: 596550 - DNA, 351 bp, Homo sapiens
ttttgagacaatctccctctgttgccaggctggagtgcagcagcgatctctcagctcactggaacctccgcctcccgggttcaagtgattcccttgactcagcctcccgagtagctgggactacaggcgcgccttcttgtattttagtggagatgatgtttcaccatgttggccaggatggtctcgatctcctgacctcgtgatccacctgccttggcctcccaaagtgcggggattacaggagtgagccactgcgcctggccctaattttctacctccatatggaacttagaactcagatgacctgacagaccacctaatatatgtctaacttttgtcgacgcggccgga

SEQ ID NO: 596551 - DNA, 923 bp, Homo sapiens
ttactcaggttttcctttcagattgtttatgtatagcttctttgtgtggcatttgtccaatttctatggtttagggaatcctttatttttgtatatgtccactcggttcatgtgacaaacccatttagcgtgttcaacaagggattttaaccaggattgtgctccttggtgttttagatgtattcttcccccaggacctgtgaccaccaccacgggctatgaggataattgatagaggttttgctttcctgtgtccaagtatggggatcactccacaaggactggcaccactggtgggggctgcctagtcgggaattaggaccacccatggattgtgaaaatggagccatgacaagaactaagccactgactgagatggagtgacctgtagacagataagagtataccttggtctcacctatcctgccctcacatcttccaccagcacctttctgcccaggcctatctggaagccacctcacccaggaccttggaagagtccagggaccgtgaggcaggagaagaaccagaaatggatgtaagcctggcccataatgtgacataagtatatcacctaatgctcaaccatttatcccttccatcactttattcacttgggttgtcagatagtctatgtatgtgtaaaaccatctgttttggctttatgtcccaaatctgttatagctttccaaatatatctggaactttttagattattcccacgccctattttgagtaaatatttgttaacttttagttctataagatgaggaagagtttatggccaagatttttggcactttgttttcaacagatggtgttatcttttgaattcctgattaatgactgttttttttctgcctaatagtaactggttaaaaaccaatgttcatatttattgatttaaaatgtggttgccttta

SEQ ID NO: 596552 - DNA, 233 bp, Homo sapiens
gaggatgatatttgtcggcgcagtcgatcataggcttcctgccctgcttgtgtaccacagagccagctccacctgcttgccgtccacctcaatgtccgcaatatagtcctcaaagacagtagggacgtcgacctccggaacactgatccttgctcgaagacgactgaggagtgcaggtcttacccacatggcaccataccccagacgatcaccagtcttctttcgtgattgca

SEQ ID NO: 596553 - DNA, 151 bp, Homo sapiens
actatgtagcaggtttcgggcgggccacgcgtgcggcacaggaacccaacccaagccgaccttgatctccaggagttcgtctcttaagtctgcggaagtgcagctgcctcagttcttagcgcaggttgacaactacaggcacaagcattga

SEQ ID NO: 596554 - DNA, 267 bp, Homo sapiens
ttggatgccaacatcagctcccaggcagccactgctcctcccatgcagcctcacctcaatagcccccaaatacctacatactagcgacatgctcaagatgcccggtttccttcacagcgtcaaccgtctgcaaagagaagccggaacagcaacatgccggggtattagtatactagctgcgggtacaatatgacagcctccatccgtgaatcctgtcaagcagcagatagatgaataaaaaggaacattcgggccaaaaaaaaaaaa

SEQ ID NO: 596555 - DNA, 666 bp, Homo sapiens
gaccatcaacttcgtgcctacggaggactcccatggcatagacaagtagtctagagagataccacagactccgtaggcagaagcttctccccatggactacgagtgaaaagagtagtagcttctctctgtcctcaacagaggtacacatggtccgcccaggatactctcatcgagtgtctctgcccacaagcgctgggattatggacacctccccatatccagagactgacagtgctaatcatgagccttcccatctgacatctgctgctgatgaatgtaataacagtaggtgacctccctcattcctctctgtgcacacacttgcttcgcctagctctaaagtctgccttgtatgtcttccccatgggacaatgcattgcctcatctaatattgtcagcagcccagccatctgggcggtcacaacaggtgacctcaaatatgggcgttctccttagactgcagaaaatggtcatcttgttagcttcctgtagttgatacgtcagtgccatgtgccatctataagctggcgtctgccttcaggaacttagagctcataaaattgtctacaggggagagcatcggaagcactctcaagtcagtgtggacgtcggaggtgtttcagacagccccggggctgcattcacaccagtactatacgtgtgag

SEQ ID NO: 596556 - DNA, 740 bp, Homo sapiens
  misc_feature (192)..(192): n is a, c, g, or t
cacccggggaaacctgggggccccgcactcgcggcccacccccaccccttgcgtgtttgccaccaggccccccaagagtaagaaatggggcccccgcgcccttggagggaccacccccgggacattaatggtggcccatctgggcgatccaagccaccaggcccaacgccaggggaatgataacctctggcnatagagcgccaccccgcccctggtgaccccatctttgctccccctgtgcccacacccctggcccccggctgaaagacttcggccccccttctgctgtcaccccatagatggggagaccctcaccccccgaagtgtatccccccgcagggcattcagggaccccagctgagatggttgactcaccaggggaatcccgcggcagcagcacggcccacgcttaaaggatgttggccccctagtcccctggggccccctgcgtctcacaataaggagcctgggatcccgatggaaaggtggagctccagggaaaatagtggggtcccttgccctcttctgtgtcacccccctcaaggcgtgacccccttagatggccccacggaatgcgccagcgtgctcaccaaaatggtgaccccaccgtgcggccatggaaatgggcgcccgaattaggggaccacctggactcaaaggggagggaagggcttatcccaccccccctcagggagcccttccccttatgttccccaataaagggtcctaaaaaacttaca

SEQ ID NO: 596557 - DNA, 205 bp, Homo sapiens
  misc_feature (71)..(71): n is a, c, g, or t
  misc_feature (111)..(111): n is a, c, g, or t
  misc_feature (155)..(156): n is a, c, g, or t
  misc_feature (171)..(171): n is a, c, g, or t
gttatgtctgacgggcacacacagcatatatacatctatggtctcacacgtaccctccaccacgctccatncatgctcatccttgatcacatgaaaagactggcgccaacntttccttttcatcaaagggggggaaatccacctccttaaaatanncctcttttcccttcncgatttatctccgtttgacctcaccgcagtgtgt

SEQ ID NO: 596558 - DNA, 400 bp, Homo sapiens
  misc_feature (1)..(1): n is a, c, g, or t
  misc_feature (245)..(245): n is a, c, g, or t
  misc_feature (249)..(249): n is a, c, g, or t
  misc_feature (258)..(258): n is a, c, g, or t
  misc_feature (312)..(312): n is a, c, g, or t
  misc_feature (396)..(397): n is a, c, g, or t
nctgaggggacgttcgtgaaggcctaatggctggacgcccacgaacatcccagtgtgggcctggacgggacatcatgccgggcaacacagctaaaatgggggtgaagaccatatttcttgcgcgtggcggtgacgggatggtcgctagagagtctgaagtgggttgtgtgctcggtcttgcggtctgtcgtcttctgtgtgcgggccttcgcgttggcaaaatacaaaaaggttcttgtatagcngggntccgcgtgnggctgtgtcttggtgttgcgctcgtctgcgtgcgtgttgcgcgttttttttctntcctcctctgtgctttccccgtcccccccgtgccgcgcacccgtgccgctgcgcccccccctccccgcccgcctcccgcgcgcnngca

SEQ ID NO: 596559 - DNA, 129 bp, Homo sapiens
agcgtgactgccagcgtctaaaagtcattaatgccgcgccaatgagccattctagtcagggcttcaccagtgtgactcagtaaacatttgatgagtacttcatatcagaaacagggcacaacggttaat

SEQ ID NO: 596560 - DNA, 139 bp, Homo sapiens
gcccccccttcccccttttttgtccccaacttgaaatgatgaaggcttttggtctccctgggagtgggtggaggcagccaggggttacctgtaccctgactttagaccagttgaataaaagggcccccctttaaaatga

SEQ ID NO: 596561 - DNA, 183 bp, Homo sapiens
agcttagatgcagttatccactaagattaggttatattttaactgtaccacagcagcattcatcatcataacgcttcactttggtatgttcttaacaatcattaattccctgaaattacaaactagttaccttaaccttgcttgagtgatccttcctaacttctcagtccaaacaaatactga

SEQ ID NO: 596562 - DNA, 133 bp, Homo sapiens
  misc_feature (33)..(33): n is a, c, g, or t
ctgcttctgaaactatatcagcagcctcagccnattaatttcaacaccaccattggtgcaaagccaactgcctcaacagcagcctcaaccaccacaaccacagcaggaactggtttcaagaagcaggaactgg

SEQ ID NO: 596563 - DNA, 223 bp, Homo sapiens
cttgggatcgagctgagatctgaggcgacaaagaggccggcggaagcaaggagcaagaagcttggaagatgagctggtgtcactgcaaaagaaactcaggggcaccaagatgaactggacaaatactttaaggctcttaaagaatgcccaggggaagctggagcttgcagagaaaaaggccacatgcttgagccgacgtagcttttttgaacagacgcatcca

SEQ ID NO: 596564 - DNA, 124 bp, Homo sapiens
  misc_feature (110)..(110): n is a, c, g, or t
atgaagcgtgagagttgatgatcatgcgtgagtataagctagtcgtctgtcaggaggtctgtgatgtacaattgttcaaggaatttttgtagaaaaatacgatcctacgnatagaagattctta

SEQ ID NO: 596565 - DNA, 853 bp, Homo sapiens
  misc_feature (173)..(173): n is a, c, g, or t
gacacacaagaatatatggtgaaacgacagctcacctctactcacttcaccacaagttgctaaccccgctaaagcccccttttccccttgtgaacttctccccaatcataacaattacccacttggggccattccactccaagagagttcatccccacacaaccaaagaacgngtttacaattgtgaattagactccccataaatcctgttccatcaactgcagataactcctggcccaagacccaactcgccgctccccacctttgaaagatcgccccccttttggcgggatttcccgcccaactgactacaaagcggactttttcaaaaagtgttaaccttttcggaagccatttgcacaggctcccccgcgatccaacccccgaacttttttccttgtcggaacccccttctgccaggtataatgtgccccgcacccccaccccaccagaaataaagtattgggataaacaaacagaatacaccagtgttcaaaaagcacctttccctcatgttaatagtacctttcgacaaacccatggggttgtgaggaaccccccacatgtattctacaaaccacacgaggaatcataaatgtttatccaaatatctaataccgttaaaaggtgggcattatccataaagaaaacccactctcttcagcaacccccgcacaatatgtataaaaagatatactttccccccggacaccactcactcgtagttaatacacgtctcacccacaagaaaaacgggtttttttttctttctgtctatacacaccaagctttgcataaatcttctactttcaacccagaaaaaaatttcccccacaaaaaaacccacataaca

SEQ ID NO: 596566 - DNA, 191 bp, Homo sapiens
accccaaataacaagtagtttccaaggaaaattcaggggctttttggttttttaacaaaaaaaaaagcccagccctttttgatccaaacggtcttttttttggatctgttatttaaagcccaggggatatttcaattaaaaaaaaaatttaaaaatgaaaagtccttggtccttccttatccctggcttta

SEQ ID NO: 596567 - DNA, 835 bp, Homo sapiens
  misc_feature (396)..(396): n is a, c, g, or t
  misc_feature (437)..(437): n is a, c, g, or t
ccagggattgtcccgtttcatgctgtgtgaatggacttataggagcacagccagaggcgcctgatgtgggaggctggggcgcattctcctagaatcaggtaaactgactgatgggcctcagtcttctaagtgaaggcagagacctgggttgagcagcagaataaaagatcttcttccaacgacatgcaacatcatgactcgattcagcccagccatcgtccagctgcgtcacagcatcagccaggctgacagcaagtgtgttccatgatcgaaagtagattggcctgacaacatcacgagtcaattaatttgtaattgaaaattctctcttatgttccaagtgtacgaagagtaagattatgctcagtattctcagaattagttttaccatgtctntaatgcaagtgtatttaatttggcttccattatttagactnaatataagcacgattaagcaatcttccacatgaggaaaccacacggaggttgggccagaattctttcccttccaacgaggggcggggcacaccagaattgtgccttgccgggggggagcagcaggggctttgacgttgcccacagcgacgttgtttgctgttaacccaatgtggggggcccccccatatttgtggaagagtccaggtcattaataactgcaaagctggcagccagagaccctggggtctaactagaccacacgggatggacacgcggcgaaaaaagttggtggaccatccaggagggcacacctagagtgaacacctgcacacttgacccttggtggacgggggcgactacaactatgatgttggcgagctgacccccctgttgaacc

SEQ ID NO: 596568 - DNA, 413 bp, Homo sapiens
cattcttcttcttttaattcttatcacttttgggataataacttgcccaagggctaaccagagaacaagcagcaggagcaaggctccatcccaggtctcctggctttaagaactgtgctcggccgggcgcggtggctcacgcctgtaatcccagcactttgggaggccgaggcaggcggatcacgaggtcaggagatcgagtccatcccggctaaaacggtgaaaccccgtctctaataaaaatacaaaaaattagccgggcgtagtggcgggcgcctgtagtcccagctacttgggaggctgaggcaggagaatggcgtgaacccgggaggcggagcttgcagtgagccgagatcctgccactgcactccagcctgggcgacagagggagactccgtctcaaaaaaaaaaaa

SEQ ID NO: 596569 - DNA, 212 bp, Homo sapiens
caatgtcatgtggtactgatggaattgaatgatgagaatgtgcacgaacttctatacccagttctatgctaactgcgatgtgtaaggacttctgtgcccagttctatgctaactgctataagaactacaaaataaatcaaagacttggcattttccatggaatgtagagtatagaacgtgaggggggtaaatccctaataaatttaactagg

SEQ ID NO: 596570 - DNA, 1896 bp, Homo sapiens
  misc_feature (1233)..(1233): n is a, c, g, or t
tgtctgctggtgctgcggggttcgggtcgctgaggagggtgctgtcagtgtgcttctttttcgtggtgtctgagcgctgtggtagtgagtgcgtctagcggggagcttcacgctgtggtgcggcgctgtgttcgttcgtgagtgccgtgctcgctcgtaattagttagttgtcagtccgtgggcttggtctgctggagcgtgtggccttttgtggcgtcgtgcctgtggtgagcgcttgtgtatcgcagttttggtgcagttctgtcgcctgagctgcgttctgtagcgagtgggggtctgttgtggttggtggtcgtgcgttggttgtgcgtggtgtgtgttggtgggggcgcggcgtgttcggggtgtgattatgcacgggcgttgcgaccccgggtgtgttgtatgatgtccgtcagtgttggccccctgttgagtggtggttgtgtctctaggtggcgcgagcgagatgtcggcgtggagtgttttttatgggggtgtgtaccgcagctcttgtaagttggtaggtatctcttcgtcgtagagagaggtgatgtctgccgccgcctcggagggtggtgttgggggctcccccgtcagttgtgggtggaggcgctcgtgagggacgtgtgtgggtgtggtgaggagagaccgcggttggcgcgggggacctcctccgagggtgtgtgttgatcgctgtgatgtgtgctgcccggcggggttgtccccgttcagtagtgagcggtggtttgctcgcgcagaggtcgcccccctcggaggggtgttgtgtgggccggcgagatgattgtttcgcgcgtggcctcctcctgcagggtgggttggttgggggccaacaggggcgacgtccgcgggggtgatgtggtggttgcctgcactgcgctgagtgtttttgtgtgggggggagggttgtctgtctgatgaggggtccagcccccgagggggagtgaaggtgggagagtctttggaggatttctcctcccctgcatgaagaagtagtttgttgtaaagtaggaagcttgttgtgcactacaagcttggtggaaagggcctccaccacagatgatttggttgtgcgtgtactcaaccacgtggtacgacttacattgtctttgttaaagaacgtgttgtggtgtggccagcagcacatcctggatgtggatgtcgccgctgcgtgttttgtttcatctacagtagaaatggagtaaataatnattttgttgcgcatcgggtttatggaggccccgccgtgataaaggaggagcgtctgtgtacacgacttggtgagagaagagaaatgtgaggtgagaaacaggaagttgtgtggtgtctctttgtggtggtgtggtactaaagatgatatgaggtggtgccgcgacgtctgtgcgacgcgacgacaacagataacatggaggcaggtatgtggttcgtgaaagatatatattgttgggtgagtatagctctctccaccgcccgtctttgtgtgagacacacgcaggctatatagatggatatctgggtgtagatctctctctctcgtgatagatatcttgtctcgtcacactctgtttcacagagatatcgctttctctcagagggttttagatccaatattctggtaataatataatttgctcggacgttataagaagatgtgtacgaccacatttagagctttgttaagagtggttgtgccaccatccacacccttaaagaagaacacccattcttatggaagagttataggttggaaacacatactgttagggatccctcggactgggatttcccgtgaggtttacccaagtccactgggtgaactgttttgtgccctggcttggtaatggtgttcagtcttataaaagtgtacgttataa

SEQ ID NO: 596571 - DNA, 223 bp, Homo sapiens
gaaggattaccatgaacttattttaaatccatactgtaccagaatgcctatgtctgtgtttcttaggaatgttgaagctatttgtgaaaactggtctgtacacatatataaatagacacacacttacatgtatgtattttgatagatatcacatggactaaattttgtcaatttcatgtaatttacccttggcaataaaaatgattcattaaatataaaaatc

SEQ ID NO: 596572 - DNA, 887 bp, Homo sapiens
ccacagtagctgtaactgccaccggatgccgaaggcgcccaagcagcagccgcggagcccgagtggatcgggacggagagagcacgagcccatcagacaaagtggtgaccgacccgggaagacggacccgacgatcaaaaaaacgtttttggaagagctggcagtagaagataaaacaggctggggaagaagagaaacgtgctcaaggcgacggagcagccagcagcagcaacagcaacacgcagccgcaaaaaaaaaaggcgagatacccgaaagggccggcggaacacggatgtggcaatgatgattgggacacagagacaagagcctcctggagcggtctctcaaggacgactctcaggcgccaacccaaggggatgaggagcgattgagggttaccagggccacaaaaacccccgcgcgaggggaacgaacaacccaaggcgggagggaacacgggtcattagcggcaaggccaccggattcccaggcactacaggaggtggaggacacgacgtgaagagacggacacaggaaaacaatcttgcctttcctaaacggacctgggccacaacgccccgggacgaacgactccggggagcacaatacggcgccggtaatcactgggaggggcacaccagacggccctggcacctcccagggggcaccaacaagggggacaaggggaacggcagcaaggctccaacaacaagggggcacaggggataacagcccccgcaaaacaatacaactaccggatgggcccactgggcaccacagcacaacaacaatacactcagacgcacacacaaccaccaatcactagcgggacccacgccagcagcacccagcgaaagggtcatcacaacaaccaatcaggacaagga

SEQ ID NO: 596573 - DNA, 951 bp, Homo sapiens
  misc_feature (50)..(50): n is a, c, g, or t
  misc_feature (86)..(92): n is a, c, g, or t
  misc_feature (95)..(95): n is a, c, g, or t
  misc_feature (134)..(134): n is a, c, g, or t
  misc_feature (165)..(165): n is a, c, g, or t
  misc_feature (184)..(184): n is a, c, g, or t
  misc_feature (193)..(193): n is a, c, g, or t
  misc_feature (203)..(203): n is a, c, g, or t
  misc_feature (231)..(231): n is a, c, g, or t
  misc_feature (235)..(235): n is a, c, g, or t
  misc_feature (237)..(237): n is a, c, g, or t
  misc_feature (250)..(250): n is a, c, g, or t
  misc_feature (252)..(252): n is a, c, g, or t
  misc_feature (264)..(264): n is a, c, g, or t
  misc_feature (272)..(272): n is a, c, g, or t
  misc_feature (292)..(292): n is a, c, g, or t
  misc_feature (318)..(318): n is a, c, g, or t
  misc_feature (336)..(336): n is a, c, g, or t
  misc_feature (354)..(355): n is a, c, g, or t
  misc_feature (372)..(372): n is a, c, g, or t
  misc_feature (376)..(376): n is a, c, g, or t
  misc_feature (386)..(386): n is a, c, g, or t
  misc_feature (389)..(389): n is a, c, g, or t
  misc_feature (395)..(395): n is a, c, g, or t
  misc_feature (404)..(404): n is a, c, g, or t
  misc_feature (408)..(408): n is a, c, g, or t
  misc_feature (410)..(410): n is a, c, g, or t
  misc_feature (413)..(413): n is a, c, g, or t
  misc_feature (475)..(475): n is a, c, g, or t
  misc_feature (477)..(477): n is a, c, g, or t
  misc_feature (490)..(490): n is a, c, g, or t
  misc_feature (501)..(501): n is a, c, g, or t
  misc_feature (534)..(534): n is a, c, g, or t
  misc_feature (594)..(594): n is a, c, g, or t
  misc_feature (682)..(682): n is a, c, g, or t
  misc_feature (686)..(686): n is a, c, g, or t
  misc_feature (751)..(751): n is a, c, g, or t
  misc_feature (784)..(784): n is a, c, g, or t
  misc_feature (835)..(835): n is a, c, g, or t
  misc_feature (850)..(850): n is a, c, g, or t
  misc_feature (871)..(871): n is a, c, g, or t
  misc_feature (879)..(879): n is a, c, g, or t
  misc_feature (891)..(891): n is a, c, g, or t
  misc_feature (906)..(906): n is a, c, g, or t
ttagtaagcacttctctaacccagaatagacactgggtatcctccaagantcccatagctttcatttcatcttccaccctcttcannnnnnnggngggaggggagagggggggtgtcaggaagtatccaaaaanaccctcctagacccctgaaaaaattcacgtngccagcaataaaccaacancacctcaanagggcatcanaaggccctctaggatcaaggatattgcnaaangnattcctgtttatngnttcacgatgganccaaggcngctctcgcagactcctaggnctggtccttcactatggctgagagcngggcagggtccaggaganagtcgccaagggctaagnnagaagagattgcctttnaganaccctttggngtntgggangcacctggntttntnggnggaggagcctgggtttcttggggggggggggctgtggaagcgccaatcagttcttcttcgtntngggagtgtgatanttgctcttgcnggagtgccacaataggggggggatgcggagggngggaagggtcatgaccccaaaggctgcccagtccagaaaaggaggggagaatcgcctgtnaaactcccgctgagccaggattcctccctgtccaggtgcactggtagagccaattacaacgggcccatcctcctgggccaggtaagtnattnttgccgaggtgaagttgaaataaccagccttgagagggcgcaggaccacagtgtgggagacattnctagcaggggcaatccggtcccatttgacatanagcattccagacacaatgccaaagtcttctggagggaaggaatcatcaganagttccacgtctaangcagcccttgagccaacattntagatgtngtactgcaaggncaggtctcgtccctncacggcgtatcttttcagcagttatttggaagccaaaagcctggc

SEQ ID NO: 596574 - DNA, 762 bp, Homo sapiens
  misc_feature (749)..(749): n is a, c, g, or t
aatgggaaggcaacagacagacccaagtggcagcagtcttacttgaaggctaatcccaagaagttgctgccctgggacactcagcgggaaagagagcaggctctgtgtgtcgccatctgctttaggtttcccattggttaatgaagcccatgcatcttggaaccctgatagttgtactctttagaaaggaaaatgactaattcttttagagcagtgttatgaaagacgtgtctgttgttaatttttaatggaagtgctttggcattaaaagcccagcaggctattaggtttacattacaataacaataattcactgtcccttagtttccttttattctgaatcctcttttggggatgccttttaattgccttctcattggcttttgttcatctttcctgttgcttttgctcccatattgtccttctctagttctatcaggcaatagatcatcttgttggttttcagagaaatcccaacctgaggttaaattcaaatgccgaatttggttgttggttcttattttaatttggaggaagccagcagagatgcttgtttggttatatatggttattaatttttacttataatatagcggttcctcaattggtatatccaggtgttacaccgcatggtattacatacaaaaccaaaaacatgagcaaattctttttaagggtcttaagaaaaggtttatttgccaaccacggcaatactgaaaggtaatagattctttaaaggaaaaaacctntatatatgcccac

SEQ ID NO: 596575 - DNA, 199 bp, Homo sapiens
gcctgggcgatgtagcagactgtctcaaaaaaaaacaaagtaggagtaattgccaggcacagtggcttacacttgtatttctagcactttagcgagaccaaggtgagtggatcacttgagcccaggacctcgagcttgcaatgagccttgatcacaccactgcactccagcctgagtgacatagcaagaccctgttcat

SEQ ID NO: 596576 - DNA, 149 bp, Homo sapiens
tcttagagtattcccggcgcatgggcggctcttagaggtggctccttctgtggtctctttcgctggggctcctagtggttttatcgtgtgagcacaccatatatttacagctagaatagacatacacacaccagcatatttcacctccg

SEQ ID NO: 596577 - DNA, 513 bp, Homo sapiens
catacacatataactatgaagagaggttgaaaaacagaacattattcatgagtataggttgctattggatgagtttcgaaaggcattacaagaaaaagatcgcaagaaataagtggtttatttgtagcaaaaaaggaacaggaggaatttagaggcttttttaaggtgggaaagccaattgattctgaactccaaaataagagacataaaagatgagattgagaaaatggctttgagcgctgaagactcagtgagacttttcagttgaagtgatttactcagccatattttagaaagtcaaattaaaggtacctttccatgaaggtctatccagctgccatcatgataccctatcaaattgagagaagacgtttgaggatgagccagcagagataaaactaggtctagaaaaatactttaagtgtggttactgtcatatgaaagtgacttgaagcaaataaatcagaagcccactaaaattttgagggacttctgttgccaattagacaatgt

SEQ ID NO: 596578 - DNA, 271 bp, Homo sapiens
  misc_feature (34)..(34): n is a, c, g, or t
  misc_feature (127)..(127): n is a, c, g, or t
  misc_feature (134)..(134): n is a, c, g, or t
gagtactgcaggcagccttttccaatcatggtgnccaggtcgcgtctcattggctagtgactgatgtctggtgtccccagccgatcagacacagtggcggttggataccgagggtgctcactcactngccagtncactcctaccagctgggccttcgttgcaccacaggaagactcctttttctcacatgtggcacgagaaccccttggtgaaacctggcgaagggcatcggggcgtggatggacaggtctggtggaagcccttggaggga

SEQ ID NO: 596579 - DNA, 378 bp, Homo sapiens
tctctagcaggatcccctgagttcgccggatgtggtgactcgtgcctgtaaacccagcacattgggaggccgaggaatggtggatcacttgcagcgtcaggagttcaagactagcctggccaacatggtgaaaccctgtttctactataaatacaaaaattagctgggtgtggtggtgcatgtctgtagtcctagctacttgggaggctgaggcaggagatcgcttgaacccaggaggtagaggttgcagtgagccaagatcacgccactgtactccagcctgggcaacagagggagactccatctcaaaaaacaaaacaaaacaaaatgatcttaatcatcatcatctatatcaccatcctcacaaccatcatcatc

SEQ ID NO: 596580 - DNA, 381 bp, Homo sapiens
tgccccaagtgcatggatgtgtcccccccaagtctttaagaccccatcacagggagggggcctacttgggccctggtttccctcacatgttttttatggtgcatcccgagtaccggcccaaaaaacctcccaaccagtttgtgcccaggtttttcggtttcaaaatccatccgatggcctaccaggtggagttccaagccgccagcaattttaagagccccgttaaggagattttggtgattccctcccccccctgtccggcagtttttgacttttccttttttttttgcccccctttcaggaaccctgtatggtttttagtttaaattaaaggagtggtttttttggtgggaatattaaataaagtaaaagaaaaggcca

SEQ ID NO: 596581 - DNA, 799 bp, Homo sapiens
  misc_feature (291)..(291): n is a, c, g, or t
ggcaaaggacaacccccccgtggcaataattcctctcgaccggggcatataatgcaccccccgcgcagtgcttgtcacagaccacacaagataccggccgccccaaactcgcccggggcagacacacgtttctacaaacaaacagggtggggcaaaactccctgcgggccacatatgagtgacaccacggctgtttgtagagaggccaccccctgcgggaccagaacacacgtcccacgtcaacgccccactttgttggagagaagagcatggctccgacaagagatggtntcccgcacagcgccgggtggccaacaccatgacgagggacaccccacacgctcgccatagtcgccggggcataagcaactctccccggcgaacaggatgtccgtgcgctacaacacctacaccacacacgtgtatcacacacacggccgctctgctgtgaaatattcgcacgcgcggcgccccactacacaggcggagtgtctcgcacgcgctctcactcgcgcgcacacacacgggcgctcgggcagtgtccgctgcccacagtccgggcgcacacacaatgtttggctccaccacattccacgctctctatgggggacaagaccccccgccacctgaacgaccacgctggaagttaggcggggagaagataagcaccacatgctggctcttccccacgccaccaggaaagcttcgaggggaatgtacaaaaaacggggtatacctcccccacaaaaaaagatctccacaacaggaggggccaacaagaaaacgccccaacaataga

SEQ ID NO: 596582 - DNA, 1176 bp, Homo sapiens
  misc_feature (246)..(246): n is a, c, g, or t
agcggattgggcgacgacagcgagggcgatttatacttgggtgaatgcctctccagattctgaggtgcctgctcagtcataggtgcaggccattggctgaatcgctacggtgaacgccacgtgtctcgctagccttccctgatacccgagttcactctcagttcacgaatggatacgttctgctggtcctcccttacagttccagatacacgtttctgcacacgaagggacctggaagagctctgnagcaagctgatgaatcgcttctcccatgcatgaactgcactggaaggatgcgactgtaaggaaagttggccgtcccacaattagtcgcacgggtacgctcagaacgcttcggtcctggggaagagaatcgaataccgagaagaatcgggcgcttccatgatcgtaatcgttgacgtggacgtcaccaccattaagcgtttccatttgctcgattccgcccgagcaaacgttattgccagttgacagtttggctcctgagtaccttcttaatctatgctatggtcacttgctctgccattggtcccgcctctcaaaacgccccaaggcgacagacacaggatgaagggcctaatcttagcaaaatcggcccctggctggtggcgcagaagtcttccgaagactacggccgaaccgttttctcaattacaggatttattcactctgtgacaggtcaagcttaattagttgctcccggaacacacttaattggagcgcccctaattagcttgaggcaccatggcggcttaattcttaaatctaattcaacatttcattccttagggcggggaaggcctatctgtgactaggagggcttcaacacagtttggcctatctgccggaactctcctttaaccgccgttgcgcaatatgtccctttaaccgtgggagaaggttctcaaggaagaatttcctccttgtggagaggataggcgaagaattagcgatcccaaatttccgttcacataattttctctttagacagttattggaatatagtcttttgcgcaaacccaaaaagggtatacatattttcacccttgggaagtttggcaatcccacggcacacaggaactttcgtaacaccagaatataatcccaacatatatattcgttttcttataacagcatatatttgtaatcttcaataac

SEQ ID NO: 596583 - DNA, 1412 bp, Homo sapiens
  misc_feature (922)..(926): n is a, c, g, or t
  misc_feature (1313)..(1313): n is a, c, g, or t
cacccttggactcgatacaggcggctgctgcttttctcctggcccctcttggattttccggatttttgaaagacccagtggcccaggagcaagaggaggaaggaggaaggggcagatctgcagaggaatgtgagagcctcccaaagcgagagccgccgaaaagaatctgggagccagagggacagccgagccctgcccgggtttctggaatggtggtttcagagtgagtctcttctattttagaacgtagtaccagtggaaagtgtcgaatttttcccctcgcagggcagatttctccaggtcacttgacttttcttctgggagtaggagttaggagagattcccctctaagcccccagaggctgctaagggaggaggagactgtggacatgagccctccctgctcacaagcatatgcccggagacctgatagggcagtttctgggccatggacattgctttgaagacgggcggagactggacagcatctgtaggtgctgagaccccaccttaggacctgagagattgaactgtgtaagcgccattcagctgcgagtgcattcttggactgccttgtgagcatccccggtctgggcaggaccctctccttcccatctttctataccacccagcccagccatggcactgaaaggccgagccctctatgactttcacagtgagaacaaggaggaaatcagcatccagcaggatgaggacctggtcatctttagcgagacctcactggatggctggctgcagggccagaacagccgtggggagacagggctctttcctgcctcttatgtggagatcgtccgttctggcatcagcaccaaccatgctgactactccagcagccctgcaggctctcccggagcccaggtgagcttgtacaacagccccagtgtggccagcccagctnnnnntgtgggggcagtggcttcctctcaaaccagggtagctttgaggaggatgatgatgatgactgggatgactgggacgacggatgcacagtggtggaggagccacgggctggtgggctgggcaccaacgggcaccctcccctcaacctctcctaccctggtgcctaccccagccagcacatggccttccggcccaagccaccactggagcggcaggacagcctggcatctgccaagcgaggcagtgtggtgggccgtaacctcaaccgtttctcatgctttgtgcgttctggagtggaggccttcatcctgggtgatgtgcccatgatggccaagatcgctgagacatactccattgaaatgggccctcgtggcccccagtggaagccnatccccacccatttgcctgctctgtggaggaccccacaaaacagaccaaattcaagggcatcaaaagctacatctcctacaagctcacaccccatccta

SEQ ID NO: 596584 - DNA, 275 bp, Homo sapiens
ccctgctggtcccgtggtgagggctggggcgagggacggcgatgtgtcacaggcaaatagctgaaggaccgagaggccctgatggaggctatagacttccggagactgcggaacctccgctcgccagggggtggcttcttggggcttgcaggtttggacaaggcctgagggccaggcttagcaggggaaggagggacactccttgtggctccagagcattgggtgtggcggaatcccccaaagacaatttatggagacctggaggagcggtgtct

SEQ ID NO: 596585 - DNA, 154 bp, Homo sapiens
  misc_feature (136)..(137): n is a, c, g, or t
actgcaactctgtgcccctacagcagaaacaatagtcaggaggttgagaacaggctggttaacatggtgaaatgccatctctattaaaaatacaaaaattagctaggtatggtcgcacgacacctgttaatcccanngctccttgggacggctg

SEQ ID NO: 596586 - DNA, 544 bp, Homo sapiens
ttctcagccatctacacacacggtactgaacttcgttgcttgatgattcagggaaaagaatctgagtgtcggagaggactttagttgtcttccaaggatctatgggatcaatttaagaaaaaaaaaagaagaacctttcaatgagaaataaccacaagtggaaggtcaatggaccacaaaataccagctccattcctgataaaagtcttgggagaatgtattttatatcgtgtagacaaattttatttactaaggaatgtttcctctctacaatgggatcatcccagtcacgggcacaactgagcacggcctctttaaaggctgggcagaaagcagactactgtcagcacacaggtctcaagtgaggacagaacatgggactgggctgaatgagtagcaaatggagggcaggagagaggccaagagcttaagtcagggaagtccctccacaggggaataggaagaatggaggctgagtgtcccccttacaatataggtacatgtccccctgtgttaccctttctaacatccctactgtgtagtt

SEQ ID NO: 596587 - DNA, 305 bp, Homo sapiens
gaggtgttctagaggatcccatgcgcgacgcttccatcactgaacagaagtaccatactaatgcaagatattaataagtagggaaacggaaaggtagagaagggatataagaactctgtactatgtgctcatgttttctgtaaatgtaaaacttctctaaaaaatctgtctggaaaaaaaaaacaaaaggcaaatgagtggcggccgggagcggatgggggataggggaacacgagcggagtcggaggggagaaaggtgggggggtgatgaatatgtccactatctggagggaagcgtcgcgcat

SEQ ID NO: 596588 - DNA, 931 bp, Homo sapiens
tgcgtaccaccatgcccagctaattttgtatttttagtagagacggggtttcaccatgttgaccaggctggtgttgaactcctggcctcgtgatccatgtgcgtcggcctcccaaagtgctgggattacaggcctgagccaccgcacccggccttccttacacattttctatgtcagatgatcatgtcgtctacaaataatgtgtttcttcctttgcaatctgtgtatcttcattttttcttgcccaattccactgactagtttttccacatgtgagatcgcactcaggagtggtgtgagtaggcatcctcttgctcatgatcttagggcgaaagccatttggtctttcttcatgtagtatagatcagcatcgaggacactctacttatatttttagcttcggctacgaattcatcacttactgcacctcgatactgaattcgtcagtactctctacaatctgttaagatgataacagcagtacgccctcttccttagttccctggaccatacattctggtgatctccaccactgtcggaacaaccttgccatctcctgggatacctcacatcgggctgctgatgtgcttatcctttgtggctacgttgctggattgccattcaccaaggctcgtgaccgatcccgtgcccagcgcatgcagcatcatgccataccctccctgccccccaccccgcgcgccaccgagacagcactcaccagcttcacgagcagacggcatccatagcctcccgaaaacaccccggcccacgccacgaccacaatcgacgcacacatacagcccgcacaatgcctacgccaccaacaccaaccgacacaccacctgacccgccggctcgaagcacacgctcacgaccacatcacagacccacgcaggcgtcggacgagacgccctaccgcgcgcccgccccc

SEQ ID NO: 596589 - DNA, 412 bp, Homo sapiens
ctggttagcatgcatgggcaccatctctactggggtctctctgactgtcacaatgttgagtcctgccgggaagcactactagcatccatcagtggggtcatggctgtacagcttcatatgctcggtacactctcatataggaaagaactggttcatcggccacccaactttctaaatatctcgcaggcagtcatgttccgttctccggggcagaccttaagtctgcatttccggatcatggcttgatcacgaccgttacgaagggttcagcatgtctcctatcacgtcttacgcttcacgtgcggagcgtcggtagcgcggatcgcaggtgcagtcgacagatactggtccgtcttgtctctgcaagtcttcggcacatgttgtcactgctaccgcacacggtgcgcctaac

SEQ ID NO: 596590 - DNA, 252 bp, Homo sapiens
gtcaaatgtcttccacaatcatgatgagcgttgtgtactatggttcgatattgtagacaggtcatatacaatgccactggtagatgatccattgcgagcatatctttcatataagaatctacagttatatatggtagcaccgtattctacacatgtcctagagatacatagatgagcataggagtatccaactgcacgctcatggtccgagatcctgctcttaaagtataagtgtatgacgttacgagcctg

SEQ ID NO: 596591 - DNA, 426 bp, Homo sapiens
  misc_feature (426)..(426): n is a, c, g, or t
cacgagggcgcagcttcttcgcggtgccgcgcttctgcaggctgcgcaggctggccgcctgcgccttgctgcggccttcggccagcgcttcggcgaaattggcgaacagcacggtgaaccacagccacagcgcgttggcgccgatgaaccaggccggcgcctcgccctgaccggccagcgcctgcagccacagcgcgctgatcagcacggcgcacagccagaccacgaacatgaccggattgcgccattgcgcggccggattgagcttgatgaaggcatcgcgcaccgcgccgcgcagcagcgcgggatcaagcagaccggcagtcgggcgcgaagggtgaagggcgttcgtcatgatcctgaaaacctcagcgatacaggttgatctgctcgaccaccgggccgagcgccagcgcgggcaggtan

SEQ ID NO: 596592 - DNA, 706 bp, Homo sapiens
caggtctaaaactagcaaagcctgcattaaaaatttcggttggggcgatactcggagtcagaacccaagctccgagcagatacatgctaagaaattcagcagtcaaagcgaactactatactcaattgatccaataacttgaccagcggaacgagtataccctagggataacatggcgcaatcctatgctagagtccatatcaaccatagggtatacgacctcgatgttggatcaagacatcccgatggtgcatgcgctattaaaggttcgttcgttcaacgattaaagtcctacgttgatctgagttcagaccggagtactccaggtcggtctctatctacttcaaattcctccactgtacgaggaggacaaggagaaataacggcctaccttcacaaaggcgccttcccccgtagaatgatatcatctcaacttagcattatacccacacccacccaagaacagggttcgtgaagatggcagaagccccggtaatcgtgatacgaacttcataaattttaccagtccgaatgttcaattcctcttcttaacaaatatccatggccgaactcctcattcctcatatgtgccattctaatcgcaatggggttcctaatgcttaccgaacgaaaaattgtaggctatgtacgaatagcaaaggcccacgttgtggccctagggtaataaaaccttcgtgaagcctaa

SEQ ID NO: 596593 - DNA, 338 bp, Homo sapiens
tgatatgtgccctaaggcatatacatctctacgaggtgtacagaggaaggccctgaggaccgggctggagtccgtgtgggtagacaagctcctggaggtgagtcggcaacctctccgccccgagtggcagatgtgccctctggaggtacatggtccctggtattagggtgcttggctgccttctcccggcctccccaagagttccaagcacaggacacccagacttccgggtgaagccacggaacctgtaaaccccaggagagaatcacttgggcaagtgccacctgggctttccgttgtcaccctggctcccatccagcgccctgattgctcatctt

SEQ ID NO: 596594 - DNA, 310 bp, Homo sapiens
tttccagagacaattaggaaaactggtctatgtgggctcttttaaaaaatacattataaaagtgcagtgttttcatgcaattgccccgtgttctaccaaccgtaagcattgggaagggtgcccactacctgtcgctgagacctcaccagcagggaacacacacaggaccaggggctttgtgaatacttgtggaatggatgaacaaatgaattgacgggtggatgagtacaaacatgtcagagtacaaacatacaggcaaaaatcaagcatggaaaattagaaacatattatgtgaacaatccactctgca

SEQ ID NO: 596595 - DNA, 145 bp, Homo sapiens
caaactggcctgtgccttatcttctggtggagtgaaaaaatttgagccagtaaagccaaatcgtaacttacagcaagcagcatgccgcataccttgctctatgctagattagcaattgtgccttaaaaacgtgacatttggaata

SEQ ID NO: 596596 - DNA, 101 bp, Homo sapiens
tccccttaaaaacattatgccagtgaaataagggccgtcacagcgctatatactgcacaattccacttatataggtgtctaaaatagttcaactcataaaa

SEQ ID NO: 596597 - DNA, 157 bp, Homo sapiens
tcataggcaatacttaaagtcttagagtcagtttcatctgttgtttctgctagctctcatttataatttctttcattgtatttttaataatttttctttcttttcgtcttctcttcattttttatttttttttatatttttggaaaatatatgggcc

SEQ ID NO: 596598 - DNA, 522 bp, Homo sapiens
  misc_feature (21)..(21): n is a, c, g, or t
  misc_feature (327)..(327): n is a, c, g, or t
  misc_feature (416)..(416): n is a, c, g, or t
  misc_feature (472)..(472): n is a, c, g, or t
  misc_feature (512)..(512): n is a, c, g, or t
agagtttgaggccagctgcanaccatggtgaaactccatctctactaaaactataaaaattaggctgggattacaggcatgagcaccgtgccctgccctttattactatttttttagagacagggtctcactctgttgcccaagctggagtgcagtggcagattcatagttcactgcatcctcgacttcctggggctcaagcaatcctcctgcctccttccccagtagctgggactacaggtgtacaccaccatgcccagataatttttttgtttattttttgtagagatggggtctcgccatgttgcccagggtggcattagcatnattttaagtgctcattgggccacatgtgatgtgacagcacagatataggaatatttccatcatcacagaaagtttttggaaatagtggntcttctgtaggtaaggttttctatagggggagattgtatttttgactcttgagtanttctttgaaattaatgggaccatttgggtggctggttttncataaattca

SEQ ID NO: 596599 - DNA, 191 bp, Homo sapiens
gcggaccggtaaggtagctgtactggggcgtcactccaggccgtactcatactacaggatatttactattacgcccaggatcagcagaagatagcgtagctctcaaatgtgtgttcctgctatttctaatgaatattttaaattcattcaacaagcacctagtaggtgcctgctgttatccctacattaca

SEQ ID NO: 596600 - DNA, 364 bp, Homo sapiens
gggcattattttgagcatttattttggggggaggtttaaaaaaactttaacatcaaatcaaatggtaaattaatttaaaaaaattgccttaaggccctactaaagaatgggcccccagcctttaagtgatagttgcaaaatcctggtttaaaaaaaaaaaaaaagttggcttaaacattttctttaacaggggtctttttttttcaaaaaccggtctttttctggctttttttccccggcaattgaggaaggattttgccttccctactcactgagaagtattgacttggggggacacattttaaagcatttttgatttgaaaattttgggacatttttatcaattattaacccttttttttta

SEQ ID NO: 596601 - DNA, 124 bp, Homo sapiens
tggcagaaacgttcgtcatatccagacgggtggtggtcgggcagagacactcctcagttcccagactggggttgcggctggggagaggtgctcaccaatctcagacgatgggcggctgggcaga

SEQ ID NO: 596602 - DNA, 226 bp, Homo sapiens
  misc_feature (16)..(16): n is a, c, g, or t
cctctccagtgacatntggaacgatgctactgttttaagttggccgctgtacacgtttggcttatgttataatattcattattgaacacttacaggtcgttgaatggcttaaaatgtacggcctccagttcattttcatggtatctttcgtgagtgtgcatgacagtctcatttcgcagctgtattaatatgtaacgttatttgaatgaaactcagaagcagtacg

SEQ ID NO: 596603 - DNA, 567 bp, Homo sapiens
gatttgcatttctctgatgatcagtgaagttaagcatctttttatatgcctgttgagatttaaatgtcttattttataaaatgtctgttctgggctgggtgtggtggctcacgcatgtaatcccagcacttggagaggctgaggtgggtgtatcgtctggggtcaggtgttcaagaccagcctggacaatatggtgaaaccccgtctctactaaaggtgcaaagattggctgggcatggtggtgggcgcctgtagtcccaactactcgggagtctgaggcagagaattgcttgagcccgggaggcggaagttgcagtgggctgagaccgcactactgtactccggcctgagcgacacggcgggactccgtctcagcaaaagaaaaaaaagtaaggaggctgtatcaatggatctactatatatgctttttgtaaaataaggatcatagtttcacctttcttatactattatggtgagagtaaatcaatgaaagtcatttagaacagtgtgtggggtaaatgtaaggacacaataaatgtcaacctattatttcaaaaaaaaaaaggg

SEQ ID NO: 596604 - DNA, 649 bp, Homo sapiens
cctgacacacggttgggctggggctcatcagtggtggtggagaaccgacaccccaaggcctacctgcacctgtgcattgtgtgactgcaccgacatgcttcaacgtgtgtgtccacacgcggcagcctgctgtacccaagtgactacgctgtgccaccccatgcacatggcatgtgtcctgtgtgatcttgtcccatgctagaaggtgcaactgcctgggcttctctatcacccacctgcctgtgcacatctgcaatggcattgcccatgtgcctatcctacagtgacttggacatgcctccaatgtggtgacccacatgtcccccccacttcactgccatgacgtgtctgcctgtgtcttgccattgtgtgccccagacctgacatgtgacacacacaattgcactagtgtgtggcatggtggtggcttgatagacagcaagaaactagtggactcacgaacccaactcacacgcaaacacactgacacacttcttcagttagattgggtgcagcaaccccccacaagccacgacgtgaccggcagaatgcaatacacatcgaaaattcatcaagtagagccacctagacccacattggaaagcttgaacaagacccaaaggtaggagtcaatccattcaccattaga

SEQ ID NO: 596605 - DNA, 172 bp, Homo sapiens
gaatgagcagcaaaacaacattccatggtgcacgaccagagggcatgtgggctggtcccaagtccagtgtgtcaatgtgctcttactgagccctgctgaagagcaggttctctcgtgtggaaaggatgtgcgacagatgtgctggaggcagtgtcactatgcatgccacatg

SEQ ID NO: 596606 - DNA, 443 bp, Homo sapiens
  misc_feature (113)..(113): n is a, c, g, or t
  misc_feature (158)..(158): n is a, c, g, or t
  misc_feature (245)..(245): n is a, c, g, or t
  misc_feature (375)..(375): n is a, c, g, or t
gggcgcggtggctcatgctgttatcccagcactttgggaggctgagacgggcagatcacctgaggtcaggagttcgagaccagccaggccaacatggtgggaccctgtcctanctaaaaatacaaaaattaggcaggcgtggtggcgggtgcctgtgnccaagctactcaggaggctgagacaggagaatcacttgaacccatgaggcagaggttgcagtgagccgagatcgtgccattgcactnccagcctggggtgacagagtatcttgatctcaaaaaaataaataaataacaaatttaaaaaacatattctattattaaaataaaatttttagttttcactttttaattttatttttattttttacatttnacatttctccttatttttgggtttggcagagtgttcttggttagggtcttacctggattttttttttt

SEQ ID NO: 596607 - DNA, 408 bp, Homo sapiens
  misc_feature (35)..(35): n is a, c, g, or t
  misc_feature (48)..(48): n is a, c, g, or t
  misc_feature (51)..(51): n is a, c, g, or t
  misc_feature (87)..(87): n is a, c, g, or t
  misc_feature (100)..(100): n is a, c, g, or t
  misc_feature (112)..(112): n is a, c, g, or t
  misc_feature (130)..(130): n is a, c, g, or t
  misc_feature (175)..(175): n is a, c, g, or t
aaaacagcctgagatgggatgggctggcgggggtntgcgcattgccanagntgagctgcggccagaggaccaaccccaccgtgggtntccctttcactgntggccaccgctntgcctgtttgcccgcccncaaactgggggtgattatggcaactccctcttacctagtgtttgncctatcctgagcctggtgtgttaaacaaaggctgagtccacctggtgggtgggaggtgggagcacgggagtgacaggggctcactccggttgccctggggcacacaggaagggaagagtgaggccaggctagtggcctaacaccagcaggtctcacctcagagcacacacaaatcctggtgtgccaagagagatttaaatatttaaataaaaaattttaattcctatgcaaaa

SEQ ID NO: 596608 - DNA, 420 bp, Homo sapiens
ggaaacaggactcgctatacacaggtgccaccatagtgtgcttagatgatgacagctagcatcttatttgcgttcaacataagtcatccacataacacaatatagatgagaaaagatgggcaggtgtggtgggctcatgccgctaatccttgtactcttgggaggccgagacagacggcatagtgagccgaagacaccgacaccatcatgtccaaactgtttcccggctgtctctactaaaaatacaaaaattagccaggcgtggtggtgtgggcctgtagtcccagctactcaggaggctgaggcaagagaatcgcttgaacccggaaggcagagattgcagtcagccaagatcatgccactacactccagcctgggtgacggagtgagactctatctcaaaaaaataaaaattaaaaa

SEQ ID NO: 596609 - DNA, 363 bp, Homo sapiens
  misc_feature (6)..(6): n is a, c, g, or t
  misc_feature (19)..(19): n is a, c, g, or t
  misc_feature (94)..(94): n is a, c, g, or t
  misc_feature (101)..(101): n is a, c, g, or t
cccccnaaacccttcctcngggggcaaaaatatttttattagtatggctaagctccttatttcccatttttcaataattaacatttcaactggntcatacnaaagcaatgggtggcccacactgttttctccctcagtactaaactgtactagtagtgttgaattctttactgccaccctattgcctaagtaaaattataattattcccagttgcacttaagaataatattggtgaagcagtacttattaattatattaaatttcaaacttcgatagctaatgtgataaagtgagaagtacaatagagttctagtgcctcataggtgactagaggcactatgtaaggtcaatggtgactttaa

SEQ ID NO: 596610 - DNA, 511 bp, Homo sapiens
  misc_feature (28)..(28): n is a, c, g, or t
  misc_feature (35)..(35): n is a, c, g, or t
  misc_feature (56)..(56): n is a, c, g, or t
  misc_feature (70)..(70): n is a, c, g, or t
ggaaaaacctcaactcttgaactgtagnctccctnacctttcaaggcctatcaaanggtgaaacacacantccccaccatgaagcaaaaccctatcagggcaaaaagcagcttcccttgccttattaccctttcctaggttcaatgtcccccttcagtttgaccctgatcattaagttgttgtagttcctctgggtctttaaagatagttttaatggcccaggcatggtggcttatgtctgtaatcccaacactttgggaggccaagacagcaggatcacttgaggtcaggagtttgagaccagcctcgcccaacatggtgaaacactgagtctattaaaaacaatacaaacattagtcaggcatgctggtgtgcacctgtaatcccagctaccctggaggctaaggtgggagaattgcttggacctgggaggtggaggctgcagtgagccgagatcatgccactgcactccagactgtgtgacagcgcaagactctatatcgaaaaaaaa

SEQ ID NO: 596611 - DNA, 319 bp, Homo sapiens
gctctttgtctgagcgcgctcggcttttatttttttttctctctccttccctgcagcaggggccggtgtccagctgcctactttctgcccggatctctggctcctcattctctccgggtctccggcaagactaaaggccctcggggattatcgcaggcagccatggcctgtgtgtgcacactgctggaggccccgggagcccctgtccggccccgcgcctctactttggccgcctggcgggaccagggggtccctgggactacctggctaaccgggaggtgccggcgcagagatggtgtggagacgcccgggaaaccca

SEQ ID NO: 596612 - DNA, 326 bp, Homo sapiens
  misc_feature (48)..(49): n is a, c, g, or t
accagcgcagacgatgggggcagaaagagcgggacaacgcacatttcnngtgctgcagataaagggggagccgagaaggctctcagctcctgggaggtgccaaggagcctccgtaggcactggggggagggagacgaaagaaggagcctcggacagtggcctggagtgcccctgggcccctgtttaggtttcaagggggtgccgtgggcatccccatactgccccccacatacagcccgaatcccccctcctcgaaggatacagcttgaccacgtctgtgtccatccgcctcttgcccggactaggggatgacatcgtctgccgct

SEQ ID NO: 596613 - DNA, 341 bp, Homo sapiens
caagaggctccccggtttaagccgagagacgagaggacattccacatcattatactacatgatcgctggagccaaggagacagatgagaagtgacttgcttttcggagggcttcaacaactacaccttcctctccaatggctttgtgcccatcccacgcagcccaggtatgactgacgatgttccagagaaaccgctggtaggccatggacaatcatggagtttcaagcgacggacggacgcagactagtccactatatgaatggatggtactcagtcggctcctgacagccttgtgaatatatcgatcgttcaacgaagcgaacagaaaccacaggacca

SEQ ID NO: 596614 - DNA, 574 bp, Homo sapiens
  misc_feature (488)..(488): n is a, c, g, or t
  misc_feature (525)..(525): n is a, c, g, or t
ctgggtacccacgcagcgagtcaagggagttttcggagccagagagagaaagatgtgaaggctgtggagtaaggctgaaaccagcctcctgccctatagtcccacactgcagggggtgcgactttaaaacagaacttcaagttgttaacactcacaagcattgcattactgtgaaggaagtagccgcatccataacaggatgtgatggtctacagcttttcctttaaaagctgaaaaggtaccatgtgtgctcgctaggcatataatccagatatgctccagagttctgagattcttccatgaaaggttaactagaagctagaatatttttttatatttttgtaacaattggcttttttcatgggggggaggggagtagagggttagtatttatagtcctaacaagtccaaaaatttttataagtgtcttcagattataaataaccctccaaattttgcaatgtttacatgttttttttttaagatgncaatatgcttgatttgctttttaaataaagtttagcngttctaagagattacttccagtaggatggctggttatgatagttggatt

SEQ ID NO: 596615 - DNA, 430 bp, Homo sapiens
  misc_feature (344)..(344): n is a, c, g, or t
  misc_feature (401)..(401): n is a, c, g, or t
  misc_feature (419)..(424): n is a, c, g, or t
aacacgacttaaaagtggcttcagaggaaaagcaagaaacgcttgaaagaagtgaaaataaacagccagaggtgtcaaagcccacagaatgtagaacacccagagtgaaccctaatgtgaacatggacttcggatgatgatgtcggttcatcgaaacacccagagtgaaccctaatgtgaacatggacttcggatgatgatgtcggttcattgaaaacacccagagtgaaccctaatgtgaacatggactttggatgatgatgtgggttcatcgattgtaccaaaaatgcctctgtggtacaggatgctgacggtgcggaaggccacgagtgtgtggagcaggngtatatgggaactctctgtaccttccacttaaatttgttgtgaacctaaaattgctntaaaaaataaagtctatnnnnnntaataa

SEQ ID NO: 596616 - DNA, 202 bp, Homo sapiens
ggctctttttctctgatcgctctcattcgcatgagtatggttctataatccagcagcttctctaagaggctgctgaccaggagtgcgaatactacccagagctggagaggtatatgtgtatccggcaatgttctaggcgcagtttttccagaagaaccttgtattgtacgtctcctctgcccccttctacctcctggtccaa

SEQ ID NO: 596617 - DNA, 519 bp, Homo sapiens
  misc_feature (433)..(433): n is a, c, g, or t
  misc_feature (490)..(490): n is a, c, g, or t
  misc_feature (508)..(513): n is a, c, g, or t
tgaggaccctgagggcagaggtgaggtcccgccttcccacgctgtcagcaggcgtcacatcacggtggaaactagctgaagaccctgagggcagagatgaagtcccgccttcccacgctgtcagcaggcgtcacagtggaacagtgatgctttcagacatgtgtcaaagcccacagaatgtagaacacccagagtgaaccctaatgtgaacatggacttcggatgatgatgtcggttcatcgaaacacccagagtgaaccctaatgtgaacatggacttcggatgatgatgtcggttcattgaaaacacccagagtgaaccctaatgtgaacatggactttggatgatgatgtgggttcatcgattgtaccaaaaatgcctctgtggtacaggatgctgacggtgcggaaggccacgagtgtgtggagcaggngtatatgggaactctctgtaccttccacttaaatttgttgtgaacctaaaattgctntaaaaaataaagtctatnnnnnntaataa

SEQ ID NO: 596618 - DNA, 152 bp, Homo sapiens
ctgctcctgctgacttctccagcggggtctatctcacactgaggacaactgggtgctgtaccaaccagaggcagctccatgtcctccgcgtcggcatcatacccagtgccacacaacaaaaattggctgcaaccatcccctatcaggacccg

SEQ ID NO: 596619 - DNA, 633 bp, Homo sapiens
ggtctatcacgtgggtcatatataattagaaatgtcccctcacagcagatcaaatgtaaatgcttccagttaaggagctaaattgaggtcctcagctgcatgaggaacgcctgtacatccccttgcacaggcctattctaaatcgcttaaactatgctgatagctgcttaggttcttgagtagtactgctcttaaacgtagggaggccctgagaactaaattttgccccaaaataaaaacagaatttatgagattgcctcctgtcatttgggttcacccagtccttcacctgccctgtgtcagtgtcttctgagggcaattgcgttgctcaaatcactagcacagaggttccttaatttggggccttagaaaccattgtgggccttggggtccatgaaccccatgaaattatttgtagacttgtatgtacattattctggggagaaggttcaagagattcatacagattgtcacactccttgaaggttcagatactctgcaggaaacggggaagaaaaccctcccattaggaagcatgctttggcagtttaatagcgatggtgccggtgatagggacttcaagaggtaaatgcaccttgtattgcataagaagcattcctaatcaataaatca

SEQ ID NO: 596620 - DNA, 871 bp, Homo sapiens
gggtctaacatttaccaccatcacggcttctattcccactctttctggcctaaccccttaaacgtgtactcacaaccttgccgtacaacacaccacgtactgttgccatacaccggccatacagtcccactgccctcgagaatgtatcacaaaacctcaccaccaagggcggaaaaaaccccttgatatttcgggacccccctaaccaatgttcctgttattgaaaaaaaccccctcagagggggaccccctgtcccaaaccccatgtgatagtatactttttggcacgatgggacgtgatacatttcggggccgcacacactctaggaaaccttggaatatctattaatcatgcaccaagacctttttaagttaaaattcggaccaaatatatcccccactatcaagtttcttcgtgtaattcgtctccgcgccccccatatgtcgtgttacttcccgtggcaccaaaatctctcgaacatggaatatcactactcctaataaatatttggacaccccctgtctatcacacggtgcactgcttggcgaccgcaaccccgttggtccaccacccccttggggaagactcgcagtgttcatcctttcccgtgttgcttctgatggtctatatccccccttgtccacagcttccgggatccctcgtgtgtctccttgatgcaaatccccatttgatcatgtcatctgctggtgatacgcgtcgctgactagacgccgcgagttcttggggacgtggggccagaggctctcgctgtcgaagcctacgggggcgaggggtcctccgggagcccggcggttgcgccccaccccccccccccggggccaccccaacttccttttctcacaaaaacaa

SEQ ID NO: 596621 - DNA, 383 bp, Homo sapiens
cccccccccccctaaattcaaaatctttttgtttttttttagacggagtctccctctgtcccccaggttggagtgtactggggcgatttcggctccctgcaagctccccctcccaggttcctgccattttcctgccccagcctcccaagtagctggggctacaggcccccccccccatgcccggcccattttttgtattttttagtaaaaaagggggttcccccggttaaccaggatggttttcaaatttcctgacctcgtgatccccccctttttgccccctaaaggactgggattacaggggtgagcccccgggcccccccctaaattgaatttttaaatcccccttgttcataaacccgtatatttggtttcccggccca

SEQ ID NO: 596622 - DNA, 654 bp, Homo sapiens
taaagtccaattactttctgtattttggggatgggtgttaattgctattaaaaaaacttgtttttgaaaaaactaaataatcaatgcctggcagctcaagtgaatatggtagtggcattccccgtggggaatggaagaggtggattcccaacatttgcgtgctctgcaaagtgcccgtgccaaaaggggaaagtcgcagcccggcagccctttcgacagatagccaacaggtggattccagtggtcagcaagggctcagtttccattacccgctactccgtgtactgcagcagaatgaagcaaagcacatctgttctctgctgacttctggcatttggtgggcacgggcagcttccaacagggctgcatccttgtgggacggactcttgctgtagcaattgaaccaccagcgctgcggccaggcgcacattgcccagtccggccctgctggggaccccgtctccacctgtcctgtccttgggagtgtttcttcgggcccaggagggcgtccccaattggagccgcgaggcattgggtatcgaagcgtcctccctggcgccccccggtggttgccccacgtccggagaacaaggccgcgattttccaggcgcccccccggtggttaccctcagccatgcggttcccgagactcca

SEQ ID NO: 596623 - DNA, 244 bp, Homo sapiens
gggtcatacggactgtgttcaggggacgggggccgacgccgtcacccccgacatatgggcaggtcagtcggccatagcgttgtcggcaccaggacgacgcccgatgtcgatacccagaccagaccgggtgtcttcctcagagccgcgcaagtcgatctcttggccctccgagttgagcacctgcacattcaggcagagtgacttcatctccttgacgagcaccttgaaggattcaggaataccc

SEQ ID NO: 596624 - DNA, 204 bp, Homo sapiens
cgtgtttctgtggtttttaaattcaaaataccgcgttccactactctcagttgtattttttttttcttgtccaaggatgatttttgtttaataacatgcagccgcccgatgaaagatatcttctatttaggggcgattggccttatgaccgagcctcctctattgcctaagtcctatcgcacacctatcttaatattcataact

SEQ ID NO: 596625 - DNA, 432 bp, Homo sapiens
gttggtgtacatgtatatgtatgttgagcgtgtgtctgtgtgtatctatgtgttaagcatttctgacatgtctgtgtgtgtacacatacttgtgtgtctgagcaattctctgtgcgtgtatctgtatgtgtttaagcatttctgcgtgtgtgtgtacacatatttgtgtgtgtgagagcagttctgtgtgtgtgtgagtgtatctgtgtgtgttcgagccttactgtgtgtgcacatgtgtcgtatgtgtctgttttacgtgtctatctgtacatgcacacatgtttcagctgaaaagagtgcggagggctaaaggtgactgtgacaatgagtgtgtactaggagagctgtgtgtgggacgctgcgtgcggctgctgcaaagtaggtgtgacagagtgtgggtgtgctcgtgagcctgcgtgtagagcgtgc

SEQ ID NO: 596626 - DNA, 479 bp, Homo sapiens
  misc_feature (1)..(1): n is a, c, g, or t
  misc_feature (14)..(14): n is a, c, g, or t
  misc_feature (39)..(39): n is a, c, g, or t
  misc_feature (50)..(50): n is a, c, g, or t
  misc_feature (54)..(54): n is a, c, g, or t
  misc_feature (60)..(60): n is a, c, g, or t
  misc_feature (63)..(63): n is a, c, g, or t
  misc_feature (65)..(65): n is a, c, g, or t
  misc_feature (69)..(69): n is a, c, g, or t
  misc_feature (80)..(80): n is a, c, g, or t
  misc_feature (102)..(102): n is a, c, g, or t
  misc_feature (114)..(114): n is a, c, g, or t
  misc_feature (136)..(136): n is a, c, g, or t
  misc_feature (164)..(164): n is a, c, g, or t
  misc_feature (193)..(193): n is a, c, g, or t
  misc_feature (203)..(203): n is a, c, g, or t
  misc_feature (214)..(214): n is a, c, g, or t
  misc_feature (217)..(217): n is a, c, g, or t
  misc_feature (243)..(243): n is a, c, g, or t
  misc_feature (246)..(246): n is a, c, g, or t
  misc_feature (248)..(248): n is a, c, g, or t
  misc_feature (255)..(255): n is a, c, g, or t
  misc_feature (257)..(257): n is a, c, g, or t
  misc_feature (275)..(275): n is a, c, g, or t
  misc_feature (280)..(280): n is a, c, g, or t
  misc_feature (282)..(282): n is a, c, g, or t
  misc_feature (289)..(289): n is a, c, g, or t
  misc_feature (302)..(302): n is a, c, g, or t
  misc_feature (320)..(320): n is a, c, g, or t
  misc_feature (343)..(343): n is a, c, g, or t
  misc_feature (348)..(348): n is a, c, g, or t
  misc_feature (362)..(362): n is a, c, g, or t
  misc_feature (366)..(366): n is a, c, g, or t
  misc_feature (476)..(476): n is a, c, g, or t
nccacacacaaggntttagcagcccttttacttccacanccaaacccccngggnccccanaanancccngtgagggaggnaggggaggaaggtttcagaganccccatttaaanaagaggatgccgaggcacaaanaggggaagtgacttgtccaagggcaaanaaccagcagtgtagagggcccaaagccanccttcccccncttgaaccccngcnccccggccccctggcagtccccacanccncnctattcncnctgtgtcccccacccccncaacncncctgggnctgcagggacccnaaaggcagcctggcagcngagatttttcaggaatggcaacnggggnaggcctggtcaacnccanaaaggaactgaccctgaagagcatgaggccagctttgcttctccccatttcccagtgggatggaaggcctagtaggtcccagggcaaggatggagcaaggcatgatttangaa

SEQ ID NO: 596627 - DNA, 392 bp, Homo sapiens
gacgaggtggattactatgagaacaagatgtacctgactcccattgataaacatatgctcctcaaagtgatgggctttggtctctacctaatggatggaaatgtcagtaacatttacagactggatgccaataagagaattaatcttagcacaattgatcaattctttaagcagctgcaggtggtgccccttttcgtgcgacatgcaaatagagctggacagatacattaagacgagtgctcactatgaagagaacatgtccaagtggacgtgcacccagaacagcatcagcccccagtacaatatctgagagcagatggttcagatccggcatgatcacatccgcttcatctccgaactcgctcgctacatcaacagtgaggtggtgacgg

SEQ ID NO: 596628 - DNA, 408 bp, Homo sapiens
ctcgggtatcatatgaggaggctaggagttcgaggtcagcctggccagcatagcgaaaacttgtctctactaaaaatacaaaaattagtcaggcatggtggtgcacgtctgtaataccagcttctcaggaggctgaggcacgaggatcacttgaacccaggaggaggaggttgcagtgagctgagatcatgccagggcaacagaatgagacttggtttaccaaaaaaaaaggtgacttgattccgggaaaaaattgcctggctatatccagccagatatggcaaaaagtctcagggtgtcactgtgaatgatcagggcctgggggggggtgccccctatcagactacgggtgtacagaggcccaaaaaagggtgccgtaggttcctaaatgtgaattgatgagaagca

SEQ ID NO: 596629 - DNA, 1621 bp, Homo sapiens
  misc_feature (523)..(523): n is a, c, g, or t
  misc_feature (1579)..(1579): n is a, c, g, or t
attctttgtaagtgggttaccgacgggggaagtagatcccctaagctcgccagtggaacttgtgttagtgggccaacgacacgtatggacatgagtcgaacatgacatgcatcgtatttcactgagagctgacactggacagctcagtgtgctagctctatatttctcagcactattcatatgaataggatagttggaccagtgttacggtagagcccgattgtatccacaaactttcggcgacaaggaacatgtgtggattacatccgcttgaggcagctgggcctgttcgatgtcgcacagttatcatcattgagaagctgatacttgtggtcagaagctagctcattgggggaaatgagatagacaatctcaccaattggtgcagatgcagtttccacacgttgtgatcgaaaatacctgtatatgactgattttcgcgtgatgtacattcacattagcctcgcgtatagaaggcctttacaccatggaaattgagccgtatagaaagggatgacaaganggcccatagaagtgaaaacctacacaaagcctgagggccagacgatctcacaaatcccttggccaccccgtttcgcttgcggggcccttgcgagccaattgaaccgggtgccggactcgcccattggggttatctttgccctgtgcccattttacggtcgttggccattggccaaggagcccttgctatcggtcgatttctcttcggtgacgggcggagcgacgctttttgcacagggcggcactttttcccttttttggcccgtgggcccctgtttctcgggcccaagctgatttagatcggccttgtcgttggggcctttgccgcccttaactccagtgtgaaagccgcattttgtaactgggtccccaattcaggttatggccttcaaagaagttgtgtccattcgccgactactcggcacgccgcaaattgagttggtgacaccgtgtgtgttctttagtaccaatcaaagcttaaaggaaaatttgaggcaggcggcgtaccgcgcattggtaatataggcgggcccctaggatggccaaaacgttccagcgaatatcgggccttcgtgttaagcttatgcttctcataacacgggcacctaaaggtaaacggattggcgctagtaaagtgaccacttcccttgggtatgttccaatgctttttggccagaattacatcgccgaggttattagatttcgaggggattgccaagaactgaaacagtgggcgcccttgaggggtctcccctcaattctaccttcccgtttgttgtataacgtttaagctatgaggggcacattttacacacacaatggcatccgtgtcacatggcgctcacaaaagaacccccttttcgctttacttttgtcctttaagagaagggacatgggcacaaagggaaaccattacattccccaagtatttgatttgagggaacctttgccctcccgtaggagaatatgtgggaccattccaagggcgcaaaagctgagtgaaatatttgtcaagtataagccccatccaattaatgcctgtggtgggaagagagcnagcgcctctgtgcgcttgtgaacaaaggaacacatttccccc

SEQ ID NO: 596630 - DNA, 430 bp, Homo sapiens
ggccgggccaatttttgtattttcagtatagatggaattttgtcatgctagctaggctgttctcaaattcctgacctcaggtgatctgtcagccccagcctcccaaagtgttggcattgcaggcaacatggcaaaaccccgtctctacaaaaaatatgaccaattagccagctgtgccgccgcatctgcgctccctgctacttgccaggctgcggtgcctcgcctgagcccaggaggctgcggctgagtgccctccctccccccacctccaccctccctcacccccccacctcccctctccccatccccccttccccccctccccccccccccccccccctcccccacccccctcccactcccctccccccccccctccccacgctcccccttcccccccccccccccccccatcctcccccccctcccc

SEQ ID NO: 596631 - DNA, 172 bp, Homo sapiens
attctaggacatgcagagagtttcttcagtacgtaccactccaaatgtcaacaaaatttaatgcaacagaaacctaaatgtttgtacttcagcaacgaaatcattcaattggcaggcaaaacattttctattacatatttctaaaaacatgagaaagggaggaaaaaaaaaa

SEQ ID NO: 596632 - DNA, 651 bp, Homo sapiens
  misc_feature (125)..(125): n is a, c, g, or t
  misc_feature (269)..(269): n is a, c, g, or t
  misc_feature (467)..(469): n is a, c, g, or t
agagcggggtcgtctttaatggggaacgagcgcagaggggttgggggtctggggtctcccaacccccccctcttttgggcccaggggaaagggcaccattcctcccgggctttccccctgagggnggattctttagtccaaacacgggttaggggttggggccgagaccaaggcctgggatccaaggggttaaaataaggggctgggggggccctccaggggaggattagttaaccaggggccctctccccttccagtttcttgtgaangggaacagcaatcaaaatttgccccgcttggccctcatcaacaaaggggggggggtccccctgcccccccccccctaaatccccaggaaaaagggggtttgccccgtggggggggggcccccccccctgtccccccaaaaagggcagcccctgggggtccccggggaggttttcccccgggcccaatattccggtttnnncttggggcccaacaaaggggggttttccccctccccctaaaatttttgccccaaaaaggggggcccccctttccctttggccccgcccccccccaggggcgggggtttgtctttcccccctgggatccccccccttttttggggcccggggccttttctaaaaaaaaaaaggttttttttta

SEQ ID NO: 596633 - DNA, 302 bp, Homo sapiens
  misc_feature (57)..(57): n is a, c, g, or t
  misc_feature (77)..(77): n is a, c, g, or t
  misc_feature (79)..(79): n is a, c, g, or t
  misc_feature (158)..(158): n is a, c, g, or t
  misc_feature (191)..(191): n is a, c, g, or t
ctccaaaggaactggctgaggcagaagtcctcagatggaggaggctgggcacctgcntggttggagcacagcccttntnccaacctgcatgggactctaacatgagcagagtagcaagtggagtcaggaacttagggctggggagattggaggttgantagggaagtcatataggccttgttgagaaaatnagatttgagcactcttagaagtttaccagcagagatctggggaagagaagaggtagttttcagggtaggggtatacctgtaaatccagggaaagaagccagcatggccaga

SEQ ID NO: 596634 - DNA, 1112 bp, Homo sapiens
  misc_feature (49)..(50): n is a, c, g, or t
  misc_feature (52)..(52): n is a, c, g, or t
  misc_feature (319)..(319): n is a, c, g, or t
  misc_feature (322)..(322): n is a, c, g, or t
  misc_feature (325)..(325): n is a, c, g, or t
  misc_feature (331)..(331): n is a, c, g, or t
  misc_feature (357)..(357): n is a, c, g, or t
  misc_feature (366)..(366): n is a, c, g, or t
  misc_feature (396)..(396): n is a, c, g, or t
  misc_feature (398)..(399): n is a, c, g, or t
  misc_feature (430)..(431): n is a, c, g, or t
  misc_feature (436)..(436): n is a, c, g, or t
  misc_feature (445)..(446): n is a, c, g, or t
  misc_feature (469)..(469): n is a, c, g, or t
  misc_feature (471)..(471): n is a, c, g, or t
  misc_feature (474)..(474): n is a, c, g, or t
  misc_feature (483)..(483): n is a, c, g, or t
atttttgacatgtgaatggtgatagtctctggttctccccatccccacnnangcgtgggccacagcaccaggaagcctgagaatgaatcctgagggctctagcccaggctttgtcccaggctttctggtgtgtgccctcctggtaacagtgaaattgaagctacttactcatagtggttgtttctctggtcttgagtgactgtgtccacagttcatttttttccggtaggaataactccttttctacatccacgctccatagagtctctccttttcagacatcctgggatgaaagaatttggcttttttttttcttttnttnttngggacntcggtttccactcttaggcttttaancaatagttnatggctttaatccctctcagattctaatancnngagagcgagggggctatatggaatctcggtnntgccntggagaacnngagctatgaagaggatcttattnanacnggcgggtcnggactttatgggattggacactggtccctttctttaattggtggaaaaaaaaaaaaacccctgaagtgtctgggaaacccctaaaggtcttgggggaatcctcaaaaagcggggagaggtcacaggtatttagctccttaacggtgggaagaccaatttctaggtatagaggtattaggaccttggggaatcgcgggccactggaatagaaggggccatatcgcgcacattacagtgttttggaacaggtccggcacctatggagccggaccggggttaactccatatagtggacccaaaacttttataccttgtgggcacagggaatggacccgtggtggttaaccacagggcgcaccaaccggtaccgggacgggatataaaccgctttgtgtacttgtgacaccacaagcttctactttaagttcggtgtgcccacgaatccccataggggggggggccagcatactacaataagagcaaaacatgtcggcgtccgaataaccatccatcaacaacccggctaacaatcagctgggcgccacatgtgggccgccacaaattatgctcgtgaggaggagaataatatcggagagtatgcatacacactacatcagagcgcagtatgt

SEQ ID NO: 596635 - DNA, 114 bp, Homo sapiens
gagacagtggatagtgttgagggcattgtgaggacagtggagagtgaggaggacagtgtggtggactgtgaaaactgttgagggcagtgtgggtgcagttgagagtgtggaggg

SEQ ID NO: 596636 - DNA, 706 bp, Homo sapiens
  misc_feature (49)..(50): n is a, c, g, or t
  misc_feature (52)..(52): n is a, c, g, or t
  misc_feature (319)..(319): n is a, c, g, or t
  misc_feature (322)..(322): n is a, c, g, or t
  misc_feature (325)..(325): n is a, c, g, or t
  misc_feature (331)..(331): n is a, c, g, or t
  misc_feature (357)..(357): n is a, c, g, or t
  misc_feature (366)..(366): n is a, c, g, or t
  misc_feature (396)..(396): n is a, c, g, or t
  misc_feature (398)..(399): n is a, c, g, or t
  misc_feature (430)..(431): n is a, c, g, or t
  misc_feature (436)..(436): n is a, c, g, or t
  misc_feature (445)..(446): n is a, c, g, or t
  misc_feature (469)..(469): n is a, c, g, or t
  misc_feature (471)..(471): n is a, c, g, or t
  misc_feature (474)..(474): n is a, c, g, or t
  misc_feature (483)..(483): n is a, c, g, or t
atttttgacatgtgaatggtgatagtctctggttctccccatccccacnnangcgtgggccacagcaccaggaagcctgagaatgaatcctgagggctctagcccaggctttgtcccaggctttctggtgtgtgccctcctggtaacagtgaaattgaagctacttactcatagtggttgtttctctggtcttgagtgactgtgtccacagttcatttttttccggtaggaataactccttttctacatccacgctccatagagtctctccttttcagacatcctgggatgaaagaatttggcttttttttttcttttnttnttngggacntcggtttccactcttaggcttttaancaatagttnatggctttaatccctctcagattctaatancnngagagcgagggggctatatggaatctcggtnntgccntggagaacnngagctatgaagaggatcttattnanacnggcgggtcnggactttaaaaaaaaaaaaaagaaaaaaaaaaaaaaaaaaacacaagagaaataaaaaaagaaaaaagaaccgaacaaaacagaaagaccacaaacaagaaaatgaaaaatacaaaagaacaggggggaggatacacaaagacacaccagcccaggcacgcactcgacatagcaaagcacccatggacagaagccgaccgcctacgcaagaacgccataaaag

SEQ ID NO: 596637 - DNA, 503 bp, Homo sapiens
ggtggagacggtgtctcactattcgcccaagtgggtcttgaactcgtggggctcaagcagtcctccaagctggcctcccaaagtgctgagattacaggcaagagccaccaggccgggccttagatggttttgggagcgggagtggataaggtttccccatctaaggcaattctctgctatacagatgggggctctacgggcagtggtggtcctagggaggtagaatgcaaggcctgggatgcgccatgctattccagggttctctaccagggtctgcacggtgggtgacataaccacgcaacagaatcctgcatcaccatggacaatctagtactggacggaggccttggaaggctgggagggcaacacccacagaacactagtgctaggggctgaatactttggtgttcccggctctgccaaagtcatatgctcaaatccccatcccgggttacatgtgtatacgaaggtagaagcccggggaggggctccggtcatgaggg

SEQ ID NO: 596638 - DNA, 1033 bp, Homo sapiens
ggacgggtgggtcgagccacgcgtccgctttgtctattgagctggcatgccaagcggctggcatccatggccacgctgctggcccgaggcgtggctggtctcattgtctgtgaactggcgtgaggaggacttccgtggccggtctccccccctcgggatccacgctaccatgaggtccactacatcctgctggatccttcctgcagtggctcgggtatgccgagcagacaggtggaggagcccggggcaggcacactctagctccggtgcgtctgcatgcgcctggcagggttccatgcagctgagccctgttggcactgcactcacttgcccttgcctgtcgagcggcatcggtctactccacggtgctctctctgccaggaggagaatgaagacgtggtgccgagatgcgctggaggagaagccgggcgcttcagagctagctcccgacctgactgcctgggcccgatccgatgcctgagcactgttcgccggtgtgccgagtcactggcgtccgggacatcccactgatgaagcacattcagcaggtggttcttcgtggctgtaattgaagcgggtcgaaggtgcccaagctcagctcagaggcaggatgcatcatgatgcacgaggtgcataccctcagtggcaagtcccgcatgagaaagaatggacagtattggagccgagcggtgcttgactccgcttgcacatagcagaggctccgggctgactccttcctggtgggacaggaagatggccggtctctccggggggccctgtgcctcaccgcagagccggttgggtttggaacggtatggggtcctcctgggcgggtcttgctgggaaccagggtgccgcacataaatgggacgtgctaaacaaaaaggggcggcgagaaatctcggggcgcgacggcaccttgaaaggggccagagataatcggcgcgcgcacagcggaaagcagatgaacccgcgagagccccaacacagaaggtacggggtgcagacgacgggacattgggagacgaacagt

SEQ ID NO: 596639 - DNA, 243 bp, Homo sapiens
tgcgacgacaggttggatgcgacgaacggttggaccagttccgcagacaccggacatgcggctgtgcgagaacctgttcccccagcatcagccctggccgagtgtcgtctgggagtgcctgaaggagaatggtcctggactgcttatgaagcagcgtctgtgactatctggagcagcaggtgtgcaggggcaaccagctcggggactttggggccccttgggttacaacttacacttgtcaac

SEQ ID NO: 596640 - DNA, 368 bp, Homo sapiens
aagaatcatctctcctgggcctgacagtttcagaatgctaaggcacgcaggggttgaatccagtgtccagaggattacagagttctcatacattgctggtgggaatgtaaaatggtgccgctgtataggaaagcagtccagcagtttctcaaaatgctagacatagaattacacagtaactctgagtaacattccacttcaaggattgaaagagaattgaaagcatatgtctacacaaaaacgtgtacataaatgcccataggagcattattcataatagccaaaaagtggaaacaacctaaatgcccatcgatggacaaatggataaacaaaatgtggtatatgcatatgatggaatattattcagc

SEQ ID NO: 596641 - DNA, 551 bp, Homo sapiens
agtacttgtcgcgtactaaaatcagaagaataaacaatgagtatcttagttcctactatacgcacaaagctttctcataaactactcccattcatgacacagtgttctcaatagcagtttgacatagctgatgcagacatacaaataggaacatgagtaatgaagatatatcaaataaggaagaggggtatacaaaaagactatactgatagcgagagcattagaaatagataattaaagatttacggtcagatatactactaggctgtaaacatagaagaactgaactgcatggaaaatacaaaagggcaaattaagggacagctacttcagaaggtagtaggtacaaacaaattacagacctccaaaaatagtccaacacacgaataaatccccaagaaaccttgtgactatagttacctataacgtggtagaacagggacacttgcagtgtaaattaagtaggacacaccctatgagatggggagattaattccgcatatcctcaagtagcccaaatttaatcgtatgaattcttaaaagcagagggt

SEQ ID NO: 596642 - DNA, 1807 bp, Homo sapiens
tgcggtgggctgggctgcttgttgtgatacggcatcgcgggtcgactgtgatgagtcatcatgtggctctctgtgtctgtgtcctcatcttcatgtgaatagctgccgcggctgcgatctggtctaccttgccttggcacgatgttgttgagcgactgacgcgtgccgcggggcggccggtgtgagtcacggttgtgtgctagcgaacgcggaggatcccgtgtgttgtgtgggcgccgctgtaggcgggctcattgattttgtgggctgcctcccctctgttgtatggcatcacctcgtggttggtgtccgaacgataagagcggctgccggcgttggtggttgatgcggccgcgtgtctccgtggcggggttgtttcgcgctgggggagatgatgtctgggttgttcgatgactcccacgtgcgcggttgtcgccgccgggatagccgcgcctgttggggggggtgtcaccgaggcccgccgcacataggtggatggggttgtctggtataccacagcgagagctgttgttatcgtgtttgtggctgcgtgcgggttgtgttgtatttcgagtgggtggggggggtgttttggagttgtacgacggccgtttgtgtgagtgggatgtgttcggatcggcgcgcccctgtgtcagtgggaggtgggcaacgtgttgggtgcggcccggtgggagttgtggtgggtgcgtgtgttgtcgcctgatgggtctttccctggggttgatatgggggcgcggctgcttgtgtttgtcggccttgggatagcagaacgctttttcgagggccagcggtgcctcttgtgtatcctgtggtgatgcttgtgtgagtgtgtaggtgcgtgtgtgagcacaaccttggtgtttctatggagggacggggcctcgtcaacggggggagatgagtttaagtggtgtgtactccgccgcgttgctgttggggaggccgtggtgtggcgcgctggggcgccgcggccggcacggtgcgacgttccctgtatgggtggccccgctgcatcttgtcggccgcccgtttcggcccagattgcctcgcctaataccgcgcgaacatcccccctgttgtaggccactgttacccaccgcagcccgagaggtgttcacacgcgagatgtctccgctctccctctctatgaccacgtctcgcagagtgtcccatgtttgtggcccaccccccacacttgggttgatacttcgagagaccctcatctcgagggtgacaccacccgcagagctattcgcgcgcgcgagcactatatatttctgtgcacaactttccctatacacatatacttttctccccgactctatatttcgtctatagagaccacacgcggcgagcactctcggcgagactctccttctgagacgcgttagagacacacattcgagagaatgtgatactctctccgcagattgtagaagcgcgccgcacatgttgggtattataatagaatgtatcactctaccacaagagacgttcgttgtcacactcacatgagagctgtgccccaccacattatgggcttataaaaccacgagatgcacacatgttcccggagacggtttatagaccacaaccacctttcacccgctaacaccgagccgcggggtaatatctatcggtcacaatgctctgagaaatctgtggaggcacaaaccaccacgtttcaatgcccactcgtcctatgagaattaaattccccttaaaaatctttgaaatagggcccgtatttaccctatagcaccccctttaccccctttagagccca

SEQ ID NO: 596643 - DNA, 284 bp, Homo sapiens
tcgttagttaattgagaatagatatttgcccctgtaagtgcacacctctcatgatagcctcacgaatgtggaatacgcttcgaaaagaaattgtccttgaagcttgtcatcttatatcagcagtggattgtagaacttgtggctgattgggcccttgtattcgaacgttaagtgtcccccttgttatgtggtttaataccctgtacatattttggagtacactctttagtacgtgtggcttggacacttccgggcctgaggtaagaacgtgcttgtggaagaca

SEQ ID NO: 596644 - DNA, 554 bp, Homo sapiens
ctctagagtataccaggacttgcatcctgcacttaccgctgctgctggcgctgccgccctgagacactgcctgcgcagctccggccgcctgggtcccggtgactagtcgccgatatttggagttcttacaacatggcagacattgacaacaaagaacagtctgaacttgatcaagatttgcatgatgttgaagaagtagaagaagaggaaactggtgaagaaacaaaactcaaagcacgtcagctaaccgttcagatgatgcaaaatcctcagattcttgcagcccttcaagaaagacttgatggtctggtagaaacaccaacaggatacattgaaagcctgcctagggtagttaaaagacgagtgaatgctctcaaaaacctgcaagttaaatgtgcacagattgaagccaaattctatgaggaagttcatgatcttgaaaggaagtatgctgttctctatcagcctctatttgataagcgatttgaaattattaatgcaatttatgaacctacggaagaagaatgtgaatggaaaccagatgaagaagatga

SEQ ID NO: 596645 - DNA, 269 bp, Homo sapiens
aagccgtagtacccgatggcacctggacagactcatagagttctagtcacgatagatagctaatctctctggtctcagccagaggaactcctttcctgctgggatagctgctgccaagcagtgacagtggccttccttactgagcgttcctcttgttcagcgtctttacctcgattatacgatacagtcctagttctctgataccatctcagcgtcataaacaactgttcgtgtctgggtactaaccctttcggcagcggtaccgaggc

SEQ ID NO: 596646 - DNA, 141 bp, Homo sapiens
ggatttgctggtgcagtacaactaggcttaatagggacatgtctgtatcccagcactttagaaggccaaggcgggcagatcacgaggtcaggagtttttagaccagcctggccaacgtggtgaaaccccgtctctacaaaa

SEQ ID NO: 596647 - DNA, 155 bp, Homo sapiens
tgtctgaggatcccggtgtacagctaattcaccaactgaaatttttttaagttgtattttaatcatacgtgtttttataaaaactatactagcatgacctgcagtttttacaaaacaaaaaaaacaaagtaatcaaaatttagtgggaaatgtta

SEQ ID NO: 596648 - DNA, 353 bp, Homo sapiens
acacaggcccaaccctctgggcagctgagacccacacaggggcctgggtggggactgcagaagctgctttggcctggctgcgggtccctgagaaaggagcgtttttttccggttcacagtcccaggctgctgggtgtggtgccggaactgtccaattccagtaggaatcgggttgaattcccagccttcctcttactgggcccacattacacctccgtcctttggggacctcgccagttataaactctctgtgcctcagtttccccatctataaactgaggacaccaggccatataacatcctcctatatttccatgtttggaactgagctggtggccccatgtcacctgggc

SEQ ID NO: 596649 - DNA, 381 bp, Homo sapiens
tcatcaatagatattgttctatagattctcttgtatgtcgttcgtgtctctgactggcttatggtacttagaatgatgctgggacgtcatgacaaatgagttacggaggattccctctttttctattgattggaatagtttcggagggaatggtaccagttcctccttgtacctctggtagaattcggctgtgaatccatctggtcctggactctttttggttggtaagctattgattattgccacaatttcagctcctgttattggtctattcagagattcaacttcttcctggtttagtcttgggagagtgtgtgtgtccaggaatttatccatttcttctagattttctagtttatttgcgtagaggtgtttgtagta

SEQ ID NO: 596650 - DNA, 274 bp, Homo sapiens
  misc_feature (166)..(167): n is a, c, g, or t
  misc_feature (169)..(169): n is a, c, g, or t
  misc_feature (201)..(202): n is a, c, g, or t
gtttgcttcaacagtatatcctaataagcctcacctatttaatccaatgagttttaaatctaaatctcattcccttcttctttccctaccttttttttctttttttcttaaaaaaatattttgtgttattgacagaaattcatgtttggtgtggcataaagcattnnanaaatttatcaggttgtgggactgcttccttgnnacattttgtgctatgttttaaaaaaataattaaaaaacagtggcgttaataaaaatgtcaatgtgaaaaaaa

SEQ ID NO: 596651 - DNA, 196 bp, Homo sapiens
tagacctctcatagtagcttatttgttcatttagtgacctcaactaatttgtcgccatttcttctgtaatagtgtcatgagagggtaccgagcactagctattgactctactctggctggtatcaatcctgtattaattcctatacactaaactggttctggccagcctctagagaaatcccagaacactcagccc

SEQ ID NO: 596652 - DNA, 406 bp, Homo sapiens
agaagcctcttaaatagaagatccctggggaagaagatatcctgccccaggtccttacagagtgtagtattaggaagagtgaagacctgattcatatgccgtgcctccaggcttgagagtgtcttgcacagatcctagaaggccacacataaaggagtaaaaagcaggcactcagctggtttgaagccaagcttacagcttcacatacctgccagcaaggaaaagagtcgggaaaaagacacagaatctgttgcagaagtcccctcttctgcagggagaagttatgtcacagcagaagtggcctcctagcaagagagtctgcctggtttagcccagcagcttatgagctattatgagcacagccttcaggataggcatgaagctgcacacctcgctagagctcgtg

SEQ ID NO: 596653 - DNA, 792 bp, Homo sapiens
gcgctccttcttgctcctgctctcttcttctcttgttttgtcgttctcgcccttgtttttcgcttttcctctgtgcttgttctttttctcttttgtttgctgcttttgttgtgtttgttgtgttttgcttttttgttttgctttgttcttctgtttgtttcggctgccgctcgccgtctcccgccacccccccctcctctcccttcctcccccccttcctctcccgcgcctctctccccctcccccctctccccccctcttctccctttcgccctccgtccgccctcccccgcccccgccccgcgcgccctccccgcccccccccccccggccggcgcgggggtgcgctgccctctcgtcggtccttgtttgtggtctcccgccccgctctcgctcttctcgtcgtcgtgcttcccggcggggttgactcgcccgcctcctttcgctttcttccctctcctgtccgcctcctcgccttttggcgccccccccccgctctgttgtctctcctgtccgctcgctctgttttttcgccgtccgccgcctcctccttctcccttctcctttcctctctttctctgtcgctctccgcccccctcgtctctgctctctcctgcttctttgtggttgcgtcccgcccgcgcccctctcaccctcctgcgctccccccccccccccccccccttttgtttcgtcctcgccccccccccccccctttttttttttttttttttttttttttttttttctctctctctctctctctctatatagataagaataaaatatata

SEQ ID NO: 596654 - DNA, 278 bp, Homo sapiens
agtgcatagattctcgagctctgtaatgtcgggtcggagtagcgtattgatggcgcaggtgagggggccgccatatgcattctaggctattaataatcggagtatacgtagccggtaagttaacaaccggtacctctagaactatagctagcatgcgcaaatttaaagcgctgatatcgatcgcgcgcagatctgtcatgatgatcattgcaattggatccatatatagggcccgggttataattacctcaggtcgacgttccatggccattcgaatt

SEQ ID NO: 596655 - DNA, 295 bp, Homo sapiens
tcgtcgaaaggcacatctctgtggcgcagtccattcgtcatccagtggctatagcaggtgccagatggtgtcggcagtggccttaggcctgggtggagagaagcagggtactcctatggcagatggtcttggcgttggaggtggcttcagttccagcagtggcagagccattgagggatggcctcagactctgttggaaggcggcagttccaacatcaaagtacaccaccacactcctcctccagacaggacagagctatagagggcactaaatgtgcgttctgcatagactctc

SEQ ID NO: 596656 - DNA, 506 bp, Homo sapiens
taatctttatttcttgtctctttcttcttttttttctgggatggagttttgctctcaaaggctgagtgcagtggcacgatcttggctcactgcaatctccgcctcccaggtttaagcgattctcctgcctcagcctcccgagtagctgggattacaggcgcctgccactatgcccagctaatttttgtatttttagtagagacagggtttcaccatgttggccaggatggtctcaatctccacctcatgatccgcccgcctctgcctcctgaagtattgggattacaggtgtgagccaccacacccggccagtgcctaggttttattaaaagaaaataattatggctgataatttattgagggctatattctcaatacttggcatgtattatttagttctgacaaacccactgagcgtagtcattgtcgaactgaagtttggagaagaaactggtcagggctcccagttcataaatagattggagaaacacagatccagacctaga

SEQ ID NO: 596657 - DNA, 318 bp, Homo sapiens
agcggctgggcaacgcgtgctgagcaagctgcagtctccatcgcgggcccgcgcagggggcagtcccgggggctcagtaagcgcacgcgcgtcaccgtcaagtatgaccggcgggactgcagcgcggctgacgttgagaagtggatcgacgggccccttgaagactgtaccgcggcatggaggcagacatgcccatgagatccacatttatgaattgttggagttagagaattaagaggagagaagcccgaaaatccaaggactcctgaagtcatgtgggaaacctgtcgaggacttcatccaggagctgctggcaaa

SEQ ID NO: 596658 - DNA, 1351 bp, Homo sapiens
cggccgcccttttttttttttatggaaacaattcttaatcatttattttcacaacacgggatactataaagaacctaagaaaatcagacaattttaataacccataaacagtgtgtggaactccacttggccgaatttaaatctgtggcgtaaacaatagccgtgccacccaccctcacaccgaaataaacgtggctcccgtgcatagtgaacaaacaaaaaaaaacacaaaaacaaaaaacaaaaacaaacacaacacaacacacaacaaaaaaacaaacacaacaaacacaacacaacaaacacacaaccaccaacacacacaccacacacaacacatacaacaacatctaactcaataatataaaactactaaacaactatcacatcacacaaagagagcggtgcacgcaacatctatgacaacaataatcttcttaacaacctctaaagacaaccaaacacaacaatctcaacatttcaacccgaacacataccacaacataaaaaaagaatacgaccaccacgacctaacacacacacaaatcaaaccacacaaccaccactacccaaacaatctcccacacaacaaacccacacctcaccacctcaccacatctaccatccgcattaccaaacaaacaaaacaacttactaacacaacacaaaacaacacataaccacatcttacatcatatctctcaacacttacaatacaaataacaatcactaccattaccgcaccacactacaccaatcactcacacaagcacactcacaacatctccaatctcactccaacacaacaacaaaaataaccaaaaatagtatatactataacctaaccatcaaaactactctacacacataccaacaacaaatcacagactatccatactcccctcccactacttcctaatactacacacagatcacacacacatccacataccgcacacgactcgctcccacatactactaatcgagaccatcgaccatccaccactaacccaaacatcctccttacgcaccaacaccgacctcctatatctagctatacatctacaccacactaactactctccaacacctagtacacataaacaaacaactattcacatagatacgtaaactcataatcgagccatatatgttagccactactactacactattattacacaactaccactacgaactcacatacactccttcataattatcacaacatacaaatacatacatacaaacagataatctatatatcatactaaatactcatccaactcaccacagcagattcacaagtaattttatatagttcactattctaataacactcttcgactag

SEQ ID NO: 596659 - DNA, 653 bp, Homo sapiens
agcgggcgcggttgttggccatccagtgccttccgcagcgccgctaaagcgcagttctcgtggtgtaactttttctttttttttcagccacttccggctcctgcgtcgctccggaagcctgcgataaccagaaaaccaaggaagaccagaaccaacaagaaaaaaacaaggcataccaaagaacaagcaaaaaaataacatgaaaaatcaaatacaaaacacaaacaccaaaataaacaaatagccaaatgcagcatagagcgcaaactccatcaatcgatgaaaaaaactgaatatgcacatggaaataatcgaaatcaaggaaattcccataaagctagtgtaaaaacagacgatactaataatagctacggaaacagttatgaaaaagactgtgcgaagtaaatcataagggaaccaaatattggataatgacgtaaaaataacattcggaaaagatgggaaaaggtaatcgtatatattaaatcactttaaacgaattacctggtatccgttggtaggcagcgatttaaattgtgcagttaacacagtaactagtcttgattttattacttttgcattaagtttactcggagatgctttaataagaggctatctttatattgaatttgaggagaattaacgtctatgat

SEQ ID NO: 596660 - DNA, 283 bp, Homo sapiens
aggagtcgcaggtctcactttaaatcaaaagtagaaatgattgagcttagtgaggaaggcatgtcaaaatgcaagactggctgaaggctaggtctcttgtgctaaacacttagtcacattgtgaatgcaaaggtaaagttcttgaaggaaattgaaagtgctgggctgtgcgtggtggctcttacctgtaactgcaacacttggggaggctaagatgggaggatcacctgaggccatgagtttgagaccagtccgggtaacatagcaagacctccacctctac

SEQ ID NO: 596661 - DNA, 721 bp, Homo sapiens
ccaccccggcggcgcccatagccagccctccgtctacctcttcaccgcaccctcggactgccccaaggcccccgccggcgtccagcgccgcgcagcagcgcgccgcgccgctctccttagtcgccgccagtgacgatcgcggtccaacctcgcaggtgcgccagaagtaccaccaggactcagaggccgccatcaaccgccagatcaacctggagcttctacgcctgcctaacgttttacctgtcctatgtcttactacttttgacccgcgatgatgtggttttgaagaacttttgccaaaatatcgtttgcttcaccaatctcatgaggagagggaacattgctgagaaactgagtgaagctgcagaaccaacgaggtggccgaatcttccttcaggatatcaggaaaccagatgtgatgactgggagagcgggctgaatgcaatggagtgtgccattacatttggaaccaactgtgtgaatcagtcactaactggaactgcaataatgccatgacgaaaaatgacccccattgtgtgtgacttcattgagacacattacctgaatgagcaggtgaacagccatcaaagaatggcgtgaccacgtgaccaattgcgccagatgtggagcgccgaatcttggcttggggaatatctcttgagaagcaccacctgggagacagtgataatgaaagctaagctcggggtaatttcccatagcg

SEQ ID NO: 596662 - DNA, 423 bp, Homo sapiens
agggaaagagcaaagatatatgtggcagagaacaaaagattgagaagtcaatgaaggagatttaaaaatggctgatgagagcaacagggaagtgtagataaataaagaaggagagttataaagaggctggaaacgaaagagtgtcaagaataaaatgggaagaatgagtgataatggagagccagacagaaggagagtatgaggatacaggctaatgcagagagagccaactggaaggagatatggagggtataaagtggtgaactatatgtcagtgaggtgaagggtgaaagaaagaggcaaaagtcagctatgtcggactatgtctctaagtctatgtcagtctcactctctctctatctctctctctctatctctctctctctctctctctctctctctctctctctctatctctctctc

SEQ ID NO: 596663 - DNA, 264 bp, Homo sapiens
  misc_feature (155)..(155): n is a, c, g, or t
tttaaagcctaaccaaggttgctgggagtccagctggggccggtttccccttcccggctctcacctccgtgtgaatggaaggggctctgctgtgccaaaggggccacagaactgcattccccatttaccgggcttccccaggggtttggcagggntcaattccccacccccccacacacactggtgcaggccacaccagtctgttgttttgggaccagagtatttttgttaataaaactcaaaagccatccatgctcaggaaaa

SEQ ID NO: 596664 - DNA, 162 bp, Homo sapiens
cagagatttctattatctaatacgactggccggcttcttccaagtactctttcaagtacctggtcattacccgcctttctttggcagcaaaacttctaggactcggcgtccaatatggcggccatgtagctacggagcacttgaagcataattagtgtgacg

SEQ ID NO: 596665 - DNA, 405 bp, Homo sapiens
gaacaagttttgactgataacatcgaatggtactaaattagagataatctgtgatatatcctattctagtgcttgttacattccaggggctgatctgttgagcattgtaggcccctaatcttaatttatattgttgctcttaattatgctcattttaccgatgaggaaaggcagattgcaaccacccctatgctgcacagctaatacccagagagcacagtttcgacacatgctatgattctagctaatcctaacttctgagtttcaccagactacgtcggcccttccggcttgtcgagcagcacggcattatctggtacccaccatttgtatcccgccatcatatatccttctgcctaccttgtaggcaacggacgtgtgggtcccctaacgggtgggcccttt

SEQ ID NO: 596666 - DNA, 327 bp, Homo sapiens
tgtgaaagcacaccttcgtgtgcgccgtgttccaagcgaccgggggactatctgcttacggctgccaccgtttgtttagtccaacaaatgaccgcttcaattagcgagtggaactttgctatggataacgttggtttggattcgatgtcgtgactcgactaactgttcagtgacatagcaattttattgagtggcagcttttcaagcgttggtggtagttgcggaaaatactcaattcgggcaggccggttctactcgttgtctaagcgtattgggacgagcgagaggtcacgatttttcgggttgctctcccgttttgcttattca

SEQ ID NO: 596667 - DNA, 261 bp, Homo sapiens
  misc_feature (242)..(242): n is a, c, g, or t
ttgatgccgaacttagtgcggacacccgatcggcatagcgcactacagcccagaactcctgggctcaagcgatcctccagcctgggcgacagagcggactccatctcaaaaaaaaaagaacaccctgggtagctcctactggtggtgcagaggtgaacttggttatcacttcctctgttcccactgcatgctgtgctatggctgtgctgtttatcacagtggtgtctactgtcttatattgncctcccgggggatcctcta

SEQ ID NO: 596668 - DNA, 453 bp, Homo sapiens
  misc_feature (48)..(48): n is a, c, g, or t
  misc_feature (63)..(63): n is a, c, g, or t
  misc_feature (75)..(75): n is a, c, g, or t
  misc_feature (119)..(119): n is a, c, g, or t
  misc_feature (125)..(125): n is a, c, g, or t
  misc_feature (161)..(161): n is a, c, g, or t
  misc_feature (300)..(300): n is a, c, g, or t
  misc_feature (312)..(312): n is a, c, g, or t
  misc_feature (347)..(347): n is a, c, g, or t
  misc_feature (381)..(381): n is a, c, g, or t
  misc_feature (426)..(426): n is a, c, g, or t
  misc_feature (438)..(438): n is a, c, g, or t
ggaccttttccccgaggactgacaaagtccgcaccatgctggttaggnaagatccagggaagnagtcactgaggnacctacctctttcacctacagcagtgtctatgactccattcagncatggnagacgctgttcagacatgtttgtagctgggatctgncccactgtgcactccatcatcaggcaaaatgatcattaatgagggagctgatgggcctccctgggaccagccaacacaggacagtggtgatgcaccgcactgaggcccactgcccagcagaacctgggctctgcagctngccgagaagctnggcagcctgggttgagaacaacgaacgggtgtttnaccacaagcagggcacctacgggggctactttcnagaccagaaggacggctaccgcaaaaacgagggctacattcgccncggttgctaccncagcagcagttttag

SEQ ID NO: 596669 - DNA, 440 bp, Homo sapiens
  misc_feature (88)..(88): n is a, c, g, or t
  misc_feature (164)..(164): n is a, c, g, or t
gaaccttaaaggttttattattaaaagcagcccagattccccatttttacacatgaggattttttttgtggtgaaaaccaggattgantgcatccctttaaagaagttttatgtccctgactttgggtaaaattatttaatttccagaggcttttgtaaatgantgaaggatttgtgagccccaaattgggagttttaaatttgagtgaatggcaggaaagggccatctcccttgagatgattaagtgaacccaactagttctcagaattttccaaagaaggagggaatcagactgaggaagctgtgacataggacttgaagccccaagcctttgaaatttgcgagctgctcatgtgtgagttattatccccgctgtctttctattgagttcccaatctatatttttattgaagtttaaataaagaaaaaatttcccaga

SEQ ID NO: 596670 - DNA, 982 bp, Homo sapiens
  misc_feature (1)..(1): n is a, c, g, or t
  misc_feature (33)..(33): n is a, c, g, or t
ngttcagccaggcgatggagatgatcaaaaccnggcgagatactgtgactggtaagacggtgttattgcttaactatttgcaaacgtcacatttaatggactgaaaaataacaataatatttcgttgtttattattggctcaatccgacaaatccgattgagccgcgctacctgcgcaacgaagatacgacttgtgctgtttgtttgaacttctggggtcgtaccgtccatgcgctatcgcattttccttctcttttttttcgctttgttgccgacgtctttggtgtgggcggcaccagcgcaacgggcgttttccgactggcaggtcacctgtaataaccaaaatttctgcgtggcgcgtaatacgggcgatcataatggactggtgatgaccctgagccgcagcgccggggcgcataccgatgccgttttacgtattgagcgcggcggattgaagtcgccggaggcgtcagaaggggagatagcgccacggctgctgttagatggcgagccgttggcgttaagtggtgacaagtggcggatttcaccatggttattagtaaccgatgatacggcaaccatcaccgcgtttttgcagatgattcaggaagggaaaggcaatcaccttacgcgaatggcgatcagaccatttctctgagtggcttaaagcagcgttgttgtttatttgatgctcagcaaaagcgcggtttgggcagtgaaaaccgcgtggatccagaaagggggaccgaaccgccgctcaggtaccggaccggtgctgcgctgaaagaggtcgcggggttacccaaaggccggaggcattctcaaattcgaaaaagggaacatttgctggattatggaaactggggaataaaatggtctggcatggctcgttgatccattgggtcgtgagggaatggtactgggcgaatgatgataagactgtgatgattatgtgagagagggcttaaccttttttgttgtg

SEQ ID NO: 596671 - DNA, 364 bp, Homo sapiens
agtcattcagatcatggatgaatgccattctgtgttagcttaaccaccatcattcttgataaaatataactttttacctgagtaatgcatacctagtataataggctacagtatttcttgaaatgtagagtccgtatcagtggtggtataaaagattgttttacatgcaacgagatatgctggtatataatattaagtgttttgctaaattatttgcctttcatttctactctaatgttactgattaagataaggggagcagatctcaccttggagctaggatgctttcatgtccctccaaccctcactgattatctttgtaacagagagcaggcctcaggctaggagtgtttgtcagaaaaaa

SEQ ID NO: 596672 - DNA, 1366 bp, Homo sapiens
  misc_feature (287)..(287): n is a, c, g, or t
  misc_feature (486)..(486): n is a, c, g, or t
  misc_feature (908)..(908): n is a, c, g, or t
tctttcctttaaaaaagtttatggtgaaatattctatccagtgatgtacttataacatataagtgtccagtttatacaagttacaaaaagcaaacagcccttcccttttatttttgttttttgtggaaagaaagaaggtcctgggcctctgtgttccacccgagggtgtggtagtctccgagggggtgtacaactcctcagctctccagcgtgggacactcctccacccctcgcgtgggttctcaaagtcgaaagtctcttatgtgtgtccctctcaagccctctcnccgcgagtgatgacgcgtgtggagtatatataccgcgcgcgcgcagcaccacaccacacacatatgtgcgccggtgtctatatcatttgtgtgtgtaatatttctatatagatatacagaacaccgggggtattgtgtgccctctgtgtgtgtgcgccagaggcgtgtgtgctctctcaaacactctcctgatgagacnctgtgtgtgtgaaccccgcgcggtgtgcgcatgtggcggcgcatcccccatagagagtgtgcgcgtggggaaaatctacaagagacgacggtgtgagacgccacacgtgtgcgcggcgctgtgcgcccacacatagacgacggagatacccactctctgtgtgtgacacaccacactctctctccacaagaacacacaacgagacgtgtgtgtagacaacatatttctctagagagcagtcctacaatacaagatatatctacacacgctgtgtgcgcccgtatatgtgcaaccacgtagagaaaacccccgccacatcatttgctcggaggaggaaaaatatacaagcagcagcgatacaatacctctgatgttgcccccaaagggggtgctgtcttctaatcgtcagagggtgggggacnaaagtacgtggtggtagacgactctaggtgagaccaagctgttgcggcaccacaaaacaagcacccacacagcacagcaaaaaactactgcagagagggagggagacgacatataagaccacgtgtagtgtcgccgcagacaacgaccatgtggacaaaaaaaccaacgagggggtgtggcaccgcaccaaaaagagtacccacaaccaacacccccgaaggtgggcgctgcgtggcaccacctcgagagtgggcgactaaaatagaaagagaggctcaccgtgaacaccaaggagacaccacagagtagcaagcgaacaaatagcgatgcacaaacgcggactacaaaggagggaggcccaatataaagaccgcgtgattaaacaaccaaacagagggacgggccgctcaactagtggtaggacccactaagaggcaaagaacaacaaaacaactct

SEQ ID NO: 596673 - DNA, 252 bp, Homo sapiens
gcatagcgccaccaaggcatagcgccaccaaggccatagcgcccaccaaggccatagcgcccaccaaggccatagcgcccaccaaggccatagcgcccaccaaggccatagcgcccaccaaggccatagcgcccaccaaggccatagcgcccaccaaggccatagcgcccaccaaggccatagcgcccaccaaggccagagcgcccaccaaggccatagcgcccaccaaggccatagcgcccaccggggtct

SEQ ID NO: 596674 - DNA, 629 bp, Homo sapiens
tggaaactttaaaatccctcaaaaacggtttattatacaagtgagtttggagtcacgaggggcttatcgggtaggatttctgggtagcagagcgcgggcaccagggcctccaaacttttgggactcgcagcgacagagggtcagctaccagcagggtccggtcatacgggatgaggatgtcttggatctccttctgggaagcctctatccactattatttctgggtaataaggccaccagggcttgggaaatgggactggacggatagcataaaatctggggccacgtggaccaccaccctttacacgggacacggtttgtctacaccagcaaatcggctccttgccagaaaagcaaaattgggtctccaggaagtcttggtgactggtgacgggtggcggcgggttccaatcattctccagggggcacgcccggttacactcttgatggaagaccttgtggcgcgcgtgtttgcgcatgtggcggcacaaaagttgtgtcggctgagtgctttctatgggtgttccgaagaactctggcaccggattggcaaggggacctcttgggacggggctttgggttcccagagctgtgggacatagaaacaaaccttcacgcggcgccggggg

SEQ ID NO: 596675 - DNA, 314 bp, Homo sapiens
atcctatattaggtcagcttgaatcaccattcatatgcatttgcgaagacctaggagaatcatactgtagagaacaccttacaaatgtgaagaatgcgagaaagttttcacgttgcaaatcatcattcttgaaattcataggataattcatactggagagaaaccatacgaatgtaaggtttgcgacaaggcttttaagcatgattcacacctggcaaaacatactataattcacaggggagacaatcattacacatgttatgaatgtagcaaggtttttgatctataagcaatccttgcatgtcatcatagaa

SEQ ID NO: 596676 - DNA, 937 bp, Homo sapiens
gagggttcgaattgcaacggcgctgcgggcgtatgtgttggtgctagaggccgctgcgggtctcgctgggggccgctcgggaccaatttgaagaggtacttggccacgacttattttcacctccggacctttccttccaggcggtgagactctggactgaggagtggcttctcacaatggaacgcggcatcgagtaatttcacagacaccaagcaaattatcgagacaatgcatatgaattctgtattattgtgtcaagtccaagctataaatatcccggcctctccgtttatgcagaagcttggattttggttacttgggtaaatgtgtacctaaatgaaaaagatctccatagaggtgtgtgtcctcattctcccttgggctgtaaacaatagattactcctatattgtatgatcatttatcgaagtgttgtatcagaaccgagcacctaatggatgacgcctacagatttggaaaaggccttcatcatccaaaacattgtgtggctatcgtgctttgactgaagccaattgatggcagtctgtgtctgcaatgcgaatatggagggtgaacagcctctaagtgacttactgaagaacgctataaagtcgcgagatcttttccagcagccattatttacagttgtttgatttcggcgagggcgtaacggatctgcccacgaaggaacttgctcctggcgcctgcggtctccatgtgtattcagggcgctctgaccactaactctgggtgggggtctctccctggtcgatttctgggctgcctggtttgactttgggcacgcgtgtgaccccacacgtggggatggggttcccgcgggcatttcgcgcccctttgggaaggctccctccctattctcggaggcggacctgcgtgcgctcccggcgccctttgtggactttgcctcctccccctgtg

SEQ ID NO: 596677 - DNA, 437 bp, Homo sapiens
gacatgtcacgcatcaatggcactgaacatctgtgcacggtcatgttctgaggcaggacatacacagcccgatgtcagatctgcaaggttgatgtaggactaggggtagcattgatagaggcaggtgtccgggtcctgctgctagctgctaaggggtgatgcctggtacaggatcctggtagtgatccttaaaccatctaaacagtcacattcacgtgttgggaagacatctggaacccgagtaccggaaatccactctggagatcacctgttacactatactatccatggagttagccccgagggctggtatcccagaacggaacattgccagggcagattcctttgcaaggcacaagctgaaaataaagggctgaacagtgggctatctccttcttaagttttgactgacgcagctcctcataatttcttgacgg

SEQ ID NO: 596678 - DNA, 137 bp, Homo sapiens
ggttttgccttgcgttttctttctttctttctttctttctttctttctttctttctttctttctttctctctctctctctctctctctctctctctctctctgtctctctcccctccctcccttctgtcgtcttctc

SEQ ID NO: 596679 - DNA, 245 bp, Homo sapiens
gccattttcagtaattcgccaaaattgacggaacacaaagggaaagaggagaggcacccgatatattttgctctatggctcttttatgaaaacaagtgagttttttccctttgccacatatatgtgaatctatatgaaagggtgatattttagacatcatagggaattgtgtacttttctaaaagagaatgtccccacaagagtttatcactggcacaaacttggtagagatctacatattttac

SEQ ID NO: 596680 - DNA, 435 bp, Homo sapiens
cagggttcattttcccctcaaggctctgacacatctgtctgggctaccgcaacattctccctcacataccatagtgcagcatgtctacattcctcgggcccacttaatgacttttgcactctgatttacatttttagaagcatctctgtggttgctgtgaagaatacaggaaggaggcaaggcaagtgtggaagcaggctactcactttagctgttggtaagtcatggcctatgctgttgattaggttggactacggtgcgtactgatcaagttgtgagatttgggatcgtattagttgtctatactgtggaacaagttatcctaaacttagcttaagacagttaatgttatctcacaggggtttgagtgccgcttagctcggtgcctcatgctcagggtctcacaaggttacagcttagatcttctcttaggct

SEQ ID NO: 596681 - DNA, 148 bp, Homo sapiens
aagcttatactgtactatatgccaagtcataaatacagccaacattatttcatgaaaagagcactgtcaggagatagatgattttggtttaattgcctattttactgtccctaacattcacgttcttgaacgaacggtcattttagcc

SEQ ID NO: 596682 - DNA, 199 bp, Homo sapiens
tgtaaaccggataaagtttggtttagacgttaggtaattgtttgtgattttaagcctaatgtggggacagggagtgagtgcaagacgttttgtgacccccttattatacaaatgggggcttgaatcgggagtactattagattgctaacgttaaggagtggtaggtagtctggttctaggaataatgggggaagtatgt

SEQ ID NO: 596683 - DNA, 409 bp, Homo sapiens
  misc_feature (1)..(1): n is a, c, g, or t
nctatcctttcagacagagatatcaagatatctatgttaaggacacttaaataaactcgagctaacatcatggagaacggaattcagaattctatcagataaatttatcaaagagattgagatactaaaagagaacctagcataaattctggagttgaaaatgcagttgaaagactgaagaatgtgtgtttttataactagctgaattgatccagaagaagaaagaattggtgagcttcacgacaagctatttataagataccaaataatatatgaatgacacatgcctagaagactctagaaaaatgcctcaaaagggcatatctccgagttattgaccatctagaagtggtagagagaagtataggtagaaagttttttcggaaggccagtaacagataacttctga

SEQ ID NO: 596684 - DNA, 1251 bp, Homo sapiens
caaaggcgacggaatggaggaggtgcctcacgactgtccagggccgacagcgcccaggcgggcagaggggcttatcatgtcagggatgccccaacctagcaatgatacactgtctaaggagacgggaatgctcaccgattacgatcctacaaaaaatagaaagaacttaaatagataagaatgaatggacgaatgaagatcagcatatataacgatataaggaaaggacttgaaaagataaagagccggatattggggtggattgaagcgcattcaggcgcccacctgttgctccattggtcgctagcattagaggattgtaaatgcatcagcgagattggcaacggtcgataaagccaacatatagaatgaggagatatgcttactgaggacttcatgatataataaatatgagaaaaaggaaaatgagacttaagaatgtcaaaaaggctatattgggcgaagaactagctatataataacgatataatataacagatctgggaatgtaaaaatgacaagtagatagctggcaagacgacgaattgcattaacgccaaggcgtaagaggggcgaaagatacaacagattagtttggaaaccccaggggatgtggaaatggaggcagaaaatgctaatggcaatggaaccctggccaaaaggaggaaaaatggaccaatttgggatgtaaaatgagcggaattaactgcatccaggaagggataatgtgccccctcatccgaatgtatcttacgggataaaggatcatccactacagatgctagggcctgagagacttagaagcgcagccaatgcagccacaagacaaggatgggatcaatgaggatgggcaaacatgccaacaacgcccatttataggaatggaacattctacgctggatgtgaaaagcgcttatgggacaaacacgccattggcattcgaaagacccacgaaagagcggaggttgcgagaacctcatatcaagaacagttgaataaataatagaaaatattgcggaaaaggtagggcttaactgaaccaaatagcgcgaaaacgggaattcgaagtggaggaaacaattacctggcgttatatttaaacccgccacttgcaacaatattcaaaaaaggggcggcctaaaggtcccaccagaaatgggcgcagatttagtttaaagaggagaagaacccgcggagccggactccagcggggcaaagaactgaggcgccccctaaggttcgacctcggca

SEQ ID NO: 596685 - DNA, 140 bp, Homo sapiens
cgtggaggcaggacactgcatcgtctcgcactgtgctaagatgctgtcatgatggctgtatcgatgactgtacactcagccgggtgcactgcaccctgggcaatttgccaaggccactttgatgccatttctaagaacta

SEQ ID NO: 596686 - DNA, 625 bp, Homo sapiens
  misc_feature (227)..(227): n is a, c, g, or t
gccagttagccctgcctcagcaacaagttttaacacattcttttggcccaacaaaagaaggacttcgtctgtgaattcaagcttagcctagttttagccaaaaaaccattgcagtcaaagattagaaactggaccagagcaaaatcatgaacataacgggagtcaagagaagggtttctaacatgaaaaagtggggcggggtgtggatacagtgggatgtgcttccnccaggttcaaccccaaggaagtctctggaagcagccccagtcctgatggggagcagaagagctgccatcttcagtcagggtcggagtcagggtccgagaagagctgctgctccatagtctcgcacatggcatcctgcagggacgtaagatgaccccggggcttcatccccattggctggatacttctgttcttgaagagcttgtcaaacatggtcacatgcttcatggcctcgtgctccttttgctcttctgtcatgccctccatagggttagcggctttttcttccatcttcccggtcacaagggttatgctggctttggcttccttgtcttcatttgtgtctgtgtcttcatcttttaagtattggcccccgggccggcttctgcaataaggccct

SEQ ID NO: 596687 - DNA, 248 bp, Homo sapiens
atgatgcctgagaccggcggccatgggaaggattttttgcgaaataccccttctttgccagaaaaccttcttcattaatgggggccttccgaaattattagaacaacttttccaaatggcccttttaaggggggggttttaaaaccaaaaggtggtttggtggtaaagggaaaaataatttgggggtgaagcaaaatatgggggaaagtggagccataattgacacgaggtccccgaaacccggtggt

SEQ ID NO: 596688 - DNA, 861 bp, Homo sapiens
ccaattatggttataaaggcaaaagccaaccatgtttttagtacatatgtatgacgaaaactccagcagtggtccccatcagagcggcttctgattttgactttagccatccatgtccgtgtagttcgggaaatttttacggcattgaagatggcatcatatattgcatggatttaaaaaaaagaatactatggagtatttcaaatatgtattatagagagagaaaatagtgcaatgtcccctcatgtgcacccattatcttactcatggataagtagtttcatcgtataccggtcatccatcttatgatttctttatttgatgaagtgaagcgacgagtaaaatatcagggggtggtttaactatcttctcatgactgggcagctcttagggctcatgtagtaaatacgaattatcgatagaacgaaactggttggcccttgcgtatatctagccttcggtatgatcattgggtgtattttaaataaaaggcgttttgaatatactttttgagacgcgattactaaaaaatttacacacgtggggttaacaatgatcaaactagtgggttttaaatagggttatgtaaggaacaatgacatttatgtatatttgttgaggcgcacatggacccaagaaaagaactcacatagcacggggagggagcgaggctgaccactataagtggaataactgagtggttgatgacgacggaagaaatcagggcctaatactgcgctgtggtgctcccccaaaaaaaaaacacgcgccggggggtatgccagtctttcgacacaaacgtcgcggtttgaggactcctgggggtctgaagaaggggctgccgagccaacgatgtacagt

SEQ ID NO: 596689 - DNA, 751 bp, Homo sapiens
tcttcagaagcagaaggactccatgaaagatgacagaagaagttatttgtgatagccaagtgggactacaccgcccagcaggaccagtgagctggacatcaagaagaactgagcggctgtggttgctggacgactccaagacgtggtaggcgtggtgagtgaactgctggccaacatggactgggctatgtacctgtccaactacgtgtgatgctgtgaagaacatgcactgaatgaatgtggctccctctgtgaatgaacctgaatggacacactagtgcctctggcaagacgcgcagtgaatgaccagcgctgctgggatgctgtcccccactgcccagcactggacagcctgagtaccccgccaatgtgcatgctgtgctgcctgacctgaaatctacgacctcaacatccctggccttctgtcaagttctgcctatgtggcctgatgcgggaggatgagttgtccctggtgaatggggtcgctgcgtcacctgtcatggagaagtgcagcagacggttggtggcgtgggcagctacaaactgggcagatcgagctggttcccctccaactacggtctttggagtgaggtgtgcctgaggcggctgctggagtccccaagcttcctgagcctgtggcaaggggcgctcgctgagcaatggccagggctccgcgtgctgcatgtggtcagacgctgtacccttcgcttcaggcacgggagggctcactcgagcaggggcgactggggtg

SEQ ID NO: 596690 - DNA, 220 bp, Homo sapiens
cagcggtgaagtcacacagggaggtgatagcatgctgacgggtaattatgtaatgcaaaatttgtataatcttcgccttaatactttttgatttcgtggagggggaatgatgagccattcggcccccccttcccccttttttgtcccccaacttgagatgtatgaaggcttttggtctccctgggagtgggtggaggcagccagggcttacctgtacact

SEQ ID NO: 596691 - DNA, 190 bp, Homo sapiens
ttttttttggggggggggggggggggggggggcccccccctggggtttgcccccttttcccgggggggggttttttggctttgtccggccccctttttggggccaggggggggggtgggggtccccggcctggttggcccccccatttaaaagagacggccttttttggattttaagggccccaaggata

SEQ ID NO: 596692 - DNA, 152 bp, Homo sapiens
tcctggcgccatcgaggaagctctttacatagtccagtgtttatttcgaggagtgagggatggcaggctcaaagacttggaaagagatggcttaacagaaaaggagtgtgtgagggagaaattaaacttactgcatgaattcctgcaaacag

SEQ ID NO: 596693 - DNA, 1003 bp, Homo sapiens
cgaattcgagtggcggaccacgtccgcccgtctccgaccttctgcatcgcaggcttcgaggcggctattccacctagacacctaacagatcgcggagccggccggatcgtgagggggtcggacggaggagtcgggcggatcttgtgcatcttggctacctgtgggtcgaagatgtcggacatcggaggactggattacaggagcatcccggcgatcacgcgctattggttcgacgccaccgtcgccgatgcccttggtcggccaaactcgagcctcatcagcccggcctacctcttcctctggacccgaagccttcctattatcgctttcagatttggaggccaatcactgccaccttttattatccctgtgggtccaggaactggattacctttattatggtcaattaatacttatcttatatcagtattctacgcgacttgaaacaggagcttttgatgggaggccagcaagactattatattcatgctcctcttataactggatttgcatcgtagattacatggcttagacaatggatatgcagttgctagatagattcctctgatcatgtcagtactttatgtctgggcccagatgaacagagacatgatgtatcacatggatggaacaccgataaaggctgctataaaccctgggttatcttggatccaatatatcatcggaggctccggaatcaatggagctcatggcaacttggtaggacatcttaaataaccgtaagtcagatacccaatggacttgggaggaaaaatatatacaaacctaaaaataggtccgacggacgaccaaagacaggagaagaacaaggaataggaggcgccgagaaaggaaggccaccgcgtcacaagaacagaacaacaggaagcgaaacagaagaaagagaaaaagacaaaaaaacaaggagaaagagagacatcagcgagaaagaaaaaaacaaagaaaaaaaacagaaaaaagataccacagacgcgccccctct

SEQ ID NO: 596694 - DNA, 310 bp, Homo sapiens
  misc_feature (101)..(101): n is a, c, g, or t
  misc_feature (117)..(117): n is a, c, g, or t
  misc_feature (162)..(162): n is a, c, g, or t
  misc_feature (177)..(177): n is a, c, g, or t
  misc_feature (197)..(197): n is a, c, g, or t
  misc_feature (270)..(270): n is a, c, g, or t
  misc_feature (296)..(296): n is a, c, g, or t
agtaagaaactccccaaaacctccatacctgatcctcacatttctggatactccttgtgtactcagtttagatgtcacctccctccactaactaagcgttnccctctgggtggagtncctttcttgtgtaaccccatagcacctgtgctcacccctgtgctnaaggtattgaaaggnataagacacagtctctcctncagagtctgtggcgtagacagtgagtcatcggatgctacaatgtgctgtgataaatgtatcacagggacagtncaatggaccacatagtaggtactctntgaatatttgttgg

SEQ ID NO: 596695 - DNA, 343 bp, Homo sapiens
tgagatgaatcctgccaacctgagcttggagacagattctctccctatcctgccttgggatgatcacagccaccaccaacaccttcactgcctggtgagaggccaagccagtgaacccaaggtaaactggacagaatcctgacccacagaaactgagataatgtttgttattttaagctgctcaatttgttacagagcaatagataactaactcaaacaccataaaattctaatattttattctatcacacaaaccaagtaataccaagtaaatgccattactatacatatatttttgtaacacaattacatgtgattttttaaaaaagctaaaaaaaaaaaa

SEQ ID NO: 596696 - DNA, 248 bp, Homo sapiens
aaagttgaagatgaacacttgagacttcagcttctcacctactttaggtacaggttgggcgaaccatacacttctggcatggtttgggaaatccaaaatgtcacattctcggggggagggaagcccagaaaattggggtatggttcctaggaggatttaccaccattggccttattggccttttttcctttaataaagtttagagctcgcgagccgggatgctcgtcaattcggcacgagaaaaaaaa

SEQ ID NO: 596697 - DNA, 139 bp, Homo sapiens
gctcttcgctattacctgaagacatcttctatagaaattcaggatggatagatatttgaactaacagaattgacgagataacttgggcaagctactagaatgcaactcaggaacgtgatatattctgtgcccatgtcaa

SEQ ID NO: 596698 - DNA, 359 bp, Homo sapiens
  misc_feature (6)..(6): n is a, c, g, or t
  misc_feature (11)..(11): n is a, c, g, or t
  misc_feature (80)..(80): n is a, c, g, or t
  misc_feature (111)..(111): n is a, c, g, or t
  misc_feature (131)..(131): n is a, c, g, or t
  misc_feature (163)..(163): n is a, c, g, or t
  misc_feature (173)..(173): n is a, c, g, or t
  misc_feature (218)..(218): n is a, c, g, or t
accccnaggtntcactgagtcaagttaaccttggtaactttaaaacagttttgccccaaagatttttaaaaattcccccnggtgcctaattaataatttaatttccatacntccaggagggatggaaaatnagtaccttatggaaatatttttacccgaattnttaccagttntggggggagggttattcctggttttttatttgggtttgctttggncttttgtctgactaattaaatgaaagatgctccttaactaaagtgactaccagacttcacacaatcttgcctttttgagttttggctattttaaaaatgatcaaatgtataataaatataaaataggaattttctcatata

SEQ ID NO: 596699 - DNA, 706 bp, Homo sapiens
ccggccagatggcgggcaagacagctgggtgtacagcgtactcgaaaccacgagcaagtgagctagatcctccgtaggctagccagtgactccatcccagtgccatggcggattctgagcgcgctctcggtgtcctggctggtgggcgcgccatgcgaccaacttctcgcgcacttcgaaagtggaatcctccgtgtttgctgagattataattatgcctggtgatccatgatctggcgttcagtgccgtcgcacacacaggcatactcctccctgttcggtgattgagatgatccttgctgctattttctttgttgtctacatgtgtgacctgtgaacaccaagataccattcagtcaactggtgccctggagtgatttcttccgaaccctcatagcggcaatcctctacctgatcacctccagttgtatgtccttgttgagagaggaaaccgacgtccaaaatcgtcgcaggggtactgggcctaatcgctacgtgcctctttggctatgatgcctatgtcatccttcgcccgttcggcaggcaatgacatacagccagcccccactgatcccgcagatggcccggtgtaggcgaacttcccgtcagtttctctcgtgcaatctgcaaataactcctccattgaagataactcctcccacaccgccaatcaagcaatattcccagcagaccgaattcccacgcc

SEQ ID NO: 596700 - DNA, 103 bp, Homo sapiens
tctagaggatccctcacgccatgtccacaaggctttggctatgtcactttttcaatgctggaagatgttcagagggccctcaaggagattaccacctttgaag

SEQ ID NO: 596701 - DNA, 214 bp, Homo sapiens
aatcttgcttctaattagatagaaatgggaggttattgctgcagccataaatgatcttttagggtgtaactaattcaactaaatctcagatgtccaatttgtgcagcctgttgatgatattattcagtgaaaaatggttggggagattgggaatgattaagaaaattagtcttgctcacaacttaatgataacacttgaggatggtccgcacag

SEQ ID NO: 596702 - DNA, 156 bp, Homo sapiens
  misc_feature (87)..(87): n is a, c, g, or t
  misc_feature (97)..(97): n is a, c, g, or t
  misc_feature (102)..(102): n is a, c, g, or t
  misc_feature (126)..(126): n is a, c, g, or t
cagcgtgaagtgttggaaccctattgaatgcagtggattttatgcagcatggcccaaagcatcctgattgagtgcactggattcaancgagcatcantgaangcagaggattccatgcattgtgtngcaattgatccttattgtatgcagtggagt

SEQ ID NO: 596703 - DNA, 436 bp, Homo sapiens
cgaatctggccccatgttttctgtattcctgtttgtggtaggagataaccagtcttgtttgtttcttacatggcattcctttgttgtcctgggatggtgaggtaatgtttatgggaaatgagcagaggcctgtaggtagcacctgagggtccagggaggtatatggacaggcctgcatcacagcatcctagacttctttggagacccgtttgatagtactttcagtttttggcatttggggtactttgaaatccaacttgtttttaaattccatgttggtgccatagatgtagtttttacagcctgaaaattaactgccatgaacattctttggtgatgtaagcaagtaaaacccaatggactctgttgtgatatccttttgtgttccagcctaggctaagtgtttgtgaaagccatttgtgagtgcttggagtgt

SEQ ID NO: 596704 - DNA, 987 bp, Homo sapiens
gcaagtgtctcagattaagtatgcagcaacaagttcggagtgaatatcctgacagtgtgacaactgaacagttgaattgaacgaaaattgccacgtaatcacccaaatgccaaggtcttactactatattgcaacagaagataactattggagcgtgaagatgcggtaacatgaaagtttgagctagctatccctgcaagaactgtagagtcatctcttggaatgtgctaaggaacttgatgtccataataacttggggttaaattttcactgtttcgagtgcttgcaaatgaatctcaacgtactatgtacatgctctactctgagtgctcgcattgtgctgctttgaccattgcgctggacgaaattggctttacgactgaacagtgttcacgtacaattggtggatggacttccatcggcgaaactgcaatttcaagtgtggataagaggcttagatctactgttactcagccaccgtctagttgcgataatctagctttgcctcgaacgcgtatcgtgggtgattcataggagtatatctatacaggaagccgccggaacgctacctagtgtgtctatctgcgaattctatctactcagcagattaatgatcaggtggcacaagagaagcttgtagcagaaaaatggagttgacagagtgtgtcctcttgcctggctagtttcattcacacaaaaccacgcgcggacacggtggcatgcaaacccgagtccccttccatgctactttattaatgcaccatgcattgagtggatccaactgagattccatgatcctggcgaatagataccatacactgtatccttgacaggtcacccgttaacaatctatccaactaactccaagacacggaatactaaccaatagaaacacatataccatcaggtcaaaggactgaaaggcccatatatggatatcagcaaaaggcacagacaatatttgaggacgtttcccaactcccctag

SEQ ID NO: 596705 - DNA, 360 bp, Homo sapiens
ctcccaactcagggcgagctgctcaaatcattccaccggccccctcggcttgggacaggtagtgtaactcccgatcccagtgtcctagccctgcacacaggtggcttcccgctatcccgcgtgggcaaaacgccctgcacaccacgcggtgcttagagcttggccatgtgtcccatccacatgcctgcaccaacaccacctccagagatgcagatgctgggcaagtggcacgctcaaagcgaacatggaccatggcgctatggcaaagacatcagcacacacaccaacccaaaaggcgtggaccccagtgcccggcccgatggtacccaagcaggtggcactgcaagctcgccccatgag

SEQ ID NO: 596706 - DNA, 391 bp, Homo sapiens
ggcacaggcaccacagagcgccacggcgaccctgaagaaggcgcgctacaatgcgtcagtgccaggagaccatacgcgtgaccaagccctgtacccccaagaccacaggaaaggccaaagccaagaaagggaagggaaaggactagacgccaagcctggatgccaaggagcccctgtgggacacggggcctgtgccacagcccttcctcttccaaggccgagaagtgacccaccagtgcgcttctgtgagctcggtagccttaatcaaacatgccctggcttgtgccttttacattgcagacccacccctaagtgcccaaagtggggaaggacaagggattctgtgaagcttgagccttcctcgctgtgagtcccaggcccgcttttggtt

SEQ ID NO: 596707 - DNA, 538 bp, Homo sapiens
cgcccccccccgcacgtgcaaaagcaccgattttccgcacattttccttggggaacaggccgccttccttttcagcttggtatgtctattagacatacgttccctattagatgaacacttcaacattctccttccatgcagacatatgctcactttctttgaagaagctacggctcaagttacaacctgcacgtgttgagcttgtgtttctcaagcccaagtcatcacaagagcggctgagagctgttatgaatgatttcgcagcttttgtacagtggtgctgcaaggctgtcaataattagtggtgctcccacgaggagcggtcacaaacctgttagtacaaggcatgctctgtaagcttaaaacatcttcattaaacagcctctcaccttttgttgagactgtaaatatttcatgaagtacgaaagcgtccccccctgtaaatcatgctcgttggtgtagacccaacaccctgtctaaaattcatgaattcctttaaacggcaagcctcactaaaaagcgcctgtattaattgaaa

SEQ ID NO: 596708 - DNA, 754 bp, Homo sapiens
ggatcaacccggacgcgagtgctggcagagtgcccctgggttggtgagaccagatgcaaaaaagttggtactgctaagtctgatctgagatctaatgacttcagacatgatggaagcttagcaagagatttcgaactatccaatgatgactgctatggaagacccattgaagttaacaacggagtagggaaatctcaggctaagaacaacaagaaggctccccctgtcgagatctgttattccaacagcagcaaagcgaatgatctttagtgcaagagcagtgtttcctttctgcttctgtgcttcaagttatatatggtctatatatttatgataaatcttttcgcattgtagcaaaataaaattccatttacatggtgacctactcctttcataattgccgaatctgtgagaagcttttgaaattttcatagcaacattgcatttggatgccatttgattgtaataaaatctgtggcaccttgaattttgaatggcaggatgatcatgttatatctgtgctcgtagtaacagagtgtatatatgtatagtgaacatagtgcttagtaacaaatgaaggcacaagcatggctaacatgaatagtatccatacaattctcttcaggagtgtaaaactgcagatactacagattattctgataaataaatgatatgccggcggaatctggtatggcaccattccaagttggtgatttacaagtctttctggtaacttcaaagaaggcactaatcg

SEQ ID NO: 596709 - DNA, 336 bp, Homo sapiens
gcagtatccactctcttcaccagtactggaatgtagtagctcaatcatagctccctgctaactcaaattcctaggctctagtgatcttcccacctcagcctcccaagtagctgggaatacagatatgtaccagcataatccgcctaattttagtatattgagtagagatggggtttcgccatgtcaggccaggctggtctccaactcctcggtctccagtgatagcactcgcctcaggctcccaaatggtagtctgtattgatctctcatccatttctaacttctaaatttcttaaatttagctagtttgtacttgagtcttaatatttccataac

SEQ ID NO: 596710 - DNA, 427 bp, Homo sapiens
cctcgtgcacttgggtaagggatagttaacccacatgtaaagttacgtaacaggctgggtgcggtggctcatgtctgtaatcccagcattttgggaggccgaggcaggaggatcccttgagcccaggactttgagaccagcttaggcaacatagtgagacctcgtagctacaaaacattttttaaaatgtttttaaacattaaaaattagccaagcttggtggcttgggcctatagtcccagctactcaggaggctaaggcaggaggatggcttgagccaggaggttgaagctgcagcagccatgatcatgccactgcactccagtatgggcaacagagtgagaccctgtttccaaaaaaataaggaataaaataaagttatataacaaagctgatatttgtagtgttttctaggtacagagtgctt

SEQ ID NO: 596711 - DNA, 647 bp, Homo sapiens
  misc_feature (458)..(458): n is a, c, g, or t
ctgccgcggttgttctcatggtagaccagggttcttttatctgccgtccgcgcttgccgttctcctacctaagtgcgtgccggcatcgcgatggaagattcgatggacatggacatgatccccctgaggccccagaactactcttattcggatgtgtgacactaaagggccgagcgaaagagttatcacttttcaaggtggtataatgtatgaaaatgagcaccagtttatctttaggaacggtcagtttaggggctgttgcaaaggagtgaggttgcacatcgttgaagcagaggcaatgtacttacgaaggcagatccatattgatatagtaaacacctggcaagcttttgacacatatgttctgtcatcgaggccaaacgtggttttaccctctgtgtggcttgagagaaatgaatacacacacgagtggtcttaaggttgaagtgtggttcagnggccagggcatatgaagtggacaggactttagtatgctgtggaaggattgatgctagagtcatgaatgaatggaacgaggaggaggattgtgagaatgcttaatgtatatactggaagaggcggtgtgcccctggaggtggttagcaaggttcctctgtaacattaggtgaattgtgctgattgaagag

SEQ ID NO: 596712 - DNA, 111 bp, Homo sapiens
  misc_feature (15)..(15): n is a, c, g, or t
cagtgatgatcacantcttcaggggtttatcccggctgtctgtcttggtgctctccaccttccgcacacctccatgccctctagaactttgccaaacaccactgacaacgg

SEQ ID NO: 596713 - DNA, 734 bp, Homo sapiens
  misc_feature (734)..(734): n is a, c, g, or t
gcaccagggcagcagaagtcttttccacatagcactccaggcagagaccaccaatcgatcagagatgttgtgtaggtgcaaacccatttatgaagccatagacatttgccctctggagtggcctaaccccagagggtgaacaggcagccagagagatccagtaaggaggaaaccaagatggatcgttgagctttcaagtactcacaagaactcattgtatgagtgctaacaaaatctggatgtggtgatgcagttagccatggaatccaagtttggagggctagtccccgaatcatgatttctgcactttctaggtattgctttgctgggcattttcttccctatggcaatgaggtttcctcaggagcatgagccacacagagagggctggcatcttcacacagttctgagcatcgtcagtcaatcctctaactaaacactggtgtcagcaagacccgttaaccagagctcatcccacccctagaactgttaacaagacaatgacatacagtgcagggtgttaaatcttctaaggcagaatccttgtctttagcgaatggccatgaatcaactcaggatatgccaggatgttttaagatggccatatatttatttatgagtgaatgaccatttcggtatttctgcccgttacctttatggattttatgagattcggataacatttattaattgcccatactggtttccattcactggagctttggttgacattn

SEQ ID NO: 596714 - DNA, 943 bp, Homo sapiens
  misc_feature (26)..(26): n is a, c, g, or t
  misc_feature (64)..(64): n is a, c, g, or t
  misc_feature (76)..(76): n is a, c, g, or t
  misc_feature (153)..(153): n is a, c, g, or t
  misc_feature (162)..(162): n is a, c, g, or t
  misc_feature (190)..(190): n is a, c, g, or t
  misc_feature (201)..(202): n is a, c, g, or t
  misc_feature (207)..(207): n is a, c, g, or t
  misc_feature (213)..(213): n is a, c, g, or t
  misc_feature (237)..(237): n is a, c, g, or t
  misc_feature (244)..(244): n is a, c, g, or t
  misc_feature (259)..(259): n is a, c, g, or t
  misc_feature (297)..(297): n is a, c, g, or t
  misc_feature (313)..(313): n is a, c, g, or t
  misc_feature (318)..(318): n is a, c, g, or t
  misc_feature (322)..(322): n is a, c, g, or t
  misc_feature (330)..(330): n is a, c, g, or t
  misc_feature (333)..(333): n is a, c, g, or t
  misc_feature (339)..(339): n is a, c, g, or t
  misc_feature (384)..(384): n is a, c, g, or t
  misc_feature (390)..(390): n is a, c, g, or t
  misc_feature (394)..(395): n is a, c, g, or t
  misc_feature (534)..(534): n is a, c, g, or t
  misc_feature (547)..(547): n is a, c, g, or t
  misc_feature (554)..(554): n is a, c, g, or t
  misc_feature (575)..(575): n is a, c, g, or t
  misc_feature (583)..(584): n is a, c, g, or t
  misc_feature (592)..(592): n is a, c, g, or t
  misc_feature (597)..(597): n is a, c, g, or t
  misc_feature (599)..(599): n is a, c, g, or t
  misc_feature (602)..(602): n is a, c, g, or t
  misc_feature (616)..(616): n is a, c, g, or t
  misc_feature (724)..(724): n is a, c, g, or t
  misc_feature (863)..(863): n is a, c, g, or t
  misc_feature (871)..(871): n is a, c, g, or t
  misc_feature (935)..(935): n is a, c, g, or t
ttagggggatatgatgtatgagaggnaattccaataacataatgtacaaggatgttgtcacatncagaagagcaanaatctacgtattgggggctattgctgtggggaggcgggcctggtcttcatactcatcttcctcattgtgttccatgnccccttccncttcatccatactacaccatcatctgtnccatgttttgnnatgtnccaggngtgctgtgcaccccagtggtgtcngcggttngggttgggtgcgtgngatcttttataccaccatccaccaccgtcttctttagngcactgttttctgggntctgntgtnggccggcngtnattgtntctgtgatacgtgctggggagcatgccgttgtgaatggtcatggncctgtnttgnnccatcagctgggatgctccatccatgagggcattaccggctgttcctctgtatttgttcactgagatctggtatttgttggcttcattctgtacagtgaatcctccatagtgtgcctttactttgtctcctttccagtnctccgtttctgtnaggagtnctgtgggtcccatcctggtangctggctnnttttatcntttcngngcnaatgttcgcctggnaggccacagtaattcttcccatctgtgttggttgcaacatttccaaatccctgtttatatggatcccatttcctgccaaagtcaacactaccgtcttgacggttctgnatcactgtccatcctccattttctgtattcatgtcacagtatactctatacggtttgacagaactgtcaggttgaatgagatacatttcagatgtttcacctcctttcctgatattttcctcacattctttgccagacnccacaggnatattgccactgacagtgcatggggtgcgacaatattccatttgcgctgagacatcagattctnacttttgt

SEQ ID NO: 596715 - DNA, 265 bp, Homo sapiens
agaggtctgctactagtattcagaataggcattgacttagtggtcgaaatattatgcttcgttgtttggatgtgtgtagtatgggcattaaaattagacgaaaacccaaggcccgacatcgaagccccaaagcaacacacctcttctgaaacatgcaaaagaactgcccacccagaaatattcaacatcgagtctgtgcagacagaagagaccgacggccccacccactccctctgtaaactctggggctggcggtcctccaggg

SEQ ID NO: 596716 - DNA, 229 bp, Homo sapiens
tagttccacagaatactagcattcacactggaacgggggtaagaaccaaattattttctactaaacagggctcctaatgtatttactgcttgcaataatggttacacttttatgctctgtagcattattttaaaccattatgctatagtactattttgaagatctgagctgttatttccatttgtttttacccctgtgactaatttattacggttttagctttttagac

SEQ ID NO: 596717 - DNA, 784 bp, Homo sapiens
cggacgcgtgggctcggctcacatgtaagctctgcctcccgggttcacgccattctcctgcctcagcgtcctgagtacgctgggatccacaggtgcccgccaccacgcctgctacaactgcgctacgcaataactgtttggctacttcttgactgcacgactgacgagacgcactgagctaccacgtaaccaactagtctaaccaggtgaaacaacaggtgttgagggcttgaacatcaataacaccttcagcattcgcgtcggctaaagcacgatcttcatagcagacctttgactcacaggcaataccccaacttcaaccgtacaatagttgcttaacgtactattgtctaccttgctgaatacgacataacctgggactacccgaaccactacgacacacacagctcacacgccactcggcaacactaccgggcaacacccaacgcacaaccaaacatagaccccgcggctcgcaatcaacacacgcagacacgcacccacgaacacagctgaggaacctagacgaccctgacactgcacccaaacctagacaacacactcccgacagcattagggacagttcaccaagcgacgctgcacacacaattacctgcacttagcattacacttaggaaatacatatgggcacatacttaacaacttctgggcaccttattgcaatacttaaaggttgtcccctggtgcttacgcacaactatcaccaaatgtagccaatcaccgttactcaatctctggccccagacaacctggacactcctta

SEQ ID NO: 596718 - DNA, 172 bp, Homo sapiens
gctgccccaaaagctctgtgctctacctacttatgtatcttctcctccccctgaacccctggctatcactgatctttttactatctctctttttttttgcactttccagaatgtcatataatttgaatcatacagtatagacagcctcttcagactggcttccttcctttag

SEQ ID NO: 596719 - DNA, 1175 bp, Homo sapiens
  misc_feature (1175)..(1175): n is a, c, g, or t
acaaaagaagaataagacggggaagactatctcactaacagactttctgtctgaggatggcgtgcgtactggtcggagtgatagccacctaatgtattccagaaccaggtcacgcgtgcgagctgcactgaacatcggtatgtacctagcgacacggagtatgttatccgaccacgttgcgcacagatacacgatgacgatgtgtatagggcgccttccaagttgacgcgttccagtcgcttcccacttggctccatcgtggtctggctccgggaatcccagatattcgactcggaggcctgtcttcgccaaagtcgccaccctacactgcgttttctaggaaacctaccctatgatgttacagaagagtcaattaaggaattctttcgaggattaaatatcagtgcagtgcgtttaccacgtgaacccagcaatccagagaggtcgacaggtctcggttatgctgaatttgaggacctggattccctgctcagtgccctgagtctcaatgaagagtctctaggtaacaggagaattcgcagtggcacgttgctgatcaagcacaggataaacgacagggcatgatcgtacttttggccgtgactcacgaaatcgggattctgacaaaacagatacagactggagggctcgtctgctacagacagcttctgatgaactacccagcttagaagaggtgatgatagcctcggacgaccaagtatcgacgatccgtcatgaatcacgaccggcatcgggaatgcggcatcggggatgccactcggcgatggcacacgcccggggcatcttggacccggaaatgtgagcgccggaaaaggcaaatgaagaacgaacgcagcagagggaacctattgcaataaaacggccgccttaagtacccgccgggaatattggcccagcagctgactcagcagaacgcccatcttacggagcactgggcagaacacccagcgagcgtgaccggcaccactacagagaagacagtgaccgacagcgaagcaatagtcagtacgagccgagcaataccgacacgcggcagatcacgcctcatgggatcccaaacagagaatacactccagcggaataatcataccacaggaacagtagggggtcgcccaacagaactaaggcaaagctctcgatcgactatctacaan

SEQ ID NO: 596720 - DNA, 1142 bp, Homo sapiens
  misc_feature (398)..(398): n is a, c, g, or t
  misc_feature (1142)..(1142): n is a, c, g, or t
gttcctttcctgtgtcccagagcttcagtggtggagctggatgatccggatgctggcaggtgttggtgtctgtcagctgtgtgctgggaggcagactcagtgataggcgagcgtggaagggggcagtggtcagcgtgttgtagcaggcgcaacatggtgcggaggcgtcccttggatgcacttctgtccctctgtccatcagaatggctgtgcgccggaggtggcgtggattcgtgcacacatcgcgtgcagaggtgtgtctgccgtgccccaatgcctcatctggatgcttggtccctggtgtgagcttgagaagggggtatccctaggtttgaaggctgagggggctgaagctattcctgagtagacttcccctataaagacaccagcatgagatntatccgctgggaatgatgtaggacactacgaggtagtccgctgtgagtagggcttctggaatgggtggaagcaaagcttataagcgccccccctgttgttcagttaagggtaccgggccgtgtgagggctagcttgactaggagaggtgagctctggttgggcggtcctggatacccccgcgtccactatttgcgtggcccccttccgccgttctttgtcccagcaagttccctggtctccacggttaggatgtccgcatcacgttgtccctggcgtgggggatgggaggaccccgtggtagttgggtatggcgcgtccaagccaagagggtgtcctgacacccaactttccgcttaatggcatcgggcacgagcgaatatagggagcttcccaaggggaaggccgcatcagggtagaagtatgtgaaacccaattggagttaaggagtttgatcgtcgccaaggaacagttgtcgaggatgggtgcatgccccgaggcccccattggccccttaacggagcccccaatggtcaggtggggaccccagtaatatgctttggcatgaagatctgaggacattcctcgaggttccgaactgacaaaggctcgcctccgtgccccctggtaacgaaatacgcagggaataagggggacccgagagacaaaggggctcttgaagttcacaacctggacagcccggaaccacatacctagcacacggagacacatttggtggatttggn

SEQ ID NO: 596721 - DNA, 340 bp, Homo sapiens
atgtacacctgcatgagtctattcaagtgtaacttttacttagcctggagagactctatgtctatttgtgttgcagttccactttgatgccaatgactagctttaccaactcgttcttgattggaaactcccttggtgaaatcagaaccagataaggctgatcccttttcctttgaaggtcctgagattgtggactgtgacgggtgtactattgactggaagaaaggaaagaatgttactgtcaaaaccatcaagaaaaagcggaagcataagggtcgaggcactgttagaacaattacgaaacaagtacccaatgagtcctttttcaacttcttcaatc

SEQ ID NO: 596722 - DNA, 255 bp, Homo sapiens
gtgggggttttgccccccccccccccaaaaagggcctcttccttttccggggtgttttttgtggggggggggggcccccccccccccccgtttttttttggggggggggggggttggggggggccccctttttttttttttccccccccccccggggggttttttggcccccccccccccgggggggggaaaaaaattttaaagggtgggggggggaaaggttgggggttttggtccccccccccccccggggga

SEQ ID NO: 596723 - DNA, 1304 bp, Homo sapiens
tctcactgtcgtaggaatacgtagtatatcggctcacagcctcatagtccgtccctacatagtgcctagagaggaataatactagtcgcgtgttcatctatacgctactcatcagtacacgcgctcgaacaccgcactcccctcgtatacccacactacttgctggccgtattgcccagtacctacgctctttgagcccgacctgccgaaaggcagccgcgctgcggccctacgcccatacatagcttcctcacactcgtccaaggcacactactgcgcccctagcacctaacgctacactacacccctacacacccctacctcccaactgccttaacacacctacactcgctcccacacacacactctacctactacaacttaacccacactgaaccacctgcacactttcccacacacaccaaccaccactacccttctccgaactccaaccacaaacacacccccaccatgcccttcacagcactctatccccactctcaccactgcccctccttgcctccccaaacacaaacacaccccaaccccacaccacaccacaacaacacaccaccacaccaccacgcaagagcacaccccccccaccccaccccccccccaacaaacaccacctcccacacaccaccccccccccacagcgaacgcccccagacgcccaccaccaccaccaaccacgacccgcccgcaccaccagcgtcccacacccaacaccacccgtcccccacccctacaagccccagccaccacctagcggacaccaaccgcccaccaccaacagagaccgacgacagaaacacccacaactagccgacatcaccacaccaacccacccccgcggcacaccccaaccccagaccccgcgcccattcgccacaccccaacacaaccccccacaccccaccacacccacaccacgcagccgccactcccccacacaccgcggcaaaaccacaaccaaaccacgggcacaaccaccaacaagccgcgagacccccaaaaacttcccacaacattctactcacacccccaccaccaccaacgcacacacacacacacaccaaacaccaaaaaccacccacaaccaccacccacacaccccccccctccccccctcctccaccccaccccgcccacaacccacccacacccccacaccacccctcaccaccacccaacacccacaccacaaccacacaacaccccccacctacccacccccaccctaccccacactacacacccacacaacaccacaccaccacacccacccaccacaacaccac

SEQ ID NO: 596724 - DNA, 101 bp, Homo sapiens
agccgggtattcaagcttcactcaaagggcgggtattaccgggttattccccagaaatcaagggggattaaccgccagggaaaaaaacattgtggagccaa

SEQ ID NO: 596725 - DNA, 157 bp, Homo sapiens
  misc_feature (6)..(6): n is a, c, g, or t
acgtancagcacaggtatataaactttgatatagcttcagcaatccctagtagtattattttgaagtttcgatctcagctggctggctagatttcctaacttccagctaactctttgtaacttctttttgactgccctcatcctcgctttaagcttc

SEQ ID NO: 596726 - DNA, 224 bp, Homo sapiens
gcacgatcggagatttgatgccagcctggccaacattgcaacaacccgatttctactataaatactaaacatttattctgggacttctggcttaggacagctccctccagctactctggctgctgaggcacaagaatcatttgaacctaggaggtggcggttgctgtgagccaagatcatgccactccactccaggtctgggcgacagagcaagactctgactc

SEQ ID NO: 596727 - DNA, 939 bp, Homo sapiens
atgacacgaggaggcacagggagatgcgcggttttttccgccccccccttgacaagtgggggtgactaagctgtgcctaaagcgtgcaggaacgcagttctctaacagaacgcttgttaaaaaaggtggggtgaccaccacacgggtagggtaacaccacatatgggcgcaccagaacgggggggtaaaaagcccctccctggggtgcatcatttccccccggcagggtagtccgccttcaaagaacggtcctttgctcctcttgaaaggaacctatcggtgcggacttccccctggcggcgcaaacatagtctggcaaaacacacgttggtgcacagccccgcactaactctgtcccagtggaagacggtcgtttaccaagtggggcagaaaaggaccgtcggcgtgcaaaacagcgggggggcacattccaccccgggagctttgatgagctccacattaaaagattagaaagtacgcctcgctcacgggacgtagtctgacttgacctccaaggccgagtgagtgactggagtgtttctaccagtaataagacctctgtttgtaaaattgtgaagcaaccgatcaagcagcgtgccgcccctcattaattcaagccgtggggctcctcacacacaaggtgactcgttcctccccgcatcttcgctcctgattttcttgtctcaattcatggattttttcgaggcttgtatattgccattcacggtacatcatttttcgcttttacccccacaatccaagcaacaaccttgtacctctataatagatccttttctctagcatctgtcttgtatgcccactccccttcttttgaatcaaggcccgaagtcttcttcccttccttccgcgcaggaaagaatggatatcaagaaaaaaaaactcctgtgctccatcccaccgaggcaacaacaaaacaca

SEQ ID NO: 596728 - DNA, 343 bp, Homo sapiens
tgccagctattggcattcacggactcattctactttatatggtgtcaggcttccaatacgactcttatgtatcattcggcagctccacgccactcgcgcactcgatccatctcagtgcatttttgggttactccccatactcctttatcgattgactcttgtccattttttcggcacgttcccttcaccgtcagatttatcgcccctgactgcacatcaggaaagatccaggcatccactacccgcacgcctttcagtccccaaaccattccttccagattgtccaccgtacgctgatctccctcctgccccatgggcgctgtacaatttgcatcgttgtacg

SEQ ID NO: 596729 - DNA, 260 bp, Homo sapiens
gtaatcccagcactttgtgaagccaaggcgggagcatcgattgagcctagcagttcaagaccaaccttggcggcataagcgagaccctgtctctacaaaaattttaaaattagccaggtgtggtggtgtgcacctataatcttagctacttgggaagctgaggtgggaggattactcagcctaggaggttgaggttacagtgagctgggatcacaccactgcccttcagcctggggtgacagagcaggaccccgtctctt

SEQ ID NO: 596730 - DNA, 391 bp, Homo sapiens
tgacactaacagctataaccatgcactggccgtcgaataacactacactagatataaccatgcactggtgcgtcgtttaccacaaacaggtataccatgccacaggccgccgtattaatcgctcagacagaaatgagcatgccaggcgggatgtgacacagtaaggagacataccatgcttggcatgactgcgggcggagcatgctctgacatcgcgtagctagcaggccaggaatgctgctaaacatacgctcaaacataccttctaggacagggctgctgtcctacaaggtacaggcagagcccctgcaaggaagaatcacctggccccaaatgacagtagcgcccaggttgagagcacctgtcctggtgtgataaatggtgcaggggg

SEQ ID NO: 596731 - DNA, 161 bp, Homo sapiens
ctcagtcggctcatgatcaggtaggtggttatgcgaggtcttgatgtaccagtcgaaacgagaggttgcctattgacgtggtagcacttgagattctttcctgagactgccaattgaaccgggactgtcatcactgagacttcatctgggcgcggtacccg

SEQ ID NO: 596732 - DNA, 173 bp, Homo sapiens
ccagtctcatctctggaaagtactgatctctctctccccattctcatgcgtaaaatggggaactaacggcacgctcctccatggccatcagtacgggcacgtgagttaacgctgcagagtgccaggactgtgtgcagcacacaccacgtgtgcaggaagcgctgaatacttct

SEQ ID NO: 596733 - DNA, 508 bp, Homo sapiens
gaagtgctggcataacaggcgtgagccacgcgcgcgactacatttttgtgttatacgcagagacgtggtttcaccatgttggacaggttggtcccctgacctcaggtgatccacctgcctcggcctcccaaagtgctgggattacagacatgaaccactgtgcccggctgatatggtcgtctcttgtaagagcttcagcattacttaacaataacaaatgttctaagtaatggaagattatctgaaaagaaggatttaaactccatctgacttctcagttacatttcacgacatagcattttattctgatcgtggtgaatcatataattaccatttacaccatttttaagagtacagttcagtgacataaagtatattcactgtgacgtgtaaaccagcatcatgacctattttctaaaactttttctaacattccacactgaaactttgaagctgttaaatagtaactaaatatttcccccttgccttcattctctggtaatctcaa

SEQ ID NO: 596734 - DNA, 474 bp, Homo sapiens
gtcgacaatttggataattttgccacattatgttacttatcttttaagataattggttttatttattttcgagaggtttcaaatctatattttaaaaactctaaaaattgggacttcccttaactgatacacataaaatagctcttaataatattgtagtcataccccatttagacaaattcagttgggatagtgaattagtcatgatgaaagaaattattctatagtttttaattgctttcattcatagtgtctcttccaaggattcattaccttctaattcatccatctatccatacattcatccatctatctatccatccacctattttttcattcattcatgaaatatgtattaagtacctactatgtttcagggaatgtgcaagggaatgtctggatgggtgagaaggtgtcataaaagtgaataaatcatgagacttacgactctgggagacagtaagaaaaaatgtt

SEQ ID NO: 596735 - DNA, 555 bp, Homo sapiens
caaaaaaaaaggaaaagcaaatccatctgatctcctggagctgggacactcttctgcctgtggacatcagagtctaggatttctagcccttggactccagggcatacaccagtggcctcccgaaggatctaaggattttggccttgaactaagaattacaccatcggcttccctgggtcttaggtttttgggctggattaagtcctgcttccagcatttcagggtctctgctgtgcagatggcctgttgtggaacttctcaacctccattatcagatgcattaattcctccaataagtcccatttcatatatagtcatttaccccacaacatttcagtcaagggaacagcatataagatggtggccgtccagtaagctaaggttaatttattaattatttaatttatttaccttgagttcaagtcacaattaaagtacatatacctttggaaatttggacttttgtatataaaagtacttttttttggcgggggcagtgggcagctctcatcctaaacaaatgtgttatttggtacctatgcaaagatttggtta

SEQ ID NO: 596736 - DNA, 791 bp, Homo sapiens
tcaccacccagcctaccgcccgacgtggtccttgccctcaccacccagtctagcgcccgagtggtcctttcctctcatcacccaggctagcgcaccgacgtggtcctgtgtcctgtcgatcgacacacaggcgctaggcgtctcggacgatggctccgtgtgtcctgttcgatcacgcacaggacgttgagctggcaggacgatggctgctgttgtcctgtcgaatggaccacagcgctgagcgtgactgaaggtggtctccgtaggcccgttgcatggaccagaatgacgcaggacgtggcgcacgaaaggacgagtcatacgtagggcataaggaccggtcgaccggagaccacttgagggggacgatggaagcgagcgcgccagaaagaccgcgcagcgaagttggccagcgacaggcagttaggggacgcgatcaccgtggacgggttactcacggataggtgggtccacgtgtgaattctgacgcgcgaaagcgggactgtgttgagaggaggggatcgaaaaccgctacagagacgtcccacggggagtgcgcctttcccagatgcaactaatacacaccccggcccaaggggcccttgttcgccccaggaagatgacggaaacccccaaggcgtgattcaccgaacagggccagtcgcccaggaaaaaggcacagacggcccaagtgggcagatgatgcccccgaataggagccggaaaacccccgttgggtacgatccacgaagggcgggacagccgcgccgcgggaaatggccacaggcgcg

SEQ ID NO: 596737 - DNA, 297 bp, Homo sapiens
tcgagctcggtaccgataagggggcaacaaacatgaaaaagtgatcatcactggtcattagagaaatgcaaatcaaagccacaatgagataccatctcacgccagttagaatggcgaccattaaaaagtcaggaaacaacagatgctggagaggatatggagaaataggaatgcttttacagtgttgatgggagtgtaaattagttcaaccattgtggaagacagtgtgatgattcctcaagaatctagaaccagaaataccatttgacccagcaatcccacttggcccttatcgag

SEQ ID NO: 596738 - DNA, 451 bp, Homo sapiens
caaaaaaaaaggaaaagcaaatccatctgatctcctggagctgggacactcttctgcctgtggacatcagagtctaggatttctagcccttggactccagggcatacaccagtggcctcccgaaggatctaaggattttggccttgaactaagaattacaccatcggcttccctgggtcttaggtttttgggctggattaagtcctgcttccagcatttcagggtctctgctgtgcagatggcctgttgtggaacttctcaacctccattatcagatgcattaattcctccaataagtcccatttcatatatagtcatttaccccacaacatttcagtcaagggaacagcatataagatggtggccgtccagtaagctaaggttaatttattaattatttaatttatttaccttgagttcaagtcacaattaaagtacatatacctttgga

SEQ ID NO: 596739 - DNA, 1648 bp, Homo sapiens
agcggactccctccacatcccgcgccgccgccgacgactacctaccacctacctacctacacgacgaccgccagaactactacacaacctaccgagcagacacgcgaacagcaaggagcctacccagaaccacacaaaaacaacgacaacacagaaaagaacacaaaaagaaagaacaaacagacacacacaacaaacaaaacacaccacacaacaaaaagagaacacaccagcacacaacacacacccacaaccacgacccatgacaaccaaaagaagaccacacacaaacgcaagacacgaaagacaccaaagaaccaaaacaacaacaaacaaccacacaatacacagacacagaacaacagaacaaaacacacacaagaagaagacaacacacacacaaaaaaaacaaaaacacaaaaacacaagaaccacacacccaagacccacacgaaaagaacaagaaaaaaaaaaccaccacccaacacgacccacacccacaacacaaaccacaaaaaaaaaaaaaaacaacacaaccaccacaaaacaaaccaaaacaaaaaaacaaaacacaaaaaacaaaaacacaccaaaacaaaacaataaaagaaaaaacacaccaaaaaaaaccgagcacaacaaaaaaacaaaagaaagaccatgaaagaaaaaacacaccagcacaagcagaaaaacgcgagagaacaggaaaaaaaaaaaacaaaaccaaccaagcacagaaaacaccaggaaaaagaagcgacaaaccaaaaacaaaaagaaccaaagacaaccacgacaaccacacaacaaacaacaaaaaaaaacaaaaacagacacacaacaacacacacagacaaaaaaaaaaaacacacccacacaacaccacaaccaagacgcaaaaaacaaaaaaagaacaaaacaaaaaaacaaaacacacgcgagaaacaagacacccaagcatcaaaaacaaaaacaacagacacaaaaacacaaaaaaaacgaacaagaccagaaaagcagacaagaaccagaacaccaacgacaacaacgacgaagcaacagaaaaggagaacaccaacacaaacaacagcaccaaagaaagaacaaaacaaaaaagaaagaaaagaaaaaacaaacaacacaagctagaaacacacaaaaaacaagaaaaaccgacaagacaaaaaacaaaatacacaacacgaaaaacacaaagaacaaaagaaaacgaagaaaaaaacacaaaaaacacacacaaagagagcaaaaaaccgagaaacaagaccaacaacagcacagacacaaaggagaacaaaacacagaccaacaaaagcaaaacaaaaagagagacacaacaaaccaacggcagacagacaaacaggcgaaacgagaaaacacacaaaccacacaagacaacacgacagaaaccacaaacaacaaaacaacagcgagagaagaagaaaaaaacaggacaacaacgaaaaacaaaagaaaacagaaagaaaaacacaacaaaacgaaaacagaaacaacggagacaagcaccagaaacaaaacaaaacaagacacacaacgaaaacccacagaaagaacaagaaaaaaagacagaaagaagaaacaagaaacgcacaaaacgcacacaaac

SEQ ID NO: 596740 - DNA, 627 bp, Homo sapiens
  misc_feature (289)..(289): n is a, c, g, or t
cagtgcagcctggagagcctggaacctggagtcgcagtcggcgtgagacccctgttgtctgtgtgctggagtgtgggctggctgtgatcccgacctctgaccctgctgcctgggggtgggccatggcgtgagatcagcgacctggacctggcatgatctgatgcaggcttgcgtctgcttgcgagctcatcaagtgagagctgaatgtcaaggccctgtgctgctaagtgccatgatgagatcttggtagagtgatgagcaacgtgcagagggtggactcgccagtcanatggtgcggcgacatccatggacattctatgacctcaaagagctgttcagagtaggtggcgacgtccctgagaccaactacctcttcatgggggactttgtggaccgtggcttctatagcgtcgaaacgttcctcctgctgctggcccttacggttcgctatcctgatcgcatcacactgatccggggcaaccatgagcagtcgccagatcacgccggtctatggcttctacgatgagtgcctgctgcaagtccggctcggtgactgtgtggcgctacttgtgctgagatcttttgactacctcaggctgtcgccatcctcgatggcaagatcttctg

SEQ ID NO: 596741 - DNA, 184 bp, Homo sapiens
tgggctcagtcgatctgtcaggactgcctatttcaggacgaagattatgtattatatgtggctatatttactagagcacctgtgtgacctctttctaagccaggtactgtctggatgacttatgcggtgggggagtgtacaccaagaacttttcatctattatgaaggcgacttaaactgtgtc

SEQ ID NO: 596742 - DNA, 102 bp, Homo sapiens
caatataaggttaaaacttatataagtaacccttcccttatcttgtattttcaattttttttaaaactgcttttccaaatatgagactatgttaaagcccct

SEQ ID NO: 596743 - DNA, 423 bp, Homo sapiens
cggggcagccatgtttgccatgatttcgatgccgcgggctatccgtgcggcggtgacagctatgtctggacaacacccacgaacactggccatcggatttgagaggcttgtctcactcgagacatatacgaaagctgctgctcctgttcgacacagcgtggaccatgaggactatttgtgatgagaccttatagagtctacgacaggcggtctttgaagctattgagattatacattgcattgactggcattccagtagaaagttacataactctggagaatgtattcattggtcaacgctgactagctgaaattccagaaggctatggcccataacactgcgactattataagcatcccatagtaagatggattgccagaatttctatgaccgacctgcgtattacgaagactgccgccccc

SEQ ID NO: 596744 - DNA, 286 bp, Homo sapiens
aactgactcagcactaacattctagtttagtttttttctttcaagagcgtgtctcattacagattattgtgaaataactataaggacttgattttttacagtattgtcttttagacactacttgagaactaggtacaacatacatcatcagtcacagtacatttatatcttgaggctgcattttgagatgagaatatgtactgtgatgtgtactatcacctttgtgtttctcacttgtttgccatggcccagatagctggtcttggctttactttgctgatgtgtt

SEQ ID NO: 596745 - DNA, 636 bp, Homo sapiens
ttttgtagtattccattaaccttatttctcctttattttatttttattttcttcttttttactttttgttttttcacacatttattccagtttattatttagttggtaaaatctaacaccgccacaaatcctaacctgtgttgaatgggtcttaccttctgggaacaaaaacctgactcgtatcaactcctctggtcgtaggttgttcggggaaacggagccttaactttttctaagccttctgggtccaccctaatttcggagcctctatttattgaactttggggaaatgttccataaccctccctttgggaattttgggccccaaaccccaccaattggaggggggggaaatttttgggggggggggggggaaaaaccccggggccctccggggggcccaacaaaccaaaatttataaaaagttttttaagggtttggggattttttccccacaaacccctgtgggaaaaccccttcttttttttacccccccccctccgggggtttttttaaaaacacttttttttcccaccaaagaaattatctggttataaaaaagggaaattaatacccaccctcctctttttttttttttttatagggccccccttttttggggattatctccccccc

SEQ ID NO: 596746 - DNA, 168 bp, Homo sapiens
  misc_feature (27)..(27): n is a, c, g, or t
ttaaggagaacaaggacccactcgccncctccaatgtgtatccctgaggaatgttgtagaattccgggcagccccccaaactgattccatacagtgtagtaagttgaggaaggcctcatggcattgtcaatgtctccaatgaggctctgaagaccgggccagtaggcc

SEQ ID NO: 596747 - DNA, 152 bp, Homo sapiens
aagctaataccttggcctactggtgttcagttacctgaaccacatcgggaaccttaagttgtagtaaagacctcgggacatggttgcacaccggtgtataagacagtcttgggacacactagtaccagacctagacgttgagcccggtccgg

SEQ ID NO: 596748 - DNA, 371 bp, Homo sapiens
  misc_feature (194)..(194): n is a, c, g, or t
  misc_feature (277)..(277): n is a, c, g, or t
agagaaagaaatcacatatgcaaaatattaacaactgcatctcggtgaagaggatatgagactcaatttcttgtaagcttaaaaattttcaaaataagttggggaaagtaataatagagaaagtaaacagttcaagaaaaacaaacactattttatgcttattaaaaccagttccttccacctcactgtagttntgtgtttttaacttccagtgcttgcaaggcatgggggaagctggtaccagtgaattacccagtggcatgacccatgggctaanctggacagggccaagcatgcagcaaatgcttaatcaaacatggaaaccactttccatgctggcttgaggcggcattggccctggattctttttc

SEQ ID NO: 596749 - DNA, 180 bp, Homo sapiens
ccgggtacggggcaggcgcatcgttgtcactgacatacccttggagacgggacgctgcgagtgccttgacctggtgcagccctggagatcgtatcgtagcgctaggccccccacatgcgggtgcgccctaactatcgtagtcccaataggtagatagcgtagtgacacgatgctactata

SEQ ID NO: 596750 - DNA, 290 bp, Homo sapiens
  misc_feature (48)..(48): n is a, c, g, or t
  misc_feature (65)..(65): n is a, c, g, or t
  misc_feature (71)..(71): n is a, c, g, or t
  misc_feature (85)..(85): n is a, c, g, or t
  misc_feature (88)..(88): n is a, c, g, or t
  misc_feature (100)..(101): n is a, c, g, or t
  misc_feature (110)..(110): n is a, c, g, or t
  misc_feature (115)..(115): n is a, c, g, or t
  misc_feature (245)..(245): n is a, c, g, or t
  misc_feature (281)..(281): n is a, c, g, or t
ttgtgtcctggtatttttggtactcggacaccaggtcgttcatgttgntctcggcctcggtgaantccatnttgttcatgatctngcncgtgtaccagtnnaggaaggcnttgcnccggaacatggccgtgaactgctcggagatgcgcttgaacagctcctggatggccgtgctgttcccgatgaaggtggaggacattttgaggccgcggggcgggatgtcaaacacggccaccttcacgttnttggggatccactccacgaatagctgctgtttttgntctggatgg

SEQ ID NO: 596751 - DNA, 1444 bp, Homo sapiens
gccgacgttgccggacctccagcagcagtcggtcttctctacgcagaaccctgggagtagtgagactcacgaatccgaatcctcttcgtccctcacccttcttgtgagatttctttcttgatcttcacgctacgattcttcggtgctttggatgagaaaccttaccagtcaaatcacagatgggccaggcagacgattaccagaacaagaacagataccatcggctaccaatggaacatcgccgatgttatttcacttggagagatctgcaagcactccttgctcgtgtcaagcaaactctgactgctcggacggcaagtgcgttcttgcgacagtactggcagacacttgttgtcggcggctgactcgtgttccactaaaggggacttttggccgtgcgcattcagctcagtgttacaatgacgtacgaacactgcccggcagctggctggtagcagggagcaggactggcagaagggactatgctgggcccaagcgctcttgtacgactaatctaagcctggagcgtgacacgaagccccagagatggacacccggacggcacacagacgccacgagctgatgaaaaccagaatctcgcaggcggagagcatcggctacggggatcgacggaacaccaagaacaggccctttgggtcgcaggacaccgcagtctaacgtcaggcgtcccttccatttttgaagctatgagacgctatgcacgtttcaacacgcggcaggtaaatagatagagtacgaggactggatagcaaagaaaaccgcagggcacggttgataccctgcacataccttcgctccctaatgcggcatccggggccgcgaaagaaggcacatcgacacacacgaaaaggacggaggacatccacggggaagcgaaccccgcacacgacacagagggcacaagaacgagcggcccccaactgccaaagacagcggacaagcgagcggaatccgtccccacgacacaggcaaacaggaccgacaacgacgagaatgacacccaccaacagggcacacggcagcaacaggggcgtgcatagacccccagtgacaagaagacagacacaagagggagactacagcaccagcccgtgagaaacccggtgtagcaagcacagtgcgacacaggagcaagcgccgcacaaccaacgcaacgctaccaaccgaaacgactagtcagacactaaaaagggagcaaagcagccacgagcccccaacacagaaggaagagagacaagccgacacaagccagcaaggaggagccaaaaacctccagaggagcgcgggaacagcgccgaacacacagacagaaaggagccacaaacgagacacacacgagacgaagagcgtgcagcagcgaccaccgaacctgaacacagccacagcaggaagagaaccaagaactaggcagaagagcagcgct

SEQ ID NO: 596752 - DNA, 222 bp, Homo sapiens
  misc_feature (142)..(142): n is a, c, g, or t
tgttgtgactcgaaaagtgatgaggggatcaggctgggagagcggttctgagctgcagaagtcgtcgtgtgctgagcatgggctcaccttggagtcttcttgaaggcatagatacggtgataggacggttacagaggtactngccattcatgggttcaattgctgcatccgaagcatcaaatgaagcaaaattaatacaggcataacctttggagtttgctg

SEQ ID NO: 596753 - DNA, 1061 bp, Homo sapiens
  misc_feature (758)..(758): n is a, c, g, or t
ccgcttatgtcctggtcttgtaataataagcggtagagaggagagctccccctaatactgttcttccatgtgcagtgcccagttgttcatgtactagctataagatcacacggtccatttgagttcacatctcgtaaaggggtgtacaccgcagtgtgagtataagcttgacccttagagctgggcatgaccgagatgagttgcatgatgcagacttgggagtagggtaacccctgggatcccctctgctcggtaggagcgagctatattagattagatagaggcgaagaggactacagtcatcccagtttactaaatgatgcgagagccctctaattcatggcaaatctattacaatgaaacgtggagtatcctatacccttggataatatatatgcaaccactatgtgttatggaagcatcctgggtctatatatcacacccagtatgcttagacttgtaccagaccgtgtgtaggctctgtggcaaaccaagcccggcaaggtgtgagactcttttggttgtgggccccctactaagacgggcattgcgtaaggaatacgcactccgcgcgtagataatacacccattatgatgtggtaaaagcgacatgatccaccatggccgaaaccgagcgaacagcaccataccatgatgcgcattcggtatacaagatttacgtggccatggctgttcttgcgacaaccaagtgtgctctagaggcggcgttccccacaaaaagacgatgggggggctgngaggctggctacaacacgcacataacgacaatttccgtaggcagggcaccgcccaatataggcccgtgcggggtttgaaaatcgcccgtataaaaaataccgcgacagtgggggacccacagcaacgataaaatcttgctcggagcaatgacaaaacgcaaccgccggataaacaggcccatctggtatttggaggagacacacaaggggtcgacattgtgtcccacttggagacgctcggagagcatatccccctggaaggcctcttcctccgtagtgagctgttgcgccctcttttcgccg

SEQ ID NO: 596754 - DNA, 304 bp, Homo sapiens
gtgggtagtgtggtgccgaaagacaacttataaagtgaacatcccaatggacatgctgaccggtagataagaaatagttctttgtgtgtgaagccctttagcagaagacatctgttttctagcagcttctggccacttctgcatcttcagggtgtcctgggcagggagttgtgtcttccttatttcaatttgcagttagaaaagctgggagaatgcttctcaatgtgctgggcacctgtactgcatgaatatatgttttagtttatgtttatgcatttacagttccacacccgaacaggaggag

SEQ ID NO: 596755 - DNA, 279 bp, Homo sapiens
gagaggggactggagtagttattcccttcggcaggtactgatgagggttctttgttgaaaatgctcaacttgtcgtactttgtagagttagtaagtgtcatgagtggagaaaattaagtgaaagttatgaaaatctaaagtaatatcccattttacaaagggcactgctgtcacctttgatttacaagaaaaacttctggaagaactactacacgtgggggcaagacacgacggaggtatgacccaagacagtgaaatgaacccgcagttgaaagaccg

SEQ ID NO: 596756 - DNA, 285 bp, Homo sapiens
cagagatgatgccacggcactccagcctgggcgacagagcaagactccatctcaaaaaaaaaaaaaaaaaaggttgttgaattcgggcggggcttttaaatttccgggcccgggtgatttcggtacctctgtgggcaccggggttactgcccttcatagggctctgcaataaccctcttcctcaattatagcattgggccattgtctctaaattctctttaccaaggttttaagggggccgtgtaagagctttcaccatttggaacatgtacaccctgcgggtgg

SEQ ID NO: 596757 - DNA, 298 bp, Homo sapiens
ccgagcatcagttctgcgatcttcggattgcactgtcttgtggttcttcgttatggactctacacttgttgtgaacgaggatcaagccatcgaagaagttgacattgaaaaataaacctgtgttgtcatttatgatgagtatgactggggatttgaacatcaactcgtggagaaggatgacctccttctatccgtgcctcctcctctgtttcctgacatcttttgtgattcttctatctctcattttccttgtgtaaatccttccatggatgcatctgctttcgatcattcgtacaac

SEQ ID NO: 596758 - DNA, 1076 bp, Homo sapiens
catggctgactcctgtacgtagtcacggtcttgtgctctaaggaagaacagaacagcacgtgttcttattcagcatagtagaagtgacgttggtttcttgtaggactactttgaagtccatttggtaagtgttcccagtggagagcaagatgacataacaaatcgggctcccttatttctgggaacctattaggacaagtctcagtacacttagatctgtacaacaaggcatgaagctatgagcgctatgatgtgttagggcacgtttgcacaatccgaacaatatagtaacatgtcgaaactcgtggcatactattgttacagtaaacttatcaataacgagaactgcaatcaaactgaatactcgagttcagcattagtctccttctctaggtatgcgatctccatgttctctagaaatcgaggactggtgggggcgtgttcgaacacagaagcgggcgagtacagacgactccttaacaaggccgctatttacgtacatctcgcaacaggacttacgttctcagtgctcaaaacatggactgctctatgttttatgcaccttcgataaggccaggtgctcgtgtgctccccgtgtttgcaattaagattcctggaatgcagtgggatacttcgtagatgacacagattacaatcgcgttataatcgatggaatgttctccatatgagagagtggtatctttatccagagggtaacacaagaatcccaaagacgcggtattcaggccgagttagagaaaaggtggatcctagaagggacacctggtacatttctcccttgatcgttgaatcgtgggtattaagaatagccacgttattgccgaaacaacggcagggccccgaaggattgttccccctacacgtgaggcgacaccctaattgtgtacaacctcagggcataccttggtgtggacaaatttctgtggcatacaaaatgcacctgggtcctgggaggtgatccccaagaaaaagcacggctctttgggaaacacaaaagccggacatgtggagttggttgtaaagtcgcagatccctttgcctagttttaacaatca

SEQ ID NO: 596759 - DNA, 239 bp, Homo sapiens
cccaacatggcaggaaaaacatattaaatagccctattttgtaaaaactgaattttatccttgaccttttagcttcttgattaaaacttaacctcaaactgacacaccaccaccaccattcccatcctcgtgtgtgtgtgtgtataaaatcctaaaaggaaaatagtctctataaagtagtgcttaccctacacattttcagacaaatcctagaagttattgtatcctataatcaaaag

SEQ ID NO: 596760 - DNA, 361 bp, Homo sapiens
  misc_feature (261)..(261): n is a, c, g, or t
  misc_feature (304)..(304): n is a, c, g, or t
  misc_feature (319)..(319): n is a, c, g, or t
ccacccccaatccttccactctgcataaactttaaagcctcacttccaatgccttctccaagctagatgtgctaagaccttcttgatcttataccgccgtcatggactcctgagatgagggtgtgacatggcggactatcatattatttatttataatatgaaatatatctgggctttgtccctggttcctgacacatcccctaaaacccttgaatttcctgggttatacgtaatgggtctctttgtttacacctgatttnataataaggaggtgactcacgaccggggccctacataaccttnagattgggccattcnccacagacaccaattgattggaagattggaactttcattccc

SEQ ID NO: 596761 - DNA, 1229 bp, Homo sapiens
  misc_feature (268)..(268): n is a, c, g, or t
  misc_feature (623)..(623): n is a, c, g, or t
ggcggtgtgcgtgaactctctgaggaaccaaaccatcttgattattattctcagacgctgcgtgtcaccaagctgactagaatacctaaaaatccaggactgcttggagtgctcctggaggaccatacctaaggtcgccttcacagatatggcaatcggaaaggtcgtctgtgctgggggttaccacttcagatggccgtatagcgattcagtcattgagttggttgttgagacaaggccacacggacatggaaactttgttgcgcangtctcgagtccatggtgggtccacaaggactcttggcttgtagaggcgcattgcacgaggcgccttggagtcggccattttatttggacgcctggaccccctttggtggaaggcttttgggtccttgggcgcccccccttatgggtggggccaatgcctttctttacctcgcttactctcacgtcgttttctaatgtggcgagcccatattgcacagggccagtacagacaagcacaagaacactcgtgtaagggcgaatgcgttgctatgggccgtgaggccccttttctaacccatgtctcatccactcgtcattgggagtaagaattgccttgaagttgaaagcggggaacnaaaatccaagtcattgtcaagcccttagaggacggaacccttttacagcaaaatggccttggttggccatttagagaaatttggggaaacctttttggaacttcggtttggccttccccgatttttgaccccccaggcggaacagaggtttccgggccccccccccaaaggatgaaaggcggtttgggcacaaaacccgttttccacgaagggttgaccattggggacatttttaacccgcggaaggagggaaacaccttccgtttccgaatttcccaaggagggaaaaccctttttcgatttgagggaaaacccttgggaatacactttgagggatttacccatatgggggaaaaacaaagcacaaaggtgtgtccccccaaggggataccgattgtgtttaaccttttccaagtttttttccacaagggaaaaggcccccagtgtacaacaggcctaaggtgccattccgaaatgggcccccccagagtggaacgcctagaaagaggaaaaaaggtcggaaaacgaagggttacggcaacttgcggaattttgggaaaggccaaccaagggacagtggtgcacaggtaaaggccaaggggccgc

SEQ ID NO: 596762 - DNA, 212 bp, Homo sapiens
aggtttcaaatgccagtgaaatgtatacccagaaaaatgatggaaaggaaaaggaacatgaattacatctggatcagtcccttgaaatcagcaacacacttacaaatgagaaaatgaaaatagaagaggagccaatgacagggtagggagatgaccagtggtgcaatgatgggagatcatgaagtctgggaagcatattgacccagtgggaa

SEQ ID NO: 596763 - DNA, 430 bp, Homo sapiens
tttagagagttagtgtgagagagatagagagagagagagatagagagagatatagagagagagatcgagagcgccatagagagagatttagtgtgagtgtgtgtgtgcctcttcggtcacccccttttgttatattctttgattattctccttcttatgtttttacctttttttctctcttatacccttcttctttgtgccctattttcctactctttttgttactttattttctgttctcctgttgtcactgcttctttccctttttcttttcttttttttttgtcttttctatttttttcctttttcttttccttttctttctcttttctttccctctctttctttcttccctttttttctctttttttcttttctctttcttctctttctttttcttctcttgtctttttttttctcccttttctcg

SEQ ID NO: 596764 - DNA, 390 bp, Homo sapiens
  misc_feature (143)..(143): n is a, c, g, or t
  misc_feature (166)..(166): n is a, c, g, or t
  misc_feature (179)..(179): n is a, c, g, or t
  misc_feature (190)..(190): n is a, c, g, or t
cagtcctacggtgagtgcgggcgatctggtcctgactcgatcggtcagtgatctctgctcagctccgagtagtgggattacaggcaccaccaacatgctggtaattttgtattctagtagagatggggtttcaccatgttgancatgctagtctcgaactcttganctctagtgatgtngccacctcganctcccaaagtgctgggattataggaatgagttatgcacctgggccctctgagcttctttatgggcatcagataattgtattttattttaacagtagttttatttctctgattatagaggtatttatgtcaaaaaattggacttggacactactagtatgctacacttgttgatgacacaagtgagtcttttttcagtgag

SEQ ID NO: 596765 - DNA, 672 bp, Homo sapiens
gtatcccctgtctctaatcatgtttatgagcggcggctcatcgagaagtacattgcggagacatggtaccgaccccatcaagcaaccaggcctactctccgaggcagcagctgcatcgactatcaaagttgctcacccaatccggcccaagcctccctcagccaccagcatcccggccattctgaaagcttgcaggatgagtgggatgcagtcatgctgcacaggtttcactctgcgccagcagctgcagacaacccgccaagagctgtcacacgctctgtaccagcacgatgccgcgctgccgtgtcattgcccgtctcacgcaaggaagtcactgctgcccgagaagctctggctaccctgaaaccacaggctggcctcatttgtgcccccatggccttgttgcccaaaaggttttccccaaaagcgaaagtttgtttgctggggtgccgggtgagcccaatggattgagggtgagctggtgggaatgaccccagagagtctcagaagcttcaagacaaagccagctgtgctaaccacggagcgcaagacgagagggaagacttgtgcctgaggagctggtgaagccagaagagctcagcgaaataccggcaggttggcatcccacgggggggttgcacaggggccagcattccgtgggaatcctgggcc

SEQ ID NO: 596766 - DNA, 170 bp, Homo sapiens
tggtggtgctggtgggtctacatgattctctgcatcctgaggatcggctgggctcaggatgaacctcttgcctcatccctgtcgggctagtgcggggctgtcgggctagtcgggggtgtcgggctagtcgtggctgtcggggctagtcgggggggtaccgggctcgagtt

SEQ ID NO: 596767 - DNA, 461 bp, Homo sapiens
cagtgcttggacggaacccggcgctcgttccccaccccggccggccgacccatagaccagccctccgtcacacatcattcacctgcaacccatcgagacatgcacccaaaggccccctgcctgccgcgtccacgcgacctgagcaagccacacgccgcccgccctgccgcacttctccattaagatcggccagccaatagaccgaaccagccgatccaaccatcgcacagcgtgcagcccacgaaccgtatccaccacacgagaacctcaaacaagagaccacgacccactcaacccagcccacgactccaaacccttggagacatcgtaccgacacaatcccgatacagaatttataacccaatgtatcccacttcatccatttaacctacccttttcgaacccgcacgcactgcacttctgcgccttttcgaacccaaacatctctgacccaacactaa

SEQ ID NO: 596768 - DNA, 251 bp, Homo sapiens
tctagagcgatcccgttcgcagcaacaggattgaaagcatgcattggacttcagatgggcagcaacagagagggcctacccaggccaggacatggacaaggctaaggacagaactcggcaggatcatcagattagagcggagagggctagccctgaagcccggccctcccccagctccttggctgcaagccatcccgcttaaactgactcacaccacacacgtgataggtacatttcagaccacatgagtc

SEQ ID NO: 596769 - DNA, 621 bp, Homo sapiens
gatagccggtcacatattgctcacacgctccaccacccacacacctgtgtttctgtctcttcagagaacattccgggaaatcacgctcctccaggtgagtggcctgggccctccagtccaatccccttgcccaggtacagatctctccagacaggagagaaactggccttcttgggccccagagcacagcccctcctggccttccagccgcctccgactctctccccaggagtttggggaccatcccaacatcatcagcctccttgacgtgatccgggcagagaacgacagggacatttacctggtgtttgagtttatgggtgagtgaggccccggccagcgccccagccccacctctgttctgtcctgacgccgtctgcgggtccctctgcgtgtccctctgcgtgtccctctgcagctggcccacagtggcttgctccctcaccatgtaccctggactcagggacagacagctgactagtgtcagcctccagagccagcagcgacccctttcgtcccacctgccccaggctcctgctctgaccacagtttgcagttgcgttctcctttttcttctcattttatgaaacaaaggcaacatgaaataaagtgttaaaactc

SEQ ID NO: 596770 - DNA, 576 bp, Homo sapiens
cgactcaacagtaaggcccgcgggcgtcctggccgccatgtgcaccgtagtggaccctcgcattgtccggagatacctactcaggcggcagctcgggcagggggcctatggcattgtgtggaaggcagtggaccggaggactggtgaggtcgtggccatcaagaaaatctttgatgcttttagggataagacagatgcccagagaacattccgggaaatcacgctccccaggagtttggggaccatcccaacatcatcagcctccttgacgtgatccgggcagagaacgacagggacatttacctggtgtttgagtttatgggtgcccccccagcccccaccccgactgcgtgcgcaccctctctgcgacctgacctgaacgcagtcatccggaacgggcggcctgctgcaggacgtccacgtgcgctccatcttctaccagctcctgcgggccacccggttcctccactcggggcacgttgtgcaccgggaccagaagccgtccaatgtgctcctggatgccactgccagtgaagctgtgtgactttggcctggccgtccctgggcgacctccct

SEQ ID NO: 596771 - DNA, 178 bp, Homo sapiens
gaaaacacacccttacatatttcatctactcagtgaagaatgacaagaacaaatcacatctcaaggttgatagtggtgctcactaggacacgtggaattgagactaataacttggatgttaacacgtgtttacctgtcttttcacatgtacaaatcgttcttctgtgtatctttttct

SEQ ID NO: 596772 - DNA, 1722 bp, Homo sapiens
  misc_feature (370)..(370): n is a, c, g, or t
  misc_feature (1102)..(1102): n is a, c, g, or t
gatggaggagggtaggccggtacaagggcgccggtgcagccccagcagtctccaggcgggggcccgcggatggtgacggacggaggaaggcctgacgccggcaaggatgcggcgggagtgcctggcggacaacggacaatacgaacacggagctgtctgacacgaggactaaagcgagcgttcgaagatgaagcgtggacgatgctcgtggatacgagctatggggagacaggtataccatcgcctggtactcggatccgagtcgcatgggacggtacgattgctgcaaggggtcacgcatttgcaggtgtacgtatcattaactacatctttcctattgcatcgttcgcagtttgaccgcgaaaagtcncatacatgcaatacaattttgcattgtctggtctccacctagcgtaagtgggcctacataccttcgacagggggatagaatcgttacttgcaggaaaagcaattgagtcgctctcatgtggggcacagcatacgtcacaggccgctttgttgggcctgggctgaaactagttcaatcattcgctgtcttattggggccctattggatctcgattgaatgcgtggtggggaacgtcgctgaatgttggccatcgaaaggtgatctgggcagtaaggttgaggagcttgcctcacgatgaggcgaaagtttgggccaatcagttgcgagtgtcgatggagagtactagttcatgggctagttcttgggcgatggtgatcacaatgtaggctacacggaacgtggcaagggacgtacttggagtgaagaaagcaaaaagaatcgtgcttcccaaggcccgcgcgaaaggacctggtccttgcccattcgaaccttacatgtgagtgtgaccaacggtgaaccgcgatctggtccgcggccccttctatttgtagaccaatggtggtaacccgaaccatactggttcccggcatggccaattgccccgaggcggttggacggcaaggcggtggaattcggcaattgtgccacgacacaacgcaaggactagacgcattgagaaaacaaattgcttggagtccgaatggaggtggcgacatttggaactaggatcancacatgtgaccatttgattgtaccacacacccggtgtcacattggcacccgggtagtggaattgtgcagacctgagaggaaactggcacgagttggagcgaactaaacagcgttatcggccatgtaaaaggagacctgtcacgtaaatatgttcaggtcgccccatttaaccgatagtaaaatacgtcttaccacagtagtgcattagcgagtgaataagccccagcgaaagagctatttgcgtagaaggacgatgaaccactggtgcaacactaccgtcgaaaagatacggctccacatatagacaagcgaacgaacatgacgagtgactggaacgcttgggctatacaaaaagcccagatctacgacgaagactacttgaaagacacatgatgcgacataacagacgccacgacacgagtgtggggacacaaccagtatagcggcaccgacgccacgatctaactacatggcagacgcacgacgacgacagacgaacacatagcgacacgaacaacagccgagcatatagatgacgagcggacgaacacgtacgacatgacgacgctgacggaggagggcgaccagtgctgacagagtaacagagataaatgaggagg

SEQ ID NO: 596773 - DNA, 463 bp, Homo sapiens
  misc_feature (125)..(125): n is a, c, g, or t
  misc_feature (220)..(220): n is a, c, g, or t
  misc_feature (236)..(236): n is a, c, g, or t
  misc_feature (299)..(299): n is a, c, g, or t
  misc_feature (303)..(303): n is a, c, g, or t
ggcacgagcttaaaccatgtagtactttactagaaaaaagcagagtaagagaaactaacgttgccttagcttcagccattcaaaataggacagtttcttttttccattatgtaaaggaatccagnagtatatcgcaataacagggaataaattcttacaacaggaatatacaacaaacattttggaaatttttttcatctactggattttttatattaanacaggggattttttanggggaataatttattacaccacaaggtcaattttaatggtaaaccaaaaattgggggccaatnggtntaatttaccctttttttttctttaacttaaaaaaaaaaaaatttttttttttaaaccaaaggaaaaaaactcagcaaaaaaatggcaatttaatttttggcggggggggcaattccattttccattccccgccctttctggggtttgggattttttttta

SEQ ID NO: 596774 - DNA, 338 bp, Homo sapiens
aggaccctcactacgcctccacctctctctacagatgcgacgactgctgctgaagctcgcagctgtagcgctcattgcggggctacaagcgtccgcacaccgcctagcgcttcttgacatgtgccgagtgcgtgaataactccagcaagagcacacacctgagaggatacatcaggcgtgcacttcggtgagcggccattctcctgtgaggagttcgagcctcggttctaacagagtagtcatctggcggcgcatctagaccaccacgcccccgatcggaccttcgcttgacccgactgcggcggtctttcgcgctgtccccgctgtggtgtcttctc

SEQ ID NO: 596775 - DNA, 422 bp, Homo sapiens
gcaggggcaatgtgctgaaccatcagatcaggagcagatagaaagaggacctgtgggccatgcctttattgagctatgggggttacccgttaggctttcccatagaggttattgattggctaatttaaagacaacacacatgaagaggggagcttattcccatgactctggtgttgacattaggttttgtggtactagctgtgggtgtgctgagctgtagatcagtaagatgagaatcaagcagattaccttacaaatgaccacgtggggagaggaagatttaactgggccaggggtgagggcagggacctatgtcagtcctaaagtagatgctgaggcagcaactatgtgaaacacatttatgacacacatgctcattgcagatactagtaattgatgatagcattatttcaaaatgagac

SEQ ID NO: 596776 - DNA, 325 bp, Homo sapiens
gatcttcgcatcttcgtcccatcagtctggtggagtcaccttccaggaggtatgggagacaggtaataggtttttaaagtgtctttgtattctttcttgtgaccaatcagattccttctcccactttcaatgccttgagtgtcaagctttggatgaccgaccctatgtgggcggttgtgtggggagtgggtacttgtgagcctcggacacactgtaaagtgttcacagtgttaggcagcaccagctgggtgaggggcactggcagcaggtaaggggcctggcaaatggccctgcacagcacaacttgtgcctgatgggcagcaaa

SEQ ID NO: 596777 - DNA, 846 bp, Homo sapiens
  misc_feature (15)..(15): n is a, c, g, or t
  misc_feature (138)..(138): n is a, c, g, or t
  misc_feature (140)..(140): n is a, c, g, or t
  misc_feature (159)..(159): n is a, c, g, or t
  misc_feature (170)..(170): n is a, c, g, or t
  misc_feature (190)..(190): n is a, c, g, or t
  misc_feature (202)..(202): n is a, c, g, or t
  misc_feature (206)..(206): n is a, c, g, or t
  misc_feature (247)..(247): n is a, c, g, or t
  misc_feature (254)..(254): n is a, c, g, or t
  misc_feature (314)..(314): n is a, c, g, or t
  misc_feature (474)..(474): n is a, c, g, or t
  misc_feature (505)..(505): n is a, c, g, or t
  misc_feature (508)..(510): n is a, c, g, or t
  misc_feature (617)..(617): n is a, c, g, or t
  misc_feature (619)..(619): n is a, c, g, or t
  misc_feature (624)..(624): n is a, c, g, or t
  misc_feature (655)..(655): n is a, c, g, or t
  misc_feature (666)..(667): n is a, c, g, or t
  misc_feature (670)..(672): n is a, c, g, or t
  misc_feature (737)..(737): n is a, c, g, or t
  misc_feature (793)..(793): n is a, c, g, or t
caaatatcatcccantttaattcaattcttttatttatcccacccttccctacatcatccctttaactcataatatttttttattcttccatttttttctacttttcatcacactataccaactttttaatttttaananttattctattttccctcanccatccccaantttacacacattcatatcanccctacttttantcanccatcattccttactttcatttattacaattttcatttacntaaatcnaactttattttttatcctaattcctctcttcccattttattacccttttcaattttaaanaccatttttatttatttttttcattttttatcctctccacaaattttatccttttctccacatccatcccctttcatatttttatatatttcataaccaaatcttctcattaccctccatcattcaatattttttcatttttatcatttacttaaacaanacatttttttatcttttccttcactcagaancannntccttaagtaagctttaatttcattatttatttttttttaatattttttttttcccctcaaccatacaattataatcatcctccaccttaacttcccacccccagtnanttctncctcatcttctttactaaccccttgtagggncaaaactcctnnaannnacagccccaccctgagccagcttcacttgagggtatagtagtttgtgggcacaaagggcatcttnctgactacagccatctgctgcttccgccgcacctctaccagcagcattgtccctgnacgactgttctcgcagggcacataacccatcgccacattcttcttcagagagg

SEQ ID NO: 596778 - DNA, 140 bp, Homo sapiens
cacgaggttttcccatgtcctgtattttctgcagtcattatggtcactgtttagaggtcaccttcaaaggtggctgcaacttcatatttggtctccacgaccaccttggcagtgggtcctattattacgccatttcacac

SEQ ID NO: 596779 - DNA, 250 bp, Homo sapiens
  misc_feature (99)..(99): n is a, c, g, or t
  misc_feature (130)..(130): n is a, c, g, or t
gattctgcgtattaatgtgcttcataagatctatcatgctgcttcttatagtacttacaatatatgcaaggtcagtagaagtgtgcatgtatatatgcnttgatcattcaaatggctaagattgaaaggngaacgatacccagaatttcagtagtttgctagatgcagagtatttatctaccaaaagcctgagatttctttacatgaattaaaaagcttccattcgaaagggtaatagcgacagcaggca

SEQ ID NO: 596780 - DNA, 190 bp, Homo sapiens
tgcagcggcttcttctcctttagtcttgtggtgattcggagctggtgtctacggctgcgtctgacatgtggggcacgccggtatccgatcaggcgattaaaaagaaagcgagagttcaggcactctggcgataagctgccggagtccgcggcggcggaggaggcgcgcggcggaggcggctgcggcgagc

SEQ ID NO: 596781 - DNA, 168 bp, Homo sapiens
agtgtctggtcagctcgatatcagtcatcactgaacatatcactgtcgcattaagggggcagagctgagatacatctggtacagaagcttgggaggagcttgttcaactcaaaaacagatgggtgaacccgtggcccagagcccccagcagggccatctaaggtagag

SEQ ID NO: 596782 - DNA, 284 bp, Homo sapiens
  misc_feature (50)..(50): n is a, c, g, or t
  misc_feature (152)..(152): n is a, c, g, or t
  misc_feature (218)..(218): n is a, c, g, or t
ccgttccgagcccacacagtctgtgtcagctcaccagagcccccacccanactcacgacccattgttaattaagactgtctgcattatagggctaattaacaattagcataaacataattagccagggctgacatttaactcattacattgnttaaataattttcgggaattgccccagcggcattctgtcagctcgcaataaaggcgccactttggnatgtaaagtaaatgacatttgtgttgttgctgtcccaccgtgggagacggtcggccacatcccacc

SEQ ID NO: 596783 - DNA, 196 bp, Homo sapiens
acttagaggatcttccagaaggcacaaggaggtacgagaggaccttcgtctcctgaggatgacttggaaggagattgagcagaagtacgatgtggagaagagatcctgatcacggtgctgtctgcatgacagaggaggcagtgttgcaatcaaggccatggcaaaataactggctcccaggatgggggtggtggca

SEQ ID NO: 596784 - DNA, 328 bp, Homo sapiens
attacgaaccgagctggtaccctcggataaggccaagcgtgcatacgacgtcgcgtgttgatccgttcgagtgtcgggtcttccgtatcatatgtgaagcggaattcagcaacgtcgttggattgtgcacccactaatagggaacgtgagctgggttagaccgtcgtgagacaggttagttttaccctactgatgatgtgttgttgccatggtaatcctgctcagtacgagaggaaccgcaggttcagacatttggtgtatgtgcttggctgaggagccaatggggcgaagctaccatctgtgggattatgactgaacgcctctaagt

SEQ ID NO: 596785 - DNA, 287 bp, Homo sapiens
catcctcagacagcggaccccaaggtagcagagagaaaggacgagaggaactgaggtcaggcgaggaagtttactaacctgccggctgctccatcacagacagaggaggcagcaccaagcttatggaatgaggggtttatattgggggaggggagtttgagggagttctttggtatggctgcatcccggggttgtttgctggttaattttgccacatatcaccttgtggacgtttattacaggagggtgtaggtaaagtttgtttatgcttcctacgacctccccct

SEQ ID NO: 596786 - DNA, 643 bp, Homo sapiens
gtggtgtggaaacttaccggctgagccatggatacaccgttaaggcgcagccgacggctgggaggcctaaggcccgaatcccccgagagcctcacctcagtttctgcggacgagacgggcccttgtggagttcgatgtcgaacccagaagaaacgatgggagcccgggtctcctcctgagtgtgcagctgggctggcctggtggtcccccgaaatggccgcctgaatgacaatgcccagtgatcaccccgtctgcatgcatgtggtgcatgtgcttgtgagtcaccccaatgggcatgccatgatgccatgtgctgcagctgtccccccatgctgtcagcaatgacctacacctggatgtcgcctcaaatgacatgccagagtacatgtcctgaatccccacgatgtcagcctgaagccaagtgatggatggcaccaaagtgttctcagtgaccagggagtacttggcctcggagttgtgcccagaatacaggaggagctgaccccggggtgccccccagcatcagctaccgcctgtgtcccagtgatcaccagagccttaccccggtcaagcaagctcccggtcctggagccctctcagccactactggagctgacaccagggcacctggctccccccgggg

SEQ ID NO: 596787 - DNA, 2041 bp, Homo sapiens
gtcaggtcggcgctgctaacggagccgtgctggcatgtctgcgcatctgcaatggatggtactgtgcggagctgctccagcttgcaactgatcaatgtaggaatacggcagcactcgtacacgggactgcagccaccgaataacgttgagattgggcccggaattccttccgctatgacggactgattcaccgaaaagagctgtagggcgatgtagaccgagcagctcagaaggccatacggtgtctgtggtggtcagttaagcggagatccggccatgggaagacctgatcaactcctatgtgcggagccaccatcaaacaggagatgtgtcgcagctgacagcgtcagcagcgatcagacacatgatccgcatggaacaatgtaccgccccgagctgcagcatggcgagccatccgcagggccatgcgctcatcctgcagctaggcaatgaagccttgtgactggtgagatgaggcagcggacccgacctcttcaagagctcctgatgggcgctgtccccagagcaagtaaagtcagctggctttctcaagataactctgaacagatacaaagaaaaatatgacaaggagaacgatcccttgaggcacaactcccagcggatgagtctcaataagttattgtggaccagatgctagcatcatggaaccaggttggacatctacgaacgcgtcgcattgtttctttacaccaagcgaacgacaaagtcgtgggggagtcgcccaatacagtgaagctcacgtctttgacttgaaaatccctactgagtcgtggatattagacacttggaagcctcactcgaccaagaatctatactacctgtgagatatcaattcgatctgagcgagacaccgtgagccctcattatctcgcaagtagacatgtcgactactcagaggcatctccaactcacctatgcatttggacgaacgtaccatccacacgcacaagcggcgcccatggccgcggcaagaatgtgcagtgcacgagacgtgaacaatggccgagtgatacggtacacagtattaaggcccggacgaaccacatggctcaacacacctcgaataacatacgaacagaaagagacaaatgacatcacgcgaaactgagccgagactatgaagctagacgacgtcacacgaccgggcaacaacggagacaagacaacaagcaggctcgtagactccactcagaagactctacataattataataactatcatctatacaatcacctcgtcatacatcttcatccctccaccgctcaatccaactaaccacaatctcacaacaacaacccaccactaccactcgaccatcacaacaccggaacacacaatcatactaacacattacacgacctaactctataacacacatccacacacacacaccatctcaaccaatcgacagtactccccataccacaccatcaccactcacatcacccaaaatccaccaccatcaacctaacgctccccaactcgagcagggcgtgagagccaacagcgtctcataagctagtcaggtggcggacacggaccgacaagacaaccagatagcaaccagacggaagtagacacacaaaccagcaacccaggcacaagacgcagaagtgtacagacgagtaatggtcagctaacagatagcgcagttacggagcagctacctcgagcgcaggcgcagcgccgagcacacacgagcccccggagcagtgaacgccttgacgacagcacgcacctggaccgggacagcggcaacggaggtgaaggaggcgcgacacaccgaactcgcggcgaggagactagatgacgagcgacagagaagcagataggagcgcatgccacgctgcaccacgcaatgaagaatcgctagaagaacatgagtagagggactggagaatgctgcagcacgaagagtcagctagaggcgagcaggagccgagcgacgcacacacgtcactggacgcagaacgcaggggagaaacgcgagacatcgaccagacgcgccggagactaaca

SEQ ID NO: 596788 - DNA, 1461 bp, Homo sapiens
  misc_feature (246)..(246): n is a, c, g, or t
  misc_feature (900)..(900): n is a, c, g, or t
  misc_feature (1126)..(1126): n is a, c, g, or t
acggtgctccgtctgccccctcgtcgttgccttagtgaagttcgttttcttcgtatgtagtgttttgtcggtgtggggaacaccccgcggggctttttgcccccaccacggctgattgcacccccaccggctgctgtaggtttgttttcccaccacgctgtctcccttggcctcctctctgcgagggtttattgtcccccccccccttgcttcccttctcgagcaccttccccccaccagggggtngccctgtgcgggaatttatactacggcgccgcgcggctgccccccccttgggcggccccccatagttttaaaggggggtgttgttccccccccctttttcccgtgggaaattttggggtgggagaaaatagagagaccctttggtccccccccccgttgaggccgacccccccccccttggaattggcccgccccttctcttgggcgctgctctgtgctctgaaagatttcttcccaggaggggatttgctgctcacaactggttgttgcggcccccaagatgggcccccagagatgtggtgtgtgtgccacaccacccccctcggccccgggtggtctttataatacgcccaccattgtggggtgtgggacaacaacattgtttacagcttgccaccccttattagagttggacaccacttgtacccacgcccctctgtacacccacataaggtgacacaacgcgtgaaggagaacgtgtttctctcgggttttccctaaacttctctccacccactattccgcgagaggaaaaaagcttatagagacgccctctctcccaacgcttctctctcggttatatatagagagagacacctccactctatatttttcgcgcacacaatatatattagaatccacacctcttgtgtntacacaaacacacatcttataggggtttctctcgtgtgtcccacatggtgtctctctccgtcgagatatatgtgtgtatatatatgagaaagtgtgggcgttttcacgcggctcgtcgcgtgtggacacacacggagatgtcgctgtgcgcgagaataatagagatgatgcccccttatataccacacagcgctccagcgccacgcgtggtgacatgccacagccnctcgttaatatccccagcaccactcttgggagagagtctcggggttgggcggagagtataccacattggagcaccctctagaggagattgtagaacacacctctaccccagcacctcgggccaacacaccagtgagacctcttatttttctaccaaaacaccaaataaattggcttagatagtcgtggccgccaccaactgtggtttccagctacatttaggaggctgaggccgggaggatttatattgagcctgggaggtccaaactgccatgagctaagattgccacttctgccctccgggctgggagaccagagtaagaccctctcccttta

SEQ ID NO: 596789 - DNA, 441 bp, Homo sapiens
acctcgcttagtgctccttggccgcgctcagtggtcaatgaagctgagcggcaggtcatgggaattactccgcccggtacccaaagactatggtttatgggaagcagtacgacgggttatgggaataacgcaacctcatagtctggcggtagagtaaatagaacatactacgacagtgtttgatctctggtgaaccttgcactggtgcaagagattaacgaatacatgctcagtacaagcgctcgctgtcgtccgtcttgagcatggcctagaattcgaactctagcagagcagtaccaatgccctatgccattattcctaactatggtctccattgcgcactccaacagagtggaaccgaggtcctattccataatatggagatggcgtgttcatgcgggaaatggctgttctgtacactttccacagagcactcaacca

SEQ ID NO: 596790 - DNA, 158 bp, Homo sapiens
ggacggggcggagggcaggaggaggcatgttcacagcagtcccgagaaggtgggtagaggcgtgctgcggggtctgggtaggggaggctgtggtgtctgtgtgtccatccatctcaggctgcaggtagaagaggcttattcggcaggtttggcctcag

SEQ ID NO: 596791 - DNA, 399 bp, Homo sapiens
  misc_feature (110)..(110): n is a, c, g, or t
acatttgctctccaatgcaggagaggtgcgtccgtgaagagtgaagtgactgctgcgaggtgcttgcagcggcaaaaaaggctgaaatagacggcaggtttgaccggganttgagcggctaccgttttttgaaagtgtcgatggcgaagtagccggaaaacaggggctacttcagaccatccctagtacaccatgcccccagcgtttccttagctgcgattgacgggcatgcctggcggtagctcaataacagccatttatggatgaagaacgaggggaataaggcagatgaagatattcacgattggattcactaagacctccgcgcggtccttcttcaccaagttaagtgcttctggtgccaagcgccttgtcgatgttcgcctgaataatgtttcg

SEQ ID NO: 596792 - DNA, 190 bp, Homo sapiens
ccgtgttgagcggtctcctcagtgagtccagagacccagtgagtgagtctaatttaaaaccgtgggttcaagtcccaagctgggtttaggctgggtttgagtcccaacacatgggtgcgagtcccagtcagtgtcctggctgggttcaggccataagtgctgtcagtttcaaccagagctaggtctttcc

SEQ ID NO: 596793 - DNA, 975 bp, Homo sapiens
gtatgtgtgcatatagcagctactctgtagcagaggtgggtagagacacttaatagtatcatgtcgcatgcagactgtcagcatcggcctctgcaaaaaactgtacatgtctatgatttctgcacttagacgttaagtaggtcatgtgaactagtactgctatgttcacgttttaggtattactgagtttttattactctggcaaagatggctacttgcgtatcgttcttgaaagtcctctgatcgtctctcgtaatcgctccctccattcgccatttcaatgcttcgcctttcgcgtaatttatcgagcgagactaaatctctacaaatagcaagtgtcacatgagtttaatagtgaacgcgcgcaatatagaagacacaacaagagaataaacacaaagagaaagacaatctcctgctcggcgagtggccggaagtcgggcccacgtagaagagggttatcttaacaatacaatccgggggtctgggttgcgcgggagagagtccccacatggtcgaagtttaatgggtacatccactctgtggggcacaaagcgggacatgccgcgtctctcccatttgtgaagtcgaaactctcgaggggtgactcatccgaaggccataatgggttgtcccctgcgcgatttatctctggaaacgccatattaatatgaacaagatacacgcaagcccggtggtcgcgaaaacccgagagcacgtctcttaccagagacaacgagagacattgccaccggtagggcggtaaccgcctagttgggaggtcgcaagacatagcggggcagatttctgtaaattgctagacaggatatcgtatctacccacgaagacctccttgggaaatctcacccaattgatcggacccccccctagtactgtacggaggagaagacagcggctcccaggctcgagagccctccccggagccacagtcgggagccagcataattgcgatcc

SEQ ID NO: 596794 - DNA, 819 bp, Homo sapiens
gcacagactcccttccttctttctccggtccgactcccgagcaccagcgcgctctgagctgcccccaggatcccatcccaccgacgcaagcagaaccaataaggagggaggaagtaaggggaagaggagaggaaggggagccggaccgaggtaacccagcacagagaccggagcaagtggagatagatggaaagagcgggcgagacacagcaacaaagaagggaacaaacacgacaggaccgacaaaggacacaacaagaaaacacggaaacacacgaagaaaccagagaagcaacacacacaatagaagaacagcacgcacgggagagagagaggaagagagaaacgcacaacccagaagagaacgaacgacacacacgcagacgagaacacaaaaacaaaaaaaacagagaagaagacgaaagacagcagaagcagagacgaacacggagcaacaacagaagcacaacacaaggaacaaacgagcgacgacgggcgaaacaacgacacggccaccgcggcagacgacgggcgcacacagggacaaaagtgacaccgaaggaacggcgtcgaaagggacgaggggacgcacagcggacgaacgggacgagagcacagagacggaaaggagcaagaagaactaaagaaaaccagcacaacgacgctgagcaagcagaagcacaaagcaaaggacgataacagacgggacagacgcgtggacacacacacagaaccgagacgtagccagaaacaggacccagcgaaggcacacgacgaggaccacgacgcagagagagaccgcagacgccaggcagcacg

SEQ ID NO: 596795 - DNA, 380 bp, Homo sapiens
ggcatgtgcagacttaaaaattacacaggggaatgtaggcacgatctgtttaagaaatactggactaaatggtctctaatctgtgattgtagattaaagaataatctacaatctacaccgtgttggccaggcacggtcgtcgcgcctgtggttccagcactttgggaggctgaggtgtgtggatcgcatgaggtcaggagttcgagaccagcctcaccgatgtggcggaaccccctctctactgaaggtgcggaaagttggctgggtgtggtggtgcatgtctgtggtcccggctgctcggggggctggggcatgggaattgcttgggcctgggaggtggaggttgcggtgggccgggatcacgccactgcactccagcc

SEQ ID NO: 596796 - DNA, 833 bp, Homo sapiens
  misc_feature (39)..(39): n is a, c, g, or t
  misc_feature (574)..(574): n is a, c, g, or t
ggatacggcctcgtcgttgaggtcggagtaaaggtgagnctgcttcacatcttctagctagaaagtagagcagctgacggaatggagttccaaacgctcaatcttacgaatgaatggtgataaggtccgaaaatttataaaggcaccacctcgaaactattccatgattggtatgttcactgctcttcagcctcaacggcagtgttctgtgtgcaggcaagctaatgaagaatatcacatactggcgaactcctggagctattcatctgctttttggagcaggctcttcttcagtatggtggactatgatgaggggacagacgtttttcagcaggtcagcatgaactctgctcctacattcatgcattttcctccaagaggcagacctactaaagctgatacttctgacctcccaaagaattggatttgcagctgagccactagcatagtggattgctgacacaacggatggtcatattcagggtttttagaccacccaactactgtgtaaccattatgcttccggccctggtaactgttggttaggatggaggttatgctgtattaagcgaangaccaacggtgaatgttgatgtataacatcaccggggcgggccattgctcatctacgcctcggctatcgctatgactttgtgacctgatctggatccgaacccggggagcgtgtggtgcccttttacagcccacaacttgagctacggtgccagcatcagtggaagatcccattatcattttgaacacaaataacacatacttgggtccgtggtgcgagtgtcccaggggtaggggtttgttaatcaggggagattgcg

SEQ ID NO: 596797 - DNA, 715 bp, Homo sapiens
ctgtagggaatttataaggtcagccatgacaattatacaccacaggtcattgtattcatcattagccaagtgtcaaggaaaaatgagctaatatgttaccaacgccatgatgttttttactaaagtaccaagtggacattgttgtcctttgaagaagaaggtgcctcaaaatggcaggattcttagtaacatgtcatactctatacaggctttaggtattgacttcagaatatatctgatgcccagcaaaaagtaaaataaaaggagctagagagtatgccctcagatagtgtggggccaggaagggaaaagtcacctgataaaacgaacttctgtagatactgtcatttaaaactgtgagaaaagcaacatgaaaagatgcctgaagctctccatcctgaggaaagattagcacttctgatgaaaatcacagtctgtcaaaggtattaaagagaaaactttagacagatagataaaaacctttgaggaaacgttgaactaatgtacactgagaaagaaccatataacttacttatagactgtataatttacatgatccgtctcttactacgaactgaggctaacacgatggtaaaattggttcccaaatcaagccagttatgtcattaaatacttgtctttcagaattacttatttaattattccatttaagttcatatacatataatctacagtttagatacttggacatata

SEQ ID NO: 596798 - DNA, 696 bp, Homo sapiens
tgccttttaaggataaggtataaccatacatttttggtggaagtgtgtctgggagtgaagttaaagtctgtttatcctgtaagtggggaggagggtcagctaagagaagtgggagggccagagctttgtggttctgatttactaaattaatgaagtagtttcaaacaacgcggtcatgtatagctctccatttgggagcctggctacattcttgtactatgaaagcgcaaaaagatcctcagatgaattagaacgaaagaggtaggggactcacgcggatactagttcttttaccttctgcttggtaacttagattaaactgagcagttgtgtttctgtcacaaatgttttccttatgacactggtttcgacatgtacatacatgtgtttgaaaatctgcgttgtagatgcagagagaagctataggaaagcccagtaccacccctggtgctgttctgacgagacatcgttcatacaggcacagcacatcggcatgatgaacagtggtggaataaaaagctgtggctggatacttgctttaggaacagctcgtgaaccttgcgagtgcatattctcacacatattcatcaactatatgtccaagagcttgtgagcctaatctgtaggagctagaactctgattgaccgagaaggcgtatgggttaaggttgggctacgatgtcctatgtgctctga

SEQ ID NO: 596799 - DNA, 316 bp, Homo sapiens
tcccccttccccccattgatggaagaatgttccagattctaaattgaggacttcattattaatggcattactgtgttatgattaacaaatttcctgtaaggtacacactacatactaaggtcggccatcattcctgtcatttttctgttttttttttgtaaccaagcttaaaatgaacctttgtgtttgaaagtaataacaagctcagactatgatggtcgtagtacattattcatttacaaagtatacctattcatcttgttccgaagctagattttaaactggaatatcagctttatcccctacaatgggaccc

SEQ ID NO: 596800 - DNA, 589 bp, Homo sapiens
ggtggtcccagcggttcagctgaggtagtggacagtgctgatagtgccggaatgtataccggctgtatggatctgcgtgatgagtgaggatggatcctgcgtgatggcaggattgtcctagaattagtgtctcccatttgatgactgatcgcaagagcagaggatggaggaacaagtctggtcctcggctgccaagatcccagtcacaattatcaccgggtatttacgtgtgctggtgaagactaacatttctgaactatattttgcacagagcaagcgagtagtaaagagagtagcggtcattgttacagtgaatttggggaaggaagtgcgctggagaaatccttagcgtgtcagccaaggtggagagctctatgaagagtggcgtggaactgtagaaagtggttgcctctgcatgtgcagtgaaggcacagtgtgcttagagctattgagaagttagatgcaaaagaaggggaaagtttgattacatactgttagagaccagtggattagcagagcctggtgacagtggtttctatgtttagggtcgatgctgattaagggagtgatatgtatcaggatggtatca

SEQ ID NO: 596801 - DNA, 400 bp, Homo sapiens
  misc_feature (12)..(12): n is a, c, g, or t
gtggaatgaccngcctctctgccgtttctgccaacgtgttggtgctataagctgcttcaaataccagtttgtctgtagtgtgtactcacctaatcacttgttatccagtgcctgttctaggtttatggacttaactatttctgtgatgtttcatttttagccatgttaactcctaacacatattctcttatgtctcagtaaagtttcatttgataagttgttgagattctgttatttgataatattcttcggctgtccatccagcatcttaatcactttaaaactgtgattgttatttgcaactctgttctttggaaagaataaaagcattttttttcacttgctaacatgctcacaaatgtgagagaagagtcattaaaagctttacttactgggaaaa

SEQ ID NO: 596802 - DNA, 481 bp, Homo sapiens
atctggcccctggtgtggtggcatgagaacacagccctaaaaagttcctcctatggaaagagggggtcatctgggcacagtggttcatgcctgtaatcccagcgcttggccaggccaaggcagagggatcctttcagcccaggaatttgagatcagccggggcaacatagcaagatcccatctatacaaaaaaaaaaattagccaggtatgggggtgcactcctgtagtcctagctactcaggaggctctctggtgcccagagttcgaggctgcagtgagccatgatcatgccactgcactccagcctaggtgacagagcaagacattatctttaaaaaaaacgaaaacgaacagggtgtggtcagcggggcacaggggttcacaccggtaaacccagcatccttggaggccacggtaggaggatagctggaggctagaagttggggaccagccaggacaccatagcaagaccttgtctcc

SEQ ID NO: 596803 - DNA, 2231 bp, Homo sapiens
agccttgggcaaccacacatagaggtttccttctcacttcagacacatacatcactttcacaccacttggggatggaaatacctacaagagtgaaggtcaagggccctccccaggcatctcattcattactcagcttccttcctgaccaagtctgccaaccaatggccagctatgcgcctcatcctcattgcttctgcctccacgtaaatgaaaccaaaggcctcagcatatcctgggaggactgggggctgttacctaatggtcctctctgtcccattataggtgcaaggcaccccatccacacatttgcaccactactccaagatagtatttttcttttcacacaatctctttacagcagaatccagagttgggttgtagtttaccttcctggaaagctcattatctttgtttgaattaacatttcagcatggaactaactgggcggaggaaggatcgttatacgtcttcagaaagttctcattgccccagctgcctagtactatacaagaagctctactttgatggcagatctaagaaggctataggcctttgtttgtaggaagcagtgtcattacattcaagcttcacttctctgattggcttccaaccactgggattcaaagagaatccaaggttctgcctatgtctgatgacataaggaaaacttggcttcctctgctcaaggttcccctctgctcatccctcctcattcagacatcctccaccataccagtgtttagaagcaaaacatgaagggctagcgccaccaggatagttagcagaactattgtctgtaaagctaggcagatgagcccagaagaatggtcccagagaaagcagactggctccaatagatatcaggcagcaatcccaataaattctgacatgtccttggcaatggaagcctgggttggagatcctgaggcagctgtgcctactgttccccacctcagaagcttcctgcccagagagccagcagccttgggatactaatgaggatgcaactggcttattggtatgaaatagaaggtggctttgtaggggcaagcaggcaaagagtactatccacatggcaggcaggtggctttgtgtctggaaagctttgcctagccagtacagctgtgagcagaggctggttataaatttgaactccctcagcccatttgcaactctgcctctgttctcttgcattctgtttggttgccctttagtttcctagtaaatgctccttttgaaaaactccaaccttgtcttatttaacttgggggaaggggattctccaatgtcttttccaggataaagaaggaaattaaaataccatgaaaaaatggacatggcagtagaaaggaaacattctgatcagaccttgggaaaagctggtgccgagagagggagaggccaggtgtccccccacccaactggcactgattctcagccccttcctcttacttctgttggcttcaaggagacctgcccttgatgtgtgttgctgctgaagcaccctcccagccagtgagttggacatatgcagcaggcactttgatgtccaggaagtacactggtacatgacaggagcaagggtcagggaggggaggggaaaggtttctacaatgcagatgttttcaaaattctccaacaatcatgactctaaatggtatgatttagggctgggtgcagtgactcacacctgtaatctcagcactttgggaggccaaggcgggaggatcacttgataccagaagttcaagaccagtctggcaacgtggagagaccaccatctaatttcaaaagagacccccccgcccccccggctaatttttaaaaaattagcaatgtacctgtagtcccagctacttaggaagctgagataggagaatcgcctgagtccaagagcttgaggctacagcgagccaagattgcaacactgcatttcagcctgggtgacagagcaaggccctgtctctctaaaaaagaaaaaaaaggtattgtttagttcacatggccatcagtagaactacatttcatatgatgagaagaaaataattatttattttacacttgagtcagggagactgacaaaggataggtatggaaaatggcttgctattttcatggccaccctgtcctgcaatgcggggggtgggaggggggacattccaatgacttactgctgcatgacaaagcaccaaaacatagtggcttaaatagaaatatattgtctctcatg

SEQ ID NO: 596804 - DNA, 359 bp, Homo sapiens
  misc_feature (231)..(231): n is a, c, g, or t
gtacaggctcagatgttgggatacttggtccctagttgttggttctttcttcgcttctcttctcacaggcttttcccccaataggatcagaacctttaaacctgtcctggtgcctgcttcttggagggcttggaatacttaaccttgcaggcccagcgctcactggagcagctagtaacactgtttgtattttcaacacttgtttcatttgcctcatcttttttctttatntactgaaatgattaaaagccaatcccagaagccatgccttagtgctttacacacagcatacacattattcacagagcccttatttgcatatttgcccttatttgcatatttgcctaccatgtcgacgc

SEQ ID NO: 596805 - DNA, 1239 bp, Homo sapiens
agccttgggcaaccacacatagaggtttccttctcacttcagacacatacatcactttcacaccacttggggatggaaatacctacaagagtgaaggtcaagggccctccccaggcatctcattcattactcagcttccttcctgaccaagtctgccaaccaatggccagctatgcgcctcatcctcattgcttctgcctccacgtaaatgaaaccaaaggcctcagcatatcctgggaggactgggggctgttacctaatggtcctctctgtcccattataggtgcaaggcaccccatccacacatttgcaccactactccaagatagtatttttcttttcacacaatctctttacagcagaatccagagttgggttgtagtttaccttcctggaaagctcattatctttgtttgaattaacatttcagcatggaactaactgggcggaggaaggatcgttatacgtcttcagaaagttctcattgccccagctgcctagtactatacaagaagctctactttgatggcagatctaagaaggctataggcctttgtttgtaggaagcagtgtcattacattcaagcttcacttctctgattggcttccaaccactgggattcaaagagaatccaaggttctgcctatgtctgatgacataaggaaaacttggcttcctctgctcaaggttcccctctgctcatccctcctcattcagacatcctccaccataccagtgtttagaagcaaaacatgaagggctagcgccaccaggatagttagcagaactattgtctgtaaagctaggcagatgagcccagaagaatggtcccagagaaagcagactggctccaatagatatcaggcagcaatcccaataaattctgacatgtccttggcaatggaagcctgggttggagatcctgaggcagctgtgcctactgttccccacctcagaagcttcctgcccagagagccagcagccttgggatactaatgaggatgcaactggcttattggtatgaaatagaaggtggctttgtaggggcaagcaggcaaagagtactatccacatggcaggcaggtggctttgtgtctggaaagctttgcctagccagtacagctgtgagcagaggctggttataaatttgaactccctcagcccatttgcaactctgcctctgttctcttgcattctgtttggttgccctttagtttcctagtaaatgctccttttga

SEQ ID NO: 596806 - DNA, 1235 bp, Homo sapiens
  misc_feature (1223)..(1223): n is a, c, g, or t
ggagagagagaactagtctcgagtattgtttatttttttatttttttaaaaacaggagtgcttaatggccgcgagtggagtgttgggaaggattgccccccggctcctgccttcgggctcacctgaggcgggggcgcaagttagaggccactggtgggagaaacacaacctccacatctcccaggaagaggctctcatcatggctggctcttacggttctacgcacagcctttctaagctggggggctctggggccgcctcctatatagggtagatgtctgcacacccgttgtccggtggtctcccggccgagaaggcggaaccatgggcttgctggggcccccaaatgagcggcggagtggacaagcaggtgccggggaagagaaaaccccaaagcacaaggggcccctctgccaaagctctctgtaaacagacctcctcacgggtccctctggggcctacagtacaaatccctgaagaaaacatggggggtcttctgccccgaaagagggccgagggttgtccaccgagctctgtgttagaaacccagttgtcccctaccctttttgcaagaagcgaggttcaccatggggggcctagaaaggcccaaaactctgcagggcccagctcgggggagacccacaaaaatagcccgggggcttctatcacagttacaaaaaatggtgcaaaatggggaagcccaatggtgggcacacgtgcgcaaaaggggtcaatgtgccccaggggggcaagagggccctcccccaagagaacataaacagagggaccagagcacacagacacacaaagggtcgagacagcatcagaccacaaggacagctggaggcataagcaaagattacaaacagaagaagaagcaccacaccccacacaaaagggaggtggagagcaacaccaacgcgaagcgacacccgagcccacagaacagagggaaagaaggacaacaaagagcaagaaaaaaaacatgggagaagaaggaagagagacaactaaacgaagatgagaggcagaaggagggaaaccaaaaaagatgaagcaggcgcggaaagcacggcacaggagccaagaggacccagccacaaagcagtaggagtaagatagagacgcagcaataggagaagaacaaccaaatcaataaggagggccagaatataacagtaccaccgcatagagagaaattaactaatatcaaccgtaatgcntacccccccacg

SEQ ID NO: 596807 - DNA, 376 bp, Homo sapiens
tatacttcttttgggagggcacgtaaaggagtcttcctttctctttcattccttccatcttgagaagaagtcctgctctgttgccccaggatggagtgcagtggcgaaaactcagctcactacaaactaccacctcctgggttcaagtgattctcctggctcagactcctgagtagctaggtttatatgcaggcaccaccaaaaccagctagtttttgtatttttagtagagataagggtttcaacatgttggtcaggctggtctcgaactcctgaacttaggcgatccaactgcctcgtgctcccaaagtgctcggattacaggcgtgagacaacacgcccagcgaaacaatggtttttaaggcataggtcatca

SEQ ID NO: 596808 - DNA, 104 bp, Homo sapiens
ccggtatgtcttacgggaactcctctttgcctatttttaaatggagctgtttgggttttttggttttgagttgtaggagctacttcagtctccgcaggaaggta

SEQ ID NO: 596809 - DNA, 477 bp, Homo sapiens
aggaagatcggcaggaacgtagaagcacgaacgaagaagcggaacgatcaccgcaagattcacctaccagcgggcgtaggacctctgaccagcggcgcggatatgtgcctacgagcaggctcgattgcagatgtacagtgcagagccagacggcggccggcgtggaacgcgggggcctcgctggctggaagcagcacttcccgggctagaagcgcctgcgcaaaggccaacgaacggaggcgtcctgccgcatcggagaatgccggaagtcggtcgaagacgccagcctagcgggaccatgactcatcgtacccgagatggtgggcagcatggtgggcgtaacaacggcaagactttcaacccagggtggagataaagccacgagatgaatcggccagtacactgggcgagttctcgagtcacgctacaagccgcgtaaagcatggccggcccggatcagggcacgcagctcatccc

SEQ ID NO: 596810 - DNA, 327 bp, Homo sapiens
gacaacgggcccgcacgtttcccagcgagcgttcctgtcgaagggtcaggacaccgatgcggcgtaaatcgagtcgatagaggcacgcagagtctgatcgaactcctgctgcgactgtgcgacgtttagcccctcggccaaagcacgagaggagctcgcgatgagtcccctgttgcgggccagcttcttgttggcctcctcacgggagtacccaccagacagggcgacaacgcgcaggaccttcggatccgcaatgaggtcggcatacaggtcttcggaactcgggatcgtcagcttcaacatgattttggcatcgagcggcggaga

SEQ ID NO: 596811 - DNA, 201 bp, Homo sapiens
cccgtattaacgagaagaaggatggattgacagcactgtagaaatgcagtataggggtccagaaaggaagcagtcactggcatgtggggacttaaatctgcaaaggctgtgatccaggtaggtgtgcggatgggcagttttgtgacgctcaaggagcagatgggcactccagaaggacggacgctccagaaagggcccaga

SEQ ID NO: 596812 - DNA, 715 bp, Homo sapiens
tatgtctcgatcgttagcacggtctggtcttcagctacccgccttcgtctccgagttgggaagtgtatctggaagtattcgtcgtctttgatttttggggaagagtttgaagaagaattggtactagttttaccttaagtgtttgggcagaattcttctggtctcttgatgttttcattgccttgctgagcatagatcccaggtacttatgagcaaaattctactcagtctgacaactctgcttagaattatgaatgtgattaaatgcagtggtcactctacctttctaaggtagttcagctcaagttacagcgatccagtcctgatagagctttgaaacctcaagtctattatataacgtaatgaaaaattggcttggtgaggtggttcacacctataatcccagcactttgggaggctgaggtgggtggatcacttgagttcggagttcaagaccaggctgggcaacatggcaaaaccccacttctaccaaaaaaaaaaaaaaaaaaaaaaaatatatatatatatatatatatacacacacacacacacaaaaaaaaaaaattagctagtcatgatgacatgcgcctgtagtcccagctactcaggaagctgaggtgcaaggattgcctgagcccaggaggtggaggtttcagtgaaccaagatcacaccaccatattccagtctgggtgacagaaggaggccctgtctcaa

SEQ ID NO: 596813 - DNA, 481 bp, Homo sapiens
gattggttttaaagaggccttctacccctgctcagatgtcaaaatgtttgggttggcgcttaatccacatgtcagctgcaagctcttatttaccaaagaatagaattgttaattctattgtcaaaatattagtaacagtttagtcgtaagactcctcttggctcagggtctccaaaattaagaaaataacagaacaacatgtttatttctcacttcctatttttgtgtacatgttaaaatgtctataatattagtaatttaactcacagtgtgagtattcttggtcaggaacaactgctctaggtattccgaaattccatctttgcatcaaatttaacgttattatgttatttatgtagagacaaagtctggctatgttacccaggctggtcttgaactcctgggctcaggtgatcctcccctatcagtctcctgagtagctgggactatgggtgcataccaccacatctgacttattatt

SEQ ID NO: 596814 - DNA, 116 bp, Homo sapiens
agatgttattgagaaggggagaaagcttgacgtcactgacctgcttgcttgatcctgtggtccggatccagagaaagtgaaggcttccataattaccatcacacctttccctttga

SEQ ID NO: 596815 - DNA, 512 bp, Homo sapiens
ctgcacgagctcagccccggaagagaaggtgctcttgtgccataagacacatactgacattgcgttgaagggtggagagcttgacctctcccacatgcgcgatgcccatacagcccagccaggatcctttccgtggttctcaggaatgacaacagaactaactttggttggattttttagttcaaagaagagtttgtgccctgttacctctgctcgtttgtgatgaccgtgagctggatcattcagtgattctcagtgggggttgggggagttgggtggatgtgcgagtgccatcccctcacaatgcgtatttctcaagaatacactggggtggggtaagggggacaaacacgggtctaggtcagatgctgttctggaacaggaaggatgtttaagtatcggattgacccagatgatgacagacagggagacattgactgggtactttagctactgctgccccattcccacctccttttcctttcgccataggggcctaggaagtcaagcca

SEQ ID NO: 596816 - DNA, 705 bp, Homo sapiens
  misc_feature (508)..(508): n is a, c, g, or t
tcccgccgtgcgccaccagaatgtccctgtcttgaggtctaatggcggacgccagtttgtgcggagttggtggtggctaaagtttggaatgggatgtgtagcatctccgttgtggattatccacaccatctcctttctcgctgcaggctattttgtggacctccgatacgtgtgtggttgttaacccaaggccgtggaggtctcgtggggtggcctcaggtttccctgtgcagccatgtgtttccgtgtacaacttataaccctttgtgcaagaaagagccacctgtggacatctcagggctttgtgccaatctcatgtggacacaccttattctctgtgagaacccaaaaaaacaaacacaagagaacatgtggatgtgatatctcccggtggcgagaagaaactcttgagagaccctgtggctattcggcccagagaaaaccccacaaacactgttggtcaaaatggtataacatatacccctatagctctcagctgtgtgtgganacaagtaataaatccggagtggtacactcgcggggtctccactctcgagtggggccctatatataagcgcccgtagaaccagggtgtgctgccccccaaaagagaccttactatgtgtggtacattgtgcgcaagtgtgcaccctcgtgagtctcagaaatgttggggcaaaattctggggcaatatacccaagccc

SEQ ID NO: 596817 - DNA, 246 bp, Homo sapiens
ttgcaagggacagaaaaagagtcctctccaaatcctgggaaagctccctggcttggcactaggggtgtgcagtaagccagaggtggtgatataggtggacaagagacaatgctccacaccccttgaactctctggtatgaaggagaaactttttttaatctctaatttttaatgtataacagatttatatttttatgttatgataaataactaaaaatgaaataacaaagaagacattcaaagtgc

SEQ ID NO: 596818 - DNA, 322 bp, Homo sapiens
ctttcttacctgatgaagaaacttccaacacaggataccccagactaatgggcaccaacggcaaaggtattaaatgcatagcaggcatcgcctagtaagcaaacaggcccctcagcgttgaacaggtcaaagtagctcccaccaccgctcatgaagttcgcattcagatcattgctacctccctgagccatactgatgccactgaaatcgaaactgaatgtgtgggcctagctttaccagtgataggccatcatgaggctgcaagtgtacgagacagctttgggccactagtgaccaacgtcccaggcgaccgaggttcccg

SEQ ID NO: 596819 - DNA, 129 bp, Homo sapiens
ggcatggagagggagtgggctctatagcgaatttagtaaaaagaggctgtcagtttgatagctgccaagaagcagcaagtaggccttgatttgtagaatgcatttttaatgtgtcgttctactttgcag

SEQ ID NO: 596820 - DNA, 1468 bp, Homo sapiens
  misc_feature (217)..(217): n is a, c, g, or t
  misc_feature (1063)..(1063): n is a, c, g, or t
atcgtgtgtcgtcgttggagtttgttcgatatgtgtatgtggtagtacataagagcaagatacaggagataggaagcaggagggcaggacagagggagcagcaggaggtaggagagaccactactcagcggtggactgggtactagcttgctttctcggtgtgtccgctattttttggcgcgcccagctgtttattagctcgtcacgcgtcctccgntccttggggcacgcccttcttgcgtgtttattgacaggaagagccgttggataaatgcccccgtgggagagggccgcccctctcttgttgtttcccgtagtttgtgccgcaggttgtcctatggagtctcgcgcacagaagtttctgcgcacacttgtgtgcgagctccccacgggatttatgtaagggggtcctccttcctgtgggtgcccacctccggggaagaccacctttgtttgagagggaggcaaccttctctccccgcgcccacctgtataggtggtgggaggttgtccgccgggaaacacagcgtctgtgttgggggttgcttagggacgtaaagtcagctcgcgggggagcacccagcgggagagtgtgtcgttttggagaagaatggtttataagcgggaatacaacccaacacgtgaagacggtgttgatggtttttctgctgggtggagagtttgttataaccacgcgaaggagcaacacatatataaacaggggggggtcaattataggctcgcccctgtggtgttgccttggcgtggtgtcttctggtttgttcttgctgcacagttcggcacaagaatttcgggctcgtcccacgcaggttttgtccacaatgaggtggggacccacacaacgaggaggagtaatcgcctggtatgagagctgttttttattttgggcctcatggttgacccaaaggctggcttgttgagaatgcttggtggtgtctacattcccttggagcacagtaacgcaccgtgtttagataaataacacatgcttttaatgacgatataatgacccacaatatgctcttgagattacctatggtgncccacaagggttccaatttccacggggatataactcggacaccacctcataccactttgtggcttttgctgttttttcttatggtggcttataagtataagaggcccactgcctcttgcacagtcatgccactcgttggtaacttaggcacttttattcttggctcacaaattcgttgaagaatggtggcttgtttcactggtgttttgtaattgtgtctaaagcacggtttacctgatagaccccatgccttgtgtagctagatttttcctgggaaagtccatcttttagggattgtttttcagatcttccataaattttttcctttaaatttcctaaaacaaaagtaaaaaatatacttcgagcattcatctcggggcgagaagagtaggagcgcccgggtag

SEQ ID NO: 596821 - DNA, 113 bp, Homo sapiens
taggagggctccaagacttgagtttcaacattgtaaaaaattttgggtctgggataaaattgtttactcttttggaacaaaaaaaaccttggacaaaggcccatatttcttat

SEQ ID NO: 596822 - DNA, 314 bp, Homo sapiens
attacagtaagtttccccagagctcataaagctggtcctctttcactttcaaaaaaaaaacagggtgggataagcaccagaagacacaggaacaggcccagtccctgcgacccaaatcagtgaggggaaaaacgactttttaaccaactgcccagggatagggatagccatctggaaaagtattaagttagactcatatgcacaaaatcccaaatgcagcagagagaaaagcataaaaaaagaaccctggccgcgcgtggtggctcacacctgtgatcccagcactttgggaggtcaaggcgggtggatcacaa

SEQ ID NO: 596823 - DNA, 518 bp, Homo sapiens
tggcttactgcggagtggacaatgttattcgatgcttacttatactacgcattatttcttctcatagggtgatatcttggtcctgttggatgtgaggagtacagttatatgtttgggattttttaggtagtgggtgttgagcttgaacgctttcttaattggtggctgcttttaggcctactatgggtgttaaattttttactctctctacaaggttttttcctagtgtccaaagagctgttcctctttggactaacagttaaatttacgaggggatttagagggttctgtgggcaaatttaaagttgaactaagattctatcttggacaaccagctatcaccaggctcggtaggtttgtcgcctctacctataaatcttcccactattttgctacatagacgggtgtgctcttttagctgttcttaggtagctcgtctggtttcgggggtcttagctttggctctccttgcaaagttatttctagttaattcattatgcagaaggtataggggttag

SEQ ID NO: 596824 - DNA, 937 bp, Homo sapiens
  misc_feature (1)..(1): n is a, c, g, or t
ngttcccgccaatgaaacacacaaagaacaaaacgaaaaaaatgccgcacatgtccatcccatttgtgttcaaagtataacccctccttttatagactctctccattgcataatgccgtttgttaataagcctgtcttataagacttcccttgcgttgtccctgctacatgtttcccccccagtaggttttttctccagattgcccgtccctgtggcgcattcattacctatgcccgactttcaaccactattcttatggtggcggcctttgccccgcccttactggtggcgtcttgccgccttaacgccttggaaatttctctggcgctccaccatgccgtctgttaacccgccttttactttgaaataaaccacttttaggcttccctctcccgttataaccaatggtatgccaccatcaacaattttacagcgtccggctaaatgtcttcattcacaaacaggctgatccaaaaagcatttcgggttaataaaagaagtacttgtacgcacacattattattgtacgaacacccacacactctgtgggtaacactcctcgacaattctcactcacacccacgtgctattttagcccccgtgtaatctatcccccaatctgggtgaagaacatgtccaccgggcgcgtggtatttttgattggcgagatgacagcctgcgggaagaccctttaaagcctccttatggtcggttttataacccccgtcccctaacatcaagtggagatatctgtggacctctttaggtgcagaaacccggaacgtttgtgttctaagggatttagtaaaacaacaagagtggagcacgagatacgactaagtgaaggacgagggggaaaaaaacaagacagggtttatatgtagcccccttgagaggagaaatgatataaatggttcttgtctccccaacaaaaca

SEQ ID NO: 596825 - DNA, 329 bp, Homo sapiens
atccaacacttgggaagccgaggcaggcagatcacttgaacccaggagttagagaacagcctgggcaacatggtgaaacctgtctctactaaaaatacaaaaattagccgggcgtggtggcgagcgcttgtaatccccgctacttgggaggctgaggcaggagaatctcttgaacccaggaggcagaggttgcagtgagccgaggttgcaccattgcactcaagcctgtgtgacatactgagactccgtctcaagaaaagaagtgatcatactgaataagcaattttatagcttacgtttcccagttaatattttagcttcagcgtgtc

SEQ ID NO: 596826 - DNA, 298 bp, Homo sapiens
ttcccttcctccagcccctgaaaacactaccatctactttcaatctgtatggatttgtctgttctggacatatcacataaatagactcaaacaatatatggcttttttttttttttggtctggcctctttcatttagcttaatgttttcaaggttcatctatgttgtatcacgtatcagtactttattttttgtgtggcacgtcatatggatataccacaatttgtttatcttttcattaattatgggcatttggcttatttctacttttttggctattataaataatgctgctgtga

SEQ ID NO: 596827 - DNA, 105 bp, Homo sapiens
tgtctgcgaaacctcagcctgcaagggatcgtgttaggaggggtcgggacgaaatcaggctctcgaagcttcataaaactcaatgtgagggatgcaatgtgacaa

SEQ ID NO: 596828 - DNA, 584 bp, Homo sapiens
agcgaggtgaggtttgagggaggagacgtgaggcaactgtggcaggaaaaaaaaaaaaaaaaaaaaaaccccgggggaaaagggggccggggttccccagggacaaaagtgatttcccaattcaagccccgtgcgtcggggcccccgagtggacactgtggcgaacccgtgtttagaagcccaaggggtgtgcgccttcgcgggcccatttgggggttgcccccaaaagggggcagaagagtgcccaataaggggaaggggtgaagcacaacctgggggccaagagaaaaaaaaacacaagcgaggcccgtcacaaagaacaggggggacccggggggtcccccgcgagcgggggtctcgaacattgttgtcgtcgcggcgagctcaggcccccctgtgaacctgggggggccccccatgtgtggacgccgtggggggggaaaccccctttgtgttgtcgagatgcgccccatatggtttgcctggcttttctgtgggcccccggtttagggggtttacgccccgacggatatggccctgtccgtagatgtgcgcacccaatttataagagagcgcagacaagg

SEQ ID NO: 596829 - DNA, 435 bp, Homo sapiens
  misc_feature (34)..(35): n is a, c, g, or t
atgggaaaatatgaactgctttcttttattcccnnctttcattcctccccccccaagcaaatcccaacattttttttcaggggggtggcttttatcctgttaaccctggaatatctttaaatgatggccaggcagatgaaacccggtccctggggggtttgcttcctttcctttgagctgtttttttggggatggatatggggaaatgttatgcccccctgataaaaaattttttttggccctttttcaagaaagatatcttatggctgggtttaataggatatttaatggctggggccttgttgatgctcccctttgataaaaaagggtcctataatttttttgaaagtttttaattttttttgaatttttttggtcctgtttgtagggttttgtgggggtctgggcccaaaaaataaagcctttttaatttta

SEQ ID NO: 596830 - DNA, 638 bp, Homo sapiens
ctgccccttgggtcttatcactcttgtaaatagttgcgcacctctaccccaattttgtatcaagcccccctgtagccacatatcctcgttgtcatttcccccccccgcaggaagccgctacacatatctaatcaagtgacaataatgtatatcaaaccatgtttcccccgtttacacgtgcttaatctcctgatcaagaggccccccttaatacacctgtattgaccaacaacaaggctcatctaatgcccactgatctgtccacccacaataagttttctccccaacctcgctcagactaatgttttatagtattattcttcggatttttcgtgaaacaccatctttcttagacaggcttaccaggttgtccgcacgtgactgggatataggcccccagctcttgtccgcgaaaacgtgtgtcccccctaaaaacatgactggaggtccgtgtctgcacgaacaatttggtggagattgttgtacaaggttcaccgcaccagcatgacgcaggtgtgttgaggggtattcccgtttttataaactaattccaacaggtattcccgggctgggtcatttcgaccccatttcccaaaaaacaatttataaaaaaaaacaaataaaccgcccacataaca

SEQ ID NO: 596831 - DNA, 119 bp, Homo sapiens
gagctccaggaagggcactgagcgctgctggcgcgaggcctcggccatccgcaggcgccagggaaagtcttctggggcgttcctgtacaatacacccttttttcttttgttttttaaaa

SEQ ID NO: 596832 - DNA, 348 bp, Homo sapiens
ggtcgacatggattttaaaatagtttttctagttatgtgaaaaatagtcaaaacaatcctaagcaaaatgaacaaaactagaaacatcatgctacctgacttccaactatactacagtactacagtaaccaaaacagcatggtgctggtgcaggagcagtcacatggacaaatggaacagaatagagaacccagaaataagactgcacccctacaaccatcttatttttgacaaatctgacaccaacaaacaacagggaaaggattccttatttagtaaatgtttttgggcaaactggctagccatatgcagaaaaatgaaactggaccccttctttacactgtatac

SEQ ID NO: 596833 - DNA, 81 bp, Homo sapiens
tctttattcatcaatagtatccgaaaaggaagaatcaggagttacaaaaacaagttaaatgcaatatagaaattaaagtga

SEQ ID NO: 596834 - DNA, 108 bp, Homo sapiens
gtatgagtgtatagatggtagaaagtcatagggctggatgaggtcacttagggcgtggccttgtctagagacatgggcccagacctggagcgcccactgcaaggagat

SEQ ID NO: 596835 - DNA, 451 bp, Homo sapiens
ttcacaaccccacgatcactaattctctttcctggctctgtagctcttcgttttctccttcctcagcctcctcttcttcctcctctgagcaccactgagttgtgacactatgactggtagtccagcgcaaacattctggatctacatctacaggtcgcaaattcagcttaagctttgccatgtgatccctggacttagttattcccggtcggataatcacaaattggtcactacggaagtcccgcattcgtacgttgtggagtgtgcaactgatgtcttgagggcagattccagtcgacttgcttaacttctttttgctaatctgcttttcattttggtaatgtaggcactccaatcttacacttttcccatatgccatgtacgaaaaacgagccaaatcagatgccggtttctctggagaccctgattggccttcacgctttggtgatcg

SEQ ID NO: 596836 - DNA, 371 bp, Homo sapiens
aaccgggccagtacctttttatggaggtatggccatggggttaaatcaaggccttggccttggcgggccattcagggaaaccatcccattaaacctttattaaggaccaatttaattaatccggtggaggaaggttccgggccactattaatttcaggagggctaattaatcctgaacctaattaaattcggagccttaattttaatcggaattttaccttttttcagataaaccattaattaagcggccaggtcaaaccagacctttggttgggtggccggattaacctgagggaaccaccatttcggtttccatataataaggcccgggtcccagcccttaaattggcattaaccatttgggaattaaa

SEQ ID NO: 596837 - DNA, 291 bp, Homo sapiens
cccccccctttttcttttttccccccaccttagccaaggaggattttgggcccctaatttttggggttttttttaaatccccaagggaaaaagaacccctttccgattttttttttggtttggttttgccgagggtttttttaacaaaaccccttttttccccccccgaaatttgttggcccggccgaaaccggggggttttgacctttttttttccggtcctttaaaaccgccaaacccctttggtttctgggccccactggctttaaaaaaatttccctgtttttttga

SEQ ID NO: 596838 - DNA, 870 bp, Homo sapiens
gtttccgatgcggggtcttcagacgctgtggaccaacccagaggggagacctccgtgagttactgcgtgcgcaagtatggtgaagattgtgtacaggaagattagtccggcacagctagtctctgtgggcacagggaacaggaatgtctccatgcccagcgcccacctgtgtcttagaaagcatgggatactcaactgataattccatctactcgagttttttgccgcgctaatagtttcaagagctcttcatccagccagtcatgaatcaatacttatacccaatgagagcctcacacattcaaggatgtaactaagcactacaggcctcacagaaacgagagatcgccagtcttggaagcttgttacaggtaccacattggggagataaaaggggtttgtgaacatgagagatgaccagaaaagcaccacgcagagaaggcaaagttacggtgtcctgttgtctcagttaactaagtcacgacctcaaataaactgtctttggctcgtacatacgagttcattctatcaaccattgtggtctggcttccacttccgttcacttcacccaaacatggctcagccaaaggaagcccgtgatctgtaggccatcactttaattgatcgttgtctacaacagtgatgcctggttgttaagccctccttacaacattcttctctcttggtttttatagctccatctctcctgcttcggtaacttgataatgcatacatgatttttctatggtgtaatttcataaaccaattaatacacaagataacaatgacgtgtatagcaaaccaccgtgttgtatagagaaaatggatgttgggatgcctctcatatgtaagttagttctatttaaacat

SEQ ID NO: 596839 - DNA, 891 bp, Homo sapiens
tgggacaggaatgtaaaattaatgggtgagtattaaaaggggggcagccactttggaacccctcatgattgcacgggcccgccacttgtccaaagggccccaacggggaatgtacttaaccccacaccgccactctgtgaatcgacgcccgctttccaacgcccacctagtgtcctctcaaattcactcacgcattgaacttgtgtagaacgccccactctcttttgaaatggtgagactcctctcatgtgctgcgccacagaaaccttgaactttgcgccctgccgcagcggcccctcaactccacactgcctcccttgtactcgcacgcatttgcgtcgccagtgaccttgagcccactagcattaaccttctgcgccccacttgttgaccctctgtgccacattgtcgccctgtgtgcgctctctccaaatgtgcacacctctccgcaatttgccccttgattcttgcggaccccctgctcatgcccccctatgcacactgagacaaacactcttctgtccgacttcgcggattcacctgtagcacacgtgtctgtgacacgcctgaaccccggtttctggaacgccatcttttgccacacacttttataccaatgtcacttactgtgcgccccaacttctctgcggcaagcctcccagtggctcttcacgaagtgcacatgtctgctccaatacttcctcttgcagcccccttgttgctccctctaagcgcgcacactcctcccactttttgcccttttttccgccccatggtcctaactcgccaactcttggcctccagggaccccctcggtcaaaccaccacttgccgtccgcttgtccttacaacccgccacacggccgggcagcgccttgctccctgggactg

SEQ ID NO: 596840 - DNA, 622 bp, Homo sapiens
ggcagtatcgaccactcccccgatggctcagacacggaggacccgtcctggagcgttatactcaaggccacaaagctgcgatcacctccttggagctcagaccccacggcacagcaacttcggcagaggaaaattctcagaatttaaagctcatacagctcccgttcgaagtgtagacttttcagctgatggccagtttctagctacagcttctgaagacaaatccataaaagtatggagcatagtatacgccagcgctttcctgtattccttgtatcgacatacacactgggtacgctgtgccaaggacctgtctttactgtctcatatttcaaaaggtggagagctatttgcatcaggaggtgcagacacacaggtctaattatggaggactaactttgatgaattgcattgtaaaggtcttaccaaaagaaatctcaaaagattacattttgattcaccaccacatcttcttgatatctacccaagaacaccacatccccatgaggaaaaagttgagactgtagacacaacagaaaccagtggtaggactctgccagaccagggtgaagaggcctgtggatatttctagaaaccttccttaatgtgaccgaaatgtttg

SEQ ID NO: 596841 - DNA, 97 bp, Homo sapiens
gggccccccgggttttggggggtggctggctggcggggccccttcccaccccccccccccccccccggatgttccattaaaacttctggggcgggga

SEQ ID NO: 596842 - DNA, 177 bp, Homo sapiens
  misc_feature (165)..(165): n is a, c, g, or t
cgtgcatgtaaaagcatcctgccagttaagaaaacaacaacaaaactctagagaagaaatgaaagcccagtttcatttctggagaggaaagaaaactcatgtgtggcatgagtttatattcaagcaaggtgcagcattattaacctatttcactacgtaataatngacacacattat

SEQ ID NO: 596843 - DNA, 343 bp, Homo sapiens
tactaaatgagtttatatgagaatatgcctatcatataggaatatgaaagcagcatagcttgctacagtgacgagccataatattgagaagcagaaatggcaaaagtaattatgagtcatatttagacttatgtagtgccgtttaaaattcccctagataattaccattcatattttattaactaggtataacatcaactgtggtcgtcagagtaaatatttcaccgtaaagataaacatgggcaatatattaaactctagctctgtttacttgcctataaagtgaggctgcacttaaaatatatttgattctttgttcgtaatacatgggaacaacaactag

SEQ ID NO: 596844 - DNA, 228 bp, Homo sapiens
attttagagggataattagagacagtaaaaggggccattttaactgttgtctgatttaacatattaacacggttcaggtcagcacattagtttgtctttatatcagcatgtcagcacacaacagtttctccatgcttgtttctgtttcacagtgcacaaatttcccttgcagcattgcaaagaccaccctgttccacccactgtcagcccacttccatttgtgtgcca

SEQ ID NO: 596845 - DNA, 1161 bp, Homo sapiens
aaagtgtaggaagatactgattagaagaagtctagatatagatgaaatagtcttagtggtggctcgactcgaattccaaagattcagcaactggttaacagagtctaacaatggcaaggaaccatcccgtggcataaaccgcagatgaagctgtagcgtatggtgctgctgtccaggctggtgtgctctctggttgactcaaggatcctgtgtgacctggtactgcttgactgactgtccccttacgcttggtcttgatgtctgtgggcggtgtcttgaccgtcttctgatttccaatggaagcacagtggtgccgtaccatgaagtctcgagatcttgtctatgctgctgtctgatttgtcggtctgtgctgttgtcgggtcgtcggggtgctcttgttctggtgttgttgcactcgcctccgtgtgtgtgcgcgcctccgtccgcccccttcgcgcgtcctctgtggccctcgtctcgttcgtcccttccctggcctccttctgtggcggtcccgcgctgtctctcgtcaggtcatcccgtgtgatgtatgtccgcctgtgtgcgtggctttcgtctgtcgggtgttggctgtttctcgctgctgaagcgtgtctgggtctctcctggtgctgtgttgcttgccgctcgctgcttctcgctccctcgcgcactttggctccctgccctctgtcgtggagtctcctttgatgtgatttcgttcccgcccctccctgggtctctgttgactcgcttgcctaccgcccgcctggcccacccccccctccccctccttctgcggagtgcgccgcgcctgccgttcccccctcggtggcgtcttgttttttcggtctgttgcgtctctttctacctcctccctccgcccggccttctcgcccctccttctcgttcacctggcttccttgcttcccgtctgcaccttctccgtgcggcgccccctcgtcgtctgcactcccgtctgctccaccccttgttctctctcggttcgtttgctgcccccttcgtttgctgactccttcgttcgcccttctctcccctccccacacctggtgtgcctggtgccctcttggcttgctggcccttctcgtttgctatctcctctctgacccgcttggccatccccgtcctgctacctcggtt

SEQ ID NO: 596846 - DNA, 328 bp, Homo sapiens
cccggggggggggccgggtttttcccttttaaaaatttttttgagggggggcccccccccccgcaaaaggcggttccaaaaaaattttttgtttcaagcccccaaagggaggaaaaagggggggcccccctaaggtttttttttgggttttctttaaaaaaaattgggtttcctggtttttttttttaatgggaggggttcaaaacccttttgtttttttgccccctcccccccgttttgtagggcaatttttttttttaaacccccgggggccggggttttttggtggggggtttttttgggttttttttaaaccccttttgtttta

SEQ ID NO: 596847 - DNA, 191 bp, Homo sapiens
  misc_feature (140)..(140): n is a, c, g, or t
ttacaggattatagacttggtctgtacttgtggaatttaaatagatggcagagaagtacaaaggaaagcaagaaaaagcagaaagtttttatcttatctgtaaattaaatatgattttttattccttttacatctaaccnattcaaaaacttatggctgtaattagggtttcggaaacccttaattaggtg

SEQ ID NO: 596848 - DNA, 347 bp, Homo sapiens
taatatctatataaaggaaggattgtacactgcccgacgtccctactgacgtcatccaagacggcacaaggcaagatcaacgaaaacgttcccatactagtccagcggaggtccgtatgttagccaatctaagtgcatccatccgtgatacagaacgccgaaggagtacggatagattgcgaaaaatcaggagcaaaattttagtcagaaaactattactacataaagccatataagaatgtgtattagttgtttcctttaagggaaaaggaaatcaaactgttggttttctatttattcagaagaaaaaataaaggaaagtgtttggaaaatatttctgatattaa

SEQ ID NO: 596849 - DNA, 338 bp, Homo sapiens
  misc_feature (14)..(14): n is a, c, g, or t
  misc_feature (111)..(111): n is a, c, g, or t
  misc_feature (135)..(135): n is a, c, g, or t
  misc_feature (243)..(243): n is a, c, g, or t
  misc_feature (331)..(331): n is a, c, g, or t
tatatatgaagtanagtacaatgaagtacaataaaacagtgtatgccctgtagtattatcctgactggatgtttacctatctacagaaacatctgaattataccatttganctttgctttaaattaagttggtgncttaacccacttaggtctggttgccttcctctctatacaaatcggccctctatgtctgtgggttctgcatctgtgggttcaaccaattgtggatcgaaaacatatagnaaaaataaaatgtgtggttgcacctgtactgaacatggtagactttttttttcttgtaattattccctaaacaataaagaataactanaatatat

SEQ ID NO: 596850 - DNA, 310 bp, Homo sapiens
gctggctaagacagtgttgtagcgtagtgagccagtgcagctgtggacgcgtgtagatgcttcaacgatagcctgagcttgtggtgctgtcagggaagagtagtcgtagtagagtggagcctgggctagctgtggaaccgttgtagcattcttgaccaacaggataaaggctgtggctactgcccaggggacagtgcctagtagtacagttgaacctagagctagtctagaggggaagttagttggatatcctagactaggagcctagacggtaggtggtagctagggcaggtgaacagtagtatcccta

SEQ ID NO: 596851 - DNA, 1960 bp, Homo sapiens
  misc_feature (1)..(1): n is a, c, g, or t
  misc_feature (131)..(131): n is a, c, g, or t
ntctgtgtgctatcgattcttttcgctgtcgctcgttctatctgtgatgatgcgcacttgctgatcttccgtctcatctgattactcttctgtgttctgtcttctttagttctcatatgtattctcttgtnatcattgatcttctttcggtctgctctgagtcttgtttgttctctttgtatgcttcttgtgctcttgtgatgtctttctttgatccttgtagcgagtacgcgtcttcggcgctcgctgtgtgtacggcgtctgctgcatatcgtcgtgtctctctctcgacttagttcctcttcgacgcacgtatgttgctatatctactgttcgtgtttgcgatgtagtgtgctctcgtttctgtctcctgtctctcatggtcagcttgcgtccgcttcgttctcttgtgtcgtattcttctctcattggttcatgtttcgtttgtcgactcgactggagtctgttgcttctctcgtgcgtgtttcctctcctgtgtttgtttctctgttccattgttttttgtgtttttgttgttgtgtgcttctcgttgtccgctggattcttgttttgtttggtcgttttgtgcttgtgtcgtttgtgttttctgtttctcctctgttgttgtgtgtgtttgtgttgtttctggtgttcgtgctgtcgtgtgtgttgtgtcttctcccgtttttgttgtgtgtggcgctgtgtgttgtgtcgtgttccgtttgtttttgtttttgtttcttgttcgtgttcttgtttcttggcgatcttgctcgtcctcgcttatctggtgcacacacttttgtgtgaccacgtcccgtggtcctccctcgcatgccgcacgtcgctgcgttttggtgtagagagggtgccgccccccctctgggggtgttagatccgcacccctcgtcttttgtgtagcacccccccgctgggtggtgttattgccccgtccccagtcttcttgggggtaggtaccgtagttgcccgcctcgtgggaccggcggtggttcgtgcccccacacgccaacagctggtgcacaccagctcgccctcgtaggtgttgatgaggtgaatgttcttctcccgcaccttttgaggagctggagcgtgtgatgatagatcacagtatatgagatagatggatgggtggacaactctcatatttctcctcaccgccgggtgcttatatagtagatatatagggcttcccaccagaggagtaaagggggggagaccttcttgtggtcacagcagctgcgcccgtgcttgtagaggtgaaggatgtcccctcctcttggatgatggggcccccaccccgcttttaatacttcctcacctaagctctctcccgcgcttgtgaagatatttgcctgtatatggttccctcgttatgcccccacgcgcacttgtgggtcccccccgtctgtgctctgtgtggcgcgcactctcgcgccgcgtagattgtgtacaccctctcatcgctctctgtgtcgccctcctgtggcgctctttgtgagaacacgctcgtgcgagagtgggctccagcgcggagagaatttttggtgagagagagtctccacgcgagactctccacgcgagcagcgcttataaaagacacatacataataaaaacacaaaagagatggtaccctcgagttgtcttccccacttattgaagaggagattgggtggcgcccgcgggaaactcctataaataataccactgagccaccttcctcacatttctggggaaggaaaaggaggactatgagcacagctggtgtgctcaccccctccctagtcaccctccacttaaccaccacgaactaatgtagcggcctggccctagcctctggccgagacctgttcctggccgaactgtggataaccgcctggagggtccggaactgttaccttctttccccttggccattaataaatttaagttaatccc

SEQ ID NO: 596852 - DNA, 893 bp, Homo sapiens
ggcgcaggctggtcctgagcagccgagctcggggtgcggtgcctgccttgcagctcccctcgggatcgcgcagccccatctttgtcctggcctccgcgctttgttctcggtgcccggggccttgtgccaagccatggaccaggcctgccgatgcagaccccactgcctgcgtgctgggccgtcagtccttcgccctccctcgccctgcctagcccaccactgagctgcggacagggcctatgcacacccccattgggttgtccccggtagcagagagcccaggaggtgtgaaaggcacagtggaggcgcgagaaaagtagagatgtgatcatgcgagcctgtgatgggggatattgacatcgagcattgatgtgtggggaagacataacagatggattggaacaaatgtgttgtgaaagacatggaacacaccttgtcggagtgacacaaataaataccacgagatgtggcattacggattgttgatgaagctcggtgatacggtcgcgtgaatggtcccagaaaaaggcaggcaaagggaccaagagtaccatgagtattacttgccattggctacttggtcgtgcttgttcccacgcccatccaaagcagcgacgctggcaatatcacttaggcactacagtacgttgatgtttcatctcatataccggggcttgcgtttgccaccaacaaaggacatgcccataattccacctggacgcacattgcgacacgtgcacgaacagcagtgacacccaaaccttggcccagattgaacacattgaaatggtaatgtggagcgcactctaacctgctcaaacttggtgcccacagtgaccctcaccatcctcatcgacacaagccacatgggccacattacatcctgcctcagg

SEQ ID NO: 596853 - DNA, 231 bp, Homo sapiens
ttctagagtatccccggctgccccgcaagacgggagggaggctggaggctggaggctggaggtctggaggctggagagatggaggagaggagcggagcagtcctcttgataaagggacatgcgaatttgcttacaaatgcagcatcatttccgggcagtgctgggtcgcaatcttcagatctgctggtcaccaatttaaagtgacgccagtttgcgtcttgcgggggtctg

SEQ ID NO: 596854 - DNA, 566 bp, Homo sapiens
  misc_feature (6)..(6): n is a, c, g, or t
  misc_feature (13)..(13): n is a, c, g, or t
  misc_feature (152)..(152): n is a, c, g, or t
  misc_feature (154)..(154): n is a, c, g, or t
  misc_feature (482)..(482): n is a, c, g, or t
tctaanacctcanacaactaaactgtgaaacattcttatttagttagatgggaacattttgctagcccattagaagcacacagaattatccttgtcctcctaatattgactttcaggaataaaggtggggggcgtgatcattcacaatacangngataggtagatatcttctggtttcccattgcaggtgatttgaaaagatgaaggtttaaatattggtaaaaggtgcaggtttttaaatgtgttcctttttcttctgtgaatatttagggcaatcggctcgctaatagaatatgtactagaggggggcgggagggaaattcctctgacttgccaaagaaaaagaagggaaccacaggggatatgctagcattttagctggccaaagggagggacgtggggaaaagggtttccattctgggaaaagcccaaaccgaatacgggcaggattcaactccaggggtttgggcttattccttttnaataatacttttaagcattctttggggggaaataaattcttaaatctccctagttttataaatttttttggaaacttaaagaga

SEQ ID NO: 596855 - DNA, 958 bp, Homo sapiens
gttcggtgtgtcagccccttgtggaacggagatactcgcaggagtggtgataactggtatcatagataccatgaaagttactcatagtgactggttgtcccgcttgcctctaggtgttttcttgctggcctatctagtagacttagctttcgtatgatctagtccggccaggtgtgcgctcggcctcgtggttccgtactaggtgtatgctcgtggactcgtgtgggggtcatcctcaagggtcgagtctcgaacgatggctggcaacttggaccagacctcgggatcctcccggcagtctcttcgcctcaagtatctggctcatgatccagatttgcaggtgtctatgatcggtatcgatggctcggttgtagatgtcgcgtgctggacgaaatatatcaatgcataatctttgtaggaccgcaaggttagtatattttatacctgattgtgcccaagtttcatagttatcaagatggttctcacactcaataggcagttggttaacatgtcttctgtctgttgggaagactggtgtcttggaaatttggctgttcatgatgactgttgacatctgtggtcttgtgggacaggtttgagtaacaagtctaccaaggtgaataagtgctggattcaatggtgtattggactgtcccattaagtccctatctcgtcgcccagggtgtacagtatttggtcatgcaggggtctagtcgtggtactgagaaatagttaactgaggattgttggaattgacaggtgtggtggacagtggaaccagatattggagaaatgagacgattccgatcagtaggcctatcgaagcagggtaataacttcaatggactgtgaacaaaatgttgtttggattaggggcattgggaaaagtagtataggaggcagaataagaggggttagagaattaataacccattggggagaaggtgagacacttagc

SEQ ID NO: 596856 - DNA, 473 bp, Homo sapiens
taaattaatatctatggctgctgaacaatttacagtttttgtacatatgcatgtactggctgggaaaaatctgtatgatggagtgggtgatgcagtcaggtaccaagaaaggcccctcacgtggtgtgtaggtccccctttcccagcaggcaggggctcctgcaagagggggctctgtcagcttctgtgtaacatcacaggcctcgtgctctgctgtggatgtcaggaaagagtaagtggggctacaggacccatctaggtctcccgtccttgggtatagaggtcacagtgattccccaaaattacctctgcctgtggcatcccccatgagaatccatcatgaagagctgactgtgtgtgcggccatggtgggtgcctctcctggagcacatgggtaggacgcagtgtgcagtgcgcaattctgggcccctcttgcccctgaagctcctaagccatccctaacggggattctc

SEQ ID NO: 596857 - DNA, 347 bp, Homo sapiens
agtcatcctctgttgcctttaagatttcagcatggtgaaggaaaagtagcagaagactgaatgcatactcagttttcaagctctggatttaatctttccatagctggaattgcctcctcctcaaaagccttatttgttcatttaattggggcaacatgaaataatgatgtatcattgacagagaacagggggcttaggttctcatcttggtcctagtgattactctatgcataacctcaacttctttatctgtacattgggaacaataattcttactccatttgttgtgttgaaactgaattatataattcataaattaaaacaccaaattctgataaatgctaaaa

SEQ ID NO: 596858 - DNA, 1303 bp, Homo sapiens
  misc_feature (405)..(405): n is a, c, g, or t
agcggatctgacggcgcggttaccatggcggcggcatttgaagcctcgggatgccttagcagtagttgtgcgactgctatgccggctgagcatgtgcgccgtgcaggtcccggcccagatgccaagacccgggcctgtgaggatcctgcgagaaccgctcaggatctcaacagcccagcgtacccgaacgggggattgtgctgttggcggcagccgcgcctgactttcgagctcaccgtgcttgctttcagagggctcgggtgcctggaaggggggctgctgggcgagtcggctttcgacgaagtgccccgtctgccgggttgccagctctaaggtccattcccctgctggggggccggcttggcgggtagctccgacttttgagattacgtagcacagcgtaanactcgtggcgcagccggtgcgcaacagaagccttgtcgtgtttcctccaagcaagtaggcttttgggacagtcctcctttgtttcctctggaacgagacctttaccgttacccccaagaatttttgacgtcattggggcttctttaccaaaaggaagcaacacgttgggcggtggattaacacgaaattaccaatttcgtggatttaacttgacacgacccaaatggggtaattaaaaacactttgggaccaggtgcgtttaaggcaagttgtttcaatgggtctgatatactttcagtgcagtgggaaccccgcgactattagtacaccacaatgaccaaagaaacgccaaagaaccggttttacaacaacaaaccgggttggattcgagttaaattatcggcgcattcgttggagggaagtcatccccttgatggccacgaaaaattttcacagggcaaaaacgttcacattaaggaaggccttttgggaccgttaactttttgggagacctcccaagaggagacagagcgtaatttaccccggcgccatacatttatgaaagtcccgttttggaaattcgaacgagggctgagggaaagtttagagggcagttatgtcaacaggacacccaggcaacaaggcgggcccagggctattccccaacgatgaaaagcgccagaacatatacaacatttgtggcagacaatttgatcagtatgacatatttcccccgttgtggcccatgttggtcccacaagtgaacaaggtgcactcggacctctgcttgtggcgcacatagggctatacattcccaaggcgacgaaaaccgttgacgttagccccggaaacacatttctcgggacgccctaaaggtgggcctttttggagccggcca

SEQ ID NO: 596859 - DNA, 939 bp, Homo sapiens
ggcccggaagtccggtccgcgacagcgccggtgtggtggtagaggagatgcgtgagctgttgggctttgccctcatcgcaggtgcgattgttgatctgatcagtgtgaggtggacatgggcagtgtgtagcgtgcagtccgggagtactaacagggggcgtcaatccaaaagttgagtgtgtcgttggaagggagtgcgtgaatcctcgatatggttgcgaaaatagtacgaggaatatgaggagaaaaattccgtgaaagaaatcgaaggacaggaagactttttgtgaatgtaggcaggtggacttgttcgcaataatatttcattgggtcaagtgttgctatttgtgtgaaagaaggatgactgggtgactttgggttcactataccattaattgtgcatagtgtggggtttcgtgttgggaagttgtaggtagccaagtgtatggtgaaaagattcacaataattgtttggaagagtcgagttgtttccttgagatgggaattttgcgtttgtcagtggaattttaaattatttgatttcccaggggaggaataggtttgttctcaccaaagttgttgaatacctcacggttacgtgggaggaattttggagttcgggtgggcatttgtgtatacacgacattgagggggcgtgacagaaatctttggaggaggatttcttgtggcaagaaaaaaaggtgtctgcgggctaggttggagatatccagtgggtgggatcttagtatttgcacaagtggagacaatgtccaggtggagagttcactaagagatgaaagggcgggagaagtccgataataggggggagtagttggacacatggcagtattgggcaggtgtttaaataagttccaatagttgggtgggaaattggaccgggggaacctttgggttctgttattgagaataaagcgtaaa

SEQ ID NO: 596860 - DNA, 400 bp, Homo sapiens
acaccctttgaacttcagctgtccttgacgagttaggtagtcagcaacgcatcgatccccgcagttaaactgtcccatacttcaagatttctactgctcgcccgggggcggcgtacgtgcagaccagccgagaacgaccatgagcctttcgaaagccgccatcgcttcatttgacgtcgacgcccagaagagcttcacgcccttgtgtcccaacgagttgcctgtgtccggtgtcgacggcattggtgccgaactcaattacatggcctgtctcggccggccaccggatcgggcggctaggacgcccagaccccccaggcaccctgggttgtttgctcagcccagctagatgctgaaacccaccgtcctgggaccgcgacacattgcaccacgacccagg

SEQ ID NO: 596861 - DNA, 358 bp, Homo sapiens
  misc_feature (81)..(81): n is a, c, g, or t
ttgtctgagatgaagctcactccatcaccaggctggagtgccgtggcacaacctcagtcactgcaacctccgcctcaagcnattctcatgcctcagccttccgagcagctgggactacaggtgcacaccaccatgcccagttaatttttttgtatttttagtagagatggggtttcaccatgttggccaggctggtctcaaagtcctgatctcagatgatctgcctgcctcggcctcccaaagtgctgggagaattctacttttttttttttgagacgggtctcactcttacccaggctggatgcagtggcgtcatcacggttcctgcagctcaagcgatctcctatctcagcctcac

SEQ ID NO: 596862 - DNA, 1231 bp, Homo sapiens
ccggtcgacacttcctggcctctggcttgtccttcctcctctgcctctgttgggcccttccccccggtgccttttcctcgaatcctttctctccattggtcgctgtcctcgtctttgggctgtgttttttcttgccttggctcaccgatgcccgttccctgtgtcctctgtgggacttcatgtgggaattgttgtctttgtgcatgttcgttccctcttatctcccgtctatggcgccttgtgtgtgcttttttgctgccgctctgtgtggtctcggcagatttaggcttcagctgggtatacgcagggtacctgtggcgttgttcctcgcgcgtgtgccatccccgttcccttgtggggccctcccatattcaatcatcccttttgatgcaattccccgtgttctgggaactttccatgtagtgggcaactaatgggtcggcgaacgatggagtgaaggtttcgaaggaaccatgctctccccgtcgttggtatgatgcctctctatggccctccttgggaaggtcagcaacagagggagggatgtggattactgtcgccggctgatttgtatgcactgtggtttggtgtacgcccgggtgcctcggtttgccaaacttttgcggcttctgcctgttgtcgaccttcttgggtgcaacgtcaactcgtcccttcttctggggcaatcgtcctgcctagcaaatggaccaagattatctttcagaggtcacctgaaagacatgtgattacattgcacctgcttttagtaatggtaggattgttcttcccagggacctcccgtatcaccctatctctgcttctttagaggtccctggagccaccaggtcaggctgaggggcagggagccggctgtgcccagtatgcctcctggaccctccagttctgccacaggtctgcctgatgccctgtccactgcctacacatgacagacaagttaccccctcatgggggatggggacctacctggctcctctagccagcacccagcgttacccctgccatctccatgcctgggccctccaggctcaagagtctcagctggccgagagtccaggccttgcctcccccgaccgagcatggagggggcagcccaggcacagcctgctgggagcccttgtgtgtctggtcacacttgtgaggcagtcactgccaaaggcaagcctcaatggccccaatacaccataactggagcgggcctgtgcacgcttgg

SEQ ID NO: 596863 - DNA, 382 bp, Homo sapiens
tgagacagagttttgctcttgtcgtccagactacagtgcaatggcgtgatcgtggctcactgcaacctccacctctcaggttcaagcaattctcctgcctcagcctcctgagtagctgggattacaggcgcctgccaccacgcccagctaatttttgtatttttagtagagacagggtttcgccacgttggccaggctagtctcaaactcctaaccttaggtgatctgcccacctcagcctcccaaagtactgggattacaggcgtgagccaccgcgcctggcccaaaatgttaattttataccttgcaaaaaggttaatttatcctcaatggaaacatatgattatattagtttcccccaacatctctggtcgacgcggcc

SEQ ID NO: 596864 - DNA, 1004 bp, Homo sapiens
  misc_feature (228)..(228): n is a, c, g, or t
  misc_feature (861)..(861): n is a, c, g, or t
gggatggtgtgcattcagagcatttgggttgggggcttcctgttccctcagccccagtcgagaggaaagagaatctgggccactgccagaaagagagtcaagcaaacctggaagggcaaatctgagagtgggaatggccaaaggccgaggcccagatttagtattctacttagcagctgccttctgggtagcagtgatgtattcctattatcctcgcctgtctgctgnctgtgctctcttccctaaagtgtacaagtgttgtgcaggaccacctccgcctacttctccaccatccctagcatgccatgccctgttcccatgatcaacctgccatgttggatgtcatgtgcagtgcactcctggagccaagagggaatgggcagggtagagagggtatgtccatgtagcctggatgctccatggtgtgcttcatgcctcccttctcccagctcagtgtgtgccctgagtggctcccttggaacatgtgcctcaaatctgacccaagggcagcatggggaagagatggttgcaggcaaaatgcactttatagagattttctattgctgggaaggtgtgtttctcccacaatttgtttgtgaatattcacttgttttataaatgtctgacctgtcttgaagaaaaaaaaaaaaaaaaaaggggggggggggttaagagttatccttggggggggccaggtttgggttacccggtttatttgtcaattgggcctaattggggggtttaaagttagggtgggggggtttaaatggttggtggggaatggtgttgggtattggggggcctcatgtgggggttaatggccatcctaggggttagtgatggataaattattggattggnacagtggtgtgggtggagtggtggtgttgatagggtgttttatagagtctagtggttgagtaggatgaggtgagtgtgttttatgtgtgttagaattgttagtatagagattgatggtttgtgtgtagtgtatgtttagtgta

SEQ ID NO: 596865 - DNA, 256 bp, Homo sapiens
cactttctgcatatgaggatatgacctacatcctcttgcttaatgtgtgaactaacccatctgcctctgttccctcctgttcatagatgggggctcactgagtgctaatgagactacccaggtagggaccagccacacacaggacttcacgtggatccagttctctttggtcccgactcatatgtaaacaactacctataaataatactcatatacttgtaaggttgtccagttcaaaagactggcccctgtataa

SEQ ID NO: 596866 - DNA, 190 bp, Homo sapiens
ccgtttaggcgcatggactgtattagtccgtctggtcgtccaggagccatgtcatcggtcttacgcgaccaccaacgtggtatagacaaattcgcaacggaccatggacagcctcacccatcaccgccgagaacttcctcggcatagcccttgtcatcaatcgctcgcaggatggtcctgcctttgtgtt

SEQ ID NO: 596867 - DNA, 135 bp, Homo sapiens
tctaacccacaggttactgcgccgaccacacacacacacacacacatagcacacacacaacctaatcatgtaatgatagagcatctggcacacgcatgacaatataaacatgaaataaatgggcctgtgggcttg

SEQ ID NO: 596868 - DNA, 436 bp, Homo sapiens
attgtgggttacaaccagcattaaaaaaaaaaaaagggacaacagagtgcaacataagggatatggttctggtgaagctttctttcaattattcacaaatatattgggtatgtacggggttacaaaataaagcatttctatggaacagggtcaaaaaaatttttggaagttacggtagttgatcttaacacggtcagccaccaaagtcatcggctttaggggataagggaaagaccattcttcacttttaacccaaagggcataaaactaaattggaagtcggtataagggccttaagatatatacagaagtaaaacattttggtctcctaaagtaaaattctggaaacgggaaaaaatcctatttccctcacttagtggaagcttttaaatatcagatggctggagggcaaaagccaatactggaggcgggacga

SEQ ID NO: 596869 - DNA, 1552 bp, Homo sapiens
  misc_feature (524)..(524): n is a, c, g, or t
  misc_feature (541)..(541): n is a, c, g, or t
gtgaccaacatggaaggcgcccaggtcctaattcgggaaacgtgcaccttgactaatacggtttgctgtggcatactgaagagcaggctatggcgggcggaggcgccagtcggatgtcttcatgcaaggaatcgttcttctgtggacataaggcctcacttaccgactccgtccgggatgctcttctagaagcccggtgttttcgaggtggcatgtgcatccacgggctcgtccgaatacaagcaagcagatggaagaactggacaccgaggacccctactggaagggaagaactgtcacacgttgatacgtccctgtgaggactgaccagtacacacgacggggtgcatgcgcacgaatgcgctgtttttcgccagtggcccaacgcggaaagtgtccttttcattacaacctcgggtggacaatgagatatcagatcctggtgaccgctgacgcatgttggctgtgaatgcaactcgaagtgaggactcgacaatatcatgcttgggtaggcccaaatcggnatagtccgaaggaattncaaaggggtatcccagggccggaagccaaaggtaccagccggctaaaagaaggtgggtctgcgagtggtgcacgtagattccgagaagtccataggaagaggagtggccatactggttttgcaaccctggaccacgcaagtatgttgagaaagatcacgtgggtcccttccagggcagggacctcaaacgcgatcgctcactaagcggggcccagctagggcgcgggaaggaactctctagggtgtaaagcgcaaaaggggcccgtggcgttctgtgtggcttcggcacacgtggcccgtggggctagagcgttatcagggggcccataaccgcatacccaattttccggaatttatggtcccccttgaaggacacgggttgccatgtgggaggccttccacgaagttccttgctcggggcattgcgaaaaggaaagaattagctccttaccacataccaccgaggggcctttgttggggacattccgtgccagtagaacaagccctggcgacaagttggtctcccctgtcgtttccgatctttgaacccgttctgtggcccaggccctttgtggttatggaacgccccggaaagcccaaagggagatatggtcccagtgcaatggccctggggtggttgcgcagtgccacgcaagaaggcgtgtgctcggacaaacggcggtagaccggtcaccacccgaaggcgggggacccccaatgggcgcaagacaccaggccaccgcgtttcacgtgggaagctgggaacaggtcccaggggtggtgaactagacccggacgaggagcacagggctgtacgtgcacctcgaccaacaacagtgcggcgggtttcggggccgcaacacacgcggggaacagaagatgcaaccgacgtagagggacgacgggtgcccccctaaagagcaggacgcagacacaagaacgcgcgcaaagtcacgcctaagcggatgctgacgcacaaggaagaagacaagtaggcaggcgacagacgac

SEQ ID NO: 596870 - DNA, 470 bp, Homo sapiens
ttgtccccatgtcctgtaaagtatctctgtctcccagtggaggacctgaatttgaaggccagcaggagcctccttttctgtccccagccttgatagggccaccaggtacaaccaggtctaagagggaggaccagggtccatgtcgtcccagcaacccccactgtcactgttcctggccccaggtcctgcccctacccagggtccccacctccacggcccatctcattttctgttctcatttcacagagttgtacaaggagagaactcagcatgggagggttggttctttggttttgtttgtttgtttgtttgtttgtttaatttaataatttgtaaagtgatgttcctcttcctttttacagttttcagctcatatttaacctctgtttggaaaacgatccttgtaactgtacattttttttttttgcctcctaataatgacaacaataaattaccaattttgtgttaaa

SEQ ID NO: 596871 - DNA, 127 bp, Homo sapiens
  misc_feature (67)..(67): n is a, c, g, or t
  misc_feature (82)..(82): n is a, c, g, or t
  misc_feature (108)..(108): n is a, c, g, or t
aaattgctaatgtattctccccccttcccccaacgccatgacatggccctgtgtgtgtagatgttcncccacgcgtgtgtcnccggtgttctcacttcttcagttccntcatccttgggacggggta

SEQ ID NO: 596872 - DNA, 189 bp, Homo sapiens
atgaacgcagttctgcactgggcagcctgacactgctctgcatgaactcacattggagtagctgctgctatcggagtggctgcagatccagatgagctaataagagggcgacctatcactggaacattgattcatcgtggcacaagtgtagatcgtgtaccgaagcagatcactggctatgcgcatagg

SEQ ID NO: 596873 - DNA, 185 bp, Homo sapiens
gagaatacggagttcagcagggtgctcactgttgtcgacggaacttgtacaggcaggcatgcaccgtagtggtgaatacacgtcgaccaggctccatcttaacgatctgagagacgtcattcacggtgctcacgtgtcgacggaactatgtacagggaggcatgcaccgcagtggtgaagtacac

SEQ ID NO: 596874 - DNA, 112 bp, Homo sapiens
gtaaaagcacagaggggacctggggtgcatcagctttctgtagggtctgggaccctgccggatggctgcctcccccatccccaacacagcttggagcacttcgcaccgtcta

SEQ ID NO: 596875 - DNA, 353 bp, Homo sapiens
ttacactcacttgctcctatgacctctatatgactgcaatgacttgcatgtacatacgtgctataactttggcgcttccatcaagagtctatcggcaaatgtgttagtgagctggaggacgactggtggcagagttttcactgagaaagcactgacgataaggcaaatcattgatgaatttgattacatcctcaaaaacctaaagacggaaatatcattcgactcagcaatcccattactaggtatatacccaaaggaatataaatcatcctattacaaagacacatgcacgtgtatgtcattgcaaaactatccacaatagcaaagacatggaatcaacctaaatgcccatc

SEQ ID NO: 596876 - DNA, 586 bp, Homo sapiens
tgagacagggtctcattctgtcatccaggctggagtgtagtggtgtgatcttcttggctcactgtaacctccacctcctgggtccaagtgattctcgtgcctaagcctcccaagtagctggaattacagacatgtgccatcatgcccagctaatatttgtattttagtagagatggggtttcaccatgttggccaggatggtcttgatctcctaacctcgtgatccacccagctcggcctcctaaagtgctgggattacagtcgcgagccaccgcaaacagcagacacccttgtatctttccagctgtctttgatggtagctttaagcttcataattccatcagggatacactactggttttttacttactctttggctaaggcagagaagctctaagaacttccacttggttcttcctttcaatgaagttcttactacacacacagtcaaatgaggcttacagatactagaaatatcatggccagacataccttcaagaatggagtgaagaatcatagtatgggttcaaagtgaaactgggcatgatggactgtgtaatgtatattgtgctcagttcaaaatcta

SEQ ID NO: 596877 - DNA, 379 bp, Homo sapiens
tatttaaggtacagatggtcctcagttacaatggttcgacttacaatatttggactttataaatggtgcaaaagtcatacgtactcactagaaacagtactttgatttttgaatttttatcttttcctaggctattggtatgtggtagtatactctcttgtgatgctgggcagctcccagtcagccacacgatgacaggggtaaacaaccacgagatgatcaacactttattataaaataggcttcatgttattttgttcaaccgtaggctactgtaagtatgctgagtacatttacagaggctagtctaagctatgatgttcagtagactaggtgtattaatgcatttttaacttaatagtattttcaactattgctt

SEQ ID NO: 596878 - DNA, 141 bp, Homo sapiens
tacatgactgtcaccgctcagctgctcctcacgctcgggactgtcgctgctcttcttcttctccgccggcaggtgcgggcagcgctcctcctcctcctccaccctggcctctaggtcatggcagtctctcttctaattcct

SEQ ID NO: 596879 - DNA, 2380 bp, Homo sapiens
  misc_feature (2192)..(2192): n is a, c, g, or t
  misc_feature (2195)..(2195): n is a, c, g, or t
  misc_feature (2211)..(2211): n is a, c, g, or t
  misc_feature (2218)..(2219): n is a, c, g, or t
  misc_feature (2242)..(2242): n is a, c, g, or t
  misc_feature (2254)..(2254): n is a, c, g, or t
tttttggggtctttgctcatgaactataatatgactaagctgtgcatacatagtttatgcaaccgaaataggttgggcagcacatactatacttttcattaatacttttaacaattgtagtatataaagaagggagtgaccgaaaacggtcgggaccgaaaacggtgtatataaaagatgtgagaaacacaccacaataccatggcgcgctttgaggatccaacacggcgaccctacaagctacctgatctgtgcacggaactgaacacttcactgcaagacatagaaataacctgtgtatattgcaagacagtattggaacttacagaggtgcctgcggtgccagaaaccgttgaatccagcagaaaaacttagacaccttaatgaaaaacgacgattccacaacatagctgggcactatagaggccagtgccattcgtgctgcaaccgagcacgacaggaaagactccaacgacgcagagaaacacaagtataatattaagtatgcatggacctaaggcaacattgcaagacattgtattgcatttagagccccaaaatgaaattccggttgaccttctatgtcacgagcaattaagcgactcagaggaagaaaacgatgaaatagatggagttaatcatcaacatttaccagcccgacgagctgaaccacaacgtcacacaatgttgtgtatgtgttgtaagtgtgaagccagaattaagctagtagtagaaagctcagcagacgaccttcgagcattccagcagctgtttctgaacaccctgtcctttgtgtgtccgtggtgtgcatcccagcagtaagcaacaatggctgatccagaaggtacagacggggagggcacgggttgtaacggctggttttatgtacaagctattgtagacaaaaaaacaggagatgtaatatctgatgacgaggacgaaaatgcaacagacacagggtcggatatggtagattttattgatacacaaggaacattttgtgaacaggcagagctagagacagcacaggcatgttccatgcgcaggaggtccacaatgatgcacaagtgttgcatgttttaaaacgaaagtttgcaggaggcagcaaagaaaacagtccattaggggagcggctggaggtggatacagagttaagtccacggttacaagaaatatctttaaatagtgggcagaaaaaggcaaaaaggcggctgtttacaatatcagatagtggctatggctgttctgaagtggaagcaacacagaatcaggtaactacaaatggcgaacatggcggcaatgtatgtagtggcggcagtacggaggctatagacaacgggggcacagagggcaacaacagcagtgtagacggtacaagtgacaatagcaatatagaaaatgtaaatccacaatgtaccatagcacaattaaaagacttgttaaaagtaaacaataaacaaggagctatgttagcagtatttaaagacacatatgggctatcatttacagatttagttagaaattttaaaagtgataaaaccacgtgtacagactgggttacagctatatttggagtaaacccaacaatagcagaaggatttaaaacactaatacagccatttatattatatgcccatattcaatgtctagactgtaaatggggagtattaatattagccctgttgcgttacaaatgtggtaagagtagactaacagttgccaaaggtttaagtacgttgttacacgtacctgaaacgtgtatgttaattcaaccaccaaaattgcgaagtagtgttgcagcactatattggtatagaacaggaatatcaaatattagtgaagtaatgggagacacacctgagtggatacaaagacttactattatacaacatggaatagatgatagcaatttgattggtcagaaatggtacaatgggcatttgataatgagctgacagatgaaagcgatatggcatttgaatatgcttattagcagacagcaacagcaatgcagctgcctttttaaaaaagcaattgccaagctaaatatttaaaagattgtgccacaatgctgcaaacattataggcgagcccaaaaacgacaaatgaatatgtcacagtggatacgatttagatgttcaaaaatagatgaagggggagattggagaccaatagtgcaatttctgcgatancancaaatagagtttatancattttnnggagccttaaaatcatttttaanaggaacccccanaaaaaatcgttagtatttgtggaccagcaatacaggaaactcatatttggaatgagttttatacactttatacaagagcagtaatatcattgtgattccactaatcattttgggtggaccgtaaac

SEQ ID NO: 596880 - DNA, 421 bp, Homo sapiens
tgatggagacgccatcctcttggcccagatggggaactgagccgcaagcagtggctcggcagccactaaggccgaggtttagaaaagtaccactcttgccaagaaggaatgtgagggaaaggccaggaggctgggcgatgctggtggtgtgactttgagctggcgtcgtggtttgtggcgtcctcagaccaagcagcggcagcacggcacaaaggttggggcatggcttcttcacacccagctcctccactcacatgtgctgcaaccccgggcaagccgcttgcctccctgaacctcagttttctcatccataaaatgaggtttaggatcataagactgccttggctgggcgtagtggctcacgcctgtaatcccagccattcgggagtttgaggcaggagaatggcgtgaacccgggagg

SEQ ID NO: 596881 - DNA, 1112 bp, Homo sapiens
tttttggggtctttgctcatgaactataatatgactaagctgtgcatacatagtttatgcaaccgaaataggttgggcagcacatactatacttttcattaatacttttaacaattgtagtatataaagaagggagtgaccgaaaacggtcgggaccgaaaacggtgtatataaaagatgtgagaaacacaccacaataccatggcgcgctttgaggatccaacacggcgaccctacaagctacctgatctgtgcacggaactgaacacttcactgcaagacatagaaataacctgtgtatattgcaagacagtattggaacttacagaggtgcctgcggtgccagaaaccgttgaatccagcagaaaaacttagacaccttaatgaaaaacgacgattccacaacatagctgggcactatagaggccagtgccattcgtgctgcaaccgagcacgacaggaaagactccaacgacgcagagaaacacaagtataatattaagtatgcatggacctaaggcaacattgcaagacattgtattgcatttagagccccaaaatgaaattccggttgaccttctatgtcacgagcaattaagcgactcagaggaagaaaacgatgaaatagatggagttaatcatcaacatttaccagcccgacgagctgaaccacaacgtcacacaatgttgtgtatgtgttgtaagtgtgaagccagaattaagctagtagtagaaagctcagcagacgaccttcgagcattccagcagctgtttctgaacaccctgtcctttgtgtgtccgtggtgtgcatcccagcagtaagcaacaatggctgatccagaagtttccagatgaggaaactgacgggtaccaagcttaatgacttgacgaagctcatagagattagcaggtagtacaatattgacggtggactcctaattcgcggagtctacccgggccacgggtggaaatgaaggcggacagagctccgtgaatggttgcacggccgagtctatccaaagagaataccccaagaacacgcaagacatggagccacgaccaagacaacgtcaggaaactccacccacacacacacagcgacacgcgcacag

SEQ ID NO: 596882 - DNA, 490 bp, Homo sapiens
gcgaattcactagtgattatccccggttcctgggtacagtggctcatgcctgtaatcccagcactttgggaaggccgaggcggacggatcacgaggtcaagagattgagaccaccctggctaacacggtgaaaccccatctctactaaaaatacaaaacattagccggacatggtggcagcaacctgtagtactagctactctggaggctgaggcaggagaatggcgtgaacccgggaggcagaggttgcagtgagctgagatcacaccactgcactccagcctgggcgacagagagagactccctctcaaaaaacgaaacaatgttcttggctgggcgcagcagctcacacctgtaatcccagcagtacgggaagttgaggcgggtggattgcttgagcccaggaattcaagaccagccagggcaacacagcataagccccacacctcttcgaaaaaacacaaaattagccggtcattgtggcacaccc

SEQ ID NO: 596883 - DNA, 2561 bp, Homo sapiens
  misc_feature (342)..(342): n is a, c, g, or t
  misc_feature (345)..(345): n is a, c, g, or t
  misc_feature (360)..(360): n is a, c, g, or t
  misc_feature (424)..(424): n is a, c, g, or t
  misc_feature (486)..(486): n is a, c, g, or t
  misc_feature (498)..(498): n is a, c, g, or t
  misc_feature (512)..(512): n is a, c, g, or t
  misc_feature (2373)..(2373): n is a, c, g, or t
  misc_feature (2376)..(2376): n is a, c, g, or t
  misc_feature (2392)..(2392): n is a, c, g, or t
  misc_feature (2399)..(2400): n is a, c, g, or t
  misc_feature (2423)..(2423): n is a, c, g, or t
  misc_feature (2435)..(2435): n is a, c, g, or t
tttttggggtctttgctcatgaactataatatgactaagctgtgcatacatagtttatgcaaccgaaataggttgggcagcacatactatacttttcattaatacttttaacaattgtagtatataaagaagggagtgaccgaaaacggtcgggaccgaaaacggtgtatataaaagatgtgagaaacacaccacaataccatggcgcgctttgaggatccaacacggcgaccctacaagctacctgatctgtgcacggaactgaacacttcactgcaagacatagaaataacctgtgtatattgcaagacagtattggaacttacagaggtatttgaattngcntttaaagatttattngtggtgtatagagacagtataccgcatgctgcatgccataaatgtatagattctattctagaantagagaattaagacattattcagactctgtgtatggagacacattggaaaaactaactaacnctgggttatacnatttattaataagntgcctgcggtgccagaaaccgttgaatccagcagaaaaacttagacaccttaatgaaaaacgacgattccacaacatagctgggcactatagaggccagtgccattcgtgctgcaaccgagcacgacaggaaagactccaacgacgcagagaaacacaagtataatattaagtatgcatggacctaaggcaacattgcaagacattgtattgcatttagagccccaaaatgaaattccggttgaccttctatgtcacgagcaattaagcgactcagaggaagaaaacgatgaaatagatggagttaatcatcaacatttaccagcccgacgagctgaaccacaacgtcacacaatgttgtgtatgtgttgtaagtgtgaagccagaattaagctagtagtagaaagctcagcagacgaccttcgagcattccagcagctgtttctgaacaccctgtcctttgtgtgtccgtggtgtgcatcccagcagtaagcaacaatggctgatccagaaggtacagacggggagggcacgggttgtaacggctggttttatgtacaagctattgtagacaaaaaaacaggagatgtaatatctgatgacgaggacgaaaatgcaacagacacagggtcggatatggtagattttattgatacacaaggaacattttgtgaacaggcagagctagagacagcacaggcatgttccatgcgcaggaggtccacaatgatgcacaagtgttgcatgttttaaaacgaaagtttgcaggaggcagcaaagaaaacagtccattaggggagcggctggaggtggatacagagttaagtccacggttacaagaaatatctttaaatagtgggcagaaaaaggcaaaaaggcggctgtttacaatatcagatagtggctatggctgttctgaagtggaagcaacacagaatcaggtaactacaaatggcgaacatggcggcaatgtatgtagtggcggcagtacggaggctatagacaacgggggcacagagggcaacaacagcagtgtagacggtacaagtgacaatagcaatatagaaaatgtaaatccacaatgtaccatagcacaattaaaagacttgttaaaagtaaacaataaacaaggagctatgttagcagtatttaaagacacatatgggctatcatttacagatttagttagaaattttaaaagtgataaaaccacgtgtacagactgggttacagctatatttggagtaaacccaacaatagcagaaggatttaaaacactaatacagccatttatattatatgcccatattcaatgtctagactgtaaatggggagtattaatattagccctgttgcgttacaaatgtggtaagagtagactaacagttgccaaaggtttaagtacgttgttacacgtacctgaaacgtgtatgttaattcaaccaccaaaattgcgaagtagtgttgcagcactatattggtatagaacaggaatatcaaatattagtgaagtaatgggagacacacctgagtggatacaaagacttactattatacaacatggaatagatgatagcaatttgattggtcagaaatggtacaatgggcatttgataatgagctgacagatgaaagcgatatggcatttgaatatgcttattagcagacagcaacagcaatgcagctgcctttttaaaaaagcaattgccaagctaaatatttaaaagattgtgccacaatgctgcaaacattataggcgagcccaaaaacgacaaatgaatatgtcacagtggatacgatttagatgttcaaaaatagatgaagggggagattggagaccaatagtgcaatttctgcgatancancaaatagagtttatancattttnnggagccttaaaatcatttttaanaggaacccccanaaaaaatcgttagtatttgtggaccagcaatacaggaaactcatatttggaatgagttttatacactttatacaagagcagtaatatcattgtgattccactaatcattttgggtggaccgtaaac

SEQ ID NO: 596884 - DNA, 217 bp, Homo sapiens
tcagtatcatctccctggaccctgggcagtactgcccccttttcacgcctctcccattggtccctggcctcctctgccccatccacgctgagttagccttccccgtcctcgagccccatgtctcgccataggtaaccttgagagactgggcacgattccatgtgcacgctgctgcacttgagacggggctcgaacttccatttccccacattccacc

SEQ ID NO: 596885 - DNA, 135 bp, Homo sapiens
gtagtcatctagatgatcccttttatatcagcaacgcacctacccttcgcctgcttaggagggacccacctagggcccatctcagtaaagggcacagaactagcttctgggtgtgctgccttctcaaaagggaaa

SEQ ID NO: 596886 - DNA, 1289 bp, Homo sapiens
gggccacccttttagggcaccgctttgtgttttatgcgagtggtgtttcttatcttgctgggggcctatgttcgaaggggccttgtttttcactagccccgcgcgccccctgagggtttccacgcttttacgtcttttttccggcggggtgttctcttgaaaaagggtgtgtccccgcaccttgtgggtgtagagaacgcgggtatataaaagtgtggtttttaagaggcatttttggccctgcaagagttgtggtgacacacggggtgtgttctcgggggggtgttcccacggaattgccgacttgtgccctgctgtgctttttggggggtttttatgtgtgtgtgttccccctctgccgtgcgcccttgtgtccgctgcgctgttaccgcccccgtgtttgtcgcccctgtgggaaccacagggtcccctttgtggaaataaaaattttccccccgaagggggaaatttctctggtagccgccaatacccctaaagccccgcgggtgttgtttcctcaaattccatagccggggattaacttttagtgtatgtttatatagagacatggtctcgggacacttactcgcttgaacacgttaaagattgtgtgggggctttgagaacgatcttgtaaatttgtgggggccaccccgtaaaagggtgtgaatcccccccgagagggctgtaatctttgccccaaaatccaacgcggcaacacacggagtatttgtgggtaatataaaagacccccggtgtttctcagcgactgtggggacatctttttctatagaaaatatataggggggtttagagaataggggtgttggacacgcttatatatttgttaacacccaatatttcgcggagaagagaagagattgtgtatatttttcacacagcactgttttgtgggttttgtggcttctcctttgtccaccaagttctttgttaacgctttgtggaattgttacactaaataaaagattctccctcctggagttaatatttttttttgtgctcatactctggggaatatatggaaatcttcgcgggcctttaactcggtaacaccccacagttgtgcccaaagaggtgtgaattcacctctttaagcccggaacactggtgtaatttgcacgccctctttccagccacggtggagtggttctcttttttaaaaacacttcgtttaacggggaaccccttgaatattttgagagggggaagttaaatataaaaaggtataggttttttttttttttttaagaaaaccattaacctttcca

SEQ ID NO: 596887 - DNA, 120 bp, Homo sapiens
tgccagaacagaagtgcagcatgctgcacaccaactcaagggtgacctcctccaacaagatggacaggatggagctgccgtacatgtccaccaccttctggcactctttcgacagggact

SEQ ID NO: 596888 - DNA, 179 bp, Homo sapiens
gcacctcttgttgtggacatcacttacgctttctcatagtgcatgtcacttatgctttcttggtgccctcccagatgacccccccttttggccattacaaaaaggttcaccccgcaaggggcaggcaagggttgtctacttacttagaccttcaagtgtggtgttcagagacaaagcca

SEQ ID NO: 596889 - DNA, 181 bp, Homo sapiens
  misc_feature (117)..(117): n is a, c, g, or t
  misc_feature (146)..(146): n is a, c, g, or t
  misc_feature (163)..(163): n is a, c, g, or t
aagtcaaggttgcccccaggcggtccttcctggtgctttggaatatgttattccactgccctctgggactccattgtttctgatgagaagtcagctgttaatcttattggggtttcnttacttcgacccccaccacttctgggagnggagcagcttctcggantacgtgcagtgcgtcctg

SEQ ID NO: 596890 - DNA, 191 bp, Homo sapiens
ccggggggtttttgttcacccgggccccccgtcttccccccggtccccccatttataggcataaaatccccggtttgccacccccccttccccccccccttttggtccattggggtaaaaaatgtaaaccaaaaaaattttatgacccacctggggggtgtgaaagagagaagaaaacctggaattcttta

SEQ ID NO: 596891 - DNA, 844 bp, Homo sapiens
ctccagtgcgcggcgtctgtggcagagccgggctgcgagcggcgcgcagcacgcaggggaaaacgagctgagcggaggccaaagtcagccgggagacagctgcggctctgctgaagcagcaccgaactagaggggctggggccacgcagcgccattgacaagcaatgcgcggaagcaaacagaaacaacacacgagcgacagcaccagcaccaaggcatgacatcgactcttgcactgccttggctgccagaacatagcaacgcgagcctggtgctgccaacacgaacagcgcagccctccaaaacgctcaacaagcgcgcaaaaccgacaaacacagagcacacaccacaaagcaggactcctgcactgcacaccatgactatcctgcaaacgaacctggcacaccaatcgctcttccggaagcctcaaggccactcacaacggctgaccagagcacaactgtcgcccgtgaaccccaacacgaaaacacatgcacgacggacattcaccctccccaagcacttaccacccagcacggcacaggaacaggaacgcggccaacacacgcagacgcttccctgactggactccttgactcgcccacaccaccttggcccggcattacccgccctcccagacactccaacacaagacctggcaaaacccggtacaggctggaacactgtacctcctggcgaagtctgctgacttaattggattcattcttgaaccagatctttaccgtaacactaagccctacacggggcaaggctccacagcattccaccttacaaagcgcggaatgagggcccgaacgacggacagagggatttcccgccacgc

SEQ ID NO: 596892 - DNA, 263 bp, Homo sapiens
agagacccccctcgtactgcgctgccacagtctcatcccatttccagctctgtattaaccaccaagctgcatcggatggggcaagacctaagctcattaatttccaggtggaggaaatggaggaggggcacgtcccttcattctagggaggagcatggaaaggaggccaacagctggatccttcttgcccaggaagcctggtgcatacctttcccccgagcatgggataggcctgggtttttcaaggccaagggccctcaggg

SEQ ID NO: 596893 - DNA, 295 bp, Homo sapiens
  misc_feature (5)..(5): n is a, c, g, or t
  misc_feature (114)..(114): n is a, c, g, or t
tctcnaccaccacaaatgagactctgggccatagtttcccttcattgacctctctggatgtgtcttaagggacttcacggagggtttcaagcttccaccaaagtgtgccctganctccatggataccatctctttagagcaaaggaccaggggcggacaatggcataagccccaggtttgacgaccgctagctgtgagtgagggaggaggctgggcttcctggagcctccgccacgaccccaatagggccctccttgtctgcccctctgaaactagcgcagcctctgcactgatt

SEQ ID NO: 596894 - DNA, 414 bp, Homo sapiens
  misc_feature (184)..(184): n is a, c, g, or t
tgccacgatctcgatcttggttcactttacgctccacctcccaggttcatgccattccgctgcctcagcctcccaagtaactgggacttcaggagcctgccacaacgcctggctaatttttagtattttcagtagagatggggtttcaccatgttagccaggatggtctcgatctcctgacctnatgatccacccgcctcggcctcccaaagcgctgggattataggcgtgagccaccgtgcccggccaaggcttaataatttcttgtccaacccttgtgatactctcattctcccagaaagtctaacagttaaagatagaaattttttcagtgtctccacatcgtaaataatattggtatacctcatgatctcctagtttctgcacataatttgctgacttcagtaccctgag

SEQ ID NO: 596895 - DNA, 130 bp, Homo sapiens
gtgagaacaaggtgggagggaggatggtgcgtcatttaacattaaattgccatctctctacagtatgtggctgaacatcatggaccttcctccactctgccccgtagagctcccactgttagcaaaactg

SEQ ID NO: 596896 - DNA, 296 bp, Homo sapiens
aaatagtcataattagtgtgtttctcattgagaaatatactgggataaatggccgggtgcagtggctcatgcctgtactcccagcacttcgggaggtggaggcaggtggatcacctgaggtcatgagctcgagaccagcctggccaacatggtgaaactccatctctactaacaatacaaaaattagctaggcatggtggcacatgactgcatgactgtaatcccagctactcaggaggctgagaactagaaagagatacgtgggacacccgacaactgccgaaaggccgatctga

SEQ ID NO: 596897 - DNA, 919 bp, Homo sapiens
tttatgtaattaattaaatcagggatatagatttgatctgtaatttgggtataattctaatctttgctgaaatcacattcaagtataatgaggcaactttatgcaaatgtacttgttgtgacaacaataacattttcctttttttttttttttttggaaaagtctcgtttctgtcacccaggttggggtgcttggtggtgtgaccttggctcactggcaacctctgcctcccggtgttcaagcaaattctactggcctcagtcttcctgatgtatgttggtgttaattcacaccacctatgcccagctattttttggttcttttctagtagagacagggtttcacctattattgggccaggctgtggtttcgaactcctgacctcgtgatctgcccgcctcggcctcccaaagtggtgggattacgggcttgacccagcgcacccggcaacaataacttttaataggctttgtctcattctaatgattattataccttctacctagggggcacttggtcctatttttatttttaatttaatttatccatttttttggagacagagtctcactctgtcaccaagttggcttgcgtggcccaatctcagctcactgcaacctccgctccaggtgagtgatctccagctcagcctcccgagtagctgggactccaggccgtaccaccatcccagattttttggctttagtcacacagggtttccccctgtcggttcgagtgtctccatctcctgactcgtgtccgcacttggccccaagtgcgggttaccggttagccccactgcgcattttcgcttcttctgttggccctgtttggcccttaaagaacttccctggtcctcccactttttggtcgttaccggtttcaaaagggcctcgcgcccttgctctttagcgcgaga

SEQ ID NO: 596898 - DNA, 219 bp, Homo sapiens
  misc_feature (6)..(6): n is a, c, g, or t
atctancaaatataacttacccacgcaagcgttttcacatagctatcttgtagaaatggactcagatctgtatcataagcaagttgttcggggtcttctggggagaggatccacttctgtagggaatgaccggctatcacaatcacttgccatgctcgctgtgctagattaccatgtcttgtgttaatcattcctaccaggtttcttttgtcagaagca

SEQ ID NO: 596899 - DNA, 2027 bp, Homo sapiens
gacgcagcctacacctacttctacaagggcaccaaatactggaaattcgacaatgagctgcctgctggatggatgccctgtgctaccccaatgtccatccatgcgtggacttcatgtgtgctgccagtgatgcactgtgtgagccagtgcccccgcactggccctgactgtgtgacctgtgccgcccattcaacctcccactggcggcgtgacatgaatgaccctgtgggactgggcacagactgtcacggatgtgtgcttgacacggtcgtggtgtgggacttgcgcggaacttggcgagcaacatatctgctgtgcgcccagtagtggactccaacccacaactgtgacacgttatctctggcccatagactacgaccgcttgggaacagagcttgcaaagaacttgctccacgtgaacgccgcttgtggccacggcgtcacctggctgcagaccggctgcgctggcacttgagcctgacttcgcgcatggcgtcagcgtgcccttcgcccttgtctcttgccctctacttgcccgcctacgccctgacgcgacgccatccgacccactaccggcacgctcgctgcgccttcgccctcgcgactgcccacgccgcccaccagccgcgcattgccgtaccctacagtctcgctctcacctagtaccttcactcaccacctaggcaaaacacgacggcacctcctgccctcggcacacagaacgaaacggcttgccgcgaatccagtggaagaccgagaactcccacacggcaaaaccgctacccattcgcgagtaaagcaccgcgcgatcgaccaatccacgccggagctagcagaggtgcaccattgtataggtacatcagtccttcgcacagccaacttgaagactattccaccaaggcgggagtgaacattcagccacatatcaatagcagacacacaacaaacaagagactaacgcagtagagactataccacctacttaactgtaccaggcacccacaattcctaataccactactagaacacccaactgtcgatcacattggaacacatcaccgtgaaatacactacttccacaatttacagcagttccagcacacttgtgattcaccagatgccgacatggccttacacgcgcgaagcacacgtgactacatcgcacggagcctaacctatatcggtcaccataagcactacaatcagaatacgtaaccactcaccatacaatgactatccgaactcagacggtgtccccaccaactccgaccactatcgtgccacaacactcgactcctcatatcctacaagaacacgttaatagcctaacaaacctcgacttgactcacctaacaatacaacagacaatagtagtccacatttaacgataaccctcgcaatctcatcacataccctcctactcttctagcccacaacacccacatccccaatacctaccccatcagcacacactcaccctccctacatcttcacatccacacactccagctccacctcccaccacctcctaccccaccgactgagacagcctgcacaccgctacccataacacgccacacactatccagtcacagcgccgtgtccccgccgacacccacatcccttctccaccgactacacctaccacgcgcaacttccagacagccataccacagacgcggaactgcaccccgcacacggacagcataataaaccattaccaccccacatacatactccaacactacagctcgaactctccacctacagactacaagccacacaacacactccagtcaccaacgctcactacacacaacatcatatcacgcttctcccagtcaccatctccctcagactctacaacatcgatcacaaacctaacatttcaataagaacaccaaataacatactatcttagcacatccgtccaaaaacttcacaactaccatacaaccctcacatccaccacacactcatcatactccccacctccaacacacaaaccaagccaccacaccacaata

SEQ ID NO: 596900 - DNA, 515 bp, Homo sapiens
ctacgactctgcccacatttaggtctgtactctcccattacacataggttcgtctcagcatgcaagagttgtcctttgaaaaaaaaaaacaaaaaaaaagaacaaagggcgggacgatccataaaagacaatagggacgcggctcgtaatacaacccgattgatagagagtgaaatagaaagaataatcaagcctctagaattcttttcgaatcatctagcagcgagggataccacgccggtagtccagaggacattgaactaatcattacgagatgacaacacaagtataatatacaacttaaaaaaacgagactaaaagcacaaacgcatcagcccggaacgaacacctaccgcctgcagaacaacgagacgtagagaacccacatacaagacgcgataaacagatagcaaataagaaagctgacaaaccaatagcagcaacagatacgatacattactcaataatccgagaagatcaccatcgagacagagattgatagaactcgagtacaa

SEQ ID NO: 596901 - DNA, 484 bp, Homo sapiens
tgggctctaaagggggtaaagggggtgctatagggtaaataggggccctatttcaaaaatttaaggggaataattctaggagatgggttgaaatggggtgttggctccaaaaatttaaagcattgaccggtagtataccccgggtcgtgtagcggtgaaagtggttgggttaagacgtccgggaatggcatctgttttaaagcctaatggtggggacagctcatgagtgcaagacgtctggtgatgtaattattatacgaaggggggcttcaactcgggagtactactcgatggtcaacgtcaaggagtcgcaggtcgccgggttctaggaataaggggggaagtatgtaggagttgacaaataagtccgccgaagtcggggtactcgtaggttcagctaccatggggggccaatggattcggagggacgggagggcatcgtagacctcgtcgggatgtaaaggatgcgaagggatgtggaggg

SEQ ID NO: 596902 - DNA, 1044 bp, Homo sapiens
agcggggtggtttcgcagagtgggtatcgaattcgcggtggccggtacctgggaggtccggtatacggcgcggtggtgatggcgaaaaccagtgcttgtgcaggactgggtgtatcgcgtgagtggcacctacccgagggtagacaatccgggaaggaaccagggtacacgtgcgccgggaattggtgcgcgagacaagaagtgagaccaggatgttgcgcctcgtgatactgccatcacatgcgtagcagacaatgagcgtcctgtaggcctaagtgagcgtccaaggcacaggcaagagcctgacccggcaacatctcgacaggacgtgatcatgtgctcaatgccgaaatatgagcaaagtgggatgttggaaggatcgcgtccaatggacgggattgcagtgctcagaatcgagggtggattgaggcatggagtcgtgtcgtagcatagagcatagaatgaatcatcggaacatttgtttatcattggcagaggcagatagtagaagcaaaaatcgggggagagcatagggaatttaaggttgggagcagtgccaggaatacctgtatcggcaaatttgccctgtgccaggtagtcccctatcagtgggaggcaagagaggctctctttgcgtcagagtcacacaccccaattggggccggcattctggttgggatcggaacatttaaagggctggttctgttggcgccgttccgcccaatttcccagtgatgcgcatggtttcatttccgcatgggcacgaattgtaaccttacccggtggggggacctatcccccggacgtgggtttccagcgaatgttggcctgggcgcggtgtgccagtcttaatatcgccggtacagaggtatgttggtcgccttgtcaagcaatggacgtgtccgttgttgaggccatggatggaaaaaccgccttacgttggtgtatgtatctccgcaagtgggttggttctcacaagattggagggttccctatgtgggggtttgcccccggccttgtcggtaccttctcggaatagggaat

SEQ ID NO: 596903 - DNA, 321 bp, Homo sapiens
actacatacttccggaccagatctaagggaccatacagagtattctgctctgaacaccaggtccaggcattgaggcagaatgagatccgaggagcgaatgctgccctgcatacgaccccttgagcttcagcagctgagggtgagacagccttgccggcctaaacttgagggcctatgcctccggaacactgcggagccatgccaacggagggtgcctgacccatgccgcctgagagtggctagcccatgccgcccgaggcttgcagagccatgctaccagagggtggctgacccatgccctttgagagctgctctagaacg

SEQ ID NO: 596904 - DNA, 273 bp, Homo sapiens
ggtgtaatgtggagaaaacgtaagcaacggtctctgtgtctaataagtttaaggaaaggtgctgtgcctcaatgtgcatgtaggccaggtttatatttgactttacacaaacatctcagtgcagtaaagagcagtattgccgccagcatgtctcacctccagccataaggcggttttctcctatctcagtaaatagaatgtacaatcaggttttacagcgagacgttccattgccaggacgagcaggagacagatgccttctccacatctcct

SEQ ID NO: 596905 - DNA, 93 bp, Homo sapiens
ttcaagcttcttaaccgatgtacggcggacatggttgtggttacatctggtgttattttctgttccacaagttaaataaatcataaaacttga

SEQ ID NO: 596906 - DNA, 191 bp, Homo sapiens
cagaccctgtgtgaagggcttgcagctattaataaacatacatcaggagatacagaggaagctttgtgtatgctggtggcaaatccagcaagtacagcttgaagcagtgagttgcaggcaattggaagaggatcaacctctgtctgtcccctgctcacgtgtcattgggagcctccagagcagaaggagtg

SEQ ID NO: 596907 - DNA, 372 bp, Homo sapiens
tgcgcgaaagtctgcaatcgggagagggcaaagagcgcggaatattttgcaataagtgacaagacaatacccgagtcaccggtgtgtatggctataatcctctaaatgggcttcagaattccttggtgagttcacaatggctgataaccagagtgagacgaccttcatatgggacttgatattctctaatgctcgttccaggtctgaaaatcgtttcaggtttcattcaaggagagccatgtcctcaagcggaaaaatgatcatccaattaacactgtcttcatgtggttttataagagattagcatctgcaatatcaaactattatttaccaaaacagaccataatctgcagacctgtgttacgtctaggt

SEQ ID NO: 596908 - DNA, 732 bp, Homo sapiens
gacatgaaacggatggtttcttgcagcttccactaaacttaaaaaacccatgaaacatctattattgctactattgtgtgtttatcgtagttaacgtcccagacggtgtcaactgacgaatagagcgagggttgttcttcgatgctagcccagtgagatctatccgaccccgtatgaaccacagcacatgagtagtaagcaggctcgcctagactctgcaggccgtgcctccacgcgcgcgcatcaagtgggaaggtggcttgatctgggctcgtccaatgcctaaaagctagctggccactcaaaagagaaagctagacatagaaataagtcccctggatgctggtaggctgtgcttgcagcgtctgatcccagagcctggggtggctgttggtgttccttagcaggtactgcttcacgtttggctaagagcgctttcggtagcaatcagggaacaggtccagaatcaagacaaatgaggttgtttggaatagctcgtataaaaattatagcagaatgttcggaaattgctagtttataccccagggaaggcatccatccatttccttcccttgtttccaggataaccaattgcttacttctcgccgttgaagaaaaggatccctagcttgggtaataaaaagtaggggcaaggaacagcgcaaggttagaacagaattgattgacagcattgttaaatccaaaatgacagtaccttcacctcctagaaac

SEQ ID NO: 596909 - DNA, 134 bp, Homo sapiens
  misc_feature (95)..(95): n is a, c, g, or t
tgatctaaggatccccccgatagccgaaggtgtctaagatcttctcccaatcagagatttccttcggctctgaggcaacccctcggagcctgtgntagtgtctgtcgatctgtctgtcgggctacaggggcgaa

SEQ ID NO: 596910 - DNA, 172 bp, Homo sapiens
ttttaaaccccttgaattggttagtttttttttagggaagtgggaaaggcggagtggggggaagtataggaaaaaggatttttagcaaaatccttttttagggctattagtcggggtttcccagtgagccctcccgatgcccttttcaaataaatgtttatgttgtccccca

SEQ ID NO: 596911 - DNA, 726 bp, Homo sapiens
acctctgatcctcacatctatccgcattctacccatctcctcctccctctcatattccctggacccccggaatttttgaaattgaaagatcaaatcataaagaaatgagtgttaaataggttctagccattttgacaaacgttgtggaaagtatttggggaaaaatagtattcctgatagaaatttttgagttgcaccgtgaagacgataggattttttaaaggcaataataataataatagttacctacttaaagagcccttactatgtgtcagggagctggtcatatctcctttataagaatattatgagactgtctatgaaaatagtgaaatctctgaaagtattggcattaggcataaaactacaaaatgatattctttgaaagcattgttttaacaaattgacattcttggtatttttaagtagctttaatatgcctggctggtggacatttaaagctctatgcaattaccaaaaagggtatatgttataaagaacacaattgggggactaacacacaatgggtggtaattctttcgtaaatattaactaggcataaaattggattataaaaaccataaatactttaagggcccaaaatatgcttcatttttttaaagtttgaaattacaaattctttactcccgcaaccgggcagccgaacatgggccttattacccatccgtcattacggcgggaggctctactcccagatgtctgggc

SEQ ID NO: 596912 - DNA, 1058 bp, Homo sapiens
  misc_feature (48)..(48): n is a, c, g, or t
  misc_feature (110)..(110): n is a, c, g, or t
  misc_feature (217)..(218): n is a, c, g, or t
  misc_feature (220)..(220): n is a, c, g, or t
  misc_feature (235)..(235): n is a, c, g, or t
  misc_feature (240)..(240): n is a, c, g, or t
  misc_feature (265)..(265): n is a, c, g, or t
  misc_feature (267)..(267): n is a, c, g, or t
  misc_feature (307)..(307): n is a, c, g, or t
  misc_feature (312)..(313): n is a, c, g, or t
  misc_feature (321)..(321): n is a, c, g, or t
  misc_feature (324)..(324): n is a, c, g, or t
  misc_feature (333)..(333): n is a, c, g, or t
  misc_feature (348)..(348): n is a, c, g, or t
  misc_feature (363)..(363): n is a, c, g, or t
  misc_feature (378)..(378): n is a, c, g, or t
  misc_feature (385)..(385): n is a, c, g, or t
  misc_feature (404)..(405): n is a, c, g, or t
  misc_feature (419)..(419): n is a, c, g, or t
  misc_feature (425)..(425): n is a, c, g, or t
  misc_feature (427)..(427): n is a, c, g, or t
  misc_feature (442)..(442): n is a, c, g, or t
  misc_feature (451)..(451): n is a, c, g, or t
  misc_feature (456)..(456): n is a, c, g, or t
  misc_feature (466)..(466): n is a, c, g, or t
  misc_feature (470)..(471): n is a, c, g, or t
  misc_feature (481)..(481): n is a, c, g, or t
  misc_feature (484)..(484): n is a, c, g, or t
  misc_feature (724)..(724): n is a, c, g, or t
tgggttgagcacagggtactttatggatggtccttgacaaggtgcggntcccttaggccccttccccttcttcagggggctctactgtggcaacgtgtgaggaggggagnattcaggtgtgggtgggggactgagttgtggcagggacctccccagcagtgagggtctctctcttcctctttgtgctcttgcgtggggcgtgggtggctccaggggnntnttatactctcctttnggagngccatgtgtgtgggccatgtgaggntnccaccaccctgtgtttgctgttacccaaattctcgttgtntcatnnaccagganaantggagcttntgacaaaaggtggtncgtttggagggcaangtgcccgagcccccnaggcgtntcaaaagggtggaagaganngtgggtgtgttcgncgtgtntntgaaaagtctcaganagggagaanccacncgtggtgtgncctnnagtgtgttangcncccgagagtattgcccccccttgaagagcagtggggacaccctcttccgcgagtagacgcgcaccgtgatgatatacaaacacaaacccctctctgcctgtttgagatgtgttcttacacacttccgatgataatctttgtgcgaacgacgggttttttatctctctattatgacaacgcgcggggacgagggttcttacaaagggttttccaccagcctcaagttgcttggtaaccganccgtttgtgttggggcaccgaaggagtgggggaagaaacacaagcgtgcgaaacaaagggggctcaccaatgtggtccaccaaatgagtggtagaaggtgcctgttttcccccgcggtgatctaccacaggactacttcagaggggggactaatattagaacaccttttttggcgcccccaaacagagaggactcctttcgtgtggacgtaagtgggcgccccacgagggattttatagtaaagccggtccacaggggagcaacgtaagaaagtggtcttctcagtaggggcaaaaaaggtcccccccccgggagggggcgacaataatcttag

SEQ ID NO: 596913 - DNA, 261 bp, Homo sapiens
ttcgtcaaaacaacggcggtagttgtttgtagggctcatgtaggtaaaggagtggcaatttctagatcaaataataagaaggtatagctactaagaagaattttatggagaaagggacgcgtgccggggatatagtggtcgaagccgcactcttaaggggtggatttttctatttcgcctttgagttgttggtagtctaaatgtaacaattattagtaataaggctaggagggtgttgatttgccgttgttcttcgacgaa

SEQ ID NO: 596914 - DNA, 200 bp, Homo sapiens
gtcaatggcacgtatgctgtactcgcacgagaaactcgtaggtcaatatatcgagctactgcaaaggccccaacgttagtaggcccctacgggctactacaacccttcgctgacgccataaaactcttcactagagagcccctggaaaccggcacatgtaccatcagcctctacatcaacgcctccgggccattcaaggc

SEQ ID NO: 596915 - DNA, 654 bp, Homo sapiens
catggcccatcctactatggagcgtatcttctttgccctatggatgacccatgtcggcgaaaccaccgccaaagcactggcgcactccttcggggacttagcaatcattcgggcaactcccctggcccttatccacatgcgtcccggatattggaggcgaagtggcacgtgccatcggccactttatggaccagcccgccaaccaacaggccattgatgacctagtgaagcgtggcgtgcgtatcaccgatacccatacccccacatctacattgcgtgatcaactcaccctggctagcatcttggaacacttggacattccaaaaatcactccactgcgtgctgtccagttagccgccctcgctcccacattgcccttattgggttggagccgcccttgattcactccttcagggcgggagtgtcccagcctgctgcacaatcattgcccgaatggttccaatctcctgataacatctccttagcccgccgactcaagcactgctgtgacgtactgttggcacaactgccatccgccgatcgtgcccacattccccattcagggccaaagcgtcgtactgaccggcaaatagcgtcatgaccgggaaccgcgcactgatagaatttggagcaaatgtggaggtgcaaaaacag

SEQ ID NO: 596916 - DNA, 921 bp, Homo sapiens
ctgtgtgtccatatagcgtcagtaacaagctggttagtacgttccggtagagttaccagcgctgtgaacgctataggggttgtctcatagcagcgaagatcatagttgatagcgaaacattgtagtactggcgccgatttcccttgtatgttgtgggcctgacgtgtcaaaccgcttggggggggctccattcccccgccccgggggatgtcgcgactaaattaccggtgtgagggccgcagttgctccccttcggatgtgcaccgacgagatggtttgttcgtaaaaaccaaggtctgggtcttaacgccccactcgatcgtggcctggataaccaagcaccacagcgcgcacacgcgagagtcaacggttacccccgttgcccggtctccccccgaagtataaagcgccttttttgcctttcattggcagacccggccacggaggtttggtggtaacaaaaagttcagaccacatggatgtcgtccggaaatgttcattgtccccgaaacgccgatgagatcaatgctcgagcacccagatgtacatatccaaagtcgtgttcgatacagtacaaacaggccgccaacaaacttggcgtaaaacactcaaagtgatgtgaatgcactctgggacactaggctcgtacttctcccctaccccaatcgtcccgtaattttttaacgacgtcccaatcaaggtgtttatatatatgcacctaaaactttaatgaacgaagtattccccatagccacccacaacccaccatctgttaaaagaaaaaagagtaacttataaactttctaatgatgcacgctcatggaacttagtttccccttagcaaaacaaactcagccctaagtcccctttaaataaagaaatcggggccccccgataaaaaccccattccccaaaaataac

SEQ ID NO: 596917 - DNA, 327 bp, Homo sapiens
ctcgctcagcatgttgtgcaggcccgggcgctccgctgtgctgcgcggttgcccgccaagagataaagcggcgatggcccagccggcgttctcgggcgggagctggttgcgctcgaagtgcaatacgtagcggtgcgtgctgtccagcgcaatgccgttggtgtcggtcttggcggtggcaatgagcatgtcctgcggcaggtcggtgccgccgccgttccacgcgacgatggcgcgctgcgcatagtccagcccataggcaccgaccatgcgcgggatgaaccagccgttttgcgtgatgggcggctgcttcacggccagcgagag

SEQ ID NO: 596918 - DNA, 202 bp, Homo sapiens
cagctgtctatcaactcattctctaaggaattccatatagaactctggatattcttttggtctagagtgatcgtgtcatttagcatagtgtgcagtttgctttttgttaatgaaccatcttttaacttgtaactcctgagcagaatttgtgtggtgctgtagcattcataatatatggaatgatcctgggaggagttatagc

SEQ ID NO: 596919 - DNA, 362 bp, Homo sapiens
gacacatgcatgtgtggcatagctttaatataaaattcactttatgaaccaataagtgaaatgccaaaaaggagaggtggatattatttaaaagaagatgattgtttaaccacaaacccttcacagagggaagagaggtttagaaaggtccagaaaaaaaattctacaccaggtaccactgaagaatgcagggctacatttgcctctgaagaaccatgtgttctctggcatctgaattccagtgctttccaaatagatgggtagatgatgaaaaatggagcagcttcttttatctcctcctctctcctccgtgaattatagtacgacacgagttctgtgcctgcccccgagacagaaagcag

SEQ ID NO: 596920 - DNA, 512 bp, Homo sapiens
tacattattatttgttacacatggagaagagccgttttgattaaggccatgtatgtttttcttagagcccttgggatttactgcagccaccactagatatcagtgcaatagggctaaatggtaaggcaatggacagtatgagccagcacttgaccaggggcccgctggttacggacgacggaaaattgactgatccaagtggacaggtaagccattttcacaagcatcaacaacgtttctgaaccccgttgtggctggctactggcatggaggtcagggggaccctacatgatgcttgccagtggtgacctgcaaagaagacttgctgattcttaggtttacactgtgagggtgtgcattcttgtttttacagatggccttgatgctgcgatggttgccatgaataaaagtgtaggtgaatgtgcaaggtgaggacaggccccgaatgcttatgatgctttcacagaatgtgtcataccgtgcctcggggttgaccacatagtgcttgcaca

SEQ ID NO: 596921 - DNA, 122 bp, Homo sapiens
  misc_feature (5)..(5): n is a, c, g, or t
agtantcaaacccacagcaaagccacattgataatacaatgaacatctgtcgagcagtcacctagagtcaccaagtgttgtcattttgctacatttgacttgtctctttctttctttatatt

SEQ ID NO: 596922 - DNA, 315 bp, Homo sapiens
atatcgtcagtgtggtcgggagcgatgagcagcaccatttccggtgtgccctccgccttctatgcattctgttttcttcctcccttctctgtttgtcttctcccgaggaagtgagttgctgatgccatcggactttatgcattaatgatgcaaccggattcgtgtcaggattacgttgcacgagttgaattttgaatgaaggagaagagtttttttttatttatttttataagaggatgttgactcgtctagttgcgtgatacggggttaccgaagctcgaaatttcgtaactcagtgctcaaagcgtgtatccc

SEQ ID NO: 596923 - DNA, 949 bp, Homo sapiens
  misc_feature (949)..(949): n is a, c, g, or t
tggtgggcacctgtaatcccagctactagggagactgaggcaggagaattgcttgaacccaggaggtggaggttgcagtgagccgagaccgcgccactgcactccagcctgggcaacaagaacgaaactctgtctcccaaagaaaaaaaaaaaaaaaaaaggaatttaaagttaagccaggccagtgattgaatggacctcttacaagtcatgtgatctgggacagacaccctctagggaacttcataatctcattggtgaaaggggaataaatgctccgactggggactgccactggggaggaggacaggtcatggtgtgtgaaggagcagggccacccctcgctcacgggcgcgctcaggcaatgtgaactgtgggtgtgtaaaaatgtcccctgagtccgccttcttgccctaaaaacacgcacatgcacgcatacttatttttagagaaaaaaagctctaatgtccctcaaagaggtgaggagaagaccttgagtctggggtttagcgaaaatgccccgtgcaaggttgtgctttagatttcgtcctcatctgggtgtcaggaaaggcggagggagtgtccaaatcggggagataactttgtgggcattagggggaaagaggtcccaagggaggttagaaagggagccgaccgggtgggtgcgcgtccaacctgtaattccaaggattgggaggtagggcgggaggtcactggagccagcttggaattggaaacactttttcaaaaaaaaagggcggcgcaaaaaccaggggccgattactccccgttttgaaaggccataaggggtaagaaacagcgggtacagcggggaacgcaggatccacgacctctgcgggatggcaccgcaacacgacaaagatgggacacgactgcgcatcgtatacacacacacaaccgagcctgatggacaagacaatacccacan

SEQ ID NO: 596924 - DNA, 1362 bp, Homo sapiens
gggcaaggttcttcccaggatgaaagccatgttcagttcgagcgccgatgatctgtgaatgcccgaatggcgcagtaagtccaggacgtagttcggagtccgagcatcgtcgccagtgctctatctggcaggctggagactgaacatcgggacctcgaagtgctcaggcgtcacgagggagctgcagatattgagcgggctagctagagtgaacatgtgaacgttgggtgagtggatcgtgcacagacgactagtcgataagtcgtatatgatatcccggttcacttctaaccgtagaatagtactttcgcaagatacaactccatagttcccggcttacgtagcgcgcaagtgtggatgataaagagtgtcagtctggagtaaggcatgatcgagtcgtttatatccgcagtcgagagagagcaggcagattctatgcacattatagcgtcgaacttcggtagagagagaggcctgtgactagcacagattccacagcggacaaaatgctgtgccacgagtggatgccagtgacctcgtggacgagcatgttgcaacgaataacccatccacttgtgaggtaccttggtcttgcctcaaggcgaaacttagtagggcacagagaagtccgcgtctaaactgagtactggccagccacggtgtcattaacaggttcatttggggacaaagctacagacagagacacatgtgggaacacaagggttgaaactccctactaggtgtctatacagaagctcacgggcggaggtactgttaactatttgaacttcccagagtttcaatcgtaaacaagaaatgactagatcaaagacgtatataattcacacgtaacgtgatgacatagaaagacagaaaccgcacacagaggcaacaaacgggggagacaggaagaaacagagcatacaaggggggcacaggaccacaacagtgagtgaatgcaaccatgtatcggagtacacaagccggtgacacaggccgcacacaatacgagaggacaaaaactaacaggcagggacgcgcgggatacaacgaccagcggcaccgggacggttggcagtggccccggagacgaaccaggcccttcaaaaacaaagaaagcagagcaagacgaacagaacaaacaaacaagcaaagagacaccatgaagagagaatacggcagagaagacggaagaagggaaccaatccaaaagaaaacaaggcaatagaacagagaagaaaaagagacagaagcgaaccgacagaggcaaggagcaacagacgagagaagaaaacaaacgagaagcggcaaccaagaatacaccgagcaaacgaagaaacacaacaagacgcaccagcgaac

SEQ ID NO: 596925 - DNA, 149 bp, Homo sapiens
  misc_feature (147)..(147): n is a, c, g, or t
tccgcctgcagcacaagtggggcatccacagatgagactccatctaccctgggaagctctcctgagcctcgggggactggcttgtcatgaatccttggccttagttctcccctgttgtgtatttttaatgaataaacctgttgcatnta

SEQ ID NO: 596926 - DNA, 1030 bp, Homo sapiens
cggacgcgtgggtcgacctcaatcgttcgaatcacactttcctttgtactatactctaaaagtatgctaacactatggtaccttgtaacacgtgattatccccagactgatcttgaatagctgacttctatgtgtgctgaggcataccatatggatcatacctgatctgagacatcatttgactatcttaatatgatgacagatcatattatatcttataggaatataccactggttcattatgtaccaattgacgacaagtcattatatacctgtttttcaatgattaaccagaccgtgaatcaattcgtgaagtgttcacgagacacctgaagggattttcctccgtgttgaatcagggtgtccctgtagattggtcgatctgacttgtcctggactgaatagactgcgcattctcttctccttttcttttattcttggcttcgcctattactataatgaaggcatggcatactttgaactgtgcttagtaagctatgttctaccttttagcaagtgagtcattgctatacagatttccacgaaggctttcacgtctctcccttgacctttgcctcatcgcgctctagatgcaagagagcgttgtaatgctagcttaaactaaatggggggcttattcgctttttcctacgagtccttacacgtattatataaaacctcctccgttcatccaccactaagtggcctagaggtccccgcactctgtacttgatccgtatctaaatagtagacgaaactgactaaatctgtattcgcgtccatgtttcctaagctcgaagctctgcacttttagatactatattgaccggcttgcttacgaatgccacccatttcatctcggaccctctcgtgactcaccgtaggcccagttgtattggcaaaccctggctccttttgttccttatcacccggtgggttacaaatgccttctctaagcccaggacaaccgacggactaccagtatttgggacaagctgccgctaacccaacacctgggaccaacggcaat

SEQ ID NO: 596927 - DNA, 1182 bp, Homo sapiens
ccaagaaccgattgactcatgcacacggactcttctcctcgcatagcccccgactgacactcccttgttgtcaagaccatggtgttcgggtctcagttgagcctgggagggtgcccctaggcgggcacaaactgacggccgtgcgacggtgcgtctccctggtagttctaccggtgctcaatgttggagctgagacctgcgtagggaatgtttcggcattgatggggcactgtgtgatcctcatcgtcaggacacggggatgtggtaggcaaggggatgtccggtgtagtttgttaacttcctgaacagagctggctgacgtgtgcgacgtgtgagggagtgcacgggcgtattcggcctataattgctcactgtggggttcgggcttgcgcttacgaggatagttttggtgtttctgtaagcccgaggagtggtatggaagcgtcctactgcaatgccagggcacgtgtaccgaagctttggagtagagagtctgcgtgagtgactattccgcggatcggagggcatactggcttcactgtcgtcaaaggcatggccagaagatgtcatcaaggtccattgtgttgactgaattggtagagcgtagtcgttggcttggggagaccttggctgtaatggaatgggcatccctatggtgtacatattggctctatatacagctggcggagggatgaatcgctcaagaatgtctgcctgtcattctggatgtgggtataccgaaaatgaggagttacgtataagatccacgtgtacattggactatcggcagagaagagtaagaggttctgaatatgatgattttgctggacgaattcatggaggcagtgttctgccaaagtcgttgcaatgcaaaataagtcggtgcttcgtttcaaccgtaagtgactttctgtatggttgtgcagatgaaactaagaaaatgttggccggggcgtcggtggctgacacgctagtaatgtccagcagttccggagaccgagacgggcagatcacgaggtcagaagatcgcgaccatcctggctaacatggtgaaaccccgtctctagctacaagatacataaataaattagctgggcgtggtggtgtgcaccgtgtagtcccagctactcctgatggctgaggcagaatggcgtgaacccggtaaccggaggttgcagtgat

SEQ ID NO: 596928 - DNA, 517 bp, Homo sapiens
ctggatacacgcgtagcgacacacccagcctccatcgtttaaactgtttaaatgtgaaagtttctatcatgtaccgttagcgtagacaagatttgctttcctatttctgactggtgcctttcccctttttaggagcaacgaaagctactctcttagttatgttcttgtgatgtgacaaaatgtcaaaaagataggagaagagaatattttatttcgttgatgcttttgtccccaagtgtgaccctaaacttaagcttggtaggagttggcattctttcatgtcccttccctttactcatgccgaaactatcaactgggacatttggtgcttttggtttaaaagttaattgatattatacttgggttttatctaaaaagtaaatgtatttgcctttgacaaaagactgacacaagagcaaataagctttaaaatcgggtgttatgtgctttcctccatttttgagcatattatccaaaatggtctgtataatataaatgagtctgaaggcagtctgga

SEQ ID NO: 596929 - DNA, 117 bp, Homo sapiens
  misc_feature (102)..(102): n is a, c, g, or t
tggaaccagctgagcgcagctggacccagtagtcgttgtctccagtgccgcagtagcaggtagtgctcacagcccaccccgccctagtgaattggggttggncccagcgccttccca

SEQ ID NO: 596930 - DNA, 343 bp, Homo sapiens
aatgccttgtcgtggtgccattcccggcgcctgacgatacgctcttctattgtcttattctggcaggttttgacgttttaaattttttaaaggaattttattccttggaccaaaaggtttggttaaccacccccctcttgcttgctttcacattttgggtgtcccgaggaaacagcaagggatgggtgtgtgacgttgtgcccgcctgcctctgtgcgagcttctttctgtgtgtatattttgttttatttttctccgtgtatatttctgatcccgacagaacaacatgtgggctttctataaaaaagattaaaagatttaaaaaacaagggcggacgccagc

SEQ ID NO: 596931 - DNA, 484 bp, Homo sapiens
aaaaaataaaaaaaagcattctagaaaataaaaggaattcccttgacttgatcaagagtttccacagaagccttgcagccacagcgcgcgtccccatggtcaggagcaggactgggtgccattctcacagcttctgtccagctgtgtggaggtctcgggaacagagaaagaaaacaagccagaggtacactgtggaaacgaagagacaaaacaaaacccactattcgcaggtgatgtcactgtgttctggaaaactccaaacaatttccaaagataacctaaaatatttcccagggaaaaatatcggaaatattaagagatgtcagcacgtttttggggatcaaagtcagtatacaaggtgtcattgcgtttctgtcatcagcagtcatgcgaaaaggaaactttaaaaagccaccgttcaaaaagctttaagatatagaaatgtcaagaaataactccaattaaagatgcaaaaagaaaaaaa

SEQ ID NO: 596932 - DNA, 906 bp, Homo sapiens
ggctcgggagatggacggcctgccgtgtttatggtgcctggttcttggatgtggcttggctggtgggggcctgtgtgtcctgcccagtgcccagaggactggcagtgctttggcacctgaagcccggcatcagaggcaaccccgcggctcctgccaacggtctggttgcccctcgtgggaccagcccttcgctggggctgtgacaaaaaacctcaagtctgagaggacgctggttgatgcgctgcgggcagacgtggtggaccggaaaggacctctagtgacgttgaaacaagccacagggtctaccagtgacaggaaaaccaggagagctgacgtaagttctcagtgctgccagagctgagccagtccctagggctcaaggagcaggagcttcaggttgtccgaagcatctgggaaagaaagctctgagggcttgtactactctccagctgtaccccagacacgatagtcgcctccagacaatactttcacccatgcacggaggagaccaaaggaccacagcaaccatattgtgctgtacaatgatgggatcccagctgcttctgagtgggaagatacaggtgcccagaaactggaacacatttgatggggtcaaatctcaaagtaccagtgaaaggccccattcacagaaaggaacatcctgaaacaggtgtcaaagaaagactctcagtccacttagcggtgaggaagccacagggactcctggagtgtgcccaggttcagatagcagccaatgaacaatgtctccaaacactatcaggtgcaaaatgtactacaggctatagcctatggctgaggaccaaatgtactcgcccaggtggacctgtctggagcagagatatgttgacataaaaagaagccaaaaccaggctgataagcctatag

SEQ ID NO: 596933 - DNA, 105 bp, Homo sapiens
gtcagctcagcattaatactgccttatgtcagcagaatttcagcctttcatataacagctacgccagtattttttatgtaggtgcctattgatcgtccgagcgga

SEQ ID NO: 596934 - DNA, 627 bp, Homo sapiens
tgagcggaggatcctcgggacagatgctggtagaacgggtggcagccatcgatgtgactcacttgagaggaggcagatggtggcccagagcctactagaaacggatgtggacctccactcaacgatgggtccagagctgcgcgtctgatgatcccatggcagtagcttcaagatctgactcccagtcccggacctaggccgtcgtcagtccacggaaggcgtttcaccgtacatggagtcgtgccaggcgagggagagctactctggacggcggcaggctcgggccattatagccgacgtgggcactgcctaggcgacatcatccccaccggggccatggctgtgagtgcctcaccaatcagagtccacaacaaacgtgtgccatctcaagaatgcaagacggactgccgtgcaagctgatagcgaggtacacagcgtgcagacgtgcagcatttggcaacgggatgaccatacgtgtgctgcgtgcaggctaggagcgtagcaacgtaacaggtgaagcacagcactactcatcgcaagtgacaagatccgtttcccaacagatagaaggtgtactgcacagcacgtacatgcgcttctaccgacgcatccgagccgctcgccacc

SEQ ID NO: 596935 - DNA, 336 bp, Homo sapiens
tggagatggagtctcgctctgttgccctgaagagcagtggcacgatctcggctcaccgcaacctccaccttccgggttcaagcagttctcctgcctcagcctcccaagtagctaggattacaggcatgcgcccagctaatttttgtatttttagtagagacagggattctccatgttggtcaggctggtctcaaactcctgacctcaggtgatcttcccacgtcggcctccccaagtgctgggattacaggcgtggcccagcgtacctggtctccaagcactttttatttaattcctacatcacttttttaatgttgggtctttgctggtgggtag

SEQ ID NO: 596936 - DNA, 519 bp, Homo sapiens
caccgactggaggtgggaatgctgccgacagactgtgttctcttgcccaccttcatagcaggaatcacccggacccggcaggctgggctatcgtgctagcgagggttctgggggtgggtctatggagatcttgtcctatggggagtctgcagtggtctcagccacatcctatgtattttggctctggaggagcaaagctgtaatcctggagttggtctgtgatttgccgacagccttgcaggctgggctcagggacaaagtcccccccaaaacccgcaggtcctcatgtccagacgctgcccagtcctgtcctgaaaacagcacgccccaggcccacagaaccccccaccctacatttgccttgggtggagctgggggtggtcctaggactgcgggtgcccttagctgacgggggtggggagaagcgtggactgcgcagcctgtgggtaattggaggttcattgagaattgagtctttggaaacactaagacaatcagattttaaaagtatttatggct

SEQ ID NO: 596937 - DNA, 703 bp, Homo sapiens
  misc_feature (76)..(76): n is a, c, g, or t
tagaggatccccggacgcatcagtccattgctatttctttttcttcttgacggatttcggtcttgtagccaggtgnagtacaatggcgcaatctcaggtaactgcagctccacctcccggttcaagcaattcccctgcctcagactcccaagttgctgggattacaagtgcgtgccacatgcccaactaattcttgtatttttaatagagacggggtttcaccacgttggccaagatggtctccatctcctgaccttgtgatctgcccgcctcggtctcccaaagtgctgggattacaggtgtgagccaccgcacccggcttcgagagagcgtttcttttcttaaagcgtgttcttttcttaaaggtatcacaggagtgattatgcctttgttgattgatggagcagatggggagaggcattgcatgacatgggaaggaagcttagatgtgggtggcaccttgttcacccatgttatttttaagctccatcttgacaattatacttaattatttttccctctctctgtttcttttttttataattttattgaagttctaatatctgaaagtgtcaaagggtatatgtagtttaaacaataaaatgggtattacccagattttagcccagctcagaaatgaacattaaagtgtgtaagatcttgtgtacttttttacctactaagtcccttataccatggaact

SEQ ID NO: 596938 - DNA, 700 bp, Homo sapiens
  misc_feature (56)..(56): n is a, c, g, or t
  misc_feature (72)..(72): n is a, c, g, or t
  misc_feature (94)..(94): n is a, c, g, or t
  misc_feature (99)..(99): n is a, c, g, or t
  misc_feature (101)..(101): n is a, c, g, or t
  misc_feature (108)..(110): n is a, c, g, or t
  misc_feature (113)..(115): n is a, c, g, or t
  misc_feature (120)..(121): n is a, c, g, or t
  misc_feature (133)..(133): n is a, c, g, or t
  misc_feature (143)..(143): n is a, c, g, or t
  misc_feature (150)..(150): n is a, c, g, or t
  misc_feature (203)..(203): n is a, c, g, or t
acataggcatggatcagatggcctcgtgtaatcggccgtagtcatggtgctcagtnacggtagttgaaaggntgaaggatgatgaagggaagtncattnantaactgnnngtnnntttannagctcagaaganagagggacangtagaantactggagtaatattaacacttaaggaaggagtgatgtcagataggccttganagataatctctgtagtgaagaggatgacgaagggcaggtaatgacatgattctagaaagcagatatcccacagcgtgcacagaggttagaaaacaggcatctttgagttgaacactagattaattagggaaggttgaagttactgttggtaagatctgatgagagagcctagaatgtccttttaattcacaagcagtttggggggcatggcttgggaagttatgtggttagtgttttaagaagcttagttaacatggtggtgacatacaggtaaaattgtagaaaggtctgtcaataggatggactgagttactggttctcagctaagggtgacttttgcaagtcttggggacaatttctagttgtcacaactggggacagagagagatgagcataggcctatttggcatctagtgcatagaagctaagaatgctgctgaacatcttataatacaaggggacaagttccccacaacaatgaattttgtgggcccaaa

SEQ ID NO: 596939 - DNA, 918 bp, Homo sapiens
  misc_feature (6)..(6): n is a, c, g, or t
tcatcnaagagacaaaataagataagatgggagagaaaaaaagaacaacagatgacactgtgctagcccatactggccgccaattctgttgagataacatagcggttcttctatgctcccactgctctttgtaacaagtccctgaccagcacatttctggaccacattacggttgtctcgaaattcctaaaaggtgtgcgagtttcctcggtactccctatattgaccaggccgggtcttttatgtatccccaacaacggtctcttctgcccccataccaaattggtttgctcgcaacccgtgccccatgtatttttagcacacccacgttgtcaaaaataaccactggcgaccctaacctacctttattgggtagtcgtgcccaccagaaggccctttttaatgacacccactatatagtttttttactcggaagtccctccgacaaaaaacattattctacccttatgccccccctcttccccataattactacctgcgtgaaacttttcgtaaaacactcgccatcataaaaatctgtccaacaaatttcgccccccttcaatagtaacatataaccacttttataattgtaagggcgcccactagcgacgcttcgcggttcaacccccgtgtcgcacacatattgtgtgaacaatacaacgggggcgaaaacccatctatacacactcccttcatcgccataattcataaaattcatagccacacccgattgtctacctaaaatgcctcgtttcttttgtttacataagaaatcggaaatcaactctcccctttaaataagaaaataagactccacttcttgactatatcctagatttcaaattttccgctttctgtatttttttttgttttctttaaaaatcacaaaaaaaagaagtttgaaaccacataaca

SEQ ID NO: 596940 - DNA, 561 bp, Homo sapiens
ttgcaggtcatcataggatatctacaactttcaggctgacacctctgctgaggtcgggctgtacatcagaataaaaaaatcgaatggaatatgccctgaccatgctcttacaaagatgtaactagacagacttatcgaatggaccctatgggcctcctctttaccactgtgagatctacagggaagccaaaagaatgatctagagtatgtcgaagaagatggacatgtggtggtacgaaaacaattcccctgtggcctgctggcctgggtggaaccaagaccaggctaaggcacaccagttcttgacttgggacaatccatgagtgaaccagaatgcagtattccttgagatacctgtaaaaaaaggtaaaacagacaatttagcagaacggtgcatagattcttaaatcctctctgtggagagcatttcagccagaggactatggaactgtgaatatacttcctgaaggggagggagaagggaggaagctcccatgtagtccacaggctgtaattggcgcagctattggctgcgtacactgtgacctatggccattataa

SEQ ID NO: 596941 - DNA, 816 bp, Homo sapiens
gatcatggccaggaagctgatccaccttagagatccacgccgcgccatccggataccagatcatccgcgatctgcaggtcctgcacgaatgcaactcgccgtacatcgtgggcttctacgggtgccttctacagtgacgagtggagtatcatgcatttgcgaatgggacacagcatggtagtggctggcgtccctggacctacggtgctgaaattaggccaagaggattcccgcagcgtagatcctggaggtaaagtcagcatcgcggttctccgtgcgtgcttggcagtaccctcctgagtagaagcagccatgaatcatgtcatccgtaggatgtgatggccctccaacctatccgtcgctgcaatcgtctagcaggggaggatcaagctgttggtgaccttcggggtgagtcggccagtctcagtcgagctccatgggccgatctccgttcgttggcgcgacgcgtctccttacaatcgcctccgcgtagctggttgccgcgggtcaccaccatttacctcgtgctgcatggtcggtacactcctggtatgcctatggcccctgtttcctggttggagctggccgtcggtccggtaccccatcccccctgtcccgacgccgaaagagctggaaggccatctttgtgccgtgccctgtgcgtcagacgggggcaacgaatggagagcctcacagcgatctcgcctcgtgccggggtccccccttggcgcccccgtcagcggtcacgggatggatagcccggctgccatgtgcatctttgaactcctgggactatattgtgaacgagccactcca

SEQ ID NO: 596942 - DNA, 149 bp, Homo sapiens
gagagaggtgtgagcgatgcaaggggagggagaggaggaataaacagaggaaatgttatgttaaatggtctgtaaacgagagaaacccccaaatactctaagttctattttaaaattctgtcaggccacaattattctaatatgcttga

SEQ ID NO: 596943 - DNA, 849 bp, Homo sapiens
  misc_feature (2)..(2): n is a, c, g, or t
  misc_feature (172)..(172): n is a, c, g, or t
  misc_feature (187)..(187): n is a, c, g, or t
  misc_feature (201)..(201): n is a, c, g, or t
  misc_feature (204)..(204): n is a, c, g, or t
  misc_feature (244)..(244): n is a, c, g, or t
  misc_feature (275)..(275): n is a, c, g, or t
  misc_feature (333)..(333): n is a, c, g, or t
  misc_feature (376)..(376): n is a, c, g, or t
  misc_feature (382)..(382): n is a, c, g, or t
  misc_feature (613)..(613): n is a, c, g, or t
  misc_feature (647)..(647): n is a, c, g, or t
  misc_feature (655)..(655): n is a, c, g, or t
  misc_feature (693)..(693): n is a, c, g, or t
  misc_feature (757)..(757): n is a, c, g, or t
  misc_feature (813)..(813): n is a, c, g, or t
gnttttccccttctctctgttgggttcgggcggttgtgcccgggtttggctggcttttttcgggcggcggggtgtgggtgttgcttttttttaaaacacttttgtctttttttttttttttttttcccctttctttaaagacaagctagtttactgggaaaagaaaaaaatnataataaaataaaancccgggcaactttngtnccctcatctttttttgggggggggggggggggtcctgggncgccccccctccccctgctcctccccgctcngcttggctcgtccctcgtgcccccccttttgtgggcggtgggggggggccgggtgggngtgggggtgtctgggactggcgggggtggtgggtggggcgggngggggngggggcatccctggggcccggggtcggggggggctcggggtgccccgggcggggggggggcggctggccttgcgtgcctgcggtgccggggtgggggggctgtggccccggccggctgtcggttccccctgttccacacggggggggggccggggctgctgcgcttcgcgaggtcttgctcccttgggacctggtctcccatctgaccctccaggccttagcttgcctcanatgtcagggcaggtatccacctaaccaggctgcngggggggnggagggaagccgggaatggggtaggaagaaagctagangtggcctgcaagctgggctggggccccgccggcggccaccataaatactatgggagtttagccnatcccgagctccgctgtgtcttgtgctaaacattcctttctctccgtgcctctgtntcccctctgtcccccctcccaacctccccgtcccgg

SEQ ID NO: 596944 - DNA, 127 bp, Homo sapiens
taaataaatatgagtataatcgcgtttgagcccgggccatctgcttggtgtctgtatcgcgtgcatcgtggatggtctttaatccccgcttgtatgtatatccatcgtggactttttgttgctatat

SEQ ID NO: 596945 - DNA, 300 bp, Homo sapiens
aagcactaatcaaatgtgagactagtaataagcatcctgagtaatgagtggcctgggccggagcaggcgaggtggccggagccgtgtggaccaggaggagcgctttccacagggcctgtggacaggggtggctatgagatcctgccccgaagagcagtactgggatcctctgctgggtacctgcatgtcctgcaaaaccatttgcaaccatcagagccagcgcacctgtgcagccttctgcaggtcactcagctgccgcaaggagcaaggcaagttctatgaccatctcctgagggactg

SEQ ID NO: 596946 - DNA, 773 bp, Homo sapiens
cccctcatttacataaagggtggcgtggcatctaccatctcacttctaggaatactagtatatcgctcacacctcatatgctccctactatgcctagaaggcataatactattcgctggtcattatagctgctctcataaccctcaacacccactcactcttagccaatattgtgcctattgccggactagtctttgacgcctgcgaagcaacggtgggcctagccctactagtctcaatctccaacacatatggcctagactacggacataacctaaacctactgcaatgctaaaactaatcgtcccaacaaatatattactaccactgccatgacttttcaaaagacacatggttggaatcaacacaaccacccacagtctaattattagcatgatccctctactattttttaaccaaatctacaacaacctatggagctgtttcccaagctttttctccgaccccctaacaaccccccttctaatactaaatacctgactactaccccttacaattatgggaagccaacatcacttttgctggggaccactttccggaaaaaactttacctctgtttctaatcccccttcaaatatcctagtgtaacaatccaaggccagaactatcctattttaattttttcaaacccactattccaccttgctatatttcccgtgagggaccaaccaacgcctgacccaggcctacttcttttttgccccaaagggcccctcctctcttggcttataaaaacacaaccggggagagaa

SEQ ID NO: 596947 - DNA, 166 bp, Homo sapiens
atccaccggtttttcttttagtgaaaacaaatcgttcatggatcctcatcctttgaaaaggagaggatggtggttgagtctcccaagccaggagaccctaagctaagccaaagacacctgatctaggcagtgggtactcgatcctcagatttcgtgtcgtcgtcct

SEQ ID NO: 596948 - DNA, 440 bp, Homo sapiens
cttgcatgtcttcctcgtacaacaggtatccttgatgatctcgtctgtaagccgatgaaactgtcgtgcgtctagcgtatttagatcgaacttgccccgatcatgatgacctaggcacagcatagtggagagctctagacagtgctagcatcacagaggactagtggccgttgataaattccggctctaatgaactcgtagcagattgacgctgaaatggaatcagtgctcatgatagggacagaagtgcaccctggcttacacccgtgtcagctgctctactcgtgacacactgaaccccattgccgcttacagccagtgctccctatgttgatggcatcacatcactctgcatctcactctaccatcagaccaagagttggctgttgaatatcgtgcttatgcatatagctgtctatatgcgtcgtgggacataccct

SEQ ID NO: 596949 - DNA, 275 bp, Homo sapiens
tggatcgatcagctgtacttgtgaatttaggacaaagccctcatttttggtgtccacattaagatcagctactgaacttggtgaatttcctgacagacaagtgctatcgtgaccatagttcatcgtgcgcgggaagcatttccatcagtttctttataattggattgtctggtgagtttggatattaaacattatgtagctcagtaatcttttagcatttcttttttatttttcaatctatattcacaggcccatacttcagtcagtccaatcat

SEQ ID NO: 596950 - DNA, 547 bp, Homo sapiens
  misc_feature (24)..(24): n is a, c, g, or t
  misc_feature (248)..(248): n is a, c, g, or t
  misc_feature (542)..(542): n is a, c, g, or t
agaaaattttagtctttcatctanaatgagaacacacagaatgtagctgaatccagacgatgtattacagtcattgagttaattctctatgctgattaaaataaagacataatctcccataaattgcttcctgatattcctttaagttgttttactcgaacgagatttaagatggagaaatatagcagacatctaaatgcaggaccacctgcaggttgagtctcagaagtctgatgagtagagatacnttagtcaggtgtctgatgcaaaacatcacatttctatcatcattttcaactggaaaggggcttcttggaggtaatctaggactgtatggtagtcagaatgaaaagtaacataatacaaatttcatctgtatatttgaactattaaaatttactttaaaaaattattggatatttagtcatcttgccaaaatcacttaaagtatattaagttattttatgcactctttggaaacatttttacctatgtaatcaaagtggtagaataagaaacattatataaaaattcaaaagttnaatcc

SEQ ID NO: 596951 - DNA, 450 bp, Homo sapiens
gcaggagatataaagccagactacagtgctaacgtgccatgatcccacagatgcataaaggaggaagataccccttcagaataatgatcgtggcatctgtatgagcccagagtcctatctggggtctcctcagaacagcccctctatcaggagcatctccaaattagagagcctcccatctccaggtgtactctgtgggtctgaaccgatccaaaagcttacaatcctcctggagagaagatggacgcagcaaaagtaaacgggtgagaaaatggataaagaagctgacaaaaaatggagcaaaacaagacagcagccactaggtaccgacagaagacgagggcggagcaggaggctcttactggtgagtgcaaagagctggaaaaagaagaacgaggctctaaaagagagggcggattccctggccaaggagatccagttactagagaa

SEQ ID NO: 596952 - DNA, 215 bp, Homo sapiens
  misc_feature (2)..(2): n is a, c, g, or t
  misc_feature (6)..(6): n is a, c, g, or t
  misc_feature (19)..(19): n is a, c, g, or t
  misc_feature (71)..(72): n is a, c, g, or t
  misc_feature (74)..(74): n is a, c, g, or t
  misc_feature (77)..(77): n is a, c, g, or t
  misc_feature (113)..(113): n is a, c, g, or t
  misc_feature (118)..(118): n is a, c, g, or t
  misc_feature (126)..(127): n is a, c, g, or t
  misc_feature (137)..(137): n is a, c, g, or t
  misc_feature (167)..(167): n is a, c, g, or t
  misc_feature (183)..(183): n is a, c, g, or t
anaatntgcaggaacagtnttgggaaccaaacagaaaatgtcaccttttatttgccatcttatatatatcnntnagntttaccagctacttctaaatttgtacattatttgtnagggnaagaaggnnaaccctaagncttgtctaacttagtggagaatgtgtgttnggcttaggatggatanctaagtcttattgagctgtgttaactaacttg

SEQ ID NO: 596953 - DNA, 139 bp, Homo sapiens
tgagtgataaagaagttgtggtatatatacatgatggaaattactcagcatagaaaggaatgaattggcctgacatattaaagtaaatatataggccaggcatgggggtgccacctatagttccagctactcaggaggg

SEQ ID NO: 596954 - DNA, 201 bp, Homo sapiens
  misc_feature (200)..(200): n is a, c, g, or t
ggtattgagtgtgatcagatatgagggtggggggccttgctaaaactgacttagccagggttctttgctaaaactggatcttacaaggaagtgcacagatggacctaggagaagtttcaggggcttgactaaagttcagccaagcaaaggatctttgtcaccgtgtcttagcaaagcttgacacttcccttccccacaanc

SEQ ID NO: 596955 - DNA, 125 bp, Homo sapiens
ccctgctgcgcagtatgtcgggtcgtcaggcaggaacctgatctgtttcatgatggcctccagatacgaaagcgccccggtcaaacaagcatctgcttgctcaaaggcaggggtagatacaaaca

SEQ ID NO: 596956 - DNA, 169 bp, Homo sapiens
gttttttcagtggggcggggcggaaagcgggtgggcccgggcaaccagttttcaaaggttgtggggccgattggaggccacaagcccctcacccctaaacgttgccaaccaaaactgacgtgtgacctcctgggtgtttatgccattaaaaccaacgttggtgcccgga

SEQ ID NO: 596957 - DNA, 413 bp, Homo sapiens
  misc_feature (373)..(373): n is a, c, g, or t
acccttgtttggagaacttcaaaaaattatcagatgagaactcacagaagacacaggaatacgacataacaacagatacagagcctggagtaatgacagtacaagtcaaggaacaccaaggatcaccagctgccacccaacccaggaagaggattttgctcctcaagtcattgtactttggtacctacgaatttcaaccttgtccttcataccccgtgggtgtgaagattcctggcaggactctatttccacgctgcaactaggtaaataaatgttcccaggaaaaacctttagagtttagtatagaattatagattcaaaagcagttttccttgaaactttgaaagcattggttcattattttttagtatcntgggttgctgatgtgacattttattaaaagcaaaacaaaa

SEQ ID NO: 596958 - DNA, 180 bp, Homo sapiens
gtcacatctgacagctcccgtcctcacgtcgtcagtggctgggctcaggcactcgccaccatgcttggctaatttttgtatttttagtagagacggggttgcaccatgttgattaggctggtctcgaactcctgacctcgggtgatccgcccgcctcggcctcccaaaatgctgggatta

SEQ ID NO: 596959 - DNA, 249 bp, Homo sapiens
  misc_feature (162)..(162): n is a, c, g, or t
  misc_feature (168)..(168): n is a, c, g, or t
  misc_feature (182)..(182): n is a, c, g, or t
agtacaggagtcattgacccggaggtccagcgatacaacaccccaggtttctcagggtgctgtctggtgtacgattcaacaacgtggctcccctcaagacccacttccgaacccctcgacccatgactgttgaggtagctgaggcccttcgagttcaggagnaactgnccgattctatttgnggagatatgccacgacttgatttcagaggtgccacctgagcttggatccctgggtatctccccccag

SEQ ID NO: 596960 - DNA, 744 bp, Homo sapiens
gtggcagcaggagcgacaagtcaagtgcttctgctccgtgatgtggatgacccagaggcatgcccatctctggcttaactggatgccataagacaaccctggttcctttgtgaacccttctgttgcaaacgcttttgcgatagcttaagcgattccaaagcgactaagaagattcaagagaaaaaaatagactgtgcgattcatagccatgtcactccgtaaagactgaactttgtctctgtttataaaaagtgagacttctcccggctacacagaagtacacaacatatggtagtcagttcggtatttagaaatgtatgggtagcagggaatgtgttcataattttcagagattatgcatttcttcatgaatactgttgtattgctgcttgcaaatatgcatttccaacacttgaaatataggtgtgaccagtgtgtaccagtttaaagctttcacttcatatgtgtagatcaatgtaaggatttagaagttcccccaagttacaaactggttttaaagtattgggacatactggttttaatacctgctttgcatattcacacatggtcaactgggacactgttaaacctttgattggtcaaattttatgctgtgtggaatactaactatatgctattttaacgttagtgttgaaccattttcagtttttgggggaaaaaatgcttttgtgtcagcttcgtcatgatagctgttatatatatatgctaaatctttatatacag

SEQ ID NO: 596961 - DNA, 250 bp, Homo sapiens
  misc_feature (138)..(138): n is a, c, g, or t
  misc_feature (174)..(174): n is a, c, g, or t
  misc_feature (201)..(201): n is a, c, g, or t
  misc_feature (220)..(220): n is a, c, g, or t
  misc_feature (227)..(227): n is a, c, g, or t
cctaataaagagaggcttgatttggcaccccatgtaatcacggtcaatgcaaaacacactcacataaccagttgacaaagctacatcaaagcaattctaattggccgggcatgtgtggcacgcctgtaatcccagctncctgaaaggctgaggcaggagaattgcttgaacccnggaggtgaaggttgcagtgagctgagntcatgccattgcagtccancctgggnaacaagagcaaaactctatctca

SEQ ID NO: 596962 - DNA, 1064 bp, Homo sapiens
  misc_feature (361)..(361): n is a, c, g, or t
  misc_feature (373)..(373): n is a, c, g, or t
  misc_feature (558)..(558): n is a, c, g, or t
  misc_feature (897)..(897): n is a, c, g, or t
ccatattggaatcaatatttatttcaggactatgccacggtgttcaggaacttaaacaaagatgagttcaacccgtggcctttaagcaacctatattttgtgttttattaaaagcacttttacaactctccatctcccattcttttaagttcacgtggatatgtggtgggcataatgtgattatatctctgtgataaccatttctctctcttattctcgagatctccatataatctccacaggtgtgctctctctctgtgaatatattataccaaggcgcgtgaacatatataaggtgtggagaagggtgtgagaggagaggagacaagaggagaacagagaagagcgggagactataagnggatctctctcnccaggtatatataaaggcgtgttgtgtgcgtctccccacagtgtgcaggggcgggatgttgagaggagaaacagtctatatcgaaaagatatatttttttcgtgtgcgtgtgcctctatgttcctctatctcttttatatactccgcgtggtgtgtcaccaagactatagcgtggctctatacanacacacatgatatcacatctctcacgcacgagtggcctttattctccgcgtgggagcgcgtgtattacaactcttcgacaaagaagatgtttgcagcgactccgctgtggcacacaggcagcagtgtgtttttgtttacacacacaatgtgtgtggtgtcttactcatatatgacggcgccctattatacaccacgaggcgacaaatcctctgcttccaaccaaaacataaaactattaagtataaaacaccgcatctttaaaacacaagagggcgccgacaaaacttctccgctataaggaaatatataacattgtcggcggggtgctgcggcccagnagcgtagcctttcatataaacacgggggcggacacaatcttaccgcttttattgttgtggccccaaggtggggtcgtaagaaaagcgctccttcctataaaacatgatcaaggaatttctccaacacgcggaaatagcacacattgtcttgtggaagagagagaatt

SEQ ID NO: 596963 - DNA, 413 bp, Homo sapiens
ggagatagcgcgagagactcaccggctcctgggaaccagtcgagggcccgggcaggggcataagaggaagttgtcccgagtggctcgctctggcctgggagaggggccccgggagcgcgtcccgccccgggcctcattccccgaccctcctccccggctgcgcgcgcgccctggctgtatctcgggggctgcgcgggaactgcagcgggcttgactggacgcactgcctgaggacctgcggaggagacgagggagcgcggcgggtcagcccgaggttaggccgcggtcacctgtccgtgcgctccgccttttccagccgtcttggtacagaatctgcgacctcccacactccttctcttttgagtatgtcacttaagtcttctcgccggatgctttttcttccttgcttttgc

SEQ ID NO: 596964 - DNA, 700 bp, Homo sapiens
gttctagatcgcgagcggccgccctattttatatattatatattttcagaaaatttacccattttatggagtgcatgggaatgggtcatacaatataccagatattagtgtagaaaactagggaaaagtcacaagcaaagtgaggaaaaacaaagaaaaacacaggaaacgcaagacatagcaagaggaaagaccgaacagaaacaaaagagtagtagagaaagagcacagaaacaagcagacagacgagaaaacagacacataaaagagagacaaaacaaccacaaaaaaaaaagagagcaacagaagcaaccaaaaccaaacacacaagaaaaaaacaccaacaaaaaaacaagaaacaaaacaacaccacgccagcaaaacacaaagaggacgacaacaaacagtgagagagagaagacaggaaagaaacgagaaacgcatgacacagcaaaagaacaaccaaacaaaaagagagaaaacaacacgacacagaacaaacagacaaagagaaaacagacacaggaaacaagaacaagacaagaacagaaaaataacaaaacaagagagaaaaacaccagtagaaaacaaacagacggaaagagaacagcaaacagagcaaagaaaatgagaaagaagaaaagaagagaaacacaacacagagagaaacagagacaaagaaggagagagaaaaaaaagg

SEQ ID NO: 596965 - DNA, 104 bp, Homo sapiens
ctaggtcttaaggagaggagggggtggggagcctaaccatctaggtctggggggagggggcagtgggggacccagtgaatccagcccccagcaccaatttctct

SEQ ID NO: 596966 - DNA, 765 bp, Homo sapiens
gagtctgtgagggaaggagatgcctcttccttcccttcaggtagtggggtcgaaaacacccgagctgggacctcgtctggaactacgggaacaatatctgcacgaggaaggtcactctaccaaagccgggagcgacagaattctcaggatctcaagaagggaagagcaagaccaagtatgctgtgtccaatccaggccaaagggttacagagcatctataacgctgtcccctagccagcattcctcagcatctcatgtgtaccatcatcagcgctgatgacatatagcggtaaaatcgcttccgctatggattccagaggtgatcaacagtcctcagctggccagactatcaaatgcatatgccatcccagcagctgcaggagtgcataacgctccataccgagaactcctgatcatgaccatacttaggagtcaagcgagaagctttgattgcaagatctggcacacgaaagctgacaatgcgacggacacccttctttcatcattggaacatcaagcctaacacgtatgaaggagacgacgggccgcggagaatcgccaggaccaccagacatgcagctgccgtgtcaaggcagcctcaggatgaccagctgggtgcccaagactctgcataccaaacgcagaaccaggagcgacgcagttcctacatccacagcaagagggactcatctcaaggggagatgtgacgatcacgagacccagggaaactgccagcacgtccctcaggcagagaactctcgatgg

SEQ ID NO: 596967 - DNA, 404 bp, Homo sapiens
cttcctttaaatgctgggaggcttaaaaagagatctgatggagctcagatactaactctcataaatggccttttgaataccagcagaaaatacatctctcagctgatatttcaattaactaaggaagcacaaatcaacaacattcctgctacacagtcatggtctgaccacacactggggtgaatcactggccatggtgaacaactgtcgtgaaaacaagtaagagtcctatgtaaacacatccagcaaacctactgggagcagcaggaatcatgaatctaatcttttattaagagacggagtcctgataagtcaccacaggctggagtgcaatggtgcagactcaactcacagcagcctccacctcccaggtacacgctattctcctgcctcagactcccaag

SEQ ID NO: 596968 - DNA, 218 bp, Homo sapiens
  misc_feature (13)..(13): n is a, c, g, or t
attacagtacganaatctccatagcatgctacaggcttgtctctatagagactgaggctacaatctcatgtctttacaattcactgaaggtaaaatctatgccaaaagcattcctctataaagaccgctcaacttcttcaagtaagtcttctcaggtcattgaaatctaggtaatgcaaggaacccctggcgctgtgattctccggctccctcccccc

SEQ ID NO: 596969 - DNA, 120 bp, Homo sapiens
tgtcagtcgctctggggacccagggtgtcaccccggccccgggatcggctttgagagcgtcaattctgcaggtgatccttaggggaacggtggcaaagtctcgaggagttccttggccaa

SEQ ID NO: 596970 - DNA, 126 bp, Homo sapiens
gctttgttccgcgttccctgcacaaaatgcccggcgaagcaccaaaaaccgtccctgctacagagcaggggttgtccgaagccccaggttgtagacagggtctgtgggacagaatcttaaaaatga

SEQ ID NO: 596971 - DNA, 253 bp, Homo sapiens
ttctgggtcctctgccatttcggggttatcctcagccactacccagagtgttattgttgcctggttcagttgcttggcctgctgggcgtccgctgttcttttggctgtgaactctactggtcagcacattcaggcaagcactgcatggtgtcatttggagcacatgggcctgagctcatccgaaaaaaaattgcaatggtgtttcattagttgcattagtatcccaacatttttcagtacacctctccccctc

SEQ ID NO: 596972 - DNA, 284 bp, Homo sapiens
ccccgggcttttttaaaaaaaaaaggggcccaaaggttttattgggggttttttttatttttaaggtttaatggggaacccccccctgggcccttttagatccggtggggggcgggttaaaaaattttttttaagcccctccttaaagttttaaaggggtttttttcccccgcccatttccattgggaaaccttttggccagttttttttttcccgatttttttaggccagcggggattccaaaaagggccttgccccttttccaaaaaaaaaaattttttgga

SEQ ID NO: 596973 - DNA, 188 bp, Homo sapiens
  misc_feature (87)..(87): n is a, c, g, or t
  misc_feature (97)..(97): n is a, c, g, or t
  misc_feature (133)..(133): n is a, c, g, or t
  misc_feature (153)..(153): n is a, c, g, or t
aggtgacaaaaaaaaaaattaaagatatatcaggggtttgggacaaacatatgagccattttttggtcatccaaaatagtaagttanaaacaagagnacaaaagaaaaaaatagttaaaatcattaatttttntatttttcaaacttggtaangttatgttttcaaataaaaactatctcaaaatttt

SEQ ID NO: 596974 - DNA, 209 bp, Homo sapiens
caagcattccgcaaggtggacacccatcatccatgcctcgtcctgcatgaaccagaagctatctgcgtgcgcttctatcaatgcgggcgatgaagctggcaccctggagagagatcgtgcacgtggacgcagggccgtagaacacgacgctgcgggagagtctttgagagtcatgaatctcacggacctacgaacctgagttgtggaca

SEQ ID NO: 596975 - DNA, 406 bp, Homo sapiens
gctctggtagtgaattccagtccatgttctcatttcagcagatggctggcatctttggggattgatcccaaggaattgtctatagtggaggtgcccgcattggggtgttgagggtgacgggcgttttcacatgggtcttgtctgggcaaacccgtcggggtgggactcagaatcaaagcaaaaaggctgaaggagccccaaaccagggcagaaaggcagagggaaccccaaaccagtggcaaaaagacagagtggaaccccaaaccaagggaaaaaggcagagggaaccccaaaccaaggcgaaaaaggcagaaggaaccccaaaccaaggcaaaaaggctggaggggtcccagaaccagggtaaaaaggtagattcaagcccaaaccaggggaacaaggtggagg

SEQ ID NO: 596976 - DNA, 177 bp, Homo sapiens
ccacgcgtccgagtcaccttgctgtacattagatatctagaacttatcttgcatgactgaaactttgtaccctttgaccaatatcaccccattttcttctcccccgccacctgtgtgttcttttgatacatttatcttctgtttttctcaaataaagttcaaagcaaccccctgtca

SEQ ID NO: 596977 - DNA, 977 bp, Homo sapiens
  misc_feature (32)..(32): n is a, c, g, or t
  misc_feature (95)..(95): n is a, c, g, or t
  misc_feature (99)..(99): n is a, c, g, or t
  misc_feature (145)..(145): n is a, c, g, or t
  misc_feature (153)..(153): n is a, c, g, or t
ggagtcggggtgggggggcttgtgcgcggggnggcgggagaggcggcggggggccagcacggaggcggaggccgagggggctgtgcacaggtcgncgcnggagaggcgtgcgaattccgagccgagcgcgaggaccgtgctaccnaggcgggntgccagccggaggctccctctctgcagaagtgggggagcgtgaccccgtgtccctcggcctcccttttcccatccacttccgagctttcttctttcccgagaacgcctgtccggcccgggcggtgccctccttcaagtgccggccgcatggcacagaggactgtcaggcgcggggaaaaattcttagccgggggaattctcaagtgcgcggccttaagcatcgggtattccggacattcacttccttcggcgcggggccccccaagggggtattgccccgggaacccctagacacaaccttcgaggcctccgggggatattacttcgagtgtgatcgcacacttggaaaccacgggcgccgggagagtggtcaagaaagtggcaaacaatagttgaagtgggcccgattagagaagcaccgggacacaggtacaaagggatgtgcttcgcaccacagacaaccaagtgggtattctacctcatttccattccttccaagcgacagaggggaatccggtgggaaacacacacttttcaggaaacacactctcccacgtcaattggactgccggacaacttccgggtcagggggaggcatgccttgtcgatcaaccaagacgggggaccttgggttggacacacattggttgggccacagtcaacaccaattatgacgactctttggacaggcagggctttacaaggtacaccgagttaccaacaagacgattctctctcccatcacaatgtggtgatccttcaacacaccggtggtttgaatctacacccaaattacacggcatttaaccagtatcctaagggca

SEQ ID NO: 596978 - DNA, 261 bp, Homo sapiens
  misc_feature (101)..(101): n is a, c, g, or t
  misc_feature (149)..(149): n is a, c, g, or t
  misc_feature (159)..(159): n is a, c, g, or t
  misc_feature (162)..(162): n is a, c, g, or t
  misc_feature (168)..(168): n is a, c, g, or t
  misc_feature (183)..(183): n is a, c, g, or t
  misc_feature (198)..(198): n is a, c, g, or t
ctcggcccggttgcttggtctttccgtatgcccttttcctaacactcacaacaaaactaactaatacgtaacatctcagacgctcaggaaatagaaaccgntctgaacctatcctgcccgccatcaatcctagtcctcatcggcctccnatccctacgnatnctttanaatacaagcggggtnaacggtccctccctntccttcaaataaattggcaccaactggtgcttatccttcgcgtaacccgcttcggcgggctat

SEQ ID NO: 596979 - DNA, 125 bp, Homo sapiens
gaagttctttgatgcatttaacatatgattagatttacaaatatttgattagcacacagaattttccaagagcacatcctgataatcaaagctgagagaaaacaaaagcaaaagaggcagtggat

SEQ ID NO: 596980 - DNA, 525 bp, Homo sapiens
ctaccttcccctcatgtgtacttagccacctgtgttgctttgaatctgctgccagtcctggctcaaatgtggcacaaaatcagtacatcagacacaccatgaaatccctgtggctataaattctaaggcaatcttttcgcacacttccagcccaaagcaacttcatccgcatccgtatcatataagagtccccacctctactccacggtaccccaaacaagatacgctgtcctcagatcctccttctaaccaggagggaccactactgggactactggccaagggacacaagtcagcacctcatccgggctcgacacaacgacccggccaagcttgggctaggcccgtttcagcaccaacaggacgcagtaacaactggggaaaacgaagccccagggctacacaaaccgatacgacccaagctgaccaggtggatcacacgcccggacaccaatcgggccaggagcggacacagggaagagatacaagggagcacagcctcggaataaaccccgtcacacaaag

SEQ ID NO: 596981 - DNA, 854 bp, Homo sapiens
agaattagatcgtcgggaacgagaaatgcaaagaactcagtcaacatggtagaaaaaataattggccaccctcttcctagcaagtttgtccttgtcggacctttgtattctatcaggatgtatctgtagacattcctgtagaatatccaaaagacaggtaaagctatatggtactactggtggatgtctccatgcgagttaacactgattgtctagaatatcttcggatgctgggcttggtaaggtgtagatatctgcaagagcggttgatgtttggattgaggtatcctgatggatgcgttgctattttactccttgtacatttgtctgttggtacagaccagtttatggagctttcagtggttggagtggcatccctgtactggtctcaaccaataatattcctgttggaatcgatgatgatgatcatagcagcacttgtcacagcatcagcagtcatctcactagttcatgttcaaaaaagtacatggactatatcgcacaacaggtgctagttttgagaaggcccaacaggagtttgcaacaggtgtgatgtccaacaaaactgtccagaccgcagctgcaaatgcagcttcaactgcagcatctagttgcagctcagaatgctttcaagggtaaccagatttaagaatcttcaaacaatacacacttacctttgtgactgtaccttttactccagttactgtattctacaaatatgttatgttcaaaacacgacagtacagacagcatggatatttcctggtacacttgtgcatgggctaaaaacaaggaaaattacttgtcttattattttacctaatagttcttaatattaagtgccctgaagagaa

SEQ ID NO: 596982 - DNA, 134 bp, Homo sapiens
tctagacggatcccattaaactgaaggaaggggttgcagaaccctgatttttagccagttggtcagaagctcacagaattaatggaaacctggttactaggctcttacaaatgttattttaaaggatataaata

SEQ ID NO: 596983 - DNA, 424 bp, Homo sapiens
attcagggtttttattcttatgtttttcttctaagaaataagttcaccaaaaaagtagcatacacctattggtatccagaggaggaaaaaaaaaaaagggcggccgccctttttttttttttttttttttttaaaattaaaggtagcctccgggggtcaccatttaaaagaaaatttaattttgggggaaaaacgaatttcagggtgatcccaaaaattttgggggtaaaacaacattcggggtgtaatttattggaacactattagagtattgggggttaagcttggagtcattccccatttcatagggtgttcatatggggggaaataggccacacttaattataagttctaccttttcaaatggccgtggtataaaaggaaaatacctcaattaaaatttttccatatagattttctcaac

SEQ ID NO: 596984 - DNA, 120 bp, Homo sapiens
gcgccgcggttaacgaggcttgctggaagctcatcaacgaagctattagttgtgagtatagtttgaatgtccgttgtagaagaaggattatgatgcgactgtgagtgcgttcgtatgttt

SEQ ID NO: 596985 - DNA, 151 bp, Homo sapiens
  misc_feature (84)..(84): n is a, c, g, or t
  misc_feature (122)..(122): n is a, c, g, or t
caagtgatccacccgccttggctctcgaagtgctgggattacaggcgtgcaccccagcccggctatcagcactgttctgattgnagacgtttcacagcatgtttggctttggtaaatcaatnccaggaagactagcatgtgcactttatct

SEQ ID NO: 596986 - DNA, 499 bp, Homo sapiens
  misc_feature (19)..(19): n is a, c, g, or t
  misc_feature (161)..(161): n is a, c, g, or t
  misc_feature (199)..(203): n is a, c, g, or t
  misc_feature (205)..(210): n is a, c, g, or t
  misc_feature (215)..(216): n is a, c, g, or t
  misc_feature (221)..(221): n is a, c, g, or t
  misc_feature (224)..(224): n is a, c, g, or t
  misc_feature (226)..(226): n is a, c, g, or t
  misc_feature (229)..(229): n is a, c, g, or t
  misc_feature (267)..(267): n is a, c, g, or t
  misc_feature (269)..(269): n is a, c, g, or t
  misc_feature (286)..(287): n is a, c, g, or t
  misc_feature (302)..(302): n is a, c, g, or t
  misc_feature (304)..(304): n is a, c, g, or t
  misc_feature (306)..(306): n is a, c, g, or t
  misc_feature (308)..(308): n is a, c, g, or t
  misc_feature (313)..(313): n is a, c, g, or t
  misc_feature (336)..(336): n is a, c, g, or t
  misc_feature (352)..(352): n is a, c, g, or t
  misc_feature (356)..(356): n is a, c, g, or t
  misc_feature (361)..(361): n is a, c, g, or t
  misc_feature (369)..(369): n is a, c, g, or t
  misc_feature (379)..(379): n is a, c, g, or t
  misc_feature (381)..(381): n is a, c, g, or t
  misc_feature (388)..(388): n is a, c, g, or t
  misc_feature (406)..(406): n is a, c, g, or t
  misc_feature (434)..(434): n is a, c, g, or t
  misc_feature (499)..(499): n is a, c, g, or t
gggtgcatttggtgctgangctttgaagccaccgtatttttcgttacctgtgactatggagccaatgggatgtgacttcgctcatcacggacagtcattccttctcctttccagggtgctgggggctggggttccctggcccaagggtccagcctcctctnaccccattccaggtggcatactgcagtctggctctttnnnnngnnnnnngccanncaagnatnanctncccaacccttgaacccccatgcaatgagcttctaactnanagctgatgaaaaaaagnncccccacccccaatncntncntcctnactcctccgtcgctgcccttcanaccttttggtgctaancctncccanagttaagnactggatgtntnctgatcncaggctgggaaccctacncccaccccctttgatcctttctacttcnacggtgaaaggactgaggtcggaataaagagggaagagggacttcccttgactgggttgtgtttn

SEQ ID NO: 596987 - DNA, 926 bp, Homo sapiens
  misc_feature (6)..(7): n is a, c, g, or t
  misc_feature (10)..(10): n is a, c, g, or t
  misc_feature (20)..(20): n is a, c, g, or t
  misc_feature (25)..(25): n is a, c, g, or t
  misc_feature (61)..(61): n is a, c, g, or t
  misc_feature (64)..(64): n is a, c, g, or t
  misc_feature (70)..(70): n is a, c, g, or t
  misc_feature (78)..(78): n is a, c, g, or t
  misc_feature (90)..(90): n is a, c, g, or t
  misc_feature (111)..(111): n is a, c, g, or t
  misc_feature (122)..(123): n is a, c, g, or t
  misc_feature (127)..(127): n is a, c, g, or t
  misc_feature (136)..(136): n is a, c, g, or t
  misc_feature (145)..(145): n is a, c, g, or t
  misc_feature (147)..(147): n is a, c, g, or t
  misc_feature (160)..(160): n is a, c, g, or t
  misc_feature (163)..(163): n is a, c, g, or t
  misc_feature (169)..(169): n is a, c, g, or t
  misc_feature (172)..(172): n is a, c, g, or t
  misc_feature (176)..(176): n is a, c, g, or t
  misc_feature (187)..(187): n is a, c, g, or t
  misc_feature (196)..(196): n is a, c, g, or t
  misc_feature (198)..(198): n is a, c, g, or t
  misc_feature (203)..(204): n is a, c, g, or t
  misc_feature (219)..(219): n is a, c, g, or t
  misc_feature (223)..(224): n is a, c, g, or t
  misc_feature (226)..(226): n is a, c, g, or t
  misc_feature (228)..(228): n is a, c, g, or t
  misc_feature (238)..(238): n is a, c, g, or t
  misc_feature (240)..(240): n is a, c, g, or t
  misc_feature (243)..(243): n is a, c, g, or t
  misc_feature (245)..(245): n is a, c, g, or t
  misc_feature (247)..(247): n is a, c, g, or t
  misc_feature (256)..(257): n is a, c, g, or t
  misc_feature (274)..(274): n is a, c, g, or t
  misc_feature (277)..(277): n is a, c, g, or t
  misc_feature (279)..(279): n is a, c, g, or t
  misc_feature (283)..(283): n is a, c, g, or t
  misc_feature (288)..(288): n is a, c, g, or t
  misc_feature (300)..(300): n is a, c, g, or t
  misc_feature (308)..(308): n is a, c, g, or t
  misc_feature (310)..(310): n is a, c, g, or t
  misc_feature (316)..(316): n is a, c, g, or t
  misc_feature (320)..(320): n is a, c, g, or t
  misc_feature (324)..(324): n is a, c, g, or t
  misc_feature (337)..(337): n is a, c, g, or t
  misc_feature (343)..(343): n is a, c, g, or t
  misc_feature (346)..(346): n is a, c, g, or t
  misc_feature (350)..(350): n is a, c, g, or t
  misc_feature (355)..(355): n is a, c, g, or t
  misc_feature (362)..(362): n is a, c, g, or t
  misc_feature (364)..(364): n is a, c, g, or t
  misc_feature (367)..(368): n is a, c, g, or t
  misc_feature (371)..(371): n is a, c, g, or t
  misc_feature (376)..(376): n is a, c, g, or t
  misc_feature (385)..(385): n is a, c, g, or t
  misc_feature (397)..(397): n is a, c, g, or t
  misc_feature (399)..(399): n is a, c, g, or t
  misc_feature (401)..(401): n is a, c, g, or t
  misc_feature (413)..(413): n is a, c, g, or t
  misc_feature (418)..(418): n is a, c, g, or t
  misc_feature (420)..(421): n is a, c, g, or t
  misc_feature (444)..(444): n is a, c, g, or t
  misc_feature (447)..(448): n is a, c, g, or t
  misc_feature (451)..(451): n is a, c, g, or t
  misc_feature (456)..(456): n is a, c, g, or t
  misc_feature (458)..(458): n is a, c, g, or t
  misc_feature (464)..(464): n is a, c, g, or t
  misc_feature (507)..(507): n is a, c, g, or t
  misc_feature (509)..(509): n is a, c, g, or t
  misc_feature (511)..(511): n is a, c, g, or t
  misc_feature (516)..(516): n is a, c, g, or t
  misc_feature (518)..(518): n is a, c, g, or t
  misc_feature (537)..(537): n is a, c, g, or t
  misc_feature (539)..(539): n is a, c, g, or t
  misc_feature (541)..(541): n is a, c, g, or t
  misc_feature (565)..(565): n is a, c, g, or t
  misc_feature (593)..(593): n is a, c, g, or t
  misc_feature (598)..(598): n is a, c, g, or t
  misc_feature (600)..(600): n is a, c, g, or t
  misc_feature (797)..(797): n is a, c, g, or t
  misc_feature (840)..(840): n is a, c, g, or t
  misc_feature (916)..(916): n is a, c, g, or t
tgaagnngcnggccagaccngaganggggagagccgtgggcccagtgcccgtggcctgccngtngtgccngggagccnacgaccaggccnggagccagcaaccaagcgcangcccggaggannggcnccaggacanggagcgccngncagaggagcggcngcngccacngcngagncagcccacacngggcagccngnggganncccttaggcactgcncccnncncngcaacccgcngnccngngngccagcccnngaagcgccccccagccncgngncacngggcngctcgggaggcngcccccgncncagtcnggcnggcncagcctcaccctncccatnccncacngcccncctctcncngcnnaanacccnggcccaganccacaaggggcngngnggccagcgggcngccanannggctgccccgggactccagaatnacnnccnccagngngtggcncctggggctgccccacacctcacacctttctctgcatgggccntntntcatnantaccacctgtttttttttngnantcgctctggcccagaaagcggcancctgcagccactgccagccacccatgcngcccncnatcatggtatggccttggccctgctgagccggctgctgcccggaagtgagtacctcacccatgagctgctgctgagctgtgtattccggctggagttcctcccggaaagaacatcagggggtccagaggcagccgacttctctgaccagctgtcgttaggaagcagcagggtccctcggtgtgggcaagggactctnctggctcaggcctgccaggacctccccagcatccgcaactgcnacctgactcattgctcgccagcccgagccagtctgctggcctcccaggctctgcaccgaggggagcgacagcgagnccaaccctgc

SEQ ID NO: 596988 - DNA, 302 bp, Homo sapiens
agctataatggctaggagagaggcgataggttaaagtgtaatgaccaaacattctaaaagaaatgcaaaaacaaaagtttattttcacgccttcgaactatattaaggaaagcaaaatcatttcctaaatgcatatcattggtgagcaatttctcacttactatccttgaatcattcatttaagactctggcttcatgtagactcgagtatgtcttctaggaaagtactatttcatggtccaaacctgttgccatagttggtaattctttcctttacgtgtgaaatatttagatgaaatttt

SEQ ID NO: 596989 - DNA, 466 bp, Homo sapiens
  misc_feature (8)..(8): n is a, c, g, or t
  misc_feature (56)..(56): n is a, c, g, or t
atgtattnccccaaagcttcactgtgaacctcctttcaaagtaaatgtttccaacnaaatgtgaaaaggtgttgaaatccccccatagggagaaataaagagtggaaagagggaaaaataacagcagcctttaagtatgcctgttttaaagcaaataaggacaaaaactggctccttctggcccgggtgtggtggcctcaaacctgtaatcccccaggactttgggaggcccaagaggtggatcagctgaggtcaggaattcgagaccagccctggcccaacattgtgaaacgccgtcactactaaaaatacaaaaattagctgggcgtggtggcaggcgcctataatcccagctacttgggaggctgaggcatgagaagcacttgaacctgggaggcagaggttgcagtgagccaagatcgcaccactgcactcgagctgtcggacagagcaaaagactgtgtct

SEQ ID NO: 596990 - DNA, 211 bp, Homo sapiens
gaggatcccatatcatgtttacacaagttagaaaaggacactctctacatcagaagacaaagaatgccaagttaaatattgcatttcattttacaagatatttttacatttaatagtcatgtaaaaagaataatgaacttgtagaaaacaacttcaatctctgtacaaatgttgaatatccaatggagcagcttgaagctttaattgtggt

SEQ ID NO: 596991 - DNA, 227 bp, Homo sapiens
agcggagtcgccggcggctcgcgcacggctcgcggtccttttgcctgtcagccggcgctgtcctgctcctccctccgtgaggtgtcgggttccttcgcccagctctccacctacgaccgccgtccgagggatgattgaatatgtagaaaccggagaactctaggagagatggcagctgactcccattgtttctaaaatctggaaacttgtccttattgaatacgact

SEQ ID NO: 596992 - DNA, 257 bp, Homo sapiens
attctggctgagggattcacagcacacgtgttgatgtatcgattgatgtcatgaggatagcggcatcatagtattagaggcccactgactggtgagatccccgaggatctcttcaatggttccagaagagttgtctggctagggatcggtgacgcattagtcgagccatgtagacaatctcatcaaaagtgatattcccactgtagttaaatgtttctctgtgtctttctgtctcttggtaccagaaatatcgaggt

SEQ ID NO: 596993 - DNA, 108 bp, Homo sapiens
  misc_feature (24)..(24): n is a, c, g, or t
ttccacggttcatcgtaatgaaanaataaaatttgtctgtcctgccttaaaattacattcgttcttccgctcaaatcctgatctggtccgtcaatggcgtccgcacaa

SEQ ID NO: 596994 - DNA, 239 bp, Homo sapiens
ctggataatgataacaccatatggagtgctagaggccgatgctgctgatgctcttctcagcagataattatgaaatcgatagggatgaggctgacatacttcaggaaggtctagtcaaagaagctattcaagcaaaaagattggatgtattggtctatatgctagagaaagatcaaagacttgaattggctataacttttttcagatggcggctatgctgtatgaagcagtccatgaat

SEQ ID NO: 596995 - DNA, 130 bp, Homo sapiens
tactttaccaggtagactagcaattgacgaactgtacttgactaaatcaggaaaggaactgctatttggtgtgttcctctgtggacccagtttatttcatccttaaacataatatttatgcggaagacat

SEQ ID NO: 596996 - DNA, 1010 bp, Homo sapiens
cacgacaaattgctttcttgcggtcttgtgggttcacctctgatgtggtgcagccccggagtggccctggtactcagggggaccccttgcgcggggtcctgttcctccggagctgggtgtcccctcttctcatgcctggtttctgctccgcgcgtgtgttgttcccggagcacgtcccccgggcgggcatcgcctttctgtcggtgcggttctccctgtgttctctgtgccggcgcggttgtgtgccaccggttctttcgcgcgcgatctggccaatttgtgtgcgcccccgcggaaccccgctgtttgggggggtcgctcccatgatgaccctcattccgccgggcgcaacccacaaaattccttgccccccgggccaccccaccacatgaagcaagtggttgccactagtcgaacccctgctttctttttgtgggtgctcccccagaccccagtgatttatggatcgctttgtcaaaacattggtcttatgggttttcccatcccgccgccttttctacctcttctcggcatgagtttctgagtggtgtttaagacaaacactgatgcggcgctaatgaactcgcgtgtccgtgggatggcacgctttctggtaggcatgtactttcgccgcccggccctcggatggcatcgttgggagattcccgccccacccacgaccagatccctctgtggacgggtggtgccggctgacaaccccacccacgtcgcaatcttcttgtggggagacaacctccgctcttctttgtgtaaggccttgtactatttctccgtgctagaatctcccagggatggcgccgcccaagaaatattctcgtgcctgcagcaaacggggtgtggtagatagagcaaataaggacgggaccaacgatttatctggtaatagttcaggatgcttttcttaccggaaagagatcttttttacaaaaagccctccgacaaacccttcatcaaatccgggaaaacaagacccttttcccccacataac

SEQ ID NO: 596997 - DNA, 1010 bp, Homo sapiens
  misc_feature (117)..(117): n is a, c, g, or t
  misc_feature (170)..(170): n is a, c, g, or t
cgatgaattctgaggagggtaatatagctagacagtcctaacctctgagcggaatcgttgacctgatcatgatcattcttgcaccattcattcatatgacagtgcacgtaggcacantgatgtgctgggccgtcactgatttgttggcttgcatgacgggtactcagaancaatgcaccgctagcgaagagtgcatgctctgcagtactcgagtagatagtggaggcttgccgaatgcttacttgcactgtccaagatggaccctcggcttggcttgcatctgtacctgtactactcctataactgaacattaaactactagtttcttggatccgggaactctgcctaggggggaataccagagcagaatgtatagcctcgtatgcccaaggaccctctttagaacacaccgctgcactgcaactttcaaagactccggaggtgatatatttggccctagtgtacgactcgtagcgacaaagtaacatcagagtgcccgttccctctagaacaaacatcttagggaaggtgtcgggtcgcgtgtgttccccgtaattatttattttcaaatgcactccatttccctaagtcaaatatggttgcctcaatccccttggcaataaatattctcaagagggctaatgaaatacgcgcattaagtaattctttccgaacctaaacttgaggaccacgagaattcgactttttgaggtttcggaacatcctattttagggtaacgtcaaggtaaccattctcctcaagtgtctttaaaccctttgaaaaattccgggctgaggaacaaacccaagataaagggcgtaacccccttttgtataaccccaatccaatttgggaaacaaaaagaataaggccaattcacgttaacatgataacagtttcgaaccaacaaaagtccagttagaattcccataaattagcgcagaggataatcgttccaccttaagtttgccaaaaccgacaacagtactccaaattggggcacccccga

SEQ ID NO: 596998 - DNA, 376 bp, Homo sapiens
  misc_feature (136)..(136): n is a, c, g, or t
  misc_feature (265)..(265): n is a, c, g, or t
gaactccaggccggtgtctgaacgggaaaccgaagccccggaagccttttggagtgtaggtgtgattgaggaaggaaaacaaaagccagcggacaggtggtgaagtgagggctgagttagccaccctagggaattntccgccttgcagaaaacattgagaggaatgatagcaacctgcctctatttgtgggcagttggtttcaaagggttgtgtgtctcgcccagaacctagggaaatgggtgtttgttccatcgtgggaggagnacctgtcagtgctgcacattagacagctgtgtcaggagttctcctttaataatgctgtggctttacgttatgattgaccggactgcggaataaacactggaatgaagatgt

SEQ ID NO: 596999 - DNA, 411 bp, Homo sapiens
cccccgcggtcgccctcgttcgggcatttagctctcgttctgctggagagcatagtatataggtcatgcaaaacctactataccttcttatgagatcgcacatgattggctgatgagcaatccatctttgctataacaatttttgggtcattgcagagcttctcgccgattcctttatacttagtgctccaggttcttacaataaccacaccaaggggcatcctattccatcagcacatctttgttttcattattcactatttcatcaaaattctctgctaccactaccttcacaggcccatcattgctctctgggataggtacccacttcaggtatctcttcagattgccatcaccgtaatcctgcaggatcctctccagagccttcccatcacgcgatatctcctcctg

SEQ ID NO: 597000 - DNA, 117 bp, Homo sapiens
gaagggaacattcttccatggacaggacaactataccagcttgttcgcattgccaaggtttctgggtacagaagaactgtatgggttctgaagaagtatcacatagacctagatcca

SEQ ID NO: 597001 - DNA, 288 bp, Homo sapiens
gagagagagagagagagagagagagagagagagagagagagagagagagactgagagcgctagcgccacattttcttcctcttctcttctctctctcctttttctctccctgtcccttctctcccttcctttcccttctccctctctctccctctctcttcttcctcttctctcttctctcctcccccctcctttctcctctcctcccttcccttctttctctcccttcttccctccctccttcttccttcttcctcttcttcttccctccccttctcttcttccccc

SEQ ID NO: 597002 - DNA, 456 bp, Homo sapiens
  misc_feature (420)..(420): n is a, c, g, or t
  misc_feature (448)..(448): n is a, c, g, or t
  misc_feature (450)..(450): n is a, c, g, or t
aattgtatttttcaaaaaggatacagcaagatttcagatctcaaatactgttccagaacctattgcctgtgacaatcgttactccccctaaagaggcaaaatgatttcctttccactggaaccggggtcaaattttttgatggccttgatgaataaagtgtggcacaagtgacactgcaagactttggagggtaggccataaagggaaagaaagcttctgggtttcttttagtcctgggactgggctgccatactgtgacaaagcacacatgaaagaacatcaagagatgtttagatgaaatccaaatcacatttatgtgaatccagcccccagcctttgaatccttcagttaacttccccaactttgtggagtagagaaaaattgtccccactgtgactatccaaatatcttgccttcncaatctgaacataataaatttttgattnanaccaaa

SEQ ID NO: 597003 - DNA, 227 bp, Homo sapiens
cgtgggtccttgcagaactacgaacgggcccccactgtcagactggacacatggtggcggcagaggcggctggagcccaggacagtgcagctgttctggaagccagtgcccctggaggaagacagcggacgtgatccaagggttatgtgtgtttcttgggagacacctcaggccaggctggggccatcctgcccctctgcaagaacccacgggttaccgagctcgaa

SEQ ID NO: 597004 - DNA, 120 bp, Homo sapiens
ccggagtttgcggaacttggggtcagggctttccgcttggggttcagggggcagagacctagaaaaaaatttcccgcggcccgggcgcttttttgcccctttggggcccccgcccctgga

SEQ ID NO: 597005 - DNA, 643 bp, Homo sapiens
  misc_feature (384)..(384): n is a, c, g, or t
ctctctggatgagaccgataccctaccccctgatgaagttcgcctgctttggacgtactgttgaagccctgtgaccagtttgtggttcctaagcccccccagtgaatgttccaagcccgagcagctggttgtaacatttgtagccggttacataagctggagtcttttgtgccattgtttctcacccctcgctgattctgtggtatctgtgttgagataaagaaaaaggtagccgtgcttctctggtcctccagagaacttggagtttataaggtgtatggaagggagctgtttgcccgtatcactcactgattggtaaccctgagctgcacctacacgtggtttatctatgactccgctgaaggtctatcttcagagcttccntcgccctcctccacacccgagaatgccacgaggtcttctgaagaagaaagcttgggttaaactcacgtagttatgatccaagcacaaatgtggagctgaattctgcttgttgaatcacgtgttgaagaaagtgccaaaggagacttttatatatttgaccgtgtaggaaattgtctattcctgatataattactgtagtactcttgcttaaggcacagagtttcagatttactgttgaaataaaccccactcttcatga

SEQ ID NO: 597006 - DNA, 515 bp, Homo sapiens
gcccgaggattaccggaccaagtaaccctcagtaataactcaaacatcgttaccctgaaaccgattataggatcaatgccccacaggatccaagctactggctgcatcgaggtaaggggtgaagggtctgagctagatcaaaaggcacgggatggagatgtggcagagaaagtacttgtggggagacctagcttttaacaggcttctggaaaagctagggaaaagtggttgcccgctttccccctttccctccccttcaagcaccgcttgagatctgggctttattattaagagctgctataaaaacagcttgcttaaatgtaaagagaagcccaggggtacttcaagcattccttcggatgcttcactccagaaagagggagttgaggcaagtcctcattactaataaaaatcaggtgaggctggcacttctcttgaccttaggataatagcgctttgttgtctctcctgccacaggaaggctccatggttgtcctactttaagccttcggtgc

SEQ ID NO: 597007 - DNA, 242 bp, Homo sapiens
cgcgtatccgacactcatataaagtctctctgtctgtcatagattatatactgacgtcgaattgaattggggatggtataccttcatagtccccacagaagacttgctatacattgcagtgtgtagtagtgtgtttacctactgaactcatttactataatgtgattagctaatgccaattgttaaaaagtgactgatatcgcactaatgaagaaatcatgttgagtcatatgtgctattcc

SEQ ID NO: 597008 - DNA, 191 bp, Homo sapiens
  misc_feature (11)..(11): n is a, c, g, or t
  misc_feature (34)..(34): n is a, c, g, or t
  misc_feature (70)..(70): n is a, c, g, or t
aaatttagtanctgaattgccgatgttgagctgnactgtaagtgtaaaatatacactggattttcaaacncctaatatgaaaaaatgttcaaatgattttatgcattgcatttttcatattgcatgaatatattgaaatgcataatagtttgggtatattgggttcaaacaaagtcaagtctttcaatgtc

SEQ ID NO: 597009 - DNA, 343 bp, Homo sapiens
gtgctctagaggattcccattggatagcggataggggtcttctggttggcatgcatcatcgtggatggacacagcgtgaagtagctgtgcaaggcctttgcgcaggcgaagcaccatgcaacagccatcattgccaagaccttcaagggccgagggatcacgcggggtagacgataaggagtcttggcaatgggaagcccctccccaaaaacatggctgagccgatcattccaggagatctacagccagatccagagcaaagcgaagaatctgttcaaccccctccacagaaggacgcacccttagtggacattgccaacatccgcatgccaagtccatgccc

SEQ ID NO: 597010 - DNA, 424 bp, Homo sapiens
  misc_feature (337)..(337): n is a, c, g, or t
  misc_feature (380)..(382): n is a, c, g, or t
ccagggtgcaggccgggaacagccgcctgagtcctccgtggccctgccggtcacttccccggcctcacctccttccacgtcctctctccaccagctcctgcctcgcagtctcccggctgaccttcaaacactcccagtgcaatcccgccccaaggacaccgcgcttgcagtcccctcctgggaacgtctttgcccagatgtccctgggattcccttcccccgctggaccccattccctccttcactttcccactgggctcgtgacatttactcctcactgaggatcccccgatgccctcctcccaccagaacatcagctccttgaaggcagagactntgggctgctttaaccaccacatcctagtgtccaggacagtgcnnnacacacataagtcatgggatgaataaacactagaaaagcaaa

SEQ ID NO: 597011 - DNA, 181 bp, Homo sapiens
caaaggtgacgtatccagaatcatataaggaacttaaatttacaaggtaaatagacaaatcacctaggctgttctgtggtgtagccattcttttattcctttactttcttaataaacttgcttccactttactgttaaaaaaaaaaaaccacaatcaattggggcggggtgcgttgctgat

SEQ ID NO: 597012 - DNA, 489 bp, Homo sapiens
  misc_feature (156)..(156): n is a, c, g, or t
  misc_feature (252)..(252): n is a, c, g, or t
  misc_feature (264)..(264): n is a, c, g, or t
atagttatgggccccctaagggcccccgtttggcggcccctttgggaaagaaaattttcttgcccctttccccccgcccccccaagaatggtttattaagggggttcgggctaccaaagcccttattgacaagcccagagtcccccccccccccgnaacagggcactttggtgtgaacattccccctaatgtgaggctgtgaaaaggcattatggaccctgcaaaaggaggccccccacaccaggacagacnctagtttcaaangaggggcactgccccctgcctgcccctttggtgcccaggcacaaaaccctgatagtgggtttgggtccccttggtatggaatgtatgtgctgaccccctaggtgagtttggggattggaacagggattttaggtctgcctctctctctctctctctctctctctctctctctctgtgtgtgtgtgtgtgtgtgaagttttttacaggtgaataaacaaagtttga

SEQ ID NO: 597013 - DNA, 112 bp, Homo sapiens
acccgtcttcctatagtcactgagtctaaacagacagcaggtgaagagatagcgttgaggccattgagggctcaagagaggacatcgtggttcctgtctacctgcgggagcg

SEQ ID NO: 597014 - DNA, 1560 bp, Homo sapiens
atgtgatgtggtcacacacgcacgtggtgtgaataaaataatgtgtgacacagttgtggaacctgatagtgattgaatttagtgttgtagaggtagcgacggttgttgtaacaagaggagggagcaagtcttgttgataaaaaagaggcacgccaccgtggttgtgtcgcataagagaggctgcttcgcgcacaagagaaagaggggtctctttttggggaaaaaatgcttagggagaacagggtaatttataaaattcatctaattggggcccgttttttgtgttcgcccgccccgcggttgcgtattatccactctcaattatatggggccccttttgtaagagtggttgcacacaacaatctttgtgggggttctctgttataaagattactctctgcttaaagagagaaaaaaatatataacactggggggtgcaacactgttttccacggagaagaagttttttctctgtgtacaacataaagagtgggggttatattggggcccccctcttaatataattgtttaaacacgtgcgtttttttgttgttataataatgtagtcgtgtttttttgtgtggtagggacgccccaaagggcacacaccacactttgtctggttgtcttcgccccctatggccctggagaaagttgttttgtggtttggggcaacccaacacggtcttttcaaaagcgcttcaaaccgtggccaaaacacctttcttgggcccccgtcctcccacaggttgtcaaaaagccacacagtctctggtgtctgttgcgccgctcacagcgcgctcttccacacaggttagtgcctggtggagatttatacacggggcacacccccgcgcacaccaacaccgctctcacaggcttaaaatttttttgttatatttttttctgttaagagagaaatgtgggttgttttcaacccagagatagtgtttgtgccccacagagcctgtgtggtctcttcacaaacactttctttgacgacactcttcaaaagtgtgagtgtctggcgcacacacactctggggcgctctccccacacaagtggtgtctcgggaggtatacacacagtgtgtgtataaagcccacaactcgcggcgcccgcgcgctctgttttaaaccttttataaaacacactgtgtgttataagagattgtctaccccctatataaagagatcacaaaagtatatacacatggagatttgagacctctctacatctacacattggagatatagcacagtgagagtggagactgagaagggttctcacaatatcacaagagaaaagcccggcacaccacacagaaactttccacattcttaaatctagagagctgagccacgtttgagagctgagattctctcctttgaaagaggtccctttttgagttgcacgtgcacgtaactggcacatttcttgagaatggagatgtaaagtggaggtatattttatagtttaaaaggcttttctcaaattacttgaatttttttataaaattgaggagctttatttctatttacccttccatttttgtgtga

SEQ ID NO: 597015 - DNA, 116 bp, Homo sapiens
ggtccctccctagtctctgtacccaaagcaactcatcccaaatcttctttcttatccctacccacctctcccctcaggccaaccccaatgtgtctctaagtctgtattaactgctt

SEQ ID NO: 597016 - DNA, 508 bp, Homo sapiens
tctagagtataccggctatcacattatcagcatctgtatgaaggcagcagacagcgtttcctcagagcagcccattcttcagcggcaggacacgaggacccacaggcccgctttccgtcccgagcacagcatgcccagagggaccagcggggctcctcagcagaaacttaaatttagaaggtgctcccagtcagggaccctcacaggcttgggtgacgaaagggtgtcttgccggggagaaggtccgggccacgacccagccagcaaattgggaggaggaacttgcacacccacggacacttgctcttgaaaaggaggatgatttacttgcttcctaaaactgacaggctgcacttgtcctctccaagcagaggtgtgaagcaggggcagctggttctcactggtctttgaagttggcctttctcttttccacaaacgcggtcatcccttctttccggtcaatcagtggcaaaggttgaataaaagagtttcgataatgtgatagccc

SEQ ID NO: 597017 - DNA, 359 bp, Homo sapiens
actcagtctctcgtctgtgctgcgtgaggatcctcgtagcagtcgtgctgacagggtatacataccatagtactgctagtcgtaatactactgcggagagtgcgatagcacctcagcgatggcggcttcgacatgggctttacggagtcataagtggagtccgtaacgaggtatctttagtataaaagctattgtgtaagctagtcgtattaactagttggctcaggagtatgatagttctatggagcagtgagagtgaatagtagaatgtatagtgagcctagggtgtcgtgagtgtaaattagtgcgatgagtaggggaagggagcctactagggtgtaggctcctacagcctgtta

SEQ ID NO: 597018 - DNA, 356 bp, Homo sapiens
tcggcattgaaagcaaactcagacacatctgacctggagttctacctgcactaagagaagagagtggtaactaattcatggataaaacagaccatcgaggcagcactgaatgatctcacccacgaatgacaacagtggcacaggagggctatgaacattttgcttcaggatgttttatttcgctctactgttatgtagagaaagcatggtttgctttttataacttttgtgacccaaaaataccagactgttgttttccctaggtgccaggccatcctgttctgtgtgttcccaaactcttagttttgttcatgtaaaactcatgatttcataattaaaacaatattcaaataaca

SEQ ID NO: 597019 - DNA, 349 bp, Homo sapiens
  misc_feature (72)..(72): n is a, c, g, or t
tgtagtgacctcttccccctcaagcactagtcctgaatatcagtagccaggtgctgtagctgagcccccccngggttcacattattttggttgtttattacccctagcagaggtttagaaagatcagtagttttatcatttgagttcaggagtttcgagactagccctggcccaacatggtgaaaccccatctctactaaaaaaataaaaataaaaaataaataaattagctgggcacgtagagcgcacctgtaatcccagctactcgggaggctgaggcacaagaatcacttgaaccccggaggtggaggttgcagtgagccgagatcacatcactgcactcctgggc

SEQ ID NO: 597020 - DNA, 278 bp, Homo sapiens
cgtaacctccaatataatttcatataactgaaacttggtaccatttaaccaacacctccccattaccgtctcccctaacgcctggcaaccaccattctactctgtgcttcatgtgtatgcctatttagattccacatgtaactcaatcacgtagcatgtgtctttctgtgtctggcttatttcatgtagcataaagttctgcaggaccatccatgttgttgtaattggcaggatttccatctttctaagggctgagtagtacagttagctttcgcatc

SEQ ID NO: 597021 - DNA, 478 bp, Homo sapiens
  misc_feature (41)..(41): n is a, c, g, or t
  misc_feature (47)..(47): n is a, c, g, or t
  misc_feature (91)..(91): n is a, c, g, or t
  misc_feature (109)..(109): n is a, c, g, or t
  misc_feature (262)..(262): n is a, c, g, or t
  misc_feature (301)..(301): n is a, c, g, or t
  misc_feature (373)..(373): n is a, c, g, or t
  misc_feature (377)..(377): n is a, c, g, or t
  misc_feature (384)..(384): n is a, c, g, or t
  misc_feature (391)..(392): n is a, c, g, or t
  misc_feature (408)..(408): n is a, c, g, or t
  misc_feature (410)..(410): n is a, c, g, or t
  misc_feature (430)..(430): n is a, c, g, or t
atttccccccctcccgtgatggagaataattaaagccaaantccccnctttatatgattatatgattttcccccccagaagcctcctcttnccccaggtgatagaaggnagttccgagaggcacacagcccgagtacagagtgttcccggttaagaaaagagcaacctgcaaagacccctagccatgagcgcttggtttgtttgaggaacagcaaggatgtcaatgtgactagagcacactgggttgaaggacagtaggagncctgaggtcagagagcttgggagtgggataaggtggggnacataatggaggcatcgtaggccactgtaaaactttgcctctaagtgagagagcaaccatcagaaggttttnactnagaaatncatgacnnactatattttaaaatngnctaagagtagaaggggaagnaccagagcaaccagtagaagcatttagagaactgaaccagggtcagtg

SEQ ID NO: 597022 - DNA, 841 bp, Homo sapiens
  misc_feature (3)..(3): n is a, c, g, or t
  misc_feature (841)..(841): n is a, c, g, or t
tcnccctggccgggtgtcctggctcggcggtccccggcatggtggtctctagaattttggacgatgtgcggcggatgaacaagcgggagctctattatcaagtcctaaattttggaatgattggctcatcggcactaatgatctggaagggggttaatgggtataactggaagtgaaagtccgattggagtggtgctcagtggcagcatggaacctggcatttcatagaagagatcttctctttctaacacaatcgagttgaagatcccatacgaatgggagaaattggtggttttaggaatagaaggaagagagattcctatagttcaacgaggtcttgaagaattcatgaaaagcaaaatggggatatcaagtttttgaacaaaggagataataatgcgggtgatgaacgaaggctctataaacaagggacacattggctagagaagatgttgtggggagagccagggggattggtccttatattggaattgggacgatcctcctgaatgactattctaaatttaagtatgcagttctctttttgctggggttattcgtggctggttcatcgtgagtaagaaggctggcttggtgttcctgggaagatgccataattttcggtactggatgttcggagtacatactggtccgggattggtggcatgggaaccccgttgtggggctccgggttacctggtttgattaattatgttcctgcctttgtgtggcgggacttgcccaagaattgcccgagggattcagccaggatccactgctggccctacatttgacccgactttcattacgtgccacccctgtgtttcctcttttgccactn

SEQ ID NO: 597023 - DNA, 522 bp, Homo sapiens
agactgcctcctcaagtgggtccctgacccctgacccctgagcagcctaactgggaggcaccccccagtaggggcagactgacacctcacacggctgggtactcctctgagacaaaacttccagaggaacgatcagacagcagcattcgcggttcacgaaaatccgctgttctgcagccactgctgctgatagccaggcaaatagggtctggagtggacctctagcaaactccaacagacctgcagctgagggtcctgtctgttagaaggaaaactaacaaacagaaaggacatgcacaccaaaaacccatctgtacatcaccatcatcaaagaccaaaagtagataaaaccacaaagatggggaaaaaacagagcagaaaaactggaaactctaaaaagcagagagcctttcctcctccaaaggaaacgcagttccttacaagcaatggaacaaaagctggatggagaatgacttttgccaagtttgagaaaaagaaggctttaaaacaatcaaactactt

SEQ ID NO: 597024 - DNA, 379 bp, Homo sapiens
tccctgccgcagattgcatagccaggcaacggggttggggcaggggctttcgccgtcacggcatcagagatgttggcttctagattttcttgcaaggtgatggacgaaacctcttactggtcgccggtcgatagcttcgtcggtgcctcgatggcggccgtcatcctatgcatcctggccctggtcggtgcgaatatgctattgctcctggcgtccggatggattcttgcctacggcggagtgctcttcctgggcttcggcggctcgagctggacctcgtacatggcgatcaactactacatgaccgtcctcggggtcgccgcgcagctcttcgcaatggtgctgctcgtaggcatggacaggaccttgattgttgacc

SEQ ID NO: 597025 - DNA, 213 bp, Homo sapiens
ccaaattatatttcacccccaagtcagagactgaggacattccagggacaccccttctttctccaggatatcattcatatccacaggtcatagtagagtcagtctttaggcattgcttaaaaaacataaagccctgcctttttggaataagttaaatgatcagcttgtcaggcttatgcccacactttatgtctgggcaaatttcagcaactt

SEQ ID NO: 597026 - DNA, 190 bp, Homo sapiens
tgctctgaagtgtagactccctgagccaacgacgttaatatgactagctacaagtagcttttatatgtaaagatacctctttacggacgtccacttagtgactcccgtagatagcccagtgtcgaaggccccatcgctgggtcaatagtacttgccgcagtactcttgaaactaggcgggtatggtatga

SEQ ID NO: 597027 - DNA, 225 bp, Homo sapiens
gtttccctgggaaccccccccccccttttttttcccccctaaaaaaccccgggggcgttcccccccccggtttttttctttggccggggggggggttactttttttccccgggaaccccttttcccctttggccctttttggggccccttttaaaccatttttttcaaaaaaacgggggggggccggtccgggttttccggggtttttttccccccccggtccca

SEQ ID NO: 597028 - DNA, 184 bp, Homo sapiens
  misc_feature (106)..(106): n is a, c, g, or t
gggcttttcggctatacgccggatgagatcgtgcgcttatcgcgacgctggcgcaggtgtcaacgcgctgccggtggcaagcgacggctaaaattggtctgctctngcgtttcatattggtccgtattgtaccgtcgccgcgcggtgtattctgccgctatccggttatttccccaatggaaat

SEQ ID NO: 597029 - DNA, 142 bp, Homo sapiens
  misc_feature (33)..(33): n is a, c, g, or t
  misc_feature (75)..(75): n is a, c, g, or t
  misc_feature (86)..(86): n is a, c, g, or t
  misc_feature (109)..(109): n is a, c, g, or t
gaacgggccgctaggaggaagacggcgagcgtnacgatcgaggacggggaggccgccaaggaccggcgcaacatnccgtgcaccanagtggccgcgccgagcgttcctngcaccttcctccaccagcggcagcaagcgcaac

SEQ ID NO: 597030 - DNA, 339 bp, Homo sapiens
gtctcatcacggatccccatacagacgaccctgccggcctctgactcgcgaatggtcccctggggcaggtttcccgcctgcccgcgtgctggcgccttgtgctgagtgattcacagacctctgttttgaacccagcccaccctgtcacgtgtgtggtgtcatcctaggctctcaggcggggaaactgaagccctgcattacagtcgatggcagagctgtgatttgattgcccggctttcccactcgccctgtccatcatctgcaccagggctgcctggctgacccctgacaagcccttcgtggggagcactgagctttacccgttttgcagctcgcccc

SEQ ID NO: 597031 - DNA, 407 bp, Homo sapiens
atgatacaataaatgtgctctgaatggaggcagtcagactgggtgatggtgcaattcttgcacaggtagaaattaagttgcctggtctgtaaaaaaaggagacctaaggtcaaaaagtagaaactttggagcttagattaagatctcagaaattcttacatggagaatcagggggataaagcaatggcaagtacactgtaagtagccaaacagtatacaaagggatgcttctatattttcaccttgtttcattacactcattttaattgtgaggagccctgaatccaaaaagggtagtgacgactagtccagtgctccttccaccgtatcatgcggttctaaagtcattctggacatacaatctacaaaaatacatcatttttccagctcatgtccatggtccaaag

SEQ ID NO: 597032 - DNA, 401 bp, Homo sapiens
ataacagtagggaataaactgtgtcccacctgttttactttgtgttttattttgtctggttcaagtgcatgagcttattgcagccttagccaattttgcctttttaatttgtggatcacttaaaacattgagtgccaaaggtttaaggagggttgagaaacacaaagtaattccccttttttaccggattcagttcctgctaggatgttgtatcagaatcatgtgagaactcaggaagagatagagcagaacataacaaaggaagaaaatgtagattagaaaataagacttctgagaaaaagttcaaggaataaagattgtttgactctggagaggagaaagctgttgagatagtttgctaagtttgctaataaagctttattgagtcttttattgaaggg

SEQ ID NO: 597033 - DNA, 124 bp, Homo sapiens
gacgtagttcattggaattcagatattcagtctttggataactacagtactgcttcatctcattctggtggtccacctcagcctactgccttactgagtcattcccagtcagtagctgatatcg

SEQ ID NO: 597034 - DNA, 122 bp, Homo sapiens
  misc_feature (77)..(77): n is a, c, g, or t
ccagagtgggtcatgtcttcaggacagacgcaggatcactgctctggagaaacattgtcagaacactatgtttattnggtacaacagatgccaggccagggccctcgattgattatatataa

SEQ ID NO: 597035 - DNA, 285 bp, Homo sapiens
  misc_feature (137)..(137): n is a, c, g, or t
tgttgttgtttgtttttgaagacagggtcttgctctgttgcccaggctggagtgcagtggcatgatcatggctcactgcagcctcgacctcctgggctcaagcaatcctcccacctcagcctcccaagtggctaacnatataggcctacagggaaagcaccaaccaataccccagctaaattcttttatattttatagagatggggtctcccttatgttgccctggctggtcttaaactcctgggctcaactgatcagcctgcctcgtcctcccaaagtgctggg

SEQ ID NO: 597036 - DNA, 259 bp, Homo sapiens
atccatggggttaaaggactcggctttcttgttgctcccaacagtggttaaagaattcgtaaacttctttgataaggaggccacttcattgcagattggggtagttcattaactaagagctattgcttggtcttgaactggtgggtcctcttcttgtccatgaagacatgatctctgctactttattgaagctgctcagtatagcgcgattgtaagctccgccgaggacttacaagtggacgacatgtatacttgctat

SEQ ID NO: 597037 - DNA, 479 bp, Homo sapiens
ggagtatcgcggatcagcaggtgtagtcgataaggtcgtgctcatcatctgaccgatcagggcaagagagttccagtagctggtggggctgcaactctttaagctgccatcatcagaagctgccttggaaggtcccatgatattattgacaaccaggacttgaacccgatcaacacggatcctccagctccgagtccacatcaaagtctccctcactgtagatgaggtcctcattctcatcactctccatctcatcctcaatggcagcctgcaggtccccgaatgcgcttgaatgccaacatttaggatcagcctgcaggctctggttagcagcctccaggctttctagatccatctccagctcgtgcttcattgcggctcgcctcggcctccttcctggcaacctcgcccatctcctccttggagtcccggagcatgctctgtagccgcttgctctgttccttctcccggtactcggc

SEQ ID NO: 597038 - DNA, 824 bp, Homo sapiens
  misc_feature (15)..(15): n is a, c, g, or t
  misc_feature (75)..(75): n is a, c, g, or t
  misc_feature (103)..(103): n is a, c, g, or t
  misc_feature (147)..(147): n is a, c, g, or t
  misc_feature (153)..(154): n is a, c, g, or t
  misc_feature (172)..(172): n is a, c, g, or t
  misc_feature (186)..(187): n is a, c, g, or t
  misc_feature (190)..(190): n is a, c, g, or t
  misc_feature (202)..(202): n is a, c, g, or t
  misc_feature (204)..(204): n is a, c, g, or t
  misc_feature (210)..(210): n is a, c, g, or t
  misc_feature (242)..(242): n is a, c, g, or t
  misc_feature (340)..(340): n is a, c, g, or t
  misc_feature (342)..(342): n is a, c, g, or t
  misc_feature (348)..(348): n is a, c, g, or t
  misc_feature (357)..(357): n is a, c, g, or t
  misc_feature (404)..(404): n is a, c, g, or t
  misc_feature (424)..(424): n is a, c, g, or t
  misc_feature (451)..(451): n is a, c, g, or t
  misc_feature (454)..(454): n is a, c, g, or t
  misc_feature (482)..(482): n is a, c, g, or t
  misc_feature (544)..(544): n is a, c, g, or t
  misc_feature (599)..(599): n is a, c, g, or t
  misc_feature (751)..(751): n is a, c, g, or t
  misc_feature (756)..(756): n is a, c, g, or t
aaataaatgaagtanaagaaaaaattaaaattttttaaaaaaaggataagaaaataggaaaaaaatatgttcagnactttacatctatcatacaattgtatgnttttttttatctacattcatccattgagctatggaatcccctgnatttcnnatctttagcggatgtttnaacgccggcccggnnggntctctacacagngnccggtncgccctttcgctctccttaatgtctcgcggtncgcgtcttgagctgcttcccacacaaacactaccagccacgtctccaggccacggggaggtgtgtgggatgttttttctaaaccacatcagataaatntncgctcncatcttccnatgggctcccaccagcgggtcaggctgtatcgggctgtgctctgcantcatattccccagagttcantgtgggaagagacaataccagtagccnttnatgtctcactttgtttgtttctaaagtnaccaagacacacaaaaagacgagagtgtttaggaagaaccgggtcaggaacctcctgtttcncccaggtggggggcgtgggtgcggcgtgcccagagctgccctcccccagccgggnccggcccgcacaccctgcccagagcagccaggtagcccggggcagcatcgatgccctcacaaggctggtcaaaagaatgtgggggtggggtggtctctggatggtctttggaatgtccgtgtgcggccagctgggcagcgcctgcccccgancttgntcccgccagtgcccgacgggaggtgaggccactgtgccgcgctgctctatgtacacctggcccgcagt

SEQ ID NO: 597039 - DNA, 847 bp, Homo sapiens
tgagtcttcagttgtttggggaaacgcatacccgacactaaaaaaaaaaaaaaaaaaaaaaaaatttcacgtccgccagtccaggaaaacggaaacccccttcgtttacccggaattggttaatcccctcgccagggccagggactgggggtctaggtggggaccaaaaaaaaccggtccaaaactcccgttgcaaaccacattgggggcggggtctgactccgggttccccggttccccaaggctggagggcctgacttccccagacacagagattgattgtgtaaccaaacatgaaggttgaattgcccggtgacccaagggccctctccacgcgtgcccccttagcctccggggcgccagtgtctggggtggcgctcccacggccccatggcgcgactctgggccgtccccgaagtggggccctcttgtgatcggcggtcccccacaacccgtcgctttccttacgcgggccgaggggtgagtgtcaagtttgggcgccacttcgagggttctccgccgatctctgtatcgaaagaagggggggagggcaaagcctggggttacaggggggtggccggaaaggtgcccccagtacgtgaaaagccgaagctgcggtggggacaaacgcgccaagagcacttccgaagcatacccgaggggggagagcgaggcgcagcgcggaaaaaggaagcatgaaagggtgggttaagaccagccccttcacgtaatcaaggttcaatgacgctaagatcacgtaggtgcaattctccggaagaccaaatttcctgcggaagaaaagggccgtacccgttgaagcctccgggggggccaccccgaaaaagtc

SEQ ID NO: 597040 - DNA, 247 bp, Homo sapiens
  misc_feature (107)..(107): n is a, c, g, or t
acgattgacgtccgtgtcaggcagctttgtcatgtcttccaagtcaggaaggcgccaccgccctgcccacgacagctgcgtctgagccgcacgtcgtgagcactgtnctcggcggatatgaggacaccatccaagatttcctccgtgggagacctcctaaggagacgcgaagactatcgatgctttggaagaatgaagagaagtctctgataagccaaatctagggtagtatgggaagtgccctgtg

SEQ ID NO: 597041 - DNA, 880 bp, Homo sapiens
gtggcgatctttatttgtggcgtgtgggtgggaggggggttcccacgtgagccctggtgctatagagagccggcctgtcctccagagggtgagctggtggagtgcttctgcggttctggagtcccggctgattgtgcgccagttccccagcaaaacccctcacagagctgcaccccggatgcacagacaatggagtgggtgcttgggagtgacttgaggctgtgacggggtcagccctacggtgtgggcaagtgagtcctctagtggaccaagaggtcagagtcgtaccctgaggctagagatcgaacacagacaccgtggccctcataaaatttaaacataaaagcacaaaaatggagcaaccagacagcatatggctacagacaggcaggacacggaggaccctacgtgtgacctgtgacttatccacaaagggcaaggacctggcactgactaccggaacagtggagacggctgtgccgcccagccggccatgagtcagagccagaggctgaaagccacagacggggccgcagggcagcaagatcacgaggctctcgtgaaacacttcagcaaggcaaaatcctaaggaacagaatcctgactggagagaagccaaggtgtttaagcacaagacagggaagtgtatagatgggaatgtacaggggtgggtgaactttaaagagggagaaaagatgggagtgcttggaaagaaacagagcagtagaataaggagaaggaggagaagagggagaaagagagaagtgacattgatgaaaaaagaggaaaaaagttagtttaggatagaagttatgagagtggtaaacgaggaagtggcaaggagagataggtgagttagaaggaggagaagtgagagtag

SEQ ID NO: 597042 - DNA, 526 bp, Homo sapiens
tgttcagaggatccccgatgcaactcatcgggaatcggtcaaatgttattctagttctagatccttgaggaatagccacactgttttccacaagggttgaactaatttacactcccaacagtgtaaaagtgttcctatttctccatatccactccagcactgttgtttcctgactttttaatgattgccattctaacgggtgtgacatggtatctcattgtggttttgatttgcatttctctaatgaccagtgatgagcattttttcatgtgtccgttggctgcttaaatgttttcttttgagaagtgtctgtccatatcttggcccatttttggatggggcagttggttggtttcttgtaaactgtttaaattcttggtagattctagatattagcctttggtcagatggatagatggcaagaattttctcccattctgtagttgcctgttcactctgatgagtttctttggctgtgcagaagctatttaatttaattagatcccgatgatggcagggtaccgag

SEQ ID NO: 597043 - DNA, 686 bp, Homo sapiens
  misc_feature (356)..(356): n is a, c, g, or t
actggacgcttgaccttgcaggtgcctctggtctcaaggaacgtgtctgcgtgccggcgtcagtgtgtgcttctccaccttccagcccaccacaggccaccgtctctgcagcgttcacttccatgccggccgctagagatcctacacggttacgcgtccccaccagtcttcccagcttgcgcggcgtctaatgatgctgcaaacgtagcgcgcagacccgtcgtggggccgcagtccgcccgccgtacgcagcagcacgcaacagcagcagcagcagtaacagcagcaacagcagcagcatgcagcaacagcagcagcagcatgcagtgagcatgcagttcgctcgacctctctgnccgtccactgcccagactgacccagtgctgcagccgaatcctgggtatctgacttccgtggtcgtgcttctcacccttcaggcccctgttacacatgctcttcgggctccgaggttccgtatcatgccggtgcccattctacttcccatgtggatcattgatcgtgaatcccatcgtatctcccagatgctgcgtggtagctttgcggccggcagagggcgcagctcgctgctggccgccgtcgttcgggagtttacacgtgcttgctaccgcggggctggaggctgccgagtgccctatgggcccccagttggtggtggtgggggcaga

SEQ ID NO: 597044 - DNA, 707 bp, Homo sapiens
  misc_feature (303)..(303): n is a, c, g, or t
gcaagtcgatgtggaaaagagcaattataaacaccggggcgaagggggcccccggagggggcttcaaaggggggcgcaattttttaaggaaaggtctgtaaagatttttgctgcgtttttttataaaaaagggaaaaacggttgtttaaggcgtttaaattttccccaaaaagtttttgcttctgcaaagcaaaagggcaaaaaaagttttccccgccccgttggagagaaaggaaacaactacgcttgagttaatatccccagatgggtcccccccaaaggggggaccacatcactgagggncctttgggggagggaaaccccagtttgggaccgaaatattttcccagtacccgttacccagttgggggtttcatagcaaaagaacacgcaaaaaacaagtttttttaaaaaaggttgtttttttccccaaaaagtttgggggcccaaaatttttgcggttgaaacggtttttctccccgagaaaaagggggcgggggcgaacaaaaagcgggccaaagcgtggtttcgtcggcgtttaaaccttttaacagccagggagcacaagcgagaacaaggccccgaagaaagaacgccaaggaggggaaaaaccccccccaagtggcgcccaaaaagcaaggaacctaaaggaaactttagacaacacgccaacaccgcgggctttttcgattagtacccaattggtc

SEQ ID NO: 597045 - DNA, 149 bp, Homo sapiens
agaagcacgggcagttgggctgaattaggggcgatgagctagggtacgtgagcaggatgttaagttagggtctgcctgtatttctggtccccttggaaatgtccccttcttcagatgtcagacctcagtcccagtgcttcagagtcctc

SEQ ID NO: 597046 - DNA, 245 bp, Homo sapiens
  misc_feature (85)..(85): n is a, c, g, or t
ggccggcagcacgatgttcggcgttaccgttggtcgcggtgtccctggtaggtgtcctgggtgatcaccagttcggccgtctctnagcctcgatgacggtctgccgattggccacggtggcaacgggattggtgcagatgatccacacggccttgatgtcgcccgtgcccagctgccggaacatctcgatggtgccggggccgacatcggtgcggatggtgccgggttcgagctcccagtgctcc

SEQ ID NO: 597047 - DNA, 203 bp, Homo sapiens
tagatctagaggctcccggtcacgaggctacgatcccatcccacggacacgctttaaaaagattacaagccgggttatcactcacctgctacagcatggcctatttaaaggcctataaactctccttacaaattcccccattttacctgtcctaaaaccagacaagccttacgagttagttcaggatctggcgcctcggtgcc

SEQ ID NO: 597048 - DNA, 161 bp, Homo sapiens
tatcccctggtgcatgatgtgtaatttaaagaaacgaaaaataagcagcaccaatgccacactctacagtgtaccctgtatcccacccaattatgaatagttagatatattttatgtactttatacccacatgcatgcacccagggttaacgaggtcgaat

SEQ ID NO: 597049 - DNA, 200 bp, Homo sapiens
ggtagactgtacaacctgtacctgtctccgagcctccactatagcagatgcgagcaggagctaggacgagagggaggtaagagtcagaagcttatgtcgtctactgcggggaaacgccatactcgggggcaccgattattagagggaactagtcagattgccaagagccttccgcattatgcatgggctatatactatga

SEQ ID NO: 597050 - DNA, 393 bp, Homo sapiens
  misc_feature (22)..(22): n is a, c, g, or t
  misc_feature (34)..(34): n is a, c, g, or t
  misc_feature (74)..(74): n is a, c, g, or t
  misc_feature (341)..(341): n is a, c, g, or t
ggcttgatcgtggttcactgcnagcctcgcctcnccagaactcaatctatcctccccacctcagcctccctgancagcctgggacccaaaggtacacacccacccatgccctggatcattaaaaaaaattttttgtaggctgggcgcggttgtcacgcctgtaatcccagcactttgggaggtcaaggtggggtggatcacttgaggtcaagagtcccagaccagcttggccaacatggtgaaaccccatctctactaaaaatacaaaaattagccaggcgtggtggcgcatgcttgtaatcccagctactcaggaggctgaggcacaagaatcacttgancccaggaggtggaggttgcagtgagctgagtgagagagagactctgcctcaa

SEQ ID NO: 597051 - DNA, 259 bp, Homo sapiens
ttttttttttttagccagaacacacacagttatggttttattcttgtcctctggggccggtaacagtgcctctcacaaaagaagaactccctctggcaggggatgtgactagggactcattgggccggcaccacccacaaaagaatctaggcattagaatgaactactggaacctgagtcaaagacctgttggtgataatttgcccattttctggcctctagttgcttgaataggggaaagacagggaaatattaaatg

SEQ ID NO: 597052 - DNA, 527 bp, Homo sapiens
  misc_feature (49)..(49): n is a, c, g, or t
  misc_feature (377)..(377): n is a, c, g, or t
gataattgattatattaatggagtttaattctggctctctattatgtcngttgatctaattctccatcttttgctgtgcagaagctctttagtctagccggatcccacttgtcaatttttgtttttgctgcaattgcttttaggacttataaatcctttcccaaggccaatgtccagaacggtgttccataggttttcttctaggttcttacagtttgaggtcttacatttaaatatttgatccaccttgagttcagtttcatatatggtaaaatgtagggttctagcttcattcttctgcatatggctcaccagtgatcttaacactatttattgaatagatagtcctttccccattgcttatgtttgttgacttngtcaaagattagatggctgtaggtatgcagctttattcctgggttctctattctgttccattgttctatgtgtctgttttaataccagtaccagactgttgaggttactgtaaccttttagtttgaagttgggtaatgagatacctctgg

SEQ ID NO: 597053 - DNA, 245 bp, Homo sapiens
gactagcaggatccccattgatttcccgtggtggtctagtggttagaatcagccttgtacttgttgtggctcaggttacctctgtggcttgagttcgatccctgagccaggaactattgatactgccaggtgcaggtgaaccaaacaaaccaaaaaacaaatatgtaaccttcatctcagaaagcttgggagggccccttcccatgtgatccctatcatgtttgaaatcactggggtaccgcgct

SEQ ID NO: 597054 - DNA, 1853 bp, Homo sapiens
  misc_feature (352)..(352): n is a, c, g, or t
  misc_feature (423)..(423): n is a, c, g, or t
  misc_feature (1036)..(1036): n is a, c, g, or t
  misc_feature (1388)..(1388): n is a, c, g, or t
  misc_feature (1687)..(1687): n is a, c, g, or t
  misc_feature (1795)..(1795): n is a, c, g, or t
  misc_feature (1824)..(1824): n is a, c, g, or t
  misc_feature (1850)..(1850): n is a, c, g, or t
  misc_feature (1852)..(1853): n is a, c, g, or t
tgggggggggggcagagggggggggcggcggggggggaagaaaaagagggagggggggggtctcttccccccccccccgccactaataaaaaaacagggggggaagagaccaacaacgccgcccacacagagggggggggtacacacagggggcggtgaagaggcgcaccagagaggagggacaacaaagtccgtacacagacacacgggagagggcgcgccgccctctgattgttagtgtagggtggggtgggggcgccacacacatgatgacacagcggggcggcgggcgggagaacacacccggggagcgccacagagcggccgggggggcgcgacagacagagctctncacacacagagagagagcgcgcgcgcgcagacgagagacgagagcggtgaggcgcgcgccaccccctctgnagagagagagatgaggtggcgcgagcgacaaagagagtggtgggtgggcgctctccgagagagagtgtgggggcggtggagaggcaacagaagccgcgccgccgcggggggtgaggagaggagagagagtcgcgaccagagcagcagcgcgcgctgcataatgtcacgacacgcgctgagagagatcacacccgcgcgagtatggcgcgccgggatcatagcagcgggcgagcgagatgaatcaagatacaccaccaccgacagaggacaagagacgagccggcggggctggcgcggtggaacagagacccacaccgcaccaagagcggcgcgaccgtgaagcgaggggagcggacccccctcgtgtggggcgccgggagaagggaagcgcggcccacccaccacaaaaggagagagagacccccagcggggtggggggcaccacccacacacctaccgagggggggagcgaaataaaacaaccacgcggcgacccagcaccaagagaagaaaaaacccatctggtacgggacacagcccgccaaacacaccgccgagggggggacgacaaacacagatccgccgccgcaccagcatcgcacaacacaaaaanaagacaaccacacacaaggcagcggaggcagcgcaagcccggtaggccaacacaacagccagctaaagatggctgacgacgagcccccaaacaaacaatgttcgtggtgcaacagcacaaaaaactacacacagccgaggaggatgtgagcgaccaaccacaacccacccaccagaaactatgggagaacgacgcgacgcaacgatacaagtcaactcagtgacgaacatgccacagggagacgacggatcgagcacacccacccgaagtgggtggggaggcagcaccgcgccatagatgtaggaccgcgaccagggcacaccgcaaccacaccattcgtaatagcaacaancgcacgcgccagtgagacgacaggccaagtacacaccaccacgcacacgaaaacagtaatgaaagagtgcgaaggtaacgccgacgcccacgccacgagtgaactacccgagcacgagaagagacgagcgagcgcacaataaataatccctcatcaggcggtggcggacccaacagacgcacgacagccagcccgccactgtatgtatagacgaggggccgcccccaaacagaagcgggaagataaaacaatacaagcgagtcggccgggtcgtcaaccaaccagaatgaagaacagcngcacccccgtggcgttggtagacgaccacaccaccgtgtcggagatgtagacagccccaacacaacatcacgacgggacacatagaagatgacgcaggtatcgtagangatgaacgcgacagacatcacgtatgacnacagcgacggagccacacatcagacngnn

SEQ ID NO: 597055 - DNA, 104 bp, Homo sapiens
ggtacagtcagcatagatactgaaagatattggcccagagcagtggaggcagtgaacatcaaggcaggcaacagccttcctgcgtctcaagcgcaaggttcatc

SEQ ID NO: 597056 - DNA, 287 bp, Homo sapiens
gaggagactgctgagccccagctggaagcatcttgcttggagaaatgcaaggacctcctgagggccacactgacccactgggggcccggtgaccccttgcctggtcccacacaggggtctgtgggccagactatccccaagagtaaaacactgagctctgcgcatgctgctgtttctttggtggccagctgggtgcttcggtcattggctgagcgccctgtcagcagggcagaggtcacaagactccttgactggctcaagagccacattttgccacagccaatggt

SEQ ID NO: 597057 - DNA, 113 bp, Homo sapiens
atggcagccgagtagagacagatgtttctgggatcatatctcagattcccaagctaaagaggatgaggaagaaatttctactagcccaggtgtttctgacgttgtcagtgatg

SEQ ID NO: 597058 - DNA, 213 bp, Homo sapiens
gttggtcgcctctcgtccctggctacttcagatgctgagtgttgaatgaatggcttgagcctgggagacagagggttgcatctgagctgagtttgcactcactgcactccagtcgctggtgatgacagtgagactctgctctctaaaatatcagaaaatacaaatatagtgaactttgggggaagggttttttggttggtcgctcttcttgga

SEQ ID NO: 597059 - DNA, 539 bp, Homo sapiens
tgggaaaaagagaagcagtatgagcaagtgagctactcaagagaatctgggcctagggggaaagaaagagagaactggtcaaatattaaatccacgagatttctgtactgaaacatgggctgagaactacgacacattcccccaagaaaagggaagctggtggtgagggtgggtacccaagctaggaaaacagtacatacaggttggctttgggtggtccggcagcaaccatacaaggtagatggtcgcaaaagaaagtcagtggctccaaggaagactcccgaccatggtgggaggggagggataatggagagcccagttcagaataaccaaagagagcctgccttgggagaataactacatttcaggtgaatggaagcacctagagaaagagcaggttacggcaggctgtatactcaggtaaccctgggaagagggagaaccctctggagacatgccaggacaaaggccaagataggaccctgaaggctagagatgtatacgagtgacagttatggggatgggtacggagctcgaat

SEQ ID NO: 597060 - DNA, 198 bp, Homo sapiens
acaggagtacttcccggaccactgcatggtcggtaggatgccatgccagctgcatgcaggcgtgggtactgcagctgcatttggtcaactgccatatgatctacctctttaagatgtaactatcataatagctgtgtagacgagcattgttctggtttagcaaatatctttgccatatttgtccagttttgtccacag

SEQ ID NO: 597061 - DNA, 655 bp, Homo sapiens
ttgtcggggtgtgggctctcgttgtttttcttgcttagcgtccttgtgggccccgccaattttgttgtttttgaaaagtggggttttttgaggtgtttctcttttttggggcccgtgggcacggggtgccacaagagtttttgtgttcgccgctgtctccgcacactgggcccctcttctgggtgttctctcagtctctcacgtgatgttctcccacacctccccagggcgccctcgctgtgggttgtgcgcgacagagacacgctgtcggatgtgggttcgcgggaacaaaccgcgctgtgtgtgcgcccacacctttctttgggccattgtggcgcactgtgatttcccgtgcgatgctccctcccttaattttctagataatggggatacgggagaaacgaggatggcctcaaggaaagttcttccactgatttttttttcactagtagattttttttcctccacgagtttgacatatttttggttctttttcctggtgtttttgggcacaaattagggggagcccgcggggtttcaacatgcgggaaaggggctgtgcccgaggattccaacgggtttctacaccaaggttttgttacaaaactgatggggtgaatttttgtttttttgagaaaaaacagaagaaaaatta

SEQ ID NO: 597062 - DNA, 539 bp, Homo sapiens
gatctctgcgtgagagagaactggtggagggatgataatccagaaggaaacacaaaggcttgagctcactgttggcatggagatagaagggaatggcaaaaactcaaggacatgtggtgacatacagaaatgaaggaaagaggggacatttccagatgacatccaaggaatgacagaagggggaaaaggaagggaaagatgggggagagatgcagctatacttgatgtcagagacactgttctgtttacatctatacttccagatcctgtgtaaatgtgtgtaaagcagtgtccaccccattttttggctagatccatttacagtagaaaagattagggcagggcttacaaattttagtgcaaaagaatcacttggaaaactttgttaagatgcagattctgattctgtaggtttgaaacagggtgtgagattctgcatcctggatagtgctgctgctgttgttctgtgggctgtactttacataacaagaagttagggtatttcgatgcagacaagcccagtctaaagcccatggttg

SEQ ID NO: 597063 - DNA, 926 bp, Homo sapiens
  misc_feature (913)..(914): n is a, c, g, or t
gcccaggtggagtgcagtgagccgagatcgcaccattgcactccagtctgggcaacagagtgagattccgtctcaaaaaaaaaaaagaaagggaaaaaaaaatagctttatacctctttccttgtctcaaccgccatgaaatttctgaacactccaaatttcagttgaaataatccaaaacaacattttataaagtataaaataaatttactctcttatagtaatagtatacttaaaaaagcctcagggtatattattcttctaaacagctacaattccagtgcagctacatttacccaactatgttctctagttgagaacaaactaggcctatttcactgctgtgtaccctcagtgccttaacatgggtgccaaattaaattttttcgtagaatacactgaattgtaaaaaccattcgttttggttcacaatttgccaaaattctcaaaaggctctgtatttatgtaaatccttggaaatattatttaattagattcctcagtattgactggctgggtgtgactagtacataaggttctcattttataaaaaacactcacataattgactgatttttacaccaacatccctccctttctagcagttactcttttttacccacttcatttggcgttaaccccctaaaatgggcttaatattttaattgcttccatgaaacccagtttccaatttaatgcctaactcaggaacaatttggtataatatttcccccaccaatttccaaatttcccgacaaatcctgccgagaattggcgggaggcaccttaaactgtgattacacacttgtggtgggctcccagttatgtgtgccccagtgcgcagacatttgcaacatgggcaggagccacacagagagagtgttaaaacaatggaacagtaatagtacaaggnncactcaatcatg

SEQ ID NO: 597064 - DNA, 365 bp, Homo sapiens
ccatagccaagtagccacatgtcacagaacaaaaaaaactatggacaactgctcaccactgaggcaagcatgtacttttattcatcctttaatatgaagccatgacacacataatgttactttgagctttgtgtaggatagatgtaccttgccttatttaaattcaatagagtcataaaggaaaaaaatgctgaagataattttcactttaaaaaagaatttggaaaatactctttaaaaagtaagtcccagaatgactcattctacaaatatattacatactacaaggaacaataaatgtttatgaatacacatagcagggactacaggcgctcaccaccacacctggctaaaatttgtttttt

SEQ ID NO: 597065 - DNA, 133 bp, Homo sapiens
tgtgccatcttgtgcttctcacttatccccaattccactgtgtattgagtaaatgcggagtcttgccatggcctacagaccctctctgctctggtcccatctaatcatgtgcacagagcagcagggaaagaca

SEQ ID NO: 597066 - DNA, 128 bp, Homo sapiens
tcggtaccgggctgtcggatgtgcagagactagggccgggcagtggtgaggcaagttggtgcctgggagggacagctttgaccgttgaacttgtcagcactcctggtccacgcttcttgagaggtgga

SEQ ID NO: 597067 - DNA, 205 bp, Homo sapiens
cagggcttgcgtcaggtgccaacaccctcgctccttgcagtgaacaagatgcgcacagcccgagagagccctaagtgttcacggtccaccctgtaaccttcacagctgtggggtcagctccagggttgttgcctgtttagcctaagttctctgctgggagcccattgttcgtggaatttcagatagaggggtgtcaggtgcacaa

SEQ ID NO: 597068 - DNA, 129 bp, Homo sapiens
gcggccgcctactactactactactgctcgaattcaagcttctaacgatgtacggggacatgaatatatccacccacctagattttaagcagtaaataaaacatttcgcaaaagattaaagtcgaaaaa

SEQ ID NO: 597069 - DNA, 412 bp, Homo sapiens
  misc_feature (56)..(56): n is a, c, g, or t
  misc_feature (89)..(89): n is a, c, g, or t
  misc_feature (235)..(235): n is a, c, g, or t
  misc_feature (310)..(310): n is a, c, g, or t
ctcggtggcggagtgctaaagaccctagcggttcaggcgttcggcgagcggggccntgcttgttgcgctcctggctctcccggggcggncgcagatgggccagcatcccggattgtagttggtgttggtgcaaggcgggacgaagcggcggtcggggttcccgctcttgggagcgattggtcactcccccgcgggagggccgagccgaccagattttcctggggccggggacccnggggcttcggggcaagggactcaccttgtcgcacccacactcattcgggttggacttgccggcgtcaccgccgcnggactttccgcttttgggccatgaccagatataatttggttgattacaactttcctctataaattaactcttgacactccttggggatttgaagaaaaaaat

SEQ ID NO: 597070 - DNA, 287 bp, Homo sapiens
  misc_feature (10)..(10): n is a, c, g, or t
  misc_feature (84)..(86): n is a, c, g, or t
gaggactctnggagctgacagcgcgcacttcacccgcagttgttctagcgactccgaagaatagctcgctgagctggaaacccnnnagaatcaccaaacaaaaattgaagggcggcagatgagcctgcctacctgacagtgggaaccgatgtgagtgccaggtaccgaggtgccttctgtgaggcaaagattaagactgtgaaaaggctggtgaaagttaaggtactcctgacacaggatattaccacacacttggtacacgatgaccacgtaaagggtcctctaag

SEQ ID NO: 597071 - DNA, 107 bp, Homo sapiens
gggcccccaaagcatttggtgcccctccatgttgcaatgcaaaccccttcccccctggggcagtggggaaaaatggctatattaataaaaaaacgtgtgtctttcca

SEQ ID NO: 597072 - DNA, 85 bp, Homo sapiens
taagggatgggggtctccctctcttgtcatccatgctgggaaaatgggtggctatgatcatagctcaccgtagccttgaactccg

SEQ ID NO: 597073 - DNA, 140 bp, Homo sapiens
gtgctctaggctgtcatcgctgcacttacatcttctgcgtcagcttccgcttggcaggttgcttcaatgctttcgtgcctttgccctcacctaccggctctttgtcggtgtgcgtgctctcccctgaagattgttgctgg

SEQ ID NO: 597074 - DNA, 229 bp, Homo sapiens
  misc_feature (9)..(10): n is a, c, g, or t
  misc_feature (41)..(41): n is a, c, g, or t
  misc_feature (46)..(46): n is a, c, g, or t
  misc_feature (48)..(48): n is a, c, g, or t
  misc_feature (53)..(53): n is a, c, g, or t
  misc_feature (57)..(57): n is a, c, g, or t
  misc_feature (82)..(82): n is a, c, g, or t
  misc_feature (105)..(105): n is a, c, g, or t
  misc_feature (107)..(107): n is a, c, g, or t
  misc_feature (128)..(128): n is a, c, g, or t
  misc_feature (134)..(134): n is a, c, g, or t
  misc_feature (148)..(148): n is a, c, g, or t
  misc_feature (157)..(157): n is a, c, g, or t
  misc_feature (159)..(159): n is a, c, g, or t
  misc_feature (183)..(183): n is a, c, g, or t
  misc_feature (187)..(187): n is a, c, g, or t
  misc_feature (193)..(193): n is a, c, g, or t
ctcgtgccnntaaactacatgagaggttacagagccctttnaaacntngacangatnttaatggcccatttcccctgaaaangtatgtatggactcatgtattantnttttagtatgcagtttcctangaattnctagatttcttaantttcataangntcggctctagattgggaatctctnaacntactgncttttaaaataaagagccacatcttgtcactaaagg

SEQ ID NO: 597075 - DNA, 763 bp, Homo sapiens
  misc_feature (570)..(570): n is a, c, g, or t
tcagggtggcaagggtagaagaaagatgcgccagaacgttctcgaaggggtcaacttctccaggcagagccacaacgctccctttcccggcggcaactggcctggccttctaaccggactcgtggtaaccccgggcactttggggcctggttccaacctctcagagggcagggggcagagaggcttggcagggcggtctggtgggcttatggagaggccctaatggggaaacgggtagcaacagggcccttaacggggccttccggtggtgggcgggcaggcatcgcggacactggcggagagcctatctcagaggcagtggaacaggcaggcagggaaccaagcaaggttcccagagggcgggagatccacacctcaataccttacttcagagggagaggcacaacctagaaaactaggctgggcaactggtgggttggggccaattgggggcttgggcagacaaggcgcggggccgctgggggggccgcgggaggccttctttccccctgtggcaaggtgggttatcttgtacggaaagtacacaagcttaaagagggcgttccaagnagagcagattattttcccaaacccaggtggattatgaaacaatttgggaaggaaggtggaaagggtactatggggagagggttacacaaaaaccaaggcaggacattcaggggcagaaactctcttatggctgggttcagccaaaagaaagtgggcgaacttaaagtcttctgggggaatccggttctcgggt

SEQ ID NO: 597076 - DNA, 502 bp, Homo sapiens
  misc_feature (26)..(26): n is a, c, g, or t
  misc_feature (38)..(39): n is a, c, g, or t
  misc_feature (52)..(52): n is a, c, g, or t
tcgacccgcccttccccccatgactnctattcgaatgnnctcgcgccattgngttgatacccgctaattcggccattatggccggggggcttctaagcggggacgcttttcaagatggtttacatttcgaacggtcaagtgtaggacagtcggagtcagtctccatggacataatctatgataacagatttgttttggggaatagctgggtttgaggttttgtttttcaaaactctgctttaacaagatgtgtgagaataagctttggaaacttatctgattccagatatgacgatggaatagggccaccaggaaacctttccctaacaatgggtggaatcaatcatctgcctgtccctagtctccatccaatgtctggtggatgaggattgtaaatgtctgctctaagaagcatacgaccgtacatgcgcattaatagcagaaggaaaccatcacgaagtggtacgctgaccatgatgagcagtagatgtgtgttgtctcc

SEQ ID NO: 597077 - DNA, 156 bp, Homo sapiens
ccatggtgtcaagtcaggaatcgctcctccgggagcaagaggaagtctctcaaaactagaagggaaaggtgttttctccacatcaatccagctgtggagacattctattagtgacatatgcctcttctccctttccatctttcagcatagacttaa

SEQ ID NO: 597078 - DNA, 150 bp, Homo sapiens
  misc_feature (133)..(133): n is a, c, g, or t
tgaaaggatatctttaaatactgagtctccctacctgtgaacagacatagcttcactttgttgcctaggctagtatcagattcctggcttcaagtgattctcccaccttggcctcccaacagtgctgggatgngggatcctctacgagtc

SEQ ID NO: 597079 - DNA, 570 bp, Homo sapiens
ggagacgggggtctcaccaatcttggccagtgggtctgggtgatccacccggcctcggcctcccaaaatgctgggcattacagggcgtgacgccaccgggcccgggcctcggttaagattttaaagagcagaatcaagaaatggaaggattggctggtaattcctaccggcatgggacttgaccggggtgtggggtgagtagcaatcgtgtacggtttctctatgtggacgatgaggaaggggttgagaaatccagcgaagggacacttctgtaaatagctcaatctgctgcccagggtggggaaaaggggagtatgcgggggtggtggtggggcaatcagggggctatagggaacaggtgtcctgattctgagcagaactactctgctctcagtaaagcggtcatgatagaacacggcccctgggtatatgcccttgtggtccatcccttttttagttcttagcaaagccgtcttcctatttctcttgggaatgtccacagcagcattattaataatagaccaagggggggaacaaccgaaatgtgcatcagcagatgaatggataacc

SEQ ID NO: 597080 - DNA, 794 bp, Homo sapiens
agagggggagagagtgagagacaccgagtagagagaatatgtttgtgtgtgtgtgtgtgtgtgtgtttgtgtgtgtgtgaatcttccctgccagggaatggcatcttgtgcacgattggttctggccttgaatggtgagcttctaggataagctctggccactcaccactctgaactgtaataattgggtaaataattagcttgtttttagtaatcggtcgtaaatgtatgtatagcttacatttatttccatggtaaatattgaatgtgctttgagtccttatttcgaagtttaatgatgtttttgtcaccagaaacatgccacaggaacttaactcttgtttatatcagactgtggttttggtttcattatatgttattcccaagaacctatggatgaagttaatgaagggttggtgtttctgcagatgctgctggttgagggttatcctttgagaaccactggttctaggccttggttaacaccactctcagccttcagcatcaggctttcaggattcttcagaatgaatgacagtaataaacataatgaagcataacaagctcatctaattcaccctgtaaaagaaggataaaggaaactccaggtcaggtgtgggtgctcactcctgtaatcccagcactttggtaagatgaggtggatggttcacttgaggtcaggagttctagaccagcctgctcaacatggtgaaaccccatatctactaaaaatacaaaaaattagccaggcgtgttggtgcgcgcctgtatccccgttactcaggaggctgagg

SEQ ID NO: 597081 - DNA, 213 bp, Homo sapiens
ccgatgcttttctggccaacgactcgagccaggaggtcatctgggtttcactctcactggggactacaggcccccgcgaccatgcctggctaattttttggtattttaaagtaagagacggggcttcatcatggtgggccaggctgatcttacagtttccggttggataaaatgctttgggtttggtgggtttggtgtctgtgagttcacgat

SEQ ID NO: 597082 - DNA, 276 bp, Homo sapiens
cagactcaaatgtgtggtgttggggcaggaactgagcctgcagtctagatccccacctcatccatcacgtcaaaagaaattacgggcgggtcacagatgaaaacacctaacagcaggtaactgttttgtaatcttggggagaagcctaaagcccaggaactaagagagtataacaagtgtgaatacagaatttaaaagaagagactggtttagcaatcactaaggtaaaacacgcgtgacaggatctgcttgtttcctcttagcacgcaggagcct

SEQ ID NO: 597083 - DNA, 461 bp, Homo sapiens
tgccacctccaccatctccccaacagcatcgccagcaacgtgatccgggcagacccaggtctgggactttgtccagagcaactggaagaagctctttgcggatttcaggtggtcggctccttctcctttgccaatctcattgcgggcagtgacaccgccgggttcacactggagtatgactgctgcagctggagccattcaagacttgacaactactggagacagggcttcgcgctcgacgccctgtccgggactggaggcaggatccctggagcaacgacagagccaacattcgagtcgggtggcagattagaacagaggagtgccgttgctcttggatggtttacgcggcaaaacagcccgagtagttcagaggagaaaaaaaggccaatctatgagggtgcaaattgttaagaaaaacaacatgaatatcaagacccacggaccaaaaaatatataaa

SEQ ID NO: 597084 - DNA, 1187 bp, Homo sapiens
gaagttctggaacgcagtgcgccgatttgagattggacccacgatcaagatagaacatgacaggtgggcatgaggacattaacagacacatggccaagaaggatctaggcgaggacgctagccaaggacgaaggctggagctagatccgaagcatggatcatccagggggctctttggacaattacctgctcgtggtctgcagggtagctgcaaggctggctgtgttgctcaaaggtcacgcacgaggagttcgccatggctgaccgttcgcaccgtcagcatgcagtatcccctggcaccatgacaggcggccggaacgcagtcaagctctcggcgctatgtagactctagtaacactgatagtatgctggtggccgcagtgtcccaggagagaacgttactcgcgcaggaggcgacatgtcccgaattcactcaaaggacacgaaggtagtgcgtctagatgggccttgcatccggggtgcggagatcctccggatgcgacactgcgttgaacttctgcggtcttccttccggtgatctcctggggagttcccactcggtggtcgcttgaccctaaggctgtgttcttggccttggcaggaggctcgggaaatgttggagcatcccttggagccccatgttggttgcggtctgacagtaggatgccgccgtactggatcacgctggctttgctagacattccaggcaggtgagggcagaggccacttggttgctaggacgccaaccagggacactgcaaaggcgacagtgaaacctgtggacccctggggccgtgcatgtggagacgctggtttagattgcacttctattcgtgagccctaaggtgcggaccgttcggagacttgcacgtagataacgacgcgaatagtagcgaagacgaaacgatgccaaggtttccggcatttcccaacggctggcattggggccccgtgcatgacgcgcgtgaggggatactggacggacccaatacatcttggcgcgacccttgttagccctttcccttcttgcgagagccttctctctgaatgacattgccaacaagagtcgggggaagaccgagaacctcagggaaccagtgttgctggcgggctctgtcctcctgaagctactggaatggcccgtggcgcgttattggaggaccaaaggggcctggccaagctgtaca

SEQ ID NO: 597085 - DNA, 273 bp, Homo sapiens
cgacgcaacagttgctgtcttgcagcacactattagatcctcgtcccgttcaggcactacgcggagtggctcgccgaggttctctgtgatcttgtccaatgcggatgccggccatggtccgcactgccagggctcgagatgagtgggtgttgggctcctcacatgtccttcagcaaaggtgttgacggccataatggccatgtcaggctgactcttggcgtaaattcatcaagtagaggtatactagcttcttcagctccaggttgtccgtct

SEQ ID NO: 597086 - DNA, 5813 bp, Homo sapiens
  misc_feature (5811)..(5811): n is a, c, g, or t
gggcgcttggttccccagcaaccgggagacgcgtctgctgcgtggaaccgccgagttcccagcgcttgagaaggaaaattctggatctgttatctgtgaggaggccactccgttgacagttgtgtaaaactctgctgctttccccagctccaacctctctggtcttcaacaacactatcatcagggaaaacgtgggggaagatgaaccagccgtgcaactcgatggagccgagggtgatggacgatgacatgctcaagctggccgtcggggaccagggcccccaggaggaggccgggcagctggccaagcaggagggcatcctcttcaaggatgtcctgtccctgcagctggactttcggaacatcctccgcatagacaacctctggcagtttgagaacttgaggaagctgcagctggacaataacatcattgagaagatcgagggcctggagaacctcgcacacctggtctggctggatctgtctttcaacaacattgagaccatcgaggggctggacacactggtgaacctggaggacctgagcttgttcaacaaccggatctccaagatcgactccctggacgccctcgtcaagctgcaggtgttgtcgctgggcaacaaccggattgacaacatgatgaacatcatctacctccggcggttcaagtgcctgcggacgctcagcctctctaggaaccctatctctgaggcagaggattacaagatgttcatctgtgcctaccttcctgacctcatgtacctggactaccggcgcattgatgaccacacagcaagtgtctccctctcagtctcccagccctgtgagacagattcctcaagcccccaggtttcttggaaaaggggcattgaagagtagcttcccctgcccacaactaggagagaaagggcagctccctcttcctaatccctttacctgactctgtcagagtgattccagcagcacccttgtaagtactgttttgtgtgcgttcccaggggccaggcctcttccacacactgtcccagggccacctcacagccatcctgcactgtctagttttccagatgaagaagctgaggagggctgggagcagtggctcacgcctgtaatcccagcactttgagaggctgaggcgggaggatcgcttgagccaaggagttcaagaccagcctgggcaacatagggagaccccatctctacagaaactaccaaaattagccaggtgtggtggcacacaccagtaatcctggctactcacaaggccgaggtagaagaatcgcttgagactaggagtttgaggctgcagtgaactaagaagatgccattgcactccagcctgggcaacagagtgaaaaaattaaaaaattagaaaagaaaagaagttgaggaggcccaaggagggcaagcagccaggatcactggctcaaggccaagccaggattcaccctaagttggtgtcatcccaggagcaatattaacagctgagctccagagggaaccaggccatcagaggctcaggcctggctctcaggggcagagtcagggctggaggtagagacctgagtgtcatctgaggattgccaattggcagtagttgaagccatggtacaggtgggatcacctggggcacatggagtgagctgggggacggggactaagttctagaggtgccagcattcctggccaggtacagggggatgagccagtgcggtggagagagccaagggccagaccctcgtgaccagccctatggcctcactctacctctgtcctgttgtcctccttccctaaaagagggccagaaggcctgctgagggctgttgggagtgagagagcaagtcctctgtggagaacacccagtctggggcgaggggagcgctccattgctgtggctcctgccctggagatggccccgggaaccccagcctgccacgctgccttccgctcctcctggtctttccctgatttccctgcgctcacaaaaacctggtgagggtcatcaggagatgggcattctcatccacgagacctcatggctttcacagccttcatgcaggcccctgtgcaacacccctgcccatgcgcgggaggctgcagcatggcagaggcggcatggcagaggcggtgtggctcggaggaacctctggtaacaatgccactcccgttccctggtcagaaaaagcttgcggaggctaagcaccagtacagcatcgacgagctgaagcaccaggagaacctgatgcaggcccagctggaggacgagcaggcgcagcgggaggagctagagaagcacaagactgcgtttgtggaacacctgaatggctccttcctgtttgacagcatgtacgctgaggactcagagggcaacaatctgtcctacctgcctggtgtcggtgagctccttgagacctacaaggacaagtttgtcatcatctgcgtgaatatttttgagtatggcctgaaacagcaggagaagcggaaaacagagcttgacaccttcagtgaatgtgtccgtgaggccatccaggaaaaccaggagcagggcaaacgcaagattgccaaattcgaggagaagcacttgtcgagtttaagtgccattcgagaggagttggaactgcccaacattgagaagatgatcctagaatgcagtgctgacatcagtgagttgttcgatgcgctcatgacgctggagatgcagctggtggagcagctggaggtaaggctgggccctgggcacaagtgccagaatctggcgatgcagctgcacatccataggtgaactgtagccttcatgggcacgcctctgctggaaacgtccagcacgactcagcgtggcaggctgtagctttcttgctcatcagtcctgtttgcttttattacattttaatcatttacattggaagtgattcttgtggaaaatgagaggtgagctcattcttctgaaatggtccccctatcctggaagtcagtggggagaggtttttgattagacccctggagctatccgggtactctaaaggcaaagcgcacccccacttggggaccaaacaaagacccctccgcattgcagcctgcagttgccgcttctcaggtgacgtgaggaggctgcaactcagcactaagtagtgaaaatgaaaagcgccgctgtctgaaattcattagcagccagagtatgtgttacaaggcagcggaggctgggagtctgaagtggtgtgatgaattgaacctcatcggatgctgctgtggctgggccaagtgatagcacctaatcaattcctcacacgtcaagtgacacctcagacatgggatagatttccccatcacatcacagggcaggtgctccctccctgctggagagcacaggcactgcagaagcagcgcacagtgccaggggcgagtgaggcagcagctcccagccttttcaggcacggagattgcctttcaacatccaaacatttcccagaacccatgtgccatcctacttgtattactggtggccagaaagccacaagcgcaatcatgcttttcaatgaccctatttttattcacgagaacagcacatacatgtgtttgaaaattatgtgaggtgctcactctgcagacagtactcacattcctatagattccacccctgcccaccttgcagcccctggagtctatagcagatgggagtggggcactccgagagtggcaggcctggagatcacatcttccattgttccttcaatcaacactaactcccatttgggccttaggtgccttgctaagcaccacaaaacagcaactaactgaaagagatctggagtgccagcccgctcctactgagggcctcctctctgtcaggcaccttgcaaagcattttgtgtgaagtgactcatttaacctcaccacaacgccacaacgcagggattatgcaggtaacctatttcccagatgaggaagataaggcccaaggaggtgaaatgcctttcccagagttacacagagtgctggagctgggaatactgacccaggcagtctagctcttaacagctcactccactgtttccctggaggtgatgcacagatgtcactgggaaacccaaaggagagggggttggctgtgtgtgtgtgtgttgggcaggcaggtaaggggagtaagaccaggacaagtgttcctggcaaagttccggtgacagcattaaacattcagatggtgagggagttaatatggttggagaacaacaactttagagagagcagaggggtcagttcacaaccatctgctcaggagggtcaagatgggtggtctttatgctgaaggtctgtgattagaggagctggttgctaaattttgaggagtaccttttgctctgtgctggacatctaaatatgcatgttaactgtgttctttaacatttccaggagactataaacatgtttgaaaggaacattgttgacatggtaggactgtttatcgaaaatgtccaaagcctatatcctttctgtgatgaccttccccatggggaggtgctacagagcccctgggcttgtcccggcctctggacaaaagaatgttccacagggtctgaggaggtttcccgaccctcagaacaatgatggcctggttagagctgtggtttggatgcccagagggacaacatccaaactgtttgcagtaggctcccagcatgattgttctcatatgagtgatgttcactaggaaatgacgccccctgtgttgcaggcaagcacactctggggttgaggcaacccccacgtggaagacactataaggagtacatcaggtgaaatgttagggtgaggagccaacatcggagcatggccaacccttcttccacccgaactcagggcactccacatggggcaaactgctgtgctccagctagcagcagccctgtggtcctgccctcctggggctcacagtccctcagggagacaagttgtagaggcaacaagtggtgccaaatgcacagggtgagaagcagttaacccagaggccaggagcctccatgcaggagggagagaagagtgtgatggcaggggccgagggtccgtccgaggtgtggggcaggggcagggagtcgaggaaggcccagggttcggagcttgtgagtggacggtgctgccagccagaatttccgagctcgccttgggcccttaaagtctgtctcccgccgtctgagagcatcagggacgcgccgggcctgctcctcccgggcctttgcttaactcggggctgcacgatggctcagtgccgggacctggagaatcaccaccacgagaagctcctggagatctctatcagcaccctggagaagattgtcgagggcgacctggacgaggacctgcctaacgacctgcgcgcgctttttgtcgataaagatacgattgttaatgctgtcggggcatcgcacgacatccacctcctgaagattgacaatcgagaagatgagctggtgaccagaatcaactcttggtgtacacgtttaatagacaggattcacaaggatgagatcatgaggaaccgcaagcgcgtgaaggagatcaatcagtacatcgaccacatgcagagcgaactggacaacctggaatgtggcgacatcctagactagatgaatgtcagccacaggagcttcttcaaaacatagcaccagccccagccaggagaaggaagtgcacacgcctcacccgcacctctagagagttgctgggcatctctcaaccgcgatccccaacaccattcttcccccacccctggaaaaacttccaaaagtagagaaaataaaggactcatttcacaaaaanaa

SEQ ID NO: 597087 - DNA, 1008 bp, Homo sapiens
  misc_feature (532)..(532): n is a, c, g, or t
  misc_feature (568)..(568): n is a, c, g, or t
  misc_feature (1006)..(1006): n is a, c, g, or t
aattgattccctagaaaatcccacgtgctggagcacttcacggtgaaggtttggttttagaatggcgccctccactgaaccgccttgggaggaaatgcacagacttggggtggggatacccacgtcctgtgtagagggggagactgcgcgcacccgggggggccccttgggctttccctttccgcgggggcccctctttgggctttatacactttcgggggggtcttgtcacccgcagttggggcttcacaggttgcccccgcgggagcacctcgggagagaatttttcactctcactctcactcgagtgagaaggctctcctcgggagagattgtctctctatattcacggcacacccctgggagagaagagattttgtttcgagggggggcgagaccccgggagacgagggggagacctgggcgctataacgagactcttggcgcgcggcgcctctttttggttcgagttataaagattaatccgagtttggttaaaaatggctcgtttcggggcatcttcggccacacngagacacttccacaccctctcctcgagaagagtttngagacacactttcgagagagaagagttgagagctcggtggagaccacggagagtgcacaactctctcttggtgggtaacaccgtgttaaatagaccacggagattcaccacaaggaatgaggagtcactgaggggacccgcacagcgccgtgaaaggaggagtccaatcacggaacactcgagccacacaatgcacgaggcgagacctggagcacaacctggaatgtggcgacatcctagactagatgaatgtcagccacaggagcttcttcaaaacatagcaccagccccagccaggagaaggaagtgcacacgcctcacccgcacctctagagagttgctgggcatctctcaaccgcgatccccaacaccattcttcccccacccctggaaaaacttccaaaagtagagaaaataaaggactcatttcacaaaaanaa

SEQ ID NO: 597088 - DNA, 286 bp, Homo sapiens
gtgcctccggagcggatgaggagtgggcacagctcgcagtggtccttcagcaccatcagcagcagcacccagcgctctacaacaccatgctgcagctggaccaacaccctttgatccagaagaaccgccagagtggtgctggcctccattcctgctcctgctgctggggctgggtgctgatccatggtctggcgtgggacatggaggcgaccccactctcctaggtgtctccatgcgccatcattcattcgtgccgaggcttccatgtagttggtgcctaggagtc

SEQ ID NO: 597089 - DNA, 785 bp, Homo sapiens
  misc_feature (26)..(26): n is a, c, g, or t
  misc_feature (224)..(224): n is a, c, g, or t
  misc_feature (243)..(243): n is a, c, g, or t
  misc_feature (733)..(733): n is a, c, g, or t
taatcggggccccctccccctcctcnaaaagtctaggggcggtcttttaaaatttaaccttccttactaattggcccataataaacttaccccaccattgcaattaagcgcatactatcttccggcctctatccctcttccttgaatacttcaataacgacttgaccagctaattcttctctacaagcgggattccaacaagttgttcctggaggggggggcanaaaaccccccaaccgcccnattcaaaaggaacgccacccttcttcttgtggggacggtgttttcacccatattcccacattctaccctttaaagccccctatagcccctagctaccttataccgtattccttgggtgcccaacttacacagcattttcgcagtaccaaccctctgccataaacaaatacaacctagttctcggacataatggtataccgcccactacggctatttactattgaggcaaattacctaaatccccaaccccctatctggaattatgcgggaacaacaatcctgctcttgtgattgaattctagtggccgccccactctggaaacccctgccttctgcgcattgggagaagtaccaaaacaccaccccactatacttggttttttcccttatgaatttcctctctcattttacaaatatgggggccgcgccttacgcctcctttacacattgtcccctttacctgcgttttttttctcgtacgacgggtgtncaccttatttaatattttaactgcttctcagtgttatcccagccctctatag

SEQ ID NO: 597090 - DNA, 465 bp, Homo sapiens
  misc_feature (19)..(19): n is a, c, g, or t
  misc_feature (362)..(362): n is a, c, g, or t
  misc_feature (462)..(462): n is a, c, g, or t
ttttttttttttgaaggangaatgcggtgttttttagggaaaacgtgggggaagatgaaccagccgtgcaactcgatggagccgagggtgatggacgatgacatgctcaagctggccgtcggggaccagggcccccaggaggaggccgggcagctggccaagcaggagggcatcctcttcaaggatgtcctgtccctgcagctggactttcggagtatgtatccaaggttcaggggtggtggccagggtgggccctccctggctttctctgctccatcttcaagccccaggattccatgcaaagtccacggtcgaggttcccacatcagcattagggcctacctgggttacaaggcataggngcagcacagatgtttgtaaaagcgtcatactttaagtgtcttcatcattttgaatatccacgacgctccggattcctgataagtgttgggcgaatgtccngta

SEQ ID NO: 597091 - DNA, 1359 bp, Homo sapiens
cccaaagtgtcccgttgctcagagagaaggatcgggtagcgtcaagaagaaggcaagcttccgtcagagcgtcaggagcgggctgcttgagagcgtaaatcccagcaatttttctatgattatgtttcagatatagactaataagacttatgaacagcgaactaagaaagaaacaaagaaaaagaacaacaaaaaaagagggtcggagcggcgcacccaagaagaattaccacccactcagcggggggccacacaagcatagccacaggtcactcccggagaaaatgtctaggggataagggaggggggcgccctagtatgggcggaggcgtggacacaatgaatcgaagacagagagggcgacagaggggcgcgagcgagaaaaattatagaaaaacaagaaagagagtgccacgacgtgcgagcagacggcacgggggggaatagaacactggggggagcccatcttcgtgggcgataaatgaggtgaatacccgatgtaaaatcgcaggagggaagggggcgggagtgagagcacagtaattcgggagggagagagaaacgacctgttcacccacttaacaacagagagacgatatttctaaggaagagcccgtcaagatgggagggaccaagaatgagtcatagataaattacttactatataacagcgttgcctaattaacagggggcgggtgagtaaatcgctacaaaatgtgggtgcgagaatattcgacgtcgcaagagccacagccgaccaccgccgaaagcaaagaactgcgaggagaagccaccaagacagaaggcaaccaaatgacagcgccacagtaacggaacactgggatcttcaaaggacagagcacgaggggagaccaaaacgccggcaaaacaaaaagcggggaaagaccacaaacacagaacgcagagaaaagacaaatggcaaacgcacgaagacgaaccaaaaagggccacgcaacgaagaaagaccaacgcattagtaagaagtacaacaataaacgcaagcaccaccgacccgtgaaaatatgcgccaaggacacagagtgcaagatcacagaatcaaaggggaacccaagagccattggaagacactaggcaacgctccaagggatgagaaccatggaaagacgaaaactcccgcgaggaagaataactaagaaccaatacagggaacaacacaactaccaagaagaaccagggaaaacaagcgccccatacaacaagcacaacagaacaggagggggatgacataaacacaacacaaccaaggcaacgaaaaacgacccccgagaatacgcaaaggacgaacacccacaaaacaacacagcggcagcgcaaaca

SEQ ID NO: 597092 - DNA, 4426 bp, Homo sapiens
  misc_feature (4424)..(4424): n is a, c, g, or t
gggcgcttggttccccagcaaccgggagacgcgtctgctgcgtggaaccgccgagttcccagcgcttgagaaggaaaattctggatctgttatctgtgaggaggccactccgttgacagttgtgtaaaactctgctgctttccccagctccaacctctctggtcttcaacaacactatcatcagggaaaacgtgggggaagatgaaccagccgtgcaactcgatggagccgagggtgatggacgatgacatgctcaagctggccgtcggggaccagggcccccaggaggaggccgggcagctggccaagcaggagggcatcctcttcaaggatgtcctgtccctgcagctggactttcggaacatcctccgcatagacaacctctggcagtttgagaacttgaggaagctgcagctggacaataacatcattgagaagatcgagggcctggagaacctcgcacacctggtctggctggatctgtctttcaacaacattgagaccatcgaggggctggacacactggtgaacctggaggacctgagcttgttcaacaaccggatctccaagatcgactccctggacgccctcgtcaagctgcaggtgttgtcgctgggcaacaaccggattgacaacatgatgaacatcatctacctccggcggttcaagtgcctgcggacgctcagcctctctaggaaccctatctctgaggcagaggattacaagatgttcatctgtgcctaccttcctgacctcatgtacctggactaccggcgcattgatgaccacacaaaaaagcttgcggaggctaagcaccagtacagcatcgacgagctgaagcaccaggagaacctgatgcaggcccagctggaggacgagcaggcgcagcgggaggagctagagaagcacaagactgcgtttgtggaacacctgaatggctccttcctgtttgacagcatgtacgctgaggactcagagggcaacaatctgtcctacctgcctggtgtcggtgagctccttgagacctacaaggacaagtttgtcatcatctgcgtgaatatttttgagtatggcctgaaacagcaggagaagcggaaaacagagcttgacaccttcagtgaatgtgtccgtgaggccatccaggaaaaccaggagcagggcaaacgcaagattgccaaattcgaggagaagcacttgtcgagtttaagtgccattcgagaggagttggaactgcccaacattgagaagatgatcctagaatgcagtgctgacatcagtgagttgttcgatgcgctcatgacgctggagatgcagctggtggagcagctggaggtaaggctgggccctgggcacaagtgccagaatctggcgatgcagctgcacatccataggtgaactgtagccttcatgggcacgcctctgctggaaacgtccagcacgactcagcgtggcaggctgtagctttcttgctcatcagtcctgtttgcttttattacattttaatcatttacattggaagtgattcttgtggaaaatgagaggtgagctcattcttctgaaatggtccccctatcctggaagtcagtggggagaggtttttgattagacccctggagctatccgggtactctaaaggcaaagcgcacccccacttggggaccaaacaaagacccctccgcattgcagcctgcagttgccgcttctcaggtgacgtgaggaggctgcaactcagcactaagtagtgaaaatgaaaagcgccgctgtctgaaattcattagcagccagagtatgtgttacaaggcagcggaggctgggagtctgaagtggtgtgatgaattgaacctcatcggatgctgctgtggctgggccaagtgatagcacctaatcaattcctcacacgtcaagtgacacctcagacatgggatagatttccccatcacatcacagggcaggtgctccctccctgctggagagcacaggcactgcagaagcagcgcacagtgccaggggcgagtgaggcagcagctcccagccttttcaggcacggagattgcctttcaacatccaaacatttcccagaacccatgtgccatcctacttgtattactggtggccagaaagccacaagcgcaatcatgcttttcaatgaccctatttttattcacgagaacagcacatacatgtgtttgaaaattatgtgaggtgctcactctgcagacagtactcacattcctatagattccacccctgcccaccttgcagcccctggagtctatagcagatgggagtggggcactccgagagtggcaggcctggagatcacatcttccattgttccttcaatcaacactaactcccatttgggccttaggtgccttgctaagcaccacaaaacagcaactaactgaaagagatctggagtgccagcccgctcctactgagggcctcctctctgtcaggcaccttgcaaagcattttgtgtgaagtgactcatttaacctcaccacaacgccacaacgcagggattatgcaggtaacctatttcccagatgaggaagataaggcccaaggaggtgaaatgcctttcccagagttacacagagtgctggagctgggaatactgacccaggcagtctagctcttaacagctcactccactgtttccctggaggtgatgcacagatgtcactgggaaacccaaaggagagggggttggctgtgtgtgtgtgtgttgggcaggcaggtaaggggagtaagaccaggacaagtgttcctggcaaagttccggtgacagcattaaacattcagatggtgagggagttaatatggttggagaacaacaactttagagagagcagaggggtcagttcacaaccatctgctcaggagggtcaagatgggtggtctttatgctgaaggtctgtgattagaggagctggttgctaaattttgaggagtaccttttgctctgtgctggacatctaaatatgcatgttaactgtgttctttaacatttccaggagactataaacatgtttgaaaggaacattgttgacatggtaggactgtttatcgaaaatgtccaaagcctatatcctttctgtgatgaccttccccatggggaggtgctacagagcccctgggcttgtcccggcctctggacaaaagaatgttccacagggtctgaggaggtttcccgaccctcagaacaatgatggcctggttagagctgtggtttggatgcccagagggacaacatccaaactgtttgcagtaggctcccagcatgattgttctcatatgagtgatgttcactaggaaatgacgccccctgtgttgcaggcaagcacactctggggttgaggcaacccccacgtggaagacactataaggagtacatcaggtgaaatgttagggtgaggagccaacatcggagcatggccaacccttcttccacccgaactcagggcactccacatggggcaaactgctgtgctccagctagcagcagccctgtggtcctgccctcctggggctcacagtccctcagggagacaagttgtagaggcaacaagtggtgccaaatgcacagggtgagaagcagttaacccagaggccaggagcctccatgcaggagggagagaagagtgtgatggcaggggccgagggtccgtccgaggtgtggggcaggggcagggagtcgaggaaggcccagggttcggagcttgtgagtggacggtgctgccagccagaatttccgagctcgccttgggcccttaaagtctgtctcccgccgtctgagagcatcagggacgcgccgggcctgctcctcccgggcctttgcttaactcggggctgcacgatggctcagtgccgggacctggagaatcaccaccacgagaagctcctggagatctctatcagcaccctggagaagattgtcgagggcgacctggacgaggacctgcctaacgacctgcgcgcgctttttgtcgataaagatacgattgttaatgctgtcggggcatcgcacgacatccacctcctgaagattgacaatcgagaagatgagctggtgaccagaatcaactcttggtgtacacgtttaatagacaggattcacaaggatgagatcatgaggaaccgcaagcgcgtgaaggagatcaatcagtacatcgaccacatgcagagcgaactggacaacctggaatgtggcgacatcctagactagatgaatgtcagccacaggagcttcttcaaaacatagcaccagccccagccaggagaaggaagtgcacacgcctcacccgcacctctagagagttgctgggcatctctcaaccgcgatccccaacaccattcttcccccacccctggaaaaacttccaaaagtagagaaaataaaggactcatttcacaaaaanaa

SEQ ID NO: 597093 - DNA, 116 bp, Homo sapiens
catgagtctgatttttaagctctgtgtctcatggtgattacctgagttaccatattatgaagttgtctgcagttcttctgataatactttcagctgttacgtttagcgtgcttttc

SEQ ID NO: 597094 - DNA, 4523 bp, Homo sapiens
gggcgcttggttccccagcaaccgggagacgcgtctgctgcgtggaaccgccgagttcccagcgcttgagaaggaaaattctggatctgttatctgtgaggaggccactccgttgacagttgtgtaaaactctgctgctttccccagctccaacctctctggtcttcaacaacactatcatcagggaaaacgtgggggaagatgaaccagccgtgcaactcgatggagccgagggtgatggacgatgacatgctcaagctggccgtcggggaccagggcccccaggaggaggccgggcagctggccaagcaggagggcatcctcttcaaggatgtcctgtccctgcagctggactttcggaacatcctccgcatagacaacctctggcagtttgagaacttgaggaagctgcagctggacaataacatcattgagaagatcgagggcctggagaacctcgcacacctggtctggctggatctgtctttcaacaacattgagaccatcgaggggctggacacactggtgaacctggaggacctgagcttgttcaacaaccggatctccaagatcgactccctggacgccctcgtcaagctgcaggtgttgtcgctgggcaacaaccggattgacaacatgatgaacatcatctacctccggcggttcaagtgcctgcggacgctcagcctctctaggaaccctatctctgaggcagaggattacaagatgttcatctgtgcctaccttcctgacctcatgtacctggactaccggcgcattgatgaccacacaaaaaagcttgcggaggctaagcaccagtacagcatcgacgagctgaagcaccaggagaacctgatgcaggcccagctggaggacgagcaggcgcagcgggaggagctagagaagcacaagactgcgtttgtggaacacctgaatggctccttcctgtttgacagcatgtacgctgaggactcagagggcaacaatctgtcctacctgcctggtgtcggtgagctccttgagacctacaaggacaagtttgtcatcatctgcgtgaatatttttgagtatggcctgaaacagcaggagaagcggaaaacagagcttgacaccttcagtgaatgtgtccgtgaggccatccaggaaaaccaggagcagggcaaacgcaagattgccaaattcgaggagaagcacttgtcgagtttaagtgccattcgagaggagttggaactgcccaacattgagaagatgatcctagaatgcagtgctgacatcagtgagttgttcgatgcgctcatgacgctggagatgcagctggtggagcagctggaggtaaggctgggccctgggcacaagtgccagaatctggcgatgcagctgcacatccataggtgaactgtagccttcatgggcacgcctctgctggaaacgtccagcacgactcagcgtggcaggctgtagctttcttgctcatcagtcctgtttgcttttattacattttaatcatttacattggaagtgattcttgtggaaaatgagaggtgagctcattcttctgaaatggtccccctatcctggaagtcagtggggagaggtttttgattagacccctggagctatccgggtactctaaaggcaaagcgcacccccacttggggaccaaacaaagacccctccgcattgcagcctgcagttgccgcttctcaggtgacgtgaggaggctgcaactcagcactaagtagtgaaaatgaaaagcgccgctgtctgaaattcattagcagccagagtatgtgttacaaggcagcggaggctgggagtctgaagtggtgtgatgaattgaacctcatcggatgctgctgtggctgggccaagtgatagcacctaatcaattcctcacacgtcaagtgacacctcagacatgggatagatttccccatcacatcacagggcaggtgctccctccctgctggagagcacaggcactgcagaagcagcgcacagtgccaggggcgagtgaggcagcagctcccagccttttcaggcacggagattgcctttcaacatccaaacatttcccagaacccatgtgccatcctacttgtattactggtggccagaaagccacaagcgcaatcatgcttttcaatgaccctatttttattcacgagaacagcacatacatgtgtttgaaaattatgtgaggtgctcactctgcagacagtactcacattcctatagattccacccctgcccaccttgcagcccctggagtctatagcagatgggagtggggcactccgagagtggcaggcctggagatcacatcttccattgttccttcaatcaacactaactcccatttgggccttaggtgccttgctaagcaccacaaaacagcaactaactgaaagagatctggagtgccagcccgctcctactgagggcctcctctctgtcaggcaccttgcaaagcattttgtgtgaagtgactcatttaacctcaccacaacgccacaacgcagggattatgcaggtaacctatttcccagatgaggaagataaggcccaaggaggtgaaatgcctttcccagagttacacagagtgctggagctgggaatactgacccaggcagtctagctcttaacagctcactccactgtttccctggaggtgatgcacagatgtcactgggaaacccaaaggagagggggttggctgtgtgtgtgtgtgttgggcaggcaggtaaggggagtaagaccaggacaagtgttcctggcaaagttccggtgacagcattaaacattcagatggtgagggagttaatatggttggagaacaacaactttagagagagcagaggggtcagttcacaaccatctgctcaggagggtcaagatgggtggtctttatgctgaaggtctgtgattagaggagctggttgctaaattttgaggagtaccttttgctctgtgctggacatctaaatatgcatgttaactgtgttctttaacatttccaggagactataaacatgtttgaaaggaacattgttgacatggtaggactgtttatcgaaaatgtccaaagcctatatcctttctgtgatgaccttccccatggggaggtgctacagagcccctgggcttgtcccggcctctggacaaaagaatgttccacagggtctgaggaggtttcccgaccctcagaacaatgatggcctggttagagctgtggtttggatgcccagagggacaacatccaaactgtttgcagtaggctcccagcatgattgttctcatatgagtgatgttcactaggaaatgacgccccctgtgttgcaggcaagcacactctggggttgaggcaacccccacgtggaagacactataaggagtacatcaggtgaaatgttagggtgaggagccaacatcggagcatggccaacccttcttccacccgaactcagggcactccacatggggcaaactgctgtgctccagctagcagcagccctgtggtcctgccctcctggggctcacagtccctcagggagacaagttgtagaggcaacaagtggtgccaaatgcacagggtgagaagcagttaacccagaggccaggagcctccatgcaggagggagagaagagtgtgatggcaggggccgagggtccgtccgaggtgtggggcaggggcagggagtcgaggaaggcccagggttcggagcttgtgagtggacggtgctgccagccagaatttccgagctcgccttgggcccttaaagtctgtctcccgccgtctgagagcatcagggacgcgccgggcctgctcctcccgggcctttgcttaactcggggctgcacgatggctcagtgccgggacctggagaatcaccaccacgagaagctcctggagatctctatcagcaccctggagaagattgtcgagggcgacctggacgaggacctgcctaacgacctgcgcgcgggtcgtttccaaaagttcaattatgtggaggcttctggcactttctaagagaagcagttacaggtagaggttgaagtctgagatttcccctggaggtcttcttaaccttagagtctgtataatgagtactgtgggggtgttggaaccaccatttctgatcctgcacaatgccatccggtttgcaccagcacatccactgatgaatggtcacaaaatcagcagggtcggcctgaggaacctggctccatccctggggtctgcacgctaagaaggctctcccggatgtctgcgctgggtcccgcagcagcatgtctatgtctctggaaggagtgtgggcatcaagggcccagacagagatactatgttgtcagggcccagacagagatactatgttgtcagggcctgctttagtgcatgcatcattcactccactgccagtttctcagcttctctctgtcgcgacatcaccaccaaggcaagccaccatcgtccttggcctggactgttgcctctttactgcctcttacagtccgtctca

SEQ ID NO: 597095 - DNA, 1031 bp, Homo sapiens
  misc_feature (10)..(10): n is a, c, g, or t
  misc_feature (54)..(54): n is a, c, g, or t
  misc_feature (69)..(69): n is a, c, g, or t
  misc_feature (131)..(131): n is a, c, g, or t
  misc_feature (984)..(984): n is a, c, g, or t
  misc_feature (1002)..(1002): n is a, c, g, or t
  misc_feature (1009)..(1010): n is a, c, g, or t
atggacagtnggctcatgattcacataagagtcaacagctccggaagcctcttnggttcactcgcattnctcctctgctgactcccgaagtgacaaacgtcttcctgcttccatggctttggctttacttnggaggcccttttcagtccaaatcaagcaaaaatgtactgagtgcctactgtgtgctaagattgggatattcagcagcccctactctaagaggtcccctggccattgtgtaggctagcatagggagtggggacacagtcttagggtcctgactactcatgctcacacccaactctgccactccccactttgccctctaggcctctgtctccttttttttgacttgaggatgatagtggtattaatatccagctcacagaattgtgatgagcagtacatgaaatgcatggaaagcagttaacacagcattcccttccccctccaacttctcctggctgcaaattaatcacctcatctgcatcctgggcctcttttgaatgcacatgctgttagagcgcttctcacattgtattaaagttagtcatttatgattccatttttcccactgactgtaggttctcaagagtagggtgtaccatatttcttttacaaccccagcaccaagcaaagcacctgctacttcgtcggtattcattgttccggctatgaaagcttagactaggaaaggatcttggaacagtctggtccactggttcctgaatgctcgaccgtggacctgcaggagcagaatcacccagaagtgtgttgagaaacagattccgtaggcacatccacagagacagaaagtggatccttgggccttggagttggggtgggatggatgggaagtgactgctgatgaggatgaggtttatttaggggttaaggaaaatgttctaaagttagattgtagtgatattgcacaactctgtaaataccaaaaccatcgcattatatgttttaaacaagtgaaantaatggtatgttaattgnatcccannaaacctgttaggaaaaaaaac

SEQ ID NO: 597096 - DNA, 4515 bp, Homo sapiens
  misc_feature (4513)..(4513): n is a, c, g, or t
gggcgcttggttccccagcaaccgggagacgcgtctgctgcgtggaaccgccgagttcccagcgcttgagaagggtcttcctatgttgcccgggctggtcttgaactcctgaactcaagcagtccttccacctcggcctcccaaagagctgggattacaggtgaaaattctggatctgttatctgtgaggaggccactccgttgacagttgtgtaaaactctgctgctttccccagctccaacctctctggtcttcaacaacactatcatcagggaaaacgtgggggaagatgaaccagccgtgcaactcgatggagccgagggtgatggacgatgacatgctcaagctggccgtcggggaccagggcccccaggaggaggccgggcagctggccaagcaggagggcatcctcttcaaggatgtcctgtccctgcagctggactttcggaacatcctccgcatagacaacctctggcagtttgagaacttgaggaagctgcagctggacaataacatcattgagaagatcgagggcctggagaacctcgcacacctggtctggctggatctgtctttcaacaacattgagaccatcgaggggctggacacactggtgaacctggaggacctgagcttgttcaacaaccggatctccaagatcgactccctggacgccctcgtcaagctgcaggtgttgtcgctgggcaacaaccggattgacaacatgatgaacatcatctacctccggcggttcaagtgcctgcggacgctcagcctctctaggaaccctatctctgaggcagaggattacaagatgttcatctgtgcctaccttcctgacctcatgtacctggactaccggcgcattgatgaccacacaaaaaagcttgcggaggctaagcaccagtacagcatcgacgagctgaagcaccaggagaacctgatgcaggcccagctggaggacgagcaggcgcagcgggaggagctagagaagcacaagactgcgtttgtggaacacctgaatggctccttcctgtttgacagcatgtacgctgaggactcagagggcaacaatctgtcctacctgcctggtgtcggtgagctccttgagacctacaaggacaagtttgtcatcatctgcgtgaatatttttgagtatggcctgaaacagcaggagaagcggaaaacagagcttgacaccttcagtgaatgtgtccgtgaggccatccaggaaaaccaggagcagggcaaacgcaagattgccaaattcgaggagaagcacttgtcgagtttaagtgccattcgagaggagttggaactgcccaacattgagaagatgatcctagaatgcagtgctgacatcagtgagttgttcgatgcgctcatgacgctggagatgcagctggtggagcagctggaggtaaggctgggccctgggcacaagtgccagaatctggcgatgcagctgcacatccataggtgaactgtagccttcatgggcacgcctctgctggaaacgtccagcacgactcagcgtggcaggctgtagctttcttgctcatcagtcctgtttgcttttattacattttaatcatttacattggaagtgattcttgtggaaaatgagaggtgagctcattcttctgaaatggtccccctatcctggaagtcagtggggagaggtttttgattagacccctggagctatccgggtactctaaaggcaaagcgcacccccacttggggaccaaacaaagacccctccgcattgcagcctgcagttgccgcttctcaggtgacgtgaggaggctgcaactcagcactaagtagtgaaaatgaaaagcgccgctgtctgaaattcattagcagccagagtatgtgttacaaggcagcggaggctgggagtctgaagtggtgtgatgaattgaacctcatcggatgctgctgtggctgggccaagtgatagcacctaatcaattcctcacacgtcaagtgacacctcagacatgggatagatttccccatcacatcacagggcaggtgctccctccctgctggagagcacaggcactgcagaagcagcgcacagtgccaggggcgagtgaggcagcagctcccagccttttcaggcacggagattgcctttcaacatccaaacatttcccagaacccatgtgccatcctacttgtattactggtggccagaaagccacaagcgcaatcatgcttttcaatgaccctatttttattcacgagaacagcacatacatgtgtttgaaaattatgtgaggtgctcactctgcagacagtactcacattcctatagattccacccctgcccaccttgcagcccctggagtctatagcagatgggagtggggcactccgagagtggcaggcctggagatcacatcttccattgttccttcaatcaacactaactcccatttgggccttaggtgccttgctaagcaccacaaaacagcaactaactgaaagagatctggagtgccagcccgctcctactgagggcctcctctctgtcaggcaccttgcaaagcattttgtgtgaagtgactcatttaacctcaccacaacgccacaacgcagggattatgcaggtaacctatttcccagatgaggaagataaggcccaaggaggtgaaatgcctttcccagagttacacagagtgctggagctgggaatactgacccaggcagtctagctcttaacagctcactccactgtttccctggaggtgatgcacagatgtcactgggaaacccaaaggagagggggttggctgtgtgtgtgtgtgttgggcaggcaggtaaggggagtaagaccaggacaagtgttcctggcaaagttccggtgacagcattaaacattcagatggtgagggagttaatatggttggagaacaacaactttagagagagcagaggggtcagttcacaaccatctgctcaggagggtcaagatgggtggtctttatgctgaaggtctgtgattagaggagctggttgctaaattttgaggagtaccttttgctctgtgctggacatctaaatatgcatgttaactgtgttctttaacatttccaggagactataaacatgtttgaaaggaacattgttgacatggtaggactgtttatcgaaaatgtccaaagcctatatcctttctgtgatgaccttccccatggggaggtgctacagagcccctgggcttgtcccggcctctggacaaaagaatgttccacagggtctgaggaggtttcccgaccctcagaacaatgatggcctggttagagctgtggtttggatgcccagagggacaacatccaaactgtttgcagtaggctcccagcatgattgttctcatatgagtgatgttcactaggaaatgacgccccctgtgttgcaggcaagcacactctggggttgaggcaacccccacgtggaagacactataaggagtacatcaggtgaaatgttagggtgaggagccaacatcggagcatggccaacccttcttccacccgaactcagggcactccacatggggcaaactgctgtgctccagctagcagcagccctgtggtcctgccctcctggggctcacagtccctcagggagacaagttgtagaggcaacaagtggtgccaaatgcacagggtgagaagcagttaacccagaggccaggagcctccatgcaggagggagagaagagtgtgatggcaggggccgagggtccgtccgaggtgtggggcaggggcagggagtcgaggaaggcccagggttcggagcttgtgagtggacggtgctgccagccagaatttccgagctcgccttgggcccttaaagtctgtctcccgccgtctgagagcatcagggacgcgccgggcctgctcctcccgggcctttgcttaactcggggctgcacgatggctcagtgccgggacctggagaatcaccaccacgagaagctcctggagatctctatcagcaccctggagaagattgtcgagggcgacctggacgaggacctgcctaacgacctgcgcgcgctttttgtcgataaagatacgattgttaatgctgtcggggcatcgcacgacatccacctcctgaagattgacaatcgagaagatgagctggtgaccagaatcaactcttggtgtacacgtttaatagacaggattcacaaggatgagatcatgaggaaccgcaagcgcgtgaaggagatcaatcagtacatcgaccacatgcagagcgaactggacaacctggaatgtggcgacatcctagactagatgaatgtcagccacaggagcttcttcaaaacatagcaccagccccagccaggagaaggaagtgcacacgcctcacccgcacctctagagagttgctgggcatctctcaaccgcgatccccaacaccattcttcccccacccctggaaaaacttccaaaagtagagaaaataaaggactcatttcacaaaaanaa

SEQ ID NO: 597097 - DNA, 213 bp, Homo sapiens
ctacacacaaatcaaaatatttagccaggtgtggtcgtgtgcacctgtggtcccatctactccagaggctgaggtgggaggattgcttgagcctgggaggttgcgtgctgcagctgcgccatgcattgtgccacatgcactccagccataaacaacagagtgaagaccctgtctcaacgaaacacaaacaaagagcttggtaaatatacatgg

SEQ ID NO: 597098 - DNA, 6000 bp, Homo sapiens
  misc_feature (5998)..(5998): n is a, c, g, or t
gggcgcttggttccccagcaaccgggagacgcgtctgctgcgtggaaccgccgagttcccagcgcttgagaagggtcttcctatgttgcccgggctggtcttgaactcctgaactcaagcagtccttccacctcggcctcccaaagagctgggattacaggtgtaagccatctcgcccaaccaattttcttcttattaattcatggccaatagggactatagttttcagatcctgttgacttcaggttatcatttcccaggaaaattctggatctgttatctgtgaggaggccactccgttgacagttgtgtaaaactctgctgctttccccagctccaacctctctggtcttcaacaacactatcatcagggaaaacgtgggggaagatgaaccagccgtgcaactcgatggagccgagggtgatggacgatgacatgctcaagctggccgtcggggaccagggcccccaggaggaggccgggcagctggccaagcaggagggcatcctcttcaaggatgtcctgtccctgcagctggactttcggaacatcctccgcatagacaacctctggcagtttgagaacttgaggaagctgcagctggacaataacatcattgagaagatcgagggcctggagaacctcgcacacctggtctggctggatctgtctttcaacaacattgagaccatcgaggggctggacacactggtgaacctggaggacctgagcttgttcaacaaccggatctccaagatcgactccctggacgccctcgtcaagctgcaggtgttgtcgctgggcaacaaccggattgacaacatgatgaacatcatctacctccggcggttcaagtgcctgcggacgctcagcctctctaggaaccctatctctgaggcagaggattacaagatgttcatctgtgcctaccttcctgacctcatgtacctggactaccggcgcattgatgaccacacagcaagtgtctccctctcagtctcccagccctgtgagacagattcctcaagcccccaggtttcttggaaaaggggcattgaagagtagcttcccctgcccacaactaggagagaaagggcagctccctcttcctaatccctttacctgactctgtcagagtgattccagcagcacccttgtaagtactgttttgtgtgcgttcccaggggccaggcctcttccacacactgtcccagggccacctcacagccatcctgcactgtctagttttccagatgaagaagctgaggagggctgggagcagtggctcacgcctgtaatcccagcactttgagaggctgaggcgggaggatcgcttgagccaaggagttcaagaccagcctgggcaacatagggagaccccatctctacagaaactaccaaaattagccaggtgtggtggcacacaccagtaatcctggctactcacaaggccgaggtagaagaatcgcttgagactaggagtttgaggctgcagtgaactaagaagatgccattgcactccagcctgggcaacagagtgaaaaaattaaaaaattagaaaagaaaagaagttgaggaggcccaaggagggcaagcagccaggatcactggctcaaggccaagccaggattcaccctaagttggtgtcatcccaggagcaatattaacagctgagctccagagggaaccaggccatcagaggctcaggcctggctctcaggggcagagtcagggctggaggtagagacctgagtgtcatctgaggattgccaattggcagtagttgaagccatggtacaggtgggatcacctggggcacatggagtgagctgggggacggggactaagttctagaggtgccagcattcctggccaggtacagggggatgagccagtgcggtggagagagccaagggccagaccctcgtgaccagccctatggcctcactctacctctgtcctgttgtcctccttccctaaaagagggccagaaggcctgctgagggctgttgggagtgagagagcaagtcctctgtggagaacacccagtctggggcgaggggagcgctccattgctgtggctcctgccctggagatggccccgggaaccccagcctgccacgctgccttccgctcctcctggtctttccctgatttccctgcgctcacaaaaacctggtgagggtcatcaggagatgggcattctcatccacgagacctcatggctttcacagccttcatgcaggcccctgtgcaacacccctgcccatgcgcgggaggctgcagcatggcagaggcggcatggcagaggcggtgtggctcggaggaacctctggtaacaatgccactcccgttccctggtcagaaaaagcttgcggaggctaagcaccagtacagcatcgacgagctgaagcaccaggagaacctgatgcaggcccagctggaggacgagcaggcgcagcgggaggagctagagaagcacaagactgcgtttgtggaacacctgaatggctccttcctgtttgacagcatgtacgctgaggactcagagggcaacaatctgtcctacctgcctggtgtcggtgagctccttgagacctacaaggacaagtttgtcatcatctgcgtgaatatttttgagtatggcctgaaacagcaggagaagcggaaaacagagcttgacaccttcagtgaatgtgtccgtgaggccatccaggaaaaccaggagcagggcaaacgcaagattgccaaattcgaggagaagcacttgtcgagtttaagtgccattcgagaggagttggaactgcccaacattgagaagatgatcctagaatgcagtgctgacatcagtgagttgttcgatgcgctcatgacgctggagatgcagctggtggagcagctggaggtaaggctgggccctgggcacaagtgccagaatctggcgatgcagctgcacatccataggtgaactgtagccttcatgggcacgcctctgctggaaacgtccagcacgactcagcgtggcaggctgtagctttcttgctcatcagtcctgtttgcttttattacattttaatcatttacattggaagtgattcttgtggaaaatgagaggtgagctcattcttctgaaatggtccccctatcctggaagtcagtggggagaggtttttgattagacccctggagctatccgggtactctaaaggcaaagcgcacccccacttggggaccaaacaaagacccctccgcattgcagcctgcagttgccgcttctcaggtgacgtgaggaggctgcaactcagcactaagtagtgaaaatgaaaagcgccgctgtctgaaattcattagcagccagagtatgtgttacaaggcagcggaggctgggagtctgaagtggtgtgatgaattgaacctcatcggatgctgctgtggctgggccaagtgatagcacctaatcaattcctcacacgtcaagtgacacctcagacatgggatagatttccccatcacatcacagggcaggtgctccctccctgctggagagcacaggcactgcagaagcagcgcacagtgccaggggcgagtgaggcagcagctcccagccttttcaggcacggagattgcctttcaacatccaaacatttcccagaacccatgtgccatcctacttgtattactggtggccagaaagccacaagcgcaatcatgcttttcaatgaccctatttttattcacgagaacagcacatacatgtgtttgaaaattatgtgaggtgctcactctgcagacagtactcacattcctatagattccacccctgcccaccttgcagcccctggagtctatagcagatgggagtggggcactccgagagtggcaggcctggagatcacatcttccattgttccttcaatcaacactaactcccatttgggccttaggtgccttgctaagcaccacaaaacagcaactaactgaaagagatctggagtgccagcccgctcctactgagggcctcctctctgtcaggcaccttgcaaagcattttgtgtgaagtgactcatttaacctcaccacaacgccacaacgcagggattatgcaggtaacctatttcccagatgaggaagataaggcccaaggaggtgaaatgcctttcccagagttacacagagtgctggagctgggaatactgacccaggcagtctagctcttaacagctcactccactgtttccctggaggtgatgcacagatgtcactgggaaacccaaaggagagggggttggctgtgtgtgtgtgtgttgggcaggcaggtaaggggagtaagaccaggacaagtgttcctggcaaagttccggtgacagcattaaacattcagatggtgagggagttaatatggttggagaacaacaactttagagagagcagaggggtcagttcacaaccatctgctcaggagggtcaagatgggtggtctttatgctgaaggtctgtgattagaggagctggttgctaaattttgaggagtaccttttgctctgtgctggacatctaaatatgcatgttaactgtgttctttaacatttccaggagactataaacatgtttgaaaggaacattgttgacatggtaggactgtttatcgaaaatgtccaaagcctatatcctttctgtgatgaccttccccatggggaggtgctacagagcccctgggcttgtcccggcctctggacaaaagaatgttccacagggtctgaggaggtttcccgaccctcagaacaatgatggcctggttagagctgtggtttggatgcccagagggacaacatccaaactgtttgcagtaggctcccagcatgattgttctcatatgagtgatgttcactaggaaatgacgccccctgtgttgcaggcaagcacactctggggttgaggcaacccccacgtggaagacactataaggagtacatcaggtgaaatgttagggtgaggagccaacatcggagcatggccaacccttcttccacccgaactcagggcactccacatggggcaaactgctgtgctccagctagcagcagccctgtggtcctgccctcctggggctcacagtccctcagggagacaagttgtagaggcaacaagtggtgccaaatgcacagggtgagaagcagttaacccagaggccaggagcctccatgcaggagggagagaagagtgtgatggcaggggccgagggtccgtccgaggtgtggggcaggggcagggagtcgaggaaggcccagggttcggagcttgtgagtggacggtgctgccagccagaatttccgagctcgccttgggcccttaaagtctgtctcccgccgtctgagagcatcagggacgcgccgggcctgctcctcccgggcctttgcttaactcggggctgcacgatggctcagtgccgggacctggagaatcaccaccacgagaagctcctggagatctctatcagcaccctggagaagattgtcgagggcgacctggacgaggacctgcctaacgacctgcgcgcgctttttgtcgataaagatacgattgttaatgctgtcggggcatcgcacgacatccacctcctgaagattgacaatcgagaagatgagctggtgaccagaatcaactcttggtgtacacgtttaatagacaggattcacaaggatgagatcatgaggaaccgcaagcgcgtgaaggagatcaatcagtacatcgaccacatgcagagcgaactggacaacctggaatgtggcgacatcctagactagatgaatgtcagccacaggagcttcttcaaaacatagcaccagccccagccaggagaaggaagtgcacacgcctcacccgcacctctagagagttgctgggcatctctcaaccgcgatccccaacaccattcttcccccacccctggaaaaacttccaaaagtagagaaaataaaggactcatttcacaaaaanaa

SEQ ID NO: 597099 - DNA, 195 bp, Homo sapiens
  misc_feature (107)..(107): n is a, c, g, or t
  misc_feature (109)..(109): n is a, c, g, or t
tattgattatacttgccccattattcctagaaccatgcgcctgcgactacttgacgttacactcctatcatacttggaattgaagacccattttttattaatttttntnccaagacgtcttgcacttatgagctgtccccacattaggcttaaaaacagatgcaatttccggacgtctaaaccaaaccactttca

SEQ ID NO: 597100 - DNA, 1968 bp, Homo sapiens
  misc_feature (1966)..(1966): n is a, c, g, or t
gggcgcttggttccccagcaaccgggagacgcgtctgctgcgtggaaccgccgagttcccagcgcttgagaaggaaaattctggatctgttatctgtgaggaggccactccgttgacagttgtgtaaaactctgctgctttccccagctccaacctctctggtcttcaacaacactatcatcagggaaaacgtgggggaagatgaaccagccgtgcaactcgatggagccgagggtgatggacgatgacatgctcaagctggccgtcggggaccagggcccccaggaggaggccgggcagctggccaagcaggagggcatcctcttcaaggatgtcctgtccctgcagctggactttcggaacatcctccgcatagacaacctctggcagtttgagaacttgaggaagctgcagctggacaataacatcattgagaagatcgagggcctggagaacctcgcacacctggtctggctggatctgtctttcaacaacattgagaccatcgaggggctggacacactggtgaacctggaggacctgagcttgttcaacaaccggatctccaagatcgactccctggacgccctcgtcaagctgcaggtgttgtcgctgggcaacaaccggattgacaacatgatgaacatcatctacctccggcggttcaagtgcctgcggacgctcagcctctctaggaaccctatctctgaggcagaggattacaagatgttcatctgtgcctaccttcctgacctcatgtacctggactaccggcgcattgatgaccacacaaaaaagcttgcggaggctaagcaccagtacagcatcgacgagctgaagcaccaggagaacctgatgcaggcccagctggaggacgagcaggcgcagcgggaggagctagagaagcacaagactgcgtttgtggaacacctgaatggctccttcctgtttgacagcatgtacgctgaggactcagagggcaacaatctgtcctacctgcctggtgtcggtgagctccttgagacctacaaggacaagtttgtcatcatctgcgtgaatatttttgagtatggcctgaaacagcaggagaagcggaaaacagagcttgacaccttcagtgaatgtgtccgtgaggccatccaggaaaaccaggagcagggcaaacgcaagattgccaaattcgaggagaagcacttgtcgagtttaagtgccattcgagaggagttggaactgcccaacattgagaagatgatcctagaatgcagtgctgacatcagtgagttgttcgatgcgctcatgacgctggagatgcagctggtggagcagctggaggagactataaacatgtttgaaaggaacattgttgacatggtaggactgtttatcgaaaatgtccaaagcctgatggctcagtgccgggacctggagaatcaccaccacgagaagctcctggagatctctatcagcaccctggagaagattgtcgagggcgacctggacgaggacctgcctaacgacctgcgcgcgctttttgtcgataaagatacgattgttaatgctgtcggggcatcgcacgacatccacctcctgaagattgacaatcgagaagatgagctggtgaccagaatcaactcttggtgtacacgtttaatagacaggattcacaaggatgagatcatgaggaaccgcaagcgcgtgaaggagatcaatcagtacatcgaccacatgcagagcgaactggacaacctggaatgtggcgacatcctagactagatgaatgtcagccacaggagcttcttcaaaacatagcaccagccccagccaggagaaggaagtgcacacgcctcacccgcacctctagagagttgctgggcatctctcaaccgcgatccccaacaccattcttcccccacccctggaaaaacttccaaaagtagagaaaataaaggactcatttcacaaaaanaa

SEQ ID NO: 597101 - DNA, 1531 bp, Homo sapiens
gggcgcttggttccccagcaaccgggagacgcgtctgctgcgtggaaccgccgagttcccagcgcttgagaaggaaaattctggatctgttatctgtgaggaggccactccgttgacagttgtgtaaaactctgctgctttccccagctccaacctctctggtcttcaacaacactatcatcagggaaaacgtgggggaagatgaaccagccgtgcaactcgatggagccgagggtgatggacgatgacatgctcaagctggccgtcggggaccagggcccccaggaggaggccgggcagctggccaagcaggagggcatcctcttcaaggatgtcctgtccctgcagctggactttcggaacatcctccgcatagacaacctctggcagtttgagaacttgaggaagctgcagctggacaataacatcattgagaagatcgagggcctggagaacctcgcacacctggtctggctggatctgtctttcaacaacattgagaccatcgaggggctggacacactggtgaacctggaggacctgagcttgttcaacaaccggatctccaagatcgactccctggacgccctcgtcaagctgcaggtgttgtcgctgggcaacaaccggattgacaacatgatgaacatcatctacctccggcggttcaagtgcctgcggacgctcagcctctctaggaaccctatctctgaggcagaggattacaagatgttcatctgtgcctaccttcctgacctcatgtacctggactaccggcgcattgatgaccacacaaaaaagcttgcggaggctaagcaccagtacagcatcgacgagctgaagcaccaggagaacctgatgcaggcccagctggaggacgagcaggcgcagcgggaggagctagagaagcacaagactgcgtttgtggaacacctgaatggctccttcctgtttgacagcatgtacgctgaggactcagagggcaacaatctgtcctacctgcctggtgtcggtgagctccttgagacctacaaggacaagtttgtcatcatctgcgtgaatatttttgagtatggcctgaaacagcaggagaagcggaaaacagagcttgacaccttcagtgaatgtgtccgtgaggccatccaggaaaaccaggagcagggcaaacgcaagattgccaaattcgaggagaagcacttgtcggtaggccccgagcctcctgaggccctccctgtctcctgctgcaggccctccctgctcttgccactcccactgtagggggactgcaactcctgtaccctctgatgacccctgaggccaatggttattgtccccatttgccagagatcatacagctaatcagtggcagagccaaggcccgccttacaccagcaccaccaaccacagctccccactgcttgacgtgtggcctgtgggtctttgtcacacaaagtgcccttgggattcaaggtcggccctaccccccaacttatcatcatcgttactattaataacagtattagtatgaccatta

SEQ ID NO: 597102 - DNA, 151 bp, Homo sapiens
ttacccctaatttctacagtgctacaccctagaccaaacctactgccaaaatccatttcactcatcatatacatcggcgtaaatctaactttcttcccaacaaactttctcggctatccggaatgctccgatgtaactcggactacccgat

SEQ ID NO: 597103 - DNA, 332 bp, Homo sapiens
  misc_feature (129)..(129): n is a, c, g, or t
  misc_feature (179)..(179): n is a, c, g, or t
  misc_feature (186)..(187): n is a, c, g, or t
cacgatattggagcgtgcgatagaccaggcggagattgtctattgggtgattactgtcaggattagggcatgtgacttgtgcaggggagcattggctgtgatatgtgtctatgtatttgttctcccagngagaagagtgaggttacggacacaagaactctactaatttaaaaataggngctatannagaatttctctataaagtaagtttttagatagctttttgtttggaagtccttaagatatggggaattttttttttttcactttttctgtcagagtaatatgtgtaccaggttcaacaagtcaggtatttactagacttataaaga

SEQ ID NO: 597104 - DNA, 149 bp, Homo sapiens
atgcccttgttgctctgatatataaggcccggatgttctgccagtattccttgagcaagtggttccaagaatttgacagccaggtgattgttatacacaagctcatcgtctgtcatcttcatgtgaccaacagctatagccagacataa

SEQ ID NO: 597105 - DNA, 755 bp, Homo sapiens
  misc_feature (114)..(115): n is a, c, g, or t
gagcggggctttcccgtgaaggcaggcaggcagcgccggcctccggaggcggcctgggcgatggcggcggagttttgtccataacctgggcaaccgcgcagctggaggatggcnncactcggttttgccgcagctggggagcaggcgtcgggggctgaggcggagcctgggccccgtggggacgacgcacgccgccactcacgcgtcctctctggggcccctgaatcccccttgacagcgggaacctcatctacaactggcaggcgagcaatggcgtcgcctgaaggagcgcttcgccattcctcttcaacgtcggagctgcgtgagcgatgtgcgcttcagtacatgggcaagggtcagacggagccgacagacagctgggggcaccaggagcgcaatccaccagaacacgcgacttcgacgactggcggcacggcaagcaggccggtcttcacggacggcccaatggttccaaccagtgcgtggcatgggacaaaccgaacggtacgggaccgaagacatccgacgccctggacagagacgttggcacaaccacgcggagcccattaccattgggcctgcttgccattgacggactcatgccgtcacttcgttcccacgcagttgcaaacggttaccaacagatcggcatccccagcagcaaccgcggcgctagtggaacgccagagtccttttacataccggggcccacagggtaaacagtcaggcgcacgtagagccaagacgcttcggac

SEQ ID NO: 597106 - DNA, 861 bp, Homo sapiens
tgagaagaggggacatgggtcagcaagactgctgctttttctggttgcatccatgtctgagttagtggtgcacactcgaccgacaggcgggactgtcagagctttagtgtgggtctcctgggggccctgcatacacactgcaccaggttagctcttggattagattgttgttcgctgtcagggttggagggaatctgccactgggtgctcagcagaggagctccttctgaactggatgggctggggagctgctatggtgcaggccaggtggagggggtctgacagcaggacctgctgagccacagggcccgagccgaccccacaagcaataacagatgtggagtgcggtggatgcttggccttttctaaacaggttacatttaaacacgagtttctatttttaagatacagcttatcagggggtgtgtggccgatctcactgcgcattgtctgcttctgtcccatgcccacatgtcagtggccagcactgtgcatgtttcatggtgttcatagttcccagccctggggctccaggggcacctgtgggcaccttgtgctttccttctcgggggagcccagtctgtttgaaacgcaacagagtctggtgttgggaggtgcggaagggggttgtaccgaaatagtattgcaggccactgagatgaagggctctctgttagaagtggtctgtgtggggtgatgtgcacacacagagtggtcccgggcatgtgctgtgcttcaggcttcctgggagtgggggagagagaggggtcctttgcaacacagtattttttctttgttttttcatggacaatttccgggggccccttcgggagggaatggggggaaaaaagggggggttcc

SEQ ID NO: 597107 - DNA, 134 bp, Homo sapiens
  misc_feature (124)..(124): n is a, c, g, or t
attccgggcaagtgagccaagagtaatgcttttccacattccttacattcatatggcttctctccagagtgaatccatatgaatgtaaggaatgtggaaaagcattctcttggctcacttgccnggttacgcag

SEQ ID NO: 597108 - DNA, 635 bp, Homo sapiens
agggagtgatcatgttggctgagaagtcctctcgaccagtcaaagcagcaatgcattagtctgtgtctaacgtattatgtgtgcgtaatatataccggaattgttcagtctttaaattagatgtgaagcataataaaggtggcggtacgtgtaaaattcatcccatctagaggcccaaacttaagcggcgccaggttcattatggtacaaaacgtggacccggcaacaagaaggcgtcgctgttactacacgctaggccacgagagcccaggctgttatcaccaaataggttcgatgaccttagtgtaaacaagctgtaataggcatggggactctatctgtagacgagaccccttaacatcgcatggaaggagattgaatggacaaactacgatggggaaaccacaactggtagcgacaaaagaagacacaattttagaacgcgcgtcttgacaagtgcaaaccaattactctagagcacatcatcacaaacgctgttactaactgtgttcacacccctcaggcctggcgaataatgacatgcagactgctctatgcaaacctgtatcaggcctgatcatgaccataatgcacttgctggaccaccttgtaatccacgagagaacttaggtcaa

SEQ ID NO: 597109 - DNA, 231 bp, Homo sapiens
tcagccggcccgctctcgtgagactgagggcggtgacagagcccatccgcagagcgtaggatggcctccgagtaggccgtgtgcaatgtggtgaatgaagctaatacatacattttttcagatatggaatattagccatggtcattaattaaatgaaagaataaatacgtgaaggttaatctactgatcaaacttaaaacaatcctctggtttcattcttgacaatccttg

SEQ ID NO: 597110 - DNA, 120 bp, Homo sapiens
gcgtaatgtggtggttgatacacggtacaattcgcacaaataccaccaggtatttgggaaagttggtatgaagattaccattccaaagaggcaacagagttctgacccaatgtccaattg

SEQ ID NO: 597111 - DNA, 304 bp, Homo sapiens
acttttccattggaaaaaaggaaattggagttattccagtgggaagtattggttgaggttaagaggcttaatgacttacaccgggactcaattgacaccgccaaagggggcacatttgtttaaagggaagattgtgaacttgtaaagtttaggaattaagaatgtagctgggctcgttggctcgcgtgtgaagtcccggcacactgggaggccgaggcagggtggatcccttgagctcgggggttcgagactaccctgagcaatatggtgaaaccctgtccctgcaaaaaatacaaaaaaaaaa

SEQ ID NO: 597112 - DNA, 205 bp, Homo sapiens
cgaatgtgggtcgcaggcacttactcccaaacgcgtcaggcattcgtcaatcagttgctgctgcccaagggtttcctcaaatgtgctcgtcgattcgcgcctttagttgggggtaattctccaggcgctcggactgtgccttgagcattttctcggcctgttgctccatcgcatgggcatcacgtagccagtcgagcaggttttc

SEQ ID NO: 597113 - DNA, 191 bp, Homo sapiens
gtccacatatgcgcagtcgccgtccagcaggttgcgcatctgggtggtgttttcagcagcgtcgccgccaccagcgcggtcagcatcaccaccatgccgatgctgatgaacttctcgccgcggccgatcgctttcaaacctgagatacagcacgccggcggcgggcacgaagaacagcaggctgcccagcg

SEQ ID NO: 597114 - DNA, 136 bp, Homo sapiens
  misc_feature (74)..(74): n is a, c, g, or t
tcgcacccggacaccggtgtagagtgcggcgcgcatcagtgcgcagaatgtgctaccaggtatggagcctggtntgcaagcgagcaatttccacctctgtgtgtgtacgagctcatgaaggtgccgatgaatagcg

SEQ ID NO: 597115 - DNA, 1010 bp, Homo sapiens
ggcggggccttgtggtgagggcttaaggaagtaaaatggcggaccgtggcgaacgaagaggaaaggagcagtggcttccggttgacgccaccaatcgctgatccacggccaagccccgcagcgcatggtctgccaagccagaagcccaaggagcagcagcggagcgtgcttcgcccggcagtgttacaagctccggcagccaaaggcgctgtcccatgactgtccccagcagtggcaccaacggtggtcaagccatcccatgcatgacatgcaacggaggagcatgtgccctgcatgcatcccctgacactgctgcatggagaagtccttccgaagctgccgatgaggagaacgagccccagaaacatgagtccagcaatgtcctctgacgaggaagcctgtgagaaaagagaccccggcacacagcaagcctttgtatttggggcagaacttgacgggaccacgagttaacgcctgataaactgagagcgtggaccgaagccgaccatggcagactgctggacacccccagcgcagacactgcgcaaccgcaacgaactatctcgtccagtatatcagtgacagctataggacgaactcaagcaatagtgccgacgcctcagcaacaaatcgtatctggcagaacatgagcgagcgagtttggatgacccccaagaattacacgaggtcagtacagtcttgcaacacgcgacaaatgccgctgcgagtcagggtctgaagtcctcgtccaggaggccaccacatgagaagagtcctggctgaactagcaggcctaaccaggaaacagacggcagcgctcgggggaaacacctgacagttctcccgcggatagcagcgcaaagccacgtgttcaccctgcccgtaccgcatgcatcgcgaccacccacgccatgggtgcaaaagccgcggcgctcacaccatcacgtcaaccactacagcatccgccacaataacgcacccgtacgtccagaccacgcgcccacacatac

SEQ ID NO: 597116 - DNA, 140 bp, Homo sapiens
cgactccgacgccggcaaggtttgggagagcggctcggtcgcgggacccgcgggcttacacccgcccagactacggacgggctttgccaccctcttccgcttgctgtccctatcttttccgcttccggttggcaattcca

SEQ ID NO: 597117 - DNA, 146 bp, Homo sapiens
agttctggcgggactacggctattgtgtagaacggggtcaggctggagaatgagggaaagttaagtggccgccagtgcgggatcaggcgagagtgcttcgtctgctaattgtaccagcaggtgctggcaggctctgaactgctgca

SEQ ID NO: 597118 - DNA, 202 bp, Homo sapiens
gtagacatctggggccaggtgtgagtagtggcacacggggctcaggtctgtgggtgaggagtgaggactggactgtacttggtggagaggatagctggtctgagttctagtattcttgctcgccagtgagccctggcactgtgtagtctccagtccccacccaggtcaggagtcagcttggtctaggaggagaggctggact

SEQ ID NO: 597119 - DNA, 810 bp, Homo sapiens
aacagtggctcacgcctgtaatctcagcactttgggaggctgaggcaggtggatcacgaggtcaggagatggagaccatcctggctacggtgaaaccccatctctactaaaaatacaaaaaattggctgggcgtggtggtgggcgcctgtagtcccagctactcgggaggctgaggcaggagaatggcgtgaacctgggaggcggagcttgcagtgagccgagattgcgccactgcactccagcctgggcaacaaagtgagactccatctcaaaaaaaaaaaaaaaaaggtgggtttccttaaaaaggtcctttaaaggcaatttatttttaaaaggtgggataaaggggcttcacaagggtttattacctcttaattagggtaattaaggacctttttctaaggtccagaggaccaatttacctttcttagaaccggtttacataatttgccaattcggaattaccggagattgggggtcacgtggtacccattgggaggttatacattaggcttcgggcacatccgggtgtacacataacttttaaatatccttgggagagagggacctaaaaaggtttccaaagggaccaaaacttttacgcggcaaccattttcctatttaaattacctaggggctaagtgggtgctactaccggtggtgctccccattttaacctcgggacagtaatctaaagtcctccggaacaaagtgggggtactaatttttgcccacacaactctcggggcaggtccaaagagggacttgggcaaggggaccccccaaatacgggttacattttcatttgg

SEQ ID NO: 597120 - DNA, 242 bp, Homo sapiens
taaccaatatgtagaaaccccgcctctactaaaaatacaaaattagccaggcgtggtcgcatgcctgtaatcctagctactcgggaggctgaggcaggagaatcattgaacccaggaggcggaggttgtggtgggccaatatcacaccattgcactccaacctgggcaacaagagcaagagtccatctaaaaaaagagctgtatataccactttaaactgtccttggccttgccatatgcaa

SEQ ID NO: 597121 - DNA, 373 bp, Homo sapiens
  misc_feature (51)..(51): n is a, c, g, or t
  misc_feature (59)..(59): n is a, c, g, or t
  misc_feature (161)..(161): n is a, c, g, or t
  misc_feature (233)..(233): n is a, c, g, or t
tcaagaaaatgattgggtgggtttccatgtgatgccaaaagaatttccccnatactccngccctgttttcctggatcaccctgtccccccagaaattgccctgaaaacaaatcacaggttgaaactagaaataacttcccctctccctaggcagcttgganactggccaccctgtttcttggtttggtaagaatgttccagacacaaggaggggagcaacacacactggggcntgtcgggggttggggtatggggagggagagcattaggaaaaataactaatgcatgctgggcttaatacctaggtgatgggttgataggtgcagcaaaccaccatggcacacatttacctaagtaacgaaactgcacatcc

SEQ ID NO: 597122 - DNA, 142 bp, Homo sapiens
ctctgctcatatctgtctgtgagtagtcttctccagcccaaagcctcagtttcccccatgattggtgcggggtgcacagcgacgctccttgcatgaaagacaggggccaggttgggagaacttgggcatggagatggatcct

SEQ ID NO: 597123 - DNA, 753 bp, Homo sapiens
gggagcgatccctccatcgtacggctgctggagtgcgacgccagcagtgccattcagttctgatcgatcgccccctggagcagttgcgagagaaagcagcaggcttgtcgtgccgtgttaagcctttgctctgcgaggaggtggaatgcccgcgccatatcgttacctgcgtctcctcgaggccccgcggtcctggtggcagtgctgttgcggcactgccctgggccaggtgggctgctggccttgcctcccgtccagtctgatccaagcgacgcagattccgtccggcctcacgacctggcgccgagtcccgttccatggtccaacgtcccagcgcagtgtgcgtgagcatgccaggggttcagcggtgttctttgagttttcacggcacgctcgccggatcattggggtacgcctcagggagggtcgccattgcgcgtaggtaggaaaccaagaggccgtgtatccctctacctgaagaggcttgctggcgccagcagaggccaggccccaagaggcggttgtctgttgaagttcgccaacggttggaacctcttgttgggagaacatggggtgggcgtgaccagaaagagaccgtcagggggatagttcagtatttagcacggtggaaagcgctacacattcggccacagttttgcatttgtagtttggaattccaacttaccagggtatcaaattacagcaatccgaacgactattaacggtcccaaggaatttggcaagaacatcttg

SEQ ID NO: 597124 - DNA, 356 bp, Homo sapiens
gtcggacagcttgatggctgactcttatagaaggatatctctggctacttggatcatccattgatactcagttaggcaacactctgctgctttacataagtgccaagaaggcgccagagagaagagcaatcgtgttccaaggaatcggcagtgactatatcttggcctttctggatgaaaggatctgtccattcacagagcacaagaaatgcaattgagacactttttttggcagctggcctctggtcaatgtagttaaccacacttgtctcctgccggaactccactgcttcccgcccatcctcctccttggtctttaccagtgacatcttgacccaggtgcggaagcccccaga

SEQ ID NO: 597125 - DNA, 398 bp, Homo sapiens
tatagaaacggagttacactctatcgcccaggctgaagtgcagtggcgtgatctctgctcactgcaacctccgcctcccgggttcaagccattctcctgcctcagcctcctgagtatctgggactacaggtgtgagccaccacacctggccaagggggcacattttttgattgcacagaagctccatatgggctagcagcagctctagggggctattgccctccccagctgtacttgacactctctccaaggtagggactagggcgtatttatcttggtatcaagattatccagtacagcaagtctcagtgaaaggttgataaacagaatttagtacacttggtcttccaaaatgaaactatttgactaaggaacttaatgaaagacaaagggaaaca

SEQ ID NO: 597126 - DNA, 199 bp, Homo sapiens
gggggaaatatctcagaagtaatgctgggtcctcctgggtgcatcaggaaattataaaaatgtgttctagtgtaggggatgttaataaatcacttgggtgataaagctttctgacacatttttttcaatatagaattaattatttttctcttcaacaacaagtatctttatggaggtggtgtggaattaaccaaacaaa

SEQ ID NO: 597127 - DNA, 203 bp, Homo sapiens
agacgtcccttctatgcatggacaacacgagctagcatcccggtccctaaacaacgcaatgcaacagcaacaggcaagcaaagcagcagcagcagggcacaggcaaggcaagcagcagcaaaggcacagggcagcagcagcaaaggcaagggcagcagcaggcaaggcaagcagcagcaaaggcaaggcaagcaaagcaaagc

SEQ ID NO: 597128 - DNA, 520 bp, Homo sapiens
  misc_feature (19)..(19): n is a, c, g, or t
  misc_feature (31)..(31): n is a, c, g, or t
ctcaagctttatacttcanatacatgtgganagacagtgtggcattctcaaggatctagaactagaaataccattgacccagcaatcccattactgggtatataccccaaggattataaatcattctactataaagacacatgcacatgtatgtttattgaagcactattcacaatagcaaagacttggaaccaacccaaacgtccatcaatgttagactggataaagaaaatgtggcatgtataggccaggcatggtggctcacgcctgtaatcccagcactttgggaggccgagaggggcagatcatctgaggttgggagtttgagattagcctgaccaacatgaagaaaccccgtctctactaaaaatacaaaattgcctgggcatgatggcatgtgcctgtaatcccagatacttgggaagctggggcaggagaatagcttgaacctgggaggcgggggttgcaatgagctgagatagtgccactgcactccagcctggaagtataaagcgttgag

SEQ ID NO: 597129 - DNA, 1301 bp, Homo sapiens
  misc_feature (52)..(52): n is a, c, g, or t
  misc_feature (115)..(115): n is a, c, g, or t
  misc_feature (142)..(142): n is a, c, g, or t
  misc_feature (146)..(146): n is a, c, g, or t
  misc_feature (221)..(221): n is a, c, g, or t
  misc_feature (263)..(263): n is a, c, g, or t
  misc_feature (522)..(522): n is a, c, g, or t
  misc_feature (527)..(527): n is a, c, g, or t
  misc_feature (693)..(693): n is a, c, g, or t
  misc_feature (770)..(770): n is a, c, g, or t
  misc_feature (781)..(781): n is a, c, g, or t
  misc_feature (854)..(854): n is a, c, g, or t
  misc_feature (877)..(877): n is a, c, g, or t
  misc_feature (1134)..(1134): n is a, c, g, or t
gaaaaaataaaatattttttattatattttattataattatattagtattangagtttatatattataatttattatttttatattattatataaataagatagtatcttttgtnattaattttgacgtctatttgatcctntganttaacgttctattatatattaattaagattgatattacggagtgggtcaatattctcttcagacatgtacgcgcnacatcctcgaggatgatcactacgaaccagcgatgacgacanaagcaccacgaggcaggaagcacgcgtagcccgtaaatatgagaatacgagccttacagtgtgcgcaacgtgtgctctgtggtgttgtgcgctgtaggagtagcgcagtctcgccataccatgtactgctctgtcgacgccatcgcgcctctgcgcgccacgcaagagatacgcgcagcgcgccgatcaatgatgcttagatagagagagacattgagagataatcaaacgtcaatataggtgtagagtcaagatgaanagcanacgagagtacactcgacctatctgccactacacacccacgcacctactccaaacgccccttcgctacattcgacactcgtctcaccaatctcatttctggtgtccgcgcatctcaccgccgcggcgacggcgtcaggcgtgtcgtgtagtggcggaatgcgtagcngcagcctagtgccactcgtccgccgcgtaagtgacgcaccacagtatagatctcgtacggagtcactgcgagatcanatcgcgtcctncgagtatgacgcactacacgtagtagacacggcgcgtgcagcgatgttaacaggacgggcgcgtgtcgagagncgcgcacgagtcgtgttagcgtnggcgtacgcctatcgcgacacaacgccgtgctgcttggcgcgcccgcctatcacgacctcgcacgcacaaacgggccgtatcgccgtcgtcatcgcgtataatcgcatatacaatagacgcgcgagtgcgtcacctgactcgatacgcatgaacgttgcagcgcgcactcacgtagttgaggtatagtagctactgacgcgcgcctcatcaccgtgctcgcttcactctgcgcttatactgagtgactgtctctcanatcgctcattgcgtcgcgaccgagtacgcgcaccacgtgtctcatgtacgctctatgcatactgcgtatcccgtacgcctcgtccagccgtgtcgacgctcagacggagtactcgccactctgacgcgcagcaggcgactgatcgctctgcggcagcctccattcag

SEQ ID NO: 597130 - DNA, 101 bp, Homo sapiens
acccctcagagacatcatacctctggaatcaacctactttctaataccctacttggaaaaatgagcttgcccctacctaccagcatctcctgcttatggaa

SEQ ID NO: 597131 - DNA, 744 bp, Homo sapiens
ggggaggaaagaacttgcatgttgggtgaaggaagaagtggggtataagaagtggggtgggaccacagtgaaatctatggtacaaccaaactggcccaaggtgtctctgcaagctgtaatgcagtttaatcacagagccatttttttttatgttcaaatgattttaattattggaatgcacaattttggggatatgcaaataaaaagcttaaaatcttacaaaaaaaagatttaaagggtaccatccttttggaaacaaaatgcttatgaaaaatatttgttggcggtttcggcctattcacttttagattcagttagcttttttgttgcggctgcattctcggtttactagccaatttagacctttagaaggccttttaaaaatcaagtgcccggccattaaccacgtcattcttgggaaacccgcgagggacccaaatttaatccctttagagaaaaacccctttgcggcgttaactatttctagaaaaggcccaccttattcccattccaactttgcaaaaccgggtggcaatggaaaagtggagcactccttctttgtaacatcaggtttaatttaaggaaaacggtgtttttttccccatgggccgaaaagggaaattccttttttcaaaaaaaagaccgaggaagggggttttccaatttgcccctggatccccttgaagcccgtttttcccccctaaggggcttccttaagggcggtccctttggccccccctttgt

SEQ ID NO: 597132 - DNA, 141 bp, Homo sapiens
gcacaaatgcaaaaatgaactgctcacccgtcaggataatctccctgcaccgatattctgtgctggctgtgtagttaattgcaactaatgtgtggtgtgtcgtttctcctcaccagttatttccttgtaacatagcgttta

SEQ ID NO: 597133 - DNA, 1132 bp, Homo sapiens
tcagtggtagctgtatggagctgcactgaaagtgaccataggatcttcatgaacacctgcgacccatcctctctcacccagcagatggttgtttagaacacagcgcgaactcaatcagtctatggaaagaagattctaactaggaacttgatgacccatcatgtcccctatggccaggaccccccagggctctggcactcactgcaaacttccctcatttccaaatcgagaagagcatgaggccaccatagttgagcgtccactacagttgtaataacgcgttgcgtcgtgccacaatagcgttccacccggatcgaaccaagaggctcctctgactatccaaccggggcatcgcccagtcgtcgccgttggactcccttgctaggcccgcacatgcagttcagacgtgcgcggctcaacgtgctgccacacgcagcgcgccatcactctcgcaaacgccacgtaggcgacacctacatagctagcggctcagcccacgccacgcaccgtcgcctgttatccaacactccccctctggccttgtgacccacatccacccgtggcaacacgcaaacgccccacacacccacaccaccgacccccactattcgtatccacacacaccatatacgttgcatccaacctatacattttgcctttccccgcccccttccgctagcaccccaccttatcacatcgcctatgcctcccgccaccgccccacccaccctccaccatcctgccctaaacgccccttctcacccagcgcccaccacaccccccaaacccacacaacgccctggcaccgtcttccccttggcgccgcatacgagcactatcagccccctccaaaccacctcccccctacccatcactacgtcgcgccccttgcgcttccccggtaaccccgcttcgtcactgggcgactcggcacatccatccagcgcaacaaccgcgcacctacaccggccggcgttagcaaccacctctctgggcccccttgcgctccccttgcgcgaggcgccccacgcgcactcctcccgccaccgcgtcaattcccgcactctgccccctagcagtcccacacactcctgcgctacccccacgcaacccactctaccgcgacccaccc

SEQ ID NO: 597134 - DNA, 142 bp, Homo sapiens
ggatgattgtctgtgatcacgtcgcgctgaaacagcaatggccgtttgaaagccgtataagagtctcgttacaagttcccccattttacctgtcctaaaaccagacaagccttacaagttagttcaggatcttggcctcgtg

SEQ ID NO: 597135 - DNA, 623 bp, Homo sapiens
  misc_feature (169)..(169): n is a, c, g, or t
  misc_feature (532)..(532): n is a, c, g, or t
ggctaatgacattcgatgtgtcggggcagcatgcaggctctggccttggggatctgagggctgtgtggcacctctggacggagttccccggagccttccttgcagccctcgtactcccgctgagactgagtggctttggcagtgtctgcgttggactcactggcctccntcgtggagcgtggagccagggacctggctgacctcgttgtaccctcgatccctgtctcctagatcactcgaactggacagcacgtgtgcattcgtgctggattggccctgcatgccaacttctgctccagactcccagggcgagcaccacccgtggatgcagtagattctgcgcaccatgaagaagggtgggcttcagtggggcgtatgcgcccagagtccccgacagccagcgctgcggcaactcagatatccctgacaggactcaagggaggtcagaacagctgagagttgtgacaggcttcagccaggtcactgagtcaccagtaggacgagaagaggaagccatagtctccacagtggntattctaacgaaagtaccgcaaggtgaccatcaaatattccagagctagggctggaggactttgacttcaaacactacaagtaagaccttc

SEQ ID NO: 597136 - DNA, 495 bp, Homo sapiens
  misc_feature (33)..(33): n is a, c, g, or t
aggcccatttgagtattttgttttcaattaggnagatagttggtattaggattaggattgttgtgaagtatagtacggatgcaacttgcccaatgatggtaaaagggtagctagctggttgtcctccgattcaggttagaatgagtaggtctgcgactaggagtcaataaagtgattgtcttagtggtcgaaatattacgctttgttgtttgaatatatggaggatgggcattattgctagcatgagcatggatagtaatagggcaaggacgcctcctagtttgttagggccggatcggataattgtgtagccgaataggaaatatcattcgggcttgatgtgggaacgggtgtttcagaggttggctagggtataattgtctgggtcgcctaggaggtctggtgagaatagtgttaatgtctttaagaacagaagctagataagtaatccgagtgcgtctttgaatggtagtacgggtggcagctgcttgtatc

SEQ ID NO: 597137 - DNA, 707 bp, Homo sapiens
ggagagagagaactagtctcgagttttttgtgtttctcgaatagtaaacaacctagttcttattatttgcccaaggccggctgtgaaaagcactggaggccccaaaatattccaaaagggaaggggaggaggggcaaagcacgtggtgccaaaccagggtgcgtgccgtgccccgcaccagtgctgccgtgaaggcacgtggaaagggacgaagaaacgggacatacgacgcaatcaaagaatctcccaaagaatacacagccaatataaaaatacacagtgagagaaggacggacaactgtgagagccaaccagaaatcaccgagcaaggaatacgaaaaaatgaaataagatccaaacggataaacacatatactcaccaacccacctcaatagtcaaaaccccacaaacaaaaaatgtgaaggagtgaaaaaacaagaccaggagagagagaggatacacaagagaacagccacaaatcagtgggcgagagcaccatgataagcaacaacgaggaggacgacaagcgcacacaagcaccaaaaggaacaccaaacgaggggacataagagaagatatggcggagcagaaagccacgaacaaggagcattgatcaacaatagccgacaagaaacccaaagaaaaattcagaaagagcaagaaagagtaccgaaaggaaaacaccaaccaacaacgaaacaaaaca

SEQ ID NO: 597138 - DNA, 846 bp, Homo sapiens
gcggcgtcaggcgaccagccgcggaggccggagggcatggaccttcaggccgccggggcccatgcggcatgggggcctgcggtagcctgtcttcggcggtgcccgtctgactgccgtagcagtcgcggtgtgggctgcccgctcagacccggtagtgctggggttttggctacagcttgaccacttccggttcaggtagcatagagcattgtctatggctactgcgatctgagcgttaggccccgtgtgaaacgagcagcagtcagttcctaaatgacaggtgcctggcccggtggtgacgggtcgacccagttctgcaaggagcgaagcgcttctgcccatggcactgagggcatgcgtacttctgcagtggaagataccttgtagatacccctggggtagccgtggtgccagggatagggcgcagcgacacatgtgagtcacaagccccagacgcgtgatacccaagagccttggcctgagaatcttttggtgcccattgggaggacactatgggggcactttcgtgcagattctgcaatcagaccagggatccacagggtgacaatcctgattcattggaatgtcttagcacgggaatacgtcactaggaggaaagacgccaactctatgtgcgtaccacatgaggacttttaaaacatcccctatggagagtttgattgctttggggttgccctcactatccacattgcgaacgacaccaattgaatttcctgatatgcaatcccacgcgaaggacctggaagaaagcccatttgcccagccccctgctcaaacttgaattaacccccttaaattcacatttgcccaaagcaatagggttct

SEQ ID NO: 597139 - DNA, 487 bp, Homo sapiens
cacacttcctgcccaagtgctgatggactgtggaaacaatgactaccatggaccactgtttgaagatgtagtatgctgaattcccagacatcaacttaaaaataaattctgctcatgaaaagtatgcagggcatgtttctgcttaaaaaaatgtcctgggaaaaaaatctaaattgaattcagaagatagagtaccatgtaaaagagtggccaagttataggaagtatttattttttacctttaattaggtattttagcattcaaaaagctaatgcattttgtttcttagacataaataaatacgtagatcataaatagaaatgtttcagagatgttttatttaagagagtcaacaatagtaattaaattaatactaataaataatgctagctcctgacactttaccattgacactttcaccagtatcttacatgaacctcatagcaactcatagctcatgtctgtgaaaactggggcacagagttg

SEQ ID NO: 597140 - DNA, 744 bp, Homo sapiens
ctcctaaaacatgtgcacctattcctttccttgtaagacattcctaccctttcctattaagagtggtaaaaattgggttaactaattaaaatgagatacaaaggttacagtcttacaacgtctttgattgttcacaatctcacaagacctcaggagtagttaccctaaacagatcaccttagaaaaaaggtgggagatggagtttaggctgttctaagccaagaaagattttgaaacttttttttttttggaaatggagtctctggctcctgtcacccaggctaaagtgccaggggcgtgatctcgggtctctgcagcctctgcctccggggtccgggcgattctccgtgtctcagcctccaaattagctgggactgcaggcttggtgccatcatgcctggctagttttcattcttagtagggcaccaggttcccctatgttgcccagggtggctctcggactcctgacctcgggagacctccgtgctttgacctcccaaagtgctaggatatacaggctatgagccagcacaccctggcttgaaaagattttaatacagtccctggtaatgaggggcatcctgtgagtatatttcccagaaaggcagagccccagaaattgaccttgactcatatcactaatttaaggactagcacgtcggggttcatgatccaagtttaacaccaacatttggctctatagaacccaggatttctaaaatacagcggcgggtcacgacgcac

SEQ ID NO: 597141 - DNA, 346 bp, Homo sapiens
  misc_feature (116)..(116): n is a, c, g, or t
  misc_feature (123)..(123): n is a, c, g, or t
  misc_feature (247)..(247): n is a, c, g, or t
  misc_feature (278)..(278): n is a, c, g, or t
  misc_feature (285)..(285): n is a, c, g, or t
agaagtcagtgaagcagaaagcccagttcttgacctcaaggacatgacttctgtcttgttagcacagcacgagtggttaggaattggcaaatgatatgggtgctgcaggaattcanaaggaanagtaatcacaactggggttgctgggaaagagcctttcctgccctttctgctggtctctccatctgcccataccaccatttgggagggtgtctttagaagctgcctgataatgtgggaatgtggnatctttagatgaaatcctggcaaagcagtgnaagtatncaattgagctttcatgggattggttatggcaacgactcttaccgaatttttggggcatgtg

SEQ ID NO: 597142 - DNA, 801 bp, Homo sapiens
gtacttatgtcttacataactaggaagtacttcttgggggctcctctggcctcccctcttatctcccccaaaccaccatcctgcgaaggcaaggaagtggctctccctccacagaggcaacggtgagagggagcactgtggctgccatcccagttacctcttcaatgcgcaaacagacacgtgtgactcaaaccctacagtatggagggtggcgttgcattgaaattccaggcctgagtttgatagtggatttaatgtagtagtcaaaggtatgaattcatgttttataactgtagcaggcaagcaagttttgtcatttatataaaaagtttggagagaatactttataagtttctgtgcgagcaaagtggctaagttactcattaacatacaggaaccgaatgtagtactctaaatccagctttttcttacctctggtacacttcagataccttacctaatacatatgagggcctttcaacccttagtccatatcaaattttctagtactaatctatttgacatacaactaattgcacaaagaaccaaaaatgacttcagaagttccatagatggatctgttgccccttacttaatttttctaccacaatgaaaacatttagaagacattggcagtcaaactgtcttatgaccattgcaagttgcttagtgctaagaagcagagacgatcaagggcctggattaaggtggtcaacaatgatgatggggtgagaaaactggtaagaggaacagtgaacggctggagtgcaattaaaacagacggctgaaggaaagaaaacg

SEQ ID NO: 597143 - DNA, 183 bp, Homo sapiens
tagatttcgtttggttttaactggctctgtcagggttccccaaacagctcaaccctccatttacattataatgcaaaagctcttccctgtggtcccaggcctgtggggaaaatggaatccggctcaaacccaagatccaaagctaaagtgcccccaggttgtgctgcctgacagttttataga

SEQ ID NO: 597144 - DNA, 620 bp, Homo sapiens
gcccagccgtgcccccccacttctgctacctctcccaatgcagtggccgcctgaaccccaacctgtattactgtgtcgacaggtgtgtcagcctcctgggcaccctgcgcttcggaacacgtgcggaccacgagacggtgcacaatgcccagtccagccattctccacgcgtgctcatctccagtcccacccgtctcgatccatggtcacaatgaaccatactaccatcggaagcccagagcttccgcacaccgttgacctgagggccctgccaccggaacgtgcctcatgcaacaaacatgatccgcctgatctacaacaatgcacaactgggccgcatacgatcccgcgctgctagccagctccaaatgacactcaagcatggctgccgcgctgagaaccccccaacggaagctcctacacagacgacacgcagtcagaactgacgcgacaaacgcaacctacttagacaacctagcccttgtgcactgcgccgcctcctggagctgacacccacgcataactcccaacgattcgcctgcaccctgagcaacaacccccaatgcaccacgtgccttgccgagacaacagaccccagggccaacttgccccaaaccagg

SEQ ID NO: 597145 - DNA, 348 bp, Homo sapiens
taataatttcaacttgtagtttagattctgagagtatgtatgccagtttgttgcatggatatattgctgaggtttgggatatgaatggtcccataacccaggtggtaagcatactaaccactagatagtttttaaatcctaccctctgccccactagtagtctccagtgtctgttgtgccatctttatgtccatgagtatgaaatgtttagctcccacttataagtgagaacatgtgttatttggttttctgttcatgcgttaattcacctaggataatggccttatataatgaagcccagctttcaaaaaccagaaattacagacacatttttttttaaaaaaggtc

SEQ ID NO: 597146 - DNA, 842 bp, Homo sapiens
  misc_feature (76)..(76): n is a, c, g, or t
  misc_feature (349)..(349): n is a, c, g, or t
  misc_feature (387)..(387): n is a, c, g, or t
  misc_feature (438)..(438): n is a, c, g, or t
  misc_feature (451)..(451): n is a, c, g, or t
  misc_feature (550)..(550): n is a, c, g, or t
  misc_feature (707)..(709): n is a, c, g, or t
  misc_feature (711)..(711): n is a, c, g, or t
  misc_feature (715)..(717): n is a, c, g, or t
  misc_feature (719)..(720): n is a, c, g, or t
  misc_feature (723)..(723): n is a, c, g, or t
  misc_feature (726)..(726): n is a, c, g, or t
  misc_feature (729)..(729): n is a, c, g, or t
  misc_feature (743)..(743): n is a, c, g, or t
  misc_feature (758)..(758): n is a, c, g, or t
  misc_feature (768)..(768): n is a, c, g, or t
  misc_feature (770)..(770): n is a, c, g, or t
  misc_feature (774)..(775): n is a, c, g, or t
  misc_feature (779)..(779): n is a, c, g, or t
  misc_feature (783)..(783): n is a, c, g, or t
  misc_feature (794)..(794): n is a, c, g, or t
  misc_feature (805)..(805): n is a, c, g, or t
gggaggtgggagggaagggcttgggaaggggatgaatatctctttttacctttaacagacttgtttaatcttctcnatgtagatgtttatgtaggtacttcacattgcaaacgccttttattctatttacaagctcagatgtctctgctctcctgaatcttgggcatgcctttctgtaaccaaaaatccctgtaggcgtgctagcaattccagggtggtccgggtttggcagatttgatttttaaaaaacgtattatctttaataaaatgttattatgtcaaccagtgaggctgccctgaacaaaaaaaaacaaaaagaaaaaaaaaaaaagggaaaagaaagaaactngttaaaaagaggctttccaggccccttatgtttttggntgggaaaaaggaaaaagaagaaaaggcaatctcgcagtacattgttacttngtcggaaaaaatnccgggacaaggattaccctgtgttttatggtttccaggtatcctggaaaataccagtgtgtgggcagttctcgcagatgttacctaaaactggctgaanttgaccgggcagaatggtcctggccgttttctggctccctcgacacttgatgggagggctgtcgacctctcctcccgtgggggcttccccagtgcctatcttctctgatagtcatgggagaggttaccctaatttcatgggagatgtaagtggtggnnngnaagnnngnntanganaanttttttactttttnatagatatctatcgntatagaatangnttannaaangagngtttagaggangcccaaattcntgtttaaatttttatggaatggaagttctggtccggg

SEQ ID NO: 597147 - DNA, 293 bp, Homo sapiens
ccaagatcatgtcattgcactccagcctgggcaacagagcgagactccatctcaaaaaaaaaaaaaaaaaaaaaaaattggaattattttactattataatttaaaagagagggtattatatttatagcagttaatcacgtgaagggttattttatttattccagcattttttaataaaattaggcctggttagagggtttccctaaattatatttattttacctaattgcaacagcaattttttttggaatttttttaaaattggattgaattgacatttggttacattatt

SEQ ID NO: 597148 - DNA, 414 bp, Homo sapiens
  misc_feature (303)..(303): n is a, c, g, or t
cacatgcttccacataaatcagcaaccgaggcctgtcctttttgttttggtttagtttatttcttgttcatgtaagactcttaacctgacaaaattttagcaaaaagggactaacgaaaaaccatttcttctgtccattacttgcattttgatgaaccacgagggaaaaaatagttccaattcaccaaatcatgtatgtatggattaataattttgagacaggtttcattttattgcccaaactgcagtgcagtggtccgatcaataatcactgaagcttcaacctcctggggctcaaacctnttttccaccccaaactccaatttttttaagttttttttgaacagggttttggttatgtggccaagttgggtttattaacaggtttgaaccaactttgcccggttttttttt

SEQ ID NO: 597149 - DNA, 696 bp, Homo sapiens
  misc_feature (1)..(1): n is a, c, g, or t
  misc_feature (31)..(31): n is a, c, g, or t
  misc_feature (47)..(47): n is a, c, g, or t
  misc_feature (128)..(128): n is a, c, g, or t
  misc_feature (133)..(133): n is a, c, g, or t
  misc_feature (171)..(171): n is a, c, g, or t
  misc_feature (205)..(205): n is a, c, g, or t
  misc_feature (217)..(217): n is a, c, g, or t
  misc_feature (225)..(225): n is a, c, g, or t
ntacacactcaatctggattcaaatgactcntgcctggttccagtgntgggctgttcccctgtctgagctttggtggcttttgattgaccccttccctgcccaggcatgaaggtggagtagcagaagngaagnatgcgggtgtataaagatgtcatcggggctgtctgtgnatggtgggtaaagagacagcacctgtcatggtgnaaggccacaagnaagcgtgnaggctgtttctggggccacctcctgcctccaggaggaagcagggatcctcctgttggcatcttggtcccatcaggtgtcttggatggggctggggctgggagtgtttctctccctgagcatttaagccaaggttcattatttagaatggaaccatttataggccgggcgccattattacattattcctaaagtgttaggattacaggtgtcatgcctgtaatcccggcactttaggaggctgaggtgggtggatcacttgaagtcaggagttcgagaccagcctggccaacatggtgaaaccccatctctactaaaaacacaaaaattagctgggcatggtggcacacacctgtagtcccagctacttggaaggctgaggcggaggactgcttgaactcgggaggtggaggttgcagtgagctgagatcgcgccattgcacttcagcctaggtgacagtgagactccatct

SEQ ID NO: 597150 - DNA, 283 bp, Homo sapiens
cttagtcttccccacaggttatatgtggcttctgacacataattcttaatgtcaagagtttttaaaaagctacaaatttaacacaattacagaattggtagaggtatgaaacacagactgcaactatcacatctgaacaaagttataatcccagcactttgggcggctgaggcgggcggatcacgaggtcaggagatccagaccacggtgaaaccccgtctctactaaaaatactaaaaattagccgggcgtggtggcgggcgcctgtagtcccagctactcg

SEQ ID NO: 597151 - DNA, 1080 bp, Homo sapiens
  misc_feature (409)..(409): n is a, c, g, or t
  misc_feature (523)..(523): n is a, c, g, or t
  misc_feature (665)..(665): n is a, c, g, or t
acatccgccttggtgctgatcttcatgaatctgtacaaatcccataagactgcatctatctactaggaatgagagttgcgagttgcactctagcaaaatcatttctctagtactattagtcacatcatctgtgtatttgattgttggttgcatcaggaatttggctagatagtcgtgtcgtacgttgtgtcatagtcctcgtagagttaagcacgccacagtcccgttgagacgaaatcggtcgattgtcactctttgagacttaccttctatctgtttatacttagtgggacctctaccactttgacggtactgttctcctctcagagtcattctctgggaacgtgcttattgtgtatctctgaagcccattaacatatcagatgcgttaccttggatcaccaaccgngggtaagggcactctgatatggagtgcggaattgagcgcaacgatatgaaggacactgcgctagatgtgccgtttccaacgtaccgatgtggtgatgcccgaataatcgcaganaggcgaagttgtaaggttggggtgtaagtttgacgtcaccagtgagctttatttccccgaagtgccaaggacttcacagtaaggattctaatatgcgacagggacaagttcccctaggaacccaaattgttaggtacccaanggcgggccgttcttggcccacgagtggtaggtacccacccggaggcgtttccggtgaacgattccttgcagcagcaagagcgttgtcaaccgtagttgtgttcgttccagcggcaacgtggacttctgcacgaatggggctcttcccacccaccaattagggggagaggcggcgaggtctttggagttcgcgccccttcgaagcgggggcagcgccttttagaagttttgtgtcgggcgccactgcgttcgttaccgccgctgccggcgttatccctttgaggaataactgggagaggcttgcctttgtgccccgagcttgttgggttgttcgccttttaggggttcctgggggacccctttcgcgtgggctttttgctttcgttatgcgcttgttggctcgccgttggggcccc

SEQ ID NO: 597152 - DNA, 495 bp, Homo sapiens
  misc_feature (18)..(18): n is a, c, g, or t
  misc_feature (37)..(37): n is a, c, g, or t
  misc_feature (54)..(54): n is a, c, g, or t
  misc_feature (68)..(68): n is a, c, g, or t
  misc_feature (191)..(191): n is a, c, g, or t
  misc_feature (198)..(198): n is a, c, g, or t
  misc_feature (211)..(211): n is a, c, g, or t
  misc_feature (216)..(216): n is a, c, g, or t
  misc_feature (344)..(344): n is a, c, g, or t
  misc_feature (419)..(419): n is a, c, g, or t
cccctaaaaacctcggcnacaaaggctgttggccaantgtaaaggcctgccccnctgtgtgtggtttnaaagtaaaactggaaaatgaagaacaattggaccgtgcctggctccctcccagaaggtcctgccacactcccacttccacatgcccgttgaactcctccacagtcctaaagaccttccagggnccgggancctttgtcccagncctgncacagtaagagtgaggcctgccctctccccgcccaggcattgggatccccatttagaaacggcattcacttcagaaggtactttttaactgctcagtttttgactattttaaatagtttgctgaaacncctgataacacttgctacatatcatgttttaattgcttgtacagttaacctttaattttatttagtaaagtgtancaaagtaggactttttgaattgtaaataggtggttttattaaataaaagtcaatgtaaaattgttaaaaaaaaaaa

SEQ ID NO: 597153 - DNA, 184 bp, Homo sapiens
cctatgctcgttcatggcagcggtactcctcatcaaaggacagcttcataacagcacaggttgcctggcagatctgcggctcgatggggatcgtggctgtgtggcacagtgaccagatcagagcccccattcccaggaaatgtcccagcccagtgcttcacatgtcctccccagtgcttcatag

SEQ ID NO: 597154 - DNA, 432 bp, Homo sapiens
ggtcaacaaagcaaaacgcacctggagagcctggtggccggccctgcagcacagtctgcagccgacacctgctttggccgtgggaaaaccatttaaatgggaggaaaaacccaaaagggtgttacaggggggacagcaagacttcccagaaagtttaaaatctctctgggtcttcgagtggaacctggaagccccgggtggcagtggattgatgtccagttcttgtcagaggaggcttgtgaaaaataactgcgcctttgcctgaataccacgtccccaagaatcagaggggccacagcccttctcctccatgggaggccctggagcctgatagaaatcagtggtgtggggcactgtagagactagccagctcccgacggcaaggggtctgtgtcttgtattgatcccatcagtgcccggcactcccttcac

SEQ ID NO: 597155 - DNA, 416 bp, Homo sapiens
  misc_feature (166)..(166): n is a, c, g, or t
  misc_feature (168)..(168): n is a, c, g, or t
  misc_feature (170)..(170): n is a, c, g, or t
  misc_feature (177)..(178): n is a, c, g, or t
  misc_feature (180)..(180): n is a, c, g, or t
  misc_feature (259)..(259): n is a, c, g, or t
  misc_feature (272)..(272): n is a, c, g, or t
  misc_feature (334)..(334): n is a, c, g, or t
  misc_feature (346)..(346): n is a, c, g, or t
  misc_feature (355)..(355): n is a, c, g, or t
  misc_feature (375)..(375): n is a, c, g, or t
ctcccgagcgtagatggaaggagcagatatgacataaatcccttgagggtctacatcttcagggcgattccaatctacggacgagctcggaccatccccggaaccctcctgcgtccttaggttgttgagtgcatccgggagtgcgtggactgacggctccggggtncnanccagcanncnagacccagcatcctgggagtggcacggcggcgcacgtggaccagcaagagcgcagcgccgccacgccgcggccacgagnagtcccagaccgnaggcaaaaggtagcgctgagggttcgcctgagcccgggccgcgggcaagcttgcgccgtcgnggtgcactgggnactcacacncgctcccatgtagccggganaagcgcagacgaggccggagaagtgggcgtagcagaggtcc

SEQ ID NO: 597156 - DNA, 340 bp, Homo sapiens
gaactctagctcggtacccagccgcgtcgattgccccaccaacaacaccagagatagcagaaacaacagaaccagccgcgccttggataccctgcactagaccagcaatgatttgtgaacccattgagaccatctgcccggcgatacctgtaatggtgctaatgatctgtgagcccatactgataaatgaagcgatgacgctttgaacgcctgctgtgactgcgctcaggaaattggacatagctgcactcactgcggaaacgacagatgagaaaatactcgatactgtggaaagtacgctagaaagcacgctagagacgacacttagcacggcttggaa

SEQ ID NO: 597157 - DNA, 233 bp, Homo sapiens
ggtccatatgcagtcaagcaagtttatcccagtgatcgaacaagaagatgcttggggaaaccagattcatcacactctttaatcatgcctgatgaaatccatagaccttgtggctgatgaactcagccctggaaggcagacatcacatgaattcacacagcaaggcattgtttcctagatttcttacacccattccatcaagtgggatcctcatagatgtctgaccttgcagt

SEQ ID NO: 597158 - DNA, 104 bp, Homo sapiens
ggctgtaggacatacttctaggtgggcactagtgcggaaaacttgaggatgaaatcagtgagctagcatgcacttgaaagcgcatggccgtgtctcctacacta

SEQ ID NO: 597159 - DNA, 432 bp, Homo sapiens
ctgatgacggagaccacgaggtaactggaaattcccaaattgcgctaaagaaaaatactacgagactagagaattttttaacgtaacttactaagtgtaagatgacaaaatttgactttcgggatattctagcgttaattttaccgtccgcctaaatgtgggcaaaaattcacagcttacgttatattaagcaaatattaacagtggctattatttgctgggtggtgaaatttgataaaaaaattaaaagttaaaaaaaattgtttagatctttaagtgtcacattgacttatctgggacatcgctttatttaatcctcacatgagatttggctaagtatatttttcacaatctgttaatctcacaaaaactaaagctgtataagcacagttaaaacccattctgcagggctaagaaattcatttgtaaggc

SEQ ID NO: 597160 - DNA, 852 bp, Homo sapiens
actaataaaccctttgatacttttagccagaaatcagtctcataaagctatcttctgagtatagtttgtgtaaaataaaccagtgtttagcttcggtgaactaactttccacaagcctgaacctcccctctagcaagcaatattctcttcacggtgcttgttactctctacttactgcgaccttccagactactgcaccttgtttcgtgacacactattctcccgctacacacctttctcttcgttattcttctgccatcttgaaaaagggtttgtggtgtactgttcgggtctgtacactttaagctctgcagcactttccacccctgctgcttagcctctcgtacaacatccaaacaataatacggttgttctattggttctcctggtatatcgtcactctccatcgtgcaggctctggaccctggtaaatccccagttgatcctttcctagcgtaccactcgtcattctctctttccaactgttttcacaaagaacgcaacggacggtgtgcacctatttccagtgacatgctggtttaacctaactccctgttaaccgaagattgaattctcatgttccacccagcaaattcacatctatgttttccccgctaacacttgatgataccaagtcgaacagcactctccactcctggaaccttcgacagacctccaccactttaacggctcccacaagtggctctactcagctgaacctctaggtactaccttctttacctctcgttcaacccatttgcggcgctcgtcagctcttctcacacactgcttggcacattggcccttcttactctactgtcgccctcgcccctgtacgggacggcttacaac

SEQ ID NO: 597161 - DNA, 752 bp, Homo sapiens
  misc_feature (588)..(588): n is a, c, g, or t
ggcctagaaataaacatgctagcttttattccgagtgctaaccaaaaaaataataccctcgtcccacaggaagtctgctcatcaagatattgtcctcagcggcaaggcaaccggcagtgccatacatccttctaagtagactagtcgctctatcaatgcaagtagttactcctccgtgaacgaatgggaagacaatagaccaagtatcgtaaccaagtcagatagcatcatcagtctaaatatgtcataaatggggtatagacaatgaacagcgtaggaatagactccccttttcacttctgagttcccagaggttaccgaaggcacccctctgagcatccggaccgtgccttcgttctcagcatgaggaaataactagcccccatgtcaattcatatatccaaatctctccctcactaaaacgtaagccttctccgtcactgctcgtcaaatcttagtccactcactagacgaggtcaggtgacggtgggatgaaacgcgaaagtccagatacgcaaaatcttagcgtactacctcaattgcccacatgagggatgaataatagcagttctaccgataaaacctaanattaaccattgcttgaatttaacggagtttatattatccctaattactaacggaattcctagtactgcaagttaaagtccagcgacagtaacctactaatatctggactgaaaggaagtaagagactaaaacccttaattgcatcaaccttctctgcctaaggg

SEQ ID NO: 597162 - DNA, 431 bp, Homo sapiens
attgtaacagtccaggagttcaaggttacattgagttgtggttatgctgctgtactctgtctcaaggggaaaaaaaaaaaaaaaaagggttgaaattgtatttgtattttgcgtatgtacttaaaagctaacttgagtcaaatgtgactcctggagtaggtaattccagttaccacttacagggtttttctcctgccccaggcactgtgcaaaatcccttttattcatttttaacaggcaaatattatccatattttgtaaatgaacacactgaagttcaaagaagtttcataactttccctgtttgggcacggtgggtcacacttgtaattctagcactttgggaggccaaggtgggaagattgcttgaggtcaggagttcaagttcagcctgggcaacataccgaggccctgtctctccctatcccccc

SEQ ID NO: 597163 - DNA, 625 bp, Homo sapiens
  misc_feature (49)..(49): n is a, c, g, or t
  misc_feature (95)..(95): n is a, c, g, or t
  misc_feature (102)..(102): n is a, c, g, or t
  misc_feature (110)..(110): n is a, c, g, or t
  misc_feature (112)..(112): n is a, c, g, or t
  misc_feature (135)..(135): n is a, c, g, or t
  misc_feature (182)..(182): n is a, c, g, or t
  misc_feature (184)..(185): n is a, c, g, or t
  misc_feature (191)..(191): n is a, c, g, or t
  misc_feature (210)..(210): n is a, c, g, or t
  misc_feature (231)..(231): n is a, c, g, or t
  misc_feature (240)..(240): n is a, c, g, or t
  misc_feature (257)..(257): n is a, c, g, or t
  misc_feature (293)..(293): n is a, c, g, or t
  misc_feature (297)..(297): n is a, c, g, or t
  misc_feature (302)..(302): n is a, c, g, or t
  misc_feature (351)..(351): n is a, c, g, or t
  misc_feature (353)..(353): n is a, c, g, or t
  misc_feature (362)..(362): n is a, c, g, or t
  misc_feature (364)..(364): n is a, c, g, or t
  misc_feature (376)..(376): n is a, c, g, or t
  misc_feature (396)..(396): n is a, c, g, or t
  misc_feature (405)..(405): n is a, c, g, or t
  misc_feature (407)..(407): n is a, c, g, or t
  misc_feature (533)..(533): n is a, c, g, or t
  misc_feature (611)..(611): n is a, c, g, or t
ttctcttccttgagggggcttcttaacgttttccaagcgcagtgcagtnagcgtggtgggaggcgtgcgcggctggtgccgtgcgcgaacagctnccaaatngactgccnangccacggtgcttcttgtgtcccncccagcgagctttcggttgtggcaggcggccaggaagggccatgagnanngtggcntgaatgaaaaccgagggcngaagccgagcgtgactccctngcctaagcnggggctcggtccgaggnacacgcatgggcttggccagacacaaaccaagagantgcnatganagatagagcagaaacctcccgagcactgtgttcaagctaagctttcctnanatgggcttntnaggcgagatgtnatatcagataccgtcgcatnttacttggngngaacagagacgtgcgggccacagcggcccaccaaaggctgccatccaagctgagttccgcagcctcacctgcagctggagagggaccttgccctgatcctcctggtaggtacccgctaagggattnaggacagagcgtcacactgcacgcagggtcctccgccaccaccatccaagaaccccggggggctggccacgcgctggnaactgacaaggagt

SEQ ID NO: 597164 - DNA, 857 bp, Homo sapiens
  misc_feature (361)..(361): n is a, c, g, or t
catctcacgaagctccttctgcatcttggggtctggaaggggtgtaccgagagaggtaggatgcatctccatcccacaaactagcctaaacctaagcaactatccaaggagccctccaacgcagctggaggcatcttgcccggagggttgtggaaatgcttcggtaattccaacatctgtatgcatgctgctgttaagccaactagctccgcgacgtcctgggaggtgcccttgaagggtttgggctcggaggtgagggcttgctgcatggagacgactcgtacgtaccctcgttgttccccgaattcgcggaggagatcatggggcttaatccatttcttgatccagaagtcaacccaanaaaacacaaggtccatggggacaaaaggttccgcatggcttgtatgtccgtaagaaaatggtgggttgttaattagttttggccggcgaagcccatctgattgggaaggagtgccaggaccttcctagggtttcaagagcccggagggacccccttgaaagaggaaacctcggcctaatacggagttagtacctgcgtaggtactctaaacagaaggcgcgatcgtggtcagagaggcgctttcggttgaataatcgccataaataccaccaggtagcacgtgtgtgtcatcgaccaacgcaacgggtaattggagataagtgcgccagtccagcgggtaaaggggccgggagactttttcgatcccgaattcccttttacaatctggatgaacttgaataagataacttggataaccaaaatgaaaggggagtgcttgtgaacgcttggccccctcgtttggggggaattcccggatgggggaccccaaattctg

SEQ ID NO: 597165 - DNA, 291 bp, Homo sapiens
aatcttttaatcaatcgaaaccttaataattaggactgataatagtgatcagtgattgaacctttattatttaccagctaatatagtaggcccataaataggttatatcattcgtagtcacaataaccacatacatcacacaccatgacgtagcgctactacccatacctgctagcagtcaaggttcagataatcataacacgcccaacatctcattgatagtgagttatccaaacaggaacaatctcaagtttatatctaaagcccatgttcttttgcttaatattagag

SEQ ID NO: 597166 - DNA, 346 bp, Homo sapiens
ttaataggcttctcgcctctaagatgtacaaatgcacctagcccacttctataccacaagagcatcttagcgccccttatcaccatactagttattatcgaaaccgtcagcctactcattcgaccaatagccctggccgtacgcctagccgctaacattactgcaggccacctactcatgcacctgattggaagcgccaccctagcaatatcaaccattaaccttccctccgcagttatcatcttcgcaattctaattctactgactatcctagaaatcgctgtcgccttaatccaagcctacgttttcacacgtttagtaagcctctgcctgctcgccaactcat

SEQ ID NO: 597167 - DNA, 190 bp, Homo sapiens
  misc_feature (135)..(135): n is a, c, g, or t
  misc_feature (149)..(149): n is a, c, g, or t
cctggaaggttgaggctgcagtcagctgtgatagcactactacactccagccttggacaacagatggagaccagtcctagctactcaggaggctcaggtaggaggatccttagcccaggagttcaaggctgcagngagctgtgatagcnctactgtatcaagcctgggtacagggtgaaccccgtctcca

SEQ ID NO: 597168 - DNA, 139 bp, Homo sapiens
ggatcccgcacatacttcgtccaccatgacttgacttgaagaagtgtatggtcattcggcgtgtgcagtatggaccctcggcgtcacgccgagggacctaacacttcttaaggtcaagtcacaatggacgaagttgttg

SEQ ID NO: 597169 - DNA, 352 bp, Homo sapiens
tgacgtgcttataattttctagttctttctcccatttaatgtatgttctactttctacgatttcctctttttcttccagtatatctatttagcattttagatttgtccatggttattttaaatttcccagagctgttttttttttcctcctttaaaatttgtaatatgttcttacttcataaatggagtatcctctcattcacctgcttttagtttttgattgtgctaaaatacactttatgtaaaataacatcaccacctagttacataactttttcatcatcccagatagaaaccctatacctgttaagcagccactgtcctttcttccgtctccccaagccacggtcaa

SEQ ID NO: 597170 - DNA, 1013 bp, Homo sapiens
  misc_feature (315)..(315): n is a, c, g, or t
aggtgattatatcccgtgttcgtattgtgtgtctctgaatgtggtttgttgtgtatgttgtgctgcgttttgtttgcgtgttcggttcttctttggtttctctatgtgcttctgctgagcacgggtgtgtcgtgtgccacagcttgtcggtacgcgtgtgggggagccgggtcccgccgtggctggttagcctccccggattgtgttatccgctccctatgggccctttttcccccccttccggtattgcgtgtggtccgtgagatactcttggtgcgggggtaatccccccgccataatctcttctcgtgttgngcgaatcactattaacacgaggttttaccacgtcgtcctgggttcccgcgacaaattcctccgggtttttcgtcttcctctccctcccgggggtctttttgcaccccaggatgttccgccgctggttcttatcatcagcaagttcatcatacacaccgcgcctgggtcagctgcaattgtacaccaccctcagacacagttgccgtctttctccaggtaaggtattccccctcatctgttccccgcctcgcatcagttctcgcctcgccacgtattcaacgccgcgctgtatagtcggtgccgccctctcttcggttcaggcattgatatctattcagaagggtcctccgcttgagtagcgagatctcccacccatcagcgcaccaggaggagggtcgatagacgaataagcgagcgacgagcacacatacagtggccgcagagggtggcacaccacgccgtggatacacagagagacacatactctgaatgatcagccccagcgcacatagcggggaacatagcaacgctattgggagttctcgcacgctctggcccacaccctattcaggtgaccaccccgccccaccacatggggaggtagatatccctcaacaccctcgggggaccaccgcgcgaagtattttttttgtcggttattttttccaaaaatggggggacaccccccacaagataac

SEQ ID NO: 597171 - DNA, 852 bp, Homo sapiens
acatatcttgtcacagagatatcatcagcatagcagaggatgaggacctcaggatcactttgaggaatccagcaagctagaagaccatgctgcggaaagtgcgcagccaaggagaccaggaagcgagcaactcagcaggttaaagctgaagacacaacaaagatatagtgatctctgtgggcatatataatctggtccagaaggctctcaagacctcctccaataaagctctatcgggaaacaaatgaaccagtgaaaaccaagacccggacctttaatacaagtacaggcggtagcattcatgccataacgataccaagaggtctcagatctatgggagtcgatcagataactacatggagaaagaggaaacagacagacgctacaaacggtaagaatgatccaggaaaagacagctccatgggctacaaacgccagaggtacagcatgaagaaaactaccaattacactgaaggaccatcaccatgtatcgatgtatccacatgagcgagatcagaattggatgaatttggggagctcaacacgcgttcaagatgctcttgcatcaatcaaagtgataatagggaccgacagagaagaggaagacaaccacatggtgacaaaaatacaaacaacacgccagaccagggaacaatcacgatccattaataacaaggtgggacaatgggacgacaaaagggaagaacgacggaaggacaatgaccaaggatacaactcaggggtgaaaacaacaagaggtcagaaaataggactcaataagcaaccatgcctggaggaatcaagagaaaaaagacacaataaagaaacacaaatgaacaacacaaaccagag

SEQ ID NO: 597172 - DNA, 274 bp, Homo sapiens
aaatccttcatgcaggtagaagcccaacgcttgcgggttttgttcgatgacgtccaggtactcggcattcagttcgttgatggcatagcgcagcaggcgcttgccaacaccctggccacggcgggtaggtgcgacgaacagcatgtccacccgcccgttggcgaccccggcgaaaccgcagatccgttggcggtccttgcagcaaatcagcatcactgcgtcgaggtagcggcgcagcacgtgttcgcgcagcagcaggatgtagccctctggc

SEQ ID NO: 597173 - DNA, 1130 bp, Homo sapiens
agcgggactgaaggttcgtgccctggcaccgccctgagtccccagtgcgctagctgactggggtggttgggaccgttagctcgtgcaggctggcaggctccggggcgctactccattggcggcctgggatggagactatgcgagcgcagcggctgctagcctggtgtgggcaccagcggcgaggggcactctccaagcgctgcggcccgggacggtgaactttggggtgcccagctgggctttgccccaacctggccagcaaatctcgcattgactagagtctccacctgtcccttctactcaacacacgccactgacctcgcgccttatccccacctgtctactccccactactatcacccaatacgccgggggtcctgccacctcgcttgtaaacactccttaggccacctctctgtacacaccccacaacccccgccacgtcggcccaaacaaggagcacacgcccccccgccccccccgactccaccacgaaatcgcagtgcaccccccgaccataacgaacgaggacgcccgcacgacccgcatccactaccacacaagtctgtccctacatccctctaccaacattcactcctccaacacctcaaaacctcacctcgcctaataaacccaccctcaccaccacattacacccgcaacagaccacccaacaacatgtctctcgtctcaaaccttacacaccgacaacacacgccctctacccccacgcctcggcataaccagcagtcggagacactaccagccaaatccttcttaccccaactcgtcgaggtgctttgaccaacgaccctacccaaacttgcggtagaccgaacaactacatacctcatgacacaatcacgccgccacctaagcacaactccccatctgacatacctagccaactgggctaccacctgcttcccagacaccataccgccaccagactctctgtgtcacaacacacaccccaatcctcaccactgacttcttcttagacgagcaccagacacacacctgtcccaacgtcacgcccagcacaaacaaaacacagagacaacgacctccagcttcggctcactagtcagatcaaccaccacacataccacgactcactgtccgcaaac

SEQ ID NO: 597174 - DNA, 476 bp, Homo sapiens
gaggatacacagtgaaaagactataaggaggaatattacatgctcaacaagcgtacgtgcatatggtttaataaaaaaaataaaaaaaggagaaaagtgttaagctgtaaacgagtggctccatatgccatatgtagaattccatccctctctgtatgcagccattgttgactatttttttgcatctttcccgatattgattaattacatgggcatatagaattatgtatcacatataaatctttataggtttgctgcatctgactcccccgatcctatttaatatcgtgtcaggacatacagatgcattttgttaatcaacagtgctacctttgcacttgcttatggcacaggcacaataggagcagttaagcagtagaaccatttactattttgagcagactgtttcttcaaaaggatgatgaactgatacgttttctttacaacctgttacgtttaaaaattctgttgacttc

SEQ ID NO: 597175 - DNA, 815 bp, Homo sapiens
  misc_feature (147)..(147): n is a, c, g, or t
cgcccttccccttcccgcccgctccccttttcccctcagtcgcctcggccttgcagtttttggctttcacccccaaccagtgaccaaagacttgaccactcaaagtccagctccccagaacactgctcgacatggacaccggtgtgnttgaaggtggattaaatgtcactctcaccatccggctacttatgcatggaaaggaagttggcagtatcatcggaaagaaaggagaatcagttaagaagatgcgcgaggagagtggtgcacgtatcaacatctcagaagggaattgtcctgagagaattatcactttggctggacccactaatgccatcttcaaagcctttgctatgatcattgacaaactggaagagggacataagcagctctatgaccaatagcacagctgccagtagacccccggtcaccctgaggctggtgggtcccgctagtcagtgtggctctctcatcggaccaaggtcggcatgcaccgatcaaggacaactacgagagagtacaggggctcaggtccacggtggcagggcgatcatgctacccaactcaactgaccgggccatcacctatcgccggcatcccacacagtccatcctcgcagctgtcgctcacacaacagcatctgcgtgcgtcaatgacgcgacacctctctccccagtcacccccaccgaagggccgtgaacccatcccacctaacacgggcccaagcacgcaccaagcatctcacgagatacatcatcacgccagagtggcgtcagcgacgcgggtacaaggcacacacgccagcgaccacgcgcaga

SEQ ID NO: 597176 - DNA, 846 bp, Homo sapiens
atgcaaggtcagtctggatgattactgtccttctgaccaagttgacactattcaagaaaaggtcctcaatatgctacgtgccctctatggaaatctagacctccaagtgtatgcagcagagtctcctccatcttgaaacaaacaaaacattaggctcctgtgtatctggtttagtaacaggcccttaattaacttatttgtacatgagtcttccagagaacactgttttatattaactttcagttgaaatctttcagatatttgaatctctgaacaaccatagtcagtgtgaatgatggtaaatttttggcatcaagtctcataaccccaactgatagaactgttgcttatctgtcttccttaagtatttttatagggttatagtgataaactaaaatggtacggtagagtagggttggtcttcacttttcccccaggtctgttgagctgtatgagattcattcatacttcatttattcattcaactaatatttgtcggaacacttacatgtaccagacattacttaagtgctgggatatatggtaatgaacacgaatcgacaaggcccctgccccttattaggggagacccgatgacgacagtaaataaccgggtactgagaacacgtaatgaaggcaaaggaccgacaaaccgaccatgtcttagaaactacaggcaccaggggactttatacggacagaaaagaacgccaacctctcaatagagcgacgccgaacaacacacaagcagggggccaccaccagaaagcccggcggcacaacgccggggcacaccagacaccagatcaacaccacaagcccccactcaaacaacaaccacacaaa

SEQ ID NO: 597177 - DNA, 143 bp, Homo sapiens
gttccctttttaaccatatacaactataaccttcataaaatttctcttcaaattctgtctgttacttttcagcacagatttataaaatagcatcctaaatttctgttttcatagcctctgttcctgtccatctgacccatctt

SEQ ID NO: 597178 - DNA, 584 bp, Homo sapiens
  misc_feature (147)..(147): n is a, c, g, or t
cgcccttccccttcccgcccgctccccttttcccctcagtcgcctcggccttgcagtttttggctttcacccccaaccagtgaccaaagacttgaccactcaaagtccagctccccagaacactgctcgacatggacaccggtgtgnttgaaggtggattaaatgtcactctcaccatccggctacttatgcatggaaaggaagttggcagtatcatcggaaagaaaggagaatcagttaagaagatgcgcgaggagagtggtgcacgtatcaacatctcagaagggaattgtcctgagagaattatcactttggctggacccactaatgccatcttcaaagcctttgctatgatcattgacaaactggaagagggacataagcagctctatgaccaatagcacagctgccagtagacccccggtcaccctgaggctggtgggtcccgctagtcagtgtggctttcattggaaggtgatcaagacaaggaatcgggaagtcagggcctagccagtgcagggtattcccactacttcgggcatcttttcggatcccaccttattgggttaacgatctggcattgg

SEQ ID NO: 597179 - DNA, 1287 bp, Homo sapiens
gattgacagcaaggcgtggcgggagactctgaccctgcagaagcagctgcggtacctgctttccctgagctggccagacacctgacacctgctactgggttcagtgttcatgccacacagctggatttctaccaccagctggggcagctgtgcagtggcccataaacaaggcagccgcctggcaagcgcagtacaggtgcttacaaggagccggcgcgtgaccaaggcatatacctggcatatggtaatgacctgcatgcgggaggacacaatccagggagacgccgggtaaaccatcagaccatgccatatggcaggaaacagcacggagggccgggacccacaaccatgtgcatcgagggctcgacaggattgtgagaacccgaaagccaagcctcacagattctcgataggtactggaacaaagggactgtacgacagagcgatccatgtcatccaaagatgcccgctgcacgccggctccacggtgcctgtgacaacaccaagaatgacgcagtgcactggcagttgacacatggagccaaacaccagttgaaaggggcgaacgctgacctaccggagaagtctcgaggcccggagagggcccgggcggatcagcagatggattgtaggagacagacattaaatacccttgcaggcaattccacccaagttggaccaccagaagatgtgtggaaggtacatgagacgccttggaaccaactaccatgacactaccactgggatgccctgatgaggagcccaccagcaaagtgaggccagatccagcatgtaggaccaagctacagtgatgccaaggcacataaagaggacaccaaacaacaagataaccagtgtaacacccggagggacaaaagagagcacaaaggaagagaacgcaccaaacgcgaaacatccataccgaggaagcacacaaacggcacagataccaccgaacaacaagaacaagataacagaacaacaagaacacaccgtacagaacaagaagcaaggacacgaaccgagaacaccgcaagagaaaaccagggcagagcgacggaggcgagctcacacgaggacacacatagaaacaggcaagagaggaagagaagggactacggaaagcaaaacgagaagaaggacacaggaagcaacaagaaacaaaaaaaagagcaggaagaacacggagaagaaacagaaggagaggaacaagacggcaaaggcacaaccggtagagacagaacgataaacaaaaagagtagggagcaccagcggcgcgaggaaaaa

SEQ ID NO: 597180 - DNA, 478 bp, Homo sapiens
  misc_feature (40)..(40): n is a, c, g, or t
ggatcacactgcaacagtgtgatgtcagagcatgttacanctccttgtgactggttgggtgtgagcacctgcagtcgtgtgatgtccgaggatgttacactcttggctgactggttggggtgagtacctgcagtagtgtgatgtctgaggatgttatactcttgtctgactggttgggacgtgagcacctgcagtagtgtgatgtctgaggatgttatactcttgctggctggttggggtgtgagcacctgcagtgagtgtgatgtcagaggatgttactactcctgctgacgggttggggtgtgagcacctgcagaagtgtgatgtcagaggatgttacactcttgctgacaggtaggggtgtgagcacctgcagaagtgtgatgtcagaggatgttacactcttgctgactggttgctgtgtgagcacctgctgtagtgtgatgtccgaggatgttacactcttgctgacaggttg

SEQ ID NO: 597181 - DNA, 360 bp, Homo sapiens
ccctcctccttttttcccaagcctttttccctgccatggcaaatttgagtggcttctttaagcatctgctgggacaagtcaatgtggccccatgagcttcatggtggcagaaaaaacaatagtccttagctttcctcccaggacaccccctacttggccagtttgtaggccaacaaaaaggttcctttacccccatgcaagacccttattagaacccattacaaaatggctgaccgtggaggatgagtggatccttaaaggttgtccccaactgttgatttggaaaaaaaataagcccataaataaccttattgtgtgttgcatggaaaggaactgaaaacatttgcctttaagcatgga

SEQ ID NO: 597182 - DNA, 236 bp, Homo sapiens
tcgcgcctccaggtcctgaatgcgtacgactgacggtacacgaagcagctggcgcagctcgacggcacattatcacccatcgcagttccagcgcgcaggcctggagaatagccaacagcaacaccgaggtgctcaagaacatgggctatgccgcccaggccatgaaggcggcccatgacaacatggacatcgataacgtagcatgagttaatgcaggacattgctgcccagcaaga

SEQ ID NO: 597183 - DNA, 1077 bp, Homo sapiens
ccacgcgtcgccacgcgtcgggcaggtgttcccatgcctctgctgctcctgctcatcatgggaggcatggctcaggactccccgcccagatcctagtccacccccaggaccagctgttccagcggccctgtgcacctgaccaggatgagctgccgagcctcaggccagaccaccatcccaccataccgctggttgtctgacatgggcagcccctgagcatggtgccccgcagagccaacaccacctcctgcctgatgggacccttactgctgctacgagccccctgcccggggacatgcccacgatggaccaggacctggtccacagaccatgggtgtctacacactgtgcaggacagcaaccaggccttggccacggcaggtcagacacgagtgcgctcagggctgtcatcgtggcatgtccatccgggacgcattaccagatccagacacatcgggacatggatggcatgctgcgctgcagtgacgccagcaatacccctgcgacatgctgagcgccggcccactggaagcccaacccgagagaccacacaagaacctcactagcatcggaacaagaatagggacacccccactcgacccatccaagaccccgggaacgcgaccacacgcaggtgtacacacaaggcgagcaccacacaggccaggaccgtggcccacagacccacccagcacgacagaaggtgcacgaacaacgggacgcgaccactggtggacgcagcgcaccacaccaacaagacgccaagaacacaccacgaggacgacgcccgacgccccacccccaaggaaaccagagccacacggaaacccccaggaccacacacgacgaacacacaggcagacaacgcacaccacgacgccgaagccaacactaccagcccaggcacaaacagacgacacacaaagaagcaccctccgacaacctacaaaacgggagccccaacgactaccccagacacacagcgacaaacccacagggcaccgcaccaaagcaaaccgaaacgaacgacacgaacaagagacaccaacacaaaccaacagcagcaaggcaccacac

SEQ ID NO: 597184 - DNA, 137 bp, Homo sapiens
ggaactatgacaaaaccattactctttcaggtcagaggtgcaatgactatagattatttaaaaactgaaaagctaagcttgagtggcccaaggatcagcaggaagtggtttatcttttttcggttggttggtttccc

SEQ ID NO: 597185 - DNA, 213 bp, Homo sapiens
gaggacttaagcactgggtaagcactggggaggaatctgagcactggtgacagggacgccctgcgccacgtgcagcccagtcggtctgtgccccgtgcgagtgcactgctggatcacagactccaagcatcttctattcgtgcgccgtctgtaccctgtgcgctgcgctttcccctagccgtcagcgagatgccccgtaaataatatgaaagc

SEQ ID NO: 597186 - DNA, 932 bp, Homo sapiens
  misc_feature (93)..(93): n is a, c, g, or t
  misc_feature (95)..(95): n is a, c, g, or t
  misc_feature (98)..(100): n is a, c, g, or t
  misc_feature (110)..(111): n is a, c, g, or t
  misc_feature (114)..(114): n is a, c, g, or t
  misc_feature (116)..(116): n is a, c, g, or t
  misc_feature (163)..(163): n is a, c, g, or t
  misc_feature (174)..(174): n is a, c, g, or t
  misc_feature (176)..(176): n is a, c, g, or t
  misc_feature (187)..(187): n is a, c, g, or t
  misc_feature (195)..(195): n is a, c, g, or t
  misc_feature (201)..(201): n is a, c, g, or t
  misc_feature (214)..(214): n is a, c, g, or t
  misc_feature (218)..(218): n is a, c, g, or t
  misc_feature (226)..(226): n is a, c, g, or t
  misc_feature (231)..(231): n is a, c, g, or t
  misc_feature (238)..(240): n is a, c, g, or t
  misc_feature (243)..(243): n is a, c, g, or t
  misc_feature (289)..(289): n is a, c, g, or t
  misc_feature (306)..(306): n is a, c, g, or t
  misc_feature (311)..(311): n is a, c, g, or t
  misc_feature (320)..(320): n is a, c, g, or t
  misc_feature (324)..(324): n is a, c, g, or t
  misc_feature (329)..(329): n is a, c, g, or t
  misc_feature (333)..(333): n is a, c, g, or t
  misc_feature (339)..(339): n is a, c, g, or t
  misc_feature (343)..(343): n is a, c, g, or t
  misc_feature (351)..(351): n is a, c, g, or t
  misc_feature (369)..(369): n is a, c, g, or t
  misc_feature (383)..(383): n is a, c, g, or t
  misc_feature (403)..(403): n is a, c, g, or t
  misc_feature (410)..(410): n is a, c, g, or t
  misc_feature (419)..(419): n is a, c, g, or t
  misc_feature (434)..(434): n is a, c, g, or t
  misc_feature (455)..(456): n is a, c, g, or t
  misc_feature (493)..(493): n is a, c, g, or t
  misc_feature (498)..(498): n is a, c, g, or t
  misc_feature (509)..(509): n is a, c, g, or t
  misc_feature (525)..(525): n is a, c, g, or t
  misc_feature (857)..(857): n is a, c, g, or t
  misc_feature (867)..(867): n is a, c, g, or t
  misc_feature (884)..(884): n is a, c, g, or t
ctgcagcaccggcaccgtttccaggaggcctggcggggtgtgcgtccagccgttgggcgctttctttttggacctcggggccatccacaccgngnccnnnccctccggcnncgntncccgcctcccccgcgggccctccccgcggaggtccctcccgtccgtnctcctgctctntnctccgcgggcngcatcgcncgggcnggcgccgcgcggngggngaagctgnacggnttgagannnacngctcttttcctctgctccgggctcgcgaggccacgcgtcgccgctngagagatgatgcaggangtgtncagctcgcnagtntcgcnggcngacganagcntgagcaanagcgaggaagagccagancggcagcagctgcngagcggcaagcgcgggggangcaagcngcgcagagnaggtgcaggcgggcngcggcgcggggcccggcgganngggtgggggcgtcggaggcggcgacgagcgggcagcncggcncagggcaagcncggcaagaagtctgcnggctgtggcggcggcggcggcgcgggcggcggcggcggcagcagcagcggcggcgggagtacgcagtcttacgaggagctgcagacgcagcgggtcatggccaacgtgcgggagcgccacccaccccagtcgctgaacgaggcgttcgccgcgctgcggaagatcatccccacgctgccctcggacaagctgagcaagattcagaccctcaagctggcggccaggtacatcgacttcctctaccaggtcctccagagcgacgagctggactccaagatggcaagctgcagctatgtggctcacgagcggctcagctacgccttctcggtctngaagatgganggggcctggtccatgtncgcgtccactagcaggcggaccccccaccccctcagcagggccggaga

SEQ ID NO: 597187 - DNA, 350 bp, Homo sapiens
ggtcgacctttgctcaaaggacaagggaaaagggagagacaggcaacccagtctaatacaatatcatatgtgttatagtaaatacaagtacaaggttaactactaggaaggcaggaagcagtgctgcttagttctttcagggcatactggatactttcacaaagacaaaaagacaagaattttgtttctgtcttgaaactaatattcattgaggactgactgtgttgaacactgggcacatatggtcacatgtgactgaaaggaggagcaggttatttcagagaggggagcctaaataaaagctggacaatttcagtgtatatttttactccaaagtgctgttggatttc

SEQ ID NO: 597188 - DNA, 379 bp, Homo sapiens
gcttattctgtgtagctagaacagatccaacagaaatcctatacagaaatccttcaactgaaaaaaataagaaagggcagaattcagctgtgggccaattcagactagcagtcccagtttcacccttcaagctgaaacaactaagaaaaccaacatacgacatggaaccccagctcaagccactggacagcagagggaggacggcagggaccctggagaggctgcagacgaagcaagccccatgctcccggctgctggctggaaaggggcccatgtgaggagggctggggccacccagactgtgcacagccacagaagaacacaggttctaactggaagctgctgctcagatgggtgattaaacactgctctaacctaa

SEQ ID NO: 597189 - DNA, 145 bp, Homo sapiens
tacacaccccaccatgtcagcctacacacccctccatgtcagcctgcacagcctacacaccccaccatgtcagcctacactcccctccatgtcagcctacacacccctccatgtcagcctacacacccctaaatgtcgtcgacgc

SEQ ID NO: 597190 - DNA, 370 bp, Homo sapiens
agatccccctttccatccatgtgttctcattgttcaattcccacctatgagtgagaacatgtggtgtttggttttttgtccttggtgatagtttactgagaatgatgatttccaatttcatccatgtccctacaaaggacatgaagtcatcattttttatggctgcatagtattccatggtgtatatgtgccacattttcttaatccagtctatcattgttggacatttgggttggttccaagtttttgctattgtgaatagtgccgcaataaacatacgtgtgcatgtgtctttatagcagcatgatttatagtcctttgggtatatacccagtaatgggatggaaagggggatctgggtaccgagctc

SEQ ID NO: 597191 - DNA, 108 bp, Homo sapiens
tgctgggattacaggcatgagccactgtgcctggacaaaagtgtcctcttataaggacatttgtctttacatgtagagcctacctaaaatactccagggtggagagag

SEQ ID NO: 597192 - DNA, 818 bp, Homo sapiens
tcttcaagcataattacttactgacttttcctccaaagattggcatgatatcttttgaaatttgtttccagatgcacacttaagttgagagcattgagtgtcgtgctttttcttttttgactacagctgatagtttgtcaaccccgacgacgtgggtgttcccggcacctggtcttggtgcgacttgggatgtctcctacgataggttggtcctgtggtagtcgacagcccgggatcttttggcgcacctggattgaattggccctttttcttggacgcttgacttattgtggagccagtgaacggatgtgatggacttgccttgttacacatggaaaacggggaaataccctctgtgtttccggcatcagacgggacaccaaaatcttctgggtgcatctcggggggcaccccctggtaacataaaacgttgtataaaatcacttcaaatcactattcgcgcggtggtccaccaaagaggagtcgctaacatatagaaggggcgcagttcttttcgattatattttaaagaacctctttggaacatattatcgacgactttattttcctaaacattacgaaagctaataggtcgccgggcataccattttcttcaacgccttctggcggcgagtctaactctgcgcggtgaaacccccaggtgttacgaaacttgaatgtgactcgtgcacatgtgggtgttatatcgtacgtcataaattggtggacctgtgcgaccctctttgggggccagtgtctcgcgcttggggcatttggcgccatttccagacttttacccctggttgtccctcggagac

SEQ ID NO: 597193 - DNA, 527 bp, Homo sapiens
atattggcttggacgagttgtggatgcagcgcaccagcatggcacatgtatacatatgtaactaacctgcacaatgtgcacatgtaccctaaaacttaaagtataataaaaaaaaaaaaaaaggaaactcatctcactgcttgtgcttataaaggaatctaattgagacaaagactaatggggagtccataggggagagtccataggaagactgcaatttgagcgatgtttcactatgagtgtccttctgcttcttctttctcagtccctcttcattgacaaatgactttggtaaaatacgggactcacattagggaagcatcccaaaaaaatccccatgcctggttaatcatcacgccattaaatcagaatctctgtgggtccaattatggcatcaatagttataaaaggccaggagtgttgactcacgcctgtaatctgtttaatcctagctgtgctgccagttgattagatggtgccacccaggttgagggtggttctgtctctcccagtccaccaatatgggt

SEQ ID NO: 597194 - DNA, 145 bp, Homo sapiens
  misc_feature (89)..(89): n is a, c, g, or t
  misc_feature (108)..(108): n is a, c, g, or t
  misc_feature (134)..(135): n is a, c, g, or t
cagtgcagaggtatcactgttgccagcacttgatctagaatcctagattctaggtctggttagtagcagatttactaggtggtagatcntgaggctacctatagaacnttcccttggcagtcataattagctcnnagaaactaca

SEQ ID NO: 597195 - DNA, 100 bp, Homo sapiens
tgctgaggtctcggtggactactcagtacaagcaaactggattggatcaacagcccccggaaagagggaggcttgggcccctgaacatccccactgcttg

SEQ ID NO: 597196 - DNA, 488 bp, Homo sapiens
agaattcaccctggctggcgcgccagcctcatccccaacatatcaacaggcacacaagatcactcagtgtgcaaactgtggctgatcccttgagctagatcctctaggatctcttgcctggtcaaagtataagcatgctgttttagcaaaagccagggttggcattgacagtacctgcataccactttaaacactgaccttatgtcagccagaagaacttggaaaatgccttgtatgaggatcctacggtgaaataaaggtataagtccggtaaaacatggatagaccacatgcaggataatgggatcggcaatatacagggagagaccaaaatgaacatatatggtcactgtgttccatgcgccgatggcctagtgcctgattccagctatgattccctctgttacaggaatcaggagaaagcttaatttaggctctgtcactcaggcctgattttctggcgaaagtagcatctgcgctgagccttg

SEQ ID NO: 597197 - DNA, 940 bp, Homo sapiens
gctggggtcgcgggctgcgcgctgtcgtttctgatgtgggcgccccgccggtattttttgtgggcccgcagacgagtgtggccggcttgtgggcgttatgtgcttctggtgttggggtgcccgccgcggggatgcgccgctccatgagggctggttacccgttattgtattcccccccgtgggctctttcgtgggcgaatgtacacgcagcggttgtgtagtgcgggggcgtggctctcaccaatcgagtgcggtcgcccacggtttgtcgtatagtgattgtctgcgtcctcgaccagcttgtcgacttgtgttgtggagtacgcactgtcggtcgtcgtggtggggcatcaattccaaagaattggagtggtgctctggagtgatgcgtatctgcccgcgcggtagtcggttcaacgacgcggtgatagtatttgttggtacagaacaacgcagattcccgcctggagtgtgtgagacgacgccgcacttagttgacggttgtgtgatagtaagctcactagagccgcgctcctctctccgggcgtgtgtgttgttacgacccgccacgcgctcgggtattaaacgcgcacgaagtgcacttgctttgttagttgcatcaagagttatcagtcatcgaacagtttttgtatgaaacaaggcagcaggtcttctttattacaaaaaataatatagaggcaaaagaaataattattcttcgttatttctaacatgtctgtgtgataagctttcacctccggatcctattggtccctgatatattcgtgtatccctccccacttattaatgacacacacgaccccattgctaaacaacctgtctttcccacacatccctccccctagtctcaaccccttccggcggtcccccacaatctcttaccacctctgcaaaaaacaaaaaacaaacaaacataaca

SEQ ID NO: 597198 - DNA, 469 bp, Homo sapiens
  misc_feature (290)..(290): n is a, c, g, or t
aaaagctgatgctgagaaaggcctccctggggcccctcccgcgggcatctgagagacctggtgttccagtgtttctggaaatgggtcccagtgccgccggctgtgaagctctcagatcaatcacgggaagggcctggcggtggtggccacctggaaccaccctgtcctgtctgtttacatttcactatcaggttttctctgggcattacgatttgttcccctacaacagtgacctgtgcattctgctgtggcctgctgtgtctgcaggtggctctcagcgaggtacgggngagggcgtaccctgcataacggtaaattgacccatccttatcctgctgagccacagctgtttacctccttgcataacttacatggaatccttactaattaagcatttcctctggaatggccgtcccctggtgtttttttattgatcagttattaaaaaatgcaggtttccccctgtgcc

SEQ ID NO: 597199 - DNA, 785 bp, Homo sapiens
gcgcgcgcacctaccgaggcgcgggcgctgcagatggctcccagcccaagcctgagcctgagacccgtcccgaggtcctggtcccgtccgtctgggtctcttcgccggtagccgtcaggatgggggacgagatgtattcacaagggactcatcgcacagagaagaacgacatgggcatgggcacccagcgcgcgcgaaccgtgggatgagctctcggacgcacaggcagggtggattactggactgaagccatgacagcatgcgtctgctgggatgaggctcttgacggcaccactaccactgcatgccgtgtctgcttccggtgcgacacgccatcagggcaagacaggcccccccggtgatgtactctcgttgtgcccacggcgaaattgcgggcgcgtgacatcgccaacctaccaccggtcgctaatccgacccttaaccctaggcccctcccacggtgggtctcgacagtcctctcgagccgtactgggctccttgtcagagggggacctcccgtacccacgttgccttgccctcgttggactacggcgagtgccctaacttcgctcccttgggcgtttgcccttgagctcatcaacgtgcggtaacttcgccatgtgccaggggccaagcgctggcgagggacccccagaccgcgcgtcctcgcgtttagcaccgacagttcgtggctctgcgctttgaggtcactttacgctgggcgtggccctgtgggcttgtggggcgttgtttgccatcttgcttggggtctccgatttttgccg

SEQ ID NO: 597200 - DNA, 280 bp, Homo sapiens
gttttccagggcagccttgtggattgggaccacttcctatatgatccttggtcttcccgttgtctttgagacggaagaggttgcaaatggaagcaacagcagcaactgcaggagcggcagatactcctgaggccccacacagggtctctcagggaggaattcccaagggctctaccctcactccctcggaaagatctagattgttatgcgtgctttgagctgtctcagtgggtataggtttgaaattacaaggtgtttgaacctgctgataattgtggat

SEQ ID NO: 597201 - DNA, 257 bp, Homo sapiens
tggggggggccttttttttcccggggccccccgggggggggaaacccccccggggcccccccccccccccgcccgaggaaaaaaacctttcttctctcttggtgttgggggggagaaaaaagaagggagaggagggggggagagcaagagggtccctttattacttattcaaaaaaacaaacaacaacaaccataagttattgtgtagaggaggagaatataattaaaaaaacaaaaaaaaccaatgaaactaacaa

SEQ ID NO: 597202 - DNA, 151 bp, Homo sapiens
  misc_feature (45)..(45): n is a, c, g, or t
gcaaggcctggccgacaacacccttattgctaaagtaaataatgncgcgcggggcctggaccaccctctggaagaagattgtaccttggagcttctcaagtctgaggatgaggaagctcaggcagtgtattggcgctttagtatcacataa

SEQ ID NO: 597203 - DNA, 299 bp, Homo sapiens
agtatggatttatgtgtatgtgtgtgtgtagtttatcctctctctcatctttatctagagattgactgatacctcatgctggttgtaaaaccagccagtaatttctgtgcaaccttactatgtgcaatagttataaatcctgagaaatgtatgcatctcgttatcggatagacaactttctttagttctgcacttttccaccttgtaaaccatatgagtattaatcctatggatacatattaaaacaagtgtctcatacaacattgtatgtgtgagaaatctaaatattaacaacctga

SEQ ID NO: 597204 - DNA, 259 bp, Homo sapiens
accctctgaaccgttaaggtcggttcatcgctgcctgttgttgaagcgttgaaactaaagagcgtcggcatccttgccggtgttgcctggcctccctgccatcgcttcgatggcgtccttgccgatgttgcgtgccttccttgtcttccttggcagcatccttgccgcctccaccaggccttgttggctggcttgagatgaagaatatgcatgtatgcatatacagtcaatgcacaaatgcatttatttttgctatagg

SEQ ID NO: 597205 - DNA, 276 bp, Homo sapiens
taccgcccacacacttcaagagaaaatgaaataaattgcagagtaccctggaaagcttttataggtacataaaatattaaagtagtggattttatgaaaatcagctggattataagattgaataccattctgttaaaaagtggttttatggctgggcatggtggcacatgcctataatcccaacactttgggacgccgaggcaggcagatcacctgaggtcaggagtttgagaccagcctgaccaacatggtgaaaccgtatctctaataaaaata

SEQ ID NO: 597206 - DNA, 326 bp, Homo sapiens
ttccaatttaaagcccagttttcaaaccaacccccatttttttttcccccttttaaaggaaaagcaaacctgtggattaaaagggttttggccctggggattcaacccaattttccccccaaaatttccggggatttgttttaaaacccgccttccagggggccccaaggggcggttttaaaaaaaaaaattattatttttccgggaaagggattttgaataaaattccctttgcagcccgttttccaaccaaccaaaaggaacagggggccttaggttaacttttagggcttggcccaaccccctgtgttgggggtttcccggga

SEQ ID NO: 597207 - DNA, 1003 bp, Homo sapiens
cgtattatatgtgtgtgttttgttggttgatggttgtcttttgtatgtcgtgttgtgttccgtctgtcgcctccggttttatgagtgtgtgcgagaattttgctggcggcaggacttcggaccccgtgggggaccgctccgcctctcgggttacccgccggtttttacgcctccctattgggcgttcttcccttctggttgggggtcccatcttctggccggaccccgccccaattttttgtgcgccactatatcgaggttcccttcccggtcccggccatttcccgggttttctcccccctcccccgcggggtaaattatggacatccaacgtcaacgtggcaatctcaggcacggagccggcaatttaaatcagggtgaaatttgattgcaggcgtcgccaggtcaatcttcatgtcggggcagaatttagggtaggaaatttcaggggcggaacagaccaatactgtagcatgcaacatcagtagcaggggcacacattaaacatgcggcatcggtgagtcaggagtcgccctcgagcgttggcaatactacagagtgtcaagatcgagagaatatacgtcagtgactcatactcgagtcaggatacagagagtctgtttcataagtcaggtcacgcccacgaatcagtgcagcgcaccatacacagtgacacgagtgctcatgcagaggatcagtggtgaagtcgagttcaatcgaggtatcatacatcagggcaagctgatgagcagtgggcatgtcagtggagcaggagcgagagaggagcaggagcagacaatggtcaggggcagttacggtcagggaggagccatcagtcataatggcaatacatacaaagatacaatacatcatgtcgtaatgcaagattcagatgttcaatataattcagagtgtcaatggtacaataaataagtgagcaataatatgtgaacatgtacagatcaaaatcaagggcaagaaaaaaaacacaaaaaacataaca

SEQ ID NO: 597208 - DNA, 320 bp, Homo sapiens
aaaagtccaatccacggccgatatcttgggtgacgaagaaggagatctgttcaaagaaaagagccgtagcatcgccagaagccacggtgagtcagacagatgaaaatacagcagagagcagaagagaaagggttaccttatcttccagcaaaaatctcaagccctcatcagaaacaaagactcagaaaggcttattttcagatgaggaggactctgaggattggtttcctatctcaaagggcgagtaagttagaaggtgcatctctgcgggcgggcaagctccccaggtcggtttcccggttggatggaagcgtcgcgca

SEQ ID NO: 597209 - DNA, 135 bp, Homo sapiens
gtgggccggcgcgcaggtgtgcaggtcggtgtgtgggctgcgcaggccggtgtgccggccggtgccgggccggtctggggcacgggcatgtctgcaggccgccgcgccggtgtgtcccgcccgtgctgccggcat

SEQ ID NO: 597210 - DNA, 1010 bp, Homo sapiens
caccttctacaatgagctgcgtgtggctcccgaggagcagcccgtgctgctgagccgagggccccctgaatcccctaaggcgcaaccgcgagaagatgacccagatcatgtttgaaaccttcgagacaccccagccatgtacgttgctatccagtgctgtgctatccctgtacgcctcatggccgtaccacttggccgatcagtgtatggactccggtgacggggtcgaccgcaacgacatgtgcccatctacgaggggtatgcccatcccccatgcccatccatgcggtctggaccatggtgtggccgtggacctgtatctgagctatccctctatgaagtatacctcaccgtagcggcgggagcatacaagcttcaacagctacggtcgccagatgcggggaaattcggttgcagctgcaccactttatggggatgcacattctggtgactcaccgatcggtccccctgggaacgtttctgaggcagaggacgcattgggcctcgaccggtccttgtcgtctcccaggcgtcacttctccctggcatgcacatgatgactaccagaccgtcttgtcactgtaccgggcaagggtacattctaactccaatttgtgccaaaatcgcacgactgcggtctcgcaggcaaggcactcgtggaggagacagctgcctttgcccacgaccatttaccgtttccattggagacatttggtacgctccctgtttgaggcaatccacaggatataacatacgcgttccaagctcccatttcaaatgagatgtgttgcatcagtgagcacattcccaggcgatgatgatccatgtatctgccaaacaatgacgttcgtctgttgctcgcgggatgccacacgagggatagccccttgggcgatggccagaccagtggattgcccgatagggagaatcaacttggcccctggttaccccatgccacaaatgcacgaatccaaggatccattggctcctcactggagcgcaaggtactc

SEQ ID NO: 597211 - DNA, 771 bp, Homo sapiens
ggcagtctgcccgttctcagatctccagctgagtgctggaagaaccactgctctcttcaaagctgtcagacagggacatttaagtctgcagaggttactgctgtctttttgtttgtctgtgccctgcccccagaggtggagcctacagaggcagtcaggcctccttgagctgtggtaggctccacccagttggagcttcccggctgctttgtttacctaagcaagcctgggcaatggcgggcgcccctcccctagcctcgctgctgccttgcagtttgatctcagactgctgtgctagcaatcagcgagactccgtgggtgtaggaccctccaagccaggtgcaggatataatctcctggtgcgcggttttttaagcccgttggaaaagcgcagtattcgggtgggagtgacccaattttccaggtgccgtctgtcacccctttctttgactaggaaagggaactccctgaccccttgtgcttcctgagtgaggcaatgcctcgccctgcttcggctcacgcacggtgtgctgcacccactgacctgggcccactgtctggcactccctagtgagatgaacctggtacctcagatggaaatgcagaaatcacctgtcttctgcgtcgctcacgctgggagctgtagaccggagctgttcctatttggcatcttggtctccccccgtaatgtcttgataacatcttaacagcagaaaacggttgagaccagaaattggttgacccagatttccagggcggattttcccacct

SEQ ID NO: 597212 - DNA, 135 bp, Homo sapiens
ttgaacgagacgacctgcgcatggagccatccgcaggccagcacatcctgcgcagccagaagcctgtgatggtgaagagcaagcggaccgcccaccaagagctcctgagcccccttgccccaaagtccatgtttc

SEQ ID NO: 597213 - DNA, 363 bp, Homo sapiens
ttcatgcagtgagtcttgacttgctgagctgggaaatggggaataagggacaggttttggtttggtttggtttggttttttgagacggagtgtcgctctgcagcctctgcctcccaggttcaggcgatggtcctccctcagcctcctgagagtggctgggattacaggcgcctgccaccacaccgggctagttttggtatttttagtagagatggtgtttcactgctatgggacaggcttgtcttgaactcatgatctccacccacctgggcctcccaaagtgctgggtttacaggcataaaggggacaggttctctggaggtgtgaggtgcctgtccagttaggcttttggcacattttcag

SEQ ID NO: 597214 - DNA, 824 bp, Homo sapiens
tcgcagcgcggtcacactgccccgcaacggccgggaccaggtaggggctgcgaccctgtggagaggccccacttgttgggcctggtgcagggtgccagcctggcgctgcgggcctgcaacccgaccgcactcatccctctgcagcctgtgcctggtgtgccctgctgctctgtgcctcctgccagccccactgacgcctgtgcagcgtcacccgaagcgtgcacctgctgcgcccccgccggtgagcgcggggagcgccgcaatgcccaacgccgggggcagccccgctccggtgcgccgccggccggaggcctcgccggtgcagaaaaaggagaagaaggacaaggagcgggaaaaccgagaaggacgaagagtgccctaagccctgggtagcgcaggcctcaagaagcgccagtcggctgcccggctccccacgttgacccgcctctccggcagcaccgacctcttgagctcaggcccaaatccaaggccaggccatcctctccactccaaatcctggcacaggcctgcctcgcccttgcccaaggccaggaccaagggcgacactctgcctccaaaggccaaccgatccccccgaggtcaccattgaatcccccaaggcgggcggggattcgggaagggacagcgcaggacgcgcaaaggcaagagaccccgaggacgacgcggaagtgagccccggaggaacacgcgaccccgacacggaacgcaggagggggccgagctaaacggagggacggtgcagacaggacccggcggcatcaccgggcaccaaccgacgtgggccagcccgggccagaggcaca

SEQ ID NO: 597215 - DNA, 141 bp, Homo sapiens
tttctctaggtttttgagggcggtaataacccaggaaagaattctaactttctgatagaggttttcagaatgtctgtgttctcatctttatgttggctagatctgcattgaagttcatttgtccttctagatgattctgtc

SEQ ID NO: 597216 - DNA, 859 bp, Homo sapiens
  misc_feature (579)..(580): n is a, c, g, or t
gggaacatggtgttcaatgaacaagcacaagcattggaaatgctaaaattcagttttgcctcaagattggaagtttattttctgactcattcatgaagtcatctattgagccaccattcaattattcatctattaattccttgatccttcatttatccattctgcaaacttttcttgagcaccagcacgggtggccatttgtggacttctcttcattcctatgtgttttcttatcaaagtgatccactctcgaaaggctcctttccagtctgtggttgggttcaagtcatgccagggccagggggcccatctcctcgtttagctctaggcaaaatccaggggatctgcagtggggagcgggggcaggaagctggagggaaggcctgtgaagggtagggatgtggaaagacaaggtgacagaaggacccaataggacctttctatatctctggcttagcattttctacatcatattgtaatcgtcttatttgctagttttcttccttactgtgagtgactaacagtcatctttatcccagtgcctggtacataataagtgatcaataaatgttgattgannaaatgagtaaatagttaattctatcattacaagaaaagcagtggctaggcacagtggctcatacctgtcctcccaggactttgggggaggctgaggtgggtggcatcgcctgagcccaggagtttaagcactagcctaggcaacatggtgagcacctctccctggaaacaaaaaattagctcaggtgtggcggtgcacaccctgtagacccagctacttgggaggctgaccacagcaagaattgcttgcaccctgggcaggcagaggttgcagtaagct

SEQ ID NO: 597217 - DNA, 704 bp, Homo sapiens
gatgtcctcgtgactcagcggacggggaacttctgcatgggtggttcagatggtggctacatcatctgtgatgatggaaaccaaggccaccgtattgtggccagtggaaagacatctagatacttatcagcacttctgacaaatgtaactgctttactcatattaacctgaagtcgcagtttatactacatgttagtgtgggtgtctgatctagggtgcccacaactttcaatgcactttgacaaagaaggtcctaataaggaacccagtgtcatggtagcagtacctccctaaagcattttgaggtaggggaggtatccattcataaaatgaatgtgggtgaaggcgccgtaaggagttctgctttgattctctggagtaatactgtacgatactggtcttagcttgagtaatagaacatcgatgagtgggcgggacctttgatcttcctaagaattaaagttgccgaataatactgatatggtctttaatctccttgtaagtcgtttgatatatattacttgtcataagatggaaccgcatgagttgtctggctgttgcttggcatcccttgacacagcacatcccatctccagaccatagatgctatccatatcctcccgaccgatgtacattgaatcaatggtgcaggaccagaaaggccagtcagactattttccttctatcctcgcacacttctcccc

SEQ ID NO: 597218 - DNA, 113 bp, Homo sapiens
  misc_feature (75)..(75): n is a, c, g, or t
  misc_feature (99)..(99): n is a, c, g, or t
gctgctgtctgtactgtagacggtccatgtatcggatttaacaaagaaagaacttcttttaaagaaagaaaagangaggaccctcatacaactctgcanaaaacaccaacaac

SEQ ID NO: 597219 - DNA, 220 bp, Homo sapiens
  misc_feature (173)..(176): n is a, c, g, or t
  misc_feature (179)..(182): n is a, c, g, or t
  misc_feature (185)..(186): n is a, c, g, or t
ctcgtgcaatttcagcacgaggaactcctgacctcaggtgatccacctgccttggcctcccaaagtgctaggattacaggtgtgagccaccacacccggccccagagtaatggtttcttgactttctgtagcccttgttccttagtctgctgtgatatttatgttgacctttnnnnttnnnnatnntgacctagatgggctctgtctggtcctgtgccgg

SEQ ID NO: 597220 - DNA, 226 bp, Homo sapiens
atgcgcaataaggcccgcaagaatgctcctggcggaccaggctgaggcccgcaggtctaagaccaagggaatgcacgcaagcgccgtgaagagcgcctccaggccgtgaaggaggagatcatcaagactttatccaaggaggaagagacaagaaatagaacctcccactttgtctgtgcatactggccgtctgtgattacatagatcagccattaaaataaaacaa

SEQ ID NO: 597221 - DNA, 439 bp, Homo sapiens
gttctctgaaatctacttaagaactggcggtattagaaatattgccaatgccactttcgcttcaacttccagagttccagagggaatatctttataaataaaaagcatgagcatcctttgtgaaggaacataatattctctaaaggttgggatccactcatcaaagatagctatccaaaactacatcataacagaaggcaccagaaaatacaggaacttctggagctctgaccaaattgaccatatattcatctaagaatgccctctctatcacacagcccatcatcatagcacaggaacgccaaatatgccttatacacttctcctggatcaacaatctttgaaaagtaagagatctaatttcacaggactaagtaaaaggcttatacatgtcccaaggatgtccatccaccagagccaaaatggacttcctgcaata

SEQ ID NO: 597222 - DNA, 108 bp, Homo sapiens
atgtcctgccgtagctggtgttggacagcagcttgaccacctgtgcccgcgccgccgtgtcgccctgggcggcagcgtcgtacagcggcttgatggtggtcatggcca

SEQ ID NO: 597223 - DNA, 257 bp, Homo sapiens
ttgattggtctgctaccccttcttgaaaatgcttagcgaacggcatgaccctctgccatcagcctgcttttcagacatatgaatgttctcagactcgaccaattagaccctggggaaaggtggagagacggtacctgcggtcgccattccccttgttatttctatttgagcgaaatatgttcaaacatccccttttactccgctgtggacaaaaattccctgtaatgttggtgtaacattttgcgtaattggggttt

SEQ ID NO: 597224 - DNA, 242 bp, Homo sapiens
tgagccgggtaggttgtatgggtttttataatatttattaaagaaaagttgttggagtttgttggaaggttttagttttagtggttgttaatttgggccaagaaatttgtttttttggttatttttaacaagttgttttaaagttttgttgaattttgttgtttaatttgggggttgggtaagggttagatttccggtggttttgtgtttaaaattaaaagaataagtgtccccttaaaatt

SEQ ID NO: 597225 - DNA, 221 bp, Homo sapiens
tacatacaggatcccggtcttggggcagtacggaataatatgaacagggtagtgttaactgtcgagtttgttagaacaatgccatagcctgtgtgctgccgtgactctgcagtgctttcctttctgacctggagaatgagaacagtgttcagaagccagaaggggaaagagcgtgtccctctcggagggcctgtcttctacgaggcctgtggttcctaagg

SEQ ID NO: 597226 - DNA, 352 bp, Homo sapiens
ttgacacacgcgaaaggtgtgctagactctagatatcagtgtccggctcgaatgggaggaaaagctgtagtttgaggcactttgcagggctccaagggggctacagagacctcagggaagatcacgacaagaggagttggttggacctaggtaaggcagccttatatttttgtgcatgtttttgccttctagattgaacaagaaaaaaaaaggatgtcaaccatgaaaaagtaacaatttgtgctaaaaataagtatagcaagttacatgagttgaacagtatttttttccaagtcatctcaggtcttttcattgtcatatttccaatctcttcacattgattaaaagcttc

SEQ ID NO: 597227 - DNA, 242 bp, Homo sapiens
aagtcccaggtgggcggatggtttgagcctgggagttcaagacccagcctgggcaatatggaggaacccccttctctactaaaaatcaatatcttggctggtcatggtggtgcacacctgcggttccagtaactcgggaggctttggtggggggatcgcttgactaggaggttgaggctgcagtgagccatgattgtgtcactgcactccagcctggacgacagagcgaaatcctatctcaa

SEQ ID NO: 597228 - DNA, 158 bp, Homo sapiens
cctcaccagccctggcagaagcaggaagcagccatttgcagaatcatgaaggcatgaagcagcgaagccacattaaggagctaggagatgggaatagctttgcgaaaaatgggcgcaatggccaagccagattgtatcatcacttgtgatggtaaaaa

SEQ ID NO: 597229 - DNA, 369 bp, Homo sapiens
cacacacacacacacacacacacacacacacacacacacacgggatctgtctctcgttataaccagcagaggggtgtttgatattgtgagagtggcacactgaccttgaattttctgtgcacgcgcttacacaaaaatattaagtggtttattatatcatggcctgagagcatctgtgggggtgacatacagagactgtatatgtccaacaggagagtggcgtgaccgcacagtgttgacagcttgtgagtgtcagacacaggtgttttttttctctctcaggagacacacctatgttagagagaggggagaggacacagaagacagggagagtctatgatgtaggtctgacaggtgcgccaagacaca

SEQ ID NO: 597230 - DNA, 1450 bp, Homo sapiens
ggtgtggtgtttcttgtgttgtgggtggcgagaaatatgtggtggtgtggtatgttttgttcgttcctgcgttgttgtgtcggcccccgtgggttgtgtgtcgcgcccccgcgcgggtctggtttgtttgtggaagggtgcgtgtgggggggggcccccgccgtcggcttcccccccccgtccgttgttttttgtataacgaggtggatcactactcaactgtcttccgctggatttgtctctcccctgcgctgtgtgttcgttggtgggggtatggtagcgcactctacgccggcgccctcgctacggtggtttgagtatggagttttttgtttttgtgtaggcggcccccaactgttttttcttgtgattaccgccttcctgctagtggtgtctgttttctgctgccagccattagtttttcgcccctctacttattggttgttggtgttgggaagaaagaggcaggggggtgtctcaccatgtgagggttcacctgccgacccgtcgcttggttgtttattaagtcccccccccccccagtccaggcgggtgggttgtttttttgtttctttctgtgtggagggggggggaggaaccaacaaacacaggaggggggggtggttggtggcttcttacttctggggtgaaggaaggagaatttggttgtccaccttcccccccccccccgcgggggggggagtcgcccccccccctccctcctgctttaatctgttgttggttctgttaatggagaagagggggtcgtcgttgtctcaccaccggctggtggttggggacaagcacaactagctggttgttcctccacctgcttggtggaggagggagctgcttgattttgtcggggcgtcgccgacaactcatcttcttctggggcgacacacttctggggtgttgtctttctctctctgtgggtgctctcaacacactgctggtgaggacacctctgctgtctgttgggtgttctcacagagggagtttgggggggttctctctgtgcgtctctctctgtggagggagagccccgtgggtcacactctctctctgggggcacactctgtgggcgcacacactctctctcgggcgacactctatagagtgtgttttccaccacatgatagagtttctccactgtttcggccaccctcgggcacagcgccccccagcgcgcccacatcccggattagagcccacaagagagagagttcttgtgcggccccccagagaagagagagagggttgttttcacccccagagccgcccctgtgctgttgcttgtagagggctgtgggtgtgacccgctcccataggttctaacataggagccacctgctgcgcttttctacctttgggacacttttgtcccaccccaagatgtaacatttggtgggcacatcccataaaatcattttggggggagaaaaaataa

SEQ ID NO: 597231 - DNA, 742 bp, Homo sapiens
cccgcgctgggtgtttccgcccgggcgggtttttgtggtgggtatagcccccgctggtcttcccccgcccctttatcgcttcgcttgttgtttgtaacgacgtggcgcgcgtgcccgccttggacgtagatctctgggtcttatatatcggggcgcctcctccctctttatatctgggcgcgccttattatgtttctgctcgctcgctccagtgccgtcgcgacgctcttgctctcgcgggcctcgctcctcccgtagaggtccctggttgtggtggctcgctgagtggtagacctcgtgcgccgcgcgatagatagctcttcctcgtttgttagtggctacgtccccttcttatgtatgcgcgatgttgttgtctccgctgtgcgtcgcgtattcgccgcgcgtcacacattgttccccgcgcggtgattttcttctgcccctctcttttcgcgcgcctcgcggtgatagttgcgataagatttctctcttatatagtgttagaagagatgcgccgtcccgcgcttaccccgtggggtggcgactctatctttgtgagtgtcccccctcctccgctttccccaccctcttctgagtaacactccgctatacatccacttatatcttctgtacccaacaaaacaagaagaagacttctgaccccccccaatacctgtggttctctatcacaccaaccccccggccctcccctagacagttttctcccaacaaataaaaaaca

SEQ ID NO: 597232 - DNA, 151 bp, Homo sapiens
  misc_feature (9)..(9): n is a, c, g, or t
  misc_feature (24)..(25): n is a, c, g, or t
  misc_feature (29)..(29): n is a, c, g, or t
  misc_feature (42)..(42): n is a, c, g, or t
ttatgcganggagagggtgaaaannattntgggtggtggaanaggagcaagcaggagtgtaaaagggcctgggtgtttatggaaatgtggaaagtgcagtgaagctgaaaagtcatatgtctggttggaagtaagatgaggctcaagaatg

SEQ ID NO: 597233 - DNA, 917 bp, Homo sapiens
aaggcagtgaggcagcgagcgtagtgtgctcatgtagaagggttaagctaatgaggatctagaaaaaatccgtcaaatcagtgaattacgactgtagaaagatagtacgattaattcgtcttaattgacaaatacttagtcaattggtgttatctagatgagtgctgtcattatacgttgctgtgtctgaatggaattgtaactacgcttacgatatgtggagaggtatcatgctgactgtagaagtgttggctgctgtgaatttatgatctgttaggtcagagtatggtgtagtcgagtgctatatgccatggtgtgctgagactgattcctgggggtggcacaagatctaattgctatgtttggaggaatcttatgagctgattgatgtcacgtggtacctttgagagagcagctaatggtgggagtactacgtggatgcaacatttgatttattagaaatccagcaaaggctgggaggctgaggtgggaggattacttgaggcccaggagttcaagggggcagtgagtcgagattgggcccccaagatctaaactgggggcacagaatgaagacctgtattatccaaaaaaaaaaaaaacacaaacaaaaagtttttggggggcctgcgccagaaaaaggtttttagaaccacttcgttgcggggcgggcccgtagtgtatgtggcacagtgcaaaggtggttctacgaggaacctggcagtcatggtgtgcgggtcttcccaaaaaaacaccgggggaccgcggttgacaaccaaagtggtctggggtcatcgggtctacggcgcacgagccaatatcacgcgcgcggggggacaagagaagaacagaaaaggcagcacacagaaacagaacacacctgacgcaagaacacaagaggcacaaacaagatgaac

SEQ ID NO: 597234 - DNA, 135 bp, Homo sapiens
ccgggttcctgttctactaaacacaaaaacggccaggcgcagtggcccacacctgtaatcccaggatttggggaggcgaggcagaaagatcgctggaggccaggaattcaagaccaacctagacaaagggaaaca

SEQ ID NO: 597235 - DNA, 418 bp, Homo sapiens
aaattaaagttttaaaaagaatattaattgtttaatactcaagtttagctgggctcctgaaattttcccccactaaattaagcaatgctaggagagaggcagagactccatctgctaagcacatgagtattctggttttctttttgattttataacagaatcgaacaagcatttacatacacctactaactcaatgagaaagtataataaatactactatgaaagtattgaaaaaaaaaactgtgctttcaagatactcactatatttgtagttctagactgagtctagttctatacctgagtctttcagctgggataattacttcaattcttagcttcagtttggaaatggtaatctgcttctttttatttattgatgtggttggatagaatagtgttccaaactaggtaagtatct

SEQ ID NO: 597236 - DNA, 248 bp, Homo sapiens
agcacgtgagcctccttgtgtgtgtctagtgtttgggccccagaaaattcctgcctggtgctatgcactgatacctccactcccttactcaggtcctgtaggacaggcctgggttgatctcagctcctcctgctcccagaagcccttgggcagagacaggtagccaggactctgtggattctagatccttgcccctcagacagcactctgctgtcagcacagcaatctctgggcagccaggcaacaat

SEQ ID NO: 597237 - DNA, 168 bp, Homo sapiens
agatatgtgcccatttcttgccaactcatggtgctacaccttgactaacgtctttacgtgggtacttgcgcttactctgtagccttcatcaggatttgctgaattgcatgcggtgtataggactgagcacagaggtggctgaggttgatcgcgggtttatcgacttac

SEQ ID NO: 597238 - DNA, 148 bp, Homo sapiens
ccccagcccgcctggctcatttaacagtgataatggacaccaaaaggctgtgtgtaatctgtgctcaagttgcttccattaaagagtgctgtttttaaaaactaataacttacaactgccacacgcaaaaaagaaaaccagtctccag

SEQ ID NO: 597239 - DNA, 848 bp, Homo sapiens
  misc_feature (524)..(524): n is a, c, g, or t
ctcctcaagcttggcgtggttgggggggtacacgcgggtttcaacatgcgtatcgaaaagtgtattctgtcggggcccatctatcctgacacggcatgatgttcgtccgcaatgaatggcaaggtgtccagatttgtgcaaatctaaatgtcataaaaatttaaaaagaagcgcaatcctcgcaaagttaggtggaccaaaagcattccggaaagcagttgtaaagagcttacagtgataattcatttgaatttgaaaaacgtagaaatgaacctataaataccaggagagctatggaataaaatattgatgcgatgaagagagttgaagaaatcaaaagaagcgcaagctaaatttatattgaccagatgaagaaaattaaagaggctacagaaggtcaggatatcaaagagttcagcaaaaatccattttatccgagccccttctggcaggcaaggggaaccagtggcagagaaatggtacagcagttaccagaggatgtgcacatggaagatgctctaaanaatctctgtaaccatttctttatgtactttgagaaatgcctgtgattctttgaacttgtaaattatttatttttacataagggccttacatgaaaggcgttaaagagattttcctggttgcactacgtagattagaattacggtgagtgctcacgcgtaacttacggagatgcttagaatatgaattatggcaacggaggaggggccacgcggcttggaaggcacggttgtaatggacatgggggaacattgggacctgtgtggggcggcacagtggatatcgggacaaggaatgtttttcctctttttatttattgggggagg

SEQ ID NO: 597240 - DNA, 179 bp, Homo sapiens
atcccgatttttaagttttgctattgtggtattttggtggagaaaaaagaaccgggtggctgtttttgaactgcctggaacctaagaccctgaatttttttcccccccaaggggaaaatttatatggaaaacatttattttaaaaaacaggatgaagtgaattaaaagatttaaatgca

SEQ ID NO: 597241 - DNA, 903 bp, Homo sapiens
ggatcgggccctttaccaatcagaaggacgggcaatcgcaagacctgaccccaccgggctttcgggcgcacccccaagtaccgggcttctgacaggatcaaaaggggatctccccctggcgcccggcccctgggagatcgagagtttcccacccccagagcgcaagtattcggtctggattcggtgctccatccatgacctcacaggcaaccgtcccaccggatatgggatttaccaccggagttacgacgaatcgggcccctccatcgtcccccgccaaatgctttttaacggactcagccagatgcgtagcatttcctgcatgggttaattgagcaatagaaaatttgccccctggccaaaagcacacacctcatgctagcctcacgaaactggaataacgcccttctgaaaagaaattggtcccttgaagcttgtatcttgatatcagccactggattgtagaaacattgttgctgattttgacccttgtattgaagattaacatggtcccctgtggtattaacagtgtcagggctgagtgttttgggatttctcttagaggctggccagaacccaattgttttgtcttgcgggtcttctaggggtggaaagtcccagccgtaggacacccagtttcctttcttagctgaagtctttggcccagaacccccgtgggctgttacttgctttgaattggaagcgggttgcatttacgcctgtaaaagtattcatttttaatttatgtaaggttttttttgtacgccattttcgattctttgaagagatgaccaccaattttgggtttctactgcttactgtgagaaccattaggccccagcacaccgtccattgtgtaaggaaaaataaaagtgctgcccggttaaaaaaaaataaaaataa

SEQ ID NO: 597242 - DNA, 1179 bp, Homo sapiens
gcatgaaaaagtgcctaaagtgccagaagagccaaagaaaccagtatccagaaaacaaaggttcctcctaaaagtcatacaagatggcaagaacctctccctagccaaagtgactagagaggcacatgcaaatttatccaggacgaaaacgttcttgatgctgtacactaatacaacagaggcgcctccaaaagcaagagtgccagaggcaaccgaaaaagagctgtcccaagaagaaaaaggttctgacaacctcaaaaactaaacagagcaggaggacaccacacaagcaaaacgtgacctgaaattacagacaacaagacgctggccaacagaacgcacaacaagcactcacacagcaacacgctacacaacacaagagcaaccctccaacccactcacaagcaaagctcaactacataacctggcacagcagaaaagaacacgggacattataacccataaaacagacggacagctgcaatcacagcaacaacaacgagagaacacacaatgaaatcacgacacgacacataatgcacacaacacatcctgtcacaacataaccagcaacactccggaccccggacgaacaacgctaccccacaagaagaaaagaaccataccagcaccaaaatcagcgcaacccaaactaacagcacgtcccacacgacacagcttaactgacacaagaccacttgccaccgcacccactcgcacaggccaaatcaccactcaagcaaggaaaacccaattaacaaaagcccaataatacccgatgacaataaaagaacactcggtacccaacgaatgacaacacaaggctatacccccgaacacaacaacaccacacaaggagcacaccccaagacggcataaacaggatgcatcgcactcacgccggtcttgtatcccccgacagacaaaacaaggtaacctaatgagccactatacactatactaaaccatcacacacaacaaaaataaacaaaataatacacctaactaaaacaaaacaaaacagtaaatagccgtgaataaacaacacaattatatataataacaacattgctaactaaacatcacgaatcataataaacacaattcacaccaaatgaccataaaaaacaaacaactgatttacacactacataaaaagtcatagatcatcattacaaa

SEQ ID NO: 597243 - DNA, 917 bp, Homo sapiens
ctgtgatgttctgcccacgtcgagacctgagtctgaaatgtcagacgatctcggagagcgactgtatggtgagaaccagtgcgactggagcaggtcagttagccgcagaaggcatcagatggtgaagtgagaaggagacacaaaagtgatgcagcatggagacaagttccatgttcctgtcccttctgtaggaaccaccacagaacggcctaaaacgaagtgtttggttggatacaaccaagaggaaagacaagagaataccaccagagacctaaggataccatgaatgataatgaagatatattactgatgttcttgcacaatatcagaaccaaaaccaggttacctgaagacctacagaagctggatgaaggactattatagcagcgagacggcttggtgatggaacttagaagaactgaacctgccagactcctgtttcctcaatggccaagtgatttgactcacagtctttcctcgatacctaaaagacattttgtcctaagtgggtaaaacttaggaagaaccacagtgagacggcaactcggtcctgatgctgatcatctgcatgctcggccgtccgagcccctggagcctcattaggtacgatgaccagtcattcagaggagacggccaaagtccataaaacttattctgcaacgccgcataagggtccacggcgcaggtacaagttgctgggagaaagcgtggtgagtgcacctgggtggtaaggaacctccgggggagcaattcaaggcaactttgttcatatgcagcgtggacctttaatttgaggccctaaaaatttctggatcttgacctggcactgggcgagattcgacacttgacccacatgatgcacattcccggagcaaagcaacggggattccaacttctgaacatggagtgccacctgg

SEQ ID NO: 597244 - DNA, 113 bp, Homo sapiens
  misc_feature (77)..(77): n is a, c, g, or t
ttttttaaccacttccctatgctacccatgaaacctagttggggctctgttgtgtctgatttcccctggcttattcnttactttttcctccttttccagactcaggtggtgtg

SEQ ID NO: 597245 - DNA, 662 bp, Homo sapiens
  misc_feature (662)..(662): n is a, c, g, or t
agcggtgcttccggtaggagcctcgcaggaatggtctccgggtagaggcaggtaaggatgtcccgggccggtggagaaggaagagctgggcgtgtggcttcgcttggaatccgaatcagagcttggaccagagccttccctgaggatgctgaaggtaagaaatcctggctcaccagtgccgcggaaggggaatgtctatagttttaggcctctgagtgcgggatcagcccttaggtgggtgtgttttgaatgcgtgaggaagtagggtttctctttgggctgtgtgttactgttgggacagcgacctggtgcgtgggtgtgctttagtgacagtgtgattgtgtgcctgatcatttgtgtaaatggggtttgtaggtgactgtgaccatgattgtgaatggctatttgtgtaaatctcatttatttacgtgaaagaaaaagcacatttacaggccgggagcggtggctcacccctgtaatcccagcattttgggagcccgaagcgggtggatgccctgatgtcgggagttcgataccagcctggccaacgtggagaaaacccagctctactgaaaatacaaaattggccgggtgtggtggtgcatgtctgtggttccagctccttgggaggctgaggcaggagaatcgcttgaacccgtgan

SEQ ID NO: 597246 - DNA, 1247 bp, Homo sapiens
ctgcgcagcgtatgcacacgaaactgcaaaatatggtgtgaaggttggcctgacaacattcatgctgccagccatattgtactggcctgctgctggcccgcaggcttctcaataggtttggccatggaccaagcatctcatgaaggccaagtggaggtgcactggtgatgaataccaatgtggcaaacgcattgatggtcagccagggtgccttcacctggctattttggatgcaggccttggccagaactaccactggcaataaagttctaaggtgccctgaagggagcttgctggatggcaggctatggtctatccctcaacagtaccaaacgatatccctggattatgattctgaaagcaaggaattaaaatgcagaagatacatcggaacgcacatccatgggccaggaatgttgaccgaattacattgcggctacttaaatggacacgaagatgaaagatgcttacagagaaacaggtactctcaatacattaaaggaacaagcgtaagatacaggaaatgatggagggagatgtcgttaacgacaaggctccatggctgggtactaccagcacaagacatccgaggtctactggagcacaaaaagcccccaacgaaacacgaacggtaacacacagcaagagcggtggacaacacggagcccaaaaaatgttgcccttggccaccaagaagcaccggataccgaggatagcctcaacaatcgacaggcaaagctttcgctcaagaagacacacggaaaagggagcaggaataaaaagcgtagcaacccaagcaaaatgccctaatgataataacccacatatacaactcacgttaaccgtgacattgacacacagcagagacaaagcaaaaaacagtggaggccagcaaaaagaaatagatccacaaagggagcccaagcacatcaccaacacaagaccaatgctgacaaaaaagggacccaaaaagaacaaacacacaaaacagcaacagagcaggcacgccgcaatacacacgctacaagaaggcgaaaaccagcacacaagggacaacagaagaggccacaagaaacaaaggggaaaaacataggcaaaaccacacacagatcaaaaaaccgcgagacaacacaacagaagtatactggtaacaagcaacaacgaaagcggcagaacggacgagccacgacaaactaggagagaagaaacaaagaagagacggatgacaaaagcaaagcacgaagcac

SEQ ID NO: 597247 - DNA, 716 bp, Homo sapiens
tgcagtcatttctttaaggttgcacaacgagcacagcccggactatgagttggagatctaaattctgatctgagtctggaactgacaagttgtgtgaccctcagcaagtcacttaacctatctgagccttaatttccttatttataaattgtggtggtttgaacacatgctcataaggtctgttcagtgggtatgtgtgttgagtgatatttgtgctttttcttgaaagattttcgggcatttagcaattattatgttgtacttgtaatcagaagcggttgagcccggtagcactaaataatgaaggattgaggaactggtgttttacattaaaaatttaatggaaatttatacagcagatagcgaaaatctaatgagtagagctcaaagaaagagagctaaacataggagtggttcttcttagcatgttctatccttctaagcctgttgtttcctaaatgatgaacggtatgtctgtcgtggaaaatacaagggctcttgtgatcactcagacccagagtgacactgttaggttcggggttgaataagtttggcctttgcataagttatttagtctctcttagcctcagttgtctatcggtcaaacgggtcatacgcaagtgttgacacatattgtgtacactccctaggactgatttttctaccccagtacgtcgtattggcaaggaaactgttatggtgttaccccatgttgg

SEQ ID NO: 597248 - DNA, 144 bp, Homo sapiens
gggcagggctggcacagacagacggaagcaaaaaggacagttggctgctgtgtttgttgggcacgccccctccccggacagcacctgccccctagaaacttttttagcaaaaaaattaataaaaacaaatccattgtcctttta

SEQ ID NO: 597249 - DNA, 243 bp, Homo sapiens
tgagtagcaggccgtggtggtcccgacatactagggaagatgaggcatgagaatcgcattgaaacccaggaggtacaggttgcagtaagctgatatctcaccactgcactccagcctgggtgacagaacaagattctgtcaaatacatacatacatgaatgggagtatttgtcacctaaaatgaatctgtataataggatttctagcggcgtaacaaaaaaagttaaaatattcacacagtcg

SEQ ID NO: 597250 - DNA, 796 bp, Homo sapiens
tggtttggaaacaggtcttaattcactagagcatttaaattacgggagatccccaaaagcagtttgatgagacttcagtattttcacttcccaggggtaggggataggggaaaatctatattttggtacagtttatttttaattaccataaagccttaggacaaaggggggggttagctcgtgctttagagaataaaggggagatgattttcaccaggggtgattgtcatatcgtgtgtgggattacgtggtacatcagtcagtgatgagtatggggtgggcaaagagtcgcgtggagtttgttttcggtcaaagatattttaaaatattttgggtaaacactcgttccagtgaggcctcatcgtggtgaagtggaaataacagcatatattttatatgagagaaaacaggtgaaattgagaaaaagtccttcaagctgtgggagtaacattgctcagccggtaaaacgattactaacaaataatcccagaggaaacggggttcgggtcggggccatttgaaaatatgccattggggcaaatcttctcattcggggtacctcaggtaatcccggaggaaaataaaactcggagatcgagtcgccctcccggacagggagttggaaatacaggtacttgggagagcttcaaactaacgtgatttttccatccataagtgtcaccctgtgcaaactgatgtaataaaaaatcctcttaataacagggtgggacccccaagaatgttgcggacgccgcggcatagagtataggacacctaggacaggagagcaggacga

SEQ ID NO: 597251 - DNA, 1222 bp, Homo sapiens
aataatgtcttttctttagaatatctggattatgaaagcaagcacttttttcattaaaaaaattatatactaggaaaaaaaaaaaaaaaaaaaaaaaaaaaaaaaggggggggggggtaaaaagatttcccttcaggggggcccaaaggttatacggcggtacaccaggtatttctgtgtacaaaggggggcccacttattaggagaggtcggaattatatataacgctaagggaatggggccagacggttaacacaacggatcggtgagacggggagaaaccgggagaacattgaggaactcatgtggtgagaaagggaaacctcttatactatctctgtggaggaggggtgaaccaaaatatgtgtggtgcgaccaagcagtataccccctataagagagagatattataagagagcctctattagagagggataaatttattagaacatttttataaagggtgtatataaaggtggtgtgttaaaaacatacagacggtgaaaaatatgtgtacgtgtgagagatgatgtggaaaaaagagtttagtggggacataaagagagagagattatatgaacctatatgagtgcagcacaaatttatatatatatcaacaccgcgggagagccacacagtgtgaaaaacacccgaaaaaaaaaaaaaaaagacggaaaaaaaagaacgagaaaaaaagcacaacaacagaaagacgaaaagaaagcgaaaagaggagacaaaggagacaaaaggcaacagagaaggagacagaaagaggacagaaggagaagggaaaaaaaggaaagaaaaaaaaaacaagacgaggaaacaggaaaaagacacaaaacgaaagaacgaaggaaggaacgagaagagacaacaaagacgaaaggaaaaaaaacacgaacaaaaacacagagaaagggacagcagaggacgagcgaaaagcgagagcaagagaagcaagacgaaagcaaaaaaagacagacaaaagcaaataaacggcaacaaagacgaggcggagaggaaggaggaaaaagaagcaaaaaagaccacaaacagaaggagacgaaaagaagaagacgagaggagagagaaggcacagagagaacagaccacacacaaaagaagagaacaggggaaaacagaagcgaggagaaagaagagggacaagaaacgagagcgagacagaaagcgcaggacgagcgggaacgaagggcgt

SEQ ID NO: 597252 - DNA, 2012 bp, Homo sapiens
  misc_feature (1301)..(1301): n is a, c, g, or t
  misc_feature (1320)..(1320): n is a, c, g, or t
ggtccggaacagttgattattattatattcttttatcttctttttatttattcttggcgggaggaagaccctccacgagggcacacacacaatagagtggcaaacaaaatgacaaatgactgcgtaaaatcatcacaaaaaaaaacacataccacacagagagagacaacacaacaacaatgcaaagcagcaagcaaaagaaggccacatcgaaacacagaaagaaacagaggacaggagacaaaagaatcaacaacaccaacaagctacaacaagagacgacatccaaacccaccacacaacacgaacacaacccgacgccgacaaacaggcgagaaaaccaaaaacacaagtgacaacagaaaaaaaaacaagagaagacagaagaaacaggcagagcagacaacaaaaaacgaaacagaaaaagaacaaacaaataaacccgagcaaacagacaacagaagaagaagcaaggggaagaaacaacagaaaagatacaaggaagacaagcgaaaacacacgagaaaagaaacgagagaaaagccaccaccacgcacaaccaaacaaaggggaaaaaagaaaacgcgaagaaaaaacaaacaacacgcaccagacacgacacgacgaaacgcaaaacaacaaggccaggaagacagaacagtcggagaaaagaaagaaagagagaaagcagaacgacaacaaagaaaacaacaacaaggaaacagaacacaacaaaatagaaagagtaagacaagaggacaaaaaacaacaacaagaaccacacaacaacaaaacatagccgcaacaacacaacaacagaagcaacacagacagagaaagcgcgagcaacacgatcagcacagcccgacaccaagacaaaacaacaacacgagacacgccgagcgagaaagacgcaaggacgcgagacacgcacaagggagaaacgaaacccagcgaccacaaagacacaagaacgacggcagcacaagaaccaaacgacacggcagagcgacaagaaacaccaacgcaagaggaccgagaacagagagaaacagagacaaaggacacgaagacacaccaacacgcgagcaaagacaagacggacacgcgaaccaaagccgacagagacaagcagcgaacagcgcaggcaggagacgacacagacggacgtcacgaacaacagcagcggagcgaaacaatagagacaagacgagacgtgacgcgaggagacgacgacgacaacgagaagagacaaaggacgacatagacgacacaagacgccgccgaaagagacacgacgnagacccgatcgaacatcantacgtacaagaacacagaacgaatatcgagagatcgaactgaatgcgcgacgacacatgcagacaacacgccgacgcaaagacgcagcaagcagacgacgcaacacgagagagagagacggagacgtcgacaggcagacacagaacgcagacgcacacgaacgtacaggacgagacacgaactaacgaccaggatacgcacgagtcgacaggctgcagcgacgagacacgaagcgaagacgaagcacaggacagaaaagagacagcgagaacagacgagagaacacgaccgagcgacgaacgagagagagaacatgaagaagacacagaaggtccgagacggagcaaccacacgcaagaagtagagaacacgaacgaaggaaaagcatggcaaggcatacatgagaagcaatcggaggagagccaggacgcgaggaggcgaacagaagcggcaggcaggagaagacaaagcagcagaagacaaagaggcaggacaagagtagaacagactagaacatagtagcagagcaaagaaaagaccacgcaggggacaacggaagagagaagcggaagagcaggaagcgacgccgccaacgagagacgagaagagagcagacaaacagagaagatagccagcagagagggagcaagagacagtcagcagcccagacagacacgagaagacctgatata

SEQ ID NO: 597253 - DNA, 451 bp, Homo sapiens
  misc_feature (57)..(57): n is a, c, g, or t
agaccccttgcacaacactgtgcctatagataacagtaccgtattgtacacttaaanatctgccaagagggcagatgtcatgttaagtattcttaccactgtattttttttaaatgacagcttgatgggttttccataaagttatgagtttgtgctttgtaattttttgctgtctaaaattctaagaactacaggtattaggaaatgattttgaaatgattttttctttctttttaaaaacaccattatttaccaaaatgaaaagttagaaatcctgaataatgtcatctcctctttagaaaggaatgcactcttggtatcagtgggcaggatacagcgttgtccagtggactaagaggagccgggacacccagactcctaccccacctctgcctcttactagccctgaaaaccttgggaagttactccagctctgtgggaactggcatag

SEQ ID NO: 597254 - DNA, 81 bp, Homo sapiens
ctagaagattcagcaaagtacttttgtgctcttggggataccccctactgggggatacggatgttcaccgataaactcact

SEQ ID NO: 597255 - DNA, 256 bp, Homo sapiens
  misc_feature (222)..(222): n is a, c, g, or t
aaacaccacacacattacagagcaaacaatggtgcctcatgcataaacatacatagatgtctactcaaaaagcacctcttcagatctcgagaacatgaaaaagaattgagtgcttttaaatactattaagaaagtaatcataaaagtaaatcgaatttcaaacctatccgacttctgttttgcgaacctttgaactatattcatgtgtataagggtatacanatacacacacgacatataacacgtgtacacatat

SEQ ID NO: 597256 - DNA, 142 bp, Homo sapiens
agcggaaccgacgggactcggagatcatgcatgcgcagccgacaacggcaacgagcagacggaggaacccacgtagctttgtggcttcgtgtcaaccctcttgccttcgcctgtgtgccttgagccagtcccaccacgctcg

SEQ ID NO: 597257 - DNA, 567 bp, Homo sapiens
gtacgtttgctgtaggcctggggaggctcagcaaattcccgcagcatgcttcctgtacaggctgcacaagtgtgagctatttccaccccttatccgttcaccgttcaccaatctcaggtcatttatccatactttttcgcggaatggcctaataatcaagtaaacagattattccaacacacacagagcagcactgtgacaaggctacgaggtcacaaagggaagcaacaaggaactctggctggcggtgagcagttttcagtgaagtaacaatatctgcactagggttttgaaaaatgcagcagaagctctgtgtcagatgaagaagcagcacaggaggccctccaagcaaaggacaccactcatgtcaagacatggggcaaaaagcagaggatgtcatttggagacacagagagtcacaccgaaggctatcattcaatcagtgcatagtcttcatggaggttaatatcaaaggcaacctgaatttcctcagacttcatgagctggcggtgaagggtgagatcacacaagcagtaataacccagctctccctggctcactgcttat

SEQ ID NO: 597258 - DNA, 201 bp, Homo sapiens
ccactgtggtactggtgttgtctcttgattcctcactgctcaacctgctcgtcgggatttcacttacacattcagaggaccataggagagggcatgaggggctagtgtgaagcatctgatgatgggggccatttgtgggtgaaaatgaatacctttttttgaaatttatgggtcattttcaacgtggatttacgaagggtg

SEQ ID NO: 597259 - DNA, 837 bp, Homo sapiens
gtctaatcgaggcttcctaccgaagtgctctatgtgtgggggcgccacctcgtggggctccctctctcaggtttgcccccaagtcggggtgaaaaaaacacgggtgaagttaacggcccccagtggagcaaagcgggcacttctggggagcgccgagcgtgtgcatcacccggtgtgacctccgccgggcctcaagccggagattaacccatggcggtccataatagagggtcgcacacacgcgagtgtcttcctaaaaagccccattaacgtctgtggtcaacacacaagacgaaccctgtcacaacttattccaaaaaatggttttccggagcacccttttgtgacaaaattgtggaaagggtaaaaggagatctttcggtttaatttacgaatggatcgaggtatacgcccttctaccctaacagcggactagatatcccgcccttttgaccccacaattgccgctgtttctcgaaaacccacacgtattatggacgattgtgccgccccgccgcgacgtggcggatcaccacagagtccccacccccttgcggggagctagagtgctgggcacagaacactagtatcctcacgtggatttagagaaccccccctggcacacccatggtgcaacccccggctgtgttcaagagcaaacccacatattactgtcgcttcatgacgaccgcaacctgtagtggcccgcattatagggaggtatattgggacgagtcatgcgaacgcctcggggatgaaggtcgccggtagaaggaccctgagttggagccccgacccccccacccaggacaacaaagggatccccccccaacatac

SEQ ID NO: 597260 - DNA, 558 bp, Homo sapiens
tttttttttcctttttttccaaaacacttaatactttaaaaaaaaaaaaaaaaaaagcaattccggggggctggggtgcctccaacccgggtccccctcggtctccagccaccctcgggctggggcttctggagctgggtgggccctgggcccaagaaggtctgggcgggaggcccagggcagcaagccatagggcgggggtggtgctctaacgaggggagaaggcggggaagcctggccaaccctacttcctgggcctaacctcctaactaaacacttcctgggcccatttgggcacccggtaaccaagggggctcaagggcacaagaaggggagctacagcacagtctggggcctccaagggcccccaaagagcctactcttcgagagcgctggtcgctggggtggcaagaaaccggccaagaagccaacccacaaaaggtgggtttctcatctggggggctccccggaggaaacctctctttatacaccttaaatataaaaggggtctccgaggcgaaaaacacaaacaacacaaaacacacaaagagaaaagag

SEQ ID NO: 597261 - DNA, 528 bp, Homo sapiens
  misc_feature (198)..(198): n is a, c, g, or t
gtgggtttggtgggtcattgtggcatttgtcaaggaaaagcaacattgccctctaaatgactcccacttctgttctggaaaaaacgcatcatcattcatgccaccatcccaatagacataggaagcaatttctcttcaggttttgagatggtgcaagcattgacttttctttctacagagggctgggatggggggtgngaggtggtggagaaactgttattctgtgagcctggctgggtctgcagatggaaggccttgttcaagtacagcagcatccttgtgctgcagttagtggttttacattttttaaaatccccttctgagggaaatctgtgattacatttttttctctgcacaggtgctagaatgcattgcgcaaacacaaacatcccacttcatgagaaaatttggaagtcattttccttccatctgtctgaagtagactgtgctctaaaactggccatccacccacccgttctcccacgcaccttctcagtgacaggaggagatggcattgtaagagaatga

SEQ ID NO: 597262 - DNA, 356 bp, Homo sapiens
agtatctagaggatccggaggtctcttcctcaacagtaacagctctaaacctgcatgctttttctatgagtgcctgtttcagagctgtctcctttcctttggaggtcagtggtctccggcgggcaggactgaaagcaataggactgcacatgtgcactgcctccccaaagcgattcctcactacagcaccacctcccttctgacagatggaaaaacagtctctggccaggcgcggtggcttatgtgtgtaatcccagcacttggggaggctgagggaggtggatcacttgagtccaggagtttgagaccagtctgggcaacatggcgaaacttcatcactaccaaagaagaaaaaa

SEQ ID NO: 597263 - DNA, 1272 bp, Homo sapiens
  misc_feature (517)..(517): n is a, c, g, or t
ctccgagtgatgggcatctctcgtggacaactggcacaagcgtccgcatagaagcggggtgcaagagaaatgccctaaccacaatgaatgcgtaagtatgagttggggcgctcagtctgctcaacagcaagattggccccctgccgctatccacacagatcccgtggtgctgacgtgaggtaacaatgaaatatccagtgcccgtgatcggtctgcgacgtggggaatttctccttgtgggctcagaggttgtctgtacttcggtaataacaagggagtcgatctggatgttgtcttacaactgcaagtacgtaagtaagcgatgcttgtgttccgtaccaaggatcccatggtgagagaattgctagtacgtgctcactcgatgagtcgacacccgtgactcagactaggctggtagctgacgtctcgcgagcatagtgctcgctgcacctcgtgagggggctctgacagaggatacgggcgcacgtcccacaaggtgctggaccttcccttggangcgcatacggtaacgcaggaatattttaagagagccatataccaagaagcggaggttctagtacacatataacacctctgcaaggaaaccgcaaaagttaagttgacttgaatacgcgcggaaagcaccaaatcgaaaattttcggcgcaacaatatccattccactagccacataattctctcttcggttcgcgaatgttcggattggccaacggtgtgttcgcctatagcaccactggggggccacatatggtccttatccgttcatgggccggggtacttcggcctaatggttccagcaccagtttgttccgaataaagagaggacctcccagagaagggggaagcccagagcggtttgcgattggagggccccctgggaaatgtgcctagagcacgccaatttaggggtccgccttaatgcttggagtatggcgcccctgtttaacgcacaaagggagggttggcgtcctaaaagagcaacaccgtagaaacagggtatatgtgagggcgagaacaacgccccattattccccaattttaaacctctccccagcttttatttaccgagcactgacgacagaatgcagccatttcagactcttgaccgaacagacacgtgcgggtgtgtaagcgccgcgcacgggtcgaccacgacgtcaagtgcaagcgaggtggggatcgctgacgaaagacagagggttttaaacgcacaccatatagtttgccgccgcctctcatatttgttggtgtc

SEQ ID NO: 597264 - DNA, 931 bp, Homo sapiens
acacagtgaataacaacaaaaacaatttaaaactgtcgtaatggtccaaaccaccatgaatggtgttctgacgagtgatacacggcggtgcaggtctgactcatgagccgctgtccgctgatgagcttgacattctcaacaatggaaatcccgaactgtgctcactgctagtgctgctgcaggccctcgatggcatggcgatccacaccactggcgtcaggaaacaacactccactagagacgcgtacaatcttagaattcatctacattccattctccgtcctggtacgtctactttcttctacaacggtcccagccgagctgaggtctgagctgtgctgctcaaggctgtacccatgtgaagtacagatgcggagacccgtgtacaggggctacacagcaggaagctgtgtaacccaggggaagcaagatacaacttgtggcacatatgtgcaaggagcaagtttctaagtactattgcactaaccaactcatgatctgtaactccttcgtcaaggaaacagaatgtatatctacgtcaaacttccatttcagaaagccgaggtcaaaataatgagtcctggggaattcaaacttgtgttaagaaacatgtgtcccagtgtgcaactggctgcaaacagcagcttccttggtagtgtatgcagccgtgtagtcgtacgggttgctctaaagggccttggagacagtcctttcagatggatgtacatgtttttgaccttgcactaccccagtgtaggctccaaaacaggcatgcgaggtgccttttggaaaggccccggaggcactgtggccaagttggtccaaggttatcatctccaatgctgcaccaaggcttgccgaacaaggaagcacgtgattgaggcccctgggacaggtccaaggttcaagattcgtggcttgcctaaagatc

SEQ ID NO: 597265 - DNA, 339 bp, Homo sapiens
taccagggtcataagaatgcacatggacggatctgcagctctggggtaggaagtggttggtccctttccacggtcatctggatggtcgctgggacctaccccctgccatccttacccatctggacaggctctgtagtgcgtcgggcaagcctcatccttgggcttcttgggctagagctactagagctgcgcaagactcccggacttcggcacccccagttgacgcgacatggaacggtcttgggcacagcatggcttgctgttctctctctgtggagagccatcctggccccggctgacctgggcactggtgatgcccccaatctctgcgtcgctgaa

SEQ ID NO: 597266 - DNA, 93 bp, Homo sapiens
atggaccccaactgctcctgcgaggctggtggctcctgcgcctgcgccggctcctgcaagtgcaaaaagtgcaaatgcacctcctgcaagaag

SEQ ID NO: 597267 - DNA, 161 bp, Homo sapiens
ctgctgactattgtgggaaaaattctaggctatatacaactacgcaaaggcccaacgttgtaggcccctacggttactacaacccttcgctgacgccataaaactcttcaccagttatccttttgtctttctgcatattttcaacaaattagtcagcagca

SEQ ID NO: 597268 - DNA, 212 bp, Homo sapiens
gcccaagggacccggagcaaagtccctgtggccccggaaaaccccagttgagctttataaaaccacggggccccccctcccggggcctcccccccaagcaaacccagatcgctcaaaaaatgggaaccccgggcaaattgtttgtgccccctcctgggtttattataagggtcccatgttttttataaaaaaacatagggggtttcccctta

SEQ ID NO: 597269 - DNA, 182 bp, Homo sapiens
aggatccttaaacgaccgaagaaactgtaacgaaagaatcaatcagtagtaaagaaaaggaaaaaatggaaacatgtggaccacgtagaaaagttcactactttgtagcaccaggcaagtgttcaatccttcatgatgaccctagaaagaagacagtagctgactacaagcattccattcca

SEQ ID NO: 597270 - DNA, 102 bp, Homo sapiens
tatggatatgcagaatacggcttacatatgtatagaaggcagtgctaggcttgggacaccggaagtgcacaacagaagaagtatcagactcaccatgaatag

SEQ ID NO: 597271 - DNA, 332 bp, Homo sapiens
atactacgctgttagaaacgtactggtactcatgaaaatgtcggtgatacaccatgggactaaaatttacaagccactgaccccgaatgaaagcctccagtggaaacatgtggattactgcttcatattacactcaaagacttaactatgactaacatactagaacactatcatcagcaccatcagagctttggtgatgtgtagcttactcattctacagttgatatggaaaaggtactgctgacttaaacatggtcttgaggaaaagaagaacaatacacgacgttacgttgatcttaccacgtcaaaacaggtagggctccttgtaccct

SEQ ID NO: 597272 - DNA, 1035 bp, Homo sapiens
ggagctcatctgccaggctgtaagtgctaagcaccgctgccgtcgcctgctgccattttgatggcagcgaagagtccggttctagggacagctggagacagatgagtggtagactgaagatacccctttaccaaaggaaagctattttgcgaactatcttctccagcggagatggccaatgtgctttgtatccagagccagactggttatcctatctcccaggatttggctcttcagttaacaagggtagtcaatcccaaatgcctttacagattgcaggatcatcaggtaccggattgagtctcagtgtgagctcgcttgcacctaccagatatatcgctcatcgaacagtgtggccctgcatgaaactatggaaccctttggacctcaacgatcagaggttccagacttcccttgggaacataggtacaagatctgtcacctcaatgggactgcttcacagaaggaaaagactggctcatacaactttgccttgatgtcgctaggcagaccctttatccatgttgacacgcaccttgacttgtgatgggacaatatgtgaactgaattcacaaggctaatgattgcacctgttcgacccaagaacttcaccccaggtgccgaacagcttacttttgcaaaacgtccccgacgtacaagttggtgcccactcacagaccatgtccaagacaatggctgccacgacgggactttgaatcacatgtaccaaacagtatactcaatggaaccaaagtgatcctgactgtcacgccacaaaactaagaatggcacctgtaccgtgtggccagtaccacactcagcaacctgtgacacagaaacgtgtcctctaaaaacgatcaccaaggtcgcgatcaaacgacatcgcctccagcccaagaaggtgaggaaagagccgacaatatgagagccacacactgtcggcacatgtgccccaatcataccaacccctttgaccacgtgagcatcgcgacatgaatcgacgtaaccggggaaggagaagcaatctgagccacc

SEQ ID NO: 597273 - DNA, 102 bp, Homo sapiens
gcctcggacagcgccatatactacagtgcgagacatgaaatccatggatgttgtagtttatcctgtagagtggggtcctggttcgacccctggggtcaggga

SEQ ID NO: 597274 - DNA, 268 bp, Homo sapiens
taatgccggaacattagaaaccctgtaccgcgtagtggccattcccaattcacccttcctcttatcccctagcaaccaccaatctgttttctgtctttacgaattagcttattctgggtatttcatataactggaatcatacaatatgtggccatttgtgtctggcttgtttcatgtcacaatttttcaaggttcatctgtgtcgcagcatgtgatcaggatttcattgttttcttatggctgaataacattccattgtgtggattta

SEQ ID NO: 597275 - DNA, 566 bp, Homo sapiens
acggagtcatagtgttaacttattccacgtgtagagttttccagtgtatagatgataatcagtggtaatacagaggtagggagtataacgtgactgactgattcaaacagttcattgttcatatggatctaagtaccccatagtctcctaattgccttccttcctcccaggtgggttattctttacctccttaggttaaagtccaccaggcttttgtcctcagatctctctctccagagaagagagacgccctagataatatcttctagtcctgggggcttaaatgtcattgagatggtgataactcccagattcagttctgtagcctggacctctctctggaagtatagacttggatacccagctgccaattgaattctacttgaaggccaaagaagcatctcaaactacaagatgtcctacacataagtatggttctaatcccttcctgaccacccagagtggctcctccttaattgtaatcaattcttacagttgcctagaccaaaaatatgggagtcattcttaccttctccgctctactcatagcgcacatatatcaatca

SEQ ID NO: 597276 - DNA, 101 bp, Homo sapiens
aagcacgttactacatgacaccaggaacaaggtaatggagaacacagatgcggtggcacaggcacacaatggggaggcaggaggcaggacagcccatgtgc

SEQ ID NO: 597277 - DNA, 195 bp, Homo sapiens
caggcatagacgatatgagtatgaaagtcctcaacaggcagccaggctgcagtggctcacgcctgttaatcatcccagcacttcgggaggccgaggcgggcagatcataaggtcaggagatcgagaccatcctggctaacacggtgaaaccccgtctctactaaaaatacaaaaaaattagccgggcatggtggc

SEQ ID NO: 597278 - DNA, 690 bp, Homo sapiens
  misc_feature (192)..(193): n is a, c, g, or t
  misc_feature (198)..(198): n is a, c, g, or t
  misc_feature (225)..(225): n is a, c, g, or t
  misc_feature (587)..(587): n is a, c, g, or t
  misc_feature (591)..(591): n is a, c, g, or t
  misc_feature (595)..(595): n is a, c, g, or t
  misc_feature (599)..(599): n is a, c, g, or t
  misc_feature (606)..(606): n is a, c, g, or t
  misc_feature (612)..(612): n is a, c, g, or t
  misc_feature (616)..(616): n is a, c, g, or t
  misc_feature (619)..(619): n is a, c, g, or t
attctgcatacgccatctctgagagccatggagggagccacacccctggtgacttcatggtgctggatgggagacgctagcggatccttcagggccaagtttgataaataccaccgccatcattctgctcatcctcctcctgtttttttttttctcttacattctttttttcccggtttatactttaaaacnngatangattggaaatacttccttgcaattatngtgcaactcccaggggtgaacactcaaattagaaaagagtcatctctcgtggtagcaagggagggcttccggggtaaggactatagagtaagaggtggcagcaatctttcaagtgcccttttcagcagagggcacagaacagtagccgggacgtgccatctcgggcaagatttcgggtaaagaatctcttctaaatttctacctctccggttctcggaatcagcccataggtgttggatgaggggccactcttaaggagtcacctcagtatcaggggatctaggcgcttggtccaagggtcaaataaaaacctagtctcctttaatccaacgttgcaatccttagctagaaggaaattcagntatntacncttnggggacntaatantttngantagtaataacctttattagatgaaaggaagttttcatgacaacttaaatcaggtgaattccaggaaatcag

SEQ ID NO: 597279 - DNA, 412 bp, Homo sapiens
tcgcaggttaagggctacccatcagagctctgggtgaccaggtgcaatgagcaatgtcagtgagcaatgagtagtattttgaacggaatcttttattctgagctacagtctcaacagtggacttaaaatattcggcaaaccatgttgttaaatagatgtgctttcatcaaggctctgttctgtttgtactgcacaagccagagtagatttagcttatttcttaagggccctacaattttgggaatgataagtgatcattgttccacttggaagtcaccagtagcattggctcctaacatgctgagtcagcctatcctttgaagtttggaagccaggtattgacttatcgtttctagctaggaaagtactacatggcttcttcttccagtagagagttatttcatctcaattg

SEQ ID NO: 597280 - DNA, 1010 bp, Homo sapiens
  misc_feature (1010)..(1010): n is a, c, g, or t
cttaaagtattacgtgtccctgggaatattagatgtatgcagaacgcacagtgaacggagtgacctttctcttaaaccgttcatagatgtcactgacaatttactctcaagctattacgaaaagatcacaatatattccagcagtgtctagctaatagctctttgatacatgattcgatattatccatctgttcacaatctgtggactcagtcctgacccgaccgacatcgaattctcctctgttgtacaactgatgctttcttgtggtaattgttcatgttcacacaaagctgtaaaatataataacatccaggtaacctcttcgatagcgaggtttatttgttcagtatttctggaataataataatccataaacgtagttaaagcttcagtatacaattgctgtcccgagtaaatttctttacagtccttgatgtttttgtggtttacaacgagacagggttatttcagctatgatgtaactggtttgagatgtgtactttaaatgtccttgccctcgtttagatgtgcctctttgaacattacggagctgctcaccctttatttggggcaaccacggcaagaagctaaaatggcaataagggaaattgacttacaaacagcaatgtggatatttctaactgaaagggccatgtgctgatttcggtcgtccataggaaactctggttacatatctggtaccaagtaattacccacttagcaaagtggttactcagtgcctggcgtctttcgcattttacaacaagtttattttggaacagttgttccctccggcgaacgcctgtggataccccggtgcggtaggaaatgggggcgtaagaaattaatatttgcgcagaaaccccctagaaaaagggtgcgcccttcaatcgcgtgctgtggaaacttcctgtcctcccaggaccaaaatatcgcaaccgggaaaaaacggggaacttagacacaaagcggttccacagataccggcaacacaagctccggcgtaacn

SEQ ID NO: 597281 - DNA, 156 bp, Homo sapiens
tgagcatacccccccgacagaaaatatgttacgctaagagaaagttagcagtgcgatccagcagtcattacttgtgatgagctactccgtgggtcatgagaaggcccctgccttcagagactatgtggctgtggcacgaggaagcaaagatctttg

SEQ ID NO: 597282 - DNA, 419 bp, Homo sapiens
  misc_feature (8)..(8): n is a, c, g, or t
  misc_feature (26)..(26): n is a, c, g, or t
  misc_feature (62)..(62): n is a, c, g, or t
  misc_feature (106)..(106): n is a, c, g, or t
  misc_feature (111)..(111): n is a, c, g, or t
  misc_feature (227)..(227): n is a, c, g, or t
  misc_feature (279)..(279): n is a, c, g, or t
  misc_feature (373)..(373): n is a, c, g, or t
  misc_feature (381)..(381): n is a, c, g, or t
  misc_feature (410)..(410): n is a, c, g, or t
taccttanagttccattaaaaataancctcctaaacccatgttagggttaaaaccaaaatgncccatctcacaaaaacgagtttagttgaatgctcaattccttanaaaancttcatttaaggctgagtgtggtggctcatgcctgtaattccagcactttgggaggccgaggcaggaagactgcttgagcccaggagttcaagaccagcctgggcaacgtaggaanctccgtctctacatagaaattttattataaaagtagctggggatggtggcanacacctgtagtcccagctactcaggaggttgaggtgggaagattgcttgagcccaggagtttgaggttgcagtgagctgatcatccactgtacntctagccntaggcgtacagagcaggaccccatctcgnaaaaaaaaa

SEQ ID NO: 597283 - DNA, 218 bp, Homo sapiens
  misc_feature (153)..(153): n is a, c, g, or t
actgtggtgtaccgtcccactgagtatccaggatgaaccgcaactcatggttggttcctagtcagattcgttaacactgagccaggaagggaactcccaggaccttgtacctttgagggttattattcaaagtactacataccctctccaggnatgacaagggaacctttttggtttcagttttgttttcttgaacaaagggagcaaaatagtgcctt

SEQ ID NO: 597284 - DNA, 544 bp, Homo sapiens
gcgtgctctgtgcggtgagcctggaaagaccgtgaacggctggtagctggagcgtaggctgaatttccttggtttccagtgtcacggggatcatcgtgttcattagctgaagtccactgggtggtagatcatggtataatatatgtggtcggtatgctttgaggttgtatcaggcaagaaggtaaatcagtactggctgtccattgtggccagaaggcagattccagcagagcttcagcaccggctgtcgactggcaggaatgcatttctaccccgtttgcttaactgcttccttctcacccttcattactcagggtagccgtctctgcctcagggaaatcttccgcgggcccattatagatcaaattcttctgtgtaatcatagaactctgtttgcttacaccatatatctgaatttataattgtcatttacgttgtgttggttcctcacttcacttaaggctacaatgacagtagaggtcttatctgtttcatgtgcagagcttagtaagatgtctcccaacttgtagggactcagtgcata

SEQ ID NO: 597285 - DNA, 366 bp, Homo sapiens
tttttttttttgtaagagaagatgtctcattttgccacgcaggctagtgcaatcatagcttaagtatcgaattcctgggctctcaagggatcttcccgcctcagccatcccgagtagctgggactacaggcgagtgcccgccaccacactcttttaatttgttcatttttggtagagacgggggtctcaacatcttgcccaagctggcctcgaactcccgggctcaggcgatcctccagtctcagcctcccaaagcgctgggattacagacacgtgccacctcacctggccgaaaagaacttttatctgaggaatgagagtccttttaaattatcaggcccagatggctgggcgcagtgttggtgc

SEQ ID NO: 597286 - DNA, 143 bp, Homo sapiens
cacactaccacactccagcctgggcaacaaagcaagactctctctcaaaaaataaaataaaataaaagcaataatacagtgtgtaacctctttgggacagccttccactcagcatactttcctcgagatttatctaagctttt

SEQ ID NO: 597287 - DNA, 507 bp, Homo sapiens
  misc_feature (26)..(26): n is a, c, g, or t
  misc_feature (104)..(104): n is a, c, g, or t
  misc_feature (107)..(107): n is a, c, g, or t
  misc_feature (148)..(148): n is a, c, g, or t
  misc_feature (179)..(179): n is a, c, g, or t
  misc_feature (229)..(229): n is a, c, g, or t
  misc_feature (269)..(271): n is a, c, g, or t
  misc_feature (279)..(279): n is a, c, g, or t
  misc_feature (292)..(292): n is a, c, g, or t
  misc_feature (319)..(319): n is a, c, g, or t
  misc_feature (386)..(386): n is a, c, g, or t
  misc_feature (492)..(492): n is a, c, g, or t
gggtggaagctaataagaaatgctantgtgctccactatttcacactatcacactatacttgttgttttatgatattaaaacttatgctacttggtaaattatnctntgattttaaaatatgcaacttagtaaatcactgactacctnttttcttaaagattatggctttttcataacnaatatcgaaatcttacttttcactggccattgtctcgtaacccctggctntaaagctgtcattttttttaatgatcgcggtctctgctcnnnatatttcngaatgtctttttntgagtcttacaagggaatcagttttcntgtggtctttaacccgttttccactaatcggcttttgcgaagcttgctgtcctattttattttaccngttttttgtttccatttttccttttttccaaaaattcaaatttcattgcttcattagggcaaaattgttatttgattcatttcacgattacttcaaattaagaagnatagtttatattgag

SEQ ID NO: 597288 - DNA, 1329 bp, Homo sapiens
  misc_feature (259)..(259): n is a, c, g, or t
  misc_feature (617)..(617): n is a, c, g, or t
  misc_feature (709)..(709): n is a, c, g, or t
  misc_feature (1242)..(1242): n is a, c, g, or t
taaatgttaaatttcgggtttttttccccccatgatattgggatgataatcttttacaaagcaaccttttttagctcttcagaagtagggatttggtgtcattcgtgggccaaaggcctggccatggaaactatgggcttccagcatctggtgctggctctaacgtgggctcctggacaaaaactctaggaggggtcttcaaaaaaatgtatatggtaacccctgggtggccccaggggctggtcgctagagtctccanccaggcttcattcttggggacaaagtgtgtgttggtcccacccctctcgggtcgggaaaggagaaaactccattaagggtggggtcaataataaggggcccaggtccaaggagaactcttggtggtgagaggtgtgtattacatatagggatatccctctcacactatcagagatctcccgcccagtgtgtgggatctgtagaaaaggtctaaaatattccctctgagtgtaaagagagaaagatgtgtgcatctctctcacaaaagctctcgcgtatctatctctgttgtgtgccccaaactctcatactatacctctcttggggggaataatagtgagacccagtgtcgcaccaanaacacacagagggggggccgctttcatctgttgtgggccccagtatacataactcaatatcctccttttgagtaacactcttctcaaagacngcaccaacgaaaaaaaatgtgtgggggagagtatgtgagagtcgtctcagaggttctcagagagactctccctgtgtgtcttctttattcaaaaaccctttttttgttggcgcccctttgtggggagaagagggggtgtctccctctcacctccttaacaacccactattaaccacaaatactggtgttgtcggcggctggggagaagaagtaacgctctgcaggtgatgtagtcaaaacaacttgtgttttttgcagaacaacagttgttgaggcaacccccgtggggggaagaaataatttatatattaatcaccacccccccgtgggggaaaaaacatttttttctccaccaatatgtggaccacatgggcgccgacaacaattagataagtggtgggtccatacaaccaaagagaaaaggcggcgataatattttctcccccccctattaatattacatataagagaaaagaggagcgtcttatattacacccaccttttttacagtggagaagttccaacggagcccnctttcatataatataatctcacattgttttgcccccatataaatttgtgggcgataccacaataaaagaccccttgaggtaataggg

SEQ ID NO: 597289 - DNA, 844 bp, Homo sapiens
  misc_feature (31)..(31): n is a, c, g, or t
  misc_feature (703)..(703): n is a, c, g, or t
  misc_feature (709)..(709): n is a, c, g, or t
  misc_feature (739)..(739): n is a, c, g, or t
gaagaaacttgctaaagactcggcataaaancagatctccaactaaagacatggattcagaagagaaggaaattgtggtttgggtttgccaagaagagaagtttgtctgtgggctgactaaacgcaccacctctgctgatgtcatccaggctttgcttgaggaacatgaggctacgtttggagagaaacgatttcttctggggaagcccagtgattactgcatcatagagaagtggagaggctccgaaagggttcttcctccactaactagaatcctgaagctttggaaagcgtggggagatgagcagcccaatatgcaatttgttttggttaaagcagatgcttttcttccagttcctttgtggcggacagctgaagccaaattagtgcaaaacacagaaaaattgtgggagctcagcccagcaaactacatgaagactttaccaccagataaacaaaaaagaatagtcaggaaaactttccggaaactggctaaaattaagcaggacacagtttctcatgatcgagataatatggagacattagttcatctgatcatttcccaggaccatactattcatcagcaagtcaagagaatgaaagagctggatctggaaattgaaaagtgtgaagctaagttccatcttgatcgagtagaaaatgatggagaaaactatgttcaggatgcatatttaatgcccantttcantgaagttgagcaaaatctagacttgcagtntgaggaaaaccagactctggaggacctgagcgaaagtgatggaattgaacagctggaagaacgactgaaatattaccgaatactcattgataagctctctgctga

SEQ ID NO: 597290 - DNA, 454 bp, Homo sapiens
ctattatgaatatgcgatatgaatatcattatcagttttacatcaacaaatgttctcatttctcttgggtatatggccagcagtgggtgggttatggtaattctatgtttaaccttttgaggaaccaaaagactattttccaaagtggctatagcattttatatttccataaacaatttatgaggttttcacttcctccatatccttgtcaacattggttattgtctttttaaagagacaggttctcgttacgttgcccaggctggccttgaactcctgggtttaaatgatccacctgcctcaacctcctgagtagccaggaccgtaagcaaaacccaacacctgactctaatcatttttaagtgtacaattcagtggtattaagtatatttatattgttgtgcaaccataaccgccatccatttccagaactcttttcattttgcaaaactga

SEQ ID NO: 597291 - DNA, 869 bp, Homo sapiens
taccaaatttctggtattctacagaaagcttaaaatttacccaatggatacatggagaaatattattatacttgcctttaaaacactcaaatgatggctagtttatttagtacagaagtgttaatagataagtagtcacaaatgttccctcctccacaggaggatttcttgtgattactggcttttactcaattcctcccatttttctctgctcacagagaattaagcatttccccagtgcctgaatatgtaactgaataaataaatggggtattgaggaagaatatgggaaatgtccaggctcattggaattcaccttgaggatgctgtaatactgctcaggttgaaggggaagaaaagactagaatctgaagagaagatgtagatgaaagaatagaaagcttgttagatatctgactacaattcaaatatttttttttcaaatacaaaattttttatttaaatttctgacttacaaaaagctgtacataattaatatgtacaactacatgagtctggagataaatatacacccatgaagccatcaccacaatctatgccataaacctatttatcaccttttatcagctatgtagcaagttgcatcttttggattttagttcaaggacaagaagttaatttttaaatgactactctcaaagtctatgaaagtcttagacaataaacaaaaaaagggcggggtcaaagtatccttgaaggccaggttaggtaccagttttgtaaagtggcctagggggtggatataaagaaggaggcgcgttaaacgtgggtggaaagtactggacttggaagactttggtggattggaactgagtagtcggtaatagtttggagtgtggggaaggata

SEQ ID NO: 597292 - DNA, 425 bp, Homo sapiens
  misc_feature (23)..(23): n is a, c, g, or t
cggcctccgaaagcgctgggatnacaggcgtgagccactgccctgggcctacaattttcttaactagggttgaaggctctgaaaatatgcagaaaatcatataatggccttatgaaggttgtatatatggcagaaggattctgtttttctggacaataaagataaaaaagtagaatatattactgacatcagtttagaaaaatgtatagtagtgtagtgtacatacaggtaattgaacaaagaaatatcaataacaattggtaagagcatttttttttttttttgagacagagtctccctctgtcgcccaggctggagtgcagtggcaagatctcagctcactgcaacctctgcctcccaggttcagcaattttccctgcctcagcctcccaaatagctgggatcacaggcgcccgtgtcgacgc

SEQ ID NO: 597293 - DNA, 1314 bp, Homo sapiens
attaaaaactattgccattctttctgaggattacttcattgtcagcacacggagcgacttaaagttagaaggagggcagttgttcctaagttaggaaacgttgcacaggtttctgagagtgatagagcatcaacttagatcagagttgactcgatggacgcaacatactacatctaaacatagtgatcgtcttgtcatgtaggcgtactgcgaatcagtgtagggaacgaaccaatgaagagtcgacacttgagagggagccattgcacaaggctgcatgatgtgtagcatgtccttgggttaatccacgagacacatagcagacgcctttaccacgacacggcatagggcacgcgcaaagtcgaagggaaagctaagcgcgtagcgtctcgtaggaagagaggggacgtcttttgggtattaacccaccaaggtgtcgcacagcacacagcaagtctcttcatggtagttaaaccctttcatagttgcgtcggtgcgaacaatctaggattggataacacgatatagaagcctgtggcacccggcatatatgacagatcaagtcttgaggagtcttaaggccatggtgcctcttagggtaagagactatagattagaactgcgaactctgggagaaagttggtttgccaatgcctttgccacacacattaaggcagttgccaaggcacctttattgctccgagatagaactgagaacggcgaacgctcggagtacttcgatgcggatctgaaaaccgaatagaaggcgaagttattgggcactcgcaaggggcaacaaacaatcggttgagcactttagtctccgggcatccccaggttggctacacaacgtgaatgtttacttcgttttcgggacaggagggtttggaaccacctgcttgggaagcttcatagatggaggtacacattctttgctttggctccctttcgcagtccgagagctaacgaataggaactggggtccccagggtgaagaggttagccttcgaggcaacatggggaacacggaaagtagaatgcctgaagtgccgcatgaattttagcacccaggggttactagcatgcgactggttataatggcacagttgggcaatgaattccgggaccttggaacgtttatagaccttcgtcatgggagagcgccttggtgcagggcacgggtactgagcgcggggagtataaggtcccactctgaagagggtgacactgaggccgttggaatcccaggccaacacttcatacgagagactatgtgcaggtctggatccccaccagcgtgacgctggactgtgg

SEQ ID NO: 597294 - DNA, 177 bp, Homo sapiens
agcggttctagaccagcctggccaatgtggtgaaaccctgtctctactaaaaatcaaaaaaaaaaaaaaaaaaaaagggctgattccagagtcatttccaaggtttaatttctgtcattcagcccaaactcattactttatggttacttatggggaaccctcatctaaaaaagcaag

SEQ ID NO: 597295 - DNA, 143 bp, Homo sapiens
gctggcaagggtgacattgtctataaagaccttgcattttccacttgagcccaggagtccagggctgcagtgagctatgatcgcaccactgcactccagcctgggcaagagagtgagaccctgttgcaaaaaataaaaaaaaa

SEQ ID NO: 597296 - DNA, 433 bp, Homo sapiens
gggaaccacttccgcaaaggggatactttaaccaggtgtgaccattcgccagagtcccagtctttaagggttggaatcttgttttgagatgcctggattacaacccgtgaaagagaaatgtcccacaagagtggacaaacagaaatacagaaaaacagaaagaatagctatatttgcagtgaatacaaataagaacaagcatttgaataaacaaggaaatatttgggcaaatttccacaagtgaaagaataatatttaaaatatgtgtttctataattatattccttctggccaactcaggagtaaactcacagattttctgtctctaacccccaattaaggtgatgcttgtcactgactcacatgtacagggagtgttgcactgcaccctggaaattcattttaatgaccactttatagtcctatagtttat

SEQ ID NO: 597297 - DNA, 516 bp, Homo sapiens
actactttccacaggcgtactttataaaaatggccttctgaaaacatgagcggaatatcttttctcccagttgctgcttaccctggactggtttatggtgctctctgccatgaataagttattttatcacacatagtcaattgcatcaaatttattagttaggacataaactcagctactattaaaacaaaaatctaaacatagcaatggcataacataaccaaatgaaccaaagttcatttctttctcacacacaaaatagtctgaacactggaagtccaagactggtaagatgtttccacgatattgggaagccacactctatttatggttcagccatcctcaacccatggcttccatctcatattctagggtgacaggtccaaatctcatccaccacatccacactccagccagtgggaggagtagaaaggaagcacagagcacaccccatttctttcaagagtacatcatagacgctgcatactatgctcctctcagatccccctgtggggg

SEQ ID NO: 597298 - DNA, 323 bp, Homo sapiens
  misc_feature (18)..(18): n is a, c, g, or t
  misc_feature (61)..(61): n is a, c, g, or t
  misc_feature (138)..(138): n is a, c, g, or t
actccctgaccctcaggnccaccccgccttggccctccccaaagtgcctgggattaacagncgtgagcccacccatgccctagcccacccacattttcctttatcccagtcaacccattaatgggcacccgggttgantctgtgtctttgctgttgtgaatagtgctgtgataaatacacgagtgcagatgtgtttttggtagaatgatttcttttcctttgggtatatacccagtaatgcaattgctgggtcaaatggtgtaattttagttttttgtttttttttttttttacttttcagtagccattctgactggtgaccc

SEQ ID NO: 597299 - DNA, 943 bp, Homo sapiens
caaagagcgtgtctaccatgggctctccgtgacaaggataagttttgaatttttctttatggcgtgggagaggccacagccggactccatcgactccccggaatcaggtgcgaaggctttgcctcccgggttcacgccattctcctgcctcagcctcccaagtaacgtgggactacaggcgctcgccaaccacacggccggctcatttttctgtattttgagtagaggcatggtttcatcatgtgagccaggatggtcttcaagcttctgacctggtcatccgcccgtcttggactcccaaagtgctgggattacaggaatgaggccaggcgcgccatgggcccttggaccatggtaattgcaggaaccagagtctgcgcctctggtgcgccccaggggtggcagtgcacgcagcgccaccgttggctcaacggagaaggatcacgaccttccctggctcaaagcaagtactggcgatcggaccaccccaggaagtgggggctcaccgggtgggtgcataccccaggccccgggcaaatcgcggaggtccccacgccaccagacggggggtcccacaccagtgtgttcgcccaacgaggagtccaaaactcgcggcctccaacatgacccgtgccaaccctgggtccccacaggggggcggaaatacacggcgcacaccgccatggacccggctacactaactgagctgcaccacacaggggcgcaaaccaacgtaccaggatagtgtcacccggacaacggcctcaacgacgggcccaaacatacaaccctacgcccggcgccgacgacaaccctgcgacacactgtgagcactgtcgcccataacaccacaacaagcgcgacaccgacactccgcctccagacacgagccacacagccaccacgcggcggcaccgcaacaagcagacgcacccggaaagcg

SEQ ID NO: 597300 - DNA, 365 bp, Homo sapiens
cagctctcactgatgcaagatatgggctcccatggtcttggaaagctctgaccgtgtgcctttccagtcaggaacacagtgcaagctgtcagtggatctaccattctggtgtctggaggatagtggccctcttctcacagctccactagccagtgtcccagtgggcactctgtgtatggattctgaccccacatttcctttcagtatcgccacagcacaggttctccatgaaggctacacccttccagcaaacttctgactgcacatcctctgatatatagtcaaaggctcccaaacctcgatttatgcttctgtgcacctgcaggcgcaacaccacgtggtagccaccaaggcttggggcttgc

SEQ ID NO: 597301 - DNA, 208 bp, Homo sapiens
ttggctctgatggctccagacttggactgtgtcacattgccaggcttccagtgctccaactttgcagacggccttgttgtggtgacatgtctcgtgtaatctgcgcaaagcacaccatggcaagaccgtgggggaaacacaccagtggttttatccagccctgatgatctcttgaacaactttcatctactcagctgttgtggatgtg

SEQ ID NO: 597302 - DNA, 462 bp, Homo sapiens
cgttttttacagaattcagccagacaagactcagttgagagcttttctttttcccctaagctttcaaggctctcccttttggtttctaattacaagaataacaaaaaatactatcattaattttttgttttgattttaaagcttatgtttttcttccagctggatgttagtgagacacaggcctttttccttttttcatgtgtgatgctattcctcacgcctgagctctcacctctgaccataggcggcctgcagccaagcgcccactcctctctgtcctttctatttctgtgcgaattgggcttccctaggaagctccctgaccacagcactcaacacagagatgggggggcgggaaggtaccttctactttttggttttaacctcaagtgaagtgtaatatataatacatacctccagataagacatctggccctataagtgaccagctccatgaatgtt

SEQ ID NO: 597303 - DNA, 474 bp, Homo sapiens
ccaaagagcccttcagagcacaacgcaagaagatccatcgcagagtcctaaagaaaaaacagtgagaaaattgagaatcatgttgaccatcaacccatatgccacgaccatgcgccggaacaccattcttcgccaggcccaggaaatcacaagctccgggtggctcaggcagctgctgcagcagcggcactacaagccccatcagctgagaaggctggcggttgcaggccagaagcctgtggtaggtcagaaaggaaagaaggctgctgttggtgttaagaagcagaagaagcctctggtgagaaaaaaggcagcagctaccaagataacagcccctgacaagcacagcctgcggagaagaaacctactacagaggagaagaagcctgctgcataaactcttaaatttgattattccataaaggtccaaatcattttggccagcttcttttgaataaagacctgattatccagg

SEQ ID NO: 597304 - DNA, 772 bp, Homo sapiens
taagtaaacccggggttccaccatgtgggccaggctagtttcaaactccggacctcaggtgatccacccacctgggcctcctaaagtacggggatcacaggcgtgagccacagtgccgggcccactcggctttaataatagggagaaatttcacataagtataggtgagctaatatttaactttcttattttatataactaccatccatatttccaagatgtagaacactgaactaagcccggtgagagatgggaacaatacgtaagagtactctagacgtcagaatggttttctaaatagagaaatcaggagggggtcctagagtgagctagagtaaatctatctcaggcatctctacagggctatacgaacggtggttctcaaaatcctgggtctcaggactcccttgcagtctaaaattataaggaccccagagaggttctggtttcacatccatcagtgtcggccttattagaatgaacgtgaggcgggatggaagccttaaacctagtgttacttggtcacagtactataaccatttcattactgggaccttcactgtgaactcctttttcacaatctttcgcggagaggtctctaatttgaaccctttagggggcccgctaaggaggggatcatatttggccaaaggcctagtatggggcacaggtgggggaccgcaacgtcacaaggatggccttcacgagctaggaagggaaagacagtcgcttcaacacacagcgctcgcggcgccatcctactcccgccggg

SEQ ID NO: 597305 - DNA, 103 bp, Homo sapiens
cgacacaacacaggaagacagctcaaataggggcttggaaaggccctgtggttccccggagaagggcccatcagacctcagcagcccttcctctctgggacac

SEQ ID NO: 597306 - DNA, 153 bp, Homo sapiens
gttctccccctgtatgtataacctctccttctcctactccttaactgactaacgaaattctatgaattcatcgtgcacttgtgtcagcccacgaaccttactccatagagtccagcttgtctggaagtaacattgtcgttacccccatccttc

SEQ ID NO: 597307 - DNA, 773 bp, Homo sapiens
  misc_feature (150)..(151): n is a, c, g, or t
ggagatgagttcatgcgagcggtacttcgacggtgaggtcagaggcgggaatccagccctccacgcatataacaacaggcgagggagggacctgcccattatgaacctgtgagttatggtgaccttacgcttggacacgacgtccttagnnctcgacggagacgttgcttatcggcttccttgcgatatcccccatagaaaggtcttcactacaaagacaaaaagagccgctcttgtgtcaggtcattggtcctcgtgctagcacaatggactcataacgacacggttggcgtggcagctgtcatttcttgcgcttggttactggtgggcaaaattcttccgctccattttcccgcgacgccatagcgaacttacacatggaacccccgccgagaaacccttgcgggctactttgccctacggtaatatccgttgttatccggtacgcggcttgaaccctcgaacgacaccctgggaggttgcgaaggtttccgttggcctggtaatgcaccgccgccgcgttaccgccgttgcagtatgcggcggctaaaagggaatccccgtgggtgggttccatcttaccacagtgtaattggctgccgggtggggggccacagacacggttccattaccctgttggtggccgtcacggcacggggaaaccggtttcaaccaccattggtgagacggctatgaaacaaacgggccaaattcacaccggttccggtgaaccattgctggggggaccccagagcacgccgtaggattccata

SEQ ID NO: 597308 - DNA, 364 bp, Homo sapiens
attctaatcgcaatggcattcctaagtgcttaccgaacgaaaaattctaggctatatacaagtacgcaaaggcccaacgtgtaggcccctacgggctactacaaccttcgctgaggccataaaatcttcaccaaggagcccctagaacccgtcacatctaccatcacgctctacgaatcacgccccgagcttagctctcaccatcgctcttctactatgaacccccgctccgcagaaccgacccctggtcaactcgagctaggcctcctatttgttctgagccacctctagcctagccgtttactcaatcctctgatgagggtgagcattcaaacttgaaaaactaacgcccctgcattcggcg

SEQ ID NO: 597309 - DNA, 721 bp, Homo sapiens
agcgggggctccccgttgggcgggggcggcggtccgagcggctgcggcagcggaagcgggtccgggtcgcgcagggcgggggcggcgcagcgggcggaggcgtgcgtgggccgcctgggcagaatgtcacgatggacgagggcgtgacgccccgtgctcccccgacagcctggtctaccagatcttcctgagccgtgggcccggccgacgtgctggccgccgggcttggtgtgccgccagatggcagggccgtgtcgcgggacggagttcctgtgggagggagcagtttctacacgtactaccaggtggccgcggacgtgccccgaaacccagcggccatgtcctggtacggaggagtccagcggctgttatgacacggtgcccgtgcgtggaggtgcagaacgctgcgggaacaagacagaccaggtccgtgcaccctcagcttctccacattccggggtacccagttcgacgtccgtgagtccaaaggaactgccacttgtgaaggatcgtggagcaacgacccttgaacatctcgcatgatgcaacagcgcggacatgcggccctacaatgtgggagcctaacacacaagttctcccaggtttcaacaagggacgaactccgctacgtgctggcctcggagggtgtaccggggggccggcacaagtcctcatccgggcaaagattggtggcatcagcctaggtgagcacggcggctga

SEQ ID NO: 597310 - DNA, 578 bp, Homo sapiens
tcagatggatcacttgaggtcgagaattcaagcagcctggccgatgtggtgagacccatctttactagaaatgcaaaaattggctgagtgtgatggcgcacgcttgtgatctcaggtacttgggaggctgaggtgggaggatcacttgagcccggaaggtggaggttgcagtgagccgagatcgcaccactgcactccagcctaggcaacagagcgagactcaaaaaaaaaaaaaaaaggaaaaacaaaaacattaaggctcaaaaacacgggggctcatgcctgtaatcccagcatttggggagggcccaggggggatgggatcacttaaactcagggatttcggagaccagcctcccgagtgggctggggattacagggcggtgcggccaccaatacccggtctaattgggtataggggggggagacgagatttctccatggtgggccaggtgggtctcagaactctgagatccgggtaatctggctggcctgggcttccaaagtggtggagattatagggcatgagccatggggctgggccgaatttggatttcttatttacaagtcttagatac

SEQ ID NO: 597311 - DNA, 992 bp, Homo sapiens
gtaggagactagctgcacggactctaggaaccatagaacatatttagatcgaaagatcaagctattgatgcgcttttaaaattttactacataataaccccgtacaacgcagcagcacctagaagaaggtactatagcaatgttttagccctatatgtatagtatatgtaggctggctagcagggtgctctatgtaccataatggtacactacatattacatatacacggctaggcctagctagtactagcctatggggtctaccctagataattagatagatatataggctagataggccaacacctacataagccatagaaactatgaatcagataaagactaggagactatctatagctaggatttatgcatatccttataacatggagtatgggcctaggtgccccctagccccctagcgcacgctctctccgctcctctcgcctagtccaaccccccagccataccctactccccaccttgtccttcctcattagggggtcatctggtgagagttggaatctttttatctcttggcttttcattccctcatgtgtggcagcttcttatttgctcttggggtctggctcgggtagtcttaatctcttccttttccttagtgtgcaaggtgttattactttgtggcattgtcctatggcgtctctttggtatgtccttttggttatggcttattcctggttccttttccccccttgggtgtgtacatttggtatctttccgtatccttggggaattacccgatatataggggccttccttttcccagggggcggtaagacccgtgggtaatttggttggggggaccttagggctagtggtcctaattggttaggtgggggcctttcctgggtcccctcctcccctccgggcacctcacctccccccccctccccactcccctccccgcccccctcccgggccccgcccccctctttggcccccggattctcgggtgcgagttttctgaa

SEQ ID NO: 597312 - DNA, 370 bp, Homo sapiens
cacggggtactgggagaaagacacacacccaactgaagtcggcatgtgagccttggttgtggtgtctgatacccacagatgtttttgggcagctttcacagtgtgtgggttattgggctttcagtaaaacagtttgcagctctttcatggcctgaccctgttctttaaggtaatgacattggctaaatatctgcgggtatggcctttagaggttttacatttttatattaaaaaaacagagaagtcaggtggggcgcagtggctcacgcctgtaatcccagcactttgggaggctgaagcgggcagatcaggaggtcaggagatcgagaccatccgtgggtaacacggtgagaccccgtttccaacaggt

SEQ ID NO: 597313 - DNA, 930 bp, Homo sapiens
  misc_feature (13)..(13): n is a, c, g, or t
  misc_feature (32)..(32): n is a, c, g, or t
  misc_feature (83)..(83): n is a, c, g, or t
  misc_feature (89)..(89): n is a, c, g, or t
  misc_feature (130)..(130): n is a, c, g, or t
  misc_feature (192)..(192): n is a, c, g, or t
  misc_feature (493)..(493): n is a, c, g, or t
  misc_feature (526)..(526): n is a, c, g, or t
  misc_feature (544)..(544): n is a, c, g, or t
  misc_feature (547)..(547): n is a, c, g, or t
  misc_feature (568)..(569): n is a, c, g, or t
  misc_feature (571)..(572): n is a, c, g, or t
  misc_feature (576)..(580): n is a, c, g, or t
  misc_feature (628)..(628): n is a, c, g, or t
  misc_feature (694)..(694): n is a, c, g, or t
  misc_feature (698)..(698): n is a, c, g, or t
  misc_feature (703)..(703): n is a, c, g, or t
  misc_feature (707)..(707): n is a, c, g, or t
  misc_feature (722)..(722): n is a, c, g, or t
  misc_feature (724)..(724): n is a, c, g, or t
  misc_feature (739)..(739): n is a, c, g, or t
  misc_feature (742)..(742): n is a, c, g, or t
aggaggtcgctgngagctgggaacaggcggcngacagcggggaaatccaaatctcctcccaaagtgcccattctgattcaggncgatanccttcccgcggggcccccgtccacagatccgcatcctcaanagcgcctaccagcaacggtgtggtcagcagccccaactccaccagcaggcccacccttccantcaagtccctagcacagcgagaggccgagtacgccgcatgcgcccggaagcggatcctgtggctagcgccagccccgaggaggagcaggagaaacccatcctcgacaggccaaccaggatctcccaacccgaagacagcaggcagcccaataatgtgatcagacagcctttgggtcctgatgggtctcaaggcttcaaacagacagcgcataaatgcaggcgaagaaaagatgccgccgttgctgccgtcaccgcctcctgggtcgtccgccatcgcgagttgcgactgccgtggcagacnagctggatcttgtagcagaggcgaacgacctgnacttactttgcactgttnatncccctttgctccgcccaattnngnncttnnnnncccattgccctgtgacctccccccttctcccccttcccactgtgattngcacatcgacaagggctgtcccaagtcaatggaaagggaaagggtgggggttaggggaaggttggngggnaccancaangactcagagagtcananagtgccacttggcanttnggggtaaagccagtgccagcaataacagtttatcatgctcattaatttgggatttcaaaacacaaatgaaaactcacacccacccacccccaagtgcatgtctccatcacttaaaaagtaagttccatttgaaaatatcctttcttttttttttcttcctatttttgtttgtttatacaaatatctga

SEQ ID NO: 597314 - DNA, 212 bp, Homo sapiens
tgagccggcctatcttgtcggggttgatacttgcaccaatcagcgctctgtgtctagctagaggattgtaaatgcaccaatcagcattctgtaaaaacgcaccaatcagcgctctgtgtctagctacaggattgtaaatgcaccaatcagcactctgtaaaaacgcaccaatcagcactctgtaaaatggaccaatcagcagacatgggcag

SEQ ID NO: 597315 - DNA, 102 bp, Homo sapiens
gggattacaggcatgaccaccggcgctggcgagatgacccagttgttataagcaagcatgcaggacagtctttgacagattctttgttttattactgttttt

SEQ ID NO: 597316 - DNA, 443 bp, Homo sapiens
  misc_feature (53)..(53): n is a, c, g, or t
  misc_feature (104)..(104): n is a, c, g, or t
  misc_feature (138)..(138): n is a, c, g, or t
  misc_feature (152)..(152): n is a, c, g, or t
  misc_feature (158)..(159): n is a, c, g, or t
  misc_feature (286)..(286): n is a, c, g, or t
  misc_feature (356)..(356): n is a, c, g, or t
  misc_feature (373)..(373): n is a, c, g, or t
  misc_feature (388)..(388): n is a, c, g, or t
  misc_feature (394)..(394): n is a, c, g, or t
  misc_feature (418)..(418): n is a, c, g, or t
  misc_feature (424)..(424): n is a, c, g, or t
gtccctcatctgcgtctggaaggaagtcatccgcccgtccctcatctgcgtcnggaaggaatcatccgcccgtccctcatctgcgtctggaaggaagtcatccncccgtccctcatctgcgtcctgaagaatcatccncccgttcctcatcngcgtcnngaaggaagtcatccgcccgttcctcatctgcgtcctgaaggaatcatccacccgttcctcatcggcgtcccgaaggaagtcatccacccgttcctcatctgcgtcctgaaggaatcatccacccgtncctcatctgcgtctggaaggaagtcatccgcccgtccctcatctgcgtctggaaggaagtcatccgcccntccctcatctgcgtccngaaggaagtcatccncccgtncctcatctgcgtctggaaggaagncatccncccgccgcgagcggccgct

SEQ ID NO: 597317 - DNA, 396 bp, Homo sapiens
atatagtagcacatactagtcatggatatagctgatgcagtcatcatttcacattataatgtaccacagctatatatgcagcaaaaaaaaaagttagtccctccagctgaaaagcggtcattactttattatcaccacagaattggaaagtgatttctggtagttaacagtcagatcttattttttaggttaactaaggacaaagtggaataattcactggtgagccaaattctttctgtgattccatctttttgggagcagtccatcatttatggagaaaaccagccttagaagggtgatttcaggtttcagggtgatttcagatagaattggtatttgggctcagcaaatggataagactgggggccaaggaaaaattttaaactttttttttg

SEQ ID NO: 597318 - DNA, 501 bp, Homo sapiens
agttcgacggagactctctgaatcccataactaatgacctcgagagaggctcctcctactttattaataagaggcgaggaagtataatccagcagtatgacaggtccgcagtggacgatcacagtgaacagaaaactcttggagccctcttgggcctgtgctttgaggcccctggctgccctggcatttctgggaccctgttgggttatcatggcctgaggcttctggatatcctccaaatgacaagttaatcacccaattgtcgccttcccatgggggactctccaaaaggactgatggtggctcggaaattagtcagagatctgggacagaggacgagcaaagcttcgtcttggggtctcatgggacctggggcatctcccccaagatatgtcgcagaggcgggactcagagtggtagcgggatgagtgttcagagttgtgtggcgtaggcatgttggaagggaagctcttagggctggaggtgggagggtgggaatga

SEQ ID NO: 597319 - DNA, 113 bp, Homo sapiens
gtgtggaggcagtcaagctggcgtactccatttagcccggcgctccaggtacacaggctgtagttgagccctacaactccatccccacaacctctacccacaacctctagaag

SEQ ID NO: 597320 - DNA, 735 bp, Homo sapiens
ctcctctttcacagtaatttctgaaggagatgctgccaatcccccccgcgctgcgaaggcgcaagcggtctaggtatacacttcacatggtttctttgcaggtcgcaacagcattttaatctgcgcccgacaattgcacaagtgcgcgcatgccttgtctgccagtggacgctccaatgaacaaaaagatagtaaattatgccaataaattggtgacaaagagctttgggatattttaatccaattattttatacaactataatgtgcttgaaagaattgtccaatgtgcttgaaaaatatgaccaaaaatacggaaggtctttttgctggctggaattgtgttcagtggacttttctagggtgctctacttttactccccccaaacaggtgctctgttgcgcacaagaaaactggaagcgcattgcttgtggggataaaagcgtctccgtggaccaagataacgcctctttcagaaccaaaactctcctcctgacattctgttctgccatcttatcgtagggaggatgggtccatcttaagaataaggttttcaaacaacaacaatagatgtggtcataatggactagggttgtcacaggaacagtctggtgtaacgtgcagaatttaaaatccccattattttgccattaaggctggtactcagagtgggtaattccaattccgaaagagttccctcccaagaaaaaggttttctatagaaagctataaccct

SEQ ID NO: 597321 - DNA, 187 bp, Homo sapiens
actgtactcactagcaccatctgacttatcagaatacaatatttcataataaactgccataactatccccactacatttacttaaacaatcacctaaaagagaacactgcatcagatgtattctggaaaaactttcattttcaattacagttattcccgccacccatcaataattccacttctaagt

SEQ ID NO: 597322 - DNA, 765 bp, Homo sapiens
ccaaagcacccagagtcaaagccaagatcatgctgaaggtgccaatggtgccaacaactccagaagctgacaacgatcttcctggacgacgaaacaattactggttacttccagcatctctagcttgaactgctcggacggatgtgaccagtactcttaccttttgagttggctgacagcaatctaagactcatgtcacgctactggctcgttctgagccattcaagactactgacaaggagacttcctaaggctcagccatctatggcttccgattggtcttgtgtcatactgcaatgacgctctttcatgcaaccatgacacaattcgcggcaaaagcactggtgagaaactcagttccacattgtgtaacacccactgggcgacgagtgtccaagaagaccatgggtattacttcgtggtttgcactctcgacggaacaagaaacaagttccgactaggtccgataaccttctgttgagacataatggcgacagaacttaaaactactcgaagaagctcggcggactgacagtttctgcgtgtggaccccaacgcgggcccacaatacacttctaatttcaggacaggcctagccaaacggcatcacatgagagacatgatcattaagcagctcccttggggttgcacctcttggtgaacaccccatagggctgctaacaagacaacgcgccgtaggacgctatcatttggtgtccaccattcggcccaataatgggaaccacaaagaggtgtcctatacag

SEQ ID NO: 597323 - DNA, 448 bp, Homo sapiens
  misc_feature (37)..(37): n is a, c, g, or t
actctgtcagcgatgacagagcagatcctcttcatanaaaaatgaattatcacagggaaatattgagtcactatgtgctcgacttgttggtaaaatcagagacaaaatattatgggcgggtcactggttcaggcctctgttctcagcactttgggaggctgagtagcggggatggcttgagctaatgagttggagaccagcctgggcaacatggtgacacccggtctgtacaaaaaatgcaaaaattagctgggactataggcgtgtgtcaccacacctggctaatcttttgtatttttagtagagacggggtttcaccgtgttggcaaggatggtcttgatctcctgacctcgtgatccgcctgcctcggcctccgaaagtgctgggattacaggcatgagccaccgtgcctggcctaatttttgtattttcagtggagaccgggtt

SEQ ID NO: 597324 - DNA, 438 bp, Homo sapiens
  misc_feature (3)..(3): n is a, c, g, or t
  misc_feature (56)..(56): n is a, c, g, or t
  misc_feature (140)..(140): n is a, c, g, or t
  misc_feature (162)..(162): n is a, c, g, or t
  misc_feature (164)..(164): n is a, c, g, or t
  misc_feature (233)..(233): n is a, c, g, or t
  misc_feature (284)..(284): n is a, c, g, or t
  misc_feature (289)..(289): n is a, c, g, or t
  misc_feature (297)..(297): n is a, c, g, or t
  misc_feature (319)..(319): n is a, c, g, or t
  misc_feature (347)..(348): n is a, c, g, or t
  misc_feature (354)..(354): n is a, c, g, or t
  misc_feature (410)..(410): n is a, c, g, or t
ccnccgctcttcagtttgcccgaagcttctgacgcgttttactaagttctaccatntaggccttttaacaacaaaaacattcaagccattgttaattaccttcagccatgtacctttcattgaaaattaaaaaaaatttnccctttaccaatctttcagatntnttctataataataaattataaatcattcatcatgtgaaaactttttagctattatttctctttctattnggggatttaactgaaggtatttttaccgcatctacaccttttgtattgttnggagntgttttgnattttcttccttttgatcattntgacacaatattcacttttttggaaaannattttnctacttggaaatcaaatacattctattctgctgggaaaaattacttactacgtatntgcaatgatctcctaagaagattttcta

SEQ ID NO: 597325 - DNA, 86 bp, Homo sapiens
atgcaaaggttgagccagaagtgaaagactccctgggggtttactgtattgatgcctacaatgaaaccatgacagaaaaaaaaaaa

SEQ ID NO: 597326 - DNA, 289 bp, Homo sapiens
ttaaggggcccccggggggcccccccccccccggggggggggggggggggcccggggcccccccgggtttaattttttttcctttcccccccggggggcgggggggggggggggggtttttgggggggtgggtttttttaaaaaaggggcccagaaaacccccctttttttttaaagggtttttttcccggggggggggggtggtttttggggggccttttttcccccgggaaaggggggggccccaaaaaagaaaggggttttttaaaattattttttttccccccca

SEQ ID NO: 597327 - DNA, 338 bp, Homo sapiens
aagatcgggcaactgtctatgtagcggagagctgcctccggtcagtaacatcatgattttgagtggtgtactctggactctacttcagtgtgtgtttggttgttggtgtttcttaaatttcctgttccacttctcttccctgttgccagtctactcatgatttctctttctcatgatgatcttcagaagagtgactggaagcgcactgctccactttcacagagctctgcatcattgggtatggagcagggcttgtgtagcttttgtctgcagcactttctaagtgtgacatgacataaccaatcagactacgtgattaagtgttgatggtacgggag

SEQ ID NO: 597328 - DNA, 473 bp, Homo sapiens
ccggcacccccgtagaacctgatgcgtcgatacaggtagagtgtcaacaatatatcattgcagagagtcatgaaaaccatcatcatattggtgtgagctccttcctcccctgaggcatcagcttggcaagcatacgctctctttgaaatctgggagttggtggggcgagggtcactgctaggcagcttcttcttgggcagacaaatctgcctccttctgagcagccaggaagatggctcgttccttctggaaagctggaagctcttctgaactgaggtccttgcaccacgcgaatgcccagtagaacgggcggacccgatgatggagcgtggctacggacgactagggcgtacatcctgcagggcaaatgcctcatgctgagctttgatgcgggcaatctcatacgcttgcttcagtgtcgccaggcctgccacctcttgccctgtttgccgggcccccttttcaatcccagc

SEQ ID NO: 597329 - DNA, 518 bp, Homo sapiens
aagcaggctcatcctgcgcagacttctgaggaggtgtacagtcctctgccatgtataaggcgatacatcaaggcgacggacaatgcagaagatggcaggaatcacccagttgataccagcaactagaaagacaccaaaagcaatgatgctagacatgatagtagcactgtggtggactcaaaatcttagccccttctaacagaaaattaccagggcatgtatttcttaactctgtaatgaatttagctgaaaaggcaacgtggattagctaaaagtgacatgagtgtaacacatgccctgctatactaggaatcactctgccctgctgacttaaatgagaaacctcatgccccacttggctgggctcaatggctcacgcctggcctctatttgaatctttaaattagattagaatcttaaaactatagatctatgacttaatttcttagcaaaatggaaattaatgtgtaggcttaagaaataggacttggcatacatatgtgtaacatagggactac

SEQ ID NO: 597330 - DNA, 918 bp, Homo sapiens
ggaaaggccgaggctagcggatcagctgagctcaggagttggacgaccagcctgtctctactaaacaatgatattacaattgagctgggaggtcacggatggagcgcctgtaatcccagtctactcgggaggctgaggcaggagaatgcgttgaacccaggagacagaggtggtagtgagctgagagtcgcacgcaggtgcagctctagccctggcgaacagatgcaagactgtctcaaaaacagcatcagtagagcaggacgtgagacttctacctgctcactcagacatcatttctgcagccaacctatgggccacgtttgtggagctgcagataccgaaagccatagatgcccatggtgggcctgggcagcttggaagtctcctcttgggaacgtgaaagaagcagtgaaggtggccattgatgcacggatatcggcacattgactgtgcctatgtctatcagaatgcaacatgaagctgggggaagccatccaagagaagatccaagagaaggctgtgaagcgggaggacctgtgcatcgtcagcaagtcgtgggccactttcttgtgagagaccccttgtgaggaaagcctgggagaagaccctcaaggacctgaagctgagctatctggacgtctatcttattcactggccacagggattcaatgtctggggatgaccttattccccaaagatgataaaggtaatgccatcaggtggaaaagcaaagttcttggatgcctgggaggccatggaggacctggtggatgaggggctggtgacagcccttggaagctccaaattcaggcattccagatcgagaagtcttgaacaaacctgggactggactatagaccagtgactaaccaggtgagtgtcacccatagttcaccacggagatactggtcagtactg

SEQ ID NO: 597331 - DNA, 371 bp, Homo sapiens
aacggttaaggggtacggggtccccatgaaaaggtcgggaacgggataggggggagggtggcacaacatatacatttcaattttaaaaactaaggagaaaatcttccatatgtagagctaaacaaaagtggtcgaactggacacaaaagctggacccacacaagaaaaactataaatgggacttcataaaaataaaaatctggtactcggtgaaagaccctataaagaggatgaaaagacaagctacacatggggaaataaaaggtgcaacccatatatggaacaaagacttagtatctaggatacataaagacttctcaaaactcaacagtaaaaaagcacaggatccaaggagacccctctccacaggg

SEQ ID NO: 597332 - DNA, 1578 bp, Homo sapiens
tgcggtttagtcccgaggtcgctccagcagcccggcctcacgcgacccaccattcccgccgccccctcacggtgcccgccgttacccgccgacctggcattatctaacctgggcccctagattccccgaccccgtgcccatcatggagacctgacagctccatgaccgacctgcgcaccgatacccaggagcccagtcgttccagaacgccctatcccatcctacaatggggcaccctagcattgccatccatcgacgaccccatttcctggactcgtgccttgacccacatccttgcaccacgcataaaccactgaccattggaatccccggtgcggaggatgccctcgccgcggtggctcatgggttccatgttccctctaaaactgccgggccggaggcgcttgctggggatagccggacatcctgcgagacccggaccaacgaccccccgggaacttggcttaaggcaagaaagcagtgggacatcagaagagagcatattgggaattcagtcccctggggactttcaccacaagacttcattgcggcacgcctgtggggccccagcacaggcaggaatccaggcacaccaaatgcacaccggaacaagagcacgtggcacaccatggggaccaataacacattcccaccaattcacactggacgaaaccaacacagagcaagacttgggccaaccagccgtggaacaacacttgtgtgacaggtacaaagagataatcacccacagtgtgggacacttacccatgggaggacaccggtctacatccaaggggccgaagcaggaccagtcattggaagccgagacaggcttcatacacacgatagtccccaatcgaagtggtgaccccgaatgcaataacgcaggataacccacaggcaaagcactgggcaacacgaggtgggaccacaaaaaaggcggaagatccgacaaaatataaaacgactaagggcacatgtgacctggaaagatagaaacaacaacggattcgatgtacctgtgggacaaaacggtgaatagcattgttgggacatgatgtagattgaaaagggaacccataaaatgatctgtgtggttgtggcaacatagagatggggagcacgcagtatagcataaacggacagaattataaacagcgtatctaaaggggtacactaattacgcacaatatttacagctgtgtattcacttgtaggttgataacctagcactgcacaatgtgcactggagtgacagatcacacacaataggcgcctacacaggggagaattgattacataacgaacatattattacagggaagagaaacgatgaaagtagcaacaacagaatagagcaagagaataataaagaaagcataaacaactaaaataagaaagaaactaatgagacaataaaagacaagaaagcaaaacgagatagagacataaaataactaaacaagaaagacaagacaacaaataccataacagaaggagacataaacaccgacagaacacaacaaacaccagaaaaaaaacaaaccacagacagcaagtcaagaagcagagaagaag

SEQ ID NO: 597333 - DNA, 957 bp, Homo sapiens
ccggtgaatggcgagcgaccggggggtacgtcacagcacggctccagtgggctctacaaggcgcctcggtcgatgaagcttctgcgggtccccagtgccctctccctcctgctcgccctcctcctggcctcactgccaggaagctcttgtgtatgaccttcacgcagtcgaagaacgagttccagattggaggttgatatgtggaagaataatgggccttgattggaaagatactttctgcagtagtctgcttattgtataattttaggatattggaaaagagagatatggaagcaggaaatatattgcagtcctttttgctgggttcctgggttttgtcagccttattctgactttctcctcatggaagctatgcagatatgtcttggcatcactgcagctagtaatgtgccttctggattcctggcacctgtgttcgctcctgttgggtacgcattatttgacgtagctccataccaagagtccaagtggcgacaaatttctgggtccgctgtccatgcgacaaacagagacatctgcatgttatatggttgggactgcagcttttcgacctcgggttcctacatctggtatggtagccgataagtggactgtatgtgcggtctgtggctacgatagcgatattgtgccaggtgcatcaggtgctctgcatcccgcagctggatggcagaagattctttgtcttggactactttgaacccgatctgcgtcttcttcagaacccaccaggaaagccagagtcgggatgggagccagggctggaacgtcagagacagctgagaatggagctgctgtaccgggcggctgatgtcctcgtccagctgcccaggggggcgactgggacgcgcggggggattgacactggcatggccgtcctccttaggcaggacaaagtaacaaaggcggcggagtgagcagcgggccctcttatttcgg

SEQ ID NO: 597334 - DNA, 1243 bp, Homo sapiens
  misc_feature (129)..(129): n is a, c, g, or t
  misc_feature (522)..(522): n is a, c, g, or t
ggacgtgacagtcgtctataagagcctggttggcgatccctgacgcaccgtcgtgatgcccaggcaagactcggcgagcgtggaattacagacctaccttacctgtagaggatcatgccaactatgtgnaagtcgagttatgcgcgacacaggtttccatttcgtgggaggcataacaagtgtggggctccaatgactgatgcacgccagattcggcgactgtccctattcggaggcgacagggctgtcggtgctggtagtgggcgagacgaacacctatcgaatgcggcaaaaggctcgattcactgagtgggcaacaccatggtggagtcaataaacctctaaccgtcttcgagaaaagacttgcatggcactcgatattcacccggcggcgaagtgtcgaggcttgtcgtagttccacacgaattggatggacacttcatcgatgacggatgtcgatggtagcgagtcgattgctataggcgcgacagtaatgggatgacaccgcaatgtctggccggntgtcctggctgcaatgtttgccccacatttgtagaaaggctatcatgtctgaccagcgatctgaggatatcagcatgcggtctcgacgagtgctgaaaagaagcaaccgctgcccttgtttatgtcaccagtggtcgtgttatggggtaccttcacgtacatcattaaataagtgctacccatgcgggcggcatggctatatttgcatacacctttccctcgtgacgcttgattttgctgcacaagtatcgtgtaattttacacgcgaactttggcgtggacacgaatatggcgtggggcgcaagacctagttcaggtggcgacccaaaagctaggaggctatagaggaactgccgtcgaagggaagattcgtgcgcgcacggtaatcgttcgcttctttggggtggctggagctctaggatccgaatggtagggggtggattttgggaacgatatgtgggcaaattggcaattacgtaaactaaaagccgcggtggataacagtttgctttgggacataattccgacccagggacgcgaacgagaacctcccttggcaagttctccttccgggttttttccccatagggaaaaggaggtgagtgcgcaggacaaaagatggatatgggcccaaggttggttcctttgatcttagggcaaggaagtttggggcgtataccccaaaacttggttgtaggccattccaaaggtataaccccca

SEQ ID NO: 597335 - DNA, 740 bp, Homo sapiens
gtatggtataagtacgcctcatcactcattctcaaccccctgtaccaaatacatagcctaccccttccttgtactatccctatgagtgcataattatagccaaggctccatctggctactgacaaacagacctaacatatcgatcattgacttactcttgcaatcagcctgacatagccgctcgtattaacagcacattctcgatccgataagagccccacatgtaagtcgtttacgcgccggtcggcagtcgatgtctcagtatagtcgccccatcgggactttccatcgctctattactattcatgtccgtagcgaaactcaaatctacgtaacgcgctcactagttcggcagtcataatcgcatcctcctcaaaggcacttcaagatcatcgtacgtccctagataatagctttctgatgagttctagacatagcctcgctaagctcgccttagcccccgactattaacctactgggagaactctttgtgcgtagctaaccacgttctcctgatcatgtatcactctcctaccttacacggattcaacatactagtcacagcccttatacttccctcgtatcatatttaccacaacagaatggggcggtcattcacccgaccatcattaacatcataaaatcctcatttacacgagaaaaaacctcatgttcatacactatcccccattctcgtctaattcctcaagccccgaggtcatttacccgggttttccctc

SEQ ID NO: 597336 - DNA, 150 bp, Homo sapiens
actgccttgcttgcgtgatctctcatacacggataccccatttttggcgactatcctgtgatcattgccctgttagctctttccagccagccacgcgtgttcccggttttgccttgccaggtattagagggtgtgatcgtatctgtctgc

SEQ ID NO: 597337 - DNA, 600 bp, Homo sapiens
tgcttaggattataggggaaagaaccaactcagccctggtgatcttctttcattttaataaatttagtatgttattttaaagtagcatattttctttctactttatgcagaaatcacatttcttatactaggtttatcaacatccattatttctttgcatatggctctagagtcattatatctgcttttcaggcttatgcagatttcaaccatgtgaaacatgaatataagcatgtccgtgattcttttttaaatgattttcacctacatttgaaacatgttatattagtcatggcctctcctttttctttttccttgttaaatgaatattgtgaattcatggcagaaactttgggaatcttacctaaatccagtataagtgacagacttaagagtttaactggtgtttgtttttgcatgcaaatcattagtccatttatttatgcatgcattcattcatttagcacctgctacgtgtcagatacagtcccagagctgacaatattaagaagaaggatgaagtattaactctttccctaaaatgcctgtaatctactggaggtcagacacaagacaagtaaatttcaggaagagaaaagt

SEQ ID NO: 597338 - DNA, 258 bp, Homo sapiens
ccaattggcacttaattactttgggtgggactcagaaactcagaagacacaaaaaaaattcacgacacagtctctactaaggagtttataattaggggatcacttaattagtaatgttattatattacatacttatatactggaattatcgagattaacccggctggtaaatttgatacttagggaaaaacctcactttcacacaggtgactactggctcttccatcagactataagcacctttcaatttcatgtttt

SEQ ID NO: 597339 - DNA, 372 bp, Homo sapiens
acctactactactaaattcgcggccgcgtcgacctttgattattgactctggcttttccaataaatcaaataccgcaaataatccccacgatcctcttgcagcccatggaccaacggtttcatgcttttatggggtaagttagaccattcaccaattccggttcgttggccgcactcagccagccgggtcacatactgatgtatgttccctgtctatcttcccttgccgccttcctgcatcttgaatgacgttgggtataaagagcagggcattccggcataaactctgaatgcaggcttaatacggtttcatcccgagctgttagccgcaacttgaaagtcgacgcggccgcgaatttagtagtagtaggc

SEQ ID NO: 597340 - DNA, 271 bp, Homo sapiens
gctctcttttccgttttgttctccaccttcgccacgtactccccgccttttcaaaaataaatcctgtatccctgtctcatccaaatctacatgatagtccaccctggtggcaaccagaggcccatgggagatgtctggattcgcagaggaatagctccatgtgatgcaaaccttgactaatgggaacaggaaaagggaggaaaccaggaagataaatctccctcccttcttattgctccttgcaacccttcccacttgaagcatgacccca

SEQ ID NO: 597341 - DNA, 757 bp, Homo sapiens
ttacgggatcgaggcgtccatgttggcagtcgttgggacctggcaagcattgtgcctagtgatctccttcgggtttgatccagatccatggggatggagccgtacaccaggcagcctcagggagagtgggcgggtgtcaagggaagccacggtcccagatggcccccttgtgtctgagctcccatggcttccttctgcctctaggctatgcccactggtatttggccgagtgctgaattcagagtgagctccagagagttgtacgaaggcctgaggctgaacgactatgaatcaatatgacttacgtgctcacaggttatacgagggacaagtcgttcctggccatggtggatggacattgtgcaggatgctgaagcagcagaaccccagtgctggtgtactgtgtgtgatccagacttggttgacatgtgggacgtgcgaaggctcgaatgtaacgtcccggagtggcgtccttctcgcgtactactaaagacatcagtggtgccgctttgcagacgattatcacggcccaatacaagtttgaggcctgaggtaactgagttgtccgtcatgatccacagccaggcaggaagccttgcgtggtgatggacatgcgtgcagatctatagggccccgaacaccgtgggtcatcagcagactccgaactgccctccccggcagggcagcaactacctgattgtgctgggagtcagagtgaggaggaatcccgctagggtccgtggtgatggaacgcatc

SEQ ID NO: 597342 - DNA, 559 bp, Homo sapiens
ctgtatacaaattctcctatccaacgaaaggcccaggtcctgacgaattcactgccgtatctaccaactattcaaaaaagaatgaatattaatcctactcaaactcttttttaaaaatggaagaagaggcaatactttcgaactcattctacaaagccaacattacctgatactaaaactagagaaggatacaacaaagaaggcaaactacaagccagtatcactgaagaacacagatacaaaaatcctcaaccaaatacttgcaaacacaaatgcaacaacacattaaatagatcattcaccattatcaagtcagcttcatccctcggatgcaaggatggctcaacataagcaaatcacataaacagacccaatgagaaaaaccacattattatctcaatagacgcagaaaaggccttctataaaattcaacaccccttcatgctaaaaactctcactaaaccaggtatcgatggaaccgtatctccaaataatcagagggataatgacaaagccacaggcaatatcatactgaatgggcaaaagctggacacattcc

SEQ ID NO: 597343 - DNA, 435 bp, Homo sapiens
gaattggtggggttttggtctcactgacttcaagaacaaaaccgcagaccctcatgatgtgttatagcacttaaggtggcacatctggagtctgtcctttattgatgttcagatgtatttggagttttttttttctggtgggttcacggtcttgctggctcaggaggcaagctgcagaccttcgtagtgaatgttacagttcttaaggcaacgcatctggagttgttaattcactcctggtggcctcatggtttcactgtgcttaggagtgaagttgcagatcttcaccgtgactgttacagctcacaaaagcagtgtagacccaaaacgagcaacagtaagatttattgcaaagcgagagaaaagaggaagggagggggaggaagggagaggaaagagagaagaagagaaggagaaggaggaagaaaagaaaaa

SEQ ID NO: 597344 - DNA, 137 bp, Homo sapiens
tgataaagccttaagcggagatggccctacgatgcccaggtctccatgtggttagcccagcatatgagcaaaggctgtgcgcatcttcagttgtttggaaaagtaaattcactgacacatctcactaaaaaaaaaaa

SEQ ID NO: 597345 - DNA, 751 bp, Homo sapiens
  misc_feature (168)..(168): n is a, c, g, or t
gcttatacatgtctgttctgattttgtcccttctagaggggaaagggaagaaaagaagtttgtgactctagttgtttttttgtctttttgtttgacgacagagtcccgctagtgtcactagcgttggagtgcagtgcgtgtgatcttggcgtcactgggaacctctgntctcctgtggttcagagcgattctgccgtgtctcagctctcccgtagtaacctgggtgctacacggcgttgtgccatctacagtcgcagctaattgttgcgtattgtcttcagtggatgactggggctatcccgcgaggctagtgtcggagcttaaatgcttggttaggcgagcataggtgttgagtccgttttaggcagccctagagttgcacgtcttgcacaggcccttagccggctagaaacggtaatgcagtattcgagtgcagacgctggcatcttctgactcctctgggcaggctcagaaggacactattgtcagctctcttcatacctgaataactaattcatcaggagaagttagcagatgtgttggcttgtgactgactagaaaataaatcgcattggggctaacttggttttcaggtcttgctcttgtaggctccttagaacagggtcttaacagagagtgtcatattcgagtaggtatagcgtaggtgtgtagggattcaatagtatacattcagaaaactgatgggttttaaagacaaatgaaggggccaaaaagcaggaaaaggtgaatg

SEQ ID NO: 597346 - DNA, 130 bp, Homo sapiens
gctcccagtaaaaagaaaggctgagcgcaagagtggggtacctccagaaaacatacctacatacgtccagcacgcaaggtctcaggtaaagtatgcagcaaaagttggagtgaatatccggacatgtgac

SEQ ID NO: 597347 - DNA, 1151 bp, Homo sapiens
gggaacccgccttggtaaaagaagtcctcccgctggctggcgcgaagtccctccgggtgcggttttacccctctatttccccggttcaggggcagttaccggtctcgcactcgagccgtgctgggctatgaactccctcgccaccgttaattgtaggggcccaactttagcgttataatttcgggtgttctgtggcgtgccaacaatgggatgtaagtatgggtctcaccgggccgtggaatttccgcttggtgggcaacggctttcgtaacgcttgggtggattgcggcataaccccttcccaaaccgaacagccgacgtggctcggtgtcccgaagccggtcctcgccaccgggccaatgatttgaaggccaggccaccacgaggggtggtccctcctgtggtgtccggacggggggggggtgcaagggttggtctgagtaaacccacgggtacacgggtaggacccgtggaaaggaagcccctggaggctgtgtccgcccgtgtccccggggtttgtcgtaggctgcccagaaagggctgcaaaagtccaacgttgttccacttggtgtgcctttggggcatccccaaagcataggtcaaccagcctgttatccttgcgtgctctaaactcctccgaggccgttccccggcaccttcatgacggagcacaggtaggcaggacgcacgtcggtatgcactaggaaagtgcgggctaacagaggacgctcggccaacaccaggggagcgtagtggcgactccgcatcgcgccctgccgcgtgcgaagcacccgagtgtgcacgggtcggacgaaggtccctagcacacgataaagtctgatagcgggcgtacaggcacaccccatgccgcctgccagcggtgcgagaccgcaggacggcctgaagcgccaaactaggggcgcaccttcgtgtacccgtcacttgcagggcacctgagccaaccgctcagcaggagctggggtggcccctgagctccaacggccataacagctctgactctccacagtgaggccacctttgggtagcaccccacgtgggtgctgtgtgtgtgtgtgagggttggttgagttgcctagaacccctgccagggctgggggtgagaagggaaagtcatagcgtccccattactt

SEQ ID NO: 597348 - DNA, 189 bp, Homo sapiens
  misc_feature (135)..(135): n is a, c, g, or t
cccttcggcaactgctgggattacaggcatgagccatcatgcgccagccgctaatgtaacgtaacctatgcacacgtccctgtttgtcgtgctcgcttttttatcggctgcacgcagtccacgtgcagtcctcangtcctctcttcctctagcctcgagcgcccagtctttgtcccacttatagagtgc

SEQ ID NO: 597349 - DNA, 135 bp, Homo sapiens
agcagagaccatcctcattcatggaccgatactctgcacctggtgagtgaggacagtcccaggtgagtcccatcgatcttgaatctcagtgccactgccagtgccattcaccactgcgtccttagtcttatcgag

SEQ ID NO: 597350 - DNA, 505 bp, Homo sapiens
ggcaacttagcaaaacaccatctcttaaaaaaaaaaaaaaattagccaagcttggtggtgtaagcctgtagtcccagctacttgagaggctgaggtgggaggattgtttgaacccgggaggttgaggctgcagtgagctgtgattgtgccactgcactccaggtggggtaatgcagcgagactgtgtctcaaaaaattaattaaattaaaaattaattaaagcgctccaccgtgtctttccttttgagagtgtggcattagcattttcacacaggtatttggactggttttacaggcttcaacttaaatttaattcccaggtattcttagcacttgggggtgggtggcgaacggattaacgggacgataactattaaggccaaggttgcccaggaacaaggggctttgggcacaccagggcttcgcctttgaaccaattggtttttggggtggtcaggggaggtgtagtgtgtatttttttggagacagcattctcattggcatt

SEQ ID NO: 597351 - DNA, 2433 bp, Homo sapiens
aagggcaggaaactgccattttaatttcaccctgggtcagaattgtcaggagttagggtgactgcaaagaagccctaggcctgaagcctcaggctctggtgtgccgcaccacaccacaggtcccagcctaatacttcccagaaagggaatgaagcagagagtaggcagagtcagggggcaggggaagggccgtgggaactgatgtagagggctggtgatggtgaagctggtgaagccccgggagagacctgtgggcaggtaggaggcagctcgtagcatggccatggagccaggaggcatcagagcgtgagatggtgccaacctgggaatgcagtgtggcctgtagggaagcaaggttctaattggtcagctgctctaggactttgaggagaaaggactcagagatgtcccttgattggaggaagggtgaaagcaaaaagttgcatggggcattattgaaagggtgtcaagaatgggactgctagaatgaggaagcaaacataaagctggacacccagacaaggaggagccctggaaaaagaggggaagggtaaagagggggcctccttccctggaggccatctgatgagggtcgatgggccagtttgagaaccatttgtggcaagcgtttaaatcccaggctgctttttgccccagtacctggtatccagccatcgattgatgtgctacgagagaagatgaaccaattttattattagcctgaacaaaacataattaggaggagaaatttgcttctgctgttgcagttgctgcagcaaagaagttacataaggttcattcggatgacttgggaacaccttccctacttccctattcctgttcccgtttctctggcttgaaccaagtaaatagaggtccagagcctccactctgccttctagaaattcccaagacagaaatgtgctcaaggagcagatctaagaccctcagcctatagcggacacggaacaagggcacaaatcgaataagtcagtgcattgtcatgatgaacatgtggacaaaggcaagaaaagggagaagggacaagagagaggagcagactggaggagaaggaataaagatctgaggcatagctctgctcctgtgatgttagaggaagggaaggtggaaaaaaaaggcattgaattattctcagacaatttcagaaggaccagatggattctggaaggaattaactctgttatgtcctgtactagtatcattactacactctaagatgggcaaacgaaaggatttggagcattttggcagatactctttgggtgattgagagggggaggtaggagggcatggctgttggggtgactatatgggggtcgcatttgggctgaaagttaaggccacagacacatcccaggctgagctccacactgacccccttagactgaggctttcactcagggcacttaacttgggtggagggaggcaggagtggaaactccaggcctaattgctaggtctctctcagctcttccagggagcacggggcaggaaattcctcaaattccaggcttgtaggatcattgctgagcttaaccgcagagcaagagaaagaggcaggagaggcagagaactgccttctctccatctttttttcccttgcaattttaaagctgcagcaaatcagaagggtttggaggggctgatggctatgagagaggccccaagcataacacccccgaccctggtaaagaaagtcccaagtctgggaatcccagagaaattagtcctgaattgagtaagtttgaagtcaaaaatagactgctgtggcccgggataagcatttttcccagggtgaatttttttagttcttcagaatagccagtggtaaggaagttggtttaggagcaagaactgtcttgctgaaataaatgatggctgcgcagggagcacattggaaggggtcttggggtggacagaatttccttttgctctaagggtgaaaccagtcaggtctctctctttctgagctctcctcccagagcacctggtcaggatatcccagtcatcacctccgggaagatgatgttccctggatagcccatacattttctcacctccatacctagctaacactgctgcatcagtcccaatgaccccacttcccatcctttactctctgagatctggatttgccttcaagatgcaccccccatgccactttcttaaggtagtcttctcaactccccccaaagaatgaactattatttttggggggcttccaaagcaaattgctttgaaattccaaaagatcatacattctgttttaatcatagtgggttgttaagctcctgcactagactataatgctacttgtggatagggactatgatttgtttatatctgtaacttccgtctcttgcctcttttccccagcatagagcagaatgactgccatacagtaaatcaaaa

SEQ ID NO: 597352 - DNA, 474 bp, Homo sapiens
tcaggcagggaggaatcatgtctgctttgctcctggtgtttcccctgagtcactcagtgattggtatttagctagtatcccctcagcatctgctgaataaatgaagaatggaaggtgactgcacagaattgaggaattaaagagtcagagattggatggccaggattggcaggagataagaaacacaggccgatgggcataggctctgcttggagtgcagcaggtagacccctgcttggctagaaagcagcatgcagaggggaggggcagggtgtcaggttagagagaccacctgggggttgattgagaagagccttgaatgccatcatcatgaagtgcccaagacctttaagtggctgagttagcactcacagaggggatggaggagacctgctttcccaagatgaagattgtaattggttattgatgtcctatttgtatgctaatgctgcttaataaaatagctaagccata

SEQ ID NO: 597353 - DNA, 116 bp, Homo sapiens
  misc_feature (93)..(94): n is a, c, g, or t
gaaaaatgaaacatcggaaaaattcccgaaaacacaagaaagaaaagaaaaagcgaaagaaaagcaagaggaggtcttaattattactttttnnaatgctagctttactattctga

SEQ ID NO: 597354 - DNA, 1825 bp, Homo sapiens
aaagaggcagctccgagtgaggaccactctacgagcagcaaaactgcattgacatacgatccgtgaaagaagattaggaatcttctcgcgcgctgaccttgctgagcgcctggcaccatacattcgagcacacttaatgtgctgcacccttggattcgcttactctgggagcttggctggctcacgatgcacggcagcctctcggagcagagttcgcttcctggcacgctcatcgacgctgacacacaggcaccaccaactggatgaccacactgccactgactcgctcgcctctcgcacactggctacaaggctggccctgctacttgcactaaaccccaccacagggcattgcacgcagttctacaccttgacgacgaccggcacgctctggttctcaacccccttctactgcgcacacacacagtctttcgctctacgcaacaacttccctcccacttacacaaacccgtggacattgggtctcatacttggcaacgcacggcaaccatcggtcgcccacggcccttacacaacccttcgcgccccaacatcccttgggccttaacttgcgaggcggccccaacaaagcaacttataaatttggcctacatacgcccaaacgccgacatggcttttcgccccatcatcccccggaacagactccaccttggccaccgagcgcaaaccccgcaggccaacattaacggcacgcagcgcctccaaacagatctccaacctccatgccaccacacaccttactccgccccgagacgaccatatcaaaattaccaagaccgccacacgccgacccacacacaccggcggccacagcaaccgacggcccacaacctcccacggcccacactggccgacctccacatcttcggccccaagttccaaccgtgcgcaacccccaagcaccagcaccgcggcgcctcccctaatccgctcacgattaaaccccacgtgctccggtccccacccacactgtgccgcaacacacttcacacactcagcggcaccaagcaagcggaacgacacccacacacgccaaccccaccacgccgtggcaccacttcccgacactcgccgcgcacacacccaagcaacaccgaccacaccgaccacactcagaaacgcaccgacaccattcaccggcagcaaacaaaccagcgaccggcgcagacagcggcggcatcatcaccaacacacgcgcaggacatcaccacgcacaaccacagcacggcagtgcgcacccacaaacgggacaacgcagcagcagcacacacacaggacacaaccaggacccgccatcagacaaaccacgacgccacactactcaccacacacacagcgccaccacaacgaagcggccacccacgcatactacccccccgctgggacgcaacaccacccacacagctgccccacctatgtgcggcgaacaacacacgcagcaaccgaccacgagcccaacgccaacaacacactggcacacaacacgacacgccacgctggccaccccacacccgccggagtcgccaacagcgcaccacacgcgagcagacgcccacacccacgccatcggcccaccgcccagcccacgccacccgaccaggcatccactgtgcgcacaccaacaacgaacaaccacacgcacacgcccagcgcagcactaacgaaccgctgcaacagcacactgccccaactaacacaccagagcccccccaccacgcgcaagagcactcaagacgaaactgcacaccggcgaacaagagccgacccccatctcacaccacaccgccggccaagcaaacgccag

SEQ ID NO: 597355 - DNA, 943 bp, Homo sapiens
  misc_feature (943)..(943): n is a, c, g, or t
gctgcgctgacactgaggggtgtcgggagctgctgaagcgtgtggacctcgcgacggtcccgcggagacatcgatataagaagaaatgggctgccacagagcccaaattccctgctgttcgactggctttgcagaattttgacatgacttacagtgtgcagtttggagatctttggccatcaatccgtgtcagtctcctctcagagcagaagtatggtgcactggggtcaataatttggcgtcgccgtgggatcatgtagacgtgctaggctggagcgagctgcagtgccaaggatttgtcgaatgaagccatctcccatggggacacgtgcagtcgtgaagggtggccactcgtgcagcccatatcctgtgcctccggggcctgcagtccggaaccttcgatgcttcacttttggacacgagggggaatatcacgtcgcttccctcctgtgccagacctggcagcctgggtgtcatggagtactactctgatggatgctgcctccttgctgcctgttctggcccctcggctgcagcctggggacatcgtgcttgacctatgtgcagctcctgggggacagaaactagcgttgttcagactggctgttgctgcaatcttgctgcaatgatctctccccggtcccggaatagacccagacctaacagaaaagattcctttcacacggctaatggtggccttgaagaagactccgcgcgtggggaaagtccaaagctccgagttaccctacatcggggactggccgggacagtgggcgaagaacggggggggggaaacctaatgaaacggggtgcgggtgacttggcctggatccaaaaacgcgacctctcttatgaggggggaacacactctatagggacaggaagaaggcgaacaatttccgttgcaaagatctggaaggcgactgtcacaaagagaagattn

SEQ ID NO: 597356 - DNA, 359 bp, Homo sapiens
cacgagatagaaccaagcactttctttattcctttgttcagagcatttccattttttagtaattgtttcacatggaaatgaggcaaaatgattaacgaaatttatgttttttagacagggtgttgtgtttacaccaacgagaaggctgagatgctcctaaatgtgatgttataagcctaaggcagacttgactagcagcaacaagttttttacactactaggaaagcatgtgtcattatagtcaggcctgcagctcttttctaccatagccgcgaaatgattcataacaggtgttaactgatcttttggtggcttgggcttgtgtttgacaaactcaacaagttgcagtccttggttgg

SEQ ID NO: 597357 - DNA, 141 bp, Homo sapiens
aatacggtatgtattgtagacgtctgtagtctcataattcagtatggccacacacagaaattaccagtagaaacaaaatgagggcacacttgctccctgatcctatgcttggcccttccaacctcctattagaactggctt

SEQ ID NO: 597358 - DNA, 144 bp, Homo sapiens
  misc_feature (8)..(8): n is a, c, g, or t
  misc_feature (63)..(63): n is a, c, g, or t
cgactccntagaggatcccctacttttcacagggattagtacatgtaatcttcatttagaaantgctcccaattgggcttgcctctattttgctcctcctttttgttttatatccctcattgagcctttgcctcggaccatgat

SEQ ID NO: 597359 - DNA, 895 bp, Homo sapiens
  misc_feature (58)..(58): n is a, c, g, or t
  misc_feature (61)..(62): n is a, c, g, or t
  misc_feature (64)..(64): n is a, c, g, or t
  misc_feature (104)..(104): n is a, c, g, or t
  misc_feature (106)..(106): n is a, c, g, or t
  misc_feature (110)..(110): n is a, c, g, or t
  misc_feature (115)..(115): n is a, c, g, or t
  misc_feature (137)..(137): n is a, c, g, or t
  misc_feature (143)..(143): n is a, c, g, or t
  misc_feature (152)..(152): n is a, c, g, or t
  misc_feature (155)..(155): n is a, c, g, or t
  misc_feature (167)..(167): n is a, c, g, or t
  misc_feature (185)..(185): n is a, c, g, or t
  misc_feature (187)..(187): n is a, c, g, or t
  misc_feature (196)..(196): n is a, c, g, or t
  misc_feature (206)..(206): n is a, c, g, or t
  misc_feature (217)..(218): n is a, c, g, or t
  misc_feature (225)..(225): n is a, c, g, or t
  misc_feature (227)..(227): n is a, c, g, or t
  misc_feature (250)..(250): n is a, c, g, or t
  misc_feature (253)..(253): n is a, c, g, or t
  misc_feature (257)..(258): n is a, c, g, or t
  misc_feature (264)..(264): n is a, c, g, or t
  misc_feature (271)..(271): n is a, c, g, or t
  misc_feature (293)..(293): n is a, c, g, or t
  misc_feature (300)..(300): n is a, c, g, or t
  misc_feature (330)..(330): n is a, c, g, or t
  misc_feature (337)..(337): n is a, c, g, or t
  misc_feature (344)..(344): n is a, c, g, or t
  misc_feature (354)..(354): n is a, c, g, or t
  misc_feature (371)..(371): n is a, c, g, or t
  misc_feature (392)..(392): n is a, c, g, or t
  misc_feature (398)..(398): n is a, c, g, or t
  misc_feature (414)..(414): n is a, c, g, or t
  misc_feature (422)..(422): n is a, c, g, or t
  misc_feature (427)..(427): n is a, c, g, or t
  misc_feature (450)..(450): n is a, c, g, or t
  misc_feature (464)..(464): n is a, c, g, or t
  misc_feature (477)..(477): n is a, c, g, or t
  misc_feature (511)..(511): n is a, c, g, or t
  misc_feature (533)..(533): n is a, c, g, or t
  misc_feature (538)..(538): n is a, c, g, or t
  misc_feature (545)..(545): n is a, c, g, or t
  misc_feature (746)..(746): n is a, c, g, or t
  misc_feature (818)..(818): n is a, c, g, or t
  misc_feature (895)..(895): n is a, c, g, or t
aaaaaaaaaaaaaatctcacaaactaataaaaaccagaaacaaaaaaaacaagttagnacnntntcctgaaaggcaaatctaacaactgcagaatggacttctncnttcncaacntttgtgaaaaaaacaattctcntaaggnatcaaaaancantgagtgcaaaangggaagttcaggtacaangnctcaaaacnactaatgggnacatgagaaanntgaaaancngctacaatttcctctcctttaanacnaaannttaaantaacaanacttctactttttatataaatntttaaanttcacacatcatgacctgcatttcggaccnggtcgtntttaaanaaaaacatantacttagtgatctgcantggcatcccaacaactgaatncagggnccagcagcaggaaaanctactctnatctnaccatccgcagcaaaaaccagcnaaagagcacccaanccaggagactcanaagaagctaaaaatttatgctaaaacctaactcntaactatactgacacactaccnaaaanggcagancacatcctaaaggttcacaagtcacacacagaacaaaaatatacaaaaatcacctcacaattcccgaagctctaaattgattcattccccacacgtggtttccctaattttatactgataaatctatcaaattaaaagctttcatttccaaccacttcaataagatagacaacaccatgcttaacattttttgttctctgnctaattgcttgcttctgctaaactttgcatttccatggctaataggaaagcttgaacccatttttccaaaanttccaatcttgtgttctgatttgaaatactgagtacacacccctgatgctttctctaaagtttctttttcaagatan

SEQ ID NO: 597360 - DNA, 1030 bp, Homo sapiens
cagctgggtgacagtgagactccatctccaaaaaaaaaaaaaacaaaaaattacaaaatttactttgggcccgcacttgtaaatcccaatacttggtaggctgaggcaggaaagttcgcttgggaacccaggaaacagaggctgcaggtgagccgagactcagtgtgatttacattttcaccctggggttgacagagcaagacttcgtgctctcaaaaaaaaaaaaacaaacacggtgctgggcccactttatatggaaggctccctccggaaaattttcttccacaaaacactatggggctaaaaaaggttcccaatttccccggggggcaaattcactaatgtgctccgcaggagttctactacacaagacgatttggtctcccaatgcgggtgagaaaacgcgccctcctaaagcggtagaccacaaccgggcaaattagggcagagacgccagaatgtttgggccggggtgaaccctggtcggggaacaccaccacctcttgggtgggagacactttcggtgctactgagaacatatcaccaatggcgagcttaccctggtgatttgagacccttttcaccgggacgagagcgacatacttctcatagggaggggccatcacacatgctttttttccaactctttcaagtctacgttctattctggagaggtggcaattttctgtggtctgttgttgcccccgaggtgtttgttgcgttgtcccatggggcaaacgcctccgcgcctcctatttccttggacatttgtcgggcagacgcacatgaggcttccccccgggtgtgggcgcagaggaattgtttctggattgggccctcggtgattcccacttgtgctgagggccccccccaaggtgggggggcattaacacgcgtttgagccacctatgcttgtccacaagcgttccagtgagattttctcttcttccccagcttcaaacaccctctgtgtgggcccggggcgggtgggcccccccatatttttggggccacgcgggtgggcctccgc

SEQ ID NO: 597361 - DNA, 345 bp, Homo sapiens
  misc_feature (303)..(303): n is a, c, g, or t
gtcgaccatcacctacaattaaactactgaaatatgcagtgataattgtgccttggagaatgcatggtgtattcgttcgttttcttgctgctgataaagacatacctgaaactgggagcaaaaagaggtttaattggactttccgtacatcttctgaaatctaggtggaggtcccaaacttcaattcttgacttctgtgcacccacaggctcaacaccacatggaagcttccaaggcttggggcttccacactctgaagccacagcccaagctgtatgctggcctctttcagccatggctgtngagcagctgggacggaaggcaccaagtctccagtcgacgcgg

SEQ ID NO: 597362 - DNA, 162 bp, Homo sapiens
tagacctttggttgtccccaccttttggctatagtgaataatgtacgtatgaccgccagggcccaaaatatctgtttaaatccctgttccaattcttaggtgttatacctagtagtagatcatatggtaatcctatgtttaactttttgagaagacaccaca

SEQ ID NO: 597363 - DNA, 955 bp, Homo sapiens
ccctataccgacgtcgtcacgagtagcgatgagccctgggtctgttttataacaaaatcgtgacctaggctgcgattgctgagaaactccactggagctcacggaaactgtctggacatgatggctcgatacgtgttggccgaacttcacggctgtcccgaagaggtctcctgtgggcgagttcctcctagcgggtggcaggacctaaacctggctggttgggaacaagcttgtcagtgtgacgacaagcgtgggaaccggggtagccggtccgttgactaggcctggagtcggcgggagtctgcgatgtccggccctggacgtcgcacgtctcctagcccctggggtgtcatgtcgtaggcacagcaccatagtggaggctgcctgggctagacgcttggtagtcccgagggctggcgccagccaggttgtcccgctggtgcgcccgtgggatctgggctcgcgttccgattgtctgtgcgtgggcgcattggctgcttcgaggtttggtcggccactgagagcgctgcctgagtctcaccatgttcgctgtgagcatgctgcgctagccttctctcagggacccatctgagaccatgcgacccatgtggcggcgaaatctcctgaggaagggccctcaagcttgtggcaccctgaggttcgctgctagccagggagacaagactgaatccctcggtcgggccgtatgtagctcccatgtcgtagatcccgagggtcatgtggcggggagcatctctaggtctcctggaggcgcgcactatggggaagcgacctaggctgtggcttgattgagaccttggatgaacgctcgttcaagccccgtttgctccatcaggacattcatacaaaatgtcccccttgcatggagcttgtcataacagcccctctatgggcgagctgaagcgctttcaaagggagccacccggggacacca

SEQ ID NO: 597364 - DNA, 897 bp, Homo sapiens
  misc_feature (17)..(17): n is a, c, g, or t
ggcagtcgcgcgctcgnatccccaagatggcggccgttaaggacagttgtggcaaaggagaaatggcacaggaatgggcggcggcgtccacctggggattcctgaggccgtgttgtggaagatgtagatgccttcagtgaaacagtctgggaatgagactgcatgatacagtattagagagaacgctggaatgaacagtaccagacagtataacgtcatatggaactcaacctgtgctcatcacagaaagagaaggctaagaggtcgagattcctgaaattaaacacagacttggaaattctataaatacagtgcagaagagaacaagagtccaccaaactcaatggagaccagattcttgctgggtcagataacctgtattgcaaagcttcagtgcctcctaccgataaggtgtgtcttgtggtatgggggctaatgtaatgcttgatctatgatattgactggaatgctcaggcattgttggaggacagaatttatcgacggcacaaaagaatcttgattccctggaggaagaccttgacttgtcttcgagatcaatttactaccacagaagtcaatatggggccgggcttattaatgggatgtgacgacagaagaaacaagatgactttaccaagacagggattgtgcgggcatgtaacaatgcggttaggttccaaacatgtgttcttaataacacttttaccttagggtgactcacttgatgtttacacggagaatttgggaaaggtaggccttttttttttaacgacatttgtcacattttgggagggagggtcccctttcaacgtcgggtaactcttgcggggaaaacttgaggggaaggaatgaagcgggggaaatcaagaggtcaggagaacaagaaggtggataagg

SEQ ID NO: 597365 - DNA, 428 bp, Homo sapiens
gccataaggtgttttctgatttattatttctcatggtggccctgtgccccctctctactgatttgtttattatgtttaacttccaagccattagttcttggtccatgggaaagttgaagatgattgtgggtaggaaaggagtgaactggccgggcgcttgttgtcacgcctgtaatcctagctctttgagaggctgaagcgggcagattgcctgaggtcaggagtgtgagaccagcctgggcaacatggtaaaaccctctttactaaagtacaaaaaattagccaggtgtggtggcccactcctgcagtcctaactgcataggaggctaaggcaccagaatcttttgaacctgggaggcggaggttgcattgagccacgattgtgccatttgcattctagcctgggcaacagggcaagactctgtctc

SEQ ID NO: 597366 - DNA, 434 bp, Homo sapiens
  misc_feature (21)..(21): n is a, c, g, or t
  misc_feature (49)..(49): n is a, c, g, or t
  misc_feature (93)..(93): n is a, c, g, or t
  misc_feature (119)..(119): n is a, c, g, or t
  misc_feature (130)..(130): n is a, c, g, or t
  misc_feature (141)..(141): n is a, c, g, or t
  misc_feature (149)..(149): n is a, c, g, or t
  misc_feature (156)..(156): n is a, c, g, or t
  misc_feature (168)..(168): n is a, c, g, or t
  misc_feature (318)..(318): n is a, c, g, or t
  misc_feature (349)..(349): n is a, c, g, or t
  misc_feature (389)..(389): n is a, c, g, or t
  misc_feature (424)..(424): n is a, c, g, or t
aatattgccctcgaggccaangaaattcggccacgagggcccaaattcnttaaaaacatgcctaaaataggccaagccgcggtggttcagganctgtaaaacccaagcacatttgggangccagaggtgngccagatcacnttgaaggncaagganttcaaagaccangccatggccaaacaatggtgaaaaccattgtcatcatacataaaaaataaaaaaaattagccggctatggtggtgggcacctgtagtcccagctactcagtgaggctaaaggcaggagaatcatctgaacccagggaggcggaggttgcngtgcgttgagatcaacgccactgcactccangcctgggcaaacagagcgaaaactatgtctcaaaaaaaanaaaactgcctaaaataacctgttcacttttcttcnaggcaggccc

SEQ ID NO: 597367 - DNA, 367 bp, Homo sapiens
cagcaggtgggaccacgggtgacgacaagaaagcgcatcattgactcagcccggtcagcctaccaagaggacatgcacatcaggaaaaaggacactagccgcccaccaataccatgcgcatgctcataacacttaacttagtcttactgctcttggcaccgataatcccaagtcttcctttgcctctccatcatggacattcacattggatctcgtcgcctgctggtgtctccacttttactgtcagcccctgggattcattcactgttcctcggaagggagagtgcggcttacggccatctgcgattggctacgtgtctgtgctttccgggcgcctggatctcaaggctggcagagcgctcatcct

SEQ ID NO: 597368 - DNA, 95 bp, Homo sapiens
gccccccccccgccccctgtttgggggggggggggaagggttttttgggattaaggccggggcccccaaattaaagttggggggttgccccccca

SEQ ID NO: 597369 - DNA, 1452 bp, Homo sapiens
  misc_feature (243)..(243): n is a, c, g, or t
  misc_feature (953)..(953): n is a, c, g, or t
  misc_feature (1452)..(1452): n is a, c, g, or t
cgggttcgctgtagtaactcgatgatgaaaggcgggcgctgggtcatcattgtacctcgtagctcactaacgtcggctcgtgggtctagagacttggcaacccgaggcaatcgcgttgtgctcaggatgatctgtccgagttcatcactcctattcagaacacagcatccagctacgagataggatcggttctgtcgagcgacagtctgcatgataggcggcacatatcgagcacgagtgganccaggtagaggacgggctcagtcgtccggtcaaggctgtggtgcatgaggtgtaggagcaggggagggagagccaagtatgaatgctgtgctcgtagcatgggctccttgcaaggcgctctgtgcacttcacgtgggaagcactctaaactttcgaacctggtaggcagtgcgcgtggcacccacgttgacatgccgtagagaatagttcgtggacaaagccttctttctcgtgtaaacttcttccgggcgacaaggacttcctcggtacgcaaaaggaacatttaccacgcgtttgcaatcctgccaagttccatgagcaacgttgtatcgcggtggaactagggataaggttgttgctatggcacattggccacttccgagaggaggatgggcctttcgtttggatcgaacacccgtttgggtttcccctaggtcaaccgctttgagcttaggttggatttcattattctctttccataactcggaataacttccttggcgggggactcggggtcaagagggcggacaaaactcagcttggagaatttgggaggaaacacccttaaattttggggccattttgggaaaccaaaaaacggaaagtggatgcgccgcgtgccgttaatggccaattacatatccgtaggagcttgtgccccgggcagaagctaaccttagacaagaagtctctttgggaaacggccaagncgaaaggcgccaaaaaacacgatttagacggaggaggagacacatctcttggtgaaaagccccaaagcacccagttatatagggtttccttttccaaaatgcgcccttctaaacagccgaaattgggaacacggttcggcgggttggatactaaccaccatatcgcgctgttgggtcgtcctgtttcctcccagtgttatattttccacccgccgcttaggtgtgcagcgccaatgcgccgttttccataaacaagtttcggcgcggtctagaaacgcgccaattacccgccggggccgacgacggtgttattagcgagcgcgacatgtggtttcgcagcatacctaactattggtgggttgtctccccgccgccgtgtaatttaccacgacgcccaaacgcgggtgttgccttttcactcccgatagtttttttataccgtttttctatcactttttggccgctttggggggcgcattatgtatgggggccccctccn

SEQ ID NO: 597370 - DNA, 739 bp, Homo sapiens
gttgtgcttccagaggtgtaatgggggcccggcattccctcctcgtcccgggctggcccttgcccccaccctgcaactcctggttgagatgggctcagccatgagcgtcccagtcacaccagcgcggtctccgccgcgacaagcaaggcatctggcttcgagtggcgggacccccgttcacctaggtgctggcatcctgcgctactcccatccaggtgggagagctctccacagccaggcctaccagcagggtgagcaactggagggtcttaaaggatgcccaggactcagatccccgtctcctactcttggtattgcacggacacctatgatagaccagcagtggagatccctccaaggctcactggtgaaaacatgctgagttgaatgtattttgacaacgtgaagactgctaaatcaaaatcttcccccagagtcctgtttcttgaccccagaggccacctttatcttctgaatttggacttgcctcatgggtagcccagttaatctgttgagaggaacagatgcccggccttggaaccatgacatggagttcccctccaaaaaggtgtttgccaaggcaggaagcaagaacagccagagaaacccctgtggcagcagagctctgaccatgcctcaagggaccctggaaattcccagatcttcaggtctatgcgcatagatggaaccaaacagcggaagtactagggatccccgtttacttctgcggatgaaatcc

SEQ ID NO: 597371 - DNA, 221 bp, Homo sapiens
actgggtgctcggccacatatcgaagcattgcattgattgacttactcatttcaagtataatggtacaaaaaaactaccagctgttcaaagggacagaaatggagcttaaaactagatcgacggtacttaacctcaccatgttaagatgccatagcctggagaagctaaaaactgccaagctcacataggtataattcaattcaattatcgtacaatagga

SEQ ID NO: 597372 - DNA, 909 bp, Homo sapiens
  misc_feature (505)..(505): n is a, c, g, or t
  misc_feature (716)..(716): n is a, c, g, or t
ggcccatgggccaattgactacaccagaacaggtcagatacttgaagttaactttaacttctgctggtccacgtggcttctaaggtgataggagtcgaatggaaacgtcgaattgtgtttcctcaagagggaaaccggtagaagcgttgtcttctgaacctgtcggtgaacatttcaataggacagaaccacgcgtgcagagtgacgcagacgacatctcgtcacgtgctggtcgtatacccttggatgagtcagtgtcaccgcggatatttcagacccatgcatctagtagtcttggtggctgaatcaaccttgcattcaggtgcgctctgcgaaccattcagcgtatcttgccttcgatcataccgtctttgaaacctatcgactggccctactggtctgctcatccagtcgaccactatgtagacgcacacacgtgttttcatggttccacctatggctggtcgaatgtctacgacatttaatatccagggaggaacgttancactcggaatgactcttgggacatccgtccattgcttatgagacaacggtcttatcgtctagttcagtaccttcgttccttgactttctaccactggatctgtgcttacatagcctgggcgtttgtacgtaggttcgtgatgcttcctgcctgcggtggatagccgtgttcgctttcgtctctgtattctggacggccacccaagccacanctatctaacgagtggtacagaggtgactgggcctggtgcaacgtgttgtccccgttgtggcctggcctccgtgcagcagagtccacaagtccaccggaacattcactcccatgggcgtcggagcaaccttcaagagatctttctacctgcctttccatgtcatgagaggaagaataagacgagagtgtatgac

SEQ ID NO: 597373 - DNA, 499 bp, Homo sapiens
taacacactatcatctataccatcaatagtccccacctctcccattaacatgctatataacatctttgcacctttccttgtgccataaacaggtataaccattcaatcctcagtacgatttacaatagtgagtagtcctcatctctgatccccagttgtgcttcatatcaaaaattaatatacccttttcaatattaatccattcattttattttagttgcaatcattcagtggttgggtgtacacttggatcacttaacgccgtagagaatattagatcacaaaaaatgcagcagctgttcatgacaaactctgcatgacaattgtcggtaacgaccagaatccagatatatcatgtccaccctctgccactgtccttataggcgggagacatttgcacgctcttcacaatgaaggtttcatttaccaagaagctttaaaaaaatacctcagttccattcatactgcaaaacgttcatttaaaaccacttttagctag

SEQ ID NO: 597374 - DNA, 150 bp, Homo sapiens
caccatgtgctggcatctgggtggagcggatccactcccctcacattccacaggcccatgggactcactttggtaacagagctcctaccaacactgaccactaaaaaaaaatgtgggttttttttttttttttttttttttttttttttt

SEQ ID NO: 597375 - DNA, 315 bp, Homo sapiens
gggggcagtgcggctctgggctggccgaaggggtggcgctgcgattcccgcagggcagcgacgcgactcttggttgcggggcccggtctttccttttccccccccccgggaaaggccttggggccgggttggcccggcggggggcccggcaaatgaactgggagctgctgctgtggcttgctggtgctgtgcgcgctgctcctgctcttggtgcagctgctgcgcttctgagggctgacgggacctgacgctatatgggccgagtggcagggacgacgcccagaatggagctgatgatatggtgtgtggtgctga

SEQ ID NO: 597376 - DNA, 887 bp, Homo sapiens
ggctactcagggcacacagcctatggagcagccctgatctgcaaggagcggcatctctggcgctgctgtgcacagctgcttccatgaaagctgctgcctaacaccaccagctcacccttgaatctttgggcaaatccaagaactctcccaggctaagccccagtcttggggcttgcctgtcctgcatcatctggcaaccagcaaagggacaaggacagcggagatggtggcaacttggcagagaggcaagacagcagagacacgcagaggcagcaattggtgagagacaagagacagcagttggccacgacagcaagagacggtgaagcagtctggtgattgacggactgtaggtagactcgtgacgtgtgacaggccagaatagtgtccactagatacatgctagccatcgatgctgggacccctaactgctcatacacgagcctcgatccccagaacaccagacagcttgagcactccgcaaggacgtggtggaaacccgagatgcagacctgccaagctcggggatcccatcagtgggataagactgggcttgtgtgcccacttatgggtcatcactgtgccactggggctgaggacgtcacgcatttagggagccacatccccccaaggtagttatcaccgttaaagacatgacgcaaagttaaccaagggcccattccggggcggttagagacaggatcatggtgttcacacccagcgcggcttacacggggctggccctgcgatagcagctgcagttgccagtcaggcacacccacctttagcaaacccgggcacaccctttaccttcagtttctgaacgatccgcaattttacgataggcatcacacttttgggtaaccatccgtaagtgccttaaccct

SEQ ID NO: 597377 - DNA, 1023 bp, Homo sapiens
caaaaacttcgatgctttgaaagatgattacagtggggaccatgatcagaatgactaaaacagtgagcactagaaggagatggtgagaatgaccaataacgtggaacgagacaagaatcatagcattatgaagagcaaaggctgttgtccctgtatccgccaaaagcatcccctgcagtacaactacactttttggtcactccaggtagcaacccccggcctgtacccactagactcacagagtctataaacagaatatcaaacatgattggcacctttgcgctctgtggagcagattcgtgggagtgttttatatccacactggtacgtcctgcgtgaccttacaggccagagtgacttccatctcttcaaagaaggaattaaagccatgtgggacgatgatgcaaggttaccaatggtggcagagtggattattcggctgccgaatgggtcttgccctcccgttgctgggacgaaatctcacttttgcgccatggctgggggaccccagttcatggtcggggaggagatctgtggggctgctgtgtgtctgtccgcctttcctgaggactcttaatttccctactgggttactgactgccagtgaccaatgcaatcccccggccgatatccgggaccgcttcggcgagtgcttgatctactctcaatggcatattggcatacaaaaagtccctaccgactgcatcaatggacaattcaagctttcgaaatacaagaattaccttgtggagagttcccaagctggcaatatccttttctgtatgtgtgttgttggtcgacatggttggagcctccagccagtactcctttctcactggacggactcctgaccaagggctctttgcaatataccgagagaacgattcgttaaaaccctcagaatgtactttaagggaaaagagaagtgacttgttagacacaagtgtacaagggcacgaggggacaccctgatgaggctgacaaacacggcagtgccacagagaagcgcatcaacggaacaaa

SEQ ID NO: 597378 - DNA, 370 bp, Homo sapiens
  misc_feature (73)..(73): n is a, c, g, or t
aaaacgaccgcgggggatttcactggtaccatgacatgtatttataggatacattctcctcttctgctgccgngaggtcttagcatgagcagtttagacagtcggtctcccaccccatctactttgacccctttgaatagccatatgccatatttgctgcaccttctagcttctggacaggccttcttgttctaagaatttggcatttagtggtgtcagcagttctgagtatagagagttagaatagtcccaagccatgtcacagttttcactgtgcgacacattctccttttccaggcttttagctacaccctgttcagcttttctttacaaccctttccccttttcttccttcctgattgagagcatg

SEQ ID NO: 597379 - DNA, 124 bp, Homo sapiens
cttcggtagggcccttcagtgaagtacgattggggcgttggggagctgtgttataccctcaaacttctgtggacgtctgtcactcgttactaatatttggagcgcagctgcgggatgccgtgcc

SEQ ID NO: 597380 - DNA, 221 bp, Homo sapiens
tatgtacacgtgggtacgtacccatgcatcctcgtgcgacctgaaaacccgtggaagcggggggttatgcggccgtctgcactcattatacccggagaacagggagaggctcttctagcgtgtagtaggttgtgcagagcctacatgccatcacggagcattgagaagaggttccccttgctgccaccttgctcttgtccacgtgtgagccttgctgtaga

SEQ ID NO: 597381 - DNA, 866 bp, Homo sapiens
gcaatagcgccatgtgtgctgctcggttaggcggaaggcggcgggggggctcgagtcggtgtatgccttctcggcgcgctcgactggtcggcgtgggaagcctgtgacctgggctccctgtcggggaaaggtactacttatcgagaatgtggcgtcctctgaggcaccagcggtccggtgagcctacatccagatgtgcgcagtctgcagcggcgctctcggaccccggtggtcgcgtggctggtgctctggcgttcctccgttgcaatcccgtttgcgcgtcacggagaagtcgccaagaatggtaagtaggagttctgaagttccctcaagtacgtctcgtgtctgggtggtgggttcgtagttcccatgtttcactgcttcttcgagatcgtgcgaggtgcacggtgcgtgggcgcaaccctcgtcttctggcttcctgcgggaggcgcctgtccagttcgccagcgacgacgccaccgcgcttatgacctgatcccaagctcatcacctggtctccggtgtgtcgcaactgatgttgcctggaactttgagaagttcctggtgggccctgacggtgtgcccctacgcacggtacagccgccgcttccagaccattgacatcgagcctgacatcgaagcctgggtggctcaagggcccagctgtgcctagggcgcccctcctaccccggtgcttggcagttgcagtgctgctgtctcggggggggttcatctatgaggggtgttcctctaaactacgagggagggacacctgatcttaccagaaaataccacctcgagatgggtgctgtctgttgatcccagtctctgcaagaccagggagttccccactataaagtgcggtg

SEQ ID NO: 597382 - DNA, 377 bp, Homo sapiens
tgcaccaataaatccttaggacgatgagtggttcaggtactacattcattcctagcacattttacttctgctttaattggcctaggactccttagttaaagccaaggtttgtaggactttagggggctctgattgccctaagagtggtcctgaaacggtaagtcctttcaaagagcttactggatacttgggaagaaataaaggcaacttttcttttcaaatgagaaatgttagaaatgacatgtaggctaaatatctggtgagtatcaaaattgcaatgtaactaatagagattcagtagggaaaaatatactgtattggcaaggttaattatttgtgtgaaatattctatatatcaactgaaccaaaaaaaaaaa

SEQ ID NO: 597383 - DNA, 439 bp, Homo sapiens
actttctggccttttagttcctggtgcacagcccctaagtcaacttagcattttctggcatctccactgggcataagctaaaaccttccaggtcaagattcagctaggggccaagagatgcagtgccaggaacccttaaacagtggcacagcatctcagctcatcttcactggcacccgggattggcatacattcttcaagatcccattggaatttttaagtgactaaaccatggtgcatcctagagtgcatatattaatatttggccggttaaaaagaaagtgagcagggtaagctaagtcctctttggaggtaggtaataatgataagcttggtcacggtttcactactcagcagggaaacaagatgaattcccattggtaggtagtggagacaaaatggatgatccattaggtaaccaataaaggtgcggaaacta

SEQ ID NO: 597384 - DNA, 1110 bp, Homo sapiens
ggtctctggcttgatcggttgacttgggccttgcagtgcgatgatggaccccgacatgcgccgcagtcccgtgagccataggcccattccaggtcgttgcgaggttcagtcccgggacccagatcaagctggacaggttgcatagtccgcggtcgaccggttcttggatgtccgaaggacgtggacagagtttcgaggacgatgacgggatggtgcgcgagaaacgtcgtgtacgcctgggcgaaccgtgcacgtgtatcgtcgtagccgggtgtgcgacaggcgaacgaagagggacctggcaccacgcagggcgactgttggccaccaaaatgacctagcgtgggaatggttgagcatcgcgaccagtggtagtgaaccatgggcaacgaggcattaggtggcatcgcatcctgtaaatgcaattgtagatagtagtcagaataacaactgggtgcgttcggagatctagacgtgcgtcatgacacggagctggggctgagccataagtgaattgagcaacccagaggcaaggaacccgttatctgggagctcatcccattggcgcgcgtgaacatgtaagaggccacactaagccactgtgaggactactgtcgctggacgcatacagatgcgcctaagaattggcaagtactcctcataaccggagaagacaggggggaaacaaggcatttgctttaacccatacgggggcacagtggagtacggaaagggcagcgctttgtggccagcaagtgaacgtgaaagaagacgtgaattttgtccacggtatgagagtgccaaatatgcatgcgtttaggcaaaattggaaggggaaacgtaatcaggttggaaatggggtgcaaagtgtatgaggaataatgcaaggccaattcgaaatggcattacaatggatggttaaagattcacaagagaaggggaataggcatgacgaccacgaaggaagaaaggacagaaggataacacagtggagcatgtgtatcatggaagaaagtatgtaaaaggagtgtgtaggtgggatttgcagggatatgactgtagggaattatttggtgaaggcaaagcgtggaagcgaggcgatagaagagt

SEQ ID NO: 597385 - DNA, 213 bp, Homo sapiens
tctacaatgtgtagaattactatctgtgtaacactagactcatgaagataggagataagaaataattataattggctgagttcggtggcttacacctgtaatcccagaactttgggaggccaaggtgggaggatcacttgaggccaggagtttgaatccagcctggccaacatgaaaccctttctctactaaaaatacaaaaatctaccgggg

SEQ ID NO: 597386 - DNA, 1227 bp, Homo sapiens
ccacgcgtcgcggacgcgtgggtcgacccatgcgtccgggcggaggtgcatggtccttggtgcttgagtggtcgaggccagtctcctgggcctgcctggtcggccagtcgtggcgtaaagcaggtactgacgtggcgccggataggtggttggtcggtacgtctgtgaaggcatcaagctattttcgtggcaagtattctacatgaaacaatgttgataggtaccgtggctttctatccgaaacgcggagtgaataccaaggctcttcccgatggccccttaccgacttccgggtgccacatgactgcattcttcgtgagcgagaccagtgcagcggtatgctgacccctagaagaagtcaacgcgatgccaggccggctctggaccgtctcaagggtgtgagacgggcagtcccaagccggtcctaagtgtaggacagacaaaagccgcgatcgagtagtgtaaccctgctattgcaccgtccaagggtcggttgcagtctgcgaaggcctttaacgacatgcacaagtattggccataatcgttcggagtgcagccataggctctagagaagggttatgcgcctagggagatgttaacacaattgagcaagtagcacaagacacgaacccctagtgcacgaggatgacaaacgcaggcgacaaaggaagcaaaaatgcccttacaagaataccagactaaacgcggtggaaacgacgatgcacagagacgagagctggcgactggtaagaggacttaacatgtgcacaaactcaggagcccccagaagggaacaacgaaaaagcgagtggggcacgcaaaacggaacacacaagataggaagagaacaataacgagagaagcaatggatcgcagacaaaacgcaccgccgaaccggggaaccatcccgtaggagaacagaggaaggcgccacaacctaaaacaaaggaaaccgaggatagtaaacaatttgcccccattaaaaaggaaggagaacaacagcagaacgacagaaaggaggagggcgcggaccaacacgcgcacaccatacagagaggtaaaataccccgacagcgagaaagagggagctgccccaagacaagaacgattagacgacgcacgcactgaaacaccacaagaggagaaagagaagatagatactagacaagaacatacagagaagacccacaatataaaggtgggtaaggcatgtaacaataagagtaa

SEQ ID NO: 597387 - DNA, 377 bp, Homo sapiens
gacagactttcaaaatggaattaggcactggggagagatcagtttccccacatcagggagaagaaggtataggtggggaagggggtggccacgagcataacgaagaagactcactatggcaagggagccgctgtgcctgtggcaataccacttggacaggtcgacttcatgccttcaagccttatcccctgctctttcgattgtgtctgtgccccctttcttgtcctttgtgcaaatgcccactacgggctacctcatcctcgtgctgttcttgtgaggatctctgggcagtaaggatcttgaatctcctttctaacactgtgcccggcaaggcggatgagcattcctctgacctttgtcttgtgccaacctgtaaa

SEQ ID NO: 597388 - DNA, 1455 bp, Homo sapiens
  misc_feature (391)..(391): n is a, c, g, or t
  misc_feature (1260)..(1260): n is a, c, g, or t
tgttccgttttcttcccacagagaatttaagatggccctttgtgttgtcgcccacgaaaagagaggatggttatatagtactctctgtggagaaccttatacaagggggtgtgtaaattcttctttccttttgggtgttgttgcccctccccccccgggggaaaaggtggttgttcttcacccccccccgcaacaccacgatttttggttgtgtcccaacggcctcacaacggagggggtttttccccccacgttgttgttgttgcccccccgaacgaaatacgccgcacgttttttggaaccacagtgcccccccgtggttacaacagggtagggtaatttttccaccattgtcttttgttcgaggtcttaacacatgcaccccttcggncttctttgggtcttggagccccctctttctcccgcgggtttcccaccccaccacgaggtgtttagaaattgttgtaccccaacagcttctcccctccccccaccctcctggtagctgttctctggtgtggctcatatcttcttatggaagttttcttggcgctcagcacttatgaacttcttgggccacctgctattagtgggacgacctctgtttctcttggccccttttataccccacgcacgcttttataacgccacactcccccccacacagatgtttttcttgttctcctcacacacatttctttctgtttctccttcacagagctttatcactcttatttcgaataaacttctcacatgcgccacatctgttttctcccacaattatcacgaggtgggtgtcttttctgttctctcttctcgagagttgtgtgtgtgtctctctcttatactctcgcctctctctgagaccaccgcactagactctctgtctcgtcttctcttctctgtttctctcctcgccacagaggcgttagtgtgtctctctcacccagcggagagtgtgctcttctctgacacactctctctcttgtccacgcgtatatatcgtctgagaagtgtaaattgtgagaacaccacacccacgcgcttgtgcgtgcacacacacacactcgtgtgttgttttcccacacagaaagcgcctacacacaccttcacagagcacctctcaccccattcgccgcacacaccatattctcagattatctgagtaaacaaagactcgaatattcacctttacgaccattcacacttctatatttctttgttctccatacttcgcatacgcgtgtgcgtttacctgtntgtcacacacactttaaataaaatagaatagtgctgataactcttttataaaaagaaaacgtggagaaataccactgacacctgagaaaagatggattgctatccacgatgctcgtttagagaagcactttattcttggcacttttctttattctttctaattatctaaaattccaataaaattttattcatata

SEQ ID NO: 597389 - DNA, 289 bp, Homo sapiens
  misc_feature (104)..(104): n is a, c, g, or t
gactttcaatagaatctttaaactagaatattttcttgcatttttgaggactaaagacaattgtctactaattattctgggtggtgatacagatccactctttnctcctctttaaatagaatctcagccatgctttcagcaattagtttagcattggtctgatagttctttgatacaaggcgggggggtttcctactttggtttcaaaattctcagtttatttccagtttggttagttcagtaaacaagtcaagataccaattagacacatttatgggcagcaaaagca

SEQ ID NO: 597390 - DNA, 240 bp, Homo sapiens
tccttgtatccaagcagtcgggagactgaggcaggagaatcacttgggccaggaggcagaggttgcagtgatcactccattgcgctctagcctggtggacaagagtgaaactctgttccaaaaaaaaaaaaaattcttcccttttctggttgggattggtccctctgtgtaacccaaattagcgactggtggatccaagggacgactggctgggataacaagggaggggtacccgagctc

SEQ ID NO: 597391 - DNA, 930 bp, Homo sapiens
cgaacatagcccgtgcgcttgtggttgcctctgtgttcaggtgctgtacgtaccgggtggcgatctccgacgttggaccactgtccctaattataatgagtcttgcaagtgtgagaagtcctaaatgtgagaattatatcaagcgatcagtggttacaagtgaccgcatgcaatctatgagtaatacatccggtcgtcgtattcgatcgtgcatcaattccgtgatcactctcgaaagccaagtagcccaaagccataaaaaagggccgccgtgcgaaatagaagggagcacgaagcgaggcgattccgaggcttcctcgcaaccttacccctagtcaaggtcaaattcagcacctcggactcctgcgacctgatcaaagacgaatttcagctactgcaagctcagtaccacaggcctcaagctcgaatgtgacaatgttggccaggtgagcaatgtcagaggatgcagcgtcactatgtgatgtactacgagatgtcctactggcttgaacatcgagatgcacaaacaggctgagatcgtcgggaggctgaacgggatttgtgcccaggtccttgcctacctctcccaagagcaccagcagcaggtcttgtgatccattgaagggccaaaacaaggttcaccgttcccgaggttgaactctatcgatccgacaggcagctccaagcccaccagctgtcccagctgcaaggccctggccctgcccttgacccattaccgtggggctgaatggcgcttcgcttccggggggcagcgcaggcaccggcctgccctcatcgcttatccgggccatgggttccccaggcccaacctatcaaaggaagacaaaggaaaggtgttgcatgtttgtaacccaaccaggggcatacttgttaaaaattggaatatcacagtggcccgcacattgcaac

SEQ ID NO: 597392 - DNA, 318 bp, Homo sapiens
ttgatcggtaactggttggttggtggactgcttactgcttctgggtgctattgttgaaaaatttcagaggtacagtttcaacttcttgagttcattttcaatctctatcgacacatagatctacttcagttatgattggtattactggtagtggtgtcctatgttgctgcttgctgattgcatagttctttggccgtatgaaacatatgtagttgagttatttttcccttattgcaggaacgatatgactacaccatatggtcaaatgtcctctcaattctatggtgtactgtacatctcgtactctctctcatcctt

SEQ ID NO: 597393 - DNA, 122 bp, Homo sapiens
gcacccctccaccccatttgtgccagtatcctagaatcttgtgctctcccccagttccctttgggttccatgtttcttgttccctcccagccaagtggacgcagagttaagtttagattaca

SEQ ID NO: 597394 - DNA, 384 bp, Homo sapiens
gtcacactttttgcactgaggtacaggctcttccctccccctcctctcctcctgcccttctgccttccaccgacgtggatgaccatgtactacatgcacaatatacggcctggtgctcaggcactcactcttgcgcgcttcttagcctccagaactgttagatatcaatttctgttcattatcaggtattctgctatagccaataacaaaacatgactaagacaccatgctatcctaaatcagttgtcttcaaactaaggtacataaaaacttcctgagccacatcaaagcaagcatattttttcacatactcggcttctcccacttaacaacataaaggcccatcacccctccaatctgaatccatgctaaaagtgtgcagga

SEQ ID NO: 597395 - DNA, 455 bp, Homo sapiens
  misc_feature (24)..(24): n is a, c, g, or t
  misc_feature (84)..(84): n is a, c, g, or t
  misc_feature (90)..(90): n is a, c, g, or t
  misc_feature (93)..(93): n is a, c, g, or t
  misc_feature (97)..(97): n is a, c, g, or t
  misc_feature (107)..(107): n is a, c, g, or t
  misc_feature (113)..(113): n is a, c, g, or t
  misc_feature (115)..(115): n is a, c, g, or t
  misc_feature (147)..(147): n is a, c, g, or t
  misc_feature (175)..(175): n is a, c, g, or t
  misc_feature (177)..(177): n is a, c, g, or t
  misc_feature (193)..(193): n is a, c, g, or t
  misc_feature (196)..(196): n is a, c, g, or t
  misc_feature (201)..(201): n is a, c, g, or t
  misc_feature (221)..(221): n is a, c, g, or t
  misc_feature (226)..(226): n is a, c, g, or t
  misc_feature (230)..(230): n is a, c, g, or t
  misc_feature (237)..(237): n is a, c, g, or t
  misc_feature (241)..(242): n is a, c, g, or t
  misc_feature (247)..(247): n is a, c, g, or t
  misc_feature (249)..(249): n is a, c, g, or t
  misc_feature (277)..(277): n is a, c, g, or t
  misc_feature (292)..(292): n is a, c, g, or t
  misc_feature (315)..(315): n is a, c, g, or t
  misc_feature (320)..(320): n is a, c, g, or t
  misc_feature (322)..(322): n is a, c, g, or t
  misc_feature (329)..(329): n is a, c, g, or t
  misc_feature (334)..(334): n is a, c, g, or t
  misc_feature (346)..(346): n is a, c, g, or t
  misc_feature (352)..(352): n is a, c, g, or t
  misc_feature (360)..(360): n is a, c, g, or t
  misc_feature (374)..(374): n is a, c, g, or t
  misc_feature (382)..(382): n is a, c, g, or t
  misc_feature (391)..(391): n is a, c, g, or t
  misc_feature (393)..(393): n is a, c, g, or t
  misc_feature (395)..(395): n is a, c, g, or t
  misc_feature (412)..(412): n is a, c, g, or t
  misc_feature (431)..(431): n is a, c, g, or t
ccccttttaatgatttgtcttganggaatccttgtttagaatgtaaaaatggggaaaggggccccttaattcccttagtcctcnttttanacngaanattttattanaaacangntattcccctttttttccctttttaggcaaaantgggtttggagttttaaaaaaaggcgananatgtaaaatttaaacngcntgctntggaaacccttttttcaaangcctntggntttaaangggnnggggnanaaacccttttcagaatcccaaacggccnaaagttattgtaaanccgtttgttttcccgttttatgngggcnanaatgtcnaatgngctatgcagccngggtanccttttanataaacttgattgncttttaanataaactgntncnatgccccctgattgganataaaaacgttatatatgnccaatttaatttaagaaaaaggga

SEQ ID NO: 597396 - DNA, 406 bp, Homo sapiens
  misc_feature (115)..(115): n is a, c, g, or t
  misc_feature (191)..(191): n is a, c, g, or t
  misc_feature (212)..(212): n is a, c, g, or t
ccaagtcccttgaagctccccaagatttcctttcccaggggccaagctacttctttctttaaggggggagttcccctgggggccgaagcgcggaaattcatccgatactttacanccttcaatggggagctcgaggactatatgagtgaccggggtcagtttgtgatctcagcacaggaatgggatcccanctttgaggagaccctgatgtncaacccctccctggcattcgttcgtccccgatggatctacagtttcaatgagaagcagaagttacttcctcaccatctctatggggtggtgccgcaggcctgaagtatgtgctatacacacacacacacacacacacacacacacacacacacgatgcatttaataaagatgagttggttctccaaaaaaaaaa

SEQ ID NO: 597397 - DNA, 173 bp, Homo sapiens
atgtacaggttattggaagtcagggcacccacggtgggcacagaagctccgtcacgcttcctccatccctttccctatgtgtctcttatcctaccatcctctcattctttctcttcctaaagcacatgtttctatgagacaggggccacagccagcaactcccacttctgacg

SEQ ID NO: 597398 - DNA, 391 bp, Homo sapiens
aggcgttgtcgtgctctgttgggatgacgtgacattattgattctgagcagcatatgctgtgattggctcgcctgaaagtttgttaccctataaggaaccctcaccaactatctctgctggataagggagtaccgcatcttttgtgggagggcagagtatggacatcttacacccggtgatcaagtgtgtacataaacttgagcattcgaatgggagaaaaagcaaatcgcacaatgacatattttgagtacataaccgtatttaccacagggtgacaaatggggccaataaatctgccatctttgagctcatcttgggtggctagactgctacggcaacttctctgatgggaacagtaccttgttgggctaaaaactcaccctttcttca

SEQ ID NO: 597399 - DNA, 107 bp, Homo sapiens
caatttctggttggaatggtgacaacactgctggagccaagtgctacaatgccttggttaaagggatggaaacgtacccctaaggatggcaatcacagtcgaccacg

SEQ ID NO: 597400 - DNA, 555 bp, Homo sapiens
atttctcaccttcctcttttccacctagctgccctacagtcctcgtttcttgtgaataataggtaccatgggttcctctggtggctaacctcaatcttgtgcctctgccttggtactatgcaagcgctctggctaactgtggtagttgggttgggttgtagccctcttccatctagcccatgtgccctctcctcactaagtgtcgtgggtctaacctgcctgcccattgcctcaagtagagagggtcagggaacatggctatctgtcacttccctgtggttattcgtccgtagtaaatctagcaccttgcatgtctggtatctggctctgcgagggaggctctttttctcctggcctcacagtgcccaccaggaggatctgcgcacggtcgcacagcccaccagagcactacagccttttattgagtggtgtcaagtgcctggtctgtggtcgtgacgctgacagcatcttcccaaggcagcaggtctctgtggaggaggccatactccctagttgccactggggccaccacctgacataactcgcctattgtta

SEQ ID NO: 597401 - DNA, 253 bp, Homo sapiens
gtactttgagtctgtacatgtcgggcggagtagcgtatcgatgggcagtgaggggcgcatatgatcctaggctataatattcggagtatacgtagcggtaatgtaacaacggtacctctagaactatagctagcatgcgcaaatttaaagcgctgatatcgatcgcgcgcagatctgtcatgatgatcattgcaattggatccatatatagggccggggttataattacctcaggtcgatgtcccatggccat

SEQ ID NO: 597402 - DNA, 343 bp, Homo sapiens
aaaaaaggttttaggccaggcgccgtggctcacgcctgtaatccaacactttgagaggctgaggcgggcggatcccctgagtcaggagttcgagaccagcctggccaacatggtgaaacccccgtttttattaaaaaaacaaaaattagccgagagggggggcatgcccctgtcatcccagctactcgggagggtgaggcaggagaatcgcttgaacccgggaggcaaaggttgcagtgagccgagatcgcgcccctgcactccaacctgggggacagactctgtttccaaaacaaaacaaacaaacaaaaagattttattaaaaatattttgttaactcaga

SEQ ID NO: 597403 - DNA, 211 bp, Homo sapiens
cgtggttccttgcagaaccagcccacccaggccccccaccaccaattgccatgcacctgcatataccacccagagacctgaggaccatcacaccttgcccactaccaccgagccaagggtacacatacaccacccagagcggcagggaccagcctgcttggcttctacatcatcagaatagccttgccacaggctctgcaaggaacccgcg

SEQ ID NO: 597404 - DNA, 228 bp, Homo sapiens
  misc_feature (30)..(30): n is a, c, g, or t
  misc_feature (124)..(124): n is a, c, g, or t
  misc_feature (149)..(149): n is a, c, g, or t
  misc_feature (164)..(164): n is a, c, g, or t
caaagctgggctccccagggccggggcgcntcgcccacatcctcattccagtccccatccccaccctatccccgactctgccccaggtccaggcgggaaccacgcaccgaaacgagcgggacgnatggcattccccttgcagccggttnaaggcggggaacgtnctccaggcgaggaacccgtcgctttcgggtccgagcagggccacgagcagcacctggtgttgga

SEQ ID NO: 597405 - DNA, 181 bp, Homo sapiens
cgcaaacaggtacaccgtgtctagaacggatctaacccagggtcggccaatggccggtcgtcttcgccagcgccgctggcacatcggattgccgttggacaacagcaccggggtagctgtgttgctcgaggatcatgcgtggtgtgtgaacactactctatcatgttccgagctggccgta

SEQ ID NO: 597406 - DNA, 1005 bp, Homo sapiens
ggtaaaacccagcccactagtctaagtacccaccctgatacgtgcaatcatgtagttttggcggaaatttccccatcattctaggatgatacagaaagaaaaactgtgcctggaccctccctcttggtgggtctgtggaaacataccagcggttttattaaatgggcccctgcatcaatagccaaacatgggggtttggtaatgagaaagcaggacaggccatctgtcagtgacccagaccaggacgaacgtttacaaacacctcctggaacgaagctcccgacctgcatgtcaccttgatcggggcgctgtgagtgagggcagtgtgatacccagtgaatagacgcactctgagtataacccgtgtttggggctgaggcctgctggaccgactggctgggccaagatgggagcagaccctagggacgtatagcacctcggactgggccgtgattcggaccggactctgtgttcagctacactcagaatagcctggcgtgcattctcatgtctccgagaccggaggtaagtgggaagcaacagactgaggctggagagtaggtgctggcaaaacagtcacttcacactgagggccgagattcttacccagagtccagagaaacaaatcacgggcatgtcagacttaatcaacaaggactgacatggttgcccctgaactggctacctgagaggcgtacagacatcaagtattctcaagggaatggaagcagaagagcccagcaagaagaacgagtcaagagggaggtgctctccatatatgaagatcaacccagtggcctaccaaacacaggcattttaacccacgggaaggacagagtgacaatgcacactacaccagaataacaaccgtcataccctacaactcattttacatcatactctgaaacgttaaattcgatggaaaacatggccaaggaaccccgggactcaggtacaaacacgaaggcaaaaagaacaatacctagagaaacggtgcacagggac

SEQ ID NO: 597407 - DNA, 425 bp, Homo sapiens
cattatccaagataggagtgtggctgtgtgtgtggcatctccagccagccgcttgtcacacgtgacgccataatctcctatggacttaaacaccaacaaaagccgaaacggtggcccagaggctgctcctttgttatcccatgctttctaattcaagtcgaatgactgctatggtcacacttatttagtcacagtaaaaaatcacgggcgccctctggcatgcatgacatgcgctactccgccacgtgtaccactcccgtgtaaaaagtttctagaatatgtctgttcacggaccacaatgggcatgggtcaccactccgaagtggatgggactccaccattgcgccttagcggccctcactacaactacgaaccctttaacacgcaccagcattactatccgctttgggagctggacattaccg

SEQ ID NO: 597408 - DNA, 959 bp, Homo sapiens
  misc_feature (508)..(508): n is a, c, g, or t
cgccgagaaaaaaaaaaacaatagaagaacaaaacaggtatggccaacaggggacgggccggtgaacgcaccatggaaaatgtcgcaacgattgctgtgcgcagcatgggataattccggggcccaataccgcggggtgagaccacagcgggcccatgtctccacaggagggaactccggtggcaagaatgcttccaagtgggcacatgggaccttggaggattaagctttcgcgtacacgacccgtagggccaccccatggaaccgtggcactgtccaccgtggctgctgcggtacccgcagcgctggtagccaagtcttctggcaagacaatgctccttccggggcccaaggacgcaccccccccaagggggggacccaacgcgatagacaccccgtgacccccaatagcggggggcccacaagtcattttaggccacccggggtaggcacccacgctgttggccaccgcgcgaggaataacaggtttcacgccccccccaccgcnggggcaagaatgggtgcacgacaaccagaacaagcctgtttggcttcggcaatattagaggaactcccctgcacccagtggagagcgtttccacggcgcaccctgtcccagcccagttgatgtcgcctgttccatgaatgtatacgcggacaacgttagatttttgtgggaattctcaaagtggcatataagtactattatggaagaaaaccaaggtggtaacaaccccacctgtacactcagacgccgagaagcactccacaaaatctttactggggagctcacaatatttcgtgaacgacgtctctcaactgttgtctgtccgcgtacacctcgtacggcggaggagaagttttcgctccatcctgccgccccgcgtgcaggaggaaaagacgttcaaagggccccgagtggctttaatacaaattacagggggaacccccacaaaaca

SEQ ID NO: 597409 - DNA, 196 bp, Homo sapiens
tacggcagtatgtgatctgcccagcattcatcgctcaataagtgacgtagggaagacctgtgcatgtgagtcgatttcataaactggaatgtgagccatgtgtacatactttggtttcaactttactggtcacaaaaaaaaacacacaaaaaaaacaaaaacttccaccctggttttaaattgggtgggttgtggc

SEQ ID NO: 597410 - DNA, 104 bp, Homo sapiens
gcctgctgagggggctggacttgcggccggccactgctgttgagctgttatgccggtaccctttcttggcgagaaaggccatgcgcctggcttctgccttctct

SEQ ID NO: 597411 - DNA, 169 bp, Homo sapiens
cgatacacctgatattaatttttaagctgcatacatctagcgcttactttcattatatgcttcagtactctaaccaaagaataatatgcacgattatggaactcactgaagaataacacgagcatattacaaattcatatggaaattataagatgactccagaggtacc

SEQ ID NO: 597412 - DNA, 638 bp, Homo sapiens
gcctgcggtgacacctgctcccctctgagagcttcaggttctccggcctgccttcactggtttgtgtccagtagccggactgattctctcaagtttgcgtagtcggttcagtcctgttagaacaagaagacgaaaaacacctgtccagaaaacatggatgcatttgagaaagtgagaacagaattagaaacgacagccacaagaagaatatgaaatcatcaatgtggaggttaatccatggtggtgtggtgattacccaagagaggtggttgcgttgggtcgttccaaggatgaaggaagcagacaatgataattatgaagttttattcaatttggaggaacttaagttagaccagcccttcattgatgtatcagagttgctccagagtgaaaagatatgtggctgcaagataagaactgaagattctgaagcatctactgtgtaattataaagctcagcgatcagcccgtaatggaagcttctttcccgaatgtgtccagtttgaatgggtacacaggaccgaggaagatgaagatgtgtgtattctaccaccttccagaggaaccttcgctgtcatgacgtatatccgagcactttgggtgatacaaagtaatgaacgcttttatcagaaaaagac

SEQ ID NO: 597413 - DNA, 613 bp, Homo sapiens
  misc_feature (27)..(27): n is a, c, g, or t
gagggtggaaatcgcttgagccccggngaggtggaggcagcagtgagccatgatagtgccactacagcctgggcaacagagtgagaccctgtctcaaacaaacaagcaaacaaacaaacaaacaaaaacctatcttatttgtctaaagaggagaaaaaaacatgagaactttactatgttgcttgtacataaaagctgttcatcagccttcactttaatgggaataatcgtcttttctataaaccccagcaggcagtcacccacactccaatcagtaggtcttctctacgcatcgccataatttagaaatattttccttctcttatgctacagtctagctcctgcaatctgagctcacccaacctcgtcctgctgtctagaacagtgctatgcaatagaactttctgtgatgatggaaatattctatacctccactgtccaatatataactactagccacaactgagcacttgaactatggctagttcaagcacttgaactatggctagttcaagcacttgaactatggctagttcactgaggaagtgaattttaatttcatttcattgtaattagtttaaattcaaatagccaatgtgctggtggtacatat

SEQ ID NO: 597414 - DNA, 415 bp, Homo sapiens
ggggagagtgggtccgtgcccacccgaatggatatgtgggcctaatgacgcttaaagtaagcttatatgacactggtatagagaggtataccaaaaggccaaagcacgtgtctatcagtctcccggtttcttctgtctgtcttcaactttcttctcctcagcctaagcaacgagcagtaagagggcaggacctactgctggtacagcaccacctgcgagagcagtcactgcggcccctacatctcagatgaggctccatatgatgacgttggccagggcctatgcaccctagccaggacataaaggctcaacatgtacagcggctgctataatgagcgcattggtcttatcctccgtgcgtgtcacctcatcgtcgtgcagtgtgaggtccgagtagacgcaggcgagctcgtcg

SEQ ID NO: 597415 - DNA, 267 bp, Homo sapiens
ccctttttttgggggggggggccccccctggggggttcggggcccccccttcccttcccccccttttgggtttggggcgggggggggcccccatttgccccccgtttggggttttttttggcccccccggccctccgggcccctttcccccccccctccccccccttttcccccgggtttttttgttgggggcccccggccctgtccctcccccgcccgggggggggtccccccttttgaaaataaatttttttggggtttttttca

SEQ ID NO: 597416 - DNA, 336 bp, Homo sapiens
ctgtcattccagcatatgaaactatcgatgccatattaataacttatgaaattataaaagagtaggctgaggacggtgtctcacgcctgtaatcccagcactttgggaggccgaggagggtggatcacctgaggtcaggattccagaccagcctgaccaacatggagaaaccccatctctactagaaatacaaaattagccaggcatggtggtgcctacctgttaatcccagctacctgggaggctgagggacggagaatcgcttgaacctgggaggcagaggttgtgatgagccgagatcacaccattgcactccagactgggcaccacgagcaa

SEQ ID NO: 597417 - DNA, 542 bp, Homo sapiens
  misc_feature (14)..(14): n is a, c, g, or t
  misc_feature (75)..(75): n is a, c, g, or t
  misc_feature (94)..(94): n is a, c, g, or t
  misc_feature (112)..(112): n is a, c, g, or t
  misc_feature (116)..(116): n is a, c, g, or t
  misc_feature (119)..(119): n is a, c, g, or t
  misc_feature (121)..(122): n is a, c, g, or t
  misc_feature (129)..(129): n is a, c, g, or t
  misc_feature (137)..(137): n is a, c, g, or t
  misc_feature (166)..(167): n is a, c, g, or t
  misc_feature (169)..(169): n is a, c, g, or t
  misc_feature (186)..(186): n is a, c, g, or t
  misc_feature (216)..(216): n is a, c, g, or t
  misc_feature (220)..(220): n is a, c, g, or t
  misc_feature (233)..(233): n is a, c, g, or t
  misc_feature (241)..(241): n is a, c, g, or t
  misc_feature (262)..(265): n is a, c, g, or t
  misc_feature (267)..(267): n is a, c, g, or t
  misc_feature (288)..(290): n is a, c, g, or t
  misc_feature (341)..(341): n is a, c, g, or t
  misc_feature (372)..(372): n is a, c, g, or t
  misc_feature (383)..(385): n is a, c, g, or t
  misc_feature (397)..(397): n is a, c, g, or t
  misc_feature (399)..(399): n is a, c, g, or t
  misc_feature (404)..(404): n is a, c, g, or t
  misc_feature (415)..(415): n is a, c, g, or t
  misc_feature (433)..(433): n is a, c, g, or t
  misc_feature (443)..(444): n is a, c, g, or t
  misc_feature (450)..(450): n is a, c, g, or t
  misc_feature (461)..(461): n is a, c, g, or t
  misc_feature (475)..(475): n is a, c, g, or t
  misc_feature (493)..(493): n is a, c, g, or t
  misc_feature (497)..(497): n is a, c, g, or t
  misc_feature (518)..(518): n is a, c, g, or t
gggggggagacaangcgcattgccactcctgccaagagctcatgcctaaatattattatttcaatgaaaaatganaaatattcacaagccctgnttagcgagtaaagcagtnacanccncnnccaaagncgcaagcngaggagattcgagcaggttgatgcttccnnangaggagacattgctgantcgtcggggtgatgccacgctggatctgcntggngactgtgtaatgntctcagcnccatggtccacacgggttttnnnntnttttctgaagttcaacttttnnntgttttttttgttttttccacctccaggttcatgttgggcttttttttgtntttcaatttttgtttgggctttttttttgtnattttgttttnnntttttatttttntnttgtntgttttttggnctgtggcggttgttcttnagagggccanntttggntgttacatggnttaggtctattttnttggttacattttgttcntgcncccctttaggctggtatttgntgtgtgtctgttgatccgattttg

SEQ ID NO: 597418 - DNA, 453 bp, Homo sapiens
cccaaacccgccagcagtgtccatcattgagtggacatgaacgtggcttttattgctcccctggggtccaaagaaccccataagacaagtccggcatgaggagtggccagaaggtgaacccgcccccagtggctatgttggagagctgggcttccgcgctttttttggatttggcaatagattggatggaaaaaagaaaggggtagagcccagcccctccccaatcaagcctggagatattaaaaggggaattccccattatgaatttaaacttgggaagataactttcatcagaaattcacgtccccttgtcaaaaaggttgaaaaggatgaagctggaggcaaatttgtcgctttttttggaaaaggccagtcattgggtaaaaagggaaaaaacccctaagtgaggactgttgggtgattggaaaataataaaagaatcttttgccccca

SEQ ID NO: 597419 - DNA, 458 bp, Homo sapiens
cacgaggcacaacctaaaatttctccctcacttccaggagttattctgcccaggttctggaatctggccagatgtgatgcagaatcccctccccactactcacctgctctgtgaccttgagcagtgatttagcattttcttcatctcattttcctcttcagcaaaatggagaccataatgcctacttcacagggtttgtgaagaattaaatgatctactttatggaaatgactaacggttccagatacataatgagtatttgataaatgctagctatcattggattcattttgttctcataagatattaatcatttggacacattgacaagcaggagaggaaaatcatgttcatttacccaccactctgatagtgcaaaatcaaataacactgatcctgttcactggagatgagtcatatagccagaatctgttagcaagtggtaatgccttctctgg

SEQ ID NO: 597420 - DNA, 111 bp, Homo sapiens
cgtttcaggtcaaatatggcgagcgtgttcggctgaaatttatcaatgagagcatgatggcgcatcccatgcacctacatggcatgtttgtacaacttgaaaatggtcaag

SEQ ID NO: 597421 - DNA, 384 bp, Homo sapiens
  misc_feature (347)..(347): n is a, c, g, or t
cctagaccttccctctgacagagcctacccaaatgagaaggaaacagaaaaccaaccctggtaatatgacaaaacaaggctcttcaacaccccccaaaaatcacactagctcaccagcaatggatccaaatccagaagaaatccctgattgacctgaaaaagaattcaggtgtttagttactaagctaattagggagggaccagagaaaggcaaagtccaatgcaaggaaatccaaaaaaaaatgatacaagaagtgaagggagaaatattcaaggaaatagatagcaaaaagaacaatcctcagcagtagaattgagcaaatagaagaaagaaattcagagctcanagacaaggtctttgaattaacccaatccaacaaagtg

SEQ ID NO: 597422 - DNA, 265 bp, Homo sapiens
  misc_feature (137)..(137): n is a, c, g, or t
  misc_feature (151)..(151): n is a, c, g, or t
  misc_feature (153)..(153): n is a, c, g, or t
  misc_feature (159)..(159): n is a, c, g, or t
  misc_feature (224)..(224): n is a, c, g, or t
  misc_feature (233)..(233): n is a, c, g, or t
ggaataactaatctgtggtggtaagaatcaaaatagtgattaccttggggagaagagaggattggctggcaaggggcatgagggaatttcctagagtgatggaaatgtttatagaaccgtgggctacctggcatctnttaaaactcacctntncatttnactttatataaattgtacttccattaaaaataaaaacaaagaggagaataaagaaaacataaatncggcatttngtgaatgaaaatactgtagccaaatatttgag

SEQ ID NO: 597423 - DNA, 124 bp, Homo sapiens
ctttggggaaaaaaaattttccccctgtccccctgggtctttggaaataaaccccccccccccccaattttttttcccttttggggcaaccctaagtgtttttttttggtggccccctgcccca

SEQ ID NO: 597424 - DNA, 160 bp, Homo sapiens
ataaccgccaaataccgcacggacagtttggcaataaggctgacgtatacacatcaatgcgactgttcctgagacgaaaccactcattttaacgtactgtgacacggccaagaagaagaagaccgtaatcaccaaaagtggaatatttcggaaaacttgg

SEQ ID NO: 597425 - DNA, 432 bp, Homo sapiens
  misc_feature (271)..(271): n is a, c, g, or t
aaaactcccacttgaatgtcttcggacccctcctcaggcgaggtcatgggattgtccttgccagagtgaacaaagggcgattcctgctaacactagcaaagaagaatctttcatttcatcagaggggcatcacatatgatgttcaagacagtagggcatagctagctgaagaggaacatcttgagccagagaggaaaagtctataggcagcgccaggacaaggaaattcccacactgtcatttgtcacgcgacccctaagcaacccagccnctcctggatgggccgagggccttgcctcccgcatcatccatgggagtcagggccttgtcctctcgccttccacccccatccttgtccttttgcccagcatcctcaggacgctttgttcccagagcagacatcccctggaccccattcaaaccctgcctccg

SEQ ID NO: 597426 - DNA, 141 bp, Homo sapiens
ggataaattgtaaaaaagctaaaattaagatagatagctaaaagatggaacaagaagaggagaggagagggagtctagtctaacaaacaccattggtcttcttcttgtccatcacaaacttcctccaaattgtggtgatct

SEQ ID NO: 597427 - DNA, 167 bp, Homo sapiens
atccccgctttcgccatggtttcccttaggagaaggattttatatctcttgttcactgtattgcaaaggtttccagtacttaacttctaatggggtggctttagcattatgtttagctagtccgatttaacagacagggaacacatagggcgaaacctgggctaccg

SEQ ID NO: 597428 - DNA, 306 bp, Homo sapiens
  misc_feature (170)..(170): n is a, c, g, or t
  misc_feature (211)..(211): n is a, c, g, or t
  misc_feature (248)..(248): n is a, c, g, or t
ggatctagaggatcccgtcatttctacacacacaggtcattcccaccagaaagccaaacatctagtctctgaagaacagttaaacactttacagtagactggaagcatgatattctcgtgaacttgtcgtggtagtatcacacatcccacacagataactgttctatcangcagaggctgtcaaggactgagttgatttttctcgttcacnaagattccaaggcaaggaacatgtaatacatagctgnttatctatttggagtgtgtccacttacagttctaacaagtttttccccgtgtcctggg

SEQ ID NO: 597429 - DNA, 305 bp, Homo sapiens
tcagtgatagaagttgttacttggaaaacccttggggacgtaatgtagtgatcgcttgctgatccggatgagcggagtgcactgcggatgaccacctcgctcttcagagactcgcccgccggtgaccacgactactctctgccgatgggaaagcagaagcaagacctgctggaagaggacgactcggctggaggagtctgtctccatgtgaacaaggatcaggtgtcggtggagttctgctcggcgtgcgcccggaaagcgtcgtcgactctaaaaatgtagcgtcaagtaatctgctctttatc

SEQ ID NO: 597430 - DNA, 585 bp, Homo sapiens
  misc_feature (464)..(464): n is a, c, g, or t
agcagctagacttattcttttattcttaatatcagggtctttggacagcattctttctacatgatccttttttgtacatttaagaatattttgattatattaaacaagactgctgattttggtactttttttaaggggtcttcaagtaagtaaaacatacatcgtagctagaagaaaaatgtaccttaaattcgcatcttccctctcatacccaagctgtgaacaattgaaatattttgtcttaaatcacttggttcaatacatgcttatttgttttaaaacctgtatcatcaaactctctctctaaatttaaaatgctggtgaatatgagacttttgaggagagagtgtgctcagaacttacacggcatttggtaggccaagtatgctaagtgtacaatatattttataaattatacacctgaaacaaagaaatgggggcacttaaaataaaagtttatatgntggagataatggactctttgttttgcaaagctgtttgctatagcttacaccgcattagggctactctacctctgaagagtgtgtaatttggtgcgattgaggagttctacggctgttcctt

SEQ ID NO: 597431 - DNA, 313 bp, Homo sapiens
  misc_feature (253)..(253): n is a, c, g, or t
  misc_feature (278)..(278): n is a, c, g, or t
  misc_feature (296)..(296): n is a, c, g, or t
tcgtgtctagaggatcccgttcaattttattctgtttaccaaaaagttaaaagtactgttggaggcaggcaaacagagagaagttttaagagtgactgtggagttggactggacaacaggggaaggaagtaaaagtgtggttagagagtgtatccatttctgtctagtttgcaaaatgtaacgtgtagtaagagtgaacggatatctcgcccaagaagagaaggagagcactattttctttcgccttttccangaaagagtcaaataaagtttgtcanactttgaagagcttatcngtgtgtagaaattgaag

SEQ ID NO: 597432 - DNA, 159 bp, Homo sapiens
gcagaggctggagaggggtaataaaaatctcctagtggaaaccacctcccgcactgccccccagctgggctctggtctcttccagtcacttcagagcatagtcctaaatctagaaatcctgtgtgtatcataggcctgaagagggcggcagccgggcgt

SEQ ID NO: 597433 - DNA, 365 bp, Homo sapiens
caggtaacagtagagaaatttaaagcccgttgttccctaagagtaactgcagcaacaaaaaatctgaaacctagatcaggtttccttgaataaacatcccacactagaaaaaaaaaatgaatgtctattttcaggaataaaaaatatatactataatttctactgtcaaacaaaagaaatctgacagtcagccaataataattaaactgtggaggatcaagcattaaaacacactctgtcaagaaatagagcaatcaaaagaatcagattcagaaatgatccaggtgttggaattattaaaccggggattcaatatagatataatttttgtgttaaatgttacagtgaagatgaacaacatgcat

SEQ ID NO: 597434 - DNA, 366 bp, Homo sapiens
cgacccttaataatgagtgcccagcctaatttatgaatttttagctgagatggggttcaccatgttggctaggctggactcgaactcctgaccggggtgatccacctgcctcgggctcccaaagtgctgggattacaggcgtgagccactgcgcccggcaaaaaaaaatcttttttaattagccatggtggtgtgcacttgtagttccagctacttgggagatagggagaaggactacttaagccccaggagtttggggctgcagtgagctatgattataccactatactccagccaagactctgtctccaaaaaataaacaaacaaataagatgggcgggaggtaatcatcttttagccatgctc

SEQ ID NO: 597435 - DNA, 169 bp, Homo sapiens
ccccacttggcgaggcagtctcgaggacaagagatagagaccatccttctcaacatggtgaaactctgtctctactaaggaaaatataattagctgggcatggcgccctgtgcctgtagtccccgctacttgggaagcagaggcaggagaatcgcttgaacccaggagg

SEQ ID NO: 597436 - DNA, 208 bp, Homo sapiens
agtcgcgtgtagtctgtcgcgtgtcgcaccaccattggttttatttgcctttaccaccaagtcccaggcctggctaataatgaatcaataacctttctatgtctctagcctcctgtatgccactagtagaagtattacgaaaagccttataaaccgaacttagacttagttcctcacatccctcttcagagttaatagtgttggtgac

SEQ ID NO: 597437 - DNA, 250 bp, Homo sapiens
ctcgtgagcacactgatgatcattcccacgtatttgtagccactgtaggccagtaggtgaaaggtgctactagagtcgaccccacgcgaagtcacgggaccttcattcagtttacatgtcatgtgccgttttctcagctgaaaccagtttacccatgcgttatgtgccacactgtgattggcacaatgcgattttgccaggggattgcgcgttcagaagctcaaggcctaacagatcctactagtagtcg

SEQ ID NO: 597438 - DNA, 247 bp, Homo sapiens
ctacaggacatggaagaccccataatagccgccagctcgatgaccatcgacaagctgcttttgtaggaagaggatagcgactcctatgcgcttaaccacactctctctgtggaaggctacttatgcgtagctcccacctgagtcctgttccctgaaactgggattataaaatgaccctggaattgagaccccaggttcatgcttgtttggagtagtcattttatgactacactttctacgcacagct

SEQ ID NO: 597439 - DNA, 395 bp, Homo sapiens
attcgcggccgcgtcgacctctaaatgtacagtctttcacggatgtagggagtaggttgagcacttgagcgtgagcatgtgtgttgcgtcgtgtgctgtgtgccgcatgggtgcgtgagtgttgcgtgcgtccatgtgtacgtgtgagtgttgcatgttgcatgcatgcatgcatgcatggggcttactccctcccattgacatgttcatatttcaagcttcctctgttccctccatatggtgatactccctctgttcccaaatatagtacaaagttgagtcatctattttggaacagagggagtagtacggagtaaaagcctccctctgttctcaaatacggagtatttgtctttctatagatttcaacaagtgactgtcgacgcggccgcgaa

SEQ ID NO: 597440 - DNA, 332 bp, Homo sapiens
gctcgacgttctgtttctttttaaagcctggttaatggccgggcgctgtggctcacgcctataatcccagcactttgggaggccaaggcaggcggatccctgagttcgggagttcaagaccagcctgaccaacacggagaaaccccgtctctactaaaaatacagaattagtcaggcgtggtggtgggcgcctgtaatcccagctactcaggaggctgaggcaggagaatcgcttgaacccgggaggcggaggttgcggtgagctgagatcacgccattgcactacagcctgggcaataagagtgaaactctgtcaaaaaaaaaagtcgacg

SEQ ID NO: 597441 - DNA, 466 bp, Homo sapiens
ggcgagctgggcccgtgtttcggccgccgccatggccgcggtggacctggagaagctgcgggcgtcggtgcgcgggcaaggccatcggacgtcctgaccaggcggcggcgacgcgcaatggcatgaacgctgctgtccgggctgtgacgcgcatgggcatttatgtgggtgccaaagtcttcctcatctacgagggctatgagggcctcgtggagggaggtgagacacatcaagcatgccaactgggtgagcgtctccaacatcatccagctgggcggtagcttatcattggcagcgctcgcgtgcataggccttttaccaccagtggaggggcgccgggcatgcggtctacaagctggtccacgcgacggcatcatccaatgctgtgacgtcatcgtgcggggatgcgcagtccttagcaggtagccaatcatcttgccggcaggcgagtggggcagcctgctgg

SEQ ID NO: 597442 - DNA, 1650 bp, Homo sapiens
  misc_feature (126)..(126): n is a, c, g, or t
  misc_feature (581)..(581): n is a, c, g, or t
  misc_feature (728)..(728): n is a, c, g, or t
  misc_feature (772)..(772): n is a, c, g, or t
  misc_feature (1095)..(1095): n is a, c, g, or t
  misc_feature (1543)..(1543): n is a, c, g, or t
gatagtactcgagtgtctcagagcacagttgtcctactccctgacactagcctgcctcgtattgctgaccacgtgactacgctccccacgcgccgatcggatgagctggattgagaaccttgcctntaaagcacatgagccgcacttcgcataggaccagcatcacactcttaccacatgtcacatgtggcacctgcgtaacctatcaacagggcatgtgtattgaatgtcagcatggtgcacgcgaaatgcctgcaaacggggaaccgagagatgtccatccgtgtggactatagaaggacggttggcaatggacagtcagttgtatcctgtcggtaagactatcagcgccctaattgatcgttgtgtgcgtgaccacttgatggagcgtagcgatgagtgaacccgctactgacagtcatcacgcatgcatatccataatcctgattatgtcagtcttgagacaacaatcaaggttgagttaccatgacgaacgacgggtcgctatcattactctcgatactctgcgaaactaaagtatacgtgaaaccataggtaaatggacgccgtatgcaaacaanttcgataacgtagccaagatgcacccctttggaccacgagtactttgacgttacctcgcgtgaaaggaaacgaccaagggtggggcaccaaaacgagaaacttattgattggaaggcgctgggacccgaagacgttaacattgccangaagtttaaatcctgttttggatgcgaatctgttcgcaatttanaaccgcaggcaattaaggaccacctcgacattgtgcccgtacttcttagccaccagccaaacgtaaacgaagcgcttagaccgcttgcgaactcgggaaacgaaactccacaaaggagttcgattagcaagatgtgccgatgtttgtttgggacccggcaccgaatacgacctcgggatttgtttggcggtccccactctcggaaggaaagcgacactctccggtaggaccaaggcaaccttgtcaagcgcttcgttcttatacttgcaagggtggggtccaggcggggccgaggcccattggcactgagttggcatttgcgngaacacgatccccgtcccggaacgttttgaggtcaacaccgcggcgccaaaaaagcgcgcctttagcaaggcaagagggactttgcgagcgcagatacgggattaggagtccaaccagcctaccaccaaaaggctttggtacccccgccacagagaaacggcccatattcagtataggctctctttgtggccctaacttgcttgttgcttgactataaagggttcccccatgtggtgtattcccccctttccaaatcggtagctaagaacccgtttcacgtgcgtgatgggggcaattgtgcgcccatgaggtggcacgacaccacggggtttatcgaaaatagcacccctggtgcccctttggtgttactatcaaaccagtagcagaggaaatattgagttcaccaaaagttgtggcccccacgggtttaagcggtgacatcacagngacaccgggcatagttgaaaccctcatagaaacactatgtgtcccttctcaaatgaacgtgtagttaaccggtaattcagtaacagtacagagagaaattacacccg

SEQ ID NO: 597443 - DNA, 207 bp, Homo sapiens
aaaaaacgggggggtttggaaaaaatttcccttaaggtttttggcccccccccccaaggttgggcaagggcggttcccgaccatgggggggaaaaaagcctttttggggccccttaaaaaagacccaattgccaagggaaaagggggttaaagcccgggacaaattttgcggggggggggggttccaaaaaaggttttttcccctga

SEQ ID NO: 597444 - DNA, 1176 bp, Homo sapiens
ccacgcgtcggccacgcgtcgggggcagcagcagctgaggcagcgagctgaggcagccgcgacggccggcgctcacaagggatgacctggagtaggccacaaaagagccgagggccgaggagcgcaccacgccgtaggacgagcagagcactgaggacagcgacctcggaaatacctcaccgtagcatacaagcgcaggggaaacgctagcaagctgtgagcccactcacacgccatacccgaacaacaacgcacagagacaaaaacacaaaaaaccaaacaaagacacaccaaaaaaacacaagagcgcccagaagagccagaacaaatggacagacggacaccccaacagaacagcaataccacacagcgacacgcgagataaacaacccacaacagcacacgagatagagacacccaatgataaccaagacgaccgcgcagacgccgacaggcaccacacaaccacataacacaaacaaaacgaaaaatagaacgagtcacaggcaaatgaaaaacacagaaagatgcacgcaagaagcagcggggccgcaatccaaagcaagagacagatcagaaatgacacgaaagtagcgtgaatgagcacacagcacacgcacgagagagaacagtgagaaacaccaacatacagagagagaacagacacagaaacagaaaagcaagcaagacagaaacaaaagagacaacgaagaaggaacaacacagaggcgaagagagaagcagcagaagcacacgacagaagaaaacaaagaacaaaaaagagaagaaaaaagaaaacacaagagcaaacaaacaaaacaggacagaagcagatgagagagccacagcaacacaagcacgaagacaaggaaaacaaacgccgagacgaggcagacgagcgcgaacgagagcccagacatcaagagacacaggtataagacagccagggccagcgccagaccactgacgacgacgcgtcagtgggacgaggcaaagcggtgtaagggagagagttagagacagcaggacggcacagagagacgaagcagagcagacaagcggggggaggacgacagacgtaaaacagagagccagagagaagggagaccacatggcggagaggagggagacgctcaacgaaaacgagaaaacgaacgaaagcgacagaccgagcgg

SEQ ID NO: 597445 - DNA, 615 bp, Homo sapiens
atggtaacaacactactacagatgctccttgacttacgatggggttatgtcctgataaacccatcgtcaggttgaaaatatcgtgaagtcaaaaacccatcaactacagctaaggcaccgaacatgggagcttaccctattctgccggagggggtactacattagcctatagttgggcaaaatcatctaatgcaaagcctattttatttaatttttttttaagagacagggtctcattctgtcaccgaggttggagtgtagtggtgtcatagctcactgcagcctctccttttgggctcaagcgaccgtcccttcttagccaaccgagtagctaggactacaggcacatgtcaccacacctgtctaatttttaaatttttggagagatggggtccctattttgttccccaggctggtttcaaactcccagcctcaaacaatcctcccgccttggcctccagaagtgctgggatcaaaggatcaaagcctgttttgtaataaatggtgactctctcatgaatttgctgaatgctgtactgaaagtgaaaaacacaatggttgtttgggtattcaaagtgtgatttctccctgaattgccattcttttagcatcatg

SEQ ID NO: 597446 - DNA, 331 bp, Homo sapiens
  misc_feature (331)..(331): n is a, c, g, or t
agagcatgtgtaattagtgaatgaagtgactgagtttgcgcaaacacgtgttgctgttgagtcagatgaaaatagtgacaaatcacattataccctttttggagacaaattatgcacagtgtggaactcttcgtgaaacctatggtgaaaagggtgactggtgtgcaaaacaagaacctgtgagaaatgagatgcgttttgcgacacaaagatgacaacccaaaccttccccgattggtgagaccggtgatgtgatgtgcactggttttcatgacacatgaagagacatttttgaaccctttctttggttaaagggatgatggttttacgn

SEQ ID NO: 597447 - DNA, 431 bp, Homo sapiens
actctagcaggatctcaccgtaatatgtaccaatgaaaagaaaagaaaaacattgtgctggctccaaaaaactgactttgagctacatatgacctatgggctgtatactgttggatctttaatagcttctagagaagaagttcaagatctaagtaggtgcttggctaaattttaatttcttccttagatatactatagacagcacttttcattattaatttctgtgttatgtttcagggggcagaaataaggacatttctcgtgaactactgtttacactgtcttttggtgaaggaagattagtatgatgaacctagacggaaacacactgtttacacctagaggagaaaataaaagagggtcatgtgaaagaggaagatggaataaaaattcaatattaaagactaaagtgaatatcatatagtaagtat

SEQ ID NO: 597448 - DNA, 231 bp, Homo sapiens
tatctgagccttggcggcacctcttcaattttaagagaatcaggccgggcgcggtggctcacgcctgtaatcccagcactttgggaggccgaggtgggaggatcacgaggtcaggagatcgagaccatcctggctaatacggtgaaaccccatctctactaaaaatacaactaaattagccgggcatggtggtgggcgcctgtagtcccggtacatgccccggtacatgca

SEQ ID NO: 597449 - DNA, 264 bp, Homo sapiens
gaaccaccacggctggctaattttttgtatttttagtagagacgaggtttccctgtgttggccaggatggtctcgatctcctgacctcgtgatccgcccgtcttggcctcccaaagtgctgggattataggcgtgaaacccgtgcccgccgtcttatccttagaaagcagttagaaagacacctgagaaccaatccaaactgcagccttcacagaaccttctggaccttctggatgcaactcattactgccagaggtctttgat

SEQ ID NO: 597450 - DNA, 113 bp, Homo sapiens
  misc_feature (104)..(104): n is a, c, g, or t
gtgcccaaagacactttgaaggtgaaaatccaccgtcgtgattttaggcaatattgccagatgacaaggggttgggtcattcgatggcaccctgcctgctctanatgtatccc

SEQ ID NO: 597451 - DNA, 297 bp, Homo sapiens
  misc_feature (201)..(201): n is a, c, g, or t
  misc_feature (244)..(244): n is a, c, g, or t
tctgggactctatcaggggggctctggcttcagtgcaagcagtggccgagggcggggggtgggcttgggcaggggcggaggtagcagctccagcgtcaaattggtctccaccacctcctcctcccggaagagcttcaagagctaagaacctgctgcaagtcacggccttccaagggcagcaacccagcccaggtagatggnctcttctaggcagtggctcaagccaggtattatccttggcggnagagtagtctagaccaagccaattggagaaccacattcttgggttccctgaat

SEQ ID NO: 597452 - DNA, 148 bp, Homo sapiens
gagctcgctaccatataggttggacgaccgagcacgtattcatgcgaaacttgcccttgcagcccaaatgcaggagcaaatgttggctccccagtaagcccacaaggtagactgaagccattatctagttgactaatcggcgagtctc

SEQ ID NO: 597453 - DNA, 271 bp, Homo sapiens
actatcaatgacattacatgagctcccaatattcgtattaaatggtagtcaagagactatcaagcaggaagcctgatctcgacatgtttcctcggaggctctgaacctgccctatcttgcccacccagaattcttttaagttctgttttgttttaacagggtatcactctgtagcccaggctagagtgcagtggtgtaatcatagctcactgcaacctccaactcctgggctcaagtgatcctcctgcctcatcctcccaaatagctgaga

SEQ ID NO: 597454 - DNA, 210 bp, Homo sapiens
acatctcaatccaattctttggcgctcttgcttgtctaacttgctcggacaaatctgacaactgtgaacaactggccttcttatcctagagatctacatgttatataatacatgtgttcatacatagccttgtctatgcccacatacttcaggagaccagctattatctataaatctagatgcgtgccattcattaataacaaaattaca

SEQ ID NO: 597455 - DNA, 129 bp, Homo sapiens
cgttggcagcccaggccagggtggccagcaccagcgtgcgctgcaggctgggttccactgcacctgcgccgcgcagctgctgcagcatcagggtggagaccgccgccggcagcttgctccagcgcgatg

SEQ ID NO: 597456 - DNA, 1430 bp, Homo sapiens
  misc_feature (899)..(899): n is a, c, g, or t
ggggccgacccatacgacggcggcggtgtgactccatgcgccgccaccacacataaagggggcgtggcacccacacggcgcgatgctagggggggcaccatacaattactgtccgccggggggccaacaacaaacagtctgccgcctgcttcgttatattagggggaggcccacccacaaaaatgtggtgcatctccataaggggggccgcaccaactaaaagaaggggggtggggctgcccacaccagacgaagccccgtgtattaatactggccaaacagggtatgacctctccctctcctcacggggaggatcggttttctcgtagcagtcccgcctactcccaaacggagaattggttgtgtctcgccacgaacatgaagtttggtgccctcttctcgggtttctctcctaatttgatgaagtccttctgctttcttcaaccagaagggggggagtattgtccccaccgggagaatttcttatatcatcaggccccggcggtgtttcctcttatcgtcctcttggtgggagcgccgtggcgttttgtcccctcgggtattccccaacatatagttgacgcccctctggagtgtccacatcggggttgtagtactctgcggggaataactacttctcggggttgtcgaagtggcaagttctactctgctgtggccccgtttacaagagcgcccctctctggagacttttcccgcaacactgctcgtctcacacaacacccccccaactagtgtgaggacgttttgtgtgtcctctgtcttgtgctgcaaacacgcgtggggtgcacctgtgtgcgcgctgacgacacagtggggggtgtttcacacactttctcacgcgcacatgggtgtctctctcacacagagtgttgagattngtgtgtgagacacactctcacagagtttgtcacacacagcgacgttcacatctctctctctatatgtctggggcggtgcccctgagacctctaagagatgtgtctctcttgtgttgtgcgcacactattttgttgagaggcgacatgtgagaagagaatagaccacatgcgtgtctcttgagagaggttgagatggcgccctatatgagaccgcggtttgtgtatagccacacatctgtgttcacccccctcttatatatattatattcacggccacatcacatgagaacgccacatgttttcttgtgtggccttttctaagttttggttgttcttggttgttctcacgttcttttatgagactcccacgctggcaccacaatttgagattggacttgcacaaattatacctggctttaaaggagatgtgggaaattcctaaattttttttgtgagacccttttcaactcccccaccatggcgtgttgtgacaccttctacccataacatagtcaagtattttccctgcca

SEQ ID NO: 597457 - DNA, 958 bp, Homo sapiens
  misc_feature (1)..(1): n is a, c, g, or t
ncatatgtcgtggatgcgttgggctcaatccggctgtcctatgcatcttatagtgttgcgcgcattttgcaacaagcttgtacccgatatggtgccggttgattgcctagcttcggatttattatcccccagtgccctaaatcgctcttcgtgttcgtaatggtgtttcaccgagctgggtattcccgcggtgggccacagcatattgtggtaggggcaaatggtgcttgtcccttacgaagacgcctcacctttgtgttcacaccgctgtattaggccttcgctcgctcgccccttgtgtgagcgggctccaccttggggttcccgctccccgtcgtttaattcccagattaatccgcccgcattttttgtaaccccccaggtgcccgtattttctttttataaactgttttgcacccccaacgatttgtataacccccagatgtgctctaaaatactggtaaacacaagcttcgtacaccacactaggcgggcataaaaatctttttaacttgtaacaccctccttacatctaacaacatagtttaggccaccgggacaaaccccttacaattatcttggttatactaaaagatggtgtgcaggaagtgcactcccacactgggggagatgcacgaaaaatggggtctccctgtgctccaccaatgggatgtataaccagtggtgaccaccacaattatagcacccaagtcctgttacacccacggtgttgcagatctatcactcattggtttcccagattataagtgaacaacatgaaaaaggagtacacccacaatcggtacaggacaaaagaagaacgatgatgaagagggcttttgaaataagaacatctttcttaccctgttgtggggtcttttttttaatttccttttttggggccccaaaaaaaaccctttgttaaaccccaacaaaacaaaaaaaacaaacataaaaa

SEQ ID NO: 597458 - DNA, 496 bp, Homo sapiens
gggctcaactggaggaacaaatatcagctccacctctgagcccaaggaagaatgagtcaccctgccccaccatctgaacactcattacactaaacacctctgggaaaaaaaaaaaaaacaaaatatcacaaaacaacagaaaaaaacaaaacaaaaacacaacacaaaaaacacctcttgggaggcacaaaagcaccacaaaagcaaatcacaaagccaaaacagtctagacaggcgagacaccaatggctcataatgacaaagccgagctaagcgtgcggcaaacaaaaagcaaccaaccgttgagaaacaaacacgaagagaggaacaaccaacaaaaaaaaaaaaaaaccgcggggcaaacacagacgcagactctagaaacacacaacgaatcaacggagctaccacacaccaacacagtaagcctcatacaaacaccggcgaccaaagagcgcagcagacaacaaaaacagcccccgcggctacccgaaga

SEQ ID NO: 597459 - DNA, 174 bp, Homo sapiens
  misc_feature (12)..(12): n is a, c, g, or t
  misc_feature (25)..(25): n is a, c, g, or t
  misc_feature (80)..(80): n is a, c, g, or t
  misc_feature (93)..(94): n is a, c, g, or t
  misc_feature (114)..(114): n is a, c, g, or t
  misc_feature (162)..(162): n is a, c, g, or t
  misc_feature (166)..(167): n is a, c, g, or t
  misc_feature (170)..(170): n is a, c, g, or t
tcagcatattgntctctctccagcnggacttctttaagcgactccttcaactgtgctcacgtgtcctttcagcagtatcngctcccgtatggnntgctctaactgccgcttganaagtgctttactgccgctcgagaacccatccggcttcttcttctgtgntggnngcnacag

SEQ ID NO: 597460 - DNA, 230 bp, Homo sapiens
aggccctcaacgtggaacaggcatcccagacgattgcacggaatgcacttaatcaggaaacggaggtggagctgtacaacgaatatcccgaacctatcaaactgcacaagaatgagcgggccaatggcctccgcagaaagctgcagttgctgagggggcagtgagagttgagcacagagtccttcacaaaccaagaacacacctaggccttcaacacaccaacgaacggc

SEQ ID NO: 597461 - DNA, 214 bp, Homo sapiens
cacctgtccccaaacactgggatgtttatggtactattactatcccctctttacatagattgagagaattgataataactgagtgattattccttttgaagaagtgataaagtgaaggtttcaagccacgggggtgtggcgttcaatactctaacacaagaatcatcaggaaatgtcttcagattgtctttcgagagaatttctctgtagatgg

SEQ ID NO: 597462 - DNA, 1479 bp, Homo sapiens
ccttcgccgcgctgttcagcctggccacccttgctccttcttgtgtttcattttgctctcacatttgtggtggtctgtcgcttgtctctccgtggctgtgtctcgttgtgctgttgtgtatattcgtcatgttcctggtgttgtgtggtgatgttggcgtctgttgcttcgtcttacgtttctgtagtgtgttcgtcctctcgttcttcgcagttgatgtgtacctgtcctggtgttgtgtggcgggtgtctcttgttgatgggtgcagtgtagtttagatggcggtccaccccttttgtggggtggtcgtgttcgttttgctctgctgtctcgcttgttagggtggtttggggggtgtcgtttcgctttgtctagtatctggtgtcggtctgatgtattgtcacgttgtgcggtgaagtgttgttgtgctttgggagttctggttgctgctgtcctatccgcgcctcttttgtgtatggtcggctccgccggcctggtagtgttgtaactcgcttgtttggcgtccactgcggcacgtgtttgttgtctgtgccggtggtcgtgggttatggggtgctgtcgcgtgttgtcccctgagctgggtggctacgtgaatcgtgttgttgcatgcacgtgttcgttgtctcgtttcttgtgtggtctctggatggccgccgcatggctagtctaagtgtgggctccgccattgtggctttgtccgctgatcgttcggtgggatctgtacgtggtgtgtgctcccgttggggctaccgctgctcccgttgttggtagccctgtcgtggcctggtggtggtgatgttgtgttggtgggggtcctcacctgggttagctgtcctccgctgggttgcgtctccccttgtttgtctgcggctctctgtggtctgttctattgttactctgtggtggtcccgccgtgtgtcctgtgtttggagccgtgtagtctagtgtgggccatctcagtgtctcactggggcgtcgatgatcgtgagtgagggccttctccctagtgagctggggtgttgtcttgtcgtcgcagttgtctgttgtatatggccctggtatggagccccgctggtctcacgcaggctgcggtccttgtggtgtcccgggcgcgagctgtgtggagtgtgtatcgccagggagtactctcacgctacctgtactcttattgtaagtgggactgcattcttagatagacctgtcttatagggttctcccctctttgggctgctctcgtaggggtctcgtaataagaccccaccttggatattcaggcagccgcacaggtgatattatcgggtactatgagccactgtatatagatggcccctgccacggtggcgactgccttgccatcccactcggtgatggatcggtttggatacagggtaatgttgctcgccattttgtgccccaagttaagatgctactggtttgaaggaaaaataaaaaaaaaa

SEQ ID NO: 597463 - DNA, 374 bp, Homo sapiens
  misc_feature (12)..(12): n is a, c, g, or t
  misc_feature (20)..(20): n is a, c, g, or t
  misc_feature (34)..(34): n is a, c, g, or t
  misc_feature (36)..(36): n is a, c, g, or t
  misc_feature (49)..(49): n is a, c, g, or t
  misc_feature (53)..(53): n is a, c, g, or t
  misc_feature (104)..(104): n is a, c, g, or t
  misc_feature (109)..(109): n is a, c, g, or t
  misc_feature (121)..(122): n is a, c, g, or t
  misc_feature (135)..(135): n is a, c, g, or t
  misc_feature (148)..(148): n is a, c, g, or t
  misc_feature (151)..(151): n is a, c, g, or t
  misc_feature (223)..(223): n is a, c, g, or t
  misc_feature (235)..(235): n is a, c, g, or t
  misc_feature (237)..(237): n is a, c, g, or t
  misc_feature (320)..(320): n is a, c, g, or t
  misc_feature (329)..(329): n is a, c, g, or t
  misc_feature (331)..(331): n is a, c, g, or t
  misc_feature (340)..(340): n is a, c, g, or t
  misc_feature (371)..(371): n is a, c, g, or t
cagacccagctncctatctngatcgtccacccgntnccttcccgtcctnactnacaccagccatgtccaagcggagcagatcgaagtcggaggaaaccattcgnggctngccaaggctcgnngaagccaaggatngagcccccctctnganggagaagccgaggaggaggagaaggacaaggaagaggccgaggaagaggaggcagttgaagaggaagaagtngccaaggaagantntgaagaagcaaaagaagaagaagaaggaggtgaaggtgaagaaggagaggaaaccaaagaagttgaagaggaggagaagaaanttgaaggtntnggggagganaagaagtaagaagaaagttgaaccccatttnctc

SEQ ID NO: 597464 - DNA, 456 bp, Homo sapiens
gatgtgcttactctcccgtcatgattctagaggcttacccagccttgatggactgtaagtccaataaaatctcttttacttcccagttctcgggtatgtcttatgtcagcagcatgaaaatggaccactatagtgctaccaattcaaataaccatcattaggaggtcatgttttacactttttattttatctttattttttatttttatttttgagatggagtctcgctctgtcatccaggctggagtacagtggcaagatcttggctcactgcaacctctgcctcccaggttcaagcaattctcctgcctcagcctcccagagtagctgggactacaggcatgcaccaccaggcccagctaatttaatttgtatttttagaggagatggggtttcaccatgtagatcaggatggtctcaaactcctgacctcaaatgatccacccaacacggcct

SEQ ID NO: 597465 - DNA, 316 bp, Homo sapiens
acttgattttaggtgtaatactggcatatatctgtcatattaccccactcaaagtttcttccgactaggcatcaaaatacagtgatttattaactaaggctttaatacattgttccacctaattggctcagactttgtattttatttacatatagtgttttttaccgctttttcaagcatttcttaatattttttaagtttcatgaagagtcagttattaatccataccatgtaattcttgtaatatgtattcagtgttttgtaagagtgatgtattttcaagattttgtatgactgtaagatcctcttcaaagag

SEQ ID NO: 597466 - DNA, 640 bp, Homo sapiens
agggatggagaagccaggtatcagcattggagactgatggagaactgagacggaagacacgagggggggaccttgcagctgtggaaggctccttggagcctcctttgtgggagggtatcagttctggttctgccagagcctcagccctggtagcagaacctcagggctgcccctctccccaaactcctcccagcaaggctgacccttatgagcttactccttaaacagtattaaccctgccacactcatggcgcatcgcgcaccttggcttcccctgccccactttgctcctgctgacagcgtccattgctggcacgctgcgacacgcgtgcaacatactacactccagccctactctccgcgctctcgactctacactcctcaagggcgcaagggctccgcttacacacacgctgcgcccactcccatggctacatgcgtctctctcttgcaccacactaggactcttaggtacgaacatcacccttcccctttttcatggatcactctacacaagctgacggtatcacctgtgcgagcagaatgtcctcttccctgctggctgccctgcccatactgctgcagggctgtggcggggtgcaggtctgcggtcggggtgggccacagctcgtgtcctagg

SEQ ID NO: 597467 - DNA, 1053 bp, Homo sapiens
ctcaggagccagaacggtctgatctggcctctgctttgaggcccaattattccatcagggaaatctatctagggctctccccttggtctttcaaagtggattaatgacccttcctcgatacttgcagagagataagccctgcgcgtaggaactgcatcctagtttgatgcgagtcttgtgacattcgctgcgagacgtcttgcggttcaacctttcgacagctcccgtgtatactccaaggctgtctccgtgtctgggaatagtaggaaggcagatatcccaggaacatagggtctggagctcatccgcggctggttgcccataccaagggtgttcatgcgtagcatggatgagagcaaacaagtccatggtcttgtacagcacttggttgacgtcttatgacttggaactcgcccctaggccagcgcgacgcaatggtgatgggggatctcagtgggctttggcgatatagcatactattccaagagcgccttgaactagagcgagtctggacgcatcgtagtggtctcggactgcggtgggggaactgaggagcgaggtagcatggggcacaaaagtaaccctggagggccccaactggccctcacggcgcaccaagggtggtgtagccccttgtggcgactcgttgacaagagactcactgtggttcccaagtcattgaccgaggataggtaactaagtaacacctgggccgaaccttctatccaatttatatgttcactgggcctggaagagcaccctttatgcccataatatttcccgaacgtgcctcggtgtcccatgggctccttgaagatttaccagtcgtggggcccagggtgcatgctggggacttatttagaacccgcctttttccatttatgaatcgtaagggcatatgagcttggggcccccggcattcgtaggcacggatgacgtattacctggtaagcctaaccaaaattaggggcctaactagtttggtgtaccacttgtgagagccaggcgaaggggcgtggcacttagggaacacaaagagctgcgagaagtgga

SEQ ID NO: 597468 - DNA, 414 bp, Homo sapiens
ccgaccgacgatcaggcgactccatcttggttattacccattagtgccttatcaaaacccatgtgggtgttaaaaccagcaatgctaatgtcatgtttattgacattcataatgacgctgggttaaattatgtgacattgaggctgatttattatgcccgcaccaatgttgggatggtcacttcttgagcgacatcctatcttaagggtaacttcttccgtttttcctattaactgtagaggcagtatatgcactgtcttgccgttgttcttgtgaacatagttcctttctatcccttctcctgagaccttccctctctatgtgcctatccatcccttaactacctcctctcttaacagtgttacacagcaataaataatgcattccctttttgatttctggggagtcgccctt

SEQ ID NO: 597469 - DNA, 217 bp, Homo sapiens
tgaatatggggtcctcagccctgcaccctctgcggtcatcagcggctgcatggttttgaggctcaggtttggataacggtgaaaagaatagtcaccagggattactcagaccggccgagctctcgcgagtcctggtgggcgttgaactgtggagaaagcacgtatgcaagatagtggtcaagcacgacatgcatccctcgtgaatggttttcacttt

SEQ ID NO: 597470 - DNA, 362 bp, Homo sapiens
aaggcggttttgatttcgcacgcatccatcccatcgagttctatgccgttttcccggacgaggagcgggcgcgcagggcggcaggcaagtttcgcggtgaatccttgaatgcccaggtcagtgtccgcgacgacggcgcctggtacctggaactgagcaaggtgatgtacgccacctatggcggtatcggtgacttcgagcagaacttcggggcggtggtcgagcccctgggcggtacgatcgaagggtggggcgtcaagcacccggtgcgggcactcaattgagtgcacttcttctttcaaccagcaacggctgacccaagggttggccgtttttgtttatcacgcacaaaaagtcgacgc

SEQ ID NO: 597471 - DNA, 286 bp, Homo sapiens
tgcgatctaagcttactacagcctctacctcctgggtcccgcgattcttgtgctcagcctcccgagtagctgggactgcaggcgtgcccactgtacctggctactttttgtatttttagtggagacggggttttgtcacgttggccgggctggtctcgaaatcctgacctcaggtgattcacctgcttcagcctcccaaagtgctgggattgtaggtgtgagccaccgagcctggctaaaatattttaaatctttcaaagatatgtaaagatgttacgtgttttct

SEQ ID NO: 597472 - DNA, 511 bp, Homo sapiens
gtcggggaacgtggcgccacggaagtcatacattgaggcgagccgtacctagagatctcaacataaccataaactcttggggactggactgacgcattcatggatgctcagcacctagcaataaatttctcagtaagtaattagtagaaggatatagcagaacattaacatgaaagcaatacataacatcagctaggcaatcaaagaagacagaggccgggtgcgggggctcacgcctgtaatcccagcactttgggaggctgaggcaagcaggttacttgaggtgaggagttcaagaccagcctgggcaacgtggcgaaaccccgtctctaccaaaaagccaaaattagccaggtgcggtggtatgcgcctggagtcccagccacttggcaggctgaggcaggagaagtgctttgaacccgggaggcagaggagcagagtttctgctcaacagtttctgatcaacagtgctctaaagaaaactttccactgttggaattggatttgaagc

SEQ ID NO: 597473 - DNA, 419 bp, Homo sapiens
  misc_feature (369)..(369): n is a, c, g, or t
tagaatctcatcttctgagaaatgctgcctgtttgtcttcacttgtgagggagactgctcgctccctctgcccttccattttgtttctcagacaggctctttagctttaagggctaggggcattaaggatgccaggatctgtgtttcagagctgagtgttctcacccagccttattgaagcctagcccggaaagctttgagaagcaaagcccctgacagccgagatcccttggcagtactcagtgcggcagtgttggccttctaggataatggggattttctcatatcctcctttggaccgttgaaacctccacaagggaatcatttttcaaaacatcttgttctgggaaggattggaccaagtaagtntatttactggtggaaagaagcgtgcacttataccaaagcagtcttctagt

SEQ ID NO: 597474 - DNA, 163 bp, Homo sapiens
ccttcctgtagctctcaaagcaaattatgagccattatctctattctgcaagctcagactgcagaagcatgtgaagctaacaccaccgatgatggcgtaccctagcatgacattctcttggacagcagaatgttaatcgacacgcgtgcagcattatgtgaaa

SEQ ID NO: 597475 - DNA, 653 bp, Homo sapiens
gctcgaccgtcgtcactaacagtcaaaagtggcgagcacaccactactgctgcattgtgcacacgcggggctggcgcacccgtcagggtggagctggaatctccaggcaagtcctccgtgctcgtggtgggaatcgtcatcggtgtcttgctactcacggcagcggctgtaggatgagctctgttgtggagaagatgaggaatgggcctgcaagcccttggaacttccgtcctggaaaagacaaccggggtcctccgcgcacaccaggggagggccagattccgattttaagggattgaaattgggtccagcccacgcctgaccattcgacaatccgagtgctaaaagcggaattggtctaggcgccttgaggggtgtagaccccctggaaacttgggatctttagcccccaaaagggttttggaccaattgtccccccgtgaggccccgccctggaggtgcgccaattccccccgataagaaaagggttttcacaccggaagataaaccagtttggcccagaaaaaaaaaaaatgtcacggcgcctttatagtatgtgcaccgggattcggcgggtctgaggtgacacttcctcggaggacgcataaatacggaaaggtcaagagttcctggaatttggcggcgacccaaaa

SEQ ID NO: 597476 - DNA, 97 bp, Homo sapiens
tcataagggctttctaaaaccatttctgtccaagagaaaaaaaactgtactgcttgttcaagagggctgtgattaaaatctttagcattttgttcct

SEQ ID NO: 597477 - DNA, 224 bp, Homo sapiens
ccccccttttttgggggttaaatcccccgggttttaaaccttaaaaccccccccttggaaaaattttttgggaaaacccccccccccttttttttgcccccccagtttttggggtaaaatggggcccccccccccccccaggcctttttaaccccccaaaatttgggttttggggaaatttttttttttgggaaaaaaaaaaaaaaaaaaaaaggggtttttta

SEQ ID NO: 597478 - DNA, 101 bp, Homo sapiens
agtgatgaaaatgcttaggatctagatagaggtggtggctgtgaatgtactaaatgccactgaattattattcacttgctattgaaacttctaaaactagg

SEQ ID NO: 597479 - DNA, 238 bp, Homo sapiens
ctagggataacactgaattaggaatatacacaaaatggctaagagggctgggtgcagtggctcacgccttgtaatcccagcactctgggaggcatgggcgggtggatcgtttgagctcaggagctcgagaccagcctgggcaacacagtgaaaccccgtctctacaaaaattacaaaaaaattagccaggcgtggtggcgtgcacctgtaaccccagctacttgggagactgaggcgg

SEQ ID NO: 597480 - DNA, 366 bp, Homo sapiens
ccgcagcatacgccgtcgcgtcacgcagagggtcgtcgtggtgatgcgcaccaaagcgtccagcgggccaacgtcgggaatcggcttgtcctgcaggacaatgcggtttttttcaacgaaaacagcggcgctcatggttgccataaggtgatctcctgcgcaggggaactccagattgcgccgcgatcacgcctggcaggttgatcatgatcaactatcgcgcaactgaccgcacatcgcgtgccgctctgggcctgcgggcaatttgatacagatcaacctcgacctcgcagcgcaggccatgatcagcggcaggtatcaccgccgctgccaccgaccccgagggagattgccatgtctgaccaa

SEQ ID NO: 597481 - DNA, 951 bp, Homo sapiens
cgtcgtgttacccaacgataatatggacgcggcgcagttgagcccaatttacatagatgtcgcggccgaaagccggtcacttcgcgcttggccaacctatccaccttgggcccagggtctcctgcacacggtcggcccctgtcccatacgtacccgtttttcgtggacacagatatgtctggtgctgggcacgccctgatagccccatatttcggggttagcccagaaattttgtaaccccgggggcgggtacccctgcctcggtgggcccccccgtgcctccgctccatggtggccacaccgtccaggagatccccctctgttaagttgtaatgttgaatacaccccacaggggtcttttggaacaacccccggaaatccccaaccgccggccgtcagagtactcctaccctcggccgcgcgcccgtgtggtcaagcgccgtacaaagccaccgcacctcggggacgcatgcggccacaaaaggagatcactgggagcccccagggaattggcgacaacacccgagcgtggcaaatatcaggaagaggcccctcctccctcagaaaaaactatacaaaaagacaggccgtcggtcccaccgtggtgtccccacacggggaagagacgcccccacctgggggaggcccacgcgggcggcacaaaccccatcgccgctccaaaggtcttcaaggaccacctccccccccccaacaagcggtgaagaccccactcttgtggactaacaaaagaagaagacagccagcaccaccgctagggtgggcacagggaaccggtaggtagcacgagcaccgtgggcgcggataaaggcacagcaggaaaccatcttcggaacccccgaagcgcacacaaggtgatccacgagtccgcggaccatactcccacgtgactcccccccggggccccaggccacaatcccgtcccccaaaaca

SEQ ID NO: 597482 - DNA, 139 bp, Homo sapiens
gatatgagctcggaccggacgatagggatagggatgaccgtcgccgtgagagggataccttgattctcgaggtggaccccagctctcctctctggctttttctttctctctccatccacctggcttgactaatggtctc

SEQ ID NO: 597483 - DNA, 396 bp, Homo sapiens
ctttttagggggggcggtttttccagggcatttcccccccggggttttgcccttttggccggggggccccccccttggggggggtttgcccctttggggggggggccccggggttttttttttttaaaaggttttttggggggcccccggggggggggttccccccccccaactcctttttttttccgggggagggggggggttttgggggggtttcccctttggttcttggccccccccccccgttttgccctggggggttcccggccctgggggggggggaagcctttttggggcccctgggggagggcccgttttcccgggggggggggggttttttcccggggccggtttttccggtggggggggttccctaaaagtttttttcccctggga

SEQ ID NO: 597484 - DNA, 893 bp, Homo sapiens
gggaaagtgacccaaatcagactacctgtgaagcttggcacattaccttcagccggacgaaacatacatggtccacaaacagtattactgtgctacacgccacgaccctccactgaagaggtctgcttccaacaaagtgcctgccatgcaagagaaccatgcgcacacgcaaggcgcgaacgatgtctgagatgtgcctacctgagcaggaaacaaaggcctcacactggttcagcagagattcttgagtagccaacctcaataatccttgtacctccaactcaagaaccacagaagggctcgcgagagttgctacccacccaagatgtgatcatcttcccaccggacttttgtctctaaacacttggaaacttctctgagatcaacaagtgttgttcagtttccaacatgtgataatatcattcagtgtttcctgcctagagatggcgtgccatagatctcagcaaaaggtgttatctcagtctgagcggaggaccagttccaaaaggtgtggactcatcacgagtgcctgtgtgcaacaatcagttcactaaggtaacaaaactattctggccccaaagaggaatttctggcgggttaagtggaatcagggtaatgactgggtcaagtggaggggaaagtgtttccagattcagcaacgcgcacgaaaagcctgtgcagtagaagaaggctactaacggtgacaattggatgtggcgagttccaccagtggaaattattttttccccctagaccagaggggtgaagtttaggaggggcacctatggccaagaagcgattgtgtttcacagctccggggcaaaaagaggggacattctttgggagaggattcgtgtgcaacagcaaggaaggactaggtagtgggcaggcac

SEQ ID NO: 597485 - DNA, 777 bp, Homo sapiens
ttgcaaaatacatttgaatgtgctttcaagtattaccagtttggggtcatagctgaaaaactttattaagtcacagataaaatgggaaaatcaggaatattttatattgtatgaaatatacaataacactgtgtgtgatggctcaggtctgtaatcctgtgatagttaatactgattgtcaacttgattacattgaaggatgtaagcattgctcctgggtgtgtctgtgagggtgttgccaaaggagattaatatttgagtcagtagtctggggaaggcagaccccctacttaatctatgggcaccatctaatcagctgccagcatggctaaaatataaagcaggcagaagaacatgaaaagactagactggcctagtttcccagcctacatctttctcccgtggtggatgcttcctgccctcaaacatcagactccaggttcttcagttttaggactcggactggctctccttgctcctcagcttgcagatggcctattgtgggaccttgtgattatgtgagttaatgcttaattaaacctccccccttttatatggttaaccctaaaaccacacaatctaggcatacaacaacaacaataaatcataaacgaatactccccacatacactaccccaaacctgcacatacacgtcaccaatcaaactatcacacacaaacgcaacatcaacacaacaaaaagagcggcgccctataataattatctccacgcgcagccaatcatttgcgcgacaagttttcttacaacagaaccaa

SEQ ID NO: 597486 - DNA, 892 bp, Homo sapiens
agcggattgggggaagcgcccgcgctttcggagggttccgttaaaatggcgccctggtggccggtgtggtgcccgcgccttagcctgtcgaggagcatgggagcttgctgtgtgtgctgcagtgaagggcgctgggccgcggatccctgctgctgtgctggctgatgtctagtggctgtgctcatgacctctggaccacctgtgcacggctcctgtgtgcgaggatgtgctgatcccgtgatcagaagtcgccgaacgttcttgcttgcgggaaccttgtgctggcaggactcctggtgcaggatgccgaagctgatgtatgcccagcaggttccaagtatgcttgtgctggtgtgatttggcacgcaaacttcgccccaacttgtatggaacgacgcatgcaattgtcttaggtactgctgaagacaagactccacacgaacagagcgttattcgacaacgagagagaagcacgatgctgcatctactcttcagcactccacagaagacttcattcacagtggagtttccgccaaccctccctggtcaatactctacctcttgctgagcctcagtgaggacccacgcatggcagccaacgcaaggttatctagctatgctacgtcatttgcgtcaggacctgaccaagagatgcccactcaatcccttacctattatgccagggcctcagagccttacccgtgagctaacaaggatcgagagtagcacagtcagaccgagagctactctgccagagttggggcaggctagtggcatctagcacgaccttggcctgtgtgtcctcagtggctccgcgcctggcaccagaatctactcatcacacggacagtcttagtcagcgttcaatgagtacgacgattgccttacgaac

SEQ ID NO: 597487 - DNA, 1185 bp, Homo sapiens
ggatctcgtgagaaccaatctcactaaaatcaagaacaggtagtggggaaactgcccccatgattcaattatctccacctggttccctccctaggacacatggaggattactgggaactacaagtcaagatgagatttgggtggagacacagccaaatcgatatcagggtgttgtgaggattcatgtgatgcaacactgtgcttgtgatacatgctagccttgctaacaggtggctagacgcacgctgtgccggctgctgtatgtggacttacttgattctattgttacatgaccgtctatcgccttcgttgtctcactcctgtgttgactcctgtcacgcttgcttctaatcgttttcccgtccgtttctcccgtggtttccatcgccttgtggcttgcatgacgtcaggcggaccgggcaatggctggctgagggctgaacgagatgctctgacatgtctaggcaggaaatgacagttcccaggtcagtcctctgtttcaggtgtggaaccatggctccgaactacactttgtgtgataaattctatgtaactgccaggcatgagctctacctccagcgcccttaggctgcaagactaggacatgaggctgaaagtcagagaagtccctgtgagacgagggccctgaggaagcactggccagactgtagcaggtcactcaccaggccacccgctggttctagctatcccgaaagccagcctttgtgccagcccattgatggcttccttagcagcattccaagattatggtacactgggagacctttcaacagaaagttcgacaaaccacccctggaacggtgagaaacacacaaggtaactagagaaaaggtatatagaacaacactaagacttgggacccacaacaagtaaaacgcggaagtgcaagcaatagaccggccgtgtgtaacaagaggttgtgaacccaaacaaaaggaggaagaacttctaaaaacagataaatagcgggcaaacatgtaaacaaagaagaaaagggcaagaaaaaaaaaaaacaaagagagaaaagcaagacgaaaggaagaaaacagcagtataaaagagaacaaaaagaagaggaaaaaagcaaaaactaagagcagaagagaagaagaaagaagcagaagaaagaaatgacgacagacccccccgtcgccctagaaagaa

SEQ ID NO: 597488 - DNA, 142 bp, Homo sapiens
ggcagagagtggacagagttacatacctaggtatctgtgcagagctatgtcaaaacgccccagtaggcagagcctagcataatgttacatcacctgggtgaccagctgcagagatacgtcacaataccgtctgtaggctgga

SEQ ID NO: 597489 - DNA, 792 bp, Homo sapiens
tagaggcttgtgacactacatccagctaagtatgtagggacagggttacatatgttgccaggctgttcgagctcctggcccgggtgatcctcactacctcatcctcccaaagtcccaggtatgaaccaacggtgccaggccatatactccttatgaggcatgtaagtgcattaaagtgctcgttagatcactggacagtatccaagtctctcctgggaaaaggaaagatagccagcgttggtaaacaacccacaaaagaaggcaacagcaaattctgagatgagttattcttcctttgtattacccagatcgaaggggttcgaaagtcctgagagtttgcagtctcgctcagaactctcccctctccttttggtcagcatcgacgtgaacagcagggtatcgtccctccactatgaagagctttcctgtgctatgaacggagggcagatttccgtatctgacaaggggcatcctgggggcaaatctgtacacagtgatttccttaggaccgggaaggattacagcccgatttcctctatagagcaccttccctttgctaaaaggcactaatgtcaaatgttaaccagccaggtcgcagggattccctacctccagtgctatcgtagcgctatcgatcttgtcctggggcccaaagtggtggcacccgggttgctgcgaattccacctacccaacatgaaacacctttggctctgactcatccaggccagaccactagttgcagttttgcaccgctcgcattcaaggtcaggacaaagcataccatcgggagc

SEQ ID NO: 597490 - DNA, 748 bp, Homo sapiens
tagagcaaggagaagacccctggatggtggagagtggagttccccaaggcgcacatctcggatgggaaagcttgtttggaaccatagtttctaaagaagaaaatcaggaagtcatgaaaaaactcataattgatggcacatttgacttcaagtggagaagacctgcattaatgaactcggcattagagaagcaacaaggcaaaaagaacagacttatcagtaaagtgtagttaccatcaaacaagtctacatgaaggagaggagctttaaaggtgtgaatcgggaacaacatctaggtctacaatcatcgcttatagaaaaccgagaatagttaccagaggaaggagaccccggcacagcagtatcagtagcactattaaacaactgggggtcaacacagagcgtaaatgtcataaactgtaacatctgtgggaaaatctcctccacagtcctccctgagtaacaccagagaatccacaacggagagaagctctatcactgtaacggaagtacgaacagccgtcagacaaaggctcatcccataactcaagcactcgagggcacataacaggagaagaacccctatatatgtcgtgaaggtggaaaagccccagctccacaaaatcgctacaggaaccagagatgcaaactgcaaagacgccaaccaagcaggagggcaaactaaagggaaaacaatacacaccgcgatcaagaaaaagctaaggacaaggagacaaaagaaaacaaa

SEQ ID NO: 597491 - DNA, 495 bp, Homo sapiens
tgcccccatgtccgggagaagggctccgggaaacaaaacaaggacctttattagttggccttttccatcaactatgaccgtggggaggaggaagggtacctcaacttcattgccccccccaaacgggagttttacctgtggacaaatggggtcagtgcccttctgggcagttccatgggcaacgaacaaacccggctgggcctggaacaacttcttaccatggagacccaactgggttttctggaggtggaaaaagtgcccatccccgaagggcccccccctgtggccccccccccccccaaattaaaattttgttatgaatgcagcatcgcttaacctttacagtgtgggtggccatgggccccaacttcggccccttcaacaacccttaagggcagtgggtaaaggagtgcaggcccccttaccaccaaaaatttctgcaaaaaaaaagtttgcttgggttttgggatatgtttagcccgctttgttccctta

SEQ ID NO: 597492 - DNA, 356 bp, Homo sapiens
  misc_feature (28)..(28): n is a, c, g, or t
  misc_feature (91)..(91): n is a, c, g, or t
  misc_feature (98)..(98): n is a, c, g, or t
  misc_feature (103)..(103): n is a, c, g, or t
  misc_feature (105)..(105): n is a, c, g, or t
  misc_feature (114)..(114): n is a, c, g, or t
  misc_feature (157)..(157): n is a, c, g, or t
  misc_feature (166)..(166): n is a, c, g, or t
  misc_feature (175)..(175): n is a, c, g, or t
  misc_feature (178)..(178): n is a, c, g, or t
  misc_feature (189)..(189): n is a, c, g, or t
  misc_feature (231)..(231): n is a, c, g, or t
  misc_feature (272)..(272): n is a, c, g, or t
  misc_feature (289)..(289): n is a, c, g, or t
  misc_feature (293)..(293): n is a, c, g, or t
  misc_feature (329)..(329): n is a, c, g, or t
atgctctgagttcaggagatttctgagntctgacgtgttgtcctggggtggaaaattcctctcgtgacctcgtgtgtcatgtcgcattgcnccaggcntacancngtttatgcngcgtccctaagggttgaaaaaacccagcgcctcttcagctgcngtgtatctncttatacanaanctctgtttcgngctcggaattatgtgtgtggggcgtatacacgtgacacaggngatttccgcgttcggacttgggtcccatccccgaggtctcnttttgtgtttacaagtnttcntgaagtgcaaacgttctggtttctgtcttttcaggngtgcattatttatatgttctattttgt

SEQ ID NO: 597493 - DNA, 118 bp, Homo sapiens
  misc_feature (55)..(55): n is a, c, g, or t
  misc_feature (62)..(62): n is a, c, g, or t
taaggatccctgcaggagagagaactgaagggaggactggtcgaaggggcagtgnagcaggngtcttggagggacaggccatgaacttgcaggggggtgagggagccgccaaattcgg

SEQ ID NO: 597494 - DNA, 345 bp, Homo sapiens
cagcgctcacattactgcaggccacctactcatgcacgctactctggaagcgccaccctagcactatcagccattcaccttccctctacacttatcatctacacaattctaattctactgactatcctagaaatcgctgtcgcctaaatccaagactacgattaacgacacttcatagtaagactcaaccgtgaacaactaaactcctcggaatcctgactcaatcattgacacaaaacacccaaataatctataaacctagccatggacatccccttatgagcgagcgcagtgattataggctttcgatctaagattaaaaataccctagcccacttcttacca

SEQ ID NO: 597495 - DNA, 775 bp, Homo sapiens
  misc_feature (303)..(303): n is a, c, g, or t
  misc_feature (414)..(414): n is a, c, g, or t
  misc_feature (457)..(457): n is a, c, g, or t
ctgtacgcttgggtatgtgacgctgctggacggaaacacctcaggacacggcctacaacaccaagagaggtattgtggccagtattttggtctcttcttgatgttcttggagtcatcacatagctaacagacgcggccaattttccagatcctcagtccagacttacctggaggatttcggctctgtcgctgaggtgtggatctaccgagtctgatatatctcagtcttgtatacctcgttccagtaactgtccagggacgagccggtcgacgttttcttaaacgttattgttcgacacccanacgactggagtgcaggatcctccatcctaggctcatgtaggtagggacggtactagcgggagtgtggagatactttggccctacagtcctaagcagatctcgcaatgcaancataatagacgtatcgtggtaacctccttttgtccacaatcanttctgaggcacaaaggtttggcaattgggctatgtgtttcggccgcggctagctgttgtcctgtggtgctcgtgcttactcgtgtatagggacccccgttgttactgggattgctcggaggtactggtgattgggcatggttgtcatttgtagtctatccatggcgctgcaatgtttcgtagttgtccttgcgcagtacatgcctgggtagcttgccgagcgttgccgcaacgttcagcccgcagctgctggggtggggatcatctggcatcatggggaccgtgctccgtcttgcaaacgtggtcgtggggccgatct

SEQ ID NO: 597496 - DNA, 458 bp, Homo sapiens
  misc_feature (305)..(305): n is a, c, g, or t
aatggtttattttacaagttaacttttcccctgcatcaatttaaacttggccggggcttaaacactttagggcaacccacccggaacaatagcaagatggttttctagaaaaaaaacttttttaccaatggccaatatccatccctcatgaggcctacttgttctttgtaaaacttgaggggggactaggctgatcttttacatatgccggggacaaggttttcatggggggcataaaactcgtttcaagctttgacttttaaagatttggagggtccgggtctttacaaaccccacccctcttnctcctgttttcttcagaagggaacaggcataccacgctcagagaaaacacaagttcaagacttttcgagatgatttagaagtggatctcttgttattttagcataatgtttattttctcttacagattccatttgccaaaaacatttatggaa

SEQ ID NO: 597497 - DNA, 638 bp, Homo sapiens
  misc_feature (284)..(284): n is a, c, g, or t
ttttcggggcaaccgtggggggtttttaatattggagacctcaaacaaggtcaccttttttacaaaaagggctggcggggccatggtttgggcctggattaaatattttgcgggcttttctgcaacaagggggatatcccttcattccagacgctgggcagggaaatgagttttccatacttgccttcaggcaccccagagcttgaagttccaaaaccaggtcagccctttgaacctgagcatggccccagccctggacaaaacacgttttgccagggcaaaantgatgggctctatcccaatcctcgggaacggtccagcttttacaactgtgcaacgggggggctgttccaacaaaactgcccgacaggcctggtgttcagcaactcctgcaaattgtgcccctggatttaagttgtaaagcccccctccagtcccaattttgagggtgggcccaggatccctttacagcctgcctcctgggttttccctgggggccccaatttgggtcctgcaggcctttttgtggttttcctttatccaggctttttgctttcagccttgccttccttttttttgggtttcctggggggcccctttcccttgcaaaataaatttttggtttgtgccccttttta

SEQ ID NO: 597498 - DNA, 812 bp, Homo sapiens
ggccaggcgtggtggctcacgcctgtaataccagcacttgggagacgaggcgggcggatcacctgaggtcgggagttcaagaccacctgtggcgaacacggtgaaaccccgtctctacaaaaaatacaaaaattagccaggcgtggtggcacgtgcctgtagtcccagctacttgggaggctaagtcaggagaatggcttgaactgtgggagatggcggttgcagtgagccaagattgcaccactgcattccaacctgggtgatgaagtgagactctccaaaaaaaaaaaaggaatttattaatcctgcctggggctctacatagcctcagtggcgcatcatgggatagctcagaggggcccttgattcgtgggcagggcaattaaagccagattgaggaatttaccatcttctattagaagaaaccaagagaaaaaaattttttatggctaaggagtgctttatgaccacttaatttttaatctaagttaaagtggtctctcccgtgtgggttactggtgaagtggcacctcttttgggagtgggggctacataataggtgccttacccccaaatcttgtggcaacctaataccatcttggtccttcggacttagattccaaacactgtctgtgatgtgggacagttgtgaaactattgggccaatgtgtgtcccacattaggcttataatgggagggttctcacaaggggttcccacgggtcattcagggacgggcgctaatatctctttcggggggtcagcgggccacaaaccactgggtccagaaaggttgtagacacgggtcaccgg

SEQ ID NO: 597499 - DNA, 562 bp, Homo sapiens
  misc_feature (219)..(219): n is a, c, g, or t
  misc_feature (255)..(255): n is a, c, g, or t
gtataatcgttggtggaggcgggtgtatgggagggttcaggagggacggggaaggaagatggcgacgtcgggggcgaacgggctggttcggcacggctcgtgttccaatccgcgcaaatttagtgagaagattggcttgagaagcagcgtcaggccgaggagacggcggccttcgaggaggtgatgatggacatcggctccaccctggttacaggcccnaaaaactgcgacgtgggcatacacaagtgagctctncattatgggtgggtctcttgcccaattgttaacccagatttggctcttggccttggccgaagttccaagagcccccctccactcaacctttgggattcatcttcgtgagcactcgtgcaccaatgggcttggtgtaacgggggtgcagtgagaatcctcgaagcaatggtgtccccagttcgggcgatacagccggcaacattgacaggtctccctatagtcctgcctacttatctcctcccccagagtctagctggcgaaggacgatgggctggggcaattcccctgcagagaaagggtcagtggt

SEQ ID NO: 597500 - DNA, 609 bp, Homo sapiens
  misc_feature (558)..(558): n is a, c, g, or t
ttatcacaggtagtgtcagtattagaattatatatagtagcaaaaatgtggaaacatctgacatgtcaatggcgatgaaagtggtatgtaataacagtcagtcatgatggaataccagggcgagccatgtacaagtcaagctacagacgaataatgacctcaaaaaatgttcacaaaatagtagtacaccaagacaaaagtgcattttcaatatgatcatctgaaaaatacagtattctctttgcaaaaatgtagatgtacttacaaatgcattgtaaaagtctggaaggatttataccagaatattaatcaatattttcatcttattttaaaatttcctaaatatctgaaatattcttcagagaacctcaattcctttgtaatcagaaaaattagttaaaatattaaaagcaggcaagtaatatcaacaagatgatacactaggagatcccagctcttgtctccccaacaaaagcaagaatttaacagctacttgccaacaaaaatagctctgagaatactccagagtacagtgaagaagctgcaggaacccattanagcacccccaaagcaaagacagctgtatataaaagtgtcggaagcgttttc

SEQ ID NO: 597501 - DNA, 377 bp, Homo sapiens
  misc_feature (7)..(7): n is a, c, g, or t
  misc_feature (17)..(17): n is a, c, g, or t
cagttangcggccccantagaacctcctggaataaaggttcccagggggcaccctggagccttttacatttcccgggaaggtcccggggggaaacaacccttttttcgggggggggggggccccaaaaaaagaaacgggggcccttttttttcccaaaaaaaatttcccgggttttcccccccccctgaaaaaaaaagtttttttttcacccccggggggaaaaccccggggggggggggggcaccccctcaaaaagaggggggggcccccccggggggggttttttaaaaaacgcgccgccgccctcccctttttttttttttttttagaaaggggggttttctttcccgtggggggggggggttttttttttagt

SEQ ID NO: 597502 - DNA, 200 bp, Homo sapiens
ggtctcagtcatagtctggaacttctttgggtccaagactaggaggtccctaagatcggatggcctgcctcctcctgtccctcacagggattttttcccaaaggtggaaggggggcatgctttaggtcgttaaagtattcgggtcgggtttggggcgctcacccccattattctttcgcacaatctcttggggttcacag

SEQ ID NO: 597503 - DNA, 891 bp, Homo sapiens
tacagtgacagggagattcggatagaatatagattggcttcatgtggaaaatatattctcaataagtgtaaaatagtagaaggtctatatcatgggttgtatttatctgcttcacaacagcacaaagtgtctttcatttttttgttggtttcttttaagatcttttttaccctgaagtcggtgaatacttttctagatttactttgatactctttctgtgtatactattaacgcttttgctgtagattgcctagtaaaattactaaggactaggcttgtatcctcacactatggtctattttacagctctgatgctttacgggcgggcaaaacgtgtagctctactaaaaatgctttaacactaaatttggaacaacgagtatgaacaaccaataccaatacctattgcgtccgcgattcttaagaccccagttcgttattccactaaactaggttatcttaaccatatcatctgatcctcgtggggccattatttaccttcccttatgtcttatagaataatggttaaatattctcgtaggtcaaaacttacttccaggcaaagtaactttcccaacaattaaccagtaattagagcacctgaacaaaaatctcaggtggtttaccctagcgatgcccatctcttgtgctcatacctatcattcacacaaagccaactggggagcgctagaccaaactaattctcaacctgcccctttgttaaactccaccggtctcgcgataactgcacctagtctgcaattctgccacgcaacctacatccaaaaaataacaaggaatccaccacagctccagcaaaaccagtcacacaactaaagcggcactcaacacgcacaacaacaactccaccgcacacaacaaaccacgaaa

SEQ ID NO: 597504 - DNA, 225 bp, Homo sapiens
tgggggcccaagaaaaaatttaattttttttaaaaaaacgcccccccccccgggtttgggggggttttaaaacccctttttttttttgccggggttttggcatttgaaggggggtttttttaaaaaattggggcggcccattttttttttaaaaaacccttttttttggggcccttttttttaaaaggggggcaatttttttttgggccccccggcccaaattca

SEQ ID NO: 597505 - DNA, 155 bp, Homo sapiens
  misc_feature (61)..(63): n is a, c, g, or t
  misc_feature (90)..(90): n is a, c, g, or t
  misc_feature (94)..(94): n is a, c, g, or t
ctattctaacgaaggagggagaggagtaatgcacaagaaactcaggccattgggggagcannnagaaaccgaggaggtccagtgcatgcntctntggcatttatgtggagttgcagttgtgtcctgctgaaattgcagggcttttgtaccagtgt

SEQ ID NO: 597506 - DNA, 130 bp, Homo sapiens
agcggaatcgtgagtgtgctgttcgaattcataagaacaggtaggttagaagtagggtcttggtgacaaaatatgttgtgtacagtacaggggagagtgcgtcatatgttgttcctaggaagattgtagt

SEQ ID NO: 597507 - DNA, 908 bp, Homo sapiens
ggggagcgcctgcgccgctccgcggagagtccgtggatctcagaggttcccagtattccagacctgaattgttttccagattaaagcgaagagacgatctgtggatgttgaagtatgcaagggagctgaaggagagagacattgagaagagagatttgtccgggtctgggtaaagcaatatacaaggcctgctctggatgcaggatgtctgtaatattgactcatcagggatagtagtgaagaggtgccaagaggatgagtactcaaggattctagcattatgaagaatgaatcatgcgatgtgatggtggcttgaaggagtaactctcctagggagattgctgaatcatgcccttgtccaggaaggaggtgagggagaatagaacttgtgatgcacatagagaaggagccccgtaaaattataagtgcaaggactatacatttgtgagaagaagctgtgctatttgaagcgtcaagccgttgtttacacgtctcaggggtatctacaagaagagaggttctgagtcagggggaaagagtgtaatcatgacaaaccgaatgatatgtcagagcaggagtgacaggtccaactctctggcctcacagatgaaaatcttgggccccatgtactggactgtggcaaaaacctttgctcagagctcatcccttacccaacatcggagaagcttcatactgcgagagaagacccttgcaccatggtgacggggacatgtgcgggaaaagccttttagtccgtaagtgcaattccctgggccacaggcattcgagaagaatttcaccactgggagttcgaagccctattggttttgcagcagtgtggtgaaaacatttcgagcgtcgagtcacttcctcagtccgggtcaacagattgcgcagctggcgagacc

SEQ ID NO: 597508 - DNA, 1708 bp, Homo sapiens
  misc_feature (1)..(1): n is a, c, g, or t
ntggtggtgccagatccgtctccctctgtcttcgtcgtcctcgtgctggggttgttttgttgttccttcccgtccgtgaggtggtaggttttcctcttcctttgcggcacacatttgtcggtgggtgaatgattgctgcggtggtctgtcaccgcggggagctcgtcgactctctctgctcgcgttcgcttcgtagtatgatgtgttgcactccgccccccccctttcgtcgtgggttccgcgccaccgttttcttatttgtctctcccctctcgggtgtggtcctccccctccttctctagtgagggggtggctgctctatgttttgtgtccccccccggtgcccccctttttttggtggggtattttccttggagtgtgcccctccccctccccctctctcctcggtgagtgtgtttctgtccgccgcgattcgagttatgatgtaattggcgtgccctctcttgttgttgtgggagggcttgttgtgcgccatcaactcgcgtgcgccgctggtcgcgttggttacgtcctcgtgatggggcgccctgcctctttgttgtggtcgcccgtacacctctccctcccgctgctccccctcatcgttgtggttccccccgtcgctccccttcttccttttgggagtgggctttcgtgcgcacccaataggtggagagtgaggagtggtttgtgtggctccccccgcctcctcagcggagtgcccttgtgatgtgggctcaccactccgcgggggggtggcgcctgcacaatgagtggccgctgtggatctcccacccccgagtagggttgctacttatagttggtagcaccgcaccgcttctattcttgtgcccgataggaagctctactatgtggcggtgtcgcccccgccccgctcggtcgtataggtagatcagcgcggggagctacttcgcctcgcccctctccccatcgtagttgagagtagaataaatgggagcgccacgcgcgctcctcgcgagaaagaaacttcctcctctacgagagagaggagcgccctcggagagagagcccaatctcctctcgtagagagtacttctctctgtcgcgaggtggtggtgtgatacgcccgcctctcatcgcgccgctctctgtcgcctctcatcagcgctgctctgagatatgatatatcttcgccgcgctctcatgagcggcggggggagcatagggagggcgccgccaccctctctcgctctctctcttgtggcgcgcccccacggagacacactctctgcgcgctcctctgtgtgcgctgtgcgctctctccatcaatgtgcgcgcgccgcacactgtctctctattagagaggcgcgcgctcgcgcgccctctctccccctcgaggggtgtctcttttgggcgctcacggctctctcgtacgcacacaccacgcgagacaccacgcgaagagcccctctctctcgggcgtataccccgcagaggcctcatagtgtcttctctcctctcggtgtcccccacaggtggggtgtggagggggagcttcctgtttctgggtgtgttcctctctttcccctctctttaccactcccccccctcccctctattcccctctccccctcgttctccccctctcacgggctttcttcccctctgtggttttgttaaagccccacctaagaaaaaaaatggcctctgtgggtttttccacaca

SEQ ID NO: 597509 - DNA, 261 bp, Homo sapiens
  misc_feature (59)..(59): n is a, c, g, or t
  misc_feature (76)..(76): n is a, c, g, or t
  misc_feature (144)..(144): n is a, c, g, or t
  misc_feature (252)..(252): n is a, c, g, or t
ctgtttctagcaacgtgctgttcctgctggacttccacagtcacctgacacggagtagngtcgtgggttacctggngggccgctgggacgtcaacagccagatgctgacggtgctcagagccttcccttgtcggagccggctcngggacgcagagactgcagctgccatcgaagaggagatctaccagagcctgttcctgcggggcctgtccctgggtgggctggtaccacagccacccacacagcccggcnctggccatg

SEQ ID NO: 597510 - DNA, 164 bp, Homo sapiens
ggaatcaggcttacggaacaatcattgaaccaagcagtggaggttgcagtgagccgagactgcaccactgcagtccagcctgggcaacaagagggaaactccatttaaaaaacaaaaaacaaggccaggcacagtggctcattgcctgtaatcccagtacatac

SEQ ID NO: 597511 - DNA, 486 bp, Homo sapiens
aatttgagaagtgctgctgtaattccccttaaaggacgggagaaagggccccggccatcttgcagcaggagggattctggtcagctataaaggaggactttccatctgggagaggcagaatctatatactgaagggctagtggcactgccaggggaagggagtgcgtaggcttccagtgatggttggggacaatcctgcccaaaggcagggcagtggatggaataactccttgtggcattctgaagtgtgtgccaggctctggactaggtgctaggtttccagggaggagccaaacacgggccttgctcttgtggagcttagaggttggtggggaagaaaataggcatgcaccaaggaatcgtacaaacacatatataactacaaaaggatggtgccaagggcaggtgaccactggcatctatgcttagctatgaaagtgaataaagcagaataaaaataaaatactttctctcaggaaaaaaaaa

SEQ ID NO: 597512 - DNA, 753 bp, Homo sapiens
acacacacatacacacacacacacacacacacctgaggccaccagaagacacttccatccctcgggcccagcagtacacacttggtttccagagctcccagtggacatgtcagagacaacacttcccagcatctgagaccaaactgcagaggggagccttctggagaagctgctgggatcggaccagccactgtggcagatgggagccaagcttgaggactgctggtgacctgggaagaaaccttcttcccatcctgttcagcactcccagctgtgtgactttatcgttggagagtattgttacccttccaggatacatatcagggttaacctgactttgaaaactgcttaaaggtttatttcaaattaaaacaaaaaaatcaacgacagcagtagacacaggcaccacattcctttgcagggtgtgagggtttggcgaggtatgcgtaggagcaagaagggacagggaatttcaagagaccccaaatagcctgctcagtagagggtcatgcagacaaggaagaaaacttaggggctgctctgacggtggtaaacaggctgtctatatccttgctcttgtggagcttagaggttggtggggaagaaaataggcatgcaccaaggaatcgtacaaacacatatataactacaaaaggatggtgccaagggcaggtgaccactggcatctatgcttagctatgaaagtgaataaagcagaataaaaataaaatactttctctcaggaaaaaaaaa

SEQ ID NO: 597513 - DNA, 197 bp, Homo sapiens
gggaatcctctcaagaggacagtcattttgtgaaggttcaattcagctgttagcatggactttcagaacctattgtagaaatgagagacagaaatgtctccagaagatcatgggagcacaaagaggaataagtgaagcagacccaggggtggttccttgggagatggaagcccgcagagaaagtcccataaatgatg

SEQ ID NO: 597514 - DNA, 137 bp, Homo sapiens
tggatccctatatagtagagatgtgatcacatgttggcaggtagtcttgaactccagactcaggtgatccactgcttggctcccacagtgctgggattataggcgtgaggcaccgtgcctgaatagcgtcgtcgaag

SEQ ID NO: 597515 - DNA, 288 bp, Homo sapiens
gaagtcctaatgagagcagtctaggcaagggaaagaaataaaaggcatccaaattggaaaagaggtagtcaaattatccctctttgttttcttttttttttgaatttaaaaaaaaatttgtagagatgggatctcccaatgttgcccaggctggtctcgaactcctggacccaagcagtcctccctcagcctcccaaagtgctgagattacagatgtgagccactgtgcctggcctgtttttctttgcagacgatgtgatcttatatgtagaaaaacctagactccac

SEQ ID NO: 597516 - DNA, 1019 bp, Homo sapiens
tggcgcctgaggtctgttgcctgacctccgctgctaaagccgctgctgccggctggaagacgatcctccagtaccctgcccgccgtcaccttgcagctgccgtgtctcctcccacccctagccgcaccccctcgcggagggatcagctgagctggccaaactgtgacggtcgggggagccccgagtccgcagctgcagcggggcctgagaccagagttggctgagggcaattgaaggagcggcccctgtggcagtggggtgctgggggcctgggcggggccctgagaacagcccgaatttggcctgagctgctgcctgagcgagtccgaggcgctgggccaggccggagccggactacgggagccgaggcgggcctgcgcggtgggcgcggagaggagcggagcggcggcgggcaggccgggcgggtggcggcaggcacgcggaggaggccgcagctgcgggtccgaggagcgtaaggcgacagcgaggcctatgcgtgacgttggtggcctggtgttggcctggtggatcccgggtgcccccgacggcagggctgtgacaagcggtcgggcagtgcgtgctggtcagggatgatccaaggcgtgtatctcggcgttgaagtcaagtcaccgaaatgaagcgaggtcgacggaagtttcgtgacagtggctgtctacctatatgggtccccgcccatccacaaagtaaaaggtgcgggttcggtcgggcgacaggtttggtgggcattccaggagatcggacgcatttaaacgggcagcgctaggaaaccctttggccccacgacccggttggtgaataattcacagcctttctatcaagagattccagacaacgggaaccttaccgtccaaagattacgaaggcgcttgggtccaatccttggtcccttgattcaaagggggcatctcataccagagaaggtggcgaaacgttctcggtgctgcagcgcttatagaggggtggccacagggtttaaccccgggttttattccgcccca

SEQ ID NO: 597517 - DNA, 318 bp, Homo sapiens
  misc_feature (27)..(27): n is a, c, g, or t
  misc_feature (30)..(30): n is a, c, g, or t
  misc_feature (196)..(196): n is a, c, g, or t
  misc_feature (210)..(210): n is a, c, g, or t
  misc_feature (216)..(216): n is a, c, g, or t
  misc_feature (264)..(264): n is a, c, g, or t
  misc_feature (293)..(293): n is a, c, g, or t
  misc_feature (316)..(316): n is a, c, g, or t
ggcccaagatggcggccacggttaccngtntttcttaagctctgtgaggaatggccagtggacgagaccaaacggggccgggacttgggcgcttacctgcgacacgggtagcacaaggcctttcgggagggagagaatacccaggttgcagaccttgagcctgtgatcagatgtacgagagcttatcgcgactccnttcaaactactacnaacacnagtaccctcgccccagagacaccagcttcagtggcctgtcgttggaangagtacaagcctgatcctgtccacaaganacccttggaaagagctttaaggnaa

SEQ ID NO: 597518 - DNA, 132 bp, Homo sapiens
cattctgcacgccgaatgataactaccactggcaatcactgtaagccaggaaaatgacaagatcaaacgtgtaacatatgtaaaacacttgtaacatatgttgcaacatatgtaaaacatttcagaaacggg

SEQ ID NO: 597519 - DNA, 161 bp, Homo sapiens
tctgaggttacccacatacgcaccacgctaacagcgctcgcgagccgcacgggaccggcttctccgcagcactccaactctgcctgaacagggcgctcccgggcaagacaaggttttgaggacttgcggcagtgggacgagcacaatttctatctgtcttc

SEQ ID NO: 597520 - DNA, 124 bp, Homo sapiens
taccacagcctttgaggcagcttcagcatgtggtgtactttgcagaattccagtgagctacgtgaagctcgtggcagaatattttgactccatacccactgtgatgttctagagaccctgctca

SEQ ID NO: 597521 - DNA, 291 bp, Homo sapiens
  misc_feature (71)..(71): n is a, c, g, or t
aatcacttaattcgtcgggggagtggggaggcttgagggggagaaagaatttcctgaattgtaacaatganatgtgacaattaagctgcaacccggatgatgaggagaaatcaaccaaaggggatggaggccttctagacagggtgaccagcatgtgccaaggccctgaggcatgaaagcccagtacattcaagaattgaaaggaaatcaacgaagatgaaatgaccatagtaaaggaaaccagagtagaggccgcgaatttaagtgatcaccgacgaatgtaagtgatcg

SEQ ID NO: 597522 - DNA, 104 bp, Homo sapiens
gccccggttaagtttagggccaaccaattttcagaaatctctgtaggacaccgctatactaatactttcgtctcgtgttatattctccgtgtcaccatgtggtg

SEQ ID NO: 597523 - DNA, 593 bp, Homo sapiens
cggcacgaggagagagagagagagagagagagagagagagagcgatcctgacgattgcccaaataaactatatactgtgtgtccctatgtacctgatacttctttcaaaatgctacggactgtcaatggggaagagatctaattgttgattgataccattcataaatttctacactttctatcagtaactggtcatttatcctattttgatgctttacaagtcttctgacaggaagtccactggtttacaccctgaataaatacgttgtggttctgcctgagccctttttggtgcccttggagacctttgcactgtttttacattgttgttagggcttatgaaggattctttttagagcttacctcgtgaatgtggaccgctttggttttataatactaaagcttccgtcacctttccaatgttttaccgcgcatatgtcgtttaatatttatctatacgattacctccctgtatggtggactctgtcgttgcgacattaaacaatattttctatactggtctttaaaccaaggtttctatcatcaacatttgtgtggagcttgactaagcgttatcgttctctgtgtaagcg

SEQ ID NO: 597524 - DNA, 947 bp, Homo sapiens
  misc_feature (55)..(55): n is a, c, g, or t
  misc_feature (73)..(73): n is a, c, g, or t
  misc_feature (76)..(76): n is a, c, g, or t
  misc_feature (106)..(106): n is a, c, g, or t
  misc_feature (168)..(168): n is a, c, g, or t
  misc_feature (198)..(198): n is a, c, g, or t
  misc_feature (227)..(227): n is a, c, g, or t
  misc_feature (266)..(266): n is a, c, g, or t
  misc_feature (302)..(302): n is a, c, g, or t
  misc_feature (376)..(376): n is a, c, g, or t
  misc_feature (392)..(392): n is a, c, g, or t
  misc_feature (410)..(410): n is a, c, g, or t
  misc_feature (414)..(414): n is a, c, g, or t
  misc_feature (443)..(443): n is a, c, g, or t
  misc_feature (447)..(447): n is a, c, g, or t
  misc_feature (450)..(450): n is a, c, g, or t
  misc_feature (465)..(465): n is a, c, g, or t
  misc_feature (549)..(549): n is a, c, g, or t
  misc_feature (584)..(584): n is a, c, g, or t
  misc_feature (599)..(599): n is a, c, g, or t
  misc_feature (626)..(626): n is a, c, g, or t
  misc_feature (652)..(652): n is a, c, g, or t
  misc_feature (677)..(677): n is a, c, g, or t
  misc_feature (702)..(702): n is a, c, g, or t
  misc_feature (708)..(708): n is a, c, g, or t
  misc_feature (731)..(731): n is a, c, g, or t
  misc_feature (747)..(747): n is a, c, g, or t
  misc_feature (756)..(756): n is a, c, g, or t
  misc_feature (768)..(768): n is a, c, g, or t
  misc_feature (783)..(783): n is a, c, g, or t
  misc_feature (785)..(785): n is a, c, g, or t
  misc_feature (789)..(789): n is a, c, g, or t
  misc_feature (797)..(797): n is a, c, g, or t
  misc_feature (801)..(801): n is a, c, g, or t
  misc_feature (807)..(807): n is a, c, g, or t
  misc_feature (815)..(815): n is a, c, g, or t
  misc_feature (870)..(870): n is a, c, g, or t
  misc_feature (944)..(944): n is a, c, g, or t
ttcaggtcctggtgctgtcaggttggtccgggcccctcggtccgctacatctggncctcccaggctggtagtnttnggtaacggccccccgcccacgttcccagcngcgcccccgtggctcctccggggtgcggccagtccggaagccgggggaccccggtagaagtngggctcagctcccctcccgaggggacaggngggccggccgctcccaccctgggcccgtncaccgagccccgagttacgtgagttgcggtggggcagcncctcttctctgaagcacgtgaaaacccagaacaganatggggagggagaaaaagccaaaacgaaacaaccagaggagacggggaccagcacaaaacctccgtgaggagtntgttgtctaaggagcnacgggtccggccctagtnaggnaaactcggcaagtttattctggtggtgtnaggnctnctccgtgccagagtnatcctcatcgtccccgaagcagctgttggcctcctcctccacctcgccgtcctcgtagtagttgtcgtagaagaggtctgagcnctcgtcgggcgccggcgccttggtcttcacgcatncttggccagcgtggngggcaccttcacgccgtcacgctccgntccaccttggtcccaggacctgcttncggatgatgtttgttttctcccganccttccccttgctctctttccactncctgtncatcacggaggcgtccacgtttncgggcgagaaggtgtngggctcgtncaggagggagancacactcaggagatngncctnacgttctncgtnggggtncacctctnttagggcagcccccgctctgggggtcgtcaccggcgggtggaggatggagaaaanacgtccccgtctcgtagatgtgagggtgcaaaacttggtcaggaccgaaagctggggagagtctgggtagtganggg

SEQ ID NO: 597525 - DNA, 447 bp, Homo sapiens
tcgctactgcagcttgacatcaggcagtcctcctgctcagtccttcccaagtagctgggcacacatacgcatgacagcgtgcctgggtaattttttaaaaagtgattgtagagatgaggcttgtcatgttccccaaggccggcgtcaaactcctggctcaatagatcctcctgccttggcctcccaagtagctgggactacaggtgcccaacatcacgcccggctagtaatcagtatttttagtcgagacagaggtttcgtctattggaactcatgatctcaagtggtcccacccaactcgggctcccaaagtgctaggataataggtgggaagccacgtgtgcctggcctcagcctgatttctacagtatatcacaacttgggggccagcattagccaccagagaccattttggaatgtctggagaccattcggttgtcagaactg

SEQ ID NO: 597526 - DNA, 163 bp, Homo sapiens
cccaatggactcatcgctctgcccaaatcatctgccatgtggaaaagacttcctacattgtgtctctggaactagggaaggagttgttgagttgctccatcacctcctctaaccctgtgcttgtgtcctggggaggactgagaagatcttcctcacccatgga

SEQ ID NO: 597527 - DNA, 352 bp, Homo sapiens
ccgaggaccagctcggtctagggagaccctaacctagcggtgctagaggaattaaagacatagacacagaaatatagaggtgtgaagtgggaaatcaggggtctcacagccttcagagctcagccacaaacagagatttacccacgtatttattaacagcaagccagtcattagcattgtttctatagatattaaattaactaacagtatcccttatgggaaacgagggatgggccgaattaaaggataggttgggctagttacttcagcaggagcatgtccttaggcacagatcactcatgctattgtttgtggttagatgccttagcgttccaccggcagcagggtctgc

SEQ ID NO: 597528 - DNA, 297 bp, Homo sapiens
tctgaaggcaaagtctcgctctgtggcccaggttgaagtgcaggggtgcaatctcggttcatggcaacctccgcttcccagtttcaattgtatgtccccgggtagcgggaaacattcatttcagagatgattgggattatttgactgtcatttgtgaggaggaaaaattaaccctttttaaaaaaattgacacctaccatttattggaatccccttttacagggcattgtggttaagtatcttcagaaaccattcacatttttttacctctcagagtaggttttttagaggcaagga

SEQ ID NO: 597529 - DNA, 289 bp, Homo sapiens
gaagtcccatgactggccatctgcaagctggagacaccgggatactggtagggtttctcagtccaagtccaaaagcctcagagccagggaagcctttagagtaattctcagtcaaatgccaaagacctaaggacctgggaggggttcactggagtaaatcctgggagtcccaagtccagagagcctgggagtcccaagtccagagagcctgggagttcttgatgtccaaaggcaggaggagaagagtatccttagctccagggaggagagaggaaagtttttttttcct

SEQ ID NO: 597530 - DNA, 402 bp, Homo sapiens
  misc_feature (14)..(14): n is a, c, g, or t
  misc_feature (106)..(106): n is a, c, g, or t
atatcggcacaggngaaaagattaagcctccacctagagttttatttttattttttgggatggagtcttgctctgtcacccagactggagtgcagtggcatgcaancctccacctccatgggttcaagcgattctcatgcctcagcctcgagtagctgggcctacaagcacatgccaccacgcctggctaatttttctattatttttaatagagctggggtttcaccatgttggccagactggactcgagttcctgacctcaggtaatccacctgcctcagcctaccaaaatgtgggtattaaaagtgtgagccaccacgcccagccccagaaataagagtttagaacgtctgatagaaataaatttcatgtagaaataaaattttgttaaggagatttgct

SEQ ID NO: 597531 - DNA, 94 bp, Homo sapiens
cccccccccccccccccccttttttaaccagggtttcttgggccggggaaatttttccgtctttggtatttttaaacttttaaattaattggga

SEQ ID NO: 597532 - DNA, 116 bp, Homo sapiens
cctttctttttcttttaaaggcggttggttttgtttttcccccctttggccgggctcctggcccctgtacctttggactctcctatcgggggtttaaaaaaaaaagtaaattgcca

SEQ ID NO: 597533 - DNA, 334 bp, Homo sapiens
tcttcagtgcatgagcaagcagaaagcaatctcaccagagaagagccactggttgggtgaagaatggtactctctttgataacagatggagaggcagagcatgtgggtgtccatgctggtcctagtggtgatgggagtcggagcacatgagcggaacatcacagaagccaggatatcagctgaaagtcatggtggggggcaacagcacatgtaggatgtcacaagcaagggaaggattcaattcaaggcttcagcatccttctctgtctatatcagtatcatggtagacactcaacatgattttctcatctgtatcatgctgacatgcatcact

SEQ ID NO: 597534 - DNA, 685 bp, Homo sapiens
agcggagtatctgtgggtacccggagcacggatatctcgccggctatacgtgcacctcggtgtctgcgagaacctccggcttgcctctcctaggcgacgaagacccagtggctagaagtgcaccatgtctatgctcaagatccatgccaggctagatcttggactctcgcgggaatcccactgtcgaggattgagtctcttcatcctcgaaagggtctcttcagagtctgcctggtggcccagtgggttgcttcaactggtatctatgaggtcctagagctccggtgacaactgataagagtcgctactctggggaaggggtgtgtcgaaggcctgcttagagcacatttgaatgttaaaactatgtgcgcctgccctggttagcaagaaactgaacggtctcagaacaagagaagattgacaaactgagtgatctgagagtggactggaagcagacaaataaatctaagctcttgggtgcgaaacgccacttctgggggtgtcccttggccgtctgtcaaagcattggtgccgattgagaagggggtccccctgtaaccgccaacatcgctgacttggtggcaaactctgaagctcatcctggccacgtcggcgtggcgttcaatgtcatcgaatggcggttgctcatgcatgtgcaatccagtctgcgcattgcaggagttca

SEQ ID NO: 597535 - DNA, 342 bp, Homo sapiens
tgataaaaaataaaagagttacatgacattcagagaccatccaaaaaacctgtgggttcccggctgggctcagtcgtcacgcctgtgatcccagcactttgggaggccaaagtgggtggatcgcttgacgtcaggagtttgagaccagcttggacaacgtggtgaaaccccgtctctactaaagatacaaaaaattggccgggcgtggtggtgggtgcctgtagtcgcagctactcgggagagggagctggagaatcacttgaactcatggtgcgcaggttgcagggagccaggtattcaccattgtgctccagtctgggcagcgagcaaaactccatctca

SEQ ID NO: 597536 - DNA, 721 bp, Homo sapiens
  misc_feature (192)..(192): n is a, c, g, or t
  misc_feature (443)..(443): n is a, c, g, or t
taacgatttacactctgtaataggctttgtagagtagatcgattattcttgagctaagcatatctaactgcctcatcatgataggactaccagtaaattataaattccaaaggttagaagatagttttcccacccctttaaattgggtggcagcaaactattacccataacccaatttcaaccccaccccanaaatatttgctatcggccttttcaagaaaaagtttgctgaaggtgtttgaatttcggacagatggtttccaatggaaccagggaagatttaaatttgctcccttaatagattcaaaatccattattcttttgataatatcatccacttggaaaacaaataagttatattaaccaaagccttccatccttaaatgtttaggaccagcaaaccaatcatatataaaagcagtatatttctaagaaaaaaaaancaataaatgaacaatttaaattacattttaagtaccaatttcagagatcttcagagaatgcaggcagttaaaggacagatctcaaaaatccatatagcagatttctggtttccaaatttctgggatacagtatttaacacagtatttgaaactctacaattgctacggaagcgacattgtggagagttacatattatccaaaaacacatttttcacaagtaagatattttaaaataagaaaccaaccaaaaaagaatggccaacaatctaaatctttt

SEQ ID NO: 597537 - DNA, 875 bp, Homo sapiens
ggacgagccaaccaataacctggacatacgagtctattcgatgctctaggggaggccatcaatgaatacaagggtgctgtgactcgatatgatcagccatgatgcccgactcatcacagaaaccaattgccagctgatgggtggtggaggagcagacgtgttagccaaatcgactggtgcactttgacagactacaagacggagacaggtgtaagagaggccctgggctaaagtcatggatcagccggaccccgaagagtgacagctcttccttcccagcaagtctcccgagagacatattctcgtagtggcctacgaagtccatctgtggatctcccctcctctgaagacatgcctctggcctcgcagctgacctggcaaaccattccacggcacaatgacaggtggacagtggtgaacctatcgcatgatgacccgaggcatccgcaactctgactctgagcaattcacaatatacaatactgaaatacgactcagcaagcggatacaagactatccatcgtggcaatgatacaccctcgacgccctgcggcaccttcatccgctatgctacaattaccaccataaaaagcgaaaaccaaaagcacggttgcacccacacctaccatacggatcgaaccgatatcacaatcccagagccggaaagtcacacatcgcataagacccctacaactacggccatcccacgcggacatacttccagttcacagtggtccggaacagaccactttgcgcctatccttgcagtatataaccacgcctaagactcatcatttcccaagcgggccccaactctttgtcacgtccgcccaaggtaactattctagaagaccgagcatgagaatagataccat

SEQ ID NO: 597538 - DNA, 775 bp, Homo sapiens
  misc_feature (687)..(687): n is a, c, g, or t
ctcgggggaagtaggcgatcctcccccccagtgcgtgtggtctcctgttcttctcgcggaggcgtgtgtgttgacctcttcgtggaagatagcgcctttctttgtgcgaggtaattgattggttctctgcgagcatgggggcttttccctatggagcggtgtctctctctcccgcgctcttcggcacgcctcccacaggggcaagctcccccccgtcacgtgcgtggatgtctgccccccgttacgtgttggacccccgcgagggctccctcctctcactctgagcgcgatcttgtagagggcactcgcttttcccttttgtgctttcattctcttcttgaaactcttctctatgattgttgaataacacacacttgcccctcacaaccagtactccgcgttgtgaaggtacacccacgctctttctagttcgattctctctttgtgggtacaaacacagtttactcgccgcacacacgactttagccctcctttggcgtaccttttaaataagaaccaccccgtaatacccctgtgtctggacagctccaccttctctttctattcagatatgctcttccccctcatggagctacaacttatattcccccgtacggcgcacactgatatacagagatagtttaattgtactctgtcaccacacttaaagataatgtcgtgataccncccacggacgccaccccataccgtaagagaccaaaatatcctttccaataaacaacgtacaagttaaacaaactcatcaataaacgca

SEQ ID NO: 597539 - DNA, 264 bp, Homo sapiens
tcacacgctactctggtattgtgtgctctgaggggatattgcagcttaagtcccagagaaaagcgtgagaggagaaacatttggaggagaaaacgggatatgataaatcgggccagagaatagtgctaggtcatttagcaagtccattcttctgttcctgtagattgcgatgcaccttcccttccaggatgggattcacaatgggcccttggtgtctggaagcaccaactgaacgcaggccttggatgatgaagactgtgccca

SEQ ID NO: 597540 - DNA, 106 bp, Homo sapiens
  misc_feature (2)..(2): n is a, c, g, or t
cnggtcgactctagaggacccgttggtgagtgacgacactgtccgctaccacaacgacctcaaggccccgctgctatgcgccaacgtcattgaccaaccaaggatg

SEQ ID NO: 597541 - DNA, 370 bp, Homo sapiens
  misc_feature (346)..(346): n is a, c, g, or t
gtgcaatcctggctcactgcagccgcgatgtcccaggctcaagtggtcctcccatctcagcttccttgtatttgggctcgcgggcatgtgccactatgcccagcttttttttggtagagatgggctctccctgtgttgctcagggtggtctcaaactcttgggctcaagcaatcctcccaccttggcctcccaaagtgctgggattgcaggcatgagccaccatgcctggccaattcatttcaatttaaaatgtagaccggacgcggtggctcacgcctgtagtcccagcacttgagaagccagagtgggtggatcgctgaggtcaggagttcgagaacgtcctgnccaacatggtgaaaccctgtctcc

SEQ ID NO: 597542 - DNA, 202 bp, Homo sapiens
gacctagaggatcccctggagattgggctgggatttgtggggagggagcatgagacagcatgggggcgtatggctttcttctcccactgacgaaaaggttgtaaggagaaggattatgatgtggagggtctgggagcagtctaaaaagtccttatcaagaggtgctatgaaaatacgtgtgatgtttatgaataaagggagc

SEQ ID NO: 597543 - DNA, 744 bp, Homo sapiens
tcgggactactatagcagatcatacagaggaggaggtggaggaggaggaggatggacagctgcccaacacaggcctctgatttatagaaggcggccaccttctccttactatagtcgcggcggatacagaccacgttccacatctcgatcatactcaccttgctgttggggaggcctgacgactttctgaaacctgccctagagctggcatattgtttgggggctgctccttttattgtctcttgtttaaaaggtgaacagcgcctactgaagttaggtgactcttacaccttctacgatgactactcctgctgggggcgaattgctgctctcattctgcctttccgttttctcgctgctttgttccaagctccgcgctgcgcgaaccgcctcttttgcgtgtttttggtactgcccttgttttgcccgctcagaagtccccattgcgcaaaccttgcctgtgtgggcttttttaccgggttccggcctcctccggcgaggcccccctcgtttccttgtcccgggattggcttccttctcgctccacagactgggttcctctgttcgcttcttcgtgccaatgggtggtcttcctctccccgtgggagcccgtaaggccccgaccaagcgtccccgcccttcagcccccgcgaccccccaacctatatactcgtccaacgtcctttgacccctccccgcaccccttctcgccctgccccccccagccacccgaaaaaaaaacaa

SEQ ID NO: 597544 - DNA, 710 bp, Homo sapiens
gatgacctgggcagccagccacatgaggaccgcgagccagtcgaccccaccaccaaaggccgcgtggcctccttctcgatacctggctcctcatcccgctactcgctgggccccagcctgcgccgtggggcacgaggtgagcgaacgtgtgcagagcagtgagatgggcacatccgtgctcatcatgctagcccatcctgcgctttctgcagctgctgtgtgagaaccataaccgggacctgcataaatgacatcggcagacggaagaacaaaaccaggtacaagtgggtatgggagacgctgcagttgctggacatgatgtgcggaagaaccacgggcggcctggggctagctggggctctacatcaatgaaggacaacgtgggcctcgtcatccaggagcttggagaccctcagctgagatactggccagggaaccccatgacaatgaggaaaccagaatatgcatagtgactcacagagatccaagtggacataagaccatcatcagccgaactgatccgtcaaatgacagtcgagcccactgtgcaagtaccgacatggatctgggtgctgaagatcaaggacaatgggctccaagctgctcctggctctgattggagagccggaaatgacagtgcacaatgctgagcgaatcctcatcagcctgaggccacaggagctgatggaagtcatcaagaaagcctacca

SEQ ID NO: 597545 - DNA, 206 bp, Homo sapiens
  misc_feature (198)..(198): n is a, c, g, or t
ccccgcggtcatgtcttacgtttcccatagggcattatacttactcaagctatctaacagatcttaaaatataggatattgtaataagtttttgattattctgattaattcattcgacgtatacttcaaatagcaatatcatctgctacatgttctgatgcttcaaaggattgattttgcattatactcgtagacatntccgcagt

SEQ ID NO: 597546 - DNA, 115 bp, Homo sapiens
tcgataagggccaatgggcaaagtggctctacttgtagtcccacctactcagaaggctgatacaggaggatccttttgagcctaatgaagtttcaaggctacgagtgagactgtg

SEQ ID NO: 597547 - DNA, 239 bp, Homo sapiens
tattcagaaagagccacaagccggatggaactggagagacggagctcaggactcgagtttaatgaggcgcgtcaaaaatacgcaggatcaaatgccatctcatctgacatgttctttgggcgcgacgtgaatgcggagtatgaagccaggtctcggctgctccatctctcaggtggctctgccttcagctcttcagacttctttgatgacctcttttgagctctatgcgtagccatcgt

SEQ ID NO: 597548 - DNA, 989 bp, Homo sapiens
gtcaggcggggatacagcctgtgaacggtaatcgcatgtccatggtacacaaattcacaagtttggagaccctgacacacgccatcgcttctcacctgtggctctgcgttatccccgcagcctagagggaagatgaagcctaaactgatgtaccaggagctgaaggtgcctgcagtaggagcccgcacaagtgagctgcccatgaatgagattgaggcgtggaacggctgcggaagaagaaatgcccgctgggtcctgcttggtcctcattctggcggttgtgggcttcggagcccattgatgactcagctgttcctagtgggcaatactggcgactatgcatctctttagggacccaacgcatgagccccagtccccctggctatgaccctatgcgaagctagttgcatggtggaaagcgattccctgaagtgggcctgtgatcttacacccaattgcgctcacactgtgaggaaccccgttctcacctatgcctagcgccattgggttggggcccgttgcgtctgccctggtagccgcacaagcaagcgcattggcactatctggccttccctttcttaactggtgcaccccttcgaacctaaagcacatgaaagacactcgacgaacggccaggaaggcccctactgaggccaagctaggggttgagcggagggtcccttccgggctagcatgctagaaccccttagggcaccgaagaggggcgctggaaaccggtcccgtcatttcggcctgatgaagcccaaaggcgccaagcctgagcggccccccaagcgcaacgcaggggcgggtacacttggccacgggcctccttagcctcgcacgaagacgggtagccccaagtggtccccgtcgatttgggccgcggaccaatgcaagacacgcgttgaccccagtgggcggtcccattggcattacccagaggttcttggaggtggtatggaccgaaggacccaggtctcgtaacc

SEQ ID NO: 597549 - DNA, 162 bp, Homo sapiens
gaagatgcatgtgtgacacatttaacattcaaatcaggccagcgcggtgctcatgcctgtcatcccagcactttgggaggccgaggcgggaggatcacttgagcccaggacttggagaccagtctgggcaacacagtgagaccccatctctacaaaaagtta

SEQ ID NO: 597550 - DNA, 433 bp, Homo sapiens
tgtcaacagacgggagtccagccagggtgggtgcccttgtcattgaggttagggacagctatccccaggttatgcctggccccacccagcagggagttggggtccccccacaggctgtgagctctgtgggccctgggatgtgatctagctcagatgccttctcatccttgatgtcatagttgagcgcacccaagtggcacccactggcggccaggggcacagcctggtggtggtggcaatagcaatgtgcccttcctgagctccttgctggttctggcacagcattgtccttaagcatgcatgcgagcaatcgtgttgaacggttcacagtatcaatgctgcacggtcatgcactctggtggtttgtctcctacagaactcttgtgtctatgattttctagcacccatgttttcgagcgtttgctttgtaaaa

SEQ ID NO: 597551 - DNA, 423 bp, Homo sapiens
ggaccgcttccaagactttgccctgattgatgccccaacgttggaggatgagccccaagaggggcagcagtgggaaatagccctgcccaacaactggcagcggtacccaaggacaaaggtggaggagaaggaggcttcggacacaggtggggaggaacctgagaaggaagaggaagacctgtactatgggctgccagatggagccggggacctcctcccggacaaggagctgggttttgagcctgacacccaaggctgagatgtttgtgctccgtagcttttagtctggaactgctgctgacccctgtgtgacatcacagggcctcagtttccctatttgcaaaatgggatgatatggaggttcaatgagatggtggcattttgagaatggtaaagaaatacccagggaggggatgatgccta

SEQ ID NO: 597552 - DNA, 338 bp, Homo sapiens
  misc_feature (222)..(222): n is a, c, g, or t
gcactctatcagcctggtgatagattggacctgtatcaaacaaaaaaaaacaaacctgcttctggattggcttctggttttttccatgacacacacatctttctatttgtctctggtctacatattaactatcttcccccaggatagtataaaaagtgtcaggaaagttgggctttggagttgtggtaaattctgtctttgttactttcctccccttcaggnggtttcttatttttaaagatgaatgcagtgaggtataatggtgtgtgcctgtagtcccagctattcaggagactgaagcaggaggatcacttgagcccaggaatttgaggctatag

SEQ ID NO: 597553 - DNA, 705 bp, Homo sapiens
  misc_feature (607)..(607): n is a, c, g, or t
acaggactcgctaagtgttcgctacgcggggttaccggatcgggctgaaatgccaaaggtggaggagacactgaagagactgcggagccagaagggagtgcagggaatcataggagcgaacacagaaggcattcccatcaggagcgccatggacaacggcagcaggacccagtatgacagccttatgcacagcttaatcctgaaggcacggatcaccgtgcgtgacattgagcttgagaacgatctcaccttccttagaatacgctccaagaaacatgaacttatggatgcaccagataaagactatgtgctgaacgtgattcagaatccataccgagtagccactctctaggctccatgagtcattgcttaatttaatgtgccgcaagaatgataatgtcaatgatgtcagtgaactatgacatggaagatggttggacccactcacagccatccagtgaccgtatgtggactggcggctttctacctgacaacggaaccactgcgtgacgcaccttcccagagatccgatcgccgtatctcactccagagttggagcacgagctttgagatgccgactcagctacttcgacttaagtcacttgtngcgttgagacgctggatctgtagctaaatgacaactgcgaatattaataaatcctctttaactggggcgcttggccatgattttttaggcttctgcgc

SEQ ID NO: 597554 - DNA, 539 bp, Homo sapiens
gcagtgcagcagtcgtgctgcatgtcgatctaacgatcgccccccgacgtgttcactttaacctttagtaaagaaaaaggaaagtcaggacgcggatggctcacaatctggaaatcccaggcactttgagcagtgccaacgcaggcagatcatgaagtctcgagattgagaataccctggccaacagtgaaaccccatctctactaaaaatacaaaaattaccagggtatggtggtgagcacctgtagtcccagctattcaggaggatgaggcaggagaatcccttgaacctgggaggtggaagttgtggtgagccgagatcgagagccactgcactccaacctggcaacagagcgagactccatctcaaaaaaaaaaaaagaaaagaaaaataatttgcccaaggtcacacagtaaaagacagaggtagggttcctgctcattgtgattctaaacagttgtccacaaaatcaaagttaaggtaaaatactctctcagaaggccccgtaagggcaggtggcactttttctttgaagcca

SEQ ID NO: 597555 - DNA, 759 bp, Homo sapiens
tttaattttttttttttatattaaacagttaatttcagtaacatggtagggcaacaatataatcctcagataagtcagcaaaccagtgacaagaaatggacaaccactccttctacaggcttccgggagacaggcaggctgggcttggtgggcccccggggtgggtaacatcttaaggaatcctatcatggtttggtgttatattatgctaaactggtgaaaaacaaaccacttcatggcagacaatcattcttaggtcaaacacaagcaacgacactatttaggaaatcaattcctcacaacattttatcccggaattatagcagtactggtgactactaacatctaattctggtgagaaatataatggcattggtaagcggacttggtgaagagcttggaaaagacccttttagaaattatttaaatggatcactcttataacaacattttattaaatctcagaatctactaatgtgacagacaaagggtatgcttaacagagtctctacactacggggtataatggctagaccatttcgggcatttaaatgacctcccagaatattacaccaagccccggagaactagtgagcgtcttactacggaccgggtaaaatacccaaagctacaaaagggtaaagaaacccaaacaacagacaggagtacccgggaaaaaccctaagagcactggcaagacgaccaataaaaacggaaagagaaagggacctcccaaagggggaatcacgggacccaata

SEQ ID NO: 597556 - DNA, 1768 bp, Homo sapiens
gctgatatgaaacattggcccatttatggtgtgtgaatgatgctggcagtgcccaatggctccaagctagaatacaagggagagaccaaaagcttctatccagatggcaggtgtccttctactggttctgcacacaatgatgcaaggcaacattgccagcacagcctcaccatggcgaagactagttcaccaatgccttgtggtcacagatgcccagcattcacttctcacactgacctctccagcgtccaggcaacccacaatgactgcctggacacctactctgactggctcctcaactgctaccatctacgacactcacttacactgaccgccaaaacatgcatgcctcgctattccggcctctatcgggccttacgcaccaacacacatggcttcgcgcacgccccgacacgcggacacaccgctgcctaccaaattcctcttgcaacccctgccgcgacaacgactgaggccaacatatctccggacctgctcgcttcaccacctcccattccaccttcaattggcaagcgccactggccaaactccttatgcacacgcgctcccaaacggctcctcaacaagcgccattgcgcaagcaacacaaccacccaccactctggggcgtcgggccgcaacaaggccaatccccggcaaccacatcccccgtcacacactgtcgcctacacacccccacctccttccaactcactgcgcccttacccagactcttctcaccacgccggcccacacgtccacctcccagtcgacacatgtcaaccacttcccacacacgccactacaaacccaccagcacgacagactcgtgatccacattaaacgcgatcctccagcctaccacacgcgccactcatgcacatgagaccaccgttccagacaatacacgacccacgtcacaacccccactcacatcccaccaccacccaataacaactcaccacagcgacaccatcgccacacctctccgcaagcaaaatcctcgtagaccatcccatcactccatccactttcacatgcgacccacctctactactcattccatatatatacaccataaccacaactaacagtccacagtctgccactcctgacactactgtccacctaaaacctttagcactcttgccttcagcacccttcgctctctctgcttctcgcaaccaccattcacacccccatccctactcactcataactcgacccccattcctgtcacattgcctccacacattccaactccactctctccccccgaacatctccacttcatacaatttagcgtcacctgcgcatagcaacagagtaacatatcctaccattcatctctcaacacctaaaattcctcaacagtttatttccacacatagacatttcttcaactcggcaccaataacccttactactaatacaaccaactctctatcataaccaactcctaagccactttgtaacacacctatcaccatcaccacactcaccatccagcacacaccactccaccactccactaccaagactctctttatctccccaccaccccccctctcagtcaccctccatagtcacgactacactacctactccccctcttcaccccaatccacaccaccaacccacacagccaccgcctctcatccactaccacactccaccctcaccgtactactacccctcccccacctcctcactctccttctttcttccaccactcacactgcgtcacctccccacctccacacccagc

SEQ ID NO: 597557 - DNA, 253 bp, Homo sapiens
  misc_feature (3)..(3): n is a, c, g, or t
agnaccctagctggatacaggcatgcaccaccacgcccagctcatttttgtatttttagaggagcaggaaaaggcattcgaggttgcaggtattagccgggcacggtggttcacgcctgtaatcccagcaatttgggaggccaaggcgggtggatcacttgaggtcaggagttcgagaccagcctggccaacatggtgaaactccatctctaccaaaaatacaaaaattagctgggcgtcatggtgggtgcct

SEQ ID NO: 597558 - DNA, 934 bp, Homo sapiens
tactaatttctctcacgggcgtggaaatgtattctgttaaaagaattgtgttgccacaggggggttgtagtgaagccgctgcctctgtgatgcttataaacgtgtaccacgtggggcacgtgggagagttttggataactcccccggtgaggcccacaatagtgttgggggttctccaccgcgggtctcacagaatatttgggcacataccccaacttgagtgttgagagagcgtgtcacaccggtggaagattggtgccccaagaggctgttaccctcagtgggggtggaaactgtaggcgttttcggtgtctgggtgtgtgtcgctgtgtttggggtttgtttatgactgtaaatatatatagcgctctacacatatctaagatattatcccggtaagagccctctcttgtataggctttcacggcgcgcctctacctacaggtgcgctcgcgcgcatattttccgcggaataataaaagtagtgatgtggaaattccactgtgagctcccgagagaaggggggcacagagccacaagggaacgcttgagaaagaaagtgggtgccaataaatgtggaggttccacgagcacgcacctgggaataaagaacactgaggaataaagggtgtgccacaagtcgtgatgtgtatatcctgctctgccactagatagtgtttgtcgcttagaataagattaataatggctgtaagaagacccacagatttgatattgggagaaggctgtcactggagagctttcactggtgaaagccacgctagatttctgggaaaacccctcggggatcgcaaacacacgcgtgtctaaaattgatacgtagactgatggatatgagaccccccctccctagaatctgggtttaagttccagacttcctaagtaagtggcccaattaataagtgctatttgggaa

SEQ ID NO: 597559 - DNA, 942 bp, Homo sapiens
cgcggtggctcacgcctggaatcccagcaccttgggaggccgaggcgggcagatcacttgaagtcaggagttcgagaccagcctgtcaacatggtgaaaccccctttctagctaaaaacacaaaaattagccagatgtggtggcactcacctgtaatcccagctaccaggaggctgaggcaggagaatcgcttgaacccgggaggcagaggctgcatgagctgagattgcaccactgcactccagcctgggcgacagaacgagataccatctcaaaaaaaaaagggaaaataattcctactcattcccaaaccctttcctaagaggtgagcctctctctctctctctctagaggctctgaattcggggctaccccaagctcagagggagtcctggcgtgctctccgtggtacacaaacacctaaaatgaccagtgttcctccaatttatctccattctatatctctatctatctatctatctatattttttggagacggggtccattcgtggatccagaataattctacaagtgcaaagagagcttcccaaagaggacaagccacctagagcggacatggtcctcgtgtccatgaagaaccaggagttacacttgaaaagtccggtgatgggaaaatcagaaatacgcattagtggaccagcaggggccggggcatcatgcctggtaatcccaacactttgggaatgccaggtggggggatcaccggagggcacgggagtcggagaccacgctggcaaaatggtgacacgtccatcttctctagactcacatgtcgcgggatgtgggagcgcgggtaaaccagtactgggcaggcgagagaaacatgaccgggagagatggagacacaaggcatgactctcgcgcaagagaagaccgggcgaaaaaaaagacaaatggcgcgcccagaataacacacggggg

SEQ ID NO: 597560 - DNA, 282 bp, Homo sapiens
  misc_feature (224)..(224): n is a, c, g, or t
  misc_feature (242)..(242): n is a, c, g, or t
ctccagcaggttaggtgtagttaacttatttctcctgagggcagaccttgttaggaagaacagaatgctgtggcatatttaaaaatggttccttttctcttctccctgctggaggcatgagggaatttttctcctatatatactgtaaaaaactagttgaactcctggagataaaactcacaaaagcatgacttctgtctaatattttctgtaaatttcagggnacatacctatgactaggnacccctgaagttttaaagtattgggcttgttgacacctag

SEQ ID NO: 597561 - DNA, 505 bp, Homo sapiens
gatctgtttgtaatacaaggtatttgggcttgtctttaactgtatagtgatttgtgggcaggctgcaggagccaggataaagaatgcatgtttgaaatcttctctatacaaatgcatccacactctccttcaaagggatgagtttcttagccgttttcacttgatacaaatgctattgtttcctttggaaggagagaaaaaaagaaagctccacctgctccgtgagtagcattgctctcaactggtgttcccagccgttcacatgtctacccattctctcccttagctttcttaggcgccggaggatgaattatttacaaaataaaaagcctgtaggtttaaggaagaattgctttgccccatatatgtgaccatgctcagatggaacaatgttcactgccccagcactgagaataggacatttccttgctgtagaaatgtcctttgttgttttgccagctttagcagcattatgctgcaggtataggattcttaaaaaaaaaaa

SEQ ID NO: 597562 - DNA, 671 bp, Homo sapiens
  misc_feature (671)..(671): n is a, c, g, or t
gcccgcggcgctttcccctccgcggttcctccccgagccgccccctgtgcccaagcttccgcggctccgtctgaccaggtgccgctgcctgactgggaactcgccagggtgcgtagtcccactgcaaggcctgggtggccggctgatggccgcagatggcggtgatcggcctgatgcccgggctgccgagggggatgtacgcgctccgcctccctaggattccctccagccctctcccaaaccctgcctcgcagaaccgccggctaccgggcccaaggaccagcctgcctgctgctcagacgttcatgctgtgccccactcacgaagaatccgtgggattcgcagacgttggtccagctccctagccctatagcagcctccgcacgggcacattacgaacagggccagaacgctatcctagtcaagggtgaccgacgctctgacgcgtgggcagccatttactttccaatctcttctagccaatcagagggccctgtggttgaaacattacacggtcggatctgggagggattcgtcgcctagcacttgggccatgcttaccatgtgacacaggtccacactaaccacatgcgctacgcattggggacccgtacccttttgccacccttaccccaggttggcgacaactgactcatctcatgcttgtaccn

SEQ ID NO: 597563 - DNA, 917 bp, Homo sapiens
  misc_feature (131)..(131): n is a, c, g, or t
cagagctggggccgcggaggagtcggaggggcactatggcatacaaagttaggatgcagatgccgaggatgtgagtctgttggaccttgtgtggctgtgctcttggtgtatctgttggtcacctgagtgantacactgtgcagtgttatgtctgtggacctggatcagtgagtcctatgaaggtggtcacttgtcaatcctggtagttgcccatgcggaaattgtcttgcaataacggaatctcgtgatagaagagacaccggatgatcagtgaccctgaaaagagaatgaaagattctttggagacagtgcagcaaagttccatgggcggattcagaatccaaaggctacgacttgcgttacgttcctagctaccgtccatggggaagcaggcgtgataactctcccattgtagctctttaccctgggtccgcttcccgagagcatgatctgtctttgcgacccacagaggcctgctgtgcatctttcagatcattctcgcaggctgtccggtttcttcgcctgcggacgtgttggggctatggttcttcaattcttctcgttctctcatgctgatgattttgcagagctgtccatcaaggatgcagtgatcaccgtgccagtcttcttcgatcaggccgagcgcctaggctgtgctgccggctgctcgtatggctggctcggaagtggtgcagcgtcatcatgagcaacatcgccactggcctcaggtatgtgtgtcttccgcggaaagattttaagcatgccgaatatcatgtctatgacatgggttcggggccgtatgcccttggggcctcccaacttggcgcactccggggctgggttttccctgcatccggggggtgccccccttggggccgggccgtttaacccggggttctaccgcggacccggtgcgc

SEQ ID NO: 597564 - DNA, 601 bp, Homo sapiens
tacagtcgaggagatctcgcactgttgcccaggctggagtgcaatggcacatctcggctcactgcaacctccgcctcccaggttcaagcgatcctctttgcctcagcctgccaagtagctgggattacaggtgcacaccaccatgcctaggtaattaaaaaaatttttgtatgtagaaacagggtctcatgtaactcctgggctaaacgatcctcccactgtggcctcctaaagtgcgggggttataggtgtgagcctgagccgctgcacccagcctgtgtggtctgtttttagtgtctgttgtttctgctggttcatgctcctggctccttagtttcttgtgtgcttggctgtctgtggcagtgtgcagctcattatgtttgaagaattatttgtaggggttcctagatgccaaagacgaggtaccttcctccggagagggtttgcttttgcttttgctaggtgtctttgggtctgttcagcctgagagtgaccaagttcacaggatgaaattctgtgaaactcccaggtagcaagtcagtgtagggctgtgtcgggctgatccatggtcatgatttatcaggagagtctccgtcgaacg

SEQ ID NO: 597565 - DNA, 1060 bp, Homo sapiens
gtcagaaaggcaggcgctgcgagacggagactggcaatctgcagcctgtgtgtgcctgctctaatcatgatggacccccgattgacgccgtggaacggctcacaccggcactgtgctgcacctgcccaccgtacttaccatacacctagccacacctagctaggccaaggagagcagtactagcagcccgcggtgcgcgtagggccagggcctgcaccggagtgtacggtaggtagatagggcatacccgagcgtagcggcgcgaggtagcactacgtacctagactagacactactagcactacgctacatactaccgcagcctagcagcccgacagggagacagcgagcgactacgcgctcatacgtaggtagctagatacgaccgacgactagactacacacgtcacactatcgcgccacgtgaccagcagaacatacacaggcctatcgcaacccccaccggcagcatcccatcactaggcgctacctaggcacggtacatactacaccctaccacccacactatactcaccctagcactatctacaccagcctaccgcacagctaccataaaggcggacccgcaaggacgacgagtacagcgtggcagcgaccccaaaccaggaacctacggattaactagcttacctacatagatgtaacgcagcaagtaccaacaggccatctcaacttagcgtagcacggctcggcacggcactgaccatacgtagcgcccaaagccacaacctaccctggagcaccgactgacaggacactaacgcacacgtgccacgcacgaccatacgagcacggcactaggacatgcactacctgagcacgctacaacaccaagcacatgcggcaccaccacctcgcggcaccaggcaccgctccacaacggatcggcctgagcacgccacagcagcccctgacaatagcgacacaagcatccagcacctccacatgacaccaaaccccggcgaacccaaccaccaaccgcaacaaggccacacactggaaccccacaaccccgcgcgccgcacgcaccagcggacca

SEQ ID NO: 597566 - DNA, 202 bp, Homo sapiens
cacctaagacctcattttaacttaaaacctctgtaaggccaggtgcagtggctcatgcccgcaatcccagtactttgggaggctgacgggggcggcggatcatgaggtcaggagtcgagaccagcctgccaacgcaggaaacccgtctcaccaaaaatacaaaaataggcaggtgtagtggccggcctgcgcccagctacca

SEQ ID NO: 597567 - DNA, 100 bp, Homo sapiens
agcgttctgacttctgctggactctgagtgggggctggagtgtccagtcactcgagctggagatgcggcaggcactgttgtactgtcgggctagtcgggg

SEQ ID NO: 597568 - DNA, 566 bp, Homo sapiens
attcgccaccctccatgcccaggtgggccgacatgaaaaatgaagatggaggacagtgtggggtgcctggaaaactgcttgacggagcgtgaagaggaagcttccagaaggaaccttggagtggtcctgagcccagcaggcacgcagtgagcaaggtgggccgccttacgaccaaagccttggcacgaatgacccaaagactgctgggcttgccaggccaaggggaaggctttgtgaacctggtcccttagctttaggttggaaccccttggaacccaccctatagcatgcccatgaaaggccgcctgtttgcaatatccctttggtgatagaaacggaacagggcaagaaatgaaaaggtttttagaacccaaaggctttcccctttgtgtccagtggaatgctgataggacaatgaaccgcatttccttaccttgcccccataggggttaattttgccagtggactggagcatagcatgcctggaaccctggtgagcctttgcaaggtaggccaggagaatgggaggccgccagagagcgcgaagggaaaacagtggactgtaa

SEQ ID NO: 597569 - DNA, 411 bp, Homo sapiens
  misc_feature (245)..(245): n is a, c, g, or t
  misc_feature (314)..(314): n is a, c, g, or t
  misc_feature (368)..(368): n is a, c, g, or t
gttctgtggtctaactcatctacctagatgagttaggtagatgagttagcagtagaaggaaagaagtaaggttgaaggaaagtatagataaatgagtggattaaaagataggaaaattgagatttttatggaagataccttctcattttctttgtaaagtgaaataggtcatcttggaataaaaggagttataatctaggcaaaggggtcaatgtagtatggatcattctggtatggatcattcngataaatgggttaggggaacccgaacagttgttttaattaaaaagaatttacccaagttgacacaaggntgacctcctgaaaatttgaacctttttaatttttataaccaccccccatttggngggtcccggttgaatttttttccccaaactccctaccgccctg

SEQ ID NO: 597570 - DNA, 184 bp, Homo sapiens
aggatattaggaggtcagcacggtgctcatggtgtcgacggaacttgtacgagggaggcatgcaccgcaactggtgaatacacgtcgagcaggctccagctttaacgatattgggaggtcagcacggtgctcacgtgtcgacggaacttgtccagggaggcatgcaccgcagtggtgaatacac

SEQ ID NO: 597571 - DNA, 804 bp, Homo sapiens
cactctctgccggagaaccccatggtgacacattttcatctttctgaccagaggctgtttttttatttttttgaaacagtctcattctgtggcccaggttggagtccaggggctgtgatctcggctcacttgcaaacctcgccttcccgggtattaacaccaattctcgtgccagacagcctctcccagaagttatagccgtggaactaacagggtgcccaccaccacaccccacttaatttcggctattgggtcattttacagctagacgcactgcgcgggagtcactttaatttactacacaccacacaccacccacaacacagacttggggaaaattacgtagggcagcaacttacacacaagacagctagtaggcgctaccatgtgagaacatcactgttgaccatcatatgctatcacaagacacgcaataagggcactctccacacagttcgaggagaattacaaggttgttgacgccacacccgatgcaactgagcccggcacatgacccttcggccaacaacgccccttggtgtcacaacctcgatgagaggtacccagtactttatgaggcagctgcttccattttacgggcaaacagacaaagggcagcctgacatcaacaacgctaatcggagggcgatcataagcgccgaccccatacaatttgcatgatcttcccaacaacacacttctcggacacaaccaggctctgagtatcgtcgcgcataccacccaccgtctctcgtgcccactccacccgacgaaaccaaacacacactcattctgtatggggcc

SEQ ID NO: 597572 - DNA, 1086 bp, Homo sapiens
  misc_feature (341)..(341): n is a, c, g, or t
aaaaaaaaaagcccttttcagtttggtgcactggtgtatggtccgtgtagaattgtgattgcagatttttcttgaaattgaaatgtgtttggttttagacgagattcattaccggttaaagcaggaattgacaaagcttggcttttctctggtattgtttctagggtgtattgggtgacttttaacggggtatattattataattggccaattattaagttaaattattagatttattattatgtgttattagtgtgtttctcacaaaagcctttaagacctttataccttctccgagcaaccccaacagtgtgcttgggaatatttctcagaagtctcangtcattgtggttatattacatgtgttgttagttctccaaaagccaccattaagcctagaaagaaagaaaattatttttcataggaagacacttaccattcgtggttttctcaacatgtgaaagtggccaacacaacaaattgagaaagcttccaaacaaatcaaattctcccatttgtgccacgagacacttgacactgtggatagcctcaaatttgtgggtctcaccaagaaaattctttagtgggaaacgtgaaaatctcttaaagtggcttctcccaaaaaaatgtggcttgccttgtgggtttgggcacaaaattatctccaacaccattgtggctctatttgccacaagaaaacacttttatttcaacttttacccaaaacatgtgcaacgattttttatttcccccatttggggtgggttttatacaacgccgtgttaccgtagaacaccataaaactcgtgggggggaaacgtcgcctttgtggtgcaccctgggttaccaacaacgcacagaagtgtaattccaaatttaaaaggggcttaaataagacacttttaaagtaagtagatcaaaaacacgacagggcggggagccgcgcctctaaaagaaatttattccccccctgcgaggagagggggcccccccaagagaatattagaaccgagcgtattacacccccgggatttttcgttgtctgctaccaccacgtgggggggcccctaattaatgagtcggaca

SEQ ID NO: 597573 - DNA, 232 bp, Homo sapiens
accactggtaggagacactacatcactccctggttcagcatccggtttgttctcttcacaatatctatagcagtgagtctttcacaaataacagttacagtctagatagttcgaggaaactccatcatcctttttgtatcctagtacgaggccttgtcacttcacttaagggagcatgaaccactctgttcgtggcttaatttgacgtagtgttgtcacatggtgccgggcg

SEQ ID NO: 597574 - DNA, 163 bp, Homo sapiens
acttggtctgaagctgtagcctcgcccagtgaggatcttcatgaggtagtcggtcaggtcccggccagccacgtccagacgcacgatggcgttgtgggagcggcgtatccctcgtacataggcaccgtgtggttaaccccctctccaggagcctcacaacgag

SEQ ID NO: 597575 - DNA, 435 bp, Homo sapiens
gcacgagatctactgcaccggcaggagtaaccaaatcctctaattttttcttctcctcttcgttagaggcatatggaatcaatgattcgtaaaatctttttggtggtttaccgaaaatatccaaattttccacaaatgcttgtaagacggttcttgtttctaacaaatggtggttgtccttgttggggactaagacaacatcggattcatttagaccatagaaggttaagaattctttgaccaaagattcattgtttctggcatgaataccgagggcttcaccgatgtcataagtcattccagtaccagaaatatcgaattcaatatggaaaatatatctatcataatcagcaggcgtaacacgtctattttctttaactttcacgacgaagttcttgacgggtaaatcgggtcttagtttattctcaacttcat

SEQ ID NO: 597576 - DNA, 249 bp, Homo sapiens
ggtggtgacggttctggggcggcctggcaccccgaggcgaacttcgttcgtcggaggcggtgccaccgtcctgggaggcagcggctgtcttcgagaaggatggagccccctatctgccccgagtgctacttatgagcgcttctcggccaagcatgtaggcttcgtgcaacacaggacacatcacggcacgaaggatggtcgatgcgacgttgtggctatctcagctggtcgacccaggaggcatttctg

SEQ ID NO: 597577 - DNA, 464 bp, Homo sapiens
tgtctcatgtcggagacgcaagatcttcgaggagctcaccctgcgacaagcccacgcatgtgatgccctgccgggcgcccgaaggtgggcctgcctgatctatcatcgcgggcggctacttccgacagtcgctcacgtacctggaggcttactaacccagtgacgggacctgggtcctggttggcggacctgcaggtgccgcggagcggcctggccggctgcgtggtgggcgggctgttgtacgccgtgggcggcaggaacaactcgcccgacggcaacaccgactccagcgccctggactgttacaaccccatgaccaatcagtggtcgccctgcgcccccatgagcgtgccccgtaaccgcatcggggtgggggtcatcgatggccacatctatgccgtcggcggctcccacggctgcatccaccacaacagtgtggagaggtatgagccagagcgggatga

SEQ ID NO: 597578 - DNA, 833 bp, Homo sapiens
ggcgttcggagatacgtaggggtgaattatgtttcggacgatgcatctggaggggtgtgtaagactcgtgtggctgaagaaagctattacgctctctatatgtgggtcattagttttaaaaatagcatttcgcttttatttgcttgactgcctcttctcaacaaattttaaagcccgccactacatgtgtttggtgttgccctaccagctctggggttggggagtgcacagttataggttattgtgtgctcctgtggccattctcggttgtcatccgccactttcacgattgtggcgtggtgtaattaaggtagactgagtgggatgtaatgggtaaatatgactttatagtcagctctaatcctggattcaactatcaagaattgtagattttcgaagctttgtggatgttcgacgttttagaaacaggtgatgcgaaagaggtgaaaattcttgttctgaagtcgttaaggaaacagagaaagtttttgcgtccttaagtgtgggacttgtgtgtgaccaacaatatgaaaggctctgaggtcagctggagaagaatatgcagattaagatgccagtgaagagacttgcgtgagggtagtttctcaaaatcatggcgatcattgggtccgctgaaagatgagttggccggtgttcctccggcatgtgtctgcaataaatcgtcttgcctgtttggaacggggactaagtttgaatgggacatcccggtggttccatcagagttaacttctggagaaattgggaccaggccctattagaaaaaccccggggtccgaaatgggtttgcaaagagggtggggggaaggtggctg

SEQ ID NO: 597579 - DNA, 215 bp, Homo sapiens
taaatagggggcaagtttccaaagatagggggggggggctccagaaatatttttggggggggaattcttaatcacagagggtttaatgctggttgggggctccggattaggacctaaaaaaaaaaaccaaaaaactttgttttattgtttcgggggaacacctttgggggctcccggggacccaaattttaaaaacaaaaaattcttggaggttt

SEQ ID NO: 597580 - DNA, 170 bp, Homo sapiens
ccgagcggacagcagggcgtcatcaagtgtccccagctcggcggaatggatcacacggagaagagggggcggatttacctaaaggctgaggtgctgatgaaaagctccatgtcagcagtacgagatgcaaaaaatctatatccctagtggatccaagacggggctttgca

SEQ ID NO: 597581 - DNA, 123 bp, Homo sapiens
ataaataccaaggaataaatacgactcgagcatttaagaacacaggccatacactgctggcttaaaatcctattagcagagagaatcttttaacattgtgaccactaagcactatcagcttag

SEQ ID NO: 597582 - DNA, 380 bp, Homo sapiens
ggcttccccctatttattactgaactattatggtaatgaagatgggccttttagggatcccccccacatataatagcctccagcaatataggcccgacttggtcctaagcccctgcctcagcagttgtttacattcagttgttttgccttaacgtctgccttctttcctttccgggccaagcctttaatgttggccccctttagccctgtgggtcccgccaggaaaaaggttggagcagggcttttccctactttggatccatcccgggtcccattttcctttaatataaataatttatgggtttatgcccttcccatcctgccttgtttcaaggctgaccttttttcctaaggaagggaataatccttttaggccccga

SEQ ID NO: 597583 - DNA, 687 bp, Homo sapiens
  misc_feature (150)..(150): n is a, c, g, or t
  misc_feature (154)..(154): n is a, c, g, or t
  misc_feature (170)..(170): n is a, c, g, or t
  misc_feature (178)..(178): n is a, c, g, or t
  misc_feature (180)..(180): n is a, c, g, or t
  misc_feature (191)..(191): n is a, c, g, or t
  misc_feature (200)..(200): n is a, c, g, or t
  misc_feature (208)..(208): n is a, c, g, or t
  misc_feature (211)..(211): n is a, c, g, or t
  misc_feature (216)..(216): n is a, c, g, or t
  misc_feature (283)..(283): n is a, c, g, or t
  misc_feature (335)..(335): n is a, c, g, or t
  misc_feature (345)..(345): n is a, c, g, or t
  misc_feature (348)..(348): n is a, c, g, or t
  misc_feature (369)..(369): n is a, c, g, or t
  misc_feature (387)..(387): n is a, c, g, or t
  misc_feature (411)..(411): n is a, c, g, or t
  misc_feature (420)..(420): n is a, c, g, or t
  misc_feature (428)..(428): n is a, c, g, or t
  misc_feature (435)..(435): n is a, c, g, or t
  misc_feature (439)..(439): n is a, c, g, or t
  misc_feature (469)..(469): n is a, c, g, or t
  misc_feature (509)..(509): n is a, c, g, or t
  misc_feature (519)..(519): n is a, c, g, or t
  misc_feature (531)..(531): n is a, c, g, or t
  misc_feature (572)..(573): n is a, c, g, or t
  misc_feature (581)..(581): n is a, c, g, or t
  misc_feature (666)..(666): n is a, c, g, or t
gaaggaaagccaggacctccggagcagagacagcagctgcagaggcaaggccagcatgtcgcccaacttcaaacttcagtgtcacttcattctcatcttcctgacggctctaagaggggaaagccggtacctagagctgagggaagcggnggantaagatactttcctgntctttagngncaaactgaagngggagtggntggggagnagncgtancgccgcgctctgggtgcctggacatgctgagcctccagggccagttcaccttcaccgccgaccgggngcagctgcaatgcgcagacttcttcatcagcgagctcgagagagttcattancatccactangancaggtctccatcgactgtcanggcggcgacttcctgaangtatttgatggttggattctcaanggggagaanttccccanttcccangatnatcctctcccctcagctgagcggtacatanatttctgtgagagtggtcttagcaggaggagcatcagatnttcccagaangtggccatgatnttcttccgagtgcatgaaccaggaaatggattcacattaannataaaganagaccccaacctctttccttgcaatgtcatttctcagactccaaatggaaagtttaccctggtagttccacaccagcatcgaaantgcagcttctccataatttat

SEQ ID NO: 597584 - DNA, 305 bp, Homo sapiens
  misc_feature (204)..(204): n is a, c, g, or t
  misc_feature (233)..(233): n is a, c, g, or t
  misc_feature (298)..(298): n is a, c, g, or t
caataagaaatgtatagaattagaaaatatagtagttccctcttacccatgggacatacgttccaagacccccagtgaacgtctgaaaccatggatagtatagacacctctatacactgttttttcctatacatatatacctatgataaagttctatttataaatcagggacagcaagagataaacaataactgcaaataggancaattattaacagtgcactgtaattaaangtgatgttaatgtggatatgtctgtctctttcttcttcaaatttcttttttggtactggtacttnacccggt

SEQ ID NO: 597585 - DNA, 145 bp, Homo sapiens
ttaagatacaggtagtctctaatgtgcttttgaagcttgctttaacaatttacaagtcttttctgcggacagtggtggctctgggacaaccatattatttctatggtaggatagaccctatacatacaagcaccccaaagccctg

SEQ ID NO: 597586 - DNA, 200 bp, Homo sapiens
ccccccgaccgcggagagcaccatgtcggcgccggcgccaaagtcagtaaaaaggagctcaacttcaaccacggacggggccgacgagacctcagaaaaggacagcaagaaggcgtttaacaatttaatgaggacaaaattgatttggacagatcttaatgaccaggccattgaggaggtttttgtatagtaggacacag

SEQ ID NO: 597587 - DNA, 146 bp, Homo sapiens
tatgaagaagtgcagcactggccaacaccagggtttactgaatcatttcagtttaatacataagtgtccaataataatgtcaaccctccctcgccacagccaataatttgtcctcactgagttggcaacaagtgactgctgtgact

SEQ ID NO: 597588 - DNA, 580 bp, Homo sapiens
aaggttcacgagcgaggattagcctgctcttaaagcgggacgaagagcttcctcctggtaagggcatgggacccaggtcctcatagaacgagtcggcaggctctgagggttgcacatggtcatggtctggccttactccttcccacggtagtgaaacttgatgtccaggtcagacattgggagagagctaatccacagttctggagagctatagaagggctgtataaggtactggagtacttccatctccaggggttcagtcttagggccacactgactccggactagcagatctccacactgcaatagcccacactaggctggcgccttagactgggcctacaacaaaaacttgtggtgagcagacaggggtaccacacgtgccccttcacttgcttgatgcctctgagaactcacaaaggtcagtagacaagaaacaaacactgaacccagacccagtgtgatcttccagcccatcagtgattcccattaactgacgcaataagaaataaggttcccctgctcctgcttcccagtcatattataactcccacaaattcatagttgaaaaaacctttgt

SEQ ID NO: 597589 - DNA, 829 bp, Homo sapiens
gtaaccccacataattacacacaactttaaaaaaatttaaaattcagctggctcaggatatctgttgtgcgtcctacagataccacaacctggatcaggtccaagcaaaactttcagagtgctacaaaatgttgcgttcccagtccaaaaagaagtggaaaagaatctgaagtcatgcttggacaatgttaatgctgtgttcgtagactctgccacaccactattcaaccatttgatggataatgagtctgatgactgtctctttacttggggaagaacctgcagcatttttgcctagaaggcttttttagtttttttttttacaagagtctttttatttattaccttcgtttctcgtctcgattctcattaatttagcccttcctctcctcttttttctccctttttagttacctccgcttctccttttatttttctttcgtctcttattgtatgccgtcgtttagttaccagctcagaccgattcacatattttttatctctaatacgtcatctataatgactccaaatcaattacttctgttcctcctctcttttttttatgcaccatcttaattttttttgtctttgttcctcccttatatacccatttactgtgtttttcgactttcctttgctgttattcatatttattattccctttcactctgtttcagtcctttcgtttatcttttatcacccttttctgttccagacctgtccatttttctccttctctactcgcaccccacattcatacattggcatctgctttcatgagaaagatcgtaaaccgcaatttaatttctattatttatttatttttttg

SEQ ID NO: 597590 - DNA, 182 bp, Homo sapiens
atttggagaaataattttggagctaagtcacttcttaataaatatatcaatagttgtagtcataatagcaaaatagattactgatattgcattggtggaaaaccatgttgctgctgtcattctccttatgcctttcagccgtcgacgcggccgcgaatttagtagtagtagtaggcggccgc

SEQ ID NO: 597591 - DNA, 104 bp, Homo sapiens
gttgacttagcaggcatcccgcatcgtggcaccacagtgcggggtccggcagctctgcaattctgtcaatccagtggtccatcagcgttgtttccggtgtgttg

SEQ ID NO: 597592 - DNA, 275 bp, Homo sapiens
gcacgaggtagcggtcagatgagaagggcaatcgtcaggacttctgttgaaaagcggactaaacataggcattatcattcttagagttttacgagcaaatagaatcgagtgacctccgtcgttgctaacaggcgcagtaataataaccgcggacgaaagccacgcaggcaaagaatgctttcgctgaaatatcggagtcttgctattgttcagggctttgccggtgcgtaaataataggctgaagcgaatttatttcccgcacaaaaaatttttg

SEQ ID NO: 597593 - DNA, 658 bp, Homo sapiens
  misc_feature (156)..(156): n is a, c, g, or t
  misc_feature (193)..(193): n is a, c, g, or t
  misc_feature (456)..(456): n is a, c, g, or t
ccaagggctttcccgggcatgccgcagattattcaggcgccccgcattatgcccacatgcggggccagcggcccaacatgccgccccttggtatgatcccccggcaaggctttgcactgggcaagatcccaccaggggcaatgccccggcagcagnttatgccaggacagatgccccctgcccagcctctttntgagaatccaccgaatcacattttgttcctcaccaacctgccagaggagaccaaagagttcatgctgtccatgcttttcaatcagttccctggcttcaaggaggtccgtttggtacccgggcggcataacatccccttcgtggagtttgacaataaggtacaggcaggggcagctcgcaatgccctgcagggctttaagatcacgcagaacaacgccatgaagatttcctttgccaaaaagaagcaccttttccccccatgcntgccccttcccttgttttggggccacccctttcccccttggttaagccccctgaaggtaagtccccccttgggggcctttttggacccgtgtgtgagtgagtggtccccacacagcattgtacccaaagtttgtccccaaacattgcaccgggggctgttaggccggaattaaagtggctttttaaggtttggtttttccca

SEQ ID NO: 597594 - DNA, 687 bp, Homo sapiens
  misc_feature (18)..(18): n is a, c, g, or t
  misc_feature (58)..(58): n is a, c, g, or t
  misc_feature (94)..(94): n is a, c, g, or t
  misc_feature (102)..(102): n is a, c, g, or t
  misc_feature (126)..(126): n is a, c, g, or t
  misc_feature (137)..(137): n is a, c, g, or t
  misc_feature (142)..(142): n is a, c, g, or t
  misc_feature (189)..(189): n is a, c, g, or t
  misc_feature (194)..(194): n is a, c, g, or t
  misc_feature (206)..(206): n is a, c, g, or t
  misc_feature (223)..(223): n is a, c, g, or t
  misc_feature (237)..(237): n is a, c, g, or t
  misc_feature (246)..(246): n is a, c, g, or t
  misc_feature (266)..(267): n is a, c, g, or t
  misc_feature (285)..(285): n is a, c, g, or t
  misc_feature (292)..(292): n is a, c, g, or t
  misc_feature (296)..(296): n is a, c, g, or t
  misc_feature (299)..(299): n is a, c, g, or t
  misc_feature (317)..(317): n is a, c, g, or t
  misc_feature (334)..(334): n is a, c, g, or t
  misc_feature (341)..(341): n is a, c, g, or t
  misc_feature (373)..(373): n is a, c, g, or t
  misc_feature (377)..(377): n is a, c, g, or t
  misc_feature (389)..(389): n is a, c, g, or t
  misc_feature (392)..(392): n is a, c, g, or t
  misc_feature (400)..(400): n is a, c, g, or t
  misc_feature (412)..(412): n is a, c, g, or t
  misc_feature (426)..(427): n is a, c, g, or t
  misc_feature (438)..(440): n is a, c, g, or t
  misc_feature (458)..(458): n is a, c, g, or t
  misc_feature (466)..(467): n is a, c, g, or t
  misc_feature (470)..(470): n is a, c, g, or t
  misc_feature (472)..(472): n is a, c, g, or t
  misc_feature (475)..(475): n is a, c, g, or t
  misc_feature (477)..(478): n is a, c, g, or t
  misc_feature (483)..(483): n is a, c, g, or t
  misc_feature (510)..(510): n is a, c, g, or t
  misc_feature (525)..(525): n is a, c, g, or t
  misc_feature (542)..(543): n is a, c, g, or t
  misc_feature (549)..(549): n is a, c, g, or t
  misc_feature (557)..(557): n is a, c, g, or t
aatcactcggggagactncaaacagtgagcctagagctggagactagcgttaaccggnggggcggtcggttttatgaatgaagctatggctacngattcccnaagaagacccagtcgttgtactgntggagttgtgnttcgnccccaggctgtcacgtaagcacatttcagataaacccaatagctgangaaangattactcagantactaacatttaggttntctttatgaacagnggttacttntgtaaaaatcttttaactgnnggctttatgggatgaatnataatanttgncangaccaaatgaagaattgnagagttaagttggcgtnttcagcncatttacagagtacgtgaagagcactatgctnaatnctgaagagcagngtntcaaactncaggtttaacanattagtggattgtnnaatcagtttannnggtcaggagttgtagtanaaaatganntanangcngnncgcantggctcatgcctgtaatcccagcactntgcaggcccaggcangcggatcacgagatcannagatcnagaccatnctggctaaaacggtgccctgactctgctgtacacatgatgactcggaacatgtggcccctgtagtgccagctactcaggacgctgagtcaggagatgacttgaaccttgggtcgtactttgcatgggctg

SEQ ID NO: 597595 - DNA, 672 bp, Homo sapiens
  misc_feature (18)..(18): n is a, c, g, or t
  misc_feature (58)..(58): n is a, c, g, or t
  misc_feature (94)..(94): n is a, c, g, or t
  misc_feature (102)..(102): n is a, c, g, or t
  misc_feature (126)..(126): n is a, c, g, or t
  misc_feature (137)..(137): n is a, c, g, or t
  misc_feature (142)..(142): n is a, c, g, or t
  misc_feature (189)..(189): n is a, c, g, or t
  misc_feature (194)..(194): n is a, c, g, or t
  misc_feature (206)..(206): n is a, c, g, or t
  misc_feature (223)..(223): n is a, c, g, or t
  misc_feature (237)..(237): n is a, c, g, or t
  misc_feature (246)..(246): n is a, c, g, or t
  misc_feature (266)..(267): n is a, c, g, or t
  misc_feature (285)..(285): n is a, c, g, or t
  misc_feature (292)..(292): n is a, c, g, or t
  misc_feature (296)..(296): n is a, c, g, or t
  misc_feature (299)..(299): n is a, c, g, or t
  misc_feature (317)..(317): n is a, c, g, or t
  misc_feature (334)..(334): n is a, c, g, or t
  misc_feature (341)..(341): n is a, c, g, or t
  misc_feature (373)..(373): n is a, c, g, or t
  misc_feature (377)..(377): n is a, c, g, or t
  misc_feature (389)..(389): n is a, c, g, or t
  misc_feature (392)..(392): n is a, c, g, or t
  misc_feature (400)..(400): n is a, c, g, or t
  misc_feature (412)..(412): n is a, c, g, or t
  misc_feature (426)..(427): n is a, c, g, or t
  misc_feature (438)..(440): n is a, c, g, or t
  misc_feature (458)..(458): n is a, c, g, or t
  misc_feature (466)..(467): n is a, c, g, or t
  misc_feature (470)..(470): n is a, c, g, or t
  misc_feature (472)..(472): n is a, c, g, or t
  misc_feature (475)..(475): n is a, c, g, or t
  misc_feature (477)..(478): n is a, c, g, or t
  misc_feature (483)..(483): n is a, c, g, or t
  misc_feature (510)..(510): n is a, c, g, or t
  misc_feature (525)..(525): n is a, c, g, or t
  misc_feature (542)..(543): n is a, c, g, or t
  misc_feature (549)..(549): n is a, c, g, or t
  misc_feature (557)..(557): n is a, c, g, or t
  misc_feature (672)..(672): n is a, c, g, or t
aatcactcggggagactncaaacagtgagcctagagctggagactagcgttaaccggnggggcggtcggttttatgaatgaagctatggctacngattcccnaagaagacccagtcgttgtactgntggagttgtgnttcgnccccaggctgtcacgtaagcacatttcagataaacccaatagctgangaaangattactcagantactaacatttaggttntctttatgaacagnggttacttntgtaaaaatcttttaactgnnggctttatgggatgaatnataatanttgncangaccaaatgaagaattgnagagttaagttggcgtnttcagcncatttacagagtacgtgaagagcactatgctnaatnctgaagagcagngtntcaaactncaggtttaacanattagtggattgtnnaatcagtttannnggtcaggagttgtagtanaaaatganntanangcngnncgcantggctcatgcctgtaatcccagcactntgcaggcccaggcangcggatcacgagatcannagatcnagaccatnctggctcggtgccgtgtctctactaagaatgcacaacattagccggatatggtgggcactgcagtcgcacctacttgggaggctgagtcagaatactgacgtccctgataggggn

SEQ ID NO: 597596 - DNA, 183 bp, Homo sapiens
tgtacgtacacttttgatcggctattaatcaggatttctacaagcccctctcttaaattcaattaatttgctagagtgactcacagaactcatggaaacactttaattacatttacccatttattgtaaagggtattacaaaggatacagactaacagccaggcagaagagaagcataggaca

SEQ ID NO: 597597 - DNA, 701 bp, Homo sapiens
gaggcgactctacaggatccttaatccatgcttggttttatcatcaatcctgtgaaatcatgcataacatctggacgcagtattctccaggaggaatttattgtttcaggcttgatggttttcatggctttttccataacaatgatggcatcttcagtggtataatccttccagactttcacgatgttctatcagggttcgcttccatagagttgacagtcctttccatagagtaccatgtatatgtgtaatgagcctttaaggtccttacgaaccccttgatctagagactgaattagagacgatgtgtttggagacaagcagaccactttgacaccttcggtattgaactgatggggttcaatgccaagggctttgtccaataacaagagaattttaaaaggcaatcccaggccaggtgtggtagctctcgcctgtaatcccagcactttgggaggccgacgtgggcagatcacctgaggtcaggagttcgagcccagtctggtcgacatggtgataccccgtctctactaaaaatataaaattagctgggcatggtggtgcctgcctgtaatcccagctactcgggaggctgaggcaagagaatcccttgaacctgggaggcagaggttgctgtgagccaagattatgccactgcactccagcctgggggatagagcaagagtttgtttccaacaaaa

SEQ ID NO: 597598 - DNA, 188 bp, Homo sapiens
gcgtggtcatcaagctggtaccgagcgcatacttggatgacctctgtcattccattttcctgtgtgcccttgttctcctatatattctcgcaaataccacgggattcgtgtccagggagaaagaaagtgtttaactttctatttgcctaaattcttcattgttggactattgtggttggcttatcgag

SEQ ID NO: 597599 - DNA, 286 bp, Homo sapiens
aaaggggggcccccccccccccggggccccaagggggttttcccctcccaaaaaaacccccaaaaaccaaaaaaaaacccccccgtttggggtggggtttttggggggggccccagaaaaaaaaaacccccgggccgagaaaagggttgttttttctttccaattttggggggggttttaaaaattccccttttaaaggggggggggggcccctttcccgtttttttttttttttttttttttttaaagggttttttttacccctaaaggggggggggggaaggga

SEQ ID NO: 597600 - DNA, 786 bp, Homo sapiens
cggcctttcccgagcggtgaagaagttccgcagcaagccgcagctggcgcgctacctgggcggctccatggacctgtagcaccttcgacttccgcacgttggcaatgatgctgatgagcaatcatgaacaaggagcctgcgcatgcgcgtgacgctacagattcctcctaatcctaggtcaacggtgcaatgcccgacctgatacactggcgctgccctgtgctgccagacggctgtccatcttcaagcagccttgtgtgaccgaagattacctagaccaccctcgagcaattcaagtgtcatatgagcggaccctgcataagtgcgtgctgtgatcagcctgctgccacgctcttcattggcgagatatgagtgcttgagcggtcttgaagcgccttcgacatctgctgagtgaggcttggtcgtaggaccaatggacctcctcgctatggtggccttgcatgcggtggttgggacctttggctttgcatccggattgagcactgcttgctagtcaggccatctggcgcagcagccctgtcacactaggcatccatgcccttcgactgggtatctgctctcggctcgccgtggacgactaaccccgggtcgtatggctcaactccatgctgcccctgtgccatggccttcatggttgaccgacgagggcgtccgggagcaggaggatgctgttgcagaagtgtcggtggcggcttgaggtggctcttatggcggacatgcttctgcacgtgtggagctggcgtacggggaggcgccgtgaaagct

SEQ ID NO: 597601 - DNA, 803 bp, Homo sapiens
aagggctcctgcgaagctgacctggggctctggaattatggagaacttcagaacttggcgaaaaagcttcaaagactattgtgtgtgaaaagtctactcattggtctgggggacgttgccttcttgcctctgtgatggctgataagggatacaagaagagaggatccacgtttcaacagagtcgaaggggacggcatggagcatgggcccagacgtccgcctcgcggtgggacaggaacagtgctattctattctggcagcaaatgatgacatggtattcatgcatgtagatgaacctgggagacgactgggtttggcgagcaaatcgtttcacctcaggatgatcgagggatcggtctattccaagtctttggaccgagcatctctacactaccacaggcggagagacggactttaccaaagtgacctcgctccggcgggcgtgctacgataagcaagcgtgctctcacgatagcatgattctatccagaaccatgatcacttttgaccgaaggaggaaggtggacggcgcctgaggaagcctgaaacagagtgaatgtgatgctacggcagatagaaagagagaatgagtgcaagcctttcatattcaggcgttcctgacacgtcatctcccagaaactgaagtgttccaatggccccactcgtcagagccgaatgccgtaggccatgtcattgtcatggtagcgtgggggatgccagtcgtcagtgagtggttcgagatgggtactctcagatgatgggggttactcctgggccaagatgctggggggcccatattaaac

SEQ ID NO: 597602 - DNA, 320 bp, Homo sapiens
tggaagacaggttccttgttgcccaggttagagtgcaatggcacgatctcggctcactgtcaccttcgtctcccagttcaagcaattctcctgcctcagcctcccaagtagctgggactacaggagtgcaccaccatgcccagctaatttttgtttttaatagagatgggttttcaccatgttggccaagctggtctcaaactcctgacccaaggtgatccgcctgcctcggcctcccaaagtgctgggattacaggcatgagccaccaaacccagccattgaaaaacatcttgataaaatgtctagtcatgattcttaa

SEQ ID NO: 597603 - DNA, 664 bp, Homo sapiens
  misc_feature (89)..(89): n is a, c, g, or t
  misc_feature (117)..(117): n is a, c, g, or t
  misc_feature (228)..(228): n is a, c, g, or t
  misc_feature (234)..(234): n is a, c, g, or t
  misc_feature (251)..(251): n is a, c, g, or t
  misc_feature (258)..(258): n is a, c, g, or t
  misc_feature (280)..(280): n is a, c, g, or t
  misc_feature (300)..(300): n is a, c, g, or t
  misc_feature (326)..(326): n is a, c, g, or t
  misc_feature (334)..(334): n is a, c, g, or t
cttgagtagaacctgcccctgatactacgtttgcccatttggatgctaccacatgtactgtcgcgtgacatagctgagctgggcatatntccagctgtggatcctctagactccacntctcgtatcatggatcccaacattgttggcagtgagcattacgatgttgcccgtggggtgcaaaagatcctgcaggactacaaatccctccaggatatcattgccatcctnggtatngatgaactttctgaggnagacaanttgaccgtgtcccgtgcacganaatacagcgtttcttgtctnagcattcaggtgctgaggtctcacangtcatatngggagctggtacccctggaaggagaccatcaaaggataccagctagattttggcagagtgaatatgaccagtcgtcccagaacaggccttctatatggtgggacccattgtaagaagctgtggcacaaagctgataacgctggctgaagagcattcatcgtgaggggtcttagtcctctgtgctgtctctctccttgcccttaaaccaagaaagcttcatatatctgtgtaggctgcacaagagccttgattggaagatagtattctttctgaacagtagtttaaggtttccaataatagatgtacaccccgtctagaaataaaaagata

SEQ ID NO: 597604 - DNA, 514 bp, Homo sapiens
agcaaatggacaaaatgccatagttttttagaatctaaatgtaatgccccccaagctaagggtcattaagacagggactgttttgcactgtcaaaatcctagacgctagcaacgcatacagctatagaaggtttataataaacagtcaggggaaaatgaatgaaaatagtgaattttatcaggaatgctgccatagaaacatttacaatgcctcattctaactggtttcaccagaaagtttaatgaacatgagctaattaagaaagccgaatccttaccctgggaattcagttctcaatgcctactaataggcagttttgacatgacagaaccacaactaaatggcactaaatgtcacagtgtacactttaaacctcatagccttagagtctgatgagacccagctacagtgaccaacaccctggattccaacactctgagggcctatatgggcaggatctacgataggctggctacagcatgctccatccgagatttgatcatgccgccggtc

SEQ ID NO: 597605 - DNA, 411 bp, Homo sapiens
  misc_feature (89)..(89): n is a, c, g, or t
  misc_feature (117)..(117): n is a, c, g, or t
  misc_feature (228)..(228): n is a, c, g, or t
  misc_feature (234)..(234): n is a, c, g, or t
  misc_feature (251)..(251): n is a, c, g, or t
  misc_feature (258)..(258): n is a, c, g, or t
  misc_feature (280)..(280): n is a, c, g, or t
  misc_feature (300)..(300): n is a, c, g, or t
  misc_feature (326)..(326): n is a, c, g, or t
  misc_feature (334)..(334): n is a, c, g, or t
cttgagtagaacctgcccctgatactacgtttgcccatttggatgctaccacatgtactgtcgcgtgacatagctgagctgggcatatntccagctgtggatcctctagactccacntctcgtatcatggatcccaacattgttggcagtgagcattacgatgttgcccgtggggtgcaaaagatcctgcaggactacaaatccctccaggatatcattgccatcctnggtatngatgaactttctgaggnagacaanttgaccgtgtcccgtgcacganaatacagcgtttcttgtctnagcattcaggtgctgaggtctcacangtcatatngggagctggtaccctcagggacctcaagatcagcagtttgcagggatataccttcccacaagctcttattgtggcct

SEQ ID NO: 597606 - DNA, 689 bp, Homo sapiens
agcggggcgttgaggttgggccatgctgatagataacgagaaaatagtttctttttactaagaaatcttctagacctatacagtgctaattctcatgaactgtcacagtataggacaaagagtggggtttaagataataatgaaaagtataaactaagtcatggggggtttataaatcttgtaaagagcaatttggtgtgtaattggcgttggctgggattagaagggaattgcttgtaagtttttctaagaactgggcattaatgtcaggagtgtgctgatacaggaccagaatctgattctctgtgtttgaagcaacaaggtttccctagacatgttgatcaactcttagtaaaacagaaacatggcaagaggtttggacttgtaagttctcgaaactccgagtgttcgttgtgaaagttttcgaaccatcttgtgacctacagccttttccagtgtgtgacagcttctacctaattctcaaggttagaagtgctgctgttcacttaacaatgataattacatgtgtttggagtagacttgttcctcttaacgcctttcagattcatatgcctagggattaggataatcactgcatctcactacgtgtgatttgcaggtcatgcatcattgcttgctgcttatccttccttagctccttgaaaataggatacatatttgcttaacta

SEQ ID NO: 597607 - DNA, 626 bp, Homo sapiens
gcgggactcagaggacccgtcagctgcctatctgtcgtggattatatatagaaccggatagtgaacaatggaatgcgtgaatgtagtcagctacagtactccgaatacgaagtcacagatcatatctatgactcagaaagctcagatacatcaacaacagtagcgagtatcagaaattaaactggaatggagcaaggaaaggtgatggtcaaacgatagcaagagtacccccatgccgtgcgagctaactgaagaatagcttccacagttgaactaatatcagacaactagcgtactaggaagtaggtgagcgacgtctggaggacgagagggctatcatagccacccaataggccaaatgcaacaggtagataacagcatttatccaatatgagagccgtccacttcatataatatcaaagtatgtgaaccaataggttacagaactaagagacagactcagtccaacccgcgctggactctcaggggccgctgacccaggggttacctacttctggattctggtactcaaccaggaaagtgtgactacatgcccagcggaaggagaaaagaagctttcaattgtaaaagcctagaattcagaatgtaccccatgtccactaaca

SEQ ID NO: 597608 - DNA, 138 bp, Homo sapiens
ctcaggggagcctgaaccctcaatacttgatggtagtttttcggctctgtcacctaagccattagactcttctaaaatcagcgtctcgtttgggaaatagatgatggagctcagggataatgaaaaccctgggacaac

SEQ ID NO: 597609 - DNA, 1774 bp, Homo sapiens
  misc_feature (701)..(701): n is a, c, g, or t
ttcttggatttcagttctcgattgtctgtgctcggtgtgtgtcttactcccttgtttcctccctcgggtgtggctgtgtggtatctttctccatctccttgcttgtggttgtgttcttacttcttctgctctcctatgtgggtcgtatctttgattgtcttattcatcgtctgtggcgttgctttttgttgctacttacgttctgtggttggattgtcttcgcgtattattctcttctttactgtttcttttctggatgtgcttatcttcggtcgttttattttctctgcgcgctcattatcttgtttctctagctgggtgtttcaatgtgtgtgtgtgtgtcccatgtgtgttttcctcgttggattgatctatctgtcctctctcttgtgtgttgatattttggggtgtggtattatagtattatattgttgtgataatatcttgtgagtaattgatatatatttgtttgtttctttgtaataaatgtgggtgtataatcgaatatatggttatggtgtctatgtcacacatcggtggtaaatggttaatctttatggaacattggtgtgtatatatttgtgagattattggggtatgtattatacttttgaattttcggtttcccatcggtgtataataccctgtttttttatataaatcttttttctgtgtttgtatatctaatatagtcgtggtcntttttttgctgtaatggttttcaatgtcccattgctccttcgtttgtgtataacttccttataacgttctctttaacgttaagtgtatatatttgtgttttactgggtttcagcttcggtaattttggttttacaacttcgtgttcggggtgtcccctgttgtctgtgtctctttttgaatgtggaattttttgtttggtgtgacccaatgtgttgtaaaatattaagcttgtgtttcacccatactcttgggatttctctcacttttttttagttttaaattcaagttctttcaataatttagttttgaatctttcatatctttttttaccctgtctctctatagtattataatatttatgcctctttcctcttactggtgttcattaactaaaagttaagttcatatgcatatctcttttgcactaacttcactcttttccatatttcttttcccttctaaattaattatggttaatttctaatgtgtgtctcttaactcgtaattaattttatccaccttctccataaagggtgagtgtagaaatagaggtactctattaacgctgaagtgtgtttgtcccatttccctaaagggccgtcggagatattgtctagagtagtgtccttggttagtgtatttctacaattgctagagatttgtttgatgtttaacttgcttagcgtgtgtcacacaaaagttacgctcgaaagtgtcattgtttacttgttaatatggggtgtacacactgttcaccactatagtggggagtgtctgattcgcctatacggcttaacatgactatcagctcggagcttgtgagcatctctagctgcatatgatcttagacagtacgttcagtataaacttgtcgctttttttcttgtgctgatctagagcgataagcagggaatcttgttaatgcattgtttgtatgggaagaaaaggtacatgtttactaagaggttataatgaaagagaataaaaattgacttcttgcgttgtacatataggagctatactattagtagttatgtagtccgtttacatacagcccccagctttaggtttt

SEQ ID NO: 597610 - DNA, 167 bp, Homo sapiens
caagatgcgcgcttctggcatccagtctatatgccatttgctctctgaaataacactcaaaacataacactcctctaagcttcagtgtccttataaaaaatatgggtaaacaatactggtcccgtgacatatgtgtaaagattgaatagtacataatatgctgtatt

SEQ ID NO: 597611 - DNA, 919 bp, Homo sapiens
  misc_feature (1)..(1): n is a, c, g, or t
nctcaggggtgttgttgagcgacgagtgcggcgagagttgtcctggaggggtcgttcttcggtcttgcggccgccctttctcgggggttcttttttttgtgatgcctgacgaccgcatgctccttcatgtgtggtgcctctccttcggctgcggtttgtggggaacgacaaagataaggggtgtgggggtgctctctcatgtgtggactgtgcccgcctagcgggaacaccactccctgggtgtttttgggtggttgttgtggggttctgcctagagcagtggtgttggggtcacgctgggggtggttgcccttggtgttgcccgcatggttcgcaccccacgccacgcaggctcacgaggtggggtgttgttcccgtccacgaccccacggttgtgatgtgagtgtctttgtgttgttgttgttgtttttgttgtttggcgcaggatgttcccagaggatttgtcctgcccattgtttccagggggtcttatagaagttggtcgagtaccagagtcccccagggtgactcgtccaggttcccagtccaagactgggttgctctgggaagttaaccccagcgtgttgctctaaaatacctcccgttagcctgtagatggtgtatgtacttagaagtattctttatagaggtgtatacacagattagaggtggaataggttttgtagtactccttagaatattcttctggtcaccctgtattcttcggcctccattttaataacccgttctttggaccgatctttttcccttggtgctcttttgcccttagactaccctctctaatatgtatgcgacacctcccttattaaaatgtatgggaatgggtttgagcctcggaaattatagtgaaaaggttggtggacgtttaaataccgttgttcccaatataaaaaattaa

SEQ ID NO: 597612 - DNA, 251 bp, Homo sapiens
gaggagtatatgtatcagagacagcgagggtcaggcgactggtactcagtgagaaggaggactacaggacatgggggctaagggatgctatctctcctgggaaggacatgctgacgggatagtggacagtgggccacagtgatagaaagtcctgtatagggacgcatattgtatcgggactgaataggacttgggataatgaccctggtagccctaaaagcctggcgctcctatgctttgagaggtagggg

SEQ ID NO: 597613 - DNA, 506 bp, Homo sapiens
ctccggttcgtactgcatccccagtcaaggctattattcgtccatcagcatcaggcagctgacagcgttctgtgggatgaagctgctcgagtactgtccttcctgtgttcccagggcgggtctcctcagtcgtgcagacgcctgaggcatcagtaccaaatccacgtgttttcagaaccccttcattgcccaatgtagctgttatcatacatcgcacagtagaaccgagcactcctgttctcttccattgtctgctggcctagtgtctctggcaggtccttctgccagtcgctaccgcagccactcctaccccaggacctacaccacggtccactcttggttccagtgaggcatttgcttctacttctgcacctttcactagcctccccctttccaccagctcttctgctgcttctaccagcaacccaaattctgcttcattgtcatcagtttttgcagggctccctttgcccttaccaccaacatcccaaggcctatccaacccg

SEQ ID NO: 597614 - DNA, 131 bp, Homo sapiens
ggagttcgagaccagcccgggtaacatagcgagagcttttctctgtactcctgtagaaaggtggctgcagtgagatatcgtctgtgaagatggcatgcaatgacgaggctgccaaggcactccgtgtgtta

SEQ ID NO: 597615 - DNA, 946 bp, Homo sapiens
ggccgatgctcgcgcactgggagcgctcgcgctcgggtatgccgcacccccggccggcgcatggccgtgaaggtgctcaccggggtcgcgttgccgcgggcctttcccagtaccacggcgggcgcctgcaagtcgttcccgtggcaggagaggagctaacgtttgtgtgctgtatcccttgcagttggaagcgcaaacaggagagattcgactctttctggaagccaggaaactctaatttcgacactcattgcttgtaatcccagcattttggggggaggccagggcgggcaagaatcaccctggttcggcgattttgaagaccaagatttggccatctttgaacgaaaatgtgttctcgctaacttaacaatttagcaacaattttacgccacggcgtggtgggcacccaccccttgtaattcataggcattacctcgggaaggcttgcgacacgcggaaatattggctttgacggcctgtgggacggccagagttttgcagtgacgccaggagaataacccccactggcaaacgaagatttcgggcccagaagagattctggcttgggacgacacgagttgcagcacttctgtctcacattactactttacgtcacattagaaacctccgtgtgagactaccctgtggttaatacggacttcccagattcactttacggagacataaggacatacagcattagggaggggggaaatattgtttggcaacatttcttagctagcgaacctattgtttacgacttgggttactaacccattcgcgaggacctgagactattctctacgtgcggggacggacatggccaaacgtgaggacaatcacatgagggacgtttgttccctctggcgaaacacactcgtttggagggtccgccatcccttttttcacccccgcatggtagtaaaagcagacagaaaggccg

SEQ ID NO: 597616 - DNA, 247 bp, Homo sapiens
  misc_feature (54)..(54): n is a, c, g, or t
  misc_feature (56)..(56): n is a, c, g, or t
ctggaccccagcggcagacgatgggagttcccgtcgtggcgcagtggttaacananccgactaggaaccatgaggttgcgggtttggtccctgcccttgctcagtgggtctagatcatacacagggccatttcatgagtgatacactccactgtcctcaataaaattggctccagtgacccaggggaaggtgtgttctgggccaaaggtgagacgatcgcatcgtctgccgctgggggatcctctag

SEQ ID NO: 597617 - DNA, 450 bp, Homo sapiens
agatccctttccatccttcctttgtttctttttgtttgagacagagtttcgcgtcgttgtaccccgaggctggagtgcagtggcctgatcttgggtcactgcaagctctgcctcccggattcaagcgattctcctgcctcaggctcccgagtagctgggattacgagcacacaccaccacgccctgctattttcacccggctaattgttgtataatcactagagactgggtatcgtcatgttagcctggctggtctcaagtctttacctcgagtgatccgtccaccttggactctcagagtgctggcattacaggcatgaccacctcgcctggccaagaaaaatgttaccttgtaaatagcacagcgttctcatactggaaaccgttgcaaagaacataaagtacagctgagttacatgttacaaaagatgccaacaaaatatattcaag

SEQ ID NO: 597618 - DNA, 206 bp, Homo sapiens
  misc_feature (184)..(184): n is a, c, g, or t
cgtcgcaagccgatgacgatgaggacattccacatcttttactacatcattgctggagccaaggagaacgatgagaagtgactttgcttttcggagggcttcaacaacctacacctgtccatctccaactgagggtttgcgcccaatccctgtcagtcccacggatgactggagagtgttccangcgacaaccgctggtagggccg

SEQ ID NO: 597619 - DNA, 361 bp, Homo sapiens
tgagagcacacaccctacgaagacatgtacgccaccttgacccaaacctacagtgccgtgcagataggcgacaccctcaaggagaacctgcgggccagccagcaaatcgttttgtctggcggggtggatgacgatgggctgttcactttcagtttcgacgatgagcgttatttgccctttgagggtacgggcgctatttcaagctgggcgttggaattcacctcgactgacgtcgcggcgcggaaccgcctgttcgaatcgctgaccgacatcatccttaagctgcactacacggccaaggcttgctaggaggaggcatagtgaaccatgacgagtcgttgcatatcgccgcgccgtccct

SEQ ID NO: 597620 - DNA, 468 bp, Homo sapiens
  misc_feature (108)..(108): n is a, c, g, or t
  misc_feature (184)..(184): n is a, c, g, or t
  misc_feature (391)..(391): n is a, c, g, or t
  misc_feature (393)..(393): n is a, c, g, or t
tcagctacctcgtcgatcagtggcgctggagggtatttgatggaagcatcaccaaggagaactataaccaggagtggtggacctcaggctgaagtacccagcctctgncccccagtgcccaggactcaaaggtgactttgacccaggggccaaagttccacattccttcttagcgtgccttacnatcaggtactttgtcagcttcatcatccagttccagttccacgaggcactgtccaggcagcatgccacacgggcccccatgcacaagtgtgacatctacccagtccaaggaggccagggcaagcgcctgcgaccgcccatgaagctgggcttcagtaggcagtggccggaagccatgcagctgatcacggccagcccaacatgagcncntcggccatgttgagctacttcaagccgctgctggactgctccgcacggagaacgagctgcatggggagaagctgg

SEQ ID NO: 597621 - DNA, 731 bp, Homo sapiens
  misc_feature (190)..(190): n is a, c, g, or t
atcccaatcaaggtatagatgccgtcaccccaaaaatcaaacgtgtacccttaaaatgggtatattttattttataaattatactgtcgtagtagaaggtatgttactgtagtaattgactctttgaacaggtatgtgttgagtcattagctctggcccttgtgtgtaatttggagaagtactttctggnttctagtggtaccaacatgggtttactctgacaagactgtgtcgtgacagatctccgtaacaaattcctttactacggaaggtataattgataaaagtaaagatatacccagttttaagggtgacagtctcgagtgattagagcaaggttgaaatctatgaatcccaatcacagggtgatcaggactgccggtctagaccctgtgactagttccgatccagtatcccgattggcaggtcgagggacagttccgctagcctcgtggatcctacgatgatctagcgtgatcattgtacattatatgactcagcttgggctcagattcactggaaagattgtaacatgggaaaatctaagattagttcggtgaagtcaatctcatttgtgttaattacattctagtatcctccatccctctattagtcggaggaatgtcactccctagtagtgaggtttgagttggtttgacaccgtaagtttacatttgtctataaggtataccaatagtgtttacgtaactactccatttcaagaagcccta

SEQ ID NO: 597622 - DNA, 460 bp, Homo sapiens
gagcatgtctcattacactatggtcttaaaaaagcaaaaatgcttaactatcagcatgcgcaagcattcacttttgtcaggtagaggccctgcttcttcatgatcttcagttatagatctaacaaccacaagagaagaagctggatatctgtttagctatatgtatcattcataaactccaagtcaccatagatactcagcttctcagagggaacatactgctccacagctgtagcaacagttgcacaacaaatccaaagcaataacatcaccgagaggacaaagagttgtagttaaaatccacccagagttaagagagaggcatcttaaaaagccatcactttctccatcttcaagaaaattcctgtgcgcatgtgacattactcatttgcagataggacatattgcttagagatgattctctcaaatttgcaggctcctgctccacatgtggtgcgta

SEQ ID NO: 597623 - DNA, 102 bp, Homo sapiens
ctagctcggtaccccacctaagcctgattcacgccaacctgcgtgatagccattaacgacttcttcagcctcacaatttgcatatacttcaccaaattttag

SEQ ID NO: 597624 - DNA, 724 bp, Homo sapiens
cgtggtgatgcatgcctgtaatcccagctactcgggaggctgaggcaggagaattgcctgaacctgggaggcaaaggttgcagtgagccggcatcatggacatccatgcatcatcgcagaccatagcgagactctgtggtggataccaatcatcaaaaataaaataaaaattttatttaatcgggtttggagcaccaggaaatacgtcactttatgatagcccccaggaggtggagaggatggcgaggtggcgcgccgaattcgtcagaggcgtcaaacatgtcgagaccctatgagggaggtcccaagagatggaaggaggcaccggtggcatagtagatacacaagggaccgagtgaggaggtaggcccagaggcacaaacaagaggtcccaagaggttaaaccacagggcacgagagtctgtcaagtaacatagcctgaccgaatgaggtgaggcagacatagggagagggaaccaacacacgcaggacggggaaacgcatacacaaagagaacgctgcagagatcatctccacagaaagtgaacgatcacaccacaagttaactccaggatactacagcacccccaagccttggggggggggaccacgcggaagagaatgacaggagggaaaagacgtcacatagaacgcgaagacgaacgggcaaaggtggagcacagaagaaaacgccgaataaaaggcaacggaaggcaacaaacgg

SEQ ID NO: 597625 - DNA, 219 bp, Homo sapiens
atggaagaatgtgcatcgtatgttatggaagctcctcagcttaccatggggttacgtcctgataaaccattgttaagttgaaaataccataggtcgaaatgcatttagtgcacctaacctaccaaacattatagcttagcctagccttttttaaatgtgttcagaacacttatattagcctacagttgggtaaaatcatctggcagcacatcttccaat

SEQ ID NO: 597626 - DNA, 208 bp, Homo sapiens
  misc_feature (101)..(101): n is a, c, g, or t
agacatgacggcagcagggaggagaacggcgaaccgccgcgcatggctggcagggctagagaccgccaagacaggggggatggagggcccgggctgtcggncgggtctccaggggtaggctcaatatcgaattctggtgacttctgttttgctttgagcagggcgagtctgggcggtggcttggtgggggggcgcgtagaggggtctg

SEQ ID NO: 597627 - DNA, 746 bp, Homo sapiens
agcggactaaaatttccttaaatgtctgcagagaaaagagaaaatggtcatgtctcaggtaagactcgtgtgatagatgctacagggaaagctgctccgtgcccagaaggctgaaaccaaggaagtgtctgctccagaccagcaccaaacacacgaatcccagagattgtatggtaaaagttcctatcagccctgtgtacagccagctgtgcctaagaagcatatgtaatgctgattcccaataggctgaagtatgggactgacggaactgagggatacgtggctggtatgtactattcacttatgaatgatcaccagcgtcgtccctggattgctcctgtatttgtttaaggtgtacagtcaggttctagagatccaaagtagtcggtttcaatcatttattcccactcaatgggttgcttgggtggaagtacttatacctagaacttcttgccagaccatttcgcctaaagtctctgtcttcatctgtatttgtatctttttgaaaaatttgttatttcatctgtggatttagatgtcagatttacaaggatcttgtaagcatttgaaagttataaagaagtaaagtgtacggtattcttgtaatcttatttttacattaacattttttattaaataattgttaaagtttaagactttatcttgtattaacgtatatgtatgatgaggggtaggtggctcccgaaatcgtgattgtgatgttggaatttctttcggtgtgagac

SEQ ID NO: 597628 - DNA, 849 bp, Homo sapiens
  misc_feature (32)..(32): n is a, c, g, or t
ctgggggagtacgggcagatgcagaccgaatngaaaatctgccgcatcccatttatttctttgtgcttttccagtcacttatatacaattacaataaagcaaatcattctctatatttttgttaaatcatcacaaaatgtatgtttaaaaagtagtttaagtttactagaaagtactatctcaatagctgtatagctaacttatgtaaatcatatttatgctaattgaagaaaatatatttcaccttcaggatattgtattcattttttctagccttaatagacattttataaatactgacactggggataaaattactgcatatattatatttacttggggcttcgcaggagaaaaaattgatttgcaggcacatgcaaacattctggcattttttgagtcaatcctcaaactatctgggatgtaaccatctttacttagttataaaagaaacaagattgggggtttctcataattcgggaggtgttatggacgaccccgggcggaaagaaaggaatttggatttgatataatgttttgctctttgcatgaattataagggattccgcttgatttgagggatcttctgtcaagcctagagatcatgtctatacctaatactcgttggctcgtctttaatgcgtatttaaacctaatctatacctctatcgactatcccgagtatttttccgtgcgctgagctaagcaatttactaattgttgtttataggctgcggtgatacttatattgttaatcgatttgcaattcgaaagaatatagtgataagtatttttcttctagtgaaattgtccgattatactgttactagtggtggattatggtgccct

SEQ ID NO: 597629 - DNA, 339 bp, Homo sapiens
  misc_feature (48)..(48): n is a, c, g, or t
gcacacggagtctggctttgtcgcccaggctaggcgtgcagtggcaantcttggctcactgcaagctccgcctcccaggttcacgccattctcctgcctcagcctcccaagtggctgggaccacaggcgtgtgccaccacgccagctaatttttgtacttttagtagagacggggtttcaccgtgttagccaggatggtctcgatctcctgaccttgtgacctgcccacctcggcctcccaaagagctggtattacaggtgagccactgtgcccagctggaactttaagtgtattataatgcctaaacaatgtccaggggtctcgtgcttaaggcagac

SEQ ID NO: 597630 - DNA, 84 bp, Homo sapiens
  misc_feature (73)..(73): n is a, c, g, or t
cgaagaggcaacgcaaggcaggcagcgacccggcaacgggaagagaaggagaataggtattctgagaaaggangcttaagtttt

SEQ ID NO: 597631 - DNA, 175 bp, Homo sapiens
tgcgcacggagggacttattctgtcacagccgagctggactgtgggcaccaacctgggtgagcacccttctcagcagggggggcgagagattggggaaacagctgatccggccctctagctccagctgtgacgtgtcctcatagaagagggtaattctccccagggtgcgggggg

SEQ ID NO: 597632 - DNA, 1331 bp, Homo sapiens
  misc_feature (1063)..(1063): n is a, c, g, or t
gctcagtgtacattggtttacatgttccaagaatgattccacccattggcaaattccatggtagcgtcaaggctgagaacggggaagcttgtcatcgatggagatcccatcaccatcttccaggagcgagatccctccaatcatcataggtggcaggcgatgactgagcgctgatgatacgtcgtggatgctccactgtggcgtcttcactcaccatggtagaaggctggtggcttcattttgcatgggtggtgacgctcaacacacgggttcggtcagtctatctgactccaccgtctgcatgacctgcccacctagtgatgtcgtctccactgggggtgtgcagagccgatggaaggacacgctaattggacgaaacaaggccgtccagagcaatcgagtcgagtgcaagtggctcgtctcgtggaaaaccccaaacaaaacatggggtctaagaagaaccctcgcgtgagtcgcccacagggttcccatacaccgagtagagaacaacacacgttctttgaggggtaattccaggtggaggccactagggtccacgttctcaatttgacaccttcaacgaaggttcgccgcaatttggcgccaaaattacggagaggttgtcgccgaaggccccgaaggaaaaattgattccaattacccacctttgccacacgttttcattattcggtagggcggccacgtcatttggccccaagaagggggggcctttgtggtttggtgggtgtccccaccacccgtgggttgtcgagattggcgtccaccggtgggttagagagccccttgggaaaagcccggggtgcgcatagagggccctttccgacctcctcggggggggcgcaatttggggcccccctttattcccccggttgggttgtccccccatccaaacctttgtgtcaccacaaagaaacagggggtttgtgtttcaacagggccatcggggaatatggcggaccccacccgttttgtaaccctcggtttaggccccctcggattaccgttaaagggaaccaaaaaaacacatttccgtgtgggcgcncaccaatagatttacgttttgagaaacttcggaaaacgaggttccccaccaatcgccaccaattgtggggtcagggcctctcagagaaaaggcggccccatttaggagggcgcggattcacacgaggaaaaggggggggggaacccccggccgccgatttccacaaagaccgcggcgggtgtcgacaactgtttccccctttgttgtgggtgggcgctttaaacacaagaagcggtctggggcacacagagccatgacctgcagaagg

SEQ ID NO: 597633 - DNA, 916 bp, Homo sapiens
ttctggccccaatatgaaatgtggtttctcatggtgaatgtgccaggagatcccccctagcccttgtgtgacccccaacacaatctgtggtctcccaaaagagaggttggcgtgcccattacccacaggtttacacggtaacacacaaggggggagaatctcttggagggaccccgacaccatggtggcccacggagaacgtgtgataacatgcggcgctttattctccccacagagcaacgctgtttgtggccacacccccacagttgcccccgctggttttcgcgagaatcttgtgcgcctcggggtcgccactgctcaccttctgtcccaggagaccccggaagaacaccctgtaagagacccgttgccgcggattctctggagaccacaggggttttctccgcggctggcggtgaccactctgttttcctcaccacaggcactctgtgggtgagagagattccgcgcgctggctctatagtgcttccctgtgaatcttctttcacaagagaaaagaaatttttacatgtgggcgctatatttcccccactgagaccacgcgggccaacttttgtttcataacggacactatccgcggcgtggttcacttttgcccacacccgcctcccacgggttcctcccacagcgggaacctcggaggacacgcgaggccacacgccaacgacagggattggggggtaagtgggtatacaccccggctgggcccccccacaggaggtcaccacagaagagggcccccccacagaagaactcggggaacacacccttttgaagacaggggcccccgggggcatttcactgccccgccacatgtggggaaggggttcttaggcctccaaaggcggttcccacccctttaagttttccccattaaaccctttttaaaacccca

SEQ ID NO: 597634 - DNA, 192 bp, Homo sapiens
  misc_feature (6)..(6): n is a, c, g, or t
  misc_feature (95)..(95): n is a, c, g, or t
  misc_feature (169)..(169): n is a, c, g, or t
  misc_feature (188)..(188): n is a, c, g, or t
taattntcctctttaacattaaaaattggctctccctctccctctccctctccctctccgtctccccacggtctccctctccctctctccacggnctccctctgatgccgagctgaagctggacggtactgctgcctgattctcctgcctcagcctgccgactgcctgnaattgcaggtgcgcgccgncacg

SEQ ID NO: 597635 - DNA, 233 bp, Homo sapiens
ccagcgaggggcacccttcctctgtgccccagtgggattcaccgtcgatctcgctggctgaatgaagaagaccctgttactgcagaacctgccaagtctgtcatcactgcttggggtgtagcctgcctcagagggccctccaatcacctctctgagctcaatggttattttgagatttaatttttaactttcacccttcccctcaggagatttaacatttttgggaatgtatt

SEQ ID NO: 597636 - DNA, 509 bp, Homo sapiens
  misc_feature (103)..(103): n is a, c, g, or t
ttattcccaccacccaaaggaatctccacacacttaaccttctcattatcttatgattattataatatccctattttatatatggactgaggctcaaaaaaangcagagctgcctatatagaatcagacatagaacaaaatcaaagccaagatttactataaacagttattgattttggtgttaaaagcattttgttactaatgagaaatcaattctaaataatatggaggtcgggtgtggtggctcatgcttgtaatcccagcactttgggaggtcgaggcaggtggatcacttgagaccaggagtttgagaccagcctggccaacatggcagaatcctatttctactaaaaatacaaaaattaaccgagtgtggtgacaggcacctgtagtctcagctacgtgggaggctgaggcaggagaatcacttgcacccaggaggtggagggtgcagtgagcggagaatcgtgccattgcactccagcctgggcaacaagagtgaaactctg

SEQ ID NO: 597637 - DNA, 461 bp, Homo sapiens
ttacttgaacacggtatgaacagtaggacacataagataggacagaagtaggatgaacactcctagctatatgtagcaagtgaatatcaactacctgggtttgctatgtacagggcctcttatccctctgttaccattccttggtaaatacatggaacgagctttgatatatgagcccttttctcgttttggctttcctctacctcaggcgtgctcctcctcatttcatttctgtcacccttactctgcttgactggtcaatattagcgaacctcacatagctcactcctggatctttctctatacattcttcctcggtaatcttaccctgcccatgtgccttcatttcaataggaactgtgaaacaatgaacatcagacgataatctctagcctctgcccctctcctaaaggacaagactgttatcaattcatctaaaaaatatatctactcaacaactg

SEQ ID NO: 597638 - DNA, 1225 bp, Homo sapiens
tggtgggtgttgtgtggttgggggttgcgtcttttcgactttaggtgctggtctggtgttgaaggggcgttgtcggtggtcgcgtgctgttggtggggcctgctcgctcggtggtgcgttgttgcggcgtcgcttgtgtcgcggggcgcggggggggggggttgctagggggaggggtttgtcacgaggtggtggggggagtcggcgcgcagtgtgtttccgcggctcgttgttgtgctcgcgtggtgagttcggctctggtgtgggcatgttcgcccggtgtgtgggggggccggtccggcctgtgcgcccagtgttgaacagcctgtgggtgtggcggtccaggccggttgcccccgtaggcgcgggggcaaagggggtttggcgcatgtattccagcgctggggttgcgctgtagtttgggggggacccgtggtgtatgtagagtgggggggtgccgcagcgcgagtgggggtttccaggcgtgttggcgttcgtgtaaccgttttgttagcccgcggttgtaagtgttggggcgctggcccccgtgagaggagggccggggcacatggagctccctggcgatagtgcggaggggatgagccccgtgttggggagcgtttgatatttgttatgtagatcggccgagccaggtgaccgtgtaccgaagcgcgccccagtgtctcgtataacggtgtcccgaaccgctgcatgtggagaaagttgtccggtttgtgggcggagccctcggagaagccaggagacacccaacctctcctgagcgccagtacaaatgcttaaagagctgttctcagcccagtgccaaagccggactgactttaacctccaattgatacccgatgaacttggaccctcacgggcacccagtttacccttagggataaaccaggcgccaatcgcttatttcttagagtcccataatccacccatagggtttacgagcctcgaatgttggatcacggaacactcccgagtggtgcacgccgctattaaaggttcgtttgttcacacgattaaagtcctaacgtgatctgagttcagagccggagtaatccacggtcggtttctatctacttcacaattcctccctgtacgagaaggacccagagaaataaggcctacttccccaagcgccttcccccgtaaatgatatcatttcaacttagtattatacccccaccccccccagaacccgggtttgtta

SEQ ID NO: 597639 - DNA, 310 bp, Homo sapiens
actgaccagcagtatacagactcaccaagcacagacttgcttccacaagcacgtcttaccttagccacgaaggtcccaaagccacacggtctaaagggttgacccccaaagattatgtccggggtataaaacaaattaccagggggaccagttacctccaatacaaggtcaaaatcagcaacaggtcctacaacccagtgctgatatcagatacaagctccagggccaattcctttcacgaaggctaatcccagttccgtgaggctagcatgaggtggtgtgcatttcgcaggggcgaattccaatcctc

SEQ ID NO: 597640 - DNA, 641 bp, Homo sapiens
  misc_feature (26)..(26): n is a, c, g, or t
  misc_feature (537)..(537): n is a, c, g, or t
  misc_feature (588)..(588): n is a, c, g, or t
  misc_feature (640)..(640): n is a, c, g, or t
ttcctttatttattagaaattttctncagagtagcattcagggtctttggagaaatgatttagaaaatgactcctgaaggtagagtttattttatgaaaaaggatttcagaaaatgtctttagaccctggtttacagaaaaatctacaaaaaaaatcaataacaataatagaagtatgtagtagattactttagcccttctttattaacaattttcactctgagatgacttgaaatgccttataggaaacactgataaaaatcagactggcaaagaccttggcagatatagtcaatataacatttggatttgagctctgtggtaggcaaagaagagtatataaatttacccaaacatatgaaagcaggccacgtgctttcagaggtaaaaacttaactccagtttttaaggcgaacttctaaattttgtcttattacctgtttgacatcgtaaaagatttagaggtgaaagagtatccgggaaattttagccttaaagctgcccatcaggaccaggaacccagagttgcagctccgnggtggctccgggctgcccattgggatacccggggattagagcctgttagcncagtggtcctccagaaccttaatttccccaagagagtccgataatgggcccnt

SEQ ID NO: 597641 - DNA, 185 bp, Homo sapiens
actagaggtccctttgttgaatgaagtgaatcaatcactaactctgtgatataccaatatatcactatgatgtgcttgtgtcattgcctgtattgtacttggaaataccttcatcgagacaactagtacggtcactagccctgaccagctactttacagatactctcaactgacctacggtgtac

SEQ ID NO: 597642 - DNA, 202 bp, Homo sapiens
gtccaaagcgtactaccagttactgggactacggcatcacctcacgcccgctattttaatatttcagtagggactcgctttcatccatgctggccttaagtgatccgtccgccttggcctccaaagtgctgggatttcaggcaagcttcaccacacccgacccctcactagtatctcagcatctgggtactacgctttggca

SEQ ID NO: 597643 - DNA, 239 bp, Homo sapiens
ttataactgtggtgtaccgttactgtgagctgtggtgtaggtcgcagaacggtcagatgcacattgctgtggtgtggtgtaggccggtggttacagttctgattgcacccctagcctgggaacctccatatgccacgagtgcagccctgaaagaaaaaaaaagaccaaaagaaaaaaaaaggcagtctccctttccactccagacacactgaatcagaatcttctctggaacaaggtcc

SEQ ID NO: 597644 - DNA, 331 bp, Homo sapiens
aaacgtgtcgtcattgccataagtcctggcgatagcgttttgcacaacttcctctggcgaatcatccgcaaatcaccgttgtagatggcggtgatgagcgtgccgattccgtgctggcaggtctgaaagccgctggcgacgcgcagtgggtattggtgcatgacgccgctcgtccttgtttgcatcaggatgacctcgcgcgattgttggcgttgagcgaaaccagccgcacgggggggatctcgccgcaccagtgcgcgatactatgaaacgtgccgaaccgggaaaaatgccattgctcataccgttgatcgaaacggcttatggcacg

SEQ ID NO: 597645 - DNA, 715 bp, Homo sapiens
gcatttctttatgcctggcttgccccgtctcagcagccgtggaagccgagcgagtatcgagctctcacagggccggaactcacccaggaggtcttcgatgccaagaacatgatggctgcctgtgacccccgccacggcgatacctcaccgtggctgcgtgtcttccgtggtcggatgtccatgagaggaggtcgagtgagcagatgcttaacgtggcagaacaaggaacagcagctactttgtggaatggatcccctgactaagtgtcaagaacagtcgtcctgtgacatcccacctcggtgggcctcaagatggcgagtcaccttcattggtcaatagccacagccattccaggagctcttctgagcgcatctcggagcagttcactgccatgttccgcggaaggccttcctccactggtacacaggcgagggcatggacgagatggagtgcaccggaaggctgagagcaacgtgaggcgacgtcgtgtctgagtatcagcagtaccatggatgccaccgcgatgaagtaggaggaggatttcggtgaaggaggccgactgaggagggctaatgcagagcccccatcaactcaggcttctcagtcccttggcgtttactcagactggccctttcctcttcgctcagaacttattggacctgatgagatcgtcccgagtagcccgattgcatgggattggaaaccagggaggcaa

SEQ ID NO: 597646 - DNA, 113 bp, Homo sapiens
acgcagtggtcgctcacgctccagaacaccagccaggagagggaggtctcggtctaggacaccaagacgaggaagaagactggggaagtttctcgggagacttaggtggtgaa

SEQ ID NO: 597647 - DNA, 671 bp, Homo sapiens
agacaagcttcacccaaagccactttacccataataaagctataggcgatacaaattgaaatcctggcgcaagtagatatagtaccgcaagggaaagatgaaaaagttataaccaacgcataactatagcaaggactaagcccctagtaccttctgcataatgaattaactgagaaataacttgtgcacaggtagagccaagaggctatagacccccgaataccatgacgagctatcctatagtaacagtctacatgagagcacacccgtctatgtagcatagatagtgtggacagatttataggtcgaggcgacgaacctaccgagcctggtgatagctggttgtccaagagtagaagtcttagttcaactttataattggcccacagaaccctctaaatccccttggtgaactttaactgttagtccaaagaggaacagctctttggacacctaggacaaaaagcctgggtacgagcagtagtaagaacaatttaacacccagtagtaggcctaaaagcagccaccaattaagaaagcgttcaagctcaacacccgactacctaaaggatcccaagcatatactgaactcctcaggaccgattggtaccaatctatcagcctataggaagaactaatgttcgcctaagtccacatgaagacgtttctca

SEQ ID NO: 597648 - DNA, 984 bp, Homo sapiens
ggccgtcctttgtttgattttattttttctgaccagaagcgcattatattaccaaaccaattatatttcttagagttcaaaaccgttcgtggtgagaaatcgttctcgtggccgtggtgggagaatccacctttcttcttatatttttttggagaacgggagttttggctctggtgtggctcaggagtggaagtgcaacgtgacggtaatctctcagctctccagcgtgaacacctctctgtgcctctccagtgggttctcaagtgtgattcctcctgtgccttcagccctccggaagatagcgtgggacttatgaggcgtgtgtgtgccaccagtgccgtggcttaattatgtatggggttattttatagttaagaagacacagcaggtttcctctcccaagtgtgttggctcagaggctgtgggatcctttaaaactctcctgtgcaccctccgaggggtgcatcccgccctgtgcccttttacaaacaacaagagtgtgggtggagaattttacagggtcgattgtagaacccacgcaagcgccccgcggccagaggggagaactccgagactcttcgtatagagcccttccaaactcttccaaatttttcagaaggatacgtggggggggttcgagagtattaaaggtggattaagcgggaagcgttaaacacaatttctttgcgccggtcgcgttgtggcgtgtaaagtctatcttggcccaatcagaggaaatgtgaaagggcaaacccatggtgtgaaatgaagggtccccaaaagttgacacctctgaggaagttcgtagccaaaaacgttctttcatcccaaaggcgcacacagactgggaaaggaaccccgtggggccctcaaaaacctgggcaaaaaccccggggggagagaggcgaaagcgagccaaccactcaccagggtgggatcccgaggacaaacagagagccaggggacaccaacgaagtggcacaa

SEQ ID NO: 597649 - DNA, 82 bp, Homo sapiens
agccaacgcccctaccctttaattctgcctttttcttccgttcattgtgaggaaaaataaaactggttgagaaaaaaaaaaa

SEQ ID NO: 597650 - DNA, 106 bp, Homo sapiens
tccgggcataccggggcaaaaggaagccccaagggaagcccgcagaaacaggatgttgaaaagaaaaaatgaaagccctcctggggacttggaatcaggcggcttc

SEQ ID NO: 597651 - DNA, 744 bp, Homo sapiens
gcgcctcgccgccgtaggccccactggatcctacaactacttattccctcttttgctcacgcacctctgaagaactgtgtgctccctgctgggaagctgcacggggctgcgctaactgaagcgaaaggtgcgcggtcccagccgcgggatccctgctctacagtgcagctgtgctcctgcacgacccgtggccctcgcagctgatggctgagtgctgcacatgctgctggtgtgtgtgcaacttcgcattcaacccctggtgctgctgtgtgctgtggctgcacgcacttgtctgtgctctacctgtacctggtctgatgccctgatgcccgtgactgttagacttgtcaacctgcatccacatttgcgctggtcctgcctgttctgtgatggtgcttgctgctgcgtgtgtgctttgcttgtgacttctctgtgtgaccttggcctgcgccgcaacgcacttattcggctcgaatttggttgcgggtgcacttccagactggcgtgtctaatccttattcgacggtggacatttgtccgggactatccgaccgacgctgaagctctccacagttggacacgctggccgtgtacggcccatttggcgtcgctgtctgatccccaccacgggaagcggcaccgcacttgtgggcgccttgaaggggatccttacccacttttggacccccttggtatattccactacggcagaaacccacgggacacccccggataccgggtcta

SEQ ID NO: 597652 - DNA, 392 bp, Homo sapiens
gatccggtgacttctgctctggagtgcatgatactcagtaagggcatttcttttatcatcagcaagggtaaaaagacagctggaagctggaggagtcacctgaatttctggcattcaacttctcttctgtggcacaaagcacaaaataaggagggatgttcctgcggggtgtgtatctgcacaatgctgcaacctccttctccagaaacttgatgagcagagcactgaacagggttgagctcccaatcaccagggaatcctctgggtacacgaacagggagggcctcaggtaatggtgtttcttcagcagtaccaacggcttgaaacccatgagcatcaaacctggatcatcaaaccgttttagctcttctgtttcctcctttctccagtat

SEQ ID NO: 597653 - DNA, 167 bp, Homo sapiens
  misc_feature (25)..(25): n is a, c, g, or t
  misc_feature (49)..(49): n is a, c, g, or t
  misc_feature (117)..(117): n is a, c, g, or t
  misc_feature (134)..(134): n is a, c, g, or t
  misc_feature (149)..(149): n is a, c, g, or t
cagaagtcaccttctttcgtgaatnttttgattccctgaggctactttnttttggtatggctgaaaaatcctagattttttaaacaaaacctgtttgattcttggttctgatatggnctaggagagagactggntcaagtaagcttatntccctgaggctgtttcct

SEQ ID NO: 597654 - DNA, 805 bp, Homo sapiens
  misc_feature (18)..(18): n is a, c, g, or t
  misc_feature (108)..(108): n is a, c, g, or t
  misc_feature (122)..(122): n is a, c, g, or t
  misc_feature (126)..(126): n is a, c, g, or t
  misc_feature (140)..(140): n is a, c, g, or t
  misc_feature (142)..(142): n is a, c, g, or t
  misc_feature (163)..(163): n is a, c, g, or t
  misc_feature (169)..(169): n is a, c, g, or t
  misc_feature (172)..(173): n is a, c, g, or t
  misc_feature (191)..(191): n is a, c, g, or t
  misc_feature (196)..(196): n is a, c, g, or t
  misc_feature (215)..(215): n is a, c, g, or t
  misc_feature (217)..(217): n is a, c, g, or t
  misc_feature (226)..(226): n is a, c, g, or t
  misc_feature (270)..(270): n is a, c, g, or t
  misc_feature (300)..(300): n is a, c, g, or t
  misc_feature (302)..(302): n is a, c, g, or t
  misc_feature (331)..(331): n is a, c, g, or t
  misc_feature (337)..(337): n is a, c, g, or t
  misc_feature (349)..(349): n is a, c, g, or t
  misc_feature (383)..(383): n is a, c, g, or t
  misc_feature (414)..(414): n is a, c, g, or t
  misc_feature (418)..(418): n is a, c, g, or t
  misc_feature (434)..(434): n is a, c, g, or t
  misc_feature (449)..(449): n is a, c, g, or t
  misc_feature (470)..(470): n is a, c, g, or t
  misc_feature (518)..(518): n is a, c, g, or t
  misc_feature (524)..(524): n is a, c, g, or t
  misc_feature (532)..(532): n is a, c, g, or t
  misc_feature (536)..(536): n is a, c, g, or t
  misc_feature (563)..(563): n is a, c, g, or t
agattccaattcagatcntggagctgggcctgctactcacctccccagtaaatgtccaggcagcattggacagagaggctggccccgccctgacgggggctgaagaanaggcccccagcagncttnttgttgggctactnancacttcagagagttgggaggncctggnacnnttgccccagatccatgtnccttntgtttggggtacacctgantngcctctaanagcaactgattggtacaaagagagaatccaaatgttggcatcanaaaccttaagtatggagcagggagcaagtncntgggggatgtttgccccatcttataaatnaatagntctcgtaatgtntctggatttttggagatgggaagaaatggccaantaacagcatcctcattcccaaatctactganaacnaactacggtggaaaanaaaatcaggggatgnatgggtgtgcgcctcagtttncctctactgcccccaaactgactaatccaggagtttcccaaaagggangggganatgagganatangcatgcaaatgccatttggagattttnagctattctggccattatcccatttcagagcacaccagacaggaagggcaaagaggtcccatcatgagtgccaaattgattggtactggctgcccagaacactgtgctgggaagaattctgacatcacccatgtgctgcacttgattggtgatgtctgccatggtcacagccattcaccatccctcatcttcaagctgggctgtcccctttccctgaaccagagacaattcaccagcctgga

SEQ ID NO: 597655 - DNA, 930 bp, Homo sapiens
gaaggaacgagagggcggttctctggatgctgattgccgttcgctgtgccctaggaggccgagctctgtagcttcctacatctccatggtgtcacacctggtcatatctcaggatgcttcagcgatgcgagctatcccagaatggttgtcggaagatgcacgctacatacaactggtggaccgagtccatccagtatctggtcgtccaaggattgcatctcaaccaacatgagagctcaggcgagagtggtggtcaagatgtcctagctaccgtgggatctgattcgcggctgcttatgtgaatcctctgctctgtgactgagtagtattccctggtttgcagccctcacggcttcatggtcattggggcattggagcaaggtggtcagtgagtattgtgcatgggagaatgcccttggaaagagagctggcgatggcaagggcttgcgggacttacacgcatttagcgcttgagcttgtggtaagatatattgaaactatcaaggatgtgggcatttcgagaaagatgtcgcagtgttgtggaacgcctctgagcttttgggacttcatacttggcagactggatgtatgctctatgccaacttgttggtcaggccattgagctgcacataaggaagaaataccgatgagtcattgctgacagctactatcttatgacaagatagtttcggactgatctaggggaaggtgggaggaataattaagtggagatgagtgatttcgcggaaggggttgtcccggtgtgtgaatacgtgtactagatgaatagcttgcgataatttagtgtaaggaaaattattaaatgggtggaatcttgggggaaggcggaactcatgaaaatgaaaagggtgaaccaaggaccggtaagggaagagggaacaagggagaaggaaggtttacatttatatg

SEQ ID NO: 597656 - DNA, 1047 bp, Homo sapiens
agcggagtttctctaagtccggagctgaaaaaggatcctgactgaaagatagaggcattgaggagcctgaagattctcaggttttaaagacgctagagtgccaaaagaagacgttggaagctgtgaaaacagtttccgtgagtggaagaggcgaggaggggacaaaaaaaaaccaaaccagcacaagagaaaaaaacaccaagaaacccacaaaaaacaaaaaaaaaaaacaaccaccaaaaaacaaaaaaaccaaaggagacagagctagagaaacgacccagagaccctgagagaggaactagagggaaacgcgaacaagcccgagacagtcagtgaaggtaaagcaaggacagaggcaaggaaagaaacgagaaagagcccaaggaagaagaagaaatgagcgagggaagaaggatagttgaggatacccaaatacagtataaagagaataagtgagtataaatgactgtataatgaagtagaaccaagtaaaaaggactatagtgataaaaagattactgaaatgtgactagtgaactaataggagttaatgaaaattatctgaaaagaattagaatttagtaatgaggaaataaatgtagttcctagagttagagttgacagattcagaagtacgacgtagaaaagtgagtgagctgattaaaaataatgctactagtagaaattgaagtgactgtacagaagtctcaagtagtccttaatcggaagtgataatgtaaaaaatgtctccaattattaaaaaacagttgtagtaaaagaactgtgtcagtgactaagctgtcaataaataataaactactaaacataagtaatcaatcagaaaaatttacagatctaccgaaaatttaccaagattacataatgtaaactatagaattttattagccagttgacttgagatagtgaatcctgaatgagttaagttctatgaatgtattttattaccattgtagtgtatatagaccctgatgtcaagatgtgaaggaaatctgctaatttggtattgaagaatggtttctatag

SEQ ID NO: 597657 - DNA, 137 bp, Homo sapiens
acgtcacgccagtcagaccgtatatgtcaagaattaagcgtactggcggtaaacccagaggcattgagaacagggttcgtagaatattcaagatctggccctgtaatcttctacgaaccctgttgtcaacgcctccg

SEQ ID NO: 597658 - DNA, 703 bp, Homo sapiens
cttacattctgcgctcgttttctctcctcatccttcttacgctctggttaccccgccccctcccatgcccttttagactccccaggcccctctcatggcgtaagttgccccaaccctagacccgggttctcgatgacccacccttgtcctaggcattcagcctcgtctccattcggcgcctttgtagcctatctctcactgcagcttagcatccctcccagatcaccctcagacctttctgctccgtgtctgccgattgtgaaatggctgctgacatttctgaatccagcggggatgacttgcaacaggagaccaaggaacgagagccaagtttagatgccgattacccaccttccgagttcctttattagtggagtctgttacattaccaacagagctacctgtcactatctgcctgatgtcgctccacaagtagaaccacaggccagagacgacatatcccaaccttgaatcttgcaccaacttactggtacaaactcacccaaaccacaaaagctgcacgtaccgtgaggcgtccacgaacccgcgggacagcacgcgcgacaagcaccacaccacaacgacacgctgcacggcgccacatcaccaaccacaccgcagaccgaccaccacacagtcacactcgcaaactccccgacccacaccactcagtgcacccaacactgcccgcccaccccgccag

SEQ ID NO: 597659 - DNA, 963 bp, Homo sapiens
tggaaacggaatctcgctctgtcacccaggctggattacaagggcccggtcccggctcactcaacctccatttcccaggtttcaagcgattctccgtggcctcaggcttcccaagttagcgtgggaactacgagggtgcgttgccacacccggctaatttctttatttatatagtagaaggaacggggtttcaccatgttgggctaggtgggtctcgaaactcctgaccttgtgatccgcccacctttggccttcccaaaggtgcgtgggattacaggcgttgagccaccgtggcccagcccagggtgggctttctcaggaagccagtggaagcagagacagtgcttttccttttatacccatactctactggtgaacttggacaaaatacacgtgggggctctgggctggaaggcagattcctacaagtcccctcctcgtggaggaagctaaacagcaaaggcatcgagcggcccttgcccgctctccttttgggtgtgtatatccgaagaaacacaggaacagctgtccttctttcagtcattccaattaaaacagacttttggcttagagagaataccagcccactgggttctctgggtttaataatgggcgtcagctaggactatacgtggccttaaacgtcatgcactgatggccacgaagagacaaccgcggtgatcaaaataggcacaagggcggggcacacgaggaccgcgcagtgaacaatttgttatctaaaaactcttctaaattgatacggtaagtttgggcatttttaaattcaatgcccccatccagaccccttaaaggttccaaccaaagttgagagggtcacggcgtgacccggcccagtggttcctggactccgctcacaaggtggtgtcaaaggcaggttgtgtcgtaaatcctttgtatggtgtcacatgttcactttccttaacataatgggtctgactctaa

SEQ ID NO: 597660 - DNA, 202 bp, Homo sapiens
  misc_feature (23)..(23): n is a, c, g, or t
ggtgacctagaggatccccaggncttttcccctcaaagcacgctataagctgcatcccataagtatgatatatagtatcattttcattctgtctcaaaatatttcctttattattcttatgggggggactcctctcctgtcccccagggttgaatgggaacctgggcccggggaaccttcggcttgggggttccagccattt

SEQ ID NO: 597661 - DNA, 360 bp, Homo sapiens
ctgcaaagcattcttaaccctgaagcctatgtgcccatcaccagctctacagacactgctcacactaaactaccgaaccacaaacacacaccgaaacatcctgcttaccactcctgggtgcatgattgatgctgaagcatccaccagctcttcaagggtaccatagcatttgaatttgggctgtctcaatgtccccaaagcctgcgagctgcagtggcagtcgatggatgccattcaatcaatgaagaccttcactgtgacatcaaggcacaatgtaccccatgattacacactagaatctttatccttaactaaatcatatgcccaccctgcgcattgacctgtaccttgactgtggtg

SEQ ID NO: 597662 - DNA, 307 bp, Homo sapiens
tgtgaaagcacacttggcgtaatcacacaaaaggttcgcgagcaattttacgaactgacccgtaaagctttagcccagtttctgaatgatcaaatcaacgatcgtctgaagtccgcaatgagcggcgttattcaaccctcgctagcatcaatacccgttacaaacagcgcgaaggcagacgcacaagaacgagatgaagcagaagataaaattctgacgacgctggaagagctggagggttatcacattgtccgggctgttgtacgctcagtggtcgatgcaaaacgaatcgtacaaagggggtgtg

SEQ ID NO: 597663 - DNA, 214 bp, Homo sapiens
acggaccgttgttgcggccatgcaagacggggcgcagcgtgcttgagtcgtgaagtattggaaaaaatcggtatcgcgatggataaagtcgatactgatgcccatgggcgcgaactctcgaaccctgccgccgccggccagtactgcggcgacctggggcagtggattccgatggcatccagcacgttcgatccgggtgcactcgagttggcgg

SEQ ID NO: 597664 - DNA, 247 bp, Homo sapiens
cggaccgcgggtcgagagcgaggtcatccgcgccatgatgaccatgcgcctcaagacgatggcatctggccacaccggcgtacgtccgaaggtcgtcactgcctacgccgatctgcttaactccgggctcgtcccagtcgtgggggaatatgggtctcttggctgttcgggcgacctcgccccgctagcccactgtgccctcgtcctgaccggcgaagggaccgtcctcacccctgacggtgacgaa

SEQ ID NO: 597665 - DNA, 295 bp, Homo sapiens
ggctccgggacggctggagtggtaaaaggctcagaaaaatcctgcgacgtaaaaccacttctgaggtaatcaataggatgatcccgtatcgaaggccttacaccgggacaggaggagtgtgttgccctcccacctgtgccctcctcctgccaatccaagaagccgccacctacatcgcgcagccgacagacccaaaacaacacatctcatcattctaacactcggcaatgtaaccactattcgactgacacaatacacatctcacgtagaccaacataccacaaacagatccaaa

SEQ ID NO: 597666 - DNA, 714 bp, Homo sapiens
tttcgccgaacaatcattgtacccccacggggggtctatagggcaacatgatgccaattttgttcccccgcgcggccaatttggccgatggggccagcaaatgaggtatagctgcccaatcgaatcaaacaagtagtgtgacgaaccagagaagagtgtaaataaaagtatttgtatccctcacccccccattatgtttgctatctacagtaatccgcccgcccgtcccacacactatttggatgtgcctcgtcctcgcggatagctggatggcctctcggattcccccccggttgtcctcgcttattataggtgttcgtggcgggctttctctcgtgccgcctttatgtgagggctggttggcgcctccgcgctgccctcagcgccccctggccttatggagtctgtttgtctcgctcgccgtcgcggcgctcgcacgtagtgtcgtgaccctcgctggctcgcgggcttctccctccctctggttgagacgactctctcccgtcgcctcagcgtgagctttcaccctgcggcgctcgcccctttcctctacagtatcttgccctctcacacatattcttctttccatttttacaaaattctctcttctccactaccatctccctctctcgcctcaatgtgtgatgtgaaacacccaaattataaaactatcacctccaccccacctcctcccacaacaatagacagaaaaac

SEQ ID NO: 597667 - DNA, 96 bp, Homo sapiens
  misc_feature (28)..(28): n is a, c, g, or t
gccagcaccaaccagacatctatgtacntctgtgccagcagttgcaggggaaccggggagctgttttttggagaaggctctaggctgaccgtactg

SEQ ID NO: 597668 - DNA, 97 bp, Homo sapiens
  misc_feature (28)..(28): n is a, c, g, or t
gccagcaccaaccagacatctatgtacntctgtgccagcagttactcggggggggcgcacgagcagtacttcgggccgggcaccaggctcacggtca

SEQ ID NO: 597669 - DNA, 481 bp, Homo sapiens
  misc_feature (1)..(1): n is a, c, g, or t
  misc_feature (66)..(66): n is a, c, g, or t
  misc_feature (83)..(83): n is a, c, g, or t
  misc_feature (86)..(86): n is a, c, g, or t
  misc_feature (178)..(178): n is a, c, g, or t
  misc_feature (268)..(268): n is a, c, g, or t
  misc_feature (287)..(287): n is a, c, g, or t
  misc_feature (296)..(296): n is a, c, g, or t
  misc_feature (307)..(307): n is a, c, g, or t
  misc_feature (311)..(311): n is a, c, g, or t
  misc_feature (339)..(339): n is a, c, g, or t
  misc_feature (361)..(361): n is a, c, g, or t
  misc_feature (369)..(369): n is a, c, g, or t
  misc_feature (378)..(378): n is a, c, g, or t
  misc_feature (382)..(382): n is a, c, g, or t
  misc_feature (391)..(391): n is a, c, g, or t
  misc_feature (406)..(406): n is a, c, g, or t
  misc_feature (413)..(413): n is a, c, g, or t
  misc_feature (427)..(427): n is a, c, g, or t
  misc_feature (442)..(442): n is a, c, g, or t
  misc_feature (465)..(465): n is a, c, g, or t
  misc_feature (470)..(470): n is a, c, g, or t
  misc_feature (472)..(472): n is a, c, g, or t
ncgaacaaatagaaaagaataacaaaaaagaggcaggaaccggaccggaaatacccgggaacgganaacacgccggcataacnaanaccacggagtctgcagcaccctccgcatccactccgaggcgacgagacccagtggcaagaagttcaccatgtcaatactcaagaaccaagcnagggagatcatagactctcgcgggaaacccacagaagaggaagaacactacacctcaaaaggactctacagagcagcagtgcccagtggngcatcaacaggaaacaaanaggcccaanagcaccggganaaanaaaagacacgcaaaaaggggaagggggnctcaaaggcagtagagcacaanaaaaaaanaaaagcgcnagcnctggaaagnaagaaacagaacganacagaanaagagaagaaaganaaacagaagaacganaaggaaggaacagaaaaaaaaanaaagnanggagcgaac

SEQ ID NO: 597670 - DNA, 84 bp, Homo sapiens
agcatatatctctgcagcgttcccgggactagcaggggaaccggggagctgttttttggagaaggctctaggctgaccgtactg

SEQ ID NO: 597671 - DNA, 108 bp, Homo sapiens
gactgctgatatgactgctttcactgaggtcactgattgtcatattgccagctttgtaaagccattacagcagaagtttcttcagtgatcttctctctaagaaacacc

SEQ ID NO: 597672 - DNA, 505 bp, Homo sapiens
catctcttgaccggggtgttctcaccatgccctttctacaaacaaaaaaatgaagatgtggagacttggagacaggtggcacctcgtgcttcctccgaagggagagcccatttcctaacagctggatcaaaggcatgaaatgaacatggagtccctgaagatgaagagaaggcatggcttccagggagaaattgtacattacaggaatgcagatgtgattcctatggatgagggtaacctagaggctagaagaacaataggacagaagaagcctgggtacctgaacaaccttgtggagcatagacacctacgtggcctggactgccagctcacaatgggcctctctgtgagagaaggaaacttccctcttgtttaagcaactgtgcttttgagaatctcttggtctataccctaatgaataaggccatcataaatggatatcaaagtaaggaaatttgtgtaaatgatttaataaaacattacctcaggtatgaaataaaaaaaa

SEQ ID NO: 597673 - DNA, 381 bp, Homo sapiens
atgcctgatccagctaagtccgctcccgccccgaagaagggctccaagaaggcggtgaccaaggcgcagaagaaggatggcaagaagcgtaaacgcagccgcaaggagagctactccgtatacgtttacaaggtgctgaagcaagtccaccccgacaccggcatctcctccaaagccatggggatcatgaattcctttgtcaacgatatcttcgagcgcatcgccggcgaggcttcccgcctggctcattacaacaagcgttcgaccattacctccagggagatccagacagccgtgcgcctgctgctgcctggggaactggccaagcacgccgtgtccgagggcactaaggccgtcaccaagtacaccagctccaaataa

SEQ ID NO: 597674 - DNA, 366 bp, Homo sapiens
cagactaccgaacggaaccacgataccatcttcacattccgattcaacatgactacatggaatcgatactggagaacccagtccatgacttaggatccatgggtccctccagactcccattccatggacgtacacgtcttgagggaatccacatggttcgttcatctcctgcaaaaacacaagcataccctcaaccccacattagtaaatctactgaaacagaagcaacaactgtcgtgactgtagctagggaggccactgatattgagaaacaggcccttccaacagaaggcaccaggaaagcaaatcaaggcttaaaagcaatccttaaaccttcaatatgcactgtacgggtgggtccactag

SEQ ID NO: 597675 - DNA, 352 bp, Homo sapiens
  misc_feature (76)..(76): n is a, c, g, or t
cggcacgcgaaacgccgaatacacttaacagcaccaaaaaaaaaccttgttgcgacaagcagagtgtttccggggntacgggaacctagaggctagaagaacaataggacagaagaagcctgggtacctgaacaaccttgtggagcatagacacctacgtggcctggactgccagctcacaatgggcctctctgtgagagaaggaaacttccctcttgtttaagcaactgtgcttttgagaatctcttggtctataccctaatgaataaggccatcataaatggatatcaaagtaaggaaatttgtgtaaatgatttaataaaacattacctcaggtatgaaataaaaaaaa

SEQ ID NO: 597676 - DNA, 114 bp, Homo sapiens
tcgaatcgacggttctctcagcttattgactggctcctaagtaggcctagatgatttactcttggcatggaaagcttgtctaggtcctctgcttgtgagggtcaaagctgtgtc

SEQ ID NO: 597677 - DNA, 322 bp, Homo sapiens
ggccctccggtttttttttcaggggggggggggctgggggttccccaacccttccaaacccggggggctgccctttttccccaagggaggggggctcccccccttgggggtcattcaaacttttggggttaggggcccccgggggggatttttgggggtccccatcaagggaaccgggggtccctgggccaattacgggaacaggggttggcccagggcccgggaggcctggggttttaacccccccgcctggttctggccccggctggcccccccccgccccgccggcccggatggtttaagaaagctgtttcctctttga

SEQ ID NO: 597678 - DNA, 232 bp, Homo sapiens
gaacgggtgatgcggttgcattgagctgagatcgtgccactgcattccagcctgggcgacagagctgagactccatctcaaaaaaaaaaaaaaaaaaagaaggggttctctcttttttgggccgggttgtttttaaccccttaacttcgggaaaccccccggcttgggcctcccaaggtgcgggggataacgagggcttgagccatgtggcgcccaaacgggattcaccggg

SEQ ID NO: 597679 - DNA, 1293 bp, Homo sapiens
gaaccaaatgtgtccttgtttgtagaagcagctcacagaggtgcacgcgtttgtgtttggactggagtgcggcccgactgtttatgggcctcgcccctgttgtgaaagccaacgaagcgggggtgggtaggccgccacccgaagttcgaccgtgggcggtgccgacaatatttgggtgtgacggttgctccacacgcaccagtgtatcatttgctgtggggaaaaatatttatgggccgcgcctgccctgttattcgggcgctaaattgtatattgacggcgcccttctagacactctgcaagtttgggctcaaaactgctcccctcgtggtgaccgctgtaatcccccttttttggcgcgtatcccccccgcttaccacatctggtggacgcataattccccccctatttgagcgggcacattaacttttatttctgccaaggcctgcgctaattctggcctttacgcgcaccgtgacctaggaacccctttgtaatatattctcggcgttcacaattcggcacataaccttgtgtgtgccgaaatgctgacgcccgcaacatatttacgcccccctttctggttatgtcttaacccacgcccccatgttgggtgcgaattcccccctagactcccccctgtaaggttgtctacctggctcacaaggtcaagttctctcaatatagtctcgcccacatccgtgacctttacaaatcacgctcaatatttaccgttatctccctggcacattccgcactaatcgctctcttacgcttacccgtgtacacgcaccggtcacacagttcgccactccactatatccctctctctctccacaggagacttcgcaaccttctcacactccccccctctatagactcttcttggagtgacatcttcttgtcatatgtctctccctacacccttgtccacttagcccccccaacctatttataccctatcctggcgagaacttcttctcgtgtctatgttacccccgcttttcctcgactcaaactattcacctttctcctaccttacaccggatctcacaccactacctcacgctccacacgcccgtattacctccctctctaacactactttaccacccagcacccactgcgcgcgcctcactctatcccacccaccagttacacacacttaatcccctcaccttcacccccgccgccacaccacccctcacatgttctattcaccctattcccccattttcacatcacatatcacaatcaaacacccagacatcattaccagggttttccctctta

SEQ ID NO: 597680 - DNA, 1014 bp, Homo sapiens
  misc_feature (87)..(87): n is a, c, g, or t
  misc_feature (259)..(259): n is a, c, g, or t
tgggtaagatattggaaatacaacctttattctggattctaaacgaaaagggaatggggaatggacagtaacaaacaaggatttcanccactggaattattggtggatggtggactggcgagcaagtctttattattatggaacacctcaagggaatgcaactggcggtctcacaaaacgggtctaaattatggcagggtcacaaaacaatgagaaggtatattttttataaacgtggcgcaacatttcacttccaganaggccacactcattcttccctttacaggaattccacaacagattagaagcgcacatgtgtctccggcgtataggctaagaataattaatggaggggggcacaccacgcgctggcaccggtgtggaacttcaccagggacagtctggcgctattaaaactaagacttctggaccgctggggcctccagcttcattctccacagggtcatcatcctacatccggggaagaagcatgttggtctggagcaacctctaaagtcgggcccataactggggctggccaaagcggggtccacggaccaacttccggggggggcagagagcagggcagggcaacaaattccaagttagggtgctccaatggagcttcctaggaagccagaggaagggttttcaaagtggtgagttacttgtgggagaaatgtcgtagtactgaaggaatctcttcggggggggacatggatttcgccttcaattcgtgtgcttatatcccttggttgcacaaacacagtggggggtttttccacaattgtaccaattctttgcacgtatgggagacatcttgtagaaacccagggtatataacatttttgtgacccggggggaaaaaaagcatttcacagaatggggggggccacagtaaaaacccgggtggaaaggggacacagggaaatttaaaaaaataagggggcaccaaaaagagcaaaggaaagaaactaggatgaggtagggatttcttttattttttttttccgc

SEQ ID NO: 597681 - DNA, 254 bp, Homo sapiens
tcgtgtgataagctgatgctgcgtcagagtcaacttgtgagtcgcacacactgtgaggtgcgcatcatggcattgttgctttccgctcttgcttgtatcatcagctgtgcctttgccttgttttccaataaacaatcttgtcattcatcccaaacttgcattcaggcatgcccactcaggtagctctctcaatcacccaacagtgaatttcggggtaccgcagcttcgaattccgtaaatccaatgggtccatt

SEQ ID NO: 597682 - DNA, 139 bp, Homo sapiens
gattcggagaggccatccacttaccaccagacaaccttagcaacattaccaataagctaggcgatagacttgatcctggcggaatagatatagtacgcagggagagatgagagattatatccacgcatatctagcatgg

SEQ ID NO: 597683 - DNA, 109 bp, Homo sapiens
cattttagcatcactcttaagtccaaactctcatctcaatatcatctaaatcaggccagatgcaaggactcacacctatatcccagcgttttgaggggaaaagaccctg

SEQ ID NO: 597684 - DNA, 165 bp, Homo sapiens
tcatgtaaacagttgggttcattaccactgagccatgaccggaactcccattgtcttcatctttagaccctctagcctgggaacctccatatgctgagggcgtggcccgattaaaagacaaaaagacacacacacacacaccacagatacggggtacccgagctc

SEQ ID NO: 597685 - DNA, 414 bp, Homo sapiens
  misc_feature (1)..(1): n is a, c, g, or t
  misc_feature (9)..(9): n is a, c, g, or t
  misc_feature (107)..(107): n is a, c, g, or t
  misc_feature (121)..(121): n is a, c, g, or t
  misc_feature (137)..(137): n is a, c, g, or t
  misc_feature (155)..(155): n is a, c, g, or t
  misc_feature (176)..(176): n is a, c, g, or t
  misc_feature (276)..(276): n is a, c, g, or t
  misc_feature (299)..(299): n is a, c, g, or t
  misc_feature (364)..(364): n is a, c, g, or t
  misc_feature (368)..(368): n is a, c, g, or t
  misc_feature (384)..(384): n is a, c, g, or t
ntccgcctncaaatagtcattccctggtagggtggagggtaagacatagggtctggaactgtttggaacctttgggggatgtcctgtgcctcccagattcctcgatnctgggaggagaggntgccgcattctgttgntcctcacagagagcaaantgaacccacttacattcagtntttccctggaactacaaagagtgggaaggcctgggatttgctgctgctcccttagagcagcgcccctcttttcagaacttgggacacctggagacccagncctgttatttaatggtagtgggnaagtgtgtgtgcatacttgtcttgccactgattcttcctgccccatgcagagagcctgtccctgncagnccagctcttagcccanttgggaacaagtgaacatgatcatggtggg

SEQ ID NO: 597686 - DNA, 192 bp, Homo sapiens
gatattcatgactcctgttagtgaggggcaacctcgaaagctcaagcgggggctcccctagagtcgaactgtcgtgcatgctgctagtgtctcagtggcgtatcctaaaaatcgctgtcgccttaatccaagcctacgttttcacacttctagtaagcctctactaaccaacacactaaccatataccaatg

SEQ ID NO: 597687 - DNA, 126 bp, Homo sapiens
ctcgcgaacggtgtactgagaatcgttgccttccttttaacaagaaatgctaatgtcacctcaaaaagcagaaagagagaacctgcttgcgattatgctcgtgaagaatagaatttacctctcata

SEQ ID NO: 597688 - DNA, 203 bp, Homo sapiens
catagaccttgtcttcacaaaaaaaaaaaaaaaaaaaaaaaaaggggaaaaatggtgggggagggtacaaatccccggggctaaaactattttaaggggggggggaggggccccctttgaccaaaggggttggggttaaagggggctttaaaaaaaaaacgggcacaaagcggggggagagaagaaaacccccttttaaaaaa

SEQ ID NO: 597689 - DNA, 146 bp, Homo sapiens
gtcggtaccgaggaatggcgactccctgctgtggctacaatggatgcccctgcttgatcctgctcatcatcatgtgtgaacaaattccaacgtattccatcttccttgggaagatcttgcctctggccctatgatatggacggtgg

SEQ ID NO: 597690 - DNA, 101 bp, Homo sapiens
ttagaggatcgctgggctaagtgatactacaaggcgggtggatagttgagctcaggagtatgagactaagtgggcagcatggcgaaacccatactactacc

SEQ ID NO: 597691 - DNA, 717 bp, Homo sapiens
ggtccaggctgaggtggtctcagatggagataagccacttcttaggaaccggagtaaaggtaactcttgctatgcaaagagactcacagcattttgtccctcccctagagatctgtggaactttgaacttgagagaaatgattcagggtatctggcagaagaaacttctagaacgacaagagcattcaagaggaagcagagcataaaagttggaaaatttgcaggagatcatttcggaattttaaggtttaatgactggcctattggatgtgatagaaaagaaaagccccattttctggggagaaattcaagcccaatgcagaaatttgcacaagtaatgaggaatgttaagtcaccaagataatgtggaaaatgtctgcagggcatgtcatgagaacttcaaggcagtccctcccatcacaggcccaaggcctaggagggaaacaatggttccatgggcctgggccaggcacagggaccctctgctctgtgcagccttgggacatggtaccctgcatcccagctgcttacagctgcagcagtggctaaaaggggccaaggtacagcttgggccattgcttcagagggtgcaagccctactcactgggtggcttccacataggtgttgagcctgtgggtgcacagaagtcaagaactgaggtatagaaacctctacttagattctagagcatgtatggaaacagctggatgtccagg

SEQ ID NO: 597692 - DNA, 735 bp, Homo sapiens
  misc_feature (476)..(476): n is a, c, g, or t
gcttctttaacctggtcggggtgccacgtgaacgatcctgttgtcgccatgggcgtcgccctgcccgtatgtaccgtgatgtaagaacaggcgtatccaaagtctcgttcatgccgaggtgtccctgatgccgaagatacagcaattccagactcctggggcggaagaacagtgcacataggtgcgtatgcagttcacgcggcgtccgtgcgccaactatctggtgttcagcatgacatcatcgcagcccagtgtgtccttctgatagcctctgtgaggtctgccccgaatttgtgtgcccaatcaagtcagcatggcgtcaaacaagtttgtgcgcaaaagaatgggcttcccatatccgggtgtgcggctcccacccctttcacacgtcatcccggcatcaacaaggatggttgttccttgtgctggggcctgacagggctccacaacagggcattgcgagtgttgccttgtgnacaaggcccccagggcacttgtggccaggcgttcacatttggccaaagttcatcatgtccaatccggcacccaagcttgcagaacaagggagcatgttgattgaggccctgccgcaggggcaaagttcaacgtttccttggccgccagaaagatccacatctcacagaagtggggctcaccaagttcaatgctgatgaatttgaagacatggtgctgaaaagcggtcatccagatggtgtggggtcaggtacatcccag

SEQ ID NO: 597693 - DNA, 952 bp, Homo sapiens
gaaagtctgctaattacgcatcgttaagagctcatcaggagcacgcagtcaaagcttcccgcgggccccctccccaccggcccgtatgttgggtcttggtgctctttctctagggggtcccttgtcctatggatattgccccttgggtgaccaccccctccggtgaagcgtttccccaacagtgccaacggggaatacatgtgggcccggacccacgtattctcggtatcttagaaaaacggcggtttccaaaataggcgcagacggttggtgcaaggccagtcacagacatggaattgtgtgcggcctccccaaacggcgggggtaccagcgtgtccacccgggcgcggccctgccacttcttttggggcccaaaacttgtacaaaccctgtccccccccgaagtacgtgcggagtgtagtgccggcccctttgctcgagacgcttgggaattcgtggccctcattaaggacgcccggtcgcttttagtcgcgtcgaggtcctccgcggaagtatgtatattgccgcgcccttaatgggggtcatgtgtgaccaccaccccccgcaagtgtcgtggaatgtgcgctcaggctacctgcggcctctactcgacccatgtggtatggttgacaaaaacggctagaaatattctccgctcgcccccgatcgacgtcctcggcgcctctcgaggtcagtacggggtgcggccgccttgtcagcaactccgtcccaatgttctgtaccttctccgccctccctcgctagttgtgcgccccgatcctacccctttcctctgttaaatagacgacccccgccccggctgttgcttgctgtcgtcgcccacccccgcatcggcctcccccccgggcccatggtgtgcccccccccccccccccaactccaattctaaaacctcaccccccacataacaaaaaaaaccagaacataaaaa

SEQ ID NO: 597694 - DNA, 832 bp, Homo sapiens
  misc_feature (549)..(549): n is a, c, g, or t
ttcaaaatccatcttgagctgtgtcagacacaggtcagatgggggggaaggagcagcaccaaatccaagatggcggccagcaggaggctgatgaaggagcttgaagaaatccgcaaatgtgggatgaaaaacttccgtaacatccaggttgatgaagctaatttattgacttggcaagggcttattgttcctgacaaccctccatatgataagggagccttcagaatcgaaatcaactttccagcagagtacccattcaaaccaccgaagatcacatttaaaacaaagatctatcacccaaagcatcgacgaaaaggggcaggtctgtctgccagtaattagtgccgaaaactggaagccagcaaccaaaaccgaccaagtaatccagtccctcatagcactggtgaatgacccccagcctgagcacccgcttcgggctgacctagctgaagaatactcataggaccgtaaaaaattctgtaagaatgctgaagagtttacaaagaaatatggggaaaagcgacctgtggactaaaatctgccacgatnggtccagcaagtgtgagcagagaccccctgcgagggcttaagacaccccgcaaagaagaatctgtggaaattgacacgtgccaccgcctggcggttggttgtggaagtactaacttctatccgtttttaataaaaaggggctaggtacctgcaagaagggataaaatattagagggcttgtctgtccctttgtttaaaaaaacaggctcatcacttcaaagaagggggttgttttttttcactttttcaaaacttaaggccgtaaccccagggctgaaaaagg

SEQ ID NO: 597695 - DNA, 320 bp, Homo sapiens
tactagcctatgctacagatttgaaatggcgctcactttgacatgacacacggtttatattacagaaaatgaatgaaacgacaatgtgctaaaaataaatgagacagtctgcacacaaacagatgaggactgctactttcctcccatcagaaaagtactcaaaaagggagtgtttaaaggcaactcaaatcagtagaacccgaaagtcatcagagtttcaggacaccaaggccttagagctgaaacactctttaacccaagccgggcttcaggtgcaagcccaccaacagaccccaatttccacagctgaggcagatccg

SEQ ID NO: 597696 - DNA, 216 bp, Homo sapiens
  misc_feature (32)..(32): n is a, c, g, or t
  misc_feature (35)..(35): n is a, c, g, or t
  misc_feature (39)..(39): n is a, c, g, or t
  misc_feature (46)..(47): n is a, c, g, or t
  misc_feature (55)..(55): n is a, c, g, or t
  misc_feature (89)..(89): n is a, c, g, or t
  misc_feature (97)..(97): n is a, c, g, or t
  misc_feature (129)..(129): n is a, c, g, or t
  misc_feature (135)..(135): n is a, c, g, or t
  misc_feature (153)..(153): n is a, c, g, or t
  misc_feature (181)..(181): n is a, c, g, or t
tcgagcacctcttgcccctcttcctggctcanctnaagnatgagtnnccttaggnacggctgaacatcatctctaacctggactgtgtnaacgaggngattggcatccggcagctgtcccagtccctgntccctnccattgtggagcttgctnaggacgccaagtggcgggtgcggctagnccatcatttgagtacatgcccctcctggctggaca

SEQ ID NO: 597697 - DNA, 705 bp, Homo sapiens
  misc_feature (19)..(19): n is a, c, g, or t
  misc_feature (22)..(22): n is a, c, g, or t
  misc_feature (27)..(27): n is a, c, g, or t
  misc_feature (35)..(35): n is a, c, g, or t
  misc_feature (38)..(38): n is a, c, g, or t
  misc_feature (44)..(44): n is a, c, g, or t
  misc_feature (48)..(48): n is a, c, g, or t
  misc_feature (54)..(54): n is a, c, g, or t
  misc_feature (85)..(85): n is a, c, g, or t
  misc_feature (111)..(111): n is a, c, g, or t
  misc_feature (114)..(114): n is a, c, g, or t
  misc_feature (121)..(121): n is a, c, g, or t
  misc_feature (125)..(125): n is a, c, g, or t
  misc_feature (127)..(127): n is a, c, g, or t
  misc_feature (149)..(149): n is a, c, g, or t
  misc_feature (160)..(160): n is a, c, g, or t
  misc_feature (167)..(167): n is a, c, g, or t
  misc_feature (175)..(175): n is a, c, g, or t
  misc_feature (190)..(190): n is a, c, g, or t
  misc_feature (198)..(198): n is a, c, g, or t
  misc_feature (203)..(203): n is a, c, g, or t
  misc_feature (412)..(412): n is a, c, g, or t
  misc_feature (502)..(502): n is a, c, g, or t
  misc_feature (622)..(622): n is a, c, g, or t
  misc_feature (653)..(653): n is a, c, g, or t
  misc_feature (673)..(673): n is a, c, g, or t
gtgaaacacagcttgtgtnganggggnggcaaaanaangaagcnagtnctgaanttcactcttgattgcacccaccctgtagaanatggaatcatggatgctgccaatttngancagtttngcangnaaggatcacagtgaacggaaanagctgggcaanccttggntggagggngtggtgaccatcganaaggagcnaagangcaatgatcaccgtgaacatccgaggtgcctttctccaaaaggtatttgaaatatctcaccaaaaaatatttgaagaagaataatctacgtgactggttgcgcgtagttgctaacagcaaagagagttacgaattacgttacttccagattaaccaggacgaagaagaggaggaagacgaggattaaatttcatttatctggaaaattnttgtatgagcttcttgaagtaaaacttggggaccaaaatggtggtttatccttgtatctctgcagtgtggattgaacagaaaattggaanatcatagtcaaagggcttcccttggttcgccactcatttatttgtaacttgcttcttttctttttctgcttaaaaatttcaattctcgtggtataccagagtagaggagagggtgctttnccgactgcagccattgggagcagtgcgggtntggcgtgtggctgaggagtnctgttgttttaaaaggtgctgcagttgatctg

SEQ ID NO: 597698 - DNA, 658 bp, Homo sapiens
  misc_feature (19)..(19): n is a, c, g, or t
  misc_feature (22)..(22): n is a, c, g, or t
  misc_feature (27)..(27): n is a, c, g, or t
  misc_feature (35)..(35): n is a, c, g, or t
  misc_feature (38)..(38): n is a, c, g, or t
  misc_feature (44)..(44): n is a, c, g, or t
  misc_feature (48)..(48): n is a, c, g, or t
  misc_feature (54)..(54): n is a, c, g, or t
  misc_feature (85)..(85): n is a, c, g, or t
  misc_feature (111)..(111): n is a, c, g, or t
  misc_feature (114)..(114): n is a, c, g, or t
  misc_feature (121)..(121): n is a, c, g, or t
  misc_feature (125)..(125): n is a, c, g, or t
  misc_feature (127)..(127): n is a, c, g, or t
  misc_feature (149)..(149): n is a, c, g, or t
  misc_feature (160)..(160): n is a, c, g, or t
  misc_feature (167)..(167): n is a, c, g, or t
  misc_feature (175)..(175): n is a, c, g, or t
  misc_feature (190)..(190): n is a, c, g, or t
  misc_feature (198)..(198): n is a, c, g, or t
  misc_feature (203)..(203): n is a, c, g, or t
  misc_feature (412)..(412): n is a, c, g, or t
  misc_feature (502)..(502): n is a, c, g, or t
  misc_feature (622)..(622): n is a, c, g, or t
  misc_feature (643)..(643): n is a, c, g, or t
gtgaaacacagcttgtgtnganggggnggcaaaanaangaagcnagtnctgaanttcactcttgattgcacccaccctgtagaanatggaatcatggatgctgccaatttngancagtttngcangnaaggatcacagtgaacggaaanagctgggcaanccttggntggagggngtggtgaccatcganaaggagcnaagangcaatgatcaccgtgaacatccgaggtgcctttctccaaaaggtatttgaaatatctcaccaaaaaatatttgaagaagaataatctacgtgactggttgcgcgtagttgctaacagcaaagagagttacgaattacgttacttccagattaaccaggacgaagaagaggaggaagacgaggattaaatttcatttatctggaaaattnttgtatgagcttcttgaagtaaaacttggggaccaaaatggtggtttatccttgtatctctgcagtgtggattgaacagaaaattggaanatcatagtcaaagggcttcccttggttcgccactcatttatttgtaacttgcttcttttctttttctgcttaaaaatttcaatttctggggggaaatcccgggttggagggggggggggngcctttttcccggccttgtcngccctttgggggggg

SEQ ID NO: 597699 - DNA, 337 bp, Homo sapiens
atacgaagatccaacacggatccccccacatggagcaatgcttgatcactcagcgaggtgcaagcttcagtgagccattatcattacactgacatacagacctatgttacatgagacgagactccttttccaaaaaacaaatatacaaactcaatcctttctaatattttgctatgaattgccttatactatacatcagtttggggagtattgatgtcttgtactatgtaatatttaaccgctgcctactgaacactcagtgcgtctctgcagttgtttacgatcttgaatattacgttagcaattttgtaattttcagcatataggatcctgcata

SEQ ID NO: 597700 - DNA, 728 bp, Homo sapiens
ttaagtgaagacggtacgccttgtacggtggaaatcatgccgtagccatgagtttcttgcctgtgtgtgctagccctagatgtacgtgagcatgtgctgtgagcttttacggttcccctgcccctgcacatgtgtggcggtggcctactagtgcctcacgggcatcccacggatctcaatgtaggcctcatcttgcctgtgcaatggtgctgccctgaagactgctgggatgtgctgccattgtctgacttgtgtttgcttactgccatggcaagctgatgatgatgctgaatgcctggatgaagtgcttgatgccctgagccggatggaaaggagcgacgtgctgtgttgtgcatcacataccagttctttgggagcccaggatattaatcgtgggagagcatatgatagcagcatttactcataccactggaatgaccacaatagtggtccctggaccatatggcattgaccatacagaaacacacattaaagacttgcactggaaagccacgacacatatataaccacagcagccccgacacggcaacgcactaacacacacaaccaccaacacacacgcaggaacacaacaccaacacgaagaacaacaaagaccaacaacacgcacacaacacacaccagccaacaaaagcacacaacacacagaaaaggcacaacaaacagcacaagcaacaagcaccccccaaccaacaacagacaagaca

SEQ ID NO: 597701 - DNA, 221 bp, Homo sapiens
tgagatccctctaaatgggtacagaaattatggaattacttcataaattcatggtaatgtatacataaattatatgcattaacatacaattgccattctacttatgaagtccatcagtattgacacataaagtgtcacatgacatgcatatattaatttactacataacccaaaatataattaccatatagtgtggtactagcactctcactgtaacatca

SEQ ID NO: 597702 - DNA, 345 bp, Homo sapiens
tcatgaatcttagcaggggttgcttgggaacagttatcagaccagacagcaaaattgactagtaacagccacacagattcagcagagaatatcttgaacgaggtaatcattcagttctcggtccacaatgaaacacagaaatactactatcaatgattattattgtgccagcatagagacagaaatagcattacagcagatattagagatcaggccagagggtaaggactctctagagatcgcagttaaaagagcagtaaaaattttcaaaatataaatagtatgtattgaggcgagggtaggtaggtgtgccgagtctaagggtaagggagaaaactggttggg

SEQ ID NO: 597703 - DNA, 501 bp, Homo sapiens
cgacgagtgtccgagtagaatgagatacaccaggattcaagactagaatatctgacctcgtttgctgtgttctttccaccaaatcatgatttttttttgtttggacatgtaatctcctagcgggtcgggcagccttaattcattcccaattgcccaaccaattaaagatgattattaaatcatgcccacggggttcctcctcatcagagcccttgggggtttcccagaaacatctgcattaaggtcctgatccagtgctcctagtggttcaccaaccgtgtcagtgggcttgggcttactaccctagccggttgtaaagcaaaatttttctggaagggtctgtctttggtgctgactagaggatgcccccggagacccgtggaccatgaccacagtggcagggttttcctgtcctaaaagagccagggagctcctcggaacataacactcgaggctaggatacggttctacaaagctcagtacaatctaacctattggtca

SEQ ID NO: 597704 - DNA, 456 bp, Homo sapiens
ttctccaggaacacatgcactgacttggccgggccgatgagtctgaccataggctgttgatcaggccctggaagtggttcaggtttttgtggcaaaacaacattgaaacgttagcggtcatgaggccgagatcactcggctcaggatttgaaatcctgaagaagaattgagaagtatgtgcatgaaattgaaaaagaaaaaggaagaaaaggaaaagaagaaacaaaaagaacagcatcatgatgaatcaaccatgtctttgcatgtaattctaacattcatatcaatcatggactgagtctcgatgtgtaaggcctttccattccatttattcacactgagtgtcctacaatcaaacttccgtcatttcaaacaacataaaggaaccaacaacacacaacaccaaaaagcactagtctcgacctctcctcaccccgcgaagacagcttatcaaac

SEQ ID NO: 597705 - DNA, 2005 bp, Homo sapiens
aaaaaaaaaaaaaacaaaaaaaaaacaaaaaaaaaaaaaaacaaaacaacacaaacaaaaaaaaaacacacaaagaaaaaacaacaaagaacacacaaaaacaacaaacagacaagacaaaacagagaaccagaacaaaagacccaaaacaaaaggaaatgaggcacacgacgcacgggggaccagagagggagacagaagcatgagcgctaacagacagcaaaagaacatagcagacacaccagtcgaaaggaaaaaacagagcatagcagacagagacagaaccgtacacaaaaaaacacaacaacgagaaacaagagaaaaaaaaagacaacaacaaaaagagagacaccgaacaacgcacaacacgaaccaccgcgcaacagggacgcacatcaagaggcgaagacaccaacgcaaagaacaaggagaaacaagtgagagacgaggaacaaaagcaactagacgaatacagacgcgcgcgcggccccccggacgcaacaaacacacacaacacaacaccgaagaagaacaggagacacagaccacacaccaaaacagaccacacctcagcagcaaccgacacacaagcatagtaacacacaccgcacaacaagagaacagaccacagcaagcagccagagacgagagacaagacgatagaaaaaaagatgacagaagaccgagagaagaggaggagcacgacgagaaaagaagcgacgagcacagcctcgcaatagccaacgagatagaggggacggcgaggaggacgacagcagacagaaggaaaagaaagagatgagaagcaaagcagatgcagaagaagtagaagaggcaacgaccaggatagaaagggaacgaacacgcataggagcagagagaagagcggagaaacacaaaccagcagcagacagaacaagcgagagacgacgcacagacaacgaagaaaaggagcgaacacacaacacacgcacgacggaacaaactaacccagtagtagaaagagctacgacgaaagagaaaaaaaaccgagccagacgagacagccacagcagcagaacagccaaacaacaacgcgcgaggcaaagcagacaggcaggcagcacaagacagagagacgcacacgtaggactcaacgcaaagacgaaagagaagagaaggaccaaacagagcagacatacgaggaggggaactgatgacccacagcagaatagccagcgcagacacgagccaccgcgcggaccgccccgacacaacgagacagaacaaacgaccacacagaacaggaacagcagcagcacacacctagtagcaaaagcacgacgcggacacacgcgctcacgcacacgcgacggaggaagaccagaatagacagagaacgaaaacgaaccacaaaacgcatgagacagagagacaaagaggatgagtagacgacgaggagacagcacaacgaagaagcaagacgagacaaaacatgacaccacgcagcactaccacgcaacaagtgagcagacacgcaacgcaagaacaacgaagaaagagcccagtagcacggccgacgcggacggtagcagacatgcagagacgagagagaacaaacgtagagagcgataggcgaagcgacaagaacaacgagcgcgagaacgagaagagcagtacgacacagacaagtgcaagaaaagcgaagtggtagatatgcaagagagaaaagcgcacgcagaagaccacacgccagtatgaactaccagccaaaagcaagaggagaacacacgagacatagcaagcgaagagcgagcgacgcacacgagccaaggtatccacacgaagacatcgcagtgaagctgagcgagaggcggacccgacataagcgaaatgagagcaacaggaaaatcttgagagcagcacagacagaccaaccactacgcagtgcggcgggtggacggtatagcaacatataagcaacacgacaccgcctgatcacccgctgcgagatgtaaggccgacc

SEQ ID NO: 597706 - DNA, 407 bp, Homo sapiens
gggcaggtctccctctcagctggactctcagaggaggagtgagtgttcctcctcagaccgcagccctcaagcgctgcgatctgtgccacctctttgaccggtccctctgccctcagactagcggaagcaaattacacctgaaagtggaggagcgggtctctttctttcttagacccagggcatttggcaaagtcttagaagcagaaagaatcagcaggggtcccatttcatccccaaaagctttagaccccaaaggcagaaacatttctaaaggaagatagaaacggaaacgaaaaacccaacagtcccaaatgtgcccatggtgggattgttggcagatgagctgtggttcttggatcctggacctaggacccatttcctagggggggggcttgaggatgggtacc

SEQ ID NO: 597707 - DNA, 125 bp, Homo sapiens
actgggggtgatttttgtcccccagtttgcagagtctgcagacatttttggatgcaacaattggggcgaggggtggttgctgctagcatctagtaggtagaggccagggatcctcatgaccattc

SEQ ID NO: 597708 - DNA, 473 bp, Homo sapiens
  misc_feature (12)..(12): n is a, c, g, or t
  misc_feature (85)..(85): n is a, c, g, or t
  misc_feature (128)..(128): n is a, c, g, or t
  misc_feature (139)..(139): n is a, c, g, or t
  misc_feature (253)..(253): n is a, c, g, or t
  misc_feature (336)..(336): n is a, c, g, or t
  misc_feature (344)..(344): n is a, c, g, or t
  misc_feature (416)..(416): n is a, c, g, or t
  misc_feature (459)..(459): n is a, c, g, or t
  misc_feature (463)..(463): n is a, c, g, or t
  misc_feature (470)..(470): n is a, c, g, or t
caagttgggccntccactcatccccaaaagaacccccagctccagtttacccaatgatacatcagatgagatcatgaccttctgntcagtcagtaccaagacagtcctcgtccttagctgccttaagncaacgttcccnggaaccgcaagtctttgagaaggacgttgaagagtgggctcggagatgacctggtgcaggcactgggactaagcaagggtcctggcctggaggtgtgaaggtgctgtatcccgnaatctatctggccctggactggcagtgcaggagatgacagagtgaggaggcccagagcaggaattctggcccagaactctgtnccaggagncatccttgagcagtattagccgtgtgtgtatgcatgtgagtgtgtgtgtatgtgtgtgtgtgatggcatatnatgtgcatgtgtgtgagtccttgaacgcacggaggaaaataanattntccctgntca

SEQ ID NO: 597709 - DNA, 1111 bp, Homo sapiens
tgacgcggtgggatctgcattctgcactgctagtgaatagtagtatatcggactcactagctcatgtcctccgtagtatgcctagaagggatagtagtattgttgggcattatagcgactctcataagcgtcaagaactcatgccctcttagccaatgtggtggctatagtcatattagtcgttgccgcctggacatgacggtgggccgtggcctacgtactactcaatcgtcgtgaccatagtatggcctgatacttaaggtgaattaaaactatacacacgtactcgcagagtgtcgtaaaggagagggttgggaacatgtgagtgatgacttctcgtactacttgtgttgtacattgtaggaacacagtagtaatagagttggcagtcgaatgagtacatgcacatgtataggtatagttatgagatgtgattccagcagatgaactgctcgacaaacagtagatatggagtatttctactttgtgcctgttggaggcaagattatggcaaggtgagtagataagggtcaggtcactaggtttcgcggttatgcgcccacgaagaagtgacaggagcaggtggagcatgaatcgcgggggatttctggtgctaggagatttgtctcaagtgcggattttggtaatagaatgaggggatagtggcgatggaaacctgcatgagttgcaagcgtgggaagaagtatgtaaggcctggttatgctggatcttacttgtggtggtggaaaggggattgaattccgggacatggtggcggactaaaatgatgggcccggcaaggggttcagaccataaaaagtggaggggggaaaacggggcgtgaaacataggaggataggtcatggcccagatggtggggcgtctacactggggaaagagacgaaccgcagtggagttggaacaaaagggggctggcagtggaaatcacaaagatgtaagtccaaggtacacacacagtaaacgccaacgacacacaacgaggagatgaggcaaagacacgacctagacacaaaaacacggaagtaaagctgaggaaaaaaataacaagcaggacgtcccactcacctatctattccgtgagaaggggcgc

SEQ ID NO: 597710 - DNA, 238 bp, Homo sapiens
agggactcggagaatcatgcagcagaagcagaaaaaggcaaacgagaaagaaggaggaacccaagtagcatttgtggcttcgatgatccaacccatcatatgccattcgcctgtgatgcctggagccagtcccaccacgctcgcgtatcctcctgtagtgcacacaggtcccagcaccgatggcataccctttgccctgagtcagcaagcgggatcccatttagtgcttccggacgaa

SEQ ID NO: 597711 - DNA, 340 bp, Homo sapiens
  misc_feature (288)..(288): n is a, c, g, or t
cgacaccagatcgatggtcgcggtctcttccagattgtcgtcggcgaagtcgcgctcgacggtcttgccgctgtcggccgcggtgaggttgcggctcatccaaaggccgccgccggtgccgtagatcagctcgtccggattgaacggattgatcttcacgtcggagatccagctgcccatccattcgccttcgcgccaggggaagcgcgtcgcgccatgggattgcttgcgcagggacgaccaatgagacccgccgtccctggagatgaagatgtcgtccgactccgnccaccagtggtcgagggtggaggcgacgatggtgccgggatgggagggatcg

SEQ ID NO: 597712 - DNA, 798 bp, Homo sapiens
  misc_feature (236)..(236): n is a, c, g, or t
tctcctcaaacattaaaaatttccaacatcctgaaaaccactgtgccctgaaacgggttctcctgggggggcacagggctaaattccctaacctcccattcctttttaaaacccattatgtgtggttgccaagcggcaaataccctccagtggttctgacaaaggtcactaagttcccgtgttcattcctaacaccaaggggatctttccaatcttcctcggactgggcccctccntaaacctcccttaacccaaaatcttccttcgtggaaagcttcctccttctttggctgctctttagaacccgccagccttgccttccattgaccacccccgcccaccccttaactaggggtgtgatcctcaggactgtatctgtcttggccctcttgttgcttgtcccacctgcccaggcttcctggaaaggttctagtcccttggttccacctagactgcattttttttttttttttgaggcagagtctcattctattgcccagactggagtgcagtggtgcagtctcggccgactgcaacttttgcattccaggttcaagcgattctcttgcctcagcctttcagttagttgggattacaggcgtgcaccaccacacctggctaatttttgtatttttagtagagacagtgtttcaccatgttggttgggctagtcttgaactcctgacctcaggtgatccacccgcctcagcctcccaaagtgctgggattacaggtgtgagccaccacacccagccccagactgcactccaacctgcacaagagtgagcccttatctca

SEQ ID NO: 597713 - DNA, 1019 bp, Homo sapiens
atcgagagcacatcaaagtgcagcagctcatggacaagggcagtgacaagcgtcggggcggtcctccaggcccatcccatcagccgtggacttcccctatgtggatgatggtggctggaccacagatatcccatcagcaaaggtagccgccccattgagacctcacgactcaccaagatcaccaagcctggcatccatcgattctaacaaccagctctcagcacctggagggcgactgagctggggcaagggcagcagcggcaggctccaggagccaagccctccagcacgccagcatccagcacagctgctcgcccagctactagtcactttcgcacatcgctatctccagacccttcaaccaagcggtaacccacagcacaagccacagcatcaatagcacgtgtggctgcagaggcagtcagcttgagccgcagcacgaggcgcagcaagctggagcacccgcaggcagaccggactcagagacgagagtgcacacggcggccagaggcgcaccgacgagcggcaccaggctctgcatccgctcgcagccgagcaccccatagctcaccaccagccgagcaagcctctcagccaagggcaacagtgccaccgtgacgccgcgaacggtcgcagaaaccgggctccatccccaaagccgcgacacggagactggctccacacggcacagaatcaggccatcaccccgaagcgcctcgagcaaaccggtgagcagcggggaaattgcccgagcacaagcagagcgcacgcatgcgcactaacccccccagtgacgcacaccagtgaaaaggccgggcacacctccggaacggagggcaccaaccagcgaaagaaaagccccacacgccctcaatcaaacgaagacactagatagacacagccaacggaacgagacaacaaaggccgcgcccaccgcgatgccacggagctgcaccccaccccgcccacgcgctaacacacaacgaaccgccagcgacacgcgaccacaccggaccgcc

SEQ ID NO: 597714 - DNA, 604 bp, Homo sapiens
agccggcatgtttctactgaacgtgtggcagctgccattctccttcgtaactgcaaattggactagatacctcagataagtggaatcatacagtgattgtctttttgtgactggcttttgttacttagtataatgtcctcaagttcacccatgttgtcatatgtatcagaattcccttcctttctaaagctgaataatattccattgtatatatgtacaacattttgtttatccactcatctgtcgatggacacttgttgcttccacctcttggctatgtgaataatgctgctatggccttggctgtacagagatctctttgacaccttgctttcaattattttggatatagcctcagaagtggaattgctgggttgtatggttagcacttgttgtcttgttttgccgagaatccctctcaaagaagaaaaaggggcggggaggatgatgcatctctgctgggagataattaccattgattacacaatcaaggtgatagtatttatggaaacttactgtttgccatgtactgcaagaagtgcttggagtcatttcacagtaaccctgtcagatagatgtgattaatcatccactttctacagag

SEQ ID NO: 597715 - DNA, 185 bp, Homo sapiens
ctctggctgactagaggacccgggatgaggaacgtactccatgccttcatcaccatcggcaaggtggatggcttgttgcctgagaaaaggctggccccgcctcttgtaccagttcctgatgaatggcatcctgactgtgcaccctatgggctggcttgagcgctggtggctaacctgcacacagc

SEQ ID NO: 597716 - DNA, 896 bp, Homo sapiens
ggcaagattatggagtccagagcaactccagcccccacagttcagctccgcacagtacccttacgacccctacaggtcgacagtgtggaccatacttatccccggcctgtgatcccacctagcttatcatcttccatgcgcaaatccaatgcagtgggcctcaattccacttgaacatccccgcccaggcacattattcgaatagtcactgccaagcagatttaactgcaatctacacatagttacatgtaaccttctatgctatatgctaattgcatgcattgtgaaccttggagctgtttataaaagttcacggcaaagatctgcgtccaatagatgactttttaagtatcagtaacatgattttatcatctaggcagcagctgttacccttaaacaaaggccagatgttgatgctccgctgggatgcgggaggggcccaaagtaactggcatttattgacatttcagtggctgtggctaaccagataaataggctttacttactccattcataaatcagatgctgtctgctcaaagcgttatccaggcaatatgtgcggactctgtaagatggctctatccaagaaaaggcctgagcatggatcaatggtttgcctggattcgaattaccccaggatggatctgatctgtatgcccaacttgcggggattgttcgtgcatcggacccaatttctactgtcagggatttaaccctcctcagtgcctggctttcgggtggctgggagggttcccgactggtgcgcgaagctcgctgcgtgcttgatgtgggcgcacggccaaacgggcggaggggcactgtctccactggtctcattgtccctgctcgtccgtgggggtgctgccccactggccccgggtttctccaagtgttcg

SEQ ID NO: 597717 - DNA, 361 bp, Homo sapiens
acctcctaccccacggaaaaaaaaaaattttaatagagacagggtctcactgtattgcccaggctggttttgaattctggagttcaagcaatctcccgccttagcctctcaaagtgctggaattacaggtgtgagctaccatgcccggcctatattagattatcttgaccagtgctgtctaacagaactttctacaatgatggaaatgttgtatagtttatgctgtccaatatggtaggcactagccacatctagctattgggcacttgaagtgtggctagtgccatcgagcaactgaattcttaatttatttaattttaataaatttaaattgccactgtggctactggctactactgct

SEQ ID NO: 597718 - DNA, 213 bp, Homo sapiens
taagcagcggcttacagcatacacaatctaattgcacaataaaatctacaacgtggtcgaagaaagtttttggagttccctgtcgtgatgcagtggttaacgaatccgactaggaaccatgaggctgaggtttcgatccctggccttgaccagcgggttaacgatccggcgttgcctgagctgtggtgtaggtagcagacgcggctccgatcc

SEQ ID NO: 597719 - DNA, 163 bp, Homo sapiens
ttccccccggggggggaaaatttttcctttttcccccccccccccccccccttttggggggaattttgggggggggcccctttttaaaggggggggggggggggggttacccaaagggtttttttgggggtgtggggggccccctttaacgggttttttttta

SEQ ID NO: 597720 - DNA, 299 bp, Homo sapiens
gcatagctagtagactctagtagtatatttgtatatccattcatctgttaacagacacttaagttatttccacatttatgggtattataaagtagtgctgctgcgaacattggtgtacatgtatctgtttgagtccctgtatttagttattttggttatatacctaggaatggaattgctgatcatatggtaattctgtgtttaactttttgaggaactaccactgttttccacaatggcatcaccattttacattcccaccagcaatgcacaaagatttcagtgtctgtctccttgct

SEQ ID NO: 597721 - DNA, 125 bp, Homo sapiens
ctcctaccgtaaatatatggtgtgctcacacgataaaccctaggaagccacatgatatcatcagctccagcacccatcacctcatgtcatccgaaatggttccgtttttttctggcagtcagtca

SEQ ID NO: 597722 - DNA, 211 bp, Homo sapiens
tatctcaggagtatcgagatcagagacaggggtgaagataacatttcaccatatagagaatttttttactatttatgattatcttttgagacaaggtcttgctctgtcactcagaatagagcacagtggtgcaatcacagctccctgcatgcctcgagccaccagcaggctcaaagtgatccgtctcatctcagcgctcctgaagatagct

SEQ ID NO: 597723 - DNA, 909 bp, Homo sapiens
gaaatagtgataagtggaggaaagagataatataacattggctttcaagtgagacccaaaggaagaactggataaaatcttccaaatgcaaaagcatgagatgtttctatccaaagtatgcagaaaatgacccatagagaactttctcattttgctactgagtcacacaacgggaacgtggaacggaaagaaacggttaaattatataggaagtgacaactataacatcctgatgacctgggtggtcaacgatcttttacatgataacgagggggaagaaatcacagtaaaggtcatacagacaacattgttttaagaattcataacagcaaccttgacaagagaatagacttaaatgaatgcttctagaaacttccagacggctcacaaagaataagactgccttagggctggcagagcatcgtaagcctctaagcagcacagggcaagacgaagatatcttaccaggcgagcctagtgacaattaaccgcagaagcaaggcttcgggttggatcttaggctggactcttattactgcatgccgatggttggacgatgcacgactggtggttagagtcattccgttcgccagcatttggctagaacgtcatcactcacacacgacattagtaagggagtcacatttagcatcatagcatgaggacacgtccattcatcttagttacaatgggattgagaatgcctatcggagttgccaggaagaatgattgatcacgcatgaaacgaagacataggtatattggttgccccagagaacatttcgattttagtgtgactaagtaatccctagccaagaaagggaaaagcactaaagaaaaggactcggtggggtcggataataaaagggcaaaagagaacttaaggagttggagctccaggcaaaggga

SEQ ID NO: 597724 - DNA, 289 bp, Homo sapiens
gcctcccaagtagctggaagtaacagtgcacgcgttagcatgccagccaattggtggtattttcactagagactgtggtttcaccatatgggtcaggctggtctcaaactcctgacctcaaatgatcccccaattcaggctcccacagcactgggattacagggcgtcagccacctcaccgggccctggccactatcgtgtgtgtgtgatgtgcgtgtgctgtgtgtgtatgcttgaaacaaggactgaatctgttgcccaggctgggcgctgcgtgtggggctccctc

SEQ ID NO: 597725 - DNA, 981 bp, Homo sapiens
gagacgtgtgcgctggctcatgcctgtagtcccagctctcaggcatgctcgagagtgcgggaggatacgttgatgcgcaaggagtcgtagacctgcctgatgcatatacgcgataccccgttctccacgaagaacaggagcgagacacccatcctctggacgaaatgcaggacataccataggtccagggaagatatttgtgggcacgcaaggacctttcaaataacatgtttcaagacaccaccttgttccggtgtgcccgacctcttccgtgaatagggagagagaacgttcgttggtggcctgagcccatgcgggaattcataccagtggccgtggatcctacaacactgaatagataacagcgagcggtatgtactcggattcttgggcaaaatctgtgtaggggtttatgcgaagaacatagtgtgtgattagcagcgggagacctcagaggggccgtataagaaaataggtgcccgtggtggttgtggaatcaacaaatatggttccctttgttgcacgacctttggctgataacctcaatgaggcaaaaactttgcccaagctagaagaggcgaagaaggtttccatccaacaaatccagattgcaattgatacgggagacgtcaacaaaggacttggttaagaaagcgcaataccttttgatgtgcaagggaatcacaatggctagggttgggaagttcttaccgggacggcgtgtttagagatataggcagcaaaggatggcgggcatatattttctgggagacaatatgcgtgacggacagacatgataatggggagagccgtgtgaagattccaaacgaagaaagggcaatgcagtgtggacataggtgtgaagacggatggcagcgttattttcctgcagaaggggcaggaagttagacgttgagggaaggagacccagagggtaagagcaaggataatcgcgagaagagcaggagttatgaaccgctg

SEQ ID NO: 597726 - DNA, 826 bp, Homo sapiens
ctgcccccgcccggtgtgatcctcgcagccgtgtggtgcgcgccccgcctatttttggggcaacccgggggcgcccctttgctgaaaaacacaacctggttgttcccaagaaaccggccctggggaaaattattatcgcttgttgggaactgtggctccccccccgcggcccaccccaacatacaaaggcgcagggggtgtttgccccccccactccacgaaggagcggcttttcccactaagtagctcgcgcctcatgatagtggattgctaatggctacaagagccacacccacgccggttaacaccggcaggtcgtcatctctctaggaagtttttagtatattttctggaattcgcccaaacaaatggttttgccccctgaacatactatatcaaaaagcatctttacaacgaccatcttctttgaacctatgacaaaacatgctattgtctgacgcccgctctcccccccacgggtgtaggaacccccccttcataaatcgaggtttactactaattatctttatctccccaacaaaactggtgtacaccacctcggcgtagttgagccccatcggctccacgaataggggctgcggtgaagacgagcctcgtagcgcaccagctggtggtcggcgccccccctgcatccccccgcgctctttgtatacaacatatcctacaggtggatcactacccgatgtgacaagttatgtcatgctgctcataaggcgcgaggtgcaccctcctccggggcggtgcaacccggtataaagatgcttgttgcatgaacagcacaggacccccctcgtccataaaaaca

SEQ ID NO: 597727 - DNA, 404 bp, Homo sapiens
  misc_feature (321)..(321): n is a, c, g, or t
atacgctgaactatgcgtgaactatgtgggtcttttgtcttgttttgttttgttttgagatggagtctcattttgtcacccaggctggagtacaatggtgtgaccttggctcactgcaacttccgcctcccaggctcaagcgattcctctgtgtcagcctcccacatagctgggattacaggtgtgcaccaccacacccggctaatttttgtatttttagaaaaccctgttttctaaaacagggtttcaccatgttggccaggctggtctcgaactcccaacctcagatgatcctcctgtttcacactcacagagtgctgngattacaggtaggagccaccacccccagcctcattgtggttttgatttgcactttcctgatagccagtgatattgagcatctg

SEQ ID NO: 597728 - DNA, 291 bp, Homo sapiens
tgagttcaagaccatcctgggcgacagtagtgagacctcgtctccagcaaaaaagaaattttttttaaccagacaagcatggtggtgtgtgcctgtagtcctgtagtcccagccactcagaaggcttaggtgggaagatcacttgagcctagggggtacaggttacagtgagccaagatcacgccactgtactccagcctgggcaacagagcgagacattgtcatctttcgtttgtttacttaaaactccattgaggctgggcgcggtggttcacgcctgtaatcccacta

SEQ ID NO: 597729 - DNA, 105 bp, Homo sapiens
catcagtgcactgctgtgtttagattgcattatctttcggactccaatcttgaatctcatcttgtagcagatagaatgttctcgtcttattagagaggaatctac

SEQ ID NO: 597730 - DNA, 740 bp, Homo sapiens
aaccatcaaataaatgacaagagtaagtcctcatttatcaataatagtcctaaatgtaaatggattaaataccccatttaaaatataaagattggctgacatgtagaacaaaaacaacaccttactatatgctgcctacaagaaacttacctgacctgtaaatcctttcacatagaattaaagtgaagggataaaagagtattccatgcaaagtggagaaacattaagctaggtaagaatagtctatacttccagtccaaagaaagacagatttcaagtcaaaagctgtaagaaagaaactatgaagaacagttatataagtaatacaggtagttaagtttagtgaaatagaatgtaacaagtgctaaatgtagtgtacaaccaagaccagaaaacccagacatataagggaaatattgattagatttaagagggaaaatatgaatgtccaatacgaatgaaaagttggaaacatcaagatcatagtttcagcattggacagatcatctagacagaaaatcagcaaggaagacattgggtgcaaacgtgaaccatagacactgatggacctaacgcattgacagaacatttcagccaatagcatgcagaactaacacaaatcgcttgcattgggcaccatggaaacactggcattaagttgaaccatgatattcacgatcaccagaggcaagttgtcgacatctgtatcaaagagaaatcaaacttattaccagcgcatc

SEQ ID NO: 597731 - DNA, 134 bp, Homo sapiens
aacagcgcaagtgtttcaccattgcatgccaagcagcatgcaagcacacttgcaacaaacagcatactcatggcatcaattgggcagcggtcaacacagcttgggtcccgcagctcgcacattcgtcacatcca

SEQ ID NO: 597732 - DNA, 394 bp, Homo sapiens
  misc_feature (11)..(11): n is a, c, g, or t
  misc_feature (57)..(57): n is a, c, g, or t
  misc_feature (87)..(87): n is a, c, g, or t
  misc_feature (93)..(93): n is a, c, g, or t
  misc_feature (110)..(110): n is a, c, g, or t
  misc_feature (198)..(198): n is a, c, g, or t
  misc_feature (242)..(242): n is a, c, g, or t
  misc_feature (317)..(317): n is a, c, g, or t
  misc_feature (363)..(363): n is a, c, g, or t
agaatgatttnataaattttaattagactgagtctcgctctgttgcccaggcaagtntggtggtataatctcggctcactgcaaccnccctcncctggtttcaagctatnctcttgcctcagactcccacgtagctgggattacaggtgcgtgccaccacacccagctaattgtttgtgtttttagtaggaatggggnttcaccatgttggccaggctggtcttgaactcctgacctcaagncatacacccacctcagcctctggaagtgctgggattacaggcgtgagatagtccactacacccagcccagggatngaatttttaaaaacttttaaaaatgttcacataggaaatgttattnttgctttattcattttcatgacacaaggtat

SEQ ID NO: 597733 - DNA, 168 bp, Homo sapiens
gctacatagaataatccaccccttacgagtgcgggttcgaccctatatcccccgcccgcggtcccttatctccatcagaaattcgttcttatgtaggctattacctgtcttacttattgtggagtcgtagaaatttgcctctccgtttgtaccccgtcaccatgtagc

SEQ ID NO: 597734 - DNA, 443 bp, Homo sapiens
atatctagaggctggcctctacttccagcatgcgtgtgcacgcacacatggacacacaagtgtacacacacattgttcgagtgactcttgggatttcaaggtcaaagtaaacacatactcacagttttgaataaaacaagcacaggtgaacatgtgtatacatacacacacacacacacacacgcacacacacacacacacacacaaccccagtggaaggaacgctcatctcttagcgcaaatatgtgccaagggaagaagggggagggtctctgtagactcgcttcaggtgaagttgcaacataaacactgtaatatacagctaaaaaaatacatacaaaaattgcacacatatccatagaaggggagcacaggctgcacacatggtgaacagctctcaatcacccacctcagcaatcagaattcctacagccatttaggta

SEQ ID NO: 597735 - DNA, 352 bp, Homo sapiens
tcccgttttcacgctgatctcatgagtataggagtgtaagagcaaagggtgagataggacgagttatagggaaggcttctggggaccctcagtccccacgatgctctagggtgcaggttagaaaagatgtgccctaggccaggcgtggtggctcatgcctgtaatcccagctactcagcaggctgagacaggaggattgcttgaacccgggacgcagaggttgtagtgatccaagatcgcgccactgcactctagcctgggcaacagagcaggactccgtctcaaacaaacaaactagccaggcacggtgccacatgcctgtagtcccagctacttgggaaggctgagacag

SEQ ID NO: 597736 - DNA, 124 bp, Homo sapiens
  misc_feature (20)..(20): n is a, c, g, or t
tttctgaaaatgtgatacangtctacagcatacaaccgtatcttctggtaccaaagaacaacaaatgagttcacgcttatatttctatttcaaatttagtatacggttttacacctttttctca

SEQ ID NO: 597737 - DNA, 355 bp, Homo sapiens
ttgatgttatatggctccccttgtcagatcatctctctctgcgcctgtgagagagcttcacataatgtaagtgtctgagctcccagcatgcagactgtgagtcataaccctttcttataaatatcagtcttggtatgcttatagcagagatatacaaaccaaaccaagcagtcacagaacgatggttgctatgagctgaagcatgtgcatgcatgagccagtcataatgatgagtaggagtgatgcggaagtcagcagagccacagttacatgtggacaaatggattgtcttacccatggctgatgctccaaagaggagggtaatcacacgatgggcgaaaagcaatgatacagg

SEQ ID NO: 597738 - DNA, 102 bp, Homo sapiens
ccgcaaaggaagctgaggtgggtggatcacctaaagccagaagttcgagaccagcctgaccagcacgtggtgaaaccccgtctctatttggcccttatcgag

SEQ ID NO: 597739 - DNA, 815 bp, Homo sapiens
ggcgtcagtttgagtctaggttggagttggaacctgtggagatgctggaaggaaaccccacccccccatagtgccccctggtggaccggtgagtggaatcttacccccaaattgcgccctgcctagcataggaactgtgcatgttagtgatgtgctagcagcagagtacctgtgtaccgatgtgtgtgcagctatctccatcgtgagtgccatccagcacttgagtgttgctgcattgactgtgtgcactgtgtctcacctactgatgctttattaaatgtgaacccacatgtttgcctgaccccagcaaactagaaaggagcttacttgtcatcctgacacctggaagtaccaaagaactgatgatagtgctatgtgatgattgtgacttgaaccatcgactattgagtagtttgtggtgaggacggatgtgtaattactatggttgtgagctaccgtgattacatgatgttgcattgtatatgacatattgttgtgtgacactagagatagaatgaattgaaagacactatatattgtcaagcaatgttcttgcaatatatagacgcattgaatgacatttgttgtctacatgtcatgttgtctttgatgctcgtggcacacaatgctgtcagctgggtatgcaaacagacatcttgcaatcaatggttttgttgacccttgcttcagcagagtggtacttgagttcataaccgatgctcattgccttggctcaggtcaccttttgtatgcttgactcttcctcacaagggactcttgtagtttctatcattgcatctgatgacaatagaatt

SEQ ID NO: 597740 - DNA, 543 bp, Homo sapiens
  misc_feature (499)..(499): n is a, c, g, or t
tcaaatgtatttctggttctaggtctttcaggaattgccacactgtcttccacaatggttatactaatttacactcccaccaacactgtaaaagtgttcctttttctacacaacctcgccagcttctgtttttgtttttttttcccccttttaataagctgttctaactggtatgagatgatatctcattgtggttttggtttgcatttctctaataatctgtgatgttgagctttttttcatgtttgttggtcacatatatatcttcttttgagaattgtctattcatgtccttagcccacttttggtgggattgtttgtttttgtcttgctaatttgtttgagtttgttgtagattctggatattagtcctttgtcagttgtatatagattgtgaagattttcgcccactctgtgggttgtctgtttactctgctgactgttgcttttgccatgcaaaagctctttcgtttaattaagtccaagctatttatcgttnttaactgcatttgctttttggttcttcatcatgaaatccttgtc

SEQ ID NO: 597741 - DNA, 417 bp, Homo sapiens
  misc_feature (12)..(12): n is a, c, g, or t
  misc_feature (294)..(294): n is a, c, g, or t
  misc_feature (313)..(313): n is a, c, g, or t
  misc_feature (348)..(348): n is a, c, g, or t
  misc_feature (357)..(357): n is a, c, g, or t
  misc_feature (369)..(369): n is a, c, g, or t
  misc_feature (378)..(378): n is a, c, g, or t
  misc_feature (386)..(386): n is a, c, g, or t
  misc_feature (390)..(390): n is a, c, g, or t
ggaaagccctcngcggttacagcgcacctcccaaccatcaaattgagcctgccatcaaggcctccttaaagttgcatatagatgtgaatgctcacacacagatctcctactccatccagtcctgaggagccttaggatgcagcatgccttcaggagacacttgtgggcccccggcattcccttgatatcagtccccttccctgcagagccttgcctttcccctctgcctgtttccttttcctctcccaaccctttggttggtgattcaacttgggctccaaaacttgggtaagntttgggccttcccaaaatnatggccccttcctaaaccctcatgggtggtgtttnaaaggggtnaagggcctggancccctttgntaaaaaanaccnataaagggcaggtgtggaaccggccca

SEQ ID NO: 597742 - DNA, 260 bp, Homo sapiens
agcggctacgctgctggagtgggaagatgtgagggaaaaacagggttatgactcactgcagccttaacctccccaactcagtctcctgagtagctggggctacaagagtacaccatctcatctggctaatttttgtattttttgtagagacagggttttgccacattgcccaggctggtatgaactcttgggctcaagtgatctgcctgcctcagcctcccacagtgttgggattacagtagtgtgagccacagggtacc

SEQ ID NO: 597743 - DNA, 542 bp, Homo sapiens
gagcggttgactgttgctagtgccaaaccaaggatgacaaggtcaccaggactgaaaacacgtgaaatagagctgtgtagggttgccaagagtgcaattatatgattgtgagccatacatcgcgggctggagcttaatgattcataacatttggatgtagtggaccacccctgcttctatttgagtatacggcatacgacaaaaaatcgattgtgcgcgtttaggaagaaactactgtagacttagaaagatctggatgtacgacggaacggaaatcattttgttattgctaagtgtaccatctatcagactggttaccacttcatctgactgcaatacaggccataaagaagggcttggatttttggtgtacccagtattcacagaaactgagcagagacatgagggcatgatcccaggtggttccagggactgaattgcttatgtgagacctttgcgagagagaacagagcaagatatggtggtacgatatgctatgagggaaggaatgccttcctggacgtacactggagccagtgtgg

SEQ ID NO: 597744 - DNA, 515 bp, Homo sapiens
  misc_feature (11)..(11): n is a, c, g, or t
  misc_feature (226)..(226): n is a, c, g, or t
  misc_feature (254)..(254): n is a, c, g, or t
  misc_feature (266)..(266): n is a, c, g, or t
  misc_feature (273)..(273): n is a, c, g, or t
  misc_feature (280)..(280): n is a, c, g, or t
  misc_feature (282)..(282): n is a, c, g, or t
  misc_feature (285)..(285): n is a, c, g, or t
  misc_feature (305)..(305): n is a, c, g, or t
  misc_feature (399)..(399): n is a, c, g, or t
  misc_feature (401)..(401): n is a, c, g, or t
  misc_feature (416)..(416): n is a, c, g, or t
  misc_feature (419)..(419): n is a, c, g, or t
  misc_feature (426)..(427): n is a, c, g, or t
cagcagacggnatccaagacgtcttacaggacacactggcccagccctgggtgcagccagccctgcatccaccgctgcgctcgccaacttcagccaccgcccccatggggactccagagggccgggctgcttaaccatttcccctgcgtctgcacgactgccctttccctttatttcctcctccaggattggagtgcactccctccacgaaggaagtgctgtggcngaaagtggggagagcgagcggggatctncagggcactgangcttccnccaagcntngcngcatgggcgcgcatgcaggnagcttgagggagcgatgcgtaaaaaaagaaaaggaaagaaaaaacaaaaacaaacccaccccaagtgtgtgttttctcaaactaaaggagagantnagggatggggtgggntgnggcgggnntggcgtagtgaagagaggaggggtggggaccaccggggcagagtgagggtgtgtgcgctggctgagcgcttgctcgcggatgtgctga

SEQ ID NO: 597745 - DNA, 810 bp, Homo sapiens
  misc_feature (727)..(727): n is a, c, g, or t
  misc_feature (744)..(744): n is a, c, g, or t
  misc_feature (767)..(767): n is a, c, g, or t
aatttcccagcgttcctcaataccccatctctctaacccaccaaaagggcctacagcccatcgtaaacaagctctgctcatgcagtcttcttagaccaacacactctccatataacacccctatcctccctgttaaaaagtctgatggctcataccgactcgttcacaacctccaagccatcagtcaagctgtcctccctattcatcccatagtccataacccctatccacttctctctctcgtcgctaccaacaccaccctctacactgcaattgacctgaaggatgccttctttaccatttccctacaccctgattcccaaaacctatttgctttcacctggactgaccctgacaccctccagtcacaacaactcacatggactgtcctccctcagggcttcagggatagccctcatttctttggacaagctctagcccgaaacctcacttccttaaacctgtctcccagtcatcttcaatatgtggacgaccttcttctttgcagcccctctctaaaagactctcaaactcacacggccactgctctcttaaactttctcgctatcaaagggtatagggtctccccctccaaggcccaactctccatctccatgatgacttacttaggaattcaactttcccctggggcccaggctatgacttcagccagggcagcattaatagaaaatctacccccacccttcttcaaaagcgaaatcctttnctttccaaggctagcangcttctttagaatatgggatttncaactttggccttctaagctcatccctttatgaagtgggccaa

SEQ ID NO: 597746 - DNA, 690 bp, Homo sapiens
ggagggtgtgatcgtgtatatgagtagcatgaggaggatgtgactgaatgtgcatgtgtgggtgtgacagctgcaggtgtgactgcatgtgaaggtgtcactgagtggtgccccgatagggtgtgactggatgtgagagtgtgtgactgcatgggaggatatgagtgtgccatgactgtgcatgtcacggtgtgagcatgagttgcatgagagatgtgatctgcactgtgagatgatatgtgatgtagtgacactgtagcgaagttgagtgtaacccgcggagagtctgccgagtgttgacatgtaaatgtgcactgcgggatgatggttgcttgtaaggtagtgagtgatcggtgcgtgatgactgctaaggatcgtgagtgatgacgttgtgagagagtgtgaaggcgatcgctgggaggtagctccaccactgatggagcgacagacttggtcacatatatcctaacagtgccgagagagcagtgcctccctgtgtgccgagtcaaaagccggcgaggggttgagcgctggtgtcggcgcaccggagatttccagtgcatcaggccggattcggtgcgtgggccgtggtcacaccagctcagaaagatcggagaggcatcttttgcgttgactaaacttacagccaaggtagacaagccacctgccgctcccaaggggcccggccaa

SEQ ID NO: 597747 - DNA, 852 bp, Homo sapiens
ggacccggtgggggagaggctggtgtttcctcctcctcggctcaccattccagaccaaatattgaaaaaatggtggacctcacccaggtaatgtatgatgaagtatcatggctttggcttgctatggatcaaatgattctttgcaagaaatgatgctgtatgaggtagcctgcaatctgcttctatagatggacgaagaaaggttctgccaatccagaagagtgtgtagctagttggtcaaaggagaaaatgccaagaagtatcttcgaacgagatgacggagttagaacgtgtacgcagagcccactgaatgacttgaaaacattagttattccatttccttggaagtgtggctcctgtatcctttgagtggtcccgaggccctctacaggccatccgtggatctatcagaacgtattctgtggggagacacggatctaccacagcatgtgcatattggataccccttccccagcaaatagagctcagagtgttggtggggatatgggagtctagtctttccatggcttacaggtctgctgaaaagtaaattggtacctgttaaggaaaatcatacaatcagacagtccagttggttgtataggagttctgtacctttcaatttataactgaatacttcttaggatgttaggtaaggaggggggcagaggaattatgaactgcgggtaacccctttctgatattggattgccaaaatcctgtatccttgttccccttggttcgaagtttacctagtattctcaagcctggggggtttaacagactcctttaaagggcaccatgttgtcgacttcccaccctcttggatttaaatggcgtgggaaccctttg

SEQ ID NO: 597748 - DNA, 117 bp, Homo sapiens
ttcgagtagatttatcattactactagcaaagaaagaagcgtgagacttcctgtcctcctactcgtaggtgtatcatattctactagcaacgaaagaagccgtgagacttcctgtcc

SEQ ID NO: 597749 - DNA, 736 bp, Homo sapiens
ctgtcgaccaggatagtgagttcgccgaggggtccctagccatgcggaactgtgcagcaggtatgttggagacatgaagcagtaagcacgaggatggaggcctagaaatacatagggcgtggtggtgcatgaaagaagagcagagcctggaggcccggctagtcagattctggctccaatcatgtgtggccaaaagtgagtttgattctatacaggcgtgtgaaaatgaccagagtagagaccatctgcggtactattgtgcttgttcctgggcccttcagcaaaaagagttgctgatcaatggcatcccaagtctaggctggataatttccttatctggaatagaatcgccatcagccgcagcatgaaggcagatgcgtactgataactccagctcgcatccaggcacagcacaggacatagcagccctctcagtcatatgatattacgttcatttcgctgacacgaggggggtcctcgggatagggcaccctggttcagctggaggcgagtagaacgagggcgtttgtgtctcctctgcttctcagcgtcgtgaatgctgttttgctcactccctctgcagtaagtcaggtcggcctcttctctggggagcatgcctcgcttagacagctttgaaagtgtgaggtaaatcgaaggactcaaaaatcagaagcaatgccttgctaaacccagggactgggggggaggagggggcctgggtacaagtgcgggaatt

SEQ ID NO: 597750 - DNA, 627 bp, Homo sapiens
ttatttatgaaatcctctggaagcctttaatgttagattttgaaataaacaacatcagaaaattctacaaatgtaattctaagaaagaaggacaaagaagaaatataacaatctcagttttgtttaaaaatgcaatatacatatatacatacccataggagggagacaataaaaagcattagcagtagtgaatgtctggcattccaaacaaaggggcaggaatgggtaggtttactttatgaaatccgctccctgtatttctgagttcttctgcaatgaacatgtagtacagtgtcacttgaagatggagcaaaagcagtatttttaaaaacaggaaaccaagtccacaatattcatatttactcattttcatcttcactgtcaaaagaaaggagactgctattttttatttgtttttgtgagttctttctaactgaactttgcttatttacatcatcttcattggttttcttctttttggagcttgctgttaaacctgaacacttttcatctgaggaacgcttaactggttttcgataaactattcttccatcagctggaggtggttcttcatctgttttggcagcctttatttctgctttaattttcatgacaataggctcaggc

SEQ ID NO: 597751 - DNA, 559 bp, Homo sapiens
tgaatggaaccttcctctctgtttcctactcccaccctgagagtattcaggtcacagggcggccatctgtgggccagatccggtctgcagatatgtgggaaattactattaccttggccctctcaggttttattatgatgattattatttttatttaaaggtattttccacatttaaaaagcaagagattttaaattccacttgctccgtgagactgtaatgctccagctccttcccagcaggacaaccttgtccgggattgagcagccaccaccttccccaaaagggcttacactcctctcagaggcctctggggccagtttaatgcatttatgttacttgtggaggcagtgggaggcaggctcaaatttgggaggtcaaatttgtgctgtgtgactttggacgaggtacttaacctctctgtgcctcagttttttcctctctaaaaatggagcaaataatggtcctgacttcgaaggattggtgcgattaaatgagtgaaatatatataaagaactcagaacactatcgggcgtgtagtaaatgttcaaggaacgtt

SEQ ID NO: 597752 - DNA, 788 bp, Homo sapiens
ggctggtacgctcggattaacgggactcgccggctgctggggcaggctggcgaatgttcctgaatatatcacatgtgtgtgataaacatgaagatgtatgaaaaattgtgtctgtagagagaaaatggaaggcttttcattctacttccacattttcattccagcagctatttctgttttggaagatgagtactgaatcttgcaatgaaatttttttaacttataacaagaccacaggaaaatgaagcgcagagacgttaaataactctctcaaggtcatgccagctgagaagcagatgcagactttgaactccagtgccagcccttgttaatcactcatatctgtacttgtctttcagtgttcattatgcctattgttttgaaaaacatggttaccctgatgaaattttacatgtagcaagaaagcttcacacgtacgagagctctcaggatataattatttcagacagatactgggaacataagatggcttatcaatctaagatggccttcctgtccttcggattgaactgaaaccatccctgattccagggataggtagatgatccgggtttggacaatcaagatattgaaccagcctggagctacaagtgtactggagatgggaacaatgcaaacgttggtccaacattgtagtactaagaagccagtacatttctacaatgcctgatggaatgatagggtatgcataaatgttacatagtgaggatctggagtataacaggaactgaagaaaggtaaatggaagtttgaatatttgtaaatga

SEQ ID NO: 597753 - DNA, 216 bp, Homo sapiens
  misc_feature (33)..(33): n is a, c, g, or t
atcccgaagtctgaaggagagaaccaaccaggntcaaatttcttttaatagcgtgtttcagcctctttaatctctttataagttaactaataaatctattttctgtcagactctgcaaatagtctttataatcacaacagtaagcaagctgacttttgtaatgtgctcaatacaaatacttgtgaacttttaatatgtcgagtgcttgcattgtga

SEQ ID NO: 597754 - DNA, 217 bp, Homo sapiens
ttgggggacgcacacatacaaatctactattttgacaataaatatactcttcaggtacaatgtggactttgttcaattgtcgttggcattgtgcaagagattcaggtagtgactgagagaactttggagtgaggtcagggatgggtggttagccaagacttgtaacttccaggcagaatgaaaagttgtaagtcttggctaaccacccaaccccgag

SEQ ID NO: 597755 - DNA, 358 bp, Homo sapiens
aggagcgaggctgtgctggcaggccacagcgtggcgtgggaacccagtgctgcgcacctcagaatgggatactgccctcaatccgatgccatctttgagctgctgacgggccggagcacctggagctgattgggcgctgcgcggtgtcccggaggcccaggttgcccagaccgtggttcgggcctgggcgtctgggactctcatggtacgcagaccggtcctgcaggcacctacagcggagggaacaaactgcaagctgcgagcggccctggtgctgtttgtgggccccagccgtggtgttcctggagcgagccgaccacaggcatggaccccagcgcgcggcgcttcctttggaaac

SEQ ID NO: 597756 - DNA, 1227 bp, Homo sapiens
tcccgtcaccgccacctgcgtagtctatgcgtcgccactattgacgtacggctgctctcactgaagtgatccttgaggatgtgtaaacgcatattccttgtgcgctgctgttggcgaacagcaggctcgaaggtgttggagacagtgggagaacagagagactagacgacatgagatgtgaagttaagagaaacgtattgttctgaagccagaagagaacagcaagcaactatcgacacaaaacctcattctgttgaacagatgcttggatagcctggccaacacgtacttaggatggaggagtgcgagcgactcttgcgataccagtgcatatctctacagcccttcctattgagtggggcaagccacttcgtaaacgtccagggtaggtgatacggagtgacctggagcccattgtgttcgtagcatgagtagtagaacagtccaactgcatgtaatgcgtacagcaccactagtggcatagtaagtcattcctataggagagaggcacggatagggacaatgaatggaacgaagacatgcgctcatgttggcatttcgctcgcgaccgagacagtgactcctgggtaaacctacacccgtcgagttactgctcgaccggtctcgatccacggctctatttgcacacgatagccggatctcacggggatgttatttatctaaccatcaaatatcggaaagcgagattgagacttttgcgtgagaacagaatttgcgcccggtatgtaggggcgatccaaatatgtcgcgccgtttgaggcaattcccattcgcgagcgtcatcataggtaggacttccaccccatggtctgtggtgactcgcggttatagtactccgttgacgcccttgcaaggcgtgttggaagcgcgctagacgcgtgatatgcgaggacggggaagcgcaacacagtgacccggggaatctgtttgtcactctcaacaaggcgtcgagtgtcgttaccaaaccttggtgttggattgacctatggaaaggacctaagcgctctaataaatggatccctaagagataccaaagaaccctagcggcaaagagtccgaggcaaagccgagcaactaagaggatgtaaaatacgccacaatgcccctatggcgtggccccccacagcgtttgtccccccacctgttcgaactcctcaagactttggccatctggccccacaactaagggcaagcgggtcacttgca

SEQ ID NO: 597757 - DNA, 178 bp, Homo sapiens
gccgacttgcaagtacaagtttgagaactggggtcgtgtatgggggcacaggaccaaagtccgccaaggcaccctgaggaggcggcgtacaatgcttcagtgccaggagaccatccgtcgtaccaagccctgaccccagaccaaggcaaggccaaggccaggaagggaagggaaggac

SEQ ID NO: 597758 - DNA, 612 bp, Homo sapiens
  misc_feature (52)..(52): n is a, c, g, or t
  misc_feature (61)..(61): n is a, c, g, or t
  misc_feature (64)..(65): n is a, c, g, or t
  misc_feature (70)..(70): n is a, c, g, or t
  misc_feature (73)..(75): n is a, c, g, or t
  misc_feature (84)..(84): n is a, c, g, or t
  misc_feature (92)..(92): n is a, c, g, or t
  misc_feature (97)..(97): n is a, c, g, or t
  misc_feature (99)..(99): n is a, c, g, or t
  misc_feature (102)..(102): n is a, c, g, or t
  misc_feature (111)..(111): n is a, c, g, or t
  misc_feature (115)..(115): n is a, c, g, or t
  misc_feature (121)..(121): n is a, c, g, or t
  misc_feature (143)..(143): n is a, c, g, or t
  misc_feature (151)..(151): n is a, c, g, or t
  misc_feature (167)..(167): n is a, c, g, or t
  misc_feature (169)..(169): n is a, c, g, or t
  misc_feature (257)..(257): n is a, c, g, or t
  misc_feature (279)..(279): n is a, c, g, or t
  misc_feature (284)..(284): n is a, c, g, or t
  misc_feature (462)..(462): n is a, c, g, or t
  misc_feature (493)..(493): n is a, c, g, or t
tatagtagggatcgttaacttctttttgagatagagatttgtgttatcatantggaggatnatnngctgntgnnngaatgtaanactttganaatgnanaangtgagttangtgngaggtnttccctgcagtgtgggatttangctgattnaggaatgggttgttcntngggatatggttctgacgcgggaggagcttgtaatcctgaggaagtgtatgcacgtgtgcctgtgttgtgccaacattgatatcatgangagcatgatgatccatggttangagtnctgggctctccactgtcattgttccagtcccggttccctgcagtgcatagccggcgggcaggttttggccagctggtttaggatggtggtggatggcgccatgtttaatcagaggtttatatggtaccgggaggtggtgaattacaacatgccaaaagaggtaatgtttatgtccagngtgtttatgaggggtcgccacctaatctacntgcgcttgtggtatgatggccacgtgggttctgtggtccccgccatgagctttggatacagcgccttgcactgtgggattttgaacgtcgacgcggccgcgaatttagtagtagtaggc

SEQ ID NO: 597759 - DNA, 195 bp, Homo sapiens
tcgagctcggtaccaaatatcgagagctacttctacttcttttccccagagtttactgtgcaagataaattagattttaactgctaagtcaaacttaataggtattctttcactctttttttttttggaggtaagctcacagcagtctccaactcccaagctcaagtgattcctccggcaaatgtgggggggatc

SEQ ID NO: 597760 - DNA, 776 bp, Homo sapiens
  misc_feature (450)..(450): n is a, c, g, or t
  misc_feature (557)..(557): n is a, c, g, or t
  misc_feature (559)..(559): n is a, c, g, or t
  misc_feature (583)..(583): n is a, c, g, or t
  misc_feature (616)..(616): n is a, c, g, or t
tgcggccggaccgtgtggccatgcaggatgcgacggccagatggccatgctccagttcatcagcagcggtgctgtccaatggtggctgtgccatccaccatccactgtgaccatctgattgaatgcccaggttgggggcgagaaagacctgcgcctgggccaagtgacatcgaaccatgtgaacgatttactaagtattccctgtgcaacctgcatggatgccaatatattggctgtgtgtgcttctgtgaagacctggatctgtgaatcagttcagccagagttcttcttggaagaacatatgcgtacacctgtgtgttccttcgtgatttggcacatgagctcaccaacacgccaccatatgggtggccggcacttggagggcattctgcatttggagcttgggggtgccgactgctgtggatgtcatggctgggatcccctgggagntgaagtgccccaaggtgattggcgtgaagctgacgggctctctctccggttggtcctcacccaaagatgtgatcctgaaggtggcaggcatcctcacgagagaaagngngtttcaggcgcattttgtggaatnaccacgggcctggtgtagactccatctcctgcnctgcagccaccctgagctggggccctgagctctgatccccatggcctcccctcaccggcccaggtttttacccagggcctcaagggatgagtcggcccggtgtcccacctctctctgcgtgggaggagaagcattgcagctccctggtgtgccgatgccg

SEQ ID NO: 597761 - DNA, 1345 bp, Homo sapiens
  misc_feature (942)..(942): n is a, c, g, or t
ttgtggtatttgttgatgttattgtgtgtggtggtgtgtttgtgtatgtttgtggtgtgttgttgggtttgtgtatgttgtttatagtgctttatattctttgatttgtagtgtgctaagtattgtgtttggtgatttgattagtgtatttttgaatgacttatgtgttgtgtttttgtttaagtgtttgagttttattgtgtgagagatttgtttttttatggcattatatcttttatagctttaggttttcatatagttgtttatttttatgtttctctttgctttttttgtgattgtggtgtggttgtgatggattgtattttatgtcgtttgtgtgtgagataagtagaaatacaaaaaaaaaaggaagaagctagtgattgtttatctttactagattaatgttttttgagatgtgtttttatgtagttcgtagactggctggttatgatcgtttctccttatgtccatatggctgtgcctcatgtgtttcttgttgtttacgtcggtcttgtgttgacttgtcttgtgtgggggcgcccctgtctatgccgagccctggtcacgctcccacgtggccctcaggtgttttggggccgcgtttagccgtagcccggtgaccgcctgctctctgattaacggggtgacccttcaaacttcatttacgcccctttttgggcgctatggcgaccagttggccccgccagtgtgcattatgggggtcaccctagccccaccagttgtgcggtcgaccagtttctgatataagtggggtccgtgtgaaccgtgttcccagccctttttctcccactcgctcacgtgaccccttcttggtttaacgtcccctgccccttcttgaccccttgggccctcgatatgacatgaatggctcccccacttagccgatgatcctcatccggaccgccctttcgaccttgnccgaaaggggagttccgaacctagttctccacggctttcaaccttcggattatcgccgccacggcccctttcgccctagtttcttcactagaccggattaccaccaaccattgatgtataataaacaccctctacccactatccaatcttcctagggaccaacatatgtacgccactcttcccctgaacatctaccaccaacaatattttgtccacccagaacccttacttcgataaccatccctggtttttatgtaattcggaaccagcatacccccgattccgctacgacccactcatacacctcctatggaaaaacttcctacccctcaccctagccttacttatatgataagtctccataccccttgccattctcccgcagttccccctccaaccctta

SEQ ID NO: 597762 - DNA, 312 bp, Homo sapiens
  misc_feature (114)..(114): n is a, c, g, or t
  misc_feature (291)..(291): n is a, c, g, or t
aaatgagcaatcccaaactgcaagtgccgtaagtgggcctgtgacgtcacaccgcccggcccgaggtatcgcattgtgcggggggaggtccacactacagctgtcctctcgtcnagaaggcaccacctcgctttcatgtcccgtgtgttttgggaaaagcagtatggtgtgtcatgtctaagcggcgaacacttccctccctctgtccttgaggttgtaatataaaaactgtggtttctgtacgtgtggggttgggaattctctgacgggttgctcgttcataagcacaangcttacgcttgagttgctgaa

SEQ ID NO: 597763 - DNA, 339 bp, Homo sapiens
cgtctctactgtgttcatgatctcctcctggtactttgtactcgccagccttctgctcccagaatgtcccatgtccttgttcttgcccctccctctcctggtcctctcctaggctttgtctgctattctgtgctttcttccccctgccctcctgcctgtgcgtcccctccatgaggaccaccctggaatctgactaaacctgtcccctgcggtctggcgcagtgcctcacacctgtcatcccagcactttgagaggccaaggtgggctgatcatcagatcaggagatcaagaccatcctggccaatcattgtgaaaccccaccccgtctggtggagcgc

SEQ ID NO: 597764 - DNA, 836 bp, Homo sapiens
gagtgtgtggacctcttggtggggccgggggctgcccaggcaagcattcaggaagacccctggaactgctacatgtgcgggcacaagggtaccttacgggctgatggcgggacgagaggactggcctcccggtccagatgtcttcgactaataaccacgaccaggaattgacctccaaaggttacccactgtccagacatgagaagaggaagcccatccgggtgctgtctctcttcgatggaacccgctaccagggctcctggtgctagaaagacttgaggcattcaggtggaccgtacattagcactcggaaggtgtgtgaggaactcccatcacaggtgggccatggagcggacaccaagtgagaaagatcatgtacgggtcagaggacacgtgcagaagacgtcaacacaagaagcatatccaagaggaaatgagggacccatgcgaaatctagcgtggaatatggggggagcgaggtaccacttgcaaattgaacgcttcctaccaatacaggtcaaacaccatgatacacaaaagagggccgtcctaaccgacggagcacaagacacggatacaacctaccagaagtaactaacccagaccgtccactgccattgagtgcgacgaggacccacaggaagcgcgaggaatgacatacagcccacctagcatgactgggataatacagaagcaacagcacagtgggccccaaggggaagtaagtcgaccaagacagcggacagactaacagagagaccatagaacgaaccaaacacctgagcagggatagatgccaaaggaagagcagaatggcagcagaagaccagaaacga

SEQ ID NO: 597765 - DNA, 118 bp, Homo sapiens
atcccccgtcagcactgaatacaaaacttatgtccacattcaaggccagatgaaatacgagattaggagtagtacaagtagcagatctgacaagggcatatcctgttgaatggagaaa

SEQ ID NO: 597766 - DNA, 458 bp, Homo sapiens
acactgctgtctcttttactctctactatccccacatcttaccacctttcccttacttgccttcacctgcttgacaaagaaaatggatctcttagatatggattccctccgcaccttaccttcatatcaacaaatctttctgcacccatgtacatctttatctcctttctttccatcctagtgtgagagttattttctttgagctaatgctttcacttgtgctctatatcctgttctctacttcctcagaggccttgtatttctcctccacctcagattctgtcatcagcatatatgtaaacatgttcagatgtgtcattttttaaatagcagaatatctgtcactctcactctacttgaggtttcattttctttctctttttttcttaccagttgtctgttttctctgctcctattcactcttcagtcccctagaatctgacctctgtactctttat

SEQ ID NO: 597767 - DNA, 116 bp, Homo sapiens
aaatagacatcactcagtctacaagaatatcaaaaggtattaagacattctaggtcttcagacactattaagcagatgtagcctcgtaaaggtcctgaagattttactatgatact

SEQ ID NO: 597768 - DNA, 300 bp, Homo sapiens
gaagacatgaagcacattcctgttagctaccaacagaaaaggggcggggtacacactgggaacattccaagccccccccaaaaggaacccagttctactgtgccggggaattcctgttggaattccggccgttttgccctggggctcaatcaatacccgggacctttaacccccagggtgggccaggccggttcttaaaatttttcccccacgggaaaaaacttgggaccacaggggaattttccccccacccctttaaaccccataaggggttctcatcatccctccctgtgcccctcg

SEQ ID NO: 597769 - DNA, 132 bp, Homo sapiens
cctctgactatctacaggacattgagaatgctatagaaaacctttctccctgagatgagtgaaaaatgtgaggttttacagtattctgcaatggaagctcaagattcaaaaaaggtggtagaggtgaggtga

SEQ ID NO: 597770 - DNA, 422 bp, Homo sapiens
atcgtgcgtgaggctgaactgcgcgaaacattggtgcgtttagtattggaagaacacctgatcgccgaaggggcaggcgcactggcattggccgctggccgccgcgttgcaggtaagcgcaagtgtgcagtggtctccggaggtaatattgacgctgcagtactggccaaactgttgtccgaagtaagaccacggacaccccggataccacgtaggcgtagtgcagatacgccccaacaattgcggcagtttaccgttcccttttatctgattccaccccatatccacgcctgccaatagcactgctgtagaggagtattaactggtgaacacaagcatatgcagccagccaccccgtatcctgatttttgataccaccctgcgggacggagagcaatcttccgtttggattatgtctgaac

SEQ ID NO: 597771 - DNA, 1302 bp, Homo sapiens
  misc_feature (251)..(251): n is a, c, g, or t
  misc_feature (1302)..(1302): n is a, c, g, or t
ggaacccgcggcgcatggtggcgttgagtgctctgcgcggcgctgcgtccagggagacggtgggcgccaacattcgcgcgttccggagacgcgggcgtggactcccttccagccgcagtcggacggctccggggtcggtcagggcctgggcccgagtgttgtatgcagtgactggcctgcggtgccattgcgttggccattgtgtgatggcgcagagaggttgccttgtctgcttggcctgtgctggaccntcccctgccagggcctgggcttgggtcccctggctgcacggatgcggccttgccgcggggagggcccccctggcccgtgtggcttgtgctgtagtgatgtgccgcaagggccgcaccggtggccttaagttggggttggcgacggtggaaagggggccggggcagttttggggcggcgattgaaggcctggagaagcctgtggtgttgcggggaccggcctttaccgaacaatttcccccaggtcgggcaccccctgttgcccttcgggggcgacgggaacctttcggaagggcccgggcctccagaaggcttcggaaagagaaccttcggcggccaggtaattaggaccgtgaaaaatggccccgctttcgccttgcccctttcttcgtagagggcaggcctatcaaatggccctttgatttggtttactcctttggtttgggcgccccatgaacacacgggtttttggccacgggtttcttttccccccaacgtttcctgagaaggggcccaacaccaacagagcgttccgatgcacgacgcgcgtggtttgttttcgccacacacttgggggaggaactcttccctgaaatcgacaatgggccccaagtgtgccttttggaagacggcttgtgccaccaagcaaccgtttggggtcctctggtaaacactttgcggggccttttgccccttttggcgaacgcgggaggtggggcacccggttggggggcacaatttccccaatttttccccaaagaggtgggagccccgggggggcgggcaactttacctttttccacagcacaggaaaggggcaaatttcttcgggacccgtgtgcgctttttaattcaaacacggtggcgcaggcggcctttgtggaccttcctttggacaaaggcccccgctgccaagttcgtttgggcaagagctcccatgggataacgcttgcacgagggggccccctccgttggtgtttaaacaggcgggaaaaaacaactcttgtggcgaaattgtggcgatatcgggctgtgttacaccaagaaaattgn

SEQ ID NO: 597772 - DNA, 633 bp, Homo sapiens
cttgtgtgaaaagcccagtgtgacagcgtcatgatgtagtagtgtcttactggttttctaataaatccttccgtataaaaatgtatcggctctttctatcatcagaatagtgaaaaatcgtcatggatgtcaaggtctattaaaagcataagttgggaagacaggcttgacgaaattgaggacatgattaaaattgcagtgaagtgcgacatgtttctagcagaatctaatttccgccataatgtgtcctccctgtccaaagttgggaatgacttaatgtcaattcgtctgttggcttgtctcacaagtacatacttccttatgtatgccattaagatagatatgaatattcatcccaaatgcccagtatttgcttaatatgtatagtgctgttttagacacaaatctggataaagtgtgcacaaagatacccctttgcacagcatagttaatgttttcatgcttccattaaatacaacaggacttaacctctgttcctctatacatagaaactgcggccagctccagagagacccatagacctggtgcgtggacttcatagatgaattccagctgttgagcggacgcttaccgacatatataccgccacaagaccaccaccagcccgggggc

SEQ ID NO: 597773 - DNA, 540 bp, Homo sapiens
  misc_feature (32)..(32): n is a, c, g, or t
  misc_feature (62)..(62): n is a, c, g, or t
  misc_feature (65)..(65): n is a, c, g, or t
  misc_feature (93)..(93): n is a, c, g, or t
  misc_feature (185)..(185): n is a, c, g, or t
  misc_feature (215)..(215): n is a, c, g, or t
  misc_feature (245)..(245): n is a, c, g, or t
  misc_feature (249)..(249): n is a, c, g, or t
  misc_feature (269)..(269): n is a, c, g, or t
  misc_feature (286)..(286): n is a, c, g, or t
  misc_feature (314)..(314): n is a, c, g, or t
  misc_feature (343)..(343): n is a, c, g, or t
  misc_feature (345)..(345): n is a, c, g, or t
  misc_feature (377)..(377): n is a, c, g, or t
  misc_feature (391)..(391): n is a, c, g, or t
  misc_feature (404)..(404): n is a, c, g, or t
  misc_feature (416)..(416): n is a, c, g, or t
  misc_feature (419)..(419): n is a, c, g, or t
  misc_feature (422)..(423): n is a, c, g, or t
  misc_feature (430)..(430): n is a, c, g, or t
  misc_feature (478)..(478): n is a, c, g, or t
  misc_feature (494)..(494): n is a, c, g, or t
tattcttatacattgaacaacttattaattanttgttatttggcaaaatatcaaacatgcanatngtattcctacaagaattttgcctttatnttgtggatattagcgctaagcttattcctctccaaaattcaatgagttatggttccgctctgctatatgtattagtgttagtggtaatatgnaaaactgtttttgttttcagggttaagtgngcagattgtcttcgcatttggtggccagcngtgnaccctaatttttcatctatnttctgtgagtgaagttnaatttcatttcgtgagccctgagatagngtgctgagggttgtatacttttaatctanantttattccactcaatttgaaccccacataaanaagtctttgaagtnatttacagatggntgtaacttaagnaangannaaatttnctacttgtataggtaagactgataataaggcctttaactaagagttgnatattttatatgcacntttaacttgctaggagcaactcttaaaattacatctataattctgt

SEQ ID NO: 597774 - DNA, 838 bp, Homo sapiens
gcccacattatagagcggaatctagagagtgagcgacgtattgttagtagaattgtccagtgtagtgctcaggaatggtggagtgtactggttcaggctcctcttgtttcatctgaggtatttattcctgtgtcttactagtctggtaacagacccgaattatcggtgacccatcagctacatggagatgtatgtgtcgtagttctgtgaattcttcctcacgtccaattcttcaggtgctctttgggtgctcccctgtggttggtgctctatgcaaaagtggtgaatgccatttggtttcccggatagttagctgagcgctggtcatctgaggtgatcatgggaggatagtccctcggccattccctagtgtctgccctatagttgctgacatgctcgtcgaccttttgtctgcaggctctgtttgctcgattcagggcacctgtttgtgagtctctttgcccatccatcttgtcggtcagctggttagtctcctggctatgtccctttcttctagtcactgttactgctttggatatccgtggttcaatccgagcgattgaaatgcgccaggggttggtctaaccatagagtggaattgggcttagtactgggggttggttgcgctttgggttttgctcatcgagaatttgcagtccgccatatcttatcccgtggctggccttgtgctatgccttctttcctttattccttactcaggcattgaagcgcgaccctggaaagggcttgctccgttggcccatcggggggtcctaggggggcttttccaaggaggtacctggggcccgagaggcccttgcgaatcccacggggcccc

SEQ ID NO: 597775 - DNA, 479 bp, Homo sapiens
  misc_feature (410)..(410): n is a, c, g, or t
tctagaggatcccgttcagcacatataggtgatgaggtgagcacaagggaggatctggaagctagcagtagttttttttccgtgtcctgaatagtagttttataggtatgcgcttgttataaaccatgtaacttcacatctctgatatctgaacttttctgttttatttcacatacaaaagaagatacattaaaaaagaaagctaatcaagaacagttaatatgctctaattttagaaacaacaaaatttagtgaaaagaaaatcacctgaaccttgtagcttcagttgtcctcacagtacaaatgggtacctgagataatctataattctggcccaaatcatcaagcttgctataagactaattgaatattttctagatatgggtaaaatcaaagtaaaattaaatttngagtgaaaaaaaaacatgatatcagtaagggggtaaaagttcaactaatattaccagactaaatgtgct

SEQ ID NO: 597776 - DNA, 419 bp, Homo sapiens
aattcatgctttccactaaaatgtttgtatcaaatactttcctatttagattgatttcttttaatatcatatattattatactgtatgccccagagattggaacaaactattcctgtaaataacacataaaagatgagggtgagggggaataaatacagactgtaaaatgttttgctttttagaactcaaattaccattctgttttttcagatgtatttttccttcttagttgcagtaagaattgtcattttctttctctttttatagctcttagttttaaaatgtatatgtacataatgataatatatacatatatgtatattgcattaaatgactttttttctcagagaataccaaagtctgtttcctcctggaaaagtagttatgttacatactcccagctttgtcacagaacagg

SEQ ID NO: 597777 - DNA, 325 bp, Homo sapiens
acgagccagggaaaggcaggatagaaatgactggcagaggcatgggcacggtggcttacgcctgtaatccccacactttgggaggccgaggtgggtggatcacttgaggccaggagttcaagaccaggctggccaacgtggagaaaccccatctctactaaaatacaaaaaattagcgggtcatggtggcatgcaccgtgtaatcccagctactcaggaggcctgaggcaagagaatctcttgaatcctggaggcagagcttgcagtgagctgatatcaccgacactgcactccaacctgagcgacagaccaagactctgtctca

SEQ ID NO: 597778 - DNA, 445 bp, Homo sapiens
ttgggcccagtgacttctgggctcagtgatcctcacagcactaaaagaatagaaaagttatgaaaagtactacatggggctgggacggtggctcaagcctgtaacccagcactttgggaggctgatatgggtagataactgaggtaggagtcaagactgcctggcatcatggtgaaaccactctctactaaaaaatataaaacctagctgggagtggtggcacgcgcctgtagtctcatttactcaggacgctaaggcgggagatcacttgaatccaggaagtagaggttgcagtgggccgagactgcgccactgcactccagcctgggcgacagagtgagactctgtctcaaaaaaaaaagttagtcattgggtcgggtgcaggggttccacctgtaaatcccagcactaggggaggccacgggggcaggaccccttgaggggg

SEQ ID NO: 597779 - DNA, 109 bp, Homo sapiens
ttcctgtgagtggaggtgtcggaacttcaccttgtgaccaaaacacccccaagggatctgccaccattccggggggtacaagccctttccagtgatgagccccccatgg

SEQ ID NO: 597780 - DNA, 675 bp, Homo sapiens
  misc_feature (500)..(500): n is a, c, g, or t
gagatgaacatgcacgagtcatgtcttggtgggattatggctatcagatagctggaaatggctaatagacactacgttggtggataataacacctggacataaccagccagcatagccactggtgtgtgaacaagctatgtcttgctaatgtaaacagcagtcctataaaatcatgagcgactctaagcaatgtaagaattatgctctcggttgtattttgtgggagtgggctctattgagtcctaatacctggtggaatggaatagtccagaccagaaaattctcgtctgagtatgcgcgtaggaatagcctgcaaggaggaacatcctctagatgacattgcgggcaaagatgactatgtttacaccctcggggagaaagtctccggccggtatgacacaaagcaaggcatcgaccgtatcctattgctgggagattgctggccttaggtgtaggtaaaaaattgtcgattagcatacgatgaagttatgcgatgaanactgccaggacttgtgagttataccgtatcgacccccccatgagttttctgaaacagaaaccctgttaacctgcatgaaagaatttgcgaaagttaaaggacatccaataacttcaaacaattaaggaatgatcgccttttacgactcagaaagcctggggttggggaggatagt

SEQ ID NO: 597781 - DNA, 117 bp, Homo sapiens
ggctgctccagtcacattgccatcactcttgtactgccttccaccgcggaggaccctggtgacaggccaaagagtggaagaaacaccctttcacctcagagtccactgaagcactgg

SEQ ID NO: 597782 - DNA, 1193 bp, Homo sapiens
  misc_feature (249)..(249): n is a, c, g, or t
  misc_feature (549)..(549): n is a, c, g, or t
agcgtgggctccggcgggcggaagaggctgtgcgctgggcggcagaatcggcggcggcggcggcggcgggagccgaggaggaggtcccggacgctgctttcaggtaaccgaggtacctcgacggagttgcgctcgcggccctgagccgctcaagctcctagacggcgtcttccatggctgagtagccgggacgccatcgctgcggagactcgtggacactaagcaagcaatcacgcctatggaagatcntcatgaatcgacggttctagcgtcgaggcgtgcaaatggaacgactcaatccccacgctgaaaagaggagctcgaagagatgatcatcgtacttggcgctagcgtgccttaggctttaggcatttccgttgcgaggacgccactatagccaaagcctgtgactaaaacgactagagcgcttctcgcatagctaggttgatgcatcactcgtctttggaagaatcttctcccgtcccgtcccttgagcactacttcagcgtagttggttggggtatgagctaacaggacatcgcccaggtngttcgcgtgagatagattctcttggacgagagggcgagtagacgcgtggggagaagcgcaaatgctatagctcgcggttatctccgccaggttgcaccacacgtagatgttacccaaaaggacaactttgagtccccgggtctaggcccctttcattgtaggtggaagagcagaatcgagtcgacaaaaatttggtgccatccacacgccactcgttacagaagagggcgcatggtggccacaagcgcgggggaaggcgaggagcaaggggagcggtacacgggtttggggaatccctttttcgaatgcgaagaaacccaaacttgcaaccttgtgcgcgctcccaatttcacatacccaaggcgtaacgaagtgagggtggacactcagggggggcaaaatggccgcggaacctccaagcttcattaatcgcgctagcctttaagctaaaatccccgttggggtcccccttatagaacccctccccctttttacctttcggtttggcaggccggggttggattgttgttaggcccagttgggttggcagtacacatgcgggcctttcgcctggagcggtagggtttccgggatcctaaattaaccagttcgttaaggccttccattccgttaaggttttacca

SEQ ID NO: 597783 - DNA, 1485 bp, Homo sapiens
  misc_feature (55)..(55): n is a, c, g, or t
  misc_feature (187)..(187): n is a, c, g, or t
  misc_feature (866)..(866): n is a, c, g, or t
  misc_feature (1097)..(1097): n is a, c, g, or t
ccgtcgcccactgcggaagaaggaaggtggaaacaacacctcgtctgagaagacnactccttgcgtgattgaagatcctcttgccccaagagataacccacacaaaagacgcggagggggtgggccgccacaataaattctctcgctcctcctctctccagagagaattctttccccagggagagcnccccccacgaactcctgtgtgtgggaaaagatgagaccctgtggggggaagggaaaccccgcggggcgccgttggaaaaaacgctcaccaacttggggaaaagcttgggtcgcccaaacaaaacaacaatgtttgtggggaaaagaaaaaaaaaaagagggggaaaacctgctccgggttctaccattgaacctggggggagaccgcttggccccaccaacaaatacgttggtgccgccccttgttaccgccccacaaaatgatgtggaagcccgcccccccccactcttttgttgggtgggaaaccttttgtcacatttggtgaggagacccacccctgttgaaccccttgtgaaatagggagccccacggggttgttgtaaagacccctcttctccacagagagaaactattgtgggggtggggaaacaccacacgtgggacgcccacacactttgggcggcccacaaagaattttggggggaggcgcccgcctccccgataatattctctggggccttctttgcgcccgccgagatatattctctctctctgtgtgacgacacaagagcacaccacaccccctctgggggagagacccactcgtgtgagtaaataatgtgagaaaagtctataagccctcccgggcgtcaaaatttttgccccccacatatacgcncctctgggagagtgtacacttttcccctgcgggtgcacacacacaaagcgcacagttgcgcacaggcacatatgtttctggggggtgtttccccgcgttaacctcgtttgtatacagagaagtgtgttgacaccacacagaacacagccccacactctaagagtgtttctctttagagatgttgggtgacacccactctgtccctctctcacacatattaaagagaaattntggggtgagaccccacgcgtgtgtgtggtgtctcttagagagggtgtctcttgggagtgagactccacagagaaatttatatccacgcgctatttttttccacgagattctctctataaatgccgcgctttgtctcacgtttctataatcaccacctataatcacacaaaagaaaccgcaggtatatttgttatatcttatttataaactcacttatgtttgggcacgtataactaaaggtgtggctgttcttggagattcacgaatatgaaactaaagggttcccgaactctgaaatccacgaagttctgagagtttaaatgtttcccacatggttcacgtctagctttcaccgatttttatgaataaaaggccttaaaggctggta

SEQ ID NO: 597784 - DNA, 295 bp, Homo sapiens
ttcttcacaaggcggcaggagagtgtgagtgtgtgaaggaggaactgtcaaaaacttataaaaacatcagatctcctgagaactcactcactatcatgagaacagcctggggaaaccgcccacatggtccaatcacctcccacagggtctctccgttgacatgtggggattatggggattacaattcaagatgagatctgggtggagacacagccaaaccgtatcagttggttaactttataatgctttacgcctcataaattaggaaggccaaaaacatgcacgacaacacata

SEQ ID NO: 597785 - DNA, 195 bp, Homo sapiens
tttctcttatcctttttttctcttacttgatttgttttccttagtctggtcttctgatctcgtgctttattcattcaattcaaagtgtggcttattttgataatccaatctgtctattgtaactactctttttctttatcatctctttcttaactcccattcctcatgtactatcacctctcgatttgtcttcct

SEQ ID NO: 597786 - DNA, 239 bp, Homo sapiens
tgtgacttcactttcacctgctccaggggtcaaggacttgccttgcctgataagcagccagcagtggccgtggcggcgagttgcggggggcggtgtcgtgcgagagtggagtctaccaatggaagccaggttggtggttacggttaatcttttactgtacattcccaaggctttagttttaaatgccagtgtgcctttaacaaggttgtaaatattttatgcccaccagagatgtggtc

SEQ ID NO: 597787 - DNA, 393 bp, Homo sapiens
tctagaggatctccctagacagagttgtgcccatgcggagtccataatactgtatgatcctttcagggggcactcattatctttccagtttcctataactatgcctctcttgggaggcatagacagggaaacctaggagctcacccgtttttatgggtaataagaaaaaggacggcttaatagtgccaataacacaactgcctgcccatttattaggtaaccgaatgtaggctccgtgcccacatatccagtatagtccagcgggagctgcccagtcctgatgagattctggatgagcccaggcagtttttaatttagaaaatttactaaatgggttcttttcagtgtggtttaggccccaccaagtaattgtctttgttgtgctgttgcaca

SEQ ID NO: 597788 - DNA, 136 bp, Homo sapiens
cctgggcctttcattcagctgatcaggtgagaatgtgcctttggtgtgcaacggttcctattggtatttgtggccacaaagctcagcagctctcatttctcccagcgcttagtcccaaagcaacagaccgctctta

SEQ ID NO: 597789 - DNA, 735 bp, Homo sapiens
gctgtagactaatcagcacacacatgaactaactatcgggctctggacgtttctcatactaatcaatcacaacgctaattacgtgcgggtgaatgacctaatgaagatgatgatgcggcagatgctgggatcattgatatacatcaaacggccgtagcacataatataggaaagaatactgattcaggcctgaagctatttctactaaattacgacatggacaaacaaaattctcccataaacaatgccctttgtaggaaaggttgtgccctggcagaccatcttcttcacacccaggctcaagacggagccatttccactgatgcccaatgaaaggatgaggaaggagaaagtcctttggattctttggcagaagcattatgggaaactactaaatggactgatttctttgacaataacgttttgacatttgcatagaagcatgcattattaaaggaaatgtatgggataggccttaaattgggactaaacttgaggaagaataccaacaaagaaaactggaaagatgatcccactgatgaagctcttgaagggacctttgtgcattctcaccgaaactgatcccaatatgatcctcccatattgggttctacataggaacagactttcatttcaaaccgctgtaaattctgatggttttaaaaaaatatggcatttaagatagcgtgtttcttcacttcagaacggggtataccaccttatattaaaaaaaaa

SEQ ID NO: 597790 - DNA, 486 bp, Homo sapiens
  misc_feature (7)..(7): n is a, c, g, or t
  misc_feature (129)..(129): n is a, c, g, or t
atcgtgngttgccccacggtttggtacacacaaaaggtgcggccgggccccggctttaacctggaggagctcagggtggccggcattcacaaaaaggtgggccggaccatcggcatttttttggatccnaggagggggaacaagtccccggagtcccttcaggccaacgtgcaacgggtgaaggaggaccgctccaaaattatccttttccccaggaagccctcggcccccaaaaagggaaacagttttttttaaaaaattaaactggccccccaactggccgggccggttatgcccgtccggaacgtttataaaaaggaaaaagctcgggtcctcccttaggaaaaaaaaaatttcaaaacctttgctagtttccgtatgggccgggccaacgcccgggtttttgggatacgggcaaaaaaaaccaaggaaacccccaaaccggatttttaaaaaaaaaaataaagccctcctgggggcttggga

SEQ ID NO: 597791 - DNA, 362 bp, Homo sapiens
  misc_feature (35)..(35): n is a, c, g, or t
  misc_feature (301)..(301): n is a, c, g, or t
acctggtttgcaactttaatactgaatacctcccntgccaccaaggaacaacagattttagatgtttaagataagaaactagcttggtaccattaaaatgcccactatgtcctactgatcacttcaaagttaaaggaactagagtactcacaagttacaatcagtagctagcttacatattttgtcatttgttgttaaacatcccatattttttgctatttaactattatcacccatagacagataaatgggtatgaacttgtcttggcctagtcatttcagcttctttttgaaggaggcnatgggcctagatagtaacagtaaagatatgatgtttttaggtggtaaattccccatgggct

SEQ ID NO: 597792 - DNA, 315 bp, Homo sapiens
caatgactggatacaatctaatcatccatataccgcaaaaccaaggttatgacacacagcttgtgccagcgatgaaggagacgtaattgtatttggtggatgtgccaccaacttgcttgtccatcacagagctgcacacagtaatgcactcataatcttttcagtacaaccaaaatctcttgtacggctaaagcttagaagcagtcatttgcttaaacgccatgttcgccaactcatggaactgccttccacatcacttcacttcacagtgttcctcagcaggttcggtagtaacaacacttctggatcttaagc

SEQ ID NO: 597793 - DNA, 942 bp, Homo sapiens
gcggaggtgctggtctggtgcttgagtgtgctcgaagccatctccctgatgccgacctggtggggctatcgtggctgaacagtgtactgctgggccggaaagtgatggtcgtacgcgtgtgaatgcatctacattactggcaatttctacagtaaacaatgttgaactacctggactttcctcgcgcgaagctggatgaacaccgaaacacgttccacggaggccccgtacgctagcattccggtggacgcgcagcatgctctgcaattcgttcctggcggacgctgtgcggaggtatgcatgcaccacacggaaagcataggacgaagggcagtgccgactctggacctgttctgaaggttgatttgacggagtatcctccagacgtccttacgtataatagaactgagcggaatggtgttttcctgctgcccttcgagggtcgtgcgtctggaatgcctaacagagaaagggttttgccttatcgtggggggcgccatgagttctacgaggttggggtggaaggtaccaggcaagtgacagcccacccgtggaggagaagaggaaaagacgaatagcccaagatccactaccgtgaagaatgaaacaaggctcatgaggctaccggaagagcaggccgaggaaagaaccgtggagaacgacaagttgagcaaatgtacagcacgaagagtcctcaaagaccacgggactccctggtctgaggcccaaataaaaggactgttaattccgtcacgcataaaaccccatcggatcattcctgacaggacactgaagcaagccagacaggaccctcgctttcttttatgcgtgcgggatcaagggaattaagcgaggcagttacactaggtcacaggcctcatctgatcacccggaggacgaacggcggcacccagagggggaacaaacacacaggaggccagt

SEQ ID NO: 597794 - DNA, 134 bp, Homo sapiens
  misc_feature (35)..(35): n is a, c, g, or t
ggtggaccccaacctggacctgtccatcagggagntggtgcacaggatcctcccagtggccgccacaagggggttgtgaccaggttcattgaagagaagtcttccttcgagtacgggcaggtgaaccacgcact

SEQ ID NO: 597795 - DNA, 892 bp, Homo sapiens
gtgctaggagttgccgaaggcaagtcctggaagctaccgagcgagtcctggaatgtttgccgaaagggagcagccggggaaggaggatggcgtgatatcatcgcaagactccgggaggacttgggatccaaaaacgtgtgatacagtgaaggccgaggagagctcccgtgactttcaagatgtgtgaccaaggccacgttccactaccggactgctgcacagtgactgacgagggcaccgtgcttggactgacagccgtggctcgtggcaagcccatggagctcatcattggcaaggaatgttcaatgctgcctgtgtgggagaccatctgtgtgcaccatgcgagaagtgggagattgcccagttcctctgtgacatcaagcatgtggtccttgtaccccgctggtggacaagagtctccgcaacatcgcggtgtggcaatggaccccctgtgatggggcatgctggcactgctgctggtgttgcacagatgcgtgaacaacagctccctgggcatgctgacctggacgccctgaagcagaacccacagccatcatcttccacatggagatgctgaagtgtggagagccctggacgtaccagcaaggaccattgggcatgacatggacgaagagaagtgcaaggccggtgcgcattatccaccaggagggcaaccggtttgtacccgcgaggggcatgtgaaggaggctgttgcaagtactacgatgcaatgctgctcagaactgcgtgaaggacagcctggtccctgatggttcaagtggccagaatacgcgtgtgtaatatgcactgactgatggcaagaaacacaggggtgaccatagccactcaagtaagaaagtcaggcatagggggaggccacagggtaatccaa

SEQ ID NO: 597796 - DNA, 206 bp, Homo sapiens
  misc_feature (201)..(201): n is a, c, g, or t
ggtcttggcttctttcttttgtctgggatgcccatttccaaactcttcacatcttcctcctgagatgggatttctgcggtctccctgtttaaagtagccctatgattcctagatcttcctatgccatcaacctgttcattcctttcttaactgttctattgatcaatgactgtgtaacgagtcacctgtaagacataactncgcgg

SEQ ID NO: 597797 - DNA, 1466 bp, Homo sapiens
  misc_feature (505)..(506): n is a, c, g, or t
  misc_feature (549)..(549): n is a, c, g, or t
  misc_feature (559)..(559): n is a, c, g, or t
  misc_feature (645)..(645): n is a, c, g, or t
  misc_feature (693)..(693): n is a, c, g, or t
  misc_feature (699)..(699): n is a, c, g, or t
  misc_feature (749)..(749): n is a, c, g, or t
  misc_feature (769)..(769): n is a, c, g, or t
  misc_feature (814)..(814): n is a, c, g, or t
  misc_feature (831)..(831): n is a, c, g, or t
  misc_feature (837)..(837): n is a, c, g, or t
  misc_feature (876)..(876): n is a, c, g, or t
  misc_feature (933)..(933): n is a, c, g, or t
ggttcgtcctgttgggtgctactctttgtagtgtctctgtgctattcctcttctgtagtttcgtgtcctcctcatagatcttcctttcgggtgcttcacagggcctgtgccttctccactctctgttttatgtcccttggtgcgctgcgggtgtattttctgacctgtgcagtggcctgggaatctcttcatggttgtccccctttgtgggggggcctatggttcttgtggtcctcctggagggccccttgttcttgcgttgacaaaccgggtggtaaggcttggagctgtaacccctggcacatgtctcccctggttatctatccgggccctacaatgcgggttaaacttacgtggttgtgtggctgtctcgagccctggggcaccagccatctgtttttcctaggtggcctggatgagttgaccacttgacggaaagcggctactctggcaggcaatcgggctagccaagaatgcagctcacagagggcttcgccctggtcanncagcagctgccacggagcaccaagctcaagaagcatccccgcnggggagaccngagctgggcgccacggcagtggccttctccagctttgaccctaggctgttcattctgggcacggaaggcggcttcccgctcaagtngttcccatggcagcatggagaggcagccctcacgcggatgcccagctnccgtgncccctgcgggccccagcacagtttaccttctccccccacggcggtcccantctactctgtgagctgttcnccccttccacaggaatctcttcctgagcgctgggactgacgggcnatgtccaccctgtactnccatgnctgcaggcccctcccttgacttacgctgcagactctccnctcaagtatctgtttgctgtgcgctggtccaccagtgcggcccttggtttttgcagnctgcctcatgggaaaggtgacgtgcagctgtttgatctccagaaaagctcccagaaagcccacagattttgatcaagcaaacccaggatgaaagccctgtctactgtctggagttcaacagccagcagactcagctcttggctgcgggcgatgcccagggcacagtgaaggtgtggcagctgagcacagagttcacggaacaagggccccgggaagctgaggacctggactgcctggcagcagaggtggcggcctgaggggtcccggaaacggcgtgaagccttcgctgtgccgagcctggtgttactgacgcaatgcactgcacgcaaagcaaaggttttcacaaaatagtcagatagaaactatgagggcgaacattgctgggagttgggagagaaaggagttatgtacaatggcattgtgcataaaggttgtcatgggacaagagattttgtagaaaggtggcaataagggtgccataattatgaggtataaatttgtaaaagcgaggtaacctgtatatgaaagttaaa

SEQ ID NO: 597798 - DNA, 145 bp, Homo sapiens
ccatccccatcgtgaaggacgtcggcaggagggtcccgagctacctcgatgtgttcggccgcaccgccgccgcatacacgctcaaggtcgagttcagcttggtgctcgtcgccgccggcagcttgatgggcacgcgcgtcgccct

SEQ ID NO: 597799 - DNA, 280 bp, Homo sapiens
gtacaaagaagatagaggaggagtcatcagcaaaagctatatttctatcacaatactagaagaatagagagggtcgatggaggagtgaaaactagtttaagcagaacagtgaaagctacactctaatatgggcatagtggtcagtacagaaagaggcccatttccttacaaaaccctatgagtggtctcgggccttgtgagaatgacagacgatcactagcaagaaaatgctcgatgagtgggccccagagatcccggcaagggtgacgggacgaggtga

SEQ ID NO: 597800 - DNA, 420 bp, Homo sapiens
ccgaggggcttcataccacttgaagacctacatgccgctggcagccgcggatctaaccgccgctaagggggggtagaacttcacccatatgggcagaatttttcttgaccatatcgccggaacccgcctgttatcttgtccaaactcgaatccgaacctaaccaaccgctcacaactcatttccactcgtttcacaggcgccactgccagaccatttctttttaacaaggtcgctaacctgcagtacagccaagttcactatcggttcatgctcactggccgccacatggttccagatgtgacctgcaagcgatataaggaagcgccgtgtgatcctggaacgtgttctagttctacagagtcaggcctttgaggaccatgtcccatctcacaactcttgtatccacagagtcctctttc

SEQ ID NO: 597801 - DNA, 1045 bp, Homo sapiens
  misc_feature (128)..(128): n is a, c, g, or t
  misc_feature (138)..(138): n is a, c, g, or t
  misc_feature (224)..(224): n is a, c, g, or t
  misc_feature (272)..(272): n is a, c, g, or t
  misc_feature (278)..(278): n is a, c, g, or t
  misc_feature (328)..(328): n is a, c, g, or t
  misc_feature (348)..(348): n is a, c, g, or t
  misc_feature (393)..(393): n is a, c, g, or t
  misc_feature (410)..(410): n is a, c, g, or t
  misc_feature (416)..(416): n is a, c, g, or t
  misc_feature (455)..(455): n is a, c, g, or t
  misc_feature (512)..(512): n is a, c, g, or t
tgtagcgagactgggtgcgcaatagtcagggttgcgagcggccggggcggggcgacaggacgctgcaggacgagaccctgggtgtggcgtcgtgccctcgcagtggagggccgtccagggcatccgcnggggagaccngagctgggcgccacggcagtggccttctccagctttgaccctaggctgttcattctgggcacggaaggcggcttcccgctcaagtngttcccatggcagcatggagaggcagccctcacgcggatgcccagctnccgtgncccctgcgggccccagcacagtttaccttctccccccacggcggtcccantctactctgtgagctgttcnccccttccacaggaatctcttcctgagcgctgggactgacgggcnatgtccaccctgtactnccatgnctgcaggcccctcccttgacttacgctgcagactctccnctcaagtatctgtttgctgtgcgctggtccaccagtgcggcccttggtttttgcagnctgcctcatgggaaaggtgacgtgcagctgtttgatctccagaaaagctcccagaaagcccacagattttgatcaagcaaacccaggatgaaagccctgtctactgtctggagttcaacagccagcagactcagctcttggctgcgggcgatgcccagggcacagtgaaggtgtggcagctgagcacagagttcacggaacaagggccccgggaagctgaggacctggactgcctggcagcagaggtggcggcctgaggggtcccggaaacggcgtgaagccttcgctgtgccgagcctggtgttactgacgcaatgcactgcacgcaaagcaaaggttttcacaaaatagtcagatagaaactatgagggcgaacattgctgggagttgggagagaaaggagttatgtacaatggcattgtgcataaaggttgtcatgggacaagagattttgtagaaaggtggcaataagggtgccataattatgaggtataaatttgtaaaagcgaggtaacctgtatatgaaagttaaa

SEQ ID NO: 597802 - DNA, 326 bp, Homo sapiens
gccatggagtctgttgctttttaggctttcttgtgaagtctggcgtttcctatgtagtttggggactagtccacacctctgcctcatgctcgtcaccactgctacaccttgtctgcccactttctctccttcccgcccctggaggtgagaccctcacctctctcgtgagcatgctgcctcatgtcttccgtgccgtcgatctgtggctgggtgactgtccctcaggccgccaaccctagttggctctcacagcaacttccagtgctcctggacgaggacttcctaagcagcatgggggccacacggaccggtcacgcacactggcc

SEQ ID NO: 597803 - DNA, 426 bp, Homo sapiens
ggatacgaatcgagctggtaccctagtgtctcgatcggtgagttgctagtattataaacgagttaataaaccttttcagaaaatagagtattcccgcaatctccgcacttggggaggctgaggtgggaagatttcctgagcccaagagttcaagaccggcctgggcaatatggcaagaccccatctcttcacacatttaaaaaattagccgaagagggctgggcacagtggctcacgcctgtaattcaagcactttgggaggccgaggcacgcggatcacaaggtcaagagttcaagaccaacctggccaacatggtgaaaccccatttctacaaaaatacaaaaattagctgggcatgatggcaggtacctgtaatcccagctactctggaggctgaggcaggagaatcacttgaacttgggagg

SEQ ID NO: 597804 - DNA, 147 bp, Homo sapiens
ctggggtgactctaccggatccttcccgtacgccaatgaacggattatctattccaaaattaaaattagccggaccattgtggtgtgcacctgtggtcctagctacttgagaggctgaggtgggaggatcgctttgaactggggaag

SEQ ID NO: 597805 - DNA, 785 bp, Homo sapiens
  misc_feature (215)..(215): n is a, c, g, or t
acagctgtgtccgcagatgagtaacgaagagaagctactatcgatgagagcctaaactcaggttaacgtgcaaatcaagaggctgggatacttttcaggcatatactcagtgtaatcgttgtactgcataaacgccaatcgtagtccagatttctaagatcatgttccaaggctaactgaatcccagttcaactacaccactccatgaacctccntgatagggagacagataacgaggcccaaggcctgtgcgatatagatgtgcgacagcttgcgtaagactctagaaaaaatacgtacatcttcataaattgggtgggagctattgttggtgaccaacttctactttgtgctgtggcttgaggtgaacggaaatggaatattcgatgatgagtgtcagttgtatctccatggtaccatttgagtggaagtcgctttgaatatatccgaggcatcgatggctcgagtggacgactcattgtggtaatagttttgccagaattcttcctgtaatcagtccgctgcatcatcatttagaatatctattattattccacatggactttgccaaagatgaggtccctgggtgtttgcatggcaacttggatcagtcaaggatttcacctctgttttgttaagctagaaatgccagtgctagctatatgttagacagtgagcattctttttctctccttcctgatcagtgaaagtgtgggaagagacgcttaattgagaacgtaatttctctgttaaggaagaggaaggatcaaaaagttgttcccaaa

SEQ ID NO: 597806 - DNA, 117 bp, Homo sapiens
gggcagcaaggtgctcacgtgtcgacggaactgggacaggaaggcatgcaccgaaatggtgagtacacgtacgaccaggctccagcttaacgactcttgggaggtcagacacggtgc

SEQ ID NO: 597807 - DNA, 391 bp, Homo sapiens
cgttctcggtgctggggaattgaaaatgagcaaaaccaacaggagcatgtctgccctctggacactcacaggccactgggggagacagatgttagttaaataattacacaaacatgcctgcaatcccagcacgttaggaggcagagacaggcggatcacttgaggtcaggagtttgagaccagtctggccaatatggtgaaaccctgtctctactaaaaatacaaacattagccgggcgcggtggcgggcatctgtagtcccagctactcaggaggctgaggcaggagaatagcttgaacccgggaggtggaggttgcagcaagctgagatcgcagcaagctgagatcgcaccgctgcactccagcctgggcgacagagcgggactctgtc

SEQ ID NO: 597808 - DNA, 217 bp, Homo sapiens
gtaagtccaagtgaacctaaagcacccaaggctcctcgaccgccataacaacccaactgttcaggatttccagttctttcctccacggttattagatattactggaaaaagaaatgctgttttacagaaaaactattgggtacaaggtacctcgaaatcctgagctgcctaacgcagcacaggcgcaaaaagaagaacagcttaaaattgatgaagc

SEQ ID NO: 597809 - DNA, 973 bp, Homo sapiens
  misc_feature (4)..(4): n is a, c, g, or t
  misc_feature (351)..(351): n is a, c, g, or t
gtantaatcaacgagataagtagaacaaagaaacaggagcttggcgagtccgcacaccctccaggggtagttcttgtcactcctcttcttggcgtctcatattcggggtttactccataaggcgacacctttttcggggacacttacaagtgctgaccccgaacgctgttgttggatccgtgacacgtacctgtgttcctgccgcccgaaggttcttagcggtctctcttaagaatgttgtcgtacatggagccgaacccggtgttgaaggtcgcccgggggacaaccgggtggtacaggcattctcaatgcgccacgcttttgcaggcaatttcccttggtccgggcttnccaaagctgtgggccaaccgcgaagcgcccacaaaatcagtggggccccccgggccctgcgacaatcggaatttttgtgtcctacgccgagggctatctcctccctcaagagcaaggcgacttctcctgccgggagtcttcctccttcgtgggtcgcgctcacgggggagcggccactcacctccttataatgcggcacgcggttaacaagacaccccccccaacagggtaacatttttgcacaaagcacacagcttgcggaagaaatttttctccgccccgaattcacacggcaatgcgcttgtctattcgaatgatatacatttctatctccaaacctttaccacccgatcttcgatcgccacccaggtcttgttgctcagaagtcacacgtctcccccatttttcccataaaccccccgcaacaatagaccgaccccctgtgcagaaaaatacaaaattgattctcccccacacaccctttttatacgggggtcttaacttctccatagataaatttgggtaaactaaatcactaattaatagctgtcgctcgagggtgttcatattatcgtcgcgctgccccgtcaaaaaaaggaaaatcaaaacttcccacataaca

SEQ ID NO: 597810 - DNA, 225 bp, Homo sapiens
tgcatccaaccagcaacttgtgaaactctgggcatctacacaggccagctttccccactcccatgcattgcacaattccggccgctccagtcagcaggcatccctcagctgccgctcaatgcacacggtaccgttcgtgttcaccagcagcacatgggcgtccatccttcgtcaagccatcatcaccacacacacagccagcccttgtggcatccttcatccagg

SEQ ID NO: 597811 - DNA, 280 bp, Homo sapiens
  misc_feature (260)..(260): n is a, c, g, or t
aaaatatttccaaaccacatgtaggataaagtgctcatatctaaaatgtataaagaacattaaaagccaataataaggggatatctaaaccaaagtaaaataagcaatggagtttaatggaattactaagtctcaaaataaagatatatgatggctcatatatatatttattacatactctcaaagatatgtaaatgactaataaacagaaaaataattatatgctctgacaattctactcttaggcatttacccgcggnaatgaaaatgtatatatata

SEQ ID NO: 597812 - DNA, 1248 bp, Homo sapiens
gagcggggtgttagtgctgacacagtgtgagggtcctcagtctaaagccaaaagcagatcaaagtggtgggactcgcgtcgcggcctgtggagacgtgaagctctcgaggctctcccgctgcgggatcggcgctcgcccatcggatcgtccatcgacccatccgacaccggacccggttttttgacccgatgccacagacagtgggagaaagactgaagcatgaatagaagaatgtgaaaaagatgaaaaagacacagatgaagaagacagcataaagacagatcaatggaacagacatgcaataaaaggttacgagagaaacgaagtaagtgaaatgtagttatcattgttccatacgaggagaagtgtatagcatgggtcatcgattggtaacaaaaaagtaacagaagagataggagtgaaagaccatatataaagaatgaaagagggatcaatagacgtagcaaaatagtagaaaaaaaaacatgaaaagaatcaggaacgacggaccaaagacggaacgaaaaaaccggacgaaaccaaagacaaaagaagaagagaagaacccgaagacaagaaagaacaccacagggaacaaaagagaagccaagaaaaaccagaaggcaccaaagagaataaaaaaagagaaaaaagcacagcacaacccagagacaaccaaaggaaaagacagcaacgacacgacacaaaacaggacaaaaaaaagaacagaaacacacagaaaagaaagagaaaagaagaaaaagcaaaaagcaaaaaaacacaaaaacaaaaaaaaaaaacaaagcaaccacacaaaacagaaccaagaaaaaaaaagacaaaaaaaaaaaacaaaaaagacaaaaacaaaacaaaaacaaaaaggcaacaaagagaaagaaacagataacgagaaggggaaggcgaaagaaaaacaaaaacaaaacaaggacgaaaagaaaagagcaaacaaaaaggaaaagaaaaaaaaaagaaaaaacaaaaaggagcaaggaaaggaaagcgaaggaaacaaagagaagaaagaagacaaaagaagaagggagaaccgcaagaggacagaaaaagaaaaaaagcaggaagacaaacaaagcaaagaaaggcagaagaaaagaaagagggcgcaaacaggaacgaagaagaaaggagcgaaaaaaagagaaacaagagagagaagaagaaaagagacaaaaaggaagagagaaaggcacaaacagataaaggac

SEQ ID NO: 597813 - DNA, 270 bp, Homo sapiens
aaaaaaaaaaattcccccccccctttttttgggcggcccttagattttaacccccaaaaaggggtgaaggcggggttgggtgggggccacgagtccccccccttttgggggtggggtttttggtcccccccccttttttttaagaaaccccgtttttaaattttgggttcccgggggccgggggggaaacccatttggtttcccccccgggggccccccgttttttcaaaaaaaaaaaaaattttttggggggggttttttttttcccca

SEQ ID NO: 597814 - DNA, 225 bp, Homo sapiens
tccacccacatggacaggaatgtatagagacacccaccgccagtcgtgtgtcctgatgggatcacagggctctgatttgccttcgtgtcccacttcctgccatgcacaaaggcatgatatgcggtggcggtgaacagtgggagctggcggaaactgtcctgcggcagggtgcgggataccaagggcggggtaccggagcctcgaacttcgctaactcactggctc

SEQ ID NO: 597815 - DNA, 316 bp, Homo sapiens
gtttttttccccccccctttggggattttgcccccccggcccaaaattttggcccgggggcccctttccccccccccctggcccaaaaggttgaccccccccccccccccccccccaaaaaaaaaggggggtttttttttgtggcccccccccgggcctttgggcccttggggggggttttaaaagggggggaggggaaaaaaaaaattggggtttttttttgggaccccccccggccccttgggccccgggggggggtttttaattgggggggaggggtccccccatttttttttttttccccctggtcttttta

SEQ ID NO: 597816 - DNA, 338 bp, Homo sapiens
ggatacaaaatcaatgtacacaaattagtagcactgctatacaccaacagtgaccaagctgataattaaatcaagaactcaactccttttacaacagttgtaaaaaataacaaaataaaaatacttaagaatatacctaaccaaggaggtggtagatctctacaaggaaaactacaaaacactgctgaaataaatccgtaacacaaacaaatggaaacacatcccatgctcatggataggtagaatcaatattgtgaaaatgaccatactaccaaaagcaatctataaattcaatgcaattcccatgaaaataccatcatcattcttcacagaattaa

SEQ ID NO: 597817 - DNA, 125 bp, Homo sapiens
gtcacgcctggacgcagggttccagcgcatcggacttttcatctgatgggctcccgaatgccacgttgatcaccgccacctccaccagcgattgccccacttgacgccgccatcctgcgcggccg

SEQ ID NO: 597818 - DNA, 745 bp, Homo sapiens
  misc_feature (524)..(524): n is a, c, g, or t
aggtgttggcgccctgtgcggcttcgagggccgctccttcctggcttccccactctccgcgcctaccacacgctgcgcctggcactggaattcctgggctgctggagcctcaggggctgctgctgtacaatggcaacgccctggtggcaatggacttccatgtgcatttggcgctgctagatgtgcctgctgtgcatgctcagtgtttgacgacaggttctggtggcctggctggtgactgaccagttgcctgtgccaggatagatgcctgtggccatgtggcaacctgccctgtgatgcttgttccctggcaaccttgtgctggccctgtgtgggacgaaccacatacatacagtaggatggggcaactttgggggatatgggaatagaaacacacaccacagattggataaacacttgggggtggacctggacagcaatgagtaccacacaatgatttgtggaaaacactgaaaaatggagaacttaccaaaaaccttgtgaaccaaacatgtaacctactntattgtagtgcgctgtggctgtacccctggatggtacccatgtgacttgtccctgttgtgatgctttgtggagccgggacccttcgtttgtgtgctgcctgggacctgaagtggtggtgcatcacgtatttggcttgggactgtcaaacgaaccaagactgccgtggacgctatggcaatttgtggcccgtgggtggactgacaaaccccgagagctctgg

SEQ ID NO: 597819 - DNA, 515 bp, Homo sapiens
gtagttcatcttgatgtgaagcctcagaatattctgttgacaagtgagatctccatgtggcgtgacattaacgatctgtggatttgtggcctcttcaacgtaatattggacagaacacgtgagagagctccgatgcaagattactggcgtactccctggaagtagtgtggctgccgtgaatatctcttacgttactgactcctgataacgctatggcaaacaggatactgttggagcaattgggacgtggttaaccgatatggtcaggtgcttacaggtaatatcaccgtttcttaggcatatgatagacaccatgaaacattcttaagacatctcaccagactgagctttaagtctattctgaggaagacttcgactgtgtggtctgagtcggctgtggattctcatcaggacactttaagttaagaaaacctgaagatcgagccactggtgaagaatggtctaaagcacccctggttgacacagagcagtcttcaagagcctttctttcagga

SEQ ID NO: 597820 - DNA, 354 bp, Homo sapiens
  misc_feature (38)..(38): n is a, c, g, or t
  misc_feature (65)..(65): n is a, c, g, or t
  misc_feature (128)..(129): n is a, c, g, or t
  misc_feature (175)..(175): n is a, c, g, or t
  misc_feature (264)..(264): n is a, c, g, or t
  misc_feature (338)..(338): n is a, c, g, or t
tcttcttccaccatgtggctgtgctggagtttctctgngcctactctggttgaggaggctgcttnattcacaaagtgttctttgctcaattaaactgtgttaaattaaaacaacacaaaacaaaacannaaagccgggcatggtggcttatgcctgtagtcctagcactttgggnggctaaggcaggtggatcatttgaggccaagagtttgagaccagcctggccaacatggcaaaaccccatctctactaaaaatacagaantaagctaggtgtcatggcaggcacctgtaatcccaggtactcatgaggctgaggtaggagatgacttgaacccntgaggcatggtgcagt

SEQ ID NO: 597821 - DNA, 346 bp, Homo sapiens
taagctttcccctatttagctgaaaaagttattaaagctcaaattattaagggtgggaagtgggagtggaagggaggagatcaatacaacttatattttggcagtttcatactggaagaaaaaagttttcaatacctagaccaacttgttgaatttttaaaacttattgcactattaaatgtgcaactttctctacgtgcttctcctcagggcctttaggaagctttcaaatttttttgggtacgtggtggttgtgtatttaaatttgtgcaatatttgattgttaaaattacattgacagtggctagttacatgtgtttttacacaaaacaaaaacacaaagagg

SEQ ID NO: 597822 - DNA, 487 bp, Homo sapiens
  misc_feature (4)..(4): n is a, c, g, or t
agtntgattcatctcccctggtataggcccaccaaaaggacacggctaacgttcatgctcctacaacgtgccaggcacagagccacactcttttctaggtttttacttaagactcccagcgtgattatgagaactggccttattttcacacaggttgaaaatgaagcagtgggctcatgcccatctgcacaaggccccccaggcagagctggcagagctgggatccagctccaggtccgtgcacctccatgacatggatgcagtttagacaaggatgcctccctccagtggagaacacaaatgcctcacacatcagccagcctgcacatgcaggctaacaagggcactgactctggaaacacaggctctcctgcgacagtccacacggggcagctgagtggggccacccagcctgactgtccttgggaggatttcctaagtctttttcttcttaaagtaaatatatatgctgtccatcctaaaaaaa

SEQ ID NO: 597823 - DNA, 361 bp, Homo sapiens
  misc_feature (58)..(58): n is a, c, g, or t
  misc_feature (62)..(62): n is a, c, g, or t
  misc_feature (236)..(236): n is a, c, g, or t
  misc_feature (267)..(267): n is a, c, g, or t
  misc_feature (323)..(323): n is a, c, g, or t
gcttgccggagcgcttgccgtcgatgttgaggctcttcaagtcattcttgtgcctcancctncccagtagctgggatttacaggcgagtgccaccacacccggctaatttttgtatttttagtggagacaggtcttcgtttgacaggctggtctcgaactcctggcctcaagtgatctgcctgccttggcttcccaaagtgctggtattacaggtgtgagccactgcatccagccnctctaatctacttgcttactcttgaatttgnctgttataagcactagatataaatggagtcatataatatttgcccttttgtgtctngcttatttcacttgtcttcataatgtcttcagggttca

SEQ ID NO: 597824 - DNA, 588 bp, Homo sapiens
  misc_feature (65)..(65): n is a, c, g, or t
  misc_feature (75)..(75): n is a, c, g, or t
  misc_feature (81)..(81): n is a, c, g, or t
  misc_feature (89)..(89): n is a, c, g, or t
  misc_feature (128)..(128): n is a, c, g, or t
  misc_feature (165)..(165): n is a, c, g, or t
  misc_feature (173)..(173): n is a, c, g, or t
  misc_feature (186)..(186): n is a, c, g, or t
  misc_feature (202)..(202): n is a, c, g, or t
  misc_feature (240)..(240): n is a, c, g, or t
aacatatacgaatgagccggacctagctcgatgcgtgccgtgaggtgttcgccaagtggctcganttctccagtnaatagngcggtcanggaatgcgctctgacggccccggttgagcctcggtcttnatcgtaggagccaccaacaaacgcttccagatgcgcnctatctanatttgacaaaaangcttaacgttaatgtnggagtccatacgaacccacgagcggccacatctcatgnatgcaagaaatcctgcacgtatctcgatttgcatagtaggtaattcagcacagacggctctcaatttcatggtggtgggcgctgatccgcgacctgtgttccagaggggcccgagtgcaagtgttggcgcctcgttggacgacggctgcccgggcgcagctcgaacgatggggggcggagggagtggagtaccccttgtctccgggtcgggctgactcccctcgccgatttgcgctccttatgggcgctttaccttcatcttcggcgcgagaggccgcgggtggtgcttacttatattgcgaaacccaaacctactggggcatactcgccgcgacgctggcttggtgt

SEQ ID NO: 597825 - DNA, 680 bp, Homo sapiens
tgtgtttacccagggtgtgggcccttcccgatgcctcacaagttgcccccgcaataagccctcacccgcccgtcctgccgagtgcggccgcgccaatggcgcgtcaatacgcgaacacatatggactcgtttctgtactgatacgctcgtactcactttccactcgggagacaccccacacaagtcgcccaaacctcggctcaattgattctgcctacagcctgttcattctacataacaagactggacagctatcagcgctatctcgtcaatccgcacacgcctgcaacatttctatgaacaagcttctttcacgagaacagaatctattttagaactgtcagatcctgacccagtcaagcccccctcccagccccccttcacaagtgactccgtgccttgagtgtgtcattgcgtgttcacaccacgtgccatctgtctggccgccccaagtgcgaggaggcacccctgccttgccctcagcagaattgggttaccaagggctgttccagatcaacgtgcacaacgtcatctgagggacaatgctcccagcggccatggccccaggctctattaacactaaaatgtagctccatagcgctaacactaggaaccgccgcatgccatgtatggggggcaacgcccctagtgcccttgtcccaggccagggcttcagcgta

SEQ ID NO: 597826 - DNA, 665 bp, Homo sapiens
  misc_feature (496)..(496): n is a, c, g, or t
  misc_feature (534)..(534): n is a, c, g, or t
  misc_feature (616)..(616): n is a, c, g, or t
tactttccaacctgactctggcataacattatgaaacaaggaagaaaatcaaaataccccaaaaacatgtttctttgccatattttgaaatggtccctgcatagctgttctttgtgggggaaaatttgcatctgtaaagaatctcagttaacatagccagatctttttcttccagaccctcccaatcctgaagagattaattaagatctgaataggaaatattggtcacctattgtctctaagggcagccactataagacttcaaaagaactttggtttccacaatctttattttttatttatttatttttttgagacggagtctctcgctttgtcacccaggctggagtgcaatggcacgatctgatcttggctcactgcaacctccgcctctccagttcaagcaattctccttcctcagcctcccgagtagctaggactatgggtgcacaccgccacacctggctaatttcttttgtattttagtagagacggngtttcaccatgttgcccaggctggtcccgaactcctgngctcaggcaatccacctgccttggcctcccaaagtgctaggattacaggtgtgagctagttgaaatgcttagcctagcattntcaacttatcacataattcttttccaaaatggccacccttgttttgaaa

SEQ ID NO: 597827 - DNA, 232 bp, Homo sapiens
cctcctcaggcccccggatagggaacagcacgactggcacagtgagggcaccgcagcagcacggcaggccacacagaggatgagcggtccttctggctgacatgtgcagcatctcgcttacactgctgagaaggtaggatccaaaggttgctgtgagcccatacatcgaacaggcccaatggacacgtgccacggctgcatctgcgctggaggccgcagagctcgatagatg

SEQ ID NO: 597828 - DNA, 786 bp, Homo sapiens
  misc_feature (42)..(42): n is a, c, g, or t
  misc_feature (61)..(61): n is a, c, g, or t
  misc_feature (76)..(76): n is a, c, g, or t
  misc_feature (78)..(78): n is a, c, g, or t
  misc_feature (90)..(90): n is a, c, g, or t
  misc_feature (99)..(99): n is a, c, g, or t
  misc_feature (103)..(103): n is a, c, g, or t
  misc_feature (105)..(105): n is a, c, g, or t
  misc_feature (111)..(111): n is a, c, g, or t
  misc_feature (115)..(115): n is a, c, g, or t
  misc_feature (125)..(125): n is a, c, g, or t
  misc_feature (128)..(128): n is a, c, g, or t
  misc_feature (133)..(133): n is a, c, g, or t
  misc_feature (141)..(141): n is a, c, g, or t
  misc_feature (143)..(143): n is a, c, g, or t
  misc_feature (150)..(150): n is a, c, g, or t
  misc_feature (156)..(156): n is a, c, g, or t
  misc_feature (168)..(168): n is a, c, g, or t
  misc_feature (181)..(181): n is a, c, g, or t
  misc_feature (188)..(188): n is a, c, g, or t
  misc_feature (213)..(213): n is a, c, g, or t
  misc_feature (217)..(217): n is a, c, g, or t
  misc_feature (223)..(223): n is a, c, g, or t
  misc_feature (234)..(234): n is a, c, g, or t
  misc_feature (247)..(247): n is a, c, g, or t
  misc_feature (267)..(267): n is a, c, g, or t
  misc_feature (280)..(280): n is a, c, g, or t
  misc_feature (292)..(292): n is a, c, g, or t
  misc_feature (295)..(295): n is a, c, g, or t
  misc_feature (320)..(320): n is a, c, g, or t
  misc_feature (326)..(326): n is a, c, g, or t
  misc_feature (340)..(340): n is a, c, g, or t
  misc_feature (347)..(347): n is a, c, g, or t
  misc_feature (374)..(374): n is a, c, g, or t
  misc_feature (384)..(384): n is a, c, g, or t
  misc_feature (388)..(388): n is a, c, g, or t
  misc_feature (393)..(393): n is a, c, g, or t
  misc_feature (403)..(403): n is a, c, g, or t
  misc_feature (411)..(411): n is a, c, g, or t
  misc_feature (413)..(413): n is a, c, g, or t
  misc_feature (417)..(417): n is a, c, g, or t
  misc_feature (435)..(435): n is a, c, g, or t
  misc_feature (437)..(437): n is a, c, g, or t
  misc_feature (442)..(442): n is a, c, g, or t
  misc_feature (447)..(447): n is a, c, g, or t
  misc_feature (450)..(450): n is a, c, g, or t
  misc_feature (455)..(455): n is a, c, g, or t
  misc_feature (468)..(468): n is a, c, g, or t
  misc_feature (481)..(481): n is a, c, g, or t
  misc_feature (484)..(484): n is a, c, g, or t
  misc_feature (486)..(486): n is a, c, g, or t
  misc_feature (488)..(488): n is a, c, g, or t
  misc_feature (524)..(524): n is a, c, g, or t
  misc_feature (528)..(528): n is a, c, g, or t
  misc_feature (535)..(535): n is a, c, g, or t
  misc_feature (538)..(538): n is a, c, g, or t
  misc_feature (560)..(560): n is a, c, g, or t
  misc_feature (575)..(575): n is a, c, g, or t
  misc_feature (660)..(660): n is a, c, g, or t
  misc_feature (678)..(678): n is a, c, g, or t
  misc_feature (773)..(773): n is a, c, g, or t
gatccaggtccatggatgaaaactaaaggcccgagttaatcncattgtagtttttaaattnctacagcctagagcncnctagtcacaggncttttaggncctncnggatgncccncagggtatcngcnctttncttgagcngngcaaccncatcancctttagcttcnggttgataacgcnggttaanccccgggcattgaggatacatgganggcncaggangacttcattcncaatgccatacancccctttaccattgtggacncgggatgaatccnggatagattttncancatggattcaataagatcagccacncttaanccaatagcccagtnggtatanccttttagcttgatgacttcataggcnctttcaaccnccancttangcccttcctnccaatttncnctancattgtcagtccccattncnggatncaatnccnggggngaaacccctgccncattcaccccccnccncncngccacccttgggtggccatgtccccccaaaatccanccanggcagcngcngggatgaatgccaagtttttcngccatagggtggcgnaatctagcggaatccggattacatccacttccaatcacgcggtgtttgggtaatccacttagtttccaggtaacatacgttagantgtccactgggttggaancacaattatgatgcaatcaggactgtacttgacgatctgaggaataatgaatttgaagacattaacatttctctgcaccagattgagccgactcncccttcttgctga

SEQ ID NO: 597829 - DNA, 188 bp, Homo sapiens
ccctcatagcctcactccccgatgaggcgctaggtgtacgccgtgagccccgggtcgctggaggagctcgttggtggaacggggtccatccccacctgctatattctaacggcaaaccctgattttggatattatttgcattataaacacgtttcagtgttttggcagcattccgtgattttagcatt

SEQ ID NO: 597830 - DNA, 189 bp, Homo sapiens
cctgccgttatgtatgtgtgtgtgtgtgtgcgtgtgtgttcggtgtcttataactcttcccctatttcttacaattcgcaacgatgactaggctttactatttgcacacgggtgtgtgtatcatctcatatctcatttaacgcagttagaaggcatacttttgcatagatataaaaaaaatactgatcg

SEQ ID NO: 597831 - DNA, 1176 bp, Homo sapiens
agcaagatccgtgaggagtacccagacaggatcatgaagcatcggtttagtgtgagtgcgattcgcccgataagtgtctagacgactaggtggtgcgagcctctacaacgccaatcgccttcgtcaggtcctagccacgtcgtcgttacgtaaacacacagatcgatgacctatcgtgcattcgataagcgacagtcgtcttcttacgacgaattgtgctttcagaaatccgcgttgagatgcttgactcactggctccactcggttatggtgacctggaagccatcgctgtgtgctctgcataccgagtgatgtgtggcgtcaccttcgtgtcctggcgtcttcctcaggaccaggctcgattgctgtatcgctgcggatagctgcgctgtggactcttggtcgccgtttctcccgggctggcacttcgttcgatgtcccggtcgtttgcccccttgctgtactcgagcccggggatcgattcgagcgaggtgaccgggtcggctggagctcgtagcgccgagcttcgaaccccagccagatggtttggatggccggagtaacattggatgcgctgtgcttgtcgtacctcggcgcccattggcacgcctaacctgaagcggtccggggcgatcgtcgtctcaagggggcgcgttaatggctccatgggaatgcgaaggttggtcattgacgcagatattggctttgaatcgttccaaggaccaagaatcggatccagacatttctggttgaaagtggcattgcccccaaactgagtgttgtaaaaaaccgcgtcgttagatcttggttgaacagttccccatgcctacgggggggctaaaaagagttgtccccgcacaacgttacccatttggggtcaatctaagcgaacgggtcccattccccaggaaaagcctgaccccaaaggccggccacatcttcccggaaagcagaggttcccacgagggaccgatggatacccgagcaggcataagggggccgtggtccctggtccaacttgggtgaagcccaggggtgcacagggtcatgggtcaccgagaaagtcgtaggctcaacacggaacgagcccaggatggcgcccacttgtgaaaaggtgacccgtggggggtgcccgaagagaaccactgcgagtctcccaaggaatgcgtcacaagc

SEQ ID NO: 597832 - DNA, 579 bp, Homo sapiens
  misc_feature (369)..(369): n is a, c, g, or t
  misc_feature (372)..(372): n is a, c, g, or t
  misc_feature (382)..(382): n is a, c, g, or t
  misc_feature (391)..(391): n is a, c, g, or t
  misc_feature (411)..(411): n is a, c, g, or t
  misc_feature (416)..(416): n is a, c, g, or t
  misc_feature (459)..(459): n is a, c, g, or t
  misc_feature (467)..(467): n is a, c, g, or t
  misc_feature (470)..(470): n is a, c, g, or t
  misc_feature (525)..(525): n is a, c, g, or t
  misc_feature (539)..(539): n is a, c, g, or t
ttgcccccccactatgggtgtccacactcgttctttgggggcccccactttcgtagccacactcttggaaaggggttcccacgccgaggggcgcacctattgctctctttgtggcccgcgcgggtgaaggagcctctccacgttcttatttggagagaaagacccaaggggacgcgctggacccgcggtcacgcgtcggaaagagggaggcgagggctaacgtgcccaccctcctacctccgagtcaccgctccattgaaccctcgcccgagaccgcggaagaggggggactcttcgcgcttctcgctctttgtggccaccgcgggaggcccccggagcctatgcacctttatttctgagccccgtggnttnggctgagacntgtgtaacntgctgccccctccacccccnacccngtcctacctgtcacaccggacggacccgctgtgccttctaccntcgttccnccnttgatgtacatactcatgttttacatcttttctttctgccgctcggctccggccnttttgttttatacnaaaatgggaaaaaaaaaaaagaaattatataaagttccta

SEQ ID NO: 597833 - DNA, 488 bp, Homo sapiens
  misc_feature (9)..(9): n is a, c, g, or t
  misc_feature (108)..(108): n is a, c, g, or t
  misc_feature (278)..(278): n is a, c, g, or t
  misc_feature (281)..(281): n is a, c, g, or t
  misc_feature (291)..(291): n is a, c, g, or t
  misc_feature (300)..(300): n is a, c, g, or t
  misc_feature (320)..(320): n is a, c, g, or t
  misc_feature (325)..(325): n is a, c, g, or t
  misc_feature (368)..(368): n is a, c, g, or t
  misc_feature (376)..(376): n is a, c, g, or t
  misc_feature (379)..(379): n is a, c, g, or t
  misc_feature (434)..(434): n is a, c, g, or t
  misc_feature (448)..(448): n is a, c, g, or t
ataggttantgggtggttatatataaatttgaagggtttagtgagggtattatttttatggtgaggggtgaagatttagtttttatggaagaagataaaggggatggntggatttgggttaggtggaaagagggaggtgagggatatgtgtttattttttatttttgagttatgtttaattgaattttgttagagatgggaagaggggggttgttggttgttggttttgggttatggggagtttaaggattaatgtattttatttttgactttgtggnttnggctgagacntgtgtaacntgctgccccctccacccccnacccngtcctacctgtcacaccggacggacccgctgtgccttctaccntcgttccnccnttgatgtacatactcatgttttacatcttttctttctgccgctcggctccggccnttttgttttatacnaaaatgggaaaaaaaaaaaagaaattatataaagttccta

SEQ ID NO: 597834 - DNA, 353 bp, Homo sapiens
ggacatggttgccattagtaagcagagatcaaagtttctcatttcaagcacatatggccatcaggacacaagagaggcgttacatgcattctaatacacacgggggagcagtgattgcgaactagatctagcagataccagggaggagaataagcgggacaaagtaatctcacatcatgtgtcttattaaatacccacgtgctcattatatattatagcatggttctatcttctcacgttacccacaatatcactaaataacaactgctaacaaccgtcctccttcccagtactggtctgacgcagaaggcccatggcaaagccttccatatcccagtacaacctgccggtgg

SEQ ID NO: 597835 - DNA, 359 bp, Homo sapiens
caataaaaaaggggttcccagttttagggacatatatgattccctaggggttcagaaattaggctccctttaaaaaaacccagccggggccgggggttcagcctggtaatcccagtattttggggggccaagggggggggttcccaaggtcgggggtccaagccccgcctgacagggggaaccccggtttttactaaaaaaccaaaaattagcgggggggggggacccccgccggtattcccggctattcggggggcagggcgggagaatggtttgacccggggggggggggggtgcggggggcccagttggggttttggccccccggcgggggcaaggggggggggcccctttcccca

SEQ ID NO: 597836 - DNA, 407 bp, Homo sapiens
  misc_feature (98)..(98): n is a, c, g, or t
  misc_feature (323)..(323): n is a, c, g, or t
  misc_feature (325)..(325): n is a, c, g, or t
agccaggccatgaccacttgtttgttctgaagatgctgccagtgctgaccttgaggtcatgtaggaaggaaatggaaggccttcctgtaggtgagggncaaccaggaagagctagcatctgtttggaggatagggtgtagttgtgcagataggagaaaacttggaaaaaagaagtatgtaatattatgttagtaaatgttctggagtcagtttataccagtttctttgacagtgaaattagctgtaactaaaccagtgccattgcagtgaactcttaaaggatgtctctgatgtgatctttttttgttttttttttttttgananggagtctcgcgctgtcgcccaggctggagtgtagtggcgtgatctcggctccagcctgggtgagagagcaaaactccgtctc

SEQ ID NO: 597837 - DNA, 151 bp, Homo sapiens
  misc_feature (133)..(133): n is a, c, g, or t
  misc_feature (140)..(140): n is a, c, g, or t
gtatagcttaaacatcttgggaccttttcttagtatggtaaacaagaatagaaagggcttgctagctctgtaggtattctcatacttcttgaattcctaattacgaaaccaaaccaaacaaataaattgttgntgtgacnagtgtcacact

SEQ ID NO: 597838 - DNA, 461 bp, Homo sapiens
tgcatcatgccagccaggtacaggtgcggaggaggacacgggacacctttccatgcattcagaatggttccttaaaatcatcagttaactttttttttttggagatggagtctcacggtgtcgcccaggcgggagtgcaggggcacaatccgggctcacggcaagctcggcctcccgagttcaagcgattctcatgcctcagcctcccaagtagctgggacatacgggcgcccaccaccacgccgggctaattttttctgttttaagtagagacgagggtttcacgggtgtaagccaggagggtctggatctccgtgacctcaggtgatctggccgcctcggcctcccaaagggctggggataagaggcgtgagccatggcacccggcccactttaaattttttaagcttttaaatgtttggtagagacgggggtctcactggtgtggcagggtgctccgg

SEQ ID NO: 597839 - DNA, 1074 bp, Homo sapiens
gtagagtgctggtgcggaacttgcctgccccagcagctgccggcgggctaagcccatgggcctgggcagacaaaagatggtcggccgcggtaggaaggcacggcctggcggatggctggacgcgcatgcgactggcctgggctgacgggggcatgcgctgcatgcatggctcatgatgctggtggcacttggcatgccctgtcagggtgtgctctctgaggctgccagaagggccccaggatgccctggtggctgccgcgcaggctggtgccatgcagtgctagccgcctgagctggacttgcaagcagatgcatggaccggcgctcgtcccttctgacgtaccgacctgcatacctccgtaagctgcgctgaaggctgctctgtagtccagtgttggcttgcagttgcacacgcacagtcagtcaggcatttcacacaggctgtgggctgccagcattcggacgaggcccggagcaagctaccgtgggtcgatcagcaggcttgtctatgagcacacctctgttctgtcccatgtaagccttgtgtgtcgccgtagaactttacgcatacactcggggaattatgcactggggaactgagtgctgcttgggagcgacgacacttgctcattataccttgggccccagatcacctcatgcgaccgaactaccacgcaagggggaaccgagacgcatctgtccacccttactccacgagtacccggcattcacattcatgccttcccatgaacccagaatggctttgcgaacggcagggtctcagcctgtatgaactcaagggatggtttgcgcgttcacagccatggcccggggcattagttggtcccggaagtttcaaaccgtgaatggctccgtccgtcattaacacaggttgtccaccaccactttttccgagtgttgcaaccgtggtctcaaccaaggcgtcgcgtcacaacaggagacactaggacgatagtaacccttcggcgtcgcacacctggtgctgtgcgacaataaagaacagtggatgcaagcgccaaccctgcgaagtccacggtcgcacccatcaggcgt

SEQ ID NO: 597840 - DNA, 141 bp, Homo sapiens
cgttccaacatctcactcgcgcttccaacatctcatgacgcctccaacatctccatcactccttcccaacatctcatggctccgtcccaacatctcatgcctgccgttccaacatctccatggctccgttccagacatctc

SEQ ID NO: 597841 - DNA, 296 bp, Homo sapiens
  misc_feature (55)..(55): n is a, c, g, or t
  misc_feature (69)..(69): n is a, c, g, or t
  misc_feature (71)..(71): n is a, c, g, or t
  misc_feature (82)..(82): n is a, c, g, or t
  misc_feature (85)..(85): n is a, c, g, or t
  misc_feature (90)..(90): n is a, c, g, or t
  misc_feature (95)..(95): n is a, c, g, or t
  misc_feature (136)..(136): n is a, c, g, or t
  misc_feature (217)..(217): n is a, c, g, or t
  misc_feature (247)..(247): n is a, c, g, or t
  misc_feature (263)..(263): n is a, c, g, or t
cttgtagcttctaccctagtttcccatcctctctctgtggaggccaaaccaactntttgccagcagccncnacatgcattgncancggcncagtnagatataactgatgggctttgaacctggttggccggggaanctgtaggggtggataaagctggctttccttttgggctgtttccatttgaccctaccccttccatgtcccaccccactcccnccaaaaagtacaaaatcaggatgtttttcnctgtccattgctttgngttttaataaacaatttgcagtgaaaaaaaaaa

SEQ ID NO: 597842 - DNA, 436 bp, Homo sapiens
  misc_feature (276)..(276): n is a, c, g, or t
  misc_feature (357)..(357): n is a, c, g, or t
  misc_feature (387)..(387): n is a, c, g, or t
  misc_feature (403)..(403): n is a, c, g, or t
tttttcacaaagttcccccggatagaaaggctgtccagtctaagctcagggcagcctcttcaaccactgttggcccagcctggcttgtgaggaaaccagccctgtccctcagtattgaacttggctgcttgtgggatccagtcctggaggacaggcatcaagttcttagcctctgtagctcttagctttcccatctttccctgcaaggccacaccgtgcatttacagcagtgtggcaaggtgtaggagggaccttgaacctggttggccggggaanctgtaggggtggataaagctggctttccttttgggctgtttccatttgaccctaccccttccatgtcccaccccactcccnccaaaaagtacaaaatcaggatgtttttcnctgtccattgctttgngttttaataaacaatttgcagtgaaaaaaaaaa

SEQ ID NO: 597843 - DNA, 887 bp, Homo sapiens
  misc_feature (98)..(98): n is a, c, g, or t
  misc_feature (308)..(308): n is a, c, g, or t
agcgggagctgggctggcggagcgagaggtgcacgaagcgaacgtgagtccacagttgtctggtcggcttcagcgtggacccagtaagacgtccccanactcgaggcagattcagcgaatcactcacatcgctggtacagaagtgatagttcctacacgggcactgccatctgtctctgagattatagattgtccagccgtcccagagggggctcacatggcggtgacctgtgatgcacctcagtccatactcgcgccttcgacaggcgacgtgctgtctccattcccactggcgcttgtgactttcnctcggatgagctgccggcccggctgctggtgcaatgagtgatctgggtactatcaagtagccgccataccccaagagactagctcccgccggatggatcttcagagtgcgcggcgaccgcaaggtcagtccaccgagagcttcccagagagccgcaagacacgccgtcctggcgggcgtacctgggtcctgccgagaacttggcactcctcctggtctcgagcgaactgtctagcccacgaggctggggcgagagagagtactatctctccgatgcgggaacctgcggctggctatcaacctaggtgacacctgtactcagagtcaacagcgtccatggagaatcagtctagagaagcctcatatatctgtggtgcccccgagaggtggtcggctacggcaccggagggtggaacgtccagctgcgatggtgccgggacaagtgggccagagcttgctgccctgagctggagcttggctgggccacgaggggctggagggaagcccgtctgtgctgggccggctgcgggaggacgagggcacctggggtgcaggtgtcactggtgcactttcgtgccca

SEQ ID NO: 597844 - DNA, 222 bp, Homo sapiens
cccaatcttatttgctttacaagtcctgcttcaggggtaccttccctgcggctttactaaaaatacacaaaaaaattatccccgtgtggtggtgggtgcctgtagtcccacctacttgggaggctgaggcaggagaatctctaacccacgaggcggagggtacagtcagctgagaccgcaccattgcactctaacctgggtgacacagcaagatttcgtctc

SEQ ID NO: 597845 - DNA, 111 bp, Homo sapiens
  misc_feature (32)..(32): n is a, c, g, or t
tggttgggggggggcccccaaagttttagttnctgatttccttttccaaaaaaggggggttggtccatgggtttccccaaaaaaaaaaaaaaggctttttgtcccgggcca

SEQ ID NO: 597846 - DNA, 289 bp, Homo sapiens
atgcaggcgcttgcaatcccagctactcagaaggaagattttggcgaatcgttttaacctgggaggcagaggttgcagtgaaccgagatagtgccactgcactccagactaggtgactcccatatatatatatgggagtttattaagtattaactcacaggatcacaaggtcccacaataggctgtctgcaggctgaggagcgaggagagccagtctgagttccaaaactgaagaacttgaagtctgatgttcgagggcaggaagcatcccgcatgggagaaagaggta

SEQ ID NO: 597847 - DNA, 1149 bp, Homo sapiens
gtagagacagcatccatagctggaacgtatgcgacgcagagatagaatgattgtgtaacatgtggagttcattgtcgtcaatcatcattgttgttttgttcgatcatatcaatagtagtgaacacacctcttatatttgtggggaccacagtcatccagacataaggtgggcagagtattcgacatagctcatcagtggagcgcaacaacgcaacattttgatgtcgcaacaatctcgttcgtgtgtaatattatattagtgagtgtcaaccacataatgagcgccattgtggtcggtgagcaaggttgctactaccgtggggacaatacctccacattagtttgcttacccggctgttattaccacacagatagggggtgagctgatcctctcatgaggagtgcagagcggtccatacgccatattataatgtgtgctgtttcgtcacagctcgcacaaagagttgtgtgcggaacacataattattattgtcacacgcggaattaaacagcaacacactggacgccacccacgattataagataagggggagagatatagttgggctctactagatgtggggtgggctaattggagtagtgataggggggagacatctcacattggggtcttgtttggtaaagatggttaatgacgcatgacataattccggcgttgaagataacgacgttaacaaacaacgctatgatgggtagtccagtgcatacactacgcctagacagtgggcgcgcctcacatcagccaactgagatgtcgcgtatatagttgtgggtcttaccactatagcactttgtgggacacactatgggcaacaacaaatgttgtgcgcaccaaagccacatgggtgcaacaccacattggcgggggcagaaatgctgcatgtctaaactactattcacgttacgcaatcgatgtactcgatagtgcctaaaatcatgggtatagccacatatttgggggaggaggagagatttttagccatgctaacacgcagctcggcccacaaggtccaacagggactacacagcgtcactgttaacatatacttacagtgtttgtggcccaatggggttggggggggttttttcaaagaaaatttttgtttaaattttcttgtgtgaccaaca

SEQ ID NO: 597848 - DNA, 503 bp, Homo sapiens
gctcggaccacaacgctgactcttccgcaccacctgcagaaggtgggagaatggcttccaggcagagagaagggtggagcagaagcactcagcgttggagggagtggtgtggtcctggaacacggtgctgcctgggagctctggctaaagtgtgggcttcctggatgtggggagatgcaaagtgctctagaacttgttctgtaggaaataggggagccatcaaaagttttgagaggggaagtaataaggaagacgcttctgttggccatggggagaatgagtggaaaaggggtagtggctgagtgactagacctgttctgagagttttatgggagagacattaagacctggactctcgcaatggaggtgcagaggaagattgagagcttctgtacttttctgaaatgtgagagctcagttttaaagtttagattggactgagtttattaaagaaaaagaaaatgtttttgacacatgtcaatctttgttgacacccgttggta

SEQ ID NO: 597849 - DNA, 325 bp, Homo sapiens
agactttgcctatgtctagaataaggagaggagacctggaagaactgcaagtttaaactcaagagttactgagaatacagaaaatacctgcagagctgggaagccaatgggaatacagaaaagcttgcagaattgaagaatcctgaaaaccccaagtgctttcaatccagacccaggctcccagggggacactgtgatggcactcactccaacagttccctagcaaaggtctccaagctggtctcctggagaatgttcccttcttggaaagctgcagctaatgaaactaaaataaatgataaaaggatatttgattctcagaaaa

SEQ ID NO: 597850 - DNA, 863 bp, Homo sapiens
agctgagtggttgtgtggtcgcgtctcggaaaacggtagcgctgtgctagctatggttagatcaatgattgaaggagcaccattgcagaattccaatgaagcttggtcactatttgacagagatggtgatggaattataacaacagaggaatagggaacttgtaatgagatctcttgggcagaatcttcacaggaaacagagttacaggacatgattaatgaagtagatgctgatggtcatgggacaattgagttcccgtgaattgctgacaatgatggcaagaaaaatgaaagacaagacagtgacgaagacattagagaagcgatccgtgtgttgataaggagtggcctgggtatagttaagggctgtaagaacttcgccagtgtgatgaccaaagcctgggtggagaagtgaaacagagtgacagtaagtgatgagaatgatcagggaagcagatatgatggtgatggtcaagtagactatgaagagtttgtgacaaatgatgagtgtatcgtgaagaccttgtgcagcatggtgttaaatttcttgttcaacagtgtattgccttgctttggttgtaactgatctgtagagttgctcctatgttagaaaagttgctgtgttgtattgaggatgcattcgtcagttgactccttatttacgatgggctaaactttttagaaatggcagtaactgtgatgggtaacggtaattaagcttgggaattaattaatgggtgtaggggaccagggctgctgaaaaataaaaggatgggagagggatgggtgatgggacagatcagtagagaggagacaaatgagggaagacatgggagaaagtcaggacgtgagaaagtgtagag

SEQ ID NO: 597851 - DNA, 286 bp, Homo sapiens
aggaggttgaggcaggaggatcacttgaggccaggggttcaagaccagcctgggcaacatagcaagatcccatctctaaaaaatgtttaaaaaaacttagccagatgtggtggttcacacctgtattcccagccactcaggaagctgaggctcagaatatcaggctgcagtgagccatgatcgtgccactgcatgaaccccagcctggctgacagagtgagaccctgtttcaaaaaaaaagaaaatgccatccgcagtgctgggacctgcgttcttacctcacctg

SEQ ID NO: 597852 - DNA, 915 bp, Homo sapiens
gggtcagtgtgacctccaggatatagacggccccccttcagccacagccctagtgaggtctcctacacgcgcagcatgccattcggtaacatccacaacaagttcaagctgaattacaagccggaggaggagtagcaacccgacctaagaaaagataacatatcgactaggtgggcaaggatacggagcacctttgaacttctacgagaggctgcgggacaaggagactccttctggcttcactgtgagaagatgtcatccagacaggagagggaaaccaggtcacccccttcattcttgaccgtgggctgctgtggcatggtgatgaggagtccctacggcgtgttcagggacacgctatgaaccccaatcagttctcggatcgacacgggggccgtacaaacgccagttgacaagcaacaagactgagctcaaccatgagaacctcaggggtggagacgaccgtgaacccaactgaggtgcgcagcagaccgggttcgctactggccgcggccgatcaggggtgacacgtgacgcccacaaatgggccccgtggggagcgcgggcggtggatacgcgcaactgagagaggctcatcacaagctgacgggcacgagaaccaacggagaaggaaataggcatcgtatacgacggcaatgacactggaaggagaggacagacggaacaacgagggaccatgcctgtacagaagagaccggtcaccgaagggggtgcctggtgatgggccgaaccggaccagaggcccgtggaatggaaaagaaacaagagacctggtgaggggagaagaacagtcggcaccaaagaacgggaaatagcggaacccagcagcaaagtaaaaagccacacacaaaggcggcagtaaagggaagacaaaagaagaacgaaaagagaaac

SEQ ID NO: 597853 - DNA, 151 bp, Homo sapiens
aaaatacgcctgcaccccagtatgcgctgtctggagtaagaggactgagatgccagctgtggggcccgtcaaggagtcacgtctcaatgagaggggtgacccatgattttttgcaaacgttggtggaagagacctctaattccatgaccta

SEQ ID NO: 597854 - DNA, 178 bp, Homo sapiens
tagaggatccctgcttgctgcgggcactgcgtgtggcggttgcggggttcgctgcggaactcgctttgcggcttcgcgcgcgctcagacaaccgcagcgagtcagatcacgaagcagtcctgtccttcggcaggactgcaaccccgcaaccaccacgccgcaggcgctgacatacggg

SEQ ID NO: 597855 - DNA, 326 bp, Homo sapiens
gtcgactgcagtgacggagaatgtcaccacaatactcctagtggtgtctcaaacaggagaaattacgggagaatacttacagaagtttagagcctgggctgaacagttttaaggaagatctgcaagatgaggaactggttgggactgggcatagcttagggcttaacagctttttggattggtcggcatagcatggtcgcctgaagtgaacctaataagcaagttgtaagccttgaccaaaaacgcaaacaaaattaaggaactcagacaggtgtggtggctcattcctgtattacgagcacttgggaggctgaggcaggaggatt

SEQ ID NO: 597856 - DNA, 433 bp, Homo sapiens
ggtctgcatatcacatagaggcttcctttacatatttgagccatcctaaatctataattttctgtttacttgtagccaataagtgcctccattaaaaaagtagaaagatatcacataaactacctaatgctgcacctcagggaactagaaaagttaagaacaaactaacatccgtcgaaaaatttaaggtaaggaaacagaaaagaaaataataaaaggccaggagcaggaaataagaataggaaacgtgacaaaaatacgaaagaaatccaacaagaagtggaacaaagtttttattaaaaagagcacaaaaaatttgcatacaacgtgcgtaagcggaagggccaaaacccaaagcaaacacacacaggaggaacaaaggaacccccgaaaagttacacactttaaggacaacattgggcaaacagcaaag

SEQ ID NO: 597857 - DNA, 145 bp, Homo sapiens
cagaatactgtgacatcaaatgtacgaatatagtgtggatatgtggagttcgggttgtatgctggcaagtatgatctttcggaaggagccattcttccatggacatgacaattatgatcagttggtgaggatagccaaggttctg

SEQ ID NO: 597858 - DNA, 332 bp, Homo sapiens
gtttcttcccttgtttcgtgtggaatgtggtgacctagtcacctggaaccagctcctgacagaccccggcaacttctagatgaacccaagtgaactttcctcattaccatcctgaagtcactaccccagggggagctatagcttcatgaccgtaaaatgtgacctgtgtgctggcaggacgactcactgcggctgcgccactgggacccctcccctacatgcaccaatgcactctctcccctctccatcaccccataaaaccctcctgtcactttccttcagagacaccgctttggagagtattcccagcgctctccttgcttgtgacaagt

SEQ ID NO: 597859 - DNA, 933 bp, Homo sapiens
ggtgaccgcgttgtctatatacatctctgttgtggcgttggtcaagatggaaggatgtgttatcgagttgtgacaggcgcgtgtgtgtgcaatgacctcttgtggttcggcgcccctccgagatttgtgggacaccgggtgggcccccctttgggggtgtcccaagattgaacgccgccgtgaggtttttggaaaacgccaattggttgaaagaggaaccgcctgacgctttcgcgggctccccaggagatcgcgtctggggaattgggaagccatgggcccaccgccccgcacgcatggggcgtgtttgtcacccgccccagttgggcggccccccgtgtgcccctggtaaccttttctccgcccggtgggtattagtgcccgcctgctcgcccccctaaaagcgtggggaaaagccgagccgaattctgagtgcagtacctggactccccgcgtctttcaaacagggtgaccctttcttctcctcgcttcctcggcagatgtgaccttcggagtcacctacgtcccccccgcgtccctctcttgtaaggtgtatcagctccctaggctccccccattctaggggggttcagtcctccttgggtccccttttactcccctaagacccggtctcactcaataaaaagaatttaccggcgccggaatttatgaacgcacatctttgtcatcacccaaatcctgccccgcaggcatgaggaactcggaaccccgcctctgtaaaatccagcatctcctttgtcctcccccggtcccaaccttaaaccaatactcttctctcaaagatcccccccttatcagaagcccccctcaatcttctcactcagtgaaaacaagacaacaataataagtttcctactctaaaaaacagcactctggggatttaaaaaaaatctttttttacaaccacataac

SEQ ID NO: 597860 - DNA, 214 bp, Homo sapiens
  misc_feature (17)..(17): n is a, c, g, or t
ggtattcatatggcggngtaggagtaaaaaagggaataatccttatagaggagaatcggcaatagcggacaaaactaaaaatctatatacccttggacccacagttctacttcggggaatttaaagtatacacatactggcacatgtacaaaaaagttacggtagcatggttttaaaaaacaagggacaggcggggcgcaggggctcacgccgg

SEQ ID NO: 597861 - DNA, 327 bp, Homo sapiens
acatatgtggttttaaataccttgccccctcttaccctccccactttgagtctctagtgtccattatgtcactctgtatacctttttgtacccataagttagctctcacttataagtgagaacacacagtatttggttttccattcctgagttgcttcacttagaataatatcctccagtctccatccaaaattggctgcaaaaaaaaaaaaacaccccaaaactttattttggttcctttttaatggccaacgtcatattcccaggggtgtagagtatccccctttttatttatcccaccccacgggtaggaggggtgggatcccc

SEQ ID NO: 597862 - DNA, 400 bp, Homo sapiens
  misc_feature (284)..(284): n is a, c, g, or t
  misc_feature (291)..(291): n is a, c, g, or t
  misc_feature (309)..(309): n is a, c, g, or t
  misc_feature (395)..(395): n is a, c, g, or t
  misc_feature (398)..(398): n is a, c, g, or t
gaattcctgctgtgccagctgaggggagctcagtaccctggactgagtcataagcacctgtctgtgagggccctgaggacccaaagctccagagtgctgctgctgctgctgctgctgctgctgctgctgctgctgctgctgctgctgctgctgctgctgttgcagcactgccacctgggaagaacctagcatgccctgggacccctgtgattgttggggggacaactgttgaaccaggagaccctggtggttgctgggaggcagaaggccctgaggcttagganccagagnctggttcttgtcctacangaccctgttggttgttggacttgccacctgccctaagagctgctgctgcttgctgcttgctgcttgcttgcttgctggttgcttgntgntt

SEQ ID NO: 597863 - DNA, 478 bp, Homo sapiens
gctgggcgctctaaggatcccattgatagcggatagggcctgtatgaatggctcacgaggttcagctgtctcttacttttaacagtgaaattgacctgccgtgaagaggcggcatgacacagcaagacgagaagacctatggagcttaaattataaatgcaaacagtacctaaacacaccacaggtcctaaactaccaaacctgcattaaaaatttcggttggggcgacctcggagcagaacccaacctccgagcagtacatgctaagacttcaccagtcaaagcgaactactatactcaattgacccaataacttgaccaacggaacaagttaccctagggataacagcgcaatcctattctagagtccatatcaacgatagggtttacgacctcgatgttggatcaggacatcccgatggtgcagccggtattaaaggttcgtttggtcaacgattaaagtcctacgtgatctgag

SEQ ID NO: 597864 - DNA, 83 bp, Homo sapiens
  misc_feature (43)..(43): n is a, c, g, or t
aaatggttaaatatcatcactgtcgggatgtacccctgcacgncctctatgacaatgtggagaaactctttccaggttttgag

SEQ ID NO: 597865 - DNA, 1358 bp, Homo sapiens
tggggagagagagagagatatattttcttaaggggggagagagaggcgcgcgcggggagagagagagagggggggggggcgctctctctctatttatccccccccggggggggggggggtggtctctctctctctctattacgagagagagatatttcgcgcgctcgcgcgcgagacggggagaggtgtgttctctcacaaagacgagagagaaaatttttattacatatagcgcgcgggcgggcgaaagaagaagagaggagagggcgcctcccggcggaagagagagagagagcggtgtgtcgcgcgcggagggtggtgcgagcggcgagggagagaggacagcgcgcgagagcagagcgcgcggcggcggctctcgcggagagagcgcgcgcggcgcacacaagagaggggcagggagagaaagacagacggaaaaccaatcgcgcgcggacgcgagagagccatatagtgtaagacggaggagacgcgacgagagtgtgacggcgagcggaaggaaagaagggcgggcgaacggcgagagagaggacgacgaggaggagaaagaaagagagcgcgaggagacagagcagagacggagacgcagacaaacacaccctcccggagaggaaagcgcagcgagggacaagaaagacccagccctacacagcgagcgcgagagccagcaaacaaaagtgagggagcgagagcgaagagagacaaacgaaaccgcggccaagagacagaaggaccagcacgcaccccacgagagaggaaaacaagagaagagacagaggaacagaggagaagaaatcacaacagacgacggatcggataggcgcggccacctccagcagagtgcgaagaacaagacgacacgcagcacacgtaatacgtaggggaggccacacacacgagccgccccgcgcgccccacctctacctccctccgagcagcttagcgcaccaccgcggacgaggcagtggcgaagagccaaaagaaagccaccaaaaacgtggacagccgaggccccgtcgcacgcacacagaacaccgaaaagaaggggacagcccgcgcgtgcgaacagacatacaccacgggccgtcgagcgccgaacccactccccaccccccccgcgcgcgcacacaccacacggcgccgccggccccaccccgaccccccgcacgcccgacccgccggcaagagaactccacacccaccgcgcaccacacccgccgaacagatacccacagcacgagggcaaatatacaccgcacgcacgagaacagtcacacacgagggtaagtaggacacccccagacacatagtgtagacagagaaaacaacccacgcgcaca

SEQ ID NO: 597866 - DNA, 1595 bp, Homo sapiens
  misc_feature (156)..(156): n is a, c, g, or t
tttttttttttaaatttgaccaaaaaaaattttttgtacaattacccaccactggatttgactcagaagaaggacccccagaaggggtgtcttccatttttccctattttattttcagccctttgagggcttcatgtgtaagatcaaacgccaagngcccccaggaagaggtgacattatctccgtgtgaagtttcaccttccgtggtgtcctttgtgttccggctccacagttctttccattcaggcctttgtgcaattttcaggcattccgtggcagttttcgaagccaatgtgggtgaggctcctttcgtgggatcaggctcctttcaggctcctttcttgtgcgctcagggggtgtgtgtgcttgtgtgtctaccctctctcctgtgccgggagttacttgtgtgtggaaagatgtggcgcaccgagggagggcgcaatgtggcctgtgtattccacggggggacattgtccatgtggacgtgtaggggctctgtgggctcttgtgagagcgcgcggttaaggggagagcgcgggcccaatatgtgcgaagccgcgagagaacacggggtttaactatattaagagcccagtgtgtgttcaaaccccccacgcgggtgttttctttgcgaacctatttgggccggtcgaaacggggggagagaccccttttgtgtgcgcgcggcgttttctacccttttgtgagagcgcgtgttttgtgtgcaagaaaccacagtggttcccccccaaaagacaccgagcgccaggcaaaaaatttttcttccgagtggcgcttacgtgagagcgccacgtgtggcgaagacagagaacagagggggatttgcgggggtttcacatcaaacgggggtattacccctttgtcgtttttttccacccaagaaaatttttattttccccaaagcggggtattaatatagtttgctcacacagggggggtggggggttggaaccttttcacacaaccgggccccaaataaaattgtggcaccctggggtttgggccaaaaggttccccacttcttcatgggggggggcagaacaacactttttgcggtcgcatctttgaagaaacaactcttgtctattctctcttaaaaaaggcattaacacaggggcgtcccttcgcggcggatttctttgtggtgccaccctgtggcggcaaaatttggttctgggggagtccaccccaacatacaatattggttggtcccccccaagggtcttatactcttctgagccgtgctgcccatcaatacttggtcgtgctggggttgtcggctcgatgtcacacgccaacttgctgcgtgtcgtgtcttgctgtgcaccaagtactcgaacaaggggacgtgcaacactctcagtttgtgcaggaccaaactgagacgagagcactgttggtctctcgaatagtgacgtaatcatacctaccagaaaaccaccacacctcgtcgcggtggggcacacccaaacaaactagtggtcggttgtgttctattactcacccacaacactaccctttgttagtctgatgagaaagccaacaccccatctggtgagagatcaagtaatgcg

SEQ ID NO: 597867 - DNA, 1059 bp, Homo sapiens
  misc_feature (51)..(51): n is a, c, g, or t
  misc_feature (67)..(67): n is a, c, g, or t
  misc_feature (95)..(95): n is a, c, g, or t
  misc_feature (101)..(101): n is a, c, g, or t
  misc_feature (118)..(118): n is a, c, g, or t
  misc_feature (123)..(123): n is a, c, g, or t
  misc_feature (165)..(165): n is a, c, g, or t
  misc_feature (194)..(194): n is a, c, g, or t
  misc_feature (199)..(199): n is a, c, g, or t
  misc_feature (249)..(249): n is a, c, g, or t
  misc_feature (343)..(343): n is a, c, g, or t
  misc_feature (352)..(352): n is a, c, g, or t
  misc_feature (388)..(388): n is a, c, g, or t
  misc_feature (420)..(420): n is a, c, g, or t
  misc_feature (458)..(458): n is a, c, g, or t
  misc_feature (488)..(488): n is a, c, g, or t
  misc_feature (525)..(525): n is a, c, g, or t
  misc_feature (533)..(533): n is a, c, g, or t
  misc_feature (535)..(535): n is a, c, g, or t
  misc_feature (538)..(538): n is a, c, g, or t
  misc_feature (918)..(918): n is a, c, g, or t
  misc_feature (935)..(935): n is a, c, g, or t
  misc_feature (957)..(957): n is a, c, g, or t
  misc_feature (963)..(963): n is a, c, g, or t
  misc_feature (965)..(965): n is a, c, g, or t
  misc_feature (995)..(995): n is a, c, g, or t
  misc_feature (1002)..(1002): n is a, c, g, or t
  misc_feature (1016)..(1016): n is a, c, g, or t
  misc_feature (1025)..(1025): n is a, c, g, or t
  misc_feature (1029)..(1029): n is a, c, g, or t
  misc_feature (1038)..(1038): n is a, c, g, or t
  misc_feature (1049)..(1049): n is a, c, g, or t
ttgccggcttgccgggcagggggggaggccaggccaaagtgaacaagacancccgaggaggctgttnccatgcccctggggggctgattgcccanagtgtngagtcggcccccagatncagcncaggcccggccctgctccccaggcagcccctaaaggattctnctcagggaggcacaggccaggctggatgnagacnttcccaaaacctgacaagatgtgcaggccgaggccggggcctgggggctncctttgctcccagcccaggcaatggatgtgccagaaaggaatattgcaggcacttaaacgggctcccagggatttttaaacaaaaagcaaaganctgttgctncaaatctattgcagaccaagcaagcaggtttttatnaattttttttattagctgattgttgttatttnttatatgcaggcctgagtctgcctgtgcgccacatgcncaggcttcagccgctgtaatggttcgcatngcctgatgggtggagagctaagcgcgctgtcgagagnacttgcgngngcntcacccagctaatctgtagggctggacctatgtcctaaggacacactaatcgaactatgaactacaaagcgtctatcccaggaggtggctatggccacccgttttgctggcctggatctccccactctaggggtcaggctccattaggatttgccccttcccatctcttcctacccaaccactcaaattaatctttttttacctgagaccagttgggagccctggagtgcagggaggaaaggggaagggccagtttgggctgccgggttttagtttcctttgcactgagggcccccctattaccatgaaaaaagggcctgtgggagcctgcaaactccctgctcaaaaaaacatggagactcctgccctgttgtgtatanatgcaagatatttatanatatttttggttgtcaatattnaatacngnccctaagttatagtatatttgggcaagccnacttgtnaataccccccctcnctcctgttncttncctaaacanatataaatggntggtttttta

SEQ ID NO: 597868 - DNA, 114 bp, Homo sapiens
catacaccgagatacggaggtcagcacggtgctcacgttgatcgacggaacttgtacagagcaggcatgcaccgctactggtgaatacacgtcgaccatggctccagtcttaac

SEQ ID NO: 597869 - DNA, 122 bp, Homo sapiens
ctgtcactgagtgtctgttattgcattcgtgctgccgcatttgttttgtgtactctatgctgttagtgacaatctagatgacgcatgcaggggatccgtctaccagtcgaccttgtcgcgtc

SEQ ID NO: 597870 - DNA, 182 bp, Homo sapiens
  misc_feature (135)..(135): n is a, c, g, or t
  misc_feature (137)..(137): n is a, c, g, or t
aacctgcttaccggggcgtataacatctcccatcttcattggggcgtcttgaacctccacctgcaccgagagcctcatcacaaccctgccatctcaacagtgggagccctgagccctgggtcccaggcatccccngnccccacacctccgcagccagctccttagcttcatcctccgtgtag

SEQ ID NO: 597871 - DNA, 141 bp, Homo sapiens
tagctgggattacaggcgctgcagcacattgcctgcctaagtatatggtatataagaagagacggggttcacaatgttggccggggtggctagaattcctgacctcggatgcttgtgccacctcggtctcctaaagtgctg

SEQ ID NO: 597872 - DNA, 800 bp, Homo sapiens
ggacgctgtgtcgttggtgagaatcgcacgtcgaaatagcgatgccgatactggtttgcctggggctgaggcccacttcgtgtgtaacctagacgctgatcttgtgcggatgcgaggcccgagcaaataatcaccgccaggggctggtctgtgcgtgcgttggctcgaggagtcgccgtctgggcgcgtgagtcggttgtgatctaagtatcctctggacatgaccgctgcggcctcaacaggcatccgcactgacgcgcgctgggtgtgcttgtgagaggctgccaatgtgaataaacgtcttcgttctccggactagcgtggccttgcctaggatgcatcatatcggcctgacgatggatcgcatatactccatgttccgagaacgtaatgtcaacctgccttgctcattcgaacatccctcttcggtgattgacctcttagtccgtccgaatgaacgatctatccaagatgtctctctgagcaccacagaagagtgtccatcgcccaccaggtccgcgctaaggctaataagcttgaggcggtacaggaggctgcgtatgcgtgagtaacgcgtgcgccagtcagtgggggatctggctcgcgcggaggtgggcttgggtcccaggcctctggcgtctcatcaagatccgttcgtgtcgtgtgtggtggcaaggccgggtcccagggacatccgtatgagcggcccgttctattgactcgtctgtgtgcctcagtaacaagccgctggtaaaagcccgattggttgggcaggatgagtttgcctggaatcgggagca

SEQ ID NO: 597873 - DNA, 131 bp, Homo sapiens
ggctgggcatggcagctggtccttcattgccgcccgcccactgtcccagtacctaggcctgcaggtcccaatgtagccccctcccctcctccagaggcccctccaaaccgccccgctcattttgtgaattt

SEQ ID NO: 597874 - DNA, 239 bp, Homo sapiens
ccatgcgcggaagaggtggtttagacagaatgcctcctggtcggggtgggcgtcccagtgcctccatcaagaagagattatagatgatatgagccctcgtcgagggaccacctcacccctcctcccggacggaggcggccggggtgagtagcagagactcggaatcttcctcgttcctccagcaaccaccagcctagtagtgggcagacctcactggcctagtgacacgaagacgggac

SEQ ID NO: 597875 - DNA, 196 bp, Homo sapiens
cggaactccaccgtgacttgcaccagggcattgaggcagccagtgacgaagaggatctgcgctggtggaccaccccaccgggccaggcatcgattgaaactggccacagttcgaggagtggtccttggaaccacagaggacaatcagccggatagagaagggtggccggagccctgatgaggttaccctgaccagc

SEQ ID NO: 597876 - DNA, 255 bp, Homo sapiens
  misc_feature (156)..(156): n is a, c, g, or t
aggctgcgtaccgtagcggcatatttcttccctgcttcatcgccatcgaccagtacatgccattcaatccccattcggcgggcaaatttaaccagtgctttagccggactgggcaaactcaatgaccttgatccttcggcatcaaaatgatgtccnactgacgcgccagttcattgataacccaggtttccgtttccccttccaccagcaaccagcagcgtgcaaacagcgatgacggacggttaaaacgaatgt

SEQ ID NO: 597877 - DNA, 449 bp, Homo sapiens
  misc_feature (39)..(40): n is a, c, g, or t
atcagctgtgccagggtcccctggcagagaaccactgtnntatgtcttaagaaaataaacttcccagttttgctggggtgggggaggggatctgggattctgactgcttcctaaatttatttcagccagtcctccttattttagcacatcagcccctcctcccttttacccttgcttaaaatattattaatgcaaattgatttgtaaaattgaggaaaacttactttgtgaaagtttttattttttttcttgtttatttctgtgctttgagctgcctcgtgcttcctgttttttttctgtttttgtgatcttagaacaggatggcctgggacatgtgtcttattaagcaggagaccatacattctggtttgcttggcacattcccagtttatgcctaatattaattgcactctagcctgggcaacaggagcaaaactccgtctcaaaaa

SEQ ID NO: 597878 - DNA, 282 bp, Homo sapiens
gctgtatgcgtaggagaaagaaaaaagtaaaaatacaaacatcagtacttctatagaggtgatagataggtaccaatagggatgtagaggagtacagttatatgtaagagatttaaaggtagtgaatgtagagctatgaacgcattcatcaattgatggctgcaataaaggcctactatgggtgttaaattttttactctctctacaaggttatatcctagtgtccaaagagctgttcctcttaggactaacagttaaatttaccaggggatttagagggtt

SEQ ID NO: 597879 - DNA, 530 bp, Homo sapiens
  misc_feature (378)..(378): n is a, c, g, or t
  misc_feature (383)..(383): n is a, c, g, or t
ccagtagtgtatttagttatttaaggagggctcaatcaacaggtttaaatggtgtgctattcataattattgcaaaaataggccgggcctgtgattccagcgctttgggaggccggggcaggtgaatcacttgaggccaggagtttgagatcagcctggccagcgtggtgaaactccatctctactagagataccaagagtagcgggcgtggtgacaggtgcctctaatcccagctgctcgggaggctgaggcgggagaatcgcttgaacccgggagtcggaggttgcagtgggccgagatcgcgccattgcactccagtgtgggtgacgagcgaaaatccgtctcaaccaagaaaagagaaaaaaggaaaaagaaancttanctggcctttggggcacatgcctgtggtcccagcttcttgggaggctgaggcatgagaaaaaaaataaacctgggaggtggaggttgcagtgagttgagattgtgccactgcactccagcttgggcaataaaacaagactgtctcaaa

SEQ ID NO: 597880 - DNA, 86 bp, Homo sapiens
cctccccccccgggtggggttcctccccgcatcgttggggttttgttatgtgaaaatatcctggaaataaaaacatgtttttgcca

SEQ ID NO: 597881 - DNA, 1188 bp, Homo sapiens
  misc_feature (1188)..(1188): n is a, c, g, or t
cttccttcagccagcgcaggcggtgcgtccctgcaggcccgctggcaacggagctcaaacttgcgggaattcttgcagacagtcattgtattcaaagaacgaataagcaagcaaacgcaacaacgaagcgaacggaagagaggtacgacagcatacaagcatgcaaactcctgctcaacaacaactgcgcaaggaacaaccacgaacacactgcacgagtgaacccaaacgcatgagcgaacacgccaaacgcccgtgcaggcacaaagcccaccgacagcacggcagcgagcaagtctagcaggacggacggcccacaaggccaacaaggcacacctctcttagcacgaaacggctgcactctccacatctcctcccaggcagccttctcacaacgcaaggactactaccaccaacgacggccatttctacacccacactgcacacgactatgctctctagcaggacacgctgcgcctcgacaactacgccactgcagactaaacggcagcagcttccagaaaacacaaacctttattacgctgatgcccgctcgggaacggcttcactcgaaacaccaatccatttacccccttattctaactgctaggttctacccttgcactcgtcatcttgaatatttcaccaataccattataacttgccttactcgatttaggcattcccctgcaatatttccctttgcccccatacttctctagctccaactacccctgttggcctactcacctggcttcccccaattgttatcctcttggtcccatctgccatcccattggctcactggcattcttgcacccccattcacaagctcctccggcttcttaccactgaacttttcgccctcgtcccccccaggctctggccccgctcttcccccgcccagcccccgtactactctcctctccatatctcaacctcaaaccccctccctttaccattttccctcaccctccgatcccaaataacccccccggcgcgacacaccccccccgacgccacggtctcctccgcccccctgtttcacccccctttctcccgacacaccgggccgcacgcacccccgcccccgaacacccacccaacgcaaccgagtaaacacaccgccacaggacaccacccagcaccagcggaccgtcctcccccccccctacccgccccctgacn

SEQ ID NO: 597882 - DNA, 133 bp, Homo sapiens
  misc_feature (48)..(48): n is a, c, g, or t
acccgactatgcctgcaccaggttttcagctttgtttcggttgctgcnttcaacattccatgtcttctcatcatgatgggggaaatcttcatcatcttccaccagtgactattggtcttcagtgttttcattg

SEQ ID NO: 597883 - DNA, 229 bp, Homo sapiens
ccgagcagtattatctgcaaatcagattgtgtagagattctcaagaaatgtggagaccagaataaattccctgaagaacacacagctgaaagtatctgtgagtttctgtcccctgcagatgacctggagagctgtatccctctggacacgtacctcaggccaagtgctttaggaaacatcatagaagaagtgactcacccctgtaacccaaacccctgcccagccaacg

SEQ ID NO: 597884 - DNA, 872 bp, Homo sapiens
tgtcttgaaagttgagtgtgagttcttcagctaagtgggggaggatgggattttcaggtagtggtggcaacacataaaagtgttatggttggcggagtgcggtggctcgtgcctgtaatcccagcactttgggaggctgaggagggcggatcacgaggtcaggagatcgagaccatcctggctaacaaggtgaaaccccgtctctactaagtagctgggattacaggcacctgccactgcgcccggtaattttgtattttctagtagacacagagtttcaccatcttggccgggctggtcttgaactcctgacctcatgatccggcactctgcctctcaaggtgctgggattacaggcgtgagccactgtgcccggccttttttttttttttctttttttggggaccgggttctcgctctggctccccgggcggggtacacagggggggacacccgggtccctggggcctccggcttccggggttacagaggcaatttttttttggctagagtccccaagtaggtggggcttaacgggtgctggcccatggcgggttatttgggatttttgggagaaagaacatgtttccccaggctggggccactctcgttgtggtggtgagacctcttagacttagggggatgttggcccagctttcccccccaaaggtggtggggttcagacgtgttggcagcaacgtcccaagtagcgcatgttgttttttaaacaaaagtttaacttcttaaagtgaacgtcaaaatggtgagaagattttttcttccgagattcaggtatttcccttgtttactacatccgggggggtcggcattatggacaggggctcgcaaagagaatcgtggcataaggaatg

SEQ ID NO: 597885 - DNA, 154 bp, Homo sapiens
cacccgtcattatgggggctaggtgtatgaacctgtagggtgttttctcgtgctgaatgagggttatatgttgttcatgtggtgggtgagtgagccccattgtgttgtggtacatatgtagagggcatctcgggctgtgcccattatgcgggtg

SEQ ID NO: 597886 - DNA, 161 bp, Homo sapiens
cggagcgatatgaagtagatgtttttctactataggtctggattacttaaaaaaaataaagaatataagtaaggatcaaaactctaaaatttggcatgaaaattacatccaaatggtgaaaatcagatctatttgggttgggccgttagggccgatctgga

SEQ ID NO: 597887 - DNA, 141 bp, Homo sapiens
gtaatgattactagtagtttgatgctactgccctgattccagttaaggggccagctgcctttcccctccctggtttttcctcctccatggaaatggccaccccgtggaaaaagccaattaataattttgttttttcttgga

SEQ ID NO: 597888 - DNA, 570 bp, Homo sapiens
  misc_feature (22)..(22): n is a, c, g, or t
  misc_feature (60)..(60): n is a, c, g, or t
  misc_feature (150)..(150): n is a, c, g, or t
gagggggggggggagctattanccatgggcaaccccacgcggtgcttcgacattgccggnagcgggaggccttgggccgcgtgtcctttgagcgtggtgcggacaagggcccaaagacaggagaaaattttcgtgctctgagcactgganagaagggggggggttataaggggtcctggtttcacagaagtattccaggggttatgtgtcagggggggggcttcacacgccataaggggacgggtgggaaggccatctatggggggaaatttgaagatgagaacttcatcctaaaggatacgggtcctggcatcttggccatgggaaatggtggacccaacacaaaggggtcccaggttttcatctggactggcatgaatattggggaggccatggagcggtttgggtccaggaatgggagaccagcaggaagatcaccattggtgactggggacaactcggataaggttgacttgggtgttatcttaaccaccagatcatttcctctggacgctaggagagcacccctccaccccatgtgctccgaggtcctagaatctttgggctctg

SEQ ID NO: 597889 - DNA, 175 bp, Homo sapiens
agtcaatgagtgtgggggtgttagaggacatagacgattctagtactgagctgccgatctactaccatgagcctagctgaagagtggaactcttacacttctactaagtagatgacaaacgatccatgtccttccaagaatgtgtggcatcacaggaggagggacacacagcatg

SEQ ID NO: 597890 - DNA, 256 bp, Homo sapiens
tggccgggtaataggcctgggtccccctcccccatgccggcagctgtccccatgtgatttatttttggatacctgggagggggccaatgggggccccagggggaggcccccctctggaaatgtggttcccagggatgggcctgtacataaaagcccccggatggcccttcccccccggatgggccgtttttttgttgataaggaaccccgtaattttcccaggaaaataaagaaccggctaactagggtctttcca

SEQ ID NO: 597891 - DNA, 159 bp, Homo sapiens
acgaggatggtgtgcagctgttacagtctctgctcactggggcaccacctcccgggttcgggcattctccctgcctcggcctcccaagtagctgggattacgggtgcgcgccaccacacctggctgatttttgtatttttttagtagagatggggtttc

SEQ ID NO: 597892 - DNA, 770 bp, Homo sapiens
cctgcctgctggcttgtaaaggaatctgtcagcaaattattgagttctctctgaagccacagttcctcagttgtaaattgggcacaataatgccaactggtaagaattagagagaatgtacatagtaggtgccttatgatagagcggccaaagtgggtcgtaagaggaggaatgaacagtcaagggcataatagcagtaactacatgtgtcggctgttaattttgctatgtataggttatgattatttcgctgtggtgtggctgtaatttgtgtctacaatctggttgctcccttccagcattctgttcttaggcgtacttccgaattatgactgtgtggactggtggaataagcaaagatagatctagaaggatgttaagtacttccatgagagatatagatctcatgtgctgagattagtgtgcaagtttgtggcggtatgggtcttgggtttggtacaagtttgcatcttaaactggttaaagtgattaggtacgttttgagactttgtctattgtgacctgttacaatagagatgtagtgtgataattcatcactatataggtaatgcttcttggtgattttctgtatttgaatattatcgttgtctgcatggtactgttataaaaataggcaggtataaagaatacaaatatgttttattatgtcaaaatatgaatcatagaagcagaatagagaacctaaaaatacggcaaattcttacagcaactgaacttcaaaaaaggaaacaaagcataaaggggggaat

SEQ ID NO: 597893 - DNA, 379 bp, Homo sapiens
aattagaggtcagacagtaagcaggctctgggtctagacagggacctaaatggggtaagagatatcaatctacagtgtagataggcgaagccatatagaagtttataaccgagagagtgacacataatttatagtagtaaacagaccatctggctgctgtgtggagagtagattgcaggggatattaaagtaggaacagaaaatccagctgagaaactaccacagaaggggaggtaagtgcatggccgtggcttggaaatatcaaggcatccagatgtggcagcaacgattgcagattcgccaaaatgttcccacaggctagcaactaagcagcagtttgctgcatgcgcattgcatggggcatcctctagcagtcgac

SEQ ID NO: 597894 - DNA, 277 bp, Homo sapiens
cgtggtggcgtgtgcccagctactcaggagggtagacaggagaatcatatgaacctgggaagtggaggttgcagtgagctgaaattgtactactgcactccagcctggatgacagagtgaaactccgtctcaaaaaaaaaaaagaaaaaaaccactgactttatgctttgtcatgggacactgcgccacctccacacctagctaaagaaatgctaaatatccagggtaaaccacttacacttaaactaatatggtatcccctccatctgcaaccctt

SEQ ID NO: 597895 - DNA, 1395 bp, Homo sapiens
gccaccttcctcaagggactgtgaccctttggggattctgtccctgaccctgcttccccaagctctcctgggtcttggagggactgtgggaatgaacttggccattgcacggaacagaccaggtaaacgtgacttgctgcaactgacgaacggacgctgtgccggaaaaggaactaacaacgttggacacacggctgacacaaacaaaacaaaaacaaacaaaaacaacaacacaaaaaacaaaaaaacaaaaaaacaaaaacaacaaagggagcggggcgagcgacagaactatcaccgagagagggaggcgcccaagaacgacgcgaccacgcaccgaagaagttcgtggcgaagccaggagaggagcctcacataggcagtccgaggcggagctagaaaatatgaagaggcacgactacggcgcaggggcgggcagtggcccacaaccccacgcctgggcgcgagtgtgagagggagaacacagacgcagacccctcggaggcgccactaaggtcgagaaaaagagaggaagaaccagaacaagagaggggggagagcagaaaaaataaaagtaagggggggaagcaacaaacccccaagcaggaggacacaagaagaaagagcacgctgagagccggcgagaaaacacactcaaagcgacagagcagagggcgaccctccgagggcggggagcagacaggacgagaggcgataatgagaaaagaggaggacacagccggacaactcgcgtcggagaacgacccgaggcgatcagtcatagatgccgaacgacagatgagacgcaagaggggagcagaaggaggggaaaacaggagacaactgaacaaaggcgcaagaaagaagagggcagacacggaagaagcggaagacggcacgcgcagagacgcatagcgggaagaggggcggggggggtaaagtagaagagtggcaaggagggacggaggaaggggtggcatggaccggacggacgggaggagaggaggaggacgcaagcaagggggggcaagaggaggagcaggggcgaagaggcaaaaggagggagaagcgggaggcggaggggaggaggaacgaaaggaggcgggggagcggaggaaagcaaagatagaggagaagagaacgcgcgaagcggcaggacgagtggcggagagcgagaagaagcagacaaagaggaggtgggggggggagacgacggagagagacaggcgaaggggagagggcgaggacggagggcgagcaaatgagcagaagaagaagagtagcggggcgggggataacgggtaggagcgagggtgggggggcctaggaggagaggagggggaggagaaggggtgggaggagagagagcaagaagagagagaggatagaaaagaa

SEQ ID NO: 597896 - DNA, 790 bp, Homo sapiens
agcgggggcccgtggcacgcgccctgccaagatggcagtgcgccgggacccagctgtcagtcgccgccgccgcggccttccccgcagctagcggacccgatgcgccatccgacaaccatgaaccaccgcaaggcacaccggcgagagagacacagctcatggacgcggcaaacagaccagacagacaaagaagagcagagaaacacagagagaagtagagaagccgaaaaagaaaccagaagaccacagacaaagcgagaaacaaagagaatatagcacaagagaccgcgaaacaaaacagagaaaggaccaacggaaagaacagacgagcacacagaaagagggaaaccaagagacaaaaaccaagaaaacagagacaagaggaagagaaagcccggggaatcaagacagagaacaagcagaagaagacaccagacacacacagaccaccacagcgaaacaaaacagacagaacgggacagacagcagcgatgaccaagagtagactcccgcacacacggaggcacgccacgcgcggcgcaacggaacaagcaaaacgaaacaagccaccaagacaaaacacgcggaacccacgacacccaacagaccaaccgagcaaagaaaccgaagcacggaccgcaagcgaacaccccatacaacggaagcaacagctagtagacaagaacaagaacaaacgaacaccaggacatacaagcggcgacacaacacccgcagagccacaaaagacacagagacacgacacaccgagcgacaggagagaaaaacgaca

SEQ ID NO: 597897 - DNA, 784 bp, Homo sapiens
tagttctagatcgcgagcggcgtcctttttttattgtataaagaaaaatcaacatacactgttcagtgctgagaggggatgtagggcccagtgggccaccctgggcctccaggagctcgctgtgtggggagagccggacaacgcccttgagcctttatgagctgtagtatagatagagttgccataacaaggctggtgggggtggtggatagctcaaactcagctgcattgtgtgttaacatatagtaaagaatccaagtcgagaacactatgaaacacatcagaagggagaacgcggcgcctagcatagattagcaagttacggcctggatgccatgtcgccagcccagctgttcccctcggcgccacatgaggataggtgggtgggcggcgaggcgagcactgcagatcaagttactagcatggtcgagcagtgagagatccgcacgacaatctcgctatgtcccttgggtcaggcgcgtgcattccattagccatgtgcttgtcgccgtgtgctcccaggggttcccaggtgccaggcgtgggagcccaggagccaccccatatgccagtagggcgggccatacccaccttacagtgcaggctatgggacgcagggccccatctgtccctcgggtcgccgtgtggccagagtgaactccagtcgtcccccaaactcgatgactcgctcagaacactatggcaggatgtctgggggcctgagccagcaagagagcgtgaaagccgggacaggggggccagctagaaccataaaaccctggga

SEQ ID NO: 597898 - DNA, 366 bp, Homo sapiens
actacatacttccgtcccacctgggatgtgaaccctccttttgtccagcatacagagtctacactacctgtccattagccacttagtagctggctgggttatcagatcaattgtcatagtattgtagacttgtgttcaagtaacccttattttacttcacgggggctccaaagcacaagagaggcgatgctgacaattcgaatatgccaaagagaagttgcaacatgcttcctttaagtgaaaaggaagttcccaacttaataagaaaacagacaactgctgctgaagttggtaagatctacaataagaacaaatcttctacctgtgagattacgaagaaaaaaaaaattgtgctaattttgctgc

SEQ ID NO: 597899 - DNA, 996 bp, Homo sapiens
ggcttcgtctgcttctcatctcctgaagaagcaaccaaagcagatcagctgcgatgaatggcacgcattgtgggctccaatgccactatatgttgccctgggccagaggaaggaagagagaaaggctcacctgaccaatcagtatatgcaaggagatggatggaatgagagcactatcctggccagagtgcccattcttttaaagtcagtttgccgagtcgcatgcagtcgggggtggcatagctcttgtgccagagagtcccacaggctcaggtacaggcctccatattcatagcacctaaaccagttagcacagatgatggacctaagtccgacgcctggggaagcaaggtcttccaaggatatggccgaagtgctatacgccggtctgggcctcgtacaactcttcgccatctgtgtccaaactgggtagtgctccggcctctcgctggcctgcccttagctatccacttcggagagtcgggtctgagtgcccggtaccgcttgtgctatggcactttggtggggctggtgccgaccatcaatgggctgattgatagctgccagtctggaggcgttcccacagtctgtggagaagcttagcgcgacgcgcttggtgttgctgctggtgctccccggggctgttggcccctacagatatcggctccagtgtccgtagcctcatgctgcttacggctcgggcatgtagcccaagccgcggtccatgtgtatgggcaggagccactggacggctccatgctggtgttgtgaccccccctggaacagaagccaatgtggggaaggctgtccggattccaacaagggttacctggcggtagatccgaagtggcggcaagcacactactgtgcatttaatccccgtttcgcagggtgacgttcgttagccctccaaaagcaagggggttgatcacaaaagagctcctatccgtcgatcctgcacaccgactgtgataacactgcagtctcaaaaaaaag

SEQ ID NO: 597900 - DNA, 92 bp, Homo sapiens
gccagcaccaaccagacatctatgtacctctgtgccagccgaactcccggactcaatgagcagttcttcgggccagggacacggctcaccgt

SEQ ID NO: 597901 - DNA, 313 bp, Homo sapiens
aagtcagctcggtaccgattacgctctagacggtgatcacgcctcataatcatgtttccttatctggttccgagtcctgtatgcccttttcctaacactcacaacgaaaactaattattacgacgcatctgcagacgctcgggaaatggaaaccgtgtgaactatcctgcccggcatcatcctagtcctcatcgcccgcccatccctgagcgcagtccttgacatacacgagacgacggtctctgttctctcccttaccgtcaaatcagggggtcagcagctggtagtgaagcgacgagtacatcgtctacgg

SEQ ID NO: 597902 - DNA, 120 bp, Homo sapiens
  misc_feature (6)..(6): n is a, c, g, or t
  misc_feature (25)..(25): n is a, c, g, or t
  misc_feature (64)..(64): n is a, c, g, or t
  misc_feature (83)..(83): n is a, c, g, or t
tcaagncttctaacgaatgtacggnggacatgcccctaaagtattccttttctccgtgcatttngatgcaggcccaacaaagncttttgttttgaaataaatttgactaccctgtccaca

SEQ ID NO: 597903 - DNA, 209 bp, Homo sapiens
ggacatcaaatccaagcttgagaaggtaggcaaccttatcatcagaccctacagctccaaaaactttgcagcccatgagcttagcaaactgacccacgactgagcccacagctccagctgctgcattaaccatcagtgttactccacccttcacaccacagatttcaagataagccaaagtaggcagtcaggcctggcatgcccactgt

SEQ ID NO: 597904 - DNA, 908 bp, Homo sapiens
  misc_feature (57)..(57): n is a, c, g, or t
  misc_feature (64)..(64): n is a, c, g, or t
  misc_feature (88)..(88): n is a, c, g, or t
  misc_feature (92)..(92): n is a, c, g, or t
  misc_feature (374)..(374): n is a, c, g, or t
  misc_feature (378)..(378): n is a, c, g, or t
  misc_feature (428)..(428): n is a, c, g, or t
  misc_feature (433)..(433): n is a, c, g, or t
  misc_feature (441)..(441): n is a, c, g, or t
  misc_feature (486)..(486): n is a, c, g, or t
  misc_feature (506)..(506): n is a, c, g, or t
  misc_feature (545)..(545): n is a, c, g, or t
  misc_feature (572)..(572): n is a, c, g, or t
  misc_feature (575)..(575): n is a, c, g, or t
  misc_feature (584)..(584): n is a, c, g, or t
  misc_feature (587)..(587): n is a, c, g, or t
  misc_feature (591)..(591): n is a, c, g, or t
  misc_feature (598)..(598): n is a, c, g, or t
  misc_feature (604)..(604): n is a, c, g, or t
  misc_feature (611)..(611): n is a, c, g, or t
  misc_feature (622)..(622): n is a, c, g, or t
  misc_feature (637)..(637): n is a, c, g, or t
  misc_feature (734)..(734): n is a, c, g, or t
  misc_feature (736)..(736): n is a, c, g, or t
  misc_feature (746)..(746): n is a, c, g, or t
  misc_feature (749)..(749): n is a, c, g, or t
  misc_feature (756)..(756): n is a, c, g, or t
  misc_feature (766)..(767): n is a, c, g, or t
  misc_feature (796)..(796): n is a, c, g, or t
  misc_feature (807)..(807): n is a, c, g, or t
  misc_feature (809)..(810): n is a, c, g, or t
  misc_feature (817)..(817): n is a, c, g, or t
  misc_feature (825)..(826): n is a, c, g, or t
  misc_feature (830)..(830): n is a, c, g, or t
  misc_feature (834)..(834): n is a, c, g, or t
ggagagagacagagagagagagagagagagagagagagagagagagagagaggagangtggctntccctgcagagccggtgtctccgnctgngtccctgctgcacaagcggagctggagtcggatcccgaacgcccctcgccatggactcggccctcagcgatccgtataacgggtgccgaggcgggcggccccacaaagcatacgcggcgcttccacgcgcgagggtatcgcgctggctaggagctcctgctcatggcgctgctgcccatcttcttcggcgccctgcgctccgtacgctgcgcccgcggaagaatgcttcagatgtgcctgaaacaatcaccagccgggatgccgcccgttccccatcatcgncagntgcactctcttggggctctacctctttttcaatatttctcccaggagtanatcancctcctgntgtccatgttttcttcgtgctgggaatcctggccctgtcccacancatcagccccttcatgaatnagtttttcccagccagctttccatatcgacagtaccagntgctcttcacacagggttctggggaanacnaggaagagntcntcanttatganttgacnccaaggncctgtgtgtgnctgggcctgagcagntcgttggtgtctggtacctgctgaagacgctgtggtttgccaaacaacctttggggctggcttcccccttaatggagtagagctcctgcccctcaanantgtcgcctgntgnatctggnggggactctnntctacgatgtcttctgtgttttgcccctntgtggtgacgngnnccatctngggcccannaatnggtntccccggtctgtggggaaggcctgagaaccattgcctgtggatggaagttgcaccggacctagggctgggggca

SEQ ID NO: 597905 - DNA, 464 bp, Homo sapiens
cagtcgttcgactgagcggggtggatcacgaggtcaggagctcaagaccagcctggccaacgtggtgaaatcccgtctctactaaaaatacaaaacttagctgggcacagtggtgggcacctgtaatcccagccactagggaggctgaggcaggagaaccacccgaacccgggaggcagaggttgcagtgagccgagatcgtgccactgcactccagcctgggtgacagagtaagacctagtctcaaaaaaataaataaataaaagggagagataacagaattaaacagcacacttctgtattaatccattttcacactgctgatgaagacatacccaagactgggaaaaaaaagtttaaaaagagttccacatgcctggggaggcctcacaatcacggtgggaggcaaagaggaacaagtcaggtcttacatggatggtggcaggcaaaaagagagagcttgc

SEQ ID NO: 597906 - DNA, 153 bp, Homo sapiens
aggactctagagatccccataagcgcaggagggctttgctgtctgggccgggatacttcacggtgacagcttggctggcacagtgggcatctcttcaggttgatggtggagagcgtgttgaaggtgcagctggccagccatgcgcgcggtgag

SEQ ID NO: 597907 - DNA, 130 bp, Homo sapiens
tcgacacgtgcgactcctccgactcttccttggcttcaaccttagctggggctgcagcagcagcaggagcagctgtggtgcagcagccacaggggcagcagccacaaaggcagaatgatcagccaagaag

SEQ ID NO: 597908 - DNA, 268 bp, Homo sapiens
agactcagagaggaaccccacgcagggtgtctccatcttccctatatactttatcagccctttgtagggcttcattgtacgattaaagccaaggcccccaggaacggtgacttactcctggaatttcacatcctggtccttgtaccggctccaagtcttccatccaccctatgtattttcacgtcactcctgcagccttcgagccaaattcgtagctccattctgcatcagctccttcagctcttattagccataggcaggacgttgc

SEQ ID NO: 597909 - DNA, 315 bp, Homo sapiens
  misc_feature (63)..(63): n is a, c, g, or t
  misc_feature (145)..(145): n is a, c, g, or t
  misc_feature (181)..(181): n is a, c, g, or t
taaattagagactgtatgttagttctggatggatttggtggcttgatatgataccttgctagntgtgaggggactctgtttttaagatgtatggccaagctctttgtaaatggaaatgcttacactgggtgttggggatgtttgntacttcttgctatttttgtggttttggttttcccantatggtaggacccttggccagcattgtggcttgtcatgtcagccccattgattaccttttcatgttttgaggtactactgcctttgcagcacaaatttttatttctgtcaataaaaggagatgaaaataaaaaa

SEQ ID NO: 597910 - DNA, 235 bp, Homo sapiens
  misc_feature (225)..(225): n is a, c, g, or t
atctctctctccgatataagtaagatacatgggagagctggcatgatttatacagagcagacggtaactgattggtctactgatagaggggaaatagagctctagtaagatggcgaaagaccgatgagcagagaaggatgccctttgacttgatgagtggcatttaggctttgcatgttgagggagtgagagaaaatgtagctctagatagtggcgcttgcaganataggaggag

SEQ ID NO: 597911 - DNA, 388 bp, Homo sapiens
taacaggcatatcgctcttagcgctacaagcctatagtgcgtgtgactgtaccatatactaatagacagttgtgatacaatggtaagtattgtgtctaaacatagaaaagatacagtaaaaatacagtataaaagattaaaaatggtataccttatagggcacttaaccatgaatagatgctgcacggactggagtcgctctcgggtaattcagtaagtgagtggtgacgtgaatgtgagggccttgcgaccattactgtacacaataagatctaagggtagacactgtatacttcgcctacactaaatttattttaaaatttcttctcctttttcagagacagagtcaccactccagcctgggtgccacacagtgagactccgtctc

SEQ ID NO: 597912 - DNA, 210 bp, Homo sapiens
  misc_feature (127)..(127): n is a, c, g, or t
atgcagcagctgtgacagggctgtgacagggcgagaatgaccctgactgaagcgcagggcattcgaggaggtgctctggcgcgggaatcacgctcctcccacaagtaaactccggaagccgccagcnggatttttcaggccctcaacatttatagggcttctggacaccactctacgacccggccacttcctaagggggatctgaaggac

SEQ ID NO: 597913 - DNA, 155 bp, Homo sapiens
gactgtaagtactataatgatgccagcagataagactgggaaagataagataaataggactgctgtaataaggacggatcaaacaaagagggacgtctggtattgggttctggcagggagttatatattgataattgttgtgactaaattgatgt

SEQ ID NO: 597914 - DNA, 492 bp, Homo sapiens
  misc_feature (294)..(294): n is a, c, g, or t
  misc_feature (390)..(390): n is a, c, g, or t
  misc_feature (463)..(463): n is a, c, g, or t
  misc_feature (469)..(469): n is a, c, g, or t
catgattccgcatttaacaaccattaggctaccgggcatgtctcaatcctatccataaggggagtggcaaaaaaaaatcaaaaaatagaatttcagtcttttcctatccacgaaacaaggttatcggcctttcggggatatccagggataacaaacatagaaaaataattctttagataagatcaaaataaggggaggtttccaggggggtaagcggccgggctcagagcaggcggtttcagaggcagggccacagttactggcaaagacggaggtagcacagagatgaggtgntgatggtgtggaggccagaaccagaccatacacatgctgttctgaatggatttaataatctaggtttaatcaaagcaattggcattgggatttggnaatgaccattccttgctaaggaagctatgtacttcatgctgtggaaactggcaaatacagaatgtagatggtnggtttncttagccttgaagatgaccaggt

SEQ ID NO: 597915 - DNA, 279 bp, Homo sapiens
ggtcaatttctacacctcgggaggctgaagcaggagaatggtgtgaacccgggcgggggagcttgccgtcagccaagatcgtgccaatgcatccagcctgggtgacagagtgagactctgtctcaaaaaaaaaaaaaaaaaaaaggccttacttttttaaccacttttagcagaaaaacagagctctcttccaatgggaaaataggggttccctggaaattaattactaccctgtgagagcccagacaacttaaaccttttttggtgtgtaaaatttga

SEQ ID NO: 597916 - DNA, 225 bp, Homo sapiens
ggattgatagcattgatcgctctttctcgattccgtcgagtggtgtgtgcatggtctgttcttagttggtggtgcgaatagtctggttagttccggagtaaccgaacgagactctggccactgctgctttgttactcggaccccagagcggtcggcgtcccccaacttcttagcagggactaagtggtcgttccagccacccgaaaattgagcacatacacaggt

SEQ ID NO: 597917 - DNA, 177 bp, Homo sapiens
  misc_feature (28)..(28): n is a, c, g, or t
ccggggattacaggcacatgcacctcgnctggctagtttttgtttttagtacagacggggtttcactatgttggtcaggctggtcttgaactcctggcctcaagtgatcctcccgcctcagcctcccaaatggtaacattttgcaaaacttatatatgttatcacaaccagtaaatt

SEQ ID NO: 597918 - DNA, 212 bp, Homo sapiens
tattatctcattgaatcctcacagcacccaatgagaatcccattttcagccaggcacaatgtggctcacgcctgtaatcccagcatcttcggtgaggccgaggcgggcggatcatgaggtcaggagatcgagaccacggtgaaaccccgtctctactaaaactacaaaaaaattagccgggcatagtggtggacgcctgcctttagtcccag

SEQ ID NO: 597919 - DNA, 172 bp, Homo sapiens
ccggtcgacgggggcttacagacgcgcttcaccacggtcggctatttttataaaaaaaatttatttgggaacgaggtctcactgtgtttcccaggctggtctccaactcctgcgctcaagacgatcttcccacctcggcctcccagaagtgctgaggattattaggcgtgag

SEQ ID NO: 597920 - DNA, 699 bp, Homo sapiens
agcgggggttcatcctgggaggcacacagaaaatgtccaataaacagtggccaccactggcttcctgtgcattcatcgtcatcatgctagggtcacgggggtcccttcagacccacacctccattctcaggagctgcctgcaggctcagccatcacctgggctggttactgggcagcctctcccacctgccccaactatgctcagtgacctccttcctgtcccctctcctgccatccctatcaccatggcatgagtaatgcacacgtgtattagtccattttcacactgctgataaagacatacccaagactgggcaatttacaaaagaaagaggtttgattggactcacagttcaacatggctgaggaagccccacaatcatggtggaaggcaaggaggagcaagtcacgtcttacatggatggcagcaggcaaagagagaggacgtatgcagggaaactcctgtttttaaaaccatcagatctgcgaggtgtggtggctcacacctgtaatcccagcactttgggaggctgaggcagggggatcacctgaggtcaggagttcaaaaccagcctgaccaacatgccagaaccccatctctagtaaaaatacaaaattagccaggcatagtggtgcattcctataatctcagctactcgggagactgaggcaggaggattgcttgaacccgggaggtgg

SEQ ID NO: 597921 - DNA, 871 bp, Homo sapiens
tgcgagcggggaggggagcagagaactgctgcagtggccaaaggacagccccccccagcactgatctcgacaggaagccctgtgagaactggggagtgcagagaccccgtgctggcctggaggcatgtggagtgtggggggcctggtgctgcagtggacgaggcccatgctggaagccgaagccaccagtgccccccagctgtccacgacggagcgatgaacattgcaggattggcgctgtgccctgcggattcccctgtgccccccgcgtgcctggcctggataggattgtccttggccccactgtggggcaattgctcttcgctctggctctttctccaccgaccccgtgtgtgtgccgtgtggatggttggggtggcctgtgtactgtcttgccgcctgtgagtgggtgtgctcccctgcctgtggcactccgtggcccccgttgggcttgcgtccttgcgagcaaaccagtgccagcctgggtggttgatcttgcgacactggggatgaagacctttggggcgagggtccccaggcccagctatcccggtcaacaccgcggtaccgttgaacccttgcagaaggacgaacgggcgatccagggtgatccaggacgggacactgttcagaggcacctgacgggaaccttggagatttcttggacgcattgagcaaagaaccttggttgcgcaagattcgaggttggtgcggcctttcaacgggtgcttgcccagcctcaaccacgctggaggcttttttgacaaccggattaaccagggttgcccatcgccaggccttcgaagtacctgtacaagactgcggggatcctctggctgcgggaacaaagcccattcgagaggcgttccct

SEQ ID NO: 597922 - DNA, 1948 bp, Homo sapiens
  misc_feature (983)..(983): n is a, c, g, or t
  misc_feature (987)..(988): n is a, c, g, or t
  misc_feature (993)..(993): n is a, c, g, or t
ggcgcggttctgtgggccggaaccttaaagatagccgcaagtgggtgaaaatggtgtcaactgacaccagatggctgccctggaggccaaaatactgtcatcaaatggacgtatacattttgggcgacttcaatttgccacgggcacacgttctctacacgggaacagatacacactggatgaaggctggagaacctttggagataatgatccaaattcaccaggttgaacccggtctaacaacagactttaatgtacatggtggaagcatggagcaaatccaaggcagaactcatggaaatcagttgaagataacacacctacaaatcacgacggtctccaaagacaaaacccctaccctgaaaggtgactgaagtgcagtatacacaccatgactgtacacacaaaccagactctagtcactactaaacaggcttacccaactagattgcaactctggatagaccatacacaagacatggttcggacagactacacggtcacacgtactaaccaatattccgatgagaaacgaacatttgacctaagacgcaatttaccgcggcattcacactccgggtagctgttcggatcggccatagacatctggtatagaaaactcggttcgaggaccccgtgggccagacatgtaccaacgacaaccagaccctggctacataactttacaccggcggactaacttggccacaagaaactgcagcacagcacacacacataacaggtgaccgcaacataagacgccaaccggaggcagacgacaactcacgcttcacgaacacgtcgctaaggtaacttcttcgcaacaacgctggcgtgtgacgaaattcgcggtacatcaacaagcacgtgaggaaaaccaacactgtgcaaccgggcacaaggaaccagcggccacgaggtactaagaaccgacgatgcacgcagatgctacacatctgctgctctcttgcacacaacgatanttcnnttctntctatatactcatacgacgactaacgcactagagaacagtagacgaagacgagaagaacacaagatccgacgcaacgacacaaaaagaaacaacgacagacgagaccgatctcagacagacgacaggcacagcaaagcagaaagcgccagcggaagcagacaggagagcagcgcgagagcgcaggagatactcagagagaagaagagagggagacagcaggagcaagacagaagcagaggcgaacgaagagcagtcagcgagagagcagacggcgagagagatggagagcaggagggcaggagcgcgaggaagagcagacgcgacgacagagacggcagcagagcggacgagcagagagcactagggggcacaagaacgtcaggggaagaggaagagaagcaagagagaacgagcgagacaccgagcgactagcgagacgaagggaaacacgaagagcgagagaagaaacagcaaacggagaagagaagacgacaaacgaaaaagaagagaacgacgagcggagagaccgaagacagcgcacaggaaaacgaacacagaacacaaccacgagcgaacgcgaagcaggagagacaaggaagacaacgagccacgaagaaagagcagagagaaggagggaggaagaaacacagaagagaccgacaacgagcaacaacacggagacaacagaaggaagaagaagaaaaaacggaaaagcagaagaacaagacaagagaagagaaggaagaacaaagagaacaagaaagaaagaagaagagcaagacgaaaagaaagaaagcaagaaaaggcacagagagacacgagaagcaagagagagaaaagagaggagaaaagaaagaaggaagaaaaaagaaagaagaagacaagagaggagacaacacagcagaaagacaaagacgcagaaagacaaaacacagaaaagacgcgaaagaaaag

SEQ ID NO: 597923 - DNA, 1367 bp, Homo sapiens
agcgctctctacttgtttttgggtgtgtggggtgtgtgcgccccgactcggtgatgtttgggggttgctggttttgtgggatgggagggttggtgttggtgcccgccctcccagggcgtgcgttgtgttggtgtgttgttcagtgcttcctctctcttgtgttggggttgtgggggtgtggatagggtggagggtggtggtatgtgtttgttgtttgctcgcttcctcatccacgtctggtgggggtggtggggggtgtgggtaccgcactgtacgcgcctgattgttgttttcttcctgcgcctcgagttcaggagcacgctggtggttttttttgttactcactccctgacgctgtgggtggtttttcgtccgcccacgcttgtgtttttgtgtttgttgtggggcggcgcgcgtcttcttctttgttttttttgtgtctctcacacacgctgagcgtgttttgtgtggggagtgtgagagagtgagtgggtggttggtcgctccctcttttgtgttgtttcgctctctctcgttgtgtttgctcgcgcatctttagtgtgagagtgctttctcctcttctctctcgtcttctttgttttatcagaatagagagagagagagagagagagagatatgatgtatctctctctcgtcgggactggagagagtagatatataggacacatcacacagcacgcacacacacacacacgcgtcgcggctgcgcgcctccacactctatatatatatcacacagacatcacaccacgcctctctctcttctctcttctctctctctctctctaataagaatatatagatatacacaccactcccttctctctctctctctgtcgtcacacacacacacacccctctctactaaagaagagagatagagtagcagacacctctgtgctgcgcgcgccctcacacctcccatctctctatatatatgtgtgtgtgtgtgtgtgtgctctctccccgtctcgtgtgtgtgtctctcgctccaccacaccgcgcgcgcgcgcgtcgtgtgttgtttcttataatacacacaccgcgcgcgcccgccaccacacacacaacaagtacaagagagagagagcgcgcgcgctcctactactatatatttaatatatctctcctccccacacacacacaagagagagagagaggcgagagagagagagagagagcgccccccgccgcgcccctctctctctgagaaaaaaacccccttttttctctctctctctctcccgtttttttttttttttttttcccccccccccaccatattattttttttttgtgtgacacacacacacacaaaaaaacacacacactccctctctcccaca

SEQ ID NO: 597924 - DNA, 178 bp, Homo sapiens
aaaagacaagaaaatggaacatcccttactgactcctgccagcactttgatttgagcccggtcagaggtgttttggacttctgaccacaaccgtagagtaatacatttatgttgttttatgtcactaaatttgtggcgatttgttatagcagccatgggagactcatacaggtagata

SEQ ID NO: 597925 - DNA, 101 bp, Homo sapiens
aaagggaaaatggacaggagattcttctgtccctcataaggagcagtgggaagttgattttattagacaaactgttgacaagacttcgagaaaggggggcc

SEQ ID NO: 597926 - DNA, 860 bp, Homo sapiens
aagcagtggtatcaacgcagagtggccattacggccggggagtgatcccaaggtcccaatctcccacggaaccactcagggttcctgtgtggacatggcttcaccttagtgtgaccaattggctctctaggctccgcggagcgtcacactgtctaccaggccttgttgccctgactgctgctctgctccactgagacttgcaatagaggctggatgccggtccataatgccggttccagttagtcgagggcgtatttgtgacgcgacggcatagtggcatcacaaatgctcacatcggcgcggcacgcagtacgtgggcccatgtgcaccaagcattaacgcaagtgagttttgacagaatatccttatatgcccaaaagggaacacagggttctgaagaatccatctctcttggtcagccatttgtgatagctaggttagacgctgcctactaggtagggaagaggggcgaggcttgttggggcatatacataaagggtagcccacagaaggttagctattcacgtagtaggatcacacacattcccaccacagaggttagaacctccttcacgttgggcaccccattttggaaacacggggtttggcccaacgttcctccaaggtgtttggcccgcgaaccgcaacggcaccattgtgggttcaccattaaaagcttaaagacaatttaacaggttaggtgaagtttcgagttgtttgacacagacgatagagacccacgagagcaagacagagcagctgcaaggactcgacgagacgaaaaagagagaaaggtcatgcgagatatcgacggacaaagagaagcacacatctacacacaacactcacagcacaacaga

SEQ ID NO: 597927 - DNA, 248 bp, Homo sapiens
caggatctctggtccgctcggacatccgtcttgggaaaggcgtcaccatggcttgctgtgggccacgtctctcctggtgggacctctcactctggaagctcctgcgggtgaaccctggtctcctgtctggaggcagaaggacgctgtctatgtgctgggaggccagctggggttgaggaggacagtgtgggcgcctcagtagtcaattggtcctgaacggaccgggtaccgactctcgagattccgta

SEQ ID NO: 597928 - DNA, 544 bp, Homo sapiens
atctagaggatctgccttccaccagcaaagacaagatggggctgggtgcagtggctcccacctataatcccagcactttgggaggccaaggcaggcggatcacctgaggtcaggagttcgagaccagcctggtcaacatggtgaaaccccgtctctactaaaaatacaaaaattagccaggcatggtggtacacacctgtaatcccagctactcgggaggctgaggcagaacaatcgcccgaacccaggaggcaaaggttgaagtgaggcgagattgcaccattgcactccagcctgggtgacagagcaagactctgtctcaaataaataaataaagctggaagtagaaggggaggatgagattggtgggttctgagggctgggatggccaaacacagttctgctgtggtcaggattatgcagagatcaggggcagaacaaccaggagttatggaccagaggactgcaggaatgtggacgctgagggccaaagcaagaaaatgagtgactgacagattaacactcaggtgtaagcaggacagaa

SEQ ID NO: 597929 - DNA, 1184 bp, Homo sapiens
  misc_feature (665)..(665): n is a, c, g, or t
  misc_feature (1184)..(1184): n is a, c, g, or t
taaagtaacaggctctttaatgggggggcattctgtgagcaaattcccattgtgccaccttcacagtgtgttaaaaccagttaaacattaaaaaatacctccagcctgtggtgcccccacccagccactgtgcccgggccccttcagtgggaaagtgaccacatattccgtggaaggacacagaaccacacaccacagcccagcgtgtggcaccagcaccacaccccacattccatgtgggccaggggaccactgggggaatgggccacaccagcctcgcggggtggggctcccagtgacgggacatctccgtggaggaaagacccaaaatttctcacgagtctccccttagaaaacacccatctctttgaaagagtctcagtgcttaccgagaactcttctgtggcaccacacctcgaaaactcccagagcgaggggaggccatcgtggtgggagagggcaactcgggtggtctcccgagaactgtggcgtgcgtgtcacacacaacacagagacagggggcgcccacgtgagagcggggcactggtgctcgcacccacaaagacgcccactctccccaaggagcagagaagagacgagacttcatacacaggcggccaatggcccctacggggcccccattgcgtagggcgaaaaacccccanaggggcccagggccctctcggaggaggctctgagggcacaaaccgggagcgagggcgcactcaatgggttctgcgccattgtgcgcctgagttgctccacccaaggggccccacagcgcggggtgggctaagagcctcccgtcgccaggagggcaaaaatccgcaagaaacccctgtgaaaaacgtggggccccaacaagagcggacggagcgtccaccaacacagggtaaagcgagcccaagaaggcatcaccaacacggcggcaccggggtcgccaatacggggcagaagaaagagcccacactcccaacagggtgtccccccagacaactcaacggggccaacaaaccacgagagaggagccaactcctatatccccaacggctatggagaggtggcgcggaaggcaaaaaaacgcagggggccggagacaacaggatcatcgacatggcgcccatggctccacacggtggtccctgagacccgggttttctcgcgacaccgcgagacaacatccn

SEQ ID NO: 597930 - DNA, 204 bp, Homo sapiens
caggctggtcttgaaactcttgagctcaggtaatccaccttcctctgcctcccaaggtgctgggattacagatgtgaaccaccgcacccagccaagatgtctttcaatgaaccaacattcttaattgtcaatatagtcagcattaagcacaccttttcatggtcactgcttttttttttttaatgtgtgtcatgtttcccttta

SEQ ID NO: 597931 - DNA, 222 bp, Homo sapiens
  misc_feature (12)..(12): n is a, c, g, or t
  misc_feature (26)..(27): n is a, c, g, or t
  misc_feature (86)..(86): n is a, c, g, or t
  misc_feature (144)..(144): n is a, c, g, or t
  misc_feature (189)..(189): n is a, c, g, or t
  misc_feature (191)..(191): n is a, c, g, or t
tgtaaggagttncgctgccccactgnntgtccttcatgaggaagatgctcgcggccgtctccctcgtgctgtctggcgcttctaanaagccggcaagcagagtgctggtagcatcccgtaattttccaaataatgctacatttnaaattaagaaatgtgaccttcaccggctggaagaaggccctcctntnacaacagtgctcaccagggaggatgggctca

SEQ ID NO: 597932 - DNA, 870 bp, Homo sapiens
  misc_feature (32)..(32): n is a, c, g, or t
  misc_feature (75)..(75): n is a, c, g, or t
  misc_feature (91)..(91): n is a, c, g, or t
  misc_feature (93)..(93): n is a, c, g, or t
  misc_feature (106)..(106): n is a, c, g, or t
  misc_feature (109)..(109): n is a, c, g, or t
  misc_feature (139)..(139): n is a, c, g, or t
  misc_feature (141)..(141): n is a, c, g, or t
  misc_feature (144)..(144): n is a, c, g, or t
  misc_feature (148)..(148): n is a, c, g, or t
  misc_feature (153)..(154): n is a, c, g, or t
  misc_feature (173)..(173): n is a, c, g, or t
  misc_feature (177)..(177): n is a, c, g, or t
  misc_feature (181)..(183): n is a, c, g, or t
  misc_feature (195)..(195): n is a, c, g, or t
  misc_feature (230)..(230): n is a, c, g, or t
  misc_feature (232)..(232): n is a, c, g, or t
  misc_feature (242)..(242): n is a, c, g, or t
  misc_feature (248)..(249): n is a, c, g, or t
  misc_feature (268)..(268): n is a, c, g, or t
  misc_feature (278)..(278): n is a, c, g, or t
  misc_feature (284)..(284): n is a, c, g, or t
  misc_feature (319)..(320): n is a, c, g, or t
  misc_feature (324)..(325): n is a, c, g, or t
  misc_feature (327)..(327): n is a, c, g, or t
  misc_feature (332)..(333): n is a, c, g, or t
  misc_feature (335)..(335): n is a, c, g, or t
  misc_feature (339)..(339): n is a, c, g, or t
  misc_feature (360)..(360): n is a, c, g, or t
  misc_feature (362)..(362): n is a, c, g, or t
  misc_feature (399)..(399): n is a, c, g, or t
  misc_feature (469)..(469): n is a, c, g, or t
  misc_feature (473)..(473): n is a, c, g, or t
  misc_feature (484)..(484): n is a, c, g, or t
  misc_feature (494)..(494): n is a, c, g, or t
  misc_feature (562)..(562): n is a, c, g, or t
  misc_feature (570)..(570): n is a, c, g, or t
  misc_feature (635)..(635): n is a, c, g, or t
  misc_feature (750)..(750): n is a, c, g, or t
  misc_feature (764)..(764): n is a, c, g, or t
  misc_feature (789)..(789): n is a, c, g, or t
  misc_feature (797)..(797): n is a, c, g, or t
  misc_feature (864)..(864): n is a, c, g, or t
tgggtctaaaatggtttacatcaaagtttaanacatatactgtctgtgttacagaggctacaataccaatttggntttcgcacattatctnanacttttttttcanagngtgcgaagtttggtcaaacaacatcaagananttntgtnctaannttttttcgtctttttaganagtnttannncctccttttttnccactggcttcgaaactttgggttttttttcagantntcaatttgtnattttnncttttccattcatgggagnttttctgggntttttnggtgggtcttttctggttgtggctgtttttttttnngttnngnggttnntnttgngtggttctttgtgtgcgggtngngggttgtgctctgtgaaattcattaaaaagttaaaanccacagaaatgtcattagaaacaacatatttcaatatgtaactgctttccatcaatgaagaatatttttnaatnacttaattganaagtattganctccccaccaatttcagctgcaacagtattcctcctgaatgttttctaattagtgctctgtctctggnctttaggnccaatactctgtgtgtcctcttcctgactaggacgtttcccaccactgagaccagtgcccatggngcttcttccttgcttcaacaggtgagtttgctgactgtcgccatgagcatagtgtaaaataccactcccttgagagcaacttccactgctgctacaacctgggatattttctgcngaatatcccatgangcctccattcccattaggattaganggtactgntgccagacgaccttgtcctctatatcgtgaaagctgctggtagatctgtttcatcctttcgatattnaaacgg

SEQ ID NO: 597933 - DNA, 313 bp, Homo sapiens
gctactttctctgatagactgtgttagatacggcattggggaaaatggcgtactcatctcaggggataatgacactgtgagcgccatattatttctgtggtgaagaacaattttaagcctgtgctaatagattaagcgactagagtgattattttgaacaaagagagtggttgagagttctacagccagcctgagactaatcaggaggagtaaagagtgataatttaatcatatcaacccataacatgggatcctgatagtggctgtcacactacaccagctgaaggaggtctctgaaccacccagacctgag

SEQ ID NO: 597934 - DNA, 775 bp, Homo sapiens
gaccgaatgaccttgggcaaggcactgcctctctgtgccttggtttccccatctgtagaatggggagggtggacactggaaactagatgacttctttcacctccaaaattcccttagtttctatgaaaatattgggggtaggggggtggattaggagattgaagggttgagaagagaagagaaattgtcctagaagagtcctcaggaaccgtgcctggagcaaatgcgcatgggggtgggcctggtaagtcccaggaaccacaggaagtgagctaaggctcacctcagagctagtctgggtctccgaggctgcctgggcttattagtgcctcgatgaagcaactctggatggccagctgtctgtccctcatgagtgcgcacctggaggcatggaaagattatcttatttattttattgttggtcttctggctatatctagagtggcaaaaaaatagagcagagggttctctagctagtcggtccagactgtctaccaccagagaaggcgacagatgcctcctgggttggaatcggggatgcacgtgtggtatctggccgatccattctggtaggtctccgagcagagcaggagtctaggtcccagcgtgcatccatcccagtgccccgatgatcatctggtcatgtccgtcccaaactacccttccaggggggccttaccagggaagcgactattcggctaggaatttggaattcacagggcttgattaacccctggcaaaatttcgcgtttgatgtcagatcacattgaagctg

SEQ ID NO: 597935 - DNA, 740 bp, Homo sapiens
gtactctcgatttgtgtgccccgctcctccctgatctgcctcccctcccctttcactcaagttctgcactcaatctcttactctacatctggtgtcgctccttgttctcgtatactgttgccgccttgatgagcagccacatggcgcttactgaaatccagagcctaaccgttcaatcccagcgcgggcggctgcgcgtcagtcgccggtgaattgtgcgccatgaagaactaaaggctagtcttagatatctgggtgcccaggcctattcggggaaacctcagataattgctactcgggcaaggaagaacgaggagaaaacggaaggtcacaaccaatagttggtctggaacacgtgtcacaatgtacagaggaatgtaggggtcgcttcaagttcgagcctttgacttgtaaaaaacaagtaagaaggcatctatgattagggtcgatatttcagcagacacgcaaaataaaatcagcttatataaagtagatgagagattaactcttacctgtggacaaagatgaaccacggaatagtgaatctttaaattacagaagagtttgctaaactggacttgcgtaaggttgaggatggtaagtccataaatgcagggggaagtactagtccgtcaaatgtgagggaaggttcctttaacattgagtgaacggggttcatgggaggaattctccggtggtaggttgcataagcatgggtcaagaggaaattccaaaggtgg

SEQ ID NO: 597936 - DNA, 102 bp, Homo sapiens
tttggggaccccccccccccccccccctccttcctctttttttttccccccttgttttggtaaaaataggcttggggatttaaatggtggttgggggttgga

SEQ ID NO: 597937 - DNA, 111 bp, Homo sapiens
cgatgctgcaggttgtttcacctgctgctgctgaggctgagggggtggggtgcaaggctgctatctgctgctgacgaattcatgcttcaaatgtgtttttttctggtatac

SEQ ID NO: 597938 - DNA, 897 bp, Homo sapiens
ccaggcatatgctgagggcccagtttacggtgctgtatgaaggggcccccccgcgtggttaagggagggcaaaaccagggtgtgacgcgcttcgcgggataaacggtccttgttcggcggctcccacgtggctatttggcttcaatagggggtttgcttcgtcaattataggcacactgaggggtttcttgggggacaaacccccgccctgataagttccgggcggcccaccccccaaagagcaaggctgtacggcacgtgagtcgtgttgcactgccgatcgtccccacgaagccaccaatgtcatcttgttttgtcacaattctcttaccttatttaccaggtaactaaaactcgtggattctcgtctattcttttaaagacttcccgctaataatctcttcactccacgagaaatatttctctgctgactcaatcacaatacttagtactagttggttaaaaagaccccctatcagttcgtgtggaataatactaaaacgtcagcccgcgtcgtttgtttactcggtaccaccccctgcgaagtaacacccctggtaatctttttcttcggtctccgcaagaatgagcgacacaccacgtctctgaaaccatgtggtgaggctcattctttaggatgcaaaaaatacaggggaaagactatcaaattttgtgcggtttgcttataacatgacctgtaggctatagtttcttcccgcctactggcgcttgcgtgggctgatagaggagggagccaccagccccatagaccacgcccccaccctttatggtggagcaataactagttttaccccacgaaacacctcggcccccaggtcgggaacccgccggtttgccccaaaaaagaactcccaacaaaacccgccaaacaaaaca

SEQ ID NO: 597939 - DNA, 128 bp, Homo sapiens
tcatacgggtcatctgacaattcaatgtccttcgacccgtcttcatcctccaaaactcgaacccttgtgtatccttgtattgaagagagacagcctttacagctacatggtcacattggcatcagaac

SEQ ID NO: 597940 - DNA, 265 bp, Homo sapiens
  misc_feature (151)..(151): n is a, c, g, or t
  misc_feature (184)..(184): n is a, c, g, or t
  misc_feature (246)..(246): n is a, c, g, or t
  misc_feature (262)..(262): n is a, c, g, or t
gccctcttcatgcaaataacatcaggcagaacagagatttattatgtgcaaatgacagtaacctttataaaatctagaaaataatttttccccaatttcccctcgaatccaaacattcttctgcagtctgagtggggttgataggctgccnagatgttgaagggcctcagtgggaagggacttngctaacagttcccagtgccagtgttctctatagcgtgtcttgttgagcactggtgccctggnttgcttgcccacaagnccg

SEQ ID NO: 597941 - DNA, 198 bp, Homo sapiens
atgtctagttgatagattctgtaactctcactctcagcgagaccattgcatcattggtcgcacgctggtggtccctgaaaacgtcagatgatgttggggccaagtgctcgtacaatgaagagaagtacaaagccatggacacgctggaagtctgtatggttcgtgagagtagattggggatccgcctcaataaacatt

SEQ ID NO: 597942 - DNA, 407 bp, Homo sapiens
atagtatgatccccctggctgtgtcagagtctcatcatactacactgaaactctatacccattaaacaattcccatccccaccagtaattgtctttctgggttttttttgttttttttgttttttgagacgcagcctcattctgtcgcccgggctggagtacaatctcggctcctgggttcatgcaattctcatgcctcagcctcttgaatacctgagattacaggcatgcaccaccaaacccagctaatttttgtatttttagtagagacggggttttgccatgttggccaggctggtcttgaactcccgacctcaggtgatctgccagcctcggcctcccaaagtgctaggattacaggcgtgagccaccgtgcccagtgtgggtcattttttttttgagggcca

SEQ ID NO: 597943 - DNA, 299 bp, Homo sapiens
  misc_feature (221)..(221): n is a, c, g, or t
  misc_feature (270)..(270): n is a, c, g, or t
agcggccgcagccatggagccccgcagcatggagtacttctgcgcccaggtgcagcagaaggacgtcggcggccggctgcaggtcggccaggagctcctgctctaccttggcgcccccggcgccatctcggacctggaggaggacctgggccgcctaggcaagacagtcgacgcgctcaccggctgggtgggttcgagcaactaccggtgtcttgctttgntgccagctggagtgcagtgacacaatctcagctcactgcaacctctgcnttccaagttcagatgattctcgtgcctca

SEQ ID NO: 597944 - DNA, 2905 bp, Homo sapiens
  misc_feature (1436)..(1436): n is a, c, g, or t
gagcagttaatcatggaaactgggctattcctgtttatgcacttctagcaatcttctgttgtaaatattaaaaggtaacgacaaaaggatgaaaacctttttaaaaaggcgcaaatcagttaatccatcagatcatgtgattgctactgattacatggatatctttagggaagcagaaaatgattgctgaacacatgccttgtgttttgatgattgcattaaaagtcccccagcgggatggcatttattggctctcagagcttttcttagattaaatttcaggcagccagtacaaggagaaacatcataacctgtatccaacagcatatgtgcagctaaagagtaatcttaatcaagtccttctaggctgtgctaaataaacgagggttttcagcaagaccccagacttttattttgaagtggagtagcagctgttggctattgcggtgcagagctgcagcgaggcctgggtcacacagtgctccgggtgtctgcaggctgcaggccgagcccagtggcgcaggcactgagctgtacttatttgctgtgctatttgacctcttggtttcagagagctccctggaccatctaatggctatgggagatgataaaagcttcgatgatgaagaatcagtggatggaaataggccatcatcagctgcatcagccttcaaggttcctgcacctaaaacatccggaaatcctgccaacagtgcaaggaagcctggttcagcaggtggccctaaggttggaggtgcttctaaggaaggaggtgctggagcagttgatgaagatgattttataaaagcttttacagatgtcccttctattcagatttattctagtcgagaactcgaagaaacattaaataaaatcagggaaattttgtcagatgataaacatgactgggatcagcgtgccaatgcactgaagaaaattcgatcactgcttgttgctggagctgcacagtatgattgcttttttcaacatttacgattgttggatggagcacttaaactttcagctaaggatcttagatcccaggtggttagagaagcttgtattactgtagcccacctttcaacagttttgggaaacaagtttgatcatggcgctgaagccattgtacctacactttttaatctcgtccccaatagtgcaaaagtcatggcaacttctggatgtgcagcaatcagatttatcattcggcatactcatgtacccagacttatacctttaataacaagcaattgcacatcaaaatcagttcccgtgaggagacgttcatttgaatttttagatttattgttgcaagagtggcagactcattcattggaaagacatgcagccgtcttggttgaaactattaaaaagggaattcatgatgctgacgctgaggccagagtggaggcaagaaagacatacatgggtcttanaaaccactttcctggtgaagctgaaacattatataattcccttgagccatcttatcagaagagtcttcaaacttacttaaagagttctggcagtgtagcatctcttccacaatcagacaggtcctcatccagctcacaggaaagtctcaatcgccctttttcttccaaatggtctacagcaaatccatcaactgtggctggaagagtatcagcaggcagcagcaaagccagttcccttccaggaagcctgcagcgttcacgaagtgacattgatgtgaatgctgctgcaggtgccaaggcacatcatgctgctggacagtctgtgcgaagcgggcgcttaggtgcaggtgccctgaatgcaggttcctatgcgtcactaggccgggtgagagcaaaactttcagcaccacttgctggcatgggaaatgccaaggcagattctagaggaagaagtcgaacaaaaatggtgtctcaatcacagcctggtagccggtctgggtctccaggaagagttctgaccacaacagccctgtccactgtgagctctggtgttcaaagagtcctggtcaattcagcctcagcacaaaaaagaagcaagataccacggagccagggctgtagcagagaggctagtccatctaggctttcagtggcccgaagcagtcgtattcctcgaccaagtgtgagtcaaggatgcagccgggaagctagtcgggagagcagcagagacacaagtcctgttcgctcttttcagcccctcggtccaggttatgggatcagccaatcaagtcgactgtcgtcttctgttagtgccatgcgagtcctgaacacaggttctgatgtggaggaggcggtggcagatgccttgaaaaaaccagctcgaagaagatatgaatcatatggaatgcattcagatgatgacgccaacagcgatgcatctagtgcttgttcagaacgctcctatagttctcgaaatggtagtattcctacatatatgaggcagacggaagatgtggcagaagtcctcaatagatgtgctagttccaattggtcagaaaggaaagaaggcctcctaggtctgcagaacttattaaaaaatcagagaacactaagtcgagttgaactgaaaagattatgtgaaattttcacaagaatgtttgctgaccctcatggcaagagagtattcagcatgtttttggagactctagtggatttcatacaagtccacaaagatgatcttcaagattggttgtttgtactgctgacacaactactaaaaaaaatgggtgctgatttgcttggatctgttcaggcaaaagttcagaaagcccttgatgttacaagagagtcttatccaaatgatcttcagttcaatattctaatgagatttacagttgatcagacccagacaccaagcttaaaggtgaaggttgctatccttaaatacatagaaactctggccaaacaga

SEQ ID NO: 597945 - DNA, 390 bp, Homo sapiens
tgtgaaaatcgagttggaattgcctgtatgaacaatgcgcgagttagccgttgattcgccatttcgctcttacagactgaacaatgtctccgaacatcatagaatgcttggccgaggaatgatctgtatgggcattaagtactctggttcatgtatctgactacttcacagatctgtagcccagagaccgtctgtgtaagcagcaaccatagtaggcaatttgctatctcttcatccggtagcagtccagacatactccaaaaccacaacgaggacacccccagtgcaggttgaagatggtggtgtcgcacacatcatacatttctcgaacagctttgacagctcgattccaagcgagctgtctgtcgactgcttggattacaaggaggc

SEQ ID NO: 597946 - DNA, 2947 bp, Homo sapiens
  misc_feature (1436)..(1436): n is a, c, g, or t
gagcagttaatcatggaaactgggctattcctgtttatgcacttctagcaatcttctgttgtaaatattaaaaggtaacgacaaaaggatgaaaacctttttaaaaaggcgcaaatcagttaatccatcagatcatgtgattgctactgattacatggatatctttagggaagcagaaaatgattgctgaacacatgccttgtgttttgatgattgcattaaaagtcccccagcgggatggcatttattggctctcagagcttttcttagattaaatttcaggcagccagtacaaggagaaacatcataacctgtatccaacagcatatgtgcagctaaagagtaatcttaatcaagtccttctaggctgtgctaaataaacgagggttttcagcaagaccccagacttttattttgaagtggagtagcagctgttggctattgcggtgcagagctgcagcgaggcctgggtcacacagtgctccgggtgtctgcaggctgcaggccgagcccagtggcgcaggcactgagctgtacttatttgctgtgctatttgacctcttggtttcagagagctccctggaccatctaatggctatgggagatgataaaagcttcgatgatgaagaatcagtggatggaaataggccatcatcagctgcatcagccttcaaggttcctgcacctaaaacatccggaaatcctgccaacagtgcaaggaagcctggttcagcaggtggccctaaggttggaggtgcttctaaggaaggaggtgctggagcagttgatgaagatgattttataaaagcttttacagatgtcccttctattcagatttattctagtcgagaactcgaagaaacattaaataaaatcagggaaattttgtcagatgataaacatgactgggatcagcgtgccaatgcactgaagaaaattcgatcactgcttgttgctggagctgcacagtatgattgcttttttcaacatttacgattgttggatggagcacttaaactttcagctaaggatcttagatcccaggtggttagagaagcttgtattactgtagcccacctttcaacagttttgggaaacaagtttgatcatggcgctgaagccattgtacctacactttttaatctcgtccccaatagtgcaaaagtcatggcaacttctggatgtgcagcaatcagatttatcattcggcatactcatgtacccagacttatacctttaataacaagcaattgcacatcaaaatcagttcccgtgaggagacgttcatttgaatttttagatttattgttgcaagagtggcagactcattcattggaaagacatgcagccgtcttggttgaaactattaaaaagggaattcatgatgctgacgctgaggccagagtggaggcaagaaagacatacatgggtcttanaaaccactttcctggtgaagctgaaacattatataattcccttgagccatcttatcagaagagtcttcaaacttacttaaagagttctggcagtgtagcatctcttccacaatcagacaggtcctcatccagctcacaggaaagtctcaatcgccctttttcttccaaatggtctacagcaaatccatcaactgtggctggaagagtatcagcaggcagcagcaaagccagttcccttccaggaagcctgcagcgttcacgaagtgacattgatgtgaatgctgctgcaggtgccaaggcacatcatgctgctggacagtctgtgcgaagcgggcgcttaggtgcaggtgccctgaatgcaggttcctatgcgtcactagaggatacttctgacaagctggatggaacagcatctgaagatggccgggtgagagcaaaactttcagcaccacttgctggcatgggaaatgccaaggcagattctagaggaagaagtcgaacaaaaatggtgtctcaatcacagcctggtagccggtctgggtctccaggaagagttctgaccacaacagccctgtccactgtgagctctggtgttcaaagagtcctggtcaattcagcctcagcacaaaaaagaagcaagataccacggagccagggctgtagcagagaggctagtccatctaggctttcagtggcccgaagcagtcgtattcctcgaccaagtgtgagtcaaggatgcagccgggaagctagtcgggagagcagcagagacacaagtcctgttcgctcttttcagcccctcggtccaggttatgggatcagccaatcaagtcgactgtcgtcttctgttagtgccatgcgagtcctgaacacaggttctgatgtggaggaggcggtggcagatgccttgaaaaaaccagctcgaagaagatatgaatcatatggaatgcattcagatgatgacgccaacagcgatgcatctagtgcttgttcagaacgctcctatagttctcgaaatggtagtattcctacatatatgaggcagacggaagatgtggcagaagtcctcaatagatgtgctagttccaattggtcagaaaggaaagaaggcctcctaggtctgcagaacttattaaaaaatcagagaacactaagtcgagttgaactgaaaagattatgtgaaattttcacaagaatgtttgctgaccctcatggcaagagagtattcagcatgtttttggagactctagtggatttcatacaagtccacaaagatgatcttcaagattggttgtttgtactgctgacacaactactaaaaaaaatgggtgctgatttgcttggatctgttcaggcaaaagttcagaaagcccttgatgttacaagagagtcttatccaaatgatcttcagttcaatattctaatgagatttacagttgatcagacccagacaccaagcttaaaggtgaaggttgctatccttaaatacatagaaactctggccaaacaga

SEQ ID NO: 597947 - DNA, 951 bp, Homo sapiens
  misc_feature (912)..(912): n is a, c, g, or t
tctcagcccctcgttcttggtcctgtccctggaaccttgtacgcttgctcaaaaaaaaaaaaaaaaaaaaaaaaaaaaaaaaaaaaaaaaaaagggggggaccttggaaccaaaagggcaatttttgggggagagattaattttttccaataataacgccaaattagtgggaaaccaaatctcaagggtaagttgaaagggggttgggctggggtgctacgattggttgaagaatttgtcgagaactccgacattcttattaataaatgtggagcccttaaaatagtgaacaaagcctttcttaaagaggcataattttccaaaaggcgcccccaccaaattctgtggtctccagactattacaatgaaagtgttgggcccaaaaaaattcgctgtctggtgaagacattaaccagggggcatttgtgggttagggagccgcgaaagaaaaacccgcgagagcacagtgtggaaaactttgtggggacaaagtagcatacatttttgcgtttcttctctgggaaacaaagaagagaagcgggatataagactatatgcgtgggcgagcatttgaggagggaagggggttgccacaaggacacataagtgtgtgagctttccatcaccatgagtggtgatgaagatgtctctcgagagagttgcggttacacgcggccatagaaaagaagggccgtctcctccccgatgaattgttgaacagcgccggctggcgccacatgttgtagagacctcttcccccaaaggtggtgatgtttatagcgcaaggccagttggtgtgtttctcccgcgggaggatatataaacctatgtggtggcgtaccgtggtcgaaaacgtggagggaacgatgagacggcaggtataacgcaagggcacgcaacagagcgtctacngtgaggggagaacactcaaggcgcttatgtgggagcgaa

SEQ ID NO: 597948 - DNA, 858 bp, Homo sapiens
aagtggtgctggtggcccagtgctgctccatctgctgggtgccacagtcctcatggagggtcttcaagcctgctcagctgtgcctgtgtgacagcagtggcccctgtgtccctcccaatgcctcatgtgagggcaacacatgtccctggcgatgtggccctggctagtgccagtgtgatggatggcaatggatgcccacatcttgcatgctggctccctggtggcagacacctgggtcctcacttgctgcccactgctttgaaaaggcagcagcaacagaactgaattcctggtcagtggtcctgggattctctgcagcgtgagggactcagccctgtgggccgaagaggtggtgggtggctgccctgcagttgcccagggcctataaccactacagccagggctcagacctggccctgctgcaggcttcgaccagccacacgtagcccaagagcaaccgcgtactgaccatggagccgaagccctggacccaatacgacgtatccgcacgtttgggatgccatgccttgcatggtaggcccaacctgggtcatgcgtgattccagcgtacccccccgggatgacttgcatcgcagttggagatcccgtagcggccaacttcgtgccgcccctgacggtcatcaatacgagatccggacagcgcgacaattgttatcaaaggtgggcagcatcgtcacaggagcagcaacgcgcattgccgcgatcgcacacgctggtagcaagaacctgttgttaccccgagaccgcgcgttaggggcgcatggggacacccctgtagtgaacttgcccatagattgaataggagggggggtcccctatccaatgatcgccttgcag

SEQ ID NO: 597949 - DNA, 2929 bp, Homo sapiens
  misc_feature (1436)..(1436): n is a, c, g, or t
gagcagttaatcatggaaactgggctattcctgtttatgcacttctagcaatcttctgttgtaaatattaaaaggtaacgacaaaaggatgaaaacctttttaaaaaggcgcaaatcagttaatccatcagatcatgtgattgctactgattacatggatatctttagggaagcagaaaatgattgctgaacacatgccttgtgttttgatgattgcattaaaagtcccccagcgggatggcatttattggctctcagagcttttcttagattaaatttcaggcagccagtacaaggagaaacatcataacctgtatccaacagcatatgtgcagctaaagagtaatcttaatcaagtccttctaggctgtgctaaataaacgagggttttcagcaagaccccagacttttattttgaagtggagtagcagctgttggctattgcggtgcagagctgcagcgaggcctgggtcacacagtgctccgggtgtctgcaggctgcaggccgagcccagtggcgcaggcactgagctgtacttatttgctgtgctatttgacctcttggtttcagagagctccctggaccatctaatggctatgggagatgataaaagcttcgatgatgaagaatcagtggatggaaataggccatcatcagctgcatcagccttcaaggttcctgcacctaaaacatccggaaatcctgccaacagtgcaaggaagcctggttcagcaggtggccctaaggttggaggtgcttctaaggaaggaggtgctggagcagttgatgaagatgattttataaaagcttttacagatgtcccttctattcagatttattctagtcgagaactcgaagaaacattaaataaaatcagggaaattttgtcagatgataaacatgactgggatcagcgtgccaatgcactgaagaaaattcgatcactgcttgttgctggagctgcacagtatgattgcttttttcaacatttacgattgttggatggagcacttaaactttcagctaaggatcttagatcccaggtggttagagaagcttgtattactgtagcccacctttcaacagttttgggaaacaagtttgatcatggcgctgaagccattgtacctacactttttaatctcgtccccaatagtgcaaaagtcatggcaacttctggatgtgcagcaatcagatttatcattcggcatactcatgtacccagacttatacctttaataacaagcaattgcacatcaaaatcagttcccgtgaggagacgttcatttgaatttttagatttattgttgcaagagtggcagactcattcattggaaagacatgcagccgtcttggttgaaactattaaaaagggaattcatgatgctgacgctgaggccagagtggaggcaagaaagacatacatgggtcttanaaaccactttcctggtgaagctgaaacattatataattcccttgagccatcttatcagaagagtcttcaaacttacttaaagagttctggcagtgtagcatctcttccacaatcagacaggtcctcatccagctcacaggaaagtctcaatcgccctttttcttccaaatggtctacagcaaatccatcaactgtggctggaagagtatcagcaggcagcagcaaagccagttcccttccaggaagcctgcagcgttcacgaagtgacattgatgtgaatgctgctgcaggtgccaaggcacatcatgctgctggacagtctgtgcgaagcgggcgcttaggtgcaggtgccctgaatgcaggttcctatgcgtcactaggccgggtgagagcaaaactttcagcaccacttgctggcatgggaaatgccaaggcagattctagaggaagaagtcgaacaaaaatggtgtctcaatcacagcctggtagccggtctgggtctccaggaagagttctgaccacaacagccctgtccactgtgagctctggtgttcaaagagtcctggtcaattcagcctcagcacaaaaaagaagcaagataccacggagccagggctgtagcagagaggctagtccatctaggctttcagtggcccgaagcagtcgtattcctcgaccaagtgtgagtcaaggatgcagccgggaagctagtcgggagagcagcagagacacaagtcctgttcgctcttttcagcccctcggtccaggttatgggatcagccaatcaagtcgactgtcgtcttctgttagtgccatgcgagtcctgaacacaggttctgatgtggaggaggcggtggcagatgccttgctcttaggagacatacggactaagaaaaaaccagctcgaagaagatatgaatcatatggaatgcattcagatgatgacgccaacagcgatgcatctagtgcttgttcagaacgctcctatagttctcgaaatggtagtattcctacatatatgaggcagacggaagatgtggcagaagtcctcaatagatgtgctagttccaattggtcagaaaggaaagaaggcctcctaggtctgcagaacttattaaaaaatcagagaacactaagtcgagttgaactgaaaagattatgtgaaattttcacaagaatgtttgctgaccctcatggcaagagagtattcagcatgtttttggagactctagtggatttcatacaagtccacaaagatgatcttcaagattggttgtttgtactgctgacacaactactaaaaaaaatgggtgctgatttgcttggatctgttcaggcaaaagttcagaaagcccttgatgttacaagagagtcttatccaaatgatcttcagttcaatattctaatgagatttacagttgatcagacccagacaccaagcttaaaggtgaaggttgctatccttaaatacatagaaactctggccaaacaga

SEQ ID NO: 597950 - DNA, 3026 bp, Homo sapiens
  misc_feature (1557)..(1557): n is a, c, g, or t
agcggccgcagccatggagccccgcagcatggagtacttctgcgcccaggtgcagcagaaggacgtcggcggccggctgcaggtcggccaggagctcctgctctaccttggcgcccccggcgccatctcggacctggaggaggacctgggccgcctaggcaagacagtcgacgcgctcaccggctgggtgggttcgagcaactaccgggtatcattaatgggattggaaattttaagtgcctttgtggacagattatcaacacgctttaaatcctatgtagcaatggttattgtagctttaatagacagaatgggagatgccaaagacaaggttcgagatgaagctcagactctgatattgaagttaatggatcaagtagcaccacctatgtacatttgggagcagttggcttctggttttaaacacaagaattttcgatctcgagaaggcgtgtgtctgtgtcttattgaaaccttaaacatttttggggctcagccactagtcatcagcaaattgataccacatttgtgtatcctgtttggagactccaacagtcaggtgagagatgctgcaatattggctatagtggagatttatagacatgtgggagaaaaagtgaggatggatctttataagagaggaattccccctgctagattagaaatgatatttgccaaatttgatgaagtgcaaagttcaggcggtatgattttgagtgtctgcaaagataaaagcttcgatgatgaagaatcagtggatggaaataggccatcatcagctgcatcagccttcaaggttcctgcacctaaaacatccggaaatcctgccaacagtgcaaggaagcctggttcagcaggtggccctaaggttggaggtgcttctaaggaaggaggtgctggagcagttgatgaagatgattttataaaagcttttacagatgtcccttctattcagatttattctagtcgagaactcgaagaaacattaaataaaatcagggaaattttgtcagatgataaacatgactgggatcagcgtgccaatgcactgaagaaaattcgatcactgcttgttgctggagctgcacagtatgattgcttttttcaacatttacgattgttggatggagcacttaaactttcagctaaggatcttagatcccaggtggttagagaagcttgtattactgtagcccacctttcaacagttttgggaaacaagtttgatcatggcgctgaagccattgtacctacactttttaatctcgtccccaatagtgcaaaagtcatggcaacttctggatgtgcagcaatcagatttatcattcggcatactcatgtacccagacttatacctttaataacaagcaattgcacatcaaaatcagttcccgtgaggagacgttcatttgaatttttagatttattgttgcaagagtggcagactcattcattggaaagacatgcagccgtcttggttgaaactattaaaaagggaattcatgatgctgacgctgaggccagagtggaggcaagaaagacatacatgggtcttanaaaccactttcctggtgaagctgaaacattatataattcccttgagccatcttatcagaagagtcttcaaacttacttaaagagttctggcagtgtagcatctcttccacaatcagacaggtcctcatccagctcacaggaaagtctcaatcgccctttttcttccaaatggtctacagcaaatccatcaactgtggctggaagagtatcagcaggcagcagcaaagccagttcccttccaggaagcctgcagcgttcacgaagtgacattgatgtgaatgctgctgcaggtgccaaggcacatcatgctgctggacagtctgtgcgaagcgggcgcttaggtgcaggtgccctgaatgcaggttcctatgcgtcactaggccgggtgagagcaaaactttcagcaccacttgctggcatgggaaatgccaaggcagattctagaggaagaagtcgaacaaaaatggtgtctcaatcacagcctggtagccggtctgggtctccaggaagagttctgaccacaacagccctgtccactgtgagctctggtgttcaaagagtcctggtcaattcagcctcagcacaaaaaagaagcaagataccacggagccagggctgtagcagagaggctagtccatctaggctttcagtggcccgaagcagtcgtattcctcgaccaagtgtgagtcaaggatgcagccgggaagctagtcgggagagcagcagagacacaagtcctgttcgctcttttcagcccctcggtccaggttatgggatcagccaatcaagtcgactgtcgtcttctgttagtgccatgcgagtcctgaacacaggttctgatgtggaggaggcggtggcagatgccttgaaaaaaccagctcgaagaagatatgaatcatatggaatgcattcagatgatgacgccaacagcgatgcatctagtgcttgttcagaacgctcctatagttctcgaaatggtagtattcctacatatatgaggcagacggaagatgtggcagaagtcctcaatagatgtgctagttccaattggtcagaaaggaaagaaggcctcctaggtctgcagaacttattaaaaaatcagagaacactaagtcgagttgaactgaaaagattatgtgaaattttcacaagaatgtttgctgaccctcatggcaagagagtattcagcatgtttttggagactctagtggatttcatacaagtccacaaagatgatcttcaagattggttgtttgtactgctgacacaactactaaaaaaaatgggtgctgatttgcttggatctgttcaggcaaaagttcagaaagcccttgatgttacaagagagtcttatccaaatgatcttcagttcaatattctaatgagatttacagttgatcagacccagacaccaagcttaaaggtgaaggttgctatccttaaatacatagaaactctggccaaacaga

SEQ ID NO: 597951 - DNA, 2731 bp, Homo sapiens
  misc_feature (1436)..(1436): n is a, c, g, or t
  misc_feature (2617)..(2617): n is a, c, g, or t
  misc_feature (2660)..(2660): n is a, c, g, or t
  misc_feature (2707)..(2707): n is a, c, g, or t
gagcagttaatcatggaaactgggctattcctgtttatgcacttctagcaatcttctgttgtaaatattaaaaggtaacgacaaaaggatgaaaacctttttaaaaaggcgcaaatcagttaatccatcagatcatgtgattgctactgattacatggatatctttagggaagcagaaaatgattgctgaacacatgccttgtgttttgatgattgcattaaaagtcccccagcgggatggcatttattggctctcagagcttttcttagattaaatttcaggcagccagtacaaggagaaacatcataacctgtatccaacagcatatgtgcagctaaagagtaatcttaatcaagtccttctaggctgtgctaaataaacgagggttttcagcaagaccccagacttttattttgaagtggagtagcagctgttggctattgcggtgcagagctgcagcgaggcctgggtcacacagtgctccgggtgtctgcaggctgcaggccgagcccagtggcgcaggcactgagctgtacttatttgctgtgctatttgacctcttggtttcagagagctccctggaccatctaatggctatgggagatgataaaagcttcgatgatgaagaatcagtggatggaaataggccatcatcagctgcatcagccttcaaggttcctgcacctaaaacatccggaaatcctgccaacagtgcaaggaagcctggttcagcaggtggccctaaggttggaggtgcttctaaggaaggaggtgctggagcagttgatgaagatgattttataaaagcttttacagatgtcccttctattcagatttattctagtcgagaactcgaagaaacattaaataaaatcagggaaattttgtcagatgataaacatgactgggatcagcgtgccaatgcactgaagaaaattcgatcactgcttgttgctggagctgcacagtatgattgcttttttcaacatttacgattgttggatggagcacttaaactttcagctaaggatcttagatcccaggtggttagagaagcttgtattactgtagcccacctttcaacagttttgggaaacaagtttgatcatggcgctgaagccattgtacctacactttttaatctcgtccccaatagtgcaaaagtcatggcaacttctggatgtgcagcaatcagatttatcattcggcatactcatgtacccagacttatacctttaataacaagcaattgcacatcaaaatcagttcccgtgaggagacgttcatttgaatttttagatttattgttgcaagagtggcagactcattcattggaaagacatgcagccgtcttggttgaaactattaaaaagggaattcatgatgctgacgctgaggccagagtggaggcaagaaagacatacatgggtcttanaaaccactttcctggtgaagctgaaacattatataattcccttgagccatcttatcagaagagtcttcaaacttacttaaagagttctggcagtgtagcatctcttccacaatcagacaggtcctcatccagctcacaggaaagtctcaatcgccctttttcttccaaatggtctacagcaaatccatcaactgtggctggaagagtatcagcaggcagcagcaaagccagttcccttccaggaagcctgcagcgttcacgaagtgacattgatgtgaatgctgctgcaggtgccaaggcacatcatgctgctggacagtctgtgcgaagcgggcgcttaggtgcaggtgccctgaatgcaggttcctatgcgtcactaggccgggtgagagcaaaactttcagcaccacttgctggcatgggaaatgccaaggcagattctagaggaagaagtcgaacaaaaatggtgtctcaatcacagcctggtagccggtctgggtctccaggaagagttctgaccacaacagccctgtccactgtgagctctggtgttcaaagagtcctggtcaattcagcctcagcacaaaaaagaagcaagataccacggagccagggctgtagcagagaggctagtccatctaggctttcagtggcccgaagcagtcgtattcctcgaccaagtgtgagtcaaggatgcagccgggaagctagtcgggagagcagcagagacacaagtcctgttcgctcttttcagcccctcggtccaggttatgggatcagccaatcaagtcgactgtcgtcttctgttagtgccatgcgagtcctgaacacaggttctgatgtggaggaggcggtggcagatgccttgaaaaaaccagctcgaagaagatatgaatcatatggaatgcattcagatgatgacgccaacagcgatgcatctagtgcttgttcagaacgctcctatagttctcgaaatggtagtattcctacatatatgaggcagacggaagatgtggcagaagtcctcaatagatgtgctagttccaattggtcagaaaggaaagaaggcctcctaggtctgcagaacttattaaaaaatcagagaacactaaggtgagatgcgttgtcttaaaatgattttactatcaggttagcgctttttgattttactttgtttctanaacactttagagatactggtgtagaaacagacttgtcctgaantcatatggttgcttcaaagtgtttttccaaagcttcagtcttttagnaccatctatactttcattactacg

SEQ ID NO: 597952 - DNA, 2501 bp, Homo sapiens
  misc_feature (1032)..(1032): n is a, c, g, or t
agggcagggaagagaaagaaaaatgccggcacaaacctcagtggtggttctgtggttgtttctgtctttttttgatagaatctttgattagtatcgaatttactgtatttggccatgtgaactattgggagcctcctagggtgagggaaattaagagctttcagaggaatgaggcgactgatttgcaaacggatctgtgattgataaaagcttcgatgatgaagaatcagtggatggaaataggccatcatcagctgcatcagccttcaaggttcctgcacctaaaacatccggaaatcctgccaacagtgcaaggaagcctggttcagcaggtggccctaaggttggaggtgcttctaaggaaggaggtgctggagcagttgatgaagatgattttataaaagcttttacagatgtcccttctattcagatttattctagtcgagaactcgaagaaacattaaataaaatcagggaaattttgtcagatgataaacatgactgggatcagcgtgccaatgcactgaagaaaattcgatcactgcttgttgctggagctgcacagtatgattgcttttttcaacatttacgattgttggatggagcacttaaactttcagctaaggatcttagatcccaggtggttagagaagcttgtattactgtagcccacctttcaacagttttgggaaacaagtttgatcatggcgctgaagccattgtacctacactttttaatctcgtccccaatagtgcaaaagtcatggcaacttctggatgtgcagcaatcagatttatcattcggcatactcatgtacccagacttatacctttaataacaagcaattgcacatcaaaatcagttcccgtgaggagacgttcatttgaatttttagatttattgttgcaagagtggcagactcattcattggaaagacatgcagccgtcttggttgaaactattaaaaagggaattcatgatgctgacgctgaggccagagtggaggcaagaaagacatacatgggtcttanaaaccactttcctggtgaagctgaaacattatataattcccttgagccatcttatcagaagagtcttcaaacttacttaaagagttctggcagtgtagcatctcttccacaatcagacaggtcctcatccagctcacaggaaagtctcaatcgccctttttcttccaaatggtctacagcaaatccatcaactgtggctggaagagtatcagcaggcagcagcaaagccagttcccttccaggaagcctgcagcgttcacgaagtgacattgatgtgaatgctgctgcaggtgccaaggcacatcatgctgctggacagtctgtgcgaagcgggcgcttaggtgcaggtgccctgaatgcaggttcctatgcgtcactaggccgggtgagagcaaaactttcagcaccacttgctggcatgggaaatgccaaggcagattctagaggaagaagtcgaacaaaaatggtgtctcaatcacagcctggtagccggtctgggtctccaggaagagttctgaccacaacagccctgtccactgtgagctctggtgttcaaagagtcctggtcaattcagcctcagcacaaaaaagaagcaagataccacggagccagggctgtagcagagaggctagtccatctaggctttcagtggcccgaagcagtcgtattcctcgaccaagtgtgagtcaaggatgcagccgggaagctagtcgggagagcagcagagacacaagtcctgttcgctcttttcagcccctcggtccaggttatgggatcagccaatcaagtcgactgtcgtcttctgttagtgccatgcgagtcctgaacacaggttctgatgtggaggaggcggtggcagatgccttgaaaaaaccagctcgaagaagatatgaatcatatggaatgcattcagatgatgacgccaacagcgatgcatctagtgcttgttcagaacgctcctatagttctcgaaatggtagtattcctacatatatgaggcagacggaagatgtggcagaagtcctcaatagatgtgctagttccaattggtcagaaaggaaagaaggcctcctaggtctgcagaacttattaaaaaatcagagaacactaagtcgagttgaactgaaaagattatgtgaaattttcacaagaatgtttgctgaccctcatggcaagagagtattcagcatgtttttggagactctagtggatttcatacaagtccacaaagatgatcttcaagattggttgtttgtactgctgacacaactactaaaaaaaatgggtgctgatttgcttggatctgttcaggcaaaagttcagaaagcccttgatgttacaagagagtcttatccaaatgatcttcagttcaatattctaatgagatttacagttgatcagacccagacaccaagcttaaaggtgaaggttgctatccttaaatacatagaaactctggccaaacaga

SEQ ID NO: 597953 - DNA, 497 bp, Homo sapiens
  misc_feature (47)..(47): n is a, c, g, or t
tggcccttttgcctgctaatggaaaaaaaaaattgggagcgcatttncaggaggagtggtcacatcatgttattttattattattatttgcttttcatgtagaactcagcagttgacatccaaatctagccagagcccttcactgccatgatagctggggcttcaccagtctgtctactgtggtgatctgtagacttctggttgtatttctatatttattttcagtatactgtgtgggatacttagtggtatgtctctttaagttttgattaatgtttcttaaatggaattattttgaatgtcacaaattgatcaagatattaaaatgtcggatttatctttccccatatccaagtaccaatgctgttgtaaacaacgtgtatagtgcctaaaattgtatgaaaatccttttaaccattttaacctagatgtttaacaaatctaatctcttattctaataaatatactatgaaataaaaaaaaaaggatgaaagcta

SEQ ID NO: 597954 - DNA, 139 bp, Homo sapiens
acggatctactccacttggtgccaggctgagatatagtggcgtgatcatgggtctctacagactcacctcccaggctcaagcagtctacctacatctgcctcccagtagctggactacaggcgtgaaccaccacgatca

SEQ ID NO: 597955 - DNA, 2026 bp, Homo sapiens
  misc_feature (1436)..(1436): n is a, c, g, or t
gagcagttaatcatggaaactgggctattcctgtttatgcacttctagcaatcttctgttgtaaatattaaaaggtaacgacaaaaggatgaaaacctttttaaaaaggcgcaaatcagttaatccatcagatcatgtgattgctactgattacatggatatctttagggaagcagaaaatgattgctgaacacatgccttgtgttttgatgattgcattaaaagtcccccagcgggatggcatttattggctctcagagcttttcttagattaaatttcaggcagccagtacaaggagaaacatcataacctgtatccaacagcatatgtgcagctaaagagtaatcttaatcaagtccttctaggctgtgctaaataaacgagggttttcagcaagaccccagacttttattttgaagtggagtagcagctgttggctattgcggtgcagagctgcagcgaggcctgggtcacacagtgctccgggtgtctgcaggctgcaggccgagcccagtggcgcaggcactgagctgtacttatttgctgtgctatttgacctcttggtttcagagagctccctggaccatctaatggctatgggagatgataaaagcttcgatgatgaagaatcagtggatggaaataggccatcatcagctgcatcagccttcaaggttcctgcacctaaaacatccggaaatcctgccaacagtgcaaggaagcctggttcagcaggtggccctaaggttggaggtgcttctaaggaaggaggtgctggagcagttgatgaagatgattttataaaagcttttacagatgtcccttctattcagatttattctagtcgagaactcgaagaaacattaaataaaatcagggaaattttgtcagatgataaacatgactgggatcagcgtgccaatgcactgaagaaaattcgatcactgcttgttgctggagctgcacagtatgattgcttttttcaacatttacgattgttggatggagcacttaaactttcagctaaggatcttagatcccaggtggttagagaagcttgtattactgtagcccacctttcaacagttttgggaaacaagtttgatcatggcgctgaagccattgtacctacactttttaatctcgtccccaatagtgcaaaagtcatggcaacttctggatgtgcagcaatcagatttatcattcggcatactcatgtacccagacttatacctttaataacaagcaattgcacatcaaaatcagttcccgtgaggagacgttcatttgaatttttagatttattgttgcaagagtggcagactcattcattggaaagacatgcagccgtcttggttgaaactattaaaaagggaattcatgatgctgacgctgaggccagagtggaggcaagaaagacatacatgggtcttanaaaccactttcctggtgaagctgaaacattatataattcccttgagccatcttatcagaagagtcttcaaacttacttaaagagttctggcagtgtagcatctcttccacaatcagacaggtcctcatccagctcacaggaaagtctcaatcgccctttttcttccaaatggtctacagcaaatccatcaactgtggctggaagagtatcagcaggcagcagcaaagccagttcccttccaggaagcctgcagcgttcacgaagtgacattgatgtgaatgctgctgcaggtgccaaggcacatcatgctgctggacagtctgtgcgaagcgggcgcttaggtgcaggtgccctgaatgcaggttcctatgcgtcactaggccgggtgagagcaaaactttcagcaccacttgctggcatgggaaatgccaaggcagattctagaggaagaagtcgaacaaaaatggtgtctcaatcacagcgtatgtattgcttatcagccctcctatatttgtcactatgttaggataagtgtgttgcttttgtattactgtattagacgattgaccagtggataaagacaaagctaa

SEQ ID NO: 597956 - DNA, 1474 bp, Homo sapiens
  misc_feature (134)..(134): n is a, c, g, or t
gacttagaagcatcctaaccagagtcactctccgcctgctgtctcgtttggtggcagtggaaatagctaagtaatactgtaaatatctggacagccatagacggtgtatatagtatataatatgcactaagtcnatcattttctttgtcccttctaacaagcctgtgaggcatttaaggcagagttactgtctccatactgcacgagtaggctccaagaggtgacttgcccaaggcctcacagctgctgtgactggtggagcaggtctttgggcctgcagctggccccactgttgctcaggggcaggtgccaggtgctctttccaagtgcagcacaagctctagacctgaaactcttggattttccttcctgggtgggttttgttttttttttttttttaacaccacgtcctctcgtttccttacatgcaggttcatgcttttatcaagagatctgatgctgaggaagtggattttgcaggttggctctgctccaccatcggccttaaccagcccagcacaccaacccatgctgctggcgtctaagtgtttgggaagcaacaaagagcgagtcccctgcccggtggtttgccatgtcgcttttgggcctccttcccatgcctgtctctgttcagatgtgcatttcacctgtgacaaaggatgaagaacacagcatgtgccaagattctactcttgtcatttttaatattactgtctttattcttattactattattgttcccctaagtggattggctttgtgcttggggctatttgtgtgtatgctgatgatcaaaacctgtgccaggctgaattacagtgaaattttggtgaatgtgggtagtcattcttacaattgcactgctgttcctgctccatgactggctgtctgcctgtattttcgggattctttgacatttggtggtactttattcttgctgggcatactttctctctaggagggagccttgtgagatccttcacaggcagtgcatgtgaagcatgctttgctgctatgaaaatgagcatcagagagtgtacatcatgttattttattattattatttgcttttcatgtagaactcagcagttgacatccaaatctagccagagcccttcactgccatgatagctggggcttcaccagtctgtctactgtggtgatctgtagacttctggttgtatttctatatttattttcagtatactgtgtgggatacttagtggtatgtctctttaagttttgattaatgtttcttaaatggaattattttgaatgtcacaaattgatcaagatattaaaatgtcggatttatctttccccatatccaagtaccaatgctgttgtaaacaacgtgtatagtgcctaaaattgtatgaaaatccttttaaccattttaacctagatgtttaacaaatctaatctcttattctaataaatatactatgaaataaaaaaaaaaggatgaaagcta

SEQ ID NO: 597957 - DNA, 750 bp, Homo sapiens
  misc_feature (681)..(681): n is a, c, g, or t
  misc_feature (684)..(685): n is a, c, g, or t
  misc_feature (692)..(692): n is a, c, g, or t
  misc_feature (694)..(695): n is a, c, g, or t
agcggggggcatctttgtgcggggccgcgcttccgccagcgccgcagcggggaatctgcagtaggtctgccggcgatggagtggtgggctagctcgccgcttcggctctggctgctgttgttcctcctgccctcagcgcagggccgccagaaggagtcaggttcaaaatggaaagtatttattgaccaaattaacaggtctttggagaattacgaaccatgttcaagtcaaaactgcagctgctaccatggtgtcatagaagaggatctaactcctttccgaggaggcatctccaggaagatgatggcagaggtagtcagacggaagctagggacccactatcagatcactaagaacagactgtaccgggaaaatgactgcatgttcccctcaaggtgtagtggtgttgagcactttattttggaagtgatcgggcgtctccctgacatggagatggtgatcaatgtacgagattatcctcaggttcctaaatggatggagcctgccatcccagtcttctccttcagtaagacatcagagtaccatgatatcatgtatcctgcttggacattttgggaagggggacctgctgtttggccaatttatcctacaggtcttggacggtgggacctcttcagagaagatctggtaaggtcagcagcacagtggccatggaaaaanaannattttcngnntatttccgagggtcaaggaccagtcccaaaacgagaatcttctcttccttttgtc

SEQ ID NO: 597958 - DNA, 2162 bp, Homo sapiens
  misc_feature (1436)..(1436): n is a, c, g, or t
gagcagttaatcatggaaactgggctattcctgtttatgcacttctagcaatcttctgttgtaaatattaaaaggtaacgacaaaaggatgaaaacctttttaaaaaggcgcaaatcagttaatccatcagatcatgtgattgctactgattacatggatatctttagggaagcagaaaatgattgctgaacacatgccttgtgttttgatgattgcattaaaagtcccccagcgggatggcatttattggctctcagagcttttcttagattaaatttcaggcagccagtacaaggagaaacatcataacctgtatccaacagcatatgtgcagctaaagagtaatcttaatcaagtccttctaggctgtgctaaataaacgagggttttcagcaagaccccagacttttattttgaagtggagtagcagctgttggctattgcggtgcagagctgcagcgaggcctgggtcacacagtgctccgggtgtctgcaggctgcaggccgagcccagtggcgcaggcactgagctgtacttatttgctgtgctatttgacctcttggtttcagagagctccctggaccatctaatggctatgggagatgataaaagcttcgatgatgaagaatcagtggatggaaataggccatcatcagctgcatcagccttcaaggttcctgcacctaaaacatccggaaatcctgccaacagtgcaaggaagcctggttcagcaggtggccctaaggttggaggtgcttctaaggaaggaggtgctggagcagttgatgaagatgattttataaaagcttttacagatgtcccttctattcagatttattctagtcgagaactcgaagaaacattaaataaaatcagggaaattttgtcagatgataaacatgactgggatcagcgtgccaatgcactgaagaaaattcgatcactgcttgttgctggagctgcacagtatgattgcttttttcaacatttacgattgttggatggagcacttaaactttcagctaaggatcttagatcccaggtggttagagaagcttgtattactgtagcccacctttcaacagttttgggaaacaagtttgatcatggcgctgaagccattgtacctacactttttaatctcgtccccaatagtgcaaaagtcatggcaacttctggatgtgcagcaatcagatttatcattcggcatactcatgtacccagacttatacctttaataacaagcaattgcacatcaaaatcagttcccgtgaggagacgttcatttgaatttttagatttattgttgcaagagtggcagactcattcattggaaagacatgcagccgtcttggttgaaactattaaaaagggaattcatgatgctgacgctgaggccagagtggaggcaagaaagacatacatgggtcttanaaaccactttcctggtgaagctgaaacattatataattcccttgagccatcttatcagaagagtcttcaaacttacttaaagagttctggcagtgtagcatctcttccacaatcagacaggtcctcatccagctcacaggaaagtctcaatcgccctttttcttccaaatggtctacagcaaatccatcaactgtggctggaagagtatcagcaggcagcagcaaagccagttcccttccaggaagcctgcagcgttcacgaagtgacattgatgtgaatgctgctgcaggtgccaaggcacatcatgctgctggacagtctgtgcgaagcgggcgcttaggtgcaggtgccctgaatgcaggttcctatgcgtcactagaggatacttctgacaagctggatggaacagcatctgaagatggcatagggttcacacctgaaatcccagcactttgaaaggctgagctaggaggattggttgaatccagaagtttgagaccagcttggacgacatagtgagaacccatctctacaaaaaattttaaatttagctgggtgtggtggcaccgtcctatagtcccacctattctggaggctgaggtgggaggaccacttgagcctgggagattgaggctacagtgagccatgatcatgccaccgcactccagcctgggcaacagaacaagattgtgtgtcaagaaataaataaaaataaaaacatgaaa

SEQ ID NO: 597959 - DNA, 1172 bp, Homo sapiens
ttggattacatagtcaacgagcctcctccaaaactgcccagtggagtgttcagtctggaatttcaagattttgtgaataaatgcttaataaaaaaccccgcagagagagcagatttgaagcaactcatggttcatgcttttatcaagagatctgatgctgaggaagtggattttgcaggttggctctgctccaccatcggccttaaccagcccagcacaccaacccatgctgctggcgtctaagtgtttgggaagcaacaaagagcgagtcccctgcccggtggtttgccatgtcgcttttgggcctccttcccatgcctgtctctgttcagatgtgcatttcacctgtgacaaaggatgaagaacacagcatgtgccaagattctactcttgtcatttttaatattactgtctttattcttattactattattgttcccctaagtggattggctttgtgcttggggctatttgtgtgtatgctgatgatcaaaacctgtgccaggctgaattacagtgaaattttggtgaatgtgggtagtcattcttacaattgcactgctgttcctgctccatgactggctgtctgcctgtattttcgggattctttgacatttggtggtactttattcttgctgggcatactttctctctaggagggagccttgtgagatccttcacaggcagtgcatgtgaagcatgctttgctgctatgaaaatgagcatcagagagtgtacatcatgttattttattattattatttgcttttcatgtagaactcagcagttgacatccaaatctagccagagcccttcactgccatgatagctggggcttcaccagtctgtctactgtggtgatctgtagacttctggttgtatttctatatttattttcagtatactgtgtgggatacttagtggtatgtctctttaagttttgattaatgtttcttaaatggaattattttgaatgtcacaaattgatcaagatattaaaatgtcggatttatctttccccatatccaagtaccaatgctgttgtaaacaacgtgtatagtgcctaaaattgtatgaaaatccttttaaccattttaacctagatgtttaacaaatctaatctcttattctaataaatatactatgaaataaaaaaaaaaggatgaaagcta

SEQ ID NO: 597960 - DNA, 362 bp, Homo sapiens
gcatagatacgcggattaatgggtatgtagggtccatccatgcacatggtggttctttcgcttggccctacgttgtgggttggctcggtactccatgttgcccagcacaggccgtcaagaaagcctttataacaaaagacttcctgaagggaagctgctcacagccaagggtctacgccttaaccaacagaagaacctggtagagctgtctttcctccccggagacactgggaagccagacgtgctttctgcttccttggaagggcaacttacaaagcaagaggagaggaaaacagaggcagaggagagagaccaacaaggggaaaagaaaaatcagacacggaacgagaagaagaaccagg

SEQ ID NO: 597961 - DNA, 328 bp, Homo sapiens
  misc_feature (297)..(297): n is a, c, g, or t
  misc_feature (313)..(313): n is a, c, g, or t
ggttgcgcttcatagacgccgcgtgtacccggttgtcctcaagcgctgtcagatctgatggtttttctacttgaaggacacaatgttttaccacactagcacatttcacaggtttgctgtacttagtcgcggagttcatcttcagtggcttctgctacatctgttgcaactaaacagtccaagtcgctccaacctctgatgacattttgaaagggatataatatgtgcacacactacgatccttactgtagcctcagagaggcaagcgttactatggatgtagcagcgttatttgantcctgagtttttacangctgtcaacggggtt

SEQ ID NO: 597962 - DNA, 1414 bp, Homo sapiens
ctcaactttccacaaaattcagtagtattttattggtttttatcagaggagtgttaaattgtcttcttactaaaagcattttttatactttgcagtcgccctttttcttccaaatggtctacagcaaatccatcaactgtggctggaagagtatcagcaggcagcagcaaagccagttcccttccaggaagcctgcagcgttcacgaagtgacattgatgtgaatgctgctgcaggtgccaaggcacatcatgctgctggacagtctgtgcgaagcgggcgcttaggtgcaggtgccctgaatgcaggttcctatgcgtcactaggccgggtgagagcaaaactttcagcaccacttgctggcatgggaaatgccaaggcagattctagaggaagaagtcgaacaaaaatggtgtctcaatcacagcctggtagccggtctgggtctccaggaagagttctgaccacaacagccctgtccactgtgagctctggtgttcaaagagtcctggtcaattcagcctcagcacaaaaaagaagcaagataccacggagccagggctgtagcagagaggctagtccatctaggctttcagtggcccgaagcagtcgtattcctcgaccaagtgtgagtcaaggatgcagccgggaagctagtcgggagagcagcagagacacaagtcctgttcgctcttttcagcccctcggtccaggttatgggatcagccaatcaagtcgactgtcgtcttctgttagtgccatgcgagtcctgaacacaggttctgatgtggaggaggcggtggcagatgccttgaaaaaaccagctcgaagaagatatgaatcatatggaatgcattcagatgatgacgccaacagcgatgcatctagtgcttgttcagaacgctcctatagttctcgaaatggtagtattcctacatatatgaggcagacggaagatgtggcagaagtcctcaatagatgtgctagttccaattggtcagaaaggaaagaaggcctcctaggtctgcagaacttattaaaaaatcagagaacactaagtcgagttgaactgaaaagattatgtgaaattttcacaagaatgtttgctgaccctcatggcaagagagtattcagcatgtttttggagactctagtggatttcatacaagtccacaaagatgatcttcaagattggttgtttgtactgctgacacaactactaaaaaaaatgggtgctgatttgcttggatctgttcaggcaaaagttcagaaagcccttgatgttacaagagagtcttatccaaatgatcttcagttcaatattctaatgagatttacagttgatcagacccagacaccaagcttaaaggtgaaggttgctatccttaaatacatagaaactctggccaaacaga

SEQ ID NO: 597963 - DNA, 2382 bp, Homo sapiens
  misc_feature (134)..(134): n is a, c, g, or t
  misc_feature (2035)..(2035): n is a, c, g, or t
gacttagaagcatcctaaccagagtcactctccgcctgctgtctcgtttggtggcagtggaaatagctaagtaatactgtaaatatctggacagccatagacggtgtatatagtatataatatgcactaagtcnatcattttctttgtcccttctaacaagcctgtgaggcatttaaggcagagttactgtctccatactgcacgagtaggctccaagaggtgacttgcccaaggcctcacagctgctgtgactggtggagcaggtctttgggcctgcagctggccccactgttgctcaggggcaggtgccaggtgctctttccaagtgcagcacaagctctagacctgaaactcttggattttccttcctgggtgggttttgttttttttttttttttaacaccacgtcctctcgtttccttacatgcaggttcatgcttttatcaagagatctgatgctgaggaagtggattttgcaggttggctctgctccaccatcggccttaaccagcccagcacaccaacccatgctgctggcgtctaagtgtttgggaagcaacaaagagcgagtcccctgcccggtggtttgccatgtcgcttttgggcctccttcccatgcctgtctctgttcagatgtgcatttcacctgtgacaaaggatgaagaacacagcatgtgccaagattctactcttgtcatttttaatattactgtctttattcttattactattattgttcccctaagtggattggctttgtgcttggggctatttgtgtgtatgctgatgatcaaaacctgtgccaggctgaattacagtgaaattttggtgaatgtgggtagtcattcttacaattgcactgctgttcctgctccatgactggctgtctgcctgtattttcgggattctttgacatttggtggtactttattcttgctgggcatactttctctctaggagggagccttgtgagatccttcacaggcagtgcatgtgaagcatgctttgctgctatgaaaatgagcatcagagagtgtacatcatgttattttattattattatttgcttttcatgtagaactcagcagttgacatccaaatctagccagagcccttcactgccatgatagctggggcttcaccagtctgtctactgtggtgatctgtagacttctggttgtatttctatatttattttcagtatactgtgtgggatacttagtggtatgtctctttaagttttgattaatgtttcttaaatggaattattttgaatgtcacaaattgatcaagatattaaaatgtcggatttatctttccccatatccaagtaccaatgctgttgtaaacaacgtgtatagtgcctaaaattgtatgaaaatccttttaaccattttaacctagatgtttaacaaatctaatctcttattctaataaatatactatgaaataaaaaaaaaaggatgaaagctacttttgcttttgtggtaagcttttcagtttctttagtacacaagaaatactggtttagccaagcaacactggtgagggggaaaggtgaagatgaggaggaggctggaaggcagaaacaggacaccgagttcagtgctttggactaatggggcttcctgtaatttcaatctctggactcagtccagctcttctcacccaacacccttatctgtgactcttccaaccaccttccttgtgggacctgtgaatagatcctgtatattcctttgatctcttttatacaagggaaaagcagctgatgggggactgggagcaaatctgagaaaaatgacaaaacatttcttatctcacagaacatttctcattttccatataccaatagttgagctgagggcctgcctgcacttttaggctgtcatgctcataggagggccttgctggtggccaacttgcctacctggtgtgggagctttctgcacaacataggacagtctgtctcctttgcgacattaagcaatggtttcccttctttcaccacttacacttaaccacaccttcctngaaaggaggaatgtgcctggcgctggctttgtcacagcctcgtgagaggtgtgcacatgtagagtcaccaaacccattggggaaccttcttttaggtacatttgaggctgctggtcaatacctctccgctcattattttctttgaaagggcaggttacagaaactaaagccaacatatatatttataaataaaaggcccattcctttttagattaaaaacaaaacttgggtaaataatcttctaagtaggtagtccaatctagaggtaccagagcttgggatattgccaggattttaaaaaaatgttgtatatacattgttgtatatacagtgttgtatatactgct

SEQ ID NO: 597964 - DNA, 294 bp, Homo sapiens
ggatataataaggccaatgtgggccacttgaaaaacccgttggtattccatgaagaaaacccctatagagatattcccattccacagactcacaattggagaagcacagcaccaccacctgggggttaaaggccatctgaacagagagatataatactccatattgcacaatgcacttgcaaagcttcacttctttttaagagcaaaagcccccatgttgaaacctccaccacagttttatgctgaagaaattatatccacacgcttctcaataaaccctttgtttcctcaccc

SEQ ID NO: 597965 - DNA, 159 bp, Homo sapiens
ggtagagctaaccgtgacagtatcctcccatggtgagttcactctcctcggccccctacacgcaccagctggtgtacgcccgtccctgtccttgtactgcacggctgacggactcgaagcggccctgggggacggtccagtgcgcggctcagcgagtca

SEQ ID NO: 597966 - DNA, 1065 bp, Homo sapiens
gcaaaacaccaaatggcggatgacgccggtgcagcggggtgggcccggggtgccctggtggccctgggatggggaacctgcggtggcttcctgcggaggtttcggcagtggcatcctgtgtggcctggggtcgcggccgtggactggtggccgggtggccgaggccgctggagctcgccggagtgcaaggcctgacggataacggagtggattgccctgtcaccaagttgggccgcattggtcaaggacatgaagatcaatgtccctggaggagatctatctcttctccctggaccattaaggaatcagagatcattgattatcttcctgggaggcctcttctcaaggatgaggtttgaagattatgccagtgcagaaggcagaaccggtgacaggccagtgcaccagtgttcacaggccattaagtatgctactcgggggcactacacatgggacaaacgtacgagtcttgggttgtttaatgttgcttccaaatggagtgttggcctcaaccctgccatcctgttggggccatcattccttgtggccaaaggtttcttcccaatcgttcccgctgtgacgacagcatggcatacatggggggggaacccaaggatcgggccaagacctcacaacaacttgtccccctatgcaatggcgtgaacaggggcccggattgacgggactcatagtgcgtagggtacaggcccttctattctccctttggcacgccccaggggggggccaacatcgtgagccaattcaggtcatcaccgggcaacacttgttagccctttacagagacagagcattggcatccaatagcataggagccatgggtaaatcggaacttgaaactttggcttaacaaacacttcaaagaccctgggaggggcattgccacattgaaccacatccactatgggggcaaacttatctggacctaatggggtccaacacttttatcgaataggcacatatattcttaaagaaccttaacagagttaccgcttggaacgcgcagaggagaccaatcgttggcaaaggggaggacctaggtaatac

SEQ ID NO: 597967 - DNA, 204 bp, Homo sapiens
ggtggctctcgacggactccccctccagctggccccccagcagtccgcagggctcagtggccagccttgcctggctggccccatgggcccgggggcccaggctgccaggcatgccttgctggccatgggtcctgtgcacccatcttgccatcagctgggcggcacttgcggcccttgggggccagctggcggggtcaccgcgct

SEQ ID NO: 597968 - DNA, 390 bp, Homo sapiens
tggcagggctctctacctggggtcatacttattaaaatggagaccattaaacaccagtatacactaaataaaaaaaaatttaaagtcaaaaattaatactaaaacattggtttttctggtcagatctagcccaaaggtcctcggtctctcttcgggcttcaaggctttctatctttccctacatgtatactagctggcaggggcttcccacttcatacactaatctacacctaaacagaccggtaagaggtatggaaagatgggtccactaaggagtatcaaagttatacacctattgtatgtcattccaacaacattatcctaagtcattggcattcggcttagatttctaagacaaaaggatagacggtacaaagctagactcagagc

SEQ ID NO: 597969 - DNA, 953 bp, Homo sapiens
tcagctgtgctgttgtggcctcgtaataggcgtctgttgagacgcggggcttcgttctctgggcgctccccactgtggtgtgccttctcgttgccagaggtcaccaacgtgtgagttaaggtactctccgctaaggcgtcgttggggtcttatttccgccgttgttgcagagcccatcatgtggtgcgaagtgtttcttgggaaaaacgatttgcttgctgcaggaggtccgcgaggggcccgccccaatgtctgcctgttaatacggcgcagcctttatttgggaaacttgggtgcctccccccgcgtggtagtacacgcctcccccgaccccccgggagaattgtccgcccgctccgcgtgaggcaggagaaagagcgaggggtcgtcgcccccgccgccatcaatggaagaccatcagttcctcccaccgcgaggtcgaagcaccgacggggtgtacactccccgcccgaaagcccggttggaaccaagacgcccgtgcccccccgcgagtgccctataaacgatgcgcgggagtctacaacgtccacggatcaaggcaggtcccgcccaaaggaaagcacgagcccccacacgggtagcacgagcttcgcatcacgggacggacgattgatcatagaggcgcgctagcccaaactttgaagaagaataatccatgaacacttataatagagattttactcgccaactcgtgagcgagcatggagaagtggtcgcctcctcaaggcgagtatctgaaccgcctcctgctgccccctcgaagaatgggttatggagaaatcccctctattcccggctctggtgtatataacagcggaggcggtacccagcagacctacgatactactggcgcacggcaacagggcatgcgtgtcacctacccacgtagccctggaaattgggcacccacaaaaaaaaacggccacacgacg

SEQ ID NO: 597970 - DNA, 151 bp, Homo sapiens
agtcaggctaaatctctaaaatacatcttagtactccagttatgtcctcaggagcttgtgacctttcatctttttcactaaagtggaatctaaaactgcaagggaaatattagttggctgggcacggtggctcatgcctgtaatcccagca

SEQ ID NO: 597971 - DNA, 640 bp, Homo sapiens
aagcattggtatcaacccagagtgcccattacggccggggggtagtgtagctttttccgtgctgtgtaccgggctaacaatggatcacccgagaaggacgttcaactctccaaagacaggacagaccatagtgatatactatctcgtggagagtgttcacacagaaatagtgtagaataatatcgtagggaattcaatctaggatgcgaggacgaatgtggatacaggacataactgttgcaagaaacacggcactagaacagattgggtcgttctttgatgactcgatggaatgctggggaattcagaggaatgtgcttcaacttatagcgttgcgatttgcttcattcgttccacagtgttcgtgattagctgtatacgtcttgtcgattttgcttgacatgtagttcccccattatcttcgggagatagctattccatgggtgccccagtgaactgcctgtaaaacctcaaagcagtaaccaacagactttagtagcactgattttctgtaccactagtatatagtaacgctatgactaaacgtactgatgtatataatgagaggatagctgagagcattaataactaatgtaatagaactcggtggtgacattgctataataagagttgtgtgcag

SEQ ID NO: 597972 - DNA, 963 bp, Homo sapiens
gtggtgtctgtgtctttgttgtgtcttgtttctttttttgttggtctccttgttctgacggcttctttgtgtctctcgcgctttgggtccgtgtactccccgttcctaccgtgcggtccgatcctatgttggtttgtcgctcttgtccgttggtgtctgaccagttgtgttctatttcggcgttgtgtactctggtttccccttgcttctttagtctagcccctctttggctccgttcgtctatcactttcgttttctcctattaatttgctcgaccctcttaacgtctcttatctcacttgactcgtacggttccctcccctgcgctccttctgtggtctatgcgtcgtgtacagttacttccgtaatttcgtgggcgcctcactaagatgcccatgtctacgacttcactgacttccgttatggcgaaatatgagacgttgtcccgtactatatctcacttgcacactctgctatatgtaggctcccaggacacgccttgtacttttaagatctgaggcatgctcgtgcagagttctagatttggctttcagagttcatagactggtggcagtcttcaccttgaattcgtgtcaatgctcagggtaataaacctatagtagtcctaactcagtatatgctagttgagcatcaggcatgaattttctttccgtctggctgatcccagccctaaaggaagggtagacccgtgtcatttccagcctctaaaggaagggtagactccgtgtctttccagccgctaaaggaagggcagacccgtgtctttccatgcaccgagggccacgacgtcactatagcagggcacacgtggcttggtttaaaaaggtcatcttagatatatcttagtaaatgttaataaactattttgtttagatcttgaaatttataataaaaatactttacctactcctgatcaccaaaacctgatggtttaaagtgtgc

SEQ ID NO: 597973 - DNA, 353 bp, Homo sapiens
  misc_feature (353)..(353): n is a, c, g, or t
ccgccattgagatcccttggacgcctgatgaactaattggttccaagctgcgtgtaccaccaagctatggaggataggcacctcgaaacgtgacttcacactcaggaaccatcagagggtccggacatgaatcccccactgtactagctgtacgccattggcgccattggctccgcccccaaacttgcgtatggatgcattgcatgtcattgaaatcctcacagggacctgggaggggtataccaagccagacgttactgcttatagaaccacgacgactggttcgcacggcctgggtgagttctttgactgtgggccatgctgagatgagttcctgcgcttttctgggctgn

SEQ ID NO: 597974 - DNA, 362 bp, Homo sapiens
  misc_feature (20)..(20): n is a, c, g, or t
  misc_feature (36)..(37): n is a, c, g, or t
  misc_feature (57)..(57): n is a, c, g, or t
  misc_feature (62)..(62): n is a, c, g, or t
  misc_feature (64)..(64): n is a, c, g, or t
  misc_feature (250)..(250): n is a, c, g, or t
agagctggtggcatcttcanctggatacccactttnntagtctcaaatttaatatanttaanantagaacctctcctgctatcctaatccactcttcctcctgacttctgtatttctgttaatgaatcccaggctggagacctcagcgtcaccttgggcaacctcctgctcagaaacctttagcatcccctcaatgtgagcagaacacatgcccatgctccttatcttcatactcaaggccttccttgtngactcaaatgaggccgatttcctgacaaccctctaatccaggatttcttaacagtttaatggcttggactccatcaggagcctaatgaaacttatgggcacacattatggag

SEQ ID NO: 597975 - DNA, 132 bp, Homo sapiens
ggaaagcatggcccacaaggtccttaaggagaagagaagctgtttagtccgtccatggggagaaaggaaacaaataaatggcttacttcgatgaattattaacagacaaggggtgctgacacacaggagaga

SEQ ID NO: 597976 - DNA, 131 bp, Homo sapiens
cgggctacctagaggacccatttgagggctagtgtttaagctgtggtttataagcaaagctgtagtaaatgtaattattttagaaagatattatttgaaatcacttttgaagaattgcactatatgataat

SEQ ID NO: 597977 - DNA, 151 bp, Homo sapiens
tttgggagtgattggggggatggggtggaaaagggttagttggtattttcatggcctgattttttttgtttctattccttttaaatccctgtgtttgaatcgagggggaggggtggtaaccggaaataaagccctccgtttttccccccca

SEQ ID NO: 597978 - DNA, 1186 bp, Homo sapiens
gtgcgaagccggtggcgcgctttcttttacacgcgtgtggtcgttgctttttcgtggcaccccgcgggggcgccccctcttttgtgggatgcgttgctttgttcttgtttgtaagttcacctggatgtggttgtacagcacctcatgatgtggcggtgacacttcgtctgttggcacgtgtggcgattggctcctggggcttctatgggacccctcgcgttcgctcacgcggttttatttcgggcctctcgtgtcgggggcatccatcgtgttcgcgcctttcgtttagttatgccccgggtggggtgctgacttttgcgctgtattgggtccacgcacgcactctttgtgggttgaaccagggccacattcttttgcggtgtgagttctctccgcgctggtgtgcgccaaggttatttatcgcttgttgtggtggcgtttgtcgtgagagtatctttgtggacacgtgctggcaggtgccgcccccgggggggacccctctctgtgcgtgattccctcactgtcgcgctcgcgctctctggactgtgctcacaggctctgtccctgtgtccccctttgttatgtaggggttctcacaccgacgctgtgtttttggcaaaggtcactgtcccccacgaaatcttcatgcgcggtgggactattccccgtgtgttctctcatagaggaagagagggtctgctagatagagagtctccccttacgtatcactaccgcgcttcggacacatattggcacacaacgcgatgtttgtggcccggtaatcatgaatacaagggttcttgcactctgtgaagcacagatgggaataactcgcgagcgatctttgaataatgtcatataggtctaatcttgggtattatacaaaatatagaagactgagatatagtgcgagggcgatattaaagtgatattaccgcctctaagtgggatacacttttcacttatacataatctctcaaggtgtcttctagcagtcttggatcatgtaaaccgagagaaacgggggagttcctaggtgaatttaacagaacactggcgtctcagggcaaagtagttttttgttgtgacctcctttgatatatgtgttgatttttatggaccttaaattttcatgacattatcaagaaatactcttggtttttactccaaagaaaaaataaaaaat

SEQ ID NO: 597979 - DNA, 228 bp, Homo sapiens
cagcattttgggggtggcacccaaggattggaaaaagggggccccctttttttgcatggtgggccccggggcccttccgttggcttttccccaaaagacctttgcccgcttggggggttaacccccccctgtcaatgtttttttttttttgggggggggggggggcccctgttttttagccgcccccctgtcccccccccttaattaattccttgttccccccagcca

SEQ ID NO: 597980 - DNA, 491 bp, Homo sapiens
cactggacgatagtcgtcattactgtagctttactgtgtcttgaaattatataatatatagcctccagtttattcatttttatttattggttgagtcagagtctcgctcctgtgcctaggctggagtacaggggcacgatctcggttcactgcaacctccatctcctgggttcaagtgattctcctgcctcagcctcccaactagctggcactacagttgcacaccaccatgtctggctaatttttaaaaaaatatttttagtagagacagggtttcaccaacattggccaggccggtctcaaactcctggcttcaagtgatctatccaccttggactcccaaagtgccggggattacaggcgtgagccattgcacctatccctaatactgtttaaagagcacaaagtagtatcaggattacaaacattcttaatgttgttgcattctaaaatagtttcccacagaatattagtgcctactgggtggaaat

SEQ ID NO: 597981 - DNA, 650 bp, Homo sapiens
agtgtgcaggcaatcatttgctggattagaggaaaggtgccgcgtctgttgccatgagttctttaaaaactgcctatgaaagtgaaattagttcatcatgcttgcttccggtgtggcagccccctggcccgcagctgtgccaggcaccagtcctaagaggcatctatagactagtgcttatgtgggaccccaagcctcggcacagctccataccagctatcctgagctgcctcctgggggaccgtgctcttcagcttctaccagcaaggagggcagatacgggtgcgtgcgtggggcagaagacacacagacttctgagttcagggtctcccagatcttcactgggctctgacattcatggcctgtggcacctctgtgtgggcccgcttctgctgaggctccccatcctccaggccgcctgccagctccctggacaggagggccgcccgcacctgccgcagctcccgcttctccctgcgctcctccatctcctcgatgtcgccagcaaacagggctttcagtgggggaatcagcttgggcattgttggaaagtctccaaagcagaccttcatgtggtcacaggcaactcgcactttctcgctgaagttggggctgaagagggggaccttggcatagcgctggctgaagtg

SEQ ID NO: 597982 - DNA, 835 bp, Homo sapiens
  misc_feature (561)..(561): n is a, c, g, or t
  misc_feature (730)..(730): n is a, c, g, or t
  misc_feature (770)..(770): n is a, c, g, or t
  misc_feature (776)..(776): n is a, c, g, or t
  misc_feature (778)..(779): n is a, c, g, or t
  misc_feature (785)..(786): n is a, c, g, or t
  misc_feature (789)..(789): n is a, c, g, or t
  misc_feature (791)..(791): n is a, c, g, or t
ggcgagaagggcagaagggacaagagcctcttccgcctgagccccggaagggtgatgtggctgcggcatcgccggcctcgctatgtctgccattttcaattttcagagtctattgactgtaatcttgctgcttatatgtacctgtgcttatattcgatccttggcacccagcctcctggacagaaataaaatggattgtggggtatatttggaagtgtgccagaatgtggtgaacggaagagtccttatgttgcagtatgctgtatagtaatggccttcagcatcctcttcatacagtagctggggaaaatgccagaatgtagttgccatcagatttgatgtgtgaacaaggactgactgcagaaaataatggaaaggatgtttaacctcttttatctccgaacattgaatgagataaatttccagatgctgttctctattttaatgttatgtggaccaatgttctgtataaacaattaagatgtaaccatttaatagtctgtaacaatcaacctcagtactgtcactacaatattacattctgcaaatgttattcctgtngtatcagatacaaaattttagtgaggtatctctaaggcacatagtagaaaacaaaattggttaattactcaagttcctttcactgtgattgggaatgatttaatctttatagaatgagaaccttttgggactagcttttattaaaatggtcattggtgtggaagggtgnttaaattaatagtggtggtttctctgggccacctttggtnttcacngnnacctannttngnaatcttttgcagtttactttacgagttgggtaagagaaaaaaga

SEQ ID NO: 597983 - DNA, 474 bp, Homo sapiens
gtgatacaggtgtgagccacgcagccggccgtaaatgtttaatatttgttgttgttgttgttgtgagatggagtcttgctctgtctccaggctgagtgcagtggtgcatcttggtcactggaaacttcaactggctggttgaagcaattcttctggctcaggctcccaagtagctggggctacagtcgtgtgccacatggccggctaattttttgtatttttaggtagagacggggtttcaccatgctgggcaggctggtttcaaactcctgaactcgtgatcctcccggctcgggctcccaaaggtgctggtattacaagttttgagccaacgcgcccagcccaagatgtttaaatgtgtaagcgagtttcagcttatgtttttttgccccctttttaaaaatttatgtcctcaatttttttcttacaaatttttatttttggcactttctccatcctgaagaacagcatggg

SEQ ID NO: 597984 - DNA, 145 bp, Homo sapiens
gacggcttcaacggaactttagacaggctgctgatagaggggctggtgtttgagagtgccgtctctaagaaggggtctatttcctaaaccccagggagggagaaaacaacaaccattgacagagctgggagagccacattccagg

SEQ ID NO: 597985 - DNA, 993 bp, Homo sapiens
  misc_feature (561)..(561): n is a, c, g, or t
  misc_feature (729)..(729): n is a, c, g, or t
  misc_feature (774)..(774): n is a, c, g, or t
  misc_feature (783)..(783): n is a, c, g, or t
  misc_feature (806)..(806): n is a, c, g, or t
  misc_feature (808)..(808): n is a, c, g, or t
  misc_feature (811)..(811): n is a, c, g, or t
  misc_feature (824)..(825): n is a, c, g, or t
  misc_feature (832)..(832): n is a, c, g, or t
  misc_feature (852)..(852): n is a, c, g, or t
  misc_feature (857)..(857): n is a, c, g, or t
  misc_feature (873)..(873): n is a, c, g, or t
  misc_feature (875)..(875): n is a, c, g, or t
  misc_feature (879)..(879): n is a, c, g, or t
  misc_feature (888)..(890): n is a, c, g, or t
  misc_feature (919)..(919): n is a, c, g, or t
  misc_feature (929)..(929): n is a, c, g, or t
  misc_feature (964)..(964): n is a, c, g, or t
ggcgagaagggcagaagggacaagagcctcttccgcctgagccccggaagggtgatgtggctgcggcatcgccggcctcgctatgtctgccattttcaattttcagagtctattgactgtaatcttgctgcttatatgtacctgtgcttatattcgatccttggcacccagcctcctggacagaaataaaatggattgtggggtatatttggaagtgtgccagaatgtggtgaacggaagagtccttatgttgcagtatgctgtatagtaatggccttcagcatcctcttcatacagtagctggggaaaatgccagaatgtagttgccatcagatttgatgtgtgaacaaggactgactgcagaaaataatggaaaggatgtttaacctcttttatctccgaacattgaatgagataaatttccagatgctgttctctattttaatgttatgtggaccaatgttctgtataaacaattaagatgtaaccatttaatagtctgtaacaatcaacctcagtactgtcactacaatattacattctgcaaatgttattcctgtngtatcagatacaaaattttagtgaggtatctctaaggcacatagtagaaaacaaaattggttaattactcaagttcctttcactgtgattgggaatgatttaatctttatagaatgagaaccttttgggactagcttttattaaaatggtcattggtgttgataaggnttgcatttatatttaatagtgcttgcttttcctctgggcacaccnttttgatcntaaacagagtacctctactcttngnaanctctagtttatgnnaagtatntaaaatatttaaaacaagcntatgnagttcttaaggacgangntatntgagatgtnnnttaaaaatagtatttgggaaaatgttganagttaacatnagtggattaagactagccaatgacaaagtaggctntgaaacatcttttaagtatattttttttg

SEQ ID NO: 597986 - DNA, 899 bp, Homo sapiens
  misc_feature (625)..(625): n is a, c, g, or t
  misc_feature (794)..(794): n is a, c, g, or t
  misc_feature (834)..(834): n is a, c, g, or t
  misc_feature (840)..(840): n is a, c, g, or t
  misc_feature (842)..(843): n is a, c, g, or t
  misc_feature (849)..(850): n is a, c, g, or t
  misc_feature (853)..(853): n is a, c, g, or t
  misc_feature (855)..(855): n is a, c, g, or t
ggcgagaagggcagaagggacaagagcctcttccgcctgagccccggaagggtgatgtggctgcggcatcgccggcctcgctatgtctgccattttcaattttcagagtctattgactgtaatcttgctgcttatatgtacctgtgcttatattcgatccttggcacccagcctcctggacagaaataaaacgtgggtatgctactaatgatgtctaatcacccaaattagttcttacagatgtccaatatcgtctggattgtggggtatatttggaagtgtgccagaatgtggtgaacggaagagtccttatgttgcagtatgctgtatagtaatggccttcagcatcctcttcatacagtagctggggaaaatgccagaatgtagttgccatcagatttgatgtgtgaacaaggactgactgcagaaaataatggaaaggatgtttaacctcttttatctccgaacattgaatgagataaatttccagatgctgttctctattttaatgttatgtggaccaatgttctgtataaacaattaagatgtaaccatttaatagtctgtaacaatcaacctcagtactgtcactacaatattacattctgcaaatgttattcctgtngtatcagatacaaaattttagtgaggtatctctaaggcacatagtagaaaacaaaattggttaattactcaagttcctttcactgtgattgggaatgatttaatctttatagaatgagaaccttttgggactagcttttattaaaatggtcattggtgtggaagggtgnttaaattaatagtggtggtttctctgggccacctttggtnttcacngnnacctannttngnaatcttttgcagtttactttacgagttgggtaagagaaaaaaga

SEQ ID NO: 597987 - DNA, 215 bp, Homo sapiens
ctgcctatgaggggggggggataactgtgcgctttcgaagaatatcataacatatgctcgttctgtggctgtcaatgttataattaaggagattcgtagggagattagtatacagaggtagagtttccttcgtgatattggttcactggataagtggcgtttgcttgccatgattgtaaggggtaggattcccgtagttagtattaggagggggg

SEQ ID NO: 597988 - DNA, 394 bp, Homo sapiens
  misc_feature (228)..(228): n is a, c, g, or t
gggcacaggcccccacgtccgggccccctgcgacaacttccatcattccagagaaaagccactttaaaaacagctgaagtgaccttagcagaccagagattttatttttttaaagagaaatcagtttacctgtttttaaaaaaattaaatctagttcaccttgctcacctgcggtgacagggacagctcaggctcttggtgactgtgcagcgggagttcccgccctcnacacccggggcccagacccttcggggcccttgcctttgttgggcctgtttccggccttgggccttcaagttggccgcccgaacaagaactggcttccttggtccttaaaaaaacttcctttcctgaagccaacacacccacccggggtgtcctggggacccaaggg

SEQ ID NO: 597989 - DNA, 93 bp, Homo sapiens
acggccgtgtattactgtactgcccgagggtgggagctcccgcgacggtacttcgatctctggggccgtggcaccctggtcactgtctctcct

SEQ ID NO: 597990 - DNA, 940 bp, Homo sapiens
tgggaggccaaggcgggcagatcaggaggtcaggagttcgagagcatccgtggccaacatggtgaaaccccgtctctactaaaatatatagaaatgagctgggtgtggtggcaggagcgctgtaatccacgagcgtacacgaggaggctgaggcacgaagaatcacttgaagtcaggagatggaggtttcagtgatgccaagatcagatgagtgcactccgagtctgggaacagagtgagactcctatcgtcaagaaggtatagaacttattgctgaaggaaggggtcgtccttgtgaaatggggggaagaaaattgtttaattttggaggctggaggggtctggtgatgttacgatattagaggcggtggctcagagaggtaggtacaagtagtaaggcggtaagtttgaatgcctaatgactatgcttttagggggggggaagaaaaaatggtaccatatctcgagcgggggaatctaaatagcagactgagtggttaaggggaatggtgagtccaagtaagatagtttaacccaatttgttgggggttgaagcaagaaattggttgtgggagaggaaggggcttcgacggagtacccatttagatactgttaactattaactttgacctcaataaggtttttgggtagggggtaacgctggagatggcatagtgtggtggagcagggggggtaactgtgcaagtgtgcgcacgacaattacatttcggaaagggacactcttcccacaggttcttccacgtcgagcagatgcttgggattggcccctgacaatttaacgttttaattaccctcggccatggtggttgcggcaaggaagtgggttttttagagccgcgaaaaaaagttaattgggggagcaagggttggggcgccagaataacggggcagggagatagggggacacgacaattataag

SEQ ID NO: 597991 - DNA, 192 bp, Homo sapiens
  misc_feature (11)..(11): n is a, c, g, or t
  misc_feature (142)..(142): n is a, c, g, or t
  misc_feature (148)..(148): n is a, c, g, or t
  misc_feature (163)..(163): n is a, c, g, or t
cccgggctgcnggaattcggcacgagtggtcatataactgcacagctgaagatgaaaggggaaaataaaggaaatgaaccattaaaaatggatctacagccatatattctgccgttactcaaaggcttaatatatggctgtngatccntttttaatggttcanttcctttatggtcatataactgcacagct

SEQ ID NO: 597992 - DNA, 363 bp, Homo sapiens
  misc_feature (106)..(106): n is a, c, g, or t
gcactgactgcttccgacctgcatgaggcgtaggagcggccctgcgcgttgtcagcggcagctgctgctgtagtagatttgtctccactcagtgacgtgggatttntctgtcttccttttggctttgttttaaactgctttagatattactgctagcgttgtgacttcctagttcctatgttgttagtgagccagcaccagtgggacctactagaaaaaggaactggcatgcacacgtgcccagcaggaaaagcttcgtcttcacgtcggctgctgcatccagaagaggcctggagctcacgccgtcgacgtgctctcaggcgttctgttccgggcgaggcttgtgctgcaaggaagggcaca

SEQ ID NO: 597993 - DNA, 269 bp, Homo sapiens
  misc_feature (44)..(45): n is a, c, g, or t
atcagctcggtacctccgtacgtggcttcaagctatcctcctgnncctcagcctggtgacagagcgagactctgtctcaaaaaaaaaaaaaaaaaaagattattcatacccgggaaatgcaattggggaaaatatcccaggtggtgtatttacttctatcacacaatttcagctgcccccctaagggtcttcaaaaaatttatcttttgtggactatcccaaaatgattcttacccatttcccaaattggtttctctgagttgaaccca

SEQ ID NO: 597994 - DNA, 638 bp, Homo sapiens
atctgttcccttccccataaacttctagaggctaggaatccctaactttctggaaatgcagcgcagcaagtcccagcctcattttcctagccctcactcaagatggagttgctctggtctgaatgcctctgacagctgctttggaggcctgtcacatttgtgcatccccgtggagggctaatagaagggcccgtgtggaagagctgtggagaaacccctgcctgaagctcctgccctgggcggggaggtgtagcgtgctgcccgcctgcggttggtgaggtcatcgaaacctcctcagttagcgttcagcaacttctccttttcaggtgcctgcaactggtatttacaaaagctaaacacccttcatcaccaaggctaccatttaccacatgactgtcagaagagaaaaatataaataatcctctcaaaattgaagtgacaaatatgcagacaattccaggccaggccctggaaaatgtattggacagacactaggctggcaagggtgacattgtctataaagaccttgcattttccacttgagcccaggagtccagggctgcagtgagctatgatcgcaccactgcactccagcctgggcaagagagtgagaccctgttgcaaaaaataaagaaaag

SEQ ID NO: 597995 - DNA, 166 bp, Homo sapiens
tgaacaggaggagtgcaggatggtggcgcacccaacaaggacccaacgccgggaagaggcagaggatgctgcgaatagagaagcctccttgccccttgacatcagatgtttcttcgctctacaagagtcgactgtcatacgtcacggacgtgccatgacggtggag

SEQ ID NO: 597996 - DNA, 119 bp, Homo sapiens
cccaactatatgtgtaccaccacacttggcttgataggttttttaaaatgcctgtgttaacgagaactgttttagtgtgtcagtttgaggttttaacatggatgacatctgtagaactt

SEQ ID NO: 597997 - DNA, 297 bp, Homo sapiens
accgcgtggatcttgtgctgggcatgggggcaggcgcctgtaagcccagttacttgggaggctgaagcaggagaatcacttgaacccagaaggaggaggttgcagtgagccgagaccgcgccactgcactctttccccgggcgacaatgtgagactctgtctcaaaaaaaaaaaaaaaaaaaaaaaatttcccttttaaggaaacaccttttacggggtactttttttggaaagggcgggcctttaaacacattactccattagccggggcggccaaaagaagcgcccaataaacgg

SEQ ID NO: 597998 - DNA, 392 bp, Homo sapiens
gacgaacagcctcagtcaggtctttcgtgaggtattccagaagaaggcattgtcatcataggagatgagagctccatgcatgttactgccccaaagaccctccagtgagacaagatgtagaggtggaaggcagtgatattcattatcttgaccctggataggcctagcctaatgtgtgtgtttgtgtctcactttttaacaaaatttaaaaattgaaaaaatgaaatttgaaactagaataaggtttatagatcaggcacagtgtaatcccagcactttggtcaaggtgggaggattgcttgagtccaggagtttgagaccagctcgggcaacatagggagaccttgtctctacaaaaaataaaaaagttagccaggggtgtggtggtacac

SEQ ID NO: 597999 - DNA, 176 bp, Homo sapiens
cctacctctttctggtccacgccagcttgtcgttgtggcggcgcctagttttctcagtctactcgtgtgatgctgagaggcaagagaatggcgtgaacccgggaggtggagtttgcagtgagccgagattgcaccactgcactccagcctgggcgaggagagtgagactctatctc

SEQ ID NO: 598000 - DNA, 395 bp, Homo sapiens
ggttgggttttttaccccgttccccccgaggagaagtctcagtggggccatccaaaaactggaaaaagaaaacgggtggccggagatttcccctacggatgggaccaagaaactgatgagaacggccaagtgttttttgttgaggcagaaaaaaaaatgctggcgtatgctgccttctctttttgcttcggctccctaaaagggaagggccctttttcctgtaatcccgtggcttgcttccccttgtcaatcccttagaagattccccctccttcccctgcccccttgttttgtatgcgataaatatcagggggcccacccgttgggggcccctcccggtttccccattttgggggtaggggccccccccctgggcccagctgttttttccttta

SEQ ID NO: 598001 - DNA, 114 bp, Homo sapiens
tacgatgaggactcaacgtctggttttcactgagccccacagcagtgggggagaagcaagggttgggccagtgtccctttccccagtgacacctcagccttggcagccctgatg

SEQ ID NO: 598002 - DNA, 1040 bp, Homo sapiens
gagaagggagaggggaaagaaaggaagaaaggaatgagagaaagggaaagggatagaaaggaagaaaggaactgaaagaaagggaaagagggaaggaaagaaagaaacgagaaagaaagagaacggaacggaaacgaggaaggaaaaggaaggaaggaaggaaatattttgtagacgcagtgatatggttttgctgtgtccccacccaaatctcaaattgcagctcccaagaattcccacgtgtcatgggacttacccagtgggaggtaactgaatcacagggcaggtctttcccttgctgttcacacaatagtgaagacgtctcatgagatcagatggttttataaaggggactttccccttttctcttgcttgccaccatggaagacatgactttgctcctcctttgccttccgccatgattgcgaggtctcctcagccatgtggaactgtgagtccgttaaacctctttcctttatcttttacccagtctcgggctgggcgcggtgactcatgcctgtcatcccagcactttgagaggccgaggcaggaggatcacctgaggtccgggagtacaagaccagcctgcccaacgtggagaaaccctgtctgtactaaaaaatactaaactagcagggcgtgctggcacgtggctggtaatcccagctactcggggaggctgaggcagaagaatcgatgaacccggaagacggaggttgcagtgagccgagaaggaaccaaggcaaaccaggccgggtgacacagaagccaaagccacaacgcaacaatcaaacagacaagcaaagaaccaaacacaggaaaggaataaattaaaacgcacgttgaaacaaattataataaccggaatattgtatgttgcccgaagagagacaaaacttgagataaataatgatccccacaaacaccacagagggaatagagtgaaccagaccagcacaataagaagaacagcaaataacaacacatcaaatcataatatgagaaaaaaaatacagaataataaatcaaacaaggcagga

SEQ ID NO: 598003 - DNA, 328 bp, Homo sapiens
acatctgacatctatctctatctctgcttcgtgggcctcactgggggctgaggctgatccaagttatatactctgtaaaccagccacagctctaaaatacgcctaagcattgcttccgacaacggtttcgtagactgcattacgccctctatacctattgccagaatctatggtagtgttcattctcgtaccaataaccttgaaatgcttgatgtgctcttcaagccctgggtagcactgtggtttgaatcacttcctcttatcagccccgcataagccaagtatcatgtgcttggctacagcagatgctgcgtatcctctatagtct

SEQ ID NO: 598004 - DNA, 188 bp, Homo sapiens
  misc_feature (116)..(116): n is a, c, g, or t
  misc_feature (120)..(120): n is a, c, g, or t
tgataggataggtgtataacataggtttctcgtgtgatgagggtttatgtttgtaatgtggtgcgtgagtgagcccattgtgttgtggtaactatgtagagggggagtactaaggngccntgtgactagtatgttgagtcctgtaagtaggagagtgatatctgatcaggagaaacgtgctactagca

SEQ ID NO: 598005 - DNA, 266 bp, Homo sapiens
  misc_feature (10)..(10): n is a, c, g, or t
  misc_feature (12)..(13): n is a, c, g, or t
  misc_feature (20)..(20): n is a, c, g, or t
tccagtctgngnnaatggtngatctccactcaccacaacctccgcctcctgggttcaagcgattctcccgcctcagccccccgagcagctgggactacgagcaggcgccactactaattttgtattttcagtagggacgggttcccccacgttggccaggctgaggcagaagaatcgcttgaacccgggaggcggaggctgcagtgagccgagatcgcaccactgcactccagcctgggcaacagagcaagactacatcacaaaaa

SEQ ID NO: 598006 - DNA, 141 bp, Homo sapiens
  misc_feature (17)..(17): n is a, c, g, or t
  misc_feature (38)..(38): n is a, c, g, or t
  misc_feature (99)..(99): n is a, c, g, or t
  misc_feature (141)..(141): n is a, c, g, or t
ttttataaatggaaggnaaaccctaaggagagtctggntttatggtttagctttattttttatatatggtccttcttgagaatctgatgaggagacatnctgctggctctttcagatgtgcctgcctgtgtacacacttan

SEQ ID NO: 598007 - DNA, 858 bp, Homo sapiens
  misc_feature (15)..(15): n is a, c, g, or t
ccatgagcaaaatanaatatgaacctaaatagaatgggctcaaacagtcataataaactcctttggttattttcagaaaatctatattcacaggtggcctgtgttaataggtgaattcattgtattttggtgtggctatttgtataacaaaacatgactaaatatgaaagatgtgtatgtctttttctttaccagatcttgcgccagtttttaagcaagcaaattatgttcatgtagtaaaattttaatctgtattgggaatagaggtgggaatagtagtattctgtttactgtggatttggagtaaaatctagaaatgctacttaatcagcatattgtaagcagaaattactttttgtcttttttacaaaaaatggacatgagagctcactccgttgcccaggctggtctcaaactcctgggctcaagcgaccctcccacgttagccttccgagcagctgagaacagaggcacgtgcaattgtgcccagctttagaaatcactttttattttaattcttatttgtaacatttcataaggtattaggctacttttcccagtcactaccgtttatacaatttagttttaatttcttaaaattttatttgaaattgtagaatgtcttaatcattcagaatgtgaattgtcatggaggtgtcagagatgcaatttaatttctcctgatagcagtatatcttgaaaatattttgcttaaagatttatttatccttgctgtcaatttgtttcttataatttgcctcatagaaacattcattcaaaacagagtgctgaaaccaaaatggaatatacaattaaaaccaaataatttttttcctgctaactacttcccagccccca

SEQ ID NO: 598008 - DNA, 377 bp, Homo sapiens
gacagagtggatgcacagtctaattgtagcgatatgtatatgaactctacaagctatccctagcggcccgcatacagtggtcgagagactatatactccattgcatccctgctgatccataacgtcacccagaatgacacaggattctataccctacaagtcataaagtccgatcttgtgcctgaagaagctgcccgatcagtcccctgtatgcccggagctgtccgagccctccgtctccagcgtcaaggtcccacccctctgttgtgactccggcagtgctttggccttcacctgtgaacctgaggttcagaacacgacctagcttttcgtgggtctatccgctgagcctcccggtcagtccctcgctgcagctg

SEQ ID NO: 598009 - DNA, 174 bp, Homo sapiens
gtacacgacagcatgctatcacctcccctgttggacttgggagaggactgggccattctcctcagagagaagggggtgccttttaggatggcatgggacttcctgtaacaacgcatctcatatttggaatgactattaaaaaaacaccaatgtgcaatcaaagtcctcggccta

SEQ ID NO: 598010 - DNA, 217 bp, Homo sapiens
  misc_feature (110)..(110): n is a, c, g, or t
  misc_feature (158)..(158): n is a, c, g, or t
  misc_feature (167)..(167): n is a, c, g, or t
  misc_feature (187)..(187): n is a, c, g, or t
tagcaatgtattaattttgtacggccttgcaattttggtcttttgttatattttataatacacatattagtaccactctactgtttcaagttaatctagtaatagagctncatatatttgtataactgctataccactgaactgaatttattttacancagtgtagnttcttgaaagttaacgtganaatatccaaaagcagttttctagaagtgtc

SEQ ID NO: 598011 - DNA, 243 bp, Homo sapiens
aggaaactgccattgatgtggaaaaaaaagagccgggaaaagcttctgaaaccaaacaagggactgtaaaaattgcagcacaagcagcagctaagaaggatgaaaagaaggaagattccaagaaaacaaaaaaacctgcagaagaacaacccaagggaaaaagaaaagaaagaaaaacatgtggaaccagcaaagtcaccaaagaaagaacactcagttccaagtgacaaacaagtaaaagca

SEQ ID NO: 598012 - DNA, 236 bp, Homo sapiens
taatggctgttacaaatggctgtactaaatggctgtactaaatggtgttacctaaatggctgtacctaaatggatgtacctaaatgagtgtacctaaatggctgttacctaaatggatgttacctaaatggctgttacctaaatggctgttacctaaatggctgttacctaaatggctgtaacctacttggctgtacctaaatggctggtacctaaatggcaactcgtgatcgcca

SEQ ID NO: 598013 - DNA, 218 bp, Homo sapiens
  misc_feature (79)..(79): n is a, c, g, or t
tgaccttacctggtcgggtgtaataggaatagtgttaccagtggactgccagccaggtgaagaaaggatcagtgtatanccaggacagcaagaatggatactgatgtatggaggtaaagctgtgaaagtaggagagcatcgggattgagtatgcagagtgagttacgggttgagtggtccgtgaactaagaaccactatgaccatgcctgcacctgac

SEQ ID NO: 598014 - DNA, 104 bp, Homo sapiens
aaaaaaatgtttagggttttttcgttttaaattttagattttattttagggctttgtaattaattggggtttaaattgataaaaatgtggaagttaacccccca

SEQ ID NO: 598015 - DNA, 289 bp, Homo sapiens
cgacatccccaggtgataacaggaccctgctcctcttgctacagcccgtttgggagcacccccacccaggcacgccacgccagccaggctcgcctctgaccagatagctagaaggagcaggtagagcaggaagtggagagccagtgacccaggttaccccaggtagcagccttggttaggggtcaatccagtactactccaatactatccagtacagagtggcacatctatgaggtcacggccaggtgcggggcggggtatcttgcggactgccctcctgggctaacgc

SEQ ID NO: 598016 - DNA, 405 bp, Homo sapiens
acaggttaaggcgcgtactgcgtattaggcgcgtactgcgtattagtgcgcgttctgcgtattaggcgcgtatctgcgtattaggcgcgtactagcgtataaggcgcgtactgcgtattaagcgcgtactgcgtggtcaccaaccgatacgaccagttctatgacgacgaatcggacccctacgaggatgctgaaggcagcagagaacaagaaaaaagaagccggcgatgggcggcgttgggggacctggggccaagagcgcagttcaggccgcgaaccaaatcaactccaacgcggaagtgcaaacagttgcgcaaggagtcccaagaaagactgcaagaccccgttgacccccagcgtaggagtgtttgacaagaaagacggcgacgccagacgaccgatggg

SEQ ID NO: 598017 - DNA, 772 bp, Homo sapiens
gcttttttttttttctcttgggcaaaatggcggagtacgacttgactactcgcatcgcgcacttttgggatcggcatctagtcttcccgcttcttgaattctctctgtaaaggagatatataatgaaaaggaatttttacaaggtaaattgggaccttcttagtgatcccaacatggtagactttgctatggttgtttacaaaacacctttatctctgatgatatcctcatgcttgtgagagagaaaagacccacaggtggttgcacacctgaaacagcttcaggcagaaacagacaccaaatgtgtgaagcatgctttgaagactccagaaactacaaggcaatatgcagtcacccagggatggtaggatgctctttgactacctggcggacaagctatggtttaaggcaggatattatttagatacatctctacagattatgcaaaatcccagtacgatttgtgggaattactcaggagcagcagaatatcttattttctagagtgctggtcccagcaaccagatagaattgctttacagtgcacccctgggggaaacgcgtgccctctgaaattcttatgcagacatgggcgatgccgtcctggaagcccttacacggttaacacgagcccctggatactatttctgcgagttcccccctccgtctccttcgcaggagaactgctctccacggtctcctgttgtttcttcaatccccaagtcgcgtaattttggcctcttttcggcccatttttgctccactgttccct

SEQ ID NO: 598018 - DNA, 91 bp, Homo sapiens
  misc_feature (37)..(37): n is a, c, g, or t
  misc_feature (81)..(81): n is a, c, g, or t
attcggaacgaggaaggacttaaaagtggaaacgtgnatttcaaatatgggagagataaaaagaatttgaaagagttagtngagtatagaa

SEQ ID NO: 598019 - DNA, 807 bp, Homo sapiens
  misc_feature (512)..(512): n is a, c, g, or t
  misc_feature (523)..(523): n is a, c, g, or t
  misc_feature (526)..(526): n is a, c, g, or t
  misc_feature (539)..(539): n is a, c, g, or t
  misc_feature (555)..(555): n is a, c, g, or t
  misc_feature (618)..(618): n is a, c, g, or t
  misc_feature (632)..(632): n is a, c, g, or t
  misc_feature (640)..(640): n is a, c, g, or t
  misc_feature (777)..(777): n is a, c, g, or t
cggtacgcttagtgttggcattgtcaaactccgaatatattgtagcctagtaaattgaggtagaaatcatgcacttgtcacatctaagactttgtataccgtccacgactaccatacactcccctcatcactaatcgatatctcatcaaacagctgctgcaacgagcaactatacatgtcatatctagtacctagaataaatcaacccattagagcggtacacattttagtttttattccggcttaaactcacgtggtccgatcttagatcatcttcaacctctgcacaccaagcaatcttcatctttacctcctatgttgctgccgcaccagatgcaatatccaaagggtcctgtagtccctcattcatttgaacctccccgcaaaatacacaccaagctttaaccagtgggccttaccctgtaaatccagtctaagcaaacagtggatctttggaatccagcatgacactagcaataactacacaaggttgcatcaggtacaattccagngtcaaatccantcnagtcctgccctgnaagtctgagaaagggntgaagcttgttcaagttgcctttacagcaaagggactgaaggatgagatgtcaaaggcgtggnactggaaaaaaagnagaagagntggttaacactggaattgaaggcaatctggtggtggcatctgtcactcactcactgccagggtcaattcatctgatagccaagtgaggttgtaacatgcacctactgaaacacaccagtactgagaaaagaagactnaggattaattggcttcacctagaccaatta

SEQ ID NO: 598020 - DNA, 256 bp, Homo sapiens
gaaagtccctgatgcaggtcagctcattgaggcagatgccttgctgggctgggggttttccaagcccttagctggtcctgataggatggtgcaagctcttcctttgctcatgagctcctgattagtggcatttgagcagctgattaacctgcacatgcttgctgtattactcctgtccacagcctttcctactgtattgaccttgagtggagaggtctgccttgtattaatgaggtagctatagtcgcagcccaag

SEQ ID NO: 598021 - DNA, 377 bp, Homo sapiens
  misc_feature (204)..(204): n is a, c, g, or t
  misc_feature (214)..(214): n is a, c, g, or t
  misc_feature (222)..(222): n is a, c, g, or t
  misc_feature (228)..(228): n is a, c, g, or t
  misc_feature (232)..(232): n is a, c, g, or t
  misc_feature (236)..(236): n is a, c, g, or t
  misc_feature (256)..(256): n is a, c, g, or t
  misc_feature (297)..(297): n is a, c, g, or t
  misc_feature (362)..(362): n is a, c, g, or t
gctcccatggttctgtgacagagatcatgctctgcactccggcctggggacagacagtacttggggaggcaagcacaggaaaatcccttgcaggtgcaggatgttcaaggccagcctgggcaacatagcaaggcccatctctgtaatcccagctactcaagaggctgaggcaggagaatcgcttgaacctgggaggcagaggcngcagtgagcngagatcgnaccacngcantccngcctgggtacagagtgagantctgcctcaacaacaacaataaaaaactttgcagtccccanaaaaaccatgaagccctgagagtatgaaaagcttcctgacattgaggtcactgtggaagatcagnggatcagagatctct

SEQ ID NO: 598022 - DNA, 171 bp, Homo sapiens
  misc_feature (91)..(91): n is a, c, g, or t
agatgaggatggtgcatagattttctttctggcctggtctgggggtggtgccatcccttctgctcacattttctcaccgtgacctgagtcnctggtcagacctgcagcaagtggggtgggaaatgtaatctgactgtgtgcctcgcaggaagaggagaatgtggatttggt

SEQ ID NO: 598023 - DNA, 269 bp, Homo sapiens
ctcattcagcatgcatagaaggtgtcggtgtccaggatccacttgcagtgaaccttcctatggttctcaggagtaggggcagtcttaccacagatggctcaagagcactcgctgggatccacgtgtcatatgtgtcaggagactagtccccagggctaccaagaatctgcttatccctcaacaagagtggtcgtccccatgcctcttctatcatatgacttcccgcagtgacaggatacacaacattgggaggcattgtcctaatcctc

SEQ ID NO: 598024 - DNA, 895 bp, Homo sapiens
aaataaatcttgatgcgtttcaattcagctttcctcccaatgtcagaatcttcaccattacattatccacattcttcgagcacccagatagcaacaggtagctcattactctgagggcagtcttctgttccattgtgacataactctagatgataaaaatgttaatcttcatcaagaaatgacttttacttcctaaaataccaagtaagtttattcccctcctataagacaactagcatatattttcacatttctgctgtctgtgtttaagttcaatcaaccccttatcactagctttattcttatttaaaccattcatgagagcatgtaagtgttaaacaatgatgagatattttcaggcttataaaataatgaaatataaaattaattatctacatagataaatagaaattgatgaaaatttctatgtatattattttcagtaactgttaatgtcttcctataacagcaataaatttaaattcaacatatttttaaatttatttcagatatgaagatattatataaaactctacaaagtaatatgaatttaaaaaaactagcagcaaaccatattaaccatattgtgtgttttagagtaaagctataacaaaagtacaggggattaagtgtatgattttaatagctgcttttactctggggtggttatagcaatggcgccttagggcaaccccgttcacatacacagtatccagctggggtggttactacctagggaagctgtgaactttaaatggcaggacagggatacagatgtaaaatggtaattgactatgcttgaaataattggaacttattgcacatattggctatgaattaattcaaggtcatactaaataaggatttaatgtatgaataatgataatatggggag

SEQ ID NO: 598025 - DNA, 110 bp, Homo sapiens
tcgcgatgaacggtacggtggcgctgtcatcatgcagttccatcggcgaggctgatctgggaggcgcgggcgccaagctcggtggcgagctgggccacgatacgggcatt

SEQ ID NO: 598026 - DNA, 223 bp, Homo sapiens
gagcgatcagaggacacaggaagtgagtgatgaccagatacacgagatgacttaaaacttaatgatctcgggaatatctttgacctgtcggtctgtagtttccaagttcgagtatgctgagcagaatcaccatggtgttgctgatgcaaatgtcgaggatgcctcctttgctgctgttcttgtttgaacttctacccagcatggaggaacagtcgctgaaaag

SEQ ID NO: 598027 - DNA, 92 bp, Homo sapiens
tgcgctgttctatttctccttcggccgccgccgccactgctgcacacagctggtgtcggtgccgcgcttttacccccttctgtcgtcttctc

SEQ ID NO: 598028 - DNA, 610 bp, Homo sapiens
gcattcctttcgctccgcaccctcaacctcggaagattatcgtggccgactcgtcctttgtaggcgaacaccacccgccggcggtgctatgtggtagattagaaaagatagcttcgcccccccctacatgccccccccgccagggaaaaaagatgtctttgaaagacgtcccccttcgcctagaaattctgatataaacatgggtggagggaacactccgcgcgagagtgtgctatattgtaggagaacataaattttagtgatcaaaggaatgaatctagtgtactttacaccacacctgtatattccacaagaacaaagagggctcgtggtgcaacaatatacctcgcggcgtacacataagagtgcacccctgcggtgttctatatatcaaagtccacatcttcaattttcgttcccggcgagctggttgtgtgggttacaccgcgccccgcgctgattactcccgcgcccacttgtgaggcgagcagggtacgcacacgagtcgttttttttttagtcacccacggggttgtgtggcagcccgccgcgcggggggtcaccgacccgctaaatctcccctctgtcccaacaatagatacaagaaatc

SEQ ID NO: 598029 - DNA, 262 bp, Homo sapiens
agagaagaaaaaagaagaggggaggggaagaagaaacccggaaaaaggagaaggaagaagaagaagaaaagaaggggaagaagaaagaggaaaaaagagaaaagaaaagaagaaagggaagaagaaagaaaaaaaagaagaaaaggggaagaaaagaaaaaaaaaaggggaagaagaaaagaaaaaaaaagaagaaagaggaagaagaaaggggggggaaagaagaaagaaagaggaaagaagaaagaagaagaagagaaga

SEQ ID NO: 598030 - DNA, 107 bp, Homo sapiens
  misc_feature (39)..(39): n is a, c, g, or t
cccgctcccgctggcaggtccacatccagttcctgatcngcaccattctgagcagcttcccaaactactagcttgtcccacacacatctgtagatgtagaatctgaa

SEQ ID NO: 598031 - DNA, 471 bp, Homo sapiens
ctttttggggtctttgctcatctagtcctgatttgcaagacagagaaactgccatgtaagtagatactccagctgaacaatttcttcagccttctacattctctacaatgtcagctcagtctcattcgacatcattttccaaaggaaggccttaattcaactctttggctattttctcaagacagtgaacaaagccagcctgtggaggcatctggccaccacacacatgatcagtttggtgaggataagtatgctgtggttcatctaatgatttttgatagtgaaaatttctttactggctattttgaaaggtactaaatcacatcaacttcttgttggaataaatgatcaaaatgacatgtaatatatggttatgtaacttaaacacaaaaataattatgtcttacttgcatgaattttaacaattagcaggaatcttcaatttatataaaacaattgttttaaaagcaa

SEQ ID NO: 598032 - DNA, 334 bp, Homo sapiens
  misc_feature (91)..(91): n is a, c, g, or t
  misc_feature (136)..(136): n is a, c, g, or t
agattcttatacaaagtgtggcaaatataaaacttgcttgaaaatatggaaattaaatttttaagagagttaatagtacccctcccttaangggctttttttatttttactttttattttttatatacttagcccngctctgtctcccaggctggagtacagtggtgtgatcttggctcactgcaagctccgccttccaggttcacgccattctcccgcctcagcctcccgagtagctgggactacaggcgcccgctaccgcacccgtctaatttttttgtatttttggtagggacgggatttcaccatgttggccaggatggtctcaatctcc

SEQ ID NO: 598033 - DNA, 284 bp, Homo sapiens
  misc_feature (14)..(14): n is a, c, g, or t
  misc_feature (22)..(22): n is a, c, g, or t
  misc_feature (142)..(142): n is a, c, g, or t
  misc_feature (205)..(205): n is a, c, g, or t
taaagagtacacgnctcagcanagtggctcccacttataatcacagcattttcagaggccaaggagggaggatcacttgaggccaggagttccagatcagcctgggtaacatagtgaggctctacctctgccacccagctantatatatattagctggcatgcacctgtaatcccagctatttgagaagctgagatggaggatcncttgaacccaagagttcgaggctgcagtgagctatgattgccccagcctgggcaacagagggagacgctgtccccactc

SEQ ID NO: 598034 - DNA, 115 bp, Homo sapiens
tgccagaaatacaacggcgacaagatgatctgccgcaaggtgctatgctcgccttcaccctcgtgctgtcaacggccgcaaggaagaagtgtggtcacaccagcaacctgcgtcc

SEQ ID NO: 598035 - DNA, 206 bp, Homo sapiens
cagctgaatagtagtctgcgtccctgtacgcataatgtgaggaggtggagagaccagcccacccccgtgtacactgtgacccctgttcccatgctagacctagtagtatactaccccagtcatctttcctgttccagagagatggggctggatgtctccatactctgtctcaactttatgtgcactgagctgcaacttcttgagtt

SEQ ID NO: 598036 - DNA, 137 bp, Homo sapiens
tcgatgaaggatatctggttccgcgctaggtatcctgctctctcagggtgtgcccggggttcttctctagggggccccggtgacaaaccaagccgccccccctcgaaagggcaaactatatgttcagaataaaaaga

SEQ ID NO: 598037 - DNA, 190 bp, Homo sapiens
ggtcgatctagaggtcccgaagcacagaggagggagagagagagagagagagagagagagacagacagagagacagagacagacacagagagacggagagacagagagagagagagagaaagagacaggagaaagaagaactccgggtgggtcccattcctttaaaaggtcgcctcctctgtgctgtcca

SEQ ID NO: 598038 - DNA, 146 bp, Homo sapiens
acgcaacgatttttcctaaagatacactaaaatgaaaatctctaagagaaagatgtcttcttcaggacgtgaaaggggtactatatggggtataacagaactcgtatgtacgctgcgctgtgaccttatgtggacgattctgcctg

SEQ ID NO: 598039 - DNA, 268 bp, Homo sapiens
gtagtagctgtatttaaaaaaaaaaaaaaaaaaaggtttgaacaattatagaatcccattacccagagatagaggggagtggtgaataaaactttctgggtgaattcttccagatatctctctatgcatatgtatacacaagcaattttgggaagaaaagatactttataagggataacgcctgaaaaccggcaaggattggcaatggtgggagaatggaagggcaatgatggtgggcagaagaaggggccaccacaattctgggtgg

SEQ ID NO: 598040 - DNA, 229 bp, Homo sapiens
cataagcatgtgaatacagcagtgagcaaaacaaagttcattgccttccttcacgggcttatatttagtggggatagggagaagacagtcaacaaataggtcgaatttatagatcgtcagaagatgtttagttttatggaataaatatttgccattcaagggacgggaagggctgggttggattgttttaagtggggccattcagagaatggcctcagtgagtctgaca

SEQ ID NO: 598041 - DNA, 514 bp, Homo sapiens
ttccgaggactttaccaaattaacctaaataaaggcaccggattgcttgagtaggacaacatggagccttcctgtggcaggagaagaaacaaagcgctattatactaaggtcaagagaagtgtcagcctcacctgatatatattaataatgaggacttgcctcaactccctctttctggagtgaagcatccgaaggaatgcttgaagtacccctgggcttctcttaacatttaagcaagctgtttttatagcagctcttaataataaagcccaaatctcaagcggtgcttgaaggggagggaaagggggaaagcgggcaaccacttttccctagcttttcccagaagcctgttacaagcaaggtctccccacaagcaacttctctgccacatcgccaccccgtgccttttgatctatgcacagacccttcacccctcacctcgatgcagccagtagcttggatccttgtgggcttgatccataatcggtttccaggttacgatggtgtcaaggt

SEQ ID NO: 598042 - DNA, 265 bp, Homo sapiens
gggcaccgtattgagagtgcacacggctattgggagtgcacagttacaacgtacaagtgaaatgaactatgattcgcattgttaaggctccaatctgccggtttatatttattgtgaaacgacagaggaaattattcagcagacttaagaaagaaagtatgttcattgatttctatgaagtttctccctagaatttaatgcacaaaatgcgtcactccaaagggagagattccatgcatattaatagagtaaaacagcattaggg

SEQ ID NO: 598043 - DNA, 334 bp, Homo sapiens
acaggtcaacgccagcctgggcgacacagtaagaacctgtctctacaaaaacaaaaacaaaaaagtgtagccgggcatggcgacgagcacctgtggtcccagctactcaggaggctgacgcaggacgatcgcctgagcctggaagttggaactgcagtgagccataatcacaccactctactccagcctgggtgacagagtgagaccgcatcttaaaaaaaaaagaaaaaaaaagggccattgtgattaatgaaaacaaacattgcctggggataaggaaagtaagaagtaggattgttctcagattagggacccaggagataaaggagtaaca

SEQ ID NO: 598044 - DNA, 81 bp, Homo sapiens
  misc_feature (21)..(21): n is a, c, g, or t
  misc_feature (63)..(63): n is a, c, g, or t
  misc_feature (73)..(73): n is a, c, g, or t
caattccgatatcaatgtatnagcatgcaataaataagcttatctttctgaattattttagtnggcattttangccaaaaa

SEQ ID NO: 598045 - DNA, 787 bp, Homo sapiens
agcggagcggaagcaccgccattggccggtgcgtgcgggtggcaggcaagagcctcctggcacagaagggactcgaggcaggtgacgcctattggatcccagaggtcatcccaggtccatgacagtggtaccgacatttcgtatctcaatgtaagtgtctactggggatgacggacagactgatggccctgtgcaggagcgttcactcgacgagcccggttccagagtccataccagctggggagcacgtggtcgtatctggaggacccgtcgtggcgctcgtacgacagccggcgcatcttcgagcgtgcgaggtgatggacaactgtgaacgacactgattcctaatagctgtgttcctacctccgaggacagtctagtgatgcatgcggatggacatgctggcatactgcgcagtatcacatcatgccgaggagatcgggacacaagctggcacccgtggttccaggaggcacactagataccagacgacggtgacacactgcgagaccctgggagtcattattgtcctccgctgggcttggaggcaagatacgaggacctggtgcagggactagagcaggatgggcctcgccggagaagtggaaagctacccttgcaggagaaataagagttgaatatcgtgaaaaagatacgaggcttaggggaagaacgtaatccgcaccaacgtgggaaagtgttgcaggagttggacctggaatgagccaggccatcttaggtattagagaaaaagtgcaaggatcaggaggaaacaagtaatggggaa

SEQ ID NO: 598046 - DNA, 378 bp, Homo sapiens
cgcgaagtatggagggctctagacacactatcattagcacggcaaagtgagcgaagacccatgtccttttcaagagctctctctgtcataagcattggccttctttccaaggtcacagaaggctatcaaaggcaaaactggggttccgcggtctcttctctctcatatggcaagagaaaatgggaaatctctatatccaagcttggattaaaaattattttcaattttgtggtccagaaaacttgggtcctatgcccaagcatggaccaaaaataggcttaaaggggtgtatgtgccgaatggatttaaggtctgactctgaatctgggaatgtgggcacctttctcagagacacagttgagagaggtggcttattgt

SEQ ID NO: 598047 - DNA, 81 bp, Homo sapiens
gtcagccgaggagaaggtgaggcccatattggcagcggtgatggacagccctggttagattacaaggaccagaagagcaat

SEQ ID NO: 598048 - DNA, 447 bp, Homo sapiens
ttcgcagaaatttttccacgcgggggtactttttatattacgggggcttcaaaatgtaccctagagcatactttgaactccactatcacataagattcccactgttacccaaattcattggtcattgccttgattaccagattttcaaactccttcactaggttaaacccttgaaccttccattcgcgataatgatcttctatccgttatactttttgtaacgccgtcaataatttagaccggtgtattaatcccctctcgttatgatctcttctatatcattcggtcacagttaaatcccccactttcggaccccttatttcctcacccattagatttctcgattgttccacttttttgaccggatctttcctaataggaccatgtttattttatttctcaagctcgcccatcactttgtcctagttatcacctcgctatattttc

SEQ ID NO: 598049 - DNA, 1282 bp, Homo sapiens
taatgtacagggaatgtttccaagacttctgtgcgtgctgttgtgtgagggcaaaggaggacaccacactgtggggaaatcctggttgtcgtaatatttagcgcctttgtaagaagatcgctggtgatgagagctgaagacccagggtgcgctgctccccctaatattattttcgggttctagagacaatggcaacaggggtaatcctctttcgggggtggaaggttcctccccccagcattttttcagagggccttatatatattcccggtttaaacaaaggatatttttggtttggggcgcataagactttctttggggggttgggggcgcaacattgtatgtgtttggaggaaatataggcgggcttctaaacccccagttgtagtaaagcgcccccacagatgttccacatagtcacaacgtctgcgtttggcccaaggaggtgtgcacccagtgttctctgtgagggttttacacataagtgttaggtggttcaccctccttatagagtggttaacatatgtgtgtgtaaatatatagtgtgcgccccactctgtaaataaggtgaataggtgtgaaccccccgaagagatgtgtaaataaataaatgtttgtaaaccccgcacggagtctcaagagattgtgtaagaaatattttttgttgtgataagatatgtgggagtgtattctctcaaatataactcgtgtcatactctctctcacacaaagagaaaagtgtgtgaatattgggtgtttttgttaaacacaacacagagaaacagtggggtatatattgtgagaaatataaagttcacagagatgtgagaaagatgtcacatttgtcttagaaaatttccccgctgtttgtggtcacccttttttctgtgagataaaaagagtgtgccacatatattacccccgtatttcggcgcccacatggatattctcacggatacccccactggaagactggggtataagttaaatataggaatttggtttcacacgccctgagggcacaattaaaacacctcttggagaagaatggcacataaacctgtttcacacctggaacttaagcgtctggctctaaattcacacacgtgctcttttttcctcacctgtaatccacggttccctcccacagaaggaggccacccacgttttcacatgggtggcacactcacagtcttttttttttccagctgactaaactttttttctgtacccaggtaatttttccaaatactaatagaataaaggcagattttttaaacca

SEQ ID NO: 598050 - DNA, 602 bp, Homo sapiens
atgctctgtgctacgcgtatttatgcaactgctgctctagatcctcacgttagctgaactgaggcaggtactattgctctccctatcccatgcaggaggacactaaggatccgcgagacatatgccacgtacccatgggtccacagccaaaagctcagtggaattcaaatccactctgtctcctaagcttatgctctctcggccacataacctccccacccatgtatcgtaaggggcatctgtatatgctggggtaaacatacccgcatggtaaagggcttgtccagagctatagcctgaaatgcccagtgctgctgactctcacttgtaaatccactggcctggatctgggggtctgcacctgaagccaaggagcataactttgctgtctacaaaagcaatgattgctgtggggtccaactattgtcatttgtcaggtcttaccacggttgaaatgtctgcctctcctcgtgtgctatgagctgggacgtgggttaaagtacactcctaagagtgtatcttaccccaaaatgaagtgccttcaagtgcgctgcagagtcgactgctcagggctaagttgacacatctgggtgctcagcata

SEQ ID NO: 598051 - DNA, 550 bp, Homo sapiens
agcggaccgaatccggcaggcacaactataggtagacttattcaatgcttatgctaagccacacaacactacctctaaggatttaacaccacaattaaaacaaatcagtggaaggattatagttttccttggccttagtgtatatcctaatatctggaaggagctaaccttatggaatgatgaactcaccaattatagagggctcactcactgtaagacacaacactatctttcaaaatatggttttaaaaaatatggtatgttctctgtaccagcaatcattaaaatatagtgctatctaggcatagtggctcacacctgtaatcccagcactttgggaagctgaggccagagaatcccttgagtccaggagtttaagatcagcctgggaaacatagcaagatctcatctctactaaaaatcaaaaagaacattagttggtgtaatggcatgcacctatagtcccagttacttgggaggctgaggtggaaggatcccttgaacctggcaggtcgaggctgcagtgagacatgattgtgcctgccggaat

SEQ ID NO: 598052 - DNA, 1345 bp, Homo sapiens
aatctcctactcctcattgtacccattctaatcgcaatggcacgttcctaatgcttaccgaacgaaaaattctagagctatatacaacgtacgcaaaggccccaacgttgtaggcccctacgggctattacaacccttcgctgacgccatagaactcttcaccaaagagcccctaagaacccgcgcacatctaccatcactcctcgtacatcaccgccgcgcgagcttagctcttcacctatcagctcttgctacctatgaaccgccctgtcccacatatcacgaaagccacctggttcatagccgtcaatctgaggactcatcactagtgaatcactagaccactctcgtagatctagccacgggcacactcaactccttcttgattcagcggtgaagcctcgacctctccaaactacagtccaagaaatcagctcgccaaacgcaccacgccagcaaacgcccagagaaacacaccacgactacatgacaagcacacacgcaaagaccaaatcgacaactagcaaatcagaacacagaacccagcccaacgtggacccctaacgaacactagctccacaacacacagaacaatcgcacgcagagaacccacacgcaaccaaacgatccacgcaaatacaccaacaccatgaccaaagtccactcgaacaccgcaacgcagaccaaccacaaccacatgcagaaggaatcatgcggagcaaccgaacggcgacgagaacccacgagccagccacaaaccctccctcactgccaggaccgccgtaggcccaccacaacacggagaaaagcccccggacaccccacacgaaccctcacaccccaatcacacaacagcagccgaaagataagcggacacactctacgcgcccgcctataccgcgccccactcacacacccagcacacaccgccccgaagaacaacacacacaaagacacacttaaccaacgtaaacgtgaaacaccaccccacgtctacgcaaagcacacaacaacaatgacaccacaacgctcaactagacaatcacaggacaaccaacaactctgcacccaaccacctgccccacaccaccgaacagacctaaagcatacacgagaaaccgagagaaacaaccaacaacgcaccccacccacacagaaagaacaagaaacaagacaaagaaacacaacacgcaagcaccaaagtcaagcaaccgacgactcacaacccgtagaaagagcaacaacaatgtcaaacccacaaacgaccacagcacgacagccaacagacaccagagcgacccacacacacagacaagagcccaagcacaacgcaccacaacagacc

SEQ ID NO: 598053 - DNA, 319 bp, Homo sapiens
ctacagattttcaatgcagagaccataatcaaaaagtaaactttctttagtagtatgttcaatacatcatttaattttttaagttatcctgaagaaggaaaggtccttaattattatagtctaaacaaatttatagattactgtttgaagtaaataatacgagtgaatattttcaaatgtgataaaatatcaccagccacttgtgctattttatcacatttggctggtgataaaatttgaaattatggttaacctcagctgtgatcttatgtatgtaaagtgaaatttaaatagataattataggttgattacaaaaaa

SEQ ID NO: 598054 - DNA, 142 bp, Homo sapiens
agatggtatccacatcctggtcctgggtcagcttctactaggatgggcttgcttcactctgcaagtgctgttgtccagtgatggccctatcttctgcagagacttggcaacaatgaagcggacatttggcaccctgggtccc

SEQ ID NO: 598055 - DNA, 232 bp, Homo sapiens
tgggaggatatttagcagcccggcagcctgaattgcctttgggaagaggggtgggaatgacttttcaatggaccccttttggcccttttgaattttggcccatggacatgtattatctattaaaaaatagtttttaatttttaatttgggaaactttttttaatagaacccaaatggaagaaaattttgattctctaaatctgcttttttaaagataaagcctttgattcca

SEQ ID NO: 598056 - DNA, 539 bp, Homo sapiens
  misc_feature (32)..(32): n is a, c, g, or t
  misc_feature (38)..(38): n is a, c, g, or t
  misc_feature (41)..(42): n is a, c, g, or t
  misc_feature (53)..(53): n is a, c, g, or t
  misc_feature (56)..(56): n is a, c, g, or t
  misc_feature (63)..(63): n is a, c, g, or t
  misc_feature (72)..(72): n is a, c, g, or t
  misc_feature (74)..(74): n is a, c, g, or t
  misc_feature (181)..(181): n is a, c, g, or t
  misc_feature (256)..(256): n is a, c, g, or t
  misc_feature (314)..(314): n is a, c, g, or t
  misc_feature (534)..(534): n is a, c, g, or t
tcagggctccggttccatgtgcgctccaaggncccgtntannaatttcacgtntgntgaagtnctagctcananccctctcgccgagactttctggtcaccagattccagcagaactcaacagagacctctacccgcctgagctcctgaccaggttagagggcatctggctcccaggcacngggtcaagctccagaggcatctcctgtgtctgcccgcgacccatggccccgctcagggcctgccttccatctccngggtcttccccagtgcaggtgggagctctgctcccctggtaactgcgagcctctcaanaccaccttcctcctcagtgtcatccccctcctgtctgccccctctcccccagtgcaggggccataaagccttccccggagtcccactgccaggtcccactgccgggcctccaggctttgctgctccacctgggctcaagcctggccatactttgttctaatgactctgtccccctgtggtacactctctaccacagccaccctgggctccccatacccancccag

SEQ ID NO: 598057 - DNA, 1362 bp, Homo sapiens
gctaaaagccaaaatgggaaaggcaaagactcatatcaacattgtcgtcattaggacacgtagattcgagcgcaagatccacacactactggccatactgatctataacactgcggatggcatcgacaacaacgacaccatatgaaaaatttgagaccggacggctgctgagactggcgaaacgggctccttcaagatatgcctgggctcttggataaacctgaccagctgagcgatgaacgtaggtcatcacccataagcatcatctaccattgataggcacaatattagaaacaccgagcaagtaacatatgtagactcatccattgcatgccaccaggcaccaccagccagcacttttatccaaaacaaccatgcatacacagagggaccatctccaggcctagacctgtgctagtacctagacttagttagcatagactgagatgtaagagatgaattaagcaagactaggataatctcccacaaacataggagacagaccacgcaggagacatgaccctatactggggccttacacagcgactgggagtgttgaaaacaaacactacaggttggtcaggcagttctaaccaccgcactgggcattcacaaatggcaggccaacccataacaggccaagaccacgagcatacagcaggcacactcgcagaccacgacagtccccagacacatcatcaccaaattcaaaggaacaaaacagaagcaaacacaacaccacgaaaaaacaagaaaacacgtaaagatagaccaaaaaccccgggacagaacacagggagaaaacacaaaggacgagcagccccaaaacagagcacacagaagcacggacaaacaaaggggacgggaacagagaccaaacagaaaaaggaatacgacaacgaaaaaaaaggagaccaaaacaaccagcaatgaaagagacaagaaacaggcaacccacaagcgagcccaaaaaaggaacaaaaagcgaagaagaacacataagaacacaggaaacacagccaaggacagacataacaagaaagagaaacaacacagggacaagaaccagaatggacaacaggaacaagagagatgaccaacacagagaaaggaaggaaaacacatcgcgacgaggcacgcacacacggagaaaaagatcgagaaccagcacaaaggcgcagagaacacatcggagaaacagggacatacgacgcaaacgactcaagaaggtcgacacaggcggagggacaggacaccacaagagagcagcgaacagagtaaacccacccacagcacggaccgtaagagcagcagaaagacagacagacgagtaaaaacacagcaagagaaagatcaaacgct

SEQ ID NO: 598058 - DNA, 217 bp, Homo sapiens
  misc_feature (3)..(3): n is a, c, g, or t
  misc_feature (14)..(14): n is a, c, g, or t
  misc_feature (33)..(33): n is a, c, g, or t
  misc_feature (86)..(86): n is a, c, g, or t
  misc_feature (134)..(134): n is a, c, g, or t
  misc_feature (173)..(173): n is a, c, g, or t
  misc_feature (177)..(177): n is a, c, g, or t
  misc_feature (180)..(180): n is a, c, g, or t
acnatttacctttntcctagattttacatgcantttcccaaatctttgtgtttgcctatctgtaaaggtaatacaatctgattacnaaaaatgaaatgttacatagaaatgtaccgttatccatctaccagatnactattattaataatgtgtatttatttttccaggaattnaaanacntctatcatataagtattgcaaataaaacttaaaaagc

SEQ ID NO: 598059 - DNA, 313 bp, Homo sapiens
ctcgggctgtcaacacatcacgtagccatctcacggggggaacgcaatgcaggtggcctcgtacaaaacacttgattgtgctggtgattatgagtctgcgaatcccgggattctggcacagccgggagtacaggtacgagatgtgctgcatggccttatccaataccccgaggtcttctccctccaaggtcaataccaactgactgagatgtgcttggatctgcacgcctctgccactgtctacgaggaactgcaggtccagcccctccttgcaggatatacagacagacgatcaccttcttatccgagagtt

SEQ ID NO: 598060 - DNA, 206 bp, Homo sapiens
accgaagtgcggtcacgtttgggatgtcaggtgagctggccctagtaatcttggttagacgataaggatggaggcccattgcactgaggccaagcctgctggttaggacactgtcattcttttctgtggatgtagaccagtggtttccaaatctgtctgcaccattagattaaccatggtgagtccccaacggtgaccggcgactt

SEQ ID NO: 598061 - DNA, 1124 bp, Homo sapiens
  misc_feature (37)..(37): n is a, c, g, or t
  misc_feature (1076)..(1076): n is a, c, g, or t
ctacgcaacagtacattcagtgtagcattgtgtgtgntgcttcagctcagatgcagcgtgcgcgtcgatcatcgtgcgacgcgatcgccgccgcacatgactttctcacagtgacatatgtgtctgtctcagtgcgtatgcacgacgtctatgctattcactagtctccgtgactccgtgtatgagcgatgcgatagagtcagcagcacgatcagatgcacatgctgctaggtactagtggagtctattcatgatagtggatgagtgaagtgtgtatgcattgtattgtatgtagtgcatattacgtcgactgtgcatcgaatcgttcgttgagtgatgcttgacttgtgagtagtgattggtagtatgtatatcgagtcatagtcggcgtgatcctcagtatcgatgcgttctctgatagcagtcatgcagatctgatgactggacgtgctgcgggagattgcatcttcgacttccgagactgcagtagtatcacgctatgcagaagaggctatgcattgtcgtatgtatacgcactagtcgccgctatcgttagtgatcatcgctgctctcgagctagaactgtgcagtagctatagtaagcgtgtgagatgtcgtgtgtagatcgatagtgagtgatgtagtggcagtgacaggatcatgtttagcacatatgcgtgaccactacagtcgtgacgagagctctagaattgtagacgtggcactgtgatgtgcagtgcattatactaacacatgtatagtcagatctatagctgacggcatagtaatacttgatgtacgtagtagatcgagtgtagagattctatgtagttggttgagtgtgattagtatctatgagatatcttaatccgtccgatcatcatgctagtcgactatgtattctatgggaatcgtcacaatagcatatatgcgtgagctgttgatacagtagcgatcagatcgtgtagttattatagcatactgcagtgaatcatcgttgtcgtatatcgtgtggcatatgaactattcatactcgtctgcgctgtgtctactcgtatctaggcacgctcgttctncatgcgcacagtcagtacatgatgggctcgtgtctgtgcttacgtgtc

SEQ ID NO: 598062 - DNA, 729 bp, Homo sapiens
  misc_feature (729)..(729): n is a, c, g, or t
gggagagcgcggagagggaaggctgggagccccagtgagtcttcactacctacactgccgctcagctcccgtgcgcgagtggaggtcggggtggggagacgcgactcctgcccgggatggctgacactctgcgagccccggcggcccgcggccgggcctgggtgactagtgcgtgagggcgctggagtggtccgcgagcgggcgggtggctgctgcagcagcctgggcacggcatgccgcctgcccgctgggcgacgagtgtgcactgggtgtggcaaggcctggatgtgcgggccagtgaggggttgtgcgctgcttgatgccgtgagcggggctctcccctcgtacggctccctgccgcccagccggtgatcgctctccggccgtccccggcaccctcgtgcccccacggccgttggtcccggcgggggaaggagaaagtgagactcggtgtcatcaccaatccatcgccagaaggggaggaaactggaatccagcagcagcgagcagcagctggacggtcacatctggaaatggaaagccgacctccccactcctcctccagcatcctcctcctccatctcctatcatactccatctcacaccaggatcacattccgcaaaacacttagcgcttccagaccatgacatcaggacacagggttaacatttaaaactgaatagtaaccgaaaagctgaacagcgtgcgaggcgagtgaggttggaacn

SEQ ID NO: 598063 - DNA, 130 bp, Homo sapiens
ctcactgcgcttatccgactgagcgtactgccaacaacgtacacgtcaataccaccggcttcaaggaatcgcgcgcgagttcgccgatctgttctcggccaccggctacggcctgtcgaagaatgcggtg

SEQ ID NO: 598064 - DNA, 121 bp, Homo sapiens
aaccaacacaaaacaagagcaactgcacctcactctgaaatgacagtggcaaacatcactttgctattggaaaattaaaagaaaaacactccctcttgctattgaaacttctaaaactagg

SEQ ID NO: 598065 - DNA, 717 bp, Homo sapiens
ataaatattatactagcatttagccatctcacttctaggaatactagtatatcgctcacacctcattatcctccctactatgcctagaaggaataatactatcgctgtgcattatagctactctcataaccctcaacacccactccctcttagccgaatattgtggcctatggccatactagtctttgccgcctgcgaagcagcggtgggcctagccctagcgtagtctcaatctccaacgacatatggggctagactacgctacgatgaagcctaaacctactcgcaatggcgtaaaactaatcggtcccaacaaggttatattactaccactgacatgactttccagaaaagacataagttgaatcaacacaaacacccacagccgtaattattagcagtcatccgccctactatgttgttcaaccaaagtcaagaacaagctatttagcgtgtgtccccaacctgtttcctccgacccgcgctaacaagccccgctcctaatactgaatctagctgactccgtaccgccgtcaacaatcgatggctaagcgcgagccgcgcacttgatccagtgacaccaactatcgatcgaaaaatgaactcgtaccgtcctcgtatagctaatctccgcgtatgaaatcctcctttaagtttagtaacttggcaccagtgcacaggaaacgtaatcaatatgggatatgcttgcttcgaaac

SEQ ID NO: 598066 - DNA, 87 bp, Homo sapiens
agacagggttggctgggcatggtggctcatgcctgtaatcccagcactcggggagagcttcgagaagaggtgggacatgatggtgga

SEQ ID NO: 598067 - DNA, 230 bp, Homo sapiens
  misc_feature (95)..(95): n is a, c, g, or t
gtttaaaaagccccgggattgggggggccccccccaaaggggggggggggcaaaaggcccccttgggcaggggccaagctttttgggcagggganttggttttttgttccccccggggcccttcccggggtttaaagttttttggaaaatggtgaaggtaatttgaattggccgattttgttgaccgggggggttaagcgggggccttaaaaagcttttttttcccccca

SEQ ID NO: 598068 - DNA, 151 bp, Homo sapiens
cactcctcctaccatttgaggatacagtgagaagccttcatttatgaaccccaaagtagccctcatcagaccctgaatcagccagtgccttgcttttggacttcccagccccaagaactgtgagaaataaatttttgttgtttataagcta

SEQ ID NO: 598069 - DNA, 1258 bp, Homo sapiens
  misc_feature (1143)..(1143): n is a, c, g, or t
gttattgtgtgggatggtgatactaccagacaagttcagagcaatatcatgcttccacgctctactgtacaagtgtttaactgttcttcagagacctagatgctttggcttatctaggtgcggaactgacctgctgctgctgtggaaccgacacaacctctagactctccatgctgtaacgactagaccagcctattcctgactacagcgctaatctagctgactctctgcgcatctgaaacctacccctaacgcacactgctgcttgcctgcgtccgccagctctgcgcacaaagaaacctgcactacactcctctcagcgctctcgcgctacggcaacccccacacgcacaggactccacctacgcacactgcggcactaattacatgtgcacaggctctcaacgcacgccatccatttggactccaccacaaggcactacactactctcctccatacgactactgcacctctacactagctacaacacctcgtcaatctcacgcacgcctccacacggataccaaccacagagacacatccccccaacccgactccgcgcaacgcacgcccctaggacctccgacattcccttgcgcgcaactcggccaccacactgcgccacaccctggcgcaaccccgaagatggcccacggggacccgtctaggtgccagaaccgggccaacacgcatcccccctcgcgcagcaacaccaggaacttcctacccggaacaacaacccataggggccacccaacaccaccaagagcccacacgcgcacaacaccttcacaacacacacgccctccgctggcccccgcaagcccacaacacttccccaacatattagcaaaccactttactatatccccacacttacacccaaactcccccaattactcccccacaccaaattggcgttgaacaacatgtgcaacacacgcgaacgccgagacaccgtgtgcccattccactagccacacggcacagatcagagcagcaagaagcacgcaacacaggcgcagaccaaacgcatggcccgagcgcatccttaccagtcaacacacccacgacgtaggacactctaacccctacacagcggcccccgaccagcagcgcaacacagaacgacagtggacagnaccggcagcccggccctcgaccagtcggaaaacgagtgggagccccgcacatcatcgcatgcccaaagcgaacaaagcaaacctcgtcggccgccaccacacagtatgcaaaaca

SEQ ID NO: 598070 - DNA, 895 bp, Homo sapiens
  misc_feature (9)..(9): n is a, c, g, or t
  misc_feature (24)..(25): n is a, c, g, or t
  misc_feature (28)..(28): n is a, c, g, or t
  misc_feature (31)..(31): n is a, c, g, or t
  misc_feature (187)..(188): n is a, c, g, or t
  misc_feature (195)..(195): n is a, c, g, or t
  misc_feature (236)..(236): n is a, c, g, or t
  misc_feature (257)..(257): n is a, c, g, or t
  misc_feature (278)..(278): n is a, c, g, or t
  misc_feature (308)..(308): n is a, c, g, or t
agacacccntgtatcagacatccnnggnagnattagggagtgggggtaattatagttcctaggtctatggggtgagaggtgggagtagaaccagaagtgccctggaatccatctcgtgtcagccctcaccccagggccccctggatatagtcatggcctgcttgaagccctctgctccctgcagaannctggggncgaggaggagctttttccttcagttagatctttcccttccntgctgcctcgctcccttagcnttggagccctaaagttagtgnacaagacactgggataaagctctatggctnctggaaggaggtcctgagtctgtgtgtgtgcatatgcatgcatgtgtgtgtgtgtgtgtgtcctcatttgcagaagtcttgctaccagttagggtgttaagagcatctcccactgggcggagacctggcatttgttttccactgttaagagaatgacacaccccctgtcatgtaagggaggagctattgagttagacattttccctatgggaatcctcggtttggtttgtgggaaaggagggaatggataagtgatttttatctctaatcgtcaacacagctgttcttccactgaatttgtgctattgcatacatgtagccatctttctttatcactgcagcagtgtttatcagtagttcaaaatgatttatttgctcctggggagtaaaaccttttttattattaaaaaaagaaaaagaaaaaaaaaaaaaaaaaaaaaaacccgggggcttttttttgggggggggaaaaaggggtttgaagggcatggtcatgtgttcccggcccgttttttgttcaagggggaaatcggcggccccctaagggggccgataaatggaaagccgggtactgtaaaagaaaaaat

SEQ ID NO: 598071 - DNA, 630 bp, Homo sapiens
ttagtaatacttactagtaataaatattgaaaaataatgtggccgcatcattgtttatttatttattttatttaacaaggcgaccagttaggggacccaggttaagcccttcaacagaactatcctgaagagcaaaagtagcaaatgacaggctatgactagggattgaatttggggaaggctggatttgtgaaatgagagccaaaaaagttttcaccttctagcccacaggttaagttactgaaaatcagtcatcaccatttctacccacttgtgtgtttctcctactctggagagtaatctaactcatcatttgcaatcagggcctctgagttctgtttgtgttagcttttgctcttcactctgctacttgtccggccgtttgccttcgcatctgacatctgttggaaatagaagcctttggctttaatgggccccgccccattcctccttggttctcgccctatggggcgtacggataaacccttcttcactgagaaggggtcatccacgttctagcgctcgttcgtgctttggtgaaggtctcttttacatccctgtattccatggtggctgttctcagattgccctattcaaatataagtggagcaaactcctattttgaccgtt

SEQ ID NO: 598072 - DNA, 532 bp, Homo sapiens
cctcaacaacttccagaccccacatccgtccaacatagctgagttctgactgatggtgctccggacctgtcctcttaagtggtgaccaagtgccctccccaccccacgttggtgctctcagatagaaggtgctgtgcccatctgcatgagccccaagccccgagcctggtcttcaggacaggcagctgctctgtgtcgccacgggcggatacgccaagggataatgatggagagacggccgagatccctggactaaaacaagacacattcttataaacactgtaattaccatacttgcactccctctagggtgacagtggcacagacacggagtgcacaatcaacgaggtaccatgcagaatgtgccaatggacgaggatcctgccccacgacatgcagtcaaacgaaatgttcacaggaacaacgcacatgaagatatcaacaagccacatggcccatagcaatgaaatcctcctatgtaacaccaacatgaggtcaaaatagcgtagtaccaaaatgatgaacatagata

SEQ ID NO: 598073 - DNA, 461 bp, Homo sapiens
aagcaaggcaagttacttctatatagaagggtgcaccccttacagatcaaacaatgcttagtgatgtgtgtcagacctctgagcccaagcaaagccatcatatcccctgtgacctgcatgtatacatccagatggcctgaagcaagtgaagaatcacaaaagaagtgaaaagggccggttcctgccttaactgatgacattccaccattgtgatttcttcctgccccaccttaactgagcgattaacctgtgaacttccttctcctggctcagaagcttccccactgagcaccttgtgacccccgcccctgcctgccatagaacaaccccctttgattgtaattttcctttacctacccaaatcctataaaacggccccacccctatctcccttcgctgacactctctttggactcagcctgcctgcacctaggtgattaaaaagctttattgctcacgca

SEQ ID NO: 598074 - DNA, 1400 bp, Homo sapiens
  misc_feature (673)..(673): n is a, c, g, or t
  misc_feature (1149)..(1149): n is a, c, g, or t
  misc_feature (1384)..(1384): n is a, c, g, or t
agcgggcctgggaggcagaggttgcagtgagccaagatggcactgctgcactctagcctgggtgacagtgagactgtttttaaaaaaaaaaaaaaaaacaaaaaataaaaaccaaaaaaacaaaaacaagagaactaatttcccattcacggctcggataagatttcttcatttcttccttttccaattaaactcctttttattctcccagaaaacaacgcatttcttgggttccacactcattgtggtacaccctgtgggtcttaaccccgtggtttcttaacaaccttttccatttctacatcctagaaaaaatttcatataccctacgcgggcttgggatatgtggtgtctcgccctttcgtggctataaagtgatctctcatcattaagggtggcttctctgggggtcgaattacatccccacgtgttgtgcacgtgcgcgcgtgtatatctatacggggggggtttctccctcttttttttcacccacgtgcggctgtgcgaaacataggcatatcctcgctgctggtgcgctcgtgcacacacatatacccaccccacacaaaactattctgcgcacatatatatttctgtgtgtgccccccccctgtgtgatctgaaccgtagagacgcccatcttggggggcggtctgtgcctcctacacatacntgtgtggctgcgggcgcaatcatctcttattgtgccacacttacacacgctgcatacccccaggcgagacatattatctccgaccataaacactccgcggtgtgatatttaaccgtgctgctcttctctctaaaatggtgccccgcccctctatatgatggtgctctctcctaccgacgtggtctaatactctctcgggcgggataataacaacatctctacgccctcataaacggcggcgtcgttcgttgccaccaccatcttctcctgttgtggaaacgccctcctcttatacggccgttgggcttacaacaacccactcttgttgttgttaccacgcgaaacaccgtcgcttcgtggtgcccaccaaaaacaccagcaagcgagttggtcgcgtcactcataccaacagcggcgctctacacaactgtcgtggcgcgatcaatctacccaatactgatgctgcggacgaaccnacgccccccccgcccgcggtggtcctttcaaaaccaaccacggttgttggtcgtctgctctctaaccaagagacgaaacgattctacgcacgctaggtgagatgacggaccacttatacaacgacaatactaccaccccatgcctaacctccaagcagccgacaacttcttgtggcgaggaccacaaactcttccccagacgcgtgtccctctttctatcttgcaaacaactatnctctaagtctccggcc

SEQ ID NO: 598075 - DNA, 1281 bp, Homo sapiens
tggttaaggtgcccgcttaattttccatgtgcaaacggtcaactgtctaaagcttctcaaaaaaacgtgtcacagacccctgtgcaaagacgagggttcatgacttgggccctctcctgtgcctctgttggtggtgtgggggtgggggcagtgggggcgcgttcacagaaattagacgaaagtgacagtgttccgcttgcagtataaactcttaggtcccgtgattcggatccatccaagaggcgggggtgtgagggagctccctcagtaaaggtggattgtgtgccatctctcttggaacaagaggacttacatgggagagtgtctgtagacccacggcgttgttgctcctgtacacagcccagggcacaaggtctgagcctagaccatgggtggcacccgggttgtgccatttctgagagactcttagagcactctggagtctccagcggggtgtacacctacagagggtgctcccacacaatatacaagcacaattcaatttgtgccccaattcgcacaacccgagacgtgacaaagtgtgtgtcccaatcgtgttctgaggagagaccccatgggcacacagtgcaacgaacagatttattcagcgcaatggaggtgcgtcccctaataagagacacacaactatttgggtacagctacacgagaatgtaacagcgcctgtacaagagcaaaaatacagcctcaagaacaacaccctggtgtgatgaacccacatcttttagtcttgtgggaccttttcaagcaaacgacccacgtggaaagaaaggggcacaaggtgccgccaccacgacaagagagggaagaaagtaaaaggggcccaaatgggtgtactgaagtcaccacagggaggacccccctattgggggcgcacttactctaaaaagagaaaacgcctatttggccgcccttacacatataccaatttatacgaacgggagttgatgatgtgcggccccccccagagaggtattgtggtgcaaaacttcaacacaaacgggggacgggacaaacacggtcttgagaccgcgttaaccaccacaaataaccaccccccaacaatattgcggaccccaaccccgagtggagttccacccccgtgccatcgtggtagtattatgcacacctcatgagcacacacacaagaatttacgagagggaagcactcacgtacaaagacacccgaggagtgttattggacagcaagtcagttctagaaaaacgaacacatttaccgcttcttgtgagaataaccttgac

SEQ ID NO: 598076 - DNA, 507 bp, Homo sapiens
cccaaagacctttacacatcgtgaccttgagaaccgattatggatcatgccccaagtatccaagctactggctgcatcgagaagagggatgaagggtccagtgctagatcaaaaggcacagggtggcgatgtggcaaagaagttgctagtggggagaccttgcattgaacaggcttctggaaaagctagggaaaagtggttgcccgctttccccctttccctccccttcaagcaccgtaaaaatttgggctttattattaagagctgctataaaaacagcttgttaaatgttaagagaagcccaggggtacttcaagcattccttcgaatgcttcactccagaaagagggagtcgaggcaagtcctcattactaataaaaatcaggtgaggctgacacttctcttgaccttaggataatagcgctttgttgtctctcctgccacaggaaggctccatggttgtcctacttttaggcttcggtgcctttggtgagggttacttgggcg

SEQ ID NO: 598077 - DNA, 169 bp, Homo sapiens
ggcttgctcaatgggttaaggatctggagttgccatgagctgtgatgtaggttgaagacacgactcggatcccacattgctgtggctctggtgtaggccagcagctacagctccaattagacccctagcctgggaacctccatatgccgtgggagtggccctagaaatg

SEQ ID NO: 598078 - DNA, 492 bp, Homo sapiens
ccgacggccggcgactaggggtaatatggcaggacaaagttaggaggcagaggaccgaggaggcgagtctgtatgggccttgtgtggctgtgctcttggacagacctgttggcactagagtgatacactaggcagctgatagtactagtaggacctgcggcagtcgagtaccatagcaaggtagcgccatatagtcacaacctaggcagctagccacataggaaaaatatagtactatgcaactacagcgaactcatcgcgacgcgcaacacaacaacacggatgcacatccgctgaccgcacatgaacacgacacaactgaaacgacttctttcggacgacacgagcacgcaccgcactggcgattaaagaatccaaaggctacgctacgtacacttaccagcacctacctgggcgaagcaggcagataacccccatgtaactctttaccaggcccgtatcccggagcacgagctgactttcgacccacag

SEQ ID NO: 598079 - DNA, 252 bp, Homo sapiens
agtgtcttcaagacaaactctggcattatcgcccaggctgcagtgcagtggtacaatcttggcttactccagcctctgcctcccaggcccaagctgttctcccacctcagcctcccaagtagctgggactacaggtgtgcatcaccatgcctggctaatttttttttttttttttttggtacagaccaggttttcaccattgctgcccaggcgtgtctctcaaactcatgagtttcaagctactccaccgtg

SEQ ID NO: 598080 - DNA, 810 bp, Homo sapiens
tggtaagtaaagtggccacctttcctagtggatgggtagatcgagcgttttcggcctgatttctcttgttgtagctctccgagaagtgcttttaagtgtgtttgcaatgcgccagtcggtgggtcattcgtggggcctgtcctagccctcttcccgccatccttccccatagtgacgtccactgccttgtctacctagctgacctgctctgttcatgccctacctccctgaggaagcatggggaccctaactaccctggtgccctgcacctagtacaggccgtggtcaggccctaggctctaccggtccgggttctgcctactagcttctcctacgtgctttgctgactatgcgtgtgcctgtgtgtggtgtctgttgctgtgtcgtgaaactgtgacctatcactcagtccatactaagtgagtggcccttcgaggccactagttatgcatctttcagtgtgtgtctataacgacgtctactgctttttaaactcgataactctttattttagtataaatgcctctaggtagtctggaatagctacgcggacttgcagaggttttacttatatataggccattagaatctggcagaaaattaagagaggcaacccgagcccagcgcagcagacatacaggaacacacaggatatgcatttgacctataagacaggaataatgtttatatcatgattgtattttaaaatagtttttttactatatagaacttaatgattcttttttccccacccattaatcaaccttacccatctggaccaagcccctccttaccacaaggggtaagtgc

SEQ ID NO: 598081 - DNA, 236 bp, Homo sapiens
cgtcccatcagtgtgtgagttataataaagcagctgaggctgggagcagtgactcacacctgtaatcccagcacttgggaggcaaggtgggcggatcacttgaggtcaggagttagagaccaacctgaccaacatagtaaaaccctgtctctactaaaatacaaacattagctggccatggtggtgcatgcctgttaattccagctactagggaggctgatgggagcaagatgcgc

SEQ ID NO: 598082 - DNA, 255 bp, Homo sapiens
acatcctgagggtgatggcggccagtcggggttgatctcgatagttgatgagcctcgcccatggtgacagcaggcgggccatgcggacagttggagtagccacagtaggcccccagctccagcagcacggagggctagtagtccttgaatcacggcgtccacgaatcttgcctattcttgtctgcccacgttccattggcccaattccttcttggctcgcaggtaggtgtcaattggcctaccagcactgctctt

SEQ ID NO: 598083 - DNA, 461 bp, Homo sapiens
  misc_feature (38)..(38): n is a, c, g, or t
  misc_feature (72)..(72): n is a, c, g, or t
  misc_feature (99)..(99): n is a, c, g, or t
  misc_feature (118)..(118): n is a, c, g, or t
  misc_feature (178)..(178): n is a, c, g, or t
  misc_feature (231)..(231): n is a, c, g, or t
  misc_feature (453)..(453): n is a, c, g, or t
acccgaaaagctcatccaagtcccagcttcccgggtgnaggcatcccttccctgcagctccctggctccggnccccagggtgtgtgccgcacgaggganacttaagattggccaggcnacggcccaagaaaacttgctgtttccgtaactgtcaatggagaaagattccttcgccaancgcagtggcacatgcctaaaatcccagcactttgggaggctgaggcaggtggnccacctgaggtcaggagttcgaaatcagcctgggcaacatggcaaaacactgtctctattaaaaatacacacatacaaaaaaattagctggacgtggtggtgcacatctgtaatcccagctactcaggaaccaaggcaggagaatctcttgaacctgggaggtggaggttgcaatgggctgacattgcaccactgcactccagcctggatgacagagcaagnctgtctca

SEQ ID NO: 598084 - DNA, 131 bp, Homo sapiens
aagtgcatcactttcctcccctctcccactcagcttccatgcacgttccagtgcggtccagaactctccggaatctctagggtggcgggcgacgtcttgtagtttatcccagatgtataaagggggtggaa

SEQ ID NO: 598085 - DNA, 510 bp, Homo sapiens
  misc_feature (381)..(381): n is a, c, g, or t
gacagaggactaaatctcagtactctgtcatagggctgtgaggattagaagatgacgcctatcagagtggctggcacagtgtaagtgcccagtaaataactggtgttttgcagtcgtttctactctgtaacctggagtaatttacttcacttcactgttttttcctctctaaaaggggacggatgaaagccaatctcatgagatctggaggaaccaatgagacagtaggcacacggtgcccgctgttgttgtattgtgattgagagcacagactctggaaccagactgcatgaagttccaattcctaagcccatttactttaggctttacggtgccttttctgtgccacagatgtccgtcatgtgtaaacttggcgagacnataagcagtaccagggtccagtggtactctgaacaaaaatggactgtgaagtattaataaaaacgcttagaccgaatatttggcatatggtaagcacgaaaagtgtgagatgtaagaaataataaaata

SEQ ID NO: 598086 - DNA, 254 bp, Homo sapiens
aacaaaggtgcaatcattggactcatgtgtgggcggtgtggtcatcgcgagggtgatcgtcatcatcttgcgtgatgctgaagaagaaacagtacatgtccattcatcatggtgtggtggaggtagacgccgctgtcacccgagaggagcgccacctgtcccagatgcagcagaacggctagcgacaatgcaacctacaagttctttgaggcaggagtgcggaactagagccccgccaccggtcttcgcctgat

SEQ ID NO: 598087 - DNA, 556 bp, Homo sapiens
  misc_feature (26)..(26): n is a, c, g, or t
  misc_feature (60)..(60): n is a, c, g, or t
  misc_feature (64)..(64): n is a, c, g, or t
  misc_feature (76)..(76): n is a, c, g, or t
  misc_feature (80)..(80): n is a, c, g, or t
  misc_feature (135)..(135): n is a, c, g, or t
  misc_feature (163)..(163): n is a, c, g, or t
  misc_feature (199)..(199): n is a, c, g, or t
  misc_feature (358)..(358): n is a, c, g, or t
  misc_feature (459)..(459): n is a, c, g, or t
tggtttgcttttttgcaaaagaaaanaggatggttgttttatcaggggtagttttaggtncagngtaatgaaaaantagnggcccattcctaaggccggagggttggtttcagggaaaaatagcacccagggggngggcaagatggttcccagttttgcccantttgtcaccctgtaagtaattcagaaccaggaggantagagaattcttttggcccagataagatacgttttttattgcagttctgaaccagagactgatgttgacacattttttttccatttggcaggaatgggagtacagtgccattaggaccagcaagtgacacaggaattctgaatccagatggttataccntcaactacaatgaatatattgtatataaccccaaccaggtccgtatgcggtaccttttaaaggttcagtttaatttccttcagctgtggtgaatgttgatnttaaataaaccagagatctgatcttcaagcaagaaaataagcagtgttgtacttgtgaattttgtgatattttatgtaataaaaactgtacaggtct

SEQ ID NO: 598088 - DNA, 354 bp, Homo sapiens
  misc_feature (151)..(151): n is a, c, g, or t
  misc_feature (274)..(274): n is a, c, g, or t
  misc_feature (294)..(294): n is a, c, g, or t
  misc_feature (308)..(308): n is a, c, g, or t
  misc_feature (332)..(332): n is a, c, g, or t
gagacggagttttgctctctcacccaggctggagtgcagtggcacgacctcggctcactgcaatctccgcctcctggggtcaagcgactctcctgcctcaccctcccgagtagctgggattacaggcgtgtgccaccacgcctggcctgtnacgtcttcttgatgattaattctttgatcattttgaaatgtccttcatgatctctggcaacataccttgttttgaagtcggctttgtctgatattaacatagtacaccaatctcaccattctngtgattcatgtttggtatgncctttaacatcctntgactttcatctacttgtgccttntatatttaaaatggttctcttg

SEQ ID NO: 598089 - DNA, 707 bp, Homo sapiens
ggcggggcgcggtggctcacggcctgtaatcccagctctcagggaggctaagaggcggaaggatagcttgagcccaggagttcgagacctgcctgggcaatatagcgagaccccgttctccagaaaagcggaaacaaaaaaacaaccaaccggacaaaaaacaaattacggggtaatttcccttcaaaggcaagggcccaccaattccctgtgagcacattaaccaccttaattgagggccccacccttgcccattaggtattaacggcagtggtcccttttttaaaaccgttgaaacaaaacacccacaaccaaacaatacacaccaaccaacaccactgcaccacctacatatttataacacgacatacacacacacagcacacacaagcaacatgctgggggggggcgcgccgcaacggccgcaccccacgagaagagaggttccaaacacacacaactggtgggggggcgcgacgcgccgccccccgaaagtgagcagacaggaccacacggtgcgccaagggggtgtccccagacggagagctcggtgaggaccaacacagggcgtgggggggtctcccacacaaaaaaaaaaaaggcggcgggcgggcaccaccgggctctgcgggaccaccaccgagcggcgaggcgcgcacgactcaggcgaccccaaacagggcgcccgaggggcgtaaaaagacgag

SEQ ID NO: 598090 - DNA, 178 bp, Homo sapiens
acctctacctcctgggtcacgcaactctctgtactcagcctcatgagtagctgggattacaggcacccaccaccatgcacagctaatatttcgtattctatagtacacccggggtttcaccatcttagccaggctggtcttgaactcctgaccgatctacctgcctcgtcacccccaa

SEQ ID NO: 598091 - DNA, 513 bp, Homo sapiens
tgccgggccttcggatgtaggaagtcgtgactgcgtttcccccgcttgtgggtggggggacatggtggagctgccatagaggccaggaatattgtggggtggctgtgatggtctggggtcccagatacgtgttctggacttctagcgcctgtgagccgccggaggctgtcaggaatcttggatgccgtgaattgcaggagttccttgctcagggttggccacctccttgtgggctgactgcgtgtatcctctctcctacctctctccagtgtgctgtctgtcgtcctaggtgcgcctagctgccgtgtccaggtcgactttcccaccgggcacggagccgtcagtgaatccgacaagactcggatggcactttcactgtctgctagctgcagctccagccagccatcggccaccaggcgggagcagtcaccattggtgtccaaagaccggctaaaaagcaggagggactggagggcagggatgcggacgcagttcaccaggtacggcttgttg

SEQ ID NO: 598092 - DNA, 179 bp, Homo sapiens
ctacagtaactgaagagtaacagctaggctgtgtaaagtaccaagaagagtgtgtagaatgatattggacaagccaggcatggtggtttcatgcctttaatcctatctacttcggaggctgaggtgggggaattacttgagctcagcagtttgagttcagccgtcgccagactgagtgg

SEQ ID NO: 598093 - DNA, 1403 bp, Homo sapiens
  misc_feature (624)..(624): n is a, c, g, or t
gctcctaccggcgggatttgatggcgtgatgtctcagccgaaagttctccgctcccagagatgggtcctctcggtgtttctggctcgtgaagcggcagcgagccggcatcgatgtggaaggatgaaggagctctcccgtacggagtgagcccgatccaggccgggtccaccgtcatcaggctgtcctgggagtacagaggtctggtcatgattcagcatcgaagtcgggaagctcgagcagtgccggtgtatctgaggatgaatcacatggaatggacggatgtgttgagatggcgtggtgacgcgactatgtatgtaggacgacctacctaaagtgagttgcgtttgcatgtgagcaaatagatggtgtcttacaggatgggaatagagactcccattacggaagagacttcggcgggaagcaattcattacgaatcttggctaaatctatgtcgatgagaaacccaaccattccccagctgggccattagggacgattggcacaatagatagcgctagatacttcttttatgtacaggagaaattatgcgacgctctgccagattatacggtaataaatgcaacaggatagacgcgctcaattttattaacactatagggtntcgcacctttgtccgtaggatacaacaatagttgcccaaagtcgccaatcggcacacgcgtccattcggggccaaaagggtaagaaggcctacagaccttaggtgcaggtacccccgagtagcgttctccaagtctctcggtcccacgtgacaatcatctagaggtgacgttggcacaacagtgtactattcactgatccgctcatttttatgaggctccaaagggaatacggcgaggacaattgccggcccacttggcgatctccttcgtctttgacctggcgcgcaagcacgacgggaaaggaggccccccaactcttttggaataggggaaaacgcatgtccgccacgggggtttgtaaacagcgcggggaacagaagacttccttggggcgggcgcaccccgcaccgcaccactcccatagggcaacgatagaaggatgcacccagcgtcgggacgtcaaggggctcacaggaactgcccaagcacaaccgggttcagccctgcggtcaggtaagtacccaagaggtggaatacgcggagtgaacatgcgggcactggggcacggactcgcgactccacgaaacaaagactgcgcagaccgcgggggggtcgaacacccaaaacagagaacaagagacagagaagttctaactaaaacacgtggggtgatccgacagcgagagttcggacggaacagagggctagcgcccccgccacaaaagaccgcttggaccagccacacgccacaactgggaacgcacaaagaacacgtgaa

SEQ ID NO: 598094 - DNA, 129 bp, Homo sapiens
  misc_feature (88)..(89): n is a, c, g, or t
aaaaactgaaccttggggagccaggtgtgttgttcacacctgttgtaatcccagcactttgggagggtgaggcaggagcactgctcgnncccaggctgggcaacatagcgagaccttgtctctatttac

SEQ ID NO: 598095 - DNA, 243 bp, Homo sapiens
ggactccccttctgggccaggacagagcgaaaatcgaccggcggggggcggtgcaccttcctctcttcctcagacacagtcttgggcttcactggccgctgcaggtgggcacggaaatccatcggctcggcggggatctccttcaggtcgtcttccgatagggtcttggtactcaccttcttccccaggaggtctgggaagtccagcggctccacctcggggggggggatcgcctcctcaggg

SEQ ID NO: 598096 - DNA, 643 bp, Homo sapiens
ggagtgcatgatttatacagtaaagggcatctgcctattatatcatcagcaaagggtatgaagaccagctggaagcctggaggagtcacctgaatgatcgggtcatccaactcttcttcctgtggcaccagagccacaaaataaggagggatgttcctgcggggtgtgtatctgcacaatgctgcaacctccttctccagacacttgatgagcagagcactgaacagggtggagctcccaatcaccagcgactcctctgggtacacgaacagggagggcctcaggtaatggtgtctctacagcagtaccaacggcttgaaacccatgagcatcaaagctggatcatcaaaccgtgttagctcttctgtttcctctttctccagtataatctgacgactcccatagatctgagacctcttggtatcgctaggcagaagcaaaccgcctgtacttgtattaaaggtccgggtcttggtgtacactggttcatttgtctcccgatagagctttattggaggaggcttgagagccttctggaccagattataaatgcccacagagatcactatatctttgtggagcttcagcgttaacctggtgagtgatcgcttcctggtctcctgggggcgaccttccgcgaagg

SEQ ID NO: 598097 - DNA, 327 bp, Homo sapiens
gttagccacgccccctagctatgctggagtcagcctttatctgcacttctgcctggtgtatcccaggctaggcttcacacctagtacataattaaaatcccaaatttagcaacttttggtgaaaaaccttggtaagagtcaacattataacatgtaattgatactactgaagaaacagttttatatgcaattatgtaaagaaagtgaaatggccaggtgctgtagtcacgcctgtaatcccagcactttgggagtccgaggcaggtggatcataaggtcaggagattgagaccatcctggctaacatggtaaaaccctgtctccact

SEQ ID NO: 598098 - DNA, 461 bp, Homo sapiens
gtgtttgcgcctgttttaggggacagcccagagcttgggtgcccattatgtggccccacccaatcaagggaagagggaggaatgttggattgggggcccctggagccaaatggcaagagggtgacagtttcctttcctgtgggttctttgtccggttcctttaaaaaaaatggatgcccaggggattcccaccccgggtttggggtcaaaaaacagccagcaagagttaggggccttagggcattgggttgttgttccattaaagccgatttgggcccgggcccttaatggttttttaagctttttggggcctttccagtttgcccctgtcccccccctccaataaggggtctgggggcaaacactcccccctcccccttcctttttccccccctattgcggcccctccgggcctgttgttatagggcctccctgtttgtcaataaacaccagttgaagca

SEQ ID NO: 598099 - DNA, 838 bp, Homo sapiens
  misc_feature (1)..(1): n is a, c, g, or t
  misc_feature (73)..(73): n is a, c, g, or t
  misc_feature (97)..(97): n is a, c, g, or t
  misc_feature (713)..(713): n is a, c, g, or t
  misc_feature (752)..(752): n is a, c, g, or t
  misc_feature (833)..(833): n is a, c, g, or t
ntgtttgtaatttatggcaatattcagacaagtagttcacaactgcatgtatatggacagtttcagcatatgntcccgtctcctgccggattaattnctgccactacacgacccatctgaccctcgccgttgtccgtcttgcctattgatagtgataggataataaatgagaaaacacgaggtatgaagtattagaaagataggaagctaatagcaaccgtcgtatcctacattcactacatacattaaactttcgttttttacttcttacgctctttttttagttaattatatatgatggagtgttttgcttgaggacgcagggtatgtctcttctcgcgaagctcagtcaagataatcctctcctctcccctacttcaatctatcccaattcctttatcactcttacgtttactatctacttgtatttttatattatctcccgacgtcttctcatattcaaacattttccctccaccacattatctcatctctctcctctattaccacaactatattatattctttactctttctctttacgtcctattctctgtttcttttatacatcattttacttcttttcccctaaatcatatttttctagagtacaagtgtttctatatcttcccttactctttttatgattcatcttatgttatcttcaggagtggcaggatagcagatgcaccgcagcatattgagcggctcgngctcacattcatatgttcttgctaataatcaatttcatnacattatgtggatatgcggtagctgactgcgcgagacatcgctctcctcgactcaactagccacgacgtgatgacagtcangcgcg

SEQ ID NO: 598100 - DNA, 606 bp, Homo sapiens
agcgggaacagtcacttcaggggccataacttgggcattctgcatacaagtacacaattctaagaaccacaggcaaactgggtccctgacctcacagagctgacaatctcacaggaggaagaggcaacaagaaaatataattaagcagagaacccagggggtactaaaggataccttcttcgctcattttttttcatttttaaaatctaaagtataatttagatgctttaaaatacaccaatggacatgtttcattagatgaggttggacaacggtatgcataacatcaccctcatgatgaaagttcccacatgcacctttaggcacttctttccaagcatactttgacttctttcaccatagattcattatgtgggttctcggatttcagataaatggaataatcgtaattctactttttaaaaaggtgaatcaggcttctttcatttaacatgttttggagatatattcatataccaacagtttattcttttttactgctgagtagtattccatttaatgcatactacaatccattccccttctgaagggcatttgggtggtttcggggggaggaaataataaggctgtacattcattcttata

SEQ ID NO: 598101 - DNA, 253 bp, Homo sapiens
gtggaaatagatggggtatggtacttaacaaaaagggcacaggctgaaaggattggcttctggataaaaagaatccagactctaggacagcttataccctgatgtacacctgcatcattcctttcccttcaccccaggaggtggaacgtccagaaaggtctgcatttcacagcatgagctcacctggctcacatacacgatcagctgagatgcagcaaacaagttttacagtgcagtttttgggaaccttggg

SEQ ID NO: 598102 - DNA, 748 bp, Homo sapiens
  misc_feature (257)..(257): n is a, c, g, or t
ggcatgagccaccacacccggcctctgctttgttttttaaaaaaaaagaaatgcaagagagggagggaggcagcctcctgaccataaaagctgatttcttgatttttgggtctttttttttggaacatggagtctggctctgtctccaaggctggagtgcaggggcatggtctcggctcactgcagcctccgtttccggggttcaagtgatgtgtcctgccttggccgtgagtagctgggattactggcacccgccnaaggcccagctaattttggtattttagtagagacagggttggatggtgtggacaggctgtctcaaactcctgacttcaagtgatccacccgcctcggcctcccaacgtgatgggccctatagacatgagccatcgtgctgtggccttctgtgatctgtgaatacggggttggaggtgaaagcatttcatgaaaacttaagttcatacacaaagagcatcatgaataatttctaaaagaggtatctgtgcttttggtgaccacaaaatatacttcttatgaaatgtttcccctagtgtgaggaaaagttcattattaccttaaaccgtccttatttttaagatttcacatggtatttggttcgctccagaatcttctggtgcctggtgactaagtcctatatgctgaggagttcaccttccttagtacccttctggatgtgacctcgcgctaggaacattgcaaatgtgggcctgcactcttttggccatag

SEQ ID NO: 598103 - DNA, 123 bp, Homo sapiens
aacgctctccccttcctcttcctcctctccctcctctctgaatgccacggagcacacagttgacaggaaggcaacacatgcaatcacaaacaatgaacaactctacagacaacaaggtttggt

SEQ ID NO: 598104 - DNA, 274 bp, Homo sapiens
cttcacagactgcgcgacggtatgatctgttgcctgaggcctcctcagccatgtggtaactgagtcaattcaatctcattttctttatacagactgcccaattcttgagtcagttctttataacagtgtggcaatgagactaatacacccacctactcgggaggctgaggcaggaggattgcttgagcccagcagtttgagactgcagtgagccatgatcatgccactgcactccagcctgggcaacagaatgagatcctgactcttgtctgtc

SEQ ID NO: 598105 - DNA, 299 bp, Homo sapiens
gactgcccaggggccgacagcgcccagacgggcagaggggctacatgtcagggatgcccgaaccagaggctgcgcgcttctggagcgggggccactccggacacagctatataggaaatcaaaaagaaaatgaatactgtgaaacacacaatctgggtgttgactgggaaaggcggcgttgggaaaagcacattcagggcccaccttgcccatggcctagcataggatgaaaacacacagattgctcttctagacatcgatatatgtgggccatagattcccaggataatgggattgga

SEQ ID NO: 598106 - DNA, 116 bp, Homo sapiens
cgctgtaccagttgacgtgaggacactgtgaagcatgcctggtcccccatgtaaggatggcagcagccccaaagtggaattcagcaatgcccacggtatactgctggacacgagtc

SEQ ID NO: 598107 - DNA, 309 bp, Homo sapiens
  misc_feature (139)..(139): n is a, c, g, or t
aggaccgtgtatgctgacaggtgatgagcagagaataagtgtgaaggagagatggggctgtctgagagttcgtctgagatctagaggagagggtccctaaatttctgagtcggagaatcccctctggagaagaggttgncccagagtcgaacatctctgatctaactgatctgctgccttcattccacttccccacatctgttctttctggtgaggtatcctccccttctctgtgaattatccatgtcctctcttttgccattttcaagaaagtattatttggctattttaaagctaaaaaaatttaaa

SEQ ID NO: 598108 - DNA, 250 bp, Homo sapiens
cccttaatatgctgtctcaattctttattattttgttaaaacttgtgtattgctaatacggaaagagaaagaactgtccaagaacgacatgaatcctggtacagagcttagatatttataaattccttttatgtgtttgtggccactccttaccttataaattcctcccttcccttgggtccactgatttggagggccacaggattggggaaaaagggtacaggggctattattgttttcttctctaaaa

SEQ ID NO: 598109 - DNA, 694 bp, Homo sapiens
aaagacgtctcggtggaaactgccatggtggaaaggtggcgcgcttctcacggctgagttgctgcgcctgcagcacggaagctccccacaggcagagctgcttggatgtgtgagtcatgaagccagagaagccccgctccatgagcagctgactccccgaggccctgtgacctccctcctgtcttgcagcttcctcctggcaccatgtccccacggctctccgtgttggtacgttccgtgcttttcttcttggaaattcctcggtggacctcgagatcttttaccctaaaatagttctgttgaatttcaccctggcaatgtaattgatagcttatcttcacagatgccagacaatggacaactcaccatcagtcctctgctcacctgagacaaatgcactgtctgcatatgcttccctctgcgcctatccgtcttactgctgaccacatgcagcacttcactgaagccagacctaacggcatcagcctgactgttccctctacctgccctctcacatgcgagcatcgtgtatcccgtgaccaggctgatcaaagacccaaaggaatgcaacagtttatctcttatctactatgactgcgagctgtccaacaccccagttgttgcgcctttccagacagaacccagtcgcacactcttacaccgtattaacttgatgtccctgtgtcctccctaa

SEQ ID NO: 598110 - DNA, 537 bp, Homo sapiens
atgggggaagaaaactgaccctaaataggtataaatgccttatgagctattgagagactgaagtttagctgcatagtggacctatagaaaaatctttatgtgcccaaatatagatttctcatattcttaaggactgtggaacataatatataatatgggaaaaaaatattttatcagctctattgaggcatgatttaaaaaattttacattatttactaataaagagaactgtattttatttttcatttactattccttgtggtcttctatctagttgttcactgcctcattgcctctctgattttcaaacttggaagttattgacacgcgtctttctggccctctcctctggagcacctctgctgccaatttttttctgccatttttattttgtcatttactttaaaaaaaaacttactgaggtgaaattcacatagcatgacattaaccatgttgaaatgatcaatttagtggcatttagtactctcatagtgtagtgtaatcaccatatctggttctgaaacctttccttcact

SEQ ID NO: 598111 - DNA, 111 bp, Homo sapiens
tcataggaggcttcattcactgatatcccctattctcaggctacacctagacagactacgcaaaatcattcatatcatatcatcgggtaattacttctcacaattctcggc

SEQ ID NO: 598112 - DNA, 104 bp, Homo sapiens
cgctcagtgttgcaagcagagcatgagtctccccacaaggacactgtctgtatgagactctgccaggagatcgcactgcacagcggacgggaaccggccccaga

SEQ ID NO: 598113 - DNA, 454 bp, Homo sapiens
  misc_feature (89)..(89): n is a, c, g, or t
  misc_feature (106)..(106): n is a, c, g, or t
  misc_feature (139)..(139): n is a, c, g, or t
  misc_feature (294)..(294): n is a, c, g, or t
  misc_feature (308)..(308): n is a, c, g, or t
  misc_feature (337)..(337): n is a, c, g, or t
  misc_feature (345)..(345): n is a, c, g, or t
  misc_feature (353)..(353): n is a, c, g, or t
  misc_feature (362)..(362): n is a, c, g, or t
  misc_feature (367)..(367): n is a, c, g, or t
  misc_feature (390)..(390): n is a, c, g, or t
  misc_feature (407)..(407): n is a, c, g, or t
  misc_feature (424)..(424): n is a, c, g, or t
  misc_feature (435)..(435): n is a, c, g, or t
  misc_feature (451)..(451): n is a, c, g, or t
aaaagtgccgcgaaaaaatggatgagttgcaatttctctcgggatggcgcgggtggtgtgtgtgtgttcccacgggccccggagccacntccgcggagggcacgcngcgcggtaggcaagcgcgagggcccagcggcgngggaggacgacctcgtatcccgcgtccccgccgcgctggatccggactgagcggccgggcctgcggacttggaatgtgcggggcctggacttgcctaaggatttcccgaccccgtacaaaccaagttgccctcttccgagctaaggccccggccnagaagcgccttaanttcgaagttcggattccgtgtttggggcngggcgttngggttttnggggggganggttncccccaagcccaaggattcgggnacttaagttgaagccgnaaaagggcccggcgcgncttggtaaaanccttgcttggcccccncgc

SEQ ID NO: 598114 - DNA, 200 bp, Homo sapiens
  misc_feature (21)..(21): n is a, c, g, or t
  misc_feature (38)..(38): n is a, c, g, or t
  misc_feature (58)..(58): n is a, c, g, or t
  misc_feature (85)..(85): n is a, c, g, or t
  misc_feature (116)..(116): n is a, c, g, or t
  misc_feature (121)..(121): n is a, c, g, or t
  misc_feature (140)..(140): n is a, c, g, or t
  misc_feature (169)..(169): n is a, c, g, or t
aaagtaactctgtcctaattnctagaatctgtgactangttgttacatggcaaaaggngctttgcagatttgattatgttatggnccttgagatggggagaatattctggattgtntgggnggacccaatgtgatatggnttggaagtgtgtcctggcctaaatctccngttgaattgtaatccccagtgttagaggagg

SEQ ID NO: 598115 - DNA, 104 bp, Homo sapiens
atcccaaacttttattgtattcctaagtctcattgaacgacctcaattccacggaatctggtggcgcttaaagtgtacgggcattttacgagtctcacggaagc

SEQ ID NO: 598116 - DNA, 123 bp, Homo sapiens
cagtgactacagcgaaagccaggaccctaacctgtttctctccattcggtgctctggtaacctcccgttgtccacagatgagctactttattttcgctccagcgtacaaagcactaacagccc

SEQ ID NO: 598117 - DNA, 89 bp, Homo sapiens
ccacgcgtcgcccctctcctggggatcttaacggccttgttctctctccctggcacccacccccaggcgggtgatgccgccaagagaga

SEQ ID NO: 598118 - DNA, 298 bp, Homo sapiens
gtgacatcgtctttaaaccctgcgtggcaatccctgacgcaccgccgtgatgcccagggaagacacgccgacctggaagtccaactattccctaagatcatccaactattcggatgattatccgcaatgtttcattgtgggagccagacaatgtgggctccaaggagatgcagcagatccgctagtcccttcgggggaaggtcttggttctttagggcaagaacaccatgtaggcaaggcatcccggggcactggaaacaccgattttgggaatcttggtctatatccggggtatggg

SEQ ID NO: 598119 - DNA, 849 bp, Homo sapiens
caaaatatattgaaacgataggtacttactgtattatctgagtatttcagtgtcctacttcgaagtgtggcagatttgctcgggtttcacattggagatggcgtgggaagtagaaatgtcggagaactgtgcaagataggcgcgttcgacgtagtcggagtgaacacattgacacctagcctttaagactgatttatctgtgggtgtactgaaggtttccatgtaggacttcgaagatgtggacatacaggaaaaggcagctcaggaaaagtggggcatgctctggagagtcacgcgttgtggagttcggacatgtccgtaggagctcggctcccagtgttgtgttcctcggtcgaaagggtctctgctgtattggggactcgactggcctctcctagggactccttaggcgttgtgaaccccacgctgttggattctgtatcattattgctgaattctctgcacagttttccctggccaacctgcccacatccttggagatttgctttgccagtgggaatccttacatggctgtttcacagtagacgggacgaggtcagcgggagtcgtgctcctaacacacacattgaacgaaacagaagatgattgaaagtgtgaggaggctcgtgtgcaagggagaacagggttactatacatattagtgtatatatatacatacatatatatatatatatatatggtcatatctcagatgagagtcaatgcaaactaggtgcacaactgctgacattcagagtctggattgaacctctctgtgcccattatctctgaccgtgcaccctggtccagcgagcttttgaaagcctgaactgtcaggcactacattcc

SEQ ID NO: 598120 - DNA, 1030 bp, Homo sapiens
ggtgggctgtcgcaagggtggtgggcctcccaggaggacgtatgtgcgcccctgtgtcactgccctcgctcctgcagatggtgcggctgcgctccgtgggtgctccaggaggtggctcccaccccagcactgtggtgccatcggcccccagaaaccactgcgaagggccctgtcagggcgtgggccagccagtgcctgccccctcctcagggctccatgctgcggtccgactcaaggactgcagctggcgcagtgaaggcctctcaagtgctcagcccaactggaccgcctgagggagagccacggctccccagtcccctgcctcaactgtgcagtttcatcttctccaagggctctaggaagctgagctggagcggccgtgtcccctgagaccccaggtgaacctccagacggaatcttggtgtgcacgaactccggaggcactcttcagacgcatgcgggccaacccaggggcccaagaggaatgttcacctaaaggtctacacccacactgtggaccgaaaagcagtactgtgcagaggtccgcgccacgccgatcataccacccaagtaaggccttcgagctgagacccctatatggctctaccaaagcaactggaggatccatccaactcgatgaaaggactagacgagagcgttggagggagaattgggcagtggacatagagaagattggtgcccaaatggaccataatatgtagagcctagatagcctcccgggaaaagatggctagaagagaggacagacatgactcgagcagaagtcaagcgcagccagaggggccagagcgctaataggcagctaggaacgtcgagagtaaatagtgctagaacgaaggagaatgagcaaaagaagagattaagtacagacagtcacgatcgacatgaggcacaggagaagaacggcaagagacaagtcgcgaggccgcacgacggggccatgcggcagtggacgagaggaagcaggactcaagcaacggacgagtagaacgacaacctgccggagaaa

SEQ ID NO: 598121 - DNA, 729 bp, Homo sapiens
  misc_feature (483)..(483): n is a, c, g, or t
ggctcgtagctccgggcactcagacatcatgaggtggtcctcgcaccctcggaattaaattctctactggtatgctgttggatttctctcttcatcatgtgtcgcatatggagcgttccagagacaactgctgcatggtagatgaatgatgcggtaggtattgtgcaactacctgtggccttgcagatttgctggctacttatcaagaccaacgtacacaaggatctacagacttgtggaagacatcctcatcaagttgctgacaaagcatcataagtcaaacagctgataaaagctatacaactcactgataatcctgatgaatcatcagaaccaaatatcatagacgctgctactttgaagcaccacttgtgacaagaaattatgaaatatgaagcatcgattttaacacatgactgaagtattcgatattcgcaggatatatataattcacataatcaaccttagcaagacaccgcgcanatgcatgatatcactgggaaagattgccaagacattgccaataagggagctaaacagagcgggcttgactttattaaacctctgaaagctaaccagcaattcttagtctactgtgaaatccatgggtctggaaatggatggactgtgtctcagaagagacttgatgggagagctgatggcaagagaactgggttcatgtaaagacgatttggcatctgtctctactggccaaagttttggtgggtg

SEQ ID NO: 598122 - DNA, 831 bp, Homo sapiens
cctggagcgagtcagagtgtcagtgaagtgtcaggccacttctatatgggacggcatgctggccggacatgcttattcttcagtattccccgttcgaaagccccgtcaatgacccgttgtcccggagatcgggcccctgcgtacaacattcggtcaacctgtagcaccatccgtacgcgtcatgctccagttctttgtgcacgttcctgagccttgtctacctgtacccgtgaggcccaggcccggagcccgcgagaagcaggagcagttcgtggacttgtacaaggagtttgagccaagcactggtcaacagcaccgtctacatcatggccatggcaatgcagatggccaccttcgccatcaattacaaaggcccgcccttcatggagagcctgcccgagaacaagcccctggtgtaggagtctggcagtttcactcctggccatcattggcctgctcctcggctcctcgcccgacttcaacagccagtttggcctcgtggacatccctgtggagttcaagacatggtcattgcgccaggtcctgctccatggacttcatgcgctggcgctcataggccgaacacgcgtcctgcagttattcatggggaccccgaagcatgataagtgctattcttgagatggctagtgctggtactccacatgctcatcatgtgcgtgacacgctgggcgggaaccgcacttacagggccccgggagggaactctgccctctaacccccctacgagcaaggctagtacagtcatcgcccttggaagactgagctgggacccacacagccatccgtgtactggccagcagaacaagcccc

SEQ ID NO: 598123 - DNA, 372 bp, Homo sapiens
  misc_feature (61)..(61): n is a, c, g, or t
  misc_feature (98)..(98): n is a, c, g, or t
gctgagtcatagattttgaaagaagtctgtccttaaggcattaatgtgttgggtgatcatntaagaagtgattctgctggtcacggtgggctcacacncttgaatcccagcactttgggaggctgaggcgggggatcacctgaggtcaggagttcgagaccagcctggccaacatggtgaaaccctgtctctaattaaaaaaaaaaatacaaaaaattagcctgcgtggtggtgcgtgcctgtaatcccggctactcaggaggctgaggcaggagaatcacttgaacccaggaggaggaggttgcagtgagccaagatcatgccattgtactccagcctgggcatcaagagtgaaactctgtctcaaaaaaa

SEQ ID NO: 598124 - DNA, 1671 bp, Homo sapiens
tacttggcctgtaaatggctgggtcagttgccgctcaggcgttatcgcagatcaactctgcttccctgaactggtgtgcatatgtctcacccatgcgcatagctgaagtaacttgctcatcctgtcgagatgccaggaagcatctgttatctcatgtcatagaagagtaaccgctcgcaaatctgctccgcaaagaatccgtgaattggcctctcgctgagggtgctgtccaattcaggatacacgtgagtgatgcagaccgtcgatataacatttcatgactacgcacggatggtcacgcgtcagaccctaggtgatacccgcataccgatcagagccttggtagcgccgtcattaacacaagaggatcatcgtaccccttactttggggaatagccaaacataccataggactggcccccgtctggttgatacgcgtaaaagacacagcagtccaaaggcaccgcctggatagaggaaagtccccagtgatatttagacagaggggccactggcaacgtgtgaatcaggcaatttccggaggtacaccccatttggtgcacactgtacggggtcgcgaaattcatggcaaagtacaatcgcgaagatgttcaccctgacaataagggttggcacgatgtgacgacagcccgagggaagcagttactccccagccattggggtggtacaccgtgggtcattagcaaggtctaggcgagacggccaagcaatgatgccattacaaaacaggctgatcccttggtggaataggattggaagacctccaaaaagaccccaattggccagcaacataatatgaatgacttcggaaagtcgccacctaacaaatcatacggaactagtcgcatggaaccgtcggaacgtacttccaacaatggaatgatgctgagacaaagagacatagggtagcaatcatttatgtacagaggtcaccgctggtgaccacactgtcgcaaccggaattgtggccatattggcacccacaccagtgggcaggcgcacgaaccccgcaaacagtttcaagggactcccctacacgccttccatgagtaacatctccgataattaatgctcctgtgacgcagttcttaacgaaagtgcccctcaagtgacaccgactatcgaggaccaggtgaacaacataggggtacagagacattaccagtgacaaacaaactccctgtgcacagggcaggcacccctgtgtgacagatctaaacggctggtgtgcgcacctgatcaacccaactgggagtaggacactatggtcaagagaacgaacgtgccacacaagggtaaatatgagcaccgcaacgagacgaaagcgcacacgaccaaagagtgggaaagacagagaaccagccagactcgaccagaccggaacaacagggagcacggagggcaagaaacaccaacaacagcacgcggagtaattggaacaccagaggcatacaacagcggcgcggaaccagtgtgagaagacgaagagcgaccgaacaagaacagcagtgaacgaagggcgggcgcgcggcaggagaacacacaagacaaatgcgggcacgacccaagatgaaaaaacgcagcaaggcgacgcggaccaggcgtgcaacaaaggcgggcagaatcaaagaagatgagccgcaagcaaca

SEQ ID NO: 598125 - DNA, 499 bp, Homo sapiens
cgatgctttattaaagaagtttccaccgcctgggcgagagatgccccaccgacaacaacgcgccgttgcgcagagagaaaattcccctcttttcccccccccacaaaaagtgtctcccccaccagaataaatagccggcgtttattttcacgcccactcttgttgaatgcgcgaaattttctaaagagaagccccactcaagagaggattatttcctcctccctcacctccctacggaaggagaggaggggaaaaaaaggagagaacacaaatatattcctcggaaggcttctaacccctgaatcacgaggagattattttaagatagaatcccccccccactctagggaaaatccttaaaatttttgaatcccccccttttccccccctccgggccccccccccccccttggggggaatttccaaacccccgggggccccttttaaataattttttttattggttttttttttttcaaaaaattgggggcacccccca

SEQ ID NO: 598126 - DNA, 133 bp, Homo sapiens
  misc_feature (28)..(28): n is a, c, g, or t
  misc_feature (31)..(31): n is a, c, g, or t
  misc_feature (42)..(42): n is a, c, g, or t
  misc_feature (49)..(50): n is a, c, g, or t
gaagggaatagacccaagaagccaccgnctncatccgctccngtcatcnnacaggggcaggcaccactgagagaaaacatgaaattaaaaagatacctcctgaaagaccagaaatgcttttcaagaactaata

SEQ ID NO: 598127 - DNA, 147 bp, Homo sapiens
  misc_feature (73)..(73): n is a, c, g, or t
  misc_feature (78)..(78): n is a, c, g, or t
  misc_feature (81)..(81): n is a, c, g, or t
  misc_feature (135)..(135): n is a, c, g, or t
agaaaaataaaatcatcagaacagagtctacttttctacccaataaaaatctcacacactcttcttccttccnctaanatnggaggacctgtttttcccttctgaagtcagtccttccatctgtgctttgaagcnattctcctccta

SEQ ID NO: 598128 - DNA, 328 bp, Homo sapiens
cggaccggtgatacctttgtctctactaaaaatacaaagattagctgggtgtggtggcacacgcctgtagtcccagctacttgggaggctgagacagaatctgcttgaacctgggagacggaggttgcggtgagctgagattgtgccactgcactgcggcctgggtgacagagcgagactctgtctcaaaaaaaaaaaaaaatttgtggaggtttagaaagcagtaggataccaaagtgctgaaagaggccaggtgcagtgtttcataccttgtatccagcactttgagaggccaaggccagaggatcacttgagacaaagggaaaca

SEQ ID NO: 598129 - DNA, 183 bp, Homo sapiens
  misc_feature (176)..(176): n is a, c, g, or t
cttctgggacggtgactcagaatctttggttgaggccttttttgctttcttcttcttttcttttttttctttgtctttttttctcttgtcggatttcttcttctccttcttgctctttgggttgctttgatctccaccttcaaccgtccccatccccttctgtcgtcttctcgcanccgtata

SEQ ID NO: 598130 - DNA, 130 bp, Homo sapiens
agacagagaatgaacccgagcaggagaagaggagaggagacagccacaagaggacgttgttcatgaggaccatgtgaaagaagccgccggctccgcttgtcattgagagagagaggaaatgggagcaaca

SEQ ID NO: 598131 - DNA, 371 bp, Homo sapiens
caggacagtcttttgtgtactatgatatccatattaccagaactgtgattacaatatgcaaagagtcataaatatgccatttacaataaggaggaggcaaggcaaatgcatagatgtacaaatatatgtacaacagatttagctttttatttatttataagtgtaattttatcagcaataattctcgggatttgagcaggatctaacacctatttttctgtataacatattattctgccaaaagtttgtttatacttcagacagtctgactactgctgaatcaaatcttaacatgctttgtttaattaaacaaacaaacaatcaccacaaatccaagcacatgaaagatatcagttcaaacaaatactgta

SEQ ID NO: 598132 - DNA, 961 bp, Homo sapiens
cccacgtgggcgcgtgctgatgacagtcctcatctgagaggactggcatcctcatcgcctctctggacagcgtggacccgatcctctccatgttcttcctcatgtgctacctgttcgtgaacctggcctgcgccgtgcagaccctgctacgtacccccaactggcgtccacgcttcaagttctaccactggtgaggccactcagcacgggcgtgaggagccccacaggctgggacactgggtgcctctgccactggtgagccgctcagcacaggcgtcaggagccccacaggctgggacactgggtgcctctgcaagccagctgctctgggcctgaagaccccagcgcgtccttgactgttcctttgcggagtaagcccctgcgcagctgatgagactgcaactgaggaaggcctctgagttacgaggatgcccaggacccttgtccatttctgggtcatgagcctgtgcatggacgctgaatgttcatattgctcctggtactacgcgctgtccgccatgctcatcgctggctgcatctagcaattacatcgagtaaccgcggggccgagaaggagtggggccgatggcatccgtggcctatccttgaacgccgaccgctacgcactgactggagcggtggaggcacgggcacccccccaacagaagaacgggagggcccatggtgatggtgatgctgcaacaggaagcggagaaggcaggtgaaggaaccccggccctgggtacatcgggtgcaaggtaaggccggcagggcagacaacgggggacggacggaagagacgtacggacaagcaatggagcttaagggaacataagacaacgggccaatgacacaaacacaacggctggcccgtgggctgtacctggcagggccccgtcacaagaggcaggagaaacaaaagtgaggacgagcacagaacaccgacacacgcagtggacac

SEQ ID NO: 598133 - DNA, 336 bp, Homo sapiens
gaaagggtttttaagtggggttttttcccccaaaggggcccctttccccttgtttttcgggggggaaataaatttttttttccccgttttgaacccctttgaaattccctaggggaccttggaagttgtggggtaaaccaaattattttgccccccaaaaccaaaaaaggtaaatttttttggggcccccccccttgggggagccaaaaaaaaaattttttttaaaatttgtattttgctacctttatttgggttagtaaaaatgggcccagttttttgttttttttcccccatgaaatttgtggtgggccaaaaaccaaaagcaatggggcccca

SEQ ID NO: 598134 - DNA, 209 bp, Homo sapiens
accaggactgctgagacatttaaaagaactacattttaggctgggtgagtggctcacgcctgtatcccagtactttaggaggccaaggcaggagaatcgcttgggccaggaggtggaggttttagtgagccgagattgcgccactgctctccagccagggtgacagagcaagactccgtctcaaacaaacaaaaaaattgctccatctg

SEQ ID NO: 598135 - DNA, 714 bp, Homo sapiens
  misc_feature (176)..(176): n is a, c, g, or t
taaaaagaaaggccttacattttttttactgaatccagccaaccaagcgtgttcataacagattcagagaggaaaacacgtcgaatatctccagataggtggtgacatttttcagctttgatatggtaacattgactcggtgacctttcagaacagcattaaatattgttgtgccnatttcatgtgtgtgcaattcctttattaagacccagcttgtggttcattctcacaagtggtctcctttgtgtgggagttgtgataccgtgtatgttttatttctccacgtgttttcattcgcgaatctccagctggtggggcaatgtgggcaccgatttgtgtggctttgtggttctcgtgtgggccgaggaatctgcgctataatctcctgtgaaagtctcgtgtgtgtgagagaagagacacatgtgtgcgagagagacacgcggagagtgtctcaaagagacacacacacacgcacacagcagtatgtgtggccgcggaccagatacagagagagaaagagagacgagacactttagtgtggcacagcgtcgttcgagagtgtgtgcattgactgtgataagcgcgaaaggacccccggtgaagagtagagaagagcggggagggaggccctactgtgggtaatctccggggggggacccccttttgaaggcgcggcccagaggacacccgtgcggcgctgttgataagcgccga

SEQ ID NO: 598136 - DNA, 171 bp, Homo sapiens
  misc_feature (3)..(3): n is a, c, g, or t
  misc_feature (34)..(35): n is a, c, g, or t
  misc_feature (146)..(146): n is a, c, g, or t
  misc_feature (154)..(154): n is a, c, g, or t
canaggcggaccctgactgtgcagacccactgtnntgccgccggggttctggcctgcgcccgcatcccggccaggtgccattaactggggcgaatacagcaagtgtgacctgcccctgaggacctgggagagcctgttgagtgggntgggcgancggacctttttaatatg

SEQ ID NO: 598137 - DNA, 773 bp, Homo sapiens
tgtccccgggaggcggaggttgcagtgagccgagaccgcaccattgcactccagtctgggcaacagagtgagattccgtctcaaaaaaaaaaaaaaaagggaaaaaaaaatagctttatacctcttcatgttgtttcaaccggccatgaaaatttctggaacactccaaatttcaggtggaattaattccaaaacaaattttataaggtattaaaattatttttacttctttatagtaattaggtatactttaaaaaggcctcaggggtatatttatcttctaaacaggctacaatccagggcagctactttaaccaactaggtcctctagtggagaacaacttaggcctatttcactggcgggtgtagcctcagggcctaacttggggtgccaaattaaattatttcgtagaatttacactggattggtaaaaacccattcgttttggtttacaagtggccaaaattctcaaagggctcggtatttattgtaattcttggaaaatttatcatttaattggattcctcagttatggactggctgggtgtggacttagtacataagtcctcatattataaaaacctcaaataatggactggattttacacaacatccttcccttttctacaagttacatttttttacaactcatggggttatctcctaaataggttaatttatcgcttctagaaacatgttcaatatttgtgcttatcagaataatttttaatattccccaacatttcttattttcaagataattctgcgagat

SEQ ID NO: 598138 - DNA, 925 bp, Homo sapiens
ggccagagtttggagatgccatttccacagcctcataggcactctgtagcgtcaccggagccgctgtacacgcgctgcctatcgtggattggtgtctctgaccccgattatccaagctggacaggatagggctcgatggagcccaagatagatattgtacgatgcaaaccaggcaaatatccaagatggcctgccagagtttgtggagagccatggcgtgtacccagggccaggtgctctctgcagacaccatatgtggctaaacacacctctgcactgtgtaacagctgtcgcctggcttctgcccgtaccaccaatcctactgccaagcgccagttttgtacagtcagccaaggaggtggccaacagcacagactaatcttgtcacgaccatcaaaggcgctagatggggacttcacagaggagaaccgtgcccagtgccgagacagcaaacagaccctctgcatggaggctgtggacaaatctgagtgactttgcagtcagacctgaagttctcccagacatacctgaccagatcagacctgagggtcgggactgccatggaagaccatatgtgatctctggcaagacaatgtcagagaagtgacagggggactcatccagacagaccgggaccatcgcagacaaatcccccagggaacccacagaagcttggtcaggtgatgagcggacagttacagtactggtctcagaagtccaatcaaggaagctaaattagcaagcatgaagggacaagggatcgcaagggaagatggaattgtgaaaaggaacattgaagctctgaaaaagtgtctacagagacctaagaacaaggattaccatcgatgcaagaaaaggcaagagaggtagattccccggtgaggagaatcatataaaggaaggcatttgaaaagatcaacatgga

SEQ ID NO: 598139 - DNA, 150 bp, Homo sapiens
gacaccgacaccccctatcccgcatactagtaatatcgaaaccatcagcctactcattcaaccatatatccctggcctgtacgcctaaccgctaacattactgtcaggtccacctactcataacacttactggtgagcatccctaatctg

SEQ ID NO: 598140 - DNA, 118 bp, Homo sapiens
atgagagcaagcagcttctcttctcatcaaggaggcagagacccctgtgtggaagccaagtagtgaccggagagagggcttgcatcactgtcactaccagatgagttcccatcacttg

SEQ ID NO: 598141 - DNA, 867 bp, Homo sapiens
  misc_feature (451)..(451): n is a, c, g, or t
agcggattcgtttcacgcgtcccggtgtggctgtgcctccggtcctgtgtcaggtcgcttagctcaagatgcctaaggaaatccctagactccaagatctgccgctggatgaggaggaggtagagacgttccccctttcatggtcatgccattagagttgcccaggcttgactgtcggtatgagtcatcgactatctttctcttacatcgagaactgaaagatagttctgtcctcgtgtgatataggcgtcagttgtcacaagtgcagtctaggaatggcagatcggagcatatacatatcacgtgatatgtaacatgccattgtacctaggaagtacccacgtatatagaatctaggtaactttcctgcgtgggagacacgacgacatggtctattgaatataaacccgttgttactatctctgtaaacctacatatctacaagtagtcncgaagacctttcttttcaaccatagtattggtcgcgtactaccctagggaggacttcgtgaaatttgaaacctatagggaatttgaacctttgcatgtcaactacaccccttgtgatacctagtccgaccatatgatctggcagacccaaatatgctgtgtcgatggacaaagcgtgtgctacgcgctgggctgccagtactctcgtccttgggtggacattgaggcctatgatctccgtggtgtctttgggcttgtctatattctctgtggcgtctcactatatggcgtctcgacttggtagggaaaccaacggtgaaaccctggttgcatttcatccagaatattccacttcacaccggacttgaactgaagcctaaggtacctgcgttgtgggcgaaagttcacaatctagcc

SEQ ID NO: 598142 - DNA, 1000 bp, Homo sapiens
gaagaggtgggatgagcgaatcgaagggcaagattgggtcagcgttaagctaaaatgtatgtgatggctcgtggtgcttaagatgtcattcaacgacataactagatggatagctctcaatggtggacaggatgtgcataggttaataagaattaatcaagaagatcctagattctattgaagagtacctaagtagatactgaatagatagcctctggaggagaattgaaattcattaaattgttgatgggtgcagatgtaatatacaaaaatgattgaggagatatacagtggaatattcagaaggcatgagatggggaaatgtggagccaggcgtattatgcaatggacctatataaaatgcattaggtgatatagggcataacagaaatgagaattaggatactgtctttactattgcatctactatacatttccttgcagcaaggcatatttaaataagagtaataacagtacgaacaatgactcgcccaactaaatgtggacatgagtaagtaggtacactctcatacctaaaaagaataccagtcgatgtatgcaggcgatagtctacatgtcaactcatcccctatttcgaagctgcatcagatactcagcaatatgggttgtgatgaacgaccaaatgttaactaggtgaatatcccaatggtctctcataaagaagaggttggaacgcacaatatagttctttgaaaataactctctctctgttaacctggtagatgaagagtgtgccttaattcaagactctgtggatccagtaaaggtcttctcctgaagtaaatattgggcgtgagggtgacggtaaaaaaaactgtaggggccggggtaagattatagacgcctagaaggggtgaatgatgtaccaacgtgttggggaattcattgtaccaaaaaaaaaacgggggagtaggcaaattgtgagggagaaggggatgacaatagacgaggaggaaatcggtagtacacaaaaaggtat

SEQ ID NO: 598143 - DNA, 613 bp, Homo sapiens
tttttaataacaaaaacggaaaaggggatttctccaaaagatataaaggggagaccccggttttttccagtgcaggtttggaacccgcccggttatttgaaccccccccccaaggggggttgggggccggcccccccccaaggtttttttttacaacgggtctatttagggggcattcatcagcatttatagaaccaaaagtggtagggacaggatctctagcactggccagtgggtgttctagaggccaggtggggttgaaacacaatggtctgaactcttcggtgggtggcagtctgtgttccaagtcccacaaaatagctcaagaagttagccagttccgttccacctttcttgaggaggggtgtcagctgctcctttttctttacaaagtaagacttggcctcggcataaagttgtgggctcttcaccttccacagcaggtccttacaatagtcagtcgcggtctgaaagtattgagaaaccaggctctccacacatggctcctttgcctgtctcagaaaaaaagctccttaaagtctgcagatgccacgcagtagcacagttctgagagcatcttcatgttggctcgtgcaatattcctgcagccggg

SEQ ID NO: 598144 - DNA, 200 bp, Homo sapiens
  misc_feature (94)..(94): n is a, c, g, or t
  misc_feature (120)..(120): n is a, c, g, or t
  misc_feature (151)..(151): n is a, c, g, or t
  misc_feature (166)..(166): n is a, c, g, or t
ggtgcaggaggtggcagggaaacaaatgagccaaaatgcttccacaggtggggtgtccacatgtctgttgacaggagccctgagctattctcanccccactaaggactctgaaaaagganaatttgggacacaacaggcagggcctcgcantccccatctaagcanatggaggagtccgcctacctcaactgtgcccagg

SEQ ID NO: 598145 - DNA, 367 bp, Homo sapiens
tttgcagttcggtctcctggtgtacggccaacgccaagtaggggattgcgttccctccagtcgcagccctatcagatttggatatgtccttcatatttgattggatttacagtggtttcagcagtgtgctacagtttttaggattatataagaaaactggtaaactggtatttcttggattggataatgcaggaaaaacaacattgctacacatgctaaaagatgacagacttggacaacatgtcccaacattacatcccacttccgaagaactgaccattgctggcatgacgtttacaacttttgatcttgggtggacatgttcaagctcgaaggtgtgggaaaaataccttccggccatccatgg

SEQ ID NO: 598146 - DNA, 874 bp, Homo sapiens
aagagtggtatcaacgcagagtcgccattacggccggggggggaaaaaaaaaaaaaaaaaaaaaaaaatttttgggcggcctggccctcggaaaaaggtttttaaacccttcggttgggggcggcggggccccaaggagcggtaacggtcgaaccgttggtcaatgaagggggctacacaaagagaacaccggggacaacagagcaaagacgggcgtggaaatttccacacgcaatataaaaagaaggccgggggggaacaccccgagaaggtattccgggaacaaaaactcccaagaaggagaagctcggagagcggacaatcagggggggaacaaaaagcacacgaggagaactccacagaggaaggcgccgcgaaatactcaaaattgaagcccccgagaccgtgggggaaaaaaacaaaagaaaaaaggaggagggggacggagaggaggagcgagcgagagagagaggagagggggggagaggcggggggcgaagagggggagggagagaagagaggaggaagaaggggagagagggggagaggaaggagggggaaggaggggaggggagagaagacagtgcacggagcgggcggggagaggagggaaaggaggacgagggcgcagggaaaaggggagagcggaagggacagtggaggaaagcggcaaaaggaggagaacccgaagaggcgaacggagcgaggacaaggcaacaaagacggagaagagggaggggagacgagggaaagagaagaaggagaaggcaagagagagagacagggagagaggagccgggagggggcagaggggggagagcaagacggggaacggaagaacggaggaggagagaaggagagagcggagaaaaaa

SEQ ID NO: 598147 - DNA, 487 bp, Homo sapiens
  misc_feature (67)..(67): n is a, c, g, or t
  misc_feature (75)..(75): n is a, c, g, or t
  misc_feature (78)..(78): n is a, c, g, or t
  misc_feature (81)..(81): n is a, c, g, or t
tttgcagttcggtctcctggtgtacggccaacgccaagtaggggattgcgttccctccagtcgcagngtttcccnctngtngcccaggctggagtgaagtggcacgatctcggcttactgcaagctccgcctcccgggttcacgccattctcctgcctcagcctcccgagtagctgggactacagaccctatcagatttggatatgtccttcatatttgattggatttacagtggtttcagcagtgtgctacagtttttaggattatataagaaaactggtaaactggtatttcttggattggataatgcaggaaaaacaacattgctacacatgctaaaagatgacagacttggacaacatgtcccaacattacatcccacttccgaagaactgaccattgctggcatgacgtttacaacttttgatcttgggtggacatgttcaagctcgaaggtgtgggaaaaataccttccggccatccatgg

SEQ ID NO: 598148 - DNA, 378 bp, Homo sapiens
  misc_feature (28)..(28): n is a, c, g, or t
  misc_feature (33)..(33): n is a, c, g, or t
  misc_feature (118)..(118): n is a, c, g, or t
  misc_feature (120)..(120): n is a, c, g, or t
  misc_feature (136)..(136): n is a, c, g, or t
  misc_feature (159)..(159): n is a, c, g, or t
  misc_feature (191)..(191): n is a, c, g, or t
  misc_feature (194)..(194): n is a, c, g, or t
agcccagcggggcaagcggggcctggtncgctncacagaccaccacaaagtcccatggggttccaagaagccattgcccagaacgcccttcccagcccctggaatctcccttgaccancngagctgatctggcccntaacgcaggccacggaggccttntgtcgggcagcttcaggccactggcccttacnaangccgatgcattattctaagacgattaatccgtgcatgctctggggacagcagcgttcccatttcagagcccgcatcctgtatttcctcgccgcctccatcgccccgggcaggcgctgaatgactcgcgatgccactgtcatttttataaagccttgttccgggtaaaaagcctctttgtttcat

SEQ ID NO: 598149 - DNA, 114 bp, Homo sapiens
gaagtcctgacactcgaatgtgtattcgttgtccttaccttctggcgggatatgctgttcgaattcataagaacagggaggttagaagtagggtcttggtgacaaaatatgttg

SEQ ID NO: 598150 - DNA, 196 bp, Homo sapiens
gtagtgacttatatgggattctagaatcaagagcataggcccttagccactctgcttcacctcagagggtcttcctattgagaggacgccgtggagagaggaagaagcaggatattcactcttagcgaactgagaatttgtgcagttctttcctctctgcctttcacggaaaaggcagttcttatacggagacacc

SEQ ID NO: 598151 - DNA, 848 bp, Homo sapiens
tatgctttgtagttggatatatggaggatggggatatagctaggatgaggatggatagtaatagggcaaggacgcctcctagattgttagggacggatcggagaattgtgtaggcgaatacgtgacactactcattcgggcttgactgtggggacggggtgtctacacggggttggcctacgggtactaacttgtcctggggtaggcctacggagctgtactggtgacgaactacgtgttaacttgtcctttaacacggccgacaacggggaccaacaaccgtaaaccgcgagcgggcaccgaccatcggactcggagagcacacgaccacgcgagcggaaaacggaggcacacagacactccgccacagtgcgcacacggcgtagacataccacaacacagggagagcagagaaccgagaagtccccgacatcaacacgccacacagcactctacggcacgcggtgaaacgatgacgcgaccccagcgcgcacagcaccaaccaaccacgcgacaccgagcgggccactcgccgtaggacacaggtcggcacaacgggggcctaccccccccccacacccccgcgcgcaagccacacgccgataggagaacaccacagaaacacaccgaaggccgactacacgcccacatccgcccacgaccgcaagcgggcaaagaaacgcacaaccgcacagacggacccggcccccaccaacaccacccgcacagcaggcgccgacaacgacgagccgggcccaccaaacagaacccagcctccgacagccccacggcaccacaacacaggccccaagccacacgcgcccacaccaagacacaaccacgccacc

SEQ ID NO: 598152 - DNA, 360 bp, Homo sapiens
tggtgtgaatgtgggatgtgtgggaagccctgtgaggacagagccggtgggacactggccctagtagcccagtggggctggttcaagagtgttggaggctgggcgcagtggctcacggcctaaggtttctttttttcttgttttgagacagggtctcactctgttgcccaggctgcggtgcagtggcacaatcacggctcactgcagtctggacctcctgggctcaagcaatcctcccacctcagcctccctcagtagctgaagcaggagaattgcttgaacccaggaggcagaggttgcagtgagccgagatcacaccactacactccagcctgggacacagagcgagactctgtctcc

SEQ ID NO: 598153 - DNA, 1896 bp, Homo sapiens
  misc_feature (157)..(157): n is a, c, g, or t
  misc_feature (456)..(456): n is a, c, g, or t
  misc_feature (1190)..(1190): n is a, c, g, or t
gacatggtaacgttaccatgtagtcactgatatgagctgatcggaactgactctagtgtctacctcgtggcgttggatcctgtgggtggcatttgcgcgtacgtgtcagtgtctgcagcaatcgcgataggtggcctgtggctgtgagtccttgctngactacttctcggagttgactagcccgtccgcttccgaccgttccggcgatgctggtccgtgcatcacatcacgaacacgacacatcaatcacacacttgagtggcactcgcatgtacgcgcatatgagcctgaactggtttgtacccctatgatacgtaatataggctttgcgcagatcagtgctttagtactatatgtgggcatcccagatcccaaggggtacttaaatctgcgagctttagaccaaagaggttgtccctcagggtggcccaaaacgcagagggaaattaacatacntaattaggatagactacactaggagggtcgaagcatttgagcactcgggacaattggagaggcagtacacggaatagctgaattagggctgtatctgacaatccctattgtttaggctgttcgcccgtcatggtgagaagctcgaatcgtcgtcgctcccattcttattgatcccggggcctcaacagacgtctcagagttacgagggtgtaaagacaccatcttaatctagctcaattcgccaattagtggcaagctcaatttgtgcggcacccgaaaatgcctatttggccaataggcccatagccttattagaaagttggccccttaatcttaacagtctggccaagtttcgcaagcggaaatagggacacgacaactaggagcaaagatgccactttgtgtgcacaaatctgggcgatcgagtcggtaacgtgggcatcgccaacagggaggaccaccaatctgacaccaaggttttgaacataaacccgagaggcacagcaggaaaagtaacggggttgagactttgcgacacattaacggatggaggcgaagggcacgtatcgacggcaccaaaccggggccaagacacctagttcggaaggtcaacacacttcttctgtacatagaaacccaaaacttggaagccacggtttgcaccttagggctgaaacgtttggcacaaaaggacaagttcgcaatgagagacattcacgttggtggtgtcttgntatttatcttcctcaccttaagttttgaaccagttggacgcaaacaaaagctttccagacaaagaggtgggttaataaagtaaagtcttctaaggaatatccaaaggacgacgttaaatagaaccaaagatccagaccattaccccaaggccatataaaatatccaagtactactctcactcggaagaagagctacatattcccgattgccatggaacgaggtatatgagacacagcagcgttatactacagagagcaaagcgccgcccacagattccctacaaaagaccacccggaggtgatatggaaacaccgacccatggaattggggaccccaaaacttatagccagagagatatcattcacctgtggcaacccatttgtgtgtcccacgataggtaacacacccataggaacgaaagaagacgcaatttccccacagagcgaaaccacaagggcagaaggcaccaggagaaaacagagcatatcggtcctcgctattaaaagaggtggcagaaggcttaccactacaattaggactacttgtgccatagcacaattgttagttatgagaccccgttgatcaaaatatgaacgccacgagtatatccaaatgacataaaggaacaagccctacaacacatctatagagatgaccactgtatcacacaatgacagcaaagacatcatacaggagagcaataaa

SEQ ID NO: 598154 - DNA, 801 bp, Homo sapiens
  misc_feature (581)..(581): n is a, c, g, or t
tggcaatagttgaagctaaagaagttccctactaagttttcgtatgggatataggatggtgaaggagttccttagaagtaatattagaagaaggtgaaaataagcatcaagatgctccggtaatgcgtgtgggtacaaagaaattcttcatgacatgtcgatcgatataagatggtggaaatgctcccagagaagatagatctgtgaagagttgagagtaaaatgaaattagttggatcaatgttctatccaagggatggaatgattgatctttaccagaagagcggaatctactggattgacagacttgacttggtgctgccgcactgtcaatgggtgtatagtagaacacggaaactgcatcgaggaaccatcgctgtggatctatcagaaaatcagatggtggtatactagcatttgcaaacataaagattgagtttagcagtgaagatatcttctgagattgaagaggtacgagggggattcacccgcctattccactgggactatctatcctcaggtgtattgttcgctgtgatgagactgcataggtaggacttgatggtagattaaggagctgnaatgcatatgacaggaacctagatactataagttccattgagtgcagacttagaggaaaggtcaaagtgggataataaatgtgtgtgatgctcattgtgacgggaaatccggatgctgatgtgggttgggaaaaatggggatataatgaatggtgtgatttgaaagtcggattggggtgagatcggcggtaataacgttggaatctagggtgaagggggg

SEQ ID NO: 598155 - DNA, 108 bp, Homo sapiens
  misc_feature (1)..(1): n is a, c, g, or t
nccacacaccttcctttcaaagaggatctgcttgtctttcagattacatttaataacttctgactgtcatcaatgaccaacaatttattggggtaccgagtctcgaat

SEQ ID NO: 598156 - DNA, 134 bp, Homo sapiens
  misc_feature (44)..(44): n is a, c, g, or t
ggtaccagccttagctttgtcgatcacgttatccacgcggctgncacttcgccagatcgtctacatccggcatttcacctgcgaattcatccgagttagaatggccttccaagaggcgcgaggtatcatcctgt

SEQ ID NO: 598157 - DNA, 450 bp, Homo sapiens
  misc_feature (17)..(17): n is a, c, g, or t
  misc_feature (24)..(24): n is a, c, g, or t
  misc_feature (45)..(45): n is a, c, g, or t
  misc_feature (343)..(343): n is a, c, g, or t
ccaacgccgaatggggnaagttangggacaacgccttgtccacangaacagacccccagaactgaagaaagaatgccccaatgtccccacaagtaatgaaatggttaaaaagaattgtggttccatcctacattaggaattgaaaaaactttttcctccctaagagcccaaataggaaatgcattgcccctttgagagcccacagactctcttgtcctttgttgccagcctactcggttctcccattatggtggaaaagcagcccactgacaacgtgtaaacaaatgggtgcccactgtgttccaataaaattttatttacagggttggatgtggtggctcanacctgtaatcccagcactttgggaggacaaggcgggtggatcatgaggtcagatgttcgagaccagcctgaccaacatggtgaaaccccgtatttactaaaaataca

SEQ ID NO: 598158 - DNA, 519 bp, Homo sapiens
  misc_feature (22)..(22): n is a, c, g, or t
  misc_feature (31)..(31): n is a, c, g, or t
  misc_feature (73)..(73): n is a, c, g, or t
  misc_feature (105)..(105): n is a, c, g, or t
  misc_feature (107)..(107): n is a, c, g, or t
  misc_feature (120)..(120): n is a, c, g, or t
  misc_feature (147)..(147): n is a, c, g, or t
  misc_feature (162)..(162): n is a, c, g, or t
  misc_feature (241)..(241): n is a, c, g, or t
  misc_feature (249)..(249): n is a, c, g, or t
  misc_feature (271)..(271): n is a, c, g, or t
  misc_feature (299)..(299): n is a, c, g, or t
  misc_feature (308)..(308): n is a, c, g, or t
  misc_feature (310)..(310): n is a, c, g, or t
  misc_feature (327)..(328): n is a, c, g, or t
  misc_feature (338)..(338): n is a, c, g, or t
  misc_feature (352)..(352): n is a, c, g, or t
  misc_feature (358)..(358): n is a, c, g, or t
  misc_feature (380)..(380): n is a, c, g, or t
  misc_feature (385)..(385): n is a, c, g, or t
  misc_feature (391)..(391): n is a, c, g, or t
  misc_feature (393)..(393): n is a, c, g, or t
  misc_feature (396)..(398): n is a, c, g, or t
  misc_feature (421)..(421): n is a, c, g, or t
  misc_feature (432)..(432): n is a, c, g, or t
  misc_feature (435)..(435): n is a, c, g, or t
  misc_feature (453)..(454): n is a, c, g, or t
  misc_feature (460)..(461): n is a, c, g, or t
  misc_feature (474)..(474): n is a, c, g, or t
  misc_feature (483)..(483): n is a, c, g, or t
  misc_feature (486)..(486): n is a, c, g, or t
  misc_feature (493)..(493): n is a, c, g, or t
  misc_feature (508)..(508): n is a, c, g, or t
ggggggactggttttttatttnaaaaagacncttgtcaattttcagtttcaaaacagttgcccttttgatttntttttttcccaatcggccccaaagagaccccntnaaaggggagtccnttttaagccaataagctgcaggatgtncacctaacaaacctnctaaaaaccttaccaaaaaatggggactgggttgggaaggaaacttaaaagatcaacaaactgccagcccacggactgnaaaggctntcacaaccaaatggggtggccngggtgccacaaacccaaagcaaagtttnaaaataatntnaaatttaaaaagttttnnccataagctnttcaagatttttcnagcctnacttgttcaaaacacaattganatggnccttcntnagnnngagttttaaacccaaaaagggtnatgggatgagnttnacatggttaaacaagggnnaaaacnncgtccccgccctnatgggcganttnccgggtnccaacacaatggccnctttccgagga

SEQ ID NO: 598159 - DNA, 355 bp, Homo sapiens
  misc_feature (159)..(159): n is a, c, g, or t
  misc_feature (316)..(316): n is a, c, g, or t
ggagaggaggaagatgaaggggaagaagaagatgaggaagaagaagaagaggatgatgaagggcccgctctgaagagagctgccgaagaggaggatgaagcggctcccaaacgggagaagacagaaaatggggtatcggtgtgaccccctgacaacagngtggggttgggaggcctctctggctctggaggtgggggtgggggaagacaagtccagacactctacacctggctccctgctctgggccctagcaacagagatgacaccctcttctctctccccagtcctctcatttccgtctctccagacactgccncctccacccacactctgacattgctccacctcctgacct

SEQ ID NO: 598160 - DNA, 719 bp, Homo sapiens
  misc_feature (288)..(288): n is a, c, g, or t
ggtctctcttcacgcctgccggtccatgtctgagtcagagtctgctaacagagcccgatcaggtgaggaagctcttcattggagggttgagctttgaaacagctgagtgacggagcctgaaggacgaccattttgacgcaggtgggtgaacagctcatcggacgtcgtgctggtcatgtagagatccgaaatgaccgaatcgcgtcccaggggcttatgggggtctgtgctgcacaagtaatgcgcactcgtggcaggcaggtgcgatgcgagctcatggaatcgtcnacaggcctacgacacaggtgggatggcaacgagatatgtgcgagagccagatggagaagctgtctccaaagcaggaagaatatctgcaagagatccaaggtgcgctgacgtgtaacgtgtgaaaaggggaatattaggttgggtggcattagaaggagagcatgacgtgcaatcacacgatccatctaaggagaatttattttgggaacccagatggtggcagggagacatatgcagagatcgcatttgtcaactgtccactcgaactgtgcatcgcggcagggccaggtgggccacaggagacaaaggggaggcatgtgtgaccgtcttgttaacccctttttgtcacgtacgcgatggaccctcgcggatggacaatgcacgagttgctccacttcgagcagaaatacccgatcatcttgctgaacctg

SEQ ID NO: 598161 - DNA, 485 bp, Homo sapiens
gcaccttgacggtactgagtgacgacgccgaagcccaggctgaacagggaattggacatgctgttacctctacacaaatggaaggctggcctacttgagggccgccgaataactatctggcatgaagccaatcagggttctgtcaccgagatcgagcaccgggcgcttgatcatcgagggttgtgcgagcatcaattcaatggctttcgactgatcgagatcggcttagcgttcgtctacgagttagcgaaaggtggtagcccgcacggtccaaaaccacctgccaaacgtgctcgtatgcaccattgggtcaagtgttcgcggtcgataccggccgtttagtagtcatggaactcatagctcaccccgtgctcatcgagccaggtgcgcgccttattcatggtgtcgcaggctttgatgccgaaaaggtgcaaggttttgcttgacgcaactcaaggaattgcccccgcagggacccactcgga

SEQ ID NO: 598162 - DNA, 204 bp, Homo sapiens
aattactaccttccccttggggggtttcctcccccacccccccccccccaattttatgacttccctttggcaattgttgaattaaaactgcggctgaaaccaacagggtcataaagatgaattttttgagaaacaaaaatctacatgttggaaaattgggttttttttccatgtaagtgaacataaaaacatcttttccgggga

SEQ ID NO: 598163 - DNA, 459 bp, Homo sapiens
  misc_feature (102)..(103): n is a, c, g, or t
  misc_feature (105)..(105): n is a, c, g, or t
  misc_feature (148)..(148): n is a, c, g, or t
gtgaccaggatgtggattttggcgacctgtgtggtggccttgagctgctttctgtgtttgtgaggactactcccatttccttgaaaaaaaaaaggggggaannanaattggcccccccccgggggggggggaaaaggggaggacattngggaggaagatggcctgagtgtgcactttggctctgctacctgctcctgaagccccgctaaaaataattcatccaagattcctttgtagttaaagggtccagttctgactggagcctctagagagctgggcttgtatgttcttttggccttttgttcctacctaaatgaagaaaccatgcctggaggggccgtgaacacagaaccctcaagacaaggatgacagagctggaggacacatctagctgccattgcaacctcactgggctccccagactctgtgtgtgagaaattaaaccccctgcatgcttga

SEQ ID NO: 598164 - DNA, 1186 bp, Homo sapiens
ggaacagataactgaatgatagattttttttattttacaagatacaaactttacacacctgcacatttagtatatagcatcactacaatggtgtgtaaaacattcagggtttctattgcctctctaacactcacactaaatctagccataaaggtaggtatagtatacatcatttatacatgctaatacatccataacctaacctaatctattaaaatataaacaggtaagacaacatatatacttagatatataaacataacaagaccatcattctaaactacacatttcgagtaaaataatagcataaatggtcagattaccaaaaatggtcattaatccatataactaataagtacagcaataataccacatctaacaaaataaaacggctgatactaagaaaatgtgtaaccagaaccaagaatactgcgtaatatgggacagaatcctgtgcaccgagcggcgtggaacctggacaagaatagtagcgaactatagacatatataaaacccaatgtaacataaccataaatacttctaaagatgaatcaatgacaatactaagtataatacataaagcaaatacatttaaaaagagggtattagagtaagactgaaaaggacaggaaaaaggtagagtagacaaggaaaaaaaataatttaaagtaaaatatgacaaaaagaagtgtagaataaataaagcatcgggacacacgccaccgtaacacactacgaaaagcaaccaacaaatgggggaaaaccaagagaagtcccacacaagacaacccagatacacagggaacacaacaatcagccaaaaacaaacaccgcaagtggcacccacacatgtacatggccactaaggaaaaacccccctccataaaccgacaaaaattaacacaaaaccccaacatgtcaaaacagcgggaggagacttaggagccatcacagtagaaaagtacatgaaattgaacaaaaaaaagaaagggattaggcagaaaaaatgatataagataaaagacacaataaaagaaacgtcaagagacagatgtgatagaaaaagaaagattaaagatgagaaaaacaataaattaagatataatacaataaacgatatcaagtgagtaaacatttggtcacaaaacaatataatagctaattaagagaaaaaatgtacgaggcc

SEQ ID NO: 598165 - DNA, 337 bp, Homo sapiens
ctcacgcgcttgcgctactgcgcacggccaccacactgtacccaacaagcagatagcacatgaacatctagtgccaactcactgtgtatgatagctatcaatatacattcattacaggatcgattaccttccctcttacgccccacctcttaacactgttagagccacatttcaacttgatatgccgagagggacagacatccaaaccgtatcattttttttgatactttcatgcagtttgtttggctctagatctgtttagactcctgcagtctggtatctgtaactagcctctggtcctttgtgagagtccacggttcggtactacgctttggca

SEQ ID NO: 598166 - DNA, 136 bp, Homo sapiens
tagacgtcactccaatggacaatctatctcctatagaaactaatgttagtataagtaacatgaaaacattctccgaacgtcactatatcaaaatcagaccccatcacctcctttctaaccacccccatcccagtga

SEQ ID NO: 598167 - DNA, 713 bp, Homo sapiens
ggcagaacctgcattaaggaatcgggaagaatcgatgagcgccactctttaaaaactcacttgacgttgtccttgtacactttgaaaagtgggaatggatctgctgaggcccagtgcatatgcaattgtataggtgtctattagtcacattaactctcaaagagattcgaatgacggtaagtgttctcatgaagcaggaggcccttgtcgtgggatggcagtttggtctcaggcagcaccacactgggtgcgtctccagatcatctggtaagagcttgctccagattctgatgcatacgggctatattggttatgtagtcagttgcattcattaaatcaactttatcatatgcgtcttttaaatcgtgcggttctcatcagtatcccctttaaaaatcctgggctggcacattgactgggaaacctgacgtgagaaccaggcaaactgcattctactcccttctctctcctgacggtgaagcttttccacggtttagccgaagagatacctggccagcacttctgccaagctgcacatttacagaagcaaattcaccacgaagggaaaccatctcacggccaacatagggcaaactgacacaagggctattaacaatattcttgacacctttgcaaacattgcaggctttggtacaaagaggtctgtccatctttccccctgggatatacagatgcatctagctcccggtaga

SEQ ID NO: 598168 - DNA, 843 bp, Homo sapiens
gggccagaaaagctctgggtggccgtaaagaggcgccaccccatgggtagacccacgcacacaagcggacaatatcggggacgcacgtcgctgcgcacagcgaaggccaggcgtgggacgcagcgccccacgtagttaaaggaaattgaaagagaaaaagtatgtgtgccggcgcacccccgtgtccgcggcacgcacaggggggggggcaacggcccccgcggtgcgtgatatctatgccaggggtgccggattcgtacagccccaccagccgggaatgacagtaaactgtgtgcgtagaaataaaccaccacacatggagagtgatgtatacatgagacagacacataccgatgagtttctgtcatacatacccgggagagaccccacccccatgttcccagatgggtgggagacacacgcacatctgtatagatattgaagacagaatgggggcgtgtcgacacacacgtatgtgctcatgtgtgaggctccacttcacactgcgtgtgagaagaaagcatgtacgcacgggtaagagtcccgcgcgcgggattatatacattatgtatgtaagaagccactcctgttatgtgggttatatatgggttcctcgaagactcttatgtattgatgcaacattcatgatggtctgcccatgcgcttcctgatgatgctcccttgtcgagcccacgcttcttgtggccggcaatcaatgaacgtggcgaagacacccgcctcgggtttttcaggtcgccatgatggtgatatggcagagaccaggcgacagatggtccgtctctcctgagatatcactccctcccgctcccacaatgacgcaga

SEQ ID NO: 598169 - DNA, 141 bp, Homo sapiens
gtgtggcccggcgccgggcggtgctgcccggagagcgcgcagcccccagccggccgcgccagcgctgcgcccactctgctctcccaaacccagggctgtcatcgtttccacgcctgttccctttcagagccagagacgagc

SEQ ID NO: 598170 - DNA, 260 bp, Homo sapiens
agcagacggcggaaggtggcaatcttctgctccagccgcgacttcagatccagcatgacgttgcgtacgtggttctgctgctcgatctcgcaccgaagctgggccagcggctcgtacacgctgccaataataccctgtatctgctacagatgcacgcagaatcgcatctctgtctccggctgcacgcactccaggtaagctaacatgctgagacgggactgcagatgtatctacaagccctgcatggagcgccgtagctc

SEQ ID NO: 598171 - DNA, 992 bp, Homo sapiens
cgctgaggctgttgggtatgaagtgtaacagaacagactttagcatctgaaactgcgtgcttcaagtatcagattcgggcaacggaagcaaacctcgtagaccagtaacaagaccaaggaagagtacgagcttcacagttgcacagacagcaagcaacttgatactgaacacaatgaatgtgggacgcgcctacgcggaccaagctgttgacacatgatgctacttgcccaacttgcctgcgtcacgtaagtctgtgtgttctcctgtcgagtggcgtggtaacctagtggaggatcaggtcgcaggtgacgaggcgagccacgttcgtagttcgtatttattaggcgtgttcgtacgatccattgtcctgcgtcgctcgtttggtggaactgacttacgcaacctttcatcctttttgaagaactgtgctggcgtggagtaaacgatacggtcatcgatgcaggatacgtagcgtgaaaaagtgcaagtagtatggaggctagtcaatcgggggaggatgagcatgagaatggcgaaagctttgtttgcagaatgagagtggacataagtggggtagccgctaatgggtatgtggcacggaggcactgggggtgaaactcctgggtgttactggaaattagacgtgttgaagccttcttggcgggttttattgaggtgtcgcgaaatgtggaagggtaggcactttgtcttttcctactggttcaccgttattagtgcgcaatccagggagaagttaaagagtaaggcagatgactgtcgggattcagacgctacttgtccggacctgacgggatggtaaaacccaattgcggttatgccggtcagaaaccagagaaatgctcctgcaaaaagtgattactgggcggcaagtgttgtgcgggggtccacccctggaacagtgcgaggcacgttctctggaagcggagcaaaaagaaggtaggggacacggaccagtggtgggtcgacaaac

SEQ ID NO: 598172 - DNA, 1598 bp, Homo sapiens
gccgagggcgccattaaacaggacgtgaccaggcagacagggtccctgtcgtagagcggagtatctcagggaccagttacattcacgagcaatgccataggtccatggaatacttgctaaatacgctcactcgcttcatgaggtaccagcgattcttcagcccatgctgcctgacacatggctccatcaagaggaccaagaagccagtcgaagcttgatcagaaacgacgagctatgcgggcttcgcatctcgcgttcgcagtcaccaggagtgacgaggatctcggtgagggctgccatagaatcttacaagaggacgtcaccgttacctcatggaattccttgctgaagtcccatgctaggcaccagatgggcaactgtcctgggagtccttgcgtcacggcgcgcgtgagaccctggtatccatgtgagacatctacctgtcgagtacggtagcgactccgtttggaaccaagcagcattcgtgcatctgcgacgagattaccatacattcaaggtggcaggagtccacattgcgtgtcaagacatggtagattctgtgcctgtcgtgcataagcatgcacagaggtgccactgggacagagagccgtttcgacaagggacctagatctccagacgccttcaacttacaggcggacgaacttgcgagagcggagcttgaaaaatatgattccttacgggtttgattggaactcgatttgagagacccaacgggaccttttgacgcccttagaaagacgaaccatattgtgttttggcgaaacatggttgcctttggcatgaataccccgtcttgtttgcctcggttaccaaagcagggagagatccaaaacgtcaacacgaactatttttactggggggaccggaacgcaagtgttttgggacactctcctttttcaacgccgtttcccaagccctcttgtgtcgattagggttactcctcacaaggggtccaccatttgtagccaccggcgagttggttggcaaacacaggacacacatcttcgacacgatacacacatcttcgcgcagggacaatataatgtagcgtggcattgcaacagagaaaagaaacgagagacactgtgacaacaacagggatacacatcaggtaagcaaacagaggaggtgtggaatctgcgcgaccccaaaggttattctttttggacaaacacgaggagtgagcaaaaaacatgtggccgggagactcaccaatatatgagtagaaaacccagttaaataattcgaaaaccgaaggtttaacacggatgaataacaaactatgaacgacagcaagcaaattaaagacgacatggcaggcacagggatacaccgatcttattcactgggaagatctcgtttgatacccagacagcctgccgaacactgagagtgagttaaccaggctcagaggagtatagcgagtcagcgattaccacagaggaagatccatcgtataactcggagagacacatgccagagacacgaaatgaaacgaaagcaacaaggaatgactacgtgctgaagcacatcaatgaaatacgatgacgaatcgtaactcgatccattctcatcag

SEQ ID NO: 598173 - DNA, 134 bp, Homo sapiens
tcccccccatgcacttgtcaacaggcctaacctaatttaccaaggatgaactctttcaattcttcatgcgctgtcccttttcatatacttatttcatttattatccataatcttatagacactctgcatcggga

SEQ ID NO: 598174 - DNA, 190 bp, Homo sapiens
  misc_feature (37)..(37): n is a, c, g, or t
  misc_feature (94)..(94): n is a, c, g, or t
  misc_feature (125)..(125): n is a, c, g, or t
cggtcttttgtttgtttgtttgttttttaagagatanggtcttgctttgttgcccagactggaggtcagtggcttttcacagctgcagttatancctactgcagcctcgaactcttggcctcaancaatcctcccacctcagcctcccaggtatctaggacaacaggcatgcaacacaaagcacagctct

SEQ ID NO: 598175 - DNA, 117 bp, Homo sapiens
aggaagggagagacagagagagagagaaaaagaaagaaagaaagaaagaaagaaagaaagaaagaaagaaagaaagaaagaaagaaagaaagaaagaaaggaaagaaagaaagaaag

SEQ ID NO: 598176 - DNA, 353 bp, Homo sapiens
acggatttcacatctgattgttttactatatataattagcatttgtctctctctctttagctcacatgctacaggaggtcaagcgccatggctcatgtgttcacagtgcccagcacagaggcatgcacatagtaggtgtatatttaagaaagttgattgaatgctgagtgagtgagtgggcactcttcgctgacgaactggggtaaggcacatactccctgttagatttcagtgtagcactgccctatagctggtgcaaacaccttggtgtctccccttaggagcatgtggaaagaagagcgaggatttgccatgagctttctctgggacaggagcaatttgggaggcagaga

SEQ ID NO: 598177 - DNA, 162 bp, Homo sapiens
ttgacatgatacgactcgagttagtaccctcggattaaggggccaagatctatgatcccacagactccaagtcctgagggctgggacaatgccgcgatgcatatccctgagcctgtatgctaagaagctcgcgaggactgggactgaaagagatggacagga

SEQ ID NO: 598178 - DNA, 123 bp, Homo sapiens
aagaggggctaagacccaagtcatcctccactttcgttttgttatatttcgcttagaattgcctcttcttctccacttcagaactgcctcaaaattgacccccttgactgatttattgtcgtc

SEQ ID NO: 598179 - DNA, 357 bp, Homo sapiens
  misc_feature (21)..(21): n is a, c, g, or t
ggcagagaataaaggataaanccaattctctgaatgaaagtttaatgtgagctcggctgggtgcgttggctcacacccctgtggtcccagcactttgggaggctgaggcaggtggataacctgagctcaggggttcgagaccagcctggccaacgtggcaaagacccatctctactaaaaatacaaaaattagctgggtgtggtggcaggcgcctgtaatcccagttactcgggaggctgatgcaggagaatcgcttgaacccaggaggcggaggttgcagtgagccgagattgcgccattgcattccagcctgggtgtcaagagtgaaactctgtctccaaaccaaaaaaaaaaaa

SEQ ID NO: 598180 - DNA, 662 bp, Homo sapiens
  misc_feature (294)..(294): n is a, c, g, or t
  misc_feature (377)..(377): n is a, c, g, or t
  misc_feature (379)..(379): n is a, c, g, or t
  misc_feature (553)..(554): n is a, c, g, or t
  misc_feature (556)..(556): n is a, c, g, or t
  misc_feature (561)..(561): n is a, c, g, or t
  misc_feature (563)..(563): n is a, c, g, or t
  misc_feature (567)..(567): n is a, c, g, or t
  misc_feature (572)..(572): n is a, c, g, or t
  misc_feature (576)..(576): n is a, c, g, or t
  misc_feature (578)..(578): n is a, c, g, or t
  misc_feature (581)..(581): n is a, c, g, or t
  misc_feature (583)..(584): n is a, c, g, or t
  misc_feature (588)..(588): n is a, c, g, or t
  misc_feature (607)..(607): n is a, c, g, or t
  misc_feature (614)..(614): n is a, c, g, or t
  misc_feature (619)..(619): n is a, c, g, or t
cggtcgcggagggcagtggcggcagaatgtggctaccaggtatttagcctagtcggcaagcgagcaatttccacctctgtgtgtgtacagagctcatgaaagtgtgtgaggagcgaagacttttcgctcccagcttatatggatcggcgtgaccaccccttgtccggaggtgggccatgtcaaagcacctgtactgccagaccgagaaggcagctgaaggagaaggagaaggcctcctgggagcagcctctccagtggatgagaaagtcgagtctgtgatcgcattaagttcanggagagcttgctgagatgaacaggggctcgaacgagtggaagacggttgtgggcggtgccatgttcttcatcggtttcaccgncntcgtatcatgtggcagaagcactatgtgtacggccccctccgcgcaaagctttgacaaagagtgggtggccaagcagaccaagaggatgctggacatgaaggtgaaccccatccaggcttagcctccaagtgggactacgaaaagaacgagtggaagaagtgagagattgctgnntngcctnanctgngcctngctntntcncnncatncaatcatgcctatttactngaaactnttatnccaaacagttttaccacttctaattaatgacccgtttacctga

SEQ ID NO: 598181 - DNA, 509 bp, Homo sapiens
  misc_feature (50)..(50): n is a, c, g, or t
  misc_feature (53)..(53): n is a, c, g, or t
  misc_feature (60)..(60): n is a, c, g, or t
  misc_feature (95)..(95): n is a, c, g, or t
  misc_feature (141)..(141): n is a, c, g, or t
  misc_feature (224)..(224): n is a, c, g, or t
  misc_feature (226)..(226): n is a, c, g, or t
  misc_feature (400)..(401): n is a, c, g, or t
  misc_feature (403)..(403): n is a, c, g, or t
  misc_feature (408)..(408): n is a, c, g, or t
  misc_feature (410)..(410): n is a, c, g, or t
  misc_feature (414)..(414): n is a, c, g, or t
  misc_feature (419)..(419): n is a, c, g, or t
  misc_feature (423)..(423): n is a, c, g, or t
  misc_feature (425)..(425): n is a, c, g, or t
  misc_feature (428)..(428): n is a, c, g, or t
  misc_feature (430)..(431): n is a, c, g, or t
  misc_feature (435)..(435): n is a, c, g, or t
  misc_feature (454)..(454): n is a, c, g, or t
  misc_feature (461)..(461): n is a, c, g, or t
  misc_feature (466)..(466): n is a, c, g, or t
atccttcagctctgtgtttcctccttcacaagtgtggttttggggagaantgnttaaatnttgcagaggagggagctgctgagcctttgtgcctntaaatgtctgtcctctctgcgccccagtttatcgcattaagttcanggagagcttgctgagatgaacaggggctcgaacgagtggaagacggttgtgggcggtgccatgttcttcatcggtttcaccgncntcgtatcatgtggcagaagcactatgtgtacggccccctccgcgcaaagctttgacaaagagtgggtggccaagcagaccaagaggatgctggacatgaaggtgaaccccatccaggcttagcctccaagtgggactacgaaaagaacgagtggaagaagtgagagattgctgnntngcctnanctgngcctngctntntcncnncatncaatcatgcctatttactngaaactnttatnccaaacagttttaccacttctaattaatgacccgtttacctga

SEQ ID NO: 598182 - DNA, 326 bp, Homo sapiens
ggctgagagtctctgagaatttatgagatgtgtgtctcatcagacttggtcatcaaaaaaaaaaaaaaggaaaaacccgtctgggggaaaggcccctttcctccaggggaggggggggcccttttggttttttttgggaccaggtttttggtgggggggcctttaaacccccggcctttggttttgggtaacaaaaaatttcaaacccccggggggcccaattctttttttttttccgggctaaagcctttggcccctttccagggtggtttttttggctcaagacggttaatttcccaaaggcggagccctttttttttcccttt

SEQ ID NO: 598183 - DNA, 1280 bp, Homo sapiens
gatactggatgcttgcggcacgcgtctctaggtggagctctggctggtgacgccagccgtgtaccggaacaaccacgggtcatactcttcagggaatctccgtagtgattgccagaggctccattccctcggcgagtgctagaatgccgtgtccagcctggcaagacaacagaccagaacacagtggatacgtcggagtggtgatggttctgctgacatgagatgaagtggggaaggacgtacatggagaggtgaggtactattcagatgtggcaggtgggatcaccagagttccgcaagcacgtgagacgctgtccacaatgcgtgtgatagacgtgcatctactgacgctaatggactgcatgcgaatgtttgttgtgatcgtgaggacttctgtgagatgcttaggacgagagcacgatttgtcggtggtcctaatatggaggatagatagtttcagagagatctgtaatgacgtaagaatgagagatgcgggatgggaggaagagtggggagcttgagaggagccgcctaaagtacgggcgatgtaggacactcgtgtgcacggggcttgccaggcgcgagagtccctcgtgggcactccggcattttcagtggtgagcaagggtgagtcttaccaaaggggcgtatcttgttcgtgagaaattggttggactcacggcaatctacacgttacggaactgctgccacggctgtaaagaggaagcgcaaaaacagcaaaccccgtgggaagcacgtgcacgaaaggcctgcagtagcctctattagcacacacgcattagacaggagaggggaacccttcgcaagggaacgcgcgggactacgcaagacagggacattggacagcggaagcggaccatctgtccaggaagagcactgggaaagcactcaagagctccttgacacttgggttagggggaacagaaccacacaccttggcaaccggcccacagaaggagcagagcgctaccacaggaggaccatatagggaggcaacatcccccaatgaaccagggacccaacgccacgaggcagggacaagagaaaagggggaacaaccgcattactgggggcaatacaccaggggcagccacaccagaccaactacgcacaggcatacacatgcggcataagaaggcagaggacttccagcaccacacacagaggcagaggacctacgacaaaccggcccatcaaacaacaaacggccctcacggcgccaagccaggggagactaccccactacagaccagacagaa

SEQ ID NO: 598184 - DNA, 125 bp, Homo sapiens
tgcacacgccgtagttccaaacatcgagtacacattatccccaaccctcagaaatcctgatggacgaagttgttgcagatcgcaatggacgaagttgttgcaggtcagggtggacgaagttgttg

SEQ ID NO: 598185 - DNA, 854 bp, Homo sapiens
  misc_feature (145)..(145): n is a, c, g, or t
  misc_feature (163)..(163): n is a, c, g, or t
  misc_feature (244)..(248): n is a, c, g, or t
  misc_feature (256)..(257): n is a, c, g, or t
  misc_feature (264)..(264): n is a, c, g, or t
  misc_feature (274)..(276): n is a, c, g, or t
  misc_feature (279)..(279): n is a, c, g, or t
  misc_feature (287)..(288): n is a, c, g, or t
  misc_feature (303)..(303): n is a, c, g, or t
  misc_feature (310)..(310): n is a, c, g, or t
gggctttggcatggcgactttttctggcccggtgggccatcctgtcgcttaatccgcagggaagatgtcgagtttcaaaaggaggtggcgcaggttcgcaagcgcataacccagcgaaaaaaacaagaacaattactcctggagnagtctatgtgcgccaccnactaacctacttgacgaaacccagatctttcatatttctcccagtttgcactgtgacacggttcaggctgtccacgaagtnnnnnggactggnnaatagcnaaggctatgnnnttngtggagtnngagtctgaggatgtngccaaanatagttgctgaaacaatgaacaactacctgtatggtgaaagactcttggaggtgtcattttatgccacccgaagaaagtacataaagaactctttaaagactggcaatattccactttaatgcaggccatcatatccatcatgtgaaacggtataatcggaatcggacactaacgacaataagctacggactggacggagcgatttatcataagaacagaacacgattactcaggacagaaagttagctagaaagaaggaattgactgagtgattttccttgctttgatttgacagaatacggaaagtatctcaaaaactaatcgtcaggacgtctacaaaatggccagggttttactgtccgaagaagacaagaagtttcaggtacttcttgacactcctgagaaagagtgcggatagtcgagggacgccacaccaagtatgtcacacccaagcatttggcggaacgaaggtgaataatcctcaatgttggctgatgtggaaattggtgggatcgataacgattgatgcaactagtgttccaa

SEQ ID NO: 598186 - DNA, 361 bp, Homo sapiens
gttctctacaatactacaaaattagccaggcgcagtggcgcacacctgtagtcccagctacttaggagattgaagcggaaggatcgcttaagcctgggaggcagaggatgcagtgttgagatcacaccactgcactccagcctgggcactctaaccactgcgcatagcaaggccctgtctcaaagaaacaaacaaagaaagttgaactcataaaagtagagtagaatagtggttaccaggaggtgggggtggggagatgttgatcaaaggatacaaaatttcagttaggaggaaaaagttcaagagatatattgtactatggtgactacagttaataacaatatattgtaatcttaaaaaa

SEQ ID NO: 598187 - DNA, 393 bp, Homo sapiens
cggaagggctgacgcgtggaggtgccgaccgggaccaacatcctggaactggcccacgatcatcacatcgagatggaaagcgcctgcggcggtgtcaaggcctgcaccacttgccactgcatcgtacgcaagggtttcgactcgcttgaagaagccgacgagctggaagaggacatgctggacaaggcttggggcctggaagcgcagtcgcgccttggctgccaggtggtcgtcgctgacgaagacctgaccatcgagatccccaagtattcgctcaaccacgctgccgaagcacggcactgaggatctgtacatgagtctgaaatgggttgatgtacttgagatcgcaatccagcttgcagaaagcaagccggtagtcgatccggagtcatc

SEQ ID NO: 598188 - DNA, 115 bp, Homo sapiens
agaaagagaccatttttaaattgagatggaccttagagaccttgagcttacttacgtacttcaattgccaccggtacttaggttttaccaccaaatgctgttaacattaatcatt

SEQ ID NO: 598189 - DNA, 404 bp, Homo sapiens
  misc_feature (118)..(118): n is a, c, g, or t
atacgcttccccacagtagcacgaggagaaaatgctggaggtctagagcaagcaggcgcttcccggggtccgagcaagcggatcttccctgagtctggagcgagcgtgccttccccgnaaaatggtctgcgtgaggtcacttcattttcttccttttgctcatctgtgtttgctaaaattccagccctgagaaatcagtggctcagagggtttgcatgtcttccttgtcaaacgtgtgtctgaaacaggctgggggtctgacggggcctgggttcaaatcctgactccggcacttcctgaccgcgtgacccccgatgagtggggtgaaaggtcccaccctttccaggctgcgtctcctcaccgtgaaatggggtgacaagctcccacctcactgtggggacggg

SEQ ID NO: 598190 - DNA, 263 bp, Homo sapiens
cctctcctctaggtggactactgttgtttttttaattattatggaatgggattttagaaaatagaagtacctttggtgtgtgttttagggaaggtgagaggaatctgctctttctctgaatactgttttgacccctggcaggaccttggaaggccaaaacattaacagtagacttctgttcactgagagttatgttatagaagataaaatggtttgtgtgtttattattgtatttgtgttgatataaattaaatggtaattta

SEQ ID NO: 598191 - DNA, 636 bp, Homo sapiens
  misc_feature (184)..(184): n is a, c, g, or t
tttgtggtttttcaccagctgccccacaccacacaaattttttggtgtcggcgcggggagagagagtttgtgttatagggtgccccctttccccacaatatatcgcgggtgttgtgtgcggggtggggcctccccccccacatgaggcggggggggcgctcttctttgggggggaatttttgantggagattttttctctaaaagaaggggggttggggtttttgtcccgggaaaagggggccccccccaaagagggttcccctttttttttttcccccccccaaaagggggggggtggggggccccatgggggttttgccaaaaaaaaaaagggcctttttttttggggggccccggggggttttgggttccaaataggaaaccccccccaaaaattccccctttgggggggggggccccccaaaaaggttttttttgggtttttttttccccccccggtttttttttttggggggggggggggcccccccccccccccttttgtggggggtttctaaattttttggggtttccgggggggcccccgggggggcaggtttttccttttccccccccccccccggggggggggggggggttgttttttttttttttatttaaatttttttccccca

SEQ ID NO: 598192 - DNA, 601 bp, Homo sapiens
  misc_feature (210)..(210): n is a, c, g, or t
  misc_feature (232)..(232): n is a, c, g, or t
  misc_feature (234)..(234): n is a, c, g, or t
gcgtcccctcctcgcctcgctcaactaccggctcaccccccactcggccccccattcccggcgttccgcccccccctcctgcggtcaccccaccccgcctaggggcagtccgggccccccccccgtgctgggtaccattccacccaacaacccttctgggggctgctctcccccccggcgccgcccaacggggagtttgtctctctcggntagagtggaaaggggggggccnangggccctcccaaacccccggaatttccttcccgcccctccaaaaattggggcccccttggggaccccccagttggggggggggcccccccctccccccccccagggttttggggttttgggggggggcccccccccctgaggggggaacccccccccccccagggtttttttccttggttttaaaccgccccccccccccccccccccccccccaggggggtttttaacggggcctctttgtttgggggacaaacccgggccccccccgggccccttaaacccccggggggttccccccctggggttgggctttttcagggccctttttggcccgaaaaaaaaaaaggaaacctttgctttttttta

SEQ ID NO: 598193 - DNA, 853 bp, Homo sapiens
taaaggagacatctggatataccccatattaaggacgagtggtactaccagatagaaacttctgaaattggaaattgcgaggccaaagccttaatctggactgcagagagtataacgcagacaattgccatcgctggacagtggcaccacgctgctgcgcctgccccagaaggtgttttgatgcggctggtggaagctgtggcccgcgcatctctgattccagaattctctgatggtattctggactggcgtcccaactggcgctgctggaacgaatatcggaaacaccttggcatcttactatccctaaacatctccatctacctgagacggacgcagaactccagccaggctcatctccgctatcacacatcctgcctcacagcttctacacttcagacccactgatggagcgcgaccgcgccctgcaccactctatgaactgtaaccgcattcgcggcatctccccatccacaccatgcgctggtgcatcggctgccacgcgctcgatgcgacgggctctctacgctcatcttcgcaccagagcccagaaccacgggtggcgcacggcagcgcagcccctgtgccagaaatcgcagactgctagacactgtctcgacattaccggagccttacctcacacagaagatgatagcccagccacatgctgtccccgatcagcctcagcagcgagacccacacgggaatagcgtcccatagcgctcagaagcgaaaggaagcaaacacataggactaaccacccgagcgatgcagaacggaacaggacgccacggacctcagccccaaacagcccccgaccaacacagaaatcatcccgcgcactaagacaaca

SEQ ID NO: 598194 - DNA, 241 bp, Homo sapiens
tcgctaaaaaataaagacaggtcctgctttgttgcccaggctggagtgcagtggtacgatcttggctcaccgcagcctccacctcccgggcccaagtgattctcccacctcagcctcccaagtagctgggattacaggtacaggtgaggaacaccatgcttggcccattgtaaccattttatctttttttttttttttttttttttttttttaaaaaaaaaaagcccccctggggccccag

SEQ ID NO: 598195 - DNA, 433 bp, Homo sapiens
tagaggaccccgaacatgtcgagtaccaaatataagtattagaacatttatataaataagcccgtatgtcctatagtatttaccaactactataaaattcagccattgactacctaattccaaatgcataagcttgaactattataattgtctaaagaaggatatttagagaaaaatatagctctaaaataaattaactgtaaatggatgggtttaaatgttcaagttattaatatttcaaaaatataaacttttggttatctaggtcaaatcagcatatcaagccaaccattactgagaccccactgtgctatactgttacatgtaacatgaaggataaaacagtataatacatagtccctacccttaaggagttatactataaataagtcaggcacggtggctcatgcctatatcccagcaccttagaagg

SEQ ID NO: 598196 - DNA, 106 bp, Homo sapiens
ccccgggcccttttaaaaaattttttttttttccccccagggaccttttttttttttgaaaaaaaaaggaaaaaaaaaaaaaattcctttttgggggggcccccca

SEQ ID NO: 598197 - DNA, 195 bp, Homo sapiens
tagccggcccgccaagttggcagtaactcagtgaggtcgaggaattgttggggggcattctatgttgttatgtttcatatcatgtacagattgttgtttctagaaccctctgaaatgcattagaagaccttaagagtcattctcagcctaaaatggcttggaacaaacagccagtatctccctaattagaactgg

SEQ ID NO: 598198 - DNA, 395 bp, Homo sapiens
agcggcggggagaccccccgagcccgcggcacaggcggcggcggcgctgagcgggctcgacagccgagcgagcggcggcccggtcctcctcgtccggcgccagagcccgcgcccgagcccggaacgtcgggcagccgagagccagcctcctcggtcgcggcaccggccgagccttcaatgaggggacgcgccggagaccaggggaggcacgaaaagccggaacgagaagttgggaatctcaaatgtagagcccatcgggaatgaacaagatggcgatgcagctgaagagcgtcaagtaggacgaggtcagatcagaacagagagagtgggacttagcagtacgacaaaatctcatgattgatgagataatggggtagattgggtatgcatcacca

SEQ ID NO: 598199 - DNA, 920 bp, Homo sapiens
  misc_feature (388)..(388): n is a, c, g, or t
agagcggaccccagagagccctgagcagcccaccgcggcgctggctagttaccatcacaccccgggaggacgccgcagctgccgagccggcccagtcaccatcaccgtaaccatgagcagcgaggccgagacccaggtgccggcacgaggagctgccccacggcggtacagagagcgtcagcgtcgcggccgaatacgtaagagcaggcggaccgacgcgttacagatgcatccatcctcgagtggttggtccccgaggctgtacgtcacattggcggggagccttgcctgtcgacgcggaaacccaaaaggcagaggggcgaccgaaaagcccgtggagcacgcgtaacaatggccacacgtgtacgcgacacggtgcattattggngccacactgtaaccccgtaagagttggtcgccccaatagcgaaacacgtggtatttgggtacccaaccctatgtatggttgccgattagctggtacaaatttatctccgcacggcgcaagtgttccactgtcggacactaccgacgcggatatttcggaacaacgacacgcggtggggtggttggcacacctgcacgtaagaaagagggacgcaaccaaggcgtgtgcagaacagtaggtaaaacaatcgctcaccaacggcgccgggcacaggagtgtcccccaccggacacaggccgcatctctaaacatgtgtcgcagcaggagccggtaaaaccaagtatactagaccggcttagttcgcaacgaccgagcaaggcagggtccgtgcgaaacgacccaaatgacacaggcacaggattctccccagaacatacgtcgacgaggtgcggggcacaaagacacggcaggggaaccggaaggacaggatcccgaaaagcgccaggggtcaccaaaaacgcgccggcccgca

SEQ ID NO: 598200 - DNA, 139 bp, Homo sapiens
tccgttgcgcgcgctatactgtgcgggaccgggcagtatcgaggagaagtgctggggggtgggcacagggcgatcgcctctgccagggggtcgagcggtgagggtggtgagaggactccgcccacgccgcagaccctca

SEQ ID NO: 598201 - DNA, 152 bp, Homo sapiens
atatcgtccgtgcgctatatgatcccttctgtaccgggatcatatagcgcacggacgatatccgtacaacgctaccccgtccgtcgccgtgacttcgcaaacgtgtcgaaggccaccgccaggacgatgatcaggccgatgatgatctgctg

SEQ ID NO: 598202 - DNA, 103 bp, Homo sapiens
tctagccatccttataggaaaaaggctcacagggcggcagtattctcaggcctagaggggtaaggagcaggaaggacagtccccctcccacatacaccaccag

SEQ ID NO: 598203 - DNA, 128 bp, Homo sapiens
ctttcccataaggttatgttttccaggccaggcatggaggatcacttaaggccaagagttcgagaccagcctggggaacttggctggacctccgtttctacgaaaataaaaataaaaaaattatccag

SEQ ID NO: 598204 - DNA, 698 bp, Homo sapiens
ttcctcatccgcctccttgctcgccgcagccgcctccgccgcgcgcctcctccgccgccgcggactccggcagctttatcgccagagtccctgaactctcgctttctttttaatcccctgcatcggatcaccggcgtgccccaccatgtcagacgcagccgtagacaccagctccgaaatcaccaccaaggacttaaaggagaagaaggaagtcgtggaagaggcagaaaatggaagagacgcccctgctaacgggaatgctaatgaggaaaatggggagcaggaggctgacaatgaggtagacgaagaagaggacacaacgcgtcggggagcgaacgacggacgcgacgcgacagacagaacggtgactggtgacggaacgaggatggacgatgaccgactgccgcgacacgctgagtcagctacgggcaagcgggcagctgacagatgatgcaggatgacgatgtcgataccaagaagcagaagaccgacgacgcgatgactacacagcacacaaggaacaagttacactaacaacacaaaaggccgccgtgacctacccaccctccacttcccgactcagaatctaaacgtggacacctaacgagctagagagggccgacccgcccaccgagggcaacgccacccgcagatgacacgcgcactcacacaccaaaccaaaacactgagaaacgcaa

SEQ ID NO: 598205 - DNA, 179 bp, Homo sapiens
taattgggttgtcatttttccaaacaaaacaaaaccctggcccttttgggagaaactttttgtttccattccttaaggatgggggattgtctgggtccaaattgctttaaaaataatatttaatatttcctggaagctcatttttttggcatgagtctaatttaatttttggaagccca

SEQ ID NO: 598206 - DNA, 243 bp, Homo sapiens
tctgactcccgtcacgcccatgtcgaagcccccatcgcagggtcaatcgtactctgcagccgtactcttaaaactcggcggctatgtgtatcatacgccatcacactcattctcaaccccccgacccaacacctagcctcccccttacttgaagtatccctatgaggcatcattcatccacaagctcccatctgccgtctgcacaacacagacctcaacatctgcacatatgcatactcttcc

SEQ ID NO: 598207 - DNA, 259 bp, Homo sapiens
  misc_feature (57)..(57): n is a, c, g, or t
gaggtggcgcacgacctcttcggtgagcttgcgtcggtctcgtcgattacaagatgngaaaccattcaccgagcgtcactgctaaaccgcggcaggtacttcatcagcgcatggtgggggcggccatcgcgggaaatgagggcgtcaccgtccatgaagctgcacgccttgcccttgatgcgcggcgggcgaattcttgtctgcgcgcccggcaatacacctcgttgccgagcacttcgcggatggtcttgccgtacag

SEQ ID NO: 598208 - DNA, 220 bp, Homo sapiens
  misc_feature (106)..(106): n is a, c, g, or t
  misc_feature (121)..(121): n is a, c, g, or t
  misc_feature (193)..(193): n is a, c, g, or t
aaaaaacccaccagactaacagctttacttgctggccagggcttcaaaatgagacttccagtaccatcctagagaggccaaaacacaatggggaaaagcgagatgntagagagagctaggnttcttatatccttagagtgcagttccacctgcctaagtactgtgtgttgacaggttcatctctattcctttntgggccacagaccccaatttttataat

SEQ ID NO: 598209 - DNA, 771 bp, Homo sapiens
  misc_feature (452)..(452): n is a, c, g, or t
taaagggcgcccgtgtcatcacacaaaggaggcggagggagccaggtctgctctccttctggtcagaatagtttatgtgttctgcatgcgcacacctctcgtcacactactaggcgccgtcgataaacgccgtcacgtcgcatactcggcgcccccctcgagggttactcgcgcaccccactcttttctctttctctggggtgagctgtgcttgaagagtccactcctcacttcgcgggctgtcccaccgcacataatacgcgcgcagtcttataccaccccactccctcgctctgtgtggaacgcactcgcactcgctgcgctctcccccgccggtctctccggcggtgctcgctctctctttgtgtgcatgcccgcccgtgtgtggtctcctctcgcctgcgtcgtcatgtgcctgcagctctcactgcgtgtcgtgcgtatgccttccncgcgcgtcctcacgcgcacgagtgtcgtcgcgttcctctcctctcttgtggtatgtcttgcggctacctatatatgcattcatgcgatactatcaccatcatgcagacgcgcgcgcttaaacagcgagaaagcgacatatatctggtgagcggtctctctacccaggtgtgcggaaacctccactacaggggggtcgagtgagtgagtactgttctgtctgttcagctctctcctgttccttttcgggagtctcgagaagcacccccaaggtattctgatctccccttgagacaggaacgaacaaatgaacagacaaaa

SEQ ID NO: 598210 - DNA, 314 bp, Homo sapiens
ctttctcctgctgttactggcctggcaagcgccgatgttcgacgccattagctatctggtgcatggtcagggctgtgcgcctcactgctgggcgatgcgctaaccctgttgccacgatcaacgtctgatgtacgccatcggcgcgtttttcctctcgcacctgctgtacaccatctatttcgccagtcagatgacgctctctttcttctggcctctaccactggtgctgctggttctgggtgcgctgttactggcgattatctggacgcgcctggaagagtaccgttggcctatctgcacgtttatcggcatga

SEQ ID NO: 598211 - DNA, 162 bp, Homo sapiens
ggagcgggaagcccagagtgaaatctagcatctgccggctggtctgcccggccctaccttcctttcggtctgttctgcgcgtctgcgcgtggtcgtctgcaactctattatgcagacacgagaagaaatagaccaaaaaatcactctcaaccacagcttaac

SEQ ID NO: 598212 - DNA, 153 bp, Homo sapiens
  misc_feature (25)..(25): n is a, c, g, or t
  misc_feature (139)..(139): n is a, c, g, or t
tgagtagcacataggcagtcatgcnagctcataccaattcgcacatagacctacaaacaaaggaccacctttaggaccaacacaggctagagcacccctaggaaaggtgggcacagaaataaatgcaccagtcagtatngctagtaccgctga

SEQ ID NO: 598213 - DNA, 256 bp, Homo sapiens
ttatgtctggtaggtgtctgcgccgagtgacgtatccctccagcacgctgtcacttctatacaggaaatagggggcgatcgagtcatctcgctgcctactcgacaatcttgacacctgacttgccaggatgcacatatacatacgtagaccagtttcctcttggtaacttcagtaaagtcaaaacaacacgtacctcataccccatatattcatatataattgctcgtaagatagtatatcttgaagctgtacaca

SEQ ID NO: 598214 - DNA, 348 bp, Homo sapiens
ttagctatagcagaagcatgtcgggcgatcaacaggcacagtgttgccaaggaatagtgtactgcagtagtacccgaaagctaatatcgttgcctatcatgacagcatcatgaaccctgactatcatgtggaattatccgcacagattatactggtaatgcatgctttagctcacagaggtgcccaaaaccatgttaatagaagtgcgcctagtagcatgatgctcctcttattgccaagtggcacagctgggtatcttggccaagtacctactatcaacaaagggtgtgcaccgagtgttatgagttgtcatcctaagccgctcccagagacaccgtcgaatacgag

SEQ ID NO: 598215 - DNA, 192 bp, Homo sapiens
attgagcgcagtctctggccaatagcaagcaaggaactgaggcctttggtggaacagcctgccctagactttgcaatatgcatttacaatgaatctaagcccccttttaaataacagtgtataatttcacagataatgtgattataagaaaataatcttatttccttcctccagtccattttgttattgctg

SEQ ID NO: 598216 - DNA, 840 bp, Homo sapiens
ccgtgtgccgccgtccccacacaagtccgggggatttgttccgcccccccgtttaccgcctgatgttttcggcgctcccccttctccgctcgctgttggaattgcgctcgccgaaagcccccctggtggtggtcacccgccctccaccggtgctgcctttataggcacaatatgttttcgcccccgtttctatatattccactaggatagtccgcgcgaccacaacatgttcaaacaagagtattggtcaaacgtccacaagtcggtagaagcacacctttggttgcaaaaccgtttatagacgcacgcacacacccattccacacccgtgacaattggaccacggatttttaacaaaggccctgataggaggcccgccagtattccccacagggcataataataatcgtgaaaatcctttttattacggcagactcagtgagcatagtgatatggagaccgcaccaccccgggcaaggaggatagaaaatgtgccaccctctacttcttgtattataaaaaacgcgcctactacgcaacgctatggtgaaagttagactaaagtttatctcagtaagtagaatttttcgatgccccgttaacaccccccacttcttgccccgctaatttactcttggcagtcaatccacagactggttctattgtcttttagacacgggcgagatgcgcggtatcggtgccacccgcaaaccaaccttgtgttctatatatttgcggagccgcccccgggctcaatgtcaaatacaatgtaggtagtcgcgggcacgccactaacttcgagctcacccacatatgccccaatacaccgcgccacataac

SEQ ID NO: 598217 - DNA, 343 bp, Homo sapiens
atgtgcttgaacctgagaggtggaagtttcagtgggcgagattgtgctattgtactccagcctgggtgacagagggagactctgtctccaaaaaaaaaaaaaaaagggtaaagttgagtggttgagggggttattatgctcgggttgtcttgatttcaaaaaaagaaaatttttttttttggttggttggttttttttggaaaggggttgcttggttcccccggggtgtggaaagccgggtgggtgccatatcattagctcagtggcagcccttcacccccccaaactctacacgctgcgttaagtgcaggctgtggggtatctcctcaaaagtctcacccgt

SEQ ID NO: 598218 - DNA, 457 bp, Homo sapiens
ttttacatttacatagctctgtaaaccactgcccagatcaagatctagaacatttccagcatagtatgtctgtttttaatttacatcatatttattatgcagcttgtggggcaaattcactgctttgtgggtttactctgataagaatattaatcagtgtgcatttgaagaaatttaaattattttgaaatagtagaaacatcatcagaaggaatcttatttttggaattacatgggagcaaatagttttcatattgtgcccacaaacaattccttcttgctaatagaccttcttgtagcatgaggtaggagctctagctcttctgctggtagtccttcctggaggggttagtaagtttaataataatatatatctttgtaatgtgtggtgttttggttaaaacttttttttgccttaaaaattgttttgaaggaataagatggatttgtgaaaaaa

SEQ ID NO: 598219 - DNA, 1410 bp, Homo sapiens
atttaactcactgtacgtctatttgtttatttattgttggagtagagcgagagcaatggttccattctacagaaaaaaaaaaaaagagtctgatgcccaggtttcgttctcagtgattaaaagtgaagattttttagaaagtgtgagaccacggtctcacgtgaatattggctaacaacactgtgcaggcaaggctgtgggcaccaggtggctgtggcacttagtaactcccaaagggtggggggataacagaacgtgaaatatgagccactgtggccccggcctatacagtgtttatagctctcgttataacttgtggcaattcacaccacaaatgtgccttggccacgatatagaaaagaagtgtgtggcgtgtgccattgagattcacctctgtgtatcccgagcgccaaatatgtgggcatacaaatccacaataaattacccactcttggaaacagtgtgggctggtatatcaacggtggcactcccttttcacccatctgtgagagaaagcgcccgtgaacgtggattcaccccgagaaagttaccaaaagacgacggggggcccctcgtgaaaacaggttacaatggggggccggacatacctaggggaaaccgtggcatctccaacaaagggggaacacatcgacccgggggggagaaataaacccctaatgccgcggcgagaactaagaacagcaccaacacttacaaaaaaacccgtgtgtagcaacacaaaagaaggatccaattaaagtgggcaaacagggcggaaaaggacagaaacaagccacataagagggcacaaggagacgccaaccaaaacacaaaaaccagaaagccagagtaggacagagaaacaccacaaaagcagggaataaggggccacgtggacacccccacaaaaaagcgggcacaacatagggacacccacacggaagggacacaacacaaagggcgaaaaggagtgggagagacaaggaagcccttacgcaaagggaccacacacaacaacaacccacgttgatgtctggcaccaaggagaaataagcaatgaagctagtgaaaccatgtcggaaaaccccccgagaactacaagagtggtaccccaagaagagtgatacgagaggagcgacgtagaaacacacaccccaaaatgagccccgcgaggatgacgtagacacactagggaacaagagaaatgaaccaaacccgatggctgagactaacagccaatggcgaggagaggaaaccacataacaacagacatgatctcgcaacaacagcacgagccaacctccggggcagacaccaaaacaaaagaaccacgacagcgcattagacgcaaaagaggcgaatgacccaaaacgaaacagtaacgacagccagcaacatagagcagactgt

SEQ ID NO: 598220 - DNA, 540 bp, Homo sapiens
  misc_feature (52)..(52): n is a, c, g, or t
  misc_feature (167)..(167): n is a, c, g, or t
gtttgactattggtcaaatggactctaatactcaggtctcctgacccagttnttactgtcatttctattctacacagtatactctgctatatttatttctcttgcctttagcctcacatgacatcagtctcatttttctgtttcaatctgtatccatcttcctcttnctcttcctctcctgcccttctctacacttatttattgacttcttgatccagttatttaacattccataatgagctattgtgtgccaggcactgtgatgggcactggagatgcaattcatgagacagttaggcttttgcaaagttccctgtcccagggaagcctgcctgaggatggggcataacagcagctctttcctgggggaaagacatacactaatgacacatcttactctttccttcacacagaaaagcatgtcttgtcccttactctgctttcccaggcctcatcccatcctgcataaatcactgctgcatccaccaatctccctgctccagcgactgtatcatggtcaggttctggccatgcttcttc

SEQ ID NO: 598221 - DNA, 209 bp, Homo sapiens
cgtctgactggggcggttcacccctccttaggcaactggtggtccctccgctcccggggggagcagttgatgccgaacttagtgcggacacccgatcggcgtagcgcactacagcccagaactcctgggctcaagcgatcctcccacctcagcctcccgagtagctgggactacaggttgcctaaggagcgggagaaactgggggtgag

SEQ ID NO: 598222 - DNA, 218 bp, Homo sapiens
tgccacacatcataactatagtactggagggtgtggcctttatatctgtgtctcagttttccccgactccgtttcaaaaacaaaaaaacaaaaaaaaaccccagaaatcagatcaggggtagctttaagggaaaagctatacaggcaacatggtggggtgataaaaggtcctgtgtctggacagaggtgctggttacgtgggaattggattggtcaaa

SEQ ID NO: 598223 - DNA, 1833 bp, Homo sapiens
  misc_feature (308)..(308): n is a, c, g, or t
  misc_feature (729)..(729): n is a, c, g, or t
  misc_feature (1196)..(1196): n is a, c, g, or t
  misc_feature (1833)..(1833): n is a, c, g, or t
ggtccacaatcgagcgaagtcttcacagatggggacggccctgtcatagttcacaagaagcctgcggcacgcccgtcgtggagtgcatgcgcgtaggatccgcatgatgccatggtctaacgctggatccgtacccgatcttcggagaagctcaagacgcagcaatgtgaccaacgcgagagcggtggtggcatggcgttggatgcgcttggaggagtctggcacaatgcttgttcatgctctgtgcccgaagagaggtcactgtcccggacgtctcatgactacaggctgactagagattgcacccngtggttgagacagcgaagatagcagagaggatgatatgagtatcatagcaagaaatagtcaaccttgaacaactcgcattgggcggcgttggacgacagcaaacctgagttggtgtccacgcagtgagggggggtatcaggaacactgtgctccgatatagagttggctcttaggtatcattgaaagtctcctcaacttgaagaagacttggttggccttgacatttggcataggtgtgtgcccccctgggtggcttaatgatcaggtcgtccttggcaaaccgggcaccacgctgtgcaggagaatacactcggttggagggcccattccaatatttagcccccacgcgtgcgaaccccaaagtggttctagaccttgctactttcccctttttaccctatgggcaccccttggccaacnagtgttggttggccttggtatagagtgggctagcgggtttcaacccggtaagaaagcgtcaaatccttgacgtatttaggccgccgaccttttagctcctaccttttcttgtccggcattcttggtcgcttcgtgtccctcgagggtctcagtccaattcgcggttcgaattcgcggtggggtgcactccccaaggcacccggaccaggggcaggttgggggctctttcgtcttggattggctcaacagtcccttgggaggtcattttctttggaatgaatcctccggtttgctaggtccccttaatttcggccaggacttccaagttaactcaaaagttggcggtgcaagttatagccatatccctaagtcaaagggagaggcaaaaggacttgttgggcaattcccttcgcatttacccaactggaggggatgggcggacaggaactgggtacacggaggagggnaaaaagaacccccgaaggaaagagtagttttgttccctcgtgcagcggaggatgagaaccgtacaccggggtgggggacccccagtgaaaagtggggccaggttagagcatttctgagccctttttagcagcgagaagggaggacacacaggcgtaacggccgggcgcggggtcccaaggagggcataccccggtggggaatccctgccggcgaaagacggcgttggcggcgaacgtggcaagcgaagaagccgtcgaaccaacactgggcggtgcctcaagaaagattctctcaggagagcgagcaccatcagttacgggcgtgcactctaaacaaacactatgaagagaaggagaccccgcgcggcgtctattaaacaagcgcggcgcaaggacaggcagaacacaacgaacgaagcgcacagcataggcagcaacaagcgacacgaccttcttacatcgggagaaaccaggagccccatcgaaaaagcgagtcaattcatccctcgtccgcacagacagcatgacaatgaccaccctacatgtatataagcaagacatgaagcaagagcgatggagtacacataggagtatgtagaagcacgagtgactgaacgagtagacaaacgaacatccn

SEQ ID NO: 598224 - DNA, 487 bp, Homo sapiens
gaggaccacttcctctcctcccacctgggattataatttaacatgagatttggcacagacacagattctaaccatatataaactcaaccatacatttgataatgactattattactgatattttagtgttgacaaggcttaagcgtaaaattacttgcagtaatgtatctgaattcatctccaaataagggagaggagaatgtatattagtggtactgcctcttgcagagttggggtgtcatagaaggactagtcttagactcttggcaaaaagtctctgtaaaaatcaaatagaaatgaggaactgtctttattattattgatcttaagtgtctgctgtggtttcctaaaaaatctaaataaatgaataacaaaagttatgcacagaaaaagaactaaaaacaaacaaaaaagcatgactggcctagcatggtggctcgcatctgtaatcccagcactttgtgaggctgaggtgggaggagaggaa

SEQ ID NO: 598225 - DNA, 218 bp, Homo sapiens
ggccgaatttctaattacgggcgcgataaatgaatcatacctcagaagaatggccatgtgaccgagataaaaatgatctgctctgctgatcatgaagagatgagaccagcaggactggcattcaaacacctgtcgggggccagggacatctcacgctttcattctttcagaaaacattttttttcttttttttttaatttatttgtttggtctaattg

SEQ ID NO: 598226 - DNA, 887 bp, Homo sapiens
tgcactcttggcaagagcacacaacaaatgtcagataccaattttggcaaattagatttaatcttataaatgttttatcttactctttctgtacagatatatcaaatcacatgaaatatttaaagttggaacaattataattacctataaagctgtggaaaaacttggaagtttatattttgggaaaaacatttcacttttcatcagaagattatattattacatacacaatagcataactgaagggatgggattacgctgaaacgtggtgtcgggttccaaataacctttaacaaatcatgtatctctggggctcgtgatcgtgtcagagaaataatatatcaatatctaaaattataggggtagagatacatactatttctccatatgaatttgaagatatttagtgcttacaagactgctgaaagcaaatccagttgctcctgtgctagatggtagccagagaatttttatagtaatggaaggttaggccttaatctcttcatgtgcattttcatttctgtaaatcagattaagtcctttaatattattttacattaaaattggggtgtaatcggccattaaactttcacaaatgtacttttaacacggattaattactcatttagtcatttacacaataatattgcatactatctacatgggagaatttgaattataaggatatacgaatacgtgagaaagtataatgacttttacgcaaaaacgacgacaaccagaacattttggcggccgccccgaagttttaaactcgtgtgggccgccaagtggtagattgctaggtcaagaaccgtagaaggtgggtcacaaaaagcggcggcttaaccaagtggttggtaagaggaaagccgggggggaggcacaaa

SEQ ID NO: 598227 - DNA, 341 bp, Homo sapiens
cggttggggagtatggaatgtcacaccgatttctcactggctttagtctgttacttttcgtgctttaatgctgaactgtaattacagattcagagttatgagtgctcagctcctcagggctaattaattagtcggatttataagtatttggttctcagagatcaatgaccctcattggtcgccttaaagctcttagaaatccctttcctgatagctagttatcttgggaagcggtgggcttgggagagctgcttttgctttggtggctggttgagacgtacagcctgaacactctcaagcagcctggagaccatagtgccctctgatagtcgccagccgga

SEQ ID NO: 598228 - DNA, 437 bp, Homo sapiens
  misc_feature (350)..(350): n is a, c, g, or t
  misc_feature (361)..(361): n is a, c, g, or t
  misc_feature (389)..(389): n is a, c, g, or t
  misc_feature (392)..(392): n is a, c, g, or t
  misc_feature (394)..(394): n is a, c, g, or t
  misc_feature (397)..(397): n is a, c, g, or t
  misc_feature (411)..(411): n is a, c, g, or t
  misc_feature (414)..(414): n is a, c, g, or t
  misc_feature (416)..(416): n is a, c, g, or t
  misc_feature (419)..(419): n is a, c, g, or t
gctgtgatctttcattatacaaatttgtgccttatgttataggatttttctttttttaaaatttctcttttcctgagtcatcatgttaccaaggcagttgttttgaaaatgctttcttatcttcctaagtgggatcatttcttacaaatgtagacttttccacttagaaaagaaaaaaatctgttttcatttgttttcaaattatttttctttttaatggcagtttgattcccagtttgacagccatttggagctgctgaaggggaaaaagaaagaaaaaacccaacattttttcatgttcctgggtgaaataaatctgtttagtggaatattaaatgcccaaaatgttncgattaatttnggcaaactttagacaaatccaattgtcnttntnttncaaatatatgattncantnaangagaggaatttccaaaaa

SEQ ID NO: 598229 - DNA, 401 bp, Homo sapiens
  misc_feature (153)..(153): n is a, c, g, or t
  misc_feature (174)..(174): n is a, c, g, or t
gtcagctgcgtttccgcggatcgcgagttgaggagctcaagctttgggaaacatggtgtgcattcctgtgtatcgtcattccagttctggctctgggatctacaaaaaattcctggagccatatatataccctcgtggtttcccccttcggtnaagtcgtatattgcgcctaangaaaaggcattacaaggaattccaatggataccaaatcaaaggggcaaagggtaaacctttaaacggggtgcaggactttgaagtgggaatttagcccaatcaaaaggtgacccaacagagacacttctggtggcatccaagcggacaaggacctaacgtgaaacatttttcccctaaaaggtgacccccaattccatttttacacacacacttggggacccttgga

SEQ ID NO: 598230 - DNA, 306 bp, Homo sapiens
  misc_feature (63)..(63): n is a, c, g, or t
ctcagacccctgagtagctaggactacagacatacactactaagcctggctaatttctaactnttattttatttattttttcattgttttttgagacagagtctctctcaagttgcccaagctgctggagtgcagtggcgcaatctcggctcactgcaacctccctaggttcaagtgattctcctgccatcagcccctggagtagctgggattacaggtgcccaccaccatcccagctaattcttgtatttttttagcagagacagggtttcactatgatggccaagctagtctcaaactcctgac

SEQ ID NO: 598231 - DNA, 114 bp, Homo sapiens
tagaggatccccaagcagttaatacatgactcaccaagccacagacttgtcttccacaagcacgttcttaccttagccacgaaggcccaagccacaggtagtaaagggtggaac

SEQ ID NO: 598232 - DNA, 1415 bp, Homo sapiens
ccagaagtgcgacgttaactttgaacggtgcttgtctgtattcacctctgctaggtttacctctacaacgtaaaatctcagcagctatgctgactgaccactacagtaactagtctcttagagactctcgctatccaagttcccccctatcccccaggcttagtacactaccgctagacactacctttctcactctttactccaggtcatttcctagtaaacactggcatagcctgcactcttaaagactacctcccatcacccttccacgcaatcggcgaaccactcaactgccgaagttgagagccccccaatgcactcgccataacaatttacttacaactacccaccaaaccataacacaagccgtacgaccgtaacacactatcccgagctcccccatggccatatcaacaaccgtaacaaacatcaatttacctacccgttgcagttcccccacctaacttactctaccacacccgtcccaagtatatttctggcaccattaccccaaatcacacgcggccaaaacaccactacaactacggcgagtggctatacacccagtcccccatgtccaggcgggcaccgcgacaacaacggccaaagaccgaacgacggctgcgccacaactacagcagaccaacaacttccctctggcaaagacgaacacaccaacgacaaagctacgcaaacgtacacacgcacctagtgcgaaccagagcgacacgcccgtacccacgacgcactcaacgtgcggaccacactggctctgcgcagcccaccgcgacacgtgacgaaccccgactggcttctcgacgaccccaccaccacgcacgctccaaagctcacgtctaccacataatagtcaacagcgcacaacccatctcacaccacgcacaccgaggagcataaccccgaggggaccctccgcgcaacacgcaaggcagccacctacgctcacaccacaccaaccaaggacaagcttaagcaccacacacgactcccaacacggcaacgctcggcacaacccgccacccggaccgcgcagccaagataccgaaccccagcgctaaacaccgcctacacctaaaacccaaccctccgctgcgacacctacatgtgcgctcacacacgacatacggacacctaaacaaacctaatcgaaacaccccataccatgacctacaaaattgccgcccatagagacaaaactcaggtgacaacccaacgtccagcgaactacaagcatgacaacaacgacaaggccgacccagcggaaacgagacacaacgcgacaaaatcagcagatccacgcacacactccacccaacctagcggccgacacacagaacaacacacctccgccacaccacgaccaagccgcccaaacgacaccaccacaaaacacccac

SEQ ID NO: 598233 - DNA, 252 bp, Homo sapiens
ataaacctaccgatgataggatattgcatgtggtgtatgcatcggagcgtagtccgagtaacgtacggggacattccggataggccgagaaagtagtagtgggaagaaggtatagatttacgccgatgaatattataagtagaaatggattttggcgtaggtatggtctagggtgtagcctgagtaataaggggaaatcagtgaatgaagcctcactaatagataggcaaatacagctcctatagataagga

SEQ ID NO: 598234 - DNA, 231 bp, Homo sapiens
cttcaccagaccctggtaggcagaagcatggaagcaggcacgaagtatgaagcggcagtaagcaggaagactgagcagaatgcacgagaagccctcaccaatacccttgcagaagcatgaagcagtatgatgaacaagcatgaagaattccggtggatgatactacggatccggcgaatggctgatcgcatggatccaatgcaatcaatgtcccgggcataagcatgacag

SEQ ID NO: 598235 - DNA, 656 bp, Homo sapiens
  misc_feature (236)..(236): n is a, c, g, or t
ccctgtgaccccaccctggttagagagaatgccccccccaccgccttttccccaatgtgcccaccacatggtccacttaaatgctctatcttgggaaaataaaagagttgacttttagaattcctatgaagaggcaagctatcaaaaaagaaagaagggctgaagccttttgccccgcagaaccctggaactccactcttccactggagaaacgctctggctatagacactgcttncccaatgtagaagaggccctttatgtaaatacccgcccacaaggcagacaatctgtatatggagacaaaaacacttttctccaagaaaaagcgaggtttctctttgaccacttaatatatgagggccaatgcgcacttaaaaattggccctccacagcactggctgctacccacattgcacacaccacatgcacggccaatccacgggaaggacacacccacggctgggggcgcgcatgcctgtgtgaggtcctgtttttacctgtctaagctgccccaccggggcctactcacttattctgttcaccccctctcctcctgctcacgctgagacctgaaactatttgaaatggctttatgtccccgaagactttaatccctccaattcttgtataactttgaataaatggttaatgttca

SEQ ID NO: 598236 - DNA, 371 bp, Homo sapiens
  misc_feature (360)..(360): n is a, c, g, or t
ggagttcaagaccagcctggccaacataatgaaaccctgtctctactaaaaatacaaaaattagcttgggcatggtggtgcacacctgtaatcccagctacttgggagggtaaggcatgagaattgcttgaacctgggaggcggaggttgcagcgagccgagatcatgccactgcaccactgcactccagcctgtgtgacagaatgagactccatctcaaaaaaaattaaaattaaaatcaaaaaataaaataaaggccaggcacggtggctcacacaggagaatcacttgaacctgggaggcggaggttgcagtgatctgagatcacaccagtacactccagcctgggagattgtttgnctccgtctcaa

SEQ ID NO: 598237 - DNA, 388 bp, Homo sapiens
  misc_feature (7)..(7): n is a, c, g, or t
  misc_feature (19)..(19): n is a, c, g, or t
  misc_feature (58)..(58): n is a, c, g, or t
  misc_feature (320)..(320): n is a, c, g, or t
  misc_feature (331)..(331): n is a, c, g, or t
  misc_feature (339)..(339): n is a, c, g, or t
tcgggantggtcccaaccngggaaggccactcccccagggccccctagaactctggcncaaaggctctctgactgactccttccccagatcttcctcacttagcagctgaagactgatgctgcctgatcgccttggaagccccctggaccattacggatgctgagctttggataactcttacagtagaggattcccaactatatgaagacaccctagctggacgatcagttcttattaagaacctgacccctcaaactctacaacctcgatggactggaccctacttagtcatctatagtaccccaactccgtcctgccntgcaggatccntccccacntgggttcaccgttccagaataaagctgtgcccatcggaaaaaaaaaaaa

SEQ ID NO: 598238 - DNA, 99 bp, Homo sapiens
tgctgaaattacaggtgtgagccactgtgcttggtaagaagttacttaatttttggtttttttttatggagatggcttttcgctcagttccctaggctc

SEQ ID NO: 598239 - DNA, 272 bp, Homo sapiens
ataaattaatgtcctctctggattggggggtgaattaccactctgttagttcctatgagagctggttgtacaaaagagcctggcacctccttcctcaccctcttgcttcctctcttgccatgtgatgtctgcatacactgccccctttcatctgccatgagtggaagcagcctgaggcccttaccagaagcagatgttgcaccatgattcttgtaaatcctacagaacactgagccaaataaacctctttctttattaataacccaaaataa

SEQ ID NO: 598240 - DNA, 246 bp, Homo sapiens
tgtgtagctccattggtttcagtgcagtacacaccccagcttggtcatgtgtaaagtgggtggtagagcaccagagggggaccccatcattttcttgatttacagtagtcagagagctctgttctatggggataggcctttcctatcctgcgcctctatgggtggtgacacgaagaagccactccatatatatacgctgctgcacattataactcaaactccaccatccacaacactcactgctcc

SEQ ID NO: 598241 - DNA, 415 bp, Homo sapiens
ggctgtgttcccggtggttgctgccgaaatgggcaagttcgtgaaacctggaaggtgggcttgcctgctgacgctactccgacgcaagctgcatcggaagaacattgatgatggcacctagatcgccctacagccatgctctggggctgaattgaccgtcccccgcaaagtgacagctgcatggcaagagaagatcgcagagatcaaagataaaatcttttggaaagtgataactacaatcacctaatgcccacaggactctgggatatcccttggcaaaactgcgcaataaggatgcttagagatctgcttaaacgcaggccgcggaggcaggcaagttgagagagatcaagacagcaagacaagtggtcttcagaaactgggttagatgcttgtttgatcattaaaatataag

SEQ ID NO: 598242 - DNA, 1295 bp, Homo sapiens
ggagaggacgcggtggcgggtccagctggggctatgcgaaggcacagattccccgtgcagagctcacgatcgagatgcccgcagcaggagtccgacgtcgatggacgtcctccgggtcactccacacgagcagtgagccaggagttaaaccttgggatgtgcccgtgatgttggaccacaaggagcttagaggtccgcagatccaactccttgaaaactgaaggaaagaagaatgcgcaggagaacactctgggaatactccattcaatgaaaactgagagactaacgtgtatacatagctgggccctctctacgaggtcctcgggcatcatccactgggtgtccgcatgcgcgtgggccggtctcttcttctccttttgcgatttgattggtctcgtgaccgtatttaatgtccgcgtgtgtcaactacaggtctcaacttccggtccatcgcccggtgtccaggaccggtgccagtgcggtctatcagggcggacaatcgctgaacagggacttaccgacatagccacgttggcctggcgtgcttaggtcgtaggttgaaacgtttgccttcggactgggtaggcacttgagtcattacaaagcacgggggaagcaggggaagtccaaatcgaatttgtttcggttatataagccattctaacttcagatcaagccaccccagagtaccgccaagtgaaagaggccatattttgtcgagggcggcagaatatacctttggttgattgggaagggcaaaccgcgactatatttgccaatccctttcgcaatagagaggccgtatttgggcgagcccttgtgatggctggcttccgtggttgagcctgaagcagcggcacagttcaaaggtgccctccttggggcggaccaaaggagccagtgatgtgggcccaacggcacccgtatcgaccaacatacagggtggggcgtactgctaggcgttgatgggcccccccagaagaaatcagacgggaagggacaagcttctgaacgtggcacacccgtgtcattggccctttgtaagtcccctggggcttgggtgccaaagatagccaccaggatactgcgagcaaatcaggcacgggcccaaagaggagggatcccaccacggagcgaccaacccccagtctgggaaaccaaagcaggcagacacgggattcacacctggacgcatcgggggacacccgagcccactggagggaccccgtcctgaataggaagcgcagcccctgaagggagcgaccaggggaacagcgcggcccacacaaacgccc

SEQ ID NO: 598243 - DNA, 158 bp, Homo sapiens
acctaacctgggctaatacaggaatagggctagctagtaagtctagcgcagtcacatttgacccgggctttggtggttatttctaaatttttgaggtgcttcgctatttcttgtgtgacctgatagttccctggaactttgggtctgtgtgtgacaca

SEQ ID NO: 598244 - DNA, 1101 bp, Homo sapiens
  misc_feature (379)..(379): n is a, c, g, or t
  misc_feature (695)..(695): n is a, c, g, or t
ggcttctgtgctacacaaccccatcatgggctgtcacagacaccatgaaccactcacatgctcatttgggtgaacgatggcacgccactcgactcgaatagtgcgaagaattcctagcatgttgtcctcttgccaggaggtatgctgttggcatggggatagcgagatcgagacgcttgtagccgttgttacccatgctcctcacaaggcatgccatggggccgagataatagcgcagacaaaagcagaccatctcagacgacatgactcgactatgttgaccaatatgatgcgaagacgcctgttcccgtaagactcctcgatctgcatgaatggcacgacccggacatactagattcgagccaataggtacatgtgntacaaatagtaccgttggtttgcggcctaggtctggctctgaagacaattgccacatttaggaaaggaatctactacacatcccggtggcggacaacctacgaagcggacccaatccactacaagtcctgtgtttctccggtcgttttaaacaggctacgatcatttaccaatggtcctggggaccctcctggaacacggttacgtcctaacataccgtccaaattcgagagccgcgcagcgcaaggagtgacctagctggaagtcaacctaacctagtgatttggctcgactagtgtttggttctccctggctgntgggcaagacgcgggactgattgatagacttctaagcgccttatcacattgaacaatctcccattgttttgccgtgaccatttgaacgtcgtcggtgggaaaagtctttggaccttttgcgcggaaaataggtctattgttaaacgcaacgcgaatttgggtccttggaacgtgtggcaccttgcggcctaggaaattcgaacggcgtctaattccagaattggccttagaccccaaaggggagtccttcgcgttcgagataccatactcattaatagttccccacttaaaccgaaaacgccactgcggaaccgaaaggccctcggtgaagtgccggttgtcttggggcccaaagggtttccccaaacgccgggcatgtggctttgctcccccccacagaactttc

SEQ ID NO: 598245 - DNA, 221 bp, Homo sapiens
taaaaaaaaaaaaaaagcaggggctgcccaaactttttgtttcatatttccctctctaaaaaaaaaaggatcctggtttttggataaaatttttcccagaatcccaaaaaaaaaaaaaccctagaattttatccacaagatcagtttacagggcccagtgggtttcttttccaactggcaatgtttaggttttaagccaataaagttcccgtttatgtgga

SEQ ID NO: 598246 - DNA, 442 bp, Homo sapiens
agtcatctcccctgtgcacagacagagaaatccattgtgcaaaaagtgcttccctggcagccgacctggagtccaccccagcctttcgccggtgctggggacatcagcgttctggctcccaggctggggagtggctccgaggatcggtcacggagcctcctgggtgtccgagctgcctcaagcgccccggggtcttttctgacttgatctgtgtttttgtcctgcggaggagtcgggagctgtgcctccatctgctgcagctctggggtgctgctgccctctctcacctgctagccttcggtgtcctggtccctcgtgttgcaagatttcatgccgtgtctgcagtttctggagagcactgagcgaggtgccacacgctgccatccgaactcaccacagacactcatgttttcatcggtctgctcttctgtcatctctcatt

SEQ ID NO: 598247 - DNA, 1414 bp, Homo sapiens
caggacccccagagggttgccagaagaagcaggcgtttttgttaacctcccgccccccgttcgatgatggcggttccttaaggatatccgaagcccctctggtggcgcgatattctgcgccccccaggggcacacctcttgaaggaggtgttaaaagagaagaaagatagacaaagggagggttttcccctgccttgcgcccccacagaaacccccttttgtaggaatcaatagcgccggagaggagatattttgcgcccagaaaccactgtgataatgatctccctaatgccccccctgtgtgaagaaaagagaaagtgtttgtgcccccccacaaaagaggatggcgttttcgggaaaaagggcccaaaggggagtgggaaaacctttgaatcgctgatggtgagaatgagccctatagccccccgtgggtctgcgccaaaggggaaatatatataggccccagagaatagtgcacccagggaacctgtggaaaatatgccgggaattgggccggcagagggattggcccccaagaataaaagactcgtgcccaaaacgtgtttcgtgaagaggtggaccctcgcccagggaaccccccccgcaattttggggcgcttgtttgttccacatacccagaaatattaccagacgaagggtttatacccacaataggggagtttgtagacccccccaaaagggtttctcacaaaagggttgttttctcacgccttttttgttttccccgctttctcgtcacacaaatctcttcacacatgtgaaaaccccttttgtgtgagaaagcctctcacaaacacagggcttttctgagattaacacacatctctttgaagagagatttgttagggagccccacaagatattttgccacatgtgggggtataccccccacacatctctggaagattccacgctataagatgagaacgtatattgtttaccacaaggcgcgtgtggtttaatggccacacaagatcacagtataagaaacgcgagaatttggctcttgaccacagagataacacgcctcttggagattggctcgcaattttctctgtgtataaataccgcgccacttacattctgccactgtgaaggagatttgaatgttcctgagagagattctaataactcggttggagaaaacgcgctttcacaaagaggccaaataacttccctgtggccccttccaaattgtctttctccacacgaaggtgtgaaatgaaagaaaaaagagccaccccacttttgtaagaaaggtggaagaatgctggccacacacagggaggaccacgagtccacacccgcttattaaaaaaattaactaaagtgtctaccctgattatttttctaaactggttggttaataaaccgtacccgctctccaaattta

SEQ ID NO: 598248 - DNA, 957 bp, Homo sapiens
  misc_feature (33)..(33): n is a, c, g, or t
  misc_feature (63)..(63): n is a, c, g, or t
  misc_feature (95)..(95): n is a, c, g, or t
  misc_feature (104)..(104): n is a, c, g, or t
  misc_feature (111)..(111): n is a, c, g, or t
  misc_feature (119)..(119): n is a, c, g, or t
  misc_feature (130)..(130): n is a, c, g, or t
  misc_feature (132)..(132): n is a, c, g, or t
  misc_feature (138)..(138): n is a, c, g, or t
  misc_feature (147)..(147): n is a, c, g, or t
  misc_feature (151)..(151): n is a, c, g, or t
  misc_feature (153)..(153): n is a, c, g, or t
  misc_feature (155)..(155): n is a, c, g, or t
  misc_feature (169)..(169): n is a, c, g, or t
  misc_feature (203)..(203): n is a, c, g, or t
  misc_feature (210)..(210): n is a, c, g, or t
  misc_feature (227)..(227): n is a, c, g, or t
  misc_feature (229)..(229): n is a, c, g, or t
  misc_feature (254)..(254): n is a, c, g, or t
  misc_feature (266)..(268): n is a, c, g, or t
  misc_feature (271)..(271): n is a, c, g, or t
  misc_feature (299)..(301): n is a, c, g, or t
  misc_feature (304)..(304): n is a, c, g, or t
  misc_feature (308)..(308): n is a, c, g, or t
  misc_feature (327)..(327): n is a, c, g, or t
  misc_feature (335)..(335): n is a, c, g, or t
  misc_feature (337)..(338): n is a, c, g, or t
  misc_feature (402)..(402): n is a, c, g, or t
  misc_feature (413)..(413): n is a, c, g, or t
  misc_feature (439)..(439): n is a, c, g, or t
  misc_feature (459)..(459): n is a, c, g, or t
  misc_feature (522)..(522): n is a, c, g, or t
  misc_feature (540)..(540): n is a, c, g, or t
  misc_feature (553)..(553): n is a, c, g, or t
  misc_feature (617)..(617): n is a, c, g, or t
  misc_feature (698)..(698): n is a, c, g, or t
  misc_feature (726)..(726): n is a, c, g, or t
  misc_feature (843)..(843): n is a, c, g, or t
  misc_feature (883)..(883): n is a, c, g, or t
  misc_feature (891)..(891): n is a, c, g, or t
  misc_feature (949)..(949): n is a, c, g, or t
aaaaaaatgtcatgacaaggggttcaaaaaaanagctaggggcccagtggttacaaaatatanccccaccccacaacaaacaggctaaaagaaancaacctggntggtttnaaaagagncgggcagaagncncccganccacctcanaaanananaaccacggccagcnccgccaaaaggagtagcggagacaagagaaaagncccagangccacccagggcccgangngctcctcgctcctcggacacaagtncacggaggtttnnnttnggaaaaggcgatgtggggccagctaagnnntgntgcncctgctgggctgggcagancagggctngnnagggcctccaggtccagccaaggtcctgacctacatgacgaccaggcccagccaaggtcctganctacataacgnagcaccgggtctttttctttttttgnttttttaaccgcagcctctntttgggccggtatttctccaggtaggttatctgcttgctgttgatggctccgcggcgcttctngcggatgaactggatggngttctcgtacttnatcccgctctcaataagggccagcgccacaaggactggagcccggcccaggcccgccacgcagncaacagccacgcagctgctggggggcctcacagaacttggccttcaccaggctcagccagttttccactaccttgccgggngggggcgcccatcgtcaaacggccagtncacaacggtgatgccatccttctccagcggcgttttgtcataggtcacttcacacacacgcaccacagtggtagccccgtacttcttcaggtcctcaatgaaggtgctgagcgtggngttggtggggttgtgggttatgaggaagcgcatgtttttntagctcanctccaccggggccgggcggttcatccgagccatggcgccttccgacgggcccggcagnaaaaaggg

SEQ ID NO: 598249 - DNA, 1021 bp, Homo sapiens
accaaggcatactgaacacattttttagcagctgggacaacaacagatatcagaaaacacctgccatttattaataacctaagcagcatctctataatactcctacctcccggcatttaaagtgtgggtgccaagtgcccaaagttgtgcatttccatgggacgagtcagaccatggaatcatacttcatgatcccacacaacaacaaagtgtccaaacagtgaggcccatgatccccaacatgcactcaatccaagagtttctacatcctgatggtggaacatcttataccaccaacgttttacctctgactatcaacactttggccttgtcaatagtacaccttgctcatctgtcaatgtggaagatgtctcaggagccatatcacagtctgtcacctgggagagactcccacgactactggcacagccgaaagaatccacggaagaacggaaaggaacgatgggacacaggaccacggcatgacaactactgaggacgcagactacctaagcaccacacatcaacagcgagccacctggccacctcaccatccagatcgcacacactggcgctacacatgagaacacaatccacatacaaacagacctgcaacctcgcacaccgaggtaccacgcagcctggacctgccacaaagatcaggtaccagacgcctcaacagacacacaccacacacctcgaccacaatgccaccggtccaccacgaccaccacggtgaccaccggcaaacaaccagagacacccaccaaaccataccaacacggacccaaacaacatggcaagtgcacacgcacaataaaaactaagcccagcaaacatcctccagatagggcgatcgtacacactacaagcactcaggcaacaccccgttatcacaaacgcgaccacccacccacacaccacgaacccgggtcacaaactacccaccacgacaacaccaaaaaagcgacctcaaccgcaagagcgaacacaaaggcccaaacaatacaacgcaaccaaa

SEQ ID NO: 598250 - DNA, 377 bp, Homo sapiens
tggacctcctaatttgcctaaatttgcctaattttgcctaaattttgcctaaatttgcgagtgatcttcctattaagtggagtcccatagagcagtagagaataaaattagaaaaaatggcccagccatggtggctcacacctgtaatcccagcactttaggaggctgaggcaggcagatcacttgaggttaggggttcaagaccagcctggcccaacatggtgaaaccttgtctctactaaaaatatgaaaattagctgggcatggtggcgcatgcctgtaatcccaactactcgggaggctgaggtgagagaagtgcttgagcctggagtgcagaggttgaagtgagctgagatcacgcaactccagcgtggatg

SEQ ID NO: 598251 - DNA, 246 bp, Homo sapiens
aaggtggaagcagccattatggatgaatggaaaaacaaaacaaacaaaacgtggtatatccatacaatgcaatattactcagccttaaaaaggaaggaaattctgatgcatgctacatagatgaactttgaggacattatactaagtgaaataagccagtcacagaaggacaaatattggatgattccacttacatgagcagtcaaacccacggagacagatggcgaatgaggagttactttgacg

SEQ ID NO: 598252 - DNA, 372 bp, Homo sapiens
  misc_feature (181)..(181): n is a, c, g, or t
gctgctggacagttcagttggcagtccccaaacgtaaggcgtaagagttaagaagaacggccaggcacagtggctcacacctgtgatctcaacactttgggaggccgagacgggctgatcacctgaggttgggagcttgagaacagcctgaccaacatggagaaaccctgtctctaaaaanaccaaaattagttgggcatggtggcgcgcacctgtagtcccagctactcaggaggctgaggcagaagaatcgctcgaaccccgcaggcggaggttgcagtgggttaagatcgagcaattgcaatccagcctgggcaacagagcgagactccatttcaaaaaaagaatcaataaaaatgttaaaagcacaaa

SEQ ID NO: 598253 - DNA, 207 bp, Homo sapiens
aaaaaccagaataagacacaaggcggatcgggaggaccaggatgagacacaacagtggcaagacgagaaagacaaagacatgggcagacgcaaacggagcgcagaagttgcaggcccataccacggagcgagaacaaaaacaacgcaagcatcgaacaggaaacgagcacgcgggcacaagaagaaacaagacccaagaatacacaa

SEQ ID NO: 598254 - DNA, 257 bp, Homo sapiens
tatatatagccaaatacaaggacgatagctggaatagacgagaatgctctagcagtcttgactagtactaagaaccagtcaagaatcataggagaagcctcgaacccatagactagtcactactaggaaataccttttagcatatagagtagtgtagtagactagggaacaaccagaaactctacaggccaaggtggtaacaaaggactggagagagaatatgtctagcaggaacaggcaagacatacacatataac

SEQ ID NO: 598255 - DNA, 229 bp, Homo sapiens
  misc_feature (219)..(219): n is a, c, g, or t
cagacagagtcttgctctgtcacccaggctggagtgcagtggcgcgatctcggctcactataagtctgcctcccaggttcacgccattctcctgcctcagcctcccgagcagctgggactacaggtgcccaacaccacgcttggctaattttttgtatttttagtagagatgtggctttcaccttccgccatgattgtgagccttcccagccacgtggnactgtaagtc

SEQ ID NO: 598256 - DNA, 154 bp, Homo sapiens
aaggagacacaggtagggagatggaggcccaaactggaacttcatttgtcttaccttggtgtcaccttgtatgtcgaactgcgaggattgcttgggccgaagggttgctctgcccgccgcgctaagctgtgagctgagcaaagccctgggctca

SEQ ID NO: 598257 - DNA, 212 bp, Homo sapiens
ggcttgatgtcactgaggaagggaccagcacgcctctaaggacagtaggaaaaacctaggcgggtgttagagcagggagtggggtcccaggagctgagggcccaggatcgacatgattctgaaggtgattgtcatgggtgccgggagcaggcggggacaccgtctaggcttcctaggggccgtcctgtgcctcggcggccacggtggggtac

SEQ ID NO: 598258 - DNA, 1282 bp, Homo sapiens
  misc_feature (334)..(334): n is a, c, g, or t
gcaataactggtcttcgtgcagacagacttggactgttgaggctgacatttggtacctctgcgcgtgtatgccacgatgctctatcagagcctcgtgcgcgaagcgtggtatggcgctcgcaaagatagatgcatagaagggcatcccacctccaattggcgtgccgtgttcatcgttccatagaattcctcagaagaaccttgtccacgacactagcgtagtcatgcgagtctaagtactcgctatgctcctattcagtgtgagtttcgagttgtgacagggctaggcattagtctatacgaagacctcgtcacttccgaagccccacattanctccagtgtatgactcctggaaaagccagccatggattgcaatgcgagcacggcatgaacaggcgcatagaaaaggagccatacgcgttacgctccacccggagcacgtactctacggacgcgcactaatagaagcgggcatgcgtgacgtttgaggagtggggcgatggtcgaaggtagtccagtactcctgtagtgcacgtcttgactattggaactggccagtagtgacggtagtgcaccaggtggtaagtcgcggaggcacgcctagtacgtaggcaacgggtttccccaccgctccttaacgctagtcacgcgactcgaaagtttcctagcagccagaaacacgactttacgaccagggtggggaacaggggcccctggccacgagattacaacctggacagacctgttgcagggcagtgctcggatctgaagtcacgcgcgaggcacgcaagtgctcgcccattggtggccctgctctcgaccggccgtgaggtcccgagcggcccgctctatccgggacagtagccctctaggaatgcagtaaaagccgatcgagagggccagggaggctggctggggcagcaggttggcgttgcgggcctgggtagagtaggtttgggggaaaaggaacacctggccctttccagggcgcatcggaggacgggcaagggaacgtttccctgggcaccaccccgattcggattccttccattggacttaagaggttagaatgtgggttcgcccacacctgtgggtccgtgaaaggcaaggatggttatgccaagcacgggggggacttcacgagcagaaagaccatataaggcaaaaggccagcccattagactttattacgcaactgtccagctgtggagcacgtctgcgaactatgggttgtgtaaactaagtaattacggaggtggcaactggcgacaacggaggtag

SEQ ID NO: 598259 - DNA, 1114 bp, Homo sapiens
atgacccaccaaatcacatgcctatcatatagtaaaacccagaccatgacccctaacaggggccctctcagacctcctaatgacctccggccatagccatgtgatttcacttccactccataacgcttcctcatactaggccatactacaccaacacactaaccatataccacatgatggcgcgatgtaacaacgagaaagcacattaccaaggccacacagacaaccacctgttcccaaacacggccttcgaatacgggcataatcctatattattacctcagcaaagtctaatacattcgacaggacttatactgaagactattaaccaatcacagacctagcgccccttacccaccccaaattaaggacgggccacctgtgtccccccaaaccagggccatacaccccccgcttacaattcccactacgaaagctccccactcgctaaaaccacactacgtaattacacctccgcacatcacggcagatactcaaagttccaccctctgacggctcaaccacaataaggcgtaaaatacgaacaaaacaaacccgcgaaaaccgaacgagtacacttccaaggccaattgggtttattacacacagatttacctgggaggcctcatacattctaccccactccctaacaaaggacctccaggacgctacatccggacggtccccccgtttccacaattctccggaaggagagtttacaagctcaaccaatatttatgggtagaccacagagcattcccaggagcctatcacacaggccaacaatcaacggggaggtcaaccatttatctctccacacaacttaggggactacatcccggccacactcaacacctctgaacctttataaattctccaaacggaataccactatagaggcgtttcgaaagacccgccgctgaacacactgggaacaaaaggggacacaacctgggaggccaaaaaccccggactggaacaccccaacaagcaaagcaggcaagcccccacacagccgagcagcaacaacaaaaaaccactcgggcccagcacccacccccaacacagcaacaccccataggccgaacacacaaaacaaaaccacgacaagaca

SEQ ID NO: 598260 - DNA, 81 bp, Homo sapiens
ctagaagattcagcaaagtacttttgtgctcttggggaactcattttgcctactgggggaccttacaccgataaactcact

SEQ ID NO: 598261 - DNA, 280 bp, Homo sapiens
aaaataaaaaacggactaaagacacccaaccgtaaacaacggaggactttgacaacaggctggtgaaccacttcgtggaggagttcaagagaaaacacaagaaggacataagccagaacaagcgagccatgaggcgactgcacaccactgcaagagggccaaggggaccctgtagtacagcactcaggacaacctgaagatcgactacccgcttgagggcatcgacttctatacgtccatcaccaaggtaagagcaaaggagctgtgtccgatctatccc

SEQ ID NO: 598262 - DNA, 818 bp, Homo sapiens
  misc_feature (37)..(37): n is a, c, g, or t
  misc_feature (69)..(70): n is a, c, g, or t
  misc_feature (220)..(220): n is a, c, g, or t
cagatggggtctcattatactgcccaaactggtcttnaactcctgggctgaggggatcctcctacctcnntctctcaaagcactgggattacaggtgtgagccaccatgtccagcctactttcttttcttaaaggacaatggattgcagcaattttattaactaggacattattatgaggattgccagagtataaatacagtcgggggagggagcttctnaagaccatctaccaaaaataccttaaaactactaatttcagtctataccctaaaactgacaaatattttttaaaattacctctaaattgcctccatgtttttatttggagattacaaaaatattaacatgtgtggtttttggaataaatattgactaataaaaaaacaatgatccgggccgcttccctttaaggaggggttaatttcatgatccctctctaactaacttccgtgatcatcgagacatcgggtgcggggaaacggtattaacctttcttagaggcggagaactgcggtgtatcaaaaaaaccgaggggaaatcccggggataaaacctgtaaagccgaaggagctacagagtgcctccggacccgtaaaaggcgcgggccgctcgggttgaggcatagaggcccggcgctcatgaagaaatacaacaagagagcgtgtcaaagaggacggggcatcaccatgttatgaataactaaccacagcaacgccgcctgagagacgtagttcaaatgtaaatggggaacgatggaagtaacacgtgacccgcataggggaagccaggggacgagcggaggttcataaagaatgt

SEQ ID NO: 598263 - DNA, 147 bp, Homo sapiens
  misc_feature (9)..(9): n is a, c, g, or t
ggtgcttantggtgagcgtcgagcgccctggaagtatacgcctgtgacctgccccaggaagcccaggccagccactgcaggtgggcctgtacccccaccccaggccaaagctctggaaccctgaaggccccagtctcccactcaata

SEQ ID NO: 598264 - DNA, 263 bp, Homo sapiens
aatccgggttcatgacatcacaggagctccaatataaggctccacagactaggctcatggacgagatgggaaggcacagggagaagggatcaccctacacccagatcccaggctgacatgctgactgtcctctcccctccagcctttagccttggcttttctagcctatttacctgcaggctgagccattctcttccctttccccagcatcactccccatggaagagccaatgttttccacccataatcctttctgaaccctg

SEQ ID NO: 598265 - DNA, 964 bp, Homo sapiens
gccggggcttgcgtcagcggtgtgccagaagcgggtggtgccaggctctgcgcaccgtggggttcggggccgggacgcctggcgggaggagggcaccggccggggtcccgaacgccggaggcggtgctcggacacgccggggctgcggagtgcatcacgcggcggtacaagcctcagctctgccgggcgccgaggcgttccgcgccgggacctgggttgggcagcctggtggccttatggcatcgggagcgcttcggcttggccctgcggggggagcgcatccggctttgaaccccggggtagtagccccggctggcaagggctgggccgcccgaagactcaccagggttatgggactcagggacaggagagaaattgaaaggccgagcgccagttcacatccaagaggggggaccacaacggcgaattaacataaacccggtgtcgaactgcaaaagcaaactactaggccggcctaataacccccacaagcaaacacttacaggtacccccgggtctatgtgacccactggtgcgtgccagacgcacccaatactctcaggtatggagggcacaccagaggactactagcacagggagatgttgcaccgtagcacagtgacggcgacgcgattaaaactatcggcgcccactgtaaggaatgtcttgtagcgacccctgcgccaccgttaattaccaccacggcaaatgacacccaagacgatgccgagcaccctacgctcttaaaccaaaaatcttcccaggtatggatgccaaagacacataagtgttcgggcccctcataattagagagcagaggtcacatggcgcagagacaccgtcgcttgtttgtcacacacagcgcggcacaacacgattgacgcttacttcccatggctacaactatgcagtacccagttacgaccactaaatcagggaaccggcgtactgcagcaacggtgtc

SEQ ID NO: 598266 - DNA, 419 bp, Homo sapiens
cctattaattgtcccccccccaagggggcaggtaacatgaattgcacttccctgcagctttaaagatgggtttagggtgaaacattgggccggccttaggggggtgatttttttatttcagaggtttggagacccctagtttgaaaaaggttattttgtttttttgtgagaatttagtaaacaaaaaaaaatttttgagtgaaaagcaagggattttttttgtaatcagggcatttgaaaattcaagccggcaaattcctaggggagggaagcaaaattaagttgtttttgtaaaaaaagaagagccttttttccagcaaaaatccctggggtaggcaaaagccctgattaaccctttccctttgggatgtttcccaaattattgatttgagaccagttgaaaaaaaggggccccctta

SEQ ID NO: 598267 - DNA, 244 bp, Homo sapiens
gttgctgctcgtgttgaatctagaaccgtagccagacatgggacttgaggacgagcaaaagatgcttaccgaatccggagatcctgaggaggaggaagaggaagaggaggatttagtggatcccctaacaacagtgagagagccattgcgagcgttggagaaatgtttaagccccggagcgctagagctttttattagctttttacctttgatcaaaaaagaagagatttcacgcggagctttt

SEQ ID NO: 598268 - DNA, 127 bp, Homo sapiens
atgtatttcttacagtattctcctctctttcacgtcccacatcttaaaagatgtctagtacggggggacttcctgaacatccttcaaacctgggccagactccatctcttctgtttaccacgctgtt

SEQ ID NO: 598269 - DNA, 2057 bp, Homo sapiens
aaaaaaaaaaacacaggcttgatgctcgctcccgtttctacaggaggttttgacggctggatgctgcagggcatcccctcgcctggaggaggttcacttgtggccaggttcccagcacacccacttgctcactggggccctggggacaccgccacactcgagcccatcctacggcctcaatccttaccagtccccaggccatggactgccacactgtaggtcttcaatcaaggtttagtggagtttcgaatgtacacacaccctgaaagacagcgaggccacctcagaaaacaacgcgcgcccagctggctcccctccgacagggcccacggctactgggtcggcctcctccggaccctgagcacagcctggtatgcgtgcgggctcggaatacggatctgagcagaagaaatgcgagtggagagcggttctgcgcaggaaagaggaattttgttggaaagcctgtcgacgttgctagaaaagaccacagcatctcacgaggggcgtgcgccgggaaaccgggagttgacggacctcctgccccccgaggtctgcagtctcctgaacccagcagccatctacgccaacaacgagatcagcctgcgtgacgttgaggtctacggctttgactacgactacaccctggcccagtatgcagacgcactgcaccccgagatcttcagtaccgcccgtgacatcctgatcgagcactacaagtacccagaagggattcggaagtatgactacaaccccagctttgccatccgtggcctccactatgacattcagaagagccttctgatgaagattgacgccttccactacgtgcagctggggacagcctacaggggcctccagcctgtgccagacgaggaggtgattgagctgtatgggggtacccagcacatcccactataccagatgagtggcttctatggcaagggtccctccattaagcagttcatggacatcttctcgctaccggagatggctctgctgtcctgtgtggtggactactttctgggccacagcctggagtttgaccaagcacatctctacaaggacgtgacggacgccatccgagacgtgcatgtgaagggcctcatgtaccagtggatcgagcaggacatggagaagtacatcctgagaggggatgagacgtttgctgtcctgagccgcctggtggcccatgggaaacagctgttcctcatcaccaacagtcctttcagcttcgtagacaaggggatgcggcacatggtgggtcccgattggcgccagctcttcgatgtggtcattgtccaggcagacaagcccagcttcttcactgaccggcgcaagcctttcagaaaactcgatgagaagggctcacttcagtgggaccggatcacccgcttggaaaagggcaagatctatcggcagggaaacctgtttgacttcttacgcttgacggaatggcgtggcccccgcgtgctctacttcggggaccacctctatagtgatctggcggatctcatgctgcggcacggctggcgcacaggcgccatcatccccgagctggagcgtgagatccgcatcatcaacacggagcagtacatgcactcgctgacgtggcagcaggcgctcacggggctgctggagcgcatgcagacctatcaggacgcggagtcgaggcaggtgctggctgcctggatgaaagagcggcaggagctgaggtgcatcaccaaggccctgttcaatgcgcagttcggcagcatcttccgcaccttccacaaccccacctacttctcaaggcgcctcgtgcgcttctctgacctctacatggcctccctcagctgcctgctcaactaccgcgtggacttcaccttctacccacgccgtacgccgctgcagcacgaggcacccctctggatggaccagctctgcaccggctgcatgaagacccccttccttggtgacatggcccacatccgctgagggcacctttattgtctgggacaggccctcagcccctcctgccccatccacccagacaagcaataaaagtggtctcctccctg

SEQ ID NO: 598270 - DNA, 815 bp, Homo sapiens
cctaggctaggtacgaggcctggtgtttaatcggccgaggcgcgcgccctaccgaggcgcgggcgctgcagatggctcccagtcccaatgcctgaagcctgagcccgccccgagtgtcgcctgccccgcccgcctggctctctcgcctgtgtgatgcctgtctagatgggggaccacgaaagatgactaaggtatctcgcccgtgcaagaacaattggcaacggagcgccgtgagactcgtggcatgacactcacacgtagacggaggtggctatgacagcatcacaagatgtcagttggaagagtgtcttgcctggttaaatactaatcagcagacatgttgtgcacgggttattgatcccagattcaaaggcccagcgtagtatcccttgggcccctgttgtattggtggccttatagcgcgactcaacgcctacccgtcataccccatcccccagaagctgtggtccaacgttttgccagtgcgagctcttcagggggcttctcgcatccgtgctcgtgcgtatcgtgggctcatcctctgccttcccttgtggcctactgcgtattcctatgtgcggtgccaccgcacgtggacgacgccctttctggttgactaaccctttgtagccttggtggcatacgtttgctgtgccggtgcgtgagttgatccatcgacctgggcgtgccttcgtccctaccgtaccagtgacggcccaacgagctccgaggatcatggacgtccttcacggacacatggtgccccaccaaagccctggtgatccgcgccggttgcaggatgcgcggacgcctag

SEQ ID NO: 598271 - DNA, 164 bp, Homo sapiens
ctctagaggatcctccaactgctcacattatgggaagaaatgtcactaaattggacttggcttcctccatatagcacggaacaggtgaataaaagatatctttatgaagaattttgttgtgctattatcttagggttgatatcagagaccaatgatggcaggca

SEQ ID NO: 598272 - DNA, 1736 bp, Homo sapiens
gcggccgctcggcgctggctgctgtgcggaggccacggcgggccgcgagccgcctcgtcctcgccctcctgccctgggtgcggccccccgggtcccggcgcccactgccccggcgtcccgcgctccgcgcccgcccaggcacccaccagcggcgccgacctcagcgcgcacctatgggctcgctaccaggacatgcggagactggtgcacgacctcctgccccccgaggtctgcagtctcctgaacccagcagccatctacgccaacaacgagatcagcctgcgtgacgttgaggtctacggctttgactacgactacaccctggcccagtatgcagacgcactgcaccccgagatcttcagtaccgcccgtgacatcctgatcgagcactacaagtacccagaagggattcggaagtatgactacaaccccagctttgccatccgtggcctccactatgacattcagaagagccttctgatgaagattgacgccttccactacgtgcagctggggacagcctacaggggcctccagcctgtgccagacgaggaggtgattgagctgtatgggggtacccagcacatcccactataccagatgagtggcttctatggcaagggtccctccattaagcagttcatggacatcttctcgctaccggagatggctctgctgtcctgtgtggtggactactttctgggccacagcctggagtttgaccaagcacatctctacaaggacgtgacggacgccatccgagacgtgcatgtgaagggcctcatgtaccagtggatcgagcaggacatggagaagtacatcctgagaggggatgagacgtttgctgtcctgagccgcctggtggcccatgggaaacagctgttcctcatcaccaacagtcctttcagcttcgtagacaaggggatgcggcacatggtgggtcccgattggcgccagctcttcgatgtggtcattgtccaggcagacaagcccagcttcttcactgaccggcgcaagcctttcagaaaactcgatgagaagggctcacttcagtgggaccggatcacccgcttggaaaagggcaagatctatcggcagggaaacctgtttgacttcttacgcttgacggaatggcgtggcccccgcgtgctctacttcggggaccacctctatagtgatctggcggatctcatgctgcggcacggctggcgcacaggcgccatcatccccgagctggagcgtgagatccgcatcatcaacacggagcagtacatgcactcgctgacgtggcagcaggcgctcacggggctgctggagcgcatgcagacctatcaggacgcggagtcgaggcaggtgctggctgcctggatgaaagagcggcaggagctgaggtgcatcaccaaggccctgttcaatgcgcagttcggcagcatcttccgcaccttccacaaccccacctacttctcaaggcgcctcgtgcgcttctctgacctctacatggcctccctcagctgcctgctcaactaccgcgtggacttcaccttctacccacgccgtacgccgctgcagcacgaggcacccctctggatggaccagctctgcaccggctgcatgaagacccccttccttggtgacatggcccacatccgctgagggcacctttattgtctgggacaggccctcagcccctcctgccccatccacccagacaagcaataaaagtggtctcctccctg

SEQ ID NO: 598273 - DNA, 125 bp, Homo sapiens
gcataggaagcaggaggtaagaagtagggtcttggctgacaccatatgacgcactctcccctgaactctacacaacatatttggtgcctaggaagatggtagtggtgcagggtgtttatgatcat

SEQ ID NO: 598274 - DNA, 1661 bp, Homo sapiens
gcggccgctcggcgctggctgctgtgcggaggccacggcgggccgcgagccgcctcgtcctcgccctcctgccctgggtgcggccccccgggtcccggcgcccactgccccggcgtcccgcgctccgcgcccgcccaggcacccaccagcggcgccgacctcagcgcgcacctatgggctcgctaccaggacatgcggagactggtgcacgacctcctgccccccgaggtctgcagtctcctgaacccagcagccatctacgccaacaacgagatcagcctgcgtgacgttgaggtctacggctttgactacgactacaccctggcccagtatgcagacgcactgcaccccgagatcttcagtaccgcccgtgacatcctgatcgagcactacaagagccttctgatgaagattgacgccttccactacgtgcagctggggacagcctacaggggcctccagcctgtgccagacgaggaggtgattgagctgtatgggggtacccagcacatcccactataccagatgagtggcttctatggcaagggtccctccattaagcagttcatggacatcttctcgctaccggagatggctctgctgtcctgtgtggtggactactttctgggccacagcctggagtttgaccaagcacatctctacaaggacgtgacggacgccatccgagacgtgcatgtgaagggcctcatgtaccagtggatcgagcaggacatggagaagtacatcctgagaggggatgagacgtttgctgtcctgagccgcctggtggcccatgggaaacagctgttcctcatcaccaacagtcctttcagcttcgtagacaaggggatgcggcacatggtgggtcccgattggcgccagctcttcgatgtggtcattgtccaggcagacaagcccagcttcttcactgaccggcgcaagcctttcagaaaactcgatgagaagggctcacttcagtgggaccggatcacccgcttggaaaagggcaagatctatcggcagggaaacctgtttgacttcttacgcttgacggaatggcgtggcccccgcgtgctctacttcggggaccacctctatagtgatctggcggatctcatgctgcggcacggctggcgcacaggcgccatcatccccgagctggagcgtgagatccgcatcatcaacacggagcagtacatgcactcgctgacgtggcagcaggcgctcacggggctgctggagcgcatgcagacctatcaggacgcggagtcgaggcaggtgctggctgcctggatgaaagagcggcaggagctgaggtgcatcaccaaggccctgttcaatgcgcagttcggcagcatcttccgcaccttccacaaccccacctacttctcaaggcgcctcgtgcgcttctctgacctctacatggcctccctcagctgcctgctcaactaccgcgtggacttcaccttctacccacgccgtacgccgctgcagcacgaggcacccctctggatggaccagctctgcaccggctgcatgaagacccccttccttggtgacatggcccacatccgctgagggcacctttattgtctgggacaggccctcagcccctcctgccccatccacccagacaagcaataaaagtggtctcctccctg

SEQ ID NO: 598275 - DNA, 1339 bp, Homo sapiens
gctgaaagaggctggcttggggccacggtgaactgcctcctcaccatccgtcctgcctccctggcgcccccaagagccttctgatgaagattgacgccttccactacgtgcagctggggacagcctacaggggcctccagcctgtgccagacgaggaggtgattgagctgtatgggggtacccagcacatcccactataccagatgagtggcttctatggcaagggtccctccattaagcagttcatggacatcttctcgctaccggagatggctctgctgtcctgtgtggtggactactttctgggccacagcctggagtttgaccaagcacatctctacaaggacgtgacggacgccatccgagacgtgcatgtgaagggcctcatgtaccagtggatcgagcaggacatggagaagtacatcctgagaggggatgagacgtttgctgtcctgagccgcctggtggcccatgggaaacagctgttcctcatcaccaacagtcctttcagcttcgtagacaaggggatgcggcacatggtgggtcccgattggcgccagctcttcgatgtggtcattgtccaggcagacaagcccagcttcttcactgaccggcgcaagcctttcagaaaactcgatgagaagggctcacttcagtgggaccggatcacccgcttggaaaagggcaagatctatcggcagggaaacctgtttgacttcttacgcttgacggaatggcgtggcccccgcgtgctctacttcggggaccacctctatagtgatctggcggatctcatgctgcggcacggctggcgcacaggcgccatcatccccgagctggagcgtgagatccgcatcatcaacacggagcagtacatgcactcgctgacgtggcagcaggcgctcacggggctgctggagcgcatgcagacctatcaggacgcggagtcgaggcaggtgctggctgcctggatgaaagagcggcaggagctgaggtgcatcaccaaggccctgttcaatgcgcagttcggcagcatcttccgcaccttccacaaccccacctacttctcaaggcgcctcgtgcgcttctctgacctctacatggcctccctcagctgcctgctcaactaccgcgtggacttcaccttctacccacgccgtacgccgctgcagcacgaggcacccctctggatggaccagctctgcaccggctgcatgaagacccccttccttggtgacatggcccacatccgctgagggcacctttattgtctgggacaggccctcagcccctcctgccccatccacccagacaagcaataaaagtggtctcctccctg

SEQ ID NO: 598276 - DNA, 4773 bp, Homo sapiens
  misc_feature (2853)..(2853): n is a, c, g, or t
  misc_feature (2991)..(2991): n is a, c, g, or t
gcggccgctcggcgctggctgctgtgcggaggccacggcgggccgcgagccgcctcgtcctcgccctcctgccctgggtgcggccccccgggtcccggcgcccactgccccggcgtcccgcgctccgcgcccgcccaggcacccaccagcggcgccgacctcagcgcgcacctatgggctcgctaccaggacatgcggagactggtgcacgacctcctgccccccgaggtctgcagtctcctgaacccagcagccatctacgccaacaacgagatcagcctgcgtgacgttgaggtctacggctttgactacgactacaccctggcccagtatgcagacgcactgcaccccgagatcttcagtaccgcccgtgacatcctgatcgagcactacaagtacccagaagggattcggaagtatgactacaaccccagctttgccatccgtggcctccactatgacattcagaagagccttctgatgaagattgacgccttccactacgtgcagctggggacagcctacaggggcctccagcctgtgccagacgaggaggtgattgagctgtatgggggtacccagcacatcccactataccagatgagtggcttctatggcaagggtccctccattaagcagttcatggacatcttctcgctaccggagatggctctgctgtcctgtgtggtggactactttctgggccacagcctggagtttgaccaagcacatctctacaaggacgtgacggacgccatccgagacgtgcatgtgaagggcctcatgtaccagtggatcgagcaggacatggagaagtacatcctgagaggggatgagacgtttgctgtcctgagccgcctggtggcccatgggaaacagctgttcctcatcaccaacagtcctttcagcttcgtagacaaggggatgcggcacatggtgggtcccgattggcgccagctcttcgatgtggtcattgtccaggcagacaagcccagcttcttcactgaccggcgcaagcctttcagaaaactcgatgagaagggctcacttcagtgggaccggatcacccgcttggaaaagggcaagatctatcggcagggaaacctgtttgacttcttacgcttgacggaatggcgtggcccccgcgtgctctacttcggggaccacctctatagtgatctggcggatctcatgctgcggcacggctggcgcacaggcgccatcatccccgagctggagcgtgagatccgcatcatcaacacggagcagtacatgcactcgctgacgtggcagcaggcgctcacggggctgctggagcgcatgcagacctatcaggacgcggagtcgaggcaggtgctggctgcctggatgaaagagcggcaggagctgaggtgcatcaccaaggccctgttcaatgcgcagttcggcagcatcttccgcaccttccacaaccccacctacttctcaaggcgcctcgtgcgcttctctgacctctacatggcctccctcagctgcctgctcaactaccgcgtggacttcaccttctacccacgccgtacgccgctgcagcacgaggcacccctctggatggaccagctctgcaccggctgcatgaagacccccttccttggtgacatggcccacatccgctgagggcacctttattgtctgggacaggccctcagcccctcctgccccatccacccagacaagcaataaaagtggtctcctccctgtgcatgcttctgctttcagccccagcctcgtcacttgactgtgaggatcctctgggtgtcagggaagtcctcctccagcagtgagtcatcgaagggttcacaaaaggtgtcgctgccaaagacagggttggggacagagaccagggtggggttggtcccttcttgccacggtgagaagtcgtcatcagcatcatcttccgcctggaaggcagagaagccaaagcccatgggcttgcctcgggcacggaggtagagagctccggccaccaagccaagcagtgctccagcggcaagcacagcccccacgcctgccgccacaggtggggcttcaggcgccagcactgcctggggctgtgggggtgccaggagggggctggccagagcatggatgatgccattgaaggccatgatgtcccacacaatgatacggctaaccacaactgtccctggggccacaggggcccaggaactgttgtcagggcctgcgtcactgatgatgaggctgaggcctgagtgggccggaagcaacttcccctggctggcgttggcacttaggagggtggcgttggaggcatgcagctccaagtctgggccactcagcgtcatgttgtccacaaagccttcattgacagggacgaagagtgtcttatacgtgagctcatcatccaggaagtccaggaagtcgagaccccgctgggtggcattggcatagcccaatagcatcccatagaaggtggagaagttggcagtggcagccagcacatccagcagcttcccattgcacgtgctgatcccgtcacccacgaagccatttcggcatcggcaggccacatcttgcacacggaagcagtaggcatcccagcgttctgagaggttcttgcgggcacccaggctgactatgcccacccgaccattgccacagtccgccacagggaaaaccacagggtgggcagtggagccattggccagccagcccatgaggcacaggtggaagcccagctgctgggcagcagagagctgagggaatgaagcaaggacggctccctgtgcttcgcatgccgcctcagcctccgaaaagttcagaccataagggccgctggtggcctggaggtggaanacgccagcccgtttctcctggaagtgcaggtcagtgcacatggcatctgagtgcaagggcggtggctggcccaagcagcggtccacaggtggttccgactcctccagacactgcagtccatcgcctacgtagcctgcntggcactcacagcgccgtgtgttcaggccggtgctcaagcagttggcgtgctcgctgcagcccccgcggtggccatctgtgcaggggttgcgggcccggcagctccagccatcaccctcgtagtcgggcaggcaggtacaagtgaccattgttcctacctggctacagttggcgtgctcactgcagccaccatgcccgtcctggcacaggtctgccactgtacacacgcggccatccccttcatagcccaggctgcactcacagctgttgcctgcacggcacacagcctcgggtgcacagggtggggtacacacaggctgcagctccagttgcacctcacagcgtggcccagtccagccttcatcacagaagcaggagccagagcccccaaggccctcatcacagcggccatgcacagtgcagcggcaggcttgacaatggggcccaaaggcaccaggagcacagagttcacaggctgtcccagcaaaacctgaacggcacagacactgcccactgccactcatgccgtccatgcacacgccacggtcactacaagggctgctgggccgccagggcaagcttgcactcactgccatagtgaccagggcagcagctgggcttccaggtggtggtgacacaattgcggtggcagcccctgcccaggccttggggcctaccccaaaggctggggtggacccagacgctgcgtaatcccaaagagtgcagcggaggggacgtccagaacttcgggtagaagcgccagcaggcctcagggctgccctgctcctgtgacccctcaggacagggtggctccagcccacagatgctgcaggtgttcagtcgcaggggccgggtctcaaagtggtcacagcgagcaccaaggccaggtggctccagcagctggtcgatgccataggccaggccaccctcaaagggcaagtgccgctgcacaatgcgagcatcatcctcacccaccatgagctcaccgggccgcgttcggctgcaggagaaagagatgggggtcccatgcatggttcgaagtgggcccaggttgggcaggtcagatgccaaggcctcgacattgcgaatcatgtggccccgcagaatggctgctagcttgtcacggtggtcctcatggtacagccaggcctggcgatccggaggcagagctcgaaaggcggcgtctgtgggccacagcattgtgaagggcctatgggatgcctctcgaagcaggggcaggaggccggccaccttcaggaggccgctgaagatcttgtaaccgaagccctgggcggcggcggtgacatttctcctcgggatgggagcatcatcaggctcccagtgcagcgcctcggggggcagcaggacacggtcaatgaagtgcaggatgccgttcacggcctcatggtcgctgctcaccacgcgcgcgaagtcattgaggtatatgctgccctccctctcgctgaagcgcagtgggtgccctgagagggccgtggcgtacccctgctccagcaggtcctcgctccgcagccgccgacagccaaccacgtggtagcgaaacaccagctggcgatgcgcacgaatccgggccagctcatcctgcgacaggttgctcattagatctgcgtgcggcacgaagatggtgaaaggcccatcgcccttgagctccttatattccaggaggcggaggctgaagaatgaggcatgcttatccctcaggagctccaggccgactcgggcacggcaggtgagccgtcccccacgtgtgggctggttacagtc

SEQ ID NO: 598277 - DNA, 411 bp, Homo sapiens
ttgagaatactaaataggggtcactttggccagagaattcatttctattttcagttccatgaatgtccactatattatgagcactgaacagaggggaggcttatcataaagttaatgagcttttagtttcacagccgcttactttcacaggcccttccaaggttctgtgtgtccttcgcagggatttaaggtatagctggatgcatggagagccacgccagccagagggtcaatctctacattctcggtctgtgtggaaggctggcaggtcgaacgtactctcaatttttgctgacctccagtgatgccctgcaacatgtggagcctccccaggtatctgaaatccaactctggcaccaaggagaaggtttggaatgagatgctccaccactctctgctcagggttctcca

SEQ ID NO: 598278 - DNA, 4880 bp, Homo sapiens
  misc_feature (2960)..(2960): n is a, c, g, or t
  misc_feature (3098)..(3098): n is a, c, g, or t
gcggccgctcggcgctggctgctgtgcggaggccacggcgggccgcgagccgcctcgtcctcgccctcctgccctgggtgcggccccccgggtcccggcgcccactgccccggcgtcccgcgctccgcgcccgcccaggcacccaccagcggcgccgacctcagcgcgcacctatgggctcgctaccaggacatgcggagactggtgcacgacctcctgccccccgaggtctgcagtctcctgaacccagcagccatctacgccaacaacgagatcagcctgcgtgacgttgaggtctacggctttgactacgactacaccctggcccagtatgcagacgcactgcaccccgagatcttcagtaccgcccgtgacatcctgatcgagcactacaagtacccagaagggattcggaagtatgactacaaccccagctttgccatccgtggcctccactatgacattcagaagagccttctgatgaagattgacgccttccactacgtgcagctggggacagcctacaggggcctccagcctgtgccagacgaggaggtgattgagctgtatgggggtacccagcacatcccactataccagatgagtggcttctatggcaagggtccctccattaagcagttcatggacatcttctcgctaccggagatggctctgctgtcctgtgtggtggactactttctgggccacagcctggagtttgaccaagcacatctctacaaggacgtgacggacgccatccgagacgtgcatgtgaagggcctcatgtaccagtggatcgagcaggacatggagaagtacatcctgagaggggatgagacgtttgctgtcctgagccgcctggtggcccatgggaaacagctgttcctcatcaccaacagtcctttcagcttcgtagacaaggggatgcggcacatggtgggtcccgattggcgccagctcttcgatgtggtcattgtccaggcagacaagcccagcttcttcactgaccggcgcaagcctttcagaaaactcgatgagaagggctcacttcagtgggaccggatcacccgcttggaaaagggcaagatctatcggcagggaaacctgtttgacttcttacgcttgacggaatggcgtggcccccgcgtgctctacttcggggaccacctctatagtgatctggcggatctcatgctgcggcacggctggcgcacaggcgccatcatccccgagctggagcgtgagatccgcatcatcaacacggagcagtacatgcactcgctgacgtggcagcaggcgctcacggggctgctggagcgcatgcagacctatcaggacgcggagtcgaggcaggtgctggctgcctggatgaaagagcggcaggagctgaggtgcatcaccaaggccctgttcaatgcgcagttcggcagcatcttccgcaccttccacaaccccacctacttctcaaggcgcctcgtgcgcttctctgacctctacatggcctccctcagctgcctgctcaactaccgcgtggacttcaccttctacccacgccgtacgccgctgcagcacgaggcacccctctggatggaccagctctgcaccggctgcatgaagacccccttccttggtgacatggcccacatccgctgagggcacctttattgtctgggacaggccctcagcccctcctgccccatccacccagacaagcaataaaagtggtctcctcccttggtgacatggcccacatccgctgagggcacctttattgtctgggacaggccctcagcccctcctgccccatccacccagacaagcaataaaagtggtctcctccctgtgcatgcttctgctttcagccccagcctcgtcacttgactgtgaggatcctctgggtgtcagggaagtcctcctccagcagtgagtcatcgaagggttcacaaaaggtgtcgctgccaaagacagggttggggacagagaccagggtggggttggtcccttcttgccacggtgagaagtcgtcatcagcatcatcttccgcctggaaggcagagaagccaaagcccatgggcttgcctcgggcacggaggtagagagctccggccaccaagccaagcagtgctccagcggcaagcacagcccccacgcctgccgccacaggtggggcttcaggcgccagcactgcctggggctgtgggggtgccaggagggggctggccagagcatggatgatgccattgaaggccatgatgtcccacacaatgatacggctaaccacaactgtccctggggccacaggggcccaggaactgttgtcagggcctgcgtcactgatgatgaggctgaggcctgagtgggccggaagcaacttcccctggctggcgttggcacttaggagggtggcgttggaggcatgcagctccaagtctgggccactcagcgtcatgttgtccacaaagccttcattgacagggacgaagagtgtcttatacgtgagctcatcatccaggaagtccaggaagtcgagaccccgctgggtggcattggcatagcccaatagcatcccatagaaggtggagaagttggcagtggcagccagcacatccagcagcttcccattgcacgtgctgatcccgtcacccacgaagccatttcggcatcggcaggccacatcttgcacacggaagcagtaggcatcccagcgttctgagaggttcttgcgggcacccaggctgactatgcccacccgaccattgccacagtccgccacagggaaaaccacagggtgggcagtggagccattggccagccagcccatgaggcacaggtggaagcccagctgctgggcagcagagagctgagggaatgaagcaaggacggctccctgtgcttcgcatgccgcctcagcctccgaaaagttcagaccataagggccgctggtggcctggaggtggaanacgccagcccgtttctcctggaagtgcaggtcagtgcacatggcatctgagtgcaagggcggtggctggcccaagcagcggtccacaggtggttccgactcctccagacactgcagtccatcgcctacgtagcctgcntggcactcacagcgccgtgtgttcaggccggtgctcaagcagttggcgtgctcgctgcagcccccgcggtggccatctgtgcaggggttgcgggcccggcagctccagccatcaccctcgtagtcgggcaggcaggtacaagtgaccattgttcctacctggctacagttggcgtgctcactgcagccaccatgcccgtcctggcacaggtctgccactgtacacacgcggccatccccttcatagcccaggctgcactcacagctgttgcctgcacggcacacagcctcgggtgcacagggtggggtacacacaggctgcagctccagttgcacctcacagcgtggcccagtccagccttcatcacagaagcaggagccagagcccccaaggccctcatcacagcggccatgcacagtgcagcggcaggcttgacaatggggcccaaaggcaccaggagcacagagttcacaggctgtcccagcaaaacctgaacggcacagacactgcccactgccactcatgccgtccatgcacacgccacggtcactacaagggctgctgggccgccagggcaagcttgcactcactgccatagtgaccagggcagcagctgggcttccaggtggtggtgacacaattgcggtggcagcccctgcccaggccttggggcctaccccaaaggctggggtggacccagacgctgcgtaatcccaaagagtgcagcggaggggacgtccagaacttcgggtagaagcgccagcaggcctcagggctgccctgctcctgtgacccctcaggacagggtggctccagcccacagatgctgcaggtgttcagtcgcaggggccgggtctcaaagtggtcacagcgagcaccaaggccaggtggctccagcagctggtcgatgccataggccaggccaccctcaaagggcaagtgccgctgcacaatgcgagcatcatcctcacccaccatgagctcaccgggccgcgttcggctgcaggagaaagagatgggggtcccatgcatggttcgaagtgggcccaggttgggcaggtcagatgccaaggcctcgacattgcgaatcatgtggccccgcagaatggctgctagcttgtcacggtggtcctcatggtacagccaggcctggcgatccggaggcagagctcgaaaggcggcgtctgtgggccacagcattgtgaagggcctatgggatgcctctcgaagcaggggcaggaggccggccaccttcaggaggccgctgaagatcttgtaaccgaagccctgggcggcggcggtgacatttctcctcgggatgggagcatcatcaggctcccagtgcagcgcctcggggggcagcaggacacggtcaatgaagtgcaggatgccgttcacggcctcatggtcgctgctcaccacgcgcgcgaagtcattgaggtatatgctgccctccctctcgctgaagcgcagtgggtgccctgagagggccgtggcgtacccctgctccagcaggtcctcgctccgcagccgccgacagccaaccacgtggtagcgaaacaccagctggcgatgcgcacgaatccgggccagctcatcctgcgacaggttgctcattagatctgcgtgcggcacgaagatggtgaaaggcccatcgcccttgagctccttatattccaggaggcggaggctgaagaatgaggcatgcttatccctcaggagctccaggccgactcgggcacggcaggtgagccgtcccccacgtgtgggctggttacagtc

SEQ ID NO: 598279 - DNA, 970 bp, Homo sapiens
gtggtttttttttgtttgggggcggcgtgctccgggggcagttttttgttgcctgcgatctgtcctttgtgttgttcgtggttgcgtgttctggtttggggtcgtgttggtatgcattgcttggttttttttgtttgctccgcgtgtgtggtggtgtgtgtcttcttttttctgttcgggtgtcggttggttttctatttttcttctggtggtgtgagatgtttgtgttggtgggtatcgttgcgtggttggttctcttttggcggttgttgggtggctgtgaggtcatcggcacttgcgtggttgttgtgttttttttagattccgctctctgttctcttggatcggtttgtctttctttgttgtgttacctgcagttcgtggtcttccctccgctcttcgttgtcttccctcggtgagtgtgttttttggcttgtgtggtcgatctgtgtgtaatgctcttttgtgtttctctctggtgcgggcgctgctgtttctgaactctgtttggtgtggtggtggttgtcttctcctcctggttggggggcgagtgggcggcctttgctttgtctcctccctcccgggctgtggcgctctgttcttctgccttgtcgtgcttgtcggtgtttgtcgccctcgcttcccctggtgttggtggtgaggctttgtgtttctgttgtggtggcctcccgtgattccttctctgtgtcgggggtgggcgttgcgtctcgggcgctgcctggcggggggtttattgacgtgtcgctgcttctggtgttccgccgccgtctttggtttgttgagtgctggcttggtttttttttttttttttttgttctctgtctcgccgtctccccgggttccggtccgggccccccccctaaatgacaaaaataaaataaaataccaaaataaaaacataatataatagtatatatcttcgaataaataaaaataaagaaaaatagaa

SEQ ID NO: 598280 - DNA, 217 bp, Homo sapiens
tgtgttaagatatgcagaatacggcttacataagtatagaaggcagtgactatagtactagagagctcaccatagtgccaaggcacattcagagcaagctacataaattaaacacacttaaattctaccaagacaccttaaaagatgggtacctaagtaatacattaatagtctataccacagataaagacaaactagagtgcactagagacaatta

SEQ ID NO: 598281 - DNA, 2748 bp, Homo sapiens
  misc_feature (2724)..(2724): n is a, c, g, or t
gcggccgctcggcgctggctgctgtgcggaggccacggcgggccgcgagccgcctcgtcctcgccctcctgccctgggtgcggccccccgggtcccggcgcccactgccccggcgtcccgcgctccgcgcccgcccaggcacccaccagcggcgccgacctcagcgcgcacctatgggctcgctaccaggacatgcggagactggtgcacgacctcctgccccccgaggtctgcagtctcctgaacccagcagccatctacgccaacaacgagatcagcctgcgtgacgttgaggtctacggctttgactacgactacaccctggcccagtatgcagacgcactgcaccccgagatcttcagtaccgcccgtgacatcctgatcgagcactacaagtacccagaagggattcggaagtatgactacaaccccagctttgccatccgtggcctccactatgacattcagaagagccttctgatgaagattgacgccttccactacgtgcagctggggacagcctacaggggcctccagcctgtgccagacgaggaggtgattgagctgtatgggggtacccagcacatcccactataccagatgagtggcttctatggcaagggtccctccattaagcagttcatggacatcttctcgctaccggagatggctctgctgtcctgtgtggtggactactttctgggccacagcctggagtttgaccaagcacatctctacaaggacgtgacggacgccatccgagacgtgcatgtgaagggcctcatgtaccagtggatcgagcaggacatggagaagtacatcctgagaggggatgagacgtttgctgtcctgagccgcctggtggcccatgggaaacagctgttcctcatcaccaacagtcctttcagcttcgtagacaaggggatgcggcacatggtgggtcccgattggcgccagctcttcgatgtggtcattgtccaggcagacaagcccagcttcttcactgaccggcgcaagcctttcagaaaactcgatgagaagggctcacttcagtgggaccggatcacccgcttggaaaagggcaagatctatcggcagggaaacctgtttgacttcttacgcttgacggaatggcgtggcccccgcgtgctctacttcggggaccacctctatagtgatctggcggatctcatgctgcggcacggctggcgcacaggcgccatcatccccgagctggagcgtgagatccgcatcatcaacacggagcagtacatgcactcgctgacgtggcagcaggcgctcacggggctgctggagcgcatgcagacctatcaggacgcggagtcgaggcaggtgctggctgcctggatgaaagagcggcaggagctgaggtgcatcaccaaggccctgttcaatgcgcagttcggcagcatcttccgcaccttccacaaccccacctacttctcaaggcgcctcgtgcgcttctctgacctctacatggcctccctcagctgcctgctcaactaccgcgtggacttcaccttctacccacgccgtacgccgctgcagcacgaggcacccctctggatggaccagctctgcaccggctgcatgaagacccccttccttggtgacatggcccacatccgctgagggcacctttattgtctgggacaggccctcagcccctcctgccccatccacccagacaagcaataaaagtggtctcctccctgtgcatgcttctgctttcagccccagcctcgtcacttgactgtgaggatcctctgggtgtcagggaagtcctcctccagcagtgagtcatcgaagggttcacaaaaggtgtcgctgccaaagacagggttggggacagagaccagggtggggttggtcccttcttgccacggtgagaagtcgtcatcagcatcatcttccgcctggaaggcagagaagccaaagcccatgggcttgcctcgggcacggaggtagagagctccggccaccaagccaagcagtgctccagcggcaagcacagcccccacgcctgccgccacaggtggggcttcaggcgccagcactgcctggggctgtgggggtgccaggagggggctggccagagcatggatgatgccattgaaggccatgatgtcccacacaatgatacggctaaccacaactgtccctggggccacaggggcccaggaactgttgtcagggcctgcgtcactgatgatgaggctgaggcctgagtgggccggaagcaacttcccctggctggcgttggcacttaggagggtggcgttggaggcatgcagctccaagtctgggccactcagcgtcatgttgtccacaaagccttcattgacagggacgaagagtgtcttatacgtgagctcatcatccaggaagtccaggaagtcgagaccccgctgggtggcattggcatagcccaatagcatcccatagaaggtggagaagttggcagtggcagccagcacatccagcagcttcccattgcacgtgctgatcccgtcacccacgaagccatttcggcatcggcaggccacatcttgcacacggaagcagtaggcatcccagcgttctgagaggttcttgcgggcacccaggctgactatgcccacccgaccattgccacagtccgccacagggaaaaccacagggtgggcagtggagccattggccagccagcccatgaggctagtngcgctggggtggcgagctcgaatt

SEQ ID NO: 598282 - DNA, 958 bp, Homo sapiens
ggcgccggtggcgggactctggggaaaatggctgcgtctcgagtgggaacttatagaaatgctggcaattcaagaaaccaaaagtgtacagggctgagaggaaaaccaggtcctggaagtgtcaaatccacccgagatggggaataccaaagccactaagtgaaaatggggcactacacatcaaggggcaacacaacttccattccatggcaaatggcaagtttcagcaccacagcaaagtcaggagacgaggagcccagtgctatgcacgcacggcttacgacacagacccagcctcacaagggccagcaagcaacaagaatcacggcaaccaggcgtgtgtcaaaaccagagaacgacgggagacacacatcaaggtcgaataggacaaaacagcgaggcaaacaggggtgcataatccttcctcatggacaggaacataaatccacagtcatgccacaatacaggcaccagtgccacgggaacagggctgtaatggtggcaccaacatggaccgtggggtagacacagggggaacccaccgggaagaaccgcttcaccccaactggattgtgacgaggaattggcagaaaggtgggggtatcacatggcggtacaggacttaagccaagtcctttaccccactaacacgggcgggggcaacatggccaactgtaaccccagggcagaatgccacgtggccaggcagggcaaagaattgcccagacatgtcctggactccccacaacggattccacgggcgcggatacagagtgaccggtggcgcaacgtggaactaatgggtcaccccacacaaaacagctacataggtaggctgcaccacagacgggttgagacaaccaacacggggggcacttaaagacagagacacaccgaccgcgagtcacggtcagaagacgtagtgcccacgcgcacgcccgccaagcgcacagaccgc

SEQ ID NO: 598283 - DNA, 102 bp, Homo sapiens
gcctcggacagcgccatatactactgtgcgagacatgaaatccatggctgttttagttcctcctgcagagtggggtcctggttcgacccctggggtcaggga

SEQ ID NO: 598284 - DNA, 4698 bp, Homo sapiens
  misc_feature (2778)..(2778): n is a, c, g, or t
  misc_feature (2916)..(2916): n is a, c, g, or t
gcggccgctcggcgctggctgctgtgcggaggccacggcgggccgcgagccgcctcgtcctcgccctcctgccctgggtgcggccccccgggtcccggcgcccactgccccggcgtcccgcgctccgcgcccgcccaggcacccaccagcggcgccgacctcagcgcgcacctatgggctcgctaccaggacatgcggagactggtgcacgacctcctgccccccgaggtctgcagtctcctgaacccagcagccatctacgccaacaacgagatcagcctgcgtgacgttgaggtctacggctttgactacgactacaccctggcccagtatgcagacgcactgcaccccgagatcttcagtaccgcccgtgacatcctgatcgagcactacaagagccttctgatgaagattgacgccttccactacgtgcagctggggacagcctacaggggcctccagcctgtgccagacgaggaggtgattgagctgtatgggggtacccagcacatcccactataccagatgagtggcttctatggcaagggtccctccattaagcagttcatggacatcttctcgctaccggagatggctctgctgtcctgtgtggtggactactttctgggccacagcctggagtttgaccaagcacatctctacaaggacgtgacggacgccatccgagacgtgcatgtgaagggcctcatgtaccagtggatcgagcaggacatggagaagtacatcctgagaggggatgagacgtttgctgtcctgagccgcctggtggcccatgggaaacagctgttcctcatcaccaacagtcctttcagcttcgtagacaaggggatgcggcacatggtgggtcccgattggcgccagctcttcgatgtggtcattgtccaggcagacaagcccagcttcttcactgaccggcgcaagcctttcagaaaactcgatgagaagggctcacttcagtgggaccggatcacccgcttggaaaagggcaagatctatcggcagggaaacctgtttgacttcttacgcttgacggaatggcgtggcccccgcgtgctctacttcggggaccacctctatagtgatctggcggatctcatgctgcggcacggctggcgcacaggcgccatcatccccgagctggagcgtgagatccgcatcatcaacacggagcagtacatgcactcgctgacgtggcagcaggcgctcacggggctgctggagcgcatgcagacctatcaggacgcggagtcgaggcaggtgctggctgcctggatgaaagagcggcaggagctgaggtgcatcaccaaggccctgttcaatgcgcagttcggcagcatcttccgcaccttccacaaccccacctacttctcaaggcgcctcgtgcgcttctctgacctctacatggcctccctcagctgcctgctcaactaccgcgtggacttcaccttctacccacgccgtacgccgctgcagcacgaggcacccctctggatggaccagctctgcaccggctgcatgaagacccccttccttggtgacatggcccacatccgctgagggcacctttattgtctgggacaggccctcagcccctcctgccccatccacccagacaagcaataaaagtggtctcctccctgtgcatgcttctgctttcagccccagcctcgtcacttgactgtgaggatcctctgggtgtcagggaagtcctcctccagcagtgagtcatcgaagggttcacaaaaggtgtcgctgccaaagacagggttggggacagagaccagggtggggttggtcccttcttgccacggtgagaagtcgtcatcagcatcatcttccgcctggaaggcagagaagccaaagcccatgggcttgcctcgggcacggaggtagagagctccggccaccaagccaagcagtgctccagcggcaagcacagcccccacgcctgccgccacaggtggggcttcaggcgccagcactgcctggggctgtgggggtgccaggagggggctggccagagcatggatgatgccattgaaggccatgatgtcccacacaatgatacggctaaccacaactgtccctggggccacaggggcccaggaactgttgtcagggcctgcgtcactgatgatgaggctgaggcctgagtgggccggaagcaacttcccctggctggcgttggcacttaggagggtggcgttggaggcatgcagctccaagtctgggccactcagcgtcatgttgtccacaaagccttcattgacagggacgaagagtgtcttatacgtgagctcatcatccaggaagtccaggaagtcgagaccccgctgggtggcattggcatagcccaatagcatcccatagaaggtggagaagttggcagtggcagccagcacatccagcagcttcccattgcacgtgctgatcccgtcacccacgaagccatttcggcatcggcaggccacatcttgcacacggaagcagtaggcatcccagcgttctgagaggttcttgcgggcacccaggctgactatgcccacccgaccattgccacagtccgccacagggaaaaccacagggtgggcagtggagccattggccagccagcccatgaggcacaggtggaagcccagctgctgggcagcagagagctgagggaatgaagcaaggacggctccctgtgcttcgcatgccgcctcagcctccgaaaagttcagaccataagggccgctggtggcctggaggtggaanacgccagcccgtttctcctggaagtgcaggtcagtgcacatggcatctgagtgcaagggcggtggctggcccaagcagcggtccacaggtggttccgactcctccagacactgcagtccatcgcctacgtagcctgcntggcactcacagcgccgtgtgttcaggccggtgctcaagcagttggcgtgctcgctgcagcccccgcggtggccatctgtgcaggggttgcgggcccggcagctccagccatcaccctcgtagtcgggcaggcaggtacaagtgaccattgttcctacctggctacagttggcgtgctcactgcagccaccatgcccgtcctggcacaggtctgccactgtacacacgcggccatccccttcatagcccaggctgcactcacagctgttgcctgcacggcacacagcctcgggtgcacagggtggggtacacacaggctgcagctccagttgcacctcacagcgtggcccagtccagccttcatcacagaagcaggagccagagcccccaaggccctcatcacagcggccatgcacagtgcagcggcaggcttgacaatggggcccaaaggcaccaggagcacagagttcacaggctgtcccagcaaaacctgaacggcacagacactgcccactgccactcatgccgtccatgcacacgccacggtcactacaagggctgctgggccgccagggcaagcttgcactcactgccatagtgaccagggcagcagctgggcttccaggtggtggtgacacaattgcggtggcagcccctgcccaggccttggggcctaccccaaaggctggggtggacccagacgctgcgtaatcccaaagagtgcagcggaggggacgtccagaacttcgggtagaagcgccagcaggcctcagggctgccctgctcctgtgacccctcaggacagggtggctccagcccacagatgctgcaggtgttcagtcgcaggggccgggtctcaaagtggtcacagcgagcaccaaggccaggtggctccagcagctggtcgatgccataggccaggccaccctcaaagggcaagtgccgctgcacaatgcgagcatcatcctcacccaccatgagctcaccgggccgcgttcggctgcaggagaaagagatgggggtcccatgcatggttcgaagtgggcccaggttgggcaggtcagatgccaaggcctcgacattgcgaatcatgtggccccgcagaatggctgctagcttgtcacggtggtcctcatggtacagccaggcctggcgatccggaggcagagctcgaaaggcggcgtctgtgggccacagcattgtgaagggcctatgggatgcctctcgaagcaggggcaggaggccggccaccttcaggaggccgctgaagatcttgtaaccgaagccctgggcggcggcggtgacatttctcctcgggatgggagcatcatcaggctcccagtgcagcgcctcggggggcagcaggacacggtcaatgaagtgcaggatgccgttcacggcctcatggtcgctgctcaccacgcgcgcgaagtcattgaggtatatgctgccctccctctcgctgaagcgcagtgggtgccctgagagggccgtggcgtacccctgctccagcaggtcctcgctccgcagccgccgacagccaaccacgtggtagcgaaacaccagctggcgatgcgcacgaatccgggccagctcatcctgcgacaggttgctcattagatctgcgtgcggcacgaagatggtgaaaggcccatcgcccttgagctccttatattccaggaggcggaggctgaagaatgaggcatgcttatccctcaggagctccaggccgactcgggcacggcaggtgagccgtcccccacgtgtgggctggttacagtc

SEQ ID NO: 598285 - DNA, 171 bp, Homo sapiens
cggctgaggcctctgtccctggatctgagttcccccatccatgacgagggtatgtgtaaacgagggatccttcacagatgcatgggggggagggatccccagctcctcagccccctggctctggccctacaagtatgtctctgggctggggagaggagcttctccctggcc

SEQ ID NO: 598286 - DNA, 4376 bp, Homo sapiens
  misc_feature (2456)..(2456): n is a, c, g, or t
  misc_feature (2594)..(2594): n is a, c, g, or t
gctgaaagaggctggcttggggccacggtgaactgcctcctcaccatccgtcctgcctccctggcgcccccaagagccttctgatgaagattgacgccttccactacgtgcagctggggacagcctacaggggcctccagcctgtgccagacgaggaggtgattgagctgtatgggggtacccagcacatcccactataccagatgagtggcttctatggcaagggtccctccattaagcagttcatggacatcttctcgctaccggagatggctctgctgtcctgtgtggtggactactttctgggccacagcctggagtttgaccaagcacatctctacaaggacgtgacggacgccatccgagacgtgcatgtgaagggcctcatgtaccagtggatcgagcaggacatggagaagtacatcctgagaggggatgagacgtttgctgtcctgagccgcctggtggcccatgggaaacagctgttcctcatcaccaacagtcctttcagcttcgtagacaaggggatgcggcacatggtgggtcccgattggcgccagctcttcgatgtggtcattgtccaggcagacaagcccagcttcttcactgaccggcgcaagcctttcagaaaactcgatgagaagggctcacttcagtgggaccggatcacccgcttggaaaagggcaagatctatcggcagggaaacctgtttgacttcttacgcttgacggaatggcgtggcccccgcgtgctctacttcggggaccacctctatagtgatctggcggatctcatgctgcggcacggctggcgcacaggcgccatcatccccgagctggagcgtgagatccgcatcatcaacacggagcagtacatgcactcgctgacgtggcagcaggcgctcacggggctgctggagcgcatgcagacctatcaggacgcggagtcgaggcaggtgctggctgcctggatgaaagagcggcaggagctgaggtgcatcaccaaggccctgttcaatgcgcagttcggcagcatcttccgcaccttccacaaccccacctacttctcaaggcgcctcgtgcgcttctctgacctctacatggcctccctcagctgcctgctcaactaccgcgtggacttcaccttctacccacgccgtacgccgctgcagcacgaggcacccctctggatggaccagctctgcaccggctgcatgaagacccccttccttggtgacatggcccacatccgctgagggcacctttattgtctgggacaggccctcagcccctcctgccccatccacccagacaagcaataaaagtggtctcctccctgtgcatgcttctgctttcagccccagcctcgtcacttgactgtgaggatcctctgggtgtcagggaagtcctcctccagcagtgagtcatcgaagggttcacaaaaggtgtcgctgccaaagacagggttggggacagagaccagggtggggttggtcccttcttgccacggtgagaagtcgtcatcagcatcatcttccgcctggaaggcagagaagccaaagcccatgggcttgcctcgggcacggaggtagagagctccggccaccaagccaagcagtgctccagcggcaagcacagcccccacgcctgccgccacaggtggggcttcaggcgccagcactgcctggggctgtgggggtgccaggagggggctggccagagcatggatgatgccattgaaggccatgatgtcccacacaatgatacggctaaccacaactgtccctggggccacaggggcccaggaactgttgtcagggcctgcgtcactgatgatgaggctgaggcctgagtgggccggaagcaacttcccctggctggcgttggcacttaggagggtggcgttggaggcatgcagctccaagtctgggccactcagcgtcatgttgtccacaaagccttcattgacagggacgaagagtgtcttatacgtgagctcatcatccaggaagtccaggaagtcgagaccccgctgggtggcattggcatagcccaatagcatcccatagaaggtggagaagttggcagtggcagccagcacatccagcagcttcccattgcacgtgctgatcccgtcacccacgaagccatttcggcatcggcaggccacatcttgcacacggaagcagtaggcatcccagcgttctgagaggttcttgcgggcacccaggctgactatgcccacccgaccattgccacagtccgccacagggaaaaccacagggtgggcagtggagccattggccagccagcccatgaggcacaggtggaagcccagctgctgggcagcagagagctgagggaatgaagcaaggacggctccctgtgcttcgcatgccgcctcagcctccgaaaagttcagaccataagggccgctggtggcctggaggtggaanacgccagcccgtttctcctggaagtgcaggtcagtgcacatggcatctgagtgcaagggcggtggctggcccaagcagcggtccacaggtggttccgactcctccagacactgcagtccatcgcctacgtagcctgcntggcactcacagcgccgtgtgttcaggccggtgctcaagcagttggcgtgctcgctgcagcccccgcggtggccatctgtgcaggggttgcgggcccggcagctccagccatcaccctcgtagtcgggcaggcaggtacaagtgaccattgttcctacctggctacagttggcgtgctcactgcagccaccatgcccgtcctggcacaggtctgccactgtacacacgcggccatccccttcatagcccaggctgcactcacagctgttgcctgcacggcacacagcctcgggtgcacagggtggggtacacacaggctgcagctccagttgcacctcacagcgtggcccagtccagccttcatcacagaagcaggagccagagcccccaaggccctcatcacagcggccatgcacagtgcagcggcaggcttgacaatggggcccaaaggcaccaggagcacagagttcacaggctgtcccagcaaaacctgaacggcacagacactgcccactgccactcatgccgtccatgcacacgccacggtcactacaagggctgctgggccgccagggcaagcttgcactcactgccatagtgaccagggcagcagctgggcttccaggtggtggtgacacaattgcggtggcagcccctgcccaggccttggggcctaccccaaaggctggggtggacccagacgctgcgtaatcccaaagagtgcagcggaggggacgtccagaacttcgggtagaagcgccagcaggcctcagggctgccctgctcctgtgacccctcaggacagggtggctccagcccacagatgctgcaggtgttcagtcgcaggggccgggtctcaaagtggtcacagcgagcaccaaggccaggtggctccagcagctggtcgatgccataggccaggccaccctcaaagggcaagtgccgctgcacaatgcgagcatcatcctcacccaccatgagctcaccgggccgcgttcggctgcaggagaaagagatgggggtcccatgcatggttcgaagtgggcccaggttgggcaggtcagatgccaaggcctcgacattgcgaatcatgtggccccgcagaatggctgctagcttgtcacggtggtcctcatggtacagccaggcctggcgatccggaggcagagctcgaaaggcggcgtctgtgggccacagcattgtgaagggcctatgggatgcctctcgaagcaggggcaggaggccggccaccttcaggaggccgctgaagatcttgtaaccgaagccctgggcggcggcggtgacatttctcctcgggatgggagcatcatcaggctcccagtgcagcgcctcggggggcagcaggacacggtcaatgaagtgcaggatgccgttcacggcctcatggtcgctgctcaccacgcgcgcgaagtcattgaggtatatgctgccctccctctcgctgaagcgcagtgggtgccctgagagggccgtggcgtacccctgctccagcaggtcctcgctccgcagccgccgacagccaaccacgtggtagcgaaacaccagctggcgatgcgcacgaatccgggccagctcatcctgcgacaggttgctcattagatctgcgtgcggcacgaagatggtgaaaggcccatcgcccttgagctccttatattccaggaggcggaggctgaagaatgaggcatgcttatccctcaggagctccaggccgactcgggcacggcaggtgagccgtcccccacgtgtgggctggttacagtc

SEQ ID NO: 598287 - DNA, 470 bp, Homo sapiens
tgcagcgtctaccccttctgcgttcactagtaacaccgtactccgcgtcgtgtcacagtcgtagagtgctttctaccgcggttactacattgtttacatgactgagatatcacttcccaaatttcagaatgaggaatctgaggtccaagagacatctgagctagtgagcagcagaggtaggatctgaaccctggaagccactgaccatccacatgggtgccttaatagaacccttctataataacagacgcagtgagcaaatccacagaagtctctcaaatgaaaaagctagacgatggaccgatagcaggcgcatcaggtaatcaggtccatgagggcaatatcctattaggcggtggccaattgctaaactgattcgcctcgtgcaaatgaggaccggtgaccgtctgagactccctagtgctctgcggactgggagcaattccaagacacgagcctctggtgaaggc

SEQ ID NO: 598288 - DNA, 261 bp, Homo sapiens
ggtttataaacagatgttagcatccaaggtgagcatgggaaacagcatttttccatctttcttccaggctgcatcacaatatgcctcatatggtcttgttcggtgagacccattctagcaggcgcacagcagtcacgggtttctgtggtggcacggcctcagtgcccgcaagtgcccccacgtggtccagtaagaagagtgcaatgagagtcggtttgggccagatagcttgtccccgtttatagtttatccgacctaatg

SEQ ID NO: 598289 - DNA, 4668 bp, Homo sapiens
  misc_feature (2748)..(2748): n is a, c, g, or t
  misc_feature (2886)..(2886): n is a, c, g, or t
gcggccgctcggcgctggctgctgtgcggaggccacggcgggccgcgagccgcctcgtcctcgccctcctgccctgggtgcggccccccgggtcccggcgcccactgccccggcgtcccgcgctccgcgcccgcccaggcacccaccagcggcgccgacctcagcgcgcacctatgggctcgctaccaggacatgcggagactggtgcacgacctcctgccccccgaggtctgcagtctcctgaacccagcagccatctacgccaacaacgagatcagcctgcgtgacgttgaggtctacggctttgactacgactacaccctggcccagtatgcagacgcactgcaccccgagatcttcagtaccgcccgtgacatcctgatcgagcactacaagtacccagaagggattcggaagtatgactacaaccccagctttgccatccgtggcctccactatgacattcagaagagccttctgatgaagattgacgccttccactacgtgcagctggggacagcctacaggggcctccagcctgtgccagacgaggaggtgattgagctgtatgggggtacccagcacatcccactataccagatgagtggcttctatggcaagggtccctccattaagcagttcatggacatcttctcgctaccggagatggctctgctgtcctgtgtggtggactactttctgggccacagcctggagtttgaccaagcacatctctacaaggacgtgacggacgccatccgagacgtgcatgtgaagggcctcatgtaccagtggatcgagcaggacatggagaagtacatcctgagaggggatgagacgtttgctgtcctgagccgcctggtggcccatgggaaacagctgttcctcatcaccaacagtcctttcagcttcgtagacaaggggatgcggcacatggtgggtcccgattggcgccagctcttcgatgtggtcattgtccaggcagacaagcccagcttcttcactgaccggcgcaagcctttcagaaaactcgatgagaagggctcacttcagtgggaccggatcacccgcttggaaaagggcaagatctatcggcagggaaacctgtttgacttcttacgcttgacggaatggcgtggcccccgcgtgctctacttcggggaccacctctatagtgatctggcggatctcatgctgcggcacggctggcgcacaggcgccatcatccccgagctggagcgtgagatccgcatcatcaacacggagcagtacatgcactcgctgacgtggcagcaggcgctcacggggctgctggagcgcatgcagacctatcaggacgcggagtcgaggcaggtgctggctgcctggatgaaagagcggcaggagctgaggtgcatcaccaaggccctgttcaatgcgcagttcggcagcatcttccgcaccttccacaaccccacctacttctcaaggcgcctcgtgcgcttctctgacctctacatggcctccctcagctgcctgctcaactaccgcgtggacttcaccttctacccacgccgtacgccgctgcagcacgaggcacccctctggatggaccagctctgcaccggctgcatgaagacccccttccttggtgacatggcccacatccgctgagggcacctttattgtctgggacaggccctcagcccctcctgccccatccacccagacaagcaataaaagtggtctcctccctgtgcatgcttctgctttcagccccagcctcgtcacttgactgtgaggatcctctgggtgtcagggaagtcctcctccagcagtgagtcatcgaagggttcacaaaaggtgtcgctgccaaagacagggttggggacagagaccagggtggggttggtcccttcttgccacggtgagaagtcgtcatcagcatcatcttccgcctggaaggcagagaagccaaagcccatgggcttgcctcgggcacggaggtagagagctccggccaccaagccaagcagtgctccagcggcaagcacagcccccacgcctgccgccacaggtggggcttcaggcgccagcactgcctgcacaggggcccaggaactgttgtcagggcctgcgtcactgatgatgaggctgaggcctgagtgggccggaagcaacttcccctggctggcgttggcacttaggagggtggcgttggaggcatgcagctccaagtctgggccactcagcgtcatgttgtccacaaagccttcattgacagggacgaagagtgtcttatacgtgagctcatcatccaggaagtccaggaagtcgagaccccgctgggtggcattggcatagcccaatagcatcccatagaaggtggagaagttggcagtggcagccagcacatccagcagcttcccattgcacgtgctgatcccgtcacccacgaagccatttcggcatcggcaggccacatcttgcacacggaagcagtaggcatcccagcgttctgagaggttcttgcgggcacccaggctgactatgcccacccgaccattgccacagtccgccacagggaaaaccacagggtgggcagtggagccattggccagccagcccatgaggcacaggtggaagcccagctgctgggcagcagagagctgagggaatgaagcaaggacggctccctgtgcttcgcatgccgcctcagcctccgaaaagttcagaccataagggccgctggtggcctggaggtggaanacgccagcccgtttctcctggaagtgcaggtcagtgcacatggcatctgagtgcaagggcggtggctggcccaagcagcggtccacaggtggttccgactcctccagacactgcagtccatcgcctacgtagcctgcntggcactcacagcgccgtgtgttcaggccggtgctcaagcagttggcgtgctcgctgcagcccccgcggtggccatctgtgcaggggttgcgggcccggcagctccagccatcaccctcgtagtcgggcaggcaggtacaagtgaccattgttcctacctggctacagttggcgtgctcactgcagccaccatgcccgtcctggcacaggtctgccactgtacacacgcggccatccccttcatagcccaggctgcactcacagctgttgcctgcacggcacacagcctcgggtgcacagggtggggtacacacaggctgcagctccagttgcacctcacagcgtggcccagtccagccttcatcacagaagcaggagccagagcccccaaggccctcatcacagcggccatgcacagtgcagcggcaggcttgacaatggggcccaaaggcaccaggagcacagagttcacaggctgtcccagcaaaacctgaacggcacagacactgcccactgccactcatgccgtccatgcacacgccacggtcactacaagggctgctgggccgccagggcaagcttgcactcactgccatagtgaccagggcagcagctgggcttccaggtggtggtgacacaattgcggtggcagcccctgcccaggccttggggcctaccccaaaggctggggtggacccagacgctgcgtaatcccaaagagtgcagcggaggggacgtccagaacttcgggtagaagcgccagcaggcctcagggctgccctgctcctgtgacccctcaggacagggtggctccagcccacagatgctgcaggtgttcagtcgcaggggccgggtctcaaagtggtcacagcgagcaccaaggccaggtggctccagcagctggtcgatgccataggccaggccaccctcaaagggcaagtgccgctgcacaatgcgagcatcatcctcacccaccatgagctcaccgggccgcgttcggctgcaggagaaagagatgggggtcccatgcatggttcgaagtgggcccaggttgggcaggtcagatgccaaggcctcgacattgcgaatcatgtggccccgcagaatggctgctagcttgtcacggtggtcctcatggtacagccaggcctggcgatccggaggcagagctcgaaaggcggcgtctgtgggccacagcattgtgaagggcctatgggatgcctctcgaagcaggggcaggaggccggccaccttcaggaggccgctgaagatcttgtaaccgaagccctgggcggcggcggtgacatttctcctcgggatgggagcatcatcaggctcccagtgcagcgcctcggggggcagcaggacacggtcaatgaagtgcaggatgccgttcacggcctcatggtcgctgctcaccacgcgcgcgaagtcattgaggtatatgctgccctccctctcgctgaagcgcagtgggtgccctgagagggccgtggcgtacccctgctccagcaggtcctcgctccgcagccgccgacagccaaccacgtggtagcgaaacaccagctggcgatgcgcacgaatccgggccagctcatcctgcgacaggttgctcattagatctgcgtgcggcacgaagatggtgaaaggcccatcgcccttgagctccttatattccaggaggcggaggctgaagaatgaggcatgcttatccctcaggagctccaggccgactcgggcacggcaggtgagccgtcccccacgtgtgggctggttacagtc

SEQ ID NO: 598290 - DNA, 621 bp, Homo sapiens
  misc_feature (21)..(21): n is a, c, g, or t
  misc_feature (107)..(107): n is a, c, g, or t
  misc_feature (109)..(109): n is a, c, g, or t
  misc_feature (112)..(112): n is a, c, g, or t
  misc_feature (115)..(116): n is a, c, g, or t
  misc_feature (119)..(119): n is a, c, g, or t
  misc_feature (122)..(122): n is a, c, g, or t
  misc_feature (126)..(126): n is a, c, g, or t
  misc_feature (137)..(137): n is a, c, g, or t
  misc_feature (142)..(142): n is a, c, g, or t
  misc_feature (145)..(145): n is a, c, g, or t
  misc_feature (149)..(149): n is a, c, g, or t
  misc_feature (151)..(151): n is a, c, g, or t
  misc_feature (154)..(155): n is a, c, g, or t
  misc_feature (161)..(161): n is a, c, g, or t
  misc_feature (170)..(170): n is a, c, g, or t
  misc_feature (173)..(173): n is a, c, g, or t
  misc_feature (176)..(176): n is a, c, g, or t
  misc_feature (182)..(182): n is a, c, g, or t
  misc_feature (184)..(185): n is a, c, g, or t
  misc_feature (188)..(189): n is a, c, g, or t
  misc_feature (207)..(207): n is a, c, g, or t
  misc_feature (223)..(223): n is a, c, g, or t
  misc_feature (236)..(236): n is a, c, g, or t
  misc_feature (266)..(266): n is a, c, g, or t
  misc_feature (289)..(289): n is a, c, g, or t
  misc_feature (326)..(326): n is a, c, g, or t
  misc_feature (344)..(344): n is a, c, g, or t
  misc_feature (446)..(446): n is a, c, g, or t
  misc_feature (450)..(450): n is a, c, g, or t
  misc_feature (473)..(473): n is a, c, g, or t
  misc_feature (509)..(509): n is a, c, g, or t
  misc_feature (602)..(602): n is a, c, g, or t
ataatgtaagaaaaaaaaganttaaaaatacaattctatcccagaaatggatccgttatctgcacagccattgaagaaaaaaaaaaaaattcatgcaaactgaaacnangcnttnntgnagngacngagtgggagangcggngangccngnggnntatatnagcggcgcnganttnacaacngnntgnnagcgagcgagaaaggagnacccaaacgttcgacnggtttaatggcgngggaacacagttttgcatatgggtatgaanaaggtttgcgaactcctgaggangggcccatatgaaacaaacacattgaacacaccactnactgacatgcccctcccncccacatcaggtttgttagggtatttttttacttgcttggcaacaaataaatacatgggtgaccattataaaatcaaaattataatttgatatgtgcccaangaangaaatagcaaatatctcaagctntaaagttacttttggtcatttatattaatttataantgctgaaatgcatcaccatgtagagaagagactaggttacacaatttatcagatttgttctcttagccatgacgacagttttaccaagtatcnaaaaaataataataaaaga

SEQ ID NO: 598291 - DNA, 725 bp, Homo sapiens
  misc_feature (5)..(5): n is a, c, g, or t
  misc_feature (83)..(83): n is a, c, g, or t
  misc_feature (86)..(86): n is a, c, g, or t
  misc_feature (89)..(89): n is a, c, g, or t
  misc_feature (93)..(93): n is a, c, g, or t
  misc_feature (119)..(119): n is a, c, g, or t
  misc_feature (121)..(121): n is a, c, g, or t
  misc_feature (124)..(124): n is a, c, g, or t
  misc_feature (128)..(128): n is a, c, g, or t
  misc_feature (184)..(184): n is a, c, g, or t
  misc_feature (205)..(205): n is a, c, g, or t
  misc_feature (254)..(255): n is a, c, g, or t
  misc_feature (258)..(258): n is a, c, g, or t
  misc_feature (261)..(262): n is a, c, g, or t
  misc_feature (266)..(267): n is a, c, g, or t
  misc_feature (273)..(273): n is a, c, g, or t
  misc_feature (305)..(305): n is a, c, g, or t
  misc_feature (307)..(307): n is a, c, g, or t
  misc_feature (424)..(424): n is a, c, g, or t
  misc_feature (436)..(436): n is a, c, g, or t
  misc_feature (516)..(516): n is a, c, g, or t
  misc_feature (518)..(518): n is a, c, g, or t
  misc_feature (522)..(522): n is a, c, g, or t
  misc_feature (526)..(526): n is a, c, g, or t
  misc_feature (565)..(565): n is a, c, g, or t
  misc_feature (567)..(568): n is a, c, g, or t
  misc_feature (642)..(642): n is a, c, g, or t
  misc_feature (662)..(662): n is a, c, g, or t
  misc_feature (700)..(700): n is a, c, g, or t
ggggngggacatctggaaaaaaagcagcctgacagtccagctgtttgcaaactcatagcacatcctccagttacatggcaganganggngggngggagggccaaaaagaaaagggagangnggnaganaaataacttaaataaacacacacacaaagaaaagagaaggcaacatgacgtgagcnggtgatccatgaaggcagggngggaggggaaccgttttacctgtgctgaaccaagggaagaatgcggagnnggnggnngggnnaggggnaaaaaaaatcagaagaaacactgggggcagangntggtggggacacggagacaactttatacaacttgagacgaggcggcccggccggcgtgtcctcagtgcggtgtggcggcggaggatctggtgctggtggtgctggcacttcagggtngggggccgaggncgggcacagtctctaagcagctcccccaccccaaacacggaggccccaaggggctgggaacaagagtctgtggcgaacangnttangcancgggcggttggcggcttgctgggtgcccccgccgcagcnanngggctggacggcctgtcttctttccactggccccccggcatgggatgggccagggcgccgggtcgggtacggantgcaagctcgaaagagaganagagaaaacactgagacagcattagtggagtgaaaggnggacacagatgagcctgcagaccat

SEQ ID NO: 598292 - DNA, 85 bp, Homo sapiens
gaaggaatcaggcgggtaaacacagattgagtgtctgaccacaagacaaaagaagagcagacagattcccttctgtcgtcttctc

SEQ ID NO: 598293 - DNA, 775 bp, Homo sapiens
  misc_feature (662)..(662): n is a, c, g, or t
gccgccgggccggcgcactggtggtcacctgctgagcctggaggtggcggtcgcatgtgaagcctggtggcgcgtgcaaaacctgtgctggctgcctgggccttctgggcctcctgggccagaagctggcgctggtgtgtgcggcgcgcaggtggtggagaaagcaggcagccgccgtggggcctcctggacgcgtctggcggagggtggcttcgtcccgctggatgtcaggcttcaggctttcaccagttctcaggatgcccatagggatgggtgaagcctgcccttggcctgtggtgctttccagtggccgtcatctcatatagggccccacagtggcattaggatgcacctctcggcggtgtacaacgccctcctggtgtcggtgctggaagctggtcctgtggaagcattgtgcggcttgctgttgagcatgcagccacactggcagcgaggaagctggccctcagccgaaaggccaacagaggccagccccagcactgaaggatcgaatagccgaaagggcacttgcagatcctgattggagggcgtggaacacaacattggtgttgcacggggcccggcacgcaacacaagaccggcatctagccggcttcaagtggctactgcaaacttccaacggaggcttgaggatgttcaancatatctcccattgggcaaacaacctcatgtcatggcttgccaagcttggggctacccggaggacttccaagaccagccctagtcgacctatacaccggtggaggaccacaaa

SEQ ID NO: 598294 - DNA, 900 bp, Homo sapiens
catccgcccactccaaacacttcgagctcccatccgagcccacgcatctcctctcaaaccccttcttcgcttacccctcaacactcttctctcctctttcctgtcaatacccatactgcatcatccgggtcacaccttctcgactgcttctacgtgtccctccttacaccctgccctgatgcttcgcagctgaactttctctgagctgtaacagcctgaccgcaacaaacgagaggatcgagaccatccgctccagattatccggctcctccatgcgttgcctctcggctcctgctccggttttccatgccttatggaactcctcgatccgccagcgatgggtataaatgtcgatgacgcgcaaggcttgggctagcgactcgaccggttcgctggtcagcaacaaccatttcaacggggtctcacccttgggcgggttaatctcctcggccagcaccgcgttgagcgtgatattcccctgttttagcgtgatgcgcccactgcgcaggctcaagctcgccttgcgggctggtcgatttttacgtttaccgcgtttatccaccacgcccttttgcggaatgctgatctgatagccacccaactccggttggttcttcagatggtcgtacagatacaacccagactctacgtccttgcgtgggtgcttggagcgcaccacgaagcgctcgttatgcgccagtttgtcctgcagataagcatgaatatcggcttcgcggtcacagaccgcaatcacgttgctcatcatgctgcccatgcgtaaccggctagttgcggccgctgccagccatttgccactctccttttcatccgcatcggcagggtcatccgggcgcatccaccactcctgatgcagtaatcctacggtgcggaatgtggtgg

SEQ ID NO: 598295 - DNA, 102 bp, Homo sapiens
gcaggttaagggctaccctctgcaaaattaaaattaaaaaaattagccagtcatggtggcacatgcttgtagttccagctactcaggaggccaagatgaaat

SEQ ID NO: 598296 - DNA, 1471 bp, Homo sapiens
gggctgtgaaaagaaagcctcagaacgttcgctcgactgcgtccccagacctggggcctgagccctccgctgactgccacccgggcacatggtgggcctgcacgcagccacgacgtaccgacatgtacccacggtggacaccctgacatggggctagatacctgacatgctacctgggacagtagctaggcaccacgaggtaggacgacctacacactgacgaactacctagagaacccacctgtgtgatgctaggtactagacatacccagcacgtgggcataaaacatgcacagaggtacacagacatacgtaccatagccttgggatgcacatgctagagattacaaccacatacgacaagccatgaccccacactccatacgccacaacaggaaccgtgacagactcacaagccttgacagctatattgagcacacaacaagcgcgcaaacgaccagggacggaaccttgatagaccagcctgatgtgactcgaccaatacggagaattggacacaactggcaatgaacatgaccgcgcaagagaagtacctggtacctcggcagggtgttagcagacgtataatacttggtaccttgcccacagcttggaacccgccgcccataggacaccgtaaataggtacgccgtaccacgaggtattaaggcaagtaatactttggtgagcaaaaaacttaggagagcacctacaacacaaccagagacggtgtttgtgacagggtataaataacacgcctataccacaacgaccaactcatataggtagggtatatgaaccccactaaggaaagaccaagggggccagttaagtagaagggatagaaccctggttcaaacaccaagcccttaggacgccaccaagaaggagagccccagtgcacacatagaattcgagggtgaaacacaccgaaaagaaaccagtaacaccgatgagtcacacatccagggacacttcatccgccatagtggattggcaccatgacacacttggatagaacaggcaaacgagccagcaaggggacatttagcaacgggtgatacaccacacaaaggaccacgaattggacgagtttgaaaggcattccaactggggcaaggacccttggatgggaagcaaccccaacaagaacaaagtcaagcccggactgaggagacaacagcccatggggaaagtgggaccacaaaaccaacggagttgtggacaatggattacaggcgaaacgaccgaccagatgtgtgtgaagacaaggcgaagatcattaagcgcgaggagatgacgcgagggaagtcccaggacatgacgacacaggcagagttaccgggacacaaattgggagaaaaccggacacagggaaagggcagtatggaggccagcaagagtagcacacggattagcaaaggaggaccagagatacccatagacgaagttccagccggagggaagcaac

SEQ ID NO: 598297 - DNA, 100 bp, Homo sapiens
cagatgaaggaacatctcatatcgccttccaacatctcatatctccttccaacatctcatcccgcccccccccgtcatgagatgtgggaaggcctaccaa

SEQ ID NO: 598298 - DNA, 256 bp, Homo sapiens
tgctatgtaagctaaagacaaggcaccctgagcacaactgcctgtgggtgaaagatgattagcacatgatggtttgcagggacgttcctagttggttctcatctctgatccacatgccctttcgcaagtactgttactccaggcaataacccagaagtccaccgtcatgatcatgctgagctctcctgactcaccccaaaaacaatcacccgtaaggctaaagacaaggcaccacgtttttaccacagtacggggt

SEQ ID NO: 598299 - DNA, 197 bp, Homo sapiens
cggtgtctgtgtgtgtatgctgtgtgtgtgcgtgtgtggtgtgtgtgcagggtatatgtggcatgtgcatatgtgtatgtggtctcgtgttgtgtgcatatatgtgtggtgtgtgtgtgtgtgtgtgtgtggagagacataaggtctcctatattttttctcaggctggtctcgtaattcctgtagttcaaggtgat

SEQ ID NO: 598300 - DNA, 896 bp, Homo sapiens
taaggttttgagggggaatgctggaaatggtaaggggtatggaaacatgtcatataagtaatgctagggtgagtggtaggaagtttttcataggaggtgtatgagtgggtcgtacggaatcgggggtatgctgtcgaattcataaaaacagggaggttagaagtagggtctgggggacaaaatatgtggtgtagagttcaggggagagtgcgtcatatgtggttcctaggaagatggtaggggtgagggtgtttattataataatgttggtgtatcggctattgaagaatagggcgaaggggcctgcggagtatcgatgtggaagccttgagactagttcgaatccccttcggacaaggccgaagggggtaccgggagggtctcggctaggggggagataaactcacatgcagggccaagggtcagtgatggcaggagctaactccagaggggtactacagccgcgaaaggctggagacgctcacaaggaagcccactcataacaccagacgaaacaccacacgccggcaacgccagacacccacagcacacccggatgaggccacaaagccacacaggacgacgcaacaagaggacaacatgaaatacacagacacacccccagacacaaagacacacacacaaaccgccgcaggccacaactggcgccaaacataaaccacgcaaaccccaagcaagaacactcaccacacagccggccacgcagaaacgcccccaacaacccacacacgaccaccacccaccccaccagccgccgcccagccacccaccacagccacaacaacacaccgagacacgaccctaccccaccagccacgcgcacaacaagcacaccaaccaaaaaaacacaaggacccatggccagcgacggatcc

SEQ ID NO: 598301 - DNA, 222 bp, Homo sapiens
gaattcggcacgaggaaaaaaaaaaattcaaagtttttgggagtaagaggtagagttccagcatcataagattacatctggcaaacacctgaaatccgaaagcgatgcaccaggacttccaaggcatcatatatattactaaataactttggtaaaatatagtactggccaggcacagtggctcatgcctgtaatttcagcacttgaggaggccagaccagg

SEQ ID NO: 598302 - DNA, 143 bp, Homo sapiens
gcgcttatgtcagcattcagcagcgcgagtatagcatcatcctctactattttttaaccaaatcaaaaccactatgtatctgttcccaagcttttctccgacccctaacaacccctcctaatactaactacctgactcctaca

SEQ ID NO: 598303 - DNA, 720 bp, Homo sapiens
ccactaaaggtagtttttcagattggttgttagaatgtcatgtttagatgttggagcagattagagcagcattcatgccactcggagcaaccagacttacagcataagtatgtacgaggaatttcaaatcatcagatgtttgcttggctaggttctactttgtttatttgatatcaaataggtttgtagatgtttatggcatttctaattgtaagtagagacaaaatattcatatagtcagatatatgttgtctgctttaaacaatttttaaattttaaaaatgcattaacgtctttttatatccatcaagggaaggatgaaatgttgaatttgaagactaattcagtaagaagtcctaggggtttaactgtacatactacctgaactggcttttctgagagatgaatcaataatgaaacatgtctgttttaaaaactaccacatgtgactcctatttttgttagctgaaagctgcaatacggagtattacaggaatgtgaaggtgactagcttgaaggtagggtaactagagagccagaaaagttttgttttaaacttgatttaatgcgtttttattttttcttatacaaaatagagataatgttgctaacttcatggaatatttgaggaaatgatatgaaagtgtctggacgtgcagtaacctcatggcttcttctcactgtcttataaatgtaaataaagatctaataccacaaata

SEQ ID NO: 598304 - DNA, 375 bp, Homo sapiens
tctctggtacctgaacattctgtgtccaagggtcatggttctcagccaccctccagtctttttctggtgcctgtgttatattagttgtctgggaagtgacccatctcaaggcatgtttagtgaacattagcacgttgttcctttcctcccagaggacagcctcagtgatggaggtggagcctcttaagggagcagatggatgccctggggctgagaggaagctggtcctacccttcatttgcaaagctaaccccttaggacatgcagattgtcttcacccaactccagcgtctgttccttggagacacattgctggtcagccagttggatgctgatattgagaagaaaaaacagaaatgatttctgacatctgga

SEQ ID NO: 598305 - DNA, 305 bp, Homo sapiens
ccttttttgggcccccccgggggggggggcccccctcccctcccccccccaaaatggggttccagggggtttttcaaaaaattcccaaggtttttgggggcccccccccccgggcccgggccccgggttttttttccttaaaagggggccccccggggttaccttgggaccccccccgccttttgggggggcccccccccctttccccttttcccggggcgggggccttagggggggacccctccccggtttttttcccctttttttggggttgtttccccgggttttaattttttaatgttgga

SEQ ID NO: 598306 - DNA, 600 bp, Homo sapiens
  misc_feature (294)..(294): n is a, c, g, or t
ggactcggtgaggaactcgggggatcggagaggggctcgtgtgctgggcgacagtgacacactcagcagcccggcggagccgcgttcggtaccgtctgaagggcagccggggctgggggaccgacagctctcaggtgtcggtttttctgtggctagcggatgtttggcaccatttcacagggcacacagggcagacgggacctagatgacgacagatctgcgtgtttgggctctgtttgaaacagacctcagccagagtcttgaagagcagaacccggagtgttgaagtcacanagagatcaacatccctacggtgtgaaatcctgaaaacggcaaatcccaaaggacgaaacgcccgaaaatgatgtcatcctttaagtgttttcttcttttttcttttctttttcttttctttctcttttttttttttttttttggagtcaggatctcgctctgtcgcccaggctgcagtgcagttgccgctatcgtggctcactgcagcctcagcctcctgggctcgagtggtcctcccaccagagcctcccacactgctgggattacaggcaccaaccaccatgtccggcccattgtggtccattg

SEQ ID NO: 598307 - DNA, 317 bp, Homo sapiens
ctggcggcggcggcggctggcgtgctggcggcagcagcgcggccctttaaactgcctgcggcgcccacagtactcagcttggtcctcttttgtgcgtcctcgtagcgtgccgtttgtcccagctcgcacgttgttctcggccggccaagttgccgtaggcattaatgactagcccaaatcatgtagtaggcgtccagcttatgttacgatcgtaaatgctgatatactccgttcatgctaaggccatatcttgatcgcatacgactacgagggagcctgaaggatgagggccgaatgctaatgcttcagatgaccga

SEQ ID NO: 598308 - DNA, 947 bp, Homo sapiens
  misc_feature (504)..(504): n is a, c, g, or t
gaggaaactgaggtcctcagaatggtgggcacaggtttggtggctgagacggtgtggtggatgcgctgccgtattgtgatcaagtgttatgacagcccctgctgtgcgggaaagggtcgagcgtgggtggaggtaggaaactcgcagtatacggagctcataaagaactaacgtgagctaacgtgacgagccccgggatatattcctggcctctgttgaaaactgcacatcagtgagcacgctgactttgtgaacagattggctggctcggacaaaccaatgtgaatgtgctcacgtatggaaaagcgataattgaggcttccgaggcccccttccttctgttcaacaacaatttgactatttactgccgtggccacgactggttgtcaacccaacttctaatggcgccccagataaggagccatcaagggccacgttaagacatgtgaagacatcttggaatcctaatgtgtccacaggccatggattgttaatggctctggnaaaagttcataccaactgaacaatcctagttcattatgacttgacacaccgcaacagaagggaaccttccagagggtcacgacaaccttatacaaggattttaaacctgccaggaagaaaggacacatagcaactcaacaggctgatcctaactgtgcgcagaacatggcgcccaaatggtgggtatctcctggctcaagtacgacattatgagattgcacggactattgtccagctaagaaatgaactctatcaaattaagcagcacttggggggaacaaggaaacctccggagacttctgaaagaattaggcggttgaaaaaagtgcgttcacaaagctcgacttcaaggacgtgaggaacgcttccaacatgtgcgtgtgacccacacgcggggggggacttgttcaccaaaagtctgggggttcaaaactgtccaggct

SEQ ID NO: 598309 - DNA, 361 bp, Homo sapiens
gagaagaagctacaaggaagtactatcaagagatcacatgaaatcaatcaaagggagaacttgaagaacagagaccagaaagagtaacaccttttatgacaggagctgcagaacaaatcaagcacatccttgcttaaattacaaagaactaccagtatctttatgtggtgaaaacatgtaatccatgatggcatgtgttgctcgtattggcactacctgtgacggatggatgtgacccacatatatgtattttcatttaagggatgtgtttagaacatggacaaaatgttaacaaagtgtggcaatatattttgtgatctatcaccttgtcatcataactggtcttcttttcatatttccg

SEQ ID NO: 598310 - DNA, 96 bp, Homo sapiens
  misc_feature (92)..(92): n is a, c, g, or t
ggaaaaattttttaattttttttttcccaaaaggggcaaactttttgggaaacttttttttaaaaaaaaccttttttttcggggggtggggnccca

SEQ ID NO: 598311 - DNA, 334 bp, Homo sapiens
  misc_feature (245)..(245): n is a, c, g, or t
  misc_feature (275)..(275): n is a, c, g, or t
  misc_feature (332)..(332): n is a, c, g, or t
tgcaactgaaccagaggcatcatacaagacagagacatcgaagtgcaaggagacacaggagcctttcatcaaagacagtactatgaagaaatctgaacaacctaccacaacctttaactgtcttaggaaatcaaagcgaagagttcagcaataggcctcacaggaacaggccgttacttatgagcaatggcaaaaagtcacaagaaaaagtttgtttcatggaactgcaaacaaaaacttttagntatctcgctctttagaaaccctttcttctncatttttacctggtcttttctcctgagccaattagcatatttcattcccactttccncc

SEQ ID NO: 598312 - DNA, 219 bp, Homo sapiens
ttcctgcgctatccggaatgcccctacgtaactcggactatcccgatgcatagcagccacatgaaacatcctatcatctgtaggctcactatcatttctctaacagcagttatattcataattttcatgatttgagaagccttcgcttcgtagacagaaaagtcctaatagtagaagaaccctccataaacctggagtgactatatggatgccccccac

SEQ ID NO: 598313 - DNA, 178 bp, Homo sapiens
tctggactgagcctccgatggattctgaactggaatactgcagctaacccttccacgactagaaccttaggcataggggagttttagatggactaattttattaaaggatagtattttttttttttttttttttttattttttttttttatttttttttttttttttttttacaccaa

SEQ ID NO: 598314 - DNA, 343 bp, Homo sapiens
aactttctgaaaactgaaactcgcgttcgcttgtagataacaaaactgggtgaaatcagttgcaaccaatatagccaactagagttcactctgaaggagcgtcatcacagcctgaattgccaccacatgcttcatattaactcctcccaaatttgaacatgggacccatgaggagtcatgaagagataactgggtactgccaaggactttctagacctcccctttccttccaccaatcacctagtaatcccagaatctacccgctaaacctgttctaataaaattactgcaccaggagacagatttgggcttgactcctgtgagtcaactggcaatcaagctt

SEQ ID NO: 598315 - DNA, 782 bp, Homo sapiens
agctcgtgtccatgtccgtgcgcgagctgaaccgccacctgcggggcttcaccaaggacgaggtgatccgcctgaagcagaagcggcggaccctgaagaaccggggctacgcccagtcttgcaggtataaacgcgtccagcagaagcaccacctggagaatgagaagacgcagctcattcagcaggtggagcagcttaagcaggaggtgtcccggctggcccgcgagagagacgcctacaaggtcaagtgcgagaaactcgccaactccggcttcagggaggcgggctccaccagcgacagcccctcctctcccgagttctttctgtgagtcgtggccggtcctggcccccgcccttgccccggcccggactccctgtcccacgtccctagtcccagactaccccggaccctgtccctgccgcggccccagccttgacctgtttgacttgagcgagagggatgaagggcgctcgggccgtgggcgactgtcgggtgctcggtcgggcaggggaccttggcttaggcgagagtatctcacgccatcgcccgctcctagactcgagcatagccggacagagagacgagatggttgcaagtccctgtatacacttcttccaggctgaatgtcctctaagcttattctcgagaaatcaccacaggcctctgtaaacacccagcctctctagaactttccacgttaaaccaggacaatttgcttcacttccctgataatactccgtcgcatataatattactacggtctaatggtcagcgcccttct

SEQ ID NO: 598316 - DNA, 149 bp, Homo sapiens
atatagaattcaacatgtccccttgagtggcggagagcatgattctgactatgaccctatctcgctgactgttgccctgcatggagtcatacagccgatcagaaaaatacaagggctcgttatgaatgcactgaaccatgctcaagaaa

SEQ ID NO: 598317 - DNA, 338 bp, Homo sapiens
  misc_feature (27)..(27): n is a, c, g, or t
  misc_feature (151)..(151): n is a, c, g, or t
  misc_feature (156)..(157): n is a, c, g, or t
  misc_feature (183)..(183): n is a, c, g, or t
  misc_feature (191)..(192): n is a, c, g, or t
  misc_feature (253)..(253): n is a, c, g, or t
  misc_feature (326)..(327): n is a, c, g, or t
tcctggcccagccgagcttgcttcccncaaatcccgtaatcctgtgaccttattcccccaaagaagcggcctcccggcgaaggagcgccctggcggagaaccgactcgaacggctcccacagccgggcgttagggaggaaaggccacttcnttcanncctccaccatgagcctggacatccangagcctgnngacatccagtgtgaggagctgagcgacgctagcatgggccgagctcctccctctgctccangcagtgccaagtggtcaggctgacacggcctcacggcaagccacggctgccacaggggacatcccagctctgnncacttcgcaag

SEQ ID NO: 598318 - DNA, 109 bp, Homo sapiens
tgaggatctgatcgagctgatagcctccagattataaagtaatggtcagctagccaaaaatctgtgcacaggctgccttgtattgggagacattgacacatcagagaga

SEQ ID NO: 598319 - DNA, 201 bp, Homo sapiens
gcaccgtgaagcactggagatactggacatagcagatttgtcaagctcatttttcccaccaccagtgcctgagcacgacctcatttgccttggtcaatgaagcccaaggaagcattgcactttggcttacgctttaagttttgtatgtagatatgtatcccatgtcttctaacaataaagtgctggcctcgatggcctcaa

SEQ ID NO: 598320 - DNA, 295 bp, Homo sapiens
atagatggttccctgtgtgtggttgtgacatgctttcccccccacctcctttcccctctttctggggctcttgctcttcccccacagcactaggggtacagatgcacaccactgtacctagtgtttatgtgattcacacaagcccagggactcaaactcaggcctcctgcttatacagcaagcaccacggccactgcctcatctcctaagcccccccccccctgatcttctactgaagccccttccttgggaagggaaaattgttcagaaagtcgacgcggccgcgagtttagta

SEQ ID NO: 598321 - DNA, 427 bp, Homo sapiens
cagtactgacatttcagatttacttcatcacttgatgctgtgagctagtggtgagtctctatggaatccccatttgttcatcgatctcctgatactgaaccatcctgcactgctcattctgtcttactgcaccctcctcagctctgcaggatgaggtctttaatctatgccatagggtgtgctgcttacctagtgattgcatttgtcccgagatcatagacttcaggatgattattaacccctgtgtgtttttgttcctcatatagtgccctgcccccagacatttgctgaccagacgtttggcatgttcagctggaccatccccattgctgttgccctgtcctgctttgggggcctcaatgcatccatctttgcttcatcaaggttgttcttcgtgggctcccgggagggccacctaccggacctt

SEQ ID NO: 598322 - DNA, 280 bp, Homo sapiens
  misc_feature (63)..(63): n is a, c, g, or t
  misc_feature (141)..(141): n is a, c, g, or t
  misc_feature (159)..(159): n is a, c, g, or t
  misc_feature (230)..(230): n is a, c, g, or t
  misc_feature (252)..(252): n is a, c, g, or t
gaatggctcaaaccctgtaatccccagcaatttgggaggctgaagcgggaggatcacttgagncccaggagtttgagaccagccctgggcaacacggtgagacacccacctcctacataaaaatgtgaaaattagcccagntgtggtggcacacactgnggtcccaccttctcaggaggccgaggtgggaggatcgcttgagcctaacagtttgaggttacagagagccntgatcacgccactgcccccaancctgggcaacagcaagatcctgtctcta

SEQ ID NO: 598323 - DNA, 134 bp, Homo sapiens
atgagcgctaggaaatgtccaactcacgtggaagacgtacgtcaataaggaaatacaacacatgctgtcaatcggggtgaaacagcataaagactctcatagaaaaaacaaagcgagagagcgcaaggatactg

SEQ ID NO: 598324 - DNA, 921 bp, Homo sapiens
ggatccctcgttgactcatagatatacatagtcaatcatccttgctgaaaatgtcatcctgaagacaatatacataggtatattttatacacagtttggttgatttaattcacgtaccatacagttcaagccatttaccatgtgcatttccatgggcttctctagatatagttcgaacaatcgtgtcatgccatcactacagtcaatgtaatgaatattccatttggcccgggctggtgcgctgtcggctcatgcctgaccagtcccagcgatccgggaggctgaggagggaggatcactctgaggtcaggaatttctagagcagtacgggcctgcctggttgaaatcctgtctcttactcattacatcgagtcaccttacaagtgttcaccccgggtgtccatgggacattgccgggtaagtcccagcatcatctgggaaggctggagggcagcgagatgttgcttgattatccgcggaggctcgtagcgttcgacatgtagagggtcaagactttgtggctctgtcatcttccagcctgggtttgatccgtgatgaggactcttggctgtggacttaaaagacaaaggcaagtgcctatttcattgctcctaaaaacttaatttgcaccccttggatgagtattcgccagcgatactgcactactcctgaccataggcggtcataattctactttcttgttttataggatctgcttcgtctggacattttgtctattaaatccgcggcggagggtatagttctcggccctaaaatggtcgcatgtacacagtaatggttcggcccgtttcgagagacgcccggtgccatttgccatggggcgtagattaaacaaatggcgacaccaaaagagaccaacgatacagacaacgcgacagccgaaaggaagagagagactca

SEQ ID NO: 598325 - DNA, 122 bp, Homo sapiens
cgtctagaggatcccgatgtttcctgatcgcctgtatcgctcttggaaattaatctgaaaatctgtctcccttgtacacaagtgagacagattttcagattaattttcaagagcgattgaca

SEQ ID NO: 598326 - DNA, 1105 bp, Homo sapiens
  misc_feature (1052)..(1052): n is a, c, g, or t
  misc_feature (1086)..(1086): n is a, c, g, or t
aagaatgtggcaaaggctttagtatattctcaacccttactaaacataagataattcatactggagagaaaccctacaaatgcaatgaatgtggtaaagcctttaactggtcctcaaaccttactaaacataagataattcatactggagagaaaccctacaaatgtgaagaatgtggcaaagcttttaaccggtcctcaacccttactagacataagataattcatactggagagaaaccctacaaatgtgaagaatgtggcaaagcctttaaactggtcctcaactcttactaaacataagagaattcatactgaaagagaaaccctacaaatgtgaagaatgtggcaaagcctttagtgtattctcaatccttactaaacataagataattcatactggagaaaaaccttacaaatgtgacgaatgtggcaaagcctttaaccagttctcaacccttactgaacataagataattcatactggagagaaaccctacaaatgtgatgaatgtggcaaagcctttaactggtcctcaactcttactaaacataagagaattcatactggagagaaaccctacaaatgtgaagaatgtggcaaagcttttaaccggtcctcaaaccttactcgacataagaaaattcatactggagagaaaccatacaaacctaaaagatgtgacagtgcttttgacaacaccccaaacttttctagacataaaagaaatcatatgggtgagaaatcctagaaatgtgaagaatgtgacaaagcctttaagcggttgtcacacttgattgtatataagataattcatactggagaaaactcccagaagtgtgacaaatgtgacaaaacatttaattaattctcataccttattgcacaggaaagcatttatacttgagaaaaattgtataaagaatggaaaagtcattaatatctgctcatatcttaacatcagcgagttggtatttaataaaagcattatcaatgaaattactggcaaaagatctttcagaccatataagcctgcaaagtgcaccagagtnttattttggaagaggaacatttaaagtccaaganggttgtagtacctttggtt

SEQ ID NO: 598327 - DNA, 1168 bp, Homo sapiens
  misc_feature (1115)..(1115): n is a, c, g, or t
  misc_feature (1149)..(1149): n is a, c, g, or t
accgatccacagaccttactacacataagatagttcatactggagagaaaccatacaaatgtgaagaatgtggcaaagcctttaaccagtcctcacaccttactacacataagataattcatacaggagagaaaccctacaaatgtgaagaatgtggcaaagcctttaaccggtcctcaaaccttactaaacataagataattcatactggagagaaaccctacaaatgtgaagaatgtggcaaagcttttaaccggtcctcaacccttactagacataagataattcatactggagagaaaccctacaaatgtgaagaatgtggcaaagcctttaaactggtcctcaactcttactaaacataagagaattcatactgaaagagaaaccctacaaatgtgaagaatgtggcaaagcctttagtgtattctcaatccttactaaacataagataattcatactggagaaaaaccttacaaatgtgacgaatgtggcaaagcctttaaccagttctcaacccttactgaacataagataattcatactggagagaaaccctacaaatgtgatgaatgtggcaaagcctttaactggtcctcaactcttactaaacataagagaattcatactggagagaaaccctacaaatgtgaagaatgtggcaaagcttttaaccggtcctcaaaccttactcgacataagaaaattcatactggagagaaaccatacaaacctaaaagatgtgacagtgcttttgacaacaccccaaacttttctagacataaaagaaatcatatgggtgagaaatcctagaaatgtgaagaatgtgacaaagcctttaagcggttgtcacacttgattgtatataagataattcatactggagaaaactcccagaagtgtgacaaatgtgacaaaacatttaattaattctcataccttattgcacaggaaagcatttatacttgagaaaaattgtataaagaatggaaaagtcattaatatctgctcatatcttaacatcagcgagttggtatttaataaaagcattatcaatgaaattactggcaaaagatctttcagaccatataagcctgcaaagtgcaccagagtnttattttggaagaggaacatttaaagtccaaganggttgtagtacctttggtt

SEQ ID NO: 598328 - DNA, 193 bp, Homo sapiens
  misc_feature (80)..(80): n is a, c, g, or t
agtgacaggccaaaggtgcctttaaaattaattgatacccaattggtgccaagacaatatcctcctatccagcattgaancataagccggcaagtctccaggttaaaggtttgtatcctccagcaatgccagactgtgtcagacatctctgcaattcatcagcatctatctgcccatcctgtccagctacatg

SEQ ID NO: 598329 - DNA, 211 bp, Homo sapiens
acctgggtgactcgccaatcaaaaacagtacatcacatacactagaaatacttcataccccaactaaacatacaaatctgcttacgagatttgctgaaattgtctcaattttggctatcaatattcatttggttttcctcaccattcgtgttatataaaaaacccacaaacttgccttctactatttctccaggacttggctagtcgccca

SEQ ID NO: 598330 - DNA, 661 bp, Homo sapiens
  misc_feature (252)..(252): n is a, c, g, or t
  misc_feature (620)..(620): n is a, c, g, or t
cataaggttctttgaaaatgacactgaaagatatgaaaatgtggaaatgagattttcagttaaaaggctgtaaaagtgtggatgaatgtaagttgcacaagggaggttataatggactaaccaatgtttaccaactatgcagagcaaaatgtttcaatgtgataaatatgtgaaagtctttaataaattttcacattcagatagacataagataaaacatatggaaataaacctttcaaatgtaaagaatgnggcagatcattttgcatgctttcacacctaactcgacatgaaagaaattataccaaggtgaatttctgcaaatgtgaagaatgtgaaaaagctgttaaccaatcttcaaagcttactaaacataaaagaatttatacttgtgagaaactctacaaatgtcaagaatgtgacagaacttttaaccaattctcaaaccttactgaatataaaaaagattatgctcgagagaaaccatacaaatgtgaagaatgtggcaaagcctttaaccagtcctcacaccttactacacataagataattcatacaggagagaaaccctacaaatgtgaagaatgtggcaaagcctttaaccagttctcaaatcttantacacataaaaaaattcatactgaagtgtcacggtccgaca

SEQ ID NO: 598331 - DNA, 931 bp, Homo sapiens
ggacgcgtgggtcgatccacgcgtcggagtaatcaccacccaacacttgactaatctaaactaacctcaaaataaatgatagccatacacaacactaaaggacagaacctgatctcttatactagtatccttaatcatttttattgccacaatctaacctcctcggactcctgcctcactcatttactaccaaccactccaactatctataaaccttagccatggccatccccgttatgaacgggcgcaggtgattataggctttcgcttctaagattatgaatgtcctaggccacttcttaccacagaaggcacacacgtagctagtcccttatccccatactagttattatcggaaaccatcaggctactcattcaagccaaatagccctggcgtacgcctaaccgctaacattactgcaggccaggcatactgcaatgcgacctaatgggaagcgccagcctagcaatatcaaccattaagccttccctctacacttatcatcttcacaatttctaattgctactgactatcctagaaatcgctgtcgccttagatccaaggctacgttttgagaattctagtaagcctctagctgcacgacaacacagtataaaaagtagaagtaagccagaacagcaggtcgcaagccgagcaaggccgaacaggaacacatggagcgcggcggtaacgccatacgactaggcccccgagcaggcggcagcatatcatcgacccatcgggatagcaaaaagaggcgcacctaacaggcgagtactaaccgaaagcaacagggcacacattagacaacgtggcggcgacaggacacagcgacggcccctcacaaagacaccctctgggcggcaacaggcaccccccagaagacaagccgggtccaagcatacaggcaggggcaccccaattgggcaa

SEQ ID NO: 598332 - DNA, 111 bp, Homo sapiens
ggtactggaggatctctagagttgaccaggctctacgatatttggaggtcagcacggtgctcacgtgtcgacggaacttgtcacggacggcatgcaccgcagtggtgaata

SEQ ID NO: 598333 - DNA, 338 bp, Homo sapiens
agctgatcagagtgctagaacagagcagacattttgtaatgaggcctgagataaacactatccacctcgacacgcgacagggtcaactcctgtcagagatgtgtatccttataggtgaaaatgacacatttggagctgagaccaagaagaattgtgacctgaacgagaacattgagaaaggagtattgcatcgagcttttagaggcttcttatatcaacaccgtggtttacgaatacctggtggagacatccattaagcaatccagacgagcttgaggaaagggacgcccttggagtgaggcgagcagcacagagaccgctggctgagctggttcccg

SEQ ID NO: 598334 - DNA, 919 bp, Homo sapiens
ttccctttgtctgatgctctgtgtattgctcttgtgaatcagagtgtggaggaaaagttgagttgtatgagtggcggatgttggtagtgccggacttcgcatgtttcaaggtgttctggggtctcgcttaattgaatgtggaaagtagcaccactgtgaggggtacaagtgccgactcctgaatttgcccatggtgtgctgactgcaagggctggccagcgccagggagaatgggcccaggggaagcaaagacctcttccctctgtgcagtttctgtcccacttaactgagcatcaactggtaggcgtacatctaccccaaagtagatgttagaaaacgcctgaagattggatgaaaccatggattttctaaaagtcctattgtttcccaaaagcagggcgcctcctgcgagccacatcctttgccttccgtcgcttctgaaacacataccgacaggcccaagcgcgtgctggccacagcccgaagctcttagggagaagtatgaatgcgtgtgtctaaccttcagacgacaaaccatatttaaacgtttttaacatagatatatatcgtattgaaggctaaatggccttttaaaatgcttcaagcttgggacaattgacggtggggacagtaataggtggctattaaccaacggaataagttgtacagctacgtgatgctggcaaagaagacgccaagtgtcggccccggcacgattctggggagctgagggccgtcggcctgtctcttggaggggatctcactgtcaagaggggcggcaggacgggccctccccaacgagcgggaacaaaggaggggggacacacaccccaaaaacaatcgcaacagcggggggggagggagaccacacacgaggaacgacgcggcgcaacacaccgagcacacggaagcacaagag

SEQ ID NO: 598335 - DNA, 382 bp, Homo sapiens
aacaagggcgcgacgaacgtgttcgaggcgcgtgcacccttgaagcaatagagatagaccggcgtgtccggagtgatgccgacggttgcgcattcggcgagaatttcttccgacgacttgaagcgcgggccctcgggggtcggcttcatcatgcggtaccattcgagccagaccgcgccgggaatgcggcccttgcgcgggcagaaatccttgccgtaaggcgatgagctttctccgatccattcgtccacgtcgcggacatcgagaagcgcgatattcggcttgccgagcgcggcgagcatggtcttggcgtcgataatgatgtcggccgcttctggcacgaccgggaatgccttaggggcaggcgtaggcacttcggtgg

SEQ ID NO: 598336 - DNA, 153 bp, Homo sapiens
aggcaggctgtattgtcccatgagcaccagtgctctggatacggctggaagcactgtacccagagcaccagtgtacggcagacacattggagcactgtacccagagcaacagtgtacagcagatgcagggagcactgtccccagagcaccagt

SEQ ID NO: 598337 - DNA, 121 bp, Homo sapiens
cgcggaccccacagcattttaatcacacaaatctgatcaaaaacaaaaaaattttaacctttgtcactgagtgtaacctaaggcaacgttacttaactgctataagatgggtagtcacaga

SEQ ID NO: 598338 - DNA, 88 bp, Homo sapiens
aaaataaacccccaaggccaaaaaaaaaaattagggtgactttcccggtgtggcaatatagggaggccccgttttcccgaaaaaggga

SEQ ID NO: 598339 - DNA, 292 bp, Homo sapiens
tctctgagatccccagccatcaggacacaggcctaaactggaacaatcacgattacctaatttccagctctactgctttttttatcacattggaaagtctctcagatttttttatattttaacttataatttttgactttttttgtttagacagagtcccactctgttgcccaggcaagagtgcagtgttacaatcccagctcactgcaatcttccgcctcccatgtttaagctattctcttgcctcagcttccctaattgcttggattacaggcacacaccaccattccca

SEQ ID NO: 598340 - DNA, 308 bp, Homo sapiens
  misc_feature (2)..(2): n is a, c, g, or t
  misc_feature (15)..(15): n is a, c, g, or t
  misc_feature (19)..(19): n is a, c, g, or t
  misc_feature (23)..(23): n is a, c, g, or t
  misc_feature (33)..(33): n is a, c, g, or t
  misc_feature (285)..(285): n is a, c, g, or t
antttcggcacagantctntacnatcaaaatcnccataggacaaagtattgttggagtactaaaatttgcaaccttgtttactttaaaaggttgccactttcagtgcagaatactaccggcatcttgttactgcaatagttggaaataaaatgtgaaaattagcaaaaccatgcatggtttttttgggttctaaatttaagatgtaatatttcctataaaagggtgaaagcagttttctttctctataacctcaatcaccagtttagtgagagcctttcttggcngggcagggaggcagtgtcacccg

SEQ ID NO: 598341 - DNA, 874 bp, Homo sapiens
  misc_feature (32)..(32): n is a, c, g, or t
  misc_feature (64)..(64): n is a, c, g, or t
  misc_feature (116)..(116): n is a, c, g, or t
  misc_feature (133)..(133): n is a, c, g, or t
  misc_feature (166)..(166): n is a, c, g, or t
  misc_feature (181)..(181): n is a, c, g, or t
  misc_feature (191)..(191): n is a, c, g, or t
  misc_feature (207)..(207): n is a, c, g, or t
  misc_feature (218)..(218): n is a, c, g, or t
  misc_feature (220)..(220): n is a, c, g, or t
  misc_feature (232)..(232): n is a, c, g, or t
  misc_feature (272)..(272): n is a, c, g, or t
  misc_feature (276)..(277): n is a, c, g, or t
  misc_feature (282)..(282): n is a, c, g, or t
  misc_feature (310)..(310): n is a, c, g, or t
  misc_feature (410)..(410): n is a, c, g, or t
  misc_feature (444)..(444): n is a, c, g, or t
  misc_feature (447)..(447): n is a, c, g, or t
  misc_feature (507)..(507): n is a, c, g, or t
  misc_feature (528)..(528): n is a, c, g, or t
  misc_feature (530)..(530): n is a, c, g, or t
  misc_feature (565)..(565): n is a, c, g, or t
  misc_feature (574)..(574): n is a, c, g, or t
  misc_feature (587)..(587): n is a, c, g, or t
  misc_feature (592)..(592): n is a, c, g, or t
  misc_feature (603)..(603): n is a, c, g, or t
  misc_feature (610)..(610): n is a, c, g, or t
  misc_feature (612)..(612): n is a, c, g, or t
  misc_feature (617)..(617): n is a, c, g, or t
  misc_feature (634)..(635): n is a, c, g, or t
  misc_feature (642)..(642): n is a, c, g, or t
  misc_feature (645)..(645): n is a, c, g, or t
  misc_feature (653)..(653): n is a, c, g, or t
  misc_feature (669)..(669): n is a, c, g, or t
  misc_feature (675)..(675): n is a, c, g, or t
  misc_feature (681)..(681): n is a, c, g, or t
  misc_feature (695)..(695): n is a, c, g, or t
  misc_feature (698)..(698): n is a, c, g, or t
  misc_feature (707)..(707): n is a, c, g, or t
  misc_feature (713)..(713): n is a, c, g, or t
  misc_feature (716)..(716): n is a, c, g, or t
  misc_feature (719)..(719): n is a, c, g, or t
  misc_feature (723)..(723): n is a, c, g, or t
  misc_feature (736)..(736): n is a, c, g, or t
  misc_feature (740)..(740): n is a, c, g, or t
  misc_feature (746)..(747): n is a, c, g, or t
  misc_feature (760)..(760): n is a, c, g, or t
  misc_feature (764)..(765): n is a, c, g, or t
  misc_feature (775)..(776): n is a, c, g, or t
  misc_feature (825)..(825): n is a, c, g, or t
ggtcaaggaatgaaaatttaactaaaaaatangattaaaaaagcagttggtttttttagtagtnctctggtaatcagacgcacatacacacatacacaaaaatttatagagtactntgaatataggatttccnccataatcttgcatctgctatattttgtaaacngtataaactggacanggccaaattngagatgtctgataaantcttataaagnanttgggaactatnaactggatttccaaaggatcaattttaaactataaaaaanaaannattanataataaaaagcaaaaagagaattaaanagaaaaactttggaaaaaaaataaaaagtgttaactcattttctatacttatttcaaatatgaataagaaaaaaagttaaaagtagtaatgtttacactnaaaaaaaaaaaaaaaataaacataaatgggtggnttngggggggggggggaaagctatacagtattattgcactccatgaaatgtgtctgtaatttnaaaattatggagagggactgnanacactatctttgctattgaaggttttaccaagaangtaacaaanagacctgtcccanagaanacctatgtgtnctgtctntnaactnacttgtctgttctttcnntataccnagnccttgcanaaatgttcaagtgtangactgnctcctngcctaatgtatccnctnttaatgtcnaaaaanagnttnttcnagtgtctgtatanggtnggatgnntatgtatcgtaanggtnnttgagaattnnaaaatcccataatacaacaattgtagcattccatattcaattgttcaangaaatttgtaacaaagataggttgcaatgggatgggagggtggaaccag

SEQ ID NO: 598342 - DNA, 790 bp, Homo sapiens
  misc_feature (28)..(28): n is a, c, g, or t
  misc_feature (374)..(374): n is a, c, g, or t
  misc_feature (381)..(381): n is a, c, g, or t
  misc_feature (432)..(432): n is a, c, g, or t
  misc_feature (513)..(514): n is a, c, g, or t
tccatttaaccttgcgagtgtgcacggnaaacaaacatccctctttcccccaatctcaattcctttctccgccttattagtttcttgatatgcgtctttccttttttagagacatgaatgttcgtacattgacttcttacttaattatgtcttactcctacatatttccttcctgagggcgtcttcatttaaaaaacgtcaaatcgcactggccgcgctggctcacgctctaatcccagcactttgagacccctaggcacgcgcatcacattgtcacgacttccagaccatccctcccaacatggtgaaacccagtctttactaataatacaaaaaacttatcctggagtgactatgcatgcctgtaatcccanccactcngggaagctcaggcatgagaatcacttgaacccctgaaggcggatgttacantcacccgatatcggaccgctgcactccatccctggcgacagagccagactctgtctaaaaataccccaaatgaaataaagnntcttttcgacccccctcgcccattcaactttaaactcaaccaattttttccttgctcccccatttcagctcacttttccaattcccctatatgagtcctattcaatccactgcccgccttttacaccttggaactggaaaaccctgctttcccaattaatccctttcaaaattcccctttgccagttgcaatttataaaaagcccccccatccctcttccacatttcccacctaatgccaatgtgccacccatttttttttaccgtatttttttcc

SEQ ID NO: 598343 - DNA, 150 bp, Homo sapiens
gaacgttgcataaaattaacacgtgcaactgaagacagtcacacatctcctctaaatatttaatatccttattatccaactttaatctgatacaaccatgaaaaaacgattagaaacaaaaactataaccgaacaatatatttaatttta

SEQ ID NO: 598344 - DNA, 413 bp, Homo sapiens
ggttgccggcattccaaaaaggtggcccggccatgggcatttttttggatccagaaggcggaacaagtccccggagtcccttcaggccaacgtgcaacggtttaaggaggcccgctccaaaattatcctttttcccaggaagccctcggcccccaaaaagggaaacagttttttttaaaaatttaaattggccccccagctggccggaccggttatgcccgtccggaacgtttataaaaaggaaaaagctcgggtcttccctgaggaaaaaaaaaattttaaagccttcgctagtttccgtatggcccgggccaacgcccggttttttgggaaacgggcaaaaaaaaccaaggaaaccccagaacaggatttttaaaaaaaaaaataaagccctcctgggggcttggaatcca

SEQ ID NO: 598345 - DNA, 449 bp, Homo sapiens
ggtacctggcgaatcgccacacgcagaatagtacccgcattcccaggtcctgaatcctggatagtacagcgataagttcagggttgagggcgttttcaccccataagacagagaacgaagtatccaccatgaacgaaatagcaataataccttgcggggttacggaatccgccatagccgccaagacttcatcggtcacgacacgcataaagacacggcgaccttcctcaggtgtaggggtaccgtgcgcttgttccataagttcagcaatatcggggtgacgctcataggcgctttccgtaacgtatacggcgtctaacaccggtgattgcagatgagctttcagcgcctcacgcacagcttggggtccttcgaccatgaactgttttttcttggtacgaccacgacgagtgcatagtttggcgatgtcacgtacacgatcagcatcc

SEQ ID NO: 598346 - DNA, 978 bp, Homo sapiens
gatcacctatggcggatggaccctgttacactgtatcctgaacactggagggccttcagacgagctctcatacgctgctctagtactagcggggctctatggtccgggtgtgtcgtccgcaccacccctacgttccagttttgggggcaaaccatagcagcactcccgttaatttctccgctaaattttcctgcgcggcaaggatccgcagcattttgatggtgtgatgatggaattcgtgtgtgtttgagaacaacggccagttgccttacgtatgtgagcaatgaggagctgcggggaagtacttccagaggcagcacgcccaggctggtgcagtgggctgagcttatgctgagttccagactatagtgacccccaggccagtacccttggtgttccccacccttggtgccatcagtgcgaaccacgaaagaacacagagccatctgaggaactgcacatatgcgacgcgaacgttgaggtcgccatttcttgggcgacttgactaggattgctttcactatgaaagaaacgaccgtacctatttctggttgggcgcatcggagtgcactgtttggactgatcgatcaacgaggtctgtcgtgcatcccctgtgtgatggctcttattcgagcagtgattcctatgatgctctctcttattccatttggatgcgcctttcccagatatgcaagctgtgtgagtccctctagccctggtgtttaagccatttccccagggtgcactggagcagttcctttgtgaggcagaacagcttggaccaccttggatgttggaaggaaccgaattggcgatcccacgctattgggatcgccctttacacattcggattatggcaatgaaaccattcctaaagtctacttagaggtagcacccgcaagagtttgcaacactagaaaacgggatccaaggggaggtgaaccgcaactcctaaaaagcccccactggtttggaccc

SEQ ID NO: 598347 - DNA, 370 bp, Homo sapiens
gttttttaaaaggggataagttttgtcagtagggggccccaaacaggcattataggaggaaaggggccccctttggggtttttgttggttgggtttttgcctttggaccccccagggaatggggtttccccagcccccagttcttgaagcaccagggggttagaaggggcccttggccccctccagccctcaaaagttgggtaggaaaaacagggcctcccttgagggccccttttggggaaaaaggttccccggccccccaaagggatttccagtcaattaaaaggctttttaccagggaagccctctttattccggttccttgttaaagccgggaattttttaaattaaactttcccggttcaggtta

SEQ ID NO: 598348 - DNA, 187 bp, Homo sapiens
cgctagttggaaagataacgttgttgtccgaggctctgcccaagctggcttcctgctgactgacgacgacgccctggtcttcgatggggattcttgtggccaagctcaaggcaggagccgacgacatccagcatgccgctgttgaggtgctcaagggacttgatgatttctccgctgacgctatcca

SEQ ID NO: 598349 - DNA, 265 bp, Homo sapiens
gtacttgaacagagatgctctaaggaagctgactagagcagctgtgagaagagatgatttgagagaaagctctacatattgttgacagcttttagaggagatattacagaagagtctaatggagtttgggaggtcatacactgctcactacagtaatgtcgtggatgaacgttctattgtcaaactctttggtatcctttatgtcagagaagctgggaattgtacaaacagaatataaatttctacaaaccaataagctatatat

SEQ ID NO: 598350 - DNA, 222 bp, Homo sapiens
  misc_feature (115)..(115): n is a, c, g, or t
gggggggtgggagggaggaggaggtggaggggggggggaaactaccgcgtgatgagcccctgttgatgaacacagtcatctttctggggggtcctagacctggcattgggaacanaaaatgggggggggggggggtacgcttaaagaaaaatctcatattattgagatgaatattttatttgataaattgagctacagagtaaagtacttttaacaaaccat

SEQ ID NO: 598351 - DNA, 138 bp, Homo sapiens
atgtgtctacgtctatccactgtaaatatatggtgtgctcacacgatagaaccctaggaacgccaattgagtatcatacgctgagacctgttgctatgtatccaaatggttctttttttccggagtgctacacggcta

SEQ ID NO: 598352 - DNA, 146 bp, Homo sapiens
  misc_feature (3)..(3): n is a, c, g, or t
acntagagtatcccccgatgtcgctgccgatgacccaggcgcgaaggcacaggtggttccggaacatgaagtgccgcttcaggtgtactatatagtacttcatctccgcgccacgaggacgctgggacgtcggggtaccgagctcg

SEQ ID NO: 598353 - DNA, 236 bp, Homo sapiens
ctgggctcgaactcctgacctcaggtgatctgcctgcctggcctcccaaagtgtgggattacaggcgtgagccactatgcccggccacttcttgaattttcaaaaaaagactttaagtagatcaacaacaaacccagcaatttgtccacttctccttggcagtagatcataaccctggagtcttgatttatttatttttttttaaagatatttaaggttaaatttaccataaactg

SEQ ID NO: 598354 - DNA, 187 bp, Homo sapiens
acagaaagttataaattttttgaaattcgcctgttatttaaaccactttcctgaagtctgaccctccttgtagctggcacagctttatcaggtcaattggcaacctgggtgaggcgcctctggatattagtgaacgtaaacgacggtggtgatcgaaagaccaagtctgaaggccatatactccagc

SEQ ID NO: 598355 - DNA, 888 bp, Homo sapiens
  misc_feature (23)..(23): n is a, c, g, or t
  misc_feature (71)..(72): n is a, c, g, or t
  misc_feature (77)..(78): n is a, c, g, or t
  misc_feature (98)..(99): n is a, c, g, or t
  misc_feature (105)..(107): n is a, c, g, or t
  misc_feature (110)..(111): n is a, c, g, or t
  misc_feature (127)..(127): n is a, c, g, or t
  misc_feature (131)..(131): n is a, c, g, or t
  misc_feature (152)..(152): n is a, c, g, or t
  misc_feature (167)..(167): n is a, c, g, or t
  misc_feature (178)..(178): n is a, c, g, or t
  misc_feature (180)..(180): n is a, c, g, or t
  misc_feature (182)..(182): n is a, c, g, or t
  misc_feature (189)..(189): n is a, c, g, or t
  misc_feature (196)..(196): n is a, c, g, or t
  misc_feature (248)..(248): n is a, c, g, or t
  misc_feature (265)..(265): n is a, c, g, or t
  misc_feature (292)..(292): n is a, c, g, or t
  misc_feature (747)..(747): n is a, c, g, or t
  misc_feature (834)..(834): n is a, c, g, or t
gctttcttgttaacttgacaggncgaagctgtaatttttcaaaaacagtaaaagctggtttctcctaaacnnttttnnttgtggtagtagagatgagnnggttannnatnntttttgatcacttggntttnttttgagccgcgtcatttggngggaatctgtaaaantagcacaggtntncngttgttncattggntcacccacatgattagcagagtgcacgaaaaaataaaatttctattaaagantcatgctgagcacaagnttagagaggttgtgacattgcaaactngatagatggtgggggcctgggagattggggttctccaaagggctcccaacaccatctctcctctgatttctgtgacaaatgtggaaagctacttgcttggaggtactgggggaactgatgggggaactttcatcctgttaggaactccgctttccattcctgcgtctctgtcttgctccctggagatggatggatcacggagggggccacagtcagctggggcagcaggtactccctacggcactagtctacagggggaaggacgctctgtgctggcagcggtggctcacatggcctgtctgcactgtaaccacaggctgggatgtagccaggacttggtctccttggaagacaggtctgatgtttggccaatccagtccttcagaccctgcctgaaacttgtatcttacgtgaacttaaagaataaaatgcatttctaccccgatctcgccccnaggactggcacgacaggcccacggcagattagatcttttcccagtactgatcggtgcgtggaattcagcaccacttctgattcgatncacagtgatctgtctctgagtatttaaagagcaatgtcacccagtagtgtccag

SEQ ID NO: 598356 - DNA, 115 bp, Homo sapiens
cacgctctcacattcagtcaccttttgctggtgtctgatacagtagttgggaacagctgaagcattgtggcacactgtgtaatttaaataccccactggggctgaaagtggaaat

SEQ ID NO: 598357 - DNA, 534 bp, Homo sapiens
  misc_feature (51)..(51): n is a, c, g, or t
  misc_feature (69)..(69): n is a, c, g, or t
  misc_feature (91)..(92): n is a, c, g, or t
  misc_feature (96)..(97): n is a, c, g, or t
  misc_feature (126)..(126): n is a, c, g, or t
  misc_feature (215)..(216): n is a, c, g, or t
  misc_feature (218)..(218): n is a, c, g, or t
  misc_feature (236)..(236): n is a, c, g, or t
  misc_feature (238)..(238): n is a, c, g, or t
  misc_feature (244)..(244): n is a, c, g, or t
gccaaagccccatgtgccttgtccaggattgggcgagggccatgcgagggngtcagaagagggcgccanaccactgacggtggggacccanncagnncctctcccctctctgtccagatcattgcnttgccaggagatgggccaaaagcacccgcttttgcagagaggagctgattggagacgggccccctgaagcgcaccccatcctcaccagnngncggacctgcttgtctggncntcacgntgtgtcagaatttttcctaaaggaaaacccaagaaaaaggacgaagggaacaaaaaaacatggaaaggcaattttaatggtgaggcggtgccgggaaaaaagaaagagggttacgtggaaacgggggccagtgggtgcaaatgaacaggttgaatcggagcccccaggttttgttgtgttgaccaaaggtgtggtgagaactgtgggcggttcaccacattaaatggtgagtaagataaaaattgacgaaaagcacaggttaaacacggattttaaggacatggaaagag

SEQ ID NO: 598358 - DNA, 826 bp, Homo sapiens
gtttggaatttctagcttttcaaacatcctaatgttgattctacttatgctgcttgaaaagtagaaatcaaatggaagagtgataggaatttaggtggataggcagatagtgaatagcattagatgttcatgatagatctatgtattgagtgagtagggtagagacctaccgttgcatcacgaaaaaaacaaaagagtcatcgaaggatactagtgcacaatgacaggacacacggaagccaaataatgtacactaacatactactatagatcatccgacaaacaacaaaactaaaacctacgaaactatagccggagaaacggcctcaagaaatgcacaaaaacaaaaaaaaacaaaacacacaaaaaaacaaaacaccaaagaaaaacagcgcaaaaaaagaaccaacaagacaaaaaaaagacaaacaacaaccagagaaaaaagaaaaaaccaataaaaaaaacacaaaaagaaaaaaaaacaaaaacaaagacagaacaggagaaaagaaaaaaaaagaaaaaaaaagaaagaaaaacaaaacaacagaaaagaacaaaaaaaaacaaaacagaaaagaaaaaccgaacacaaacagacaaaaacacccacaaacaacacaaaaaaacagcaacaacgcaaaaaaaaaaaagaaaaaaaagaaaacaagagcaaaaacaagaccaagaaaaaacaacaagaaacaaacaaaagcacacaaaacaaaaaaaaggaacacaaaaagacgcaaagagcaaacacaaaaaaacacagaaccaaaaagacaaaaagaggacaaccaaagacaacgacaagagcgag

SEQ ID NO: 598359 - DNA, 1469 bp, Homo sapiens
  misc_feature (120)..(120): n is a, c, g, or t
aacttgtcaggatagatgccgtcatgacaaacctactacgcatccgctgttaggctgtgtaaccattaagcgactgaagcctgaacgttgtccaggccctattagtcgtatcgattcaanccatttacaggcttgactcgacttatacgctcatctgttcaccgacccgagatgactcgacgtggtaatgctcagtacacgtgataataggctatatacaagccatgttatcaatggaccgtcgcgggaaactctattactcctcgacctgttgtatccgtaccataaagtaatttgaccctcctacgcctagtcgatccatgcttacttcacgcaggtgctagcctgccattgcgccaaaggtgtaacaacaacttgatttgaataactgagtaccgtcaggataagctcctagtgcactgtggcagctcggtgttaggcatacagtcgacctctgtttgccctgtgaacatttcacgtgggcacctttggtactggaacactggagcgtacccatctgcatggggggttcccagggcttgtttgctacctttgacctgtcttcaaaacgcaagattgcaacaatttagacgcatggtccactgcctgtaaagcataggcgggacgcttattcatgaacacttgaggcataatgtgaaccgcaagaaatagacaactcgcgatcaattgcgttatgccatatctaacattttgtcagttcccaatttggcgaagataccaaggctaactccatttacaccgaaggactcccagactgaagtggatccccttcagaaacttaatccccatagcacccctggcctgattttgagcagtaacactttgtccaggcggagtagagggggggcagaacccatctgaggggggcccaaggaaaagccacaaaacagcatcccagtacgaccaggctaaccaattgcctgtaagcgaacttttccagcccaatcgtcggatcatggccgatacccctaaccttaaattaccttcccacttgttgaattctcacaattaacgattgtgagccagaccgtgaaacagagggttaacgccgttaagggggagtaagacacgcggcccaatgccttaattctctagaaagggtcccactattcaagcaaataaggggtttaacggaccggtcgaaatgtatgagcgaccgggacatttccaaattgggttgccacccgccaatcaaaagggctttgggtgtgttcacccgaattacacgatcctccgtggaaactgaaggattaagaccgcggggcaataccaggggaagggcgccaaaatctacctcgacaataacgccccagtatggacacggcaagaccactaagcggacatccacgaacagagccgccgaaaagaataagcacgctagaaataacgcacaaacacagaaaagaggggagacaacgagacagacaagcaaacgaaatggggcaaca

SEQ ID NO: 598360 - DNA, 394 bp, Homo sapiens
  misc_feature (203)..(203): n is a, c, g, or t
  misc_feature (289)..(289): n is a, c, g, or t
  misc_feature (296)..(296): n is a, c, g, or t
  misc_feature (361)..(361): n is a, c, g, or t
  misc_feature (377)..(377): n is a, c, g, or t
cttaggctattgctcctgaaagctaaaccgactatggtagacactggttatatcgaggagctcccttgtcaaggaaggacttgctgacccatcgtcaagggagggctgacagtggatagtcagctatctgcccataagggattgattccaggatagagaactagcttcacctaaagttatgttcgtctggagcagactatatncagtggctgaatcaggcactcttataaaagcccagtcatttggactgcaaggtaggtgaactctgggtaactattaaacgtccagnggctccnaggagggaatgctaagtgccccagtgtaccttgtgctcaccctctgcccaatcctgctctagctncttctctaataaatantctgcacagctaaacac

SEQ ID NO: 598361 - DNA, 769 bp, Homo sapiens
  misc_feature (769)..(769): n is a, c, g, or t
gccacggacttagaccagaggatcgataagtgccgtgtcagccccacctttaggaggacagatgcttccactatggcttcaactccaagctacctgaagaaagtcatctcctactggcggaatgaatttgactggataaaatgcaggtggacgattctcgaacgagataccctcacgttcaagactgaaacattcgaacgggctggacatccacttgcatccaacgtgaagccccccacagcttgccgcgcaggccataccccagaagcccgttgctgataggtggcacggcgtgacccgggcgtcttatctagcgatgttggatagagatcatcgccgagctacctgacgtgatccccaagaagccatggacctgagcgatgagcacgtacggtcgaagtcatctcgcccttccatccctggctatggcttctcagaggcatcctccaagaaggggtcccaactcggtggccaccggcaggatcttttagcaagctgatgctgcaggctgggctatccaggaattctacattcaaggaggggactgggaggtccctgcatctgtactaatcactggcccagctggtgcccagcgacgtgaaatgggctgcacttgaacatgtgttagagttgcaagcaacttctctaccctgaccctcctcctgggacagcgtacgggaggttccttggctcactgagagggatgtggagctgctgtacccgtcaaggagaaggtattctacagcctgatgagggacgagcggctacn

SEQ ID NO: 598362 - DNA, 118 bp, Homo sapiens
gccaaaaaaaaaaaaaacccaaaacaaaccaaaaaaaccaaataaggccttgccatttctctttttgttttctgggccagtttaggtgtttggccccggcaagggggtgtgtacggca

SEQ ID NO: 598363 - DNA, 315 bp, Homo sapiens
tcctttgcatacatgccagcgccgaccaagacaggttcgagaaatggtagaaatcatcaggaggggtgtattttaatgggcggaccgtggacacgtggagctggaacgagccagacgcagtgacatcatgctcatgatgaacctggaatccacggctgtgatcttcgaggatgtggggaggccgtgctggcactcgctccagaaagcttgcggacgagctgtggacgctcatacgcgacgtgaagccgggaagatgtgaagagagtcgcttctaagatggtccgagggaagccgggagtgggcggcctgggtgac

SEQ ID NO: 598364 - DNA, 359 bp, Homo sapiens
cggaagctacggtcatggatgagacatttcttcaataagactccaatttgcttttaggaataccctgagagtgcttctcctcgtgtaacacttcttcgatataggcaccatgtagccccttcctgcacatcttgcattcaggttgatggagctagttcttcagcacaactgtcaaatggtaggaggcctttcctttggggttttttccttgaaaaaaacttttggaaaagtatctagaatgatgagaaactgacattctttcatggcatcaaagtactgaggtaggaattaaaagtctgagttggcccaggtgccaagtgttatttggaaaaccggataagcttgcccgggggccaaaa

SEQ ID NO: 598365 - DNA, 388 bp, Homo sapiens
gctgtgtaaagaaatgggaaaagggaaaaggagagagctattgaggcagttgtccatattcagttttatttatttattttcaatctgggtttttatccaagtccaccagtctctgaaattagaacagtaggcggtatgagataatcaggcctaatcatgttgtgattctcttttattagtggagtggaatgttctatccccccaagaaggattatatgttatagacttgtcttgttcagattccgcattgaaccattttattgacacatagactaagttccatggatttttgttacaaatgttttgagaaaaaaccaacccatgtgcaacattaaaattaaaaggcattaataatatccacgtgtgccttcttactgaaaaaaaaaaa

SEQ ID NO: 598366 - DNA, 131 bp, Homo sapiens
attgatagcggatagggggcacacttggaagaattgtctgggacacacgtaaagctcactaacactgaagatagctgataaggcttaaaaagaaattgcaaaaaaatctcataatgttattgagaactgtt

SEQ ID NO: 598367 - DNA, 200 bp, Homo sapiens
gggcttgtcgtctccccgagcaggcaatggtcgaagcgctcgcccctcgcccgcgcccattcgaggagcttgacgttgccgttgacggcgggaccctcctcgtccccggtgatgaggaagccgagggatccggtgaaggcggggccggcggcgtcgagatagtcgagggcggcggcgagcatgaaggcgatgccaccctt

SEQ ID NO: 598368 - DNA, 202 bp, Homo sapiens
agcagggtgcgtggtggacagtcccattaaaacacaggtgactgtcgttagcaaaaggtcagtcattggttcaaagagtccatattatgaatatgtttttattccccagagcactctctttcctgaggaacaaagcaaagcactttgctctctcatgtatttagaactgtttattagtagatttccaagctataaacctgaa

SEQ ID NO: 598369 - DNA, 111 bp, Homo sapiens
ttttttttggaaattcccccacccccaaaaaacttccccggggcccggggcgggttttttcccccttttgaggaacaagggggcccaaaaaaaacctttttgcttttttta

SEQ ID NO: 598370 - DNA, 408 bp, Homo sapiens
gcggccgcctactactactctactactactaaattcgcggcccgtcgacttttcctctggggaccccaggccccagctcctgtctggttagaggctgaaggggtctgagcgacacctaccctaggggacctccggaggggtcttggtgtcctctgacttctgtcctcagaagggagctcagaatgcagctgaggcttcccctggggcccagggtgtctgtgtccgagccacagccagagtgtgccctggagagtcgctgggatgcacggtgggctctcgtcatcctgtccccactccaggctcaggctggagccgtgatggcaccgctgcactccaacctgggcaacagagtgagaccctgtctctataaaataaaaacaaaaataaagaagagcatgtggtttctgc

SEQ ID NO: 598371 - DNA, 627 bp, Homo sapiens
  misc_feature (46)..(46): n is a, c, g, or t
aattcggaacgagggccaggtgagtctcctccagggcccagcccantcttggacagaggaagttgatagtcaggaaaggcaggagtggcctcttctaacaatttcagctctgaaggggccaagggtggcgatgctgacagcatttcctccagctcccacctgcctgctccggggaactccctacccaggcattgatattcacctggtgatactaataattgtctcaggtgataaattgtctcagctgctctcccacatggcccacaggtccctggaggttccccggatcctttcagggaagaccatgggccctaaacgatcttcataacaaaactgagaagtggcctggcttcttcactgcgtgcctgtgtgctgggatctagcgtggcccgactgggcagctcctttccttccctgccctggggcccagggtgtctgtgtccgagccacagccagagtgtgccctggagagtcgctgggatgcacggtgggctctcgtcatcctgtccccactccaggctcaggctggagccgtgatggcaccgctgcactccaacctgggcaacagagtgagaccctgtctctataaaataaaaacaaaaataaagaagagcatgtggtttctgc

SEQ ID NO: 598372 - DNA, 918 bp, Homo sapiens
  misc_feature (46)..(46): n is a, c, g, or t
aattcggaacgagggccaggtgagtctcctccagggcccagcccantcttggacagaggaagttgatagtcaggaaaggcaggagtggcctcttctaacaatttcagctctgaaggggccaagggtggcgatgctgacagcatttcctccagctcccacctgcctgctccggggaactccctacccaggcattgatattcacctggtgatactaataattgtctcaggtgataaattgtctcagctgctctcccacatggcccacaggtccctggaggttccccggatcctttcagggaagaccatgggccctaaacgatcttcataacaaaactgagaagtggcctggcttcttcactgcgtgcctgtgtgctgggatctagcgtggcccgactgggcagctcctttccttccctgacgctgctccaggggaaagaaggaccagggtcaatccggggtgccccaggtggatcagcgaatgcccctgaagccaggtgccagttgcatccccgtcagatgcccccaccccagtctcctgagcctcattagtcacccctcattttcctctggggaccccaggccccagctcctgtctggttagaggctgaaggggtctgagcgacacctaccctaggggacctccggaggggtcttggtgtcctctgacttctgtcctcagaagggagctcagaatgcagctgaggcttcccctggggcccagggtgtctgtgtccgagccacagccagagtgtgccctggagagtcgctgggatgcacggtgggctctcgtcatcctgtccccactccaggctcaggctggagccgtgatggcaccgctgcactccaacctgggcaacagagtgagaccctgtctctataaaataaaaacaaaaataaagaagagcatgtggtttctgc

SEQ ID NO: 598373 - DNA, 1030 bp, Homo sapiens
  misc_feature (2)..(2): n is a, c, g, or t
  misc_feature (77)..(77): n is a, c, g, or t
  misc_feature (112)..(112): n is a, c, g, or t
  misc_feature (118)..(118): n is a, c, g, or t
  misc_feature (129)..(129): n is a, c, g, or t
  misc_feature (140)..(140): n is a, c, g, or t
  misc_feature (158)..(159): n is a, c, g, or t
  misc_feature (189)..(189): n is a, c, g, or t
  misc_feature (238)..(238): n is a, c, g, or t
  misc_feature (253)..(253): n is a, c, g, or t
  misc_feature (256)..(256): n is a, c, g, or t
  misc_feature (271)..(271): n is a, c, g, or t
  misc_feature (277)..(277): n is a, c, g, or t
  misc_feature (713)..(713): n is a, c, g, or t
  misc_feature (723)..(723): n is a, c, g, or t
  misc_feature (730)..(730): n is a, c, g, or t
  misc_feature (765)..(765): n is a, c, g, or t
  misc_feature (767)..(768): n is a, c, g, or t
  misc_feature (772)..(776): n is a, c, g, or t
  misc_feature (779)..(782): n is a, c, g, or t
  misc_feature (785)..(785): n is a, c, g, or t
  misc_feature (795)..(795): n is a, c, g, or t
  misc_feature (801)..(801): n is a, c, g, or t
  misc_feature (834)..(834): n is a, c, g, or t
  misc_feature (839)..(839): n is a, c, g, or t
  misc_feature (846)..(846): n is a, c, g, or t
  misc_feature (998)..(998): n is a, c, g, or t
tnaatcacagcttgctcacaatgacatacaggaaaatagcactaatgaagactaaatatgcaggcagcaaccttcangagttgggagtacgggagaaacgacttcaaaactncgatangtacttatggngggtatctggngattcttagttggcacanntgccctgcctagcccccttaactgcgtcanttcacagatggggtgttttgttgttggtcgttgttagtaggcaggattnccttacactgggganganagatcagcttgagtnaaagtncgcagtgtttttgattttgtttgtatgtgtgttttaatgcaacaaccagctcacagtttccaagtggaaaaatattcagtagcatcatgtacttgtactataggtaagagcttaaaatgaacatcatcaatcatggcatccacaaataagccacctgacgagcattaattaattcattccatcaaatagaacttaaactagagaattaagcccactttatgaagagcgatttcacggctgtcttgaaccattcgaatttgtgatttgtgttcagcactttaaaaggttcaactttttgcttctacccagattggtctcaggtctgtcttctcatccatccctttctaaagccaaagcacatttgtagcacataatccaggagaagcagaagtaaatgctatgactggtggtatttcttagcctggttttgtagttnttaggcagtnagtagantatgagcgaacaaatgtgaaggttcatgtggagtnanntttnnnnngannnnaanagggcttagncaagcncagagacaacaaagccttctaggtcattaggcnatggngggttcnagcaccatagactgtctactgacctcatttttcttttggaatggagttagacatggggagctcaaaagaacagacctagcaattcatttgagtggaagacacacatcaaagctgttacagacatgtagatatgaatacttgcatatgcatantgtatttttacaaaatgtagtttacaaataga

SEQ ID NO: 598374 - DNA, 754 bp, Homo sapiens
ccgagtctggggagctggacgacgtcacattccactcttgatgatgccgccccagtcctaccatctggacagcaggagaagctgcccatttcctccatctccggtccctggaggttccccggatcctttcagggaagaccatgggccctaaacgatcttcataacaaaactgagaagtggcctggcttcttcactgcgtgcctgtgtgctgggatctagcgtggcccgactgggcagctcctttccttccctgacgctgctccaggggaaagaaggaccagggtcaatccggggtgccccaggtggatcagcgaatgcccctgaagccaggtgccagttgcatccccgtcagatgcccccaccccagtctcctgagcctcattagtcacccctcattttcctctggggaccccaggccccagctcctgtctggttagaggctgaaggggtctgagcgacacctaccctaggggacctccggaggggtcttggtgtcctctgacttctgtcctcagaagggagctcagaatgcagctgaggcttcccctggggcccagggtgtctgtgtccgagccacagccagagtgtgccctggagagtcgctgggatgcacggtgggctctcgtcatcctgtccccactccaggctcaggctggagccgtgatggcaccgctgcactccaacctgggcaacagagtgagaccctgtctctataaaataaaaacaaaaataaagaagagcatgtggtttctgc

SEQ ID NO: 598375 - DNA, 651 bp, Homo sapiens
  misc_feature (46)..(46): n is a, c, g, or t
aattcggaacgagggccaggtgagtctcctccagggcccagcccantcttggacagaggaagttgatagtcaggaaaggcaggagtggcctcttctaacaatttcagctctgaaggggccaagggtggcgatgctgacagcatttcctccagctcccacctgcctgctccggggaactccctacccaggcattgatattcacctggtgatactaataattgtctcaggtgataaattgtctcagctgctctcccacatggcccacaggtccctggaggttccccggatcctttcagggaagaccatgggccctaaacgatcttcataacaaaactgagaagtggcctggcttcttcactgcgtgcctgtgtgctgggatctagcgtggcccgactgggcagctcctttccttccctgacgctgctccaggggaaagaaggaccagggtcaatccggggtgccccaggtggatcagcgaatgccctgccctggagagtcgctgggatgcacggtgggctctcgtcatcctgtccccactccaggctcaggctggagccgtgatggcaccgctgcactccaacctgggcaacagagtgagaccctgtctctataaaataaaaacaaaaataaagaagagcatgtggtttctgc

SEQ ID NO: 598376 - DNA, 155 bp, Homo sapiens
tgatctccaataataactgcaaactcgtggatggagaatgctagacgttcgtcgaactttccactgcatgtctgagggcagagtctcatacgtctctctcgaggcagtcgcaaattctgtcttccgaggtgtcaagagccacacgcaggtgggga

SEQ ID NO: 598377 - DNA, 1281 bp, Homo sapiens
  misc_feature (1271)..(1271): n is a, c, g, or t
gccagcccctgcccacttacgatgaggtgctgctctgcaccccggcaaccacctttgaggaggtggcactgttgctgcgccgctgcctgaccctgggctccctggggcacaaggtctacagcctgctgttcgcagatcagctgagctacgaggtggcacgccaagcggaggagcttttccacaatctgtgcacgcagcagcaccgagaagactaccagctcgtcatggtctgtgatggggactgggagcactgctacctcccctctgccttcagccagcacaaggtcttcgtcaccccccaggcacccctcgaggccatccaagcctacctggcaggtcactaccgggtcccgaagcagaccctgtcggcggcagccgtgttcaatgaccggctgtgtgttgggatcgtggcctcggagcgagcaggtgttggaaagtctctgtacgtgaagaggttgcacgacaaaatgaagatgcagttaaacgtgaaaaatgtgcctctgaaaacaattcgactgatcgaccctcaggtggatgagagccgagtcctgggcgccctgctgcccttcctggatgcgcagtatcagaaggtccccgtgctctttcacctggacgtgacctcctcagtgcagactggaatttgggtgtttcttttcaagctcctcattttacaatacttaatggatataaatgggaaaatgtggcttcggaacccctgccatttgtatatcgttgaaatcctggaaaggaggacgtcagtgccgtcgaggagctcttcagcgctgcgtacacgtgtaccccagttcagttttcttgacatcttcccaaaagtcacctgcaggcctcccaaagaggtgatagacatggagctgagtgccctgaggagtgacacagagcctgggatggatctgtgggagttctgcagcgaaactttccaaagaccttaccagtatttaagacgattcaatcaaaaccaagacctagacacgtttcagtatcaagaaggctctgtcgaaggcaccccggaggaatgcctccagcatttcctgtttcactgcggggtaataaacccatcctggtcagagcttcggaactttgctcggttcctgaattatcagctcagagattgtgaggcctctctcttctgcaatccgagttttattggcgacacactgaggggcttcaagaagttcgtggtgaccttcatgatctttatgcaagagattttgccacaccatcactccacacctctgagtcccacatcgaagggntcctctagag

SEQ ID NO: 598378 - DNA, 650 bp, Homo sapiens
  misc_feature (650)..(650): n is a, c, g, or t
ctaatttgtatttttagtagagatggggtttctccatgttggccaggcgtggtggctcacatctgtactcccagcactttgggaggccgaggtgggtggatcacttgaggtcaggagttcgagaccagcctggccaacatggtgaaaccctatttctactaaaaatacaaaaattagctagatgtattggcatgtgcctgtagtcccagctactcgggaggctgaagtgtgatagtcacctgaacctagaaggcagaggttgcaatgagccaagatcacaccactgcactccagtctggttgacagagcaagactctgtctcaaaaaaaaaaaccaaacaaaaaaaactcttaagaactaggatgcggggagtcatcttggacctgtccctcatctacaaccactcccattccatccagtcatttcccaaattcggtaagtttggcctccgggtgtagaatcaaatctggtccctcctttccttctctctcattatgttcattatactctcacttattctatttctttcaagatggggatctgtgctatgctggccagactggactctaattcctgggctcaaggcattctctagcctcagcctcctgagcaagctgggaccaaaaagcatatgccacagttaccgggcn

SEQ ID NO: 598379 - DNA, 164 bp, Homo sapiens
cccagcttggtcccaaagagcactcaatactgacactaactacctagaattagcacagaccccacaggataataacaagagagaaaaggtgaatgctgaaaaacatatccacagaactaagggctgaaaacttcctaggtgcagcaaatgacataaacccaggc

SEQ ID NO: 598380 - DNA, 1092 bp, Homo sapiens
  misc_feature (582)..(582): n is a, c, g, or t
  misc_feature (1091)..(1091): n is a, c, g, or t
gctggcttgggaccatatattgggtctcagctaggtacgaattagaacgatcatggtgatgttggagtaggagggtttatcttggtgactgtggcgatgctggtttcactcgtaggtataacttatgcaaagcaaagacatccaggaaccgaattgccagagaagaaattaaaacagaagatattatctgaaggtacccacctcgatcctgaaagaaaacacaacggcagcagcagcaattgaacaatcttgagcatagaagtcaatgtaaacgaagttacagatcaagcacataaaacatttcatgtgcaataagctctcaatcaagtacacataaccgtccaagtggtaggtcataaaattcccaaacttgtgtggaatcgaaaacttgccagtatattctggccctgtgtctactgccaggatagcatacttacgtagtcccatatagtggactagacatcctctagaatgtgaacagacatttattggcagcgtggaaaagacattatacaaacatagtggtccaatgtacttgaagtttccctagtaagacagtaagtatacgagtccgagtggacncagtcaacgatccttaacaaaaactacaaccttactgactaattcgaatatcaacacaccagcacaactacgtaactgaagttctcgtacacgagccacatgtacagcgcacacattcaaaaatcacaggccatacatcacctttggcagaattgtttactacaagtgcactcaccaatagacaggtcccacaaggcgaacaatgccacacaatccacacaaccggtaaacaagaccgaaagcaaatttggggagacaaacacaagattacaagcgaacacataacaaatatctgaaatcaacatgctgactaccgtatggggccgaggagtaagataccaaggaaaaaattaagtaagacaatataatgacacagtagatgagtacatacttaagacccgctagaagaaacaccaagccgggaatacgaataaccggtgtgaaacaaaacaagcgacatatcatcccctatgctatgtctcgcttttcgtcttcacaattcatcgatnt

SEQ ID NO: 598381 - DNA, 156 bp, Homo sapiens
tattggtggtggagggacctggatattggcaaccagggtgggggctatcggaggtggttattgacactatggaggaggaacttatggaaggtcggaattaccatgatcatccgaattataaccgcagccttctaactacgtcacctgagagtggaa

SEQ ID NO: 598382 - DNA, 328 bp, Homo sapiens
  misc_feature (4)..(4): n is a, c, g, or t
acantctttccagactcacagtctagtatcatactgaatgcaataaactgaaagcctttcctctaatatctgtaacatgtcaaggacgcccagtttcaccactcttattcagcatattactggaagtcctaactagatgcaatcagcctagacaaataaattacgggcatttatttcaattataatgaaacttgacccctatctcttgccatatactacaatcaaattaaaacggattagagacctcaatctaatacctaaatctatgaaactattactagaaaacattcgagataccccctgagacattcatctaggtcacaatttc

SEQ ID NO: 598383 - DNA, 337 bp, Homo sapiens
cgcgttggaacactttggtccttgacacttggaacacatcagagagcagcagcctgtgccatcatcagatgtttaattttaatcttcaggaagacttgccagagtttaacctgacattatttgtattgagtaccatctaacatttctctatctgaaaacttttattactgaagaccacagtgattacaattcatatgtacctgtaaatcgttgcatttgtcaataatgcatgctgcttttgaaaccacaacttgtttttaagactataaaattgagggactgtggctgcagctcagggggtagagcatgccacacacacatgcacaaaagtcgacgc

SEQ ID NO: 598384 - DNA, 460 bp, Homo sapiens
tgttttttattatcacaaaaacagttaccaataagttataaaacgacatttaatttttcttaacaaagagtgtagtttaccaaggtaatccgtgtaagttcattttagtattttataggttcaatttgttactgtgtcggttcgtacaccgaactattttcaattctcaaacaggtaagagaccttaccttattttaacagtgaagggaattgggctctgagcaccaaaacaacaagtataggtaaagattgtatgtctattcaaagaatttttttgttttgttttgttttttcaagtgaataagacgtgagtcttcttggtcgctccttagacgtgaagttttcccttcactttgacttttgtaatccactttaaagtattcatcaactcaaatgagttgtgaccgtagtctacctgactcaaaactcaaaccttcaccacggttaattacccggggaa

SEQ ID NO: 598385 - DNA, 713 bp, Homo sapiens
  misc_feature (713)..(713): n is a, c, g, or t
tggtgtaatgggcccaaactgctgcaaacagagtggtgatagcccctaagcatagttgttaaagttgggattaggtgggctatttccttgctagtgggtgtgtagaagcggataggagtaaaaaagatccctgctacaactatatgtgcttgagtggagtatgggctagaaactgggggtggggccttctatgtgctgaggtgagatgtcatggggtggaagacctaatggggcttgattgtgcctgctgctagcatagagatgagatggccataagaactgtggtggagtagagcggtcttggagattacctgtataaagaatgtgtgctatttaagtatggtgggtgtctccatagatgttggagatgttgtagagatataaatccatggtctaatgtgcagcagtgatagaaacccagatattcgcgcgaaaatacgggtgtgtaaatacggatgtgtcattagaaagtgggcgtgtcgtggtgttagtgggccattcgtgcctcgagagcgtataatctaatcaaatattgtattgaaagccaacaaagaggtgtattattaaagttccctttaccgcccccctctctcaaagccgcggatgaaccccagtggggcacactacgggtgtgtatacgctggtacacctaaagacatcaagctcttgtgtcaaattcagggaacgagagagtagcgaaatttggaacggcn

SEQ ID NO: 598386 - DNA, 195 bp, Homo sapiens
tttgatgttttctcatgaatggggcgaggttatgcattccttctcattgccccatatcaggagattcatgatgtcagtatgatgatgattaccttgactacttggttaagttggcatcttgctggtctttctattgtggagttattctctttccttttgtagttgataagtatcttgcccgagatatttatcaac

SEQ ID NO: 598387 - DNA, 295 bp, Homo sapiens
tacatagatttattatatattcactccctttcttactatccttgtggtagctcttctactgcctccataccacctatagcccataggactctgcagttggtgtcggtggtggcagaggtggtataagagaggtgctgaagattattttcagtcagaaggaaagagctgagagggccatcagaggaagaaaagaactttttccactgctacgacctcccagaatcccttcctctatctttcctagagctgaagaccttcaccacagtaaaattactagaaatcagctacattcctt

SEQ ID NO: 598388 - DNA, 422 bp, Homo sapiens
ttgttgagacaattaagcatgttagtgcctagtacagcatttgagataccatacttgatccattgattttaattccccctgccctaaacatcaatttttctatctacacaacatgcataacacttcaattgtttaactctcgaaacagttgtcagggttaagttgggtgacgtatgtgtaggcaactaaagggttttaaactgttatacacatataaggttatagcagttatttttttcagcaattgtgttccagaatttggcacatgaaagttgttcagtaaatgctgattgaattgaattatgataaattgaactcccctgcaaaaaatgttatgattttattgacccaagaaatgcacaagtatttttctgaatcaaaatgctaaagttattggcaatttgtatattaaagaaaggaag

SEQ ID NO: 598389 - DNA, 1096 bp, Homo sapiens
ggagccgctcagctcccgggacgctttggagctgctgctagaattaatttctgctcagaccactgatcagccgagctcctagcatgcaagcccccggtcatccgtgcggtcgactctcccgtgctttgagcgctcacgtcgcggattgcttccgtgttcgtttcagaggaccgtgagcctcggtgagaccactgtcgccgtgggtgcaggcgtcgtgggcgccggggcgtcccgccgtacattctctgttatcatgggctcgaggggggaggacgaggaagaggcgccgagagagaggagagaggcgtatcttccatgggagttccctaagtggagtgacttgtcgacgacgaaacgcttatgttgcggtgtgcaaacattagttgatccgagacccgtatccgaggaagcgcatcgcgaatgacacacgaaggggacagcactctagtagaggctttggaccctgcgcatttccgtgtatatagagcgcgtagacacgcagagcagttcttcacatgggatcagaggacgcatactcccttgtttcttgcacccgtgggacctttctcgaaaaaagccatgaggcatcccaacaggggagcaatcgttgtgcccagcatattcgtcgcgtgcatccaaggacagtgacgtcagtaaactcaagtcccaggtgcgaaggcacgcgcacgtctgcagagacaactgcgcatcgagcgcaccgagtgggcgtagcgactctctgcaagaaaacggatttcggacgagcccaggaagaccacccacaagtggagcacctatcacagcgcgcgcaataacaagatgccgcatgccttatacgtggaatatcccccacggccaaccgttggtcacctacaatgcggccatgcgccgattctgtagaggcgcataaagcagagttcgtccgcgtgaacccacagccaccaatgacaatgcggttccacactcaaaaggaacacagagcaatcccaacatcaccacgaggggacaatccacgaccacacaccacaacaaaaacaaaggcgcccccagcacgaaccttggtgctcggcccttcaacacaggagaaaccccaggg

SEQ ID NO: 598390 - DNA, 1079 bp, Homo sapiens
  misc_feature (349)..(349): n is a, c, g, or t
ttggaatcgagctagtagcctattattcggcgcatgagctggagtcctaggcacaggtctaagcctcctgtattcgatggcgagcgtggcgccagacaggtaagccttgctgaggtgaacgaccgacatcgtacaaatcgtgtatctgtcagctagcgcgcagtgcgattgagtacataagtctgtgcttcctatcatgtgaaatatcccatgcatataagtcggtaggctataggcgaaggtgtacctagattgccccctcatataatcggtgcccccgtaatatggcggttctgccacgcagtaaaaccaagatacagcctgtcatggacatcttgaccgtccctcntcttccttactcacctgctatcgtctatcgtgcctatgtagtgagatgagctcgggtacgcaaagaatcgatgggttgagactagctctgtaccgcgtcctcattagcatagggatacactatcgtctgcgatcccatgagtagagcctacagttaggacacttagacgcgattgcatatacatccacgtgtaagctacgcttgaagccagagatggtttcgttccgcatacgtcatttccttttaagggagggcctcacttcgaaaattttgcactacaatctagatcgaaattcacttgaagtcattaagaagcccaccatggcggcattaatccgcaaatatcgcaaaacgaccctctacataggtcctggatgccggtcgcctaagtcagcaggcgagtcactaacgttcgttcctattctcatccccaggtccataagctggcttggcaatccactaattacctagataggcaagacccaggaaggcatcaaagaaccaacctttccttcgacccgccggcgggagggagggagaaccccgatatcgtatgagcaaatcaccggtattctggatcattccggtgcacccgtggaaagttatataaacgaatacttaaccagagtctccggaagaaaatcctccccagatcgggaactaaataatccggaaaaaaagaaaccttggggaaccatagggaccgaggccacagaggaaaaaaagggcc

SEQ ID NO: 598391 - DNA, 809 bp, Homo sapiens
cctcgaggacgcgcagtggccccccacccaccaggacgcacgtttcaatgctcatcagtaaaggttccttaaattccctaagggcaagaagttaaccaagtaaaacagcatcggaacaccagtgatcccatgacagattctgttgtcacgtctccttacagagttttgagctggtgctgaactgtcatgcaccatctgtcctggtcccagcatgccttctgagaccccccaggcagaagtggtggcccacaggctgcccccacacgctcagggaccacactcggcgaaggggatgcctggagaaggggtccccagaggataatggaagccaaggagcccctgtgtgatcctggcccgatgctcctgagcagtgtgcacctggcagctggtgccggactgcctccgagtccccacatcaccacacttgaccctgtgcaaaatctccaaaaatcttgccatgatattctgaatgaaaatctggggacacccctatggtcagaatcaacaagatttgggaagaagttcggcctgaagtgtgagctcttggccaatgtgtgagtactacaactgcgggcgggagctgtgaaggaccgcatcaagcctgcggatgactgaagatgctgagcgcgagtgacgatgaagcccgggaccagagaatcgagccagaaatcgggaccacgggaatgggcgggacggagagggaaggaggggaacgagacaaaacggagccaaaacaaagcgaagggaacgctgcagacacggggaagaggagaccaccgaacaagaaaaccaaaacacaaagaagagaa

SEQ ID NO: 598392 - DNA, 167 bp, Homo sapiens
tagaccttttgggttgtcccacttttggctatagtgaataatgtcatatgaacgccagcgccaaaatattgtaaatcctgttcaatcttaggtgttatacctagtagtagatcatatggtaattctatgtttaactttttgagaagacaccacactgtcagcacctt

SEQ ID NO: 598393 - DNA, 398 bp, Homo sapiens
tatgtattctgaggacaccattgactcatagcgctgactgcttgtccactctctcagtgacagcatggagccatcggcatactatgactgcaggccacgtgcaatgtcctgggacacgccatattcatcatcgacatcttgacttggcattctccatgatttgccgcgcgtccacctcagagacgtcatcgctgtcaggaccctgacgctccttctgctcctccacgggcagggtgggaggctgtgctgcctgcggctgctcttcctcctcctcctcttcctcttcttctgggccactttcttcactatcagacctcggagctacttcataccccgggttcatctcgagccaggcctccagctgcccggctttgggggcatctgtgcctgtgaggatc

SEQ ID NO: 598394 - DNA, 470 bp, Homo sapiens
ctcactgtctcgggaaaggaaaagcagagaggtgtccctctcttagtgcttggtcaagaagtgtggctttattacatgggcggtgtagttggctcctgaagcacaggcgtgcctgctcttgctgtcctcctggagtgctgaggaatgctgtttgaccttggtggtgatattgatcaataatcctccacaagcacagtgcagcgactgccaaatgcttagtcaccaggaagtgtccatcagcccacagcccgtgtctgtgcatgcttagcacctgtcctatctggggaaggagtatcctttattcttcaaatggtgtccttcctactatattgtggttaaatcaggtccttctgactgtgtcgctgttatgacatggtgctgttagtagacagtggcttgtctgcttgcattttttttataacaccctttcttggcaaaagaataaatgggtagcaatccaaaaaaaaaaa

SEQ ID NO: 598395 - DNA, 255 bp, Homo sapiens
cactttgagaggctggtgcagggagatcacttgagaccaaaagtccaagaccagcctgggtaacatagcaagactccatttctacaaagaaatatatatatttttttctaattagccaggcacggtggtatacaactgtagtactagccactcaggaggctgaggcaggatgatcatttgagcccaggagttcaaggttacagtgaactatgatttgccactgcactccagcaagaccctatctctaaaaaaaaa

SEQ ID NO: 598396 - DNA, 126 bp, Homo sapiens
tacctgatacaccgggatgtctgatccaacatcgaggtcgtaaaccctagttgatatggactctagaataggatagcgctgttatccctagggtaacttgtcccgttggtcaagttattggatcaa

SEQ ID NO: 598397 - DNA, 273 bp, Homo sapiens
ggaagagatcctgctggacctctagatgcaaacaccagccgaggatgtacccctcaaccccttcaaaggaggcccttcccctttggccttgtccttgctaccctaagcctggcctggcctggcctggcccccaatggtaagaagaggccattccatggccatttaaagggatagatggaaatttgttgatttggttttaaaggtaattaccatcattaaagtgcagttttaataaggaaagggatttaggatcaggggttagagagaaataaa

SEQ ID NO: 598398 - DNA, 283 bp, Homo sapiens
ctgtgtcatcagagctgagagggcgtccgactgcgatccgtcttgcatcatcagatagatgatacgcccgagccgctcgacaacacagcagccattcaagcaatcctatacaaccgtctcggcgcatctcggttatcatcctcgccttagcatgatttctccatacactccaactcatgagacacacaacaaatcgcaccttctaaacgctaatccaagactcaccccactactaagcctcctcctagcagcagcaggcacactcaccaccaggacttctccg

SEQ ID NO: 598399 - DNA, 305 bp, Homo sapiens
ggactttgtctggacatagagaaatccctttacttacaggtcacaacctatccataggggtgaaaaatgtctgtctcagatatctcctggagcagcataaagaccaataattgtactatatgatctgtaagtgctacaacatgaattagattatacttctctacttctgtgaataaatatgtccgaaagataatagaaatcaagccttgaagtacaagggaaagaagagaagaaccgataagtaaggggatatcatctaaaggaagcagaataccacattgagtcagcttgtcttgacgaacaca

SEQ ID NO: 598400 - DNA, 255 bp, Homo sapiens
cggtcctgtcatacgctgtgcccttgtgctgcaatgtgtcgttatagtacatgatttataatcctttgggtatatacccagtaatgggatggctgggtcaaatggtatttctagttctagatccctgaggaattgccacactgacttccacaatggctgaaatagtttacagtcccaccaatggtgtaaaggtgcttctatttctccacattctctacatgctagcgcctatgcttcacatagttcagcgtctga

SEQ ID NO: 598401 - DNA, 302 bp, Homo sapiens
ggcagaaactgggccttccaatctctctcagacaccagagctgcagatccaggctttctgggaaagtgaggcaccaggtctggagaagtctctgtcggctcttctgctgctgatactgctggtgctgggctggtcagccttcctgggcaaggaatcccgggcagaatccaggagattggactcagagtccccaaggtcactagacaaatgatgaggcgattgccggggggaacatgaccttgtgagacctgtgtgtcaatgcgtccggaaggtccgaaaaggaggatgtcagagaatcaata

SEQ ID NO: 598402 - DNA, 213 bp, Homo sapiens
ttgcgcttatactcctcaacgctttatacttctcaacgctttatacttcttggcacaaatactgcatgttctcacttataagtgggagctaaatgataagaacacatggacaaatacagggggaacaacagaaactgagacctacttgaggatggagggaagtataaagcgttgaggaagtataaagcgttgagggaagtataaagcgttgag

SEQ ID NO: 598403 - DNA, 456 bp, Homo sapiens
  misc_feature (176)..(176): n is a, c, g, or t
cccccaaattggggggcatggcccccaacaggattcccccgttaatcccctagaagttccactccttaacacatcggtttatctcgcttcggggggatcaatcccctgagccccccatagtttaatagaaaccccccgaaccccaatatttcaagcccggcttattccaattttantgggtttttattttaccctcccacaagcctcagaggaattggagtttcccttccccatttccgggggcatttaggggtcaacattttttgtagccccaggcttccccggacttccggtcattattgggtcaactttccccccaattgggttcatccgccaactaatatttccctttacatccaaacatccctttggttttgaaccccccccctaaaacgggcattttgtaaatggggtttgactatttttgtatgtccccctctattgatgggggtttta

SEQ ID NO: 598404 - DNA, 165 bp, Homo sapiens
  misc_feature (142)..(142): n is a, c, g, or t
  misc_feature (145)..(145): n is a, c, g, or t
ctctagagtgatccctatatggaaaagaagaatggaatggaagggaacagagtgcagtggagtggagtgcagtggagttgactgaagtggatgggagtgcagtggaatggataggaatgcaatcaaatggaaagaggttgantgnaatggaatggaatgaaatgg

SEQ ID NO: 598405 - DNA, 233 bp, Homo sapiens
  misc_feature (215)..(215): n is a, c, g, or t
tgcgcgcctatagcacgggaaggcctccttcagaactagtcaattcaagtcctgccctgtggagcaatatactgctgactacaaccaaattctttggcattctgcacaaagtgcctctccactggcttgccctgcccaatacactctgttgttcctgagttgttctacacaacgactttgctgcgcgctcttgggttgtgttgggccaccttggnttttctctggcactcttg

SEQ ID NO: 598406 - DNA, 706 bp, Homo sapiens
gcggcatggcctttcccagtgtccccacgcggaaggcaactgcctgatgatggctgctggcgtcgcacctgcccagagctgagtgaatgcctggctgccagttctgcggggctccgggccgccactcagagctatgagctacgtgccgcccccctcccgatgtggatgggtatgacctccctcaaggtggacaacctgacctacctgcacctcgcccgacacgctgaggcgcgtcttcgagaagtacgggcgcgtcggcgacgtgtacatcccgcgggatcgctacaccaaggagtccctgcggcttcgccttctgttcgctattcacgacaatgctgcgacgctgagtgactgctatggatgccatgtgactgggtgcctgtgctggactgtgcctgcgatgctgcgggtgcaaatgtgcgctgctacggccgcaccccctgtgaatcacaccacatgcctgcctgtgtggacctgccacaccctgcacggtacgtgtgggccggttgtgttactggactgcctggatgcctgcatgcgcctcaggctggctgtctgcctgcgaggtcgagtcccggcacttcgcgcagccgttcccactgtctcgcagccgatctcgctacagccgctcgaaagtctcgggtcccggcacctcgttctcgatctcggtcgacctccatgtccagatccgtacgacggtccaggc

SEQ ID NO: 598407 - DNA, 382 bp, Homo sapiens
  misc_feature (8)..(8): n is a, c, g, or t
  misc_feature (142)..(142): n is a, c, g, or t
  misc_feature (168)..(168): n is a, c, g, or t
  misc_feature (173)..(173): n is a, c, g, or t
  misc_feature (178)..(179): n is a, c, g, or t
  misc_feature (182)..(182): n is a, c, g, or t
  misc_feature (186)..(186): n is a, c, g, or t
  misc_feature (201)..(201): n is a, c, g, or t
  misc_feature (203)..(203): n is a, c, g, or t
  misc_feature (212)..(212): n is a, c, g, or t
  misc_feature (216)..(216): n is a, c, g, or t
  misc_feature (222)..(222): n is a, c, g, or t
  misc_feature (226)..(226): n is a, c, g, or t
  misc_feature (242)..(243): n is a, c, g, or t
  misc_feature (245)..(245): n is a, c, g, or t
  misc_feature (264)..(264): n is a, c, g, or t
  misc_feature (287)..(287): n is a, c, g, or t
  misc_feature (296)..(296): n is a, c, g, or t
  misc_feature (314)..(314): n is a, c, g, or t
  misc_feature (333)..(333): n is a, c, g, or t
ttggaganaaggtgggcacaggccaccacatccccccgttgggtgtcaggtctgagatgcagcgggagggccaggaatgggcggcccagggcccagggtccccggagacccagctggccgcggggagaaggctgagaaggcncgggtgtctgaggtggttttgctcanggctngtcannttnttantaatatttattggtnantaggtgggnatgnttaatntgantgggaatgggcaaganntnggattaattggtaaacagntttctccatggaatgatagaaanttatggggnagagggaggggaggtggnggttggagaggaataaaanagcaaggctgccttgcttttggaatcacagaagaaaagtctcggggcct

SEQ ID NO: 598408 - DNA, 179 bp, Homo sapiens
cgtcggagggctccgcccaaagtttggtaaaaggtttggggaaaacaggcccctgggaaacaaccggctttggggggtggggaaaaaaggggaggggctcgggcaaagggaactgtgcagtccccaggccgccccggctccgggctaaaggcaataaataaacccgatcctgccgggca

SEQ ID NO: 598409 - DNA, 150 bp, Homo sapiens
ttctctacagcttccattcatatatccttccagccacctatttttaactccagcgcatactatggcacgcgcggttttaggcgtggagaatacaactgtgaacaagacgaccgaaatccctgcctctatccagtttccggggatcctcta

SEQ ID NO: 598410 - DNA, 126 bp, Homo sapiens
cgcgttacgttccaaccattatagtaagtggagaagggattggccaagtcccaaccattacagggtgaagatattaacatgtaaacggaagatacagctttggatcaaggcgtagtccgatgcaag

SEQ ID NO: 598411 - DNA, 329 bp, Homo sapiens
  misc_feature (18)..(18): n is a, c, g, or t
  misc_feature (107)..(107): n is a, c, g, or t
cctacaggcacttaactnctcattctagtttagaccaagaatcaaacacacctccgccagtaccctttgccttgttgttgttgggacactttctcactttataccantcttttgaccctaatcccacaacaacagaaccaagaacagtactcccaaaggaactttaccctaaatcacacaacacatacaactaaacaacctcccgcaattgattcaaagtgcatctagaagtcagttgacaccaaactcatccagaagtgagtagacagcaaaatacaattcaacactaaagagacccaatttctaaaggtggataatttatttctacc

SEQ ID NO: 598412 - DNA, 277 bp, Homo sapiens
ttccaacctgatgcaagaagttctggccagaactacagggagggcgtgaatcctgtgtgcagaccacaggtggggaagcacgaagggttcacagctttcacagctgggaggctggtagcctggggcaagctctcagccctgcttgtccactgcctggacacagacttagtgctgttgagcagggaatggtgagagtgagactggccctttgggttgtgtgggagctgggtgaggcctgtgattgccagctttccctcacttccctgccaacctatga

SEQ ID NO: 598413 - DNA, 392 bp, Homo sapiens
tggaaagttcatttcctgggattcccttttccagggattttttaaagttaatttgggaaattaacacccgttccctttattgggggtttttgccccatttgactgaattgagcggtcatttggccatttaaagcagctgttttgggggctgtgaggggacatgtattaaaaccaagcccaacaggggttgccctaaaaaattgtccttggaataaccccacttgggagcccaacttcaaaaagggatttttaattgccccaaaaggccaaaatttgtccccctgggggtttgaaagtttgctttaaggggggggcatttttatgttttataaacccaaacaaaatttcccaaaccaatgaagggaacccaaataaaaatttttgcctttcca

SEQ ID NO: 598414 - DNA, 829 bp, Homo sapiens
ctctttatgggcacttacttccctaccatgggaggggcttttctgggcatgaaggccagatggattagaggaatctatgacatgtggaagaagctagactaatgctcagcgatcgaggactgaaccagattccctaatcgtagattcaccctctggtggtccccgaccattaatcgagccaatgtatctgtaggctttcaggtgcagctagacctgacgggctatcattcatgcacggcaagatccccacgctgaagatctctctcatccagatcttccgagctcacttgctggccgaagatccatgagagcatagtccctggactcatgtccggctgctccgaccaggcacactgatgcactggcacatcgcagacagctacaaaaggagacaatccatccccgacaagtcatataagatgaactcttcctgtgcagatatcctgctactttgcctcctataagctggaatgtctcccaggccactcataaactggatgactccaaaggatgtgatggacagcaccaacacccagaactactgcattgccctccacgaagctgctgagggcgactatcgatctccacgaacctatgagcgctaccacccgagaccaagtctcctggaacttacaccaccgacaaacatgagcactctaaccatcagcccacagagtatactccactcgcctattgaaccttgtccctatcaccctgcccccaggagaccaatagcacacctggacaaaacacgtcataaaagagatctcaaaacaaaatcgccattggcccagcacactttacaccctaacaccactgcaccttactg

SEQ ID NO: 598415 - DNA, 84 bp, Homo sapiens
ggcacgaggcctggtccaaaaggtgctaagggctcctcgggtccaactggcccgaagtgaaggcaggccacccaggacccccag

SEQ ID NO: 598416 - DNA, 105 bp, Homo sapiens
ttaatgttctttcctgaatctaagtcactgggatcgatcctagagtcagaccacaaagaacaatggctacatgccttggaagcactttgaaaacaaaacaaaacg

SEQ ID NO: 598417 - DNA, 291 bp, Homo sapiens
tttaagtttcaaggaacttcatggtattcctcatccaagaacctttatctattgatcccatcaagacccactgaattcctcaaactagttattttctccctcattttataggcaaagaatcagaggcccagagaagcttttggattcaaactactatggcagggctggaccctaatttcctcactcgtggtcaaggttacacctataactgactctcagtcgtcggttatttttcactaactcactgtataatctctctttcagcaaactttttggatctccttaaccctc

SEQ ID NO: 598418 - DNA, 408 bp, Homo sapiens
cctccatgtacacagaaatcgcccattccctccaaagcctaactatagcgcccccagataaaaactactagctctagtgacaacacagcacaactctgagtgatccaacttcatatactaagacccagtcctattgaagcagacacatacctcaaagcccattttaatccaatactcatatccattgcatagcaccagtggttcaggtcatgcagaccaccagtgcacacaggaaggcatcagtggagatagttcatagggacgagcctttgcactttatccctccaggtttaaaaaatccttaatatgtcacatgttatttatttgactttatttttttttagacagagtctcacttagacgccaggctaaagtgcaggggcatgatcctggcccccgggagcctca

SEQ ID NO: 598419 - DNA, 394 bp, Homo sapiens
tggatttgaatccaagtgtgcctgatgcaggacctagcttctgttgattgatcagttgattgattgagacaggctctccctctgtctcccaggctggagtgcagtggcatgatctcagctcatagcagcctccacctcctgggttcaagcgattctccttccttagccctctgagtagctgggattacaggcacccgctatcacacctggctaatttttgtatttttagtggagacggggttttaccatgttggccagactagtctcgagctcttgacctcaagtgatccacctgcctcggtctaccaaaatgctagaattataggtgcgagccactgtacccggccccctccttctatttattacactaaatgccatgaaagtgaattttttt

SEQ ID NO: 598420 - DNA, 134 bp, Homo sapiens
gcggccgcctactactactactgctcgaattcaagcttctaacgatgtacggggacatgatcataattgaaaggtcacagaacctttgtcattagagcacagtactgccaaataaagaatggaaattcaaaaaa

SEQ ID NO: 598421 - DNA, 313 bp, Homo sapiens
  misc_feature (36)..(36): n is a, c, g, or t
  misc_feature (110)..(110): n is a, c, g, or t
  misc_feature (276)..(276): n is a, c, g, or t
gggtagagatgggttcttgctatgttgcccaggctngcttgaactcctggcctcaagtattcctcctgccttagcctcccaaagtccttggattataggcatgagcactnctcccagccaagaaaaaatattctttatttttaagacagggtctcactctctcatccaggctagaacgcactggcacaatcatggttcactacagcctcaacctgctgggctcaagcaatcttcccacctcagccgcctgagccattgggactacaggtgcaccancacacctgggctaatttttaaactgttttgtagagac

SEQ ID NO: 598422 - DNA, 1606 bp, Homo sapiens
  misc_feature (1241)..(1241): n is a, c, g, or t
  misc_feature (1522)..(1522): n is a, c, g, or t
gagtgtatcttgcggctctgggtactgagcctcatctatgtgccttgtagtctgaggcgcaggtcaggactagcaccaagggagtcatgagacaccatggcacttacattaatatatatgtgctcacctgacggacgcaggacggcatgagcacctaagtcaattgtggacttgtctcgtgtccaatcagtagcgttctccattgagggataagacatgctccatgagtaagctagtaccgacgaccatagttcgtattgaactgtcaattagtctcttgtgcggcatccctcacgcatatggaatcgcctaggggacacgaacagatggtccactgagtaagatcaaggaagagcatcctcaagagtccctttgtcgtgaagaaccgatatgtcactgcaaggataaacaactgtcttgctccctctttgtatccctcggaagtgcaatgtgtataccacgcgctcagagtgttattcaccaatcatgttgttcagaactaagaagagcctagtttgttaatgcatcttatggcaccacttgaaaatatggggggattgcattttgaactacgccctgcggacttcgtgtgtggtccgcattacccataagttttcttatctatgcctcgagtttggcgtaaggacgaagataccccacttacgggttcgtgcacgaatcctgcttagaaacccattggacgcttagaagggaatgcctcaatcggagaggcccaacggagggaccaactccaagcccttattgccccacttggggctaagtagtcccccttccttggggacacgctattcgggcgaatgttcgcccgtttcccggaaacttttaggcaggcaacttttggggagttagtaaacggttcggcctgtgagtgcttcccaccatagtggtctcggagaccagttcgatattgggcctgtagccataaggggaccctaccacattggggctatacgcgcacatgaggggctccaaacccaatgcctccgggagagatccgctagggaatttccgttacagaagtagctgcgggttccatgtggatggccttacacccaaccttttccacatttcaacctggtattgatacccgcaactattaggacgggagggcgagataacatccttcgcctagcgttaacaatttgtgttcgctcgaagggggacatatacgctattatcacataccacggattacagtccatggagaaaaccccaacttntcaacctgttgtcactagacgcgtgcgttcgggtcaccacctgcggggtggttccaacccaacacgtgaaaccgggagacggtacaacagagcaacagacccgcgtagagacacaatgagccgtgcaccagggcaaggagtccaccacttcgttcacaccacagagcgaacgtcctttccaagaagagcgccgacatctgcctgtgaagcagtccacacacctctgccgcgggtgtgggacgcccgcacccactcacgacccatatccggcactgaatcanaccacatcatattacgacacgtgcaacattccttacgcaaggtccgacgcgccactccagcagtcgtcacaacgtcatctggca

SEQ ID NO: 598423 - DNA, 227 bp, Homo sapiens
tccccccgcggtcactcttacgactcttatctctactacctctttatcttcttctttgatctaccatatttcttcaacctcatcatcgcttacttctttatcacgttccttctccaccataagagtaatgagatatccaataaactagaaaatgtatcttcacaatctcctttattcttcgttcctccaagtactcagatttggtctaccgtaagacataaccgctg

SEQ ID NO: 598424 - DNA, 339 bp, Homo sapiens
ctcgtgccgaattcggcacgaggagagagagagagagagagagagagagagagagagagagagagagagagagagagagagagagagagagagagatagagatagagagatagctactccttgatatagacactgcttttatcatatttttctctttctctgaccattctactattttatcagctttatatcctttttcttttctttatgttccttctttatttctttttcattattctcttttctatctcttttatattcctcattgtttccctcttcttacttttatttatgtcttactcccatttactacacaattaatttttttttcctcttttg

SEQ ID NO: 598425 - DNA, 894 bp, Homo sapiens
caattcctgccgggatcccagagctacccttctggagccacgagggaataaagtgaaacacctcaggctccaagcactgccaaccacagaggctccctcctggagggagagagaggatggaggacgatcacgccctgggcgtggtccgctgcgagcccgtggagactgccaggagatgtcctctttctggttacaggaccctgacggtggccctcttcacgcctgatctgctgtcctaggatcggatgagaaggtattcgaggtacacagtgagggcgaagaagctggcggttgagcccaagagggtccctcgaggtcaactgcagacaccacctgtaagccacgcgctgaagatggggtggtctgggagaccgtctctagcataagattcgtgcgtggacagaacaggctcagtggaaacattacttggtctcgaaagcatcgtcccatgacagggtcctccaatgccacttcgaccgtgctccggggaagcaggagtcgaagtgacattccaacgtcagcgtgtaccagcctccaagggaggtcatcctgagactgcaaagccacgtttggtggctgtgggcaagtccgttcaccattgagtgcagggtgcccaccgttggagcccctggagagcctcagcctcttcctgttccgtggcaatgagactctggactagtgagaccttcgggaaggcagcccctggatccgcagggagggcacaaggcacattcaacagcacggctgaacagagaggatgggcaccggaggttttcctgcctggcatgtgctggacttgatagtctcgctggtgcgaacatcttttaaaaagcactcagacccgaaagatgttggcagatctatgagctgtgtcggagagccagatgggcatca

SEQ ID NO: 598426 - DNA, 101 bp, Homo sapiens
aggcgagctggagagcttggttcgtggaagaaggagcctggtgttccctgaccattgctgagcctggccattatctgccgatgtgcaggaagcgcacgatg

SEQ ID NO: 598427 - DNA, 235 bp, Homo sapiens
atgggtgctcatccccggctactgcctctgcgagcagaccccccacgagcagcatggaggctggctccatcatgctctgccgaggccatggggcagtgcgtgcaaattagggccgaatgcaggagacgtcacaacacagggatgttgctggaactctcaaagccaagcttgcgcctcttggcccatgcaggaccagcacccagtggataccggagctcgaaattcggtacttcat

SEQ ID NO: 598428 - DNA, 231 bp, Homo sapiens
  misc_feature (71)..(72): n is a, c, g, or t
  misc_feature (74)..(75): n is a, c, g, or t
gagagctgggttcctgggctgcgggaagttggggagcagaggccgcttggtgtccgagtagggtaagaccnnanncacccagtccgttaggaaagaagggaaacgaggcaatttttcgggcggattccccggacggagggctaaggttttttggaaggcgttgttccccgattggccacccagatatttccggccccggcttcaattggcctttgcccaaggaaggaaggg

SEQ ID NO: 598429 - DNA, 150 bp, Homo sapiens
gtcggagcatggtgggcacctataatctcagctagttgagaggctgaccaaggagggtagcttccacctgggaggtggcagttgtagtgagccaagattgagccattgcattacagcctgggcaacaatgtgagactccgtctcaaaaaa

SEQ ID NO: 598430 - DNA, 136 bp, Homo sapiens
ccgagatccccctccttccctggcctctcctgaagtgctgggatacagttatgagccaccacacctgccaagtgctttgtgatactatgcatttggcaggtgtggtggctcataactgtatcccatcaccgcggag

SEQ ID NO: 598431 - DNA, 216 bp, Homo sapiens
gaaccttcggcagtgtatactctgaccgcgtgtagtgatccgccgaacaagagccaagcaagagcaggcaggcgctcagtgcaagcacatcgccataggcagaaaacccagctcttcagggctgcagctctacaagccaggcccaggtccattacagagaacgtctagctccctatagcctatgccagcacagcaggagggttacagaacaggaac

SEQ ID NO: 598432 - DNA, 107 bp, Homo sapiens
atactaggctcggaccgctatcttatttgggtaaatggtttggctaaggttgtctggtagtaaggtggagtgggtttggggtcttagctttggctctccttcaaagt

SEQ ID NO: 598433 - DNA, 391 bp, Homo sapiens
ttttttaaaaacctttttagggccttggattttatctcaggaaaacaaaggggttggcccctggtttttccgttttgccccttgttccgcccccttttttttttttgggggggggggtttttgctttttttttttccggggaaaatttcccttttttttttttggggggttaggttaccttccccttttccccgttataaaaaaattttcccccaaaaaaccttgttggcttgaggttttttcccttttttaaggaagggtgaaaatccctttttgggggcccggtttttaagggaaagggttacctttaaaaaaaattttttttcccggggcccaaattctttttttacccccctgggttaaaaaattttaaaaaaaaaaaaatttttta

SEQ ID NO: 598434 - DNA, 341 bp, Homo sapiens
  misc_feature (22)..(22): n is a, c, g, or t
  misc_feature (112)..(112): n is a, c, g, or t
  misc_feature (135)..(135): n is a, c, g, or t
  misc_feature (139)..(139): n is a, c, g, or t
  misc_feature (177)..(177): n is a, c, g, or t
  misc_feature (219)..(219): n is a, c, g, or t
  misc_feature (271)..(271): n is a, c, g, or t
  misc_feature (292)..(292): n is a, c, g, or t
gatataaacctcattataaatncataaattgatattttttgcttcttaatcattctccaatgagttgggttaatattcttacaagtttggttaatgtaccattgagtaagcncacacttcaacaaggtaattaantttncatgattcccaataagccctatcttagtagccaatttncctcccttgctgacacaataaagtattgtattccataaaaanggactgtagagggacatccaaatcagtgtgaacaaatgtgttagcgggaganatagtgtagttagtaggagantggtaagcaaaggctttctgaaggtgggcaacaaaatctaaattttgga

SEQ ID NO: 598435 - DNA, 160 bp, Homo sapiens
gttgcataggctggtctcgaactcctggcctcaagtgatctgcctgccttggcctcccaaagtgctgggattactggcgtgagcgcaccatgcccagcctctttttgtccttattcctaatgtggttttgggttcatttaaccagactattactgctctg

SEQ ID NO: 598436 - DNA, 1073 bp, Homo sapiens
ctattcttctagggagtgtacagctgtttgttctccctgtgttgtgtaatgttagccccctgagtggttgagggcccctctactaccgggggtggcacacccctttcttgtggccccctttttggttcctctccttaggtcccgctggttccttttgtgtttctccgcccagtgtccccaggtatcccaagatttttgggggggtcataacccccgtttgttccccccccaggtgtcctccctgccctggacttcccactcctccgttcaagtttctggttttcttcccctagtcaccattttaagccttatctaattaacctctgtttggaacctgcctaataaatacagtctacacccgaacgtgccgggagattgctgtgtacccccgcctttgaagcacctcctcagtacttttgcccacctatgaaatggccgtgaaaatgcctgaaaagtcccccccctccttacttacctgcctgaagaaattctgcctttgaccattaatcctatacccgctttttgtttctttatagttcaccagaatctcccattcagggctcttccaaacttgtttgaaatcaaaataatagttgtcttcttgtttaacgccatttattttccaacccctaaggggctttttgacacatctgttaaaacgctctttttgtttttttgttaagtcttttacacttttaatagtttttgaagacccattctaggttaagcccagggcccaagggccccttgtttgccccttaattggggggtgggaagggaaagagggtacttgccaccatagtttcctcttttaactgcacttttctttaaataatgcgtttgcacttttgttacttgctaccctgagtactttcacggaagactgacttaaatattcgcgggtgagctaagtagcttgggtataagattctgaacttttcattctgcacgaggcccacggaacaatactttgacacttgtgacttgactgtggaagatgatggttgcatgtttttagtttgtatatgtttccatctttgtgataagatgatttaataaatctctttaaatta

SEQ ID NO: 598437 - DNA, 267 bp, Homo sapiens
ctcactgcaatctccactcccggggtttaagccattctcctgcctcaccatcccgattagctgggattacaggctagtgccaccaagcctggctaattttttgtatttttagtagaaacgggtttcaccatgttagccagggtgttctcgaactcctgacctcaagtgatccacccacctcagattcccaaagtgctgaaattacaggcatgagccatcgtgcctgtcctcagtgtccttttaaatggggatatttagacacaggga

SEQ ID NO: 598438 - DNA, 300 bp, Homo sapiens
gggtgggttttggcggcttctttactacaaacttttttattagcaaggtctttaagactcgtatcttgtgctgacctcctatctcatccggtgactagaatgcctaactctttgggaatgcagcctagtaggtctcagccttattttacccagcccctactcaagatgggattgctctggtttttatgcctctgacaacatgacatgaccatccatatcctctcatctcctcttttttttttttttggaaaacaaattttgcccttttcgccaggttaaagcacatttaaccctcaaggt

SEQ ID NO: 598439 - DNA, 227 bp, Homo sapiens
cgaatgtagaggatcccctaggctgtggaagagggaaggaagcacctgtctgtgtacgcggccgcccggacgaagctgaagagggacctgaagcacacggacagcgcacatccgctcggtcaacaagaaccgtcacgaatccatcaaacaggtgcacgcagctgcaggcactagactatggactgcatgcgcgagctgtataacagctgcacgtctcgtgaggagat

SEQ ID NO: 598440 - DNA, 178 bp, Homo sapiens
gaggatcccgtggaatctctgctgctcaggatacccgggccagttagattagaaaggcctgctcacagaagtgttttagggagcgtttgacagtgatgaggggtggtcgtttgactgcgtgctccgtagctggatacatggcaatgagtgcagtgatctgctgtgatcctgtgttgaa

SEQ ID NO: 598441 - DNA, 1235 bp, Homo sapiens
gatcccctctgcgggatggtacggcccttcaagggacccattccatcctcctcctcatttctttccatttggacatccagggaatgtgtctgccctatggtgtccccatatccttattgcccagacactggccccatcgaccaccctactacctccatcccatcagaaccactcatatgacaccacatgggattgctgtatttatatcactcatgacccatggagatgaggacgatcagcattcagaggaccaacccgaacaaagatatcgaatgcaatacacaaagagatgacagagatgacgatgacacggacccattccagaactccctgacatcatagacgagattcgagagaaccacttgatgaaaggcatcagcataaagggaagcaacgagactaggaacgcgacacgcagacagtaccaccataacactgggagagcctagaagagcaccacaaggagacctacaaggacctggtgacaaaggaaaccacggaagggtggggcacagcgagatagcggccaataccacaaggcacatacaaaagacccaagcgaagcaaaggtgaactgaaacaacacaaacagaaagcgggtgcggcccagacatgaaagcgcacaagcacgatagcacgcccaagaaaccacatcgagccatcaaagaagagagacatgaaaccatcacaagcacaccagcacccctagagcgaaaagccaagacacggagcaatcacattcgggacactacctagaagcaagaacgaaagagacactcgaaggacccaagaaaaacgagacgaaacgggagaaacaaacaagaaacacagcatggagaccccccacaaccaaccacaaccaaacgacgcacagctgccagaaagacacaaggacgcacacagagagatgaacacactgacacacgaaccaaggaccgcaggcccgaacccccaccagaacccaccacacagcacagagccaccgggtcaccgcagaacaccaacgagcacacaaaagcacgaacaaagcacaaaacccagtgggacaacaggggcacagacaacgactaccccagaaccaacaacacacacacaaaacaccagacgccacagccacgaacgaacacaaacccagcgcacaccagaaacatcaccacagacacaacacacacaaacgagcaacacagccccgcccgcacccaaaaacaacaacacagaacacccaccaacgcaga

SEQ ID NO: 598442 - DNA, 380 bp, Homo sapiens
  misc_feature (80)..(80): n is a, c, g, or t
  misc_feature (146)..(146): n is a, c, g, or t
  misc_feature (166)..(166): n is a, c, g, or t
  misc_feature (243)..(243): n is a, c, g, or t
  misc_feature (284)..(284): n is a, c, g, or t
  misc_feature (321)..(321): n is a, c, g, or t
  misc_feature (344)..(344): n is a, c, g, or t
tgagatagagtcttgcccaggctggagtgcagtggcgtgatctaggctcgccgcaacctctgcctcccggctttaagcanttgttgtgcctccatctcccgggaagctgggattacaggtgcgcaccaccatgcctaatttttgtntttttagtagagagtagggnttctccattttggcagactggcttgaattcctggcctcaaagcaatccaactgtcttggcctcccaaagtgctgganttacaggtgtgagctgccttacctggcctggaaaaacagcnttcaaacatgagataggacttcaccagaaaatgactnttatgtcttcagaatattaatgntctttcccatcatctatatccagacagatttttttt

SEQ ID NO: 598443 - DNA, 697 bp, Homo sapiens
gacccccaatttatttcaggaagccctgaatctccaattcgtttatggtgtgtggggctgggaaacacaaaagtgacatttacaaatcccaaaaatccagttaggggtgggttttccatccaaaacataccacctttgcatttggttctccagataacataaagcagtggaaattccctgatggaagtttcattcaaaatctttccggtcataatgctattattaacacattggcggtaaattttgatggagggcttgtatttggagctgccaatggccccatgcatctttgggactggaaaactggctccaattttcagaaaggttcccccagctgggcaacctgggtctttggacagtgaatcaggaatatttgcttgggcttttgatcagtttaaaagtcgatttctaccagctgaaggtgataaaacccttaaagtatccaaagaggatgccccacccccaaaaaaaactcatccagtcaggtggaaaccaaaaattttcaaaagaaaaagtttttaatgaatggggaattttttttctctctttttttttttttttaattaaaaaaaaaaaagcttggggttcttgaggatatccagtccttttgtgctctggctgggaatataaaggagaaattcccttgtttcaatcattgctgtttcattttttccaataaactgtcccctgtccccta

SEQ ID NO: 598444 - DNA, 123 bp, Homo sapiens
tagaagtctttcacagcactagattggaaggtggatgaaggatagggcaaaataagctaaggaaagtgcatcctatgacctcaggctgacttcaagtaagagtggatttgataaaggcattgt

SEQ ID NO: 598445 - DNA, 249 bp, Homo sapiens
taggttgaaggagactgttgtgatgcgacatgacgtagctgcggcctcctatggatcgattcaggcccgagcgagctgatgatgtgttctcgcgttacggtgatcagagggtggactcacgtacgcgaagctctgcggcggcacccccgacggcaggagttcagatatcgccagtggcgtttcaaggcggacggcagctctgatgccgatgcctgcgccggaggcgcttccggcgtagtaccgctcgaa

SEQ ID NO: 598446 - DNA, 361 bp, Homo sapiens
caggaaccggccggggccccatccctgacactgctgtcgcccggctgtacctgggtgctgtgtccccggggcgtttggaaacgtcaatgtggtcaaaacagggcctggaacggggaggtttggccttaactaaaaaaatgaggggggtatccgcttttcccccctggcctcaaattaaaaggctttgggggcaggagggagtcaaacacgtgcagggcaggcggcctgtgcagggcccaaccctccggccccaaaacctgacctcctcaaaggccccccccatggagggatgtttgggggattctgtgccccccccctacaatgtttggttaaaaattaaagccctttcaaaagtggccca

SEQ ID NO: 598447 - DNA, 465 bp, Homo sapiens
  misc_feature (15)..(15): n is a, c, g, or t
  misc_feature (39)..(39): n is a, c, g, or t
  misc_feature (101)..(101): n is a, c, g, or t
  misc_feature (115)..(115): n is a, c, g, or t
  misc_feature (174)..(174): n is a, c, g, or t
  misc_feature (183)..(183): n is a, c, g, or t
  misc_feature (210)..(210): n is a, c, g, or t
accaagatgggatgnttttcaaggactctcagtccgccnaggtgtttttgggggagcccgttttcctagtgtattcctttaagaggttgtctaaagtcttnttaattatggaagnttttatatcccagagtagtcaattaaggatataaacgatataaactttccacaccttcngtcgtgacnttaaagcacagaaggacaaccctgaancatgtaacgttggtcatttcaatattttgtaccgttttaaatctgttagtgtatttacttcattgtaaatatttttgagggtacctttgtattttgcttttgaccttggttctgtgatttggatgtcaacaacttccctaaaaagcaccagtgtgttaggttctaatgtcatgacccaatttgtgttattcatctttaatcctgttttcagtctctatgtgtacagcagtatttttaataaagaattacagagat

SEQ ID NO: 598448 - DNA, 176 bp, Homo sapiens
  misc_feature (28)..(28): n is a, c, g, or t
  misc_feature (34)..(35): n is a, c, g, or t
gaggcaggcacagttagatacaagtggnatcttnnaggcccgagtgtggcaccaagtacctgctcaacctcaacctggagcctttctctgagaagagcgttcctctttgcatcctctatgtagaaataccgtgactgccttacggagtccaacctcatcacggtgcgttggcccaa

SEQ ID NO: 598449 - DNA, 477 bp, Homo sapiens
taagtgaaagggctcaaactcactatcacgtacgtgtagtgatcctcgacaaatcgagctgatcggcatacaatgactggtacatgacgacgtataacaagagtgaatatttactatctggatcggacaaagagggttctattgaaccaagccagtaaatacgctccaacttctgaaggattacctcgactatctcctgatttaggcaaatctttggcaaggttctcttttagggagaggtttactctgatgcgtaaaactgagccttggtttcttcttgtatagtagtcgttggttgagatattttttaacatttagaaggatggttggattggagttcttgatgtctttatctgtcctttgtcctagctgctgtctgcaaaccaacagatggcagtggaaatggtcttcactgtctgttctggtgtgtccaccaccaacttagaatttctttcttcattctcgtgtctccaactc

SEQ ID NO: 598450 - DNA, 254 bp, Homo sapiens
cccccccccggttttttttttgggcccggggggggaaaaattttttcccccgggaaacatttttcccctttgccccttttttgggcccctttaaacccattttttccaaaaaacccgggggggcccccccccgatttccccggttttttttccccccccgcccccccccccggcccccgggggggggtttttttttttggggcctttttttttttttcccccttttttcccctttttttttttttcccccccca

SEQ ID NO: 598451 - DNA, 448 bp, Homo sapiens
agtttgtttgttttttcctgaaattattagttccactcttttcacattgcctgtaggtccttgctctctgctcccctgtttgatctgtatttctttttctttcactgattttccaaatattgcttttatcatggataaatcactgcccataaaaagcttgggaatgggccgggcgcggtggctcacgcctgtaatcccagcactttgggaggccgaggcgggcggatcacgaggtcaggagatcgagaccatcctggctaacacggtgaaaccccgtctctactgaaaatacaaaaaattagccgggcgtggtagcgggcgcctgtagtcccagctactcgggaggctgaggcaggagaatggcgtgaacccgggaggcggagcttgcagtgagccgagatcgcgccactgcactccagcctgggcgacagagcgagactccgtctca

SEQ ID NO: 598452 - DNA, 728 bp, Homo sapiens
atgaagattcagggtggcataaatatatccagaaaagaagatggaaaccacatgtatgggcttaagatgttaatcgatagaacatagtagaagcttgtattttttctctacgagtattggttctatataaatttggaacggtggcgcaatagagaagctgacgaggtatgacttgagtacggttacattcataggagcctccatcttgagggaattggggtcgccatttggtcccgttgcagaagaggcgatactgatgtcagctcgaagaattggcatccctgtatactggttccccctacttgggtacacggccattggttacgcgtaaaagccgcatggtggcttggtcatactgaaccgtgcctagagggaggggatctgcaagaggattcagggcgtatgagacgccatagggggtaagtcctctcaaagcctaggtgattaggcctatctttgcgtacccttgttcacaatagagtccacgagcataaacactttgactgtgcgagagaagcctttctgtaagaaacaattttgaccgcaaccgttctgacgggttatgagactcgacgagaaatgccatccaggactcctagtggggaccacgtgcgaagttacaagggaggttgggagaacacaaggaaggcttgggaaggaggtccacacgaggcccttaaaacctgttgggatcaaggttggcacaaaagccccaagtgggtttgcca

SEQ ID NO: 598453 - DNA, 664 bp, Homo sapiens
gattccgtcctgcgcggttgttctctggagcacgcgtacttttatctccgtccgccttctctcctacctaagtgcgtgccgccagccgatggaagattcgatggacatggacatgagccccctgaggccccagaactatctttctcggttgtgaactaatagggcctgacaacagattagtcgactttaaggtggcatagactgagtgaacacatgagcaccagattatcgtttgaagaagcggtcagtttagcgggctggtgcacaaggatgagttgcacattgttgaatgcagaggcaatgaattacgacgtgcagtccatacttaaagtaacactggtcgaactttgaagaatcgtcttgtacagaccaacggtttccctctggggcgctttgaaatagcaccaccagtggtcttaaggtctgaagtcgtggttcagggccagtgcgatagttagtaggacagcacttagtagctgtggaggagagatgcagagtcatgaagatgaacgaggaggaggatgtgaaactcttgaagtatcatctggagcgccgggctgcccctggaggtgggtagcgggggtacctagagaaaaatcgtaaagagtatgcgtgcgtgatggaagaatcgatgaccgatgatgatggacgcagggatagatgg

SEQ ID NO: 598454 - DNA, 237 bp, Homo sapiens
  misc_feature (146)..(146): n is a, c, g, or t
cccgagtgagagatcacttcttcgagtttgtggacggggtgaaatcggaagggctcctggaggaagcagcatttgaactgggccttcctgaaagaatagggtagtatttagatatgggagatgttgaggagtgacaggtatattcntgggtagaagaaaccacagaggtgtagcgacaggcaagcctgtgtaaggacaggaaacggggagtggttctatttggcagggacccactcg

SEQ ID NO: 598455 - DNA, 335 bp, Homo sapiens
  misc_feature (187)..(187): n is a, c, g, or t
  misc_feature (202)..(202): n is a, c, g, or t
  misc_feature (215)..(215): n is a, c, g, or t
gacagaattttcctgaaatcagagatatttatactcaatagtatgtattaatttggatttataggtgagaaaatagacaaataattaaccagggagcgtaaaataaaattattccaattaactatttatcatatttatgtggcgtaattactttttaaaaattcttttaattttatctagggataancactcacatcatggntaagttgccaggnacttcaaaactttggaaaagaatttcatccctgagaagtgagagatagaaaaatatcttaaaaaagagaagccacagtcttgcacccttttaacaatctcaacaaatggatgcaccccgg

SEQ ID NO: 598456 - DNA, 678 bp, Homo sapiens
  misc_feature (356)..(356): n is a, c, g, or t
  misc_feature (597)..(597): n is a, c, g, or t
gcgctccctcttagcttaggatactctggagagtcccttctttttattgaaatgtgccactatatgacactgtgccataatgtccttaaaacttctctatggggaaataaaactgtacctattgcaagagtgtgtataatatgtacactcatgacattttcaatccacccggggatgtcacattcaaattactattaatagagggtcttttctgggaaaaaaatgtgcacagcttttgaggggccctatacgagaggcttgctttttatgaggaaatctacttgttgggcatgagttcaaaaagcgggttatagggcaaaaacactagaaaaagctctctcttactcaaaaacagnccaaaaaagggtgggaatcatttataaatacgcacagcctcttaggtaattaactcaaatattgccatggacttctctgtgtccacagtgatgaatggcatagaaattctcgctatattatttgtgaaactgcgggtaagctcccataagaagttttttagacatcacaccaagtggtgtagggactctggggtatatatatgtttatgtatatatacacacactatctatatgcattttntcaagcaaagaaatgtgtatcagatggaactatttattgaatatttgccccaaacattggtgattcattttttagatggtt

SEQ ID NO: 598457 - DNA, 395 bp, Homo sapiens
agggggtgggtctctcattattctactcaccgtgtgcgacacacctgtgcggaagaccaaatcacacatgcgtacacattaacccctgctattgtgtttgagcgcctgactggctcttatggctggccttgtgtttcaacacgacctataacattcatggacaagatgacactggaatatggcggactgatccgaagcatccataacgactcatactctgcccttgagcttgagtaattataacaataagcgggctaaccactggtgacatgagtgtcctttaagtacctccacaatgcgccgatggaaggaacttaaatcaacttccggatcctgttttagggggtcagttggggggggccctgggggtgggccccccctccttcctttttagg

SEQ ID NO: 598458 - DNA, 144 bp, Homo sapiens
cccagctgctcatctaccagtacaattgaagaatatattaataatctttgaagaagaagaagttgaatttagtctattgtgcctgttcccagtagtttgcagactagtgatcctcgccaacattgtttcatgtactttaacaat

SEQ ID NO: 598459 - DNA, 102 bp, Homo sapiens
taatagtcgtacctctctcagtccccaagctcagtgtgagctgagtttatagatgcattcacactgaggccttggggactgaggtgagagggcccagcagtg

SEQ ID NO: 598460 - DNA, 801 bp, Homo sapiens
  misc_feature (11)..(11): n is a, c, g, or t
  misc_feature (99)..(100): n is a, c, g, or t
  misc_feature (105)..(107): n is a, c, g, or t
  misc_feature (110)..(111): n is a, c, g, or t
  misc_feature (116)..(116): n is a, c, g, or t
  misc_feature (121)..(121): n is a, c, g, or t
  misc_feature (124)..(124): n is a, c, g, or t
  misc_feature (137)..(137): n is a, c, g, or t
  misc_feature (140)..(140): n is a, c, g, or t
  misc_feature (168)..(168): n is a, c, g, or t
  misc_feature (182)..(182): n is a, c, g, or t
  misc_feature (199)..(199): n is a, c, g, or t
  misc_feature (229)..(230): n is a, c, g, or t
  misc_feature (232)..(232): n is a, c, g, or t
  misc_feature (261)..(262): n is a, c, g, or t
  misc_feature (274)..(274): n is a, c, g, or t
  misc_feature (314)..(315): n is a, c, g, or t
  misc_feature (322)..(323): n is a, c, g, or t
  misc_feature (332)..(336): n is a, c, g, or t
  misc_feature (343)..(346): n is a, c, g, or t
  misc_feature (352)..(352): n is a, c, g, or t
  misc_feature (355)..(359): n is a, c, g, or t
  misc_feature (368)..(369): n is a, c, g, or t
  misc_feature (371)..(371): n is a, c, g, or t
  misc_feature (375)..(375): n is a, c, g, or t
  misc_feature (390)..(391): n is a, c, g, or t
  misc_feature (393)..(394): n is a, c, g, or t
  misc_feature (396)..(396): n is a, c, g, or t
  misc_feature (399)..(399): n is a, c, g, or t
  misc_feature (402)..(402): n is a, c, g, or t
  misc_feature (412)..(412): n is a, c, g, or t
  misc_feature (418)..(418): n is a, c, g, or t
  misc_feature (423)..(423): n is a, c, g, or t
  misc_feature (441)..(441): n is a, c, g, or t
  misc_feature (443)..(444): n is a, c, g, or t
  misc_feature (462)..(463): n is a, c, g, or t
  misc_feature (480)..(480): n is a, c, g, or t
  misc_feature (490)..(490): n is a, c, g, or t
  misc_feature (495)..(495): n is a, c, g, or t
  misc_feature (497)..(497): n is a, c, g, or t
  misc_feature (501)..(502): n is a, c, g, or t
  misc_feature (507)..(507): n is a, c, g, or t
  misc_feature (643)..(643): n is a, c, g, or t
  misc_feature (650)..(650): n is a, c, g, or t
  misc_feature (652)..(652): n is a, c, g, or t
  misc_feature (656)..(656): n is a, c, g, or t
  misc_feature (668)..(668): n is a, c, g, or t
  misc_feature (673)..(673): n is a, c, g, or t
  misc_feature (678)..(679): n is a, c, g, or t
  misc_feature (681)..(683): n is a, c, g, or t
  misc_feature (688)..(689): n is a, c, g, or t
  misc_feature (691)..(691): n is a, c, g, or t
  misc_feature (789)..(789): n is a, c, g, or t
ggggggggaanggcttgggttgtaaactccctcccccagccttcctgtcccttggaggggcagttcagctgggttctggttcagggtcaggcaggcagnnaaggnnnggnnggggngaganggnggggggcgggggnggnagagcgcaggccgccacgcgggcgccangggcagagaaaggnaaaaggaaaaagaaagngaaggggggagggaggaagggcgggggggnncngagggagagggggggagagggcgcagacnnggaaggaaaggngggaaagggggaagggaaagggggggagggaagggaaaanngggaganncgccggggnnnnnaaagaannnnaggaanaannnnnagtaagggnnangggncaggagaagggggtnnannangangangagcagggcnttgganggggnaaagagataaattgaaantnntggggttcttaaggaaanncagattaaagtccaganccagctgganaaagntntggnngcttngcacggtggagatgaggatgacgcttcgttcttggccttggaattcttctactgaacccaccttcaagtccttgatgtcatccagtcctcgaagctccctgtcaagtttggtgatgcagtaacggattttctccanctgtttncngtanggggagatgacncccanacttnnannnctcanncnagctttgcccttcttggaggagggggccaggagcagcttcaggtaggaagtcactgtggcagcctcttcaggggttgaagaaggatgggctgttgccntcacgctcatct

SEQ ID NO: 598461 - DNA, 279 bp, Homo sapiens
cacgagggaaaatggtttcatcatccgctttgggacctgaagtcctctaggcctaattgtgtatgttaatgatcagaaaaggcatctcatacagtcgccaagtgtggagtacagtttcagggtcggaggtaaatggaactacagttacctgggttctggcagtgcacctgctacacacccataacaacataggaataaatttaacgggtattgaaaccagagtgagtttatagtttgggcagatgtgctgtttcaccaagttggacgaggtgggcccag

SEQ ID NO: 598462 - DNA, 188 bp, Homo sapiens
cggttacaaggtggtgcccaggcaggcaggcaggggcatggctgtacagctggtagctgttggtgtggtggctgtgcttctcagtgctggcagggcggttgcagtccctggcctggagccgggacgtggctttggagctggtgactgtgggtgtcgtggccgtggtgctcacatgtggcgttgctcag

SEQ ID NO: 598463 - DNA, 129 bp, Homo sapiens
ggcagatgtacagaactgcaaattcgacatggcgaggatggcaagccaaagctggcaacttctatgtacctccagaacccacattgggcgttttgtcatcagaattcagaggtatcactggagtgagcc

SEQ ID NO: 598464 - DNA, 683 bp, Homo sapiens
ttttctgattaagaaatttttttgagacttaaaggatcctcaaaacattggggattcagcttattcctgcgacaggaaccgttccaaaagcgcttcactctctactattcacatgtgtggggcctgatacagagccctggactgctgacatcctttctctctttgtcaaatacattctcatacacggtcttttcatagttcaaaagaaaaacatacaggtttctttcttggacaaatggcctggcactctcaccctgggatctgattgcttaataaaaaagatcagggcgccaaatcccacctataattcccattacaacagtggttacttatctatgaggggatggatgcttttgtctttctatgaggggaatcattatccccggcttattatactgatcaacaagcccaggacatgtgtgtgggaaggagggtgaatccaaaacataagggtctcagatcagaatgaggctctcatcaacaagccattgcaaaggctttatggtacattgttgcaaaccactccctgcagaggtcaaaagtgcggactttaaactaaaagtgaaatgaaaagactttctgtggaccaagggagaacaaaagattgtgtcctttacaaccgagctggctaataacgtttgttaattgctaaccctgtagattggcgggcaaaaagttggttt

SEQ ID NO: 598465 - DNA, 296 bp, Homo sapiens
ggagagactgcagccaaaaagaatccaaaaacagcttctcctgtagaggggcatgaagtacatattggtctgagcatggtcaagattcccaaaaagatgaaacagcacgaaaccaagcagatgggtccagatgttgccagtttctgtatgaatgcggaagatgctcttgaaagcaagcccgaaaggaaggccatgggaggtctatgaacattgtagcagatagctcgtaggtccctttagccagctcaaggggcagcacatcactatgggcactgaaccctccaaacgctccctcc

SEQ ID NO: 598466 - DNA, 461 bp, Homo sapiens
  misc_feature (181)..(181): n is a, c, g, or t
  misc_feature (211)..(211): n is a, c, g, or t
  misc_feature (244)..(244): n is a, c, g, or t
  misc_feature (294)..(294): n is a, c, g, or t
cgtgcatcatttcagtgacaactccacaggcgccaattaaacatggaaaagacctgttctgaagcatgcccatctggcatttcccaaggaactgtagtcaatggctgataaaacatacatgatcataactataaagaaatttcgcagccctctccttgctcaaaagcaaccggggcctatnaggacaatgaacctggaagacacccaaaanaggaggtgagtaaagaaaagcctgcatttgaanccaccactgctcttcctcatgcacagaaagcaaagatcgggagttgcatnaggtcagattttcagccaccaaaaacaaacaaacaaaaaaaccaaccaaacctcaaaaaaaacccagacgggtctagggaatacttgggagtttgtctggtagtctgtgggtgaacttcaattgttatgtctccgagtgaaataaaggattggcagtagtccaaaaa

SEQ ID NO: 598467 - DNA, 147 bp, Homo sapiens
attagaggatcccgtgtgggtcttgcagagtttgttgttgactaggagcacggaagcagctggtgtgaaacacctgctggttggcaagagagctccattggatagactgtcttctgacattccactgcaggtctctcttggcaggtg

SEQ ID NO: 598468 - DNA, 185 bp, Homo sapiens
gggtaccgatgtcgccggtcacgttgggggacaaacgaagggggatggggggcacgaaggtctcatcattcaaaataaaacaaaataaaagagtgttaaggcgaacgattaaaaaaatattgcattacataatttacacgaaagcaatgctatcacctcccctcccaacggtgaccggcgacttc

SEQ ID NO: 598469 - DNA, 151 bp, Homo sapiens
atcatatagacattaaaatcaattttaaatagcggcagcttcggtgccgtcacatgacaaggggccgcccaggccagtgtggaatcaccaggttgtctggccaccaccaggaccaccggtcctaaggcctcctgctcacacccggggaact

SEQ ID NO: 598470 - DNA, 222 bp, Homo sapiens
atctggtaggataccgaagatattataccgtcgttcagcgacctcattgatacagtgtacttgaatgatcagcatgtgacattctactatgagccgcgggtgtgagagcgtctggggacatggcccaggacacggggatccctgctgacatctggcgcttctatctgctgtacattcggcctgagggccaggacagtgctttctactggaccttttctcgga

SEQ ID NO: 598471 - DNA, 170 bp, Homo sapiens
ttagaggatccctcctcagctgaaaagacatagctcaaaggaagcgaggggagacgtagaaaggattataacgaagcgtatgaggggactgcacgccgtggaaatacctgccctaagctgcgcgcactaccggctcggtagctgtcatggtcggcggggtcacgtgactc

SEQ ID NO: 598472 - DNA, 793 bp, Homo sapiens
  misc_feature (147)..(147): n is a, c, g, or t
  misc_feature (161)..(162): n is a, c, g, or t
  misc_feature (243)..(243): n is a, c, g, or t
  misc_feature (251)..(251): n is a, c, g, or t
  misc_feature (254)..(254): n is a, c, g, or t
  misc_feature (277)..(277): n is a, c, g, or t
  misc_feature (286)..(287): n is a, c, g, or t
  misc_feature (289)..(289): n is a, c, g, or t
  misc_feature (342)..(342): n is a, c, g, or t
  misc_feature (344)..(344): n is a, c, g, or t
  misc_feature (361)..(361): n is a, c, g, or t
  misc_feature (374)..(374): n is a, c, g, or t
  misc_feature (395)..(396): n is a, c, g, or t
  misc_feature (406)..(406): n is a, c, g, or t
  misc_feature (409)..(409): n is a, c, g, or t
  misc_feature (411)..(411): n is a, c, g, or t
  misc_feature (456)..(456): n is a, c, g, or t
  misc_feature (460)..(460): n is a, c, g, or t
  misc_feature (465)..(465): n is a, c, g, or t
  misc_feature (495)..(496): n is a, c, g, or t
  misc_feature (591)..(592): n is a, c, g, or t
  misc_feature (594)..(594): n is a, c, g, or t
  misc_feature (596)..(596): n is a, c, g, or t
  misc_feature (605)..(605): n is a, c, g, or t
  misc_feature (629)..(629): n is a, c, g, or t
  misc_feature (633)..(633): n is a, c, g, or t
  misc_feature (640)..(640): n is a, c, g, or t
  misc_feature (642)..(643): n is a, c, g, or t
  misc_feature (653)..(654): n is a, c, g, or t
  misc_feature (656)..(656): n is a, c, g, or t
  misc_feature (667)..(667): n is a, c, g, or t
  misc_feature (675)..(675): n is a, c, g, or t
gagacaaaaacttattaaggttaaatagaatgtttcttctgaataatctaacaaaggaaaatataagtgattgaatcataagatataaggggggtgaagtattaaaaataactttttgtttgataacttgagaatttagaagatttngccaagtatgtgtnntgcttgattcttaaatatggcattgatgaatttaaagtaggagcatcagttattacttctgattcattaatggccagaatntgtgtggngtnatagttgtgtcaccattcttgtngctttttannantcaggctaatcatgtggtccatgtctcttcaaagcttgacctgcacaaatgcnanatttctattgggaccanatattctccattngcattgagcagtagagtacannggaacgggantangnatactgattattctgaacagtttagtcccaagagaatagcgtttnaaanaaganaaccaagattggagtcatgtgggttatccnngggatggaggatcttaaaaatgctaatgtgagagaatcaattgtgaaaagggtgaaaatttctgaaaataaatggcttaatttacatatacaggnntnanatagttggnagagggtggattatcattaccttnacantactgtntnntcagaagtcnncngacctcaaatngtaatctngactagaatgttgctgacacggaggtggagggatggaagggggttacaattttggacaacaatgtcacttggggttacgacaaataatggaggtcatgccagacggggaagcggagaa

SEQ ID NO: 598473 - DNA, 128 bp, Homo sapiens
atcgcagatgacccagtcaccctgaatgtcctctatggtccagacctcacccagaattataccctatcatatcacctattaccgtaacagagagaagtcctactacttgatcctgttctagcggcact

SEQ ID NO: 598474 - DNA, 780 bp, Homo sapiens
  misc_feature (1)..(1): n is a, c, g, or t
  misc_feature (81)..(81): n is a, c, g, or t
  misc_feature (96)..(96): n is a, c, g, or t
  misc_feature (98)..(99): n is a, c, g, or t
  misc_feature (107)..(107): n is a, c, g, or t
  misc_feature (111)..(111): n is a, c, g, or t
  misc_feature (126)..(126): n is a, c, g, or t
  misc_feature (228)..(229): n is a, c, g, or t
  misc_feature (231)..(231): n is a, c, g, or t
  misc_feature (280)..(280): n is a, c, g, or t
  misc_feature (284)..(285): n is a, c, g, or t
  misc_feature (287)..(287): n is a, c, g, or t
  misc_feature (289)..(290): n is a, c, g, or t
  misc_feature (292)..(293): n is a, c, g, or t
  misc_feature (305)..(305): n is a, c, g, or t
  misc_feature (310)..(310): n is a, c, g, or t
  misc_feature (317)..(317): n is a, c, g, or t
  misc_feature (328)..(328): n is a, c, g, or t
  misc_feature (331)..(331): n is a, c, g, or t
  misc_feature (334)..(334): n is a, c, g, or t
  misc_feature (337)..(337): n is a, c, g, or t
  misc_feature (339)..(339): n is a, c, g, or t
  misc_feature (373)..(373): n is a, c, g, or t
  misc_feature (383)..(383): n is a, c, g, or t
  misc_feature (390)..(390): n is a, c, g, or t
  misc_feature (406)..(406): n is a, c, g, or t
  misc_feature (416)..(416): n is a, c, g, or t
  misc_feature (424)..(424): n is a, c, g, or t
  misc_feature (496)..(496): n is a, c, g, or t
  misc_feature (502)..(502): n is a, c, g, or t
  misc_feature (510)..(510): n is a, c, g, or t
  misc_feature (693)..(693): n is a, c, g, or t
  misc_feature (779)..(779): n is a, c, g, or t
nagtctttcagtatttccgttacacattctgttaacaagaactcatacattggtaaaattcattctaagaaaacttggcanataacgctttggccngnnattggcanttcnttctctacttttccntcccaccatttcttccttttaaactacaggatttatattttaaaatgttttatttcagaacattaagatagcagttacattttttaatatttatattatttnnanatgactctttaagatacagttttaaacccatgggctagggatcatacgnctgnnantnngnngcattatttggnctaanatttttnatcattctganacnggnttngngtaatacattgataaattcatacaatttggaagngtcagttgangttacanggacccaatactagcnctctttcagngaatgcgngcaaatctgttattccattggcaaaatcgtattgctgctctcctgttaatctcacatttaaaaaaggatcangaggcngccaagtnctaaaaatggagatggtctagtaactagaaaactccccaccccagggagcacacctacatatctccctacaacctaataatgtgatgtgttttggaacacagacattagaacttcatgaagttttaactgttgattctttcccaagcatcatcaagttatgatttaggcaatgtatgattganatgcattcattcatcatgcataggcacaatcacagaaatattgcacaaagtatgtccctgactgaaaatgagaggtacaaaaacgna

SEQ ID NO: 598475 - DNA, 441 bp, Homo sapiens
tcactgctacgacggctcatggaggaatgcacgattgatagtagccatttggaatccagaggatgacttaagtactcccggacgcgtcgaatgagagaggcctgggttctaggctcgatcctaggcccccgagtggctgtggggccagccccccggggatggggaaaacagtggcctccccaaccagagagaccgctgtgtggcaaggggacagtggcctgatgtgagaggcagccagcacgggcacactggaagacaagtttcctccccttactcacagggcgagagcacctgcgaaactcaaaccaagctcaaaaagttccaaactgggactcggaccaagaaaagttcaaagaaaaaaaatgaacgagactatattttgcttggtttctatcccagtgaaatcagaatcacatctgccagatagagatatggacaaca

SEQ ID NO: 598476 - DNA, 463 bp, Homo sapiens
  misc_feature (271)..(271): n is a, c, g, or t
gggcggctgggaccggggtatacgtatcgcgggaaaacgtggagggcctgtgcagaggctctcatcgcctggtcagtgtacagcgggggctcgaggtccggggtgcgtctccggcgaccgatgcgccattctgcgcagtttggggccagaggcaagccggcaccccgtgagattgtctcgcggaaattgtcctgtccgggcaagtgtccgcaggatgtatgtagaggatgatgttgatggcactgtcttgctgatggtttggagcacggcnaacgggcccaatatgccctacgtaattgttgcagcgatatgcatggagcgtagcagtgggaacagctacttctcacgaggccatgactagacacgcgagagttgcggtagcaatctagtgtgctggaggcttctgcttgggatttcccgtagtcatagataggcctcgcaaggctcaggtgaccgtagtgga

SEQ ID NO: 598477 - DNA, 1294 bp, Homo sapiens
gcgtgtcttgtgatcgttgcacaccttgaggtcgtgggtcgttctgtgcgactgtcgacgtcggtggtttccacacccgcttgttgtggtgacactcgttgtgctcccttcgacgtttttctcgcggattttatgtgtttcgtccggtacctcgcctcttgggtttgttggtcgagagcttttttctgggggggaaacattggggagtttttccgattgttccaagaacttgttgcttttcttcaaggagtgttttctgtcttgttggtgctaaccatgttctcttgggtgagcctgtgctggttagttgtggttcccgctctctcatgttgggagatacatcctttggtgttttcttcttgggtgtaacagggggtgtgtttatgtccccttgtgtacctcctttctcgcaggggtcctccgaattgttagtgcgctccgggccttagttgcgccccgctggttattttagtggagttttgccaccacccaccggggcttctacaccacgttcgccatagccaacaggtttttgctctcgacgctcttgaaatggggaaatagagttttgtatttccccccgctttttcgtggggtttagaaaaagcgttgtggagaaggattggggccccctcagaaattttctctctggagagaagtcactcgtggtgggaattgtgcctgtccccacatgtggtttgagataattggggttttcactcggggccaagggccccctgttggtggtctgagggaggcttttctccccgagtctattgcccccccctctttggtgttcgccttttggctgttttcgctggaatattgaggaccacgaccacctttccgcgttgggtgttcacttccaagcacggtggacccaagaaaggctcgctggaggcatggacaaggtcaccccagggtttgcccacgagaagctcacggaaggctaaatgaaatatttaatccctaaatatcctcgccaccgcccacactcttaaatcacgtggtggaaagaacggtttcacgaactcgttttgtttcacaattggccacatttaaggtttatgtagtataaagaactggttatatgataacccaatgcactcgtttaaccttcacgaaggaaaggagaaatgttttgtggaccacctttggttttcttttttgcgtgtggcacgttttatagttatttatgttcttttaaaatcacgtactttttataatggagaacacacttgagcccaaaatttgtcacagaattttgagaccccatttaaaaagtttaatgaga

SEQ ID NO: 598478 - DNA, 796 bp, Homo sapiens
  misc_feature (1)..(1): n is a, c, g, or t
  misc_feature (81)..(81): n is a, c, g, or t
  misc_feature (96)..(96): n is a, c, g, or t
  misc_feature (98)..(99): n is a, c, g, or t
  misc_feature (107)..(107): n is a, c, g, or t
  misc_feature (111)..(111): n is a, c, g, or t
  misc_feature (126)..(126): n is a, c, g, or t
  misc_feature (137)..(137): n is a, c, g, or t
  misc_feature (146)..(147): n is a, c, g, or t
  misc_feature (155)..(155): n is a, c, g, or t
  misc_feature (163)..(163): n is a, c, g, or t
  misc_feature (169)..(171): n is a, c, g, or t
  misc_feature (182)..(182): n is a, c, g, or t
  misc_feature (184)..(184): n is a, c, g, or t
  misc_feature (186)..(186): n is a, c, g, or t
  misc_feature (208)..(208): n is a, c, g, or t
  misc_feature (218)..(220): n is a, c, g, or t
  misc_feature (240)..(240): n is a, c, g, or t
  misc_feature (257)..(257): n is a, c, g, or t
  misc_feature (264)..(264): n is a, c, g, or t
  misc_feature (271)..(271): n is a, c, g, or t
  misc_feature (273)..(273): n is a, c, g, or t
  misc_feature (277)..(277): n is a, c, g, or t
  misc_feature (279)..(279): n is a, c, g, or t
  misc_feature (281)..(281): n is a, c, g, or t
  misc_feature (283)..(283): n is a, c, g, or t
  misc_feature (298)..(298): n is a, c, g, or t
  misc_feature (300)..(300): n is a, c, g, or t
  misc_feature (306)..(306): n is a, c, g, or t
  misc_feature (340)..(340): n is a, c, g, or t
  misc_feature (342)..(343): n is a, c, g, or t
  misc_feature (346)..(346): n is a, c, g, or t
  misc_feature (353)..(353): n is a, c, g, or t
  misc_feature (356)..(356): n is a, c, g, or t
  misc_feature (368)..(368): n is a, c, g, or t
  misc_feature (370)..(371): n is a, c, g, or t
  misc_feature (389)..(389): n is a, c, g, or t
  misc_feature (399)..(399): n is a, c, g, or t
  misc_feature (406)..(406): n is a, c, g, or t
  misc_feature (422)..(422): n is a, c, g, or t
  misc_feature (432)..(432): n is a, c, g, or t
  misc_feature (440)..(440): n is a, c, g, or t
  misc_feature (512)..(512): n is a, c, g, or t
  misc_feature (518)..(518): n is a, c, g, or t
  misc_feature (526)..(526): n is a, c, g, or t
  misc_feature (709)..(709): n is a, c, g, or t
  misc_feature (795)..(795): n is a, c, g, or t
nagtctttcagtatttccgttacacattctgttaacaagaactcatacattggtaaaattcattctaagaaaacttggcanataacgctttggccngnnattggcanttcnttctctacttttccntcccccccctnccccctttnncccccccngcctcccntttccnnncgcccttattncngnacatccagacagccgctccacntctctctccnnncacccccccctattctcccntgcccccccaagacacnccccccnccccccngncccncnancncacgccccgtcaatnanccgccntaccccggcccacccacctcttttaccctctccnannccngattcgncgncccacctccganannctcccccactttggaagngtcagttgangttacanggacccaatactagcnctctttcagngaatgcgngcaaatctgttattccattggcaaaatcgtattgctgctctcctgttaatctcacatttaaaaaaggatcangaggcngccaagtnctaaaaatggagatggtctagtaactagaaaactccccaccccagggagcacacctacatatctccctacaacctaataatgtgatgtgttttggaacacagacattagaacttcatgaagttttaactgttgattctttcccaagcatcatcaagttatgatttaggcaatgtatgattganatgcattcattcatcatgcataggcacaatcacagaaatattgcacaaagtatgtccctgactgaaaatgagaggtacaaaaacgna

SEQ ID NO: 598479 - DNA, 317 bp, Homo sapiens
  misc_feature (28)..(28): n is a, c, g, or t
  misc_feature (33)..(33): n is a, c, g, or t
  misc_feature (52)..(52): n is a, c, g, or t
  misc_feature (57)..(57): n is a, c, g, or t
  misc_feature (71)..(71): n is a, c, g, or t
  misc_feature (107)..(107): n is a, c, g, or t
  misc_feature (112)..(112): n is a, c, g, or t
  misc_feature (123)..(123): n is a, c, g, or t
  misc_feature (128)..(128): n is a, c, g, or t
  misc_feature (161)..(161): n is a, c, g, or t
  misc_feature (178)..(178): n is a, c, g, or t
  misc_feature (203)..(203): n is a, c, g, or t
  misc_feature (225)..(225): n is a, c, g, or t
  misc_feature (261)..(261): n is a, c, g, or t
  misc_feature (287)..(287): n is a, c, g, or t
gtgaggtttgttcggctatgtccaagtngtcgnttactaatgtacccctgcngtttngctttcggtaatgntgatgttgatgtgtctccccctacccacaaccatgngcctngtcgcggtagnagggnagcagcataccaaagagatgtgctgcaggactncggaggcggcctgggtnggtgagccatcgggcagttgacctnggtcttgaaagagtcgggagtnacaagctcagagagcatgaactgatgctggcatganggattccaggaagatcatggagaccnggctggtagctgtaacagagatggtggagt

SEQ ID NO: 598480 - DNA, 162 bp, Homo sapiens
gtatgtatctctcagaaatagtaattttaacctctaataatttgacatgggtttttcccctgttatatctttcatatcttattatcatggtttactttaacctatttatgctttcatatttaaagtgggtgtttacgtgggcaacatacacgttgggccttc

SEQ ID NO: 598481 - DNA, 910 bp, Homo sapiens
gcagctggtgcagacatggccccgtcctgggtgcccgcatgggcttcacggctggcgcccatgcctggggtgcttcgtgggctcccgttttgtccacggactatgggtctccgctggtacgccggtctgcataaggccctcgtggcacccggcccactgggtgctgggccctgtctggggcacgctctactcagccatgggtgtatccggttcctacctggtctgtgaaagatggctgggaggcttcacagataatgctgtggttcccctgggtcctctacactggtgcagctggtcctgaactggggcatggccccccatcttctttggtgcccgacaaatgggtttgcgccttggtggtatctcctgctggtcagtggggcttggcggcttgacactaccgtggcctggtaccgatggtgagcctcgctggccgcccgcctgctctacccctacctgggcctggctggccttcgtgaccactgtcaactacgtgctgttatggcgggacaaagcatggctggcgtgcgggacggcggctgccagagtgagtgcccggccacagggactgcatctgcaccatcagttgccatcacgcttgtgaatgtggtggctgtccgctttcatgaccactggtgcctgctagtctgtcagggcttggccagggttgtcgcatgagctcctaggtggcccactgaagccccacctggagcaatgtctgtgcttcctgatgttaaacctgttcttgacatggattaaagctgataagtttggtcgttaagaaaaaaaaggggcgcaaaagatccagggccggtacgcccgtttacaaggccagaaggtaaaggcagccgtaaccgaagaaagaacgctgagagctcgggaaagacaaacgaaaatgcatgggtacaaa

SEQ ID NO: 598482 - DNA, 448 bp, Homo sapiens
agtttaaatgggtagtttttgttaacaatgagatttatggtaagtgtatgaggaactaaaatctcaacagctgaggacagttatacaggtgctgcatgcctacgtgactgacccctaataaaacctctgaagaccaaggcaagattgagcttcctgactggaaatacatcacatgtattgccacacatcattgctgggataataaagcacatccataggactccactgtgggaggacacctagaagcccatgcttcatgtcttctagactttatcccatgtacctttacaatttgctaattttaatgtgtatcttttcattgtaaaagaccctaaacatggagatagtaggtttttctgagtctagagaatcttcattctctagaatgaagtggtagtggtcatgaggagtctctacccataaataaaacatatttttaatgaaaaaa

SEQ ID NO: 598483 - DNA, 226 bp, Homo sapiens
atgaccggcgcaatatactatagttccgccggggggatgatgagagaattataacctagcatcatatagcaaggactaaccccatataccttctgcattcatgaatgtaatctagaattaactttgcaaggagagccaaagctaatacccccgaaaccagacgagctacctaagaactgcttagagagcacacccgtctatgttgcacaatactgggaagatttat

SEQ ID NO: 598484 - DNA, 842 bp, Homo sapiens
ctgtttaaaaggagaaaagtgaggccagggcatgctgtgaaaagatggtcacttatcagtgctcattatttaccaatggggcaacctccacaagggcaaagggccctcaccaatccagttacccattttagcttgaaatgtaattgtcagttctcagactgattctgattaacagaacctgcttcctcctgggaacaaagatttcccttggttttgcttattagctccttttctccccattagaaatagcacctctaattagagtgctggttccacagggaatctcaggccctctagcaagactgggtttttctgccaatgtatgaccttccttgagtggttaggtacggaacagaggagttgtgcagccagccccaaacctggcaacagcagcctcttcctgtccctctacagtgctcttgtgctgcctgagatgccagtgccaacaatggctactcctgggctccctggaagcatggcccattagcttgagagcaagccaggagctattaacatacaatatggatgtaaagttgagcacgtatctcaataattttaccagacatatttgacatggctgtttggagcctggtcagcatgtagatcacttggctgatggcgctgtttgggaagctgagaaagtccagctccatgtaaaatacctgtggtaagagaagtaagggagttttactacttgttttctggaaaacagtttcatgctgcaatgatgtcatctgttcagagccatccataaaatgttacagatccaaaatgatgtcacatctttggaagcaagcgtatagataatcattaaacattacaatgctcttaaagaaaaaaaa

SEQ ID NO: 598485 - DNA, 313 bp, Homo sapiens
tactgtgtctcccatttaaaggagaagatctgatgactcaaaatgacttgatgtcaaaccagctaatatcatgatacctgacagaagagagagacacaatgtattatgaaacttgtcagatttcaagtcatcaatatacaaaattagcgtatggttcccaattttgcatacgtaccagaaacacatacacaacttttacattccagcacataatcctggagcacccacaacatcctaggtttagaggcttaacagatgctgacccagccacacttgggccccttaccctgaggagctaactgtctgtatcggt

SEQ ID NO: 598486 - DNA, 276 bp, Homo sapiens
ggggttttaaaaggggggggtttttcaaaggcagaacttccctttgggggggggctccgaatccatgaatttttagggtttttctgcccccaaacctttggggtcccggggggtcccccccccaaaatcctttttggcccggcttccccaggggcccctagggggttcccttggttttccaccccccccccctttgggggccctttttccccccgggggccccttttccattccccccccataaagggggttggggtgggtttttttttaggttga

SEQ ID NO: 598487 - DNA, 913 bp, Homo sapiens
ggcggatgacgccggtgcagcgtggggggcccgggggcccctgtgtggccctgggatggggaaccgcggtggcttcctgcggaggtttcggcagtggcatccggggccggggtcgctggcctgtggacggggccggggccgaagccgcggagctcgcggaggcaaggccgacggataaggagtggatgcccgtcaccaagttgggcccgcttggtcaaaggacattgagagagtcaatgtccccttggacggaagatctagtctctttactcccctgcccattacacggaatcgagagatcaattgaatttcttccttggggagaccatctcttcaaaggggacttgacggtcatcgcacagcgatttattgcccagttgccaggaaagaccaggaccccggtgacacgggacccaagcggccaacacagggattccaaggggcaatagcgggtcaggacataatccagggagggaacctttaaccaaaattgggacccaacgaatacggagatccttgggaaatttgattcacacagttggacttccccaaaaaggtgaaactgtggattgagtgcacaaagacccgggcccaaatatccacgttatggatagacgtacacccaatttcaacattctcatttggggcccacaaataggtgacatatcggttatccaaaaatttcacggaattcccacaccacacagaaataagagacggaccagaacacaaacagtagcacactattaacaaccgtatagtgctacataggtatataactcccctaaacagggaaattattccagtagagcccaataatgctgcacaaccacaaaacacaaaatcccagtgtggcattaccccccagaattttaggccacacaacagcaggggcgtttggtaaacaccatat

SEQ ID NO: 598488 - DNA, 378 bp, Homo sapiens
gatctaaggatcccccggtcgcacagcttctcaaggatggaaacagccccattgggtactcttacgcatttgatagagcccttgcccagccttcatggaaccttccatcgacaagggcacaggagctgattttgactatcacgcagcgtccttaatgagccagcctgccatttccacagtgaggggtggttctcatggtggctgtcgactccccgcaggagatcatcatgaactccaacattgacgagaagttctctgcgcactacgacgcggtggaggcggagctcaagtccagcaccgtgggtctcgtgaccctgaatgacatggaggccatgcaggaggctctggtgaaggagcgggagaagcagctggcctata

SEQ ID NO: 598489 - DNA, 316 bp, Homo sapiens
  misc_feature (16)..(16): n is a, c, g, or t
tctgctccctcttcangctcacatgcacaggaatgctacatgatggcagctgcttccctccttggttatcatccatgcagtgctaattagaaagggttggaaggaataactttaagtaaatcatggggatattattgatttattttcactttttgcgatttttgtgggggtgggaagtgggcgagcaggaatttgcactccagacattgacatttccaattcatcctcttgctatatgaaaaagggttcctttcctctatgggggaacatgtgttgtgctcagttctagtcagcctgcaagcttctttgtattaat

SEQ ID NO: 598490 - DNA, 102 bp, Homo sapiens
cagtacggatgtggatacggcagctaagcgcctcaggggtgcgggtcaatgggtgctagagagcccgcgggacccagtctgctggggacggggggtccttgg

SEQ ID NO: 598491 - DNA, 204 bp, Homo sapiens
taataaattgtatgcttttcatctgctttccattataagctgcctcagcgtgaagcatctgagacacgtgagtgaaaggctattatgaccttaactctcctggagctccaaaaccaccacccacagaggaaatggaggaccacagatagcattttgtctgtgtagccctgagcaggggagagagttgcagagaagcagccttca

SEQ ID NO: 598492 - DNA, 327 bp, Homo sapiens
accggatagagcggtctagagcgtctctttgttcactgattccccctattctccgggtacacactcaaccaagcatgagcaaaaattcactttgtaattatattcgtaggagtaaatataatattcattcccgtagcactattcgtcacatgatcaattatagaattctccatatgatacatacactcagaccccttcatcaaccgattctttaaatacctactactattcttaatcactataataatcctcgtaaccgccaacaacctcttccaactctttatcggatgagaaggcgtaggaatcatatcagcagcaggaggagga

SEQ ID NO: 598493 - DNA, 963 bp, Homo sapiens
  misc_feature (606)..(606): n is a, c, g, or t
caatatgctaggcttttgtgttccccaagacactcgaatgtccccgttcccccaggaccctctcccaaaaggttgctgtatctataacacaaacttttcttaagcacaaaacaatgcgggaaatcctcggcaaactcatgatctctctcctacattgttacaacaacgcagggatgttctaactctgatcaaacaaagcaatcgtgttgttctatttaacacgccccaaaaaagtaccttctgcttccatggtatttcaaaataaccccgatcttaccgaccactacataaggtattatcttgtacgcaaacaaacaccgacctttatgcgtgccgcctgctccctccagaagtgaacaactctcttcgcgggacggcgtgctccataaaagggtttacaactttgctgcgggaactgcacctgcttgtcgtgagcccagaacaccgtcgtcctctgcctcaagtacacgtgcgcagtccccctcggagacgcacccctatgatccccaagaggccattttctgtgtgggcgcccttatataatacgccccacagcgaatgtgagcgagtgcgtgaatctcagagattctccggcgagaggatccnttgccctggtttatgaaactgatgtgaggaggctaacaaatattctattgcagcgagaatcactgagctgtgtgagtagaagagcgcttttacaaaaacacacatgtgagtgagaaaaccacccccaacaattattctacacacagtgtttacggcacgccatacatttccatcataggggtgaacctttctacagccccatggtgcttgatagttctagcgcctcctggtgaccttggcaatcatggtgttggtgccaccagaaacaatggtatatctcccttctcttatctgtaaaaacacagaattggcgtgtcgtaagaaagcctttggaaaaaaagcttccacaacaggaca

SEQ ID NO: 598494 - DNA, 310 bp, Homo sapiens
  misc_feature (243)..(243): n is a, c, g, or t
  misc_feature (279)..(279): n is a, c, g, or t
  misc_feature (298)..(298): n is a, c, g, or t
tcctcacagacaaaggaactgctgtgttacagttcctcacaagcctctttaagccttttgtggaatcatatcagttactttgcagataccttttgcatgaagaggactacttcggtgagaaggaatacttggttgcagccaggaagttcacccgtcagcttctggatcaaggctcctctcagtgttacgatgcgctgtcttctgaactgcagaaaaatgccttaagcagctttccgtgagacntgggggtggtggaaaagaagaaggtagaatagtaantatgtgtattatgtgaacnggccttgccaca

SEQ ID NO: 598495 - DNA, 83 bp, Homo sapiens
tgaaaaaaaactttaagcattaagattttggccccctcacccctatgttgttcatagagtgtaaatgagaaataaacttttat

SEQ ID NO: 598496 - DNA, 411 bp, Homo sapiens
  misc_feature (256)..(256): n is a, c, g, or t
  misc_feature (391)..(391): n is a, c, g, or t
  misc_feature (397)..(397): n is a, c, g, or t
tgagatggaatattgctctgttgcccaggctggagtacagtggtcactgcaacctccatctccctggttcaagcaattctcctatgtcagcctcccaagtagctgggactatagtcacttgccaccatgcccggctaatttatttttagtagagatgaggtttcaccttgttggtcaggctggtctcaaactcctgacctcaggggatccacccgcctcggcctcccgaagtgctgggattatagggcgtaacacncatgcctgggccaaaaattaaaagattttatgaaacgaaatgggcttcccattctttctatttcagcttctaagtggggctatttcatttgtgctctcctctttttttgttttgttttggcaattttgttcaatncatttngggggaaatagggc

SEQ ID NO: 598497 - DNA, 103 bp, Homo sapiens
gggaggcagaggttgcagtgagccaagatcgtgccactgcactccagcttgggtgagaccctatctctaaataaataagtaagtaactaagggtaccgagctc

SEQ ID NO: 598498 - DNA, 106 bp, Homo sapiens
agtcgtgcaggaaatagctggtgactgcaactctggtatgggggtgctgctgttgctctggcggcgtggagtaatcaacgtcggtgatatcacgtttatgttaacg

SEQ ID NO: 598499 - DNA, 1081 bp, Homo sapiens
cctgtctcaaaaaaaaaaaaaaaaattttttatagtatttccacagagtggtgcaacccatcaatttaaagaaacatttccatcacaaattttggtggcctgtaatagttgtcctaaaaagctggtttactaaacaggaagtaccacaagctgggcgtggggataaaagacaacagaactgtaattcctgggccgggtgcagtgggatcaacgcttgtaatccacaacactttacaggaggccagagtgtgagcacaggatcacagaagttcaccggaagattcaaagaccaactcctgggaccaaacatattggttgaacgccccttttcctaaattagaagaattcaccaaaacattacgccacggggatattgggccgccacgcgttatataggtccgacaaataacatcaaggaggtatttatagggcacagtaaagaaaaatacgttctgacaaaaccctgagaaaaagggtgtagaagcgttgtgaacaagtgtgatagaccaacagagaattcggttgcaccaatgtagggaaacttcattaggcctggggggggtgaacatgagagcgtgaagtgaatttcagaatttctcaaaagagaaaattgagaaagaaaaacaaagaagagtggtaaatacccaccaatgtaaaccgactaacagagacaagcgccaaaaaaaaaagaacaccaaaaaaaggaggcaagaacgaaatggaacacataccacagatctgtcacacactaaaaagacaaacgacggcgaaaggaggaccacaccaaagaacgcaaaaagaacaacaaggacacaaatacgaaggaaacatgaagaaccaatgctaaggaaaacaaagggacatcacacacaacagccaaggcaaaaaaaagcgtacacacgagatagaaccaaacatgaaaagagatagacaccgggcaacaaaacagcgactggccaccaaagtggtcgtcacaaattacatggaccggaaagaggccacccccaaggtaagacagccagaacgagggaaaaagacaatgcacacgaacaagaagcatagacaacccctaaggaagaac

SEQ ID NO: 598500 - DNA, 1380 bp, Homo sapiens
  misc_feature (369)..(369): n is a, c, g, or t
  misc_feature (1122)..(1122): n is a, c, g, or t
gcgaagagcttgatccctgaaccaacatcaaggtaaccttgcggagatcgtaaagaccggtgactgaactgactctactgggaatgtgcggtggtcaggagaccaccttaagggccactcgatggcgcagcgattactaatacccagactggcgcacgagtggcgctcggtactatgtcgtgggatgagacctcgtgctggacctcgtcgattagaggactcgagaaggaagctccatgacctgaggcggcatcgatgagatcatcgtagcgattagtcaaaagcatagtcgaggggccaatctctccggaagctgtatcagactgtgcggtagacgcacggacaagggcaagtctcggaaggaacacntcacatggggtccactgtcttcagccagacattggccagaagagattctgctgttgagaccagactgagaggtgcagactctgagaggcatcgactccaaagcgtcacaatagagtcggaattatggaaatgcccataaccagtgatgccatagtcggtcagggcagcaagtggaccctgacatacggagcaggagcgtatggacggatagagctgtacactgtgactcactggactcacttcgaacacacgcacacgatacacataggagtctcgccgcgcaaagaccacgagaggacccgataaaaacggagtgcagaataagtcggaatagccttactatattgattccctgggtagatcgagacggctacaaggtatgcacgaacatgggctgccatagaactactcagagcttgaaagatcaaaggcgagcgtgtgtcgctatctaagacgcgtggggatataaagcccactaggtctatggctcgcggggcgcagtgacagttcctcatggtggaaacagcgcatttgtgggggccccgctaaagattggcccattggtcagagcacctagcaccgccaattccatctttgcttgggcccgctgcgtggagacaagggggtcgcacgctgggaaatcgtcgggatggttctggcttttgcatgattttcggggtgctgcgtgtacttcaacgcctgaggccgcccatgaaggatgcctcccctttcgaggaaattcttcacctcganaaggtgggggggagagggactcaaacgttcggggagcacatacgggaggaacgtggcgatcgcaagggaaggccacgacgcgggggacgcgtgggagaatacccggcgtcctgggacatggtccatgggtgggagagcataggaagagcttctaccgtaggccggtgggaaacacacagtggcgtcagatcaggacagaacagggattcgcccggccggggcttcaccggagacggggggatgacagcgaacacacat

SEQ ID NO: 598501 - DNA, 262 bp, Homo sapiens
ttgcgagatgagccatcggtccagcagcgacattgtccagatttgagtgtccctgataaatgatgcccttgctgtgtacaaactgcagaaacatgaatgatgagaaataatttgtggctataaaaccaataatcgggatgggtgcagtggctcatgcctgtaatcccagcactttgggaggccgaggcgggcagatcacttgagatcaggagttcgagaccagcctggccaacatggtgaaaccccatctctactaaaaata

SEQ ID NO: 598502 - DNA, 126 bp, Homo sapiens
gctttggggctcaagctgatggcatttgtgggggtcagggagcctccttaggggcacatacctgcctatagtgcaacttttatgcacctagtgttcttccttggtgcaaaatccttcatttcctcc

SEQ ID NO: 598503 - DNA, 1180 bp, Homo sapiens
tgatgaagaggactgtgagccccccacagaccacagcagccagctgcgaagacaagaaggagtttctgtgcgctggaatccaggcagcatgcctctcctcctccctgcgcatggaactatgttcgatgactgctgtgggacggagttctgacagaggaagtgactgctagcatcagcacccaatgctgacacagtctgcgtccagcaatgccagcatctgtggggacgaaggtactgctgcgtgcggcgaccggagaaagcaggctactgtgcctgccgctcgtggcttgcaaaccgggccctggcagcccggatgccaatgacatcaacgagatgcctgatgctttcggacaactgctacccagctctgcgaactagcgaccaaggggcggacgacctctgcagactggcgacgtacggtaactctcatgatgacggcgacaacgacctgccactggcgctgaaggctctgtagtaacaggtcctgatacatcgcctgatgagaatgatgattgcgcacagctgtataccaccgtgacatcccccatatcggagtctacagtagcagggcagttccacgggtgaccgagacgtgttcaggcattgactcgctagttggagtgtccattgatcaaaggcttggggcggtgtctatcttggaaccaacattggcatcactgggacgaccatccgtcactaaccgcatgcactgacaaaccatgagttcgcgccttcgataccgagttacacaaagcgcaaccggggagaaaaggatttggaccacgagggtggtgaggtgaagttcaaggatttaaagggcttgaagattgccgcagagggattagagcaacggaattgggtatgacggaaaagtgatattggaccgagtcggggacgagatgagatagaagatggggcaaattaagggcaaaaggcggagaagacaaattcaggggatgtatgaggagacaagacatggggtggcacaaagagggcgaacaacaggacgcagggatcacacaaaggagaagacaagaaaggcaaaaaagaacaaggaagaaaaaagaggaacagacaagaaaagaaagagggaaaaagagaagaaacgaagaacaacagaaaaaaaaaacaagaagaaagaaaaaaagaagaaaaagagaacgaagacgaccatgaaaaa

SEQ ID NO: 598504 - DNA, 300 bp, Homo sapiens
cgtgaggagcagctgccagcttcgctggagatgagcagggaaccaggaataaaaattctgcttgatttgaagacgcggctggagcaggagattggcaactaacggcggctgctggagggagaggatggccacctgactcagtacaagaaagaagcggtgacgcaccgtcaggtgcgtaccattgtggaagaggtccaggatgtggaggtcatctcctcccgcgagcagggtcaccagaaccaccggtgaggactcagctatcccgggcgggcaaccaggagggcgggaggggggcgggcc

SEQ ID NO: 598505 - DNA, 175 bp, Homo sapiens
cccccggcccgggacccggacccgggcccgggcccgggcccggcgcagacatgcagcgcagctatgacagctactattaccccgcggcggggcccggaccgcggcgcgggacctgcgcgctcggcggcagcctgggcagcctgcatgccagccccttccgcatccccgaggacga

SEQ ID NO: 598506 - DNA, 152 bp, Homo sapiens
  misc_feature (74)..(74): n is a, c, g, or t
tcctcatgaaagttggacaagatgcaagttctgctggatcaaccaggactaaagatccaacaagacgtgcaganctagaagctcgtacaagtgggaagaagttcgacaacaagcccctttgtaaaaccaaatccaggttttagcacagacgg

SEQ ID NO: 598507 - DNA, 307 bp, Homo sapiens
  misc_feature (23)..(23): n is a, c, g, or t
  misc_feature (104)..(104): n is a, c, g, or t
agcatgtttggggccccctgggntgccatccatttaaccccaaatttttttgggaaactcgccccccctgggaaccaaagttttgggtttaacctttagcaagntatgccctagttccaaaaaagcccctaacaggctgccctgtgtaaatgtaggttttttaaagatcccagggtgggtcatttgatccctggatggatagctcagcctggggcctttagtgttttccctggtgataaatcccccaggcagctggatttggagctgggggccagtttaaattatttaaaatttatttgtgtgggga

SEQ ID NO: 598508 - DNA, 162 bp, Homo sapiens
aaaaaaaaaggaaaaggaaaaggaaaagaaaggttcctgggtgccccccccctggggtgggtgggggttagggggggttggataagtaaagccgtttgcaggggacttgggttagtccacccctggcggcccctccaggggcagagggggaatgggtttcca

SEQ ID NO: 598509 - DNA, 321 bp, Homo sapiens
accgctgtaatctcacatcatagacacacacatcttctgctatacatcctcactcatgcgcatatacacacagcgtgctgggtacctgtctacacatgcacataccgagttcctgcattgcttacatactacacgacacacacatatgttcactcgttacatgctacacatatagggtctgcagaataaattagcgtgtgtgtacacagtgtgcacacagcgacactataagctcatttatacagtgcttattcacacagtgcctacacacaccagacctacatgttagcacatacacactcatgcctacctgcaatcatg

SEQ ID NO: 598510 - DNA, 314 bp, Homo sapiens
  misc_feature (246)..(246): n is a, c, g, or t
  misc_feature (275)..(275): n is a, c, g, or t
  misc_feature (297)..(297): n is a, c, g, or t
atagcaatcttcccaaatgacacttgatgaagtaggtgaatagggttggagtcaggacagatacttccagtcactggcagtgattcagtaaacatttcaggttcatagaggagtaaagggaattattgattagatctatatccaaataataggtgaaagtgtaattacttaggctaatacaggagaaaaataggaataataaaacataatcctgaaggaatataagggagagactagggtgcattnggctcacgcttttaatccccgcctttttngggaggctgaggttgggtgggntttttttttttgggccc

SEQ ID NO: 598511 - DNA, 116 bp, Homo sapiens
ctcctcccctgtctgcctgcgtggactggagagaaagcaaacagccagatttggggcactcccatgaaatgcaaatgtctaacacaggctattctctcatcatacttcacgtttac

SEQ ID NO: 598512 - DNA, 81 bp, Homo sapiens
ctcctcagtgactctggcttctatctctgtgcctggagtacacggccgactagcaagtggtacacagatacgcagtatttt

SEQ ID NO: 598513 - DNA, 238 bp, Homo sapiens
agcgagtgagcacaatgcaaactgccacttttaaaccatcaaatctcgtgagaactcactgattattacaagatctgcatggggcaacccttacccataatccagaaacctcctacaggtccctccttcaacatgtgtggattacaatttgagatgagatttgggtggggacacagagccaatccatgtcattgctatttcaaccacagaaattgaaaccatttttacgtggattagg

SEQ ID NO: 598514 - DNA, 469 bp, Homo sapiens
ggctgctccggcctccggggccttggggagactcgagcccttcagcgtcagactgacgccgccgagtcgtcagctcgtgtactgcgtggccggctctcgactggctggtccactctcgtgtcaggggcagctagtgtctggcgcaaagcgatctccgttcgacgctacacaggctaggtcgctcgccgagcgggacggcgatcgtggcggggtcattggacgcgtgggctggagcgctccaggttggcactgaggggcactagcccaccgaacttctaagagtgcccgtggacagatgtcaccggcgagggaaggaccgagactggctgtgtgtggaggtgtggccagccagttgtggggtgagcaggcgagccatgatcaagggaacctcatttagacgtgattgtgtacttggctgacgtgaacaagggcatccgagcttaaagcacgagcgccattaacaggtgaa

SEQ ID NO: 598515 - DNA, 883 bp, Homo sapiens
cttggtgatttccctaccgaggacctgggatcgagaccccgaagatattttccggggcctcccccctgtttgtttccccgggaccctcagagtgatccctcccctagccttcaggaaccaagggggttccctggagccgtacttgtgttatcaagacgggtgcccccccccggattccaaggggaccctgaccagcctcgtatttccccccacgggggttcccgccagcactccaccttgttgttagtcccgcctggcctcgacaacaccagtttcgagccacattccgggattatctgggtgcaccaatatcggatcccaattttagaaccccgggcccccccacccccggtagaaagatacttgtctgcagctagagaccttctgaggaaggtggctgccctgacaaccccccggatgttgtgcagccctcggccccccttacggctcgtcgcgctgggcccccccagggccttcctgtaagactgccctcccgaaggagccccccgccccccagaccctggcccctggcatccaggaagagctcttcccagccccctggctgctgctgagtccagcccacctagcgctggcgcccaagcagcctccctgggctgggctggctctgtgatggagccccggcatcggccagggctctcgggaggctgtctgcccctccagacatcctgcctccagccctgagtggaaggcacccctgaggaccgcgcggatcgggacctggacctggggctggcctcaggcccccgtgcacgtgctgctccctttttggaagacccgctttaaccctagagccccttgagagacttcctttgcccccccggaaggaaatccaattaaccccccctgactacctttgccttta

SEQ ID NO: 598516 - DNA, 962 bp, Homo sapiens
  misc_feature (15)..(15): n is a, c, g, or t
ccccttcctctcccncagaatttgtgttgctgcctctatcttgttttttgttttttcttctggggggggtctagaacagtgcctggcacatagtaggcgctcaataaatacttgtttgttgaatgtctcctctctctttccactctgggaaacctaggtttctgccattctgggtgaccctgtatttctttctgtgcccattccatttgtccagttaatacttcctcttaaaaatctccaagaagctgggtctccagatcccatttagaaccaaccaggtgctgaaaacacatgtagataatggccatcatcctaagcccaaagtagaaaatggtagaaggtagtgggtagaagtcactatataaggaaggggatgggattttccattctaaaagttttggagagggaaatccaggctattaaagtcactaaatttctaagtatgtccatttcccatctcagcttcaagggaggtgtcagcagtattatctccactttcaatctccctccaagctctactctggaggagtctgtcccactctgtcaagtggaatccttccctttccaactctacctccctcactcagctcctttcccctgatcagagaaagggatcaagggggttgggaggggggaaagagaccagccttggtccctaagcctccagaaacgtcttcttaatccccacctttttttactcccaaaaaagaatgaacacccctgactctggagtggtgtatactgccacatcagtgtttgagtcagtccccagaggagaggggaaccctcctccattttttttgcaacatctcatttcttccttttgctgttgcttcccccctcacacacttggttttgttctatcctacatttgagatttctattttatgttgaacttgctgctttttttcatattgaaaagatgacatcgcccccagagcccaaaataaatggggattgga

SEQ ID NO: 598517 - DNA, 997 bp, Homo sapiens
  misc_feature (15)..(15): n is a, c, g, or t
ccccttcctctcccncagaatttgtgttgctgcctctatcttgttttttgttttttcttctggggggggtctagaacagtgcctggcacatagtaggcgctcaataaatacttgtttgttgaatgtctcctctctctttccactctgggaaacctaggtttctgccattctgggtgaccctgtatttctttctgtgcccattccatttgtccagttaatacttcctcttaaaaatctccaagaagctgggtctccagatcccatttagaaccaaccaggtgctgaaaacacatgtagataatggccatcatcctaagcccaaagtagaaaatggtagaaggtagtgggtagaagtcactatataaggaaggggatgggattttccattctaaaagttttggagagggaaatccaggctattaaagtcactaaatttctaagtatgtccatttcccatctcagcttcaagggaggtgtcagcagtattatctccactttcaatctccctccaagctctactctggaggagtctgtcccactctgtcaagtggaatccttccctttccaactctacctccctcactcagctcctttcccctgatcagagaaagggatcaagggggttgggaggggggaaagagaccagccttggtccctaagcctccagaaacgtcttcttaatccccacctttttttactcccaaaaaagaatgaacacccctgactctggagtggtgtatactgccacatcagtgtttgagtcagtccccagaggagaggggaaccctcctccattttttttgcaacatctcatttcttccttttgctgttgcttcccccctcacacacttggttttgttctatcctacatttgagatttctattttatgttgaacttgctgctttttttcatattgaaaagatgacatcgcccccagagcccaaaataaatggggattggaaaaagataaaaagtaaagggcacgccgctcgcgat

SEQ ID NO: 598518 - DNA, 253 bp, Homo sapiens
gtagactctacaggatccccccagttctgcttcttgaaaccagttcctgctcccaattcctggatcggagtcagtagcaactccagagcacatttcagagcaaggacattaattaatagggaaactaatacacgtcatttcattcaatgtatatttatggagttcctaccagatgccatgtgtcattcaaagagcagaaggaggccgggcacggtggctcacacctagttaatcccagtcactttgggtaggc

SEQ ID NO: 598519 - DNA, 244 bp, Homo sapiens
acgcttggctagcacagttggtcctgcccataataccagcactttgggagtgctgatgtgggaggatcacttgagcccatgaggtggaagctgcagtgagccaagatcatgccactgcactccagcctgggcaacagagtgagaccctgtctaacaaaaaaaggaaaacaaacaaataaaacacccacaaaacaacaacaacaaaaagcagacatagcaaactgatctctagtgacagaattgg

SEQ ID NO: 598520 - DNA, 86 bp, Homo sapiens
gcggccgcctactactactactgctcgaattcaagcttctaacgatgtacggggacatggactaagaacgatgctggctttcaagc

SEQ ID NO: 598521 - DNA, 316 bp, Homo sapiens
gctccacccttactaccagacaaccttagccaaccattacccaataagtatagcgatagaattgaacctgcgcaatagatataggtaccgcaggaaagatgaaaatataccaggcataatatagcaagggactacccctataccttctgcataatgattactagaaatactttgcaaggagagccaaagctaagaccccgaaccagaggagctacctagacagctaaagagcacaccgtctatgtgcaaatagtgggagttataggtagaggcgacaaacctaccgagcctggtgatactggttgtcaagatagat

SEQ ID NO: 598522 - DNA, 237 bp, Homo sapiens
ttcagggattgtagtgggatgcgatcaagtgatagtctacttttagttctcaaatgaatctccacactgttttccatagtggctgtactagtttacattcccaccagaagtatagaactgttccctgttcaccacattcacacaaacatctattttttttttaatggtcattcttgcaggagtaaggtggtatcacattgtggttttgatttgcatttccctgaagattgttggtgg

SEQ ID NO: 598523 - DNA, 806 bp, Homo sapiens
agcggggttggggtgctgcgccggtgccgagtggacgccgtcgctgacgccatgcagctgacggtgaagtgcgctgcagtggcctggcgagtgcagcctgcaggtgccagagtgactgagctggtgtccactgctgaaagcagctgtgtctccgatgaaggctgaactgtcccatgtgcgccagcatgctgtgctgctgttcaatgggcaaggcccctggcagactgggaaactgactctcggattatatgcatcgggcccaagtccaagctcaacctacgtggtcacaaccccctggacgaagtgtgctactagaagacagtgcgagtgcccacgagtgctgggccgacgtcccgctatcaccccgacagagtcttggcaagacttgatcctccaacaagtcttggccccgccaacttcagttgccggcatgacttgcacaagacaagtcggtcctaggcaaccaagcttacacggagtgggaattaacagaagatggatacccttgaggttcgacctgacacgctgggaccgaccattccgacacggtttggccccaggccaggatatcccttgcaacatagccctgcaaagggtggaaccttggacgcacccacactcgtgacggcaaaggagggcctcttccctcaccacacacatacgacaacatttccgtcagggaagagcccattgatagcgcaaccgtgttggcaccccgaacctacgccccagcgggcgataagccatgactatgccacactagagttagcaccaccatacaaccctgactggctaccactccgcaa

SEQ ID NO: 598524 - DNA, 951 bp, Homo sapiens
ggcattgcgtcccgacgcccgtgaggtcctcgcggatgcgcagccggttatgcgagctgtgggtactctggcaagaccagcgtggcacagaggacttgtgcagaatgacaatcgcaaccagactgtgacagcgcctttggggcaagctggagctgtctgtgttggtgacgcagggtcttgcagcgaaatagaagctgcctggggcgaagggcgacgtcgtgcatgctgatgccgatggtaggtcccgagccacgcggcatgcgagtttctcggagtgtccggagtccccatgaatgcagatgcacaagcctggcgtgaatggctagtttccacgcagctcgcgatggctattcgaaagagttcccgcgtgccgggtctatgatacatccgcgttttccaggcacgagtcgttcagcgcagaggaggtgttatggaagctgctgaacggttgtgaaatgcggagaagtgatttcttactcatgcaattagcgagcctggtaggctaacgccctaaagccgtcgctgagcagatgggaggagcaatgagaggcaatcctgtccccatcctcatcccgtgcaacaagaggggatctgcagcaagcgggagaccgatggggcaacgtactccggaggactggggcggaaggaaatggcttctggcccatgaagggccagcggcaggggaaagccagggcagagaagggagctcaaagtctggcaggggcaggggatcaagggacggggaggctacctcgggctcccagaccgggtgggccgacacctgagtatgtgcaggaacggatggacggttgaagcgaaaaacaggtgttacactggcataggatgccggacgtggagggacccgtggattaaaggcagtggcgcgtccggcataaacaaaaagccaaagaaaagacaaacgatcccgcacgcggccatacaaagccagga

SEQ ID NO: 598525 - DNA, 1066 bp, Homo sapiens
agagtaacagaagcatatagccatcttatttttttcttttaaaaaaaaaaaaaggaaatccagaatctgggccactcccgaccccactctgaaagggaggacaaacccgactgtgctctccaactaacttagccaaggtggcgccatggtacagtttaacagtgatgagagggccctccgtgaaaattcgcaggtcactgtacttcaatcacagatcctgtcgcaatttttccccaatgtgacacaatgcctacgtaactacggggcgcggctactctcacaaaacagggccgtgctcccacccccttacatctagccaccaccttccctcggtgaaaacggccacccacctttgtgtgacaactccctacgtacgaggcacccgggtcgtggccatacaccgtctgcagtacaccccatccgaggcaggggcctccaccatcacacagggctggcgccccgaccacacaatcccgggaacgccatgtcacccgtgacagcagcgacggtccccccacacaacaccgagctgcaggggaacagcgcctctgggaaattgtgacagcctccgccccagacaagggaaactgcggggcgaacacatgggcctccaaggacaagggaactccgtcgggcacagcgacactcccaccggggacggcgacacacacccacacccaccgtcacaccctggtgccactgcgcccagaggcatgagttgggcaacaccgttggacccgcggcaaccggacgctccagggggaactggggcccggcacgtaaaccggttactccaacaccttgtgccacgcgggtcaccccacgtgacctaaccactgcatctggccggaccacggcgttccccccattgtggtccagtcggacttcctccgacaaaactacaccaccacagcggccttggcaagtgacccagtctcgaagtgatcacctctccggcacctctccactgtacgctcaccagtaactctacacattggtctcagttcacagcgaactcacgccgacgagctgcagtgcactgcgcacaacctactcccaggaccga

SEQ ID NO: 598526 - DNA, 109 bp, Homo sapiens
atgagctggtacccatcccacctgtgtgctctccccgctaaccgtgttgccatgacccgctcagtactgatgagatcaagggaatgttcaagcgaaaagccgagcagga

SEQ ID NO: 598527 - DNA, 440 bp, Homo sapiens
gcagcccccgtggctgtggaacccggggcaacagtgggctcacttctttcaccgggcctcctgccccatttgtggcctgcggtggggtttaaaaccaagactgtccttaaaaagggctgcaaggactgttacctggtgaaaagggggggtgggtgggacgttttctgtaaaacccatccgggggccaagcagagacagatggagcccctttccctccagagtcagggacaaacttgtcatcgcatcccttgggggaatggttgtatcttatgggaggaattatcccatcaaggagtcaggggaaaggggttggaagcaaacgccctaaaagttccccctcccgtttcaggggaaatggggaactaaagaagccattgggtttttttttttcccaaaggttccaactaaaaaacattttcctattaaaaaagcccttccga

SEQ ID NO: 598528 - DNA, 1099 bp, Homo sapiens
agcgtgctggggcaggagaatggtgtgaacccgggaggcggagcttgcattgagcagagatcgcgccactgcactccagcctgggtgacagagtgagactctgtctcgaaaaaaaaaaaaaaaagtagccctcgtggccaggcatgggggctcacacctctaatcccaacacttggggaggctcaagcaggaagatcacttgaggccagagttcgacaccagcctgggcagcatggtaggaccccatctctacaaaaggtttacaaattgggcaaggcatggtggcacatgccttggagaggctgaggcaggaagatcactggtgatggtgccactgcactccagcctgggcgacacagcaagaccctgtctctgaaacataaagtgggcctctgtcacattcttccctatctttcataagtagctaccctcacctcttctagtggtggtcccgggtacttatctccatattttcaaagttaaggctctggtcactatttcttatttgatcagtttagatcttacttatggatctcgggccagggtagaagaggatgtagttctcacattagagcaaaatgactcatatcttctaaccgaagggacctaccaaaagtgtgcggtacacatgacttgacagacacagaaaagcgggtcaaaataaccttttgcagaacaccgcgaattagggcctaagagtttccaaaagggaactacacgcggggcttcaccaaagttagggagccaggaatcgaagggcaccaaacgtcaaatgaggctataagcggcaccacgagaaacccgggacagagagtgggacaggacaggggcgcacatgtaacgaacagacacggatagccccacacagaggtagaacatatgaggacaaagggtgatatctcgggaacaagggagattaccgggttagacaagcaaaaaatgacgcgaaaaaaaggggggcccaagaaacccaatatcttacaatatatattagaggaaaaaatgataagacggactcttctaggagaaaaatagtgtgaaacaataaaaagggggatagagaagacgataaggggaacgttctatactatcgataaaa

SEQ ID NO: 598529 - DNA, 256 bp, Homo sapiens
ccccccccaaaaaattttacccccaagggggtccctttggtttttttttgggcccccggggggggggcccgcccaattcccggtttttttttccccaagggttggggccggggttttttgcccaagaaaaaagggccttttttttttttgggggtccccccaaaaccatttcaaggggttttggttttttttttttccccttcccttttttaaagggtttcgggggggggtttttttttttttttcccccccccca

SEQ ID NO: 598530 - DNA, 222 bp, Homo sapiens
cagccggtaatatcagtgtctttctagcgagttcatgtgagcaggactgcgtcttcctagtttcatggagttgcatgggggcaggtgcccatctttctagtgagttccatggggtcagggggcacatctttctagtgaatatccctgaggtgaggggctgcgtcttatctagtacttccatctgtgtactgagccccacagcagggactcagtactccttgt

SEQ ID NO: 598531 - DNA, 345 bp, Homo sapiens
ctggcaggacgcggtccgcaggcagcatggcccgggatgcctgcacccaggtcgaggctgaaggacgaggggtctcggtgtacccgacgctctaaaggctgtggctgggggctggctcacggacacgtcactcttcagggtgctgtggggactgccggtggaatgcggtgaggacgacacgaggagggcgctgggctcaggaaccctgtcacagagtggactccaaagaggagtccaaagatgtcatcgtgatggctgttgctgttggagtcgctgtcctagctctggggggctggagtaattagctgcctcctgcagcctcatcagcatgttcatcagaggatc

SEQ ID NO: 598532 - DNA, 173 bp, Homo sapiens
gatactccattacccccagtagtggtgcacgggcacagtaacaccaactcgaaagagacttatgaatgcaaggagtgcggggaagcatttaattctcccaatttatttcacactccatcaaagaactcacactggaaaggaggtcctataaatgtagggaaaatagtgagagc

SEQ ID NO: 598533 - DNA, 294 bp, Homo sapiens
aaaaaggcaaagtgcagcaactaatgcttgtaatcccagcactttgggtggccgagggaggaagattgcctgaggccagcagttcgagaccagtataggcaacatggcgagagccatctctaaaaaaacaaaaccaaaccaaattagccaggtgtggtggctggcacctgtgttccaactacttgggagactcatgtgacaggaagatcacttgagcccaggagttagaagctgcagtgagccgtgatcttgccactgcgctccagtctgggcaacacagggtctcacgaattc

SEQ ID NO: 598534 - DNA, 923 bp, Homo sapiens
  misc_feature (226)..(226): n is a, c, g, or t
  misc_feature (228)..(228): n is a, c, g, or t
  misc_feature (681)..(681): n is a, c, g, or t
gggcgacgggaacgggcgaatacaagcggcataagcactggcccctacagaggccatggtccatccgagtagaagactatgttgtatggcatctgtctgttcaaatgagaagatggctggatcaataatgggcgctatgcagttaggcagacgcaattcaagtcgcgctttgacagcaatgcatgtgtccgacgcactgcgcagaacgtgagtttcctcattcaananagagcataggtggcattgcccatgtaactactgcgatgacattttctaggaaggacgcgaactgtaggagcagcacagaatatcggtgaatagcggaagggtgcagatagacgaggaggaaaggtgcgttgggaaacaacatcggttctgacatgaattggtttcatgtggtttcagtgatacacttgcaacgtggaattgagtcggacgctatgagaggacatgttgcattggaaagttgagtaatggggaacaactgaggaagaagactactaagatggctgtgacacgaacgtatgcaatggtcacgtaagagataccactttcaacgtcataggcacgaactctcgaggaggccaggccactatctcgggagttaggacccatctggtgcataccttgagctgtggtttaaactgaaacccacaggaggtctggaacacagacacaagngcgccaagcgttctagcagaggatgagcagttacttgtaatgcgtcttaacccgtatcgctaagccattttcgacggcctgtcgtaaacagcaagaatatacattacctctcgcccgcctgatggtgttgaccttggctgcatgccctcagtgtcagataattccatgggtgaagtttcatgtcagctcgcgaggttggagatggattggtgccaatgggttggggggacgttggaatgtcc

SEQ ID NO: 598535 - DNA, 981 bp, Homo sapiens
tgggcagtttccaagtcatttaattcaaaatttggtgttggtttcctgaatcaataaatacaatacaaaacaaggtaaaaatggctaccattttctctcccctggttccccccaccgggggaaaacccccggggaaacctcacttaggggttttcaggggttctccctccaaattgggtccaagcaaatgaggctgacggtgacatagtcccttgattcactttccaaaggagctcagctgaggtgaggagagcctcggggaatcgggaggtctactaggttagggaaagggattagggttattttgattttttggggaacaaaaacccggcctgggggaagagcttaccccaaaaaaccggggtgtcctacactgggtccagcgtcccctttctttggccttcaacaacggtggaacgttctctcacaaagagaaaaaatatgagcaaaatgtgtcacacccatgtggggaccccccgtccatcttacccccctactcagtgtgagtccctacagccccacagaatattatgaccctcgtgccgtgggaacctgtgaggttgagcaaggaaaggcccctacaaaatgcaggctaagcaaccagtggcgggggcacttccccacagggggaacgtggtgtaaagggacacagagtgtcgcggaaagaagcccagggctatactacggcgaccacggtaagagagcccaacacgtttcgggcacaaacgcgtccaccctgcacggatggggggacaatagatccccgtgtgggggggaaggtcaccgggaagacaaaagcaaccgcggacacataatgcttctgcgcggagcttagggaaacaaacctgtataaccaaaggaacccccatagcgcttgaccgggcacatccacgcggggcacgacagcaaccgttcggcgacgacactccggggtaacaaccgcacagaaaaaatgcaaccagatgtaaatgacggcacgag

SEQ ID NO: 598536 - DNA, 422 bp, Homo sapiens
gtagcctcaggcctgacggcgactcccaggctccgggacgattctgggcagtgtcggccccacaggtcggccggcgttgcccgttcaccagcgactctgggtgcctgcggagacccaccctgatcctctctagcatccgatcctgcccagcctgatctggtggcccccgcctttagcaggatcatgcctgacctggcctagatcgccttccgtctataccgccatctgtgccaccgcagctacatcacctctgccttcttcggccctctgagcgtacgctgccggctcttgaataggcgacctggggaccaaggctggctcttactgtgaaagccctggaggccttgcatttcgccttaccgggagttcagaggctcgccctgaatgctttcttgcggcttcgtcccctcgaccagctctcc

SEQ ID NO: 598537 - DNA, 145 bp, Homo sapiens
ctcgtactagaaatacaatattagccaggcgtgctggcagtgcccacaatcacagctactccagaggctgaggcaggagaatcgcctaaacccagagtggcagaggttgcagtgagccaagagtgcaccactgcactccagcctg

SEQ ID NO: 598538 - DNA, 922 bp, Homo sapiens
ttcctggcacagcatggcagcgagtaccagtctgtgtaagctggtgggccctgaggtgcggatggcgaatgcgagatgccaggaacatgggcgcagacctgtgccggcaggagcgcagtgaacctactacttcaggcgtggatgctgacgtggccctgaccgagcccaacagcctgcggttgctgatccaacagaacaagaatgtcattgccccgttgatgacccggcatgggaggctgtgggtcgaacttctggggggctctcagtgcagattggctactattgcccgttccgaggactacgtggacattgtgcaggggggcggcgtgttggtgtctgcaatgtgccctatatttcaaagatctacttgatcaagggcgcagtggcctggggggttgagctgcagtccttcagatctcttccaaaccacaagaatgcgtggaccccgacatggccttctgtgccaaaatccgggcagccaggattgtgttcatgttcctgagccaatcgggcacaccctttggccatcttgtctccctagacaggtacccgaacaaccacctgaaagggacctctgggagggtgttcaggcaacccccgaggactggcacgggagaagtactattcgaccaagaaactacagcaaagcccgtggcagggaaacctggtggaagcgagcccctgcccgtggatggttattggttcccaaatttcacgggggggtggccctgtgattgagccttgttgcgagaatgggccactttggccccggtgcttttgggcgcacaaccaagggaaccgcattcacggggggactcgacaacgtccggaatttggatcccatgacgcaattgtttggcgggtgcgacaatcctggggaaatgtgccaagagggaagtccccgggctaacaggcagtgcgt

SEQ ID NO: 598539 - DNA, 855 bp, Homo sapiens
  misc_feature (11)..(11): n is a, c, g, or t
  misc_feature (15)..(15): n is a, c, g, or t
  misc_feature (228)..(228): n is a, c, g, or t
  misc_feature (330)..(330): n is a, c, g, or t
  misc_feature (413)..(413): n is a, c, g, or t
  misc_feature (416)..(417): n is a, c, g, or t
  misc_feature (422)..(422): n is a, c, g, or t
  misc_feature (430)..(430): n is a, c, g, or t
tgccgactagnccgncgggtgacattcagccggcggttcggggcgacggactctccattccagaaccatggcccaatttgtccgtaaccttgtggagaagaccccggcgctggtgaacgctgctgtgacttactcgaagcctcgattggccacattttggtactacgccaaggttgagctggttcctcccacccctgctgagatccctagagctattcagagcctganaaaaaatagtcaatagtgctcagactggtagcttcaaacagctcacagttaaggaagctgtgctgaatggtttggtggccactgaggtgttgatgtggtttnatgctcggagagattataggcaagcggggcatcattggctatgatgtttgaagaccaatctttaacatctgattatacttganttnntcatntgagtgtngtggaccatgtgtgatcagactgctatctgaatacaaactcacgatttgtcaaaactcagtgctttctccatcagatacttccatgacacaggtcacaatttctcttgatattaagctgggttagtcttttaaacaacccttaaaatacaacgtcttgtatagcccgcaaattgggaaccaggatcactctgctggcacgtattaaccctggtaccctgactactatggggaataccagtctaacatctgcaaggggtcgtgggaacctagtacttatattgacacgcctttaatttcccagaaccaggtgcaggggttaaagggtcttggtgcaaaacctcgttagctttgccacaagtaagaacgacacatagtcagtacccatatggcccacagtgcactcgaccatcaacccaatgtccgg

SEQ ID NO: 598540 - DNA, 314 bp, Homo sapiens
agatttggcatatgatctagaatggtggctaggtttttgtcagtgtgacgaagaacgcaggccgtgagtgtctataggggtgccttgggtaaactctgggactcagaagtgaaagggggctattcctagttttattgctatagccattatgattattaatgatgagtattgattggtagtattggttatggttcattgtccggagagtatattgttgaagaggatagctattagaaggattatggatgcggttgcttgtgtgaggaaatacttgatggcagcttctgtggaacgagggtttatttttttggtta

SEQ ID NO: 598541 - DNA, 680 bp, Homo sapiens
  misc_feature (11)..(11): n is a, c, g, or t
  misc_feature (15)..(15): n is a, c, g, or t
  misc_feature (228)..(228): n is a, c, g, or t
  misc_feature (330)..(330): n is a, c, g, or t
  misc_feature (413)..(413): n is a, c, g, or t
  misc_feature (416)..(417): n is a, c, g, or t
  misc_feature (422)..(422): n is a, c, g, or t
  misc_feature (430)..(430): n is a, c, g, or t
tgccgactagnccgncgggtgacattcagccggcggttcggggcgacggactctccattccagaaccatggcccaatttgtccgtaaccttgtggagaagaccccggcgctggtgaacgctgctgtgacttactcgaagcctcgattggccacattttggtactacgccaaggttgagctggttcctcccacccctgctgagatccctagagctattcagagcctganaaaaaatagtcaatagtgctcagactggtagcttcaaacagctcacagttaaggaagctgtgctgaatggtttggtggccactgaggtgttgatgtggtttnatgctcggagagattataggcaagcggggcatcattggctatgatgtttgaagaccaatctttaacatctgattatacttganttnntcatntgagtgtngtggaccatgtgtgatcagactgctatctgaattaacataagatttcgtcagcaaatagaactctaaaaatcaacacaagaagctcgggggcgtcatccctggggggcgtgcaatcagcggtgttgcatggggcgtggggagctcaggcgtgtctggtgccagtctggtgtcctgtgggtgaatcgcggcgggcaccctagggggatccgcgatatcacggatcccgggttgccgtgtaggcccggcgaa

SEQ ID NO: 598542 - DNA, 401 bp, Homo sapiens
tcactcagtgctggcagcggtcctgggatagaaggtcgtgcgcaccaggccttcaatggtgtagcggctgtgtccggagtcgttggctgtgaattccacctctgcatgttcattgaatgagaggaggccaagtgccttccagtacgatttggtgtttacgtccacagatgtacatcctgtaacgactgtctatctggctcgcagagtgtcatcagcagcctttgggacacgcattgcacgagccacatgttatggcagcagctgcctcgatacagcatctagaacatgtgaccatcaaatatcatcaggattccccggaggcagtaggaccacgcctcagacacctattcatgtcccactcgccataggacgagctgtggatgagaatagatcttgccaag

SEQ ID NO: 598543 - DNA, 606 bp, Homo sapiens
  misc_feature (11)..(11): n is a, c, g, or t
  misc_feature (15)..(15): n is a, c, g, or t
  misc_feature (275)..(275): n is a, c, g, or t
tgccgactagnccgncgggtgacattcagccggcggttcggggcgacggactctccattccagaaccatggcccaatttgtccgtaaccttgtggagaagaccccggcgctggtgaacgctgctgtgacttactcgaagcctcgattggccacattttggtactacgccaaggttgagctggttcctcccacccctgctgagatccctagagctattcagagcctgaaagctgtgctgaatggtttggtggccactgaggtgttgatgtggtttnatgctcggagagattataggcaagcggggcatcattggctatgatgtttgaagaccaatctttaacatctgattatacttgggtcgattattcgaggggtgtccgaccatgtggcatcagactggcttctgaataaaccaaggtttggcacgggaggactattggatcttagcggtcaggggggggtttagctgcgccgtacgactgggcacttaggttttaggggggggaaggttatccaggcgggccggaatcgggctgatgtggccttaacgcctatgggggcgccctatcccccccgcggtgggggggtaagggcgagcaggggagg

SEQ ID NO: 598544 - DNA, 361 bp, Homo sapiens
ttgctgctgtcctcctcgccctcctcctcgtcctcttcatcgtcttccacacccatgccgagtgctcaggggcctcaatatccctctcttcgagaatccctcggtggcgtcctcttcaaagctggtcagggcaaagagggctttaaattggttcctgtcctcatccttcctgtcagccatctttcttcgtttgatctcagggaagttcaggtcttccagccgctctttgccactgatctccagctggatcttccgggcacgcagcttgcgccagtggctgtagtacaaaggcaaggggggcccctcttcccgggtcagcttcttccaagctttcactggctgctgcccaaaaagccggaat

SEQ ID NO: 598545 - DNA, 203 bp, Homo sapiens
tcgtctagagcctacacctgctgccccttacgcgcgggggccctgctggcagcttaggggcgtgctcagaggagaaggatgatgaatgggaagaggagtgcggtgtagacacgggtgtacagtgatgagttctgcatccttgatgctccccgcctgggcatcccgccccgagatggggagcatcaaggatgcagaactcatca

SEQ ID NO: 598546 - DNA, 293 bp, Homo sapiens
  misc_feature (182)..(182): n is a, c, g, or t
ggtcaagtatgtctctactggagctgcattattaagggcgtgctgtcattgtcgagcacgtgacgctgagatgtagtgcagatcagccattgcctcggcgagagtaggtcataggacagagagatggcctccatcgggacagtcaggcagatctcgtagtgaaagacgagaaaagttcaggnccaggcccaggcggatggggttggtgggcggcatctccttcttgctgatgtccatggcctcctggtaggctgaccgggctgagtcaatgatgcgcttcttgtcgtcaccgg

SEQ ID NO: 598547 - DNA, 429 bp, Homo sapiens
atggcactccttgtgctggcagaaggtgttcccatagctactacgtctaggatgagccttgattggagctggcattgaagatacaaagcaagttctaagaaatgacacaatagccagtaactgtcccaagtttgtcacatcaggaattatgtacaaagttatcttcaagcttctgtactgggctgcacagagcatctccatgtaataccagcaggtcctaagccttcagctccaaggcagagaagcaggagactctgaggtggtgtttgggccattcacctaatggtggccttggaagagtatgtccctgaaagattccaaagaaacttcaatgctcagaatttttattctttggctcagtccaccacagagacccaaattcagcccatataggaggccaaacaaagccctgctctgacaggcgggctc

SEQ ID NO: 598548 - DNA, 536 bp, Homo sapiens
  misc_feature (536)..(536): n is a, c, g, or t
cctgtgcattttctcttttatgtttctccattttaaaggaattccagtattttcatcggtaaagactaaatcgtatgagtggtgtatagactagaaccaagctaaatagaacatgttgcacgttctgcctttatggtaataatggtcactgcctctagtgcctttggtatcgattttcagcttgacttgggttatttttgtgaagatgaaatggtttactctggcactttggactttcctcagagctccactcagttttaaacgaaaaaattttgtttatttatttttggtagttcaaatcagcatacttccaaatggtctgttttgtttttgaagtttgtaactcatggctgtggggatattgagatagagtaactcctcctagaagattatgttactgatacctgtgttgtgtttgtaaatttgaaaaaattagtaaggattttattccttcctgaaacgtcaggaaaaaagtgggttgagtgtgtgtgtgtgtgtttgaatgggtggtgcagtgcatttcaaagctgatagan

SEQ ID NO: 598549 - DNA, 192 bp, Homo sapiens
  misc_feature (81)..(81): n is a, c, g, or t
cgccagtggtctggcccgcgacgatagcctcctcgggctgttggcgctactcgtcgatggcagcaggcaacaagttcaggnccaggcccaggcggatggggttggtgggcggcatctccttcttgctgatgtccatggcctcctggtaggctgaccgggctgagtcaatgatgcgcttcttgtcgtcaccgg

SEQ ID NO: 598550 - DNA, 264 bp, Homo sapiens
acatatccatactagaaaagaaaccacagacataggtataaaaaaactactatgtagtagtctgggggaatgaacgcacagatctagtatgacttatgttataacaatcagggctcccccacctcctcccattactagtgtccttacatagtagcattagctgtctgcaacaggcgccccataggccccatggcacgacattagcatgcttccagtgccccattttctctactgctcagcatggcatgttgcatgccctggcag

SEQ ID NO: 598551 - DNA, 108 bp, Homo sapiens
cacaaagggggggggaagctagggtttgactatatgcgaccgcttctgggacactcaaagcaagtatttcacctgccaatgtgctctgagaagtgcaagcactcaagc

SEQ ID NO: 598552 - DNA, 124 bp, Homo sapiens
  misc_feature (17)..(17): n is a, c, g, or t
  misc_feature (26)..(26): n is a, c, g, or t
  misc_feature (48)..(48): n is a, c, g, or t
  misc_feature (54)..(54): n is a, c, g, or t
aaaatacttccctcaantctgtaaantaaaagaatagttattttacangttccngggattgtgaaataaatgttgcagttttttaattataatgaaaataaatactcttggttttgctttgtga

SEQ ID NO: 598553 - DNA, 397 bp, Homo sapiens
tgacattataccaatcgagctctgtaccgtgaacattcgtgtccccatcattagcttgtctaatgctctgaccaagccgagatgcccattctctatatgtgattgccggttagggttagagtaagggaatttggctcatagcttcagattaatatggtgcattccaaacagcttgactgcttcttaatcatcaaagattacttgtgtaaagttgtttgcccatattaggaagcagtccctggagaaggcatgttcccagaaaggtctctggagggacaaactcactcagtaaaacataatgtatcatgaagaaaactgattctctatgacatgaaatgaaaattttaatgcattgttataattactaatgtacgctgctgcaggacacgaatgttca

SEQ ID NO: 598554 - DNA, 83 bp, Homo sapiens
  misc_feature (16)..(16): n is a, c, g, or t
acaccaaagtgttttnctcatgtcgagtttattaaaactttagcagaacaaattatccagattggagattatcaaaaaatcaa

SEQ ID NO: 598555 - DNA, 1392 bp, Homo sapiens
aaccgcgtcggataatcccgggatatatgtatgacccacgctgtactgctcgagccctgctagggcactcgtgagtgcagctgcactgtacgtatccccgaacctactcagatcagcagaactgcactatgaatctcgtacactctaatcctactctatctgaccacgacaagaaaccataccactaactagatatactctacgactaaagataccatatgataacatagagatactatactagcaataaccacagacataaacgataaaaccagcaaataaagacgaactacaacgagaaccatacgatcctcactggatatcagcaacacagagcatagaacactacgcagatatagatacgacgcacagcaacaaaatgcgcatagaacaatacacacggaaaacaaaactatggcttgaactacgcacagagatagcataacgaaaaccaaagctcaccaaaccaaacacatgcctcaatcacttcatcataccatacaaataccccaccaaaaacacaacccacgccttatacaccaaacaaatacatatataacaaacaacacccccaaatcaaaacaagaatccctagcacaactacccctacattacattgacacaaacaactaactcccaccaaacccctacacccctatcgcaacatactacctacatgtctaccaaacactacaccctctaataatcactattatagtataccaccccacacatctctaacacctcaccaatcacaacaacacaataaacacaccacacacattaaacatcactacccaaaacaaaacaataaaaccactcagcacctacccaacaccaaaccaacaaaacctacccacaagaaaccaaataccatccataaatacccaccctacacaaccacaccacatcatcatcactaacactatcaacccaacaacaccatattccacacataacccctataacgtaaatcacccttcacataacaatcataaacaacacaaatactaacaataattatactaacaaacaactacatccatctgaacatcacaaatacccaaaatacagaaaacattaactataaaatccactacactacacatctaccaaaactcccacattcacacaacaacacataaaaaaaaacaatacaaaatcaacacatacctcttataaccaatacaaactaaactataaaaatcaattaaacgaaaaccacaactttacatctacaaacagctaattatacaaaaaaatcctaccacacacatacacatacaaaccactctaacacacaaaaaaaaatatcacatacaccatcacataataaacataattaccccaataacaaatacaaacaataaacatattaatatcgaaatacta

SEQ ID NO: 598556 - DNA, 149 bp, Homo sapiens
ggctcggcccccgtgtcctttctccataaaattcttcttagtagctatactgtcttattatttgatcgtagaaattgacctccttttacccctactgggttaggtctacctggggatctaccatggctagctgggttaggtctacctgg

SEQ ID NO: 598557 - DNA, 331 bp, Homo sapiens
  misc_feature (49)..(49): n is a, c, g, or t
  misc_feature (82)..(82): n is a, c, g, or t
  misc_feature (252)..(252): n is a, c, g, or t
taatcctaaaagtgtcagaggatgggtgcaagtggctcacacctgtaanccctggcacttttgggaggctgagacaagaggntcacttgagcccaagaggagtttgagattagcctgagcaacatagtgagaccccatctctttccaaaaaaaaaaaaaataataataataataataataataagccaggcatggtggtatgtgccttcagttccagctactcaggaggttgaggcgagaagactgtttaancctggtaggttgaggctgcagtaagccaatgattagccagtgcactccagcctgggtgacagagtaagacccttgtctc

SEQ ID NO: 598558 - DNA, 112 bp, Homo sapiens
  misc_feature (60)..(60): n is a, c, g, or t
gcggtgatctagaggatcccgcaggtctgtcggtttaagggtactgtagagccgaacttngagttactgtgcaagattttttttttaaagctcattcattttaatagtggag

SEQ ID NO: 598559 - DNA, 137 bp, Homo sapiens
  misc_feature (32)..(32): n is a, c, g, or t
  misc_feature (45)..(45): n is a, c, g, or t
  misc_feature (97)..(97): n is a, c, g, or t
  misc_feature (110)..(110): n is a, c, g, or t
caacatcacagtcacatacagagatggccgantggcacagctggngcaggtatacatccgtggcagcaaaatccgctttctgattttccctgacatnctgaagaacgcanccatgttaaagagcatgaaaaataaaa

SEQ ID NO: 598560 - DNA, 114 bp, Homo sapiens
cggaagtgatacctaaaatcccaataattaaaacaaatatgcagtcactttaaaaatatgatcttaagtatatttacataaaatatattttctccatgatgaaagctcagattg

SEQ ID NO: 598561 - DNA, 352 bp, Homo sapiens
cggcaccccggcaactgcttcggatggtgctggaggccattatcccaaactaacgcaggtacagaaaaccaaacatagtgtgttctcacttataagtaggaggtaaatactcagttacatagatacaaagaagggagcaacagacactggggcctccttgaaagtggcggttgggaggaaggtgaggacagaaaactacctatcaggtactatgcttattagtgattaattaatctgtactccacacctctgtgacacacaattttcctatataagaaacctgcacatgtactcttgaatgtaaaataaattttaaaaaaaagaaaagcacaggcatccgaagcagttgccg

SEQ ID NO: 598562 - DNA, 566 bp, Homo sapiens
ctagagcaccctgtagagagagactggataatcagcaattttctcagagcaccagtattggcataaaaaataatatctctgcttttcttgtgatgggagttgtgaggtttaatagaatacatttctccctaagtagtttcagtaagaattaggttggaggacattctgagcttatttatgtgttacaaaaaaactctctgacattcttaatgaaaaagcgggtaaagccaaaactaaaatgtgcaacaagacaagtgatagtcttttgtgcatgaaattttgtgtccagtcttctcactgctcttttcagggatagtatccaaagccaccaagaaagcctttctgttctcaggtccagcaatgagtttatgcgctatgcagtgaatgtagctctgcagaaagtacagcagctaaaggaaaccagggcatgtgagtaggcctgatagggcaaaaacccgaaaatatcttttcagaacctctgtgacataaactcgagtcttgctatggagatacacttcaattcctacttcagtggaagagtccggaaagaaaagagaagggaagag

SEQ ID NO: 598563 - DNA, 383 bp, Homo sapiens
  misc_feature (383)..(383): n is a, c, g, or t
agttatatttttttaactcttatatcaggttcaagggtacatgtgcaggtttgttatataggtaaattgtgtgtcttgtgggtttggggtttggtgtacagattatattaccacccagtaataagcatagtacctaataggtaggttttttggtttggtttggtttggtttggtttgtgaccgagtcttgctctgtcgcccaagctggattgcaatggtgcgaacttggttcactgtaaccttcggcttccaggtttgagggattcttctggctcaagcttcctattagctggaattacaggcatgtgccaccatgctgggctttttggattttcagtagagaccgagtttcatcatgttggccacgctgtgcttgcccctgn

SEQ ID NO: 598564 - DNA, 441 bp, Homo sapiens
tttttttggggaaggccccccccaaaaatcctccctttaaaaggggcccccccttttttggtgaacaaccccccccccccaaaaaaaaaggggggggaggcggggttttttgggggggccccttaaaaaaaaacccttcaaaaaaaaaaaagccgccaaaaaaaaaacccccccccccaaaaatttttaaaaaaatttttctttaaaaaaaaagccgccccccccgtgtgttccaagagggggggggggttttttttgtaaaaaacacccccccccggttttccccccccccccccccccctttgtcaaaagaccccgggaaatttcccaaaaaaaaaaaattttcaatttgggcccccccccaagttttaaaaacggtccccccatttcaatcccaaagccccgaaaattggaagcctccccaggcttaatttctccaac

SEQ ID NO: 598565 - DNA, 162 bp, Homo sapiens
cccctattcaggcaggacgatcctgtctgcagtcacatctttgtgggggcctgctgacccacaagctttggttctctcagtacttgttacccagcttctcaacatccaggcccaattgccctgcctggagttcccccgtggctctaggacactctaacaagc

SEQ ID NO: 598566 - DNA, 925 bp, Homo sapiens
  misc_feature (1)..(1): n is a, c, g, or t
ngtcaccttttgtttaaaaacgcccttgcttgttgttgtaaaataaaaatgtagcggtgtttgaccttcttttaagcaccccttcgacgccctcattcgtccgaccacaacgacccttcttctatttctgggggtgcaaagatatttaattttttgccccgccgctcgctcttgtggaaaaaaaaaatttttcctctctgtgtaattcgccacgcgctctatcaaaaacttgtgtagtattgtctaataaatttcccgccccatatattttttctatgaagatcatatccaccacacctggtgttataaactcctgcgcgcgcccccttctgtagaggaaggtgtccaccccccgctccagccccctctttttaataatcacccacacaaaattttctggtgggttcccctcccccgctcctctctcgttttttaggagaaaataaacagtcaccacagaagaaattgtggtgcgtacactcattttgtttgttttaaacacatagaagagagtcaccccacgatgtctgtctctctctctccccccactgtgggaggaaaataaattattttctcccccccccctctcctttttgtacccctcctctcctattctatctctataaggtatagagaaaaattccatctacataaggggggaatatctttcgccaccactagaagagagtcctcttcattatatgaaagcatcataatggtggtgtccaccccgttcccccctcaatcatcaatcgtagttgcgcgcaacgccgcatacccacgaacataggaaaggggtcttcttaacccaccccccccccaataattagttgttttttctggttttgggaaaaccccacggggaaaaaaaaattttttaaaattttttaaagggccaaatttttaaaaccccactggtttttta

SEQ ID NO: 598567 - DNA, 111 bp, Homo sapiens
ctgggtatactatgaagaagattattacaaatgcatgggctgtgacgatacacgttgtagatgtggtcgttaccctgaagattgttggtggcccatgaagattgttggctg

SEQ ID NO: 598568 - DNA, 473 bp, Homo sapiens
  misc_feature (1)..(1): n is a, c, g, or t
  misc_feature (141)..(141): n is a, c, g, or t
  misc_feature (159)..(159): n is a, c, g, or t
  misc_feature (197)..(197): n is a, c, g, or t
  misc_feature (225)..(226): n is a, c, g, or t
  misc_feature (256)..(256): n is a, c, g, or t
  misc_feature (260)..(260): n is a, c, g, or t
  misc_feature (325)..(325): n is a, c, g, or t
  misc_feature (332)..(332): n is a, c, g, or t
  misc_feature (334)..(335): n is a, c, g, or t
  misc_feature (344)..(344): n is a, c, g, or t
  misc_feature (386)..(386): n is a, c, g, or t
  misc_feature (473)..(473): n is a, c, g, or t
ntgccagcgctgctcttgtctggagggccaagcactgtcatgaagtcagtaacgacagcccagacaattggaacggttaactttacgtacaaaaacaaaattcaaatgatttccttcagaggtggagttttcttaggttcncatttataaattagtctncacagtcaatcctgtttgggaacaagaaataaggaacncatttctggtttcctacacatgacccanntgtacattaattctcgacttccgtggtccnttgnctccagtctgtgaagggtgagtggctaccatttttggatcacctactttttgcatcagctaactngcatatntnntttcaaacntctgtctgtcagcaatcctgaaggtagatgacaggtactatnaatctcattgtacagatgaggaaatgaaggctcagaacggctaagaaacttgcccaagcccaaagtcacgccaggaagtaaaaaaan

SEQ ID NO: 598569 - DNA, 131 bp, Homo sapiens
gagtcgttgaggtctccgcgccgctccctgtaccaactcggtggctcgcgcctctggaaagagctttccgccagagatgcttggagagattaagaaccagccggaccagctcctaaccagataccgccagc

SEQ ID NO: 598570 - DNA, 1415 bp, Homo sapiens
  misc_feature (1)..(1): n is a, c, g, or t
  misc_feature (3)..(3): n is a, c, g, or t
  misc_feature (5)..(5): n is a, c, g, or t
  misc_feature (13)..(13): n is a, c, g, or t
  misc_feature (18)..(18): n is a, c, g, or t
  misc_feature (56)..(57): n is a, c, g, or t
  misc_feature (182)..(182): n is a, c, g, or t
  misc_feature (261)..(261): n is a, c, g, or t
  misc_feature (294)..(294): n is a, c, g, or t
  misc_feature (348)..(348): n is a, c, g, or t
  misc_feature (357)..(358): n is a, c, g, or t
  misc_feature (463)..(463): n is a, c, g, or t
  misc_feature (476)..(476): n is a, c, g, or t
  misc_feature (498)..(498): n is a, c, g, or t
  misc_feature (503)..(503): n is a, c, g, or t
  misc_feature (546)..(547): n is a, c, g, or t
  misc_feature (566)..(566): n is a, c, g, or t
  misc_feature (591)..(591): n is a, c, g, or t
  misc_feature (620)..(620): n is a, c, g, or t
  misc_feature (697)..(697): n is a, c, g, or t
  misc_feature (702)..(702): n is a, c, g, or t
  misc_feature (797)..(797): n is a, c, g, or t
  misc_feature (1185)..(1185): n is a, c, g, or t
  misc_feature (1227)..(1227): n is a, c, g, or t
  misc_feature (1292)..(1292): n is a, c, g, or t
  misc_feature (1332)..(1332): n is a, c, g, or t
  misc_feature (1334)..(1334): n is a, c, g, or t
  misc_feature (1360)..(1360): n is a, c, g, or t
  misc_feature (1415)..(1415): n is a, c, g, or t
ngngngcacctcntcggngcggaaacttcgcgcgagccgacgccccccgctttacnncgcggcggaatgcccacgccgagatataatcagagtctcgtgagagaatagagagtataaagtgatgtttgtatggttccatacggtggttacgaaaggcagtcgcgccccatgggcccacgctncgcagagaaaatacacacaacaacgacactgtgcaggggaggcgagagaatgagtaggcgcgatcagcgcaacgcgcancaccacgatacacacaaaacgccacagtgccgngccgtacccgacgctaacgactgcatgagatacataagattatagagtgttagntgtagtagnnatttgtaagatgtcggcgagacgcgagcgatgggagtagcgagctactgacgaggccgcgtgcgcgtcgacttatttaatcagacgcgatgcgcgtgagcagcangcggcgcgcgtcntcgtcttcaccggggagaagangagantagcatgtccttacgacgagagagaaatcatataataacaaannagaatatatacaatataanagacagacaatacggcagcttgtanttacaagaacagaatatctcatgcagcgngtatgagtagagagtgttacgcgcgcggtcctcgtcagccatctgtctcgcctattgcatcgtgcgtgcggcatctngtctncgactcctatttcgccgcactcgagagctccgcggagcctgtcccatagcccatcgtcggtcccatgagcgatcgtgatatgtcaccataggcgngacactcgcccaccgtactcactgtccattctatcctcctcttgctgtatcacgcaagcacgaagacttaagctacatgatgagtatataacatgaagagaagcgaggagagaatgagtaagagtcggcgactcggagccagctaggtagttgatcgccatcacaccaacacgcctaaccaggtactctgattactaagtataaggaacgccctgaggtggaccaagagagcacgataaagacaccaatagacactaagtacagcgcggggaagacagcagagtgcaagttgcgcggtactcaccgtcgtcacaccatcagttcaagaaacgcgctgctctgcgcgcgcgtgatcgtacgttgagatagcgacacatgtagctggtgngtcgggagtggcgtctcacacacgcttattacaccacaccanagataaacgagtgatgcacctagcgtactcaaacaaacgtaatcgatctgacctccagtgagcgngcgactcccgcacacacgactcgcgcgacacgacgtaatncnacacagtagcatcagcgctgacacancatcgactacctgacaccactttcagcagtctacctacgagactcctaacgcggn

SEQ ID NO: 598571 - DNA, 399 bp, Homo sapiens
  misc_feature (49)..(49): n is a, c, g, or t
  misc_feature (140)..(140): n is a, c, g, or t
  misc_feature (174)..(174): n is a, c, g, or t
ccttttttggtgctagacttttaaccccttttttccctccctcctgtgngggggttttttgatctcttcggactaaaattttttatcccggagtgtatctaatcggttctgttctgtcctatccaccacccccaccccanctcttccggtgtgctgtagccccccgctgttagncgccgccgctgctgctgctcgccccgtcgttacaccaacccgaggctctttgtttcccctcttggatctgttgagtttctttgttgaagaagccagcatggtgccccttctccaagaccgcagcgaagggagaagccgccgcgcagagccctgggcacggcgctgtggtctcgtcgcctcccaaagccaattgacaggagaattgccacgtgaaggtaacacggc

SEQ ID NO: 598572 - DNA, 286 bp, Homo sapiens
gatactgacggagggttactttattaatatattgtatgtttaagacagggtcttactctgtcacccaggctggagtgcagtgatgcaatcacggctcactgtagccccaaactcctggcctcgagtgatcttcttgcctcagcacccccaaatagctgggactatacatgcatgccaccctgctagctaatttatagaggaggtctctctatgttgcacaggttggtctggtcttgaacttctgacctcaagtgaaactcctgctttggattcccaaagtgctgag

SEQ ID NO: 598573 - DNA, 360 bp, Homo sapiens
ccacgatcaaagaggacaatgcatcaagcacgcagcaaatgcagctcaaaacgcttagcctagccatcatcgcccgcagctgggaaacagcagtgattagcctttagcaataaacgaaagtttatcgaagctatactaaccccagggctggtcaatttcgtgccagccaccgaggtcacacgattaacccaagtcaatagaagccggcgtaaagagtgttgaagatcaccccgctccccaataaagctaagaactcacctgagtcgtaaaaaactccagttgacacaaaatagactacgaaagtggctttaacatatctgaacacacaatagctaagacccaaactgggattagatagcc

SEQ ID NO: 598574 - DNA, 206 bp, Homo sapiens
taggtgtaaccgtttgcaggatagtgacacatcaaggcttcgttgtgcttgacctcctagggtcaagttatcttcttgcttctggctcctgagtagctgggacctcagtgtgatccacctgccttggccctcaaagtgctgggattacaggcatgatgcataatgctttttaaccaatcaaatgttgccttttccaaggctaccta

SEQ ID NO: 598575 - DNA, 516 bp, Homo sapiens
tttaaatactacccagttcacagggttgttgtgaggatccaaaataatgtatgtattaatgaaatgcctggtgcctatgctgcaaccatggacaccatcactaaatactaagaaggtgaaattccacgaagcttgctgaaatccctggatgggggtactgtcaagatgaagttataataagaatgttcctagacagctatgaattgcagccattcttcccttttccagaatatgtaaagaatgtttgtgtgcccacggaggagccgcatctagcctttgaggctgttcagctcatctttcccaacccgaggattttcctttcctctggactcctcccttcattctcccccactggacatctgttcactgcctcgccaaccaaggggggaaaacattctttgggaactgaagctgaggcaccaccaagagtcaaggcagctatgagatgtttattgttcacagagaatatgtggtgctggctgaccacagaacctgccagggttgggattgccaagg

SEQ ID NO: 598576 - DNA, 345 bp, Homo sapiens
aaaatggagtctcaactctgttacccaggctggagtgcaatggtgtgatcttgtctcactgcaacctccgactcccgggttcaagcaattaccaagtagctgggattacaggcaccagccaccacgcccggctaatttttgtatggtgtttcgccaccttggccaggatggtcttaactcctgacctcgtgatccacccaccttggcttcccaaagtgctgggattacaggcgtgagtcactgcacccagccagtcccagcattttgggaggccatggtgtgtggattcctgaggccagaggttcaggactggcctgccaacatggcgaaatcccatcttcacta

SEQ ID NO: 598577 - DNA, 880 bp, Homo sapiens
ataggctgatcaaactgttattcggcgcatcctacggaggcgcagatatccttgagcctgtggagtggtcactttgatacctaaggatcggactacaaagtacagagtgaatgttaccgattgtattgctgagaagaatttgggtgctgaaccaaagaaaatgttgtttctgacagtatgtgactcgagtaggcaagtgctgttagaggaagtgagttaggtgtgcacgttagactgtggtggggagaccagtgtaacgcgggattactagatgatgaaagacttactacaggctgatattatccttcagtgaattataattgaggttcctcaagtgtagagaagggtgtgaaggtgcagagacgatgtgttaccaacatgagttgttcgctgatgtgttctaggtcgattgatacctggtagacaaggtacgttacttgaaataaacatattgtagctagaatatgtatgcgggtatggtatatagtgtgtatgctcggatgaaacttccataggtccatgggtgacagaagtctcagttggagggaaactaaaatgatgtagagaatgttgatatgtgaattggtttgacatcatactctaagccttgaggtgagtggcagtgtgtggtcgggagaagaaatggttatatacctattttatgtgctagggttgatcacatcgtgtcttaaaatggcagcaggtgggaaatattcagaagcttggtcttttaaaagtgaagtttccaagagggttttaaggaaagaaaatgagtggctgggtttaaactttaaacggggacattgggtttatttaaaaacagggcctctcggtaaacaaggggaaaacccggtgcacggttataagaggttggacaagg

SEQ ID NO: 598578 - DNA, 1151 bp, Homo sapiens
gaaattaattcccattttagagtaagactggaggcagagatggtcacccagatgaaaatgaataacccaactgtgtctttcttctggtgcctccacgtggaacgtgggctgaccaaaatacttctaaagagcattggcactttgttctttaaataagacggaggaggatgaggagagagacgacaccaaaattcactcacagaagtgaacatacaattctacacattcggtaaaactttgtctatcagtatgaaatacatcagtcagtagtctcaatccataaacagagtatctcttgtacaaatgtctgctctctgacgtgattcactatggatgcgtactgaaacatatacctgttaaagtacgcttgacgtgacttgcaactatcggctcactgcttcattataatactcatcgtcatgtcacagtgtacgcagacctattcaggattaaaaacagaagacttcgttcttctacttataccatagtatacgatacattactgaccgagagtctccaagaacatccttgtcgtgcccaaggggcattaagaagataacaagaggattgaatgacatccgtaccggcgtttacatggcaagaccctgcatgcaccataccatgagggatatccaaagcgacaatatcttatcagtggacccttcgaagaccatatcctagcacgatatgcttgggagaactctgacaagggcaacacaagaacacagaccaacgaaccttggggactcaaatttactctcaggaaaaatgttcattaaaggtaagacaccaaccgagaggacatttttccgacaccatgagagtgacgccacggggcactccagataaagcgtacgaaccatccctgggaaccccatcaaggggagacatatacaccaacaaagcgatgaacatgtgacacgcaaatcatgaacagcgaacaagattgacagccccacacagcaaaatgaaccctggcggacaccaatcgaaaacacataccatctagatccaacacgccaattgcacagtctaagcaacgaaaacagggggtcacaaggaaccacaactagcaaacggaacacgaaatcagcagtcaagcagacaatacacatggaacaacacaaaatgcccgtcacaacacacaacca

SEQ ID NO: 598579 - DNA, 220 bp, Homo sapiens
  misc_feature (171)..(171): n is a, c, g, or t
accctagaggatcccggcactctagtcatggcaaatgctgtaccaacacaaatggttccccagtttttcatcttgcactggcagactgagtggtttggaatgccaagcatgtggtgtttggcaaagtgaaagaaggcatgaatattgttggaggccatgggagcgctttgnggtcccaggaatggccagacccagcaagaagatccaccattgctgacta

SEQ ID NO: 598580 - DNA, 325 bp, Homo sapiens
  misc_feature (17)..(17): n is a, c, g, or t
  misc_feature (56)..(56): n is a, c, g, or t
  misc_feature (127)..(127): n is a, c, g, or t
  misc_feature (255)..(255): n is a, c, g, or t
  misc_feature (266)..(266): n is a, c, g, or t
  misc_feature (281)..(281): n is a, c, g, or t
ctcagcctcccaaagtnctgagattacaggcatgagccaccatgcccagccatgantttttttttaagacccaacagtatgctgcctacaagagtcacctcacttttaaggacacccatagactganagtgaaaagtttggaaaaagatactccatgcaaatagaaaccaaaagaaagcagggatagctaaacttatatcagacaaaatagactttaagtcaaaaactgtaaaaagagacattatataaatgatnaagagcatcanttcatccaaggaggnttattaacagttatatatggcacccaacattggaaacacctaat

SEQ ID NO: 598581 - DNA, 820 bp, Homo sapiens
gctccttggcggtgctggagcccgggcgcaccccaccgctcccgggactgttgggggctggccgaaccgtcgtcgaagggagccgctcggccacccccgacgttcctcgccccgcccgacgttccctcaagtggccgaaccagccggacgagccaaactcgccgggcctcccggcggcagcaggtggccccgtccttccagggagggccctgcgccccgcggcgctccggagccctctcggccgccccgccaggcggggtgggaggcgggtttggggacggagaggagctgtgccggttggctcagtcttcgcggtgtgagagcagaagcgtcggggcgctgggcgcgaggagttccgggcattgtgcggagctgcgggtgcggccggccgacgccgaggcagtattccagcggctggacgccgaccgtgacggcgccatcaccttccaggagttcgcgcgtggcttcctcgggtccctccgcggggggcggcgccgggactggggtcctctggatcccgcgcccgcgtgtctgaggcggggccggagacacacgacagcgaggaggacgaaggcgacgaggacgcggtgggggctggcactcgtgggccgggagtccggcgggttggaggattcaggcgcgattggggaagaagcaagttcattccagagaagagcagtagtacctgtatcaaaaattaacttgtggagcagattaatcagcatatgactgttaagactttccggagatagattaaggcagaatggaatttgcctggggaaaagccgacagggttgctatgtgcggcagaaacacctca

SEQ ID NO: 598582 - DNA, 1592 bp, Homo sapiens
  misc_feature (1592)..(1592): n is a, c, g, or t
gcactcgttaaagtctctcttcacccctgccgctcatgtctaagctcagcactctccctaaagagcccgaacagctgacgaagcctcttcactcggagggtctgagctcttgaaacaacctgactgacgagccctgacgcgacgccacttcttgacgcaactggcgcgcacacgcctcacgcgacctgctgctgcgctacactgcaccacgcattccaaaaacacaccacacgcgcgccccagcggcgccctcgcgcgcgcctgactgcactccacactactgacccactgcagcgcacgcgcacgcgctgcgcactgcccgcccaactcacactgccacaggccccacccacccacacggctgcgcactggccacacgcacgctccgctgcgcaaaccccacaacagcacgcaacgcccgccccatcccacccagccacaccaactctcctcaacacacgcaccccacccgctgccccccaccctccacacccctgactgcacacacccacgcccactcactcactgccccgcgcaccgcgccccccctccacacccccacacgcacccaccctggcaccccgccacacccacctcccccccccgtccacgccaacccactccccctccccccgcacacccacgccacactgccgcacccacacacccccgccccaccactcgccactcccgcccaccaccctcccaccacgcaaccctaggcacccccggcaacgcgacacaagccggcggcagcccaacacacgcaacacaacacacgacgcgcagcccctcctccccgcacccccccaccgcccgaccataccaacgaccacagctttggaaaccccggcaaccaacccaacctgccaaccacactacccgcgcaagccgcacaccatcaaccacgacaacctgctgacctaccacaactacacccaccagacaacgcagcacatcgtaacccaccaaaatcagacccctcgcccctcgccaccccctccgcgccacccccacaccacaacccaccattggaccgccacacaccagcctcccaacgcaccagcaccacgcagaccgcccatccacgaccccgccaacaccacacgcaccaccacaacgacacagccaaactgccggcgcccctcacgaacgcagcacacaacccaccactacacacaaaaacacacccaaacacccccaacccggcgcttcaccgcacaccacccaccctgccgccctcccccccgacggcacaccaacacacctcccacaccgcgcccacaggcgacacagccaccaacacaccacacgcagcaacaacagactagacagcaacatcaccaccgcagcatagcacacgcacacacacaccacacagcacccacacacaccacacatacccaccacacacccaaacgcacagcacacacacccgcaccaccaaccccaccacccaaccacgtcagatccacacaccacaacaccagaccaccacacacagcacgacacacaacaacacgaaaacacaaacagacaccacgcactaaacacagcgcaccccaacacaacccatcagcagccacaacaan

SEQ ID NO: 598583 - DNA, 668 bp, Homo sapiens
  misc_feature (10)..(10): n is a, c, g, or t
  misc_feature (91)..(93): n is a, c, g, or t
  misc_feature (105)..(105): n is a, c, g, or t
  misc_feature (112)..(112): n is a, c, g, or t
  misc_feature (177)..(177): n is a, c, g, or t
  misc_feature (196)..(196): n is a, c, g, or t
  misc_feature (211)..(211): n is a, c, g, or t
  misc_feature (275)..(275): n is a, c, g, or t
  misc_feature (295)..(295): n is a, c, g, or t
  misc_feature (299)..(299): n is a, c, g, or t
  misc_feature (350)..(350): n is a, c, g, or t
  misc_feature (365)..(366): n is a, c, g, or t
  misc_feature (479)..(479): n is a, c, g, or t
  misc_feature (561)..(561): n is a, c, g, or t
  misc_feature (565)..(565): n is a, c, g, or t
  misc_feature (598)..(598): n is a, c, g, or t
  misc_feature (646)..(646): n is a, c, g, or t
aagataaaanattaaaaatgcagaggaagaatatggggatcaggttgggtctagggtgtcctcaaacaggctgaggaggttccgaggctcnnncggggggaaggngccccgngggggctctgagttggtgtcgcttaggtccagggcttccctgggtgtgcacctgctcgggggggngggggtgctccccacggtnggggccaggggagcntggggggggagtgaaggccctaggctgtcgtcatcccagttgctggagaggctgctgtccaggngcaaactgcagggtggtganccanggggggtggcatggcgggcccaggggctgtagccagctgggagggtgagcnagcccatgccagggnnagcagagcagggcaagcagggcctgccacagggcccaccctcggctcagggcctccgctgccatgcaccacagcacaccccaggcccgcggctgcctcaacacaggcagtgcnagcagggcctcggccgtggcccgcagcttggggtctggctccagcatcatgacaagggcagaacgcagttcggaagacagancggnagtgaactcagggggcaggtagccctggcgcantggctgcaagccctccccaccgtggggcagctccatgttgcatgccanttacaggatggtgaggcccaga

SEQ ID NO: 598584 - DNA, 122 bp, Homo sapiens
  misc_feature (106)..(106): n is a, c, g, or t
ggctcagtgatctcccgtctcagctcacagcagttgagattaaggcatgtgcaaccacgcctggtaatttttgatttctagtagaaacggggtttcgccatgttgnccaggctggtctcaaa

SEQ ID NO: 598585 - DNA, 1153 bp, Homo sapiens
gtgggctggagccctcgtctgggccggaaaaaaaaagccctccgatccgtcttttagttgcttctcttccttttttctctccggtttctcatcactccaaccagccgcgaccatgcccaggaagaaggcggcggcggcggcctgggaggagccgagctcgggcaacggcactgcccgcgccgggcccaggaaacgcggcggcccggcgggcaggaagcgcgagcggcccgagcgctgcagtagcagcagcggcggcggcagcagcggcgacgaggacggcctggagctcgacggggcccccggcgggggcaagctgcgcggcgcggccggcgacagcaggcaaggcgggcggcgcggccgtggtcatcaccgaacccgagcacaccaaggtagcgcgtcaaacttgaagggtcaacagtgcaaagggcagcttttgattcatggggcaaccaactgggacttgcattggtcgaaacagaagtgcctaaacagcaagctgcttaccgcaatctcggtcagaattgtgggggccccacagatatgggtgcctggcagggggtccgggtgcggacagtggtctcgggctcgctgtgctgcacacagcctcctcatcaacacggcacgcgcacgctgtggcagctgggcgtcgacatgagaagcgccagctgcgacatggtgccaccaagcagagtaaagcacccaacacatcgacggcctacgccaacgagggaacggtctccccaatgcgccgccaccacccttgcgccagccacggaaacggccccgcgaaggactcggcgaacacaaacatggccaccgtcgctgcgcaccgacagatcgcgcacaacaccgcgcaacgaacgtcaggccagcgaccccaatgcacggcccaacccacaaacgggctgctagcaacaacccgacctggactccacatatgcgctgggacactcgccgcactcagccgcccggctcagccgcggacacccggcacgtgctctctaagcccgacactcatcacaggtaccgtggtcaccgggccaaatgcgctcacaccacaccacggcacaccctgctgatcacacaccagcagcatacaagcccacacgatgactacaaaaccaccagccacctaccgcaactccaccaccct

SEQ ID NO: 598586 - DNA, 892 bp, Homo sapiens
ggagctaaaaaacacagcatgagaacttcatgaagcatacacaagaatcaatagccgaatcgaccaagtggaagaagggatatcagtttgaagaccacgttgctgaaataaggcatgcagacaagagtagagataaaagaatgaaaaggaatgaacaaaacctccaagaaatatgggacttcagcgtttaaaaagaccaaatctatgattaactggaatacctgaaggagatggggagaacagaaagaagctggaaaacacacttcaggataatatccaggagaacctccccaacttaacaagacaggccaacatgcaaattcaggaaatacagagaacaccactaagatactccacaagatcaacccaaagacacataatcatcagattctccaaggacaaaatgaaggaaaaagtattaaggacagccagagagaaaggccaggtcacctacaaaggaagcccgttggaataatagcgtaactctcagcagaaaccctacaagccagaagagattgggggccaatattcaacattcttcaaagaaacataattttaaacgcagaatttcatatctagccaaactaaacttcataagcaaaggagatcctttccagagaagcaaatgctgagggatttgttaccaccaggactgccttgcaaagagctcctgaaaagaagcactaaatacggaaagggaaaaaccggtatcagccactgacaaaaactccaaatgttaaggaccaatgacactatcaagaaactggatcaataagtgttgcaaattaccaggtagcatcatgatgaccggatcaattcaacataatatattgacttactgtcatgggtaaatgcccaataaaacgcgattggcaattaataaatttaggaa

SEQ ID NO: 598587 - DNA, 1456 bp, Homo sapiens
cccgtccggatatccgttgagttgttgcctcgttgcgccctcgcgtggttttccgttctaagttatatgtttctgtggcgagagagtttttggtggggattgtcctcccccttgtaggtatgtggtgtcggaatactcttggtgggagattttcttgttgtgtagatacccccccgctgtgtcctccacgtgttgtgtggtattatgtgtccccccctggtgggagtttgtcgtcccactttgtggtcccaccagttatgtgtgcaaccactactgttggtggggggggacatctgtttttttttggtagatcgatcgtcccgcgtctcgctgtggggggttcccattgtggtgccattcagtttggggtggtgtgtcgcatcttatgcttccctccagcgccgcggtgttgcactctgtggggcccacctgggggtccccccctggtgtgccacagggggggcccctgcttgttttgtcacccctcacatgggggtggccaccaacgtggtgctgtttcccgtatgttgtgcttgtgagataggcccagctggtctcatatcgccgcatttgtgtccccgtctcccacccatggggccccccccttctcgggagctctgctcgtgtgcacactcacggctgatatgggtgtcctctcctctctttgtggggtgtctgttgtctctccacagcgcgctctctctctcttgtgggataccccacagcagatgttgttgagagcacacgcgtgtgagaagagaatctcacaggtgcgcgcacagtctccgctctgccaccacgcgggtcccctgtctccccatagagagagagagtgtgacacacagtgtctcgctgtagtcccgctctcccaccgtgtggctgtctctctcccactcgtgtggcgcacacgcacacgcccgtcgtcaccacagtgtctctctctgattactgtgtggtgtgtgccccacaatcctctcgctcttttgttccacagagagtgtgttgtgtgatacgtgtcacatagctccacattgtcacaagatattgtgtattctcggtgtctgtggcacacactgtaatatagacacacaccctcagagtagaatatgaggcgccgcgggctcaataatgtgataagattattttaataacaccagattctctgttgtgttgtgccacctctcctgtataactcccgaccctgccatcacccgtggtccacaggccaggggtgatacatccatccatatttcggaggacatcaatggcacctagatacaccagatatttgtaagtacttatccccatacaccacaaccccctttgtaccgttgtacgacccccaagagataaatgtgtttttaacccccttccctttctgtggcgtcttacatttggaattttcccctgtgtaagacctttggactgagaattgggaaaacccaattactccccc

SEQ ID NO: 598588 - DNA, 558 bp, Homo sapiens
atctagaggatcccgtagtagctatatgcttctcatgaacattttaaaaccctgacttggcaggcatggtggctcatgcctgtaatcccagaaccttgggaggccaaggtgggtggatcacctgaggtcagaagttcaagaccagcctgctcaatgtggcaaaatcccctctctattaaaaacacaaaaaaattagccaggcctggtggcaggagcctgtaatcccagctagtcggaaggctgaggcaaaggaattgcttgaacctgggaggtggaggttgcagtgagccgagatggagccactacactccagcctgggcgacaagagcaaaactctgtctcaaaaaaaaaaacacaccttgacctttatgactctgagctccggtggtccttctacatatacgacaattctcttccatgggattctccaaattcaggtttctccacagttgtgtgccaaatttcctccttcaaaaggtccacttgggttccataatcctgcttcttttccaccttgagcttttagaacctctctcattctagctgccaataatcaaa

SEQ ID NO: 598589 - DNA, 480 bp, Homo sapiens
gtaagggggtgtatgcaggactctgactgcttccttgggtgcagttcctgcagcatggccaggcattctcagttttctgtttggttctcagagagttaatcacagaatagatgaagtacgtatcttttgcaggacttaaccccctttatagagtatgttagcaaaattggggaatgggacacttagctgttgctctggctagcctgcctttaaaaagagatactgaagataaatttttacttaacccataaaggtggtaagaaagattttttaaagctttggagttttatatgagagaaatgcttggctgtcctggggaccattgttactctgcctggttctagtagagaatccgaagttggtgtggtttagagtgtaacaatttaacatatgttaataggagagtttcctgaatctctttgtgacagtttagaaactggtagtttctgccggatttggtgactcctgtcataatcgcag

SEQ ID NO: 598590 - DNA, 953 bp, Homo sapiens
  misc_feature (8)..(8): n is a, c, g, or t
  misc_feature (105)..(105): n is a, c, g, or t
  misc_feature (129)..(129): n is a, c, g, or t
  misc_feature (175)..(175): n is a, c, g, or t
  misc_feature (181)..(181): n is a, c, g, or t
  misc_feature (321)..(322): n is a, c, g, or t
  misc_feature (330)..(330): n is a, c, g, or t
  misc_feature (349)..(351): n is a, c, g, or t
  misc_feature (355)..(355): n is a, c, g, or t
  misc_feature (357)..(358): n is a, c, g, or t
  misc_feature (360)..(360): n is a, c, g, or t
  misc_feature (364)..(365): n is a, c, g, or t
  misc_feature (370)..(370): n is a, c, g, or t
  misc_feature (376)..(376): n is a, c, g, or t
  misc_feature (380)..(381): n is a, c, g, or t
  misc_feature (383)..(383): n is a, c, g, or t
  misc_feature (385)..(385): n is a, c, g, or t
  misc_feature (392)..(392): n is a, c, g, or t
  misc_feature (412)..(412): n is a, c, g, or t
  misc_feature (418)..(418): n is a, c, g, or t
  misc_feature (427)..(427): n is a, c, g, or t
  misc_feature (449)..(449): n is a, c, g, or t
  misc_feature (453)..(453): n is a, c, g, or t
  misc_feature (469)..(469): n is a, c, g, or t
  misc_feature (487)..(487): n is a, c, g, or t
  misc_feature (492)..(492): n is a, c, g, or t
  misc_feature (504)..(504): n is a, c, g, or t
  misc_feature (511)..(511): n is a, c, g, or t
  misc_feature (530)..(530): n is a, c, g, or t
  misc_feature (540)..(540): n is a, c, g, or t
  misc_feature (556)..(556): n is a, c, g, or t
ttgtacangttaaaaaaatggtgtgaggtttatggtttccttgaggttacagttttgtggctgctcttagtgtatttcagaaaaaagcagatggacgaagaccgnccttacagacgtgggtttctacantgaacgcaaggactgactacgctgtatttcacaaccgagccctagngccagncagcaccctacgctcaggaagcggattttgcacgcacactactgcattcatacagagttcactgaagtctattaccaagtgtcttttatgaataaacaatacaaagtccaattttgatggctgctataaaatacttaggnntctctgcnatactttactacaaatacnnntgcncnngnggtnnggggnatgggngtgnngnantgggtanaggttctattctttgtgganatttcngcctaggantgttattcccggtacagatgtncacngtcaaaaagggttatngagctgtttgaagagttnttgangtgttctggatnagtgatntgcctgtgaactttagttncgctgaaganagttttctcagttttnatgactgtgaagtgtgataatggaacgcatccttgatcttaggtgctgctgacctactttcccaaagcaaaatgttttaaaattcaaggcaatctggaacggggactatttccaaacttccttaggcagcacttttcagtgacttccccgcacgctgctttccctgccacgaagcgcttggtctgcttactaaagccacgtatcctgattttacagaaacgtgggcaggtccagcagtgccactggagagctcccagagaagcccactcagaaggaagtgctcagaccaccctcgagccagagcggctggaagctgggactggtcccatgaggcagaaggagcaccagcgcctgctgggtggtgtggggagagcctcagctgactctggacacactg

SEQ ID NO: 598591 - DNA, 898 bp, Homo sapiens
gctcctttctccctctctttaacctttctgccgtcgcgttagcacctcgctgctccagcctctggggcgcattccaaccttccagccatgcgacctgcggcagtaaaaaaaatcactttctatttgctttgcaccatacatatcccttgacggcgagcacaactcaacttagcttttacccatgagtggccatcgtgcacttccaggctggtcatgtgtggcaaccagatcggtgcctcgttctgtgaggtgatcagtgatgaacatggtatcgagcccagcggacacctaccacggggacatgcgacctgcagctgagaccgtatcatcatgtgtactacacctagaacgccacaggtggaaaaatatgtacctcgatagccaatccatggtggatctagaacactgggaaccactggacgtctgatcgactcaggtccatttataggcacagaatctttagacccaagacaaaactttgtatccaaggtcacgtcatgggtgcacggtaaccacaatctcgggccacaagggccacatacaacacaagggcagccgaacgctggttgcattgctagtcctaggactgtcgcgtcacggacaggacggcagaagagcttgtgacatgccttgcaagggactaaccagacatgacccactccacatggtgctggtgaacaacaggtctcatggccacattggcgcgagatccacactttcattccagccacagaatccagcagaagcggaatacactcctgaatccgccagtcaatggaactacacctatccgaggtaggcaagccattcagacccaaaagacgtctggacacacgtggatccgaagcccataacaaatagacacccaatctgcggtccatacaaggggacacagacc

SEQ ID NO: 598592 - DNA, 553 bp, Homo sapiens
  misc_feature (20)..(20): n is a, c, g, or t
  misc_feature (47)..(47): n is a, c, g, or t
  misc_feature (133)..(133): n is a, c, g, or t
  misc_feature (183)..(183): n is a, c, g, or t
  misc_feature (226)..(226): n is a, c, g, or t
  misc_feature (268)..(268): n is a, c, g, or t
  misc_feature (307)..(307): n is a, c, g, or t
  misc_feature (311)..(312): n is a, c, g, or t
  misc_feature (337)..(337): n is a, c, g, or t
  misc_feature (526)..(526): n is a, c, g, or t
gattatttttcagattgttntaatccagtgtggccgattcctcatcngattcaggctgtccagtcaggccccctccccattttgggacctggagccttcatttatgaagagattctccatcctatgaaatggnatcctcatttgtaaatcttttttcttcccattttcaccaaagctgtaaangaaataatccatctcaaaccttacccttttttctctggagtcnagtggggtctttcctcgctccatcttacacagaccctgagcntggaagcctcaacctggttttgttcccctgtttgaaatnttgnnatctcccctccccatgaaagaaaanccaagaaccagaggcgtagactgactgaagacacaactcctggctttctgaagctatggacttggattggattgctgggggtttgtagagaaaggtgacaaatttcagtacctctggcatgctgtcccaggaaactagggctcccactaacttatgaggtttttaaacacattgaaaatgacatgacantaaaataaatttggatttgctcataaa

SEQ ID NO: 598593 - DNA, 150 bp, Homo sapiens
gacaatagttccagttcttcatcacgacagtcaatgacagcctggatagatggcaagcatgtggtgttggcacagtctagagggcatggaggtggtgcggaagaactgggagccgttgtcaaccctgagggcctgttgtcaaccccgagg

SEQ ID NO: 598594 - DNA, 900 bp, Homo sapiens
tgatcaccatgcgctgctgcactgccctgggacctgccatgggctccctgcgcctggcctgcactgagctgattcatggacgctggctggctgcgcctgggcctgtcgcctgcagccgtgtggcctgccgctgtgggtgctgcccctgagtgggcctggctggtggctctgccagtgactggtggtggccatgccctggtggccctgggccgcggtctcctgtgcccctgaggggccgggcgagccgcgccagttcatctgcaacgagtgtggcaagagcttcacctggtggtcgtctgctgaacatccaccagcgcatccacactggcgagcgcccctatgcgtgccccgagtgcgtgcgccgcttcagccagaagcccaacttgacgcgggacctgcgcaaacacacaggcgagcgcccgaaccctgaccgcactgtggacgcggcttccgccagaagcagaactgctcaagcaccatgtgcacgcacctgcccggcgcccaggctgagcccatgacccagcatgcggtaagagctgacgaaggccgagccgcgctgagcgcccaccagcgcgcacaggatgtcgctgagccgacgtccgtgccggggaaccgggcgaccagacgcaggacgaggacatcccagggattggacgagaggccgaggagatccaaaggtacccggggcaccgggacgcgctgtgagtgcccggggacaagcggacctcgactgggacaatggatgagacagggcaaagttcaactttgaaagcgaagttcgggaagagaattctcagaagggagtcaggagacaaacaataacacaggaattcaaaaacgggttaaacgggcctaacacgtgcaccgagatgcgagcgacggataaagcagaaagaccaa

SEQ ID NO: 598595 - DNA, 111 bp, Homo sapiens
agagcttgtggcacacctgtgcttcagttgacaatctgtaaagctctgttcttctggtggcagctcatgactgagacactttgagtggctctatagagaaactctgtctag

SEQ ID NO: 598596 - DNA, 370 bp, Homo sapiens
cgccccgccctctttttgtgttcccggcttcccaaggatcttttagaccccttttctggggaggacctccacaagcttattgacttcctttagctgaagagaaatccgccgggggacgacttatgggcgttcttgaacttgggaagaggggccccccccccccgctccggggggttctcatcagccgcaaattccttccgaccctgatgcgcgtgggcccagcagtttggacatcagccccttttttttttcatttacattcccctgggggaaaaaacgggggggcttttcttctttttaaaataacataataaattgatctttaacatagggaaaccctacttttcttattataaaattctttttttta

SEQ ID NO: 598597 - DNA, 270 bp, Homo sapiens
agggacaataaactttaacctgaattccgtgtccatcagattcttgaccgcatcatgctactctaatagtcatcaccaatccctaatgtcacctaatgaaggccacaatcactgcgtaaggccggcgggtcctgtgactgggaaaacacgagacctttgttcacttgtttatctgctgaccttccctccactattgtcccatgaccctgccaaatccccctctgtgagaaacacccaagaattatcaataaaaaaataaataagtatttg

SEQ ID NO: 598598 - DNA, 146 bp, Homo sapiens
  misc_feature (142)..(142): n is a, c, g, or t
tgagccatcttatctaggaatgatgggaaccttcccattggaagaccatctggaaaccatatggaatccaacttttcagatgcctgccaaggaccaaccttacaagcagatctttctaaggatagaagtcttaagttgctancacc

SEQ ID NO: 598599 - DNA, 180 bp, Homo sapiens
cccgagagcaaagcattgcttgaggttgcccagagacttatttttgagctcgcgtgtggactgagaggtcacgtagtccttcctgaaaccactaagaggaaaaatgtctgtgacactgcatacagatgttgctgctgttacaagaaaaggcttctgcaagaggacacccaagacatgtga

SEQ ID NO: 598600 - DNA, 160 bp, Homo sapiens
agccccaaagatgggccttgtctttcccacataagttggtcctccgtttgccttttctctccagccctcaaaaagcgtaggctgcaacaagaccagtgggttcttgcaactctgtaaggggcagccaggccggccccaataaagcccttgaattctttga

SEQ ID NO: 598601 - DNA, 215 bp, Homo sapiens
gtcgacctggtattgtctagttctctctctgtctagttccctctctctctctaaccctctctctctttaccccccccctctctctctctctctctgtctctctctctttaccccctctctctctctctccctctctctttacctctctctctctatctctctttaaccctctcttcctctctctctctatctctctgtccctctttaaccttctc

SEQ ID NO: 598602 - DNA, 686 bp, Homo sapiens
cagcgggcctggccacctgctggtgccctggaggctctgagccccgtgtggctgccctgggcccactgcggaacgacttggggcgagatgcgagccacccctctgtgctgctcctgctgggttccctgtccaggaagaagctggttgtgagtttggatgacaagcttagatacctgatgctgtccctgtccatgaaactgagctcgaagtgggccccagcccagactgcccccctgcctgttgcccctgatgcccacctactgctccagatctgtgcaactgctgtgtgccacttgctcccgtcttggtgccctatgtcctcctggatgccctgagtgatgggctgggctgtgtgcctaccaggccctgcactgccctacatggcacttgatgtatacctgcaatggtgtaccccctgtccatggaatgccctggccgtgctggatccctattgcgcggttgcccccgcacaatgcatgttgctcggcccactgaggtcctaggctggtacccagctcctctacgcctttttcactcggacccatggggacatgctcagccttggtgcgaagccgccaccgtatccctgatcctgaggctgccgtgctcttccgccagatggccactgccctttgcgcctgtcccagcgcggtctggtctgcgtgatctcgagctgtgtcgcttgc

SEQ ID NO: 598603 - DNA, 379 bp, Homo sapiens
tgtctgctgtcgctaccaacacttacattccttaccctcctctgcccttgcccccttggcgtataacattggatttagcataagtagaatgtgcacttccctttgtcctttagccctggcagggacagaggaactactctaccaggaggtggcaaagggtgagggggttgcaggtggaaggcaggtgggtgagtccatttatctcattcagcgtgaatgcaaataggctatcctatttgagactccagaatgttagagtcacctgggaaagctttggcagagccacggcagtcgtgattcgggtttaactgttctgggcatggcctctggcgttgcacattttttacatcagattcttctgtgaagctggggttgaaaa

SEQ ID NO: 598604 - DNA, 320 bp, Homo sapiens
ggggtttgttggtgaggtctagaatgtctgggatctcttggagtatcggctactagtagaggaatgggagatctttctgtggaagggggaacgtttgcctgattaaagaggctgggtggctgagaggatgggctgggcgagttctagtcgtaaggtctcctttacatgtttgcctcagagcaatgggggtcactcgacctccgcagggacaacataaaagcctcattgacacgagaaaacaccctcatgttcaatacacctatcccccattctcctcctatccctcaacccggacatcattaccagttttcactctaaag

SEQ ID NO: 598605 - DNA, 365 bp, Homo sapiens
gactgcatcaacgcgcgtggcaggtctctcagacttgcctcattttcaacgagcatcgtagataaaaggagggcaggtcaggtgttgaagtagggacagcccttctgctggggttagcctacatgtatttctcataagtgacgggggccttgtgtatatgggaggaggtgaagcctccttatatcgctgggtccaggtccacaccctccatgcagcctgtccgtgctggccttgcttgtcaactggccggggtgtgttggtcggctcacacctgcccgtgcctcttcccccgtgctgtccatgtctgcggtgttggatgcagtcagatggcgtcagagatgcagtcagcggcgtcaggatgcagt

SEQ ID NO: 598606 - DNA, 281 bp, Homo sapiens
attctttaaaaaaaggtttatttttttgggccccctgctaatcaagtgggggaaccagtggaacaacgggaaacctttgctagtttttcaaaatgccccctaaaaacgcggctcaaaaagaaacccagggggccggagttgtttttgaccccctgatttttactccccccaggaaaaaagtttaggaaaaaccagctttttctgttttttaaaaaatacaggttccccccggccagtttacaaagaaagcctgggcccaaaaaagggttttccccccttga

SEQ ID NO: 598607 - DNA, 288 bp, Homo sapiens
gggggtgggtttgtggggatccccccccttcccaagtgggggccccccccccccccccttttttccccccccgggggggagggaggggccccccatttggcccccccccaaggcccaaaaggggggggcctttttcccgggggttggggaaaattttttttcccgggcgccccttcccccccaaggggttttttttttggccccccgggcggggcccaaaccccagggggggtttccccccccccaaaaaaaaaaaaaaaaaaagggtttttttttttttttttttta

SEQ ID NO: 598608 - DNA, 140 bp, Homo sapiens
  misc_feature (64)..(64): n is a, c, g, or t
  misc_feature (71)..(71): n is a, c, g, or t
ctagtttaatgaatctgaggggctactataaacaatcccaccctcacacgattttttaccttcnttacttngcccttcattaggcaaccctagcagcactccacctctattctcgcactgtccaagaggcccacctaatc

SEQ ID NO: 598609 - DNA, 1007 bp, Homo sapiens
  misc_feature (305)..(306): n is a, c, g, or t
  misc_feature (313)..(314): n is a, c, g, or t
  misc_feature (624)..(624): n is a, c, g, or t
  misc_feature (654)..(654): n is a, c, g, or t
  misc_feature (659)..(659): n is a, c, g, or t
  misc_feature (665)..(665): n is a, c, g, or t
  misc_feature (671)..(672): n is a, c, g, or t
  misc_feature (679)..(679): n is a, c, g, or t
  misc_feature (695)..(695): n is a, c, g, or t
  misc_feature (703)..(704): n is a, c, g, or t
  misc_feature (822)..(822): n is a, c, g, or t
  misc_feature (833)..(833): n is a, c, g, or t
  misc_feature (840)..(840): n is a, c, g, or t
  misc_feature (842)..(842): n is a, c, g, or t
  misc_feature (844)..(844): n is a, c, g, or t
  misc_feature (846)..(846): n is a, c, g, or t
  misc_feature (851)..(851): n is a, c, g, or t
  misc_feature (858)..(858): n is a, c, g, or t
  misc_feature (860)..(860): n is a, c, g, or t
  misc_feature (869)..(869): n is a, c, g, or t
gtgtgcatgcacgtgtgtgcacgcatgtgcacatgcctccagccccaccttccaacccctcagtgcccccaggacaggggcccctcttagctatcagggtatggccggaccggcccttcctgcccagcacgttgcaagcacttggccaggccggccctccaggctgctgctgcgtgggggcccgggtgcccccaggtccatgcagactggggattcggtggggaggggcgcttctaaggaaccaaactgacgctcactctgggcttcccaagcacccttagcacggagcccaccccaaggcctcnnaccgtgnntgggacagggcagcccgatgccagctggcctacctgactgtgccagggccctgcccccaccctctcaggatggcctagacttggggaacagagccgggtggggttgcagcccagacaaggcccaggctgagcaggacggggccgaagagtccgagagcagcagcagcaccaggtggagagggcccggcacaggcccaccctggtccaaaccctcacactacagaaaaccccaatggtgctgaaactgtcgcccggccacgcctggccctccccacccaggagggaggtggcacttcttaacctgtacagntttattgtaccaagagactcgccccgcccntgttnatagcntttaannggagtcnactttttaattatatntataaagnnaaatatatataaatatatatataaactttttaaaactgtgaaaaatagctatgaaattataaaaaaaaaacattctgacgtgcagaatattattttttatttcctgttagattatagngtctagcaccngcttcancngncntccantccccananaacccccgnccatccgtcaagtttactgtatttaccctccagattaaaaaatgttttttatggagaaaaaaaggagaggcttgaatcgggccaaccctagggccttgtttgggcccaaaaatcctttaacagccctaatttttttgg

SEQ ID NO: 598610 - DNA, 954 bp, Homo sapiens
  misc_feature (305)..(306): n is a, c, g, or t
  misc_feature (313)..(314): n is a, c, g, or t
  misc_feature (571)..(571): n is a, c, g, or t
  misc_feature (601)..(601): n is a, c, g, or t
  misc_feature (606)..(606): n is a, c, g, or t
  misc_feature (612)..(612): n is a, c, g, or t
  misc_feature (618)..(619): n is a, c, g, or t
  misc_feature (626)..(626): n is a, c, g, or t
  misc_feature (642)..(642): n is a, c, g, or t
  misc_feature (650)..(651): n is a, c, g, or t
  misc_feature (769)..(769): n is a, c, g, or t
  misc_feature (780)..(780): n is a, c, g, or t
  misc_feature (787)..(787): n is a, c, g, or t
  misc_feature (789)..(789): n is a, c, g, or t
  misc_feature (791)..(791): n is a, c, g, or t
  misc_feature (793)..(793): n is a, c, g, or t
  misc_feature (798)..(798): n is a, c, g, or t
  misc_feature (805)..(805): n is a, c, g, or t
  misc_feature (807)..(807): n is a, c, g, or t
  misc_feature (816)..(816): n is a, c, g, or t
gtgtgcatgcacgtgtgtgcacgcatgtgcacatgcctccagccccaccttccaacccctcagtgcccccaggacaggggcccctcttagctatcagggtatggccggaccggcccttcctgcccagcacgttgcaagcacttggccaggccggccctccaggctgctgctgcgtgggggcccgggtgcccccaggtccatgcagactggggattcggtggggaggggcgcttctaaggaaccaaactgacgctcactctgggcttcccaagcacccttagcacggagcccaccccaaggcctcnnaccgtgnntgggacagggcagcccgatgccagctggcctacctgactgtgccagggccctgcccccaccctctcaggatggcctagacttggggaacagagccgggtggggttgcagcccgcaccaggtggagagggcccggcacaggcccaccctggtccaaaccctcacactacagaaaaccccaatggtgctgaaactgtcgcccggccacgcctggccctccccacccaggagggaggtggcacttcttaacctgtacagntttattgtaccaagagactcgccccgcccntgttnatagcntttaannggagtcnactttttaattatatntataaagnnaaatatatataaatatatatataaactttttaaaactgtgaaaaatagctatgaaattataaaaaaaaaacattctgacgtgcagaatattattttttatttcctgttagattatagngtctagcaccngcttcancngncntccantccccananaacccccgnccatccgtcaagtttactgtatttaccctccagattaaaaaatgttttttatggagaaaaaaaggagaggcttgaatcgggccaaccctagggccttgtttgggcccaaaaatcctttaacagccctaatttttttgg

SEQ ID NO: 598611 - DNA, 653 bp, Homo sapiens
ggcctccagaggttaccaatttctatgtcaatcttcagcaagcaaaggtttaaaactatgaatttgtgggagacataatatgactaggaagcaggagcaggggaaccttatttcttattgcgtcagttatgggactcactgatgggctggaacatcacactgggtcacgggtcagtgtgtggctcttgtctactgaccttgtgagttctcagagcatcagcaagtgatgtgcacgtgtggtacccctgtctgctcaccatatgcttttgttttaggttctcccatggcgccagacagtgtgggaaattgcagtgtgggcaactgcagcccggaggcagtgtgggccaaaactgaacccctggagatggaagtaccccaggcaccttttcagcccttctatagctttccagaactgtggatcagctctctccaaatgactgacctggacatcaagttttagtagcgtgggaaggagtacgggcagaccaagaccgtgagcaaccctcaggatgcagaatattctatggggacctgggtccatgctttgacaggaggagctctttgggccgtcggctggagaggttaaattcatcgcaagggtaccggatgaatcgtatctgtcagaggttacaaaaggataaaaaaacagaaag

SEQ ID NO: 598612 - DNA, 474 bp, Homo sapiens
cgcccctatttatgcgttggagcatggcgggagcccccaagattgcccctatttatgcgtgtcgtacgtgatagaggtcctgcggcccctatttatgcgtggaagggcccaaaggtgggccttttctggtgtgacggcgcccctagttatgcgcattttcgaggtggcaactgctgccgcccctacttatgcgctgcgagtcacgcataaataggggcgcgcccctacttatgcgttacttggaggtgctgtcttctgggtgctccgagggagcgagttcagaagtgtgatcgtcaagttccagttgctgcttgagattcgcaacatacagggcccgcttttctgcatcactaaatgtcatgtcaagcgtaactcggccgttgtcccaatccttgatcacgcctaccaggacccccgctcgctttatcttgtcgacgcggccgcggatttagtatagtagtagtaggcggccgc

SEQ ID NO: 598613 - DNA, 626 bp, Homo sapiens
  misc_feature (79)..(79): n is a, c, g, or t
  misc_feature (272)..(272): n is a, c, g, or t
acagaggacagagttgacagctgtgagctattctgattgtagggctgataaagacaccactagctacccattagttaangcctttatcattgtacactatagcttatgccctaggatttgcaagtgttatcgttgctttaagtctctcatagcaaccatcatgatgggaattagctcttcttgtttttccacagtttgaggcaggtgtcaaatatgccacgtatgattcactaatactcgcatttgttattaagtcgagccgaatcggctgncgcgttctacgttagacaatgcttcatcagtgttattgtgtcacgatgcgcttggagagaggcctgaagggaagctcggtgttttctgcaaggactccactaggctacggctttcgctaatgtgtaggagttccttcaggccatacaggtgttctcagggcgaggcgcagcaaggcaacagggggcagccgaatccatttatgcaccgagtgggccaagcctagggtgtgctcagggctaatggccagcaatttcctagactcagcaatgcgggcgaagttcactcgcagcggttcttggccacatttaaacttctatcggggtcgtttcatggccaagatcaaatctctgcaa

SEQ ID NO: 598614 - DNA, 401 bp, Homo sapiens
tgcgaaagagcttttcaggtagtcagctcagctctccgctcgtcctcggagagaatctagtgttcatgtgacagtaaaaacaagcctattaggaagcttttttctaacatgtcctttgcgatattgcaccgttgtccttacctccatcagcacatgcagcaaaataatcaaattagagagggacaagatatagttatcacccattctttttaacattgacagaactcaggggtttattagaaaagaaaaaagaatttcagttttacactctttttttttattttataactttgaaatggcccctgggtaagggagcaaaacccgtgtctaaacaacaaaattaacaaaaccaaaaactgaacccttaaagttcacacttaatctgatgggagcacgatgcg

SEQ ID NO: 598615 - DNA, 151 bp, Homo sapiens
acatcattacattaacataagactctccatcatcaagaagactgaaacttggacaggtgcagtggatcacacctgtcatcccaacaccattgagaggccaaggatgggtggattgcttgagcccaggaagtcaaggcgcgtcagggccaga

SEQ ID NO: 598616 - DNA, 815 bp, Homo sapiens
cgtatcccgcccttggtcaccacctgggtgcccccttttgggagcccccggtcttgggtgcccccccattggctccaccgccccatcaggttcttactcctgctccacttttgatgtggggaacctgcagtcacatcgcggccacattttcattcgaagcctccgctccacttttggatcacctggattttcaggacttccagcttgccttggccacaggtcctgtcagagctcccgtggccccagcctttggaggtggcagttctgtgcctggttttggtagtccagggctcacattctcacactgctttttctaagccatcccagtgacacttttggaaatagcagcatatccacattctctgtcagcccatcaaacagcatcattgcgacagataatgtgttattccacaccccgagatataactggagccgtagaagacactggaaccatttccatcgccagaaatttactctgggaaaaattcccttagaagcctccccctctggaacttctagaatgtttaaaagggccattttaaacctaccatcaaagtaatgatgtttaaaattgcttctgagtcgatttcatacccgagatgtatatatgcatacaatgtatatattcattaacggcaatataagcttccatcccatagatgattattaaatttgatttttttcttacactttataatatttaagtaaaaagtaacccaaactctgcacagcacagggaatttttttgtactgtaattttgcaatggacactggtcaaaattatgcacgaataaagtacttttctcatgcccata

SEQ ID NO: 598617 - DNA, 170 bp, Homo sapiens
  misc_feature (136)..(137): n is a, c, g, or t
caccacttgtgctggccactttcactggccttcttgtgtttggggggaatatggatgcacagacggtgcaaacacagaactggaaaagcagatggtctgagctgtgctatgtgcctccatcatcaatgactttcannatcctactcccaagtgaaactaaattggcaatg

SEQ ID NO: 598618 - DNA, 300 bp, Homo sapiens
ctcactgtccacaccatccccattgaccaactccagtggggtgcctctgctagagactgccacgcctccatgcaaaagcttgactttctccaacacctcctggcagccttctgggccacctcagggtcaatcactgatagttccccgaccccctccgtgatgacacttagcagggccccccatagtgcctgtgggccagaagctgttcagaagttggcttcaaggggcaggctcgttactgtatctcccatgccacagccagacttcgagcttccaagctctgggggacccccgcggagt

SEQ ID NO: 598619 - DNA, 141 bp, Homo sapiens
gcggatttcgggcaggctggttgaacacgtgcacgcgccgctacagtcctttggaagtgggcttcaagaccatgccattccggctgggcgccatggctgcctacggccctgcggctcctgcgcaagccacggtcaacccac

SEQ ID NO: 598620 - DNA, 107 bp, Homo sapiens
tttattttcacataactctccatcgtagctttgctcatatcagccatccattggaaagcaacccatatgtgtggtttgattggattaacagattgtggtatatttat

SEQ ID NO: 598621 - DNA, 922 bp, Homo sapiens
  misc_feature (461)..(461): n is a, c, g, or t
  misc_feature (468)..(468): n is a, c, g, or t
  misc_feature (471)..(471): n is a, c, g, or t
  misc_feature (549)..(549): n is a, c, g, or t
agcgggatgcgctctgttggcggcctcctgagcactcgcagggctgacaggtcgccgggaccaggccgtggggccgccggccacccagggcaccttgctgtggtggacggacacggcataggtctttgagccggttccgcctgccagtgctggttctgctgcgtcccagaatgctagcgcagacttggcgtgcttgtgctgcgtcacctgtatcttgcctcctgaatgcgttgacatcctcacctacagacgagttacggacaggcctttttctaggactaggcgtccgttgcttgcacgccaccccactgttgaacatatgcgagcctgagtttcgttgagcgacgtgacttgtacactctgagcgagaggttgcgcatgcgggttggacgagggtttcctgacagagcgagggaaattgtctttcattcgaagcttatgcgaaactctctcgttgtcgnatgaccntanttaggttccgagatcgagaaatgttcgattctcactcggttagtacccatgtccgtcgactcgaagttcgagtacatnggattgtgtacctagccacttgcattattgcactccccgttgagaaggcaccagcgaaaactttggatatcgagaagaacgcagacacgttatcccaaggacgaagacaaacggattcatacttagtcttttccaagatagccacaacacggtggtggcttaggcactaacttgtagagaagattgcccatatgcgttcgagaaccgtgggaacaggagttgggcgaaaagaggaatcgcgcaagatggaacttggttgttttcagaggaacgttgttgttagatggttgcagtttcaatcaaaggtgtttagtaaggcagatctttgaagaaggcaatgttgaataaggggtggccgatccaatcgaggaag

SEQ ID NO: 598622 - DNA, 643 bp, Homo sapiens
aggacctgtatcactcatccattgctatcgtaaaaagtgctgcaataaacatacgtttgcacgtgtctttacaacagaatgatttatagtcctttgggtatataccccagtcatgggattgctgggtcaaatggtatttctggttctatatcctttaggaatcacccatgctgtcttccacaatggttgaactaatttacactcccaccaacagtgtaaaagtgttcctatttctctgcaccctctgattgctgcctgctacttcctctggaatctttgtcccagagggccactggcctgatgcctgctggagctctcctgtataaggtgtctgtcaacccctgttgggatgtctctcccagtcaggagtcacggggatcagggaccctcttgaggtggcagcctgcctcttagcagagctcaagctctactgcgctggtagaaccctctttgtcaggatccgctgctcttttcagagctggcaggcagaaacatttaaatctgctgaagctacgcccacagccgccccttcctccagatgctctgtcccagtgagatgggagtttatctataagcccctactagggctgctgccttttttcagagatgcctgcccggcaagagaatctgggaggcgctggca

SEQ ID NO: 598623 - DNA, 164 bp, Homo sapiens
taccctcggcataagggccaacggatggtacaggtcaaatttgtagactacagctgtgtacactatctgtaatccctgttactcaggaggctgaggagggaggattgtttgagcctgggagttcaatcacttcagtgagttatgattgctccactggactccag

SEQ ID NO: 598624 - DNA, 1033 bp, Homo sapiens
gattcatggaggaattgtactgccacttatgtattttgtatttcacacgaaaaaagccattcagattcctcctgggcctcctcgccccatttgcgacagcatttgctacctgcttcagttcagcgagacttccctcatatgatgaagtgcattgaagagaacaagtggtgtggacaagaggatcagcaggtttattctccccatcaggggccaccgtgaacatggacggagcagcacatcttccagtgtgtggccagcggtgctcattgcgcaactcaaacaacaatacgagctcaactgcaggacagattttcaccattctagtgactgccacagcgtccagtgttggagcagcaggcgtgccagctggaggggtcctcaacaattgcacattatccatggaaggccattgggctggctagatcatgagctgactctgatccatggatgtggactggattgtggaacggaccacaaggtggtgaatgtggaaggggatgccactgagaatgcaaggcattacacagcaactgaatacagaacggcaaaacacagaaaggcgagcaggaacttgctgagggtgaaagtggaagacatcacccaatgcgaagtctgaggaggaagacatcgaccccttggatgacacacacagaaacccgctgaaccccgtggaccaagatgacccaaggaaactggcaattacaacaggatagtaaggaacatagtgaatgggggacatgggcgataagggacatagcattgcacaggacagtgtatgttacccaacccatggaatcaaccacacagacagacgaaagcacaataggaccacacacgagagcagccagcaccagtaaggaccaccacatatataaaccacataccccaaagagcacacgggagtacgagcaccacaaaccacggaagggcacagatgagaggataatcacccataagtcgagacacaccgtgcggacataagagaggcagtcacacaacgaacagaaaaaagtgagcagcaccaccacgcgca

SEQ ID NO: 598625 - DNA, 582 bp, Homo sapiens
tggtgattaaggatcttgggcaggttgtcatcttgtctgtagtgtactgtcattggtcaggtcagtgagtcaggtatcttatagctacagagagggtggtcaggctgtactttaggctgcatgaaagtctcctggagatggaaagcattccaacccaatctggccccaaccaaaagcaaaggcggcagatgagtggggcaatgggctggaagctgtagcatcacttgcaggtggcatagtagagcacgcgcccatggatgtggtcacggatctgctccacacgcttctccagtccggtcaggtccgccgagcgcagaatgagggcctggctgccccgaagcaagctccaagtccatgtctttcatcctgtccatcatctccatggtctccccaaacagttcctcttgctctgtcttcacactctggatccgggaccctgctcacccagcatggaactctgacccaaccggtccttcaactcagcatacttttgtgtattctctcaaatccctcttgggactcaatgcctgtcgctggaccttccggaggtggtggcctggattgctttgcccctgtgccggt

SEQ ID NO: 598626 - DNA, 838 bp, Homo sapiens
gctggcgtaggcttggtggactgtcactggccacctctccgccccggacttggaccgcgattggaagtgatgtgtggagaatagccaagaagggccaagtgggtggcccttgttggcagttgtccgaacattgcaggagaatttgaagaagattatgcaagcatttcagaaaggtataagtgggttctgtcctgccgtgctttgggtgttcactccagttcaaggtacttccaagcagaagagcaaagacagtgtcacgaagctaaaggatgcggatgtagcctttggcccatttaacttgaggaattttactaaggatcgagtcgtcgaggcgaacttggagagcgtgggagcttagtagttttgctaccccccgagagtatgcctggtgacatggctgaaccagatagctggagcggaagacaagcttgctaatcagaacagatccagttagcacgacaaggacttaccaatggtagcctaggtgaattgttgcacgtgcacgggctggctgcctgggggagatgcataccacactaaactcctttttagcaagggagactcctggatgggttgaacacatggctcacatgcatgcgtgctattggaatgggtcggagtaccattccttgctatgccccgtggtgaatgggaacgttaggaacgcttggggattatgcttcatatcgtacagagtgtacccctccattttaaatcggtgatgaagcgtgggaccatggaaagtgcgggaacctttgtgggcagagcatgtggccctttaaacgttcctcgtttgcttcaggagaacagataacagctgggactaggaccagacaga

SEQ ID NO: 598627 - DNA, 320 bp, Homo sapiens
  misc_feature (275)..(275): n is a, c, g, or t
  misc_feature (316)..(316): n is a, c, g, or t
tatcctttaaagaatgaatctgaaaagctacacttacacattataacagaaaatacatgtctagattggaaaaaaagtaactttaaatgaaactagagattcttccccattattagctcctaactgaatttgaatgttttaaatataagtagtaagatcaactctgtaagtcaaagatgggctgggtgtggtggctcacgcctgtaatcccagcactttgggaggccgaagctggccgattctttgggagccctgggagttcgaggaccagcctnggtcaattatgggcgaaaccccgttttctacaattaaattnaaac

SEQ ID NO: 598628 - DNA, 936 bp, Homo sapiens
cgcgccctatgtgtcccccgggtctcacccgcgctgttggactccacccctggggtccataaccagtgggccctgctcacaatcccgcgtctgggccccccaccctgttaacgtccccacagttaatttcggggaaaggcaatttcccaatggggactggtattctctcccgcgcggaaagtgtttaacaccaggtcgaagcgccggcatatcctaggcctgggggacacgttaaacctgctacgcttgggacagcagctgccttcccgagaagaaaaattctgggacttgcttttggccgtgaatacaattcgcactcgcgcctttcaaccaggaaactatgtgaagccccccggccgcgcgccgtatttggacccgggtcccctccctgcccccgctgtcgtggggccctcatcttcctggttaaaggggtaatcctccaatgattttcaggctgctacgttgtccccggagttcactttgtgcttttggtcgcttcccgttgcccaccccgcaagccggtataatttcttctggggggccaacatcgatgctgcccgcctgttaccgcagcgcctgttggcacagattttatttttacagacccgcgtcggacccctcaaagatttcatggatcgtaaaaaacatctagttttgaggattgcaaatactatatcagcattatatgggccccgggagtggccaattctgcgctgagtaacgaccttgtgatgtgtgcagaagtcacgagaatctaggaggcctcttgaagttaaaaataatacgggctattccagatggaacggaaatagaccagacatccggtcggacccggttaccctattatgatcaattgtttggattccgtactgttttctgaaggagctctcgaccccccctatataaattccgtttaaatccaccccaaacaataac

SEQ ID NO: 598629 - DNA, 431 bp, Homo sapiens
aagctagtatactagtaacctagacactggatatgttctatgacaaatatatgctggctcctatatgtggtacagctagatcaggttgtttgggtcatacgctgtgccggtagctaagaagagaactgaactttggtgggtcccttagcttaggggggaagcatattagtcttggattcagccggacttgacgtcagattcaagttatgtgacattgagcagctggaataagccctctgagcttgccttcattcatgtgtgaagtgaccacattgttttgaatattaaatgagaatgtgtgaagcacttacccactgcctggcacacagtgggtgctcaagaaatattagtcccttccctgcccctgctctcatatcaaataactgattatcttttaataagaccctttccaaaacacctcaaacattcca

SEQ ID NO: 598630 - DNA, 159 bp, Homo sapiens
ttttcccccgggggccgccttggccctttgggcctttttgggtgcccctttggacccggttgggcccaaaagccgggtggggccgggccgggatttccgggggtttggtgcccccccgggccgggattttggaaattaaaacccctttatttccgtcca

SEQ ID NO: 598631 - DNA, 222 bp, Homo sapiens
ggctctggactcagacgctgacgatctggagcacctgacagatgaatcagctgatgagactcgctgtgcctatgcctacaaacccatcgtcgccagctctgtagatgtgcgcaggatcgactttgcacacaccacctgcagcctgcatgacgagcacaccgtggcgcatgagggccaggatgctgactatatcttcgatctccagagcctgatagacattgt

SEQ ID NO: 598632 - DNA, 231 bp, Homo sapiens
ggacacatgaagactcatcgtctccaataaaagtcagacattaggcaagaacagatgtgtcaaaagaaaatgtcagaatccatacatggatgcttagatgaggagctgtactccttccgtgatcatgccattggaaggcagttgtatgacacgcatgctttcacattagctccgcttttcttaactctccagaaggacttcagaagcctctggagtttagcgacccgcgaa

SEQ ID NO: 598633 - DNA, 216 bp, Homo sapiens
  misc_feature (152)..(152): n is a, c, g, or t
tcgtccggagcttacctctatatctatattcgttgtgggtcttagacatttggtatgggagtaaacagtctgtgtataatatatttcagatcatgcttcttggacggggaagaatggctacaaggtgatgggacaatatatacggatttgcnggactgatcaagtatttgtccaggtccaagtttcaagaagccggggagggggggggtgggggga

SEQ ID NO: 598634 - DNA, 925 bp, Homo sapiens
gcccgctcaacgtggatcatttctcttgcacccctctgatgtgggcttgtgccctgggacacctggaagctgctgatgctcacttttccgattggaaccgacaggacactgacgcattcccgacatctctgggccgatctgccatatgtcatgtgagcatcacttcccagggagtcactgtgacgaccattgcccgcgtgccgtgtgcaggcaactacgagcagacaggcagccattcaggatggagcccaccagtttgcccataatcgcacacacacatccatccaagaccacagcacaacatggatcgtgacgcagacgtcatcactcgcccatcggagcttgtcgagatggcaccattttccgtcacgtcagcctattctagatgccaccagaatggcagtcccacccactgcacctctgccagcactctgagatgactatggaggacatggacccaggccagctttcctctggtgtcccagaagcccccctactcctcatggactatgaggctaccaactccaaggggccccatctcctcccttcctgccctcccaccagacttcagatgatggggctgctccggaggacgctgacagaccacaggctgtggatgtgatcccggaggacatgatctcactagccaagcagatcatcgaacgcacaccggagcggattacaacgagaggactcgtggggctgccagaggctggagcctcactgccggaccggacaggggctgtgaggctcagtgagaccatgcctggccggcacctaacttggacaatcggggacacattcccgaggcacaaacccatccaacgacctgcatttgaaccacgccgactggtggtcatacaagaccctccggggcagcagcccctgcaccccccactggcccgcggcaccgactcagcgtgga

SEQ ID NO: 598635 - DNA, 222 bp, Homo sapiens
tctaagatcccgtgctcctcttcagcagcatgttccaagggaaaggcttccttggaggtgtaggagatggctgggtgggcagctgctgggactcagatgggggaagtagaggaaacacaaaggctggtcttggcgaggaagggcctttgtccttagggtcccagggaggccttggaggcattctcaggcagaagtggcaccggtgggtcagctgtgagtgag

SEQ ID NO: 598636 - DNA, 322 bp, Homo sapiens
actacatacttccgtagctagggaaaggaagtctcccttttgcagtttccggtctgccaaccaggaggctaccggtttcattaagctgaaatgagagaaattagaggctacacatttccccattgctatcacacttaaacaaggctgtaaagacccagtgaggaaggaggaaaatagtagggtctcagaaaggagaaagttacagccaacctcagccagctctaggaaaggcacctgttaaccaagcaaggaacaaaggacattcacttttatactaggaaacccaagccggtggtctgcatgcagactgtaaggtggggat

SEQ ID NO: 598637 - DNA, 150 bp, Homo sapiens
tacagcggcagtctgcgatgcctgagttggcttggggcttgcgtgaaggtggcactggcaggggcgcgctcggagcggatcccgggcgtgacttcacagttgcctctgcgaggagcccaggttgtctggcccagcttcaccagcagcttg

SEQ ID NO: 598638 - DNA, 141 bp, Homo sapiens
aaaggatggttgatatctggctgagacactgtggagagactgagagagcaactgagagaaagtgggcccctgaaatgaaagtgattacgcaaattttaggcagatgccaccatcagaaactgatatattctgacgtcttca

SEQ ID NO: 598639 - DNA, 180 bp, Homo sapiens
gccgcaccccgatatttgtggttctggcctactgcctaggtcactagcactgactctgttgccaggcagttcttcgctattggcctcaaagtgatgacgaatagcgcacagggtgctatgtcgccaagcaggactggtctgtgctacatagatggggcagtgtgagaccttatgcagtgg

SEQ ID NO: 598640 - DNA, 124 bp, Homo sapiens
aatctagaggatctcggcacattgggaggctctttgggtctataccactgctctctctctccccaacaccactattgaacaggagcccttgtcaccaggcgccccccaggagcccccccacgag

SEQ ID NO: 598641 - DNA, 422 bp, Homo sapiens
  misc_feature (6)..(6): n is a, c, g, or t
  misc_feature (16)..(16): n is a, c, g, or t
  misc_feature (70)..(70): n is a, c, g, or t
  misc_feature (76)..(76): n is a, c, g, or t
aatttnggaaataaanggaaaatgtttgttgaattttgacagatttctaccaagcagctaaaattaatangaaatnaattttgaatggaatgtacttaataacatttacttctgtggtatgcatcattccctaccatcagataatatagatttaacataatttttggtcaggcactattttaaaaatcaagacatgaaaaatatttttatgctttgtggatatcatttgtttcagtcttcgttgtgaaccttttaaatttgagactgtagctacatttgtgtactttatcattctttaaagaagtattatgttagaccctgtgccagctgctgaggatatggaagtgttcaagacacatctcctacccttgaaattgtgcatgatgcttctgaactagcaataaaagtatggtgttaatctt

SEQ ID NO: 598642 - DNA, 456 bp, Homo sapiens
ttcagaggatcccccacggcgggttgtactggggttggcaaaaaattacgttaaacacaaaagaataatgtgtaaaagtgtagccccttttacattccagatgttattttaaaaagtgacgtaaactttttggagatggagtctcgctctgttgcccaggctggagcgcagtggcacatctcagctcactgcatgctctgccttccgggtccacgccattctcctgcctcagcctcccaagtagctgggactacaggcgccagccaccacgtccagctaatttttggtatttggtttagtagagatggggtttcaccgtgttagccaggatggtctcgatctcctgaccttgtgatatgcctgccttggcctcccaaagtgctgggattacaggtgtgagccaccgtgccaggccaaagtgaagtaaattttacattaaaaaatgtggtgggctgg

SEQ ID NO: 598643 - DNA, 128 bp, Homo sapiens
  misc_feature (3)..(3): n is a, c, g, or t
ctngattccggtgaagttggttgaaaatcacatcaaaaagctactaaaaggactggtgtaatttatataaaaactactgacagaaaagcttttcggaatgatgattagaagaactttggaacggcctt

SEQ ID NO: 598644 - DNA, 151 bp, Homo sapiens
atgacagcagtaggcagtggtagtctaatgcaaagatctctaatgatcagtatacctactacaccgatttatagctacatccaaacctgataaggagcacttaagagattatctgcagccctagattaccatactgcttccctctggtggt

SEQ ID NO: 598645 - DNA, 160 bp, Homo sapiens
  misc_feature (15)..(15): n is a, c, g, or t
  misc_feature (154)..(154): n is a, c, g, or t
  misc_feature (160)..(160): n is a, c, g, or t
cctactttcacaggnagctggtgactatacagccttatgtatgtagtagataatgtatgatcttttcctgccttttttgcaactaactgaatacaatagtaagtttatgaggtgactttttaaacattctgaatcttacaggagacgttcaagntacagn

SEQ ID NO: 598646 - DNA, 233 bp, Homo sapiens
ttcaactgggttctcgagtacgtacctgaggcgagagcagagaatggtcgccactggctctgagcgctgcagatgcttgtggcggctgccgcaggtccgcacagcaggttggcgaccgcaggttgtactcagcggggtcccccgagctgctgcagtgggagccgggggtggtgatggagcaggtcatcttccatcctcatcctcgtcgtcctcaaccggagttgaaagacgca

SEQ ID NO: 598647 - DNA, 319 bp, Homo sapiens
  misc_feature (34)..(35): n is a, c, g, or t
  misc_feature (66)..(66): n is a, c, g, or t
  misc_feature (121)..(121): n is a, c, g, or t
cgagggacagctcataagtgacactaaaagaaanntttcgttggtttactgacaccaaccacttgnatggtactatcctgaaagcttggaaaacactcggcagttgactttggtttggagnctgggacaggagacgacgagagcacaaccctggagatatgctctccttgctcctggctgaagcacgccagaggtcacacgctaaagtcccaggaagagattgaaccgtgtgattggcagaaacccggagcccctgcatgcaagacaggagccacatgccctacacttttgtctgtggggggcgaggtccagagataca

SEQ ID NO: 598648 - DNA, 126 bp, Homo sapiens
  misc_feature (1)..(1): n is a, c, g, or t
naccccgaaggacataatgataaaagggtcaattcaccaagaagatataataactataaatatatatgcaccacacattagagctcctaaatataggaaacaaccccaggcactgtttggactctg

SEQ ID NO: 598649 - DNA, 267 bp, Homo sapiens
  misc_feature (39)..(41): n is a, c, g, or t
acgatgatgtttccaaatgatgaatttagggaagccctnnnttaactagataagagctttgcataactaagacatgattattttggagttcccattgtggttcagtgattaacgaatccgactaggaaccatgaggttgtggggtcaatccctggcctcacttagtgggttaaggatccggggttgccctgagctgtggtgtaggtcgcagacgtggcttggatcccgcgttgctgtggctctggcatagactggaggctacagggg

SEQ ID NO: 598650 - DNA, 298 bp, Homo sapiens
gttcaggaggatccgctatccgcagagaagggcttgtcctgtagagaattatcgagtttggctggcccacttgtgccatcttcatagcctttgttatgatcattgacaaactgtgcaagtaggacataagcagctctatgaccattagctcagttgccagtagacccccggtcaccctgaggctggtggtccctgctagtcagtgtggctctctcatcggaagaggtggttgcaagatcaaggaaatacgagtgagtacaggggctcaggtccaggtggcaggggatatgctacccaa

SEQ ID NO: 598651 - DNA, 255 bp, Homo sapiens
agtctagatacctgagtcagagccatcaagaaactaagaggcacttggcactggcttcggcatcatccctgtgggcggcacgtacctcattcagtctgttcctgctgagctcaatatggatcacgccgggtctgctgatgctggcagagaagagtggctacggtactgtctcagtcagatcactgccattcttaaattgggagaccgagcgtgcgcggcaatgtgcggaaacaccagcggtatgagtccatattg

SEQ ID NO: 598652 - DNA, 328 bp, Homo sapiens
atgcggttagtcgtcagccagactacatttgccgacgggcctcccggctcttccgccctcttctcccgcgaagtatgagccgaactgggcgtccttttcaaacgtcgtcccctcacgcgcgcgccctgcagccactctcccgcctctaccgcacgcgggagctgcatcgtccactccggtcggcggtggaaccgccagtccggggtcacagagcttgagaagcgacgcgctgagccccccatcacctccagcccgggcgacccctcccgggtcctgcctcgccctgcgcagccgcccgagcccccaagcccgggaggcccgtcccagc

SEQ ID NO: 598653 - DNA, 1010 bp, Homo sapiens
tcatcaaggtgcacgtcggggatgaaggactactgtacacctgcgagtgttccaatctctcccttcgtgaaaataggcccttgacctttatcgtaacttaccagaccaagaaagcctaagcatgatgagctgacgcatatttctgatcctgactttggacaaggccctttcagccagaagactgacaaatgtcatcctccgtctaccagagcgtgtacattgtgactcctaaaactaatgcttcattctccgggctgatgcccttggggttggacacggggcaggacttcttgcagctggtttaggattgatacttcctcaaaatttcacaagtgtagtagcatctctccctgtgcccctaggaggctgattctacaataatctttcagaaattatgtttcgcacttactagataatatcttctgaaaaagtctcccaatataaacacacaacaaataataaaccataacatgcagaaacaaatttcgtcgtggtgccatagggtacacccagcaatagcgttccttgatatcacacgtattcaaggtcatggcgtacctcggcacgcgaaactcaaaggaataagttaggtcaatgaggccccattaatagcgtccccttctaagagataattttcggcgagcaaaaacaacaaaaatgggtgggacggggaagattctaccccaaagccgaacaagtaaaaaccgacgccgcggggggagaagaacaacaggagagaggagcatcacggcgcacaaaccatatagcgcacgagagagaagaaaaaaactacaagaaagaacacaacaaacagctgggaagacaacagcaacaaaagagagggagatagccaacagagaggagaagcacgaccagaatatagaacgaaaagtaaacaaaggacgcaccaaccagagggatgagacagacacgagagagcagaacgaaggagggaagaggaccaggaccaaggagggagaagcagacgcgcaacatgacaaacacaacac

SEQ ID NO: 598654 - DNA, 195 bp, Homo sapiens
cctggcccccgcctgtacagttgcgctctcgcagctgcccggcgtagcagcggctatggtgcccgatccctgcctgcgccatccatttacatcgactaataagattcgagcggctgagttgtaacacgctccttatcgaactgccggctaccatggccaccgccctgcctgtctaatatcacccaacgccctttc

SEQ ID NO: 598655 - DNA, 132 bp, Homo sapiens
  misc_feature (12)..(12): n is a, c, g, or t
gctccgaggatnccagggttacgcccctgcattcaggtggatgtaaaatataaatttttgtgagatttcagagattaagattattttgataacattatttacagatctaaaagatgtggttatcacaagtat

SEQ ID NO: 598656 - DNA, 434 bp, Homo sapiens
gccccagatataaaaccaaaaaaaatttccaaactgtttagaaccctaataaaatttatgccgttataaaaaaggcctttctgcccagttttaaaatgaagcagatttttttaccgttgtattgtggggcaaaactggattttttgtaacttaaaaaaaaatcccccgttttaaaggccataatccgtaaatgttattttcaggggctgacatcctgttttttaaaaaaaattaaaagtaaatttttcccccataaaaataaaaaaatcttgtcagttactttttttttacaaaaattgctgggcaaaaatgttttatatctttagttactaactaaccccgcgggttgttcctatgtgcttttttttcattttcaattttggttaaatccaaaaaaaaataatttcccataataaacggcgggttttttttta

SEQ ID NO: 598657 - DNA, 163 bp, Homo sapiens
  misc_feature (39)..(40): n is a, c, g, or t
aaaaattttttttggggtgggggaccctggagggcctcnnctccgggagtttcaaggggcccccccctttcctttggtgggccgttggtttttttggccggggggtttacttttgcccagtccgcccaattaagccagggtttgcccccttttccttgtccca

SEQ ID NO: 598658 - DNA, 141 bp, Homo sapiens
tgtagctgttcttgaggataccccaatgctctcacaaaacaaacacctgcggctctgctgaatgataaaatgtgtggctgggaaaaaccaaacaccaatgtagaaaccagctgacctgggtacctgatgctctgaattctg

SEQ ID NO: 598659 - DNA, 293 bp, Homo sapiens
  misc_feature (235)..(235): n is a, c, g, or t
cactggaatccctttcagcgaacctcatcactcccatctaattccataataggaacatttcacgcgaaaacgaaacaaacctgaaccaaatcaccccgggaaggactttggagccagaccaaggtatggggggcggattcacggggcattctgccgggaggagccttgaagattttttaatttgtcgcgggatgattttcgacttctcgaggctgggttttgttagactaggcgnacgtctgcaccatggcttttaaccggtccctttataggtcgggacaaaaagtatagac

SEQ ID NO: 598660 - DNA, 798 bp, Homo sapiens
agcgggtctctcgctggagacggaggtcaaggtctcgtccttactggctgtgtgttctctgctcctatagtgccaggctctgtggccctatgacctgtgaggtatcggggatgcaatccacgaagtaagtactgcctaggagcccctggaagcctagaaatgggatcattgacacttgtagcggatgtcggctcatatgatagttctcttctggtaggatgttggcaatgacctggacactgcacacgcagaatctatagtagcaccatgtgatagttagagaattacagaataccctgtggtcttcctgggtacttgcgtagcgctttaatgccagagtcgtagatcagtgtttgactggaggaagggaagaaggagtctctgtgagatatggaagagacagtgagaatggtgtaagaattcggccaggtaggtgacgagtgaatgacatgactaaagattggatgatgaggtggaataagtctagtggcaggaagtccagtccttaaagtgattctggagtcagtgttccagggatgaaggagtattctgggagagactcagtggtatttattattctgtgtaacttggtcttctcaggacgagggggcatcgtacgggtctctacatcttattaaaagtatctaagaattcttctgttgcccttcagataaatcttccttcaaggtttacagtgacagtccaatagtgactgtttcatggcatacaagatgagtgcacaatctatagttgctggtagtagaggacgcacagatatgctggcatgattttaagata

SEQ ID NO: 598661 - DNA, 279 bp, Homo sapiens
  misc_feature (12)..(12): n is a, c, g, or t
  misc_feature (14)..(14): n is a, c, g, or t
  misc_feature (16)..(16): n is a, c, g, or t
  misc_feature (73)..(73): n is a, c, g, or t
  misc_feature (83)..(83): n is a, c, g, or t
  misc_feature (87)..(87): n is a, c, g, or t
  misc_feature (112)..(113): n is a, c, g, or t
  misc_feature (115)..(116): n is a, c, g, or t
  misc_feature (125)..(126): n is a, c, g, or t
  misc_feature (268)..(268): n is a, c, g, or t
  misc_feature (270)..(271): n is a, c, g, or t
aacttacatttntntnttcttgtaactacagattattatgatggttgtaatgaagattatgagtataattggngctatatgtntctnaattctgaacaactatttataaaanncnntcctacttnnctctgttgaacatatgacttctctggtctgctaaacacatacagacctttagttttggtttacatggatttaaatatatagatatatcactgtaaaataaacttcaggtgtaacagatttatagagaaagtaatcatatttntnnatggttgt

SEQ ID NO: 598662 - DNA, 358 bp, Homo sapiens
gaagttaaaggaattatggatgggtttaaaccgggtacatttttcaacggtccttttaacgaagttgtaagttaaagttaaaccggggcataggggttagagcctggattgggctcaaggggggggaaaagggaaaaaaccaaaccaaaaccggtcacgggaaattaaaattccaccacgggttaccagacctttcggatttaaattaaaaggaaggaaaaagcggaagcattgagcttcgacatcaactgtacaggcattacaaagactcctgtgacgaaaacacaattgttcaaagctttccacagtgtccacagactcagtttcagggacagcctggactactttcctttcacac

SEQ ID NO: 598663 - DNA, 377 bp, Homo sapiens
  misc_feature (54)..(54): n is a, c, g, or t
  misc_feature (171)..(171): n is a, c, g, or t
  misc_feature (174)..(174): n is a, c, g, or t
  misc_feature (183)..(183): n is a, c, g, or t
  misc_feature (190)..(190): n is a, c, g, or t
  misc_feature (193)..(193): n is a, c, g, or t
  misc_feature (348)..(348): n is a, c, g, or t
  misc_feature (367)..(367): n is a, c, g, or t
  misc_feature (376)..(376): n is a, c, g, or t
cccgttgcccccgaagccattttagggtggctgtggctcttcctcagccagggnctgaagaagctcctgcctgacttaggagtcagagcccggcaggctgcaggaggaggagcagggggtgctgcgtggaaggtgctgcaggtccttgcacgctgtgtcgcgcctctcctnctntggaaaccngaacccnacngatagcacatcctaccctggaagaccagcctcagagggtccttctggaaccagctgtctgtggagataatgggggtgctttcgtcagggactgctgacggctggtcctgaaggaaggacaaacttgcccagactttgagccccaattaaaatttnatttttgctgggtttttgnaaaaaaaang

SEQ ID NO: 598664 - DNA, 318 bp, Homo sapiens
  misc_feature (152)..(152): n is a, c, g, or t
gaccacacacacacacacacacacacacacaggcatacctacctacggaaaacatgagaaacaacataaaagtcagccggtgtggtggtgcgcgcctgtagtctcaggtaatggggatgggagggatcagaggcagaacgaccgtttggtcngtccaaagcgttgaggttggggtgatcctgggcggcagagacagaggaagaccctgccagtaagggagggaaggaaggaaggaaggaaggaaggaaaaagaaaggaagatagaaagaaaagaaaaaagaaaaggaaaggaaagaaaaggtgattcctgagttaaac

SEQ ID NO: 598665 - DNA, 152 bp, Homo sapiens
  misc_feature (116)..(116): n is a, c, g, or t
gatctcatccagcaaagatttgcggcgtttttccttttttgctatatcgggcttttatttttttcagttctattgggtttaattaacaaataaatgaaaaatcaaggtttgggccntttgggccaacatctcctcattttccctccccccca

SEQ ID NO: 598666 - DNA, 811 bp, Homo sapiens
  misc_feature (18)..(18): n is a, c, g, or t
  misc_feature (131)..(131): n is a, c, g, or t
  misc_feature (167)..(167): n is a, c, g, or t
  misc_feature (172)..(172): n is a, c, g, or t
  misc_feature (174)..(174): n is a, c, g, or t
  misc_feature (178)..(178): n is a, c, g, or t
  misc_feature (188)..(189): n is a, c, g, or t
  misc_feature (192)..(192): n is a, c, g, or t
  misc_feature (196)..(196): n is a, c, g, or t
  misc_feature (198)..(198): n is a, c, g, or t
  misc_feature (201)..(201): n is a, c, g, or t
  misc_feature (208)..(208): n is a, c, g, or t
  misc_feature (213)..(213): n is a, c, g, or t
  misc_feature (227)..(228): n is a, c, g, or t
  misc_feature (232)..(232): n is a, c, g, or t
  misc_feature (241)..(241): n is a, c, g, or t
  misc_feature (244)..(244): n is a, c, g, or t
  misc_feature (248)..(248): n is a, c, g, or t
  misc_feature (251)..(251): n is a, c, g, or t
  misc_feature (254)..(254): n is a, c, g, or t
  misc_feature (257)..(257): n is a, c, g, or t
  misc_feature (263)..(263): n is a, c, g, or t
  misc_feature (269)..(269): n is a, c, g, or t
  misc_feature (273)..(273): n is a, c, g, or t
  misc_feature (282)..(282): n is a, c, g, or t
  misc_feature (288)..(288): n is a, c, g, or t
  misc_feature (297)..(297): n is a, c, g, or t
  misc_feature (304)..(304): n is a, c, g, or t
  misc_feature (348)..(350): n is a, c, g, or t
  misc_feature (380)..(380): n is a, c, g, or t
  misc_feature (385)..(387): n is a, c, g, or t
  misc_feature (390)..(390): n is a, c, g, or t
  misc_feature (429)..(429): n is a, c, g, or t
  misc_feature (433)..(433): n is a, c, g, or t
  misc_feature (630)..(630): n is a, c, g, or t
  misc_feature (693)..(693): n is a, c, g, or t
  misc_feature (731)..(731): n is a, c, g, or t
  misc_feature (773)..(773): n is a, c, g, or t
caggcggggggggggggngggggggggggggggggggggggacccgggagggagaggggggggaaggggaaggagaagcacgagggcgccggcggggggaggcgggcgccagagggggggggagcacaggnagggcagcgggggcgggggcagcagcggccacaggngccgncngagnaaggaagggnnggnagcnanagnggggggngaagnagacggggagaagnnaggncagggcagnagnaganggnagnggnagcggnagggangccnagcgagggnaggaanggaggacanagagcgnagagacagaacaggccagggggaagaaggagagacagaaaaggnnngggcgagggcggtgagggactgaggccccnaaaannnggncccaggggaaaggaagaggccagttggtccagttttganggcnatggggaagggaatgtattagtaagcatgggggagaggatgccagcaggcacctcagaggtgacaggacaggctgaaccccccaccctgacagaaaggagcttgagagctctggggctctctgggaatgtcactgctaaaatatatatctacatatatattaaccattcgtgggagggcaggggcaaggcctggggngggatcagaggatctggcgtggcatcccgtagccagtcatgcctgcctgagacgccccgcggntggtgcccatctgtaacccgatcacgttcttgccctcntgcagctggttatccgagaagttccgagggatctccttgganttcttagggaacagttgggatcccagagaagagcccat

SEQ ID NO: 598667 - DNA, 181 bp, Homo sapiens
gcctgcggcatctagaggatcccatgctcatccctccttgatgaagaatgtcaggtgtaatgtactactatttaggttgaaattttgggttttaccctttgtattatatcttatagtgaaaggctttttttttggtacccatatatccagggctgattcctaaattttccaattcccaaaa

SEQ ID NO: 598668 - DNA, 361 bp, Homo sapiens
gggcattctcgggacactggacaagcgcgcaaaacgggggcagagaaagccctaccacaagaagcggaagtatgagttggggcgcccagtgccaacaccaagattggccccccgccgcatccaccacagtccgtgtggcgggaggtacacgaatacgtgcctgaggttggaacgtgggggaacattttccttcccttgtggggggcgtccagacaggtggttgtgtacacctcggtaaaaaacaacgagctcatccgatgttgtcctacaattgcgatctaataacgagctggttcgtaccaatgaccctggtgaaggaaattggcgatcggttgctccaaattccgggaaaccacagggc

SEQ ID NO: 598669 - DNA, 244 bp, Homo sapiens
atacaggcatacaatgcataataatcatatcaggatgaacagggtatccatcatctcaagcatttaccctttgtgttacaaacaaagcaattatgctcttttagtaatttttaaatgtacaataacttactgttggctatactctattgtgctatcaaatactagataatcttcatttatataactacatatttgtacccattaaacagtctcccttcacaccacgcctggcctggcccctata

SEQ ID NO: 598670 - DNA, 170 bp, Homo sapiens
  misc_feature (126)..(126): n is a, c, g, or t
  misc_feature (158)..(158): n is a, c, g, or t
agcccccaaaaacaacgggcctggcaacgggccgggccatgcagggagggcctccctatgttgcctgcccctttgggcaccggccagcaccctttggttaaaaaaggtcccccctttttatgtgcnctacccccccatttgtgattataataaatttnttattcctgtga

SEQ ID NO: 598671 - DNA, 1409 bp, Homo sapiens
  misc_feature (203)..(203): n is a, c, g, or t
  misc_feature (209)..(209): n is a, c, g, or t
gatgtgatacctgggaagggctggatgggtgtccccgatatatggctttcgctgtgcgtgtgtcgtgagtccggtcgctgacgaggcatagctaaatagaaggagcgaagtgttgatgtatctcgatgtactgtacgtactgaggaagatggagtggctgtggatgctgtgatgtttaactctatgtcatgagatagttttcntatagnttgtcatcgggggtcggatagagaaggggttgtgtagatggagtgtcacgtgtataggtgagcgttaattcactacggtcagggggtgctgaggcggacagaggcacacttgatcattttgtggatgtaagggtctcgtagaaatttcaaaaggaataaggcatgagattgcccttcatgtgccacttgggatagaagcggtgagtcgtatatcgtggccctggagtgaatggctaaaagtaggtatgtgcgttagataggggatgaaagggaagggaatagctaggtatctgagggggcagcaagttagctgacgcaaatacgtgcttccatgcgccgcgtgttgtgcgcacgctccttcgaagggagggacgtggctgagagtggtggacgtattcgacttgcgtaatcgatatcagaagaggagcgttcttgaaaatgatcagaagttgcatctgttagcccttgtactggaaaggcacaaggaagaaagccttgattaaagaaacgctgcgaaaggggcgtgatagtttatggtgcactttagaagggtttaccgaataggggggaaacaaaattgtgggagtttgtgtgagggttaagtttttagaacaaattttaagggaaaacaggaaaaaaggagaataaacgcggttgaccacaccacaagggtggacaacaccttttgccggtttgctcaaagcaacgatggcggattaggaggaggacaactattacaggacgtggcggttggccgtaagctccagttaagggatgaagccgcggaggttccacagataccattactaactttttacgcaacaaagggggcattatgagaggtaatgtgagcagctggatacacaaccacaatatggtgggaatggataaggaagggaaaaacttgtgccgttttgatgcacaccaccccatagattgggatcaatccttcatacggttggtgtgtgcaccttgtaacgaatgaaagagccaacttttccctctatgtaatgtgggaaggcaagccgcccattaatgagagggcaagcccagttggaggcacgaaaaaccggcatatggtgggttacacgaaactcgtgttccgggggaccgtatgagggaccccctttccttttcctattttctcccaacgttaacacgaacacaaccagtgagacaacccagggatagggaaaaaag

SEQ ID NO: 598672 - DNA, 143 bp, Homo sapiens
cgacgaagggtggacctcggttcttagcttcagaaaattgcctgtggtccatccccccagaatactgtgctcctctgctacttagtgctggccctgaaatccaaagtctgtgcctcaccctctcttaccccagctgggactcc

SEQ ID NO: 598673 - DNA, 1137 bp, Homo sapiens
gaggatctcgggctcggaacgagactgcaggcggattgttttataggaaaatggcagacaaaccagacatgggggaaatcgccagctatcgataaggccaagctgaatgaaaacggaggacgcaggacgaacgaacaccctgtgcgaccataagagaccattgtaggcaggatgaaggcggagtgacacatttccgtaacgagtcctggtacggatttcctaacccgccgtctctcttcgagaccccaggtcgtggatgtggaggacagacgccaactgctagatggacacgagccacagaatgctgcagctgtcgaaccctagtgcgtagctgcccgtgccgattgccaaccgtgcctgttgcggtcatcttgaacgggatcccccccaccaattctggacctgccagaaattctccgggttatgtcgccgcgcgactattagtaccgaacgagtgaacttttgtacttgaactacattggtagcaataaccaccaagacttcgatgggctgggacctggacagagagagaagccgcggaggctcattgaaatgtcggtgggcggatgctgggagagaccggagggctccgtgaactggggccgaacgtccacgttagcatgcttggcttggtacgctgacacctctatgggtgcgaccaccggggggctgaacgtgagctggatcttgcgcacactcgcgagatgccgcatggacatccctggattcaaggcaccggggtgacataggtcgagggctttcagcaatttcgcttggcacagcaccgaatcaaggcgttcttgagggcggtccccacttgggctcttggattcttgtcgttccttgcctgggggaaaaaccttgaatgtctccaaactttggaggcttccccccttggcacgcgggggtatcatatccagggtctgcttggacgtggagaacttgggcctgtgccctgtgggagcctgccccgctgatgggacttactggtagctgacaggtaaattggattccgctctagcaaaggggccttggcttctgaattcccaggtggaacccccgtttttaaaccacaataaacacctcgggttaaaacccaagcgggagcttcttgttgaagaacgcaagtcaccgaag

SEQ ID NO: 598674 - DNA, 374 bp, Homo sapiens
gtgcgatctcagctcactgtagtcactgcctcccaggttcaagtgattctcctgcctcagcctcccgagtagctgggattacaggcatgcgctaacacacccagctaattttgtatttttagtagagacgaggcttctccatgttcgacaggctggtctcgaacttccacctcagcctgccaaactgctgggattacaggtgtgagccaccgtgaccaggcaatgcgccttcttatagtgtctactcattggtctttgctctgcccagagataacaatgggataacgcctgctacacatgctcattgtgaaacccttcccctgagctgagattaaatgaactctgattatttagtatattttccttggcagcct

SEQ ID NO: 598675 - DNA, 142 bp, Homo sapiens
agatggagaaccgtgataacacgggatgcacaggagtaatgctgctgatgtacggctatatgtactccaactgctataagtacaatcccccagatcacgatgtagtggccatggcacgaaaagctaccgggatggaatagcg

SEQ ID NO: 598676 - DNA, 122 bp, Homo sapiens
gctatccagcatagcgacgcttggtcttatatatcttctgtatttgaaaacacctggcgacaatgctgatgacatccatgaatccagcagggtaggatatatcagtaacggaccttgccatc

SEQ ID NO: 598677 - DNA, 177 bp, Homo sapiens
gggggtagaatttcaccaacaaaggacccacggcatctaggcttcgaagcggtacattaccgagctgaaggacaggggccttccaaaaaaaacactaaaattgaaataagcactgtacttaaggattcttagatgtatttttttgttatttcccctccgccgctatcccttggctaa

SEQ ID NO: 598678 - DNA, 758 bp, Homo sapiens
  misc_feature (106)..(106): n is a, c, g, or t
  misc_feature (758)..(758): n is a, c, g, or t
ggctaagagcatcatgtccgagacgcgcaagcatgtctcataagttcccatgctcatcgcatagttaatcataatagtatgtacctcctttgtgctcttctagtantcagatcgttgagtattgttctaacacacactgaatatacaatggacctagagatgcacagggtggcagtacttgaaccaagtcctatgattggatgttctgaggtgcaagttgtgagcggatctatcaagcagggagtcgcaatggcgaggctcgatgtcaaaattacgcgccgctcgttgagatccgctccccaggtaaggcccatatctcgtggcctcagccctccccagagtaacgttgggagcctaccagggcacttggccaaccacaccgggtcctactttttgaatattttaaggtaaacagagggttcacatctattgtaaggccaggagatggtgtctaggattctccttgagacctacatagatccggcccacgcttggcctccccaaaagtgggctggggataatagggcatgagccaccggtgccggcgatattacacaggtcctaattagctgtggacccattttgcgcttgtacgttttcatattttgccaaaatccttcacctctgtccattggtcggcctcagcggaaaattctccccaccgggctttgtacaaaactttacatactgggggcgcgcactcatcccacgagacataagggcgcggcaactcacgaacacgccttaacagacatggn

SEQ ID NO: 598679 - DNA, 1219 bp, Homo sapiens
gactagttctagatcgcgagcggctgaccttccttcccccgccaggccaggagctgggtgagccctggatggatcatccccagtgtagctgagcactgttcacatggctaccgtgtccaagcaacgcgcattctatccaccgaccgacccaagggcaatggaggtcatcatccaccggctcctgagcatgttccaccctcggagcctttgtgaagacccgacttagacccatcagggagactgtggacctgacctgacatgacatcagcgacattactactacactgtgatgtaccggatccatgccgagttccagctcagtgagcctgaccgacttcccctattttggttactcccactgactcagttcaccgtgcacatcatacctctccaaaagacgaccaaccacgtaccgacgattaccgggatcttcgagacacaaccaaccacaggtctcatgaactggtggacaatggacgtggccccaaacagcaggccaagcagcacaagcagacaaccataggcgacggtggacacacatcgagaacaacaatacaacacaagactgagagcaagcgaaggggaccaagcgaggcacacccacacaatggcaggccccattcaggaggactcaccatggcgaaactgcaaggatgggacaagcaaacaagaaacaaaaaaagaccaaccaaggacacacaacagagggagacgaaccacagaagcaacggagatacagcaggaacggaaccaaacagcgcccctcacacacagagcgcaagacacaaaagcaacacacagaaaagaacccagagacgacctgggcaggctgaccagtagaccacacacaaacacacaagggtcacgacaacaaggcacggaccaccctgcaaccccacaaccagcacacaaaagcatcggaaacacaccggacgaccaacaagaacctggcaggaagatagcgcccacacaaaagccacagcactgcagaaatcacagggggaccacaacaggaagaacgagccagaccagcaacacagaaccacaccgaccaaacgaggtaaaacgacatgccacgacaacgcgaggcgcaaggacaataccgcaaagtcacaccaacgaagagaagcgaaaaagacaaagacaaaggaaggaacaggaccacaaaaccgcacaaaaccgcgcaacacacgaagagcaaacaaacgctaacaaggac

SEQ ID NO: 598680 - DNA, 395 bp, Homo sapiens
aaacagaaaaaaaatgttgaaagccaggcgtgatggtgtgcacctgtagtcccagctactcgggaggctgagctgcagtgagccgtggatgtgccactgcattccagcctgagagagcaagaccctgtccaaaaaaaagacagcacaactgaaaaatgggcaaagaacttgaatagacatttctccagagaagatacacagatggccaataagcccatgaaagatgcgccaagccgttagtcattagggaaatacgaatcaagacccaatgagatactacttttacacatactaggatggctattcaaaaacaaaaacaaaagcaaaatagcaagtgttggcaaggatgtggggacatcagaatccctgtgctttgccgctgggggtgtgaaatg

SEQ ID NO: 598681 - DNA, 854 bp, Homo sapiens
gggctcgagccagcccctggcgttagcaggagggggagaacagataggtaagctcttttagcatttccgtcttatgatctggacactttctccccaagtctcctttcaccatcttgcctctcccaacaccacgtacatcacatcaaacaagatatcgtgggtaacgcccatggacgtgtctgctgacggcgtcgtggctttctttagccagaagagatatagggagccatggtaagaccacgcagttgggtgcagaagtgccttaagttgtccacgtacccaattgtttgagttgttggcctctagttcgtttcccgagttcatctgattacggtcttgatatcttaagtattgacatcgtcttagtggcctatcccgcttattaaaatttcgagactctaactttggggggtagtaacgcttggatcgagtggctatgggaattcgccttgggatatggcgaacgacggtttgtaccccgtgggggctcaaaccccgtttttaagggtggccttaaacggaattcggtacttttggagtgacccatggggggacacctttattgggggggaccactgggaagtaaacctcgagtgtaagtcatttcacgaatagtataccaaattcgagaataagtcctttagatgccacttgggtttaatacaggttattgaaagatcgtgaaaagattatccactctctaatatatagttttacaatgcactattgaagggcgtttagatagaattccgtgagttaaattaaagtacagggttgatcgaattgcgttggcgggacctgggataaaagtaagaaacagttaggttagaccttaagaggggtttaccatggtg

SEQ ID NO: 598682 - DNA, 445 bp, Homo sapiens
gtgattgatgaatggaattcacgatactgttaaatgctgcgagcaacaaggaaacggctttgggatcaaccggggcaggtaatggcgtggagggctctttgagtttgggagtcaggaacgacctctctgataaacagaggcgtgcactgaactgacggacgcaacccttgcacattggtggggaacagcattctacggtgagggaacagtgagtgcaccggtcggaatgacgcagtataaaggccaccgtggctagactggagacacggggatgcgagtggttaatgcaggggtacgccaggtcatgagacgggtcatggaggccactgggaaggggtagaggatataataaggtttagagcagaggtgtaagacaggatccaatttaccttttaaaaggatcccctggctagctatgagggaagaatcgaaataagaagcatgg

SEQ ID NO: 598683 - DNA, 449 bp, Homo sapiens
caccctgctggactacagcctcccagacctctgatgggatgtgtgtgtgtgtgtgtgtgtgtgtgtgtgtgtgtgtggtgtgtatatgtgtctagaccaccccacgaggtgctatgcatgttctctatgcatgaaaatgcattctatagggcacagggttgttcgccggggtgatgtggcaccacattcactatgcatatcacacatttgcttcatgtacattgcatttgtcctaaatgtagagtgtacattgtatatattgtatgacatgtgtcgtgtatatgcatggctgttgtctgcatgcaactcgtatagcaccttccctctgtctcacatttatgctgcatgtgccctgcatgtgggttattgtatatgtgtatcatgggtgcggcattcctgtagaatgtctattgtgtatcgcacatatcttgggtactaacgctttggca

SEQ ID NO: 598684 - DNA, 196 bp, Homo sapiens
cccaaggaacatctcaccaatttcaaatcggatctccttggctcaacagctgaagactgacgctgcccaatcgctttggaagctccgggactatcacggaccccgagcttcgagtaactcttacagtggagggtagcaccggtcaaagacttcttgtgtggtaaacacttaggataaagtgcacaggcgattgctt

SEQ ID NO: 598685 - DNA, 1831 bp, Homo sapiens
  misc_feature (1009)..(1009): n is a, c, g, or t
gcgcgtgctcatgacaggcgcgatgggagttcaggtggtggatcctggaacgtactaacacgagtctggacgtcgggcacggtgcatcacgatgtgctagagagaccgtgcattgctcacgacagaggttagcaactcccttgctgacagcgaacgcacagtgagctacaagcgtgaccacattcgtacattaactacagtagcatgcgctctgtgtgctacagtacagggccccaacgtgctacgagcctagcgatggtagctcctggaacctaacgcgaatctggagcacaattgtcatcagagccagcatacggggcggaataccacaatcggggcacacggcagcatgccccaagtggcctccaagtgcagcgagccctgcgtggcgatgggcgcactaaacgaatgggtgctgacaataccaaggcggggacacttcgagcggatcacgtgcgcaggccaagcaagcgacgaaagcaacccgtcagaaattgccccccgctcgccatcgacccccgttcggaacacaccgcggcacccccacacggttgacaagccaggcggcctccgaatgccacaacggaccccccctggtgagcgcggcctaacccacccgcgcactgacggggcatccccgccgggggggctcgggagcaacttgcggcccacaaagaagctcgccccaacagaggacctcccagcgccaacgtcgagccaacgccctgcggacagagctaattgcccgcacaccacgcaaccggggcacacacctacggggccccgcccaagtacgacgcgaaaaaacgccggcgatcagcaggatgggagccccactcgaactccgctcccccggtcaccaacggagccaacccaagcttccggcacacgtgccctccccctgcacacacaccgccaacggacacggcgtcgaacacccatctggacaccctgggtcacccactccgccgcaacaccgacggcccccatcccgcacaccaaaacacgncaggggcgaccacacagaccctctgcgcacgcgcgcagccccccaccctgcccgcagcgccccacccacagcgaccctgccacagcgcctcccgccaccgccgcacgccaccacgccccccggccacagcacagcgcacccccacacaaccgccgccacacagcccctgcggccccccaccacggccgcacccctcccccacgacatcacaccaccaaccccctgacacagcccccccccaccaacgccgacgaccagcggcaaccagcaccagaccggtcgacaaccacgcaacgaccaacgcccccaccaccacaccccgccccccaccacacagccgcacacaacagcgccccagcacccccggcacgccccagcctcgcccagctgccccacccgcgcgcaacacaccaccacaccgcacccccacgcctcacgccgcccgcgccccgccccacgcgcagcgcacttcccgcgcaccaccacccgcagcgctcccggccccctcccagctcactgtcaagtatgttcacctcgctcccctccgacccacgaccacccaacgcactcactcgcagaccgccacccacacgccaccgccgtaccccctaccccagcacaccgccccccgccacccaacacactagcacccgactcaccgacgaccgccaccgcgacaccacgaccaccgccacgccacccccaaccgacgaccacgccgcacccaccgcaccgaccaccgacaacccccgctacgcgcacagcagccacagcaccaaccggcagcccgccctccaccaccgccccgactgcccaccgccc

SEQ ID NO: 598686 - DNA, 124 bp, Homo sapiens
agtctatactgtggtgtaccgtccccttcttctaagacattcccatctctcctccatttgttcccatttcattccctgccgagcagaataaaaagacaccagatggatcaaaaagcttctccac

SEQ ID NO: 598687 - DNA, 537 bp, Homo sapiens
ggcgcatcgcctcccacaggccagcgtgaaagggctggggctggcacgagagcggcttggccaggctaggctggcctcagggactagtgggccaggagaacgcgcgagaggcatgtggctgtccatagtagacattaatcgaaagcaagaaaatggctggaagagctgtcttgttgggaggacctcctggaacgtggcttagaaaaggttctggctctggctattgctcaggagacctgggtagtaagggtccccttctgcccaaatggttgggggcagtgtaaagctttactcaaactgtacgtatcaagaagcatcagagagtgactgatggagcaacttccgggagggttcattggtgctgcgaagtaatcggagagccaacggcaaggtttatgaagggtgaagttcgcaggaagctaagctccgaggtggaatcaggaggaagcccggtgggaggatatggcaaagccgttaggccattgtgatcataggatctcgaaaagagccaagggaagccagacagttgatgctgga

SEQ ID NO: 598688 - DNA, 169 bp, Homo sapiens
gggggttttttttttttgaaaaggggcccccccggggggggggggggggtccctctaaacaaaaacccccccccgtgggggggggcccccccctttttcccccctggggttttttttgggggttttggacccccccctttttgggcccaaaatgggcccttttttttta

SEQ ID NO: 598689 - DNA, 706 bp, Homo sapiens
taatgggcttgggtgagggaggtaggtggtagttggtgttaaatattttaagtggggtgatgaggaatagtgtaaggagtatgggggtaatatggggggtggtggggtaaatgagtgaggcaggactcccgaggaggtaagtggtggcaattaaaaagtgattaaggatactagtataagagactcaggttcgcccttacaggtgtgggtgtatggttactcattggtttggaggtacagttggatatagacatggtgggggtggctgatatagccggttcgtcgatgagatattgggaggtgggggaccaatagagggaggctgtggcagtgtgtgcaagaacaataactttaaccacaacagcctgtcaggccccctttggggcacccacctggccttgtgaggacacgccggtgaaggacacccttgaggcctcacttggtccctgccccgtttcccccaggcaggtctcaggaacgtgccaatgggttccggggccccgggtcttacagagcaagtagccgccatgaggccctcagtagatgtcggcttggccacgtggcgctccaccagttgtctctgatgcaggtaccccctataaacccgcccactgggggcccttaaccctcttccttcatgtccccatttctttgggcctcttcccccaactcggggccatccccacgcttcctcctctcttcccag

SEQ ID NO: 598690 - DNA, 244 bp, Homo sapiens
tagatatggggtcttgccatgttgcccaggctggacttgaactcttggcctcaagtgatcctcccacttcagcctcccgaatcgccaggactacaggtgcctgcaattgtacccagctcgggacacaattcttacattttcttttcttttctttatttttttgaggcagagtctcgctctgtcacctaagctggagtgcagtggcatgatctcagctcaatgcaacctccgcctgcgtcgacgc

SEQ ID NO: 598691 - DNA, 389 bp, Homo sapiens
tagctctgcttttggctggtacgttcctaggatcggggctgcttatgcctttcgtttatccttggggtttgagagcgctgtatttgggagagagtttaaaaatacattaggagagaggaaccattaaaaggttcgctgtcagagatattgtaggtggtaagactggatttcgtctcgggtttaatttcttttatgggtctgtgagtcattcaacagatcccataagtatgggttaatattttaattgggtaaaactcattgggtactttgcagcctgtaatagtgggtctgcgttttcaacctggtgcaataactgtgctggaatattaacgcattaagaaaacttttcttaagcgagaagaaaaaaaaagagaaaaaaagggaaggtg

SEQ ID NO: 598692 - DNA, 155 bp, Homo sapiens
tgcggcgggttggtggtacgcgagtgtgacgataacctgaaggccctagcgacagccctttgctttctacttcctttctggcaggtggcggctttcccgtaagctataatcggggctccttaggcgtccgatttagtctttcggcacctcgcccc

SEQ ID NO: 598693 - DNA, 187 bp, Homo sapiens
caagctgattcttgagtatagacgactcatttcagatcgagaacggactgatacagcatccatcataaaaatgtattaatgaacatgatgacaactcttgaaacaaatgagggctcagggcaatataaagaagaaacaaatggctggctcatgcctgtaatcctagcaattttggaggccaaggtgg

SEQ ID NO: 598694 - DNA, 118 bp, Homo sapiens
cccaggcatcttgctcagaagttttctcatgaggagattgcatggcgaccgtcacagcgctgcgccgacagtgcccccgctgtcactgggatcaccttcctgccattgggccagcggg

SEQ ID NO: 598695 - DNA, 317 bp, Homo sapiens
cttttttcccctaaccatttaaaaatgtagaaaccagactgggtgcagtcgtcacgcctgtaatcccagcactttcgggggccagagcgggtggctggcttgagcccaggagttcaagaccagcctgggcaacatggcaaaaccccgccatctctaatcaaaatacaagacaatgagctgggtgtggtggcacctacctgtggtcccaactacttgggaggctgaggtgggaggatcacttgagcccaggaggtggaggctgcagtgagctgagatcgcaccactacactcactccacagagcaagaccccatctca

SEQ ID NO: 598696 - DNA, 187 bp, Homo sapiens
gaggactacagttcctgatttccaggccagtccctgatccctgacctaatgttagtcgcggaatgatgaggctggccagtgcccagcagtgagggagctgacctcaggggccgagactagagaggcactcaaggaggatccaagagctgactatgcctgcattgctgataacaaacccatctgagca

SEQ ID NO: 598697 - DNA, 259 bp, Homo sapiens
ggatcccgcgatgacttctgctctcaacttggacacatctagtttgcctgggggccttcatttctcaggaccaaaggtggaaggaggtgtgaaaggaggtcagattgggactccagggctccctgggctggaagtggtggtctggggcccttcaagggtcaacttgggaaaaggtgggattcttgggaacaaaggtaaacaatttccccttaaacaatggaaaggattcccccaagaatttttaaccctttcttccttg

SEQ ID NO: 598698 - DNA, 191 bp, Homo sapiens
acagctcgatttgttcgaccacgagggctatcacaatctgccggaggagtggatagaagagctcagattcgtattcgaagagccgcaccgcacaatcgtcatgcacaacgtgcccttcgatattcaagttaccttcggtgaggggttcgatttcaacgcgaacagcttctgtacgcaaattcttgcccacc

SEQ ID NO: 598699 - DNA, 771 bp, Homo sapiens
  misc_feature (38)..(38): n is a, c, g, or t
  misc_feature (41)..(41): n is a, c, g, or t
agcctgctgactttgcagtggctcccctgcctcagcgnttncgcagagcctcctcttttctggacaagatggcaacccttaaggagaagctcattgcgtccgttgcagatgatgaggctgccgtcccgaacaacaagatcactgtagtgggcgttggacaagtgggtatggcatgtgcatcagcattctgggaaagtctctggctgatgaacttgccctggtggatgtgttggaagacaagctcaaaggagagatgatggacctgcagcacgggagcttgttcctccagactccgaaaattgtggccgataaagattactctgtgacagccaactctaagattgtggtggtgacggcaggagtccgccagcaggagggggagagtcggctcaacctggtgcagagaaatgtcaacgtgttcaagttcatcattcctcagatcgtcaagtacagccctgactgcaccatcatcgtggtttccaacccagtggatattctgacttacgtcacctggaaactgagcgggctacctaagcaccgtgtgattggaagcggatcaatctggattctgctcgattccgctacctcatggcagagaagcttggcattcatcccagcagctgccacggatggatcctgggcgagcatggagactccagtgtggctgtgtggagcggggtgaatgtggcaggagtctccctccaggaactgaatccagaaatggggacagacaatgacagtgagaactggaaggaggtgcataagatggtg

SEQ ID NO: 598700 - DNA, 1329 bp, Homo sapiens
  misc_feature (781)..(781): n is a, c, g, or t
agcggaagcgcagcccgaccccgcgcagcgggtagagccaggagccagcgcagcctacggccccgcagctacaagcctacgtaccccgccgccgccgccgccgacgcgccctcggggcatggcctgtctgatggcccgcgtaactcgagtctggcaccagcccctgacatagctattcttttgtatcgactttctctgggaaaatctgtcgctcgcgtgctcatcgtatttcacgacgctggttcttaacgcgtaggtgggtgcgtttcaggtgatcagtcccggtgatactacgggggcgagttttggggctggtcatctgccttgcaattactgatggatattacaacttctcgatggccaaaatcttctctaattctacattacaaccaacccatgcttcccgcccaggctaaagctagtctaatatgcaccattttacacattcatgctaaccttataccaatgtgctgggacctgctgtaaaatttcgaagttttatttctacgcgccacttaaactttaacctaaagggcttatccaatcgctataatatgggacgcatatattcccgattctacactgggctctgcaactacaatattatgcctaacaatgtgcaatgctccgaaaaatacttgcgggctcacacgcaatataactgtctctttaaatgtgtacttactttcgttatgaaaagcgctgcgcggaggagccaaagaggcgcaacgcggttaggggttctcacccttttttttccacgttttatattgtacgacanaggctcccggatttcccaacgtggaccacacatcgtcgttcctcgttccggctcctcaattgcttccttcatttgtgatcgcgcttttcggcgttgccagttggagtcacagtcggctaagacttttagcggacactctttcacgggtctattggggatcattcactcgatcggttgcgataacccggcggctgacacgccaaccctattctcccgcgtcgctactccacccgcacgatcacgtcatgcgacacctccatccttccccgggcggaggatcacgtccctttccgcactgccactctcacacttaatctctggcggcgctacatctcaatcacgcgtcattacgcctggtatacgcgtcttttgtccaattcttccttggcacccgcgtttgcctttgcgttgccgccacttgccttgggggctcatgcacagactactctcgttctgccggcctcttccaaacccgcttgcggctcgcggcgcttttatacgtcctggcaaccttctctacttctccacatctctactacttcgtcatc

SEQ ID NO: 598701 - DNA, 190 bp, Homo sapiens
taaaagggtcttaaaaggtatttaaataggtggaggcgggacgaaaatagggcaccatcagaataaaggcaggcaatatatttacggtcagatgaaacaggggtgtccataaatcaacaaaaagaccatctcctcctttgagggaaatacatggtatggcttacgccagtcaccaataaggtaaacggtc

SEQ ID NO: 598702 - DNA, 102 bp, Homo sapiens
ggaatgactgcagtagctggctctactgcgcgtttttctgcttgctggggaggctttgcattccagtataacagcagctcggtttcgatcaggccgttgcat

SEQ ID NO: 598703 - DNA, 371 bp, Homo sapiens
ttaatttaaatggatgcaggttgtctactaaagaaagattatatataactatgctaattgttcataatcaacagaaaccaagatagagctacaaactcagctgtacagttcgtacactaaactcttcttgcttttgcattataaggaattaagtctccgattattaggtgatcaccctggatgatcagttttctgctgaaggcacctactcagtatcttttcctctttatcactctgcattggtgaatttaatcctctcctttgtgttcaacttttgtgtgcttttaaaatcagctttattctaagcaaatctgtgtctactttaaaaaactggaaatggaaaaaaaaataaatctttgccaaatccttca

SEQ ID NO: 598704 - DNA, 342 bp, Homo sapiens
  misc_feature (339)..(339): n is a, c, g, or t
  misc_feature (342)..(342): n is a, c, g, or t
aataggggtggtggtaatgctttgtacatcatcagttatgagtagggattggctagtgtagttctgtcaggccaatgattataagagagacatttaattgtttggacactcagactgtatacataaacttattttttgattgagtgtgaacgcatttatatgtctgtgatcgagaaagtaatcatattctaaacttattatacctatagtcaataccatgtctgatgtgactcaaatcacgtcttcttgcttgctgaggactgtggatagactgatgacaatatgcttgacgctagtgttgctgtgtcttttagcagctctgtgagatactttcgctgngtn

SEQ ID NO: 598705 - DNA, 342 bp, Homo sapiens
atttaaatttaaaggaaatgggatgaaaaattcattttttcaattgcattagccccattttggggattcatgggggggggagattttgtattagcccaaaaaaatggaacatttccctccccccagaaagttttgttgggcagcccggcattagaaaattttcaaacgggttttccccaattaatttttggggttaagggggaggttttcattggaggggtcaaaatgttccctgaaccctttcaaggacccaattggatgttttttgtatcccctcccccaaaaatttcgcttgggtcattttttttgcggcttcctaaaaagtttgttttcctcctcaga

SEQ ID NO: 598706 - DNA, 1068 bp, Homo sapiens
  misc_feature (220)..(220): n is a, c, g, or t
gattcctgtaatgggtgcttcctagaagcgtaatgtacgaactcgtctccaacaggatacttaggttgcaccgagtgtatttggtagaacaggagcatgattcctgtaatggctgcttcctagaaggtcgtgtcacgtggaacctcttaatctcagcatccggagctccaggaagggaacaatttcaagtcagatagaattctatatataccatttcttnggaaccttcagccctcaagattccaacatcatgacctcagtttcaacacagtgtgtccttagtcctcatgtcactgctttggtgctgcctgttgtggaagcagtagaagccggtgatgcaatcgccctttgttaggtgtggttctcagcattacaggcatttgtgcctgcttgggggtatatgcacgaaaaagaaatggacagatgtgactttgaaaggcctactgagtcaaacctcaccctgaaaacctttgcgctttagaggctaaacctgagatttggtgtgtgaaaggttccaagaatcagtaaataagggagtttcacattttttcattgtttccatgaaatgggaacaaaacatacatttataaattgaaaacaagaatgttttctttacaacaaataatgcacagaaaaatgcaggctataattggctagttaggtagtcaaagaagtaagatggctgaaattaacataagtaatatttcataatcttagaattctctcaaagcatgtgacataggaagaaggagagttcttgcccagaatcttaggaaatcacactggtcggttataatcagatgcctcctgaatcgttgaggagtcttcttgaattagatttttgttttggttgtctccccagttaatatgtatatttagatatccagagagtcagcgcgatcaaaggaacaacttttatctctagggaaacaacatctagagaaactgtattcagtgtatctaatactgtaatgcggtaaaatatgtcaatgttacacaactaaactatagacagtgacatggaaaagagatgtaatgttttgaagtaaaacttcatattcactgagt

SEQ ID NO: 598707 - DNA, 401 bp, Homo sapiens
  misc_feature (250)..(250): n is a, c, g, or t
ggcctggtcacatgctctccgtgcagcagcgtcacggggacggggcgcatggtggtaacacgtctatcctgagcctgtggccgcgaggacggagggaacaaggctgatgctacaaacacggcaacgacgctggggacgggacgcgacggcggacagccggcgaacggacggacacgacgcgaccgcgacggggaccggggacacacggaacggggggggaacggcaagcaaaaaaggggacctccaaggntctcccgacgggaggttaataccaagaaccatgtgtgccgagcgtgtgggccagttcatgaccctggtttgggtgtgggccaccttttgacccggcgcgggggaccgatgccaccaaaccacccgagggtccccaagacaggagctcccag

SEQ ID NO: 598708 - DNA, 911 bp, Homo sapiens
taacaaggtctgactgcgaaagaagtatctgtgtgataagggcgtccgctgcgccgaacaggcttaccattcatgggcatctactcgatcaaggaagattaggactgactaaccaagcagaggccgagacagggtgggccgtggcgcaatacgagagactactacatccgtgtacctggagcatccaacgggtggacacaccatggctcctggtgcgcgagagtttgctgggagcacgtgagccctccaggaggcaggaagagttcgcgtcgcctggcatgccctcccaagatgtcatatgcaagtcaatcatccgacagagcatctgccctctctatctttgggggggccacagacatatgcagagaaggtcattgccatgcctgtgctgtgggggctcccggaaagaagcttcctggatggatttactcgacgcagatggcaggactatcaaagctgttgcagtgctgacggcgcgtaccctgcgggacatggcaacgctctcacagactctctggaaggttcgatgggaggaagtgtttctcccagttgggggtgataccacgttctgtgtgaaaaacgtcgggacaaggacaagctggacgtgacacgggctcggttgatgaacgggaacccttgcgtgcccggatagttgtcagcatggtacggggcgtggagacgattgtgatcctgggccgactgggtggttggtcgtctgttgtgaccgagattgagacgaaagatgcgatcaagaatgaccggggtggctcactccacgaaggccatggagtgagcagaacatgtctatggcgagggcggggatcaccacaggctgaatggcgtgctccggacggggtgctgcaataatgttcgcgcgggatgcacacaggggagggcccttgtgtaggcaa

SEQ ID NO: 598709 - DNA, 262 bp, Homo sapiens
aggcattggcgtgggccgccgtgatatctagggaattgtgcgtcacactgagccttgtctggagtgcctgtgggtccagggcctcatgcctgtgcccttatatgacccattgtttgcctgtgtcccaccattgaccctgtttgtgcccgggcttggaggacaaggcgtgaggagagctgggctctgagagtggcgctattcagctgtgtctcgtccctggaccccttgatttctggtggcagtgtggggtctgcacgtggtg

SEQ ID NO: 598710 - DNA, 310 bp, Homo sapiens
gggggggcccccccccccgggggggggggggggccccccccccctttttggggggaaaacccccccccttccccccccccgggaggggggggcccccccccgggggggggggggggggggggcccccccggctttccccccggtttttttttttttttttttggggggggggggggccccgggggggccttttttcccccccccctttttttttttttttttttttttttttcccccccccccggggggggggggtttttttgtttttttccctgttttttttttttttttaatttttttttttccccca

SEQ ID NO: 598711 - DNA, 546 bp, Homo sapiens
  misc_feature (154)..(154): n is a, c, g, or t
  misc_feature (168)..(168): n is a, c, g, or t
  misc_feature (215)..(215): n is a, c, g, or t
  misc_feature (224)..(224): n is a, c, g, or t
gagtcccaggcttcctcaagcatcatttctctaggatactgtattatcccctgtagggccttattttctatctctacttaactcccctaaaacatgttatgtcagacagcatctaagataagtcacatagtgcagtatttatgatgccgtgatngctgtcattacttntttatcaattacagaaaaaaacccttcaataaaataaaccaatctgnatatacttngttaacatcaaaggtttttaaaactgatttttttctcctagaatgcatcctaagcattaacttcttcaacctaaatgatgcctcaagtcatgcaattttctctacatatatgacaaaataaggaatatacatacagataaacatacataataagtgaagacaccatacacacgctcctaaaaggtatgcagacagacatttcctaattcacatagacttcttacaaatacttacaaaggtacactcttcaaaggccaagtaacaaccaccattacctttaacaaaaaagcttttttttcaattataggaaaggcttattata

SEQ ID NO: 598712 - DNA, 222 bp, Homo sapiens
ggagttaaagcccccacgtgccagcggggctttaggcagttacagcaggacaaaatctggtatttgtgaatatttctaaatgtgcaatacaacatgggaggagagcgtgtccggctccagcccagcccgctggtcactttccaccctctctccacctgcctctggttctcaggcctctgctctccgacctctctcctctgaaaccctcctccaactctgcag

SEQ ID NO: 598713 - DNA, 851 bp, Homo sapiens
tatgcgtctgagctatgatatcaatgggcttcctaggcgtcgatcgtgtgaggcacggccatatatttacagtcaggaatagacgtagacgacacgagacatattgtcacctccggtagcataatcatcgctatccccaaccggggtctcagtgttatagctgactcgctacactcgcacggaagcacagtatgaaatgatctgctgcagtgtgtctgagtcctaggcattgcatctgtatctgtttcaccgtatcgtggcctgtagctgtgcatgtgtattacgcaagagctcatcactagacatcgtacttagacgagacgtactacgttgtaggcctcagttcgactatgtcctatcaataggagctgtattggccatcataggaggcgttcgttcactgatttcccctattctcaggactatgaccgctagaggaaacctacgccgaaaatccgatttcgctatcatcttcatcggcgtagatctaagcttactgcccacaaacttagctcggggtatccggaatgcccgacgttactcggagtacgccgatgcatacagcagagtgaaacatcctatgatcttgtaggctcatttcatttcctcttaacaagacagtacctatttaagtactccacatgattttgagaacgcctcggttccgaaggcgatgagtcctaatagtagaaagaaccgtccataaagctggagtgactattttggttgccccacctacagagatcgagagaacccgtttggtaagtcttgcacgacagaatgaggagggccaaacgctggggcggtcggcacgaaacttacacaaattcggcggcccgggtcaaagcaca

SEQ ID NO: 598714 - DNA, 714 bp, Homo sapiens
tattggcggggggggtatgcgaattgtcggctctgactgtgttgccagcctgtgttgttttgatgatctccctctctggatgttcgggaaatttgggttcaaaaaaactagtcgtgtgggtttagtttgaacaacctatcgcgcaataaagccgcgcgcgtagtccgcctctatggtggccatacgaagctccgaggtaggataatcgtgtctctcgtgttcgctctaacgcgtaagttgacgtgtcgctgaggtgcacatccacctccattggctattcagaggatggtccccacatctaagtgagtcgtccacgtcttacatagactcactccctgatgactccacacacgctcgttcagtatggtaagccagtaacagagccgggcgggcggtgttcggatacacacgtgaacacattcccacactgggtctcgagaataggaggttgccccaagatagaggcacttcagtggggtgctctctcctcgtgtttatctggtgaaactataacgaattgaggggtgcgggccgcaatagaattatctctctctcttgcgggtgactctttgttatcacgccgcgcgcgcggctaggttgagttctccgggtggcatccccacatacttctggctgcatccaccacctgctctgctacctgcgttaacgtcggttctaatgtaacccaaccggaacaatacaatagaacgaaaa

SEQ ID NO: 598715 - DNA, 591 bp, Homo sapiens
  misc_feature (43)..(43): n is a, c, g, or t
  misc_feature (85)..(85): n is a, c, g, or t
  misc_feature (427)..(427): n is a, c, g, or t
ctgggccctgctgctcatgatcctgcatccagagtgtgcagcncagagtccaacaagaaatcgatgaggtcatagggcaggtgangcatccagagatggcagaccaggcccacatgccctacaccaatgctgtcattcatgaggtgcagcgctttggggacattgttccactgcatttgccacgcatcacaagtcgtgacattgaagtgcaggacttcctcatccccaagggacgatcctcctccccaacatgtcctctgtgcatatggatgacactgtctgggagaagcccctccgcttccatcctgaacacttcctggatcccagggccactttgtgaagcatgaggcctttataacattttcagcaggccgcagatcatgcctgggggacccctggcccgaatggagctcttcctcttcttcancctgcctcctgcagcgctttagcttctcagtgcctgatggacagccccagcccagtgaccatagagtcttttctattatggttgccccctccccctaccagctctgtgctgtgatacgtgagcaaggacactaattccatacaggctctgcagggaaggctgtg

SEQ ID NO: 598716 - DNA, 148 bp, Homo sapiens
ttcagccggtatccctgcactgatggagcagaagcaggcactgctaccccggctggctgtctgctggctctcacgccaggcattattctgggcctggctgtcgcagatagtgggatcacataacgctgcatgtccatggcatcttggc

SEQ ID NO: 598717 - DNA, 193 bp, Homo sapiens
gcctagaggaccggtcattcagtcatctttcatactatgaaggtgcaaacagctatataattgctacgagaatattactgacaacaaccctacataatataaaacacacgcgtagaagtggttggagttgcctgtacaggatcctaaatagttctgctagtgtttttgtcccacggctgaagttttttacttc

SEQ ID NO: 598718 - DNA, 326 bp, Homo sapiens
aggagtaggcaggcaggagaatatttcaacctggtagtggaggttgcagtgagccgagatcgagccattgcactcaaacctgggggataagagtgagacttctctcaaaaaaaaaaaaaaaaaaaaaaaaaaaaaaaaaaaaaattaaatttcggggcgggctttgggggcccagggttgtatccccagcttttgggaaccccagggtgggtgactctcaccctgtggaggccaggaaacagaacacctgtgcctgcgggggattcccgaagcttcgaattccgaaacttctgtggccaatagcttgtttcccgtggtatgacaat

SEQ ID NO: 598719 - DNA, 894 bp, Homo sapiens
  misc_feature (1)..(1): n is a, c, g, or t
  misc_feature (106)..(106): n is a, c, g, or t
  misc_feature (108)..(109): n is a, c, g, or t
  misc_feature (113)..(113): n is a, c, g, or t
  misc_feature (134)..(134): n is a, c, g, or t
  misc_feature (150)..(150): n is a, c, g, or t
  misc_feature (156)..(156): n is a, c, g, or t
  misc_feature (168)..(168): n is a, c, g, or t
  misc_feature (184)..(185): n is a, c, g, or t
  misc_feature (192)..(193): n is a, c, g, or t
  misc_feature (198)..(198): n is a, c, g, or t
  misc_feature (200)..(200): n is a, c, g, or t
  misc_feature (208)..(208): n is a, c, g, or t
  misc_feature (228)..(228): n is a, c, g, or t
  misc_feature (254)..(254): n is a, c, g, or t
  misc_feature (263)..(263): n is a, c, g, or t
  misc_feature (275)..(275): n is a, c, g, or t
  misc_feature (295)..(296): n is a, c, g, or t
  misc_feature (308)..(308): n is a, c, g, or t
  misc_feature (315)..(315): n is a, c, g, or t
  misc_feature (322)..(322): n is a, c, g, or t
  misc_feature (332)..(332): n is a, c, g, or t
  misc_feature (336)..(336): n is a, c, g, or t
  misc_feature (374)..(374): n is a, c, g, or t
  misc_feature (378)..(378): n is a, c, g, or t
  misc_feature (380)..(380): n is a, c, g, or t
  misc_feature (417)..(417): n is a, c, g, or t
  misc_feature (462)..(465): n is a, c, g, or t
  misc_feature (492)..(493): n is a, c, g, or t
  misc_feature (854)..(854): n is a, c, g, or t
ntctatttttcttttaatacaatgaatacaaaagcagttgaaatagtacccccacgattacacagctttgaacaagtgaaactatggttaccaaacagctattttnannatancatctacagtgtctggaaaangatgtaacaataaatncctgtngacgcatcacgngacatccatttacttnntcacagnngtggntnttgctacntagttttctcaatgtcttcnttcttcagattctccaggcttacgantgtcatcantcttcaaaatcnttctaaccatttgtgttgcnngggatatctgtngcttttngccaatnaaggtttctntganatgctgttgcttcatatcatttgtgcccttgtgcaaanggtngntgccaagggcggggttcatctccttcacctgtttggntcgggcttcggtcatagtctggttgggttttatgccactgttttnnnngggggccatggggttgacctccagtgnnttggcaaacgctctcatggcatactgttctttggtggggcacttatccgcctcttggctaactgccagggcacaggatatctcagcagcccctcctccatacaccacacgattatcgcggatgaggttccggatgacacacaaagcatcgtgaagggatcgtttcgcctcctcaatgatcatcttatttcctcctctaataaaaatggttacagctctggagttcttacactgctcgatgaccagcattttatccttagttgtccaaatgagatctcctgtacaagaccagcaaagcccagcttctcggctgtgagctctgagaacctggggacgatccgccctcctgttgcgatggcatnagctcaatttcaggtctcctacccagcgaacgcagcaagt

SEQ ID NO: 598720 - DNA, 381 bp, Homo sapiens
atgcctgaaccagctaagtcagctcccgccccgaagaagggctccaagaaggcggtgaccaaggcacagaagaaggatggcaagaagcgcaagcgcagccgcaaggagagctattccgtgtacgtgtacaaggtgctgaagcaggtccaccccgacaccggcatctcgtccaaggctatggggattatgaactccttcgtcaacgacattttcgagcgcattgcaggcgaggcttcccgcctggcgcattataacaagcgctcgaccatcacttccagggagatccaaacggctgtgcgcctgctgctacccggggagctggccaaacacgcggtgtcggagggcaccaaggcggtcaccaagtacaccagctccaagtaa

SEQ ID NO: 598721 - DNA, 292 bp, Homo sapiens
agccgcccccatatttgcggagtgtatcaacctctgcttctagtgttgtctacatctaattcagggtcgccataagtgcgactcaatgcgttcttggattgcatatagcatcttccactcagtgtccactagctggacttgtaaattctcaatctggtcagttttcacttgcttgtctaccttcatttcctttgctcccagtatcatagcatcaaccgtggtcttggtatccttcaatgactggatagtgtaattaacttgtttcatgtagaatgactcttgggtgcgatcg

SEQ ID NO: 598722 - DNA, 122 bp, Homo sapiens
  misc_feature (79)..(79): n is a, c, g, or t
  misc_feature (113)..(113): n is a, c, g, or t
tctcgacgactcccgggtgggcgcacgcacggtgtgacgtgacctgcaccctctttttacgacggaccaccacggaccntgggcttaacggacacgggaccacggccactacngcgcccacc

SEQ ID NO: 598723 - DNA, 576 bp, Homo sapiens
  misc_feature (176)..(176): n is a, c, g, or t
  misc_feature (248)..(248): n is a, c, g, or t
  misc_feature (273)..(274): n is a, c, g, or t
  misc_feature (276)..(276): n is a, c, g, or t
  misc_feature (278)..(279): n is a, c, g, or t
  misc_feature (296)..(297): n is a, c, g, or t
  misc_feature (319)..(319): n is a, c, g, or t
  misc_feature (355)..(355): n is a, c, g, or t
  misc_feature (370)..(370): n is a, c, g, or t
  misc_feature (550)..(550): n is a, c, g, or t
ggtttccctttaaaccagatcctggagacagtgagatactcagggcgtgttaacagggagtggtatttgaagtgtccagcagttgcttgaaatgcttgccgaatctgactccagtaagaatgtgggaaaaccccctgtgtgttctgcaagcagggctcttgcaccagcggtctccntcagggtggacctgcttacagagcaagccacgcctctttccgaggtgaaggtgggaccattccttgggaaangattcacagtaaggtttttggttanntngnnttttgtttttaaaaaannggatttcacagtgagaaagttnggttagtgcataccgtggaagggcgccagggtcttngtggatggcatgtgngacattgaccgtgagattcggttcaaaacaatactgccttgtggaatatgacagaatcaatagcccagagagcttagtcaaagagatatcaggtctaccttaacaaggcactttcttaagcagaaaatatgtgtgaggttaccttgtgctgtaaagatccaatcttctaagccaaaaagnatagcaatcctaggataatcacctct

SEQ ID NO: 598724 - DNA, 255 bp, Homo sapiens
aacgggtgatgcggttggcagtatagatattcattaccctaaaactaaaatgtttcagttcctaaaaatgactacctaaattttacccaaaataactagttccattccttgtggagggagccgtaactatctttactgatggctctcagaatggaaaagcagcttatacaggaccggaagaaaagattattcaaactcagtttcattctgcacaaagagctgagctacaaagcagttatatctgtatgggaagat

SEQ ID NO: 598725 - DNA, 366 bp, Homo sapiens
atattctttgaaaggcagttagttcaataacttatgagtagatatacactattatcgggcagctttacttattagaaattcttactttcggccggacgcggcgggttatgcctggaatcccagcactttgagagggcgaagcaggaggatcacaaggtcaggagatcgagaccatcctggctaacacggtgaaaccccgtctctactaaaaatacaaaaatttgctggacgtggtggtgcgtgcctgtaatcccagctactcaggaggctgaggcaggagagtcacttgaaccagggagtcggaggttgcagtgagccgagattgcgccactgcactccagcctggcgacagagcaagactccatc

SEQ ID NO: 598726 - DNA, 868 bp, Homo sapiens
cccgaggttaccccgttcaaaggccaatggcacattggtccagtgtgtaatgggatagatttggctcccaatttaggtaaatgagactagaagatttaactagaccgatagtttaggtggatatatttttaaaactcagaaccagtatattggtcctgtgttacccagtttaaaagtgaccgttgaaaaagaaattcccctgaaatgatcatgaggttaaaattttcggtcaataggggacttggagaacccgtagtcgtaagattagttgatagtttcactgccccagccatgaattgctttctgtgtgtttcccccgtaggactcccatagtaaatagctgtctgtcttacaccatttataaggagccctgcacagacgacgacccaaggcctcttggcctgtggctactaaacccagagagcctattagaaaattttctttctttaaaacttgtttttttctcctttccacgctaagtgtcaccactttggaataaattttataaaaagaaaaagtaaattaccccgttgtgttttccacgaaccacctataaattggcggtgtattcttaaattcacgttaaaatattaattagtagaccctggatttttcccccttgaccccactcacgtctataaaaggttaaaactgccaacttttatgaaaatggtctttaatatttcccaccaataatccctgtgctataatttgttttatagaacaccaagtaactcttataccacttccaagacctttacgaggattttttaaatccctgtattgttggatccaattaataaagatgcccaccaaactttatagagatgttaaaaccaaactataatggatctcctatttttcttta

SEQ ID NO: 598727 - DNA, 388 bp, Homo sapiens
agcagacagttgtaacaagaaagtgctcagatagggtctagcccggctttcacagttctagaggtggacaactgatccctgtagtagctgactggcacagtcaagcaggctttggcaagagtgccccccgacagctattaggattacccacaggcactccttgtcataaggccatcgtctcagtcagtgctggcaaataaagggtttaatattttggttttaatctggagttacaatcttagttttaatttggacccaggttgctaggtgatgcctgccacaggagttcgggacatccgctggccatcctttgacttgcatgtccggccagttgtcagctggagaagcgcagcagcttgtgcacaattcggcacgagctcgtgccgaa

SEQ ID NO: 598728 - DNA, 121 bp, Homo sapiens
ggtggcatgtgctgtaatcccagctactcaggaagtgaggcagagaatcgtttgacccagaggtgaggttgagtagccaacattgactactggctattcctgggaaaagaggatctctgct

SEQ ID NO: 598729 - DNA, 117 bp, Homo sapiens
gaacagaatgaagagggatctcacaagacacctgttatcctcttctatacaccctatctcttcccacccccagcttccctttgacccacaaagttcccatgtgcctgtaccctcccc

SEQ ID NO: 598730 - DNA, 332 bp, Homo sapiens
  misc_feature (134)..(134): n is a, c, g, or t
cccagggggaaaagggggggggggttttgggcccggggaagggcccaggggggcaggggtccagggggacccgctgaggtcttttttggggagaaacgcccggttgggccgggcgggggggggccggttttttnaaccccccccctcccggggggggggggggttccccccccctttggggggcttgggccccttttagacccgggggggggggaagccccccggcccttgggcccccggggggggggttgggtcccctccggggagggggggggggggtttttttttttttttccttttttttttttcaataaaagggttttaaaccccca

SEQ ID NO: 598731 - DNA, 210 bp, Homo sapiens
gagaatccgaagatctggtgtgtcttattttgtattctctgtgtaaacagtgactataactaagtgtagtggattgattaaagaactatcaggcagacaggtatgtagtatccatgactactcttaaccatgcagactaataatattctggaggtatatagctcggcaccttcaccctttatttcactgggtatttcatgtaacggcatc

SEQ ID NO: 598732 - DNA, 424 bp, Homo sapiens
  misc_feature (400)..(400): n is a, c, g, or t
ctgctccgcccctctctggagacggggatcaatagtgtactggtgattgaccaggcactcagcacatgcgtggagcacacagtgcagggctgtggtggggaggtgggctgagttcctagggagtcacccatgtgtgcctgccgttctgaccagccaccaggccctcagggcagagcccactaccagcagcagctcacaccccaagaccagctcagaggcggcccctacctcagcagcagggacatcacagacactttgagctggcactagggtggcttctccagctcccacggggagaggggtcccagctgagtcccactcacgtggagtctcatgcccatgaaagtgccattcaccactggccaggctcatgaggccgcatgagaggggggtcactggngaggagatatcgggggaacaagag

SEQ ID NO: 598733 - DNA, 252 bp, Homo sapiens
ataagctctgtttttgtgcctgattgccattacagcggatgccagagaaagaaagagcttgggtgagcccatgatgaacttgcacacgagtaatgggaactaaggcagtgcctgttcccattgtgagtgggggtagagagcacatgtatcacctggaagatggcaaagaagacaggggtttagaatatacatcccagctgtggtgtggaggaagcacatgtggaacagggtgattgaatatttggtggtagg

SEQ ID NO: 598734 - DNA, 111 bp, Homo sapiens
gatacttagcattctattgggagaaaagcaaatcgcacaatgacatattttgaggtaatagccatattttgcaccaggggggacaatttgggccaataatatctgccatct

SEQ ID NO: 598735 - DNA, 349 bp, Homo sapiens
  misc_feature (2)..(2): n is a, c, g, or t
tnttatgagtgttactatgtgccatagactgctttagacattttctatgtattaatagattcaagtttgaaacaactctatgaggtagataacattattgtcctgtgtttaataagggaaactaaggcatagagaggttaaattacatgccccaaatcacatcccactttatttttaaagcaaggtttagaaaacatatgactgatttatcatgttcgtaagccactgagttctgtcatcctcaagacacagttaacaagcaaaagctgccagagagaaaagggaaggagagagagtatgttagtagaaggacggtaacaccacagtacgacggtaacaccacagtacg

SEQ ID NO: 598736 - DNA, 370 bp, Homo sapiens
tctaatgtttcctcatgattagactgaggttctgggttttggagaggaagaccagaggtcaggtgccattcttgcacatcttatgaagggtcatgctgactttgatcacctgactgaggtaaactttgccagacttctccattgtaaagttactcttttttcttctttctgtactggaccctttggaaggaagtcactgtgtgcagcccacatttaagaattggggaattatgttctacctccttaagggcagaatatctacacaggctttttttttttttttttttttttttttaaacccttggtggaacccaacacttttccccaaccccccgggttgggggtaagggccccaaatcaagggtctccc

SEQ ID NO: 598737 - DNA, 928 bp, Homo sapiens
  misc_feature (771)..(771): n is a, c, g, or t
ggcgctgcagtgatcgtaagccggtgggatgtgacaggtgaactcgctctagggcgatgctgcaagcaatcactatgtcaacagaaatgaggtgtttcccggttccttcatatgaggaaaatcagggctcaacactcattcgaaagagctaaaagaggcaccatccgtagcccgttgaaagtagcgggttttgcacgccaatagtagcatatggagtcataagtaaactgaatgagcaggggaaattactaaaatgtccatttcatctgatccacatgcgtgtgggaaggcccacaggcttggggtggtcaggagcaaggactgtctgggtatggggctattccagtgtatcggggaaattctgggcaaaacctaagccttaggaagaagagagtgctgtcgtatggtcttgttggaggagcttgctttaggacagatgtctgattattaaaggtgtacctatttattgtgttggaaataaactaatttgtatggggttagatggtaacatgggatctggaatatttggttcctttcttgcaggttgggattttgcttgtgtgaccgaaattactagtgactagtttactaactaggtcattccaaggaagtcaagttaacttagaaatggtcagctaaatgacttgaggtgttgaaatgtccaccttccttaaattttaagatgaacttagtctaaacgaagctacagggcaatccgaaaggtctccgcttgctgcacaggtccgaattggggttgctagatccattgcncagtaattcacattggctcctatgtggacgggactggtaaacctgtcacaggcggggacatatgtgagtcccatgtatattggtttcccacacactcacggctgttttacaaccaaacaacgcgtcagatgcgaaacaaccatatacaccggtttac

SEQ ID NO: 598738 - DNA, 173 bp, Homo sapiens
gtcacagaaaatgaggatataagagccaagcccgaatttcgtgtactcaatcacagaggcaatacactatggatgtcatgaatttctaaactccatttaagtcttttgtctctcccatgatgtaaactgagaaaaacagcagcaacctatccctacaaaataactcttataat

SEQ ID NO: 598739 - DNA, 239 bp, Homo sapiens
gaggttgcattatcgaaggaatcacaaaaaagaatagcctcatcagtccgccagcatcatagccagcatcagcctccttaagctctactgctagctacgcgtaatctactccacctcaagtcacactactccccagtatctaacaacgtaaaaataagatgagagtttgaacatacaagacccagcccattcctccccacactcatcgcccttaccacgcaactcgaaagccccaagcg

SEQ ID NO: 598740 - DNA, 166 bp, Homo sapiens
agatgcccagactaaagtctacatgtttctaggactccatttatataaattctacaaaagggcagaactctgcagacagaaagaagatcagcagttgtcaagtgcaaagggtggggagaggagactgacacaaatgggacatgggagaacctcgtcagaagtgacg

SEQ ID NO: 598741 - DNA, 703 bp, Homo sapiens
  misc_feature (10)..(10): n is a, c, g, or t
  misc_feature (59)..(59): n is a, c, g, or t
gttttttaangccccccaggggggggtgccagtgggtggcaggcgccaggggcttcttnactttaaaccacccctagcctctcctattatgcggggggtccccattgatttggattatcctggaggtgaatgggaccctaggggctgagaaattcaaggcttgatttttgaatgccatagaatagggatttttcttccaggcccctctgggaaaaaaggggtggcctgaatccccaaccgcgcatttttaggatttgggaaatggggggtaaagaccccgtttcttttgctgaaaagtttccctttcccctatgggtcataacccatgggagggtccgggggagaacctcttttaaaagaaatttataaaccttgtttgtggggcaaaaactagtttttcccggccaaaaccaggttggttggggtaaaccctgtttttggccccccccctcccaaaaagaggggggtccaaagttttagctttttttcgggttttcccccccaattggtaaaaaaccgggttatattccctttttggtttttccggtttggggggttttttttgcccctcttggggaaaaaagggtttccttttttccctttcccttcccccccctttggggtcccccctttcttcccccccaggggttttagcggttttgggggggctttaaaaaaaaaccccccggggggggtttttcca

SEQ ID NO: 598742 - DNA, 736 bp, Homo sapiens
cacggtggttcacacctacaatcccagcactttgggaggctgaggcgggtgggtcatttgaggtcaggaatttgagaccagcctggccaacatggtgaaaccctatctctactaaaaatacaaaatttagccgggcatggtagcaggcgcctgtaatcccagctacttaggaggctgagacaagagaatagctcaaacctgggaggcagaggttgcagtaaaccgagatggcaccactgcactccagcctgggcaacagagtgaaactccatctcaaaaaaaaaaaaagggaaaaatcatctaatatctgagattttctcaatttaaccaagaaagggcagggctataggttaaaaaaaaatttactaatagatttttaaaatctattactttcttcatgtctgaaatttttccatgatatgctttttaaaaaagaaggtatcggggctaggtgcaggggctcatgcctgtaatcccagtattttgagaggcccagcaggcaccacagcttttgagccccagggattcaaagagttggcctgggcaactttcgcagaaaccctggtccgctacaaagaaacaccaagaataatacacaacagtccactgtgtttacacgcagaaacaacctttgtgtgggcgccttgtgcccctctagaaaaggttttttacacccacatttgtgtggcgcggggggccccatatggtatgtgcaccgtggcacatacaggtgtcc

SEQ ID NO: 598743 - DNA, 421 bp, Homo sapiens
  misc_feature (182)..(182): n is a, c, g, or t
tattcattttttaaaaagggctataaacaagtagcaagatgaataatctggttttctgtgggttaagttacatatcaaaaaatcctaaaatttttcatcattttgatgcactattcttaatttttaaaaactcatggtctgaaagcaagacagatattttaatgctaatatgtaaaaataanccggatttccggtcttgggtctctgtcgttgcctatatatctagatgtctccaaaatattccagattttctgcttttcttaatttcaaatggtccaaatggctaccttttctagaatatttacctattagctgatggtaatggtaaaaagaaaatccggctaattttggcaggattgtgccctacccacaatcctgtcttttctgtgagagtggagaaaaattaaatttgccgaatttc

SEQ ID NO: 598744 - DNA, 439 bp, Homo sapiens
ggataccttgacccagacggggtcactctgatgccttctgaagtgagaaattgatcacgttaccacagctagtcaccactcactgggtgacttcagacaaagaaaattgacgttgtcaccgttccaaagaccagaagtctgagatctaggcgtgagcagggctgcgctaccctggaggctctaggggaggatccttcctgcctctcccagctcctgggggttccaggtgttcctgggcttgtggccacatcactccaatccctgcctccatctccacgtggccgcctcctctgtgtctccaaatctctatctccttgtaaggacactagtaattggatttagggcccaccctaaatctgggatgatctcatctcaagatccttcacttaagtatgtctgcaaggaacctatttctaaataagatcctgtttctacattt

SEQ ID NO: 598745 - DNA, 148 bp, Homo sapiens
tcctgactgaaaaaataaggaaatattggtggcatgtgtatgtataggtgggcatgtggtctgtgtgtgactgcacaagaggggtgcacgtgcaatgcttgcgtgtgtgatgatgtgtccttggacgttgaggaatcccgggggccga

SEQ ID NO: 598746 - DNA, 645 bp, Homo sapiens
caagctgaacgtagaacgatattcctaatgggtgtgtttgcctttttcccccttttgagacagggtctcactctgtcacccaggctggagtgagtggcatgatcatgcctcgctgcgtacttgacctcatgggctcaagcgaccctcctgcctcagcctcctgagtagctgggaccacgggcacatacaacattcccagctaattttttgtatttttgattgatagagatggttttgccacgttgcccaggctggtcttaaactcctgggctcaagtaagattgccgtcctgggattagaggcgtgagctgctgcagcggcctgcttttctttgaagcctgagaaatgttgagggccgggcacagtggttgacacctgtaatcctggcgctttgggaggccgaggttggtgaatcacctgaggttagaagtttgagaccagcctggccaacatggtgaaaccccatctctactaaaaataaaaaaattagctgcgtgtggtggtgggtgcctgtaaccccagctgcttgggagggtgaggcaggagaatcgcttgagcccaggaggtggaggttgcaacgtgagccgagattgcgtcattgcactccagcctgggcgacaagagtgaaactctcactctccctcg

SEQ ID NO: 598747 - DNA, 319 bp, Homo sapiens
  misc_feature (53)..(53): n is a, c, g, or t
  misc_feature (286)..(286): n is a, c, g, or t
  misc_feature (308)..(308): n is a, c, g, or t
ttttgagatgaagttttgctcttgttccccaggctggagtgcaatggcacgantctcggttcactgcaacctccacctctcagattcaagcaattctcctgcctcagcctcccaagtagctgggattacaggtgcccaccaccacccctggctaaatttgtattttcagtagagacggggtttccccatgttggttaggctcgtctagaacctctgacctcaggtgatccacccgcctcggcctcccaaagtgctgggattacaggcgtgacatcgggcgcccagnctgtgcttattttcttaaaatnaatttttgtat

SEQ ID NO: 598748 - DNA, 396 bp, Homo sapiens
ctggtgcatccagggctgcagcgcacgtcaccggggagaacctgctgccgggcatcgactggctccctggatgacatattccagccgcattttcacagcatgactgaacacactccagactgcccccacgcacctacgcatgtccaggtccctcaacctctcagccaaacactatccatggggggttgggagtcagcacgggacataactaacactccccctccatccaccccagcctgctgcgtgctactgctgcccagctgctgctctgtggccacccaggctcaccatggcgggagggctgtgccctggctgtctctctggctcctgacctggcctttggctaccatacacaagaagagagggctggcggggagaaattctcctgctgctacg

SEQ ID NO: 598749 - DNA, 180 bp, Homo sapiens
ttgggggggcccaggaaccccctgctgggggtggaggctctattcatgacctgcccctttttattgagacatcccccaacctttgccccttggggccctttcccagggcccccccctgttttgcccccctccccccattcccccctttaagaataaataagttttccttttgttttccca

SEQ ID NO: 598750 - DNA, 325 bp, Homo sapiens
  misc_feature (1)..(3): n is a, c, g, or t
  misc_feature (6)..(6): n is a, c, g, or t
nnngangcctagcgtgtctgcccactagcctatgctatagatttgaaatgactttcactttgacatgacacacggtttatattacacaaattgaatgaaacaacactgtctagaaaaaaatgagacagcctgccgacaaaaagatgatgactgcttctttgctcccatcagagaattactcaaaaaggcagtatttaaaggaaactcaaatcagtagaacacgtagtcatcgagatttcagggcaccaagtccttagagcgataacacttttcaacccaagccaggcttcagatgcaagcccactaacagaccctaatttccaca

SEQ ID NO: 598751 - DNA, 195 bp, Homo sapiens
ctgtgataggcttctttgacttaatgtttcagaattcatctatgttgtaacctatatcagtacttctttcctctttatagctgaataatattccattgtgtgggtggaccacaatttgtttatccattcataagtttatgggcactgggttgtttccctctttcggcaatcgtgaataatggcgctataaagatt

SEQ ID NO: 598752 - DNA, 192 bp, Homo sapiens
ggataggggcagggaatacataaggaaagtaggtaactagtcaccagagaactggcaagggaaaaaggacgggggaggcatagaagagcgagaatccaaaaaaaagtagaaatggttaggggagaaaactcccaaaagaccccggcagtacgtacggaggtgagtacgacaactagcaactctatttccttc

SEQ ID NO: 598753 - DNA, 3389 bp, Homo sapiens
ggcacgagggcggagacgccgggagccagtggcgcctgtggctccgggcaggggccgcggccgaaagatgccggtccgcaggggccacgtcgctccccaaaacacttacctggacaccatcatccgcaagttcgagggccaaagtcggaagttcctgattgccaatgctcagatggagaactgcgccatcatttactgcaacgacggcttctgcgaactcttcggctactcccgagtggaggtgatgcagcaaccctgcacctgcgacttcctcacaggccccaacacaccaagcagcgccgtgtcccgcctagcgcaggccctgctgggggctgaggagtgcaaggtggacatcctctactaccgcaaggatgcctccagcttccgctgcctggtagatgtggtgcccgtgaagaacgaggacggggctgtcatcatgttcattctcaacttcgaggacctggcccagctcctggccaagtgcagcagccgcagcttgtcccagcgcctgttgtcccagagcttcctgggctccgagggctctcacggcaggccaggcggaccagggccaggcacaggcaggggcaagtacaggaccatcagccagatcccacagttcacgctcaacttcgtggagttcaacttggagaagcaccgctccagctccaccacggagattgagatcatcgcgccccataaggtggtggagcggacacagaacgtcactgagaaggtcacccaggtcctgtccctgggcgcggatgtgctgccggagtacaagctgcaggcgccgcgcatccaccgctggaccatcctgcactacagccccttcaaggccgtgtgggactggctcatcctgctgctggtcatctacacggctgtcttcacgccctactcagccgccttcctgctcagcgaccaggacgaatcacggcgtggggcctgcagctatacctgcagtcccctcactgtggtggatctcatcgtggacatcatgttcgtcgtggacatcgtcatcaacttccgcaccacctatgtcaacaccaatgatgaggtggtcagccacccccgccgcatcgccgtccactacttcaagggctggttcctcattgacatggtggccgccatccctttcgacctcctgatcttccgcactggctccgatgagaccacaaccctgattgggctattgaagacagcgcggctgctgcggctggtgcgcgtagcacggaagctggaccgctactctgagtatggggcggctgtgctcttcttgctcatgtgcaccttcgcgctcatagcgcactggctggcctgcatctggtacgccatcggcaatgtggagcggccctacctagaacacaagatcggctggctggacagcctgggtgtgcagcttggcaagcgctacaacggcagcgacccagcctcgggcccctcggtgcaggacaagtatgtcacagccctctacttcaccttcagcagcctcaccagcgtgggcttcggcaatgtctcgcccaacaccaactccgagaaggtcttctccatctgcgtcatgctcatcggctccctgatgtacgccagcatcttcgggaacgtgtccgcgatcatccagcgcctgtactcgggcaccgcgcgctaccacacgcagatgctgcgtgtcaaggagttcatccgcttccaccagatccccaacccactgcgccagcgcctggaggagtatttccagcacgcctggtcctacaccaatggcattgacatgaacgcggtgctgaagggcttccccgagtgcctgcaggctgacatctgcctgcacctgcaccgcgcactgctgcagcactgcccagctttcagcggcgccggcaagggctgcctgcgcgcgctagccgtcaagttcaagaccacccacgcgccgcctggggacacgctggtgcacctcggcgacgtgctctccaccctctacttcatctcccgaggctccatcgagatcctgcgcgacgacgtggtcgtggccatcctaggaaagaatgacatctttggggaacccgtcagcctccatgcccagccaggcaagtccagtgcagacgtgcgggctctgacctactgcgacctgcacaagatccagcgggcagatctgctggaggtgctggacatgtacccggcctttgcggagagcttctggagtaagctggaggtcaccttcaacctgcgggacgcagccgggggtctccactcatccccccgacaggctcctggcagccaagaccaccaaggtttctttctcagtgacaaccagtcagggtctccccatgagctggggccccagttcccctctaagggctacagcctcctgggtcctgggagccagaactccatgggggcaggaccttgtgctccagggcacccagatgcagcccctcccctgagcatctcagatgcatctggcctctggcctgagctactgcaggaaatgcccccaaggcacagcccccaaagccctcaggaagacccagattgctggcctctgaagctgggctccaggctagagcagctccaggcccagatgaacaggctggagtcccgcgtgtcctcagacctcagccgcatcttgcagctcctccagaagcccatgccccagggccacgccagctacattctggaagcccctgcctccaatgacctggccttggttcctatagcctcggagacgacgagtccagggcccaggctgccccagggctttctgcctcctgcacagaccccaagctatggagacttggatgactgtagtccaaagcacaggaactcctcccccaggatgcctcacctggctgtggcaacggacaaaactctggcaccatcctcagaacaggaacagcctgaggggctctggccacccctagcctcacctctacatcccctggaagtacaaggactcatctgtggtccctgcttctcctccctccctgaacaccttggctctgttcccaagcagctggacttccagagacatggctcagatcctggatttgcagggagttggggccactgaactccaagataaagacaccatgaggggactgaaggtgggcaaggtgagagttaaggatcttggggaggtggccgggtgcagtggctcgcctgtaatcccagcactttgggaggccgaggcgggcggatcagaccatcctggctaacacggtgaaaccccacctctactaaaattaaaaaagaaaaaaaatagccgggcgtggtggcaggcgcctgtaatcccagctactggggaggctgaggcaggagaatggcatgaacccgggaggtggaggttgcagggagccgaggccgcaccactgcactccagcctgggtgacagagtgagactccaactc

SEQ ID NO: 598754 - DNA, 1713 bp, Homo sapiens
ggcacgagggcggagacgccgggagccagtggcgcctgtggctccgggcaggggccgcggccgaaagatgccggtccgcaggggccacgtcgctccccaaaacacttacctggacaccatcatccgcaagttcgagggccaaagtcggaagttcctgattgccaatgctcagatggagaactgcgccatcatttactgcaacgacggcttctgcgaactcttcggctactcccgagtggaggtgatgcagcaaccctgcacctgcgacttcctcacaggccccaacacaccaagcagcgccgtgtcccgcctagcgcaggccctgctgggggctgaggagtgcaaggtggacatcctctactaccgcaaggatgcctccagcttccgctgcctggtagatgtggtgcccgtgaagaacgaggacggggctgtcatcatgttcattctcaacttcgaggacctggcccagctcctggccaagtgcagcagccgcagcttgtcccagcgcctgttgtcccagagcttcctgggctccgagggctctcacggcaggccaggcggaccagggccaggcacaggcaggggcaagtacaggaccatcagccagatcccacagttcacgctcaacttcgtggagttcaacttggagaagcaccgctccagctccaccacggagattgagatcatcgcgccccataaggtggtggagcggacacagaacgtcactgagaaggtcacccaggtcctgtccctgggcgcggatgtgctgccggagtacaagctgcaggcgccgcgcatccaccgctggaccatcctgcactacagccccttcaaggccgtgtgggactggctcatcctgctgctggtcatctacacggctgtcttcacgccctactcagccgccttcctgctcagcgaccaggacgaatcacggcgtggggcctgcagctatacctgcagtcccctcactgtggtggatctcatcgtggacatcatgttcgtcgtggacatcgtcatcaacttccgcaccacctatgtcaacaccaatgatgaggtggtcagccacccccgccgcatcgccgtccactacttcaagggctggttcctcattgacatggtggccgccatccctttcgacctcctgatcttccgcactggctccgatgagaccacaaccctgattgggctattgaagacagcgcggctgctgcggctggtgcgcgtagcacggaagctggaccgctactctgagtatggggcggctgtgctcttcttgctcatgtgcaccttcgcgctcatagcgcactggctggcctgcatctggtacgccatcggcaatgtggagcggccctacctagaacacaagatcggctggctggacagcctgggtgtgcagcttggcaagcgctacaacggcagcgacccagcctcgggcccctcggtgcaggacaagtatgtcacagccctctacttcaccttcagcagcctcaccagcgtgggcttcggcaatgtctcgcccaacaccaactccgagaaggtcttctccatctgcgtcatgctcatcggctgtgagtgagacctcatgccacggcctaacttcatgctctggtcttacccgtgaaattttatgtgtagttttgtactgagatagaacataacacatagcaacaattcatgcagtacactgatcctaagtgtgcagcacaatgaatt

SEQ ID NO: 598755 - DNA, 1707 bp, Homo sapiens
  misc_feature (272)..(272): n is a, c, g, or t
  misc_feature (459)..(459): n is a, c, g, or t
tgtggtgaaatccaaactaacacctaaaaaaactgggtttctggaaactattccttaagtctgggggtctcacctataatataatctccctcacctcaaccttatattcagagaggataagggatttcgtgtcgtgaacctcaggatctccatttgggatctcgggtggccataccttatgtgggcaagtgaaaggaattcattatttaaccgtggtcacgtggtcacactcctctcgtgagtctctgtgggatagtgtggagtagataaanataaccatatagcgtggctcccatatatatataaaaatgtggagaaatgtgtggtgttataccccctataaaatgtgtgtcacgatataaactgtgtgggtgtgttctctcccacgagagctctctctcgcgagagctctccatagagagaaaaactctctcgtgcgcgtggggggatatctccccnctttttatatgtgtctcctgtgggaaaagagagaaacaacggtgtgctcgagggctctctcggtgggagataactcctgttgggagaacaccccgtgggttgtgtgtccccccctataaaataaagcagatcttctaataggagttataaggtggggacgcattatgatcgggagctcatctcttataacaccctattaaggatttatacggagagggggaaatattacccccttattctaccggtgtgatcaggggacaccattttttacacgagaaggtgtttataacagccaccggcgaggaaattatcctttctgagcaaggaggaagggggcgacaacaacgaagaagttgttctctttaggagcgacaacacacgtcttctttcatgttggtggggacacgcgaaaacccttatttaggggggggggcgcacccacattcatggtggcgggaacaacaagttgtttctcccaattgtgctcccaacacagccaacaagcaggcaggtagttgttcgtcgacccaccccccctttttttaaaagcacaaaaaaaaaaaaaaatttgccgttactaataacgggggtgggcgaccccacctgtgggggggggaataaaacgtgggggggtgggaataaaatctacagtgggggggagttgaggagtggtgattggaactggaagttaggagtgtagtcaaaaaataggggggagagcaataatgatgggggagttaatcatattttcacacggaattcttatacggttattattattttcgtgttagttcttcacgcgcagatctctatggtttggttataacatcggtgggggaaaaacacactgacggggcaagatcggcacccaacagatggggggaccacaaaagagacatattggtgggtgtgtgtatctatatatgatctccccgcccgcaaaaagaagagaggtgtgtttctcaccacaccgttctccgttgggggacgacaataaatatattgatccgtaagtatagtgatacgatgatagttatgggcaccgcccctgtattattgattcgttttgaatagaaaaaccactcgttgatcgagaagaggagagcgaaaccaagagcagaaacttcatctggggggagaaacattttgtttgtttgccccccacaagatgccgttcggtgtgggataattaaattcaaccaagggggggggggacagctggtatccacaacagaggagggatagtac

SEQ ID NO: 598756 - DNA, 3123 bp, Homo sapiens
ggcacgagggcggagacgccgggagccagtggcgcctgtggctccgggcaggggccgcggccgaaagatgccggtccgcaggggccacgtcgctccccaaaacacttacctggacaccatcatccgcaagttcgagggccaaagtcggaagttcctgattgccaatgctcagatggagaactgcgccatcatttactgcaacgacggcttctgcgaactcttcggctactcccgagtggaggtgatgcagcaaccctgcacctgcgacttcctcacaggccccaacacaccaagcagcgccgtgtcccgcctagcgcaggccctgctgggggctgaggagtgcaaggtggacatcctctactaccgcaaggatgcctccagcttccgctgcctggtagatgtggtgcccgtgaagaacgaggacggggctgtcatcatgttcattctcaacttcgaggacctggcccagctcctggccaagtgcagcagccgcagcttgtcccagcgcctgttgtcccagagcttcctgggctccgagggctctcacggcaggccaggcggaccagggccaggcacaggcaggggcaagtacaggaccatcagccagatcccacagttcacgctcaacttcgtggagttcaacttggagaagcaccgctccagctccaccacggagattgagatcatcgcgccccataaggtggtggagcggacacagaacgtcactgagaaggtcacccaggtcctgtccctgggcgcggatgtgctgccggagtacaagctgcaggcgccgcgcatccaccgctggaccatcctgcactacagccccttcaaggccgtgtgggactggctcatcctgctgctggtcatctacacggctgtcttcacgccctactcagccgccttcctgctcagcgaccaggacgaatcacggcgtggggcctgcagctatacctgcagtcccctcactgtggtggatctcatcgtggacatcatgttcgtcgtggacatcgtcatcaacttccgcaccacctatgtcaacaccaatgatgaggtggtcagccacccccgccgcatcgccgtccactacttcaagggctggttcctcattgacatggtggccgccatccctttcgacctcctgatcttccgcactggctccgatgagaccacaaccctgattgggctattgaagacagcgcggctgctgcggctggtgcgcgtagcacggaagctggaccgctactctgagtatggggcggctgtgctcttcttgctcatgtgcaccttcgcgctcatagcgcactggctggcctgcatctgcagcctcaccagcgtgggcttcggcaatgtctcgcccaacaccaactccgagaaggtcttctccatctgcgtcatgctcatcggctccctgatgtacgccagcatcttcgggaacgtgtccgcgatcatccagcgcctgtactcgggcaccgcgcgctaccacacgcagatgctgcgtgtcaaggagttcatccgcttccaccagatccccaacccactgcgccagcgcctggaggagtatttccagcacgcctggtcctacaccaatggcattgacatgaacgcggtgctgaagggcttccccgagtgcctgcaggctgacatctgcctgcacctgcaccgcgcactgctgcagcactgcccagctttcagcggcgccggcaagggctgcctgcgcgcgctagccgtcaagttcaagaccacccacgcgccgcctggggacacgctggtgcacctcggcgacgtgctctccaccctctacttcatctcccgaggctccatcgagatcctgcgcgacgacgtggtcgtggccatcctaggaaagaatgacatctttggggaacccgtcagcctccatgcccagccaggcaagtccagtgcagacgtgcgggctctgacctactgcgacctgcacaagatccagcgggcagatctgctggaggtgctggacatgtacccggcctttgcggagagcttctggagtaagctggaggtcaccttcaacctgcgggacgcagccgggggtctccactcatccccccgacaggctcctggcagccaagaccaccaaggtttctttctcagtgacaaccagtcaagatgcagcccctcccctgagcatctcagatgcatctggcctctggcctgagctactgcaggaaatgcccccaaggcacagcccccaaagccctcaggaagacccagattgctggcctctgaagctgggctccaggctagagcagctccaggcccagatgaacaggctggagtcccgcgtgtcctcagacctcagccgcatcttgcagctcctccagaagcccatgccccagggccacgccagctacattctggaagcccctgcctccaatgacctggccttggttcctatagcctcggagacgacgagtccagggcccaggctgccccagggctttctgcctcctgcacagaccccaagctatggagacttggatgactgtagtccaaagcacaggaactcctcccccaggatgcctcacctggctgtggcaacggacaaaactctggcaccatcctcagaacaggaacagcctgaggggctctggccacccctagcctcacctctacatcccctggaagtacaaggactcatctgtggtccctgcttctcctccctccctgaacaccttggctctgttcccaagcagctggacttccagagacatggctcagatcctggatttgcagggagttggggccactgaactccaagataaagacaccatgaggggactgaaggtgggcaaggtgagagttaaggatcttggggaggtggccgggtgcagtggctcgcctgtaatcccagcactttgggaggccgaggcgggcggatcagaccatcctggctaacacggtgaaaccccacctctactaaaattaaaaaagaaaaaaaatagccgggcgtggtggcaggcgcctgtaatcccagctactggggaggctgaggcaggagaatggcatgaacccgggaggtggaggttgcagggagccgaggccgcaccactgcactccagcctgggtgacagagtgagactccaactc

SEQ ID NO: 598757 - DNA, 564 bp, Homo sapiens
gggagagccagcgcgcgcgtacgcgcccgatgcgagggcggccccgtgaccctagtcggccgtggagaggcgcgcggagtctgggccgctgccgtctaggggtcccgtcccgaggtggtccccggcatctccggcccgaatcccggagtgccgggtcgcgcctgctccgagggtcccggtatcctgtgccctcccgtgcaggacgtctaggggaccgttcccgcaaggtccctctttccgctcagtgcagggtcctcgcggcccatgctggaccgactggggacccgcgcagcccagaccgtgtcccgggccggcgcagccggacaccagtggtggcccgtgagtgcctgtgcagcaactccagcggggactaaagggctcagagtgcatggccgaggggcgcgagggtcccgggcctgagccccgcgccatggccggggcatcgcttcccgcatgagcttcatctctctcacgaggaggcaagccaaggacgttcaccgtgaggatcgtcaccgatggacgccgagatggagttcaattgcgagatgaagtggaaggggaagg

SEQ ID NO: 598758 - DNA, 515 bp, Homo sapiens
gtgtggtgttctagaggatccctcacgcccagtacacaagcagacattctttatgtttaatgtacacattttggtttgtatatgttctttttatttacttttctagagacagagtttctctcgttgcccaggctggagtgcaacggcgtgatctcagctcactgcaacaccgtcccctgggttcaaacaattctcctgcctcagcctcccatgtagctgggattacaggcacctgccaccatgcccagctaattttttttttgtatttttagtagagatgaggtttcaccatgttggccaggctggtctccaactcctgaccttaggtgatccacccgccttggcctcccaaagtgctgggattacacggcgtgagccaccatgcctagctatcttattttctataacttatttaaatatattagcccaccaatcagtaacaattaacaaatatttatttagcatcaagtattagatcagctttttccatatctccttcctactctctgacacat

SEQ ID NO: 598759 - DNA, 265 bp, Homo sapiens
tgctgtacgctcgtactgcctggcacacgggatccagcccgactggcagatgccaagtgacaagacattggggagaggcgatgattccttcaacaccttcttcagtgcaccgggtgctggcaagcatgtgccccgggcagtgttatgtagaccttggaccccacacggcatttgctgccgttcgcccgggcacttacccgccaactcttccaccctgacgcaagtcctcacaggcaaggaacgactgctgccaatacactactgc

SEQ ID NO: 598760 - DNA, 417 bp, Homo sapiens
  misc_feature (170)..(171): n is a, c, g, or t
  misc_feature (178)..(178): n is a, c, g, or t
  misc_feature (186)..(186): n is a, c, g, or t
  misc_feature (189)..(189): n is a, c, g, or t
  misc_feature (192)..(192): n is a, c, g, or t
  misc_feature (195)..(197): n is a, c, g, or t
  misc_feature (199)..(199): n is a, c, g, or t
  misc_feature (201)..(202): n is a, c, g, or t
  misc_feature (204)..(204): n is a, c, g, or t
tggacagcacagaggagatggacagcacagaggaggtggacagcacagaggaggtggacagcacagaggaggtggacagcacagaggagaggaggtaagagtcagaagcttatgttgtttatgcggggaaacgccatatcgggggcaccgattattaggggaactactcnnttgccanagcctccnctntgntgnnnantnncnatgtcagaagacctattatctaatcgcatgggctgcgacgattactttgttgatgtggtcgttaccttaaagattgcctggctgactccaactcgtctcgcataaggtggcttgagacctgtgcctagtattacgagctcatgcgccggattatcggtatagtcttgctatgtctttgtcccttgctagagcatcatccacggtcgactcaca

SEQ ID NO: 598761 - DNA, 152 bp, Homo sapiens
ggcgcattgagcttggagtcctaggcacagctctaagcctcctttattacgaagccgagctgggccagccaaggcaaccttcataggataacgaaccacatctacatcgttgatcgtcacagcccatgcatttgataataaatcttacttca

SEQ ID NO: 598762 - DNA, 247 bp, Homo sapiens
ctacatgcacaacagcgcattccatctgtccatccaagaccgtaccaaaccgtagcagcttcttccctccggtcaccaaactgcttgcaataggatctcactgaaatgtgggtgcaccagcaataattttaacttggaccagtcacaacgtctcgtcgaacattcttctcctagactacatgtccataataccttacaccttgccaatcgctctagaacacacgccccatgtagctctcacactttc

SEQ ID NO: 598763 - DNA, 170 bp, Homo sapiens
catcccatctccagaaagaacaaccctgtgaagcaaattactagtatcccaatttagaggagtgcaggtggacgctcagagaggttaagtgtcttgtccaaggccactcagctacaaagaggaagagatgaaactcaaaccccagcctgatcccacagaccaagaccttc

SEQ ID NO: 598764 - DNA, 141 bp, Homo sapiens
tgtgtgtcatgcgatgactgctttaagagcattatctaggatcatatccgcaagtcatatccagaacattcagggtcactccagctcccttagtctccatgcgcttagcattgtccatctgatcaccaaacaagggcatca

SEQ ID NO: 598765 - DNA, 989 bp, Homo sapiens
cgggggacctcccttgggagatcaatcccctgtcctcctgctctttgctccatgagaaagatccacctatgacctcaggtcctcagaccgaccagcccaagaaacatctcaccaatttcaaatccgatcttctcggcttagcggctgaagactgacgctgcccgatcgcctcggaagccccctagaccatcacggatgccgagcttcgggtaactctcacaatggaagatccccagccatatgaagacaacctagctggacgatcagttcttgttaagaatctgacccctcaaactctacaacctcgatggaccggaccctacttagtcatctatagtaccctgactgccgtccgcctgcaggatcctccccactgggttcaccgttccagaataaagctgtgtccatcggacagccagcctaatccctcctcttcctcctggaagtcgcaagtactctccccaacttcccttaaacacactcgtatttctgaagaacagtaataacccttatgagcctaatacatcccttcattctattagatctgttcatccttaccctactttttgcaacagggctttacgaagtcaccccaccacttaggccgagccccaaaaaactagtcatccctactatcttctgtccggtcatactcctattctccattctcaactacttataaatgccctactcttgtttacaccgccggtttacactgtttctccaagccatcacagctgatatctcttggtgctatccccaaactgccactcttaactccctcttagagtggatagatgatctttgctggcaaggcaccctccaatacttccaccctgatgaagttctattctttacttttatactcactcttattctcattcccattcttatgtcaccctctacctctccccagctatctccaccacactatcaaccttacccattctctcctagctgcttctaatccctccttagcgaacaactgc

SEQ ID NO: 598766 - DNA, 339 bp, Homo sapiens
agacagcaggcggcttaatatgtaactgtggagagaggaggcaacctactgacttttttcccaggaggaggcagatttacagcagagcccatttgcctaagcacagtgacagatgatggataccatacccacttacacacacgcctggtaggccttggagcttcctggctccatagacgctgtgatgtaggatgtcgccaaggagcattatcagacactaatgtcgaggaagtaaacggatcgtgtaacattagtgaacgtagggctatcctatgtaggaaccaagggcccattaacgaacaaggaaagggacctgcgtgtctgctggcccatttgctc

SEQ ID NO: 598767 - DNA, 396 bp, Homo sapiens
actaagcagctatacaccgagaaatatctcaagtgagataaagatatgcgtactatccacacagaaatgttatttgcgttggcaccagctcacccatcacgtaacattaaggggaatcctctccaaagaaggcggagactgtagcaagtaaggaatagagaacacttgctcttataccctagtggtggcggtcaagctaacaagtgtgccaatgcctttgcgctattcgcacaaaagtgcaaacaataaagcagagttcctcaagaatgcgtaagttaacagccagagacagacactgtgcaggcattgcacatagatggaattacagcaaaatgtgctcaatgtatatgcctgctttacaacactgggagatgtgtttgccagtaagtggctcat

SEQ ID NO: 598768 - DNA, 124 bp, Homo sapiens
tatccaccaccaccacggctgccaccaaagccaccacgaccactgaagtttcctcctccacgaccaagccgctattcccaccgaaaccacctcaccaccaccaccaaaagtatcagaaccatga

SEQ ID NO: 598769 - DNA, 636 bp, Homo sapiens
catggacgccagtcccgcttatctggtgctcgattatcacgagtagactcgtacctcgtctactgggtaaatcttctctacagaattctcgttagatcatcagattccactagtcagagaacataacttattatgacatattttctttgcgcaactactgttattgccacctgggataatcagctagcccgaggagaagaatccatgtcttgaaagccaagaacagtgaggctccccaagattccgtatgatatacttctaagtaaggttgcttgtccccgctaggtcaatcagcactgattatatatgttaccaagcaagcgctattggtacaataatacattctactagctctatttcaatattgaccgagaagtatttgagatctcctgaagcgcaaatgaaactatattattgcctgagcattacgaccagaaggcatgaaactgacggaagaaacgaaacccatcgtgttaaaccggagcatcgatgtaatagacctcgccgtaagaagcccgtgtctgatatcccacgagacgtttgagtacacctagtatcgtagcctgcaggtgcgtctaaacactaggcggctatggtataagaagggtcatagtcatactgatgaccctgaccatt

SEQ ID NO: 598770 - DNA, 148 bp, Homo sapiens
cggtatccacccgtgcttttgatctagcacagacccttaaccctcacttgatgcagcagtagcttggattcttgtggggcatgactcataagtcggctttcaaggctaacgactggtgctcgagcgtctttgggcggcgttgaaccta

SEQ ID NO: 598771 - DNA, 143 bp, Homo sapiens
tccactattgtaggcacaatatttatgaggacgtaagcccgtgggcgattatgagaatgtctgcgccggtgaagcttcaggtttcatgaataagcgatgctgatcgttcaagggctatgtggctgattgaagagtatgcaatg

SEQ ID NO: 598772 - DNA, 313 bp, Homo sapiens
atggggcttagtaaattgaaattaccagattagataaaatttaaaattcagtttttcaagggaaacccaaacacgtttcaagcactcagtagtcatgaggcctgtggctcccgtattaataaagacccagaacatttccttcatcatagaacatttttttggaaagccctgttttacaagtgttttgttaacagtatggttttggccctaatgttaaaagccacttttgtggttcttaagtcaaccccttttttgccctgagggtcattaaaggggttgttaaaaagaacttttgggtttttttttaaaacta

SEQ ID NO: 598773 - DNA, 414 bp, Homo sapiens
acaggtatccccacgcggcgccttttttgtgttactagcttggtctttaagtcatttggctactgatttgagtcctcctccacagttgataaaacttcatcggtagatatatgtgtttaaatgccccacttcatgtgccgtttcacagcttgattttaactcgggatttataacagtaaagcatgttgtacgttcactgtggaaagctaaaaattcgaacttgtttatgatgcactgaccatcttctgcttcatgctgatgaccagggtgataagaaaaggaactatcccatacttattgatcagcaggcagaactgtaagacgaaactctctaccactgcgccctcgaagctaccaccaaagttaattaagatgtttcaatgttccctgattatggggctgcaactctgaagc

SEQ ID NO: 598774 - DNA, 147 bp, Homo sapiens
ggccaaacagtaaatattttagggctgggggccataaaatatgttgcaaccacccaattctgccattgtagtgcaaaagcagccatagacaacacatacatgaacgaacgtggctgtattccaataaaactttatttatggacactg

SEQ ID NO: 598775 - DNA, 974 bp, Homo sapiens
tctcatctactctaccatctttggacggacactcatcacagcgctaagctcgcacttgattatttacgctgagtaggcctagaaacgaagacatgctagcttttatctgcccagttgctatacccgagacaaaaatagcagtcctcgttccacagaatgctgccatcaggtatctcctacacgcacagcattacgcgcgatacataagtcctgtctatatagctatcctcttcacatacattatactctcccggaccaggatgaaccataaccaaaatactagcgcaatcaagtacttcatcagttaagtacatcagtaactggctgatagcaattaaaaccgtgaggaatatgccccctactcagcttctgagctcccggaggttcaccgcatggcacccctctgacatccgggcggcttctgctcacatgacggaacactagccacacagtctcgacatcatagtaccaaatcatactccctcacctaaacgtcaagccttctcctcagactcgcaatcttgttgcatcataagcaggcagcttgacgtggattaaaccaaaacccacgtcacggaggaatcttagcatcctgcgtcaaatacccacgtagcgatgaatactagcaatcctaccgtgcagactaagtcacacatatcatgaattaacctattatattattctgagctactaaccgggattccgtagatcacataaactccagcacggcgacctactagtatcgcgcagctgcagcacgtccgtgactaacacctttactcgatcacactcctttcctaccaggccgccctcgcaacggtttcgacaacgagcaaatgacgatcccaaacaacctcccagcgcacaagctgcacagcccaaccaaccacgcgcttcaatcctatccacccttccggaaacagcttacacaacgcgaccagaagcaaccacgcactacacaacaacacgccccc

SEQ ID NO: 598776 - DNA, 956 bp, Homo sapiens
  misc_feature (564)..(564): n is a, c, g, or t
  misc_feature (836)..(836): n is a, c, g, or t
  misc_feature (848)..(848): n is a, c, g, or t
  misc_feature (896)..(896): n is a, c, g, or t
  misc_feature (946)..(946): n is a, c, g, or t
tgaaacttcccgggggacaggatctctctctgtcaccttggctggaatgcagtggtgcaatcagcggctacactgcagccttaacctcccacctcagcctacctgagatgggactacaggtgtgcaccaccaccctttgctaatttttatatttttttgtagagacgggttttgccatgttgcccagtctagtcttgagctctggggctcaagtgatctgcccgccttagcctcccataacggtgggattacaggcatgagccacccacacccagccctttttttaaaaaatgggtttgtaagagtattttgggaaagctgagtaagcagaggaccctaaattgttatttaaaataattatatgtaatatatttgaagcacttattttgtgccaggcactgttgctttatggtcacttgtttcagttaatcatcgtgaataccttcttatccagtgtgagtggactccagcttaggtccattttacagttgaaactgacactctagtaggattaagagactttgaccgaggtcacacaagttagggcggtgctagagccaggantgtaacttgttctgtatttgttcatttaccccattgatgtattgagtgcctgctttcttcagggtgcgctgcagggcccgtgctcttaaatactgttgttggctggtgtgaaaagaaccctgaatgttgagtcagtaaaccagggcttgagtcctagctctgccacattcccgctatgaccttggacaaataatttctgttctttgaggctgtcttttaaaagacgtctcgctctttattagatagatggcatacatggcgaggctttatangcggtaaagcantatcaggtataaactacgaatgtcttgcaatcagataattctagctgntcttgcttgtagttatgttttaagcaataattttgaggtgagagagctgncagtttgtag

SEQ ID NO: 598777 - DNA, 138 bp, Homo sapiens
ttttggaaactggggagaatagattccccttagactgcgagtcagctagtgtgtttctttacagttgactttagcaaaattcatactaaatagtagttacaatgatcttctttacttgttaagcgtcaccaggaaaca

SEQ ID NO: 598778 - DNA, 1065 bp, Homo sapiens
ttgcatactggctatataattctctgtctctctctgtttatctctcccctccactacccctcccctatacatactaccatcatccatctttgaattcctcatacctaacatctcaatcccagtatcataagcaccccaccccacaaggaaacacaaagaatatcaataaaaaaaaggaaaaaaagagaaaaaaaaaaacagccatcacctacacaacctctggtaactcacaaacacacccgacgatcaaaggacaataagcatcccacaccgctacaagaaagaacgaaaaaagaaaaccacacaaaaaccacgcacacacacaccaaacacaaaacaaccaagacaacagaacgacgaaacagtacactccaaccacaggacccacacgaacaaacgcaccacaagagaccacaacagaaacacagacgtacccacacaaagagcacctacacgaaaacacgcacaagaacaaactcaacaccaccacaataccaacaaccacaccacaccagagacaaacgcacaccaaacccacacggccaaacacacggagagcaaagcgatccaaacaaaccagacaggataacagacaaaaaaacaaccaacacagacactccaacaaagagaaaacaagcacacacaaaaagacaaaaaccacacaccacacgaggacaaacacaagcacaaacacgaagacaagacacgaaaacaccagcaaacataaacaaacaagaacaacacacaaaaaacgataaaccacaggcaactccgtacacacacatacacaaacaaaacaaacaacaaacccacaagaaaaagcgaaacaacgcacacgacaaacgacaagccaacacaacgcacaacaaaaacaaagcaccacacaaacacccgacaaaagacatcggacacaaaaacaccacacacgaaccaaacacccgcaagacaccaaagcacaaaaaaacaaaacgaaacaacccgataagcaacaagacaagacagcaccaagcagaaagcacaaacaaaacacaccaacaaaaacaacacacaaacacaaaaaacaga

SEQ ID NO: 598779 - DNA, 164 bp, Homo sapiens
ggggtgccccccccccccctttgggggggtggccctttttttccgggggggcccccccctttgggggggccgggggttttttttccccccccccccccccccccctggggtttttttttgtttttgggggggggggggggtaaaaaaagggggtttttttgcca

SEQ ID NO: 598780 - DNA, 303 bp, Homo sapiens
actatcgactcgcacccgtcagacgctgaactatgtgcagagaggtgattataatattctctgatggttgcttgtatttctgtggggtcagtggtgatatcccctttatcatttctgattgtgttggattcttctctcttttcttctttattagtctagttagcagtctattaatttttttcaaaaaaccagctcctggatttgttaatttttgaaagattttttgtgtctctgtctccttgagttctgctctgatcttatttcttgtattctgctagctttggggtttgtttttggttctct

SEQ ID NO: 598781 - DNA, 254 bp, Homo sapiens
  misc_feature (57)..(57): n is a, c, g, or t
  misc_feature (122)..(122): n is a, c, g, or t
  misc_feature (236)..(236): n is a, c, g, or t
tcgcagtgcagcttaggtgacgtcacgttgcactatatacttctcagtctgtacatntcgcggtcgtgacttagaatacctgtcggccagctgcaggcggcgcatatgcatcctagcctatnatattccggagtatacgtagccggctaacgttaacaaccggtacctctagaactatagctagcatgcgcaaatttaaagcgctgatatcgatcgcgcgcagatctgtcatgatngatcattggcaaatttgg

SEQ ID NO: 598782 - DNA, 882 bp, Homo sapiens
cccagaggggtgtgtggcgccagccaaggtgtggcgcacaaacatgtggttgccagtcacacatgtatttcccttgtagaccgtgtcgtcctaatttggaaagaaaattcggggttcatttttccccgggcgccagttgccccccgcgacctcgtctctcaccctgggggggccccgttgctgagttcatccagacttctgggatcctcacttgcataagggagttgcttccaacgggtagtctttttttggatgccactccgcaccccgcagtgtctgtcatgtttgcctcccacgtgcccgcgcgtatgtgtcacccaacacaggttatagcaccacttcgcctcatgctactatcgcgcacctcgcctgcgtggcgcctttcttgagagcccgcttggcttcgcaccgtattgcgtgtcgtgcccgccacgcgaagttgattctcgctcttcacttagttgacgccgcctggctgccaacacacgaagtgtttcttgcccaggatagtctctctcctttctgactcgcccccggactattgtggagtcgttattcgtctgagtggtgtaataactcgttgcgtgggtggttaatatgtgaggcatttatgtccccgcttgggggagcccccccagtaataatcagctcctacctacttggctcgatatgctacgctacgacgagcgctctcgcctgcgagggaccggcgatgcgagtagacgagccgcctcccctcagctggagcttctcttctttctatgcgctgccccacaacagcggcatgattttctcctccacagaatagtcaagaagtctctaggaactccccactactccttggccacagaataaaggcaccccccaaagaacaaacataac

SEQ ID NO: 598783 - DNA, 883 bp, Homo sapiens
ctctctgaaacatgtgctgtgtcaactcagagttaaatggattaagggcggtgcaagatgtgcttgttaaacagatgcttgaaggcagcatgctccttaagagtcatcaccactccctaatctcaagtacccagggacacaaaaactgcggaaggccgcagggacctctgcctaggaaagccaggtattgtccaaggtttctccccatgtgatagtctgaaatatggcctcgtgggaagggaaagacctgactgtcccccagcccgacacccgtaaagggtctgtgctgaggaggattagtaaaagaggaaggaatgcctcttgcagttgagacaagaggaaggcatctgtctcctgcccgtccctgggcaatggaatgtctcggtataaaacccggttgtatgctccatctactgagatagggaaaaaccgcttagggctggaggtgggacctgcgggcagcaatacggtttgtaaagcattgagatgttatgtgtatgcatatctaaaagcacagcacttaatcctttacattctctatgatgcaagactttgttcacgtgttcgtctgtgacctctccccacaatgtctggtgaccctggaaaatccacctcttcgagaaacagccacaatgatgataatactagggaaacagaagctggaggatctcatatgggacggcggtcccgggaccttatcttaccaaaggcgcgggctcctcccaagccaatcccctaaaacccaggtttggggcccccaaaagaagccgaccgggggggcgcacagcgccccagggcgaggcacaaggcgcacacgacagcgcgcacaaccgacacgccgcaccacagaacagtggcgcccggcaagcacacactgccgcta

SEQ ID NO: 598784 - DNA, 354 bp, Homo sapiens
attatcccaagcttttaccgcgacagtgatgcaggctgacacccccaggtgtgggcacattcgtacatgcagtcaagtactctgactaaagcctgaatcatgctaagctgctaacagggagtgggatgtagagaaagagtagaagaaggggatcagaagaggctgacaaggccatagacgcaggctcctctttaccctgtgtgtgctgggattttgtaataagcattacttaaaaagtttattatcccaaatattaaccattacatagtaagtgagaaaatcagaaaaggaggttctggttctattaaagaaagagtatacaaagctagtcatggaaggtttaaagggcggtaa

SEQ ID NO: 598785 - DNA, 287 bp, Homo sapiens
cggactcaggtcggctcatgccacgtctccttccctgtcttccacaggtatgtaaaagcgtcatgtttgtggcaagtgtggaagtgaaacctacctaagaactatagatgtatagattgaacttctactagaagtactattcaggagagctgtattttgaaggataaaatgtttataattggggagtggggagagaagaagaaattattgttcatggtatatagatatttatgtcaactatggtattctggattctgagagatttttagtacacatcagtgctatct

SEQ ID NO: 598786 - DNA, 221 bp, Homo sapiens
tgctctgacgagctcccccgttgtgtcctgcctcgtagcaggccattgcagtggtcctcccaggtcatgggtggcatgggggtcgcccgcagcgtcgctgcaccgctcttggccgcccgcgcagctgcctggggcgctggccggcctgggctggtccggcctggtcatgcctctcccttgcggagcctgggcgcgcgtctccagcctgaccaggggtaccg

SEQ ID NO: 598787 - DNA, 135 bp, Homo sapiens
cctgcggctgttggatttgggaatgcccttggtgaaagtctccctgctccagggtctctttttggtccaaaggctagacctataaagttggatccctttttttctttccggtgaaataaatggtttttcacctta

SEQ ID NO: 598788 - DNA, 755 bp, Homo sapiens
  misc_feature (533)..(533): n is a, c, g, or t
  misc_feature (673)..(674): n is a, c, g, or t
  misc_feature (721)..(722): n is a, c, g, or t
attctttgattacttatgctgaaaaataaagaatgataagcttttatattcccagtcacacccccattcccccactccagataaagcttcagttataaaaaaaaaaaaaaaaaaaaaaaaaaaaaaaaaaaaaaaaaaaaaaaaaaaaaaaaaaaaaaaaaaaaaaaaaaaaaaaaaaaaaaaaagaaaaaaaaaaaaaaaaaaaaaaaaaaaaaaaaaaaaaaaaaaaaaaaaaaaaaaaaaaggaaaaaaaataaaaaaataagaaaaaaaaaaaaaaataatggggtgcgagccccctggcggaacccaaattaaatttttggaagcttttttaaaaggggcaaaattgggaaaaaccggggaaccccccaataaagggcgttgaaaaaaaaaacaaagggggaaggttaaaaaaaagggaaaaagaaaaaacccggtgaaaacaaaaaaaaatgttctggaaaaaaaagccttttttaaaagaaagtgggataaaaagaaaaaaaccccccgaaaactttataaaaagnggagatcgttttgaacaggggggcaaattgaaaaaaaatttcttttataaaaaaaggtggacctattgtgaaaagggggatttttaaaaaaaagaggaagccccctaaaaaccccttgaaaaaaaaaaaacccggggaanngggggtattttacaaaacaccccaaaaaaacctttttaaaaaggggnncaaacgggaagagcgaaccccggaagggataaa

SEQ ID NO: 598789 - DNA, 386 bp, Homo sapiens
  misc_feature (88)..(88): n is a, c, g, or t
  misc_feature (280)..(280): n is a, c, g, or t
gacgtatcagctcagtgatcacagaatttcagcacactctccaggcccctgcttggtgccacatctgagagttgcgcagcgtcacagncagttctgaccaggcggggctgttgctggtcaggtgcttcgccgaggcctgcatcccaccagcctccacaatggcaggcttattgctgggacacacggatagcaccttgagcacacgactggtggtccagagcagcttttcataactgtagttacgcatgatctgcacgagggccctggggcccaccattgnccaggatgatcagcttgctctcctggttgccgtaggccaagagctgcaggcagccggtggtgatggcaggaactttggggttgctctttgtagagcaggggcccca

SEQ ID NO: 598790 - DNA, 272 bp, Homo sapiens
gtggtagggcgcttgtgctaggctgggtggatgctgctgtgctggccccgttctgcccagctcagcagctcactgttctggaaccacagctggatctcccgctggggcccctccacggcagtcgctagcgtggatgacattcctgctgatgtggacgctgaagtcaccccttatggttgctggggcggtctcagccgagtcggtgtgtccaatcatggccctcgaggcgcgtgcgacattgtacccttcccagaccacggacatcccctgct

SEQ ID NO: 598791 - DNA, 118 bp, Homo sapiens
tgctagcaactgtcgggctctcgtctctgctctccgacctcctcctccagctccgggatatctccatgcagagcacagtggctgccagtgggaaggacttgacggtgcgttggcccaa

SEQ ID NO: 598792 - DNA, 419 bp, Homo sapiens
  misc_feature (6)..(6): n is a, c, g, or t
  misc_feature (55)..(55): n is a, c, g, or t
  misc_feature (290)..(290): n is a, c, g, or t
  misc_feature (338)..(338): n is a, c, g, or t
  misc_feature (415)..(415): n is a, c, g, or t
cctgtnagaccgccgggagcccgacttcctggcgctttgccctttgggagccggncaagcgaacagcgccaacctctctccacaagccagggaccctacaacccaccgcctcaggccagaaccagcagctgatttagataccatcaagacacctaaaaccttatcatgagccagatgctgtggaagagattctgggagaatcctgaggaccccccagttgcagccatgtcaagactgatgctgaggaggaccccaactgtcacgagcaacacccgtcgaacacagccacntattggggaaagatcaagaagctgttcacagatggtgggaagaaaacntgagggaaagcggggacaaccattcacattgagttattttaattgttagctattgaggagcggttgttccacctttngttt

SEQ ID NO: 598793 - DNA, 511 bp, Homo sapiens
tttattactaatacaaattaaagttgcacatttattcatacttgcttttacctaatgtatttacttcttcatccagtgaacactttctgactatctaccaaccaagcctttactcaacatctgctgcatcatacatgttctcaaagcgcttcccaaaacagacttgataattaattggaaaatgatactggaagttatggggattaggtgcagagttttattaccttatacagcagtatttatgattacaataaaccatacataaatgttgttatattaatataatactaaagaagttcactgcttgcaactattttaatgggcttgtgacttagagaaaatttacttatgtacaatatcagagtaggaattggaatcatagttaactaaaatagaacataaacttcataggttacgatttatatgaagcccaatagttcaattctaatgaccgccttgtgttttacgattaaccttatctgctcctttatgagttctctggccagcaaaa

SEQ ID NO: 598794 - DNA, 238 bp, Homo sapiens
  misc_feature (27)..(27): n is a, c, g, or t
  misc_feature (73)..(73): n is a, c, g, or t
  misc_feature (152)..(152): n is a, c, g, or t
  misc_feature (173)..(173): n is a, c, g, or t
  misc_feature (215)..(215): n is a, c, g, or t
  misc_feature (222)..(222): n is a, c, g, or t
ggcacgaggacaccacggccagtgctnctcctggggtcctgtacaaccttgcgaggcacccagaataccaggngcgctgccgacagaggtgcaagagcttctgaaggaccgcgatcctaaagagattgaatgggacgacctgggcccagctncccttcctgaccatgtgcgtnaaggagagcctgaggttacatcccccagctccctttcatctnccgatgntgcacccagggcattt

SEQ ID NO: 598795 - DNA, 154 bp, Homo sapiens
  misc_feature (121)..(121): n is a, c, g, or t
attagaggatctctgggtcagtgatctcggggtcagtgatctcgggagtggcatctgactgtgggcgactcagtagcatgaacctgctttgtatgctttctgcgcagatgtcatcagattntgaagagttgagcacagtggattggaagaatca

SEQ ID NO: 598796 - DNA, 520 bp, Homo sapiens
  misc_feature (1)..(1): n is a, c, g, or t
  misc_feature (81)..(81): n is a, c, g, or t
  misc_feature (210)..(210): n is a, c, g, or t
  misc_feature (254)..(254): n is a, c, g, or t
  misc_feature (426)..(426): n is a, c, g, or t
  misc_feature (505)..(505): n is a, c, g, or t
nacccctcacccactccacacaacctcactctccccccctcctccccacccatcatctcttaactacccaccccccccccncccacaccatcccttactttctcctttactttcacaaaacacacacttcccctccctttctttttcttttttctttccttttctttttttacccatacctccctcaacctccctccatcaccccccatncaccaacccttccaccaaccctcacttccctccacaccccaccnccctctccccactctcaccaacaccactcccttcctccaccaactccactccaatcctccaccaccaaataaacccaaacccaactcctccacacccacccaaaatccttaaccaccccccccctctccacttcccatgcccccccctacatcaactcctctccaccccacnctcccatctacacctccctccacccacccctcccccactttctcctcttacactccttccatttcttctcttccttttntcccatccccctatt

SEQ ID NO: 598797 - DNA, 842 bp, Homo sapiens
cgtggtggctcacgcctgtaatcccagcactttgggaggctgaggcaggcggatcacaaggttaggagatcaacaccatcctggctaatatggtgaaaacccgtctctactaaaaatacaaaaaattagccaggcatggtggcacacacctgtagtctcacctactcgggaggctgaagcaggagaatcacttgaacccaggaggtggaggttgcagtgagcctcactgcactctagcctcggtgacagagcaagactccatctcaaaaaaaaaaaaaaattcctcaagagaagattttacttatcaaggtaatttccagggtccgtggccccaaggaaatccagggaaacaaccacattattcctctggagaattctcaaaagaattcttaaagagaaattctcaaagttaaacgcaccaaaagaaaataacacttcacaggagccaggcagggggggcgctcattgcctgtaacacccacttgggggagcgccaaggcaggaggatcatgagctcaagagatcgagaaccatcctggaacacactgggtgaaaaacctggtctctactaaaaattgtcacaattaacttggccgggcgttgaaggcatacggctgggaacttcccaggcaaactcaggaggctgaggcaggcaaaattggcttgaacccaagggagggcatctttcaagttgaccccgacgaattggtgcagctggcacccccaggcttgacgagaccccaggggagaaccctggtccccccaaaaaaaagacacaagcagtaacaacaacaacacacagtgtgcgccgccctcgcgcctcacaagaagctctccaagac

SEQ ID NO: 598798 - DNA, 350 bp, Homo sapiens
  misc_feature (146)..(146): n is a, c, g, or t
  misc_feature (149)..(149): n is a, c, g, or t
  misc_feature (199)..(199): n is a, c, g, or t
  misc_feature (256)..(256): n is a, c, g, or t
ggatttaaatggtctctaaagccgggggtagggggcagggtgggttgtctttgcccctcaaagtcacctacctagaaaccaagcccacggtcttggccgtgaccctgataattgggctctctcagaggcgccagcccctccttccnagncggaggcgtcattctcttctgtccactagagggagctctgatgcagctgnagaagcagcgctcaaggtcttcgccctcccttcctaacccttacctttagtctcacnagcctgaagggcttctaggggtcctcaggcgggccccaccagggcacaccctactggccttgggccttacgcccccctccttatctgccccctt

SEQ ID NO: 598799 - DNA, 184 bp, Homo sapiens
caagaccagcctgggcaaggaagaaagactgtctacaaaaatttaaaaattagcctggtgtggtggcgtgtgcctgtggtcctagctgcccaggaaggtgaggcaggaggactgcttgagcttcagagtttgaggttgccactgcattctagcctgggtgacagaatgagactctgtctcaaag

SEQ ID NO: 598800 - DNA, 487 bp, Homo sapiens
gatgttatcctcaacaaccccacagcatcgtacagcccacatagtagtagggggtccgaagctatatgtacccaaatctgacatggctcctgtacaatactggcgatagtagccttgagtatgtagggagggcttctactatagtgacttgaggacctgattcttccatcacaggtgtgaatcctacaaattggcaagtggtcttcaccgttttccccagtctgtgtccaagtgctgtagaatcgtatctttcacggttgtcactcgaggtagatttgatacctcagtgaattacagagaacaactcccacgaactttcggataccacttgcgcttcacatattgccgtccatggcagtccgtgtagctgtgatcatgtttgaaagcgaatgggatccagataggctcaccgcctggggccctcacaacaagcagaggattatctgattcggtgacaaatgagaccgaagtgctgataggtccgtag

SEQ ID NO: 598801 - DNA, 327 bp, Homo sapiens
taccgctcctgaatgacagtaggtcactgaagaaattaaggaaaatttattaaaacaaatcataatggaaacacaacataccaaaacctatgggatacagcaaaagcagtaccaagagggaaacttatagctataagtgcctatatcaaaaagaagaaaaggctgggcatggtggctcatgcctgtaatcccagcactttgagaggccgaggcaggcagatcacctgaggtcgggagttcaagaacagcctgaccaacatggagaaaccccatctctactaaaaatacaaaaaattagccgggcgtggtggcacatgcctgtaatcc

SEQ ID NO: 598802 - DNA, 461 bp, Homo sapiens
  misc_feature (25)..(25): n is a, c, g, or t
  misc_feature (83)..(83): n is a, c, g, or t
  misc_feature (123)..(123): n is a, c, g, or t
tcctaattgcttcctacatgggccnaatttggaccttccttcaacttacttcgccattgcccgagaacggagagcaaagcccngcgtgcggtttcaacctgatggagaaaaattgcttgcaanccaacgggccgcccgcggacaaagcccgaggagaactgaggtgagcgctgcccagtcttccccgtgtgccggctgcgagcctccttgctcctgcatctcgaccattccgtgttggctgtgtcgcctgacctgcgtacctgtggaggattcggaacaagtcatggagagactgtccgggtccgctccttgtgaactgtgcagaaggagtgatcccagcatcggcaagcgagggagaagactgcacgagagtgatgcgcatttcgagtctgcttttcgatagttgatgtcttcttgcctttttaaaaaaccatatatatataaagtttagggtttgctct

SEQ ID NO: 598803 - DNA, 571 bp, Homo sapiens
  misc_feature (482)..(482): n is a, c, g, or t
  misc_feature (519)..(519): n is a, c, g, or t
  misc_feature (555)..(555): n is a, c, g, or t
gtggcgtgcacctataatcccagctactcaggaggctgaggtgggaggattgcttgagcccaggaagcataggttgcaatgagccaagattgagccactgcactccggccaagacttactgtaaaaactcaaagcacggtggctcatgcctgtaataccagcactttgggaggccaaggtgggtggatcacttgaggtcatgggtttgagaccagcctggccaacatggtgacaccctgcctctactaaaaatacacaaattaggggctgggcacagtggctcatgcctgtaatccttgcactttgggaggccgaggcaggtggatcacctgaggtcaggagtttgagaccagcctggctaacatgatgaaacccatctctactaaaaatacaaaaattagctgggcatggtggcgcacccctgtaatcccagctactcaggaggctgaggcagcagaatcactggaacccaggaagctgangttgcggtgagccgagatcatgccactgcacttcagnctgggtgacagagactttcgttcaaaaaccaaacanaaccaaaaaaaaaaaa

SEQ ID NO: 598804 - DNA, 114 bp, Homo sapiens
tatagaggatccctcacactgggttcgagttcctgaggtgcatgcatttgatcagacaagcaccaccgcaaaggcacagtatcggtccttggcgaggaatcatccagggggaga

SEQ ID NO: 598805 - DNA, 200 bp, Homo sapiens
agcctgcacttcgggctggtcaacggcgtgatccgcgacggcacggcgccaagctggatctcggcctggcgggcaacgccaccctggaagacgtgcgacagatcttataaccctaagcatcaggctcaatcggacgatagcctgaccactattcggagaataacatggccttttctcaggcagtcagcggcttgaacgcg

SEQ ID NO: 598806 - DNA, 824 bp, Homo sapiens
atcctgcgctccccatgcaccaccatcccaaactcaggcttcaggcagaaccaagtcatcttcttcacgaccagaagcagcaggaggagtaacacgaggcatggggcaatggaccttccaggtctcatgcgcagttgagcagccaatagtgattggcctggcagcagactcgggatgtgggaaatccaccttcatgcgccggctcaccagcgtgtttggaggtgctgcagagccacccaagggcggcaatccagactccaacacgctcatcagcgacacgacgacggtcatatgccttgatgactaccattccttggacagaaccgggaggacaggagaaaggtgtgaccgccctgtgacccccaaggcgaaacgacttgtgatctcatgtatgagcaggtgacaggcaatcaaggaaggcaaggctattgagaagccaatctacaaccacgtcactggcctcctcgacccggcggagctcatccagccccccaagatcttcgtcatcgagggtttgcacccaaggtatgatgaacgtgtgagagagctccttgatttcagcatctacttagacatcagcaatgaggttaagttcgcatggaagaattcagagagacatggcagagcgtgggccagtcttgaaagcatcaggctagcatcgaagccaggaaacctgatttgatggctttattgatccgcagaagcaatacgctgatgctgtgattgaaagttctggcgacccagctgattcctgatgaaccacgaaggaagggtgccgcgtgttaattgatcattgaaagaaggccttaaggtcttcaacccgg

SEQ ID NO: 598807 - DNA, 353 bp, Homo sapiens
agttaacagggtgcctctttggggccaaggaaggagtgcgaccccgagaatcatgccaaggctcccccctatcctgcggctgctccaagcgcctgcgaagttcacagtggttcccaaagcccatgtctctgccaagccagccaaaactcccacttccgccgtggtaagtaacttctgaggcggcattccctgggcttcagggcaacagggaagattaaagtgataaaggagaggggaggacgtggtgctaggtatcagggttttatgcaagaccgtgtctgggtgccagaagagggctctggcaccactgcctgtgggccgtagacgcgcccgcgaatttagtagtagtaggc

SEQ ID NO: 598808 - DNA, 433 bp, Homo sapiens
  misc_feature (86)..(86): n is a, c, g, or t
  misc_feature (420)..(421): n is a, c, g, or t
cggatacataaagaccagggggaaaagctattatgcatgttggaatttgtgatgtgtaatcgtgttaatttactgtttgagaaganaccccgctatgtgttagtgattatatagtaatcaggaaattatacagatatttagatcatagaaattagtttatgaatggcataaacataatgctacctcagcaacgaaatgagataatcagctaatttctcaaacctgatcatatgaagcagacccgggaagaatacttttcagtggtaagtgggaaaaggtgtagcaaataattgctaaacttccaaaattcttcttcttcagggcctacatgtgatattccataatttcgttcatctgttctgatgcagtgaagtgcaaaaacatcctccaaaccaaaatattgtgaaaacaaaatttctnnagatgacttggc

SEQ ID NO: 598809 - DNA, 130 bp, Homo sapiens
cctggtgatagctggttgtcaagatagagtcttagttcacctttaaatttgccacagaccctctaaatcccttgtaaatttactgtagtccacagaggacactctctggcactagggaaaaacctcttag

SEQ ID NO: 598810 - DNA, 116 bp, Homo sapiens
agtcagattgaacacatatctagtctcatcaaactctccaaggccgacgtgaaaaggaaattatcacagatggttcttgacaggaaatttcatgggattttggaccagggggaggg

SEQ ID NO: 598811 - DNA, 155 bp, Homo sapiens
tgagagctgcactattgtgacctaaactccttacacttcaccctataaggaaaggttagctgatccctaggctagaactcaggttgtgtgcatcatatggctcttcaacaaagcctggcattcccacagctctatcccagagctctgccaaaggg

SEQ ID NO: 598812 - DNA, 1012 bp, Homo sapiens
gccagatccccggctggcaagaacttcaggaagaggctgcccgccttgaagagccatttccagggctcagttacagcgaggtaaatgacgaaatgacagctcttgcagaggatcaactcctgtcgagctatctcaggtatcaagaacagacgggtggcagccctgcgatgaatcaccagtatcccgacggtgctctgagcgtgctaggccccgtacggagaaagccgagcggagaggaccagtctgtggcattcatgaagctgcaatggagctgcattctgccagctgtgatccttggagtaactagaacggacatctggcatctagtcagccttccaggcgatggtcccctgtttagaacaggccagtggtagcacggagtccagatctggaatgttcatacgtgctcctgaataagactacacgactggacgaagcctgaaggagagcatgcgtgcagaggtagccgggccacggaaagagccatgcgttgaccccgtggagtgctgagaagacccgctcgtgctagacctggaccactaatgcctcagcctcgtgaggctgctgactggggacaacgggtaacggtgcacgtctgattaccgaacagggagctggaaacagtcgtgagacgaaggcagtgtggagcaaggcttacataagagtgacgcaagtccccaaggggtaggatccgtcatcaatgcgtagggaatttcctcaggagtactaggctcatcccgtgggtgcaaacggagagcatgcggagagcagaccccagggcagccgacgctatgggcagacagcccgccacggggccccccgaattatttccccaatgcagagcgtcttccctgaagcaggggaggccacaggaagcgagcgaatagacccccggcacgtgaacgcgcccgcatgcacctgggcaaccccacccgaaggcatgggacacccgggactagaagtgaagagtacaacacgaggcggagaacgctaggagccgggcgaggcaagc

SEQ ID NO: 598813 - DNA, 894 bp, Homo sapiens
agaaaggttgtgatggcggctatagctgcatccgaggtgctggtggcacaacgcgcggatggaggggtccctcgcttgcggcggcggagctggccgctcgagaagctgcgatacagagactgcgcgtattccgggagctgcacctgatgcggaatgaacgctcgtaaattcaatcaccaggaagttgtggaagacgatactcagactatgattacctgccaaatgtgcgcgaagccaaaaacagctcgtttggagtgggcactagtaggaagaggacatgaacacggtaatgtgctggcataggagaacgactatgagacagtgaactagcatgcatgatcagtgcatgatacgatgctgaacaggatgggagagcgaaaaagaagaggaaaaaccctgatctgggattttcagattatgctgctgcccagttacgccagtatcatcggttgaccaagcagatcaaactctgacatggaaacatatgagagactgagagaaaaacatggagaagagtttttcccaacattccaatagtcttcttcatggaacacatgtgccttccacagaggagaattgacaggatggtcatagatctggaacaccgagttgaaaaacgagacaaatatagccggagacgtccttataatgatgatgccgatatcgactacttgatgaaaggaatgcaatttcaacaagagagccgtaagattctatgggaaatacacagtgaaatttaccccgaattgggaagaggatcgctgctaattcccttcacgcacctgttattggaagcttgagaatggggtaaaaatttctgctagccaaacacagtcctttggaattgaccagcatccgaacattggtcccgccttccctccggtttaactcacg

SEQ ID NO: 598814 - DNA, 367 bp, Homo sapiens
gtccggatcattggttttagaagatagagcaaaacttgagagttaaaccctagggttttttttgtttgtttgttttgttttgttttttagctctgattctactagaagtagtcatgtcatctttggcaattctcttaatgtaacattttggaacttggtttccttgtctatatgagagagttgatgataccttacaagttgtactgaggattacatgagccctccatgcaaaatactaaatacactgatacagatatggttggtactcaagaaataatggcataattttttttttcttgctatgttgcccaggccaggagtttgagaccagcctagccaacacagcgagaccccatctctacgaaaa

SEQ ID NO: 598815 - DNA, 1110 bp, Homo sapiens
gcgttttttttttggtgttgtttgtgtgttgtgtgtgtgaaggagaaggagaaaagagagaagaagaaaagaagagaaaacgtatatgcttgttatgcttttcagttttgttgatggtttttgttgtgactttctttcctcgtatttctctcgcgtggtgttggtacttgatgttacccctctatgtggtttgtttgccccccttttccgcgggattttacacttaggcgcttttttcggcgcgagacaccctggtcccgggtatggtgtttggtcttcggccccatgtttagggggaccactggcgcgtgttgtccattgcgggtccgaggcggtattttggcaaatttctgggctttcttagggcacacctgcgggcgacacgagttccaccagaccaagcccaaccttgttgtcacaagcgaggagccccgccgtttgggacccaactgagggggggaccaatgtatcccggtcgggctttcccccgcgctgtcttgacccttggcccaaggtggaccgagaaccccctccacgagtttacttctgtccgaattcccggcttttggaacattctcggtgatccccgctgtgatgaacctcccttgggttcacccagatcactttgtgatgtgaccgtgttttgagttggccccgttactgacacgccgctgggacaccctccccgcccccgctgtgctgtgtgccgctgtgtggaggagacttatgaaactgagctgttgccccttattgttattgccagatccaccctcacgagatcccgtttaccctcgtgctgttccacgctttctccctctgggaaaaaatctctcctgtttctctctcctccttccaccctcccctccctccatcaccctcacgcctttctgttccttgtcctcacccttactcccctcacggagccctaccccacccctctttgaaaagacacaagctctgcctaacactagaagacatttttttattttaacccaagattactgttgtttaccgatgagatttgggggaaaaaaatataaatataaaatggctttccccgtcccttgcatccacgggatgcccaccatttcataactgtttttaatggta

SEQ ID NO: 598816 - DNA, 310 bp, Homo sapiens
gctcgacctgctgaagatacaaaattagccaggcatgctggcacatgcctgtaatcccggcccactgcatcctccgcctcccaggttcaagcgattcccgtacctcagcctcccgagtagctgggattacaggcatgtgccagcatgcgtgctaattttgtatctcacagaagaagcgggtttccaccgtgttgccaaggggctgcactcaactcctgacctcaggtgatcggcacggctcagcctcccaaagtgtcgggaccacaagcctgagaacctgcgcccggcctttttgtgtttttttttttta

SEQ ID NO: 598817 - DNA, 107 bp, Homo sapiens
tgactctacaggatcctccccagctactcaggaggctgctaaagtctgtagagcaggaatcatttgtcagaagaacacagaagcccacctagctaggagttctatct

SEQ ID NO: 598818 - DNA, 161 bp, Homo sapiens
tatttgctctctcctactctgctgaacatccactgtgctcgcttgtgccatgctgacgcgcactggtgccacgtgcgcgtgtggttgtcttgtgcctgcagactgggacatcatgcccgctcacttgtgagacttgtgcgctccactggattgtcgctgcc

SEQ ID NO: 598819 - DNA, 135 bp, Homo sapiens
tgttacgactgcatctgtgctcaggtctcagtatcaacctcttcacccagcttctagaatcaattctcacatgcaaaccttggtcagtccatgcctcgctgcttaaaacccaacagtagcttcccactggcttca

SEQ ID NO: 598820 - DNA, 1521 bp, Homo sapiens
  misc_feature (296)..(296): n is a, c, g, or t
gaattcatctacgataaagacctgcacggacactggtgcttcatcgccgctcacgggtgcgacgcgttgctcctgtgtctgaggcctagtgtcatccttttgagatccatcattgctcgagatataaccttgggtctgtcgaatcggtagatgtgatatgtatcactagactagaggcgaatggggctcaattaggagctcatctgacacatcatagagcgatggggaggaacaaagagctcaatagctctctttgcgagatcgatagcatctcgctatggcattctatccatagnactatgcaattgctcctcaataaagtctatcgctagcatcgaagttggcacactaacccaaaaggaaacggtaattgttccctaagatgataagagcattgagacaatgaaaaaggggcccaagaaccaattccaatagtgtagcaatacattccgggtggcaaatgaacgagggatcgtagtggggggcgcgataacgtagaagtagtgtgtataaagccacgatgtaagcataaaaggggaagaaaatgcctcggaggaatgggaagcgaaggaatattggtgcagattccaggttttttgtacaaacgtctctaatttgaaatcgggcgaaacaggggaaacaatttgtaaggggatagccatggaccaatgaaaatgcaataaaggaaggttaggaccagttataaagaaaatggcgtaattatataattgcggcagtggtttccttacggtggaaaatacagtcgtctcatgcacaccaaaaaaaagagggcctattcacttcgttgtttacctaaagcggggctccactgagcatggactatagattcgcctcgtttaggcctcggggtaggcctagggtggactttggttggtctcttgtgtgcaaaccggttgctcctaaagggagaaactgtaagcaatcccaggatgtcccaggcagcaagaataacacagcattccgttggacctaatgtccctagtgagggggttacactttggaaccctaggtaaaacggcccagacaggggccaagggaataggccaatctggccctggatgggcgaaaaaaagcgtccaccgaaaggcggggggccaaaacgcctacccaggacacccttggacgggtgccccggctggccgcaccaagcacctacgggtgcacgagacaacccctcaggcggggagacgctggcaaaacaggagcagaggcgggccacaaatcaggacgggggcggcccgcccagaaggaatataaccccccgtggagtaaaacaccgccccggccgaagacccacacctacggcagcagagcaggagcggagacgaagacgaagcctcacccccacaaacaaccacaccggcaagacaccacccaacgagcacaccaacaaaccacacaaacaaccacacaagaccactgccgcacacagagtaaacaaccaaccatccggcgcccacacacaacaagacacagacccccgcacacacgagccgaaca

SEQ ID NO: 598821 - DNA, 875 bp, Homo sapiens
gattcgagccgttgagacgcctctgcggcagctggtggcgcagtgtggcttgcgtggagcgcgggtagaggcgacctggccagcaaccgcagcgtcgtgcgcccgctggcccggcaggcgcgtcgggacgccccgatggcatcctccccctggcctgtgggccggtagctgggccctggtccggcgcctgatccccgtgcgcgaatctcctcgccgctcccgggcttctggacccccggtctcgcccccgaaaaatgattcgcgatttcaaacctggcagaccttcatattcgccaagatgaacaggttatcccacatggggccagctcgagtagacgaagttcctgatggagctgtaaaaggcaaacgcaaaacaaagatacccattttacgtttagtggaactcatgagaggtgatttatgtagagaccaaaggatataattacccttactcagaacaataaggaaaagtatggcaaaacaaataaaccagagaagggtttgaattgaaggtaaaatgggagatagataaacaaatcgcaaaaagtgaaaatattcaagtcagacaggcaagaaaggtaaacacaactcaaaaatgcatacatctgatgtatgaaacgttgaaacgaaaacagggaaaactagtaggttcacaaacaggacgaataacgacaatgaaggaaaaaaggccaggcaaaaggaggaatgtgactaaaagcaagggtggaaataaattaaacacaaaaaggttgtcagaaagggggtgagaatacagaaaacaggggacgaaaaaaatcatagttagaacatgcaggacgtactagaatattatacaaacaagaagacagagtttgttcatctaaaatgatgataac

SEQ ID NO: 598822 - DNA, 1708 bp, Homo sapiens
cgtgacgcgtgggtcgacccacgcagtcggccgccgaggattcagcagcctcccccttgagccccctcgattcccgacgtttccggtaccccccatgaccgcactacataccgacgaaacgcacagacggcgacattccgcaggccgatataccaacgaggaaaaggaatctgtatcagtatgatccagcatatcgcagaagctcacaactctagatcagacacccataaggcaagaatgcagacgacaggggcagacagacacatgaataccctgacatggacacacaatgaagagactaacactccaactatacagaactaccaagcaagagcaaaacgggcaagagaaagaaccacaagaccataactagatccacaagagcgaaactcagcacacggacaatgcactgacacggcactacgaaacaagacaaaccccaggcagcaaagacgacaaccaaaaaagaccacaccagacaggaaccggcccaaggccacaaaagagaacaacacaggcaacaaaacagcaagagacacataacaggagaaaacataacagcgcaacgcaacagaaccaacgaccaggacactaaaccaccagcgcgcaagagaccaccaaacaagcagacaccaacaaaccaagtagacaacccgcaaagaaacaccaccaagaaaacacagcacatacgcgcacaaaacgcgcctacaaagagacaacacaacatccacagcacaaggaaaaagagagaaacaagaggcaagcgcacacacaaccagaatagaaaaaagagaaagacgacgaccccaccatgagacaccagccaaaaaaaaacaatgaacacggaaaaaaaacacacctaagtgaagcaagatgaaaagacacggaaaacgagaaacacaacaatacgacaagcaacacacacaagaacggaaacacaccacagagaaacacacacacaacgacaccaaatcacaaacccagagccaagcgaggcaagataacagaaaggatcaaaccacaaaactacagacggcgagacgacgcccaagaaacaaagaaaaacaaaacacatgagagaacagaaaacgaatgcaaccacgacacccaatacacaacgacaacgaaaaaaacaacgcacgaacacaaaacaacacacaacaaagacgagaacaacaagaaagaataagaaacgcgaacagcaccacacaccaaccaccaacacagagagacaccaaaccaaaaacaagaagcaaaagagaaccacacaaaaaaaagagcaaacaacacacaagagacacaaaccgagaaacaaaaaaaagacacaaacaccaacaacgcccaaaacgaaatcacaacaaaacaaacacaggacggaaggcaaccaatcacaacacgaccaccgaccgaaaacaccgccgcaccacagaacgaaaaacaacacaccaaaaaacacacaacacacaaccacccagcaagagcaaacaaaaagcaacaacgaaccaacacaagccagacacgaggacacacaagcaagaacacaacaaacacgaaacaacaaaagagaaaacaacaaaagagaagaacagaaagaaagaccacgcaaaacacagacaaacacacaacgacacacaaaaacaacgaaacacagagcaggaaaacagaaccacacaacacagagctcgaagcataaaaaagacacacaaca

SEQ ID NO: 598823 - DNA, 613 bp, Homo sapiens
cacctgccaccacacctggctaattttttttgtatttttagtagagatggggtttcaccgttcaccatggtggtcaggctggtctcgaactcctgacctcaggtgatccacctgtctcagcctcccaaagtgctgggattgtaggtgctagccactgcaccagcctcaacagaactcttttagggtcaatatcttgagacccacaaggaatttcctttgagcaaattctgtgggaggtatgtagccttttatctttatagttatgtagtttaggaaaaaaaaaaaatgtgagagacaggtttgggtgtgacacagtttcccagctagccttttcccgtgtagcgtaggtggtgtctgagaattcccaagaatttaattttttctttaattaatattaaccattgaaattactcaagacaaggtatattcggtaagatctggagagctacagtggtacaagaacattaccacagaaaaagaatacacatcactcgcacatgacacacttacgacacaaacacactttttatggtctctgtaccctgtctcctggtgcacagctcctgaaaccctttggaatctcccaagtgatgtgtcttaaggatgctattga

SEQ ID NO: 598824 - DNA, 386 bp, Homo sapiens
  misc_feature (281)..(281): n is a, c, g, or t
  misc_feature (316)..(316): n is a, c, g, or t
  misc_feature (386)..(386): n is a, c, g, or t
agcagaagaaaagtgaatcgccaaagagcatcttcaaatatattatttttaaataaaacttaaaacctaaacaattctaaatcaatttgtgtaagggatatattagtggtttctaaaattattttaaagtgcataagaggatgataaacacaaaaaggagagaacctacgggaaattccaacacaaccagggaatactctagttatgagttgttatgaaggttcatgggtaaccattattattacttattaacgtttaactcacatatattcttaaacttngggggggaaagtctcttattttgctttgggaggtncatggctttattttgcctaaacttgttttatgttttctaatccttttaggtgggggaggaaaccctggan

SEQ ID NO: 598825 - DNA, 521 bp, Homo sapiens
  misc_feature (7)..(7): n is a, c, g, or t
ttcattnagcaaatgggggccgttaataggaaatggaagggatacattgtatttttctgcctctggtagtaaacatggtatatctttttccaatcttttaactttcctgctttttgtatttaaagtgttttttttcttattgatagcatatatttggatattgctttttatgccgtctgacaaattcgacttctaactacagtattttgcccacttatagttaacataattattgataaaattaagatttaaccaaccactttcctatttatttagttttgtctcataaaatgagtgttctaatttcttaaaaaatgtgtagaattggcattatttcttatgtttttggtagaatatgccgataaatccttctaggcctgatgttgaacttgtaaagtgtattgtcaaggaatttttaattaaaaatataatttctttaatgtactttagtcctattcatactttctgtattttaacgtccactttgtcagtttatgtcttctaaggaatttgcctatgaa

SEQ ID NO: 598826 - DNA, 380 bp, Homo sapiens
tagagacgcatcttcataaacaggcatacaggacaaacagtgaaggctgtttgggttgaaatcatatttaattgccgttatgttatgaacccacaaaacagccactatttaatttagcccttaacctcctactaccagattgccaggtgacatcttttaggagaagaaaatggtttattttttaatgtttcttacctaaacattactttggcaattcacacttatatgtgagagagaaaaaaacaaatgtttacaacacaaatctctgttttgtgagaatactttgcattatggagtaatagacaaattggagctctcatatatgtcccaaaagttgtttagagtgagttctacctggccccaatgttctgatagtgtgt

SEQ ID NO: 598827 - DNA, 92 bp, Homo sapiens
ccccccttttttcctggtccccattttccaatctgtatgggggctgttttttatggcaaaaggttttggggaataaaaagcgtgaaatgcta

SEQ ID NO: 598828 - DNA, 478 bp, Homo sapiens
  misc_feature (474)..(475): n is a, c, g, or t
ctttgaaggaggaaaggaatgtgacagagggaaaaaccaaccttgtcccaccggggacatcagaacaatagcagtgttctagaattgggcatgtttgtatcattctcttatatcttgcattcattttataacctttgaatatggccaatatttaataaagttaattacatttaaaataagtgcacgaccccagcttggtggctcacgcctgtaatcccagcactttgggaggcccaggtggacagatcacttgaggtcaggagttcaagaccagcctagccaacatggtgaaacccatctctactaaaaatacaaaaaattagctggatgtggtggcaggtgcctatagtcccagctacccaagaagccgaggcaggaggattgcctgaaccctagaggttgaggctgcagtgagccaagattgtaccactgcccctcattctgcacaccagagtgagaatattatctactatnnaaa

SEQ ID NO: 598829 - DNA, 398 bp, Homo sapiens
cctgaccatgctctcttctcgttggtgggcatgctcctttagctcgggcgctgcgtcccgtgaggggccacacgtctccatttcagcgtcgttgcttggcctggcgaccgggctggggtggtatgccccgaggaccttgttgtgtcaagataatgactttccctgcccttgccgttgtggtcgcggctgtcctcccagccgggatcacagtgggcagccggcacccggcaccactattggcgagcgtcctgcttccgccctcgccctcatctacgctgctccgctttcctcagacccctttttgccgtgcaaagggaattcttgacattaaataacaggtatccagattgcagactgcatgttcacagagctgggggttctccagctatgcctacagt

SEQ ID NO: 598830 - DNA, 159 bp, Homo sapiens
aacgcagccatggctcgtggtcccaagaagcatctgaagcgggtggcagctccaaagcattggatgctggataaattgaccggtgtgtttgctcctcggccatccaccggtccccacaagttgaggagagtccccccccccaacaatttcccgaggaca

SEQ ID NO: 598831 - DNA, 310 bp, Homo sapiens
  misc_feature (125)..(125): n is a, c, g, or t
  misc_feature (132)..(132): n is a, c, g, or t
  misc_feature (136)..(136): n is a, c, g, or t
  misc_feature (164)..(165): n is a, c, g, or t
  misc_feature (180)..(180): n is a, c, g, or t
  misc_feature (185)..(185): n is a, c, g, or t
ttccttaatggaagactcagatgacggtccttcgctacccaccaaacagaacgaggaattccgccccttcattcgaaggctcccagagtttaaattttggcatgcggctaccaagggcttcatgngggtatngcgnactttcttcgacgcttcacttttttttnnccggccgattctggngatgnacttcatcatgctcttctgtatcacgatgaagaggcaaatcaagcacatgattaagtaccggtacatcccgttcacacatggcaagagaaggcacagaggcaaggaggatgccgctaaggtctcc

SEQ ID NO: 598832 - DNA, 367 bp, Homo sapiens
  misc_feature (316)..(316): n is a, c, g, or t
  misc_feature (348)..(348): n is a, c, g, or t
aatgaataaccagaccccattgtgcagcccgtggaaaaacaaccaactcaaacaacactgggactgttagaaatatgcttgtgattggcagcttggagagcctccaaaattagtttcctttggcttccctgctgctccctgttctccaagcctgggcttaatggggtttgagttttcttttaagtgctcactttaacccttaaactgccgggctgatggcctggggattctggggaagagctgccgctggacccacaaagccagtgaagcccattcccctttctttgtctcttcattttaggactgtaggctgttntaaaggggcgtgataataagagggagagggtngttttagcttcccctggga

SEQ ID NO: 598833 - DNA, 370 bp, Homo sapiens
cattctatgcatgtgaggctttataaagtacaataaattcatttatgaaatgaggttactttcttgactcaattaaaatcattgtgcaccccttccttatctgttaaaatgttagaagcgaattgacttgaattaaatgttgtaaaaagagtggagtggaaatcagagattgagtttggttggaaattagcagctgagagatgaaggtgccaggatttttatttaaatgtggtacaacaagattttgtcagtaaagcacatcattagaatattgagtttagaactgctaatttttcctttaaaatgagcatacagtcatgtgtttcatggaccataataaattgccattgtgttatcattgaaaaaaaac

SEQ ID NO: 598834 - DNA, 107 bp, Homo sapiens
catcgctttttcatgtgatctcatccatcaaaggagattgatcctatttcctcctcacgggagttggggtgagaataagtatggtcctgcagtgaaacacccacgaa

SEQ ID NO: 598835 - DNA, 723 bp, Homo sapiens
ggtctgttggagccatgaaggcagagggaaagagggctgccattcctgacagcctcccagccaggctggcgataaaggaccgagatagatggagggggcgagtagggaagtcctcttctaaaatgagagatagggatttggtggggtatggaaggaactaaccccttccctcgtccacctctgattcagcccttaattcgttggatctatgataaataaagttcagtagtctcacattccccatctattaccctaggtgtgtattcaaggcagtcagcggtagaatccatgtagttcccagcagttgccttcccctcagggatggaaggaagagggtctcttgggctggttgagggcacattgggggtgtctcatcagagggacctcgactgggttacccagtcagacgtggaggccagcaggcctaccctgacgcatctctttagctgtcaccaaggacacacataaaacccgactggtctctcgtagcttggccgctggtctttcccgttgctccctggccataagcatgtgcattagggcgattccttcctccccttcatctcaccaggggaacgggagacggacacgagtcgtcctcccactcgaacggggtactggcccttctgcaggtgaccatcccacgacacgctgtcccccattcgcctgtctcctttagactgctagaaacaccatctcggactctgcatcatggccgtggcg

SEQ ID NO: 598836 - DNA, 173 bp, Homo sapiens
gtctagagatccataggcgcgtctggtacttattaaaggcttaagaaatctatagaaatctgttcagccaggcacagtggctcacacctgtaatcccagcactttgggaggccaatggtgggtggaccacatgaggtcaggagtttgagatcagcctggccaacatggtgaaa

SEQ ID NO: 598837 - DNA, 189 bp, Homo sapiens
atacgagtcgagccggtaccctggattaggccgcatctagttagggtctcgacctgttgctcctatattatcgcgacttcctgttgttaggttgcttatcctaaacaatgaatctgaggaggctactcagtagacagtcccaccctcacacgattctttacctttcacttcatcttggcccttatcgag

SEQ ID NO: 598838 - DNA, 349 bp, Homo sapiens
cccatcattatgccccagggcgtgcagcacacgtgaaaggtataccataatacatattggctgggtgcggtggctcacgttggtaatcctagtactttgggagggtgaggcaggtggaccacgaggtcaggagatcaagaccatcctggccaatatagtgaaaccttgtctctactaaaaatacaaaaattagccaggtgtggtggtgtgtgcctgtagtcccagctactcaggaggctgaagcaggagaatcatttgaacccgggaggtggaggttgcagtgagccgagattgtgccactgcactccagcctgggcgacagagtgagactccatctcaaaaaaaaaaa

SEQ ID NO: 598839 - DNA, 284 bp, Homo sapiens
gccttcgatacgcgttcagctgcgacatagatgaagctgaacatctcgttcccagtacaatgtgggtgcaagatagcgtcatcgaagtggactgcctgaacgtcgaaatgttcgagatctttctattgacgaacgcaataatggccgagcagacagtagcatgtctgtaccagctctgtgccctgaagatcctggaatggccttactgttcgttccagatggtcagctgagtgggatacaacgataagcacagtgtatgcctccattggaaggaacgcggtagt

SEQ ID NO: 598840 - DNA, 694 bp, Homo sapiens
ccctgtagggccaaaaagaaatggcctagttaggctgtaaagggtgcccttactcatgcctgtaatcccagcactttgggaggccgaggtgggcggatcacgaggtcaggagatcaagaccatcctggctaacacggtgagaccccatctctactaaaaatacaaaaaattagctgggcatgggccgggcgcggtagctcatgcctgtaatcccagctactcgggaggctgaggcgggagaatggcgtgaacctgggaggtggagcttgcagtgagccgagatggtgccactgcactccagcctgggcgacggagcaagactcagtctcaaaaaaaaacaaaaatttagcctgggcagggcattggctgactggtgccgtgttaatcctagctacttgggaggctgaggcattgagaatttgcctgaacccaggcaggtggcagcgttgcagttgagccgagatcgtgccactgtactccagcctggggtgacagcgcgaggactccgtctcagaaaacagctggcgctgttggggaccaccctgtggtccccagcctattctggagactgaggccgggaggactgctcgagcccaggagtcctggctgcagtgagctatgatcctgccactgttttacagactgggtgcacgagtgagagcgacctgtctcaatcatcaacaactccgcccgg

SEQ ID NO: 598841 - DNA, 1322 bp, Homo sapiens
  misc_feature (722)..(722): n is a, c, g, or t
  misc_feature (739)..(739): n is a, c, g, or t
  misc_feature (745)..(746): n is a, c, g, or t
caacatttaattatgaatgcccactccccagcatctagatctaaaattattaacattagccacattctgatgctctctctgtgtatgtatatgttctctcgtgtcctaattcaacaagtacattcgcaagacatcatgaaacttgagtccctgaaaggtccatgcctgcatctcctatgagcttagggcatcgttccttacactattgggcccagatatcacagtcaaccaagacgtagcaagtcttgtttctcctagacgaatgatcatgctatcctaatctgtgattcataagtcccccgcaatagtctctccagagctcaacgttatgtgtctggtgttgttggtaatcagttgatccagctgcacggtgcaccactattgctttggctaactatgttcataaaacctcttttgaagtgctgactacggtctttcgccctctagctgcaactgtgtgagctttattaaatgagcatctgtttatgaggccctaggtctgactgtgcttttatgaagccccacattctgaagtttgtcacattgttgctcatggtgtccgcatgaagccacttcttctatcccctgtactttcaaggataatttaggctacatgagattttgccttttgtgctgacttgacagcttcacttctgcctaagatgcgcctccactgtcacctgtaccaagtgccaaaacagcagaggggccagttagagcangagctctgggggggccnggaaanntctccctgagagaacggccgtacatatcttggtgccttggacaggaacggacacagggctctggacaggacgtgagtgctgcatgcctgacatggctggtcgccttcgaccctggtggactgtggtgccacctgtggcacccaaaacacactcatatgtcatcatcctcgtcttactactcttatggggagtccacacgggttatatccatttcacttgggcaagaccctgtgagtcatcgatgtagcacctcgcgagcatagatgacagtgctctcagatttgcaagcaagtggacacatagccataccattgggggaaccttagctcctcagacaacaacctgttggatgcatgaaggacagcacgcccactgcgcttggcgcacgccacgagcaagcctcgatggaacggatcagccttcccaccagaccggggtggccattatacagtagcagtgacctgcacccgatccttcctccccaaggacacctcagtctatcattcactcctgtacgacatgaacagtgactagggagacacaagcaggagatttttcaaaacattcacccgtggg

SEQ ID NO: 598842 - DNA, 125 bp, Homo sapiens
  misc_feature (19)..(19): n is a, c, g, or t
actctcaccctgaggcgtnctgccgtggagttctgccgggctgagctcctattcttgtcttatgcacaacgatgaccgggagggcgatagtcacgccaccttcgttattgcctctgtgaagagag

SEQ ID NO: 598843 - DNA, 307 bp, Homo sapiens
aagagcaagctacgagctactccaaagggagtatgtgccaaccagggtgcagaccacagctccctctggcctactcattcaaccacatagcccgtgcccgtacgcctcacccgggctcaggactgcaggccacctactcatgcacctaattggaagcgccaccctagcaatatcaaccattaaccttccctctacacttatcatcttcacaattctaattctactaactaccctagaacgtcggtcgccttaacccaagcctacgttttcacacttctagtcccattcaacctgcccgacaccacat

SEQ ID NO: 598844 - DNA, 216 bp, Homo sapiens
aatccttgttgagctgcatatgaggtgttgctcggtccctcgggggatcgcacttcatgctctttcgactctcgagacagagttggaaggaggcggagagtccggttttcagaaacgcgggcagctcatgggaaatcttctgtcctttcccctcttgtgtctcgtcaactatatcacgttcaagttctgtgtacccattgagcactaagcgaggtc

SEQ ID NO: 598845 - DNA, 313 bp, Homo sapiens
  misc_feature (207)..(207): n is a, c, g, or t
cctcagacttttcccagggccctccctcaaattgtctcatgggaaacttgaccagtggcaagttgcactttggtgatcttggtggtctacacacccgttctgtggagagtcgatttacataagctgtgtatactcactcacacacactcacacacacacacacacacacacacacccctaccccacactgactgtctaccgagaaanactgtatttcctggcaaacggcctcctgaactctgactttgtgtgtacatacttgtacacacggatttctctgggttttggtttgctttttccttgtgtccccctg

SEQ ID NO: 598846 - DNA, 259 bp, Homo sapiens
gaaacaaattgagacatagttcaaacagtttctttcgatagaatttgaaagcagaactatttgggtcatgtagaaacctggggcacagaggaaatacatggggtaaccatgctggaatctctcaacagtttttatttggctgaaacgtgctgggactagatccaagtgcaggtggatggtgggacaacgggaaatgaataaccgtgaccagatctctacgcaggctatggcttgactggtgcatgcctctcaagtgata

SEQ ID NO: 598847 - DNA, 186 bp, Homo sapiens
aaaaaaaaattttgcccccccggggggggggggggaaggggcccccccccccggggggccggcccccccccttttctttttggggggggggccccctttttttgaagggggggggggccccctccccccccctttggggttttttccggaaacaaaccccccccctttaagggggtggcccctgga

SEQ ID NO: 598848 - DNA, 1209 bp, Homo sapiens
  misc_feature (684)..(684): n is a, c, g, or t
ccaaatcgtttaggcaacctcggaggcaattgggaaccctcggggcccctggcctcggtggcttcaacctcttgcctccaggcatctttgatcttaagggattgttttgccccaaatcatttcaacccaagattttagtttgaaagcaatgtcctggccggttttgccggccccaaggaaagcaaggcgtgtggtgtggaaacaattcttttcctttcgttcatggaatgcagtatgccaaggtttcatccacgtacgacaagactgtacctatcgggacgccataacactggctttgtctttctttcaatcccaagcaacaatggaacaaccttagattatggtgcacccgtttctcaatggcccaattaccgttcctggctagatgtacaattgcggttgttcccaagctagattaaagcagcggctcttttgagaggcaaaccgcacaagatgtgccgtgcccagcatagactagggcaatggctaactgcaccataggtgtagtgtgggacttctgttcacctggcattccttgcatgctcgaagcactcgcgtacatcggtaaccctcgcaaatgtctgcttgactggcctacgcacgatcgccctcaatgttgatggttgcattttctcgagatcgtaggcgagccaagggcggaacctcatgagcggcgtcccccanatgtcgcctaccttgactacctagtgacatcacgtagagataacgacatactgaagcatcgtcaccaggcgatccaccaagcccgtcccgcaaccaaagtggtgtaccaaagacaggtggaaaggggtcctcggactaggtggtccacgcgagcatgcttcagtgcaatgtctcttcgtatgtgggtattcggaatgccacatgacgtctagaatctgcctgtgccacacgggaacacaagatgcagaagacagtcacgataatcctaaaagtgattgctagctcacacatctttgaaatgggtgttgttattacagagcagcatgctaggacgatgaagggagtacaaggggacaggtgcccaggagccacacaactcccattcctcactttcggactgctgcatatgcatctatagctctctcgtgacctctgaaaagctgtctcggcgattttgtatttactaaaacctctccccaccccccaccccccaacttcctggatatttctcattgtctatgttga

SEQ ID NO: 598849 - DNA, 111 bp, Homo sapiens
  misc_feature (105)..(105): n is a, c, g, or t
tcacacgaacccccgaagagcccgaaaaagtccaagatctcggcgggcacaggagcctcatccccccatccgatctgaggtcagtcctctccagaatcgcgacangaggtc

SEQ ID NO: 598850 - DNA, 171 bp, Homo sapiens
tagaagtcaagaattgaggtttggcaaacttctcctagatttcagaggatctatagaaatgcctggatgtccaggcaagagtttgctacagggcgtggggctctcatggcagaatctctgctaggcagctgtggatgtggacaatgtgggcatacagagcccgcccacaca

SEQ ID NO: 598851 - DNA, 265 bp, Homo sapiens
cctttttgagatgaagtctcactccagcctgggcaaccagagcgaaactccgtctgaaaatatatatatgtatatttagagtagtgcttggcacatagtaagcctttgttgttgttagcgcttactgtgtaacaaatcgctgcgggctcaaaacaacagtcatttattcagctcataagtctgcaagttgaggacagttggccctcggtatctgtgggtaccacacgggagaattcagcaacggtggatagaacatattcttaca

SEQ ID NO: 598852 - DNA, 174 bp, Homo sapiens
gatccccaagccgaattaccaagcgttggattgttcacccactaatagggtttcgatgtgtcatcgaaaccctcttggtgctttctggggaatccttgttcaaaagggtcagatctttgaaagatttccgcacaccacttccaagaataaccactttacaatagggtttgatga

SEQ ID NO: 598853 - DNA, 1156 bp, Homo sapiens
  misc_feature (467)..(467): n is a, c, g, or t
gccgcccttttttttttttgtcccactctcataaaaatataatattttcacaaaagaaatataatacatgggaaaatcacgtggatgggcgtgcttcttcggtcttttttcccggggaagtgtggtagggtggtaggaggtctctgggtatttctttctttaacacagggatatggggctggttggaaaattattctcaatcaatcttttatcaatcaactctatccaagtccaagctcacactggagaatttcgcggcctctccaaaaagaggtggggtggtcacaaaacggggtgggggggcccggggttaatccacaggagtctctcctcaggggtgtggctcaaggatgtcaccgtggaacactatgtttctcttctctttcttaacacgtgtaaacaccgtgggccctcttgtggtgaagacgtgtcgtggacgagattaaaggtttttggagagaataatntttctcgcggtgttctcgtggtgcaaacactccacacagagacagggagagacatatcatataagtgtcaaaaatctccctatatatttcaacacgctctaaaagtatctctatctcgcgtgggagtaaaactctttacctatctcctattatacaacatctcgggctcctctcacatatcccgtgaaagcgctttggggtgtgtcacaggtgtgctccgagaatcacgcgagattatatacacgcggttacaccacgtgggatcggcggatcaatgaagaggggggctggggctaaacaataggggggaacatataattccccaacggccctttacaaaaacaagaatgcacccaccggggggaacccagagcgcgcagagggggggacgcggagacaacccccggcgggcggcacagcgacgacaacaaacacatccgagcagacaggcccacagagtgcacatttccccaaacgtggtcgtaacagggggtgttccccaagagagcaaacggggcgcaccgaccacgacgacagaaaacatttttgtctcacaacacagagcgaggaaaagaccagcacacacagaacagtctaactcctgcgaggaacggaaatagcggccggaaccagagggggacactcctgcggattctcgtgggacacagaagaagctcccccgagatggg

SEQ ID NO: 598854 - DNA, 1357 bp, Homo sapiens
ggttctttgcccgtgctgtgtgtgtgtgtgagtgagagagcgagtgagtgagtgagtgagtgtgtgtgtgggggggactcggctatgtagttgtcggtgacttcccgctcccacttaccgaacgcgctacacctccccgtgccgcagccgtgtccgactcccatgcagccggtatagaaactgatctttatcctactgatagtcgtagctagtagatctgaccgtaaccacaccaactcgcgtgttacccatcctgtcgatatgatctacaactgtgtctcactcactacattgctctctggacactgaaacactctatgctaccacatctcttacaccacacaccatgccatcttcaccgcgcatctagctggtgtactctacgcttacactacttatacatatcgccaacgtgtacgacagtatacggtgatactacacctgatgatcacaccacacctctaaacatacgaaatcaaaactgcgtctacaaagtacactacattctatcccccagctacatactcgacagtacaccgacacacaacctcctccaaccaaccacatctacagtctcaactgcatcttaattcctgacacatcatcatcactatgcaaacagtcattgagacattcagtcatcagaaatgacataccataaacaatttggtgcaacgctcatatgtagcactaagttctactgaaattgaccgtcacatatgttacactcaatatagtccgaacaccaacatacaccatagtactcagcatcgctcacttcgcatatgacctatcggaacactccgtactacatatactccgctccacttatcccatacaaagcatctccatacttataatcaccttccctatgccatctcctaaacactagtactcaaccacgtgtgttccctgtagctaatccatagatcatcatgtttaccttttatatccgactatttgctatgcgctactattgtcacgtatccaaccacgatctatttaatctaatcacacttcgtcagctaaccgtgttactggtatgataactacctcatagtatatgcgactcgttgactagtgacctacatactatttcgactttctgagtcactatgtacccatcactaagtagcttcatgatcatccacccttacatgatagagtatactatcatctatcttaggctccacttattaataccgccatcctactctggatatgtctcgtatacctcttcgcgtacgtggtagtcggtcaaggtattaccatatctcctctataatcactcattactcttccccagatggcaatttatgtatccactatccacaagactatacactaatattcaaat

SEQ ID NO: 598855 - DNA, 229 bp, Homo sapiens
  misc_feature (44)..(45): n is a, c, g, or t
aaaaaaaaaaaatcccccccccccttttttttgggggcccttgnnttttaacccaaaaaaagggggaaaaaccggggggggggggggcaaaaggcacccccccttttggggttgggtttttgggcccccccccttttttttaaaaaaacccagttttaaaaattgggtttcagggggccggggggggaaccaaatttgtttcccccccagggggcccctttttttttta

SEQ ID NO: 598856 - DNA, 440 bp, Homo sapiens
tggtggtgctgtagaactagaggataccggttctcgagtcatccaagaagagttaacaaagtcagagcaagagttgaaatagtggtatatgctgaccattcatacgcgtgtatcgaatgatctcgaggactccgagacccaagtagtataacctgtactgaagctgtgtgatgcaaaggattcccagctgggttgtacagaaagtgagactccaggaagctgaccagctactgagtactcgcacagaagcattagaagccttacagagtgaaaaatcacgaataatgcaggatcaaagtgaaggtaacagcctgcagaatcaagctctgcagactcttcaggagagactgcataaagcggatgccactctaaagagagagcaggagagctataaacagatacagagcgagtttgctgcacgccttaataaagtggaactg

SEQ ID NO: 598857 - DNA, 900 bp, Homo sapiens
ccagtagtagcccttgcttacacaattcaccatgccctctataacttggccaaagaccagatgcttgccagtctagccaggctgtcttgaatgtcgtgatgaagaactgggagccgttggtgtctatgtctgcagttggctcatgctcagcccatgcctaggcccgtaagtggctttcagtatatgaatgctttcttcatactgaggtgcaatgacgctactacctgatatgcatgctctttcgctgggaagaacaagatcacgagctaaggtcatggggcgctgcgcatagctgccaagacaacgcgagatattcggggccaggactgaaggggcttaacctgtctctctgttgccacggctaggctggtagtggaactacaaggaccgagtaacaagcagcgtcctgtacctatcttactggtcctcagagccaagaccatgctgacatgaggccaagtggggcatcaggccaggctgatgtggtgaacacgactcacagaacgattaccttcgagaagatacgtcaagtggacttttaaactaatggcgcatgtaatcagctccgcttatgctatggtccaggacctgccactggagggacctattgctgccgggaagtgccggtgccgtaatgcagggggagtcaccagggttcgtgaaaactgctgccagatcacgggaggcactgctgcggactgaacagtctgtatcactatgaagcacaaacaagacagcaggcagtggcatgccgaaggcaaaaagcaagccccgagatgtgatggggacggggccaccctaagaaggggcttgcccctagggataccggaaaagtcaaagactcttcaaaagggaatgaccagcactccaggacaccgtaactgttcaacaacaaagtct

SEQ ID NO: 598858 - DNA, 489 bp, Homo sapiens
  misc_feature (86)..(86): n is a, c, g, or t
  misc_feature (95)..(95): n is a, c, g, or t
  misc_feature (264)..(264): n is a, c, g, or t
  misc_feature (269)..(270): n is a, c, g, or t
  misc_feature (274)..(275): n is a, c, g, or t
  misc_feature (277)..(278): n is a, c, g, or t
  misc_feature (281)..(281): n is a, c, g, or t
  misc_feature (284)..(284): n is a, c, g, or t
  misc_feature (336)..(337): n is a, c, g, or t
  misc_feature (425)..(425): n is a, c, g, or t
  misc_feature (437)..(437): n is a, c, g, or t
  misc_feature (447)..(447): n is a, c, g, or t
  misc_feature (452)..(452): n is a, c, g, or t
gccggtcccgtactgtcgcgggatatagtaccgtaaggcgaaatgatgacattataaccaagcatgattatcagcatacggactanccccgtatnccttctgcatatgaattaactagaaataactttgcaaggagagccaacagctaagtacccccgataaccagacgagctacctaagaacagctataagagcacacccgtctatttagcaaacatagtgggaagatttataggctgaggcgagcaaacctaccgagcctgnttatnnctgnntnntcnctntataatcttagttcaactttaaatttgcccacagaaccctctaaatcccctnntaaatttaactgttagtccaaagaggaacagctctttggacactaggaaaaaaccttgtagagagagtaaaaaatttaacacccatantaggcctaaaancagccaccanttagnaaagcgttcaagctcaacgcccactacctataaaatc

SEQ ID NO: 598859 - DNA, 140 bp, Homo sapiens
  misc_feature (61)..(61): n is a, c, g, or t
  misc_feature (63)..(63): n is a, c, g, or t
ctgctgtgtttggtgccatcatctcttactttgaacagttttttgaaacttttggaatttntntggcaaatcaacagtacgtttcaggagacggcagcgaggcttaccttgcatggtgtggtggacgagcttgttcggtt

SEQ ID NO: 598860 - DNA, 850 bp, Homo sapiens
agggtgaatggcgcggtgttgttgtttgtgccgggtgtggtgctggcgttgtcctgtgctgtggcgtgcagctcactggacggccctggtccccgcttgtgcacccaggggttgcctgccgagcggcgcttctggcggacccgcatctgtgggacactattcaggtggcggcgccccgagattgggcgggtttccctctccgcccgggatcttcaaattgggtgtcatatctccttgtggccaggtccggtagctgacgggttgaggttgcccgcccgagtagcgcctgggtgggacccgcatgttcaagggaccgctgtacgtgctgtgtgtcccgggtgcgtctccaccgtctgcccccaagggttgcgggcccgctgcgggacacattgtttggccacacaccccgcagggcaaaactttgtgcccgggccccatctcggcaacgcgggcctcccgtcgccgcccctctgcgatgcgttgggtcaggactttgcataccacgatcggtggagggtgagtgtgttttgatactccccgaggggccctgcggaccctccttttccgagttgggcaaaggagccacaagcacggaggattgtctgggtcattgcggggcacccacaggggggtgtgcaacggccgcggaatctcgggggtttcgtcccgcttgcggtcacgcctgattctggggcatcttctaggcacgtgggaggcctggggggtcagttgagcattttgagtctctcctccgggagctttcccggccgtcaacaatctccccggactgtctttccagcacataccacaacccaccacattttcaaaaaaaacgttaccccccacatac

SEQ ID NO: 598861 - DNA, 462 bp, Homo sapiens
ggaattcgaagtgaattgttggaatgctgtgggatttttgaacctcaccaaatactcctctgcgtaagcgaggttgaccagcaaagagatgagtatgcactgtggcttcatgaccagggtttttttgctgttttccttggcggatgttggaggatgtctagcacttgagtatacctctatatgctgtataaaatagaaaataaaaaagccaatgaggacaatattttgtgtcgtttttttttattttcgcttcaattctttatacacgtacgtcatcactacgggaaaccaaaaaaaaaaaaaaaaagagaacagtacaaaaaggtttactttacccataattagtatacgtagattttacacacgcactatttttcttatatacaggagatgggtggccacagaacccgcgcctagcctatttctttcttcttagacctgcctccaggtcgccgacatcca

SEQ ID NO: 598862 - DNA, 160 bp, Homo sapiens
ctgcgatcctccgctcgttcattgaccgtccaatgtgcttcgggcgtcctttcacttgcttcctcacgttgaattttatgagcttcgagagccttatttctccccgaaccctcctaacacgggtccttgggaggctgaggtgtcgcaaaaatccgttgca

SEQ ID NO: 598863 - DNA, 292 bp, Homo sapiens
agcaggacccggtgtatccttgtctctccatataaactgtagaaaaatttgtcagtatccaaaaaataacttatggggattttgacaggaattgcattgaatatatagatcaaagaagagctgatacattagaatattgagtcttcttatctacgaacatggactatctttccatttattttgatcttcttttatttctttgattttttttttttttttttttttttaaaatgggagtcccccctctgtggccccaggcctctttataacctctctttaaaaaataccaaat

SEQ ID NO: 598864 - DNA, 170 bp, Homo sapiens
tttttatgttcagttcatagaaaaactggatgatacccctttaactttagccgatatgtttatacacagaattttttataattaacattttaaacttgcttaacttttaaacaaattttttttgcctttatttggaggtcaatttttgccttacctttaaggtttctctc

SEQ ID NO: 598865 - DNA, 185 bp, Homo sapiens
agagaacagaaggactattgggagacagagctgcttcaactgaaagaaacaaaaccagaagatgtcctcagaaaatgaggagatgggaatcagagtggatcagcttcagggccagctgtcaacttaagagaaagaaatgtgaggagcttgttcaggggagagtctaaggtatagacacgagcagt

SEQ ID NO: 598866 - DNA, 203 bp, Homo sapiens
taccggtatcccaccgcagaaactgacatataaatacgacatataaaaaataagacaataaacttgtacaatatggtaatataaccatagctagctaatacaatggagaattgggagcttatcttaaaatcaagtggcaagccagctgctacatatggtcaagcaagaaagaggctagacatctctcctttaggcaagaaaat

SEQ ID NO: 598867 - DNA, 655 bp, Homo sapiens
  misc_feature (425)..(425): n is a, c, g, or t
ggatggaacgacgccgccccggtgcataagcctctcctggctgaacagagacctcgcgtctcccccttagtgcgggcgccgccacgagacacaacaatatgcgcgcccgggcggggtcaccaccaccgactgagcctcgtcgtccaccaggggggctctctagacacaacgcggcgcttcaaagcgcccccacaggtgagatccagacaagatcgccgcctcaccccagttcgagtactgtccgctagagatatgcacacgcccgaatcaatgtgggtgttctcccgtcgccaggagatccctccgatgtaccgcgctatacactcgtgaggaggagaccctcttcctccgcgactgacaaagcagtgcttgcgcacacgtagactcctcccggggacaccacctgatatcaagctgagggacancatgtagaggcgctctcgtccttcacgcaagatgttcgcacgatggcacatctattttgctctgttctatgagaagtcattctataatgtgcttgctcccggataatgttgttcgaggacaccccacgatttctgtataagatttgttgcgggtctattacaaacaaggtgagaatctttttccaggtttcaaaaaaaaaaggccgaaccttacccgtgcggacaaaaca

SEQ ID NO: 598868 - DNA, 124 bp, Homo sapiens
cttgtgaaaggatcataaggaaaggatgggaacactaagatgagtgtatttatagataaaaatactaaagtattggtacaaggtattacagggtctactgcccttttccatacaaaacaaatat

SEQ ID NO: 598869 - DNA, 321 bp, Homo sapiens
taactggagacgtcctgtgaacatcctcgagctgctggcaccctgaaaaccaaggatgtgcagtggcgctcaaggtgcgagcagttgtctggtgaacggcaacaagcaagccttgagcgaaccggcgatattggccgccttgcgtgaacacaagccggcgctgatcgaactgatcaaggccggtgaatacaccgcgaccaaggccggtgaggtgctggtgccgttcaatggcatcccggacaacgccgagcgtatcaatccccagtatgctgaccctgtcgaacctgaaacaggacgagatcgagcgcattgagatacggt

SEQ ID NO: 598870 - DNA, 865 bp, Homo sapiens
  misc_feature (95)..(95): n is a, c, g, or t
ggcatcatggtgaccccgaccccgtaccctcgctctcgatcgaggacgattcaactatggcagcagtgtgctctgccacgtgcacatccgaatgnggcccagaatgcaacagatcttggaggattattgaggcaagtgctcaacacagaagcttcctaagtcagtctacaatggtgtttcaagttattagcgtagtagccaatgggcagaaattttgaataaaatggctcagttcatctacgtggaagccaatggcctgtctagttgtgtcatttgatcgccgaaacagacccaggactttcaggcttgtttagggcagtttggaactgtgttctgtgaacaggacagcatgaagatagttctgattgtgctaagaatcttaggtgcctagaatgtgtcctggaaaacaggaccgatgacagatcgttctggatgcaccaagaattctttggtgcctagcattatattttttggactggactttgtgacattattttggggccgtgaactcagctttttttacacaacattaacttgtggtacaaattaccggccttttgtggagaaaagtctaacagcattcctttcctcttgcggggttctcttaactacaggtgacttccaacacgtttttatacctgtgagtcggacggacattgtacctggcgagccctgcgtaaatttgggtgtggcccccgactccgtgcatgattgggtgcttaaacggacttaattttccttaactgaccactttgttacgcgtggacgcgctgtgacagtcgactacagaggattaccggacgggacagccaccagatggggggggtccaccactaggtcactgaccggctctggttattcccca

SEQ ID NO: 598871 - DNA, 1225 bp, Homo sapiens
  misc_feature (170)..(170): n is a, c, g, or t
  misc_feature (380)..(380): n is a, c, g, or t
  misc_feature (396)..(396): n is a, c, g, or t
  misc_feature (730)..(730): n is a, c, g, or t
ccctggccttcccagcagtgtcggctgagcccttcctctactccagtgacctctatttggctctggcccagccaggagtcagtgcctgcaccatcctgaagtgggactatgttgagcggcagcttcgagactatgatagaatcccagccccctctgcagtgcactgcaanccgatggtggtggacagccagctgtacgtggtcgtggcccagctgtttggcggctcttacatttaccactgggatcccaacaccacgcgcttcaccaggctgcaagacattgacccgcagcgcgtgcgcaagcctaacgacctagaagccttccgcatcgacggtgactggtactttgccgtggctgacagctccaaggcaggcgccacnagcctctaccgctggnaccagaatggcttctactcccaccaggcactgcacccctggcaccgtgacaccgacctggagtttgtggacggcgagggcaagccacggctgattgtgtccagcagctcccaggcacccgtcatctatcagtggagtcgcacccagaagcagtttgtggcccagggtgaggtgacccaggtgcctgatgcccaagctgtgaaacactttcgtgccggccgcgacagctacctgtgcctcagccgctacattggcgactccaagatcctgcgctgggagggtacccgcttctcggaggtgcaggccctgccctcccggggctcgctggccctgcngcccttccttgtgggtggccgccgctacctggcactgggcagtgatttctccttcacccagatctaccagtgggatgagggacgacagaagtttgtacggttccaggagctggctgtgcaggctcctcgggccttctgctacatgcctgctggggacgcccaggctactcctgtgccccagcttcgcaggggacagacgctggtgtctcgcacacattgtggctggatctcagtgcctagggggtgcgaggcctctggtctcctcaggctggccactggaggatgggtgggggcctctgtgagcaccacgctatgcctgtgtgaagacaagcgaccaagctgcattcatgcccgtgtattccgctcacgcaccagcgatgtacatggcgcacccccgtgggactggccccaggaggacgtgcatcatcactgcaatcaggcattaatctccagggaaccccatgagaaaacctaaaggccccatgttcccgtaga

SEQ ID NO: 598872 - DNA, 135 bp, Homo sapiens
  misc_feature (115)..(115): n is a, c, g, or t
tatagctggcccctcttccgttctcaggtattgcggagcacttacgcacgtgccctccaggtaggctctccactgctccgccacatgggccgcctcccacttgtgcttggtggtnctgagctgccatgtccgggc

SEQ ID NO: 598873 - DNA, 367 bp, Homo sapiens
ggtcgaccagagacagataaagtatgaagctccaaggcttgaactccagggcgcttcacttgcatgggacctttctaaattcaccttatacctaattgttaatctttttcccaatgagggcctaccgcattttgtaagcctggggtagggaggatgggtctcacaaaatctagatggaccctcactgagctacagattcaaaggcgttccaggttccctcagaagccagtggaagagacagatgtgaaaacaaataatcttttttctttcttttttttttttttgtgagatggagtcttgctttgtcacccaggctggagtgcaatggcacgatctcggctcactgcagccgctcgggaggctgagg

SEQ ID NO: 598874 - DNA, 432 bp, Homo sapiens
  misc_feature (16)..(16): n is a, c, g, or t
  misc_feature (49)..(49): n is a, c, g, or t
  misc_feature (71)..(71): n is a, c, g, or t
  misc_feature (302)..(302): n is a, c, g, or t
ggtccctcaattaccntagaaaattccctttggaggacacgagaaaaangggtggggccaggggccccttnttcacccctaaccagcaggaagtagccagaacgactgccacacggttcccaacagcagttggggtgtcctgtttagaggcaggactgagaggaggtgccagctgggcttcctgggtcaagtaggggctcagaaagctgtgaaactcactcatttcctgcatcaggacttacttcagtcctggatgaataatattgaagatatacgcttaaaatattcctaacaccaggatntcgtgcatgtgtttttcttccccaagaaagctaataaacagtgaaaaatttgctgtaagtttccctgtatattctctccctctctcccttcccccgcccctgaaactaaaataaaggaatgttaactgct

SEQ ID NO: 598875 - DNA, 197 bp, Homo sapiens
cggttagaggcatgtaagaaggacttgctttctctacatggactacagtggacagaaagagtatacggtctgtgaagctgatgccccatgagctggagagggggtctcattactacaaagagagaggtggtccccgcttacttgaactcctcctccttcaagctcaaagaccacctcccaatagtgaccggagactg

SEQ ID NO: 598876 - DNA, 881 bp, Homo sapiens
  misc_feature (36)..(36): n is a, c, g, or t
  misc_feature (52)..(52): n is a, c, g, or t
  misc_feature (386)..(386): n is a, c, g, or t
caggtacccaatgcagcggactcggcaggcgccacnagcctctaccgctggnaccagaatggcttctactcccaccaggcactgcacccctggcaccgtgacaccgacctggagtttgtggacggcgagggcaagccacggctgattgtgtccagcagctcccaggcacccgtcatctatcagtggagtcgcacccagaagcagtttgtggcccagggtgaggtgacccaggtgcctgatgcccaagctgtgaaacactttcgtgccggccgcgacagctacctgtgcctcagccgctacattggcgactccaagatcctgcgctgggagggtacccgcttctcggaggtgcaggccctgccctcccggggctcgctggccctgcngcccttccttgtgggtggccgccgctacctggcactgggcagtgatttctccttcacccagatctaccagtgggatgagggacgacagaagtttgtacggttccaggagctggctgtgcaggctcctcgggccttctgctacatgcctgctggggacgcccaggctactcctgtgccccagcttcgcaggggacagacgctggtgtctcgcacacattgtggctggatctcagtgcctagggggtgcgaggcctctggtctcctcaggctggccactggaggatgggtgggggcctctgtgagcaccacgctatgcctgtgtgaagacaagcgaccaagctgcattcatgcccgtgtattccgctcacgcaccagcgatgtacatggcgcacccccgtgggactggccccaggaggacgtgcatcatcactgcaatcaggcattaatctccagggaaccccatgagaaaacctaaaggccccatgttcccgtaga

SEQ ID NO: 598877 - DNA, 336 bp, Homo sapiens
  misc_feature (211)..(211): n is a, c, g, or t
tctcccaacagtgaggtcttgaactgggtcttgaactcctccacctcccaaagggctgggattacaggcgtgagccacggacctggcctagggccatgtaaaaagccagatctgtgctgctgtctgtgtagaagggtagacaagtggatgagaagttccagaactattctgggccccttttaccactaagggcaaagtaactggctgcccncaaagaaagatgtctcgatcattcgcacaggacttccctagttgaacttcatgcaaagcaagagcatcctgtttttctggctcaccacgtgtatcttgagaccccggtctccacaggggtaccga

SEQ ID NO: 598878 - DNA, 311 bp, Homo sapiens
  misc_feature (68)..(68): n is a, c, g, or t
  misc_feature (127)..(127): n is a, c, g, or t
  misc_feature (129)..(130): n is a, c, g, or t
tcccctgcctgggtttggggtgcccccggacagggatttcggtggggcctgtcccccacaggaccccnacattcagggggtgggggagggcatcaatgtttttttaggtcctgggccctcgtccaantnntgccccccccaagggttttttccaggatcccaccaattaactgttttagggaaaggggcttcctgccccaactggatgggacccctggggagtgggggggggggagctttttccaaggcccccccctgtttcccccccaattaaaacgggctcttttttggccccctggccttgttttcca

SEQ ID NO: 598879 - DNA, 458 bp, Homo sapiens
tcgacgaggagtggaatggaatggaatgcaattgaatggagtggagaagagtgtactggagtggagtagtatgacattcaatggaatgcagggaagtggaatggaatggaatggaatggactggagtggaatgcagtggagtggaatgcagtagagtggaatggtgtagagtggaatggagtggactggagaggaatggagatgagtggaaaggaaaggaatggaatggaatggaagggagtgaagtggaatggagtggattgaattggaatggagtgtagtggaatggaatgcaatggagtggaaaggaatgaagtggagtgaagagaagtagagtgtagttgagtggagtggagtcgaattgaatggagtggagtagagtggagtggagtggagtagagtggagtggagtggaatggaatggagtggttaggaattgaataaattagattacaatg

SEQ ID NO: 598880 - DNA, 342 bp, Homo sapiens
  misc_feature (19)..(19): n is a, c, g, or t
  misc_feature (61)..(61): n is a, c, g, or t
  misc_feature (79)..(79): n is a, c, g, or t
  misc_feature (83)..(83): n is a, c, g, or t
  misc_feature (159)..(159): n is a, c, g, or t
  misc_feature (192)..(192): n is a, c, g, or t
  misc_feature (264)..(264): n is a, c, g, or t
  misc_feature (334)..(334): n is a, c, g, or t
caaacttaggtctcctctncattttctactacacctgcctcaatttcatggacgacatccnaaaatgtggatttttttnactntttgtcacgtacagtgatccacaattatccagtatagacatccacaaagagtcgcaaaagataactgtactgactncaggaaattttctactattcaaagactaacccngaatctaaagggcagaatgtatcagagtttcaatcagctcaagctaacatagtctgtaaacttgctggtccngcctcctgctaatattctaaaagtggtaacactcctcatcagaattacggaggcctcaaatattcacctnccccatag

SEQ ID NO: 598881 - DNA, 412 bp, Homo sapiens
  misc_feature (5)..(5): n is a, c, g, or t
ccggnacccaacattttgggaggccaaggcagaaggatcacttgtgtccaggagttcaacatcagccctggcaacttagcgagatctcatctctacccaaaaaaaaaaccaaaaaaaaaatttttttttaaagtcccaaggggtttaattaaatggcccctagggcccctggccaaagcctacatttggggggccagggcctgccaagttttccccctcccaattgaaaggccttgccccctgggccctaaatcacatgacggggaacctgggtaggcccttggattcttaaataaaaagccacgggggggtttcctaaaataataaatttggatgggggggaggggggtaattccgtttttataagaagaaaaaagggggggggccctttcctcttttagttcaaatatgg

SEQ ID NO: 598882 - DNA, 199 bp, Homo sapiens
tgaggtaggagataatgaccatcctgggttagcatgggtgaaaccctgtctctaactagaaatgcagagaatgggccgggcatggtggctggttcctgtggttccagctactcgagaggctgaggcgggagaatggtgtgagcccgggaggcggagctggtagtgagccgggatcctgccacggcactccagccggggc

SEQ ID NO: 598883 - DNA, 313 bp, Homo sapiens
tttccccccccccggggggggggggggggaaatttttttaaaaaataggggggcccccccccgggtttccccccccccccttttttgggcccccccccccccgggggggtttttttggttaaacaaacccggggtttggggaggaaacccccccccccccctttttggggggggggccccccctttttggggggggtttttttttttttttgggggggcccccccagggggggccccggggggttttttttgggtttttttttttccccccccttttcccccgggggcccctttttttgggggggggggccca

SEQ ID NO: 598884 - DNA, 975 bp, Homo sapiens
  misc_feature (28)..(28): n is a, c, g, or t
  misc_feature (829)..(829): n is a, c, g, or t
  misc_feature (856)..(856): n is a, c, g, or t
agccatgggccggatccgctagcggagntgtttttcgtcttccctaggctatttctgccgggcgctccgcgaagatgcagctcaagccgatggagatcaaccccgagatgctgaacaaagtgctgtcccggctgggggtcgccggccagtggcgcttcgtggacgtgctggggctggaagaggagtctctgggctcggtgccagcgcctgcctgcgcgctgctgctgctgtttcccctcacggcccagcatgagaacttcaggaaaaagcagattgaagagctgaagggacaagaagttagtcctaaagtgtacttcatgaagcagaccattgggaattcctgtggcacaatcggacttattcacgcagtggccaataatcaagacaaactgggatttgaggatggatcagttctgaaacagtttctttctgaaacagagaaaatgtcccctgaagacagagcaaaatgctttgaaaagaatgaggccatacaggcagcccatgatgccgtggcacaggaaggccaatgtcgggtagatgacaaggtgaatttccattttattctgtttaacaacgtggatggccacctctatgaacttgatggacgaatgccttttccggtgaaccatggcgccagttcagaggacaccctgctgaaggacgctgccaaggtctgcagagaattccaccggagcgtgagcaagggagaagtccgcttctctggccgtggctctctgcaaggcagcctaatgctcctgtgggagggactttgctgatttcccctcttcccttcaacatgaaaatatttaccccccccatgcagtctaanaatgcttcagtacttgtgaaacacagntgttcctctgttctgcgaccgcctttccccttagcacgcccggcgcttagcgacagccggagtgcccgctttcccctgggcctgtggttgtgagctctgatcgtggagcttctccccgg

SEQ ID NO: 598885 - DNA, 168 bp, Homo sapiens
  misc_feature (117)..(117): n is a, c, g, or t
aagctgggccagtaaaatgtttttgtgaagactgttaacagaggctatctctcaggcatggataggagaatggtagatttctatctttttttccaaataattctgtactgttggagnttttaataaatataattatttttatacataaaagaatttttaaaggagatc

SEQ ID NO: 598886 - DNA, 549 bp, Homo sapiens
gctgaacttgcccgaacgggtgttataacgtgacgtttcagctggtccgccaggtacgagctgaaagacattcctcgctttcctggcacggtatgcacggatgcaacctaaaactcagctatcgctgatgcttcttcgctcacggctagcatcagccttctcaactgcaaggaccccttcacgtcaccaatcaaaagcatctcagacgagtaaccgcagatttgaacatggcatgctattggttcagctcgccagacatcgatgcaggtacgacgctcgagccaagccagggcccgtgttgaagtgctcgaaactctcaacaccgacatgagctgggcccggccgggagatcgcgctaagctggacgaagccgtcgacagcctcgaggaagccacaaactcgaccgagtggagggagtggaacaccaattccgtctccgtgccgttcgacgtcactcggctcaagtaccctatccggaaagcatggtccgacagccccagcgagcctaatgcgcttgacggcatgtctatcaccatgctacgcgttggc

SEQ ID NO: 598887 - DNA, 849 bp, Homo sapiens
  misc_feature (28)..(28): n is a, c, g, or t
  misc_feature (703)..(703): n is a, c, g, or t
  misc_feature (730)..(730): n is a, c, g, or t
agccatgggccggatccgctagcggagntgtttttcgtcttccctaggctatttctgccgggcgctccgcgaagatgcagctcaagccgatggagatcaaccccgagatgctgaacaaagtgctgtcccggctgggggtcgccggccagtggcgcttcgtggacgtgctggggctggaagaggagtctctgggctcggtgccagcgcctgcctgcgcgctgctgctgctgtttcccctcacggcccagcatgagaacttcaggaaaaagcagattgaagagctgaagggacaagaagttagtcctaaagtgtacttcatgaagcagaccattgggaattcctgtggcacaatcggacttattcacgcagtggccaataatcaagacaaactgggatttgaggatggatcagttctgaaacagtttctttctgaaacagagaaaatgtcccctgaagacagagcaaaatgctttgaaaagaatgaggccatacaggcagcccatgatgccgtggcacaggaaggccaatgtcgggacgctgccaaggtctgcagagaattccaccggagcgtgagcaagggagaagtccgcttctctggccgtggctctctgcaaggcagcctaatgctcctgtgggagggactttgctgatttcccctcttcccttcaacatgaaaatatttaccccccccatgcagtctaanaatgcttcagtacttgtgaaacacagntgttcctctgttctgcgaccgcctttccccttagcacgcccggcgcttagcgacagccggagtgcccgctttcccctgggcctgtggttgtgagctctgatcgtggagcttctccccgg

SEQ ID NO: 598888 - DNA, 1016 bp, Homo sapiens
cgtggagaagagcgtgggactcggctgaccctgctcctcccgaccctcatgttctgaatgagcctgatgtgggcctgatggcagtggcaccagatagcactgcgtgtgccttgtggccctgtaatcgtcacgacctcctggcctgctgtgccatcctcgcaaaacaagggcgtccaagctgcctgccatgtctcattgtgccatcatttatctggtgccctatggaggcatgcagtctactttcgccaggcatcccacccagacctatgtactaacgttgactcatgagtgacgtgatgtgatggatgtgaaatgtgcacgaccgacactgccccaagaatccggcactcgtccaggccacgatggcctctgcctgacaagctacgcggacagaagatgggaacgcaaccgccctggtcacgaaccgccggggcacccagcactgccacggacaactgccagcacgcgagcagcacagacaacgcacccgaggcacggcaacggagactcgacacaccaaaaaacaggggcaaacccagggcccgacgcacggacacaacccgtccagacacccacgatgaccacaacagaagacgcagcgaaacatggacgcgccgagagcccaggaaagaccacacataagacaaaaccagaccacacgaacaagaacgatgggccaagcaaatggaacggcaaccagacgacggagagagcatgaccaccacaagagccatgggacaagggggacacgcgcaactcagacaggaacggaagacccagaggcaagaagacagaagcacacctgccgagaaagccccgccgacccgccgcccgcaccgacgcccaccccgtcagaactagcaatataaaaggtccgcaaacagcaccacgaggacaagagcgaaggcccggggaacgggcgagaggcaccaacggcgcaaagagagagacgacaggcaaccggcagccaccccaacagccacgccacaacacgcgcgccacagaacccacggacc

SEQ ID NO: 598889 - DNA, 138 bp, Homo sapiens
ctaagatccccgttcctggacttgtgggccgtcggaagaggcactgctctctgaggcccgctgacgggctgctgactggagttggggccgtctggacagaggcgctggtctctgaggcccgttatgggcttgatgccc

SEQ ID NO: 598890 - DNA, 239 bp, Homo sapiens
gaaggtgcatgctgcggatgggtacgatggagaaggcgctgcatggcacgcatcggagaagccagggctgatgctgcggcccttcagagcgcatggaggggggctctgtggccccatccattcaggaagggtaaggtgggaggatcgcttgagcccgggaggatgaggctgcagtgaactctaatcccgctactgcactccaggtctagcaacagtgcatgtgctctttcactccaggt

SEQ ID NO: 598891 - DNA, 138 bp, Homo sapiens
gttgccaaaaagttggctttgtttatttggttttggcggggaaaggagtggtattttatgctttttgtggacaatgtaaccctaaacccatcatgtattttaaatgccccccacataaataaaacataagcatattta

SEQ ID NO: 598892 - DNA, 157 bp, Homo sapiens
cacttcgttagtcttctggcgtgagctacgagacaatgtgagttacgcctcgagacacaacaatgaccttcacatgcttggtgtttgtctgacatgttcaatgcactaagttccagatcccagaccaagtctgtgttggagattggacttagtcccg

SEQ ID NO: 598893 - DNA, 633 bp, Homo sapiens
agttcctctccttcaaaagcttggtctttggttttcctattagggaaaacagtcaaaataagttccaaaaactatcctccaagtcctattgtgcttgtagtacatgacggttggatggatggatactgaccatggtgggcaggccattcacagcctttgtcaaattcaatacttttcggtcgtctggcttcattaagattttggtcattgcagccaagacaccagttggttggtgataaactgggtggttggtggatgcttcaagacacacggttaaccaattgtattaatatccccctttcggttccgtccccatgggtcgtcaacataggacatttccatcattattggctccaagcgcatagcatccacccaggatagactaaagatacaccaagggggaaagcacaacacattttcttgatactttacagacaaacatggtcagattctctataggatgtattccttcaacattggatattggcttcgagtcctccttaccacacatggaatagatgttagcactcctagcattagagttcctagaatgggggtgatagctacaggtccgggatacctggctgagggtactttgccttgtagcaccattcgactaggtaccgggccctg

SEQ ID NO: 598894 - DNA, 135 bp, Homo sapiens
tgtagttgctggcgtggggctgggattgtttatgttcttgtccttgcaacctatttctggaaaggaaaggctagtgggtcaggaaatgaaatcagtctcggctgggagactgggagagaaaagccctgaatcaat

SEQ ID NO: 598895 - DNA, 204 bp, Homo sapiens
catattgagataactttaatacctcagcagatttgtcttcctttatattgttatcttttttatgtgccatgttgcttttggaatcagcctgactctctgccccagtatatgatagttctactgggtattttactgtttattgatgaacatatcttcattaagaattttttgaaaactcatcaaattccaatgaataagttttct

SEQ ID NO: 598896 - DNA, 1306 bp, Homo sapiens
  misc_feature (893)..(893): n is a, c, g, or t
tctcaaaaaaaaaaaaaaagggacatagggaatggagaatgattggattggagtgggattcacaacttaattaacgtgggtcacagattcaacgtggtggaataatttggtaaaagaggccggggttaatagaatggagggtcagtttggaaaacaaaacagattggatgtcaacatttggtgactaacttggggtgctctttccaacacacattattagattgacaaatttgtggacagtgagtgtttagaaacttgggtgagttaaagggatagggcgatacgacatattttcttaaaatttcaaaattcagaagcttaaagggtcgcatagaactcagtaatattgcggaaaaaagtgaggcattggttcggggacaaacggaatttattatctactaaccgtggggtttcaaaacatttccgagggcggggagctctatacaaagaaactattggctcattgaagagactctcccatattctgggtgcccccaataaggttaattatcaacgtgtatgcttaccaaccccgccaaaaaagaacactaaagggtgtaaagtgggcatcacaccatggggggggtgctacccttaacgaggcgaaacaacgggcgttgctatgtggacacttcttcgccaagggtttacacaccacacagaattgtattatcccgcccgtggtccgtctacaaacacgcagcgcgaggggcaacacaccattttgggaaccaccgtgtggctgttttcacgcagttatcattttccccatataaaaaacggtgggtaaattctgtgggggacacacagtttgtttttaccgcagatggggatcaaggatgaattaattatattaccagaggggggcaatattatcctacaagttataaggntgttgtggggcattgccttgtggaccattttatttaaattgcgcaattggatataatggggaatgttgtaaacggtgggaaaggctatagggggggaggatgttcttgtaacagaagaacgcagggggggattccttataagaaaaatgcaggggcaacatattttaagggctgtgaggacgttataacaagacatttatgggggttatacaacatgtggggtgcatgaatcgttgacaaaggtataactttaagaggcaactgtggaattaaaacatatgtgtgtgtcccgagttgaaatattgtccgttggagaaaagaaactttgggggtggttatgtcaccaagaggataaaattacatgggggagcacgagtacataataaaagttttataaagaaggtagtgatggg

SEQ ID NO: 598897 - DNA, 223 bp, Homo sapiens
cagagtgctgccctttcttgccgctgactcgtcccgtctcctcctcccaagtcgcagtgcccttgttagcgcaatagcagctcaagctcagtcagcgagagagtcacccccgactggtgtgacctctcagaagattcattctagctcatcacagcgtcatattgctctatagcactacgaaatgatgtactcacgttgcagactccgccaatgcagtacatca

SEQ ID NO: 598898 - DNA, 224 bp, Homo sapiens
tgatccaggctccctgcggctttgactccccgggctcaagccgtccacacccatcagcttcccaaggagctgggactataggcctgagccactatgactggctaattttcaaagcttttttttttagagatgtggtctatgttgcctaggctggtctcgaactccaggactcaggtgatcctcctgtctcagcctcccaaagtattgggattacaggtatgagc

SEQ ID NO: 598899 - DNA, 93 bp, Homo sapiens
ccccccgggggggggggggggtttgggggggggcggcccccctcccccttggttttggcctgtggccctttaagggttttttttcccccccca

SEQ ID NO: 598900 - DNA, 1199 bp, Homo sapiens
  misc_feature (34)..(34): n is a, c, g, or t
  misc_feature (54)..(54): n is a, c, g, or t
  misc_feature (56)..(56): n is a, c, g, or t
  misc_feature (62)..(62): n is a, c, g, or t
ggctgcaggatttttcacgagaaaaaacaaagcncttcaggtcaggagaatgtntnaatgtncattgccatcgaggttctgctatttttgagaagctgaagcaactccaaggacacagttcacagaaatttggttctcagccccaaaatactgattgaattggggacaattacaaggactctctggccaaaaacccttgaagaggccccgtgaaggaggcagtgaggagcttttgattgctgacctgtgtcgtaccaccccagaatgtgcactgggggctgtgccagatgcctgggggggaccctcattccccttgctttttttggcttcctggctaacatcctgttattttttcctggaggaaaagtgatagatgacaacgaccacctttcccaagagatctggtttttcggaggaatattaggaagcggtgtcttgatgatcttccctgcgctggtgttcttgggcctgaagaacaatgactgctgtgggtgctgcggcaacgagggctgtgggaagcgatttgcgatgttcacctccacgatatttgctgtggttggattcttgggagctggatactcgtttatcatctcagccatttcaatcaacaagggtcctaaatgcctcatggccaatagtacatggggctaccccttccacgacggggattatctcaatgatgaggccttatggaacaagtgccgagagcctctcaatgtggttccctggaatctgaccctcttctccatcctgctggtcgtaggaggaatccagatggttctctgcgccatccaggtggtcaatggcctcctggggaccctctgtggggactgccagtgttgtggctgctgtggggggagatggacccgtttaaacctccgagatgagctgctcagactttacagcatgacgactacaatttcttttctaaacttctcttttctgggattataaatcccaatcggttcctagctgaaaaagttaaaaaggccggttttcccttctttcaaccagtttggttgagtaaatttgtttttttaaaataaaaattgttggcgtttccttaacgaggggtatttatgatccttgctactgattcctggcctcgggcgtccgtttgggcaacggaatacctcaccaaagccgtatccggtttcccagatcaggggataccaggaaaacatgtgacaaagccgcaa

SEQ ID NO: 598901 - DNA, 322 bp, Homo sapiens
  misc_feature (2)..(2): n is a, c, g, or t
  misc_feature (9)..(9): n is a, c, g, or t
  misc_feature (13)..(13): n is a, c, g, or t
  misc_feature (31)..(31): n is a, c, g, or t
  misc_feature (51)..(51): n is a, c, g, or t
  misc_feature (58)..(58): n is a, c, g, or t
  misc_feature (103)..(103): n is a, c, g, or t
  misc_feature (108)..(108): n is a, c, g, or t
  misc_feature (151)..(151): n is a, c, g, or t
  misc_feature (164)..(164): n is a, c, g, or t
  misc_feature (168)..(169): n is a, c, g, or t
  misc_feature (171)..(171): n is a, c, g, or t
  misc_feature (194)..(195): n is a, c, g, or t
  misc_feature (199)..(199): n is a, c, g, or t
  misc_feature (226)..(226): n is a, c, g, or t
  misc_feature (282)..(282): n is a, c, g, or t
  misc_feature (285)..(285): n is a, c, g, or t
  misc_feature (302)..(302): n is a, c, g, or t
  misc_feature (307)..(307): n is a, c, g, or t
antagagangggncaggctttttatgagtancacacaccatatataaaggngcctttntggctgaccacatggttaagtgcataccttcccagtactgggggnaaaangggacccttcttagaatgtgcaagttccatgagagtaatatantgatatgattttnaaannangtgttgatagttacatcttcaannttancattccagtatgcatctttaagataangtgattctaagtagatgactttatattcttgattaaagagtgctatacatgttaanaanggcattaaggaatacantaaanagtctaaagtgatgt

SEQ ID NO: 598902 - DNA, 1145 bp, Homo sapiens
  misc_feature (34)..(34): n is a, c, g, or t
  misc_feature (54)..(54): n is a, c, g, or t
  misc_feature (56)..(56): n is a, c, g, or t
  misc_feature (62)..(62): n is a, c, g, or t
ggctgcaggatttttcacgagaaaaaacaaagcncttcaggtcaggagaatgtntnaatgtncattgccatcgaggttctgctatttttgagaagctgaagcaactccaaggacacagttcacagaaatttggttctcagccccaaaatactgattgaattggggacaattacaaggactctctggccaaaaacccttgaagaggccccgtgaaggaggcagtgaggagcttttgattgctgacctgtgtcgtaccaccccagaatgtgcactgggggctgtgccagatgcctgggggggaccctcattccccttgctttttttggcttcctggctaacatcctgttattttttcctggaggaatattaggaagcggtgtcttgatgatcttccctgcgctggtgttcttgggcctgaagaacaatgactgctgtgggtgctgcggcaacgagggctgtgggaagcgatttgcgatgttcacctccacgatatttgctgtggttggattcttgggagctggatactcgtttatcatctcagccatttcaatcaacaagggtcctaaatgcctcatggccaatagtacatggggctaccccttccacgacggggattatctcaatgatgaggccttatggaacaagtgccgagagcctctcaatgtggttccctggaatctgaccctcttctccatcctgctggtcgtaggaggaatccagatggttctctgcgccatccaggtggtcaatggcctcctggggaccctctgtggggactgccagtgttgtggctgctgtggggggagatggacccgtttaaacctccgagatgagctgctcagactttacagcatgacgactacaatttcttttctaaacttctcttttctgggattataaatcccaatcggttcctagctgaaaaagttaaaaaggccggttttcccttctttcaaccagtttggttgagtaaatttgtttttttaaaataaaaattgttggcgtttccttaacgaggggtatttatgatccttgctactgattcctggcctcgggcgtccgtttgggcaacggaatacctcaccaaagccgtatccggtttcccagatcaggggataccaggaaaacatgtgacaaagccgcaa

SEQ ID NO: 598903 - DNA, 788 bp, Homo sapiens
cggaaagccatgtgaggacacagtgagaaggtgatgtctacaaaccaggaagaaaggcctcaagagaaaccaaccctcccctggcgccttgatcttgcatttccagcctccagaactatgttcacctccacgatatttgctgtggttggattcttgggagctggatactcgtttatcatctcagccatttcaatcaacaagggtcctaaatgcctcatggccaatagtacatggggctaccccttccacgacggggattatctcaatgatgaggccttatggaacaagtgccgagagcctctcaatgtggttccctggaatctgaccctcttctccatcctgctggtcgtaggaggaatccagatggttctctgcgccatccaggtggtcaatggcctcctggggaccctctgtggggactgccagtgttgtggctgctgtggggggagatggacccgtttaaacctccgagatgagctgctcagactttacagcatgacgactacaatttcttttctaaacttctcttttctgggattataaatcccaatcggttcctagctgaaaaagttaaaaaggccggttttcccttctttcaaccagtttggttgagtaaatttgtttttttaaaataaaaattgttggcgtttccttaacgaggggtatttatgatccttgctactgattcctggcctcgggcgtccgtttgggcaacggaatacctcaccaaagccgtatccggtttcccagatcaggggataccaggaaaacatgtgacaaagccgcaa

SEQ ID NO: 598904 - DNA, 310 bp, Homo sapiens
ccgagatcgcgccactgcactccagcctgggcgacagaacaaggctctgtctaaaaaaaaaaaaaaaaaaaaagattgacttaatggcctttagggactcaggaggaaactagttggcaagggggctgaggcattgaaacggctgcaacatagggttcaagtgtatacttgcctcgggtgagtgggtgcaccaaaaattctcagcgaattcacctagctaagagaactttactcattggagaccaaaccaccaaccttgtttcccgcaattgaccttattggcaacttaacaaactttaaacacaaaaaa

SEQ ID NO: 598905 - DNA, 904 bp, Homo sapiens
tgagcatggtagaatatgtattaagtacttctcactgctgagtaaattggatactcgatttcaggaagcggaaattttggcactagagatgctgaaacagatggacctgaccaaaggagatcaaaaaggcaaggcttcgtccatttgaggaggaccaaaacagagatcttaaacacggggatgatgtatgattctaaaataaatggcagcaggtttgcctaaatggaatggatgcccgattgcaacagatttttaatcgtactcctgtgaagtcgtcatagcctctccaactgaagtagttgagacgcttggtgccccacatactaagtccctcagaaggactggggcctcttcctaatcctacagctaataaaccacttgttgaagaattgtacaatatcctgacaactcagaatctcgatgccatggaacagagttggtctggaactccttagagtcttgagctatcctgttactcaggtaccaatgggactcttcaggagactacgtgtaggcctttgtgatatacaattcccagcacgtcaagttcttacagaggactaatgcaactaaccagtgacaacagttaagcttgcagctccaacagcaggcaaaaatgcgttagcaacaagctcagcatgcccacatactcgctggatggtatctcacgcaaggtgcttggtcccagcttgcatttggtgacaaatccattaacataataagggagagcccgtccaaaggaccgatcggattactgaagcaagattggcgtgaaagcgagacaatagggagcatgaaggaatcaccaggttacgaggaaaaggagggcttcacacaatattaaaatattcagtgcaaaaaccgtggcctgttttacctgtgaagacatctccgataacagata

SEQ ID NO: 598906 - DNA, 457 bp, Homo sapiens
actacatacttccggatgcactgtatactgacttacaggagagccccttttttaactcaggtgctcctgtagagccttagctgccttacaaatgccaattgccagcctgtctacctacgagcagcaggaaggcccgagcaggtttaggacggatgcttccctgaattgaatgaaatgctgtgctttgagactggaaggcaacagccaccacaaggggacaacctagaacgcggcactcaggcctgtagacagcaggtgtgagtttcatgtgattaataaccagaactgcaaccagaggggaagcatgaaggaaaatttaaggtactacaagcaaaactctcctcgacaaatttaaatactgtatcaggaataaatttatgagcatatataaatcattaagtattacttgtctactagaattccatgtttatcaacatacaaatcaggcatcacctcg

SEQ ID NO: 598907 - DNA, 1330 bp, Homo sapiens
tcctctggcttcagcggttgtctgctcgccttctttgtcttcttctctgtactcccgtgtgtggtcgtccagtgtttccctcgtgtagctatgcccttcctgcgtgctcttgttgtgttacgctttaccgttgccctatttacgtaccaccgggaattgtggtttttttcactgatattttatgcggctggtctttatgttcgccgatctctggcttgtcctgtatgacttgtcctcttcctgttacatttggctcatgcttcccgcggtgggtttgctacccattgatgttgcctccggcggtgctttggtcatatgtatcttcctttccttctttagttctcttattctttctatatatctgggcgacctttctttcactatctccttctttcctcacatatcttgctgttctaaatatggggcaattaatcctaagctatcatttctctctggtctttgcaatcgtatattggtctcacttcacattaacatattcttttgtgtacctcgctctatttccccacattgcctcttttagttccaaggggtctctagttcacggttgttatccctccaagacctagtcgtactatcgttagattagtaatgagtttcccctttctcccattgctgttcactggaaaacttctccatagtgactctggaatcaatcatgtcagtgtaatggagctttatctctgttacatgtttctgggtctcttgtctctctcttgctccagttgtgatccccacttgtactagctacagtgtagtctggaaacacaagtctgacacatgtcattctccttatagaacctgtgccctggcccataggagttaaccctctggcctgttccttcacgatgataaaagtcacagatgtacagtttgtcaagccagatataatacgagtgcaatatgtttgatagtatactccggttcatcttcttcttcaggaacgcgaaatgctggctgattttaaagctgttatagctggaagtatcaggacaagcccatgtacacgggctacagcacagcgtgttataatcagaagatgacgacgcatctgagggatggactttcttctcatagtgacttctgtccatgagtgttaagggctgtcatgttttagagtaatcacttatccattaaggactgttttctctagattagtacgtgaacgaaatggattatacatataactaactctcattctttgtcactatactatccctgtggctaaatataagtcattatacctcgtatgcgcaacagtatttgtataaatatcacttatgtctagcatacatactgccaggattcagag

SEQ ID NO: 598908 - DNA, 168 bp, Homo sapiens
  misc_feature (26)..(26): n is a, c, g, or t
  misc_feature (86)..(87): n is a, c, g, or t
ttatgattatacttctcatgggtgtnaaccatgagaagtatgacaacagcctctagatcatcagcagtgcctcctgcaccaccaanntgcttagacacccctgtggcttaagtcatcctatgacaatcatttggtatctgtggaagggagctcatgacccagcagtcc

SEQ ID NO: 598909 - DNA, 177 bp, Homo sapiens
tacccacagggcatctacccagcagaccaaccccaaccggctctacgtgttcttaatgtatataactgggcgagaaggtttcaaaacaccacaaagaacaaaagtcctatagaggctctatttctattcatgggactggtgcctcacaaatagagtaccagaagccagaactaaagt

SEQ ID NO: 598910 - DNA, 401 bp, Homo sapiens
  misc_feature (114)..(114): n is a, c, g, or t
  misc_feature (136)..(136): n is a, c, g, or t
  misc_feature (210)..(210): n is a, c, g, or t
  misc_feature (231)..(231): n is a, c, g, or t
  misc_feature (234)..(234): n is a, c, g, or t
  misc_feature (241)..(241): n is a, c, g, or t
  misc_feature (251)..(251): n is a, c, g, or t
  misc_feature (312)..(312): n is a, c, g, or t
  misc_feature (366)..(366): n is a, c, g, or t
  misc_feature (398)..(398): n is a, c, g, or t
gaattccctcaccatgtcgctgaagccccagcagcagcagcagcagcagcagcagcagcagcagcagcaacagcagcagcagcagcagcagcagcagccgccgcccgcggctgncaatgtccgcaagcccggcggnagcggccttctagcgtcggccgccgccgcgccttcgccgtcctcgtcctcggtctcctcgtcctcgggcacggntccctcctcggtggtcggggnganctccggnggggggaggnccggcctgggcagaggtcgaaacagaaacaaaggactgcctcagtctacgatttcttttgntggaatcttatgcaaatatgaggatgggtcatattcttacatcaagttggtggntccaaatgtgaaggtacaaatgaaaaaatggnggt

SEQ ID NO: 598911 - DNA, 912 bp, Homo sapiens
  misc_feature (28)..(28): n is a, c, g, or t
  misc_feature (96)..(96): n is a, c, g, or t
  misc_feature (216)..(216): n is a, c, g, or t
  misc_feature (428)..(428): n is a, c, g, or t
  misc_feature (434)..(434): n is a, c, g, or t
  misc_feature (478)..(478): n is a, c, g, or t
  misc_feature (489)..(489): n is a, c, g, or t
  misc_feature (493)..(493): n is a, c, g, or t
  misc_feature (535)..(535): n is a, c, g, or t
  misc_feature (595)..(595): n is a, c, g, or t
  misc_feature (620)..(620): n is a, c, g, or t
  misc_feature (655)..(655): n is a, c, g, or t
  misc_feature (690)..(690): n is a, c, g, or t
  misc_feature (824)..(824): n is a, c, g, or t
  misc_feature (895)..(895): n is a, c, g, or t
ctttcttcttacgccaatatagtcaganctagcttccttatgctatacataaaatcttaacatcagaggcagtacagatagtacagatagtttttnaactgatttccaaacaagcacaaacccactacgttgaaaagaacaggtaatttgaggtttttgggaaaagagagtacttcacacatttaatccaaattaaagggggtgcagaaagttttnagtgagatgaaaggaatgaaataaatataaattgtagggataaataaaaaaaaatttaaataaggtaaaagaactaatttttttaaataaaaatactagtgaggtaaaaggttttgttttttaatgggagagttttaaatatttaggagagtactgttaatattaaaaaggtaatttttgagccagagggttagtaataatagtggtttggntgtggnaattttgaaagtgaatggttttggtggtgaaaaatattttaggngtattagtgangggngagtgtggtggtaatagaatttaagtgttaaatagttttaanaagtgagagagggcaaaagtggatgtactaatttggtagttaaaaaatgggtgtgaggantggttgataattaggatcttaaganaagtagtgggatggggtattgagtggtatgatgantgagtaattaatagaggttaaaagaatatggccanaagtgtgtttgttttatgtatttgtcacttaatttctttagtcattaattttacacccaccagtgaattcctatgggcagatgaaaattttgtggtatacataattagagagaaaatgattatggtgggtattnctgtaagtttgacgaacttgagaagttttagcaccctcccctaaatggatgaagcccttctatttaatttntctccttaaaatagaga

SEQ ID NO: 598912 - DNA, 253 bp, Homo sapiens
cggagtgcgagagaacgggagcctgagcttcctgcccacccatccgtggagctccacttggacaacaacaatgttggccagagctgccctcaggcgctacccagacctcaagctcctccaggtggtctatctgcactccaacaacatcaccaaagtgggtgtcaacgacttctgtcccatgggcttcggggtgaagcgggcctactacaacggcatcagcctcttcaacaaccccgtgccctactgcgaggtg

SEQ ID NO: 598913 - DNA, 434 bp, Homo sapiens
atgatagcggtgaggatatggatgttgtgtttagagctgtctctgacagaaatgtgcatcctgtttatcttctaagagcagttctgctctgtcgggtaatataagaaacgtacactctcatttaatgaattctctcctccggggggatgggggcgaggtttgtttggaagaggcaggggaaagttcttgcttcggctctgataggtggtctgttgctagggccttgagagaagtatggtggcagggaggcactctgtggaaaactgctgttactttctgagaatgctccaggcatgtgagaggatgggaaagggttcatgggacttggcttagtagatcttgaagggaaagtgttggagctcataggaagtagtgctggctggggcaaaggtctctgatgcacatcatcttcatcattctctcttctgtctggt

SEQ ID NO: 598914 - DNA, 160 bp, Homo sapiens
  misc_feature (28)..(28): n is a, c, g, or t
ctttcttcttacgccaatatagtcaganctagcttccttatgctatacataaaatcttaacatcagaggcagtacagatagtacagattttatgtatagcataaggaagctagctctgactatattttcctaagaataaagacctatttttgtagcatga

SEQ ID NO: 598915 - DNA, 175 bp, Homo sapiens
tccacaaagagctgctgtacttgtacttgcacgtaaagcatctgctcatcgacctccttcatggacatcctgaccacggaaggacagcagccacgtgtgaggtatcggccgtacgcgaggtgttgcctgtagctgtgatgtatgccgtagcgtggtgtagccgtacctgtgtatg

SEQ ID NO: 598916 - DNA, 1111 bp, Homo sapiens
  misc_feature (435)..(435): n is a, c, g, or t
  misc_feature (467)..(467): n is a, c, g, or t
  misc_feature (473)..(473): n is a, c, g, or t
tggagtactagccaaggcacaggggaccggttgtccttaggtccttagtcggtgaatctagcaataggcagctccaaattctctgagtcgaactagggtttggccttgtcactgggtgaggccctactaggtgtaagcattctctcgtgaatttataatttcctctcattaaaataggaacaaaattggctatcctttagaattaggagctgaagattcatttcccgtgggaatgtttcccatttatagcttctcaagttttcagcctcaaacattctacctttctttctcgtgacctccttgtttcattctcattctccctccgagggcagatagggggggctaccatatagtatacctgtgggttatagtggccgtggtatttatatgtggacatctcagcgtggatagtgtgtgacttgtgaaccgtgtgtntctctctcccatagccgtggtctcgtgtgtanacactntatttataagtgggggtgaagaaatctcataaagtgtttatactctcaactctgtgtgagagtggggctctcagtggatctcacgagccaccgagtgggtcgctctctaacacaaagagaaaaacatattgtgggggtggggggtggaagtgggaagtgggagttggcaggaaacagtgggtgagacaacgagtgtgtgggcttatacacgcgagaaatttccttttatatcgcgagaattatttatagcgtggggcctcccaaagaggggagtggaggttagaatataaggcagccatattaagaaaatcttgtgggcactcccacagggtgtaaaaactcgcctcaacgcgggggccccctttttgtagagagagccccaattaagggcgcggcaactccatgttggggcgcttcttataacagatattacacaggccacacagggggtttcttttcccacagagttttgggtgagcacctgtggctcaataactccgtgggtttataccccctccaggggggttcaagaactggcacttactcggacgggacgtggggttattaaaccctaattgtgtcaaacaacttgtggcgctttgggaaacaaccatcaacctttggggtttcccccccaa

SEQ ID NO: 598917 - DNA, 386 bp, Homo sapiens
cgtgtaaacagccaggcaaccccttgtggagggatacaaagggcacggcggactacactgaggtcccagaagaaaggagaccccttcctgcgcctacaatcggtgataggccccgtgtttctagaatctaaaaacatcagcacagacaattacatctggtgctcaacaatgtgttgagaacccactgctgcctcctccaatcagttttatagcaatccacctcggagtgtcacctggccaggtcatcctatgtgtctacatgctattcaacggatgtcggatgagaatgaagttgcctgagcccccaggatggtggagtccttcactgtgagtccatcctttgccccacaacatctttcagcctgggtgacagagcccaaacctgt

SEQ ID NO: 598918 - DNA, 621 bp, Homo sapiens
  misc_feature (153)..(153): n is a, c, g, or t
  misc_feature (161)..(161): n is a, c, g, or t
  misc_feature (168)..(168): n is a, c, g, or t
  misc_feature (182)..(182): n is a, c, g, or t
  misc_feature (199)..(199): n is a, c, g, or t
  misc_feature (208)..(208): n is a, c, g, or t
  misc_feature (237)..(237): n is a, c, g, or t
  misc_feature (245)..(245): n is a, c, g, or t
  misc_feature (274)..(275): n is a, c, g, or t
  misc_feature (291)..(291): n is a, c, g, or t
  misc_feature (300)..(300): n is a, c, g, or t
  misc_feature (330)..(330): n is a, c, g, or t
  misc_feature (348)..(348): n is a, c, g, or t
  misc_feature (374)..(375): n is a, c, g, or t
gctgttttgggcctcgctggtgctctaccctttcttccagttcctggtcagcatgatcaggagcgggtcttccctgacgctggccagcttcatcctcgtcttctttgtggcctccgtgggagttcagatggatagattggtgtgacggaaatntgacaagnctctgcnctacggcaactctngacagcaagcagaaacntgaatgacntgactcaggcgaggtgtcaccatccgaangggaaccnttggggaactggtgtgcctctgcatatcnnctccttagtgggacancggtgacanacaggctgggtgaagcccctgctgggcacnggcggaacgttcacgaancctctcgcagccagggacgctctggnntctcaaggcgcggactggcggacggacagactgttttggtaatccttatttttccacccattgtggctttagatgggctatggttttctttttgtgcgagtgtgtgtgagaatggctgtgtggtgagtgtgaactttggtctgtgatcatagaaagggtatttaggcctgccggggagggcagggctggggaccgaacgggggcccagttccccctttcatccctttggtggcgaagtttactgga

SEQ ID NO: 598919 - DNA, 1220 bp, Homo sapiens
gacctgtgtaccctcggagaacaggcaaaggaaacagaagaaagaagcgagctgcagtgtcgcaggtggctcttagccgacggaggggacagtgccccactgagccctggggacaaggaagatgccagccaccaagaatgcccttgagcaatctgccctcacccaagtgagcacaatgcttccagaatgccacctggttacaggaggaatctgaaggctcagggtaagcccagcacatctgagccaaaaagagctcaaaacatgcaggcgaccaaagagcctcagctctctgaagcctgtgggcctacagcacagacgtggtgcgccggagcagcagagagctggacggggccaggcctgctgtgtcatggccagcgacacaacagtgcccagaaggccccctgtcctgacaatccaaacacctccgcatggcacactgctgcagcgaatggcaacaggggacaaccatttccaggacgcaggaccttgcagtctaccgtactcgtgactcacccctgcatgtaagcttcgcgcactcgaatggcaatcatggaattcctccaatcactgcatcgcggaagaaggatgagcaccacgaagatgcgccagaagcatctcgcctgacacagtaaacccaaacccggcgaaaataccatgaaagagacacacacgacacacaccacagacgacagaaacgacaaggaagccagcaaaaggaccagctgagtcacgaccctcggcgacaggccacacggcatccacacccgcgcagaaagatgaaaaaaaagacaacagcctcgagcggcaatggaaccaggcaaccagaggactagacgaacctacacagcacaaacaggccaagaacactcccagcagtaggatagcgcccacgacacagcggcgacataccacattggcccacgcgaacgcgagcaaacgagctacacacacgaaagctcaaagggaagaacaacacgctaacccactcgtagcatccaagacaggtctatacagacataatcaccaccacgtgcacagagaacgcggaagagacaaaacacaaggacctgaacacaaccacaggaagaggcaaatcagccacgaagggcagacggcatgataacgaggtgacgtcagacacaaccagagacaacacacgaagtgcagacaagcgagaccaagcgtaccagacaaacaacacaacgctcacaccgtatcaa

SEQ ID NO: 598920 - DNA, 148 bp, Homo sapiens
  misc_feature (122)..(122): n is a, c, g, or t
atgttgtctgccagcctcccaggtagcaggggttggatgcgtgtaccaacatgcccctctgtatgttgtattagcagatgagggtttcgccagtgttgaccaaggctggtcttgaactcctngacctcaactgacgctcaggtgatct

SEQ ID NO: 598921 - DNA, 610 bp, Homo sapiens
gaatagatgtattaaaaatgtttcttataagtcttcaggtctgtgttgatgctaatgctggttggctcttactaaattccaaaagggtgtaggatataatgaggcatgtccaacttccccttcccatcatggtctgaactagtttttcaggttaactttggaatgccttggccaagaggagggttccattcagaaggctggggcccttagaattttattttggtttacagaatcagtactctttcaactttaaaataataattacttactgagataataagtcagaactttaaaaattaatttgttcaacattgtttattaagtgtctgatgtgttagggactgtttttggtgctggggacacagaattgaacagtatctgatgccatccttgcattcctataacttacctggcaggggggtgggggattagtggtagacagtaaataagcacaatgaatataaaaggtcaggtaatgttacataccatcaaggaaaataagccagatgaaggtggttgctgttaagtagggtagccaggaaggctggaatgaatttagatattaagatattagtcatatctataggaatttgatccatcttagcaaggg

SEQ ID NO: 598922 - DNA, 350 bp, Homo sapiens
  misc_feature (303)..(303): n is a, c, g, or t
  misc_feature (337)..(337): n is a, c, g, or t
gtcatagtaattagtctgcttgatatcaaatgtactaatttacatattgtgactttattatatagtcacaataataaagactgtgtgttgttggtgaaggaatagactcataacctaatgggacagaaggcagaaccagagatagatccataagtgtgcccaactgattttttacaaaagcaattcaattttgaaagcattccaatgggaggggcagatagcctttttcagtaaatggtcccaagagcaagtgggacgaccagaggcatgttagcttaacccttccaccttaaacccccacantttcattcccccaaaatttttaccccccaattanttttcaggacttt

SEQ ID NO: 598923 - DNA, 743 bp, Homo sapiens
agcggaatgtgggcgtggccggacatgtttctcttgacctatcttccacatcatcaagctgttacgggcgaaaccttggtctgaaacatgcggccagagaaataaatctcaggatccggcaggtgtcaaaggtgccctcttcatcaattcaactgcctgcactattgtctgtagtccctgacaagagtaattatgcctcgaggtcagaagagtaagctccgtgcccgtgagaaacgccaccaggctcgttgtgagaatcaggatctgggagctacgcaggccactgtggcagaaggagagtcaccctcctctgcctatcttctctttggtgacagaccccagaatttgcctgctgctgagacacctagcatccctgaagcgcttcagggagccccatccaccaccaatgctattgcacctgtttcatgcagttcaaatgaaggtgccagcagccaagatgagaaaagtctaggttcctcaagggaagctgagggctggaaaagaagatcctttaaacaagaaagtagtgtcgctggtgcatttcttgcttcagaagtatgacaacgacaagagccaattacacagggcagatatgataccagtggttatcaggaaggataagtgtccacttcaatgagatcctcaagagagcctctgagcacatggagctggcacttggtgtcgatttgaaggaagtggatccaatcaggcactactatgccttttacagcaaattagaccta

SEQ ID NO: 598924 - DNA, 105 bp, Homo sapiens
gtgtatcaccactgcgggcatgcctcctgtacagttcgtcgacacgtgagcacgtgctgacctccaaatatcgttagctggagcctggtcgactctatcaggatc

SEQ ID NO: 598925 - DNA, 163 bp, Homo sapiens
ggagctctagtttaggaatagtgaataagaaatgtactgtcatgttgagtgtgggagaataactggagcacaggagtttgaggccagcctgtgctacatagtgagactctgtctctatcaaaaaatttaaaaataattagctgggtgtggtggcacatgcctg

SEQ ID NO: 598926 - DNA, 1424 bp, Homo sapiens
cgctaacggaagataccttgcgatggctggaaaaaatcgccccttccacaccagagcatacagagcattccgtattgaaattagtagatctcggcgtcacgaactcttccagataaacgatcatcgagacatgcgaagcattcctgagagagccatgcattgctcggccatcatccgtgcgttcatgggaccatgccaggcgacgcagaaaatatgtcggtgagcatcacgtcttagcacaaacacaacgccaggagactccgcagaaattacagcccagcaagattagctctcgcacaccgaatgcgtggaaagggacacgacgcgaaacaaagcaaggcacatggcatcacacggaaagatagcccctgcacgagacaatcacgtagcaaacccatatcgcatacattcatcgaggcgacctatgccagtaagatcgaaaccggcccgactcgcagtgctcgcgcgtcagtggcagacgcgccagctgcacgacgccaccccgtagcgtgtaccctaggcgaaactatcggccaccgaacggaaacgcacacgcacggcagacgcgcggcatcaccgaacgactgcgtactccgcgtcgcacacggaactcgcccacacacgagcccaacgcaccgctcgggacgacgcgcccggccagcacatacataccatccacaaggcggcaccacttccgacacgaacaaacgccgccacagccactcggacactcgaactcgaccgctggcgcgcgctacacacacgcccccacatcgaacccggccccaactgcaacacaagcgcatcgccccagtaggcggccgcccctggcgaaccgcaaacagcacacgcccttggataaccccaacggaggccccaccctacgtctctcgcagcacatacatacactaaaacagagcacacccatcgagccgcatcttccctcggcccacccgccaaccacggccatacccgcgcccaaatccatccctcgcccggcaaccattcccgccccgcgccacgcacccatccaccccttccactcaacgacactcgccccggagcactcccgcacaacgcccactcacctccagcggcaaccgacatcgcacgcacgacccccaccccccatgcgaccccaacacacccacacacacgacacgcgcagccaccgccggctgccgacccccagcgaaccggccaggaagcacctgcagcccgcgaacatacactacccaccctcccaagccacaggccgcccccacctccacaccccaccgcaccctacacaaagccacacctcccgaccgcccacacgccaacaccccctgccacagcgaccacccacctcaccacaccacaccaccccgcccctccccgcccaaccaccccaacccaccacccaacagcaccaaccccgcgcc

SEQ ID NO: 598927 - DNA, 281 bp, Homo sapiens
agatggagtttcgctctgggctgaagtccagtggcgcgatctcggctcactgcaacctctgcctttgaggcaggagaatcgctcgaaccagggagttggaggttgcagtgagccaagattgcaccattgcgttccagtcttgcgacaagagtgagactccgtccaaaaaaaaaaacaaaaattagctgggcttgtggcacaaacctgtagtcctagctactcataaggcttgagatggaagaatcctaaaacctgggaggcagaatttgcagtgagcccaa

SEQ ID NO: 598928 - DNA, 494 bp, Homo sapiens
ggcccttgaccaaaaattctttgttaggggccccttttgggttggggtcagttgggccccttttcaacaattttccctttcggttttacgggccctggttaaaaaaagggggccaccaaaaccggggggtttttttttagccccggccccctgggcttttttcctttttgggccctaaaaaggagggagatttttttttttttattaaggatagggccggttttttgttgggttgggccctccccccccgggttttccaggaagcagaatttttcaaaaaaagggtttttttctttcccgttcctttgggttttggcctcaggccccataattttcttgttcccttttttaagaccagccgggttctttttttccccttggccgggatttttaatttaaagttggggtggaaggggccctttttttaccccccccctggcccggttatttttgctttccttgctttttaatttaattttttttcccccccggga

SEQ ID NO: 598929 - DNA, 319 bp, Homo sapiens
ttctgagacacaccaactggctgctccctctccgccgctgttgagggtcgttatcttgattatccagatcacctagaaagtatccgtatccagaatgaataagatcaactctctgctcctctgacagcagagggagcaggaccataaggaaccaaagagcgtggaaggaaacgatgtgacaggaaagctcagagaacggccacagggggtcgtcagcaggccttccaacctgaatcatgaataattaatgaagcgtaaatcaaaggggactggagtttcagcaggagcaattcatccaacgggagatcgccggagggcc

SEQ ID NO: 598930 - DNA, 115 bp, Homo sapiens
atctgattgatcccccttagacatttggtctgcgcatgatgcacagggcctgatcctggcttgaaacttggccggtgatacctgacagtgtctgtgcaagggtttccttcttacg

SEQ ID NO: 598931 - DNA, 461 bp, Homo sapiens
  misc_feature (414)..(415): n is a, c, g, or t
aagcagtggtatccacgcagagtgcccattacggccggggggggagaaaaaaaaaaaaaaaaaaaaaaaaaaaaaatggggggcggccggcccggaaaagttaaaaccctggggggggcggggcccctggtgttagtgtgaacacgtgctgcatacgctgtgtcccataggagaagacctgtgggacgtagagctatagtgggcgttgggggttcctcaccccattataataaacacgcgccgcggcgggaacaccccgagcgtggtttttggaacaaaactcaagagattgcagtgtctcggcagggccatacgcggcacgtctcatatccaaaccaggcgaggtgtcacacagccgaaaccgctccgagatatatatcatatatctaaccgcgcccgcggccccgtggtgannaatatgacactatagatgatcactaatagacagaatacatcacatg

SEQ ID NO: 598932 - DNA, 295 bp, Homo sapiens
cgtacggacagatgccacacatatggaagatgactctgtcacttgccgatgggtgtacaaaagacacagaagattagaatcattgcacaatggaatggatcgtgatcctgacatgccaacgcacagataatgattaagaaagaagaagaacgttagagggcttccatacgtagggaatctcagcagcgccgaatgagagagaaacagcaccagcgggggctgagcgccagttacctggaacctgatcgatacgatgaggaggaggaaggcgagaagtccatcagcttggctgaca

SEQ ID NO: 598933 - DNA, 1150 bp, Homo sapiens
ctttgatgatggtgaaaagcgtagctagcgattcgacgagatcgcgggaggacgctatcggatgggttggctacgcgcgcgatccgatcgggattatcggcgtgaggatttcacgacaggagctataaatattatatatatcggcggcggcatgcggcggagatattatatccttgtggttgtgagagatatatataggcgcatatttttattacgggcggcatatcggcggcatatggccgtttacgggcgagatctatcatatggagtcgggaacagccagtagccgcgagtagcagccatcagccagtgcggcacgcgaacagcagtaaaacattaagtatcccatccatcaaacgatctgatctacgtagcgacgggcatgcggaggctaggctacgggggcttagggggcgtaggctagcgggggctattttacggcggctagtagtatcgagctacgtacggcgcatctacgagcggggcgtagcgcttaaacgtatcgatcgacgggcgcggcgcgctatattatacgggggctacgatttattatacgggcttatgcggcgctagcgatcggcgtagcgctacggcgatcgcatgcgatcggctagcgcacgacagagccacagagacaaaacgagcggaaccagcaaagcaaagccccaagaaaacccggcccatcgacacgacattgcaggctcggatgcggcgatatcgggcgcgatgcgcgatcggcgtagcatgcacgatgcggcgcgatcggtagcgagcgggcgatgcgatggctagcattatcggcggcagatgaggtcgggatcggcgagcggcgcgcattaacgggctagcgcgacgcggcgcgctagatctgatcgactgcgctatagctgacggtcgcgcgatgtagcgatttcgagcgatcgcgcgatgcgcgcgatcgatcgtgatctatagcgccgatcggcatgcagtcgtacgatgcggcattcgtacgcgatcgcgcgcgatcgcggcggcgatgtatgcgatgcgcgcgcatattaatgcgattatatacgggcgcattacgcgcgatcggacgatgcgagcgagcgcggcgcgtagtatagcgtatatattacggcgctaacggttttcagcatcatggaaa

SEQ ID NO: 598934 - DNA, 229 bp, Homo sapiens
  misc_feature (144)..(144): n is a, c, g, or t
aaaaagttcttctctacttctcggctgaggttcaattattaactttttttaaatttttttgagactgagtctcactctgtcgccctgactgaagtgtggtggtgtcatcttggctcattgtaacctccacctccaggagaattncttgaacccgggaggcaaaggttgcagtgagccaagatcgtgccaccgcactccagcctgggcaacagagcgagactccgtttcc

SEQ ID NO: 598935 - DNA, 865 bp, Homo sapiens
caaggcgggggagtccacccccgtggtgggggctgtccaggtgcctgtcccgggcatgccgccgatgactcaggcgccccgcattatgcatcgcacatgctcgggaccagctcgctcctacatgccgcgcccctggatatgataccccgccgtcccaggctcttgcacctggtcagatcccaccaggggccatgcccccgaaggcacgtttagtgcgcgaggactagattgcctccactgcgccaggccttcttttctgatgatatccacgctgaattcacattcttgtgtttcctctagtcaaacactggccgagcagggagacacaagcggaagactaccatgtcgtggtttcccatagtcttctcttgcaagtcatggtgtaccgctgggcgttgcaacgagagggttcgcggtactggtgtaccccggagctgggcaactgcaacatttctggccctttcggatgtggaagcttatggaactagagttggaagggctaagcaaggtggcgatggggggactacgtcgttcggccgcaatggacgcacctggcgaaggtggcgtgtatagagcactccaactgccaagagacaatactgcccctactgacacgcattcttccctgtccggcccaaaaagaggttacgctatcccgttcttttcttacccacacaacaagtgagcctgtgggggggcatctcattaatatccactgggtctcaatgggcgacggtttcagccgtggccctatggacctggcgttgtcgttgacttgcagttgctctggccttagaaatcgtgttccagggtggcccaccctagggttggcggtgggccatataaagtccgacgttgaaggtgg

SEQ ID NO: 598936 - DNA, 255 bp, Homo sapiens
gcccactttggggcccttggttttttttggggtgggggggagggtggaaattgctatccatccccggggtttttcccccgggggggggggaagcccccgattcctttttaaccccggtttttagggggcccccccctgttggctgaaagggggcggccagataaatttttttggggttccctgtttacggtttttttccccctgggggggggccagttttgggttccgaaataacccttggaattgccaggggga

SEQ ID NO: 598937 - DNA, 653 bp, Homo sapiens
acaaataaattagtcttatttagtttgaagtaccagcatcattaactgaggaattctcactagtggacttagaacgttctttaattatacacatagataatatcactcctgtagaggtttctttttgtgttggatatgttgctgtcactgtcagacttagaagtcttaatcgtaaaactggagtcaggccctaaaaatggagagagagttcaccaccatccacataagaccaccaactcgaactaagacggacagaagaaggcatcagctaactgaacatatccacacgctcgcagctcagactgatattcgtcatctgaccagaacgccccctgcgcaacttctatggtgcaaaacaagctgaacagatctggatctatctgctccacacctggagtctacgggcattagctgactgacaaaacagaacatacttcccacttttcagcacctgctctactagacgtcttgctcctgcatcttccagtcctatgtcttgtctgatgacatcaagctacattccctccagctgctacccatttaccagaccggttctcttacgtctgatggccacccttgtctcaggacccgccctcgctgagctctcttcgcttctttctccttaccctcatgtgggctctctctacatggtg

SEQ ID NO: 598938 - DNA, 247 bp, Homo sapiens
  misc_feature (11)..(11): n is a, c, g, or t
  misc_feature (231)..(231): n is a, c, g, or t
gttgttcaccncaggaagggattagaaacgtctaggagagaatgaagtaaggttgatagtgtggtagagatagctggggagaggtagagggtggcataaaaatgggaatgagaataagagtgagtataaaagtaaagagtagaacttcatcagggtgaaagaattggaaggtccccccccagcaaagatcatctatgcactctaagagggagttaagagttgccatgtccntgtgtgggggcaaatc

SEQ ID NO: 598939 - DNA, 611 bp, Homo sapiens
agatgagtcacaaaatcgccgctgtgtgcctcttgatgagctgcctgattgccacggcttatagcgccgctaaggtgccaatttctatctactacgagtccctgtgcccggacagcgccaagttcattacggagcaggtatatccggcggtgaagggagaactgcgcgatgtggtggaactcactttcgtgccattcggaaagtctcagttcgttacccaggggtccgaagtgacgttcacctgccaccacggaccgaacgagtgctatggcaataaggtgcatgcctgcgccatcgagcacatccaggccaactcctatcaggtggagtacacgcgcgagtcgctcacgatggacttcatcaactgcctaatgaaggccggcaagaatttcccggacaacgtctatcccggccagcgatgcgcctcggagaaccacatcaataactgggagaacatcaagacctgtgccaactccaccgagggaagcgttctgctccggaaggccggcgaaagcacaatgcggctcaaggagccactgaccagcgtgcccaccattctgttcaatgagcaattcgacaagaaggtgaatgatcgcgcccaggtgaacttg

SEQ ID NO: 598940 - DNA, 620 bp, Homo sapiens
aagcctgggtctgcttttgtccagatcagctgtttttttaaaatgtctgactttttttgcatttctaaagaagcgtgagaaatgggctgggagtgcttctgtcctgctgacaccccgcggtgggtcctggacgcgcggccctccagctgccgcaactttccatgccacggatatttcttccgcaaactcacgctcggcttgaaacttcacgagcgacgtcacgacatgactcgacctgctccttcaactgttgactaactaaatgtctcacgccaacaaaccttccttgcagctgccactgcttttccccttgacctgcacctcttccccttaaacacttctgcaggtgacaccccctggcggacggcgccacttgacacagcactgcgtctcttgccagctggcttggcaacggccggctctccgcttctgctcagtcttcctgccagacgcgctcggactgcgtcccctgccatccagccctccccgctctgacgcccgcactgactctgccacactcaccgcggacacggggctgcctcgcccgccgaccacacattcctccgctcgctctctcccggcccgtcctccctcctgctctcccctcccccttcaccccg

SEQ ID NO: 598941 - DNA, 205 bp, Homo sapiens
catacattcaactaatattggttaaatcactagtctatgccaatttgagccatctgtgcttggaattatatcagtgaacaagaaggctatggtcctagtcctcatgtggagactagtaaatagttgtttattttagtggagaggtaaacaataaacaagtcaatgggtaaataaaaatatatgtacacactttaaaaaatgccat

SEQ ID NO: 598942 - DNA, 197 bp, Homo sapiens
tgaaatttttgagaaacacgagtaaagggtcagataccaatgtgtatttaaaaaaaaaaagcctatttataggggttttggccggggcaggggtggaaacctgctttatcctttaggattattcctaaatgcatcttctttataaacctgacctgctatctcagccagattaattatattaaaaaaataagaatccc

SEQ ID NO: 598943 - DNA, 632 bp, Homo sapiens
gcgtggctgaggtccatccgagcatctcaacctggatagcctgatggcggagcccaagaggcacaacgtcctgctttccacagaaaggagctgtagccgagttctctgcgcatatgccactgacggctgtgaagctaatactgtctacagtgggactcatcggataatggtagaactaatatgtctgcaggagtgcgtaacctgtcctattattgcactcctcttagtaaggcccgtatttctatgcgccatcttatctagatgagccatgaatcttgactgtcggtgatgatcttcacgatggtgagcctacttggtgttcgagaaatcgatgtcatcttaatttaagcttacgcatgcaacttctaagggcctctagctgcacgagaccgcgtgttacaaatgacctctgctggggacgccgccgtatgcctttcacggactatgagtcatggttcactgcactgaactcattttttggacagcgaggctgacagcttcctgtagtaacccagatcattcgtgttgccttgtcccttttgccagtttgaattttgatagatttgccgcccgaaccgcgttccgaactttttccttcccgatgggatgttattcgcctccgggcctttgtg

SEQ ID NO: 598944 - DNA, 1303 bp, Homo sapiens
  misc_feature (605)..(605): n is a, c, g, or t
gcaatctctgaccattgtatcatgcccggctggctctgcaatgtcatttcgatgtgtcttcagtatggattttttatatttttttttcggagttcagagttctcggacttgtgttcacgcggaaggttggagagtgtgccagggggtgcggaatcttcacaatattttcaacgagatttcctgtgtgaatgacggacagagagtgtggtccccaatgtgaactctttttctacccattacgtggacagatgagaaaagttatggaagaggtagcacctcgtgggaaatattctcgcacatatacttcaatcaatacacctctaagaccatgtgtctaccttattgggcccactttaaaacatctaaaaaccacagaaatataaactcttacacagtgtttttctctccaacaaatattcaaacagattatatacaccacgtgtcgccgtgcgcccataattttataaccaatactcgagagagacctctgtcatatatgggcccaagttttggggggcgaccaccccaaatacctcaaaaagagggagatttaacgaagaggggacaagaggtcttccaaatcattaaagcgttgaaaagagagnccccgagagagaaaccatatttcgcggggggataacgccgcacataaaggagggtacaaaaattgcgaaagagggagccgttgactaaacacaacgaggtttctctgacgagaactttgagggaccccccatcctacttttgcaaccccctttgtggacgggggcttccttggtgtaaaagtcgtgcacccaccattctcagagggccgagaggcccatacagaaaaaacccgtcgttaaacaacttgcgggacctgtgcttccaactcgtgtcaccaaaagggggagcacctttacacacgaggtggcctcaactcacagttgcacctcttaacccaacttcggggggacgaacttttcacgaaaaacacacaaccggggccacacaaggcgacaaccaaacatggtggggacgagcgtaaccccgtggacaatattgggcgggcgggcccccaagatggtaataccacacagggtgccctttacaaacagtcgacaacaggtgtaacacaacacgctgtgctctccaaaactgtgcggagtagacacttggctcccgcgcacactgcccacctggtgggcccttttgcaaatgtgggggaggacacccacccacagggagaggagcaagacggggccacactaaggacagcgtgaaaggagagagcggctctttagaaacacacgagcaaaaaatg

SEQ ID NO: 598945 - DNA, 250 bp, Homo sapiens
agaatggcatacccgagaggcagagcttgcagtgagccgagattgcgccactgtactccagcctgggtaacagagtgatactccatctcaaaaaaaaaaaaaattcttagtgccctcaaaaaactgctaaaacactcttgccactctggtttactgtaatttctcttaacctccttgattctttagccccagggaattttttccaggaacttgtgtataggagttcccttctttcccttgagttttatac

SEQ ID NO: 598946 - DNA, 155 bp, Homo sapiens
acgaagaaacaccctccttattggtgtgtccacagacatcgaggacctgtgtggtgctattcattcctccatgctaaacagctgaaaagcgaggtagctacactaacagcagctgggaaagaagttatgcttgataggaatatggtgacaaaaat

SEQ ID NO: 598947 - DNA, 193 bp, Homo sapiens
gagtgcagtgccacaatcatagctcactgcaggtcaagcagtcctcccatctcagccttccaagcagctaggaatacaaccaagaaataccatgaccagctaatgtttacattttttttttttttttttttttttttttttgggaaagggagtcccactttgtacccagggggggagggcgggggcacaatct

SEQ ID NO: 598948 - DNA, 559 bp, Homo sapiens
tgaatgattcagagagtcctgtccagagactaaaacacccacagcggaatgctcccatgaagaagtcgtctatcgcgttgttgttactcagcctttcgccactggcaggcttcgccgctactgcgccgttggacctggtgggcccggtgtcggattaccaaatctacgtcaccgaagaaatcgctgagctggtcaccccagaccaggcgtttactgacgccatcaataaaggcgacctgggcaccgccaagaagctctacgcgccgactcgcgtgcactatgagtccatcgagccgatcgccgagctgttcaagcgacctcgacgcgtccatcgactcacagcgtcgacgatcacgagaaaggggtcaaggccgaagacttcaccggtattcaccggatcgagtacagcctgttctccgagaagaacacccagggactcgccgtcctggcccgaaacaactcaacaaggacgtgcaggacctgaaaaaccgggttgacgagctgaccttcccgccggaaaaagatcgtcggcggcgccccaccgcggatgagagagtcg

SEQ ID NO: 598949 - DNA, 131 bp, Homo sapiens
tgctgggatcacaggcgcaagccaccgtgccttagccctcaagtttaagatttccgagtcttgagataggatcgacttgtttatctggattcaacttgacgttgcgactggcggaaacgggtaccgagctc

SEQ ID NO: 598950 - DNA, 120 bp, Homo sapiens
gaacacgtgacaggccagaatgacatgactccactgaccaggactatactgacaaagcctcacggacaaggcctcactgaacaggacccttcactgaccaggcctccctgacaaggactc

SEQ ID NO: 598951 - DNA, 498 bp, Homo sapiens
aggatcatagcttttacttagattctcaaaggtatcaggaatggggaatgtgttagacaaaccgaaaacctgtgtcagcttgaaaatcctccaaaactttaaagacttttcttttttctgagaaaggcgggtaaatcactgagtcatcattcagaacatacagcctcgaagggccagagctcacacccatatatgcaggtaaagagctcaagaaatgtgggttgagtgacggagtgaccccaggggcagactccagctcatcagacactgatacagagagcgcatgctatcccctcaattctccctcttgtcctaaaagcggagtctatatagggatgacaggctcaggctgagcagtcgcattctcgtgggttacgctgtgtcaagaataggtccctcaacatgaagatgtgtctgcgtctgcaccagatgctgcctgggtcaggttgcctgcctccgttctggttacctccctcctactacggtggcaagctggga

SEQ ID NO: 598952 - DNA, 274 bp, Homo sapiens
ggggcaatgagccacgctctgcgtagacgtctattcgctccaagttcatcgaaacactgagcgcacgaatacacgtcctgggtgagaaccattcacggactcctccgggacctgttccaccctccccgccatgcacagatcatctatgtaaaccagagtaagattctggctaacacacgagtcttctgtcctggctccgagggcgaatgcccaaacgttcctccctccgccgcgtgagggaggccgagcactcgcgtccctaatttgaggtcct

SEQ ID NO: 598953 - DNA, 679 bp, Homo sapiens
  misc_feature (318)..(318): n is a, c, g, or t
  misc_feature (347)..(347): n is a, c, g, or t
  misc_feature (382)..(382): n is a, c, g, or t
  misc_feature (476)..(476): n is a, c, g, or t
  misc_feature (516)..(516): n is a, c, g, or t
gggggggggggggggcgggcaaaaggggggggggggggggggagtacggggtttctagggctcaccccatggggggagggggggggggttggggcaaaataagggggttttaaaaggggggtaaaattggccccattaaaaaaaaggcggggggggggggggggggggggttatataaaagggggggtttggggacgggggggggggggggggagccatccacttggtttgtcttccataaaaaaacccggggcgggtcagggctcggggttttagcctagggggggggggggataacattttttccaggggaaaagntatgccccttggggcctttttggggcccntaaaaaaaaaggtgggtcaaaaaaagggggggggncggggtcgggatttccggggatttggtgacccagggggggggggaaacccgggatttttttttgggccccttggggtaaattcccttaaaaaanaaaaaggggggggcttggggggggcaaggggggggagggnttttttttccccccccgggttttaaaaaaaaaaggggggtttttgaaaatccgggcctttcccctttaaattgggggggcccaggattttttttaggggggggggaagaccgggtttcggggggaaaatttttaaagggggggaaaaaaccttttttatggga

SEQ ID NO: 598954 - DNA, 277 bp, Homo sapiens
aggtgactctgaggatcccccccgactagcctgacaggacagttaatgtagtacttccacactcccaaactcagtgagcctataaccttaaaggagggagcatttgctacacaaaaagcactattcacaggcagggatgattgtagcccacaaggaataaataaaggagaaaggagaccctaggaattcatgttcctttacgcctcacaagggacgaaaccctgggaagctggttgggctagccatctacgccggaatattgtacacccttgtcggg

SEQ ID NO: 598955 - DNA, 266 bp, Homo sapiens
tctcttggagacaccaggcatacagactgcggctgccaaagccagctcctccacatgcgcacccagtgcaccactgccccttgagctgggacactggagatgctgctgaagccagagcggctgaccccaggtagcctggctgagctggcactgaaaccccggcggctgctgctgtggctcctgatggtggtggatgtgctggccatggttccaggagatgagagggcttaggagagtgtgagaggctggaggcgagagggaggaga

SEQ ID NO: 598956 - DNA, 252 bp, Homo sapiens
tcccttttttaaaaaaaaaaaccctttttttggtttttccttttcctttttgggggggggggggggggggggggggcccccccaccccttccggaggggggttttccttttttttttaaaaaggggggggggggcaaataaaatttaattttgggggggaaccctttagggggggggaaaaaaaagggtttcccacccctttttttttttttttttttttttttgggaaaaaaatgggcccggccccgggga

SEQ ID NO: 598957 - DNA, 709 bp, Homo sapiens
tactatgcctagaaggaataatactatcgctgttcattatagctactctcataaccctcaaacccactccctcttagccaatattgtgccttattgccatactagtcttggccgcctgcgaagcagggggtgggcctagccctactagtctcaatctccaacacatatggcctagatacgtacataacctaaacctactccaatgctaaaactaatcggtcccaacaattatattactaccagtgacatcgatttcccaaaaaaacacataagttggaatcacaaaacacccaagcctaattattagcatcatccctctactatttttttaaacaaatcaacaaacaactatttaggttgttccccaacttttcctcggacccccaaaaaccccctcctaaatactaatacctgatcctacccctcacaatcatgggaagcaaagccaatttatcccaggtgaaccactaatcacgaaaaaaaattctacctctctaatataaatctccctaaaaatctccttaattataacattcacaggcacaaggaactaattcattattatatcttccttcgaaaccacactttttccccacggggtgatcactcccccggggggaccagccgaaagctggagcggatatttctatttacaccctggtagggcccccccctatcaatgggggtgtaaccccccacccctggctaa

SEQ ID NO: 598958 - DNA, 157 bp, Homo sapiens
gcgatgctaggcagagcatttgtgcaagtcggactgcactacatcatggttgatctactactgttgaagatcctagtggtgtagctgaaatcttaacaaccaagatttgctcagtattgggacagtctgtgaaccatggtttgagaagctatgggtt

SEQ ID NO: 598959 - DNA, 170 bp, Homo sapiens
ctctcatgagagtaaagcagagggcagaggagtgagagggaggggggtcgcgttcacttcatggcttaccggatgctgattggacagaccagatccagtcggttcatagaagcccgtcgccgctggtggcgcaggttgccggcaatgtaccagcttccagctggcgatag

SEQ ID NO: 598960 - DNA, 6440 bp, Homo sapiens
aaatactgctgcaacgagacggagttccaggcggtgatgcaggcgaacctcacggccagctccgagggttacatgcacaacaattacaccgccttgttgggagtgtggatctatggatttttcgtgttgatgctgctggttctggaccttttgtattactcggcaatgaactacgacatctgcaaggtctacctggcacggtggggcatccaaggacgatggatgaaacaggacccccggcggtgggggaaccccgctcgggcccctcggccgggtcagcgggccccacagccgcagcctcccccaggcccgctgccacaagccccacaggccgtgcacacattgcggggagatgctcacagcccaccgctgatgaccttccagagttcgtctgcctgaaaacgcttttgctgtgcctcaggatgggggagatgagatctgaagcacccggtgcagcctccgagaagaacaacttctacagagatgccagggacagccgaggtagcggcggtggcacaggaggaaatgctgcctgtgcccaaagcccccttccgcggacttctaagattaggagcaaactcaggggtaggggctgggggtgcaggggaggggattctgagccacctgtccgcaagcaatagtcctattttgggctggtggcttctgagaggtgactcattgtggactcaggatgaccaagacaaagcaactctggctgattccagccaggaggattgaggcctgtgagttatacctgtggttgaaaaccgaagcttcccttgcccctgctccctccagtagtggccccttggggctatttgtgtcagaatattgaatgtgcgtgtgtgtgtgcgtgtgtgtgatttggggtgttctttttgtttgcttggttggttggtttttattggggcttcccccctcaagttctctgatgggcatgagtcaccctccggctgggggttctcatccgtgtcaatgtccgagccgcaagcttattgctaagcacagggtacggcccctctgtgtctcggggagcactggggatttgaaaatgccagtcagggttgtttcttacagaattcgttcctgtaacaatagtaatactaagggctgcatctcaggctgaccacagggcaggtgccaagttaagtgttttcatgcactccctctctcaccacctgggaggcaggtatgattaaccccctgcagaaaaactcacagtggggaagcggtgccggaacccaaagtccaggctccaactccctggacgtgacatgctcgccagccggggtacaccctgcacaatgctgggagcatctccttgatgcctccaccatcaccgcctggagcgctgatccactcagcacattctggctaagcatctgctgtgtgccaggccccgtgctgggcagtgatgggaatgaaagatgagttagatctcatctctgcccccggggagcctcccatctggtgggagacacagacacgtggatctttgctggaaagggtaacaaggccatggaaacccaggcaggagcgttctagaaatccatccactttcaagtaggacttccatgcccgtaacatccacccaccgagctaatcacccccactcctgccccgctgccctgggacacctatgagatggcatcacctaaatcatcacaaacatctccaaaggccatgctgccagtgtagacacactcattccatgggtgttagtgataccaaatctcccccagctcttagctcgggaggccctgcttgatcaatgtgtgtgtcctctgacgcagtttcctcatttcatcagacctagtgttctcacactgaccacccatccattcaccagacacgacagtgagcaaggcaggtccctgctcactgtgctagctttctagctggggcaggaagacagtgaagaaggaaggtggcgaaggcagtgagtgctctgccgggaactcagtgccaggaactcagttcgagggacacgtgagtgagacccttgtggacctggggtggtctgggaaggccgccttgagcagatgattgaagcccagatttgaatgacacacaggagccagtaatgggcgttaaagataggaaaagagcattccaggcagaaggaacggctagtgcaaagatcctgcggcagccacaggcttggtggtttcaaggaagcacaagaaagccaggtggcacaagaaagccaggtggctggggacccagagggaaggcagaaggagatgagggtgatagtgcccagctctgggctctgctgtgagtcaagctgtgcaaacacaatgtcctgcctttggaaaagcagaacaaacttgctagggcataaagcatcctccattctgcctggctgtccatcctctcaacagccccatgaagaaggggctctccccattttatggacaagaagacagactcagctgggtcaagtggcttgcccaggatcacacaggtcagctgtggaagacccaggcccctggcttcagtctttgggtccagctgtctcctccaggcagtgctgccagtgtccaggcatatggcttggcaaagtgggagaacctctgcttggggtctcgattggagaaaggaatggcttcctctcccctgatgtgagccgtcccagggccatgttgccgtaagggggtgcacagcctgtccactagcccagctgcggaagccacagctgtgtcccacgtgcagtgcctcagaaggcagaggaagccttgaggtgggggcccaagacccagattctgacatcagctctgccactgagaacagcgtgacctcaggcaaggtctgttacctcagtttccccatcggtaagaggaaggagtcagatgggtatttaaggagtttgcaaccctcgtgtcctgctgtcctggacaatgctctgtaggtgcttcctctgccaaaaaggaactggtggccttgcctccctctcctggacacctggggtcaaaggtcactgccaaatagacagctagaactggggttcacctaagcatcccttgagatgtacaaccttctaggaggacattcctcctgcctgcccccctccccgcaagaggtcttttcaggaataactgaaaaacccatggggtttgtggtcctgctgctctgccaagtccctcttgggcagctgggctgaggactggaacattctgtggcaagcaggaggcctcagcagagatcaccaagacccagcacacctggtacagacagcctgcggcaaaggcaggtgcagagtgcagacagccacggcatcctccttcctgcaggtcacccccacgagccacttaacctctcagagcctctgcttctcacctgtcaagtgtgtgaggtagggtaccagttagtcacggtacttgctgtctcacagaggagccgacaggtgagaacagtgtgcatgtgggtgtgaacactcagtgtggaaagcaggtgtgtgtgtattcaatcccccaatggtgtcaagggctcctcaaaatgccatgggtccccaggtcattgtgataaacactgtccccatcctgctgtggttgtggctggaaggtccctcaaggagtagactgtccctgagaacaagatggatgcagggtagtgacgagttcaagcatagctagagttactgttttttagcaactcaacctgattttttaagctgcctacttttactttttactgtgagcttctgtccatcaccatgtaatttgtaataataataatacaaaaagaaaaacgagagagagaagaggacaagatgtccacagaggaatctgcattcgaggctgtttgcagaactaccgcgtttgtaaggactgtttcccactgggaactgtgtgtaattaatgagcagttttatgctttccctctcgtctgtgtacggtgtgattgttgtgtgtttcagaatctctattcagaaccaatagctggtaatgcctgctggctcgctgccctcaagttagcctctgaacgtgccctgcacctagagaagcagccttctcacccgcctcacctggctgctccagcggccaggccagccacctgaccatgaccattgctgatgtgcaacaggccttaattgaaaaaacacacaagtacatacatgcacatgcgcgcacacacacaggtgatttcacaggtagatctggtccctcttgctgtctccaatgctctagaaagcagcaagtaggcagctgacagtgttcccagggtgagtggcatctcccctcatcatcagaaagattcagtcaaattttggcccagagctgaagaggaggacttgggaatgtcagggaaaacatgacagggctaggggttaacaggcttctttggccaggagatggtttccagttcaccgtcaacccaaaagctctcttcaggtcatggcaaacagaccagggctgtgggtgtggctgtgcttggcactgactcccccacaggccgctgtccaggttggctcaggattccagctgccatccccaggcaggcccctccgctggctcggctgctttcacaatcaccatgtctgtctattagagactgtgccattcaaggagacggggtccccgggggtgcagacttgtaaaattttttaatttttcaacttggctgaactggtccccatcaacaggaaaagccttcggaagtgaatttacagatttctcccatgtttgaaattaacataacatgaacccagaaggcagagcttgcagtgagctgagatcgcaccagtgcactccagcctgggcaacagagtgagactctgtctaggtaggtaggtaagaaggaaggaaggaagaacagacctggatggagttattgggaacatgtcttatcaatgttgaagggccccctatcactgtagggagacatccacgtgggttgttttcgtctgctgtgaaaatctagggttggaatcatggaagcaaactgcaggaattcttaatcatcctgctcacgtggtgggcatcagagggtgtctgcttggcccccacagcactgggacagtcagagaggccatgagtggatgacgccctgatcactgccctttgcagtccaggaatacctcactgggctggggccataccctgtgccctctggaagacaagcctgcgcacttactatgtgccagatgccatgcacagtgccctagttccttgctgtagcaccaacacgtcccacgctggtgcttaaatgcacgcaaacaactttggtggttgtggcccgaaaagctcaaatgttaaagttaagcagtcaggcaagctagaagaggtgaggagcctcctagaaaactcattcgatgacacgcgcttccctcacctattcagatacttgccgagtgcctgccacttgcctggccctgtacccagggcctatctgggagccattcctgctatagctgggaccacttgtgaaacggctagttgtgcctaacagacatgctcagattcacaaaatgaattcagaacacttacctgtcccacccgtgaaagtgaccttggaggtgtcattgccccccaccaccccagtttctagtccaagccaacagctggtgctagatagatgcttgatgaatgagcagatttgactgttagttactctgtacctaaaactcctatctttacatcaaagccctgacagatttgcccttgacagactgaaatccggggctgctgcagggttcacctccaggaggcaccattcacgacactgtcccataaatggtaatgggctcccagggatactgtttacatagactgcactgagaacggtgacccttaggtttgtacaatgaggtaccctgttgaatgaccctaaaccagcctccaaaatgtgcaggatcccacattggtcagcgccaaccctgagcacaggatctaaaactatagatgatatggccaccctggccacagctggaaccaagctggtggcccaagagagagcctcttcttggaattgcatgtcagtttctcatacgcagtttcttcctatttttcccatttcccgttttaaagctagtggcatacctcacagtcaaataaccaagtggtcagtgtctcgacaatgtgcagtaacgaggtgggggctgcaagggtgaggggctcagtcaccttaacaaggcaggagacctcccacaaaaggctgatgtgtcgtccccagggccagctggacaagggcatgcagcgcaggggtagggggatggaaatattttctctcccgtaaactctgacttcatgtgagcaggcatggggtctccctgagagctgataaccgggaaaaccaaaaccaataatattcctaataataatactagaatgtaagaataatcatgtgtttttcactgaccgctgttgctctgcttttgtctttatatacagtagtttttataacaatgtccctaggttttaataaaggagtgtcatgtc

SEQ ID NO: 598961 - DNA, 153 bp, Homo sapiens
gtgatgctggagggggacaagttgaaagtggagccgggagatccatgggggcctggagaccctccgccttaagcgtccaacgtgtggtacaacgtaccctagggtaacgagcccccgtagcaacgagtcccaacaatagtaaaccaagacgag

SEQ ID NO: 598962 - DNA, 171 bp, Homo sapiens
tgagatcctgccattgtactctagcctgggcgacagggtgagactcaaaaaaaaaaaaaatttcggtgacccacaaaacttttagaatccgataaaaggatgatttccccccaaactttattcttcccttctaatggctgtggagtttaatccccaaatgggggtgttggg

SEQ ID NO: 598963 - DNA, 418 bp, Homo sapiens
ggtcgaccgggattcgtcggaaaagggattacatgtacaaagtagatagcagcattctcagaagctgctgtgtgatgttgcttttaagtcacagagttgaacattccctttcatagagcaggtttcaaacactctttctgtagtatctgggagaggacatttcgagcgcttttaggcctatggtgaacaaggaaatatcttcccataaaaactggacagaagcattctcacaaactggttggggatgtatgtcctcagctaacagagtacaaccggtctttggatacagcagtatggaaacactctttctgtagaatctgcaaggtggatattgggatagctctaacgatttcgatggaaacgggaatactttagtataaaatctagacagaggcactctcagaaactgcttggtgat

SEQ ID NO: 598964 - DNA, 264 bp, Homo sapiens
tgtagccctggctggattatccacttaaatactccttgtctggctgagatagatccacttctaagtactagcttgtcctggctggatgatccacttatactagtgcttgtctggctcggatgatccacttaaatactagcttgtctgagctggatagatccacttaaaatactgcttgtctaggctggatgatccactttaatactgcttgtctggctggatgatccactttaatactgcttgtctggctggatgatccacttt

SEQ ID NO: 598965 - DNA, 116 bp, Homo sapiens
cggatctaaccgatagccgacagggctgaggggataaggcaggaggatgcatggggcctgtgtgtgaacagagatgaagctggggtcagaggtaggagctgtcgggctagtcgggg

SEQ ID NO: 598966 - DNA, 173 bp, Homo sapiens
  misc_feature (51)..(51): n is a, c, g, or t
  misc_feature (66)..(66): n is a, c, g, or t
  misc_feature (84)..(84): n is a, c, g, or t
  misc_feature (137)..(137): n is a, c, g, or t
  misc_feature (156)..(156): n is a, c, g, or t
gctgggtatcctccaatttaattctgacactatttggagatagcatcagancccacaggttgagtnctcagtccccaagaccgnccaccccctagacaccagtgaactagtcaatggagcccagagctgtctatctntggagaagagctgtctgtnaggcaggtgtatacaga

SEQ ID NO: 598967 - DNA, 424 bp, Homo sapiens
  misc_feature (61)..(61): n is a, c, g, or t
  misc_feature (177)..(177): n is a, c, g, or t
  misc_feature (182)..(182): n is a, c, g, or t
  misc_feature (185)..(185): n is a, c, g, or t
  misc_feature (209)..(209): n is a, c, g, or t
  misc_feature (211)..(211): n is a, c, g, or t
  misc_feature (214)..(214): n is a, c, g, or t
  misc_feature (219)..(219): n is a, c, g, or t
  misc_feature (227)..(227): n is a, c, g, or t
  misc_feature (237)..(237): n is a, c, g, or t
  misc_feature (246)..(246): n is a, c, g, or t
  misc_feature (251)..(251): n is a, c, g, or t
  misc_feature (256)..(256): n is a, c, g, or t
  misc_feature (275)..(276): n is a, c, g, or t
  misc_feature (282)..(283): n is a, c, g, or t
  misc_feature (290)..(290): n is a, c, g, or t
  misc_feature (297)..(297): n is a, c, g, or t
  misc_feature (300)..(301): n is a, c, g, or t
  misc_feature (304)..(304): n is a, c, g, or t
  misc_feature (307)..(308): n is a, c, g, or t
  misc_feature (312)..(312): n is a, c, g, or t
  misc_feature (317)..(317): n is a, c, g, or t
  misc_feature (324)..(324): n is a, c, g, or t
  misc_feature (331)..(331): n is a, c, g, or t
  misc_feature (364)..(364): n is a, c, g, or t
  misc_feature (367)..(368): n is a, c, g, or t
  misc_feature (375)..(375): n is a, c, g, or t
tacagttcagctcggtacccaggaacagctatgacatttcatattggtactgtgtgaattntaaaactcatatcatttggcccagcccatactgcccaagacaaaacttccagacaattctgatgccatccagttttgttcttacaaactgcatattagaaaaaaaaaaaaaaaaanatctncanggtcctaaatgtgatgtgcccagngngangcttntcagagcnggacgtgacntttatgtcnttganaagcntcgattatccaggtccttnncctggnntatcctngaccagncanngtnctnngggnatatngcttccnccagganatcaagctcaaagtcttaattcccaatctcagnatnncggacanggtcaaaagcctgggaggacgctagggttctggtgtaaaccttgtccaa

SEQ ID NO: 598968 - DNA, 349 bp, Homo sapiens
tttttcattataaaacataaaatattataaaagttgcaatttttttaagttaaaaaattcaaaactggccaggcacagtgggtcacgcctgtaatcccagcactttgggaggccgaggtgggtagatcacctgaggtcaggggttcgagaccagcttggccaacacgatgaaaccctatctttactaaaaacacaaaaattagccaggtgtggtggcacacccctgtaatcccaactactcagaaggctgaggcatgagaatcacttgaacctggagacaaaggctgcagtgagccaagatcatgccatcacactccagcctgggcaacagagtaagactctgtctcca

SEQ ID NO: 598969 - DNA, 285 bp, Homo sapiens
cagggaaacactatgacctcttatatcttttagtggattttttttaacacctcagacaaactgcaatatgatacatacacagcatttaaataggtggtcaggaggttgtcaaaacaaatgccagagcagagtgtgcatgtgcacgtctgcgtgcgcttgcgcgcgctcgcgcgcacacacacacacacacacacacacacacacacacacagtgtgttcggtcacacagacatcactctgcagcacagagaaaccacgagaagggaatctcaattcatacaattt

SEQ ID NO: 598970 - DNA, 567 bp, Homo sapiens
  misc_feature (40)..(40): n is a, c, g, or t
  misc_feature (562)..(563): n is a, c, g, or t
gctctgctaagagatgtccaaggcggcggggggcaagatncttccagactcatctgtcagagccccaagccctttagacccagagcccaaggaccatgcctttgggacattaggactgcagcctttgcttctgtgtattttggagttttggtgacttttgtcacctggacacactcatttgttagccatagtgggttcccttggtcagcaacagtgcatgtacctctggatgtcatctgaggtgagaccaccgaggccttttctctctgtgtacagaggggagttaggagttgctggactggatgcattacgaggactggggacagggtagagggacatccagggatcagggcatgagtgggggcaaccccccggcctctgccctggcatggtctccgcatgggctgaggtgtagctgattggctgccacatttcggccatgctggctggcgtgcccatgttgcagatattttcccgagttccccagaatggatggtattgaatctcagccacatgcaacactgtgtccagcattctttgcaataaatactttttaaaaaannaaaa

SEQ ID NO: 598971 - DNA, 426 bp, Homo sapiens
  misc_feature (421)..(422): n is a, c, g, or t
tcccctgttgctgcccgtgtccacacaggaatgtacactggtggcagaaacatgcatttgccataaataacagtgcatgtacctctggatgtcatctgaggtgagaccaccgaggccttttctctctgtgtacagaggggagttaggagttgctggactggatgcattacgaggactggggacagggtagagggacatccagggatcagggcatgagtgggggcaaccccccggcctctgccctggcatggtctccgcatgggctgaggtgtagctgattggctgccacatttcggccatgctggctggcgtgcccatgttgcagatattttcccgagttccccagaatggatggtattgaatctcagccacatgcaacactgtgtccagcattctttgcaataaatactttttaaaaaannaaaa

SEQ ID NO: 598972 - DNA, 278 bp, Homo sapiens
ctattgcatgggtaatctcctaaatattttaagttaatataaatggggaaatgtggggaaatagctgggcagacccagagttgttaagagttgcaatccaatctctgacaaactataaagacctttaaggaaaggataaaggtttggttgcatgctggcagaaaagtcatagctgattcactacttaccttgtatgctgtgttatcatgcctgctcctgttcggctatcgcccattcgcctcgtatcatgatagctaggcccttgagaagggggaccc

SEQ ID NO: 598973 - DNA, 87 bp, Homo sapiens
ggcacgagcttgaaggcagccacttgacactaatgctgatgtcctgaacatcggtcacttgcatctgggatggtttgacaatttctg

SEQ ID NO: 598974 - DNA, 367 bp, Homo sapiens
cacagtagtgaaaccacatctctactaaaaatacaataaaattagctgggcatggtggtgtaatcccagctacttgggaggctgagacaggagaatcacttgaacctgggagacagaggttgcagtgagccaagattgcgccactgcactccagcctgggtgttaaacacagcgagttctaagtttctcttcaaagaatcagtatgtcagtatgttcagttctttgttctccattttcaagtttaacttccttgtactcttcatctctttgcccctagtttcagtaaacaaccttcccgccagttctaatcagtagttcacatctgttcccctggtcacctgctctgtcctgatttccaccttgcca

SEQ ID NO: 598975 - DNA, 206 bp, Homo sapiens
tatgcagcgcatgtcagagggtgtgccttcggtaacctctgggactcagacgtgaaatggggctattcctagtttaattgctatagctattatgattattactcgataagtattgatcggtaatattggttatggttcattgtccggagagtatattgttgaagagtatagctattacaaggattatcgatgcggttgctcgcgtt

SEQ ID NO: 598976 - DNA, 849 bp, Homo sapiens
gccctgatgtgatgccgtcctgcgcggtctgtcgctctggaggcagcgtccttttatctccgtcgcgcctgctctccgtacctaagtgcgtgcgccacccgatggaagattcgatggacatgggacatgagcccccgtgaggcgcccagaactatcgttttcggtatgtgaactaggaggccgaccaaagattagtcactctaaggtggataatgatgaaagatgagcaccagtgatctttcagaagcggcagttaggagggctggtgcaaaggatgagtggcacattgttgaagcagcaggcgattgaacttacgagaggccgtccaagtgaacagtatacacctggcaaccttttgaagagagtgtctgtacagccaaaggtttcccttgggggccttggaaataaggcaccaccagtgattctaacggtggacgcgtggttcagggccagtgcagtataggggacagcacttagtagctgtggaggaagatgcagagtcagaagatgcagaggagggaggcatgtgaaactcttacgtatttcgggaacagcggtctgtccctgaaaggtggtagcaaggtcccataatgattaaagttaccactttgtcgctgatgaagatggtgaccgatgattgctgaggatgttgtggaagaagattatggatgtgatgatttgaagatgaggaactggagaaaaaggcagtggagaatttatagaggatttccagcataaggtcggagcaatcccctgtaaaattgaggtttttacgcagttaatggaggattttatgaaggaacggttaaacaaggctattttacatatacattggggaaaaagggggtc

SEQ ID NO: 598977 - DNA, 128 bp, Homo sapiens
  misc_feature (58)..(58): n is a, c, g, or t
actacctttattccttagtactcattacatcttccatagtcactgaattttattcttngtcagtgcggcttatttaaatactgactgtatggaaaaattaaaattatggtatccttaataaaataaca

SEQ ID NO: 598978 - DNA, 255 bp, Homo sapiens
agggtgggtccaaagacgataccaatggttctctgcatacataagattctcctttgcgtggagggtcactctctttagatgtgccatgaggtacctggagtgttaccgcagttgagcagtgtggcagtaagtttcatgtgcttcatagaagggttcccaatttgctcattccggatccataatttggggcagatatctaataaaacttaggggtaaggcattcatattgtaatggaggtggaattgggcaaatcc

SEQ ID NO: 598979 - DNA, 1577 bp, Homo sapiens
  misc_feature (1577)..(1577): n is a, c, g, or t
ggaatgccgctccgagtgcggaagatgaggacgacgaggactactgtgccctatgtgcctgttactgtgcatgcgcctggcatgctacttgctccagaatgctgctgcagctgaagactgcaatggtgagcttgcggaggaatgacgcatgcatggacatgctggtatgtgatacccctgtggtgagatgatggactgagcatccctgctatggcccttcatgtccaagctgttcaagcactcctgcgattcatggcagccatggcaacctttacaacgatgaatgtgcttgacatgctgctggcaaatgatgtcttgcctaagggcacgcaagcaagcttgaaacagtgacacgacacgcagaacagaactccctggaacgcagatgatatgacctgaatgaggcctctgaaggccacttctggactggtccacgcttgacacgggagcattgggcctacaggggtgcactttaccgttagttgcattgaacccccagcttcaaaaaagccacgtctgggaacatccacaacaccaccggttcaagtggctgcccgtggacggccgattgttcctttggaacaaaggatgctggaccaattgcaggtcctgccagattgccgtgtaccaggaacaacataagcccatcatttccctttgtaggttggtgaaggtgagacgcacgcgcggatagttcccacagaccaaggccacaacttccgaagtctgcacagcctatcccaagaatggcgaagacatattggagaagcgggttctgccccgtttgctgagaggtcgacaagttccactctggaacggtaagggggctccttagtacacgtaagacgaaacagatggggccacattttcgaagccaactgcgcccaatgtgaaagcccccaatgtttccgaatgagagttctcccgctgggtggagcattttccgcacccatacgcccaaaaattatccttaattacatgtatgtggccctaggatgcgaaccactattggactttaaggggcgcatcattcactggacgtttattagcacaccggtagggggtgttaccacactgcaggcacaaatgaaacacaatccatttgagggtattctgattccaacactggtttattgcgcccctgaggttcataagtcccatgtttgcgtatccctatgcggccatttgggcaaaacccacatgtgaccggaaccaggcgacgtgcgtttaaccacccactgttctctttcccaaacgacgcgcacaacagaacgtggatcggcgccccatttaactagtggatagcatgtcacaagttaactatcacttagggcacacacatttatcgcgagtgggaagacgttatgggagcccactggggtacaggatacacatgtatgtggtatatctcttaatggagaacaggatacatacacatgtgcgtatgccattgagtatctgcactacggatagagacaaatgcgttacaacacaattatcactgtgagacgtatcgtgtagcccctctaattagagaaattatggaggatgaacactatagccatagtgttcgaaan

SEQ ID NO: 598980 - DNA, 231 bp, Homo sapiens
gtatcagaggattcataaacggagctggaactcggatggcatgaagtcaggctggaggctcggatgcagatgagcttccaaagggagtttgaccagtgcaggacacctaccagcacctaccaaggacagcagcgggcagcatgtggacgtgagcccctaacagacagcgcctgcagctcctggagccttttgacaagtgggatgtcaaggaccttggaggacctgcagatc

SEQ ID NO: 598981 - DNA, 523 bp, Homo sapiens
accgcgccacaccccacttatttatcttctcccccccctccattatccaattctcactcctttctctctctcttcactcctcccctacccccttctttcccctaccctaaatttcacacctccatattctcttctcccaccctcaaatccccaccaactttcactccccaaccacaaaacctaaccccctccactccaccctttctctattaatattcccccctcccctatcctatctccaactcttcctatacttcccctccccccctctctttaactcaccacccttatcctactacttcacctcattatacctcccctctatccaaacctcctacaccccaccttcctcacttcccccaccctctatcccccccccaacaccctactacatcaccactccatctcctctctttcccctcactcccctcatctcctcccacctaccaccacatactcttcattcccctaccctctctaactcaatctatctactacctcatatccacctcacctctttcct

SEQ ID NO: 598982 - DNA, 117 bp, Homo sapiens
tggaccgaggctaaggctttcaggagagttagaatctcatagtaaagactgagaaatttagtgccagaccaagacgaatgggtgtgtaggctgcatttctttcttactgcgtacaca

SEQ ID NO: 598983 - DNA, 198 bp, Homo sapiens
ctcagggtttcgatgatgatggttcagaatttcatgaacatatatgtatctggagaaacaccgtggagagcatttacaaaacaagcgaccaatctcgccaccttcatggtagactggagactttggggcctttccaaaaacccatatacttagcgttaaacagaagcgctgaacacatcagagcgggtgagaaatcca

SEQ ID NO: 598984 - DNA, 228 bp, Homo sapiens
gtgtgcagtgaatcactaagttgatggctccttacggcagccacagaaaactaacagtgaggagggagcactgcatttaactgagtttacaaaggaaatatctgaaatgcagaggagtgacatgcccaggcttactctgatgattttaaaacaagtttgcaaattccttgacactcttcttaaaaaagatggaatcaaactcccctcccattgcaacacggtctctca

SEQ ID NO: 598985 - DNA, 122 bp, Homo sapiens
ctggcttctcaggtctgggtggggtgaccccaggagtcttttctgtctggttcttgctctgttttctgaaaaccagcctttttgtcctccaacaggttttgtcaatgagtcaggaaggagaa

SEQ ID NO: 598986 - DNA, 210 bp, Homo sapiens
aaagggcacaggtagcttgcgccctgtaaaagttgccccctggtaccttgatcgctgtcggagctgaacaccatctcccagagtcacagctctggacaccgaccccagccttgactcagggccccgccctctcccttggtctgtcgtgcccctttaggaggccgcctccctgccgaggccaggctgccgcccgcatctgccagtcccgcc

SEQ ID NO: 598987 - DNA, 143 bp, Homo sapiens
gagaccggcgggtgctgcggcctcagcacgagttgacgccgtgtgatgcgtctgctcctagagtgtgtgatcgtgtcttacctgcgtactactaccccgagtaagtaacctatcttgccaccgggaataccacctacgaaaaa

SEQ ID NO: 598988 - DNA, 525 bp, Homo sapiens
catgtgatatgtagagaggtagtgtgtgtgtgtgtgtgtgtgtgtgtgtgtgtgtgtgtgtaagtatatatgatgactatcatatcaggtgaatctgtaggaatccttaggacacgattgtgttagtgctggccacagatattatgcttatctctaacaaatgacagagagttccaccaatggggaaacaaattatctacattttaaaaatgtagtttccatgatctggcaggtagcgtatacattatagtgcgtgcccatccaacattacgcttagtagatcacaagtggtgtaggagaggagagaagatgactatgatgaactaactcttttcccgttgatgtagagcaagggcaaaaagcagacatatttccccatctgctccctttcgggggagcgctaaattttcacagctcatgtctctctctgagggggtacgcccctgagagtgtgctagctgtgagaaagagttgcgtcctccaagtgcaaacaaaccccaggccgagacatctttctccagagtg

SEQ ID NO: 598989 - DNA, 165 bp, Homo sapiens
  misc_feature (26)..(26): n is a, c, g, or t
  misc_feature (53)..(53): n is a, c, g, or t
  misc_feature (74)..(74): n is a, c, g, or t
  misc_feature (137)..(137): n is a, c, g, or t
ttggttgtgaagggaaggtaggaaangcatgtagtggaaatggtcagtagacnacggtagagggaagctaggtnacattactggggaacagctggtggagcctggggttacagcatggggagaaatggagatggagnacaggacagctggtttttacagaggatc

SEQ ID NO: 598990 - DNA, 477 bp, Homo sapiens
aaggctgacttagagttatcccattggatagcggattagggccgacaggaccgagggccttagttggtgggcaagtcggggatcccagaaagagaagcgtgacccggaagcgagaaactgggtgtccgccccagctccgggctgccagtagagcttctaccatcatggagctattgtacgggcgccggaagacgccaagagaagctatctgggcagacaccgcagagggccctgaaccgtgccatgcgtgagctggaccgcgagcgacagaaactagagaccccaggaggaagaaaatcattgcaggacattaagaagatggccaagcaaggccagatggattgctgtccgcatcatggcaaaagacttggtgcgcacccgggcgcatattgtgcgccaagatggctaatggatggcggcccaacatttccaggctggtgtcccttaaggatccagaacattcaggtccacaaactc

SEQ ID NO: 598991 - DNA, 1515 bp, Homo sapiens
gccccctctcacgccaaccccggccccagccgggctgcagagtgctgctgatgcgctggtgagtactagattgcagtgatacaagaaggtacatggtagagatagacaccactaccccactcaatccccacagatctacgacacatagggtctgactcgaagtcgcacgctctggatggacgcgatgcctagaggggtaggtgagctcatggaaggtgcccataacggaaacggcttcgccagtgcggtcgcacgtgtgttgtggcacggtgagactctaagagagacatgggactatgacagatgcgctggtgaagtcttgctcgcaggtctgtcgcatgaccacttgtcgcactagatggtgaatcgcaagggatagaagatgatgctagttgatgctcacatgtgtagatcaattgtgctgttgatctctgctacatctgttgcgtacgtaccgttaagctcgattcgtagagcggcatatttttgtgtcacgcccaaagtggatcatagggtggggccatcggctaacggattttcaccgtaaatataaagaggtgggacacaccaaggtccgccaagggaacactaagcgctctccattgggcccctaaacctttatcagaacagcagcaccctacccctttagggagtacccccccatgaaggcttccttattggccttttgggaatcttgtccctaaccatgatgaaaagggcctatgtggagacgcaggggggtatggtgtaggaagggtgtcccaaagggggggccagggaggcgctccttagggaaccaataccattaggagttgtagtgaattacacttagacaccggcggggtaggccccggcctggtggagttctccccactagagtccacccacgcgtctagagggcaagtgctccccggaaaggtggcgggctaaaaagcctcggagaaacctcttcccccttgttaaagtcaccaaacgggtgaggacagaattgcgagcacacgtgcgaggcccaaggctctccaaagggggggggaatggccgaaccaaaggtcgtgctgcaagaccaaaaggccacggtagcgaatagaacggcacattggccaaaaagcagggttacatatacacgctgatgaggagcaccaactgctaccaaccctgtaggaatcctccggggtggcgcccatactcgctttagcaaccgcgcccattttcgttttggatttgaccaccaccaaagccggaatcgggggtgccggaatacttcgccgaaaattggggagagacgacaggctgtgtgagtgccacttatttggagccattaaggtggcgcaatggcacgggcacattttggatccccccttatagacaagaggattcccccccattattcacccgatgaggggtcgtttataccccattgggttttataacgcgccgtaggaggtacatatatatggtcatatgtccccatttggtggcggagagactaaaacaaaagccatataaaatgtgggg

SEQ ID NO: 598992 - DNA, 858 bp, Homo sapiens
  misc_feature (51)..(51): n is a, c, g, or t
  misc_feature (73)..(73): n is a, c, g, or t
  misc_feature (75)..(75): n is a, c, g, or t
  misc_feature (101)..(101): n is a, c, g, or t
  misc_feature (109)..(109): n is a, c, g, or t
  misc_feature (113)..(113): n is a, c, g, or t
  misc_feature (149)..(150): n is a, c, g, or t
  misc_feature (157)..(157): n is a, c, g, or t
  misc_feature (160)..(160): n is a, c, g, or t
  misc_feature (170)..(170): n is a, c, g, or t
  misc_feature (173)..(173): n is a, c, g, or t
  misc_feature (176)..(176): n is a, c, g, or t
  misc_feature (179)..(179): n is a, c, g, or t
  misc_feature (195)..(195): n is a, c, g, or t
  misc_feature (200)..(200): n is a, c, g, or t
  misc_feature (207)..(207): n is a, c, g, or t
  misc_feature (219)..(219): n is a, c, g, or t
  misc_feature (222)..(224): n is a, c, g, or t
  misc_feature (230)..(230): n is a, c, g, or t
  misc_feature (232)..(232): n is a, c, g, or t
  misc_feature (237)..(237): n is a, c, g, or t
  misc_feature (242)..(243): n is a, c, g, or t
  misc_feature (245)..(245): n is a, c, g, or t
  misc_feature (249)..(250): n is a, c, g, or t
  misc_feature (252)..(252): n is a, c, g, or t
  misc_feature (262)..(262): n is a, c, g, or t
  misc_feature (265)..(265): n is a, c, g, or t
  misc_feature (275)..(275): n is a, c, g, or t
  misc_feature (279)..(280): n is a, c, g, or t
  misc_feature (282)..(282): n is a, c, g, or t
  misc_feature (286)..(286): n is a, c, g, or t
  misc_feature (288)..(288): n is a, c, g, or t
  misc_feature (290)..(290): n is a, c, g, or t
  misc_feature (292)..(292): n is a, c, g, or t
  misc_feature (301)..(301): n is a, c, g, or t
  misc_feature (307)..(307): n is a, c, g, or t
  misc_feature (309)..(310): n is a, c, g, or t
  misc_feature (312)..(312): n is a, c, g, or t
  misc_feature (314)..(316): n is a, c, g, or t
  misc_feature (322)..(322): n is a, c, g, or t
  misc_feature (324)..(324): n is a, c, g, or t
  misc_feature (340)..(340): n is a, c, g, or t
  misc_feature (343)..(343): n is a, c, g, or t
  misc_feature (345)..(345): n is a, c, g, or t
  misc_feature (347)..(347): n is a, c, g, or t
  misc_feature (361)..(361): n is a, c, g, or t
  misc_feature (366)..(366): n is a, c, g, or t
  misc_feature (381)..(381): n is a, c, g, or t
  misc_feature (383)..(383): n is a, c, g, or t
  misc_feature (529)..(530): n is a, c, g, or t
  misc_feature (553)..(554): n is a, c, g, or t
  misc_feature (621)..(621): n is a, c, g, or t
  misc_feature (673)..(673): n is a, c, g, or t
  misc_feature (733)..(733): n is a, c, g, or t
  misc_feature (759)..(759): n is a, c, g, or t
  misc_feature (853)..(853): n is a, c, g, or t
ggctgcggactccctcccctgcacggtggggacagccacccagagttagtnttctggggtccctctgccaaangnggtgggcgttatgcccaatcccaggntccccttntttnctcccctgggctccacgtcccaaggtcagggccacnnttttttnttncttttttttnctnctnctncaaggttttggttttnttgcnttctttnttttttttttcnttnnncttgtngntgggncattnnanattnntnctggttactnttnttttcccatnttcnntntgcntngngnccaggtctngggttntnntntnnngttttncnaggtatctggggtatnttntngnatctgctggtggcngaggnaagttcaggttggtnanggctgtgatggggccctcagcatccccaccctccggcccacccggccctcctcctgtgccgcgcccctgctgggcccgaaccagggcgttggcgctgcgtgccagggcctctgcctctgcgtctccccgcccactgttcacaaagnncccttcctcctccgcctcgggtnncccagccccggccccctcgccccacaccacctcctgcacctcagcccggatcctcagttggctcagnagtgcccgcagccgcccctcggccgccccaggcgcctcccgaggccccaggnacagggaagatccggagccgggcgctatgccaagcgggcaccatgcccaagatggttgcnatctgcagcaggaagaggccgcaganatccacatagccgggccaccccgggggcgcagcaggttgaggggccacacgtccacatggtgcagctgagaggtgccccagacccccggctcancgctt

SEQ ID NO: 598993 - DNA, 223 bp, Homo sapiens
gacagtgtcataccccaaataaagtataggcgatcacaaattgaaacctggacgcaatagatatagtaccgcaagggaaagatgaccaattataaccaagcataatatcgcaaggactatcccctataccttctgcataatgaattaacaaaaaataacatagcaaggagagccaaagctaagacccccgactacagcgaccaggctatgaacaacagagggg

SEQ ID NO: 598994 - DNA, 464 bp, Homo sapiens
cattgcatacaatagttgagttgattagcttggtgaccacgggtttacatattgtagggggaatggggaagctaccctgaccacctgtgacatacagcatttgctactatgccgcctacgccttccgcggatctaacggttccccgcctgcgcgaactgcacgcttggcgatgtgttgtactgtattgcttacccacgtgcgctcgcgtattgatatgggggggggggggacattacttttaaattacgggtgaccgcagccgcgagaataaggtagtggttgtgccagctgccctactaggccccgcagaggcccacctgccgcaaaatggaaccgacggcgtgctatgcagggccgggcgtggcggcgaatatccgggattgacttgatacgtggtatgcgaagcttacttggtttcgaatttcacccgcgcgcatacctgggcgaccacctgccgttgcat

SEQ ID NO: 598995 - DNA, 298 bp, Homo sapiens
  misc_feature (158)..(158): n is a, c, g, or t
tatatatgaactgtgtaggatggctgggtgtggtggcttatgcctgtggtcccagcactttgggaggctgaggcaggcggattgtttgagtcaggagttttgagaaccagcatggtgaaaaccctgtctctactaaaaaatacagggattagctagcnttggttgggatgccacctgtggtcctagctactcgggcggctgagggacaagaatcgcttgagcccgggaggtgaggttgtggtgagccaagatcgtgccattgcactccagcctagacgacaagatgaaactttgtccc

SEQ ID NO: 598996 - DNA, 278 bp, Homo sapiens
gcgggtgctgcctgacggtagagaaggagcactagtatgctactccagtattagagctgtacttttgtgggagttgatatagaatgggagggatgtttagtatatccagatattattggtaatatgggatatattattgattctgatcactcttggtcagtttctctttctttatctttctttctccttttttaagaaaacgagttaagtttaacagttttgtattacaggcttgtgattcatgcttagtgtaaagtggatgttgatattattttaaa

SEQ ID NO: 598997 - DNA, 153 bp, Homo sapiens
ttcatctcctgtcagggcatacttaagtaaagaagatttgcatgcagcggttcattacttcatctcctgtcagggcatacttaagtctgttcttcaggagatgaagtaatgaaccgctgcatgcaaatcgatggcaaggtccgaactgatata

SEQ ID NO: 598998 - DNA, 108 bp, Homo sapiens
ccgagcagtactgtatgttgcactcaaaaataaaataattcggtgtcgtctggatgtatacaattttggataactccagaagatgacacagtgttactttattagatg

SEQ ID NO: 598999 - DNA, 945 bp, Homo sapiens
  misc_feature (45)..(45): n is a, c, g, or t
  misc_feature (49)..(49): n is a, c, g, or t
  misc_feature (74)..(74): n is a, c, g, or t
  misc_feature (80)..(80): n is a, c, g, or t
  misc_feature (84)..(84): n is a, c, g, or t
  misc_feature (89)..(90): n is a, c, g, or t
  misc_feature (96)..(97): n is a, c, g, or t
  misc_feature (99)..(100): n is a, c, g, or t
  misc_feature (111)..(111): n is a, c, g, or t
  misc_feature (117)..(117): n is a, c, g, or t
  misc_feature (121)..(121): n is a, c, g, or t
  misc_feature (123)..(123): n is a, c, g, or t
  misc_feature (129)..(129): n is a, c, g, or t
  misc_feature (131)..(131): n is a, c, g, or t
  misc_feature (134)..(134): n is a, c, g, or t
  misc_feature (148)..(148): n is a, c, g, or t
  misc_feature (150)..(150): n is a, c, g, or t
  misc_feature (156)..(156): n is a, c, g, or t
  misc_feature (170)..(170): n is a, c, g, or t
  misc_feature (174)..(174): n is a, c, g, or t
  misc_feature (176)..(176): n is a, c, g, or t
  misc_feature (180)..(180): n is a, c, g, or t
  misc_feature (186)..(187): n is a, c, g, or t
  misc_feature (200)..(201): n is a, c, g, or t
  misc_feature (213)..(213): n is a, c, g, or t
  misc_feature (219)..(219): n is a, c, g, or t
  misc_feature (221)..(221): n is a, c, g, or t
  misc_feature (240)..(240): n is a, c, g, or t
  misc_feature (247)..(247): n is a, c, g, or t
  misc_feature (251)..(251): n is a, c, g, or t
  misc_feature (269)..(269): n is a, c, g, or t
  misc_feature (277)..(277): n is a, c, g, or t
  misc_feature (280)..(280): n is a, c, g, or t
  misc_feature (284)..(284): n is a, c, g, or t
  misc_feature (302)..(302): n is a, c, g, or t
  misc_feature (305)..(306): n is a, c, g, or t
  misc_feature (318)..(318): n is a, c, g, or t
  misc_feature (323)..(323): n is a, c, g, or t
  misc_feature (353)..(353): n is a, c, g, or t
  misc_feature (364)..(364): n is a, c, g, or t
  misc_feature (367)..(367): n is a, c, g, or t
  misc_feature (380)..(380): n is a, c, g, or t
  misc_feature (382)..(382): n is a, c, g, or t
  misc_feature (388)..(388): n is a, c, g, or t
  misc_feature (396)..(396): n is a, c, g, or t
  misc_feature (406)..(406): n is a, c, g, or t
  misc_feature (415)..(415): n is a, c, g, or t
  misc_feature (423)..(423): n is a, c, g, or t
  misc_feature (430)..(430): n is a, c, g, or t
  misc_feature (433)..(433): n is a, c, g, or t
  misc_feature (436)..(436): n is a, c, g, or t
  misc_feature (439)..(439): n is a, c, g, or t
  misc_feature (441)..(441): n is a, c, g, or t
  misc_feature (443)..(443): n is a, c, g, or t
  misc_feature (471)..(471): n is a, c, g, or t
  misc_feature (489)..(490): n is a, c, g, or t
  misc_feature (497)..(497): n is a, c, g, or t
  misc_feature (501)..(501): n is a, c, g, or t
  misc_feature (504)..(504): n is a, c, g, or t
  misc_feature (520)..(520): n is a, c, g, or t
  misc_feature (529)..(529): n is a, c, g, or t
  misc_feature (532)..(532): n is a, c, g, or t
  misc_feature (924)..(924): n is a, c, g, or t
aagtttgtgattgtagactgcagatacccctatgaatatgaaggngggnacatcaagactggggtgaacttgcncctggnacgngaggnngagagnntnntactgaagagngccatngggngntgtagngnggncaagagagtgatcntnattttncactgtgaattctnatcngngggngggggnnggatgtggggttnnatcagggaaggngaccgngntgtgaaggactacgccagnctctacnacgntgagatgtatatggtganagggggcnacnaggngttcttccctcagcaccngannttctgtgaacgncaggnctacgggggcatgaaccagggggggttcanggatgagctanagnggttgggggtgangngtgggnggtggggngggggggggnggggggggnggtctgtnggggggnggnggnggngngnggggggtgggggagtggtgctacctccnttgggtttgggggggtgnngggaggngggntangggcgtgggggggtgngggggtggnggngggtgaggtggtgtccatgggaaagatggtgtgggtgtggtgggtgtgtgggccaggccagattcgcgctgtgtcatgggatgattttcggatatcctggtgccccccacccctggaagagcccagtctgttgagttagttaagttgggttaataccagcttaaaggcagtattttgtgtcctccaggagcttcttgtttccttgttagggttaaccttcatcttcctgtgtcctgaaacgctcctttgtgtgtgtgtcagctgaggctgggggagagccgtggtccctgaggatgggtcagagctaaactccttcctggcctgagagtcagctctctgccctgtgtacttcccgggccagggctgcccctaatctctgtaggaaccgtggnatgtctgccatgttgcccttt

SEQ ID NO: 599000 - DNA, 200 bp, Homo sapiens
ctctctctctctcaacaaactcagcccaacaatgtaactgttctttaactcccacctctttgagattggtataatcctcctagcttctgtgactgctagggttctgatagctgcagtcatgagagctctccggcttttggcagagtgcaatgcacctcctgataatcaagggtcttcgcttcccgtctctataaaggatg

SEQ ID NO: 599001 - DNA, 338 bp, Homo sapiens
  misc_feature (19)..(19): n is a, c, g, or t
  misc_feature (179)..(179): n is a, c, g, or t
  misc_feature (188)..(188): n is a, c, g, or t
ttttggtgccttgtgaggncttttagaaggggcgttcagctttaaaaagccggtcctaattacggccggacgcagtagcttacgcctgttatcccagcactttgggaggtcgaggtgggcagatcacctgaggttaggagttcaagaccagcctggccaacatggtgaaaccccatctntactaaaantacaaaaaattaggtgtagtggcaggcacctgtaatcccagctactcgggaggctgaggcaggagaatcgcttgaacctagaaggtggaggttgcagtgagcggagattgtaccatggcactccagcctgggacaacaagagcgaaattt

SEQ ID NO: 599002 - DNA, 559 bp, Homo sapiens
aactgccctgctgcacagaaaaagacctcatgcccattcgggtaaaacttgcacaacctcgggttcatcaggttagggaacagcccagacccagaatgcctttgtcctttgtatatcagcaggctccgaggaaaaagtttcttcttttgtgggcatgaccacagtgggcttcagtaggtcaaggttggcacttttttttgtggaaaaggaaaagcccagcctctgtaaatcatcacttcaactcctgattggtcccgggccaagctgaatagcccttaggaataatcacttcaactcctgattggtcccgggccaagctgaatagcccttatgaatcatcacttcggttcctgattggtcccgggccaaggtcccagaccaagctgaatcacgctttctccaagacagcccgcaggctaagtgcattccttccccttcccagtccataaaaaccccggaccccagcctcatactgggcaacttatttggatccccatctccactgtggagagcttttttctttcacttattaaacttttactccaatttcaaaaaaaaa

SEQ ID NO: 599003 - DNA, 442 bp, Homo sapiens
  misc_feature (9)..(9): n is a, c, g, or t
  misc_feature (189)..(189): n is a, c, g, or t
  misc_feature (360)..(360): n is a, c, g, or t
  misc_feature (428)..(428): n is a, c, g, or t
tgtcctggnacctgtggaatcatagcctgagctacaaagggacctttgagaccatcctctagtccaccatcctcttcattttacaggtgtgggacctgagctggattgaacagggtcgggggagaagaggcctgggcaggacaggccacctgggatctcatcctggcccttgccagccactggctgagntgaccttcagcaggcacttcacctctcagagttgctgttccttagagttatacgatgggtttggactagatggtctttaagattatagaagtatagggtcctaagtatatattattatattgagaagggctatggaaggatttatattaatcctgatgttcttcagttatncttctgtagtttcctgctatttacggttagccagtgttttacatttttaaaggatttttaatggggcnttttactaaacctg

SEQ ID NO: 599004 - DNA, 583 bp, Homo sapiens
acttcaggcagggcttgccaccagcctggcagagccccgaactcggaacccagcaatggccttccagacgcacgtcagctaccgcgcgctcacactgcagggccccacaagaggcctcccagtgtgcgcgggcctcttgaagaagtaactctactcagaggcccgaatgacccaaactgggctctgggaggctggggacggccttccaggccaagtggggcgcgcgcagggctcagcggggcccaagagaagggctgagggcactgggtcctgagccacccaccgaaggacgccgcgggacagcaaggcccgaagcaggaggagagaagggagcagattcctgggcctcctggggcccggtcgctccgggatgtctgagctctgggaggggcgtgcccggggcgcctccctcgcggggtattgtgggatcacgagtcactggcgacggtgggtcaggactacacttcccaggaggctgtgcgcgccgcgtggcgcctgggagttgtggtccagagcgcgggcgcggcgggcgcggcaggcgggcgcgtggactacgcatcctaggatgccgcgcgcggccgct

SEQ ID NO: 599005 - DNA, 364 bp, Homo sapiens
ttacagcgagacaccgtctagattagttatgatgtggtaaaacatcctcgtccctttgtcccttatagacgaacatttttttttcttgggaacggacatcttgctctgtcgaccagagacatgaagtgcggtggcttaatcttcagctcagtgcaacctctgcctcccgggtacaatcaattctcctgcctcagcctcctgagcagctgggactacaggcgcatgctgcgacgcccggctaatttaattgtattttagtggagacggggtttcaccgtgttagcccaggctaggtctcaaaactcctagagctccaggcaatcttacccaccttggcctccccaaaagtgtataggaattacag

SEQ ID NO: 599006 - DNA, 397 bp, Homo sapiens
gtaggtaatcgctgactcggaaagtacgggattagaggtgtcagtcaccaggccagaccctaaaataggtggaatatatattctggacactaaatacttaacaatagatgatttgcaaatagttctcctaagagtttgctagttttagctcttatatttaggtcattgctccattagagttctgtttggtgggtatatggtgtgaggtaggggttgaacttcattcttttctctgtggttatccagttttctcaacagtgtaggttgaagacactattctttccccatggaatgtacttggcatccttatcaaaaatcaattgaggataagtataagggtttatttctggactctgattctgtcagttggatggaaaaagtttccatgtccagtgaa

SEQ ID NO: 599007 - DNA, 175 bp, Homo sapiens
actgcaccttcaccaccagagaaccttatgccaaaccatcctacccaaaatatcgtataggacggtaaatgtacaaataccctgggcggaaattaatattattagtaccccgaaggggagaaatgttgggaaaattttttatcccccccggaataattattagggcgggggttaa

SEQ ID NO: 599008 - DNA, 199 bp, Homo sapiens
  misc_feature (69)..(69): n is a, c, g, or t
cttagaggatccctccagtgcgaataaaatggtacgttgtgaatatgacttctcaattacccaaatcangctacaaagacatggcatgtgtgtgggaggaaagaagattgagtgggcggagccttgtaggtaccaattctttctgacataaaaaaaaaaatagcagtccgtggggtgcagggggaaaattcttgaagtc

SEQ ID NO: 599009 - DNA, 265 bp, Homo sapiens
ctgggggagctttaaacgggggaaaccctggttttcccagatgctccccatggctgtctttaaaagactcaaaacttttttttgtcctctttgttaaggttggaagctccccccccccccccagtgtgttgagttttttcaaaaaaacctttaaatgtggttcataaatatatgaatacgtatttgtgttaaacagtgagtgtgcagtgtgttaatacttttaatttttttgctagaaaaataaagtttcattcccttctgtgga

SEQ ID NO: 599010 - DNA, 271 bp, Homo sapiens
  misc_feature (204)..(204): n is a, c, g, or t
aaaaccaaaactgctcttctagtgccaaacgccctgatcatagcaacagtcacagacagggtgagtatgcagccgagcgagggcatctttgctttgtcctcctgctctgggctctgctgcctaaggggtctcttgccaaggaccaagactccaaaccataaatatcatctcctgtgggtgaatcagggaaaattccataaggantaattttaaaaattattggcctgtaggacatttcatgtagtgctgtttccctttcacagggtgattt

SEQ ID NO: 599011 - DNA, 1077 bp, Homo sapiens
  misc_feature (1077)..(1077): n is a, c, g, or t
tgcagttagaatcgcgtttgcgacgaaatgattgggtgagtgggatctcaccgtgggtccgatatagcctttggtctgccttgtttgattgaagctcccagtggaattcgcaatattggcttggaggggtgaatgtgctgtgaagagggatccggtgataaggaccatagacaatgaggggttagcccgcttgcgaataagtggccggtttgcaggtctctctagttggaccggtattctattcggaggaccgtaaaaatctcagtgacagacctactccattgggtcggttgttgccctcgaacgtggccgtttggtagtcgccggcggcctcccattccctgagttttcaccttccacgcgtgcggagtggtgacctttaaaactgctggcctgagcaacgttgcaactgcagcaagtattcttagaccggtttacacggggtatatttagctccccttcgggttagcattgtgcatgcttttggcatactttccgcgtggcggctatagaccgtagcttgggttctacttgcaatacatgcggccataaccaccattctgcctgttcggcgatgatggtaccatgcccacaacatttcaatcaaacttctccttgagtgtgccatcggcgatacggcacaatcgggacgcacttgtgctacatggatttgccttgaatgcccgttgggtattcatcgaggcagtcctatggtactttctaacgcaggtctgcaccggtgatgtacgactccctcagcgggaccgtgttctctctcgtggtgagccaatgccacgtttggtgccttgttgggaaatcctatttggcgcagtctggaaagttacattaagttgttacaagcaaagcaaagttatttgcatttccgctttacaccatatttgatgtgccctgtggctacacgaagtcagtgcttcgagcaggggggtgcaaggtcgctctttcaccacctggttgcttctcatggagccgcaggttgtcacacctttggttggccgacacattcctcgggtgtgtgcaaggtttctcgcacaaagaaatgtgtgcgcggcgagttan

SEQ ID NO: 599012 - DNA, 172 bp, Homo sapiens
aataactttaaaaaaatatgcatcttttaggcgatccaagatagccaccagttaacatggaaatatgtagaacttttaagggtcctgagatcctggagatcttggttaaattggtgaagattaatggctttggaaatccataactagcttggcttctggtcttctgataata

SEQ ID NO: 599013 - DNA, 169 bp, Homo sapiens
gatcatgtctagatctgatcaacctcccattcttgggctattagagtgcacaagaaattaccttgaaaaaatggaattcagtgactgaccagtctaggtaaagacagatgatactgtccagcatgcatgcagttccagagagctcaaggtcgtgattccacatttttgt

SEQ ID NO: 599014 - DNA, 357 bp, Homo sapiens
aaaggggggggggggggggggggggccccccttttccccccaaacccccgggggggtatttttttttttccccttccccccccccccccccttttttcggggggggggggggggggcccccccgtttttttttctcggccccctttttttttgggggaaaaaggggggttttttaccccccccccgggcccccccccccgggaggggggggggtttttttgggccccccctggttttttttttgggggggggggggttttggttttttttttttttaccccggcctttttttgggggccccccccccccccattttttcccccgttttttggcccccccttaaagggtttttgggga

SEQ ID NO: 599015 - DNA, 1092 bp, Homo sapiens
gcaggagttccatgaccaggctgggcaaccatagcgagaccctatctctaagattacccagaagagagaaaatactcttttcttggagaacggagtctagcatctgtgtgcccaggctaggcattggcacgcgcagcgaatgctaggagctgccactcggggcacttacttgcctcgcacgaagtgcacagtgatgctcctcgcctgcagcctcctggggtcacgctgggattcacaatggtgcatagccgacccacagcctcggctcacatttgtcgtccattgaggaagtcaagaagacggaggcttgtcgaccagaagagtgggaccaacggctggggcacctccgaggactccgtgcacgcgtcaggggtagagtgccaccacaaggcgtgcagcacatcgcgcgagaaaccatagagtggaggatgtaacgagggccgctgaaggccaacacgacggcgccaagagccaacagagaacacaatctccgaacgcagggcaagctacacacacaaggtggagggcactcgggaggcaccactgggggacgcgatctgcggtagcccaccccgagtagggcacgacccacgacagaggggccaacaccactcccggcgggagaaaagaatagccaggacgtgaggaaacaaggcgaaacgcagggacactcccgtcaggagcggcgaaaagaagcgacgcgagtgaggaacgagaagctaagaccagaagaggagacacaagcccccggagaagggagaatcggaacacttaccaacggaggaaagctggaaggactaaccaagagggaagagacatcaccacgagggggagggtggaagacacagccacacagcggagaagaagcaaagggcacacccaagcggagacacttgccgaaagagaaactaaaacaagccaataggggcaaaccacacccccgacacaaggtcggaacagcccaacaagaccacccgaggatgaaagaggaaagacggaaacagcaggggaggtaaaagtatgaccacacactgcgcgaacgcaccaagaactggtaccagaagagaacaacggacggagaaagggacagac

SEQ ID NO: 599016 - DNA, 828 bp, Homo sapiens
gcactggttgttgcgctgagcagtgcgggtcggtgcaggctcgcttgactcattgccgcacctaggtagagtgatgctgaccctcttgcctgttgctttgggagcgcattgctccgaacctcgccctatttgacctgggagagatggagaaggactgcttcattgatgcgatcccgtatgttagcacgcgtcgtaggaaattaccggaactcaggtgtctaacagtccacgcacattagtacccgcgcgggcctcccacggcgcattgcgggtatgcgtaaaagataaccggacgcaatatgtgatggtctatcccgtgggcccgtccgtatcgcatcctgagggctggttccggtcagcgcgttcacgcatacccccgtgttaatcacactaatcgtagtcttcatatccagagtcagccctgagttaatcccatcttttggcgtggaaggtcctgctgtaggatttctcatgagactagtccaacagatagggtagagaccagttgtgcaagtgaggtcttcatgagaattgctgcgtcatagaagatggttggttgaggtcagctagctcgttacgcaacttgcagagcacgtcttggatggaacagagtggacgcacgactcctgaccatgagccacgaactaccatggagggcccgaagagtgagccagcttttgcgggctacaccagtaagagcacgctaaccacgcgggtagctgtcgctgtggatactgccgacacctcattcgtcgatgaacatcgggtgtctgacctatgcgggcacctcgagacttctgtgatgccaataacgcttgtgtcctgtca

SEQ ID NO: 599017 - DNA, 209 bp, Homo sapiens
cactgacaggggacagtccgttcaagagagactagagagaaatgaatagtatgagtagcgcatcaggagaaactcctactaaaaagagaggaattctttaggaagatggaagtgaatcaccagacgaaaagaattggcccaagaaaatcgagttctgcgcttattacgccggtctcgcaagatgtagcgtaatgagccgtggttcccac

SEQ ID NO: 599018 - DNA, 159 bp, Homo sapiens
aattcgcggccgcgtcgacacggtgcgagaagacgacagaagggggctactcaggaggctgaggcaggagaattgcgtgaatctgggaggcggaggttgcagtgagctgagatcgagccactgcactccagcctgggcaacagagcaagactccatctc

SEQ ID NO: 599019 - DNA, 188 bp, Homo sapiens
ctcggctccagcgccatggcccctcccaggaagttcttcgttgtggggaaactgtgaagatgaacggggcggaagaggagtcttggggagctcatcggcactctgaacgcggccaaggtgccgccgacactagtgtttgtgctcccctactgctatatcgacttcgccgcagagctagatcccagatt

SEQ ID NO: 599020 - DNA, 230 bp, Homo sapiens
gccaaggtctgcgtgtgccaggcggtctcgaactcctggagtacatgatcctccacctcggcttccgaagcgctgggattacaggcatgagccgggtgctcggcagttgctcttaatttagacctaactctgataaactttgttatctgggttcttagccaaattaattttatatttaggaaattaagagcattactagttaataactggagctgtcgggctagtcgggg

SEQ ID NO: 599021 - DNA, 346 bp, Homo sapiens
gctcgacttttgtgttttttgagacagagtttcattcttgttgcccaggctggagtacagtggcacgatctcggctcactgcaacctccacctcccaggttcaagcgattatcctgcctcagcctcctgagtagctgggattacaggcgcccaccaccatgcctggctagtttttctatttttagtagagatggggtttcaccttgttggtcaggctggtctcaaactcctgacctcaggtgatccaccagcctcgcctttccaagagtgctaggattacaggcgtgacgaccgcgccctgccatataatctttttaaaaccgacaatctataatttccgtcgacg

SEQ ID NO: 599022 - DNA, 689 bp, Homo sapiens
agcgggtccttgcggtgctgggcagcagaccgtccaaaccgacacgcgtggtatcctcgcggtgtccggcaacgagactaccaagacagacgctatgactgaggctgatgtgaatccaaaggcctatccccttgccgatgcgcaaccgtcacgcaacgtaaggcataactgcgacctcgattcagcaagttcatgtagactagtaatgcagcgttcggaaacggagccgaactgaggccactcaaatactccttcaatcagggagcgatctctgatgttcatcgtgatggcatgcagactgctcgagccgactggagatcattgctgcacctgccgctgctgtgtgaagacgagaatgtgaccctacgatgatttagtgcgctgccaagcaggaccctggggagagcctgtggggtctccaggcctgtcatcgcctgttgctgtgcaccatctaaagaaggctcgcagctgagaacagcagatccaatccagttcaggcagtcgaatggaaaggctcttaggtctaaacctgtggacctctgcgcacggtgctccctgccaggcttcccccctgaggttgggtatcatattatctggtgttagcatgtagtattttcagctacgtctctattgttataaaatgtagtactaagatctgagaaaagtgagtgaaatgtctccaagcgccg

SEQ ID NO: 599023 - DNA, 385 bp, Homo sapiens
acacaggaacagcaatgcgggaaatcgaccataatcccatcactcccacaggtcctccctataacatatggggataacaattcagcatgagatttgggtggggacatggagccaaaccatatcaccaaactcatgtgacttttcagatataagcagtacaatgaatagcaaatatagcagaatatccaattttgttattgcatctatacagcctccaaaatactatgcacttaatacagggcaagtcaagaacaaccactccagtcgtgtacctaggaatccaagccacaccagaaggaatgtctttcaaaggtaccaagttttgacatttgctccaattaaaaaggtttctccggatgctctggaggtattccaaataagtgtc

SEQ ID NO: 599024 - DNA, 123 bp, Homo sapiens
ttatgggagtgaaggtgttgtgtcacttgagcttggcagctctggaaagtggtagatacttcctgaaggccagcgcttgtggagcttggcaggggtcagtgtagtagtgtagcgagccagtgc

SEQ ID NO: 599025 - DNA, 519 bp, Homo sapiens
cccccaccggccaggcctgtcttccccactggtaaacaagggggcgggagacaggggacaagggacagggcgctgagtgcctgggagctggacacacagccacatcgaggggcccgagaaagtcctcacgccccagcaggtgtggcagcagtcagggtgcacgggacctgcccacacaggtgcaggtgaactaggaggtggcgcgtggccatttcctccttttgcaggacagaccaggacgtggctgataacacctgccccggcaagacagggtttctagaaaaacatgctttatggtcagaaaaagtttggagtcattgaagtagcggggtagtgggaacctacacaccggatcccagtatctctggagttttgagggctgctggggacccttgctgtcagaaacatgcctggtgtggacccgtgagcagaaggaaatgtcgtccttactgctgcattctgtcctgtctcctcgggcagctctggaccagatgaagaccactagggtcaggcgtggat

SEQ ID NO: 599026 - DNA, 356 bp, Homo sapiens
gctgcactcctcctcctgcatgctctcaaggcaatggactaccactggattgagaccttgcagagtgatacaaagcgggtgcgaaaggttctctggaccacagcctcccgtcatgacgctatgtcaatcctaaacagagccggattctcaaccccttcttcatggagattgcagctgacaaactgctgagccgctctatgcacctgccacagacgattgagcagaagcccaccacgggcctgttggccatcacgctggcccactatctaagcaccagggctgacagtggacgctttgggtaccgcaacacctactaccagaagcagaccattcactactatgagcagatcacgctc

SEQ ID NO: 599027 - DNA, 244 bp, Homo sapiens
tatattcaccggagcgaggcctgcatctgtggctgtattgataagaacttcatacgttccttctactgtgatcttgtatgaaaaggtaacatcaaatcaaggcatagattcacgtaaccctcagtagtgtccagtatcatgatgtaattcaatccgtactagggaaggttgatgagaccaaagtgggccaacttgtgcacactgcccagactgtggacataggggtatctaccacaatagtagg

SEQ ID NO: 599028 - DNA, 362 bp, Homo sapiens
ccgccagtctcgtgatatctgaacgacactgccactgagcgaggagatcctatgtttaatatggatatgacctgtgactggcttccgaaacccaacatttttgcttcatgcaatgagattgtgcactcctacctccctgtcatcctggacatcattgtaggacaaatgagccgtcctggggaggtgtgctctgctctcctcctctgcgagtctctccagaagctccttgcttagctgaatcaccagaagctgctagtgtcctatctgattccagtagctggaccttattcaggttgtggcccccttcatggccctcatccctctcctcctctatcctctggacggtccccgtctagccccag

SEQ ID NO: 599029 - DNA, 413 bp, Homo sapiens
ggccttatatatcacactattgtagaaagtattatttaatttaaatggatgcaggttgtctactaaagaaagattatatataactatgctaattgttcataatcaacagaaaccaagatagagctacaaactcagctgtacagttcatacactaaactcttcttgcttttgcattataaggaattaagtctccgattattaggtgatcaccctggatgatcagttttctgctgaaggcacctactcagtatcttttcctctttatcactctgcattggtgaatttaatcctctcctttgtgttcaacttttgtgtgcttttaaaatcagctttattctaagcaaatctgtgtctactttaaaaaactggaaatggaaaaaaaaataaatctttgccaaatccttcaaaaaaaa

SEQ ID NO: 599030 - DNA, 200 bp, Homo sapiens
  misc_feature (5)..(5): n is a, c, g, or t
  misc_feature (123)..(123): n is a, c, g, or t
  misc_feature (152)..(152): n is a, c, g, or t
  misc_feature (177)..(177): n is a, c, g, or t
caccnaaacaaatgtatatagggggaaggtttcacaagcatgtcatagggtcggtaaatatgcagcatttgaaatatacattgacttaaatgcaaatagtcaggctgaagctctctgtaaagnaaggtacacccacaaaaggcaggcctttnctggagccagagaaatgtggttgtntttatattagtggggcagaatta

SEQ ID NO: 599031 - DNA, 1085 bp, Homo sapiens
gcagtggaatcgcttgaacccgggaggcagagttgcatgtgagccgagatggcgccattgcgctcaacgctgggggacacgacgcgagacttctccaaaaaaaaaaggatggtaaaaggcccagtttattttgtgtcccccaagaaccggcaagagaaaaggcttataataggatcagagggatcatagactggcgcacgacagaagagggtaccccttctaaaggggggtcacctcgggcacatttcccacttcccacctttccagggggatatcaaccctctatacaataacctcgtgggcatacgagcccagggacatattttccattccggtgtacacacaccaagggacattattccatacaggctggacctggtactggtaacgacacctaaggggcgcgcggaacaggcggacactgcggcggggcgccctacaaggactcggcgtaacgcacgaaccggcccgacgacgacgaccggtaatctacaagcgaccggcccgcaggacggacgaactaactaaggcaaacgggcacccaatagggtcccacagacagactccatacttgggcccggaggtttattctaccggggtgttatgtacggtatcatataccgcaggggtgttttcacttaaaggttacagcacgacacactcacggtgttcccacgacgatccccacctaccgttcaactacacttaactaacattttcaacatacacgtacggccctcacatcttacgtattccgtgaacaatcctaatactatcttcggtctaaccgggcaagtcacacccttggagcaaaggcgggtgaaacccaacgcgaggccgggtgcttagacctctgcggccttcgacgtttcggaactggtatctggaagcccgcactctcactcttgtgcttcgcgcaaacaacttggaacgagaaggggtctttatcataatacacatacacgcatccctatctgctgcctccgactacccctacaccatgagaatcagcagatcatgctaccacgctacaccagatgcagatcatgcacgcacactgacgtcacgacgagctatgacgatgg

SEQ ID NO: 599032 - DNA, 1633 bp, Homo sapiens
  misc_feature (347)..(347): n is a, c, g, or t
  misc_feature (1309)..(1309): n is a, c, g, or t
gaaaaaaaaaaagcagagatttaccatgtatcagtgccgggcttttggttataaagcttgggttggtctagtgctctttggctataaaatagactgtagtacaccctagtaggaaaaaaaaaaactaaactttaaaaattaaaaaatatatttgggcttattttccggcaggagcaatcctttttataccagtgaattatttacaaaaaaattgtgtcagatttcgtgaattattttctttctttggatagatttttgggaattcatttattgagttaaaagtttgtgttactttattttaaactattttaaaagagtgttattttataccatgtgtgtgtttaccnaaggattgaaactgtgatatgtgggatagcattttatgggttgggtcttcttggattatgggttattggattatagggtatattgggtaataaaagatggataggctcgcaagcggaggaaacatttcttgtggcgacgtggtacaccattagccgtgacagccctcttacaaacactttaaaacacacaactggggtctcacacaacacagcaacaacacacagcgggaaacaaccattttcctcaacacaacagacaataacaacacagaatatgtacaaagcgagttatacaacacctttgtgtatcttacacaagagtgtgtcgtgtggactcaagaaagagtgccctatacgaaaatagttacgaccgagtgtatcacagagagggggggataatcccccgcgaaatttccgggaaacaaaaatgtgttcccaaaaacaagaggcgctttgcatggttgcccgggagaagtctcacccctttttacacagacgaaagtacataacacaggacgcagaaaaccccagcaatgaatcttagtgcgagctcgacaaaggggcgcaccaaattatacaccctatggtgatgtttaaccccccactatagacgtaggaaggaactaaactataccagcaactacgaagacgagactccctaaagtgggcaaccaattattgaaacccgggagttattgtggtaacgaccaatacataatgggtgtggcccccacatgtttctgatagaataaacgaacggttgtggattcattgatgagacaccaccactgttagtgtctctcaacacatagctcaacaattggagggcggattagtgggacccacatattttatgggactcatagtgagaaactactacactccatgatgcggtataggacttaaaaacagcaggccacctatctatgaatatctgacaaattaaacccacagagggtttntatgcgcagggttcttgtacaacagcagatgtacacaaccaccgaagctgatttactaccaacaataaattgcacatcaaaactacatctgttggcaagtggatcgagagcggcacaactagtatgctatctccagcgaaaagaaagtgcccctaatgattaaaacggccacaggcagtacttagtctccaaaccaaaacaggaggcggactcataagaaaatccacagggggccagcagacgtgcgtaccaccggccttttcaacatagtcacctatgtagacgaaatataaagacgcgacgatgctatcatcgcggaataga

SEQ ID NO: 599033 - DNA, 107 bp, Homo sapiens
acatcattcctaagaatcaaacccacaagatgtcaatctgcttttactctacaagaaaacttgctgatttgctgtcttgcttgctctctgtgcacgacaggccaaaa

SEQ ID NO: 599034 - DNA, 175 bp, Homo sapiens
cacccacagcctaattattagcatcatccccctactatttgttaaccaaagtcagacaacaaccctactttaggctggttgcccgcaaccgttgttccgtccggacgcccacgtgaacaacgcccgccgtccgtaagtacgtagactaacctggaactcgcgtaccccgtccaag

SEQ ID NO: 599035 - DNA, 146 bp, Homo sapiens
ttcgacctgttttgttgttttattttcttcttccccaggtgtgaatcaacttcttgggccttgtctctgagttggaaaaggttttagaaaatttgatgagcttgaatttgtgggataataaaaagcttttttgcccaattatttta

SEQ ID NO: 599036 - DNA, 331 bp, Homo sapiens
tgaggacgcagcaggaagaaggatgaaagaagcgcttgcctatacagctctacaatacctttctcggctctctactggaaaatcagtgctaacaacagacggcgcaggtgcatttggtacaagagctatgcagtcagcacatgatagaggagccaaagtgatcacaacagcacgcagccttgaagatgcgcagtgccttgaaagaatcagacctcccatagcacgagtgagtgatgtatctaatgagccagttcatgttgcagaaagctgatagcgagaaacaggtcgcctgataggagatatagctctagatgctgtagtgcgattatat

SEQ ID NO: 599037 - DNA, 251 bp, Homo sapiens
tgatgactctagaggaccccgtctagcctcgacaggcgggccgcagggctaagaacccggggtcttcctctcttgccttgcagcctcttactttctgaactcagctgttttcactccgcctttcaacttactgaaaagggaagcttgcagcggcctggtccagctccccagcctccccgccctgggtgggcccctttggccatccctagctcttacccctcatgcagctccctgcaggggactccacactc

SEQ ID NO: 599038 - DNA, 301 bp, Homo sapiens
cccatttttcccttttttttccccccgccccttgccccagattttttaaggggggggtttccccccccccccccaaaacccttttggggggaaaaatttttttggggggggggtccccgggggttttaaatttttgggaaaaaccccgggcccccccccctaaaggccccggggttcccccccccccgggggggccccctaaaagttttcccccccttccccattttttccttggggggggggggccccttcccccttttttaaaaattttttttttgccccaagaccccggcccggggga

SEQ ID NO: 599039 - DNA, 205 bp, Homo sapiens
acgaggaatacggggatcagtttaagtgacacgtttgcaggaatagtcccttgaatgccgattagtttaattttggaactggatgcacatatataacggctcatgagagaaaaccctggagttacgcatcaaaaacgccgtgcagggaatcgcccttttaccaaatgttgccgtgtcgaccaggtccgcattgttggagcatctt

SEQ ID NO: 599040 - DNA, 1299 bp, Homo sapiens
gcgaaacggcgaagaaagaagctcctgctcccgtcctgatgagtctgaatgactcgagatgcgaatggctttatacggccaagaaaggtaggtgtagaagagaggctgctcgcacgagcctcgacagagacaaggaatcatacgaatcccgtcacgatcactcgcaccgttccggtcgtgcccgaagactactgtcgactccggagaacagcctcaaattattctctcgggaagtagtcgctccgcaggatggaaatcgaagccttgatccaactatgcctatcaatcgaatcgatttccgagcgatgactcagcgtggagagtcctgcctcatgaaagaatgagtaggaagagacgagatccaacacacgtgttgtgttcatttggtgcgagatgttacaaggccgagatctaaagcgactcagacttaagaacaggcatgtcgaacgacacgctgttatgatcattcgattgttggccagaggtccaatcatccactgacttcgtgccctgatggaggagaacgaaggcagtatgattcagacctggcgtcctgcattacggatgctttaggattgttgccagatcaagacagttgggatcactctaaacctgagtccagtcgtgcctaagttctgaatactatagtactatatagtagtcttgatcatgcatagatagccgacatgataattatacaaaaccgagtaactcagagagtacaaagatggggactaagaaagacatgttcatcatgcggtcaacaggtgctaaaaggtactatccaagcagcaccgtgattgctgtacacacacgggagaccaactagcgaacgcacccagaatggaagcacaaaaagtgccagagacccaggaagcgcgataaccccgggaacaacaggcggaccaagggcccacaaccaccaccaccaccagacacaagcgtacacaggggaaactacatataggacaacacaaaccgcacaccccacgacacaacacacgcgcacaataacacgcgacagacgagagacaaacgaagcagaacacggacgcacatccacgacaccagaagcgccacagcacaaaaactccaccaagaccaaactaacatacaacacacgaaccacagcagacactacaacactcccacccatcctatatcaccacaacaaacacaatatcacactataactgattaacacactaccaaaaacacaccacactcacaataacatgatctacaaataaaacaatacaacaaacaactccataccaaaaacaccccccccgcccagac

SEQ ID NO: 599041 - DNA, 393 bp, Homo sapiens
agaagagacaccgataaccactacagaggagcgagacatccccccagacatcttgtaccacacttagccctccactagatcgtgcagaaacacagggaacgggaaagcatgaggaacactctcgggactggaaaaacgtcaacagagatcaggtaatccaatcatcccaaactgagaatctaccgcctaactgatccagctgaagacagccttagcgttcgttctcatctgtataatggggcataatatcttctataaggatgcttacaattctggaataaaataatgcatatgaaagcatctgacatgggtaatgcactcactaaaactgggtgaacctggaaattctgcatttattcaataaatattacgtgaacgtctacaatatactag

SEQ ID NO: 599042 - DNA, 417 bp, Homo sapiens
ccaaatgcccaaaggggtttttattgaaatgaaaatttaattttggttttaaaaaaatggttatccttatttattttgggggaaaataggaaggttttttagaagcccattttcctaacctgataaaatataggtttggttggtagaaaaggtggtccttaaaaatgttaattggtggccccccatggtaataattttgtaagaggcttccaaatggttttacgggggaacccccccccctgaaaaaccaaaatcgggtgctgttttgcttctttttcccccttatttttggattgggggcctttcccatgccaaaaaaggagccaacccctggataggtggagaatttttttaaagaatgagatggttatatattaacccccatttttttttgggaaataaaaagggccccaaaga

SEQ ID NO: 599043 - DNA, 308 bp, Homo sapiens
cctaaaaaaaaaccccctggctaaaaaaatgaaaaccaccccgtttttttttttaagaagatccagtagggccccgcccagtttgaagataaccaaaccaaaaaagctcaatcatttttaccaagtttcgccccatgcaagaattcagtttatagcccccttccccagataagcaaataaaattcccgaaatttgagataacgggctttttcttcatttgccccaaccaaaatatccccaaaaaatggacccatagatccccaattatcagagtttccagagttcaagagggggttcttttgaaatta

SEQ ID NO: 599044 - DNA, 1677 bp, Homo sapiens
cgggggttttgatcttcttccccttcttttcttccccttcttctttccttcctccctccctctctcatttcccttctccttctccctcagtctccacattcaacattgacaagtccattcagaaaagcaagctgcttctggttgggcccagacctgccttgaggagcctgtagagttaaaaaatgaaccccacggatatagcagataccaccctcgatgaaagcatatacagcaattactatctgtatgaaagtatccccaagccttgcaccaaagaaggcatcaaggcatttggggagctcttcctgcccccactgtattccttggtttttgtatttggtctgcttggaaattctgtggtggttctggtcctgttcaaatacaagcggctcaggtccatgactgatgtgtacctgctcaaccttgccatctcggatctgctcttcgtgttttccctccctttttggggctactatgcagcagaccagtgggtttttgggctaggtctgtgcaagatgatttcctggatgtacttggtgggcttttacagtggcatattctttgtcatgctcatgagcattgatagatacctggcgatagtgcacgcggtgttttccttgagggcaaggaccttgacttatggggtcatcaccagtttggctacatggtcagtggctgtgttcgcctcccttcctggctttctgttcagcacttgttatactgagcgcaaccatacctactgcaaaaccaagtactctctcaactccacgacgtggaaggttctcagctccctggaaatcaacattctcggattggtgatccccttagggatcatgctgttttgctactccatgatcatcaggaccttgcagcattgtaaaaatgagaagaagaacaaggcggtgaagatgatctttgccgtggtggtcctcttccttgggttctggacaccttacaacatagtgctcttcctagagaccctggtggagctagaagtccttcaggactgcacctttgaaagatacttggactatgccatccaggccacagaaactctggcttttgttcactgctgccttaatcccatcatctacttttttctgggggagaaatttcgcaagtacatcctacagctcttcaaaacctgcaggggcctttttgtgctctgccaatactgtgggctcctccaaatttactctgctgacacccccagctcatcttacacgcagtccaccatggatcatgatcttcatgatgctctgtaggaaaaatgaaatggtgaaatgcagagtcaatgaacttttccacattcagagcttactttaaaattggtatttttaggtaagagatccctgagccagtgtcaggaggaaggcttacacccacagtggaaagacagcttctcatcctgcaggcagctttttctctcccactagacaagtccagcctggcaagggttcacctgggctgaggcatccttcctcacaccaggcttgcctgcaggcatgagtcagtctgatgagaactctgagcagtgcttgaatgaagttgtaggtaatattgcaaggcaaagactattcccttctaacctgaactgatgggtttctccagagggaattgcagagtactggctgatggagtaaatcgctaccttttgctgtggcaaatgggcccccg

SEQ ID NO: 599045 - DNA, 499 bp, Homo sapiens
  misc_feature (128)..(128): n is a, c, g, or t
  misc_feature (258)..(258): n is a, c, g, or t
aaacgccgccttttccttggggtgtatttgctacttatgtcctatagatttcaggatattcttcagggtataccaaagcccgagagcagtgctgctttctcaatgtgtctttttcttttttgggggcnagggggggggatggagtcttgctctgttgcccaggcggaggttgcagtgagccaagattgcgccattgtacttcagcctgggcaacaagagcaaaactccatctcaaaaaaaaaaaagagaccgggcgcnggtgtcacgcctgtaatcctagcactttgggagccaaggcggggagatcacgaggtcagtagatcgagaccctcccggctaacacggtgaaaccctgtctctactaaaaatacaaaaaactagccgggcgtggtgcgggcgcctgtggtcccagctactcgggaggctgaggcaggagaatggcgtgaacccgggaggcggagcttgcggtgagccgagatcgcgccactgtactccagcc

SEQ ID NO: 599046 - DNA, 215 bp, Homo sapiens
atcacacctttgaacgcgggcgcgggctgttgtttgggaagtgcgaatcgccctcttctcccggatgctgcacgttgacgaacatcgtcttgtagtccggggtgaaggtgatgccggtcagttcgcaggacttcggccccaccatgaaacggcgaatttcgccgctgatcggatcgcccaccagcatctggttgttgccctgcccggcgtaatcg

SEQ ID NO: 599047 - DNA, 760 bp, Homo sapiens
ttacgttctattgcttccttggaagatactacattggtccccaccccctcttgtactccatacactaaatgtgccccctccccactcgttccctcaattaataggcgtacacacgtttttcccgcccacaaattaccaacgtgcttcaccgccctcctttccgtgtgaaaaacccctcgcgggattatactttacgagcagattataaaaacctggcccccacactcatctctgttcgccttctcaactccggcgatggtttgtaaatatataccctaccgaccgttctacttctaataggaaaaaaatgttctctactgttaccactaacacccccctaccttacttcacctgctcccatgttgcggcacgccacctatgaaatccttcgctcccataaaaggaggtttttatattggcgacacacacaaatgcgcgcacacatcctttttgaggttatcctaccttcagaatgatatccttctctcctatgttctttataaaacgcccaccccgcttggctcttaataataacccactcgtcctgtaaaacatgattccacaccactctttgtataatgcattacatgttattgcaaacatatacttcttacatcgagcctgtgtatctctccccacttatggaactattgtcatgtgattgtatatctccccgcgaggcaatttattaacacttctgctatccgccgcagggatttcatcacttcaataatttcatccgcaggtcttccacaatggt

SEQ ID NO: 599048 - DNA, 935 bp, Homo sapiens
ggaaagagctgatgcgtcctcctcgctgggcctaaaccagtccagaccgagaagtgagaggagagggtgaacctccacccaggtgaaagggagggatggaaagaagttcatggggtgttgccatcctagtgcaagcgatgtagtgctgttcaagaaaatgaggcttatgagtactgcgaactggcattctattagatttgacaagaaaggtttttgccgaagtccaggaagactgtgtagcatgttggcaaaggagggaaaagtgcgcaaggaaagtatgctgtgcggaacaggattgacaggagtagaagcgtgtacggcaggagcgccaccgtggaatgaccgttgaagaatattagttccagtgttgctgtggaatttggcgctcctgtattgccgttgagtggtcccggacccgctctagcagcgcatcctggcagcttgcaggactagttgtgtgcggagcagcggagtcgtaccacagccagttgcagtatttgacagccccgttccccagccagaatagagctttgagtttttttgttggatagtggagttagctcgtttccatggcttacaggttgctgaaaagtaaattgtacctgtaaagaaaatcatagcaagctcagcagtccagttggctttttaagaagttctgtagcttccaagtttataagtgaatactttcttagattttaggtaggaggggagcagaggaattatgaactggggtaaacccattttgaatattagcattgccaatatcctgtattcttgttttacagtttggagttagaaagtttaagcatagtaattcttaagtcttttgtctgatttttaaagtagctttcttataaatttggatcatgttatgatttgtaacattcacacaacacctcacttttgaatctataataagacttgcgcgtatgaga

SEQ ID NO: 599049 - DNA, 102 bp, Homo sapiens
  misc_feature (89)..(89): n is a, c, g, or t
  misc_feature (96)..(96): n is a, c, g, or t
ggtgccaggctactcctcccgcagtgtgggtggttccgaggctgactaccctgcggcggagcggatcaaagaaattccctcatggaccnggcttgngaggag

SEQ ID NO: 599050 - DNA, 427 bp, Homo sapiens
cgctgatctagaggatccttaaacaccgcaatctggacctggatagcattattgctgaggtcaaggcccagtatgaggagattgccaaccgcagacggacagaatttgagtcctggtatcagaccaagtatgaggagctgcagcagaactgctggccgggatggagatgaactccgcaacaccaaagcatgagatctctgagatgaaccggatgatccagaggctgagagccgaggattgacaatgtcaaggaaacagtgcgcccaatctgcgagaacgccattgcggatgccgagcaaggtgtggagctggccctcaagggatgcagggaaacaaagctgggcagagcttggaggaggccctgccgaaaaggccaagcaggacattgggccgggctgctagcgtgaataaccaggagctcatgaac

SEQ ID NO: 599051 - DNA, 235 bp, Homo sapiens
acagccatgtatatctgtggaatactcaaggtgtacaccgtttgactacagctgcagaagtgttcctttagcacaaagtagtgacccattttactcgggactaagggcagaaacggttcacattccattattggaagtagttatactccggcgcttaagctagtttagtgcctgggctgaatccagttacatgaaaagcgttttaacgttaggaaaaacaaacaaaaacaaaacc

SEQ ID NO: 599052 - DNA, 271 bp, Homo sapiens
ccccaaggagaagaccggaccaatgaaagaaatcaaccttctcctgacagctcatccgtggttgtatcaggacttatggtggccaccaaatatgaagtggagtgtctatgactcttataggacacttttgacaatgcagacctagctcagggtagttgtcacctactctgcgagagatgtcagtcccacgcaagcaaggggctcgttgtgacagattgctactgatgaccaccccccaagggtaaagacacgtcggcggtatacgtattaa

SEQ ID NO: 599053 - DNA, 217 bp, Homo sapiens
gcatttgaaatcccacataaccattgaagttgcaacaccttagctcatatctaactcctattatcagagagcccagttaaacataactttacatcagtagactcggagctttacgtggatgggagcagcttcaccaatccctgcaaaatgacttttaggaggcaacaaccacttcttcagttagaccagaggttatttggtcacgaatgcttaggat

SEQ ID NO: 599054 - DNA, 188 bp, Homo sapiens
agtgatggatccttacgtgaccagtcgtcctgacggttctgcgcccgggcgctatcagagcccagaataccgcgcgtggtaattatcagtgtaccggcaccggttgtcgacattcggcgatccatctatagtcgggctgctggcttggccgcgggggcctgtgcggcgcgtcagaaggtggtgccagg

SEQ ID NO: 599055 - DNA, 795 bp, Homo sapiens
cctctgtgtggagagagagggtcttccagctggggtgcgcgcagaagtggctcccccccagtgtgtcccctctgctgcccaatggtgtttgccccggcgccccccggcgggccctgtgtatatttttgctgtgggggagccccccccgccttctggtgaatgcgtttttggggacaaaacgcgctgttccggaaaattctgggggccccgaaggggggggacgacaaaacgcccccgggcggccaggctgtgatgtggtcccccaacgcagatgggagaccagcgccaccccagcgggtgaataaatgggaaagatgaaaagaaattttgtgggagccaaaggaaattctggaaaggttatttagttcaagaaagccaggcccttaggaaaatgtgatgaagcccgccgcggaagaaagagcccgggttcaagccatctgaatggagtccagatctcccccttccccctccggggtctctccttctactcatctgtagatactagtagtattccaccgcacctttcagacgagttagacttccggccaccttgagacaaggtgtccctggtcgtccagtttaaccggaacagagaggtgtgaacccacaccatgggagggagaggaggaattaaccgagggaatattaattaatggtctgtaaaccataccactgtggataagattatccaatctgttttagtgtaatgattgtcaacagtttaaaacctttttatatataaactgggatactcatgtccatattctttattaattaaatgtttttcagtgtcca

SEQ ID NO: 599056 - DNA, 252 bp, Homo sapiens
cgggcgcagtcaaggatagtcgctgtatactcttgcttactactcaccacaaagagcatcaagatatatgctctttgttttttttgtttggaaaccaaaactcactctgtcgcccaggcgggagtgcaagggagcaatctgggctcagggaaacctccaccttccaggtccaagtgattctccggcctcggcctcccgagtggctgaaataattgggcattgccccacatacacccgggcataagtttggat

SEQ ID NO: 599057 - DNA, 236 bp, Homo sapiens
tatcatacactatgtggcctttacgtgtctagagtgtctattaccttgaataatgttttcaaggttcatccaagctacagtatatatctactcttcagtcctttttacagctcaaaatattccattgtatgaatatttcacattttgctgatccattcatcagttgatgggcttttggattgtttcttctttattagctgttctgaataatgctgctatatgtgcggtaaaagctt

SEQ ID NO: 599058 - DNA, 829 bp, Homo sapiens
gcggacgcaagatgtgcgacggcgaccatagctctccagtgtcaatgtgccagcaacggaggggtggtcctgagccgtgcggctgtgctgtgcgtgcatgtggtggcagcggcgagacaaatggaaacctcacacagtggcacacgactccactcaagcatggagcaacgcggcagaagcacagtcctgccacagctgtggggctgccctccgcctgaactgcgccgaagcatgcatgtgatgggccccttcatgacagtgcccagagaaagctactgctcattggcatgcaggacgcactcacagaagtggtgctaggctgacagcgagacccaatcggcatgcacccaggcaggcatgcatggctcaacctaagcctggcagtgatggggcacggcagttgacaaattggggccttttggatgatcccttctctctaccctttgcacatctgactgggcggcttcaggctgtgccagctggggctgcttggccaatcattgttgcctgctgttctacgttgtggctcctatgtctacgtattgcagcttggggggcgatggggacaccactcctggccagggcgccttttgcccgcctttgggcccccatctaaagagcgatcgaacattgttcccttgcgcgactcctgtcagccatgtaacgtcacacaggtgcctttgacctttcgatggacgtatgacgcgtccccgtaagtctagcacatgcttggtcttggcagcagatgaactcgggttgatgcctgcggcgcggcagggaaccatcaaaggctgggcagatcccagtcaatcaataggggcaggcccta

SEQ ID NO: 599059 - DNA, 327 bp, Homo sapiens
tttgtctatgtactgttcttatggaatcatgccctgaatgtctgctgccgcatatgcagatgctgctcggggtcttcagtctcacctctccgttgacattgcttccctattggggaattgttccattgggttgtcctatttacacttatgtgtcgtgttaaaataatcatttctctattaatttctccatatacatttccttctgacatttccaattattgtttcccttcagtgcccccaggcttgccagcttggagtgcaaatacctagattccctgagcacccccaaggtatgactgtctcttcagtggagattttacagttgta

SEQ ID NO: 599060 - DNA, 837 bp, Homo sapiens
taaattaggggggaaaaattgggacccttgcccccaaaattccttaaaacttgtgctattaaggcaacttttctggaatattctgggggtgccggccaatgtagaagatgtttacctggagacattatttaacgcgccattgtggggacaacgaagacgacatttattaataaactggctgggtgggaaaaggcctacgctagatcgtcggtgtggtggacaacgtattagatccattttacctgttgtggattttcacacaatgacatttaaacaatgttgtggtgtaagagtggttttataaaagagagaaaaaaatttattctaacaaaagctgtttttcacacacccacatatattagggcgtggtgttaatttaaaacagggaggaagactcttttacaggtgggggcacatcttgtgggcgcacagggggggtagtatcatctccaaccactttatataggagtagaagaacaaaacaaaggtggttttttaaaaaaaagtggtgtggctacgcactacaacatgatgcggcggcacaaaagagggcaacaaaaatatactcaccacgaataaagatgatggttggggcagcctcttttttttaaaacacaacagcaagacggctcattattttgtgggcggcattttttacacaccaccattgttgggtggctgattggttggcgccacccgtccctcacacgaagaagaggttatttgtggcggggggttggtacaaccaccaccgtattatattgtgttggcacatgttttttctcccccaaattaaggagggggggggggagtggttggtcgggatgtcactccttc

SEQ ID NO: 599061 - DNA, 164 bp, Homo sapiens
gcaaagggcaatactgtgtgattccccttacattagaaatattagtagtgtagttgatgatagtagacgaaaaggtatagctgttgctaagggaaagggaggtggggagttattgttctatagggcacagagatattgggagagatagggaaaacttctgtgag

SEQ ID NO: 599062 - DNA, 484 bp, Homo sapiens
  misc_feature (18)..(18): n is a, c, g, or t
ctattccctaagtaccanatattatatagaaggatataggaaagaaccactgaagaaatttgatatttctgttttgacaatagacctacaaagcatgataaattagacctataaactatgataaggaaagaaactgatttctcctttggggggattaggttaaataggtaatggcacattaaagaactagaattggccaggtgcagtgactcatgtctataatcccagcattttgggaggctgaggcaggtgtatcacctgaggtcaaaagttcaagaccagcttggccaatatggtgaaaccccttctctactaaaaatacagaaattatctgggtgtggtggcacgtgcctgtaatcccagctactcgggagctgaggcaggagaatcgctcgaattcaggaggcagaggctaaagtgagctgagatcgtgtgccactgtactccagcctggccaacaagagtgagactctgtctcaaaaag

SEQ ID NO: 599063 - DNA, 586 bp, Homo sapiens
  misc_feature (10)..(11): n is a, c, g, or t
  misc_feature (23)..(23): n is a, c, g, or t
  misc_feature (34)..(34): n is a, c, g, or t
  misc_feature (36)..(36): n is a, c, g, or t
  misc_feature (38)..(38): n is a, c, g, or t
  misc_feature (59)..(59): n is a, c, g, or t
  misc_feature (72)..(72): n is a, c, g, or t
  misc_feature (87)..(87): n is a, c, g, or t
  misc_feature (89)..(89): n is a, c, g, or t
  misc_feature (96)..(96): n is a, c, g, or t
  misc_feature (108)..(108): n is a, c, g, or t
  misc_feature (160)..(160): n is a, c, g, or t
  misc_feature (162)..(162): n is a, c, g, or t
  misc_feature (164)..(164): n is a, c, g, or t
  misc_feature (586)..(586): n is a, c, g, or t
tgcttagctnnagcatacgtagngtagtgcactncncncgctgcgcttaggctaggcgngagatatatcggncgtactgcagtcagncnggagtangtatgccttgtngaccgcggtagtctccgcggacagtgcgtcgccccaccagccgtcggctgcngncngtcgtgctgatcttctcactacccgcagtggccgctgtttctccgtcgctcgtcgtgtagtcgtcttgcgtctctgcggcgcgtcgtgcgtatcacgccgccgcacgctgcgggcactcgtgggtgtatactcgccgcacgagaggcgtctacacagtgtacagcgcgcgcgtggcgagagctcgagacacacgcgttggtgtagtcgccctctcagatgcccagagcagcggacatgtgtctctctctctctcacacacgtgtctctgtgagcgcacggacacattacacgtgacacaccctgtagagggtggccacacggccaaggtggagtcattaagagcacggggcccgaggcccgtgtgtagagcgcctcttgtgcgtgggactctgcgcagtggctctacctgttgttggccccn

SEQ ID NO: 599064 - DNA, 168 bp, Homo sapiens
  misc_feature (101)..(101): n is a, c, g, or t
  misc_feature (105)..(105): n is a, c, g, or t
  misc_feature (134)..(134): n is a, c, g, or t
  misc_feature (138)..(138): n is a, c, g, or t
tctcccagctttacacattataaactgaggttcccaaaaggggccaggtgtggtggctcacagctgtaatcctagcacttttggaggccgaggtgggaggntcgnggagttcgaggcaacatggggagactctntctntaccgggaatttaaaaagtagccaggtatg

SEQ ID NO: 599065 - DNA, 113 bp, Homo sapiens
ggaatgctgagattttgcgtagctgtgttaggtttaatccacactcatcgcccttaccacgctactcctacctatctccccacactcatcgccctcagcattcctcgcaacag

SEQ ID NO: 599066 - DNA, 484 bp, Homo sapiens
agcggggttgcttcctcctcttccctccttcctctcctagtttcttccctcccttcccgcctactcctccctccccacacccgggccgtgccaccagtcaggccgacggagaagacacctcaggagaacccacaagaacagagggacggaaaccatagaacacgaatgacgccacaaacatctactgctaaaacagagttaccccacgaaaaggacaaccacgacgcgaacgaacctagctgagcatcgcgcaggagcaccgacccaagagacaacgaatggcagctcataccatatcctcatagaacaggctcgaccgagcaacagcgaagaccctgacgacacgtgctcgactcgcgagcaccacaacagcggaatgcaacatgctgccacacaacacccaaacaccatacacagccaacatcgacaaggatgatcccacctacaaaaaagcgcgtgcaaccaacaccatcaatgaccaacc

SEQ ID NO: 599067 - DNA, 1381 bp, Homo sapiens
atgtcctggtgatattactcgtttctcgcgggtgtttcttgtcccccagaaatgtcatggcgcgagaattcttcgaaggggggaatttgtcccccaaggtggtgaactgagagctaacggattgtggaggatttccacacaggctcttgagaggtattcttcaccgtgatgggggagccttatttgtgagtaaactcccccccttgtataatggtaattatattgtttaaagggggggtccccgagcggcctaaagtttcttttcgtaaaagaatggggggcgacccaagggttcgccaaaaggatgaggtagaattgaaagggcgtacaggtttataaggggtgtataaaagattttgggggaatagagaagaattgttcgctccatacgccccccctttctataggggggggctacaaatgccaaggccgccagcaaggtttgggtgctcttctctcatagggcatcaggctattagtggcgagaggagtagcttctttccaaaggagggccccaaaaaagagggtgttttgtgggtgtctcaacagtggaagttggaagagggcttctcttttttcgcggggaagagagtagagtcctcacaaggagcgcccactatatattgtatatagataggggagagtgagagggagagtcggaatgggactcttttctctgagaaagataaagagaagagatctgttatgccgcccacgtgatatgttccccccccccccaagagcgctctcagagagagggagatcctcaagcgcgctctaacgagagtctctcgaaattggagaggtgatagaaacccgggagggggaaagggtgtctctctcttttgcgcgcgtttggccccttttgtctaacacctctcctctcggatctttctcccaccccactaatattttggggtgaaccacgtgtttttttctccttccacttgagaaagcacgtgtcccctgcgggagtttcttgtgcgcactttttgagaacacaggcttcttccttgtttgtgtgtgtttgaatgtgcacattaagggcacattgggggaaaacgcttctttaatctctttgcgttgcttttcccacaaggagttgggcttgtgttataaaatatgttggggaagaaatataagggttgggagaggcacagggcacatatgcacggagtcccaaatcctcaattttatctttctccgagccttaaaggagatgtatagctgctggttgtcctgttcaaggttgctggagaacacaggggtcaatgttgaaggccaaggcctgtaagctctctatacctggggcctatttttactttcattttgtatttttggttctttgaaaatgatttaataaagggaactgactttggga

SEQ ID NO: 599068 - DNA, 960 bp, Homo sapiens
  misc_feature (5)..(5): n is a, c, g, or t
  misc_feature (184)..(184): n is a, c, g, or t
  misc_feature (241)..(241): n is a, c, g, or t
  misc_feature (294)..(294): n is a, c, g, or t
  misc_feature (448)..(448): n is a, c, g, or t
  misc_feature (551)..(551): n is a, c, g, or t
  misc_feature (567)..(567): n is a, c, g, or t
  misc_feature (579)..(579): n is a, c, g, or t
  misc_feature (611)..(611): n is a, c, g, or t
  misc_feature (642)..(642): n is a, c, g, or t
  misc_feature (650)..(650): n is a, c, g, or t
  misc_feature (656)..(656): n is a, c, g, or t
  misc_feature (683)..(683): n is a, c, g, or t
  misc_feature (711)..(711): n is a, c, g, or t
  misc_feature (767)..(767): n is a, c, g, or t
  misc_feature (777)..(777): n is a, c, g, or t
  misc_feature (806)..(806): n is a, c, g, or t
  misc_feature (829)..(829): n is a, c, g, or t
  misc_feature (894)..(894): n is a, c, g, or t
  misc_feature (955)..(955): n is a, c, g, or t
atganatatacaataataataacaacaatgacaacaataataatggtaccttagaagctttaaaaagaaaaatacactattttataccaggtctcaaggaacttgttagtttttggctttggctccagggtcagatgtttttccagctcaaagctgtaaatggaacgtaactttcgcaccagtngaatatctttgtttggctgagttatctctgagcggacacgaattggtgacccaaggnttggagcattgagaagaccatttgcctggccatggctgttctcctcttcagtngcagcgttacaaataccaagctttatcttgtttttgttggcatccatcttttcccaaacatccttctgctggggacgggggtgttccagagatccaggcaatttatctggtgaaagaacaacagggatgccattttctccatcgctaagctgtncatctggaaatacctcatctgttttttctcgaagcaagtgttcagggatgggagtggcattggcaataccaattgcagcaggggtgaagcgagtgttcaactnaggggtggtagaagtngtggtggttgtnagggagccatcatttccagtcttctccaagtnaaaaaaaaaaaaaaaaataactccaaaagtnttgatgcnattgtnaaacacggatgtgagaagctggtagtntggttttgtaaaataatccaaagaaganatatggtctagaaagatgctgaattctggagggagaagtttcaacatgagcctgtngtcatatctnttcttaatagagcctacttgctccttgtnctttatttttctccagggcagcngatcaaccacaaactccaccaacatgtagaataaaggaccaaaggtcatcatgttttcccatttncctgttccgatgtgcgttgattgaagcataaagaactgttccttggaaacctgccaaaacncgagg

SEQ ID NO: 599069 - DNA, 154 bp, Homo sapiens
tctgtgtcaggttttgttgatgttggggtgtgttctgtgtgcaggttttgttgcagcatgttggggtgcgtgtgctgtgtgaggttttgttgatgttgaggtgtgtgtgccgtgtgaggttttgttgagctgttgggttgtgcctgccggcatt

SEQ ID NO: 599070 - DNA, 262 bp, Homo sapiens
aatcatgtcggtaccgaatacgctcctagacggggagtccacggcgttggtcgtagggcgcctggtcaccaggtctgcttttaactctggtaaagtggatattgttgccagtcaatgagcccttcattgagcctcaagctacatgtgtttacattgttccaatgatgattccacgccagtggcaaaattccatggtcaccggtcaatggcgtgagaacgcggaagctctgtcatcatatggcaaatccctatcacgcatctt

SEQ ID NO: 599071 - DNA, 165 bp, Homo sapiens
catgtctggctaatttttttgtctttctgtacagcagggttccgtgttagccaggctggtctcgctctcctgacctcgtggtccgcccacctcggcctcccaccgtgctgtgattccaggatcggttcccaccctgtatgcctaacagacttttctggggctcct

SEQ ID NO: 599072 - DNA, 672 bp, Homo sapiens
aagagaatatcaaacatagatttctggaagtatttgccaaccttctggttgagctgcaagaaaatatttatggtgagaacttttctgtatcccgttatagggtttttggttggttttggtttgttcatttactatagctatggtctagtaaacaatatgcaactgtaactacacttcagcaaggacaatattgtctatcatagacatcattatcatgacagtatggtacgataagttcatgatgaaggaaaacaaaattctttgcaacttcttttatagccatatagtatgtatttcatgtgttgttattccctgtgatgaaacatatcagctattacagtagaacagcatatatattcaagtagtttagactatattaaccatgttcttgtacctcgtatttatacatatgctgtattctggaaagtactgcctttactacgggaacgctataattcgatacatagtgaaacaagggaatggtgaccccttgtgcctcttccactgaggataacaacacagcattgtaatccattctcttgcaccttctatcttcttatctcgtcattacggtttcattaatttgtacgagggacagggagtgggcaaggggaagaagcagcttattgactaaccagcccctctgtggtccaccagcgtcttggcttggga

SEQ ID NO: 599073 - DNA, 723 bp, Homo sapiens
  misc_feature (45)..(45): n is a, c, g, or t
  misc_feature (78)..(78): n is a, c, g, or t
  misc_feature (89)..(89): n is a, c, g, or t
  misc_feature (93)..(93): n is a, c, g, or t
  misc_feature (105)..(105): n is a, c, g, or t
  misc_feature (109)..(109): n is a, c, g, or t
  misc_feature (111)..(111): n is a, c, g, or t
  misc_feature (115)..(115): n is a, c, g, or t
  misc_feature (123)..(123): n is a, c, g, or t
  misc_feature (135)..(135): n is a, c, g, or t
  misc_feature (142)..(143): n is a, c, g, or t
  misc_feature (149)..(149): n is a, c, g, or t
  misc_feature (175)..(176): n is a, c, g, or t
  misc_feature (183)..(183): n is a, c, g, or t
  misc_feature (201)..(201): n is a, c, g, or t
  misc_feature (221)..(221): n is a, c, g, or t
  misc_feature (229)..(229): n is a, c, g, or t
  misc_feature (236)..(236): n is a, c, g, or t
  misc_feature (257)..(257): n is a, c, g, or t
  misc_feature (304)..(304): n is a, c, g, or t
  misc_feature (313)..(313): n is a, c, g, or t
  misc_feature (317)..(317): n is a, c, g, or t
  misc_feature (355)..(356): n is a, c, g, or t
  misc_feature (391)..(391): n is a, c, g, or t
  misc_feature (431)..(431): n is a, c, g, or t
  misc_feature (533)..(533): n is a, c, g, or t
  misc_feature (575)..(575): n is a, c, g, or t
  misc_feature (655)..(655): n is a, c, g, or t
  misc_feature (721)..(721): n is a, c, g, or t
acccacccacctcaaaccctggaggcagcagcataagccccagtntccactatggtgtctcctcaatgaccagaatanccgcaagtacnaggngtcagcaattcnattntntctntccggatnaaaaaagaagcngtgatgnncctgtnagaaagcactgcctgcaggtcaaaanntggaagnggctctcccaggccaggngacaacccttcaggtgcagngggggaanaaaaggnttaacctgtgataatcccaanaccttctgaaaaaagagtaacagtcatccagcaaggggccatgggtnggggggggnggtnggggggacactgtcccctgcctcagcatgtcctgtttnntgggtgggcacagatataggctcgcttctcaaggntctgctgggacactttcttaatctgctcatctaggttttntggagcatacttgtccagctgagagaggctgaagagattctgcaagttagcttccacgcagaaggtgttggccaagagaacctcgtggtcgtggttgcgganccaatgcggatggagcggctggcccgcgacagcacggccgtnatgccatacaggttgatgaggatgttggccacccgcttcagtaccagctgctcctccatgatggtcttgccaaagcgganaggcagtgtctccacggtccggccgaagcagtaggtgttctcctcaaacttgttggcactgtccgnag

SEQ ID NO: 599074 - DNA, 795 bp, Homo sapiens
  misc_feature (789)..(789): n is a, c, g, or t
ggagaacttccccaacctagcaagacaggccaatattcaaatcagtaaatacagagaacaccacaaagatactcctcgagaagagcaaccccaagacacataatcatcagattcaccaaggatgaaatgaagaaaaaaatgttaagggcagccagagagaaaggtcggtttactcacaaagggaagcccattaaactaatagcagatttgtctgctgaaaccctacaagccagaatagagtggggggccaatatttaacattcttaaagaaaagaattttcagcccagaatttcatatccagccaaactaagcttcattagcaaagaagaaataaaatcctgagagacaagcaaatgctgagcgattttgtcactaccaggcctgccttacaagagctccagaaggcagcactaaacacataaaggaaaaaccagtaccaagccactgcaaaaacataacaaactataaagaccaccgacactatgaagaaactgcatcaactaacaggcaaaataaccaactagcatcataatgacaggatcagattaacacataacaatattaaccttaaatgcaaacgggctaaatgccacaattaaaagacacagactggcaaattggatagagtcaaaatccatcattgtgctgtattcaggagacccatctcacggtgcaaagacacacatagggctcaaaataaagggatggagggaatatttaccaagcaaaatgggaaagggaaaggaaaaaaaagcaagggggttgcaatcctaaggtctcctcattanagcagg

SEQ ID NO: 599075 - DNA, 887 bp, Homo sapiens
  misc_feature (26)..(26): n is a, c, g, or t
  misc_feature (75)..(75): n is a, c, g, or t
  misc_feature (82)..(82): n is a, c, g, or t
  misc_feature (99)..(99): n is a, c, g, or t
  misc_feature (106)..(106): n is a, c, g, or t
  misc_feature (112)..(112): n is a, c, g, or t
  misc_feature (129)..(129): n is a, c, g, or t
  misc_feature (131)..(131): n is a, c, g, or t
  misc_feature (137)..(137): n is a, c, g, or t
  misc_feature (140)..(140): n is a, c, g, or t
  misc_feature (149)..(149): n is a, c, g, or t
  misc_feature (158)..(158): n is a, c, g, or t
  misc_feature (161)..(161): n is a, c, g, or t
  misc_feature (174)..(174): n is a, c, g, or t
  misc_feature (180)..(180): n is a, c, g, or t
  misc_feature (186)..(188): n is a, c, g, or t
  misc_feature (203)..(203): n is a, c, g, or t
  misc_feature (211)..(211): n is a, c, g, or t
  misc_feature (238)..(238): n is a, c, g, or t
  misc_feature (250)..(250): n is a, c, g, or t
  misc_feature (297)..(297): n is a, c, g, or t
  misc_feature (303)..(303): n is a, c, g, or t
  misc_feature (395)..(395): n is a, c, g, or t
  misc_feature (458)..(458): n is a, c, g, or t
  misc_feature (635)..(635): n is a, c, g, or t
  misc_feature (759)..(759): n is a, c, g, or t
  misc_feature (787)..(787): n is a, c, g, or t
  misc_feature (872)..(872): n is a, c, g, or t
actcttgcaaatggtaaataccagtnataattacaatgacgtaaacttggatgtctgacagcttgaccatccggnggaactngagtggcagcgggaccncccaggngagggnaacaccaaacgcttggntngcaacngtncggccgagnggcgattgnggnttagtctatgagngatggngcgggnnngcgggggtgcaccantgggggcntgcagctaagaggctgggagcgtgggnggaaatgaaganggcagtcctggcctggggcagggagaggaaaccccagactagctggngagcgngggaagatttgtcacgatcacagtgcagacgcaaagtgggcatgggacctgtggactgtgtgggaaatttatgccagggaggatcacgaggnggctgcggctgcggccctggggaccaaagaggaacagagcaaggcaaaagcagggagagaggngggaggagatttgagcgcagatcttaattcaagtgtaactggtggtgcgagaagattctagagagaggggaaaggaggatgtggggtttggtcttctcatcaaatagctaggccatttcctccagacaggggccttggggcactgccttggtctggtgggcaagtttttgggcagtntggggctgctggctttcctgcccaagggaaggaagggcatgcctgcagagggctaggatggaagggccctttggcttcttactggcagtgggctttgctcttgtcccaccagtggactgcagcnatgggaagtgacctgaagcagttgagcngaggaacagaatcagggcggtgagcagatgcagctaagggctgaaattcgcaggctagaggtgatctgaggggatgtggaccccncttcctttacaaagg

SEQ ID NO: 599076 - DNA, 1730 bp, Homo sapiens
gctccctccctccttcctctactcccaccccatcccatgtccccccattacctcaacatccatttttaacagagacgcagactgactttggaaagggagagcgctaggggtataagaaccatcaccgactgctaatctaaccccatgggaccacctcacccggaggaatacctcatctgaccaatacactgacagagggtcatacggaccccatacagcgcacagcctccgacacatactaaaaaacccacaacacgacccgtgatagtatcaacacactaagaggacatcacgacaacgccgagacaacacgcagatcgaccccctacataccacatgacccaaagaaggcagaggaaaatcgaatcacacaccaagcaaacagacacacgacgaggaggacgaccacacaaacgccaccaaagatcgataacaacacatcccacagaacgagaacgaatcagccaccacgcaccaaccacccccgtggaagagaaagcacatatcgtacaggacagaaagcaaaactgccccgacacccggactcacccaggcgccctatacacacgattcacagacatcgcaagcacgggatgagacaggggagcaaacataccaccgatgcgccgaaacaacaagcggggcaacccaaagaacgacgaacgaggaccaaacaggtacgcaccacccacaaacgcaccccacgagggacacccccgcaccaggacatagcacaaaggaggccataccaaaggcacatggacagcggaaagagaacagacggaggcccacgacccgacccgaatacatgagacgaaatcaaaacgaacacaaacagcgaagcacaataccagaggcaccgtaacaccccgcagcgaatccccatgcgaagagccggaaccaccaacatcccacgcatccacaagagcccatatacagcagcgaagcaagcaacaggacgaggaacacccaagtgtcaaccacacgcgtaactagcgaccagcgcagaagcatgtaacccgatgagcaaatgaaaatggatggacaatgatacgtgaggacagtacccatccggagcgaaacaatcacgaaaaacacaaatgacatgggagccgcaaggtacgccggcaaactgatgagaaggacagccaaagacacaacacgaaggatagcacacaacgcagacgcaagaaaacatatatggaccgcaccaccatgtctgacgaatgatccagacggattgattacaaacaccaaaaacaagccagacgggagcgaaggacggataacacagcaagaagcccccgcgagacgcataggacagagccaccaccccagccagcacgtagcgcatcgcttcagcggaggcgacacacgcagaaaaacagaaccaacagaagcgggcacgacgcgaccgcgaaaacggccccaacgccactactacaacaccctggacacagcgacagcgacatgcaccgcaatgacagaccacacacaccatccagaacaaacacaactcaaaccacacaacgccgccagaggacaaaccaaacgcagcaccaagacaacacgcgaacgagcagcaaaacaaccaaagggtgaaatagaaggagagcataagaacagcaacacatagcccaacaagacgcaacagatgaccacacgactaacgtgcaaaagataggagagacaacaggaggcgaacccaaacagagaaaaagaaaatacat

SEQ ID NO: 599077 - DNA, 273 bp, Homo sapiens
  misc_feature (17)..(17): n is a, c, g, or t
  misc_feature (106)..(106): n is a, c, g, or t
  misc_feature (138)..(138): n is a, c, g, or t
  misc_feature (149)..(149): n is a, c, g, or t
  misc_feature (154)..(154): n is a, c, g, or t
  misc_feature (222)..(222): n is a, c, g, or t
  misc_feature (244)..(244): n is a, c, g, or t
tatttctacagagcgcngtttcaggaactaaataaatgaaaaccataaaggggagaccctgctacaactcgatgcctggcacgcgtacatgggcaggtggtagcgnttatagtgcaggtagtcaagagtgcttctctncaccaggggtntgtanatggattccttactcttttgaggtattgcctgggcttctttagtcgggttgatttcctcacttctatntgatgggctaactgctctatgnaaggaagaactttcctcctccttggggct

SEQ ID NO: 599078 - DNA, 353 bp, Homo sapiens
  misc_feature (9)..(9): n is a, c, g, or t
  misc_feature (353)..(353): n is a, c, g, or t
tctcctggnaactgtgacacagagcaggaggtgaatggtgggtaacaattgaagcttcgtctgtatttctggctgctccccattgcttgcattgctgcctgagctctgcctcctgtcagatcagcagcatcattagattcttacaggagcatgaaccctgttgtgaattgcacacacgagggatccaggttgcatattccttatgagaatctaattcctgatgatttgtggtggaacagtttcatcccaagaccattaccatcctgcgccccatcccttgccgcctgtggaaaaattgtcttccacaaagccggtccctggtgccaaaaatgttggggactgctgtgctttan

SEQ ID NO: 599079 - DNA, 332 bp, Homo sapiens
gagctcggccctagttaggtgatggagtgacagctacaggggtggttgttagttctttctgaggggtgaaattttaaactagcggtggtcagggcaatgcctacttgaaactagtgacatttcagtgaagacttgaggaagtgagggaacaaagtattcagaatcaaagggaagaatattctagccagaggaagcaacaagtattacacaaagtcttgaggcagatgcatgcctggtgaactcacagaagaacaaggagatcagtcctgtcctggctgtcactcactcgcttgcccactgatctcttccacatcactccttcacccaagcta

SEQ ID NO: 599080 - DNA, 237 bp, Homo sapiens
ttcctaataacgatcatcctggtccacatggatgtcgctgatcactcatctcgtggagcgccatgatagctgcgccttacgcgccacggggcacttgatccggttaatgacgaaatcccggaattcctgcgatttgcggtcgaaggcgcggacgagccagcgcaagccgttgtcgatcaaggcgaacgggacgatctcccgctcggtgcgaccactggagatggagcagtattcaat

SEQ ID NO: 599081 - DNA, 372 bp, Homo sapiens
  misc_feature (46)..(46): n is a, c, g, or t
  misc_feature (58)..(58): n is a, c, g, or t
  misc_feature (100)..(100): n is a, c, g, or t
  misc_feature (200)..(200): n is a, c, g, or t
  misc_feature (203)..(203): n is a, c, g, or t
  misc_feature (329)..(329): n is a, c, g, or t
  misc_feature (333)..(333): n is a, c, g, or t
aagttcgattcgacgcagacgttggtagcgatgccggtgaaaaccnagatggcgtatntccgcggtgcgcaaaatgctgtccagcggcgtattgaagaanacgctgtagcgcggcttcggcagcacaatattcgccaggctgcggcaccagttcatccaccagttgataatcccaggagcctttcgccagcaatttcccnctnagctgcgggctttacgcatggttttcagggcgttcgatttatgaaaattcggtgagccgggtccgccagcctcgacatactgttcatcccagccattttgaaaccagatgatcagcaatcccatgncctncgctgcggtcacggcggtttgaatgttggcaattgaccg

SEQ ID NO: 599082 - DNA, 164 bp, Homo sapiens
  misc_feature (15)..(15): n is a, c, g, or t
  misc_feature (71)..(71): n is a, c, g, or t
  misc_feature (133)..(133): n is a, c, g, or t
agcaccatgagatantacaatagtttaagaccctaaattgtaaatgcatattagtggtaatttactgcagncagccataggacactgacacagaaatgtttataagaaatcaccactaaagaaattattcatncaaccaaacaccgtctgttcctcaaaaacct

SEQ ID NO: 599083 - DNA, 922 bp, Homo sapiens
  misc_feature (8)..(8): n is a, c, g, or t
  misc_feature (250)..(250): n is a, c, g, or t
  misc_feature (321)..(321): n is a, c, g, or t
  misc_feature (353)..(353): n is a, c, g, or t
  misc_feature (381)..(381): n is a, c, g, or t
  misc_feature (384)..(384): n is a, c, g, or t
  misc_feature (404)..(404): n is a, c, g, or t
agcggctncctcctcctcctcctcctcctcctccctcctcttccccaccttcctccactccctcccttcccctccccttctacctcctcctcggccagctcaggttgcagcttctctggggaactgctcacctttccggagcaggggaagctgccccgtgcccgggagggagcgggcgcaccgcggcccccaggacacgcgctgacccggctgcccagtccctcatgatcatgaacaagatgaagaactntaagcgccgttctccctgtcagtgccccgcatgagaccatgaagaatccttggctgaatcacggagcaatncaaccagctccacaaacggggaatgagaactngcagctcggtcctctggcagagaccccncgnaggagtgcagcaccttctcnccaacagacagcggggaggagccggggcagcatctcacactggcgtgcagttccagctggcaggcagaaccagaagccgctatctccatggagcgtgagggccatctggagctctgaccccgggaaggtgggacaggatgcacgcacaaggggtgtgcacagggagggcagcatgccttaacagccagactttgacagctcagcaagaggctctctcatgcacatggatatccgcctgccccaaggaattccttacagaagctacagatggcgagccccagatctggcccaaggccggctcagaccgcatgtcccgaccggagctccctgtacagacatttggctttgggaaactggaaacatacgtgaaacttggacaaaaggggaagaggggcacccataatgccacaggcgttcaaagggagcagaaaactggacggagaaccaagtaggcccagaaaagagatccgggctgaagcacgaggaggaagcgcccagcaacggcacaccgaaaggag

SEQ ID NO: 599084 - DNA, 215 bp, Homo sapiens
  misc_feature (19)..(19): n is a, c, g, or t
  misc_feature (36)..(36): n is a, c, g, or t
  misc_feature (116)..(116): n is a, c, g, or t
  misc_feature (130)..(130): n is a, c, g, or t
  misc_feature (134)..(134): n is a, c, g, or t
ggcggcaaaccaaacaaanccagagtcatctggggnaaagtgactcgggcccatggaaacagtggcatggcgtgccaaattccgaagcaatcttcctgctaaggccattggacacngatccgagtgatgntgtncccctcaaggaaaactaacgaaaaatcaataaataaatgtggatttgtgctcttgtaaagtggattaaaaaacttactacc

SEQ ID NO: 599085 - DNA, 572 bp, Homo sapiens
  misc_feature (8)..(8): n is a, c, g, or t
agcggctncctcctcctcctcctcctcctcctccctcctcttccccaccttcctccactccctcccttcccctccccttctacctcctcctcggccagctcaggttgcagcttctctggggaactgctcacctttccggagcaggggaagctgccccgtgcccgggagggagcgggcgcaccgcggcccccaggacacgcgctgtgagtcccgcgggcggtgcgcctgggaggaagggggaggtcggaggagggggcaccgcggcgccgggtataacggagccacaggtaagcggaacggctcttaacgcgcgcagttcttgctcttgccctgacggcgagaggtcggagggaaataccggacgcggccgaggggacgagcagagatcacgaggcgtgatctgtgtgatactgtgttgtgtgttgaggggtggggggtgccctcgaaaggccactcgtaagcttccaggtgcttgagagcggagggtcatttctgcaatctcagaccccgcgcccccttagggagtctccatctgggatcactttggcccctgggctcccgtctgaacccta

SEQ ID NO: 599086 - DNA, 1000 bp, Homo sapiens
  misc_feature (8)..(8): n is a, c, g, or t
  misc_feature (328)..(328): n is a, c, g, or t
  misc_feature (399)..(399): n is a, c, g, or t
  misc_feature (431)..(431): n is a, c, g, or t
  misc_feature (459)..(459): n is a, c, g, or t
  misc_feature (462)..(462): n is a, c, g, or t
  misc_feature (482)..(482): n is a, c, g, or t
agcggctncctcctcctcctcctcctcctcctccctcctcttccccaccttcctccactccctcccttcccctccccttctacctcctcctcggccagctcaggttgcagcttctctggggaactgctcacctttccggagcaggggaagctgccccgtgcccgggagggagcgggcgcaccgcggcccccaggacacgcgctgtgagtcccgcgggcggtgcgcctgggaggaagggggaggtcggaggagggggcaccgcggcgccgggtataacggagcacccggctgcccagtccctcatgatcatgaacaagatgaagaactntaagcgccgttctccctgtcagtgccccgcatgagaccatgaagaatccttggctgaatcacggagcaatncaaccagctccacaaacggggaatgagaactngcagctcggtcctctggcagagaccccncgnaggagtgcagcaccttctcnccaacagacagcggggaggagccggggcagcatctcacactggcgtgcagttccagctggcaggcagaaccagaagccgctatctccatggagcgtgagggccatctggagctctgaccccgggaaggtgggacaggatgcacgcacaaggggtgtgcacagggagggcagcatgccttaacagccagactttgacagctcagcaagaggctctctcatgcacatggatatccgcctgccccaaggaattccttacagaagctacagatggcgagccccagatctggcccaaggccggctcagaccgcatgtcccgaccggagctccctgtacagacatttggctttgggaaactggaaacatacgtgaaacttggacaaaaggggaagaggggcacccataatgccacaggcgttcaaagggagcagaaaactggacggagaaccaagtaggcccagaaaagagatccgggctgaagcacgaggaggaagcgcccagcaacggcacaccgaaaggag

SEQ ID NO: 599087 - DNA, 2042 bp, Homo sapiens
  misc_feature (401)..(401): n is a, c, g, or t
tgttgactgctttcatctgtacaagaagggcataaagtttaaaaaacagtaaagagaaacaagcatgactattatgatcgcacggaaaactggaagtggtcaggaaatgttgttgaaaccacgagtggatcatgtgtacacgacgtatgcttacaagtgttgagaacaatatcgcttggtaaccaatgcacaaagtgggaagacatcgatagagtattgaactgctgatgatacgcatatctccacagcactacgcaacaccgctggcgcacccaccgaacacgcttacactacgatgggtatccacacacattacacactcctagaataacccaggctcaacacctcgtagattcggacacaccgacattgatacaccaacactgccacaactgcccttnacacagtggataccaactacgaggcttataaatgaggccacggcacactttgatatataaacggcaaatgatataaatagaccgtggaaaaatgctagcgtgctatatatcacgcaaagagcggttcgccaccacaacaaacatgcgtgggacaaaaccacaataagtccacaccaaacgctgggccccattattatcctccaaatacaccgacaacagacaataatatattgagcatcgatagaaactgtatccagcaatatctaccagctaagaataatcacgaacaaaacaagcagataataccagggacacacacagaccacgcctacaacccaacaaaccaatcccccgggcaggacacacacaaagaaacaagcgcgacaaagctagtcgccccacacacgagggccacgcactccaccccaccacgtggactcacaacgacggactacacacacaacgacacgatcacacgccacacagaacaacagatcagacgggcagcagtacacacacagacgagacaagcacgagagaagcgcagcccacacaccaaagacaagacgaaagcaaaacgcggaccaagcagcaaccacacacgaaaaagctaccacaacagaagtatcacacacccaaccaccaccacaagccaccaccacaaggcagacgatccgaccaaccgaagacacccaagtacaagatccacgccgcgacgacaaagcaagggacgtgtatctaaagcagagcgcacccacaaccaacgcagacctcccgaggggaaccgaggcggaacaggcaataagagcgacacgcagggagtacatcaccaccacgagggcaatcaaaaaaagctcaagcaacgaaagaaccaacagacaatgtaacaaacacgacacagacacacaaacacacgacacacacaaaccagacaggactggacgcccacacgagacgcagcgccgaccgcacgcacgagacgagcgcgaccaaggcgggccaacacgcaagacacacaaacccgaacagaaagaccaagagaatcgagagaagaagcaggaaccaacaacgcaggaggtccgcagcaaacaacaaaagcagacgagcaggcagatacgcagcgacacgacaagatcaagaacacgcgcgagcgacaaacagaacgaaacgaaaacgatcagacgaagcgacccacaggcagtataagaacagcagacagacaaccagcctagatcagcacgctgactgcgacgaggccacgacacacgcgcgacagcgcaaactgcagcgacagatcagcgatcaaaaacacgacccaaaactcacatagcggacccactccacccacacactcccagagctctacacacaacaataggaaggacaaacacaagatgccaacaatacatccgaccaactaatcaagacacactcacactacactactaagacgcactactcaaagacaccccaccacccgcatgatcatacaacacactactcacactccagatcactacactgatacactatcagcatcagacacaatcaatactaaataaccataataaagactaacacgccacaatgctgcatcaaatctcttatttcttttatttattttatcttatctataccacg

SEQ ID NO: 599088 - DNA, 130 bp, Homo sapiens
atctaagatcctcattaactcatacaatcgtcgagtatttacgtacataattgaaagtacaggtcagctggtttcaattatgtctaaacagaaatgggacaaatagacttgaaaaatagaagggatttat

SEQ ID NO: 599089 - DNA, 721 bp, Homo sapiens
atatttactttttatggaattggtaatgttacagaattctggcatggccaaaccattgcctgagaaattcaaacaaagggtacaagggagccagcctcatccaacccatcatacgaagtatattaaaactgtgattcatgttatatttggagttatttccacaatcttttaaaaagttatacccaagagttgtaattataacatcttgcggcgggctctccagatttcgagtacaagtatgcctttacataacagcctccacttactcatctgttcatctcttcagtaacataacccccaacaaaatttggtggggaaaaaatgctgggaaaagtgcagagttcaacgatgaagagattttcttaaaggtttttcattcccaataaaagtcttcagttgtaccaagaatcccatttctgatttaatcattcaaccttccctgggcgggctcagttactcacccaataattttttcagaaggcaaggcatcctgcctgccacctcaagtgtcaactattggcccagatgcgagtggcaggccccgtcagggagatcctggtaaccctcctcggagtccaattccgtgccgcggacacttctcgtcagattaaactcctattctgaaaagcgctcccatcgtcaaagagtagcttttactcacccacttggcttcactctgtgcctgttgcaagttctgcacactcatgccttggggcacggg

SEQ ID NO: 599090 - DNA, 322 bp, Homo sapiens
tgtgggtagcacaactagggtcagtttagcaggtggtaaagtccatttaccaagatagattgtaggtaaagaagggcagatttactagagaaattatgaaaatatgttgcagtgggcagctcagcagagaaggggctacctgcaaagaggcaggggctggaggaaagttttatagggtcctgctgaagggtgctacgtgtggaatgaggtcattgtgcccgcaggttgttagtgattagctgtctctaacaattgttcatacagtaattgttcattattgttctcaacttggggctctccccaacctggggacccttcctta

SEQ ID NO: 599091 - DNA, 448 bp, Homo sapiens
  misc_feature (59)..(60): n is a, c, g, or t
ttatatttcaaaatgatattatggtaacccaattgtaagcacagcattaacctgtcatnnaaccctaatatacataaggatgtggatgttattggaaatccattaaagccaatccactttcatttcaagttggatacctactattgattcatgtggattcttatcctgaattaattttggtaagagcgaaacaatgttattaggatgaaaactcctctcaaatctttgtaagttgactaaacctttttgtgtgtttaaaatagttgtattaataccttgaatggctccaaacattcatgttcatagaaatattttgcatatattctttctggtcacctattttttttattgtctcttgtgcaggactttttattttaatttttaaatagacattttaaagtaatgtagcaaaaaatcagtaatgataaccgtaggtatatatatgcct

SEQ ID NO: 599092 - DNA, 205 bp, Homo sapiens
tattgcggcaccaaaataaggaaccctggcttgatgtggtgcctgcatgacctctgccctctggcattagccagaaggagtagtgccatatagtgatggttaacaccaggcctcaccctggctggctggagggagtgcccagctggccggtgagatcttgtctcagcctcagctagatggatggataagaggatgagctgttctg

SEQ ID NO: 599093 - DNA, 180 bp, Homo sapiens
aggatcctggacgaggccatgatcctgaactaactcgtaaggcttgtctggttttaggacaggtaaaatgggggaattgtaaggagcagtttataggctttaaaaggccatgctgtagccaggtgcagtgcataacaggctttaatctattttaaagcggtgtcgatgaggtaccgcagc

SEQ ID NO: 599094 - DNA, 199 bp, Homo sapiens
tccgagctgtatacctgaacattcgtgtcccagagccttaactttgagaggactctatcctccttcagtttctggggttacatgagggaaacaggggtttttcctagaatggggtctgtgacgcctcctctgtttttccccaggagtcccaggctgttagtaattatcttaggttctctcatgtggacacgaatgttca

SEQ ID NO: 599095 - DNA, 434 bp, Homo sapiens
cattattagaggtgaagagggtttgggagaggtattaaagttcaccaggggaattgtgacaattaatgagctttgagccccactgccttaaatgatacctgcacgtggaaggccagggaagatcaggaaccagtgaaagagagttctgataagaccacgtccagtgtaagttagggaggaagggcactcgaggaaggaagacgtggttctccaccattcctctcctgagaaagagagctttatagtcatattgtgggcgaaattcatatcttgcactaagaaaagttcaattggagtcctagctctctcactgataatccgtgtgacattggacaggccactttacttccctggatgtccttctttcactaggtctgatgctgattctcctgcccccctcacagggcagtgatgtggaaccaagtgagacattg

SEQ ID NO: 599096 - DNA, 219 bp, Homo sapiens
agaatagaacacttcaatttagaagagctcctaattgatcaactacaattaaggggggaggtattttgaggtaaaagggggtagggtaaggaagccttttaggcgggagaagaattataaaagttttgaaaagggttccttggttgggcttgccctccattaactctcttgaactcgaggagacaaacacgtgtgcctcgtgcatgacaaacactcata

SEQ ID NO: 599097 - DNA, 226 bp, Homo sapiens
gggtatggggtatagaggaaatttctgaggcataggaagaatggagtagtcatattactgatgtggggaagattgagaagagatatttttgaggacttatcagaagttcaattttggccatggtatgtttgacatgcccattagatagccaattagagaagtccactagattgttgattatcggcaactcgtcgtagagggaaagatgcgggccagatgtctacct

SEQ ID NO: 599098 - DNA, 256 bp, Homo sapiens
ctgacttcaacgtagtccttataatcgtgtacaaagactaaaggaaactataaaaggagtaaagggggaggtatgataatgttgcatcacaatagacaatacccatcaagagaacttattataaaaaaaacacagatggaaattctggaattacgtaacattactaaaatgaacacattcactcagcaagggcagtcaacaatcagcatttgcacctggcagcacagcagttcggcacattcgcacagcatcagca

SEQ ID NO: 599099 - DNA, 161 bp, Homo sapiens
acatcaacagtgttcaagcttagctttgtttacagaaaatgaggtagggtgcggtggctcacatctgtaatctcagcagtttggtgaggccaaggcaggcgcatcagctgaggtcaagagtttgagaccagcctggtcaaaatgatgaaaccccatctata

SEQ ID NO: 599100 - DNA, 658 bp, Homo sapiens
  misc_feature (12)..(12): n is a, c, g, or t
  misc_feature (32)..(32): n is a, c, g, or t
  misc_feature (47)..(47): n is a, c, g, or t
  misc_feature (77)..(77): n is a, c, g, or t
  misc_feature (92)..(92): n is a, c, g, or t
  misc_feature (113)..(113): n is a, c, g, or t
  misc_feature (117)..(117): n is a, c, g, or t
  misc_feature (160)..(160): n is a, c, g, or t
  misc_feature (166)..(166): n is a, c, g, or t
  misc_feature (173)..(173): n is a, c, g, or t
  misc_feature (180)..(180): n is a, c, g, or t
  misc_feature (186)..(186): n is a, c, g, or t
  misc_feature (195)..(195): n is a, c, g, or t
  misc_feature (205)..(206): n is a, c, g, or t
  misc_feature (211)..(212): n is a, c, g, or t
  misc_feature (214)..(214): n is a, c, g, or t
  misc_feature (217)..(218): n is a, c, g, or t
  misc_feature (223)..(223): n is a, c, g, or t
  misc_feature (237)..(237): n is a, c, g, or t
  misc_feature (241)..(241): n is a, c, g, or t
  misc_feature (255)..(255): n is a, c, g, or t
  misc_feature (259)..(259): n is a, c, g, or t
  misc_feature (261)..(262): n is a, c, g, or t
  misc_feature (270)..(270): n is a, c, g, or t
  misc_feature (274)..(274): n is a, c, g, or t
  misc_feature (278)..(278): n is a, c, g, or t
  misc_feature (280)..(280): n is a, c, g, or t
  misc_feature (282)..(282): n is a, c, g, or t
  misc_feature (286)..(286): n is a, c, g, or t
  misc_feature (288)..(288): n is a, c, g, or t
  misc_feature (295)..(295): n is a, c, g, or t
  misc_feature (306)..(307): n is a, c, g, or t
  misc_feature (311)..(311): n is a, c, g, or t
  misc_feature (313)..(314): n is a, c, g, or t
  misc_feature (317)..(317): n is a, c, g, or t
  misc_feature (329)..(329): n is a, c, g, or t
  misc_feature (333)..(333): n is a, c, g, or t
  misc_feature (337)..(337): n is a, c, g, or t
  misc_feature (339)..(340): n is a, c, g, or t
  misc_feature (343)..(343): n is a, c, g, or t
  misc_feature (358)..(358): n is a, c, g, or t
  misc_feature (363)..(363): n is a, c, g, or t
  misc_feature (369)..(369): n is a, c, g, or t
  misc_feature (389)..(389): n is a, c, g, or t
  misc_feature (451)..(451): n is a, c, g, or t
  misc_feature (462)..(462): n is a, c, g, or t
  misc_feature (464)..(464): n is a, c, g, or t
  misc_feature (471)..(471): n is a, c, g, or t
  misc_feature (479)..(479): n is a, c, g, or t
  misc_feature (487)..(487): n is a, c, g, or t
  misc_feature (502)..(502): n is a, c, g, or t
  misc_feature (507)..(507): n is a, c, g, or t
  misc_feature (511)..(511): n is a, c, g, or t
  misc_feature (516)..(516): n is a, c, g, or t
  misc_feature (533)..(533): n is a, c, g, or t
  misc_feature (536)..(536): n is a, c, g, or t
  misc_feature (569)..(569): n is a, c, g, or t
  misc_feature (578)..(578): n is a, c, g, or t
  misc_feature (619)..(619): n is a, c, g, or t
tgattcaaaaanagagatttatttattaaggnttatttagtttctgnataaaaatctccaattgttcctcattgggntttttcttttaaaanacacatcaactcttttggggntgcnttgtttgccccagcactttaaaaaaaacagcgctttttagggncagggngaacagngaagggnaagggnggggggggntttcttgggnnttagnngnggnnggggncatctctccccggnaagngaatacacacgggngggngnntcttaggngggnaaancngncccngnagggaanaattctggggnngaangnnaanggggggatctangggnaatngnntgngccccagagggttgnaaganacgccnctggggcatcaaggggttgnggggggggttcagcgggaaaacaacaacaacaacaacaaaaaacaaccagaaaaaagaaaanaaacaaaaaantnttttttncgggacanaaagagcngggtttacaatagtnctgtnaggntgggntgtgcaaaccacaaganaanacacaccagttttctttttaaaaaatcccacanaggggcccngcataattttaaatcaaactctttatagtccttaaaataanaatacagcgagagcctcataaggtcacgtgctttttttt

SEQ ID NO: 599101 - DNA, 286 bp, Homo sapiens
tctagacggacccccattgactttcacgtggtacacggggacagccacgtgtcgggcacccaccacgctcacggtcctgcctgcgactgattcaccagtaccatgagcacttggtgcgccgcgccacgtatccagtgcagcggttgccatagctagcaggagtccacaaagcagctcactatgaagaaagtgcccatcgtagcctgtatacatctcaaaggatttgaacactcagccacgctgcggcggaagatcaccacgtagaccatcactggggtaccgcgct

SEQ ID NO: 599102 - DNA, 711 bp, Homo sapiens
  misc_feature (134)..(134): n is a, c, g, or t
  misc_feature (646)..(646): n is a, c, g, or t
gatttaatgccagaggtaaaagatggtaaagaagtttcaaatcctagtgaatatttattagtagttgatgctatgacagtccacgatgctgttaatgtagcagagacatttaataactcattagatctttcagngaataatattaacaaagttagatggtgatacaagaggtggtgctgctctttcaataagagacattactggcaagccaattaaatttgttggtgttggtgaacagatgagtgatattgaagtattccatccagatagaatggcttcaagaatattaggaatgggagatgtcctttctttaatagaaaaagctcagcaagctattgaccaagatgaagcaagtaagttaagtgaaaaaatgttaaatcaagaatttaactttgatgactacttatcagctatggatcaaatgaaaaagcttggacctataaataaattgatagagatgattccaggtgttaacaaaggaacttgaaggcattgatttttctcaaggagaaaaacaaatggctacagttaaagcaatcatacaatcgatgacagctaaagaaagaaaacaaccttctttagtaataggaaatggttcaagaaagagaagaatagctaaaggttctggtacaacagtacaagaagntaaataaagttcttaaaaggctatgaaatgatgaaaaagcaaatgaagcaaatgaaatcattcca

SEQ ID NO: 599103 - DNA, 170 bp, Homo sapiens
  misc_feature (130)..(130): n is a, c, g, or t
tctagaggatccaacacagtcgtaaggccgatgtctcaggaaatcaggtgtgctcaaatactaccaacagtttggtgctcggaacaacagcttctgcctggagcacagatcaatattctgagaagtgcgnaatcaacactgcaatgatgataacgttatcaggtgcggga

SEQ ID NO: 599104 - DNA, 157 bp, Homo sapiens
gaattgtctaatttaatccctacaacaacccttctgtgttagtctcttttcacaatgctataaagacatacccgagactgggtaatttataagaaagaggtttaacagactcacagttccgcctcaggaacttacaatccttgtggaggtgaggaag

SEQ ID NO: 599105 - DNA, 1113 bp, Homo sapiens
cagtccctgggatctcctggctgaaggttctggacgtctgtctttgcgtgtcgagttcgttcctattgagcgaggccctgggcgccttggccttgttccaggatgttctatcttatttggttcggtacttgatgaccctggttcccttgttgggcccgtagtggatgacttgggtgtttctctattccccgttattgttgatcacctttgctccagtcatacgttacatacggatagtaaaatgctggtcgaaatgctccatatgtaagctttgagtgatagctcttgccttggggacaatgttgggctttcatatgtcaagaatgtgtctgtcaaggatgttcgtcgttgctaacgttgtctggtgtacagcttttattgacccagcctaatggaagcagctggctttcacgtgctctaggtgtattatcctgaacctatccaggccacaataagcgcctggctatgcccctgttattggtattgcctacacggctctactattgctatgcaagtcttgctgtagctgtaaggaaaagattgatcgccgttctggtaaaatagctggtatagatggccctaatattcttgttagtctggtgtatgctgccattgttgatatggttcctggcatagccctatgtgtgttgtagagcttctcagactatccacctttgggtcgctttgctgttcgtgatatgagtactagacagttgcggtgaggtgtctatcaaagcagtggacaagataggctgctggagctggcaaggtcaccaagtctgccctagataagctctagaaggctataatgaatattatccctaataccgtgcctaccccactctttatcagtggtggatagatacggtctctagaactgtttgtttctaattggccattttaagtttagtagtaaaagactggttaatgatatacaatgcatcgtataccttcagaaggaaaggagaatgttattgtggaccactttggttttcttttatgcgagtggaagttttaagtgagtagcttatatatgcagtactttcttaagtggaaacatctgacccaaaaatgaccgcgaaatgagacaacaaaaagaacgtcccgccccac

SEQ ID NO: 599106 - DNA, 590 bp, Homo sapiens
ttttttctaatacatgcctatttggagagggagggaacaggaaaagaagagaagagagagaaagagtcagagatggatgacaggacagagacaaacggacaaacagagacagacagaaggacagagactgagatttcagctctgaggattgagtccagggcttcaggcattcttcctacatcaccagcccaataaatatagaactaactttgctcagtgctgaaaaccaactctaacattgtatctgaaaagtacagtttgctctttattgttatatgcatatgaaaggtttccatatatatactaaagtgagtatgcatacatatgtgtatttgtgagtatgtattctcttcttaaataagaaatctaggaaatgaagtttcaaattgtgggctgcattttcataatctatcaacatttgtaatccattataaaccttattttcttcacctgttgttcttacatgtaatgttcctaaatttaaatctttacaaattattcaaaagttaattaaaaatgaataaagcaaatttccccaaagactggatagtgtaaaataaaagataagaggcgttgtatatctcctagaa

SEQ ID NO: 599107 - DNA, 508 bp, Homo sapiens
gctgttctagaggatcccggccattggcaacgcatgtcagagggtctcagtgaaacttttgtcctcagaaggtacatatgtgtcttgatatcttacacgatagtagtccacaatgcaactcttgaatgactctgtgtaaaatctcagacctcaaccatgttgtcttatgcatgtcgaactaccttccatgcctggtagaggtatttccatcccttctccatgtgagcggaaatccccggctgccattgtccgttactcaggctccctctcgggaatcgaatcctgattccccgtcacccgtgttcaccagtggtaggcacggcgactaccatcgagagttggtagtgcagacgttcgaatgggtcgtcgccgtcacgggtgacgttcgatcgggccgagggtatctagaggcaccaaagcagccggggccggcccctggccggggccggagaggggcttgaccgggttggtcatgagctgataaatgcgcgcatcccccccgcgaagg

SEQ ID NO: 599108 - DNA, 805 bp, Homo sapiens
  misc_feature (289)..(289): n is a, c, g, or t
  misc_feature (450)..(450): n is a, c, g, or t
  misc_feature (459)..(459): n is a, c, g, or t
ttttgtcttttttctacactctggtgtgcctctttatccactcaccccccagcgcgtgttgttttttttctcatcacgcggttgatccacacacgcttttctcgcgcgcgcagcgcgtgttgagtacttggttcctctcactctcgtgtcttcctgcgcgagacactcttgttgtgtgtgctctcttctcgtcgcggggcggcgcacgactgcgtgtgctgcgcacgactctcgtctcgctgacgacgtcttttcctctatcgagcagcggcacagcggcgcgttagtnttgtctgttggtggtgtggctgtcgacttctccactagagcagagcgcgcgcgctgacgcacagcactcgctctcctcacagactatactcttgtttgtgtgcgacacaccgccgagttggctgctctctctctctctcgtgtggtgctcgccgcacgctnttctttgtntctgtggcacacagtgttgttgtgtcgccgcgagagagagccgctctgagacctcgttgagacaagatgttgatactcactggggggcacaccactcatggagccacaatcgttgtggtagagaggcccccacgacggggagttgtgtgggtgaccacctgttggggagccacacccgcggcacaagaattctcacgatgtcgccattgtggggcccacacgagggcccctgttgtagagcccctgggttggggggccccccccccaaggttgccctcattttgggcccccttttggttgtttccccccccccccccccccttttattacccgggggcccttgtta

SEQ ID NO: 599109 - DNA, 224 bp, Homo sapiens
  misc_feature (63)..(63): n is a, c, g, or t
  misc_feature (126)..(126): n is a, c, g, or t
  misc_feature (134)..(134): n is a, c, g, or t
  misc_feature (169)..(169): n is a, c, g, or t
  misc_feature (182)..(183): n is a, c, g, or t
agtaaaagcaattttagaatataccttgaaatgggtctggagatgaaggctaaaccaaaactnttccaaatgcattttaaacagtggttgcaatagcttaaaaataaacgtgtagccttataaccncctgaggnaataaaattagatgcgtaggctctggcatttccgngttaacaatacgnntatttatattttaaatactgaatgttcacacaactggtagc

SEQ ID NO: 599110 - DNA, 297 bp, Homo sapiens
atcaggcgaggactgtgcgcaacatcgttcttcaggaggcaaagcacttcgtcgggatagaggagaagcaaggttcagtgccatctgacccgccacaccccagtacaagacccgacagaaggcagaatcccacatggaggtaggacagtcacagggtcctctggtggcgtgcccgggatgaacaccttggtccatccagtccagctgtcctcgagtgttccctcaggctgggaagtctgatgccaatgggccctggacatgcttcagtttcctctctcgccacagtcttcgcctgat

SEQ ID NO: 599111 - DNA, 989 bp, Homo sapiens
agttgggccgaccagtgtggagtgagtgatggtggtgaagtgactgacaatatgtgtcaccaagcgatgctcctcaatggtgtgatccctctgtgccacatggtgtgacaccatgcccatgatgccaagaagctactgcctgggagctccactgcctgctcccaatgtgagagtcatcaactggaaacataaatgacatgtgacatgatgtacaatgatagatgagtgatggcaatgaaagttacaaagatttgtcctgaccttcaggtgatttgaagaaccctgtgaagggaatttagaaaagtgcttgtcaggcaatgtgagtgaaagaaattggaagagaagttctggtgaacatcagatgtatcgaaccccccccctgtgaacccacaagattaggtcggacagcacatgacaacttgtcatgttgaacgaattgtcatacatcaatgagctgtatccagtcaaacaacgaaaaaacggatgtgaaccgttgaagctggccatgtggatgtgacgtgaggagacccgctatagaaaccagacacaacaaaaggtgccaataaaagaataagatgtacatgcctgcaatctaggacgcaaagaggagaacagcacttgggaaccaccacggcttgacacacttaacaaaagggaatacagcctgagaggccacaaatgccagaaagggaagacaggccgaagtccagtcatagggcagatgatctaacaaggacgaagaaaaggggagaaaggccagacagggaagaggcaaaaacgcagtatgcaaaggacaacgcaaaaagcacgcacagggcaagaatgtgacgacgagacatgagcgaaagggagcagaccgacacagaggaagaccatgcaacccaccggaaaaacggcgacaacccaacaatcgatgtacaaaaaggtaaagaggaagaggtagaaacgacgtacggaccaaccagcgacagaaccaacacaacaaacga

SEQ ID NO: 599112 - DNA, 121 bp, Homo sapiens
cagttaactacgcgtatattcgctaaacggtatcactgctgtatcccgtggagtgtaggctaggctaagcgtatagagctagcattgctgcgtgcttgactgcttgtacactcttaagata

SEQ ID NO: 599113 - DNA, 132 bp, Homo sapiens
cacgaggtgtatgcttgatgtgttcgcgatgtcttttacactgcatctgattgtgtcatttggacacatacatgcaaatcaaaaggctatgttctgctgtagacatgtggggaatggatatggttcatctcc

SEQ ID NO: 599114 - DNA, 1300 bp, Homo sapiens
  misc_feature (900)..(900): n is a, c, g, or t
cgcgggtgttattattacactcccctcagcgtcggcctcgtctttgtttcttggtgtggtatgcgcccctcctcactctttctctctctccccgagtcaacttgctcctactcattctcctcccctcgtctggtttttgttgatctcccgcccccctctgtagtgtagcacctccccctgcgcgggctccgctaacttgtcctatctctcctcacgcgcggtcttttctgctctcttgtactccggctccgccgggcgtgccggcgtagttaacccactgtttgcctgcccactctcggagtgccctcctcttgcttctgtctctccccttgttttttgctccctcctgtttattgttatagtgctggcgtcctcttccttttctggtccaccccactccttttcgttcgctcgcccaactctaaactccatcccccgcggctgtgttttgtccctccttgcctcccgcactgtttttctcccccgcgctgtgttttgttttctcactcctctgcagcgcctagcttcttttgatccacactcgctacctggttcttgtacactacctgccttccatcgtttggttacacacacatctctcgctttttcgttttatcttcccttgtcgctctctctcacagagcgtgtgttatgtctgcctcctcacattctcttttgttcgtgttgttgtttgtctcaccacacccccgcatgcatttggtgtgttgtttgcgacccaccacatcgtctttctcatgaaagcttttcttcgtcggagatactatttctgggggtttcaacacctctttcttgtgtgagggagcacctctctttgtgatctgctctgtccgtgagatatatccctctcgctcaagatgactgtttgatagaaatagtatntgtgagatatatttttctcttgagcaaataagtattaatagagagataaatatagagacagatatgggtgctcccacacagcagggaataatactagagcagagaagagttgtttaatgatagcaccacaagaacactcctgttgtgatgaatatttttctggcccaccagcacagaagagttgtgttgacaacagagaatatcacaattacttatattttttgtggggtaataaactgagtggtggtgtataacaacaacaggaaaaacaacacgaacaaagatttttcttcttccttgtaccgggtggtgtaaaaaaaaaatgggggttaaaaaacccctttttcttttttggaaattttttttttgtaactttttaaaacttttttacccggcccca

SEQ ID NO: 599115 - DNA, 223 bp, Homo sapiens
cccggaccgctacacagcttcccaacatggacgagcgtcctctgtctcgtctccccatctggtctggaacctgctttgccaggtaagcaatatctccatgctattgtatagtactaccgctcttgtagccttctgatttctgttactgtagagtaacacagattctttatacacatttgtaagcatttacgccaaacccccgctctcgatctcttcttctccc

SEQ ID NO: 599116 - DNA, 387 bp, Homo sapiens
tcactaaatgcgatctagtgaacaaactacaaatcataatcgcaatgtcgaaagtccggagactagaaaatcttatgctaatcatgctacacaacaatcttgttaccataaatacgcctctaaaaaataaacggatactagtcaaaccagcgattctgtatctgatcactatttgtatctattgtatgcaataaacttactccaatattttagcagtagtttgttgcatcatggtaaccagatatatatctaggggacccctggttgtattaactataaatactcatttagtctatttagactatcaagagtcaatagatatcggtcttagcctataaagtatagacacacgtgaatataatagcttagcaagatgtatctgatata

SEQ ID NO: 599117 - DNA, 647 bp, Homo sapiens
  misc_feature (13)..(13): n is a, c, g, or t
tcgttgtgtcccncgagtatggcatatgtgacggcccctcgagtaggtagggacgaagtcggtgaggaagagatggtggaaggcaacgactatgaagaatgcggtgcgtatggtggctatggcaccctcaccagctttgacatccatatcctcagagccttcggaagcttgggtccaggccttcgcatcttatcgaatgagccctgggaactggaaaaccctgtgctggcccagaccctggtggaggcattgcagactggatccggaaacacttgccaatgatgactgtgccgccctgtgctgccaactgtatgccctgctgcctgccgcctccaacctgtgcggctctgggcctgctgcctgccgctgccccgtacctgccttcagtcaaggtggtcgctagccacctgggtggccacggccgcgaggtctcaaggagacggatacccaagcccacgaacctacgcctgccagaggctcacggggcccacgcccatgagaccaacaccttgcttcttccgcagaacctccgcagatcgttacgtcaccagtaagcatggcttgcccccgaggctccggaaaacactccgacacagatacccagaccaggcatcccccggcccaggacgcctgctacctgagggccc

SEQ ID NO: 599118 - DNA, 349 bp, Homo sapiens
tttttgtcgggggctgttttattgttcccccccccccgcatttttcaggtgttccccaacaaaaagggttgggcaaccccctgtgtctcttgagctgggggagggggggcccccccccccccacccctgtttttccctcaatggggcccccaagcctgggggcctgcagccccgggggccccccccccgggacctttggggaccccccccccccccaaaggggatccgggctttccagggggggcaagggcaaggaccaggtttgggccccgggccccggggggggggggggggaaccccccgggccggggccccccatgggggtgggggaaaaaaccctttgttttta

SEQ ID NO: 599119 - DNA, 161 bp, Homo sapiens
ccacaagcatccaccctaagtgtttctggtttacattgccctctttagtgccttcttgaagacttcttccttcaggtttcggttgttttaaataagaaagagttgctgttctaagccttgtttcacattgttccgtacctgcatttctgaaggccccaact

SEQ ID NO: 599120 - DNA, 362 bp, Homo sapiens
  misc_feature (111)..(111): n is a, c, g, or t
  misc_feature (120)..(120): n is a, c, g, or t
  misc_feature (136)..(136): n is a, c, g, or t
  misc_feature (147)..(147): n is a, c, g, or t
  misc_feature (164)..(164): n is a, c, g, or t
  misc_feature (166)..(166): n is a, c, g, or t
  misc_feature (183)..(183): n is a, c, g, or t
  misc_feature (192)..(192): n is a, c, g, or t
  misc_feature (199)..(199): n is a, c, g, or t
  misc_feature (212)..(212): n is a, c, g, or t
  misc_feature (230)..(230): n is a, c, g, or t
  misc_feature (257)..(257): n is a, c, g, or t
  misc_feature (270)..(270): n is a, c, g, or t
  misc_feature (284)..(284): n is a, c, g, or t
  misc_feature (339)..(339): n is a, c, g, or t
  misc_feature (342)..(342): n is a, c, g, or t
tttccccatcgctcccaacctaaaccgaaaaggagttgttgaccagtgccccccccggcagcccgggaggaacacaggcagctcctttcccttcacgtggtttgcaaaaancagggtganctgccaactgcccctntccaccagggnaccctgttttggtggtnangggccccttttcctttnaggctctantggaggnggatgtccttttntgccaggcttggcacatnatgtgaaaaataaatgcccaatttttnctgttcaggtttnatgtggaatcccanctgcagtgatatatattttttatcagggcttggttggttttaaataaagggcccnctnttttattatcttgttttgaa

SEQ ID NO: 599121 - DNA, 490 bp, Homo sapiens
  misc_feature (1)..(2): n is a, c, g, or t
  misc_feature (68)..(68): n is a, c, g, or t
  misc_feature (70)..(70): n is a, c, g, or t
  misc_feature (76)..(76): n is a, c, g, or t
  misc_feature (79)..(79): n is a, c, g, or t
  misc_feature (95)..(95): n is a, c, g, or t
  misc_feature (98)..(98): n is a, c, g, or t
  misc_feature (100)..(100): n is a, c, g, or t
  misc_feature (104)..(104): n is a, c, g, or t
  misc_feature (122)..(122): n is a, c, g, or t
  misc_feature (151)..(151): n is a, c, g, or t
  misc_feature (158)..(158): n is a, c, g, or t
  misc_feature (206)..(207): n is a, c, g, or t
  misc_feature (430)..(430): n is a, c, g, or t
nntgacctgtgttcttgtgcaaagtcctgcagggttggtggcaccagaaaaggccttgcacctcttcntntctccnagnaagccagctcctgagntcntnagcnagcggaaactcttcctcnagccttccgggagaacatccctcccttantggaaangaaagcagcctccaggaaatgttttctgccttcctgcttctagaaccnncctcaggtattgatgaaccccacttagcacagctgaaggggtttgtgaatactcccgcctaaatcccttctacttcactcctcaggggagtgaagtgccttaagaaacaaagccctgtcctaatttatctagcttgtcagtccagtcttagagataccctctttcctgaagtgaggcgtgcctgtagaaacactatgtggtcagcctgtccccaaggagatcntgtgtctcctctccatctctgcctttgttccagtgtgcatgtgtttgtgtgttttttaat

SEQ ID NO: 599122 - DNA, 357 bp, Homo sapiens
  misc_feature (210)..(210): n is a, c, g, or t
gataggcccttcccacttacaaatttaagtgctgaactgtaaataaacattaaatcatgattaagcaggggtttacctaaggaattcaaatatgtgtaagaagagcgagtcatttcgctaatggattaaaggagagaacccacattaactgaataggtgcagaaaatgcattagatggtatcccatttccatgtgggagcaccggtctgnaagactctaaataaagtgaaaattacttaatcggtaaaaggcttatgacaaacaatacttaatgccacttaataatacaggagtctctactcccaccttgtattatctgccccctggtattggagatcctgacacaatgcaatcagc

SEQ ID NO: 599123 - DNA, 184 bp, Homo sapiens
cagacctcgtcaagactccgtatgagtaggtactagttacttgcgcccagtttagaggtgaggaatagagcccatggtcacacaatatatggtatgtgcagatgtcaaaccctatcatcctagctctgagagaacttgtcctctcagaaccatctcacatcccgggccccaggcaaatatgcga

SEQ ID NO: 599124 - DNA, 112 bp, Homo sapiens
  misc_feature (70)..(70): n is a, c, g, or t
  misc_feature (79)..(79): n is a, c, g, or t
tttgtcagctttaagcagagatgattaaaggtgtgacttggtgatcaactatactatcaactagctcagntgaatatantcacagataaggtcgaacctgaatagcagggca

SEQ ID NO: 599125 - DNA, 198 bp, Homo sapiens
agaggtattggtacatccatattcatagcagcaataatagccaaatagttcataatagccaaagggtactacacaacccaaagggccatcaccgagcgggagggataaacaaatcaaagggtatacataaaagggaatataatttttccataaaaagagatgaagtacttttcatgcgcgtccgtgtaaagagaccac

SEQ ID NO: 599126 - DNA, 344 bp, Homo sapiens
  misc_feature (31)..(31): n is a, c, g, or t
  misc_feature (271)..(271): n is a, c, g, or t
ctttgggcccattttgtattacttccttttntgtgtgttgtctccttaaggccattagaaatggaataacaggactgggcacaatggccatacctgtactcccagcactttaggaggctgaggtggaagggttgcttgactgcaggagttcaagaccagtctgcacaatatagggagacccccatccctacaacagataaagataaattatctggccgtggtggtgtgtgtgcctgtggtgccagctacttgaaaggctgaagcaagaggntcacttgaatttgggaggttgaggctgcagtgagctctgattgtgccactgcactccagcctgggtgacagag

SEQ ID NO: 599127 - DNA, 198 bp, Homo sapiens
gtggtttccctagaaagggcccctgttgttttccccaccgcagtcaccaccccccgaaatgccagggggtcattgtgcattgccctgtttatgggcctttggggggcagggcctttctggttttgtacactgttgtacccaaatgcctacacccatccctgccacatacaggggttcaataaacccttgtagagcaga

SEQ ID NO: 599128 - DNA, 127 bp, Homo sapiens
gactctagcaggatcttttcttgccacggatcggtaatgcccaaatctttgtggaaatagatggggtatggctatttacaaaaatggcacaggctgaaagaactgggttctgcataaaacagaatcc

SEQ ID NO: 599129 - DNA, 971 bp, Homo sapiens
  misc_feature (69)..(69): n is a, c, g, or t
  misc_feature (86)..(86): n is a, c, g, or t
  misc_feature (146)..(146): n is a, c, g, or t
  misc_feature (232)..(232): n is a, c, g, or t
  misc_feature (258)..(258): n is a, c, g, or t
  misc_feature (268)..(268): n is a, c, g, or t
  misc_feature (271)..(271): n is a, c, g, or t
  misc_feature (277)..(277): n is a, c, g, or t
  misc_feature (280)..(280): n is a, c, g, or t
  misc_feature (283)..(283): n is a, c, g, or t
  misc_feature (296)..(296): n is a, c, g, or t
  misc_feature (305)..(305): n is a, c, g, or t
  misc_feature (307)..(307): n is a, c, g, or t
  misc_feature (313)..(313): n is a, c, g, or t
  misc_feature (315)..(315): n is a, c, g, or t
  misc_feature (346)..(346): n is a, c, g, or t
  misc_feature (356)..(356): n is a, c, g, or t
  misc_feature (364)..(364): n is a, c, g, or t
  misc_feature (384)..(385): n is a, c, g, or t
  misc_feature (387)..(388): n is a, c, g, or t
  misc_feature (393)..(394): n is a, c, g, or t
  misc_feature (398)..(399): n is a, c, g, or t
  misc_feature (403)..(403): n is a, c, g, or t
  misc_feature (447)..(447): n is a, c, g, or t
  misc_feature (449)..(449): n is a, c, g, or t
  misc_feature (452)..(452): n is a, c, g, or t
  misc_feature (454)..(459): n is a, c, g, or t
  misc_feature (461)..(461): n is a, c, g, or t
  misc_feature (470)..(473): n is a, c, g, or t
  misc_feature (562)..(562): n is a, c, g, or t
  misc_feature (570)..(570): n is a, c, g, or t
  misc_feature (636)..(636): n is a, c, g, or t
  misc_feature (639)..(639): n is a, c, g, or t
  misc_feature (641)..(641): n is a, c, g, or t
  misc_feature (646)..(646): n is a, c, g, or t
  misc_feature (648)..(648): n is a, c, g, or t
  misc_feature (660)..(660): n is a, c, g, or t
aatcttgacggtttctgcccgtcctaatggcagagctctctgacttgggtgtatgctgccaggcggggnactgtcatactttgttntcttgttgtgctttaaaactacgactcagcatacattttcccacatacatttttacattntaccttaggactcagtcatctccacttaaattgatgacacaagcagctaataaccatttctgggtttctgcctaaccccctaattntctgttaaagccaattctctgggtgncccagtgagnggnggcttnttntcnttccacattggcncattcaccncncccacncntggcatgtaagaaataagcattcacataatnggaaaaatcnggatttcngatgccaaagggttaaagcnncnnggatnncatnncatngatatacagccactattttatttttgatcagggcctttgggccncngcncnnnnnncngaccaccannnncagcattagggttttggtttttgtttcttttgggtatttcttttttggcacatgtgaatcttgttttgtgtaaaatgaaattactttcncttgttcnctgatgatgggtttaaaattaaaagagcatccggttttggtatggggatgatcccaggattatgcngcngnactgnantacatattagtnacttgtgctttttttttttttttttggatctttgcaagggcaaaactaccaagtaacgagttttaatataattaatttaaatttgttacaggttttcatgttcaggataaaccatacttccaccttgggtgagaacacttgcaacagtttattaatgaggtgactttcaccttaggacaactgttgcatgccaagttttttgtgtgtgtgaaacacttcaaaactgatttaaaagatgtaaatttaaaattggttgtatctaatatgccccaggttcggtaaataaacaattctttttaaaaacaaaaaaa

SEQ ID NO: 599130 - DNA, 141 bp, Homo sapiens
gaggatctcttgtcccagaaccgagcaggagaattatggtgggtttgaagcacatcaagaagccatcctgctccactgtcctcagcttgatggcacccaacaatgtgctgctggtgctggtcctgtgacttcaagtgtctg

SEQ ID NO: 599131 - DNA, 307 bp, Homo sapiens
aatgtcactgttgctggtggtacttatattgtccacttctgggtgggagaactctgtgctttcaacatccacttcaatctcctctcgctctgaatcagaacgatctgaagaaatagttgatccaatgctgtccattcgtattcgttccatcttctgaggaccctgcagctgttccagtcgccactttaaaaatctctgttctcgttccaaattctcgagctggtgctggctttttctttcagcttcttcaagtttcttgatgtgtgctttggcttttgtgagcaaaccaagtgttgtgtgccgggtg

SEQ ID NO: 599132 - DNA, 180 bp, Homo sapiens
tgcctggagctccggagatcgtgagcagctggtgaagaacacatattcctgtgaccgccctgtcgccaagaggactggggaagggaggggagactatgtgtgagctttttttaaatacgagggattgactcgagatttgagatgatcattatgggctgcggtctgtttctctcgggagtg

SEQ ID NO: 599133 - DNA, 549 bp, Homo sapiens
  misc_feature (250)..(250): n is a, c, g, or t
ggtccttttcagaagtgagctttgctgctacaggggaaggtggcctctgtggagccccagcatatgggggcctggattcatttcctgcccttcctcagtttaatccttctagtttgcccagcaatataaaagctgtagcttcactgtcaggagagaatatctacagatatcatatggattactgactctttaacccaattggctcccctggagcaatggtctgtcgctagtggaaacttccccgtcccantatcctgggcctcagccacgccaagtgtagccaatcccatggagacacacttgtgttcctaggttgctcatcatgccacttgggaagggggcagagttagccaagggtgttggcccctgcccattcttccccaggcaggggcccaactccccgggaacttccatgctttaagtcacttgccttgcagaaggtctggtggctgaggccttaatcattcatttcttagctcttaattgttcattttgagctgaaatgctgcatttttaatttttaaccaaaacattgtctccttaatcctg

SEQ ID NO: 599134 - DNA, 952 bp, Homo sapiens
agcgggagctcgtgagcgccggcgcggggacgcgggtttctgcctcaggccctgccctgctctactctgcgctctctgcccgcgcctgccgccggcctcagcctcggccctgcgctgcggcgccctggccgtgctgccatggcctggccgcccgcgaagcccggcgaggcatcagagccgctgcgacggtgacgcacagcccggccgtccccccgcggcgatggagcctgggaaccggaagcgcaggaggccgacgggcaaggcgcttgggaggcccgaagaacgccgaggaaggcagcagcaccgggggcgccagaagccggcaagacccggaagagctttaaccaactccttggaagggcccctaaaaacccgggttccaaagaatggctgtgacgtggggcaaaggtggcagggttgaacagaaacgactgtggacactgcgaggcacccaacaaggtttaccccacagaggacaactggcgccacgcgcacttattcacaacggggacaaacttcccttcaattaccacttgaacattgtgggcacaccaccaagacgcaaacatttcaattctattcagggaacagtttccttggatttcccacaccgggagcagttactacatggttctacaccttggttggtccccggggggtgtgtgggcacttttttggggacggacacacatggatttggacacatgttggttccccttaatccttgtgaggggggcaggaacaccgtagcacacagccaggacatttcaacacataaatgtgggggacactgacaaccgccaccaagcttggggcgtgtaaagcgaaagtgcgggtgtgagtaatttatacacgcggaaacgggtccccccacaggagacaccccgttgtgcgaacacaacccgcgtagtgacatttatcaattacctagagagaacacccccttaacagt

SEQ ID NO: 599135 - DNA, 167 bp, Homo sapiens
atggcaacgatctctctctctactcaggcggacccccgctccagcaagccccagtccaaaggataactggggacgtttgccaggacgtgcacttcaagaacttggtgaactgaacgagtccagactgctgtcggaccaactccacctttgtccaggccttttggagc

SEQ ID NO: 599136 - DNA, 151 bp, Homo sapiens
ggcgccataaaaattaactaagcaaatcccgtgttcctaattttacagaatccgttgccgtccttaaataaaataaagcaattaatcaaacaacgaacgaattaacccttttaataataaaagcctaatttaaccgtaactaataacttat

SEQ ID NO: 599137 - DNA, 417 bp, Homo sapiens
aggcggggtactcactgtgtcggccagacggggcacacactccgtgacctggtgatctgtccaccgtcagcctcccacaaatgctcatatagtacttgtctagtgtgtcctcatgatgagattcaggttacgcatacttggccagaatactacataagtagtaggtattcgttcttaagagagctggaatttagagagacataatggtcatctgccccgtcagttttcatcctcaaccaaaatgagtgatttcttcactgtgtagttcctgtcattttctttaccacaaataagtgggaagtactttaagaccatgcaaacattcatgttttccatcagtatttccctcctggatttgaggtctattgattctcgcctgaaccatctttactacagtggttatagagtgatggtttc

SEQ ID NO: 599138 - DNA, 123 bp, Homo sapiens
ctagggatcttattacaaatttgtactatcatgtgtgtatttatgtgtgtgtgtctcatattggggtttcagctatataaagcaaatactaaccaaactgtgattaacaccaagagaacaata

SEQ ID NO: 599139 - DNA, 375 bp, Homo sapiens
tagctagacagtctaatcggtgaggttccggaagcctccctgttccgtctccacctaccctcccctagcctacccccaaacaggcctccatattccagccagggacacctaaagccagggcttagaaactcacgtgctgggagggccagttaggcaaggaaaaggggccccgtagtgggggtggggggctagagcaaataggagggtgcctgccctctcggcatagcaggggctgctcagctgcccccaacaggtgccaagggggagcacagacccagggtaccaggagttttaaagagaagctggaactctggggtttaaatgtggggaagaaatttctttgtttttaattgtaaatattggcaatacatctca

SEQ ID NO: 599140 - DNA, 314 bp, Homo sapiens
ctctagaggatctctaatatgctgtctcacctccaactgctaagtgacggcacagtgcgtgataagtgcttagttaagatggaacaggcactgcatatgtgggtggaagagatgaacagaaaacgtgttcccattgacagcaacatgttgcgccagaaagctttgagcctataccaagacttctgcaagggatgctctgaaactgacaccaagccatttactgcgagtaagggatggttacacagattcaggcatagattctcacatcattacaagaagaagaagaagggtaagtacgttacaacaagttatac

SEQ ID NO: 599141 - DNA, 630 bp, Homo sapiens
agaagacaaaggggtttgttgaacctgacctcgggggggatagacatgggtatggcctctacaacatggccccagcagcttcagtccatttatcgtctatggtcagcacagcattatgcacgacatggagagcttcatgagtgcctcctctgtgacacggagaggtcagccccattgctatacacattagtgatgcccagttgacacagaacgctattcagatcataggttccagtaatggacagtttgggtaaatgtaagctgacagaccacaggtgcggtagttctcccctcatcaggcatgatgaagatgtcggtggcattgcccaggtatttcatcagcagcagctagatggacagcttcttacagtgctgaatgttaaacatgcttaaacgcttcatcataggcactttcacgatggtcacttggtccacgtgtaagtcctattcatcggtgtcctaaacttaaaagggtctctcccattagccttgaaaaaagatgtaattcaccagagcaaaatctgtgtctctgtcaagctccttgaccaaatccacaattttccttagagtacccttctccacgtaatcgttgatctgtctcttggcctcataggtgtccctgaagttgac

SEQ ID NO: 599142 - DNA, 807 bp, Homo sapiens
gctggagagcatgatcaagaagccgcggcccactcgtggtctgaaggcagtgatgtggccaatgcagtcctggatggatcccgagctgtcgtcatgctgtctggagaaacagcctagaggggactatcctctggaggctgtgcgctatgcaggcaccttgattcgcccgctgaggcagaaggcatgctcatctaccagttgcaagttatttagaggaatctcctgccagcgcatggcgcccattaccaggcgaccccaagcaagtatagccttagcctgcacgatgggtgcctgtgagaggcctccattctaagtgactgcaagtggtggcccataatcagtcctcatccagtgtctgtgcaggtcgtgcatcactcaggatggccaagatacctgtccagcgtgaccgcccgatcattgcttgtgaccctggaatccccagtacagctctgtcgggcccacctgtactcgtggcatcttccctgtgctgtgcaaggcacccagtccaggacggcctgggcctgaggacgtggacgctccgggtgaactttgcctatgaatgttggcaaaggcccgaggcttcttcaagaagggagatgtggtcatcgtgctgaccggatggcgccctggctccgcgcttcaccaagcagcatgcgtgtcgttccctgtgccgtgattggacgcagagacacatactctagcagatgtacggaatccaattcacctgggcacatgcatgtacaataggaacaggcgatgatgtctttctgccaatggaaaaataggaacatggtacatcctggaatc

SEQ ID NO: 599143 - DNA, 210 bp, Homo sapiens
tccgctgtgatggacctgagatccccagtgtctcaagatagcatggtactaacatagaagataggcatgaatcagaataaaagtccaggaataggccgtgtgtagtagctcactgcctgtaatccatacatttcttaagtaaccatattcttttaacaccttgcttcagagcacagtaccatttaattatcaccattccttccagaatat

SEQ ID NO: 599144 - DNA, 325 bp, Homo sapiens
  misc_feature (324)..(324): n is a, c, g, or t
tgtatgttgtgggtgtgactgagtgaacttcaggtcagtggtgcaggaatagctgtcgagatgtcatggttgaggtatcttataggaatggggaaaggcaataagtgagtccagagtagaatggtgtcttgtggctaggtggttcctggtcagcaagatcagtacagaagtacagtaggatgcaaatgaagaaagtgttgctgagaatgtgtttatatccaccaattctcagaatcactgaaaacatttgggtaaatgccaaaactctaagagattttaggttttacaagttttgctttcccttaaaaaaaaagttacataggnt

SEQ ID NO: 599145 - DNA, 379 bp, Homo sapiens
  misc_feature (287)..(287): n is a, c, g, or t
  misc_feature (314)..(314): n is a, c, g, or t
  misc_feature (321)..(321): n is a, c, g, or t
  misc_feature (364)..(364): n is a, c, g, or t
ggctacagtggcaaaaccccaatctctacagaaaatataaaagttagccaggtgtggtggtgcacatctgtaatcccggctactcaagaggatgaggtgggaggaggtggaggcttcagtgagttgagactgtgccactgcactccggcctgggcaaccagagtgagatcctgtctcaaaaaaaaaaaaaaaacaaaaaaagagagagagagaagcaattaccacagccatcccagccttcagcaaccacgaccctgggtaagcagccattcaacatcaaggcaagntcccccattaggcaaaaagattttaanttacttnaaggcttcagttatttgtttagctttttttttttttttttttngaggacagggttttg

SEQ ID NO: 599146 - DNA, 112 bp, Homo sapiens
tcaccgtgtggacatcaaccttcgagaaattccagttgtcttttatcccagccgcatcgtgcctgtagaatgccggggaatggctctagaaaatggggcgcattcgcgatcc

SEQ ID NO: 599147 - DNA, 832 bp, Homo sapiens
gctgtagtggcattcgtcttcggtttatactcttccttcgcataacgcctcccggactctcgtcagcctcccagccggccgtctccttaacaccagaacaccatgccttcaattaagttgcagagttctgcatggcagcagcatcatttgcacagttgcatgtggcaacattgccaaaaccaatctgtgcactcattcaagcacccatgttggcacagcatatcgggcaatggcatgcatgcaagcgcagcatgcatgcacccgaaattcacatcattacccaaacatggtgcacattgcgaggcaaatcatctcacacacacacatggtccaattccaggtgggatgacaaacacgaaacaaaaacgggaatgcaccatccaatccatcccgtggcaaagcaatgcatgcagcacaccacaaagcacaaagcgcaaacagattggaatacttcccctggatctggaggaactcaacggaccttcccttggacaaacgatgtggacccaaaagagaaaccaccctttagatggcacacatacaattagcatcgggcgtcgacgaacaacataacctctacgaccaattcaaaacgggattaggctatgacttgattaacattgcaaaagaacgttcgtattggccaaacataattgcactccacagggggacacaaacacctcccttgaggaagcacatcggcacagaacccttcaactacttccagacggcattgcgttttcaaccttgacagcacggcaggacaaggccccaaggataacgccaaaaagaaggaaccagttgggtggtgacacgacagacaggtgaccat

SEQ ID NO: 599148 - DNA, 175 bp, Homo sapiens
  misc_feature (55)..(55): n is a, c, g, or t
  misc_feature (97)..(97): n is a, c, g, or t
ccgtcagtgctttgcccgaggttccgcaggcccagcctgtcctgggccttcaagnctcactgccgacttcagggaggatccggacccccgcaagggntaacctgggagtgggagacataatcgacacggatgactgccatccctgggcttttgccagaagtgaagaaagtggagc

SEQ ID NO: 599149 - DNA, 369 bp, Homo sapiens
tagcaaatctccgacaacttatgagtaaggagattagaagtcagataagtagagttctctcatcaaagcaaagcccaggacattatgtcttcactgctacattcgtatcaaacatttaacgaagaaatcttaccatatttttgtcacatctctcctaaacttgttaaagagcagagaatacctccgaactcatctggacactatgttgtacaaattaaatacataccattttttctgtcaatgtaaaaattaaaatacaaagcaaattaaagtttctaaaaaagaatattttgttactaaaccaattctattacaaaaaaacccacacagtgaaacctggtatccactgagggcttctagtccactgag

SEQ ID NO: 599150 - DNA, 770 bp, Homo sapiens
taaaattaattaaccactcattcatcgacctccccacccctatccaagcatctccgcatgatgacacttcggctcactccttggacgcactgcctgatcctccaagatcgaccacaggactattgcctagtccatgcactactcagccagacgcctcatccgctcttttcatcgaatcggcccacatcactcgagacgtaaattatggctgaatcatccgctgaccttcagcgccaatggcgcctcaatattctttatctgcctcttcctacacatcgggcgaggcctatattcacggatcatttctctactcagaaacctgaaacatcggattatcctcctgcttgcaactatagcaacagccttcataggctatgtcctcccgtgaggccaacatatcattctgaggggccacagtaattacaaacttactatccgcatcccatatcattgggacagacctagttcaatgaatctgaggaggctacctcagtagacagtcccaaccctcaccacgatatctttacctttcacttcatcttacccttcattattgcgagccctagcagtcactccacgtcctaattcttgcacggaaacgggcatcaaagaaccccctaggaatcacctaccattccgagtaaaatcaccttccacacttatagacaatcaaaagacgcccttcggttacttctcttccttcctctcctttaatgacctttatcacttattctcaacagaacgtcctaggccgaccagacaattacagg

SEQ ID NO: 599151 - DNA, 164 bp, Homo sapiens
ccgtggtgctcgctgttgaactgcccgagctgcccgacacctggctattgcgaacccgtcacgcaggacgtgctgcaccttcaccgacagcctgaatgacgccgtactgcgtgcaccgacacggccttctgaagccgtctggctgtgctgtgacgccaaggtgt

SEQ ID NO: 599152 - DNA, 1484 bp, Homo sapiens
tgggggggagacagcacccgggggggagaaaagggggccacacacacacacacacacacacaacgaagagggggggggggggggagggcgaggggcgagagggggggtgagagaacacacaccccccaccacccgcggggggggtgccccgccgagagaacagaaaacacaaacatcaacacacacccccacacaaacagagagagaggcaccctctccaaacacacagagagggggggacctggggcgaccaacacacaacacaccacacagcaggggggcacacccgagaggggcgaccctctctggggagccacacacacacacacaggcggcgtctccacaacaacacagggtgcacaccacacagagtgcggcgcccaccccctccaccttcaccacacacacaccttctgagagggagaggcacagagagagagcgaacaccgagaggcgcgccgcagagagaacacacggacaccacacagagtgtggagggcgagagagaaaagagagagagaccacaaagataacgcgagaggcgcgagggggggggagagaacaatcaacacacacaacccaagagagagatgagagagagagaagcgacactcacaacaaacacagaggagaaaaagagggagagagagagggacccaccaccaacaaatgagagcgcgcccacctcaacaaaagaaaccagagagagaagtgcgagaaaaaaaaacgaaaaaaaaacaaagatataaaacaaagaagaagcacaagccaacaaaacgcagcggacggagagtcgacactctactacacgaccgacgcagacacggaagacgaaggagggagtgtagaaaccaaccaccaccgaacaacaacacaccatcactcaaaaacactttccccacctcacgcggcgagacgcgccgcaactaacatcagttcgcagcgcacccagacaggaggaagcagaacaaccccaccagcaggagaagcagcatcgacgcaaaagccaccccacccccacacaaagctaaccaggcagcacaacactaccacacacacagtagtggaagagacacgaaatgaagaacaaagaaccacaaacagataagtaaggacccaaaccacacacccatacccacgcagggcgcccctccgctgcggcagacatagaaaagctaggcagacacacgaccccaaaccacacacacacacaagaagacgagaaaaagcaaggaagcgacgacaccaacagaccgagcaccacacaacacacacaccaacacaagcagcagcacagaatacatatgtcgatgccacccacaccccgcacagcgagacgacaaacgagcaagcaacgacagatagcacaaagaaaacgtaacacaacaaacacaactagctctaaccaccacaccacacaacacaccaaaacacagtctcaatgcaggaaagaacaggacaaacagcaccacccacgagtagta

SEQ ID NO: 599153 - DNA, 382 bp, Homo sapiens
ttggggccttttttccggggggctttcccacccctccaaaccccccctttgtttgggggggggacctgggcccccggggtttccttccgtttgccctggtgggggggggggggcccccttttcccggccttttgcctggcccctggttcccattttttttccgggggccttgggaaaattggggaggggtttggttttgtccacccccggtaccaagggccctgttttaaaaaaaaaaaagtttggggtccgggggggggtggggggggccccttgggggggaccaggtttttttggtttggatggttttttttggagggcatttttttccttggggggggggcattttttttttaattggttttaatgttttggcctttta

SEQ ID NO: 599154 - DNA, 101 bp, Homo sapiens
tgtctgtaccgccttgttctaactgtgccactgacttgtacctgtctgctgccagtgctttgtgacccctgctctgtgattatttgtttgcccctcttgtt

SEQ ID NO: 599155 - DNA, 937 bp, Homo sapiens
gactgcatcgacggacgggcgccagctacgggaggacctggagtggcaactgggcgcccgacggacatccccgggaccgcctgcccctcggcgcccgccccgccgggccgctccccgtcgggttccccagcacagcttacctacgggctcctgactccgcaaggcttccagaagatgctcgaaccaccggccggggctcggggcagcacgtgagggaggcgtccagacaccccaatcagctcttctcctcctgtgccagtgggctccccgggggatgagcatggtggttttccctcggaggccacactggatcgggacgtctgaggaagatgccggtcatgaggcatgtatcccttgcttcctgcagtcctggacgggctggctgcttgcctgcttgtgcccccccagcagtgggacttgtatgtgggaacgggatcgtcagaaggtggaagtggtacccttccaggaagtgtggggacgagtacatgacgggcgctggagaggctggtggacgtcgtgtcacgagtaaccacaaagagaggtggagcaatgtacaggacatcctgtgttacctgtgaggttgcacggatggttggggatgagaatctggagtgtgtgccggtggagacggaaatgtaacatgccagcatcctacagaatccgttctgtgggaccggacatccctacgttggagctgacgttcttctcacgcaagatcggtgcgcaattgccggctctgcggcgaagatgacgctgccagcaggagaccacaggccagggggaaaaggggaaacacaaagtgcacagcatgcacgtggaggcctacgtcccccagaccgaacctgacgacagaccgaccggcggatcaacgacaacacaagcccgggaacggcacacacacaccacaagaacccaaagagagcaccacacgcgacga

SEQ ID NO: 599156 - DNA, 403 bp, Homo sapiens
  misc_feature (168)..(168): n is a, c, g, or t
  misc_feature (320)..(320): n is a, c, g, or t
  misc_feature (333)..(333): n is a, c, g, or t
ggaaaactcttgagtggctcaatcttggctctccacaacctctgcctcctggattcaagcgattctattccccagcataccaagaagctgggattacagttttgaagatgaagaaaaaccgaagctataaggactgagataaaatgcccaaggacatatagcttgaanaaggcatggctagaatgtgcactcagtatgacctcagcacccaagctctttaccaatatatgctgcaatcttaggctcatcaactgcacacagtgaattgtggtgctacttcgtctaagcctgcattctccttcagagcctacacctccctntcagctgttttcnccttcactgttccaaaaaaagcagactttgaaaacttaagaaatgacattaaaaaaaatcaaaatcgaaa

SEQ ID NO: 599157 - DNA, 159 bp, Homo sapiens
tggggcactgcttgcatccaaccaccctacactgcaccctaatatgctttgtctggccaaaagcaggagaatggtgttgtttattgaatttatttgttggttgtagaagattctatgtgaatattttatgtgtaaaataaggttatgattgaatctact

SEQ ID NO: 599158 - DNA, 466 bp, Homo sapiens
caggatctcattcatatcacttgctgtcacgtatgcagtatgtacaagtagatacttgggatcagtctcgcactgtatctctgatacagttccttctacgggagtatcattccactaataggtggtgttataaaaaacaaacatgatagcttctcttctccatctctttaagccatctgttccctgtagttctgtagttccttatcctttttgtagaggctctccattttctcctttacactgtcattttaatctgggagtagagagaaagaatctgataactggcaccccctcacaccactaccaccaaagaagccactacgaattcccactgaaaaccttttgttctaaagggagagccagtcctgttcctactgcagtactgtcacctagaaaccaaaattctcagccgacataacatttcaggactaatctaattcctaagaactactcagcacagttcaac

SEQ ID NO: 599159 - DNA, 360 bp, Homo sapiens
gtttctttgacctcccaccccaccctccgcttcctagcctctgcctcccgccgtgccccaggctgtggatgtggacggaagtgggggtcccgcagtggcaggccaagttcacgtcaggcagggcagtgcagggagacagaccctctccgaggctctgctgagcggggacctggaggtgctgagtgccagccactgcggttccacctggtgcccccagtcctgccccagccacagactccacctcaccttggctgccaccaggggacactgcaggctgcagggacagcccgagctccagggtcactgccgttccctgccaacttggaccaggtggacctggtcctccaagggttaactcgg

SEQ ID NO: 599160 - DNA, 315 bp, Homo sapiens
tacgatcacccaaagatctttgagcatcacccaggcctaaatgtccacaggccactcttgtacatgctcttttagaaacaccactctgaaaagatctcgttcgctacgtaaaagaatgactacacatatcatcacaaatgcacactgatcatgactttatttaaaaattaccaaacaatactgtagaaacattgatatgtaaattcctaaaatgcctgcatcttaaatttagttggcaaagaccacatttaccaataaccatgagtttactcttccatgtagaaaccagatacactaaactgtaaaacaaaaaaa

SEQ ID NO: 599161 - DNA, 131 bp, Homo sapiens
gtcgtgtacctgcagctctctctgatgcacacaagcacactgtattcacctgtacttctttcctccccaacccatgccacgctgcttaacgttgtctctatatgctagttttcactgtatttcctgcttgc

SEQ ID NO: 599162 - DNA, 831 bp, Homo sapiens
gtaaggatctacctgaagatggggaatgctcgaaccatacaaacgtccgtaaccctaatgccccgccatacggaagatgagaaaacggggatctgatcgggaggttgcgatcaggtcgcagacccctccatagtattttgaaacgagtccctccgtaccaagcatagcagaatgtgtgcggcctccctggttgtttggttaaacatgagtatgcagcaaaacatattgagctcaggacggaccatgacggacgtgatcatcctcatccttcagactgcttggccgaagagatgttcggggcatcctgtacaaacaataattcatgctatgatctagtacgtattcatctgccctggcctgatgcacatacatcaactgtattgaagaggaatgcggataattagtaacgtcgcgtagtggatagggcgtagatggagtagacgtacagatagatcgacaaccaggggcacgagacggagggggtctcccattgttactatcttgagagctaataactatgagagacgtactgacacgctagaatatttgtagtagcattatagggggtaaacgaccatctattctggtggcgtataatggcgtacgaattgcttattcgagtcgattgactgtgtgatgaggttctattggtgcgccgtatgagagttaacttgatgaggaggacggtagtagagctgaaacaaagtatatgcattatcgggcctagtgagatgtagaataaggggaggaaaactggttactcatatacgggaagggggtctgcagagggaatggtttgggaacattcccgccccaaccgaaaagggatag

SEQ ID NO: 599163 - DNA, 108 bp, Homo sapiens
atttcgtgtcgtggtacatgtggctccctgccaggcgcaagagaaagtataacgtggagtgccaaggctaaaagacgaaataccacgacgacgaattccggcacgaac

SEQ ID NO: 599164 - DNA, 140 bp, Homo sapiens
cccatcagataaggtttaatatatatccaatacagaaatcctattaatttttgtgttggacagtagtgaaatcttgtgatttttaatcgctttgataatacttccaaattttatgatttttctgatgggacgaagactgg

SEQ ID NO: 599165 - DNA, 242 bp, Homo sapiens
tgcagtacatagtacccactcctgacgtcaagtgtgattgagctgtcacagggcaggcctgaatacactctgctttcagcttcgcagctatgtggatgaggcctgactaccgcagcaaaatagatgccaaatacaacccgacgatcgagggaatggtcaggcgacccgatatatctgagatagaagaggccacaataccatgtccattctgcaaatttcttctcccagagtgtgaactcctc

SEQ ID NO: 599166 - DNA, 103 bp, Homo sapiens
tggtcttgtgcaggaaaaaataacatccctgcatctgttataaagtataaatgaagactgtcctagtaaaaccaaaaataaaattcgtgtggtactttgctgc

SEQ ID NO: 599167 - DNA, 775 bp, Homo sapiens
acttacatgcagattttttttcaataaatgatattggaaattttgggagagatttttcaacaatttgaaaaaactcagatgaattgcacagcctagaaatatcaaagaaattaagaagctacttatgtcatgaatgtataaaatacatgtaaatactagtctattttatcacttactaccataaaatatgcacatctattattaaaaggtaaaacttaacaaaacttacctacttacagaccacacgtggcaccattctcagtcaagagaaatgtaaaccaatgtcgggatgcagtctgaaaccgtaactgcataaaattaactatagtacacagtgtgctgttaatgtagccacttcctgttgttactgtagtgagctcaagcgctgcaagtatctgcttaaaacgtgtgtgacactacccatccccgcttcagcagttcatatccaggacatctggtatcccagtaagatggaaaaagtgatttcttgcagtttttgtggtatttttcatcatgcttagtgcaatactgtaaaccttgaatcccaccatgggacccatatgaagtgccactactgatgctggaagtgctcccaagaagcagaaaacaagtcgtgacattacaagaaaaagctgaattgcttgatatgtaccacagattgaagtccacagctgtggttgctgccatttcagacagatgtttcatctcatatgtaaatacagtaaaaaccttacaataccgataaatacagtaaatatattttatcttccttata

SEQ ID NO: 599168 - DNA, 711 bp, Homo sapiens
gctgtataatatgcctggcaacactttgctcaaagctccatcggccttcaccatcagtacaaccccaagtttcagaccctgttccaaccctgtaacttgatgggagctatgcacgaaattgaagacttcaacacacatgctaacattgactgcagccctcataaaactgtccagaacactgccaatgaatttccctgtttgccaaagcaagcggcttgaatcctgcccacaaccaaggttttcatgaactcacacccacttcacaccgcgctccctgaaggccaacaatacccacgataccaccctcttcaccaacgctgacgacaatttgccacctatacgactgaacaattaagaagggactgaaaacgttaaccctctccagaccatctccctcctaccataaaacaccgaacacccactgacagtcacaatgccgcacctctgcgagcaccaaacttcctcacctcacccctgcatctccataccaccaccgccctccctcccacccctacaccgccccgtctacatagatccccccacaacacgcccgccacctatgcccggcctaccgcgtagcgttccaccaaacggataaaagattcctctcccaattctcgcctaactaaccccccacaatcaccacacccaaaccataaacggcgaacgccaacactaaccccaagctactaacacaacaccctacccaat

SEQ ID NO: 599169 - DNA, 390 bp, Homo sapiens
  misc_feature (92)..(92): n is a, c, g, or t
gcgacctagaggacccttttccaatgacaaatgggggaaatcaatcaaacaggtctcttctgaagatttatttctgctctgagctgtactgngtgacctactgctctaattaggctggaaataaacctggctttcatgagatgcaggacacggctggagggaaaaaagttgtcaagactactttaccatcatcaagtgcccacaggcctccagaaccattcccagaatttcattgattcattccataatttcatttcctgccccatttagggccacaaaacacaagacacccagggagaaaaaaacaccactgggctgatttaagctttactgaatctgcccaaggggcaggacaagagaattacacaaaacaattaagtgctgtaagtt

SEQ ID NO: 599170 - DNA, 1387 bp, Homo sapiens
  misc_feature (625)..(625): n is a, c, g, or t
gctggagccggcctgcggacggggccctggagcttgcctgcctccctcgctcgccccagcgggttcgctctgcgcagggctgcagggctgcgctgctgatgaaggctggtgagccctggtgctgccccatctggcctgcaatggcggccggtcggggctgctggctgtgctgtgggcagctggctgctgctgctgccttgtgccgatgcacggtgcgcaacatgctcttggtgttgtgcttccggccaggccctgctggtgctggtgcgtgcctgtgctgtgcctgtgctagtgctcgcgctagctacacaggtgctgtgcgctgacgtgcctgggcctgtgcccggaacggacgccctgggctgcttgttggctctttgcacgttgccgagtaattgagagcggagcctggccttaatagcccagacctttgccggtgaagggccattgggtttggcccccacacgatttaccctggccccaaacgacaccgacacacggtgcaacggcccaaaacagttaggcaagaattccctattgccaatgaccaaccggttttcagtcgggacttacaatttcaccttgtgaagcgctatggcaagactttgggctcggcattggcacntgaaccatgcaaacccgctggggcctctttgcatttcgcaagcggcaaacgatacaaaatcaaagcacctgagcccaggactgccccttgctcaaaacaaaccaaaccacatggggccctggtggagatcactttagctccccaagtgccccaggcgggccccaggaccactgacgaggaggaaccaccaacccggagttacgaagttttgggctggtccttcaaaaacaaaccgtggaaatctcacggcggtccctgcgggtcggccggtgtttacgaacacaacccactagtgctcaacgtgtgggccggaacgcacacgacaagattatcattttgctatcgcccctgtgtttacgaaaggccaccaggggctaggcactttgggtcccacaacgcgggttcagtatagccgggggaccgtggcagtcacttaagcgcaagtagtagattacccacacgatcagagaaaggggcgggaggcgcccccagaagcatgaggcatttataccagtgcctctgttaacacgccacaatatgctctattactccttttcggctaacaccacaaggacgaggatgtgtggataccgccgccattaaatttaacagcgtcagacccggtaccgcgcataattccaactgtaacaccggctctaacgggcggaccacttttggggacccacgatcacgagtcatataacccaacagcccgcgtgtctctgcgttcggcaccttctggtcgagacaaacacaaccatg

SEQ ID NO: 599171 - DNA, 645 bp, Homo sapiens
  misc_feature (270)..(270): n is a, c, g, or t
ggtagggaatggcgcctcccgcagtcgctcggaactgccgacccgtagtgcttcccgctagagggcgtggtggtgggagcggagtgggtctgggcggggcctgagcctgggcctggggccgtgttgggggtgccggtggctgtgatgtgactgggcctgcggaggacctggtggggattggtgcattgcagctctgttgatgctgccagaaggacacaggctggtgtgtcggatgcggctcttagaggacttgaatctgacatacgatanccgttgcgggggaaggaacgggtgacgcaagaaaaggtgcagtgccggtcggggcgaatgcgctttgaaacgctttggcataggctagtctcgcggagtttggcattgcgagtggaggttctacggggacaaagcaggcattgcgagtaccggtacaaatggcgaaggaataggaactgcattgcgattacccaaccgacgcgtatcgtgcactaactcccagcagtgcagcggatagtggcccgcggggagagtgacacagagaggccggggtttgcttgtaatgagaccagacagaaggccaatccccagttcacaattccatgggggccaattgtcagaagcacgaagggactaaacatgcgaatgatctgg

SEQ ID NO: 599172 - DNA, 619 bp, Homo sapiens
  misc_feature (92)..(92): n is a, c, g, or t
  misc_feature (129)..(129): n is a, c, g, or t
tgccaaaagtgttgttcatatacaaaaaacaaaaataaagggattggggccaatccttgtggaagaaaggcgtaatcttcaaccaaatctcntcaatgagacccatgccccttgcaattaatccatacnacaccatcatgtgtggcatgttgccaacgtcccagttgtactgtccactccagtagtatcttccgtttggaatgcatgcatgacatcaattaatacaaccatccacccccgtcttctttagaacgctgtattctgggatctagtgttaccagcacgtcgttgtctcccatcagctgagatgctccatccatgagggcattacgggctgatcctctgtatttgttcaatgagatctggcagttgttggcttcattctgtgcagtgaatcgtccatagttagcctttcctttgtctgcatgccgagaccgtggcgttaagttctgttctctgtgatagaaatagcaccgctttactgtttagagtaaaggactcactataaagagtgaacattatgcaacatcacgagtcaatatacagtcacggaatataagattcataaataacatggaggataactgtaacagtgctacgagatttagcagcatatacg

SEQ ID NO: 599173 - DNA, 342 bp, Homo sapiens
cttgccaagagacctctaagtgcgcaacatccaaggtgttggttatgttggaccagccacaaatccagaagttcaaaaaggccttcaccatgatggatcaaaccaaaaatggtttcttcgacaaggaaaattggcaggatttgctggcttcattggggaaaaatccacctgatgagtatttaaatgccttgatgaatgaggctccaggccccatcaatttaaccatgttcctcaccatgttgggggaaaagttaaatggcccaaatcctgaaaatgtcatcagaaatgcctttgcttgctttgttgaaaaagcacctggccccatccaggaaaattacttga

SEQ ID NO: 599174 - DNA, 338 bp, Homo sapiens
gcgtcgacatggaaaataagatgttttttttttttcggaaaccgtacgtgatctcacagcagcagacgactgctggtagatcaaaagggggaggtgttgagcttcagagagaattgaccttaataagatgataactgcaaaatgtgtttttctcaaaacaggtttagctgctgaatttctgacttcatcaaatgatccaggagcaattaatgaattaaggaatgccttaaatggtttggcattcaagtgccattggaatctggataaaaatggattttatgagatacttttgtaactaactaactgtaacgtaactctgttaacagattgattccttt

SEQ ID NO: 599175 - DNA, 141 bp, Homo sapiens
ggtcattagcttcatatacttttgacttatggggcataaataacttcatagtacctgaggcggatttatccgaacttcgtgctctgtggttagattaaccgctttaatcactattaatacacataggggaatcagttagtc

SEQ ID NO: 599176 - DNA, 849 bp, Homo sapiens
agcgggtccgtccgcccgcgggtgccatcatggcggacgcggccagtacaggtgctcctgggctccggtctcaccatccgtgtcccagccgctcatgtacgtgaaagtgctcatccagcgtgggatatgagacctcttcctccaacaataggacgaaaatatttttgggcggcaagtgtgtcagcttcctggtctcttaagttatgcgtcagcacatggccagtatacgatgggaaggcgcgggtttgttcacaggacttaactccaagactgtgttcgggagtccttggaagctgtggtccatgggtaagagttttacatgctagttaccaggagagtgacgcagggtgaggagttaggacctggaaatgtacagaacagaacgtgcgtcatcttccttgtgaccaggtgtatcaaggagacgaactcgacgagatgactcgctcgattgctgctgctaccctgcatcacacatcccttccatgtgatcactcggagatctatggtacagttcattggcagagaatccaagtactgcggacttcgtgattccataataaccatctatcgggaagagggccatctaggattgttcgcgggtcttgtcctcgccttctaagtgacatccttgctatgtggctgtggtaactcacgggcctacctcgtgcaataactatgccatggacagtggggtatctaaccatgaatgacttgacgacgtcaatctcaagcctgtcacaggaattttggcaatactgttgaacctaatccctttggtctggctgcaactccacatggctgttcaacaactggtggctcgcagggtgatgcctctttatccccacatat

SEQ ID NO: 599177 - DNA, 450 bp, Homo sapiens
  misc_feature (402)..(402): n is a, c, g, or t
  misc_feature (416)..(416): n is a, c, g, or t
  misc_feature (425)..(425): n is a, c, g, or t
tgcaagtccgcctaccagattctggtgattcttgtgcctcagcctcccaagtagctgggattgcaggcgcccaccaccacgctcaggtaatttgtgtgtgagtgtgtgtctatgtatatatatatatagagagagagagagagacacacactcacatgttttggggtttttttgttttgttttgtttttcttgagacagagtctcgctgtgttgccagggtgagtactgtggcgtgatctcggctcactgtaacctccgcctcctggggtccaagcgattcttctggcttcagcctctgggagtagctggggactacagggcgcgtgccaccaagcccagctaatttttgtagttttagtaggagatgggggttttcaccatgttgggggcaggatgggtcntcaatgtatttgantttgtgatncccgcccttcttcgggccttcccga

SEQ ID NO: 599178 - DNA, 88 bp, Homo sapiens
tgccagatgcctttggagcaggtgctttctgggctggagcgctttgccccttgtgttgtcttctcgcaggtgtatagtagtagtaggc

SEQ ID NO: 599179 - DNA, 286 bp, Homo sapiens
gtcgttttacttggtgtagagctatgtgcgtggctccgtttttattccggcagactgctagtttcgtcactgctgttccatctgctgcagtctccgagacgtcctcctgcttctcccggtaggctgagcctgtagacctgttcatgctccacctcctacgctgctgcctgtctgctgggccccctccctgcctgtgcttacaacacttgcatccaggactctacacagctatgctctgcagagccctggactcttggcgaaacacagggactgtgttggggggatc

SEQ ID NO: 599180 - DNA, 219 bp, Homo sapiens
ggtctaaatagtcgtatcactgtacgaaattcttaattacaagaattaccaattgagaaatagaatgcagctcattatgcaaagagacggcgacttcatcggcgtcttgaatagtctcctcggcgttaatactcttggccgagttgtactggatcaatagaccaacaatttattgcatcatttgtttctgcatcgagacatatggcacagggcggtgac

SEQ ID NO: 599181 - DNA, 171 bp, Homo sapiens
cattaggcaaaaagaaaaagaaaaaaggttattttaagacatgctacagataagtttgtctttggtatctgaagagagcttgaggcctaacaacttaactttaacattttatttttgctgctctggtaggaatgtctctgaaagttattatgaggctttataagcatcaga

SEQ ID NO: 599182 - DNA, 447 bp, Homo sapiens
agaatgttagagcatcaatattgtagaagtgtatttttcaccatggaaaggccaaattccctgtacgcctaactccagaatatagaaaatatcttaatcgcctggaatctatttgagttactagctgatggtcaattaaattgtcctgatatccaatgctattcaatatggttactaccaagggactctcagaaatggctactaaaagccactgagaaggcctagatcattcatattgtacattgacatttttacataaatggaattaatactacttaccatttgagtaaagaacacaaggaattgaagagtctgtgaaaatatgtcctgtttgtgaaaggtgaaactgtccaatccatgtccaatcaatgtcagtcgtccagtatcggtggtgattattaaacttattggaggtacaactttacctccaataagcttacctttacg

SEQ ID NO: 599183 - DNA, 792 bp, Homo sapiens
  misc_feature (8)..(8): n is a, c, g, or t
  misc_feature (19)..(19): n is a, c, g, or t
  misc_feature (28)..(28): n is a, c, g, or t
  misc_feature (33)..(35): n is a, c, g, or t
  misc_feature (43)..(43): n is a, c, g, or t
  misc_feature (45)..(45): n is a, c, g, or t
  misc_feature (47)..(48): n is a, c, g, or t
  misc_feature (56)..(56): n is a, c, g, or t
  misc_feature (62)..(62): n is a, c, g, or t
  misc_feature (75)..(75): n is a, c, g, or t
  misc_feature (83)..(83): n is a, c, g, or t
  misc_feature (100)..(100): n is a, c, g, or t
  misc_feature (106)..(106): n is a, c, g, or t
  misc_feature (111)..(111): n is a, c, g, or t
  misc_feature (118)..(118): n is a, c, g, or t
  misc_feature (120)..(120): n is a, c, g, or t
  misc_feature (128)..(128): n is a, c, g, or t
  misc_feature (136)..(136): n is a, c, g, or t
  misc_feature (139)..(139): n is a, c, g, or t
  misc_feature (157)..(157): n is a, c, g, or t
  misc_feature (164)..(164): n is a, c, g, or t
  misc_feature (170)..(170): n is a, c, g, or t
  misc_feature (176)..(176): n is a, c, g, or t
  misc_feature (178)..(178): n is a, c, g, or t
  misc_feature (189)..(190): n is a, c, g, or t
  misc_feature (197)..(197): n is a, c, g, or t
  misc_feature (202)..(202): n is a, c, g, or t
  misc_feature (221)..(222): n is a, c, g, or t
  misc_feature (235)..(235): n is a, c, g, or t
  misc_feature (238)..(238): n is a, c, g, or t
  misc_feature (241)..(241): n is a, c, g, or t
  misc_feature (269)..(269): n is a, c, g, or t
  misc_feature (277)..(277): n is a, c, g, or t
  misc_feature (279)..(279): n is a, c, g, or t
  misc_feature (286)..(286): n is a, c, g, or t
  misc_feature (298)..(298): n is a, c, g, or t
  misc_feature (304)..(304): n is a, c, g, or t
  misc_feature (316)..(316): n is a, c, g, or t
  misc_feature (319)..(319): n is a, c, g, or t
  misc_feature (334)..(334): n is a, c, g, or t
  misc_feature (340)..(340): n is a, c, g, or t
  misc_feature (349)..(349): n is a, c, g, or t
  misc_feature (360)..(360): n is a, c, g, or t
  misc_feature (368)..(368): n is a, c, g, or t
  misc_feature (375)..(375): n is a, c, g, or t
  misc_feature (381)..(381): n is a, c, g, or t
  misc_feature (400)..(401): n is a, c, g, or t
  misc_feature (403)..(403): n is a, c, g, or t
  misc_feature (434)..(434): n is a, c, g, or t
  misc_feature (460)..(460): n is a, c, g, or t
  misc_feature (481)..(481): n is a, c, g, or t
  misc_feature (484)..(484): n is a, c, g, or t
  misc_feature (502)..(502): n is a, c, g, or t
  misc_feature (524)..(524): n is a, c, g, or t
  misc_feature (536)..(536): n is a, c, g, or t
  misc_feature (543)..(543): n is a, c, g, or t
  misc_feature (580)..(580): n is a, c, g, or t
  misc_feature (613)..(613): n is a, c, g, or t
  misc_feature (615)..(615): n is a, c, g, or t
  misc_feature (620)..(620): n is a, c, g, or t
  misc_feature (644)..(644): n is a, c, g, or t
  misc_feature (656)..(656): n is a, c, g, or t
  misc_feature (661)..(661): n is a, c, g, or t
  misc_feature (669)..(669): n is a, c, g, or t
  misc_feature (672)..(672): n is a, c, g, or t
  misc_feature (721)..(721): n is a, c, g, or t
  misc_feature (724)..(724): n is a, c, g, or t
  misc_feature (766)..(766): n is a, c, g, or t
tgctttcngaattcatgantcttttttncattnnntttttttnananngggttttnggtggnttttgccaatttngcccaaantgtcatcgtcttttttntcttgntttgnatgtgcngncctgtgtngccttgtntcncctggccttagatttccngggcccnattctncctttncntctttgttgcnnttttccnatttngaatccctgtcaatcttannttctgccaattgnccntgntccccttttgctttccccttcttgcccncccttttntnccgtgcngtggtcttttcngggatnttccccttcccnggntcttccttggttctncccggngccatgggntcctgtttccnctgctgtnattcctntttcgnctggggtttttctggcacnncnggctcccggggggctttgcttcccgcccaantcctgttgtccgtgtgggggccaagncccggtggggtgggatctggnggngtgcctgtctcctgggtngctgtcttctgggacgtgtccncctctgagtganaaaattngagccgaatatgccatgctaaactgcatacagctganactgtcttgaactgatgaacaacattccttggnanaaaanaaatgtcattatcatatagctgantcctggcatagngaatnccttcccnccncagttgattcagttttgcatcatcaacccattggacacactgggacagnggnggttcatgtaaatctaactgcattcgttgaactacttctaanaaatcttcagcatgaaaacaaattac

SEQ ID NO: 599184 - DNA, 236 bp, Homo sapiens
gagaattcctatggatacatttatagttagcacaaaccctaacacagtaactagtagcacacccataccagggtctcgcccagtggcacgcctaggattatatagtcgcacaacacaacaagttaaagttgtagaccctgcttttgtaaaccactcccactaaacttattacatatgataatcctgcatatgaaggtatagatgtggataagacattatatgtttctagtactgat

SEQ ID NO: 599185 - DNA, 491 bp, Homo sapiens
cgcgggccgctggtcaccatgaaccacattgagcaaaccttctgtcctgtgaacagcatacagactcccaactacgagatgctaaaggaggagcaagaagtggatattctgggggcgtcccacaaccttgctacccatacgcacaccggaatccacatacgcagcaagacctacgtgctcagaccacatttgtttggcacatgttgaacaccctctatatgacacctgctgccaggctttaataacattctcatactccgctaagaataggtacaagaagatggataccatctttaccggagaccaaggctaattcctacactgtcaagagcctgaacatcggccgcctgaaagagagcatgtatactgaccattctgctaaaggtgataccgataggctgacagatcccaatgtaccacaagagggcttcattgacgtcatgatctcttgccgtgacctttatccaacaatctatagatcttcctcgctg

SEQ ID NO: 599186 - DNA, 93 bp, Homo sapiens
  misc_feature (29)..(29): n is a, c, g, or t
  misc_feature (49)..(49): n is a, c, g, or t
ggatggactggctttgagtgtagcgttancccagcccctgaacagggangagcgccctgtgattgtgctctactacttgatggctgccatggc

SEQ ID NO: 599187 - DNA, 294 bp, Homo sapiens
tccccagttaaaaaacttttaatggccccggaacgccccattgtaacgggcaggcaaaacacctctccttttcccaggctcattcaatttaaccagaaaacaggggagcttctccttcaccccagcctgtggccctgtgttgcctccccaattggccccttgcgaggccccttacacagtggcctgcctgtgggaaacacaaatatattgacaggaacacacgtggactgatatacagaaagtgaggccagaacaccacccaattgcctggtgtgcccctcccaagaaagcgac

SEQ ID NO: 599188 - DNA, 682 bp, Homo sapiens
cctgtacattgaggcgaaagtcacatggggagagagtagtacaacaacgattaaaaaaccttatcttggccagatgtggaggctcacgcctgtaatcccagcactttgggaggccgagacgggtggatcacctgaggtcagaagttcgagaccagcctggccaaaatggtgaaactccgtctctactaaaaatacaaaaaaaaaaaaaaaagaaagaaagaaaggccaggtgcagtggctcataccttaatcccaacattttgggaggccgaggcaggagaatcacttgagcttaggagttcgagaccagcctgggaaacagagtgaaccctgaccctaaaaaataaccacaaataataacaacaggcagggtgtggtggctcacacctgtaatcccagcactttggtaggctgagactggcggatcacctgaggttgggagttcgagaccagcctggccaacatggtgaaaccctgtgtctactaaaaataccaaaattagccaggcatggtggcgggcacctatgatcccagctacttgggaggctgaggcaggagaattgcttgaacctgggaggcggaggttgcagtgagccgagattgtgccactgcactccaacctggacaacagggtgagactccatctcaaagaaaaaaaaaatctttttttcttcgactctaa

SEQ ID NO: 599189 - DNA, 724 bp, Homo sapiens
tgcaggtgtctccatgagggatagtacaggtttcagagggataggaagttggtgcaggtaggtcgtaagggaagtaactcttccccttctgtattctaagcctcctttcgtcacagggtctaagagaaaggccagtggccatgggtcaaagcaacaatcctctctggaagtggtggggatagcaccagcttgtcgctgggaagagatccactgagacattgcttctcttgtccttaaactctgggctgcctaatggtgaaacttctagtcggaggacagtccaggttgggcagagccagacatataccatggaagaagctgtcccaagtgagagagtgttaggtcataacggagtctgggcaggcagtactggagcttggggacttccttgccttgtggattccgtgagggtgaatatcacaaggtttcggtgtgaattctcagctgttaagcactgtgggcacctaggccgaggaagtgaagtcacttcccgcttcatgattcccagtacgtgtgtgacctatccagaggagaaatcacgtcctttggcatcctcgttggataccaagactgcagagcagtgatgacctcagcaattggagtctctgtatcaggccagtcttccgggctctcaagctggctgtcctggatgggggccgcggatacgtctggctcccatttgcgaagaggctcggcagatggatggggagggggttgactcggc

SEQ ID NO: 599190 - DNA, 710 bp, Homo sapiens
  misc_feature (27)..(27): n is a, c, g, or t
ctaaccttctaagcatttgggggtggngggaaataccccaagacaaggtgttttttaatttgaaaagagaggaatattggccgggtgtcaagtttgttccaaaacaacgactccaaagtaaaagcgcttggaacccttcctattgtcccggaattacaggcattgggacctggcggccatccctttgggtttttttggcctggaagcccaaccgccaattctccccctttcctggaaaaattttgtttcataaacacatattttccccaaacgggtctattttactcaataaatcatatattagacccgcctatagtcaaataatttttgttaaaccataccgtctttagaccagctgtgtagtgattagtcgcaatatgtctcaaaatgtatgctccaagcactctcatccattttagcttgatgcacggttttttcacatagcttaaaaagatgcgctcttgtacatagttctggaacgtagcttcattctccagataactatcatggacacactttagggcgcttgtttcaggtaggggtgtatacatcccaggggcgtggagatgagcattccactgagcaagtagaaagatgattttttgtatttaatctcatcctttttaattgcgatttttgtgtgttttataatgtacataatatgttgcacaattgcacacttctattacttataaaacaacattaattgg

SEQ ID NO: 599191 - DNA, 637 bp, Homo sapiens
taatgtgttgccgtgcaggtaaaggcttactaaaattgtgaaaccttggcttggattaagggcgacagcgatttctaggatagtcagtaaaattagaattgtgaagatgataagtgtagagggaaggttaagggttgatatcgctagggtggtgcttccaattaggtgcatgagtaggtggcctgaagtaatgtaagcggtaaggcgtacgggccaagggacttatgggctcagaactgacctagcgcgtgaagtggttctcgacataagtaacctagctaggtgggagactaagggggatgctaggtaggcgcccatagagggagtacacgaaagagcgcggcaaagtagccactcagcaacatcactaagacgcgaaacgcctcaataagcaccagctgggcgaccacgggttacacattaagcggaggagaataagaaccacaacgagggaaaaagagacaacaacaaagaacttaacgatgaagggtcagggaagcaggtaagataaaaacactgaaaaatgaaacagacgaaagcagacccccagaaaggacaagagaccacgaaatcgtgagagacacatcaaacacaaacgagaaatacaaaagagcaacacccaaggcaaaaaagaaac

SEQ ID NO: 599192 - DNA, 395 bp, Homo sapiens
ccagatttatttcaaatttcataggtattctgattttttttatctgcctcttgagctagaggtaaacccgacaaaaagagaaacttgatatatcttgttcactgatctctcacagtgcctggtaatacattgtcaattaaatgaatattaaagaaaataaacggatgaataaaggcactcatacataatatatgcttacatgttaaataacactaatatacatttgaatttattgtatactgttgatatgttatcctgaagattatattttctttctttttttttggaccaagtcattttaccatactctaatgggaaggcccaccaggaaccagggccttaagcatgcatgtatggtaaaattttaaatacaagcaaaatattaataacattat

SEQ ID NO: 599193 - DNA, 403 bp, Homo sapiens
cctgactccagatatcaccgggcattcaacatacaaactgatagcacacggagtaccggaaaacgaaatttagcatatacccattgctcacgaaacaaaatgtccttgtcgatatagggctgaactcgcatggtgtacctcatctactgcgacaacttgaccttactctcccatattgcagtcgcggcacgatggcaactaaattaataggcatcaccgaaaattcaggataatgtgcaataggaagaaaatgatctatattataagtctgtcctatatcaccacaaaatggcacatatagaacctgatgaaacaagcatgtcatcgtaatatgttctagcgggtttgtatttatctcgagagattattttcataaagctgcagggacccactcgggggatcc

SEQ ID NO: 599194 - DNA, 807 bp, Homo sapiens
  misc_feature (36)..(36): n is a, c, g, or t
  misc_feature (89)..(89): n is a, c, g, or t
  misc_feature (98)..(98): n is a, c, g, or t
  misc_feature (117)..(117): n is a, c, g, or t
  misc_feature (193)..(193): n is a, c, g, or t
  misc_feature (208)..(208): n is a, c, g, or t
  misc_feature (236)..(236): n is a, c, g, or t
  misc_feature (253)..(253): n is a, c, g, or t
  misc_feature (273)..(273): n is a, c, g, or t
  misc_feature (332)..(332): n is a, c, g, or t
  misc_feature (425)..(425): n is a, c, g, or t
  misc_feature (438)..(438): n is a, c, g, or t
  misc_feature (443)..(443): n is a, c, g, or t
  misc_feature (457)..(457): n is a, c, g, or t
  misc_feature (460)..(460): n is a, c, g, or t
  misc_feature (536)..(536): n is a, c, g, or t
  misc_feature (538)..(539): n is a, c, g, or t
  misc_feature (541)..(541): n is a, c, g, or t
  misc_feature (550)..(551): n is a, c, g, or t
  misc_feature (574)..(575): n is a, c, g, or t
  misc_feature (632)..(632): n is a, c, g, or t
  misc_feature (700)..(700): n is a, c, g, or t
  misc_feature (737)..(737): n is a, c, g, or t
  misc_feature (780)..(780): n is a, c, g, or t
gttttatatttaaaaaaaaaaaaaaaagctaaaatntatattggatatattttctataactttctatttgggaaactattgtttaaaangtccctggncaaataactcccaaatganacactcaaccctaaggatgttttcagcccactgttagtgaagctgggtgcagaatgcaaagcctctaaaaggagtngatacaatgtcaggngagtaggggccattggcaatgctcaganccagccagactccaaanagggagcccaagtggttttnttctgggacactctacttgaattattgtttaattagtcaaccatagatcttcaaaaganaacaattagttaacatgataaaaagtgactgcattctttggactgtatcataattatagtaagcaaattctgacagttttaatgaaaatagcntccaccattttgnaggtntgaagataacttanttntccacagggcttttaatgtctgctggacaatacatgaatgataagctataaatgacattgttttatgatataaaantnntngtttttttnnttttttatttctataggcattgnntgtttgagtcaaggttaggcttgttaagtgattaaaggcaattttattacagcagcntgtacttattcttttctaaaagaatttttttcataaacagaaacaggttttatatttgtttgcaaccngcaaaattgaattattttgctgatataaaatactaanaactcacttgaggaccatgccaccttctgaaaaggccacacanctacttcttaaatgtgttaaagttaca

SEQ ID NO: 599195 - DNA, 319 bp, Homo sapiens
cattactcatgcctgattcacgagttatccattggcacgcgtactaccactatgactatgtggacaccgtctccacaattatcagtcgacaacgtccctgccattagtgaggttaccgacatctcacttgaaagacatttctgtcttcactccggcagaggacttccgggtctaggctgggagagagccccttggacatgcctgtcctgaaagcggctgcctctcatcatccattcccaagatgcctgatcagaaaccaaccatgaatgaacccctggctccttcatcactccccacgattgggtactacgctttggca

SEQ ID NO: 599196 - DNA, 1907 bp, Homo sapiens
  misc_feature (101)..(101): n is a, c, g, or t
gaggaagggagacaagtgagaagggaaactcggaaagagccaaagggaggaaacggcagagccagacgacgacacagacggacacgacgacctgaagtgtngacaggacgacgacggaccacatggggactgactgacgacgaccagacgacgacgacgacgacgacgacgacgacatgacgaccagaagacttacaggaacgacgacccgctgtgacgtcttgacatataaacacgaccttctgggaccaagacaagcacgaccaacgacttgcgacgacgacgacgacgacgacgagcgacgacgcacgctgaccgtgacgacgacgacgcactgagaaaagacgaccacgacgaactccgacgaggacgcaccagcagacaacggtgacgacgtgcggcgacagaacgaccgagtaacgctagctaacacacagggacacagacgaccgacagaacgaccgacagaacgaacggcagaacaacgacccaccataggcgaacgacaccacacggacgaaccacgacacacgatagatagatagcttgacacgcacagatgatgaacaacgacagaacagacagaacttatgaacagaacaaaataaaaatagaaaagcgaacgccagcaaagaaacaaagaacaatacaaagacacagaaaaccaataccagaagaccagcagacccggcgaggagacaacacagattagacaaccgacaagagggataagcacaccagagcaaacacgacacacacccaacacaaagcgcacagcacgcaacgtagctgtagaggaccaccaccccccgcgaccgaaagaccgaagctatgagacaaacaagacccagaccaacacaacgacacgtcgcaggcgccacaacaaagaaaaacaatagaagcaagaccgaagcagcatacagcccgatagccaatccgcattgccaagaccaatgaagccgacacgtacctccgttcagatacagcatcccattcagggcagacaaacaagcaaagaggccagagcccattacaccagacgaaccaaagtcacactaacacaaacaccagaccatacgcaacaagcgacagagccaaatagaaaagcgcgacgcccaaaacacgaaaaagccgccaacacgcacggagaacacacgaaaaaccccacaacagagacgtacgcgaaccgcgaccatatataaggaacggcaaattacagctcaaagagcccaaaataatagcaagctatccaaggatgacacgaagaagaaatatacaccaaacacaccatatctccgcgcaaagtcgagccactcagtttccctagggtacagagagtcagagacattcaacatataacctgaccaaagccacacagcgcgacaagaacagcgcacgaaaggtatgctacgtataacagagaaggagacgatcaggattaagcacccagcgcaataattacaccaaatataatacaaacaaacacacaaatcttcgaggagtcaggtgtaagagaaagaccctaacacacgataatgagtgtcaagataagatacgcatcttcgacaactaatcagcgacagaaatgaccgtccacaccgccggaaggagacaaacacagaaacgcaccgaaaaaaagacagagaacgaggatgaacacgacggtatacaacgagaacaatgcaggagcgagagagtgaagctacgaggcgatgcagacgagacgagtgctctctctcccgctcagctaagtcgagtgcgatgcaaacgatatgtcaagcacatagagctacaagtagaaacacgctatgacacgacgactcgacgtcatcacaggaggagagcaggagctcagagaagacacacgtcaggaagacgacacacgctggaatgagaacagaagaaga

SEQ ID NO: 599197 - DNA, 825 bp, Homo sapiens
atgtgagtctgtaggagatgacgcacccgggtataacgcgcgggaaatttttatggtaccgaggggaaccccctggggggccccgcacgtgggagggcgcgcaagcgtcccgggtttgtgaaccccctctaggcgtgtgtcgttctaagtatttaagtttttgaaagcgcgcacgccgggttcgggaccatagtgcttcgaaagaggtcatggggtgtcgttcgttgagaacgtgcggccccgctcggagttgtcttcgtcttcacaccacctggggaggacgtgtcagcaccatgatggtgtccgctgaaaattacccctctttatggggcgtaataccccaattccatctggaacacacttggggcttgataaaccccggaagagtgtttagaagcacaagggcgttggtcctaagtaattggttgtccacaccgccgggaaccacatttcgtggaggaccaccaaatgacgttcccgacgctacacgcgcaaagctgtgttagaccaaatgctcgaagggcccgttaatgttcgtggagaaaaaattaaagagcggttgcctcaccgaggagttgtatgcgttactaagctcggcaaacaattcattgtgcttagcaccacagtggtcaatacgtagagtgaagaggcccctcgactgccatagtggggctaacaaaagggggatacgcccactctcgggaacgagattcatagagtgaagttcaacaccactgcactgggatatgatcccattgtccactctccggatgtcgtcgtgaggggctcgcgaaataaatcatatcgccgccccacatagacagc

SEQ ID NO: 599198 - DNA, 242 bp, Homo sapiens
ggagatggaccttgtgcacgctattgaggccctgccagggtccggccacctcactgccttggaccaggacctgctgcttgtgaaagctacctctgctgccaccctcagctgccttggggagagcctcaacttgttacagcatgagtgtgcaccaggcggaccagcccagccagaagccaggagcctcggaaaacatgctgtgatggcacgggtccaagtcacattccacagagcagctgaaa

SEQ ID NO: 599199 - DNA, 109 bp, Homo sapiens
tttggcattccaagtttgtgtttttttaaatccttggaaaaacggctttggaaaccttttttttcctttccctcttttttatgttgtaataaacattcatgtgccctta

SEQ ID NO: 599200 - DNA, 87 bp, Homo sapiens
  misc_feature (41)..(42): n is a, c, g, or t
aagtaatgatcattccccaaaaatgttctgttatcaactgnntttataaaaaatcgattgtgggtagaagcagagaaaaggcactta

SEQ ID NO: 599201 - DNA, 376 bp, Homo sapiens
  misc_feature (2)..(2): n is a, c, g, or t
  misc_feature (110)..(110): n is a, c, g, or t
  misc_feature (121)..(121): n is a, c, g, or t
  misc_feature (129)..(130): n is a, c, g, or t
  misc_feature (146)..(146): n is a, c, g, or t
  misc_feature (151)..(151): n is a, c, g, or t
  misc_feature (198)..(198): n is a, c, g, or t
  misc_feature (200)..(200): n is a, c, g, or t
  misc_feature (202)..(202): n is a, c, g, or t
  misc_feature (206)..(206): n is a, c, g, or t
  misc_feature (215)..(215): n is a, c, g, or t
  misc_feature (226)..(227): n is a, c, g, or t
  misc_feature (236)..(236): n is a, c, g, or t
  misc_feature (256)..(256): n is a, c, g, or t
  misc_feature (276)..(276): n is a, c, g, or t
  misc_feature (315)..(316): n is a, c, g, or t
  misc_feature (373)..(373): n is a, c, g, or t
gnctttataggaaacaaactaatcaaagggaaaaaacaaaaaatacagatattatacccaaatggataacgattatataatcattcttactccaaaaaaaactgtattangtataaacaantataaacnncagataaataggccanattcnataaatactaatttgttatatacaacacataaacatctacaaatacnantnatangataatacntttcaaaatanntcaaacaanttatttttttccttgtgctncaattttctcatttgctaanttagggacttagcccactattcatagatttacgtacgcnnattaagttctttctccttgctgacaagaatgtcaaatcaggcacaccggggtttatnccc

SEQ ID NO: 599202 - DNA, 381 bp, Homo sapiens
tcagctactcgggaggctgaggcaggagaatggcgtgaacccgggaggcggagcttgcagtgaaccgagattgtgcgatgcattccagcctgggcgacagagcaagactccgtctcaaaaaaaaaaaaaaaaaagtataatgggatcgtttataactcaaataataaatacttgaggggatggataccccattcttcattatgtgcttttccacacggcattgccagaaattcaaaacattctcaaggtaccccataaatatttacacctactatgtaccaacaaaaatttacaaaataataataaataaatacataaaataaaatatatattgcatgccacagggaaaaaaatcactctattttataataacagccaaag

SEQ ID NO: 599203 - DNA, 336 bp, Homo sapiens
gtgcgtgggtgcatcatgtggcatatgcatggggatgcatgaagatgcatgcatggggcatgcaggcaggcatgatggggcatccatgaaccatgcatgcatggggcatgcatgcaggaggcatgcatgcgggcatgcatgcaggcatgcatgcgggcatgcatgcacagcatgcattcatgcggcgcatgcaggcaggcatgcatagggcgcatgcaggcagcccatgcatgcgccgcatgcatcgcatcaagggcatgcaatggcggccatgcatgcactcacagggcatgcaatggggcgcatgccactgcagcgcacagcactgccatgctg

SEQ ID NO: 599204 - DNA, 117 bp, Homo sapiens
  misc_feature (1)..(1): n is a, c, g, or t
ntgagtacatgctactgggtgaggtacagctacgggtgattgtacagctacgtggtgaggtacagctacgggtgacggtacagctacggttgaggtacagcctacgggttgaggtac

SEQ ID NO: 599205 - DNA, 609 bp, Homo sapiens
gacccggacaagtggattcgcgtacaatcaactcgccatttggcagcccaatttggatgtacaatgatgagccggttcatcaagcaaaatatatcttcttactcaaggtctggcgtcctatctcctctatgacgttcccttgtcttcttccacttaatcgtcttcatatttcctatcatcatcctcatcctcttctttttcagatctctctaactccctctgttcttcttctttgttcctctactttaagctgtatagtcaatcgggctataaacggggatttgaatcctttggaactaagagctcgactttctaattcttttcggaggtcatttaccttcattgtctattggatcaagttaagaccaatgggtaggtgtagaaatatctttagcttcaccatcatccttctcttcttcatcctgttctccatcagcctccttgcgttcaccctgaagcttctcgaccatatgctgcttgtatcctcgggagagggtttcccactctgagcgggtgggaaggcaatgccaaacatccgggaaaaataaaagcactgtctcccacatgagctggaactgtacgccccttgagggtctcctcaggccgatg

SEQ ID NO: 599206 - DNA, 109 bp, Homo sapiens
  misc_feature (7)..(7): n is a, c, g, or t
ccaccanttgtgcggcaaaagaagccgaaggagtacaggtgctgcaatgatgttagctgtggccactgtggattttcgcaagaacattaataaactaaaaacttcatgt

SEQ ID NO: 599207 - DNA, 529 bp, Homo sapiens
acatagcgatttgacagtgaagccagagggcgatagatgatttgttcaacgtagggcttgttctcccatcgctccttcttttcgtatgcctcaatttagaagtgttaactaattctgcagtaggatcaactatttctgtatcatatgtgattatctgtattagtgacagatcccagctggtgaggtagagaaaggcatatggaagagaaggttagcgtatttacaaaacgtgcttctgaagcactagcttcaagagagatactaagtgtatctcacaaaatgaaagtaccgactggtattagtatctgttgccacaatacaggtatcattttagagttgtacttgctcgtatttaggtagtcactcttaacttcaactttcaagaagttcataagctttttaaacttgaatgtgaccttgataaaatgaagagaaaacttaagcttgagttgaccactgttatattattactactttgattagttgatttttgtgcttaaagcaaactcccaaagtttgcagagtactc

SEQ ID NO: 599208 - DNA, 317 bp, Homo sapiens
tcgataagggccacaatcaaatgggagtacattcgtggtgtactgactgtacgtactctgtattcattgtacttggggctatggtggttgatatatctttctcgataacagtaccatgctgttttggttactgtggccttgtaaaatagtttgaagtcagatagcacgatgcctccagctttgttctttttgcttgggattgtcttggctatatggactcttttttggttccatatgaaatttaaagtagttttttctaattctgtgaaggaagtcaatggtagcttgatgggaataacatttggccccttatcgag

SEQ ID NO: 599209 - DNA, 1018 bp, Homo sapiens
  misc_feature (5)..(5): n is a, c, g, or t
  misc_feature (7)..(7): n is a, c, g, or t
  misc_feature (9)..(10): n is a, c, g, or t
  misc_feature (13)..(13): n is a, c, g, or t
  misc_feature (21)..(21): n is a, c, g, or t
  misc_feature (35)..(35): n is a, c, g, or t
  misc_feature (224)..(224): n is a, c, g, or t
  misc_feature (244)..(244): n is a, c, g, or t
  misc_feature (282)..(282): n is a, c, g, or t
  misc_feature (304)..(304): n is a, c, g, or t
  misc_feature (306)..(306): n is a, c, g, or t
  misc_feature (370)..(370): n is a, c, g, or t
  misc_feature (385)..(385): n is a, c, g, or t
  misc_feature (387)..(388): n is a, c, g, or t
  misc_feature (397)..(398): n is a, c, g, or t
  misc_feature (400)..(401): n is a, c, g, or t
  misc_feature (409)..(409): n is a, c, g, or t
  misc_feature (414)..(414): n is a, c, g, or t
  misc_feature (417)..(417): n is a, c, g, or t
  misc_feature (423)..(423): n is a, c, g, or t
  misc_feature (428)..(428): n is a, c, g, or t
  misc_feature (438)..(438): n is a, c, g, or t
  misc_feature (441)..(442): n is a, c, g, or t
  misc_feature (451)..(451): n is a, c, g, or t
  misc_feature (458)..(459): n is a, c, g, or t
  misc_feature (463)..(463): n is a, c, g, or t
  misc_feature (466)..(466): n is a, c, g, or t
  misc_feature (475)..(475): n is a, c, g, or t
  misc_feature (493)..(493): n is a, c, g, or t
  misc_feature (508)..(509): n is a, c, g, or t
  misc_feature (551)..(551): n is a, c, g, or t
  misc_feature (570)..(570): n is a, c, g, or t
  misc_feature (583)..(583): n is a, c, g, or t
  misc_feature (607)..(607): n is a, c, g, or t
  misc_feature (726)..(728): n is a, c, g, or t
  misc_feature (732)..(732): n is a, c, g, or t
  misc_feature (747)..(747): n is a, c, g, or t
  misc_feature (1005)..(1005): n is a, c, g, or t
aaaancnannagngccaagtnaaacaagtcaaacnattaaagtctctttatataccataaaatattacagaaaagtttatttgtgtttcaataaaaagactatcgttttagaacaggcagctaatagcaactgtgcagttaatgggttttgtgaataaattttaaaagagactactgcctgtccttaaattcctttttctttttataaaaaaagaactattaanaatgattgacaaattttgcnttaaaaaattgttaaaacattctctatatttaatttcnattttataatagattacaggcngncgcttatgagacagatacatttgtttcagtacatgtctttaaatgatagacttataagtatgtnaacaactatataatngnngggttcctnncnntgcctgtnagggntcngggaanttttnccataagcgntannccattccangcgttcnngacngtntccatagcngcaccagcatggcaatangctttaaccaaacgnnaacaaacaaacaaaagcacttcgcaatttgttgctgcaaaanagggagagaaaagagtgtncaaacttgatggnatcacaacagtcaatataatttangggacaataaagtcaataaggttgatggtgtttattgtttaaaaagttgaattctgctgtttgcttggggctgtttagaaagttgcattctgctgtttgcttggacaccgtaccactgnnnaaantccacagagtcttgntatccgccagcaggggtgccgtccaaactcacggcaaataagcggcatcaggggctcaccatccacaacaggaggtgttttattttcatggatgtggttgaaatacaatttcttcagcaaactcagcaaaaacttttcaggggcaaaaatgaactctgcacttaaagaaaaatagcaaatgaaaacacaaaatccctaacaagtaaataaacgctctgcatcagcacactggtatcaaacacacatcacagcacgtcntaatctacgggaa

SEQ ID NO: 599210 - DNA, 95 bp, Homo sapiens
cccccccccccgggggggggtttggggtttttttccccccttttttttgggggaaattttttgggggggtttaaaaaaaaaagggccccccttta

SEQ ID NO: 599211 - DNA, 1163 bp, Homo sapiens
ttttcctgaggcttggaaaacacttatggatcttaaaattagagtggcccatattcgtgaaattcgggttactacaatattttgggctctcccatattgttgcaatatggctctccactttttaccagattccaatacaattcttcttacagtcccaattgagaaatggatcacgtccagatccaagaacataatcgggaacatgattgacgttttaaggctagatgtgccaggccatgcatagaaggtggcatttgtcgtagaaatcttgaagcttgttgaggccttagtaaagttataggctaattagtggtgactgtttgtaagtaattaggatgttatagttgttgtgtctggtataagagatagtcgacatgttatgcaaatgcttgtctgtcggattagaacatcgatacctgttcctagtttcatctccacgctcatcattggtactcacagagatcgcttcatgtcatacgagaaatgatcctgggctgattgtgaaagaatttcttctacatcctgaactattgtgtcatatttctcttatcaccttgctgttatcttcatccagtaatctatgctttgtcatcacaaatgaactatcttctatgagaatcatcaattctttctcattctccatttatctgaaggttcttttgccgcttagttaacgctcgtcaactgttttattgctgtgattgtctagtcaatgacctagaacatatcttccatctacatcagttacttggcatcatttcacctcagtttatgtgattgccaaataataattttgagtcagcatgtttcaactatggttattcatccaacccttggatctgctgttcgagcactgactcgactaatgctccacatggataacgcgctggtacattgacaatgtggtccacattttaacatagctaatgtctctggggctgtatttttcagaatattgctgagctacatttgctgcaatcagttggtacttcagagtttcaagtttcaggagaatacagggacaatagtcatctctgcgctgttatttttgttgtcatcaagcttttccacagttcttgaaagagtactatgtttctaattgtcaggaacaccagcgttagctgtaaaagttgcagcatttataactacgtgggtgaaaatta

SEQ ID NO: 599212 - DNA, 211 bp, Homo sapiens
cgcaaaacttcgtctcagaccttcttaagatcaggtcatggctggacgaagtgcacacgccgaggatcagacaaatctttatggacgaagttgttgctgcacacgccgagaccccagaccacactcctaggtctttgtggacgaagttgttgcgcaacaacttcgtccataccgatttccattgtgacctgagtaaccagaacgccgcgag

SEQ ID NO: 599213 - DNA, 851 bp, Homo sapiens
aacacgtgctacgaccactccaaggggaacgcagaacacagcgagggaatcagaaccatggacaaatgccgacagaaccatacgcagactcggagcgatggagacacagaatgaaaaggagttcaagacacaaatcataaacaagatggcccacgcgaggggcaaacacgacaggctgtggcatgcaacaaacaatccccgggatagagcaagccaccaagcagggccacaacacaggagagacactccgtacaacaaacacaagagcacgttccaacagactgacagtcatgcgaagataaagccgaaaagtaaaccttgcccggcacgacccacctgggcaaacagaaacacacatagcgcccagaacatcgaaacaatagaaaaaggacaaaacaataaaaaacaatggaaaaacatccagacgacactccaccacacgtagaatgcaacactataggcacaacaactacacaaggacaactagagaaaacgcaacaacactaagctagagcacacaacagaacaacacaacatatgccaaaaatacagggaaaacacaagcagaaaacaacaaacacgagaacggacactcaaaaagcgcaacaacaccaaactgtaccatacagaaacaggggaaacacgcgacaacctataccatagacatacccacatatcaacaagacagcaagtatgggaacacacccaacagcacactcaaaaggacaacagaggacagaacacacaggcaaacacacaacatacacagcaccgaggccacccttatgaatgcacactgacacatacaacacacagaacgaggcaacacaacccaaaacaaaacaagcaac

SEQ ID NO: 599214 - DNA, 579 bp, Homo sapiens
tgtgaacacaaaggcgctgcgccccacgaaggccagtgcgcccgaagagccaaacagcggtcctgagaccgcgatgcccgaatgacccctttgggggaggccaaaggcgcgcaacctctccagaagtggtgcgcaacaaaaacagcccccggcgagcctccggcacccatatgacccgccctgaggcgccaacaggtgagcccggcattccccaggggctgagaggcgcccccgggcgccccccaactccaacaatggaccccccgcgtcgcgcacaaatccccaagtggccccgcagcagcagcgcgggggtgcatgccaacaagcgttccaggagcccgacacgcgtgacacgccgcgagatgcttccctgccgcaaagagacacccccccaaaggctatgcattcaatactcacccgcccaagttgcgccaggccagcccagcgtcggtcaccagagcaccaggggggagctgaggcccaaagacccgcgggagagaatgtccggcccaagccgtgaggcaaggggaggaaccccccccccccaacaaacaatctttggtcggcccaacaatgaca

SEQ ID NO: 599215 - DNA, 428 bp, Homo sapiens
cgctgaagagcgctctatcattcaaatcggtcatgcccaaggtttcagcctgcgcggtattgcctgcttgatcaaccgatccccttcgaccatcagccgggagctgcgccgcaatcgagatgcctgtggcggctactcggcccgcgtggcccagcagcagatgcaggcccgccgtcaggtgtgtcgaccgaagcaaaagctgttgccgggtagcgagcgcttcgaattggtggcgcatatgctgcgtgagcgtttgtctcccgagcagattgccggcaagctgcgcagcatgaatattcccagcctcagagatgcctacgtctgtcgcgagacgatctataacgcgatctatgccttgccagtcggcgagctgcgtaaagagctgatcatctgcctgcgccaaagcaagacgatgcgcaggccgggag

SEQ ID NO: 599216 - DNA, 158 bp, Homo sapiens
gcagacttgaccttgaccagatagtcttgaagatgccaaactggggcggaggcgcaaaatgtggagcctgttaaaatgaccgtctaacatgcagatgatatcacagtggcaatagtgaaggagctttgacacaaagaacgtgttttaacatgacatgg

SEQ ID NO: 599217 - DNA, 974 bp, Homo sapiens
gttcctgttggtatagactatgtgatacctaaaacaggggttttactgtgaagctgtgcttcactcgtttctatacaaatgacagaagttgcaaagaatactcatggcagcagcctgtcctcattatcagaagattaccagaaatttctgaataaattggcagaagaacgcagacagaagaaggaaacttaagatgtgcaaggagatttaatgattgcaaagaaaataatggttctttgtgtcttaatgttaaccttgtttaaatacgaatactgatgagttagaaggaaaactattgtactctgtggttgtagtggagaaataatagatgtctgtctcatgtgtccaagtgtaatagcaggaaaaaagtacacatatggtctaagttaaggaactagtatcgtcttatcagaatggcaacagacgagaagtactttagtagagatcgagcttccctaaggctaccttacagacaacgtggcacccattaaagaacaacacagggctagaacacatttgggcacccattgagaagtccaagtaggttccaaagtttccgacagcacatggtcaggcatcttaattcccatggcgataaagaacaaagacccacatagccggatccactactgacctttgtccatcctgaacagcattcccaactcgttctaaattctggaagccttgtgccagaacattccacataggggagcttggaaaccacggattctaggttgcgcctcctcgactcctaccggagagaagagcttgcacttatacccgtcgaccaaccgcgcgcacttgggacacctgcccggggtcgccacgaactcccacagggcacaaggccacatgccggcaacggcacaagggaccacaacagcacacgtcacccacgcacactggggcctaagcaccccggcaaccgcacgccccccgacaaacccggacacgaactgccgaatcacacgacc

SEQ ID NO: 599218 - DNA, 402 bp, Homo sapiens
ttccctatacgtgtccggggttgtatccgtgtcggggttttctggatgattttcccattgtgatcaaacaccagtcgagtcccaaccttcgccgatacctgacaggtagaaatggtgacatcattaagcctccgaagtgttcttcttctaccccacatccattgcctgaaacttcaatgagatccatcccatagtccttaagctttagatcaacattagcggcaccagcatccagactgttttctactatcttcttcatccagtgcttagactcagtaccacctgcccagagcaaatctgatggactgacttccgatcaataggtttgatggccttagcaggttctgtacttcttaatattcctttgaaaatccttatggcgcacaggtagcgtagaaaata

SEQ ID NO: 599219 - DNA, 562 bp, Homo sapiens
gaagtggaggctgcagtgaactgagatcatgccattgtactccagcctgggcaacaagagcaaaactccatctaaaaaaaaaagaaggccctcaccagatgtggctgcttgactttggaattcccaccctccagaactgtaagaaataaatttttaaaaataaagtacccagcccctcaggtattctattgcaacacagaatggactaagacagtgtttatatgtcaaaatctattttcctgtgtttaaactgtcttccttctccttgcagagggaatataaccttagccttttggagtgataatttcatgtttgtctgaagtagcttcttctcacattttctttttttttttttttatgttcaaaatgcttttatttctaggaatttagttttatttttaattttttaattattatactttaagttttagggtacatttgcacaacgtgcaggtttgttacatatgtatacatgtgccatgttggtgggctgcacccaataactcgtcatttagcattaggtatatctcctaatgctatccctcccccctccccccacccc

SEQ ID NO: 599220 - DNA, 428 bp, Homo sapiens
  misc_feature (337)..(337): n is a, c, g, or t
gctttttggttttgaacttgaagtccctaaactgcaaaatttaaaagttgggtggttattaaaatgcttttaaaaagttaactgtggccccaattttaatgtaatccaacttgtgactgtttttttttgttttgttttgtttttgggggggggggtgtggggcactgggaaaagtggaaacaaacatgtattgaaaaacatattggaaataaaaatggtttgagggtcagtgatattttcccaaaatgtacttattttacctcggcatgtactgtagtcactcagtatttgtaaatgttgctaaaatttaaattgtaaaaaagtgaaattttaatgngttcatttgtttttaaggaaaaaatgtcttgctcaaattatttggtttaaataaaacacccttgaggtttgtagcttttccttatcctata

SEQ ID NO: 599221 - DNA, 662 bp, Homo sapiens
ttactctcgtagaaactacgtaagaacccgagagggtagaattgagaaaacggagacggcgctcgaggccacgggagacgtcaccgacgacgtcccggaaggagacgaggaagaagaagagatcgaagactccgccagttaagcttccgatgagactggcactgatactaattaagaggcaaacatactaacactccagtcattacccatccaccttatccacggactaactgaattaactccattacagtcgccagacacctataacagattaaactagaacggattccactacagtccaaatccttccgaatcgaaattgacatcgtgcgatgcgagacccggccccatccaatccgaccgcacttactcacaataccttcagcctcaccctttattcgcaagacgtccaatctgacccgattgacctactcacgccctagtcggcgaacgtcttactcggcgtggctgtagcatttgtagtaaagaataaggcggcataagtcgaggtgattggagtcgaggatagcggaggcacagacagcgattcctaagtaaggccggacaattccagaaaaacgcgaagttcccttcgccctcgcactacaacaccatcgaggtcgactatcccctaacccaaaagtaaacgccgtaaatgaagc

SEQ ID NO: 599222 - DNA, 156 bp, Homo sapiens
gcaacagaatatattgcttttgttgtaagcttttgtagtacatgttttcactaataatttcttgttctctaggaaggctttctatttccgccctatgggcaaatggaatccttcatgtcttcttgtcattgttgacacacttgcagtgtagcccag

SEQ ID NO: 599223 - DNA, 494 bp, Homo sapiens
  misc_feature (63)..(63): n is a, c, g, or t
  misc_feature (67)..(67): n is a, c, g, or t
  misc_feature (70)..(74): n is a, c, g, or t
  misc_feature (76)..(77): n is a, c, g, or t
  misc_feature (79)..(79): n is a, c, g, or t
  misc_feature (90)..(90): n is a, c, g, or t
  misc_feature (475)..(475): n is a, c, g, or t
aggactgaagcactgggcacctcccttgtgacaactgaaaatgtctgcagacatttccagatnagcncgnnnnntnngnatactcccttngaagaaccaaccgtgacagacatttaaaactatatgcgcaagattttagacttgcataactacagaacacattaaaattccaagtgagttatcactctcttccagaccaaaacaagaacaaagaaaacacccctgagatccacagcagcccctgagcaccactgcttcatcttcaaaggagaggtttctccctgtccaagtgcggaggggcaggaatctgggtatctcccagggtctgggatgcagaggcgtagaggagaagctggtgcgtgtgaacatcccaccggcctccacctgctagcatccatgctggccgggatccaccatccctctctaagaagcagttcccacatctgcatagagccaattccatacctactccggngagtgatgctttgagggga

SEQ ID NO: 599224 - DNA, 1678 bp, Homo sapiens
  misc_feature (3)..(3): n is a, c, g, or t
agnggagatctgtgagcccagcgctgactgcgccgcggagaaagccagtgggaacccagacccataggagacccgcgtccccgctcggcctggccaggccccgcgctatggagttcctctgggcccctctcttgggtctgtgctgcagtctggccgctgctgatcgccacaccgtcttctggaacagttcaaatcccaagttccggaatgaggactacaccatacatgtgcagctgaatgactacgtggacatcatctgtccgcactatgaagatcactctgtggcagacgctgccatggagcagtacatactgtacctggtggagcatgaggagtaccagctgtgccagccccagtccaaggaccaagtccgctggcagtgcaaccggcccagtgccaagcatggcccggagaagctgtctgagaagttccagcgcttcacacctttcaccctgggcaaggagttcaaagaaggacacagctactactacatctccaaacccatccaccagcatgaagaccgctgcttgaggttgaaggtgactgtcagtggcaaaatcagtgagtgtcggagccctgtgggcctccttcctccatctctatgctgggtgcggtctagtgatctaggatggtatagaagtcttgcagcccagcccactcatacttacagccctctgcctctttgatacagtacctgatctactaccactcttgtctttcagctcacagtcctcaggcccatgtcaatccacaggagaagagacttgcagcgcagatgacccagaggtgcgggttctacatagcatcggtcacagtgctgccccacgcctcttcccacttgcctggactgtgctgctccttccacttctgctgctgcaaaccccgtgaaggtgtgtgccacacctggccttaaagagggacaggctgaagagagggacaggcactccaaacctgtcttggggccactttcagagcccccagccctgggaaccactcccaccacaggcataagctatcacctagcagcctcaaaacgggtcaatattaaggttttcaaccggaaggaggccaaccagcccgacagtgccatccccaccttcacctcggagggatggagaaagaagtggagacagtcctttcccaccattcctgcctttaagccaaagaaacaagctgtgcaggcatggtcccttaaggcacagtgggagctgagctggaaggggccacgtggatgggcaaagcttgtcaaagatgccccctccaggagagagccaggatgcccagatgaactgactgaaggaaaagcaagaaacagtttcttgcttggaagccaggtacaggagaggcagcatgcttgggctgacccagcatctcccagcaagacctcatctgtggagctgccacagagaagtttgtagccaggtactgcattctctcccatcctggggcagcactccccagagctgtgccagcaggggggctgtgccaacctgttcttagagtgtagctgtaagggcagtgcccatgtgtacattctgcctagagtgtagcctaaagggcagggcccacgtgtatagtatctgtatataagttgctgtgtgtctgtcctgatttctacaactggagtttttttatacaatgttctttgtctcaaaataaagcaatgtgttttttcgga

SEQ ID NO: 599225 - DNA, 280 bp, Homo sapiens
gaatataacaaatgttttttttaatcaaaaagcgttttttggcagaaataccttctcgaacatgtgaactttcatgtgccttaatatcaaacttgaatgtcatctgtaaatacgaataaaattgttaaattgtgagcccagttggtttagccacagaacaagtatgccaccttcccactagccatgattggctgagataatgagtgggctggaaatgacaagagatgagtttggattggtctgcagtgaagcatcttgtgtctataaaatgagtcgacgc

SEQ ID NO: 599226 - DNA, 1847 bp, Homo sapiens
  misc_feature (3)..(3): n is a, c, g, or t
  misc_feature (831)..(831): n is a, c, g, or t
  misc_feature (848)..(848): n is a, c, g, or t
  misc_feature (854)..(854): n is a, c, g, or t
  misc_feature (859)..(859): n is a, c, g, or t
  misc_feature (900)..(901): n is a, c, g, or t
  misc_feature (929)..(929): n is a, c, g, or t
  misc_feature (937)..(937): n is a, c, g, or t
agnggagatctgtgagcccagcgctgactgcgccgcggagaaagccagtgggaacccagacccataggagacccgcgtccccgctcggcctggccaggccccgcgctatggagttcctctgggcccctctcttgggtctgtgctgcagtctggccgctgctgatcgccacaccgtcttctggaacagttcaaatcccaagttccggaatgaggactacaccatacatgtgcagctgaatgactacgtggacatcatctgtccgcactatgaagatcactctgtggcagacgctgccatggagcagtacatactgtacctggtggagcatgaggagtaccagctgtgccagccccagtccaaggaccaagtccgctggcagtgcaaccggcccagtgccaagcatggcccggagaagctgtctgagaagttccagcgcttcacacctttcaccctgggcaaggagttcaaagaaggacacagctactactacatctccaaacccatccaccagcatgaagaccgctgcttgaggttgaaggtgactgtcagtggcaaaatcagtgagtgtcggagccctgtgggcctccttcctccatctctatgctgggtgcggtctagtgatctaggatggtatagaagtcttgcagcccagcccactcatacttacagccctctgcctctttgatacagtacctgatctactaccactcttgtctttcagctcacagtcctcaggcccatgtcaatccacaggagaagagacttgcagcaggtgggtagctggagcaaactgggcctggggcacaggaaggggtctgcttgaagaggtngggtacaggaggtggtnctttancaggntgaggctgagggaatcctgttgggctgagagccagtacaannagtggagccactcacactggtggcctgncctctcancttgcagatgacccagaggtgcgggttctacatagcatcggtcacagtgctgccccacgcctcttcccacttgcctggactgtgctgctccttccacttctgctgctgcaaaccccgtgaaggtgtgtgccacacctggccttaaagagggacaggctgaagagagggacaggcactccaaacctgtcttggggccactttcagagcccccagccctgggaaccactcccaccacaggcataagctatcacctagcagcctcaaaacgggtcaatattaaggttttcaaccggaaggaggccaaccagcccgacagtgccatccccaccttcacctcggagggatggagaaagaagtggagacagtcctttcccaccattcctgcctttaagccaaagaaacaagctgtgcaggcatggtcccttaaggcacagtgggagctgagctggaaggggccacgtggatgggcaaagcttgtcaaagatgccccctccaggagagagccaggatgcccagatgaactgactgaaggaaaagcaagaaacagtttcttgcttggaagccaggtacaggagaggcagcatgcttgggctgacccagcatctcccagcaagacctcatctgtggagctgccacagagaagtttgtagccaggtactgcattctctcccatcctggggcagcactccccagagctgtgccagcaggggggctgtgccaacctgttcttagagtgtagctgtaagggcagtgcccatgtgtacattctgcctagagtgtagcctaaagggcagggcccacgtgtatagtatctgtatataagttgctgtgtgtctgtcctgatttctacaactggagtttttttatacaatgttctttgtctcaaaataaagcaatgtgttttttcgga

SEQ ID NO: 599227 - DNA, 1748 bp, Homo sapiens
  misc_feature (5)..(5): n is a, c, g, or t
  misc_feature (49)..(49): n is a, c, g, or t
  misc_feature (52)..(53): n is a, c, g, or t
  misc_feature (56)..(56): n is a, c, g, or t
  misc_feature (58)..(58): n is a, c, g, or t
  misc_feature (61)..(61): n is a, c, g, or t
  misc_feature (64)..(64): n is a, c, g, or t
  misc_feature (81)..(81): n is a, c, g, or t
  misc_feature (83)..(83): n is a, c, g, or t
  misc_feature (92)..(92): n is a, c, g, or t
  misc_feature (95)..(95): n is a, c, g, or t
  misc_feature (732)..(732): n is a, c, g, or t
  misc_feature (749)..(749): n is a, c, g, or t
  misc_feature (755)..(755): n is a, c, g, or t
  misc_feature (760)..(760): n is a, c, g, or t
  misc_feature (801)..(802): n is a, c, g, or t
  misc_feature (830)..(830): n is a, c, g, or t
  misc_feature (838)..(838): n is a, c, g, or t
cgccnaattaaccctactaaagccccaattaaccctttctgggtcgccnaannaancntcnctnaagtgctgggattacangngtgagcacngcncctggcctaggagtagtattaagtggcccaggcaagaggaacatattcagactcggaggaatgaaggatgaaatgtggggaggggcagtgtctatgctgagggttatttccaaagaatgagaggctgggctgaacattgggcaggaagttagcaaaaactaaggagggtaggaatcaaggttagagggaagagaagaatgaaattgagtagggagctgagaaagcagggcgaggggcatttggacttacattttcttccagcaaaggtttcttatttaacccctgtgggcttatcttgcagccaaacccatccaccagcatgaagaccgctgcttgaggttgaaggtgactgtcagtggcaaaatcagtgagtgtcggagccctgtgggcctccttcctccatctctatgctgggtgcggtctagtgatctaggatggtatagaagtcttgcagcccagcccactcatacttacagccctctgcctctttgatacagtacctgatctactaccactcttgtctttcagctcacagtcctcaggcccatgtcaatccacaggagaagagacttgcagcaggtgggtagctggagcaaactgggcctggggcacaggaaggggtctgcttgaagaggtngggtacaggaggtggtnctttancaggntgaggctgagggaatcctgttgggctgagagccagtacaannagtggagccactcacactggtggcctgncctctcancttgcagatgacccagaggtgcgggttctacatagcatcggtcacagtgctgccccacgcctcttcccacttgcctggactgtgctgctccttccacttctgctgctgcaaaccccgtgaaggtgtgtgccacacctggccttaaagagggacaggctgaagagagggacaggcactccaaacctgtcttggggccactttcagagcccccagccctgggaaccactcccaccacaggcataagctatcacctagcagcctcaaaacgggtcaatattaaggttttcaaccggaaggaggccaaccagcccgacagtgccatccccaccttcacctcggagggatggagaaagaagtggagacagtcctttcccaccattcctgcctttaagccaaagaaacaagctgtgcaggcatggtcccttaaggcacagtgggagctgagctggaaggggccacgtggatgggcaaagcttgtcaaagatgccccctccaggagagagccaggatgcccagatgaactgactgaaggaaaagcaagaaacagtttcttgcttggaagccaggtacaggagaggcagcatgcttgggctgacccagcatctcccagcaagacctcatctgtggagctgccacagagaagtttgtagccaggtactgcattctctcccatcctggggcagcactccccagagctgtgccagcaggggggctgtgccaacctgttcttagagtgtagctgtaagggcagtgcccatgtgtacattctgcctagagtgtagcctaaagggcagggcccacgtgtatagtatctgtatataagttgctgtgtgtctgtcctgatttctacaactggagtttttttatacaatgttctttgtctcaaaataaagcaatgtgttttttcgga

SEQ ID NO: 599228 - DNA, 702 bp, Homo sapiens
  misc_feature (672)..(672): n is a, c, g, or t
caatatctgataggaagatgtaatataaagaagggggatcaaatcctgcccttaaggtagacagaatctgtcaaggctttagagtgtaccatcaaagagttaacagccaacagaacaaaatttagcatcatcacaattttggaagtttttcaacagccctatgatttataaactgtcaatcactatttttacatataaatcatttccagtggtagtaaatgtgctaatattctcgatatatgtgaaaaatatcacttaaaattttttcttggaagaagcacttaataatttgtaaatcagaaacaaattatatgtactttctaagtagattagtgtatttctcatacatagatgatggcatagatttgcttttttagtaaattgtcagatatcagactctaacttatggaacaaatgaatataagtaaactcactcccatttgattgttttgtaaatgaaaaatgtaatattaaatttgtgagatgaatgtgtatgtagtaaatacattaataaaaatgtgtagatcattagtaattttttaatcttctttatactagaattatgtctgcctaacaattacttaaatatttgaacttttaatttattatcacaattttctaagtcactatgtatgaaacatcatgattgtatttaacttgacaatataaaanttagtcaagaaaatatagttgttccattta

SEQ ID NO: 599229 - DNA, 1395 bp, Homo sapiens
  misc_feature (3)..(3): n is a, c, g, or t
agnggagatctgtgagcccagcgctgactgcgccgcggagaaagccagtgggaacccagacccataggagacccgcgtccccgctcggcctggccaggccccgcgctatggagttcctctgggcccctctcttgggtctgtgctgcagtctggccgctgctgatcgccacaccgtcttctggaacagttcaaatcccaagttccggaatgaggactacaccatacatgtgcagctgaatgactacgtggacatcatctgtccgcactatgaagatcactctgtggcagacgctgccatggagcagtacatactgtacctggtggagcatgaggagtaccagctgtgccagccccagtccaaggaccaagtccgctggcagtgcaaccggcccagtgccaagcatggcccggagaagctgtctgagaagttccagcgcttcacacctttcaccctgggcaaggagttcaaagaaggacacagctactactacatctccaaacccatccaccagcatgaagaccgctgcttgaggttgaaggtgactgtcagtggcaaaatcactcacagtcctcaggcccatgacaatccacaggagaagagacttgcagcagatgacccagaggtgcgggttctacatagcatcggtcacagtgctgccccacgcctcttcccacttgcctggactgtgctgctccttccacttctgctgctgcaaaccccgtgaaggtgtgtgccacacctggccttaaagagggacaggctgaagagagggacaggcactccaaacctgtcttggggccactttcagagcccccagccctgggaaccactcccaccacaggcataagctatcacctagcagcctcaaaacgggtcaatattaaggttttcaaccggaaggaggccaaccagcccgacagtgccatccccaccttcacctcggagggatggagaaagaagtggagacagtcctttcccaccattcctgcctttaagccaaagaaacaagctgtgcaggcatggtcccttaaggcacagtgggagctgagctggaaggggccacgtggatgggcaaagcttgtcaaagatgccccctccaggagagagccaggatgcccagatgaactgactgaaggaaaagcaagaaacagtttcttgcttggaagccaggtacaggagaggcagcatgcttgggtctgtgctgcagtctggccgctgctgatcgccacaccgtcttctggaacagttcaaatcccaagttccggaatgaggactacaccatacatgtgcagctgaatgactacgtggacatcatctgtccgcactatgaagatcactctgtggcagacgctgccatggagcagtacatactgtacctggtggagcatgaggag

SEQ ID NO: 599230 - DNA, 1390 bp, Homo sapiens
  misc_feature (1085)..(1085): n is a, c, g, or t
cttgatgttcaccccttctcttattgcgcctcttccctcgagggggtgtgcgctcatcatttgtgtggttttcctcaccacggtcgcgctttctggcgggtcgatcacaccaccagtggtgtttgataaaagtgggttcatcttctcacccaaagatcgccgcctaagtttgcccctgttctcataggtctctcttttgggagttgtgactccctttcctcccctttttcgggggtgttctaccaacacagggggcccgacccccaccccgagcctcgaatttttttgtgggcccaccaatacaccaaaggaaattgtccttgatgtatgtgggcgaccttttctccctgcttggagcacaacacccgagcaccaagatggtgtcttccttgggagtgccttctggggggattttgcacccccatgtcgtgagatcttatttgggggaataatccccccttggggtgttttgtgctcacaaaataacacacactgtgctccccgaggattgtaggaaccccccacatcccaggaacaattggggggtgtttctttttgtgggttccccgcagtgttgttctgcgccccttactcatacgtaagcttagactccctccttttctgagtcgggtctctccccctgtttgtgccttgtgggacacaaaaccaatgggtgtccaaagaggattctgtgagccacctcgggccgttttacctcgcgcaaagaccttgtatgaaggacccacaccccaccccaagttggcgcaccaccaacaagggcgtatatctttggagaccaccccgggggatccctggtcttccttctccaagagttggagatccccccctctctgtggccttttctctgtgagagcgcccacaagtaggttgcccccccgcgccacatgttttatatgggagatctctctctccacagaggcgcacaaccacccctttttacccacaccgctataaatgtgtgtgggggacacaattaatcacaacacgccccctggtgcgtctctacacccctatacaccgcgtatcactgtgcctgtttgttgcctttccacaccagagcgccnccacgccactctccaaaatctctgtggaatttattgaagggaaagaatctcattggtagatgtaactgtaagcccagaaagattactccagtatcccaccctgccagagccagaacccacccccacggtgccaccctcccctggccctgggtcttgtctgtatgtgcccagaacatcttgttttgtcctggcgtaaccacggaccaccctggtgcgagatttggcccggtgaccccgtggcaccccctagaaagatttttggccgagcctttcacccaattaaaaaaaaactggctttttctgga

SEQ ID NO: 599231 - DNA, 1178 bp, Homo sapiens
  misc_feature (3)..(3): n is a, c, g, or t
agnggagatctgtgagcccagcgctgactgcgccgcggagaaagccagtgggaacccagacccataggagacccgcgtccccgctcggcctggccaggccccgcgctatggagttcctctgggcccctctcttgggtctgtgctgcagtctggccgctgctgatcgccacaccgtcttctggaacagttcaaatcccaagttccggaatgaggactacaccatacatgtgcagctgaatgactacgtggacatcatctgtccgcactatgaagatcactctgtggcagacgctgccatggagcagtacatactgtacctggtggagcatgaggagtaccagctgtgccagccccagtccaaggaccaagtccgctggcagtgcaaccggcccagtgccaagcatggcccggagaagctgtctgagaagttccagcgcttcacacctttcaccctgggcaaggagttcaaagaaggacacagctactactacatctccaaacccatccaccagcatgaagaccgctgcttgaggttgaaggtgactgtcagtggcaaaatcactcacagtcctcaggcccatgacaatccacaggagaagagacttgcagcagatgacccagaggtgcgggttctacatagcatcggtcacagtgctgccccacgcctcttcccacttgcctggactgtgctgctccttccacttctgctgctgcaaaccccgtgaaggtgtgtgccacacctggccttaaagagggacaggctgaagagagggacaggcactccaaacctgtcttggggccactttcagagcccccagccctgggaaccactcccaccacaggcataagctatcacctagcagcctcaaaacgggtcaatattaaggttttcaaccggaaggaggccaaccagcccgacagtgccatccccaccttcacctcggagggatggagaaagaagtggagacagtcctttcccaccattccaacctgttcttagagtgtagctgtaagggcagtgcccatgtgtacattctgcctagagtgtagcctaaagggcagggcccacgtgtatagtatctgtatataagttgctgtgtgtctgtcctgatttctacaactggagtttttttatacaatgttctttgtctcaaaataaagcaatgtgttttttcgga

SEQ ID NO: 599232 - DNA, 1225 bp, Homo sapiens
  misc_feature (3)..(3): n is a, c, g, or t
agnggagatctgtgagcccagcgctgactgcgccgcggagaaagccagtgggaacccagacccataggagacccgcgtccccgctcggcctggccaggccccgcgctatggagttcctctgggcccctctcttgggtctgtgctgcagtctggccgctgctgatcgccacaccgtcttctggaacagttcaaatcccaagttccggaatgaggactacaccatacatgtgcagctgaatgactacgtggacatcatctgtccgcactatgaagatcactctgtggcagacgctgccatggagcagtacatactgtacctggtggagcatgaggagtaccagctgtgccagccccagtccaaggaccaagtccgctggcagtgcaaccggcccagtgccaagcatggcccggagaagctgtctgagaagttccagcgcttcacacctttcaccctgggcaaggagttcaaagaaggacacagctactactacatctccaaacccatccaccagcatgaagaccgctgcttgaggttgaaggtgactgtcagtggcaaaatcactcacagtcctcaggcccatgacaatccacaggagaagagacttgcagcagatgacccagaggtgcgggttctacatagcatcggtcacagtgctgccccacgcctcttcccacttgcctggactgtgctgctccttccacttctgctgctgcaaaccccgtgaaggtgtgtgccacacctggccttaaagagggacaggctgaagagagggacaggcactccaaacctgtcttggggccactttcagagcccccagccctgggaaccactcccaccacaggcataagctatcacctagcagcctcaaaacgggtcaatattaaggttttcaaccggaaggaggccaaccagcccgacagtgccatccccaccttcacctcggagggatggagaaagaagtggagacagtcctttcccaccattcctgcctttaagccaaagaaacaagctgtgccagcaggggggctgtgccaacctgttcttagagtgtagctgtaagggcagtgcccatgtgtacattctgcctagagtgtagcctaaagggcagggcccacgtgtatagtatctgtatataagttgctgtgtgtctgtcctgatttctacaactggagtttttttatacaatgttctttgtctcaaaataaagcaatgtgttttttcgga

SEQ ID NO: 599233 - DNA, 335 bp, Homo sapiens
gtattggaatatgatgctaaggggttagtggggaggacgagggtttgtgagaaagttgtttgatgtaggtatgagttaaggatgggtcagcacttggtaatcttggatgggttttggggaaaaactgaagtcattgaatgataagagaggagcagtgaaggatttggaacttatgcttgtaaagagttgtttgatgggtaatggtgacaaaatgggtcttttttgagtagttttgaaaagaaaaaatgtggggtattgatgatgggcttgattttttgggaataataaaatgaaataatagttttattttttgaataaaagtttgtgactgataa

SEQ ID NO: 599234 - DNA, 873 bp, Homo sapiens
  misc_feature (3)..(3): n is a, c, g, or t
agnggagatctgtgagcccagcgctgactgcgccgcggagaaagccagtgggaacccagacccataggagacccgcgtccccgctcggcctggccaggccccgcgctatggagttcctctgggcccctctcttgggtctgtgctgcagtctggccgctgctgatcgccacaccgtcttctggaacagttcaaatcccaagttccggaatgaggactacaccatacatgtgcagctgaatgactacgtggacatcatctgtccgcactatgaagatcactctgtggcagacgctgccatggagcagtacatactgtacctggtggagcatgaggagtaccagctgtgccagccccagtccaaggaccaagtccgctggcagtgcaaccggcccagtgccaagcatggcccggagaagctgtctgagaagttccagcgcttcacacctttcaccctgggcaaggagttcaaagaaggacacagctactactacatctccaaacccatccaccagcatgaagaccgctgcttgaggttgaaggtgactgtcagtggcaaaatcactcacagtcctcaggcccatgacaatccacaggagaagagacttgcagcagatgacccagaggtgcgggttctacatagcatcggtcacagtgctgccccacgcctcttcccacttgcctggactgtgctgctccttccacttctgctgctgcaaaccccgtgaaggtgtgtgccacacctggccttaaagagggacaggctgaagagagggacaggcactccaaacctgtcttggggccactttcagagcccccagccctgggaaccactcccaccacaggcctctggattgacaggcctctggagttgga

SEQ ID NO: 599235 - DNA, 406 bp, Homo sapiens
  misc_feature (11)..(11): n is a, c, g, or t
  misc_feature (189)..(189): n is a, c, g, or t
atttcggcagngggataggactagggcgaagctaagcagcatctatcaatcatcccttcagctcctgattgatcccgggccaaagctggtccaaagctgagccacacgtttttcaagacagcctgtgaactaggcacatatccttcccttcccagtccataaaaaccctggacccagcctcgtagaggncaccactttcagatacctatctctgctggcaaagagctttcttctcttgcttcttaaactttcactccaacctcacctttgtgttcacgctccttaatctccttaggaggtagaacaaagaactctgggatgttatcttcagactacggaggagactgttaacatcttgggtggcactgctggaggactacggacacttgggttttctttggacttt

SEQ ID NO: 599236 - DNA, 102 bp, Homo sapiens
tatttccgggggaaattttttaaaattagttcccgggggggcaaaaaaccatccccaaccccttgggggggggtttaaatcctcccctgaccctttaaacgg

SEQ ID NO: 599237 - DNA, 339 bp, Homo sapiens
tttttttaatccagtaacacggctagagagaaaacttgtattaaaaacttgtacctggctgggtgtgatggctcacatctataatcccagcactttgggaggccaaggcaggtggactgtctgagaccaggagtttgagaccagcctgggcaacatggtgaaaccctgccttgacaaaaaaaataaaaaattagctgggagtggtggtgtgcacctgtagtcccagctatgcgagaggctgaggtgggaggatcgcttgagcccggcagcagaggttcactccagcctgggcgacagagtgagaccctgtcttaaaaacgaaaacccatgcctcaatca

SEQ ID NO: 599238 - DNA, 691 bp, Homo sapiens
  misc_feature (3)..(3): n is a, c, g, or t
agnggagatctgtgagcccagcgctgactgcgccgcggagaaagccagtgggaacccagacccataggagacccgcgtccccgctcggcctggccaggccccgcgctatggagttcctctgggcccctctcttgggtctgtgctgcagtctggccgctgctgatcgccacaccgtcttctggaacagttcaaatcccaagttccggaatgaggactacaccatacatgtgcagctgaatgactacgtggacatcatctgtccgcactatgaagatcactctgtggcagacgctgccatggagcagtacatactgtacctggtggagcatgaggagtaccagctgtgccagccccagtccaaggaccaagtccgctggcagtgcaaccggcccagtgccaagcatggcccggagaagctgtctgagaagttccagcgcttcacacctttcaccctgggcaaggagttcaaagaaggacacagctactactacatctgtgagtgcctgtgaggggacagtgtctgtgtttcttttttgccattacatacatgccttgggtacatgcttggtgtagagtccagcagcagagggccccttccgatcttgaattctattttcattcatctacatcccaatgtgagtgagcttctactatgtgctgggcactctgtttagcgctatgagcacaaaga

SEQ ID NO: 599239 - DNA, 239 bp, Homo sapiens
  misc_feature (65)..(65): n is a, c, g, or t
  misc_feature (141)..(141): n is a, c, g, or t
gtgtgctggtatctaagacgagtgtctcaaccctatgaggaaccatggcagcagccttctgagangcagtggatcaggcatgtattatctcgtggctccttgacttttgagacagagaaaagaacacatcaactctatgtncgcggtgtcatcatggacagctgtgatgagttgatacagagtatctcatttatcgtggtgtgttgatctgagatctgccttgacattccgaaaatggt

SEQ ID NO: 599240 - DNA, 148 bp, Homo sapiens
gtgataaacttgaagtataatgttaagagaaccgttctcttaatgtgtcagataatatgtatgtactctctctcgtctcaaataattagtatacattgagatagtgtcatatatacagttttgtagtgtaaaataagagatggagtct

SEQ ID NO: 599241 - DNA, 521 bp, Homo sapiens
ccttttattttattgacgatagagtctcactctatcacccaggcctggactcaaatggagcgatcttggctcatctgcaacctctacctgcccaggttcaagccattctccctggtctcagcctcgctaagtacctggggtattacagtgttctttttccaccacgccctggcgtaatgttcttgtaatgttgtagctacgatgatctgagaatttacacccgtttttgttccacggcttgccttcttcgagcatcctgacctcgtgatccatctctcagcgcgtcaagacctcgtcaaagaagaccatatggaattacaaggcacgatccactgcacccagcctaatttttataatatatttacttacgtatgtatcgtgtgtgtctttgtcactcacttggtctcacgacctggtctgtaattcctcacgctcaagtgatctgcgcacctcggcctaccaatatttccctgggataaacaaatgagacacacacccaccccccgcccaacataacacaa

SEQ ID NO: 599242 - DNA, 382 bp, Homo sapiens
ctattaggaagtggggtgcacagcaggttaggggccggcaagccagcgaagcttcatctgtatttatagccactccccgtcgctggcgttaccacccgagctccgcctcctgtcacatcagcggtgggcattagattctcatagcagcacgagccctattgtgaactgcacacacgagggatgtaggttgcacgctccttatgagaatctgatgcctgatgatctgtcactgtctcccgtcacccccagatggggctgtctagttgcaggaaaacaagctcagggctcccactgagtctctgtgatggtgagttgtagaattatttaattatatgttacaatgtaataataatagaaataaagtgcacaataaatgcaatgc

SEQ ID NO: 599243 - DNA, 282 bp, Homo sapiens
gtggagcgtgtctcagcctctttcagtttgtcggacagaagtttaatttcttcttcatatttgtcctccttatcagaatagtgtgggagaaaccaaaacattgctttaagaaaaggcggcccagccaggcagggtggctcatgcctggaatcctggcactttgggagcctgaggttggtgaatcacaaggtcaggagttcgagcgcagcctggccaatatggtgaccccccgtctctactaaaattacaaaaactagccaggcttggtggcatgcagctgta

SEQ ID NO: 599244 - DNA, 217 bp, Homo sapiens
ccacgaacgcgatttaagtggctttggcaatatgctgtttatggcgttaatcggcattgtgctggcatcgctggtcaacttctggttgaaaagcgaagcattgatgtgggcagttacctacatcggcgtgattgtctttgtcggattgacggcgtatgacacgcagaaactgaaaaatatgggtgagcagattgatacccgcgacacgtcgaacctg

SEQ ID NO: 599245 - DNA, 181 bp, Homo sapiens
ctcacccaggacagccttcgtgcggccacagttcccaactgacacgtggagacttcacatcctacgtgaaaggccgagtctctccccagatcctaagtctctccttcggtctcctctctgcttcctctcccggactctctattatcctctccttttcttctcttcctggctggttccgctg

SEQ ID NO: 599246 - DNA, 237 bp, Homo sapiens
tgtggcacaacacactagacgggagtagagacccactcacgctggctcaagtcacggagtctgtagtggggacgcacgtggaccaataagggctgctgccagaaataccaagaacataccatggcctggcctacctcccagcaggggcacgctcctcactacctctaagtacttgtgctagctccccacaccttctgatgcctaagaagcttctgtttccttgtatagcatttcaga

SEQ ID NO: 599247 - DNA, 305 bp, Homo sapiens
ctggccagcaccatagcagatatccaggagcacgatctggagaaaacacggcagtactctcaaaagctagggcctgctgacttagacaactacagagcctgactctcttcctacagacaaacctaaaggggaggcctacacaggagacccttctgtctgagtacagcctgtcctcccacccaggacacaccctctgtctaagtgacaggccctctctgggaagactctagacagcagtcgcagatgagagccagactcatctcctgtgcccttgctgggaggtcacaggtgtgctatcacccgag

SEQ ID NO: 599248 - DNA, 123 bp, Homo sapiens
  misc_feature (117)..(117): n is a, c, g, or t
tttgatataagcacaacacattgatacccttgattggagaatctgcgttcctctaagtatatccccagaactaaggcatttaaccagtgtaaacagactctatcaagcgccccaagnttatat

SEQ ID NO: 599249 - DNA, 209 bp, Homo sapiens
aggtatgaccatactccgtatatacttagatcacttatgcagaaacctcaactgtgttgaacattgctgagagaaatcaacaataatcttaacagatatgaggacagtaaaaatagattgcatatctttttgcactaaaactttcatatttattgacaagcgggaactccattctgccacagagaccctgacaattctcctttgaggta

SEQ ID NO: 599250 - DNA, 867 bp, Homo sapiens
ccataattgtcacgccctctggggtatcctctttgcgaggttcttgagagcccccccaccgccgtgtgctcaagggaagccccctctcaccggggtgggaaaacacggtgtggccgttccacggcggctccctatgtaggggtaggcgcacggacgggtggcctgggagtttaagccgccccagccgcactttttccggggggtttaggaacaggaaggcaagattgagattcctcggacgggggtcatggggcctgctcccccgcccaggacagctccaccagggggttttaagaggcgctgccccacacagctcacctggctccggaaacacagttaaccgcgttcccacatatcaatcaagatcagcaataacctttattacgcgggattgccatctagtgccccgacacaaatatgtgtccccccctccctgagatcatcccctcttcaatcgttctatcccctctggcgagaacaacccaccataacttcaagagattctcaacgttttgttactccacagccgagagatatatttttcgctctctgcaccatcttttaaatatcaccaatatccaacctcatttgtggtgcgaaacacttgggggtatccccgtcgcgtgttatctccttttccttaaaaattctcctcgaaagagagacgcctaaaattgagccaaaatggtgggaagagtaagtgtgtaaaccgtgatcttcttccacttcgaagaagacaaagaccaagcagccctccatgtctccccccatcgtatatatttggcacaccacattgtccccctcccctcgatcttagtacaccccccccccccgtttaaaaaaccaaaaaaagcccccaacaaaaca

SEQ ID NO: 599251 - DNA, 364 bp, Homo sapiens
cacgagggcgatgctgaccttaccggggaggaggaagggggcctcgccggtggcggaccagtcgccttcacccagggcggcacggaggtcggcgcggctggcccagaaggcctcggcgatctcgccgtcggcggggacgagggggacgtcggggtcggcgacggcgtggaagccgaccatcaggctgcgggggaacggccaggactggctgccgaggtaacgcacctcgctcacccgcgccccgacctcctcgtggatctcgcgcagcacacatgcctccagcgactcgccggtctccacgatcccgaggagcacggcatagcggggctccggccagctgggttggcgggcgagcaggacctgg

SEQ ID NO: 599252 - DNA, 209 bp, Homo sapiens
ttattcattagtctagaggtccatgcatacttaatattatacttcctcaacgctttatacttccgtgatggaattcaagtataatattaagtatgcatggacctctaggaagtataaagcgttgaggaagtataaagcgttgaggaagtataaagggttgaggaagtataaagcgttaaggaagtataaagcgttgaggggtaccgagc

SEQ ID NO: 599253 - DNA, 884 bp, Homo sapiens
taggtgttggggaatatgggaagggtctcctatctattcaatagagttgtctcagttattttcctgccttgccctgtgattctccagaaaaggtgggatctaggaagaaagaatccgagtgtagaagttgatgaagaacttgaaggtttgggtatctggataaggtacactgtcactaggtgctaggtgggccgagcgtaaagattcagtggatgaactgtgtgcagtgcctgacaatgaatatagaacagtattaatccctttgagaaagtcatagtccagcaggacagtggcatttggacggaaggcccacttagtttcttgggagcaagagcgacgtatcatgaagtgctagagtgtggctcttcggtgcatgctgcttggggatacagcgtataggtgcacgaccatgtagacttggaagcaagagaagtagcaggctctgggtgcagtcagccagacccgaagctggaaggatctggttcaacgtagcaaaagccttaggaaactatgtaattaaccgtcactggatgtgtaatccagtgaagattaccttttgcgggtgtgtatgtgggcatgtgcccatttctatgtgggtgtcgacgtgagtcagtaccaaaagcttcatgtgacttgacctgaggggtcggttggaactctcacgaggtggagctgaatgcctaagctcaggaggcaagggtggtggcgagcaatttaaattcttttggcgagggggtggaacctaaggtaccttgcctaatagggggttagatttcctcctttattgttagcggcacaccttggttcacggggcacagtggtggctcggggcctggtcttcaaacacaaaaaaaagcggcgctaactgtggcacaatctatatc

SEQ ID NO: 599254 - DNA, 519 bp, Homo sapiens
  misc_feature (13)..(13): n is a, c, g, or t
  misc_feature (17)..(17): n is a, c, g, or t
  misc_feature (20)..(22): n is a, c, g, or t
  misc_feature (25)..(26): n is a, c, g, or t
  misc_feature (33)..(33): n is a, c, g, or t
  misc_feature (36)..(37): n is a, c, g, or t
  misc_feature (484)..(484): n is a, c, g, or t
  misc_feature (489)..(489): n is a, c, g, or t
  misc_feature (494)..(494): n is a, c, g, or t
  misc_feature (499)..(499): n is a, c, g, or t
  misc_feature (504)..(504): n is a, c, g, or t
  misc_feature (509)..(509): n is a, c, g, or t
gggggaggtgagnccgnggnnncgnnggggggnccnncttgagttatagctcagcagtgtcagataaacacttggaagagggtcggctttatcctcctttgaataccattacagatgtggctctgggggttgcagaaaagattgtgaaagatgcataccaagaaaagacagccacagtttatcctgaaccgcaaaacaaagaagcatttgtccgctcccagatgtatagtactgattatgaccagattctacctgattgttattcttggcctgaggaggggggggaaaatacagaccaaagttgaccagtaggataatagcaaacatttctaactctattaatgagggctttaaacctttcataatttttaaagggtggaatcttttataatgattcataagacacttagattaagattttactttaacaggctaaaaattgctagaagaatatcgatatagattggggataaacatcacatgngacanttggngttantttgncttcngggtatttat

SEQ ID NO: 599255 - DNA, 941 bp, Homo sapiens
  misc_feature (13)..(13): n is a, c, g, or t
  misc_feature (17)..(17): n is a, c, g, or t
  misc_feature (20)..(22): n is a, c, g, or t
  misc_feature (25)..(26): n is a, c, g, or t
  misc_feature (33)..(33): n is a, c, g, or t
  misc_feature (36)..(37): n is a, c, g, or t
gggggaggtgagnccgnggnnncgnnggggggnccnncttgagttatagctcagcagtgtcagataaacacttggaagagggtcggctttatcctcctttgaataccattacagatgtggctctgggggttgcagaaaagattgtgaaagatgcataccaagaaaagacagccacagtttatcctgaaccgcaaaacaaagaagcatttgtccgctcccagatgtatagtactgattatgaccagattctacctgattgttattcttggcctgaggaggggggggaaaatacagaccaaagttgaccagtaggataatagcaaacatttctaactctattaatgagggctttaaacctttcataatttttaaagggtggaatcttttataatgattcataagacacttagattaagattttactttaacaggctaaaaattgctagaagaatatcgatatagattggggatgtagctgtgaggagtagttcttagtgtcacgcctgctctaagtataaagggaatttgcctaatttacatcggcgtcggtatttgtagtagcggagggggtgatacgggaactcgtagtttttgagttaccgtgcacgatcggggtatatcaatgggagtgtaatgatgttattggtcggaaaagagggtacgctgtcacggcaggtgagagatgttatcaaacgtctacttcattctccgcggtgcgtggatagtatgttgatggtgaaaggtggtgtacagtatcggccgggtccgtcgtgatagcgtcgtaatataataatctatatctgtgctacatctgctcgaggatgtgcgatgtgaggaggcggaatcttgctagttgatgcgtggcgtgaggcgagtagccaagcgcgtggttcggtagaccacttcttgtgcgaggttaggagggcgcgtggaggtatgtg

SEQ ID NO: 599256 - DNA, 226 bp, Homo sapiens
ctgctgggctcttcctgctgttggaaacttacccggcccttacagagggaatcttcctcctctcttctgcccttgaatgttttcccaaacatgaaggtgataagcttattcattttgggtgggtttataggagagttccaaagtttttcagtccctcctctccagtcaactgccagtgggacttctatgccccttgtcagatgcaatggctgtaccagactagact

SEQ ID NO: 599257 - DNA, 314 bp, Homo sapiens
tgcacatcagtcataattactcactctttatccccctaataaattgcatttgggtcaaagcgatggctcacgcctgtaatcccagcactttgggaggcaaggtgggcagatcaagaggtcaggagatcgagaccatcctggcaacatggtgaacacccatctctattaaaaatacaaaaattagctgggcatggtggtaggcgcctgtagtcccagctactttggaggccaaggcaggagaatcgcttggaacacggggagggcaagacctttgcaggtggaagctggagatcgcaccatttgcactccaaatt

SEQ ID NO: 599258 - DNA, 706 bp, Homo sapiens
agtaaggtcatgctaaataagctatcgggcccataccccgaaaatgtcggttatacccttcccgtactaattaatcccctggccccaacccgtcactctacatctaccatctttgcaggcacactcatcacagcgctaatgctcttcactgattattttagcctgagctaggcctagaaataaaccactgctacgcttctattccacgttctaaccaaaaaacataaaccctcgttccacagaagctggccagtcaagatatttcctcacgtcgaagcaaccgcatccataatccttcgtaatagctatcctcgttcaacaatatactctccggacaatgaaccataaccaatactaccaatcaatactcatcattaataatcataatggctatagtaataacagctaggaatagccccctttgcacttctgagtcccagaggttacccaaggtacccctctgacattccggctgcttcttctcaccatgcacacaaaactagacgcccaatctcaatcatataccacatctctccctcagtacaacgtaaagccttctcctcactctcatcaagtcttatccatcatagcaggcagctgaggtggatataaaccaaacccagcttacgcaaacatctcagcatactcctcaattacccacatacgatgaatactagcagttctaccgcacaccctaactaagcct

SEQ ID NO: 599259 - DNA, 545 bp, Homo sapiens
gtaatcgatgccacagcgggtgtctcgcgggggatcggctactctttggtgatgcacaccagcgcgggtgcagaaggctcgggccaagcccgggcgtcccccggctccggccgggaggagtttagaagtgcgccattcatcgagtgtcagggccgggggaccggcaattactacgcaaacgcttacagctttgggctcgccaccatagagaggagcgagatgtccaagaagcctacgccgtccacctggagggcaggggagctgcgcacgcacgtcagccgctgccaagtcggtatgagaagaacataaggaagccggactcagctaaggtcacaacagggtggctacttcttcttcttttggttaacagcaacgaaccctagaaatatatccggtgtacctcactggtccaatatgaaaaccgtaaagtgccttataggaattggcgtaattaacacacccggtttcatggacctctactggcggaaggagaaaaagacggcgataagctttcaataggggcatcgataaacaccgggtaccga

SEQ ID NO: 599260 - DNA, 428 bp, Homo sapiens
atgcgagtaatacggatgtgtttaggagtgggacttctaaaacatccgtattatcgcatcagagtatgaatcactgactcacatagtctatagaaaacaacgaaaccaaataatcaagcactgcttattacaatttactgggtctctatttacctcctacaagcctcagagtacttctgagtcgtcccttcaccatttccgactggcgatctacggcgtcaacatttattgtagccacaggcttccacaggacttcacggtcattattggctcaactttcctcgactatctgcttcatccggccaacataatatttcactttacatccaaacatcactttggctttcgaagcccgccgcctgatactggcattttgtagatgtggtttgactatttctgtatgtctccatctattgatgagggtctta

SEQ ID NO: 599261 - DNA, 294 bp, Homo sapiens
caaggtgcccaacctgggcaaaatcaatcgggacctgtttgatttttccacgggttttataaaggggccggccaaataaggcccggaaaccccggcccaaggggcccaggccttaaccccatgcctcccaaaaaccaggggccggggggggggccccccccagcccaggccgggactttccccaattttgggtggggttcgggtttttcccctgtgaaggggcggtcttggtgttttggggcacgcgtcccaagggggttattttgtttttaccaaaaaaggatgaaaacccca

SEQ ID NO: 599262 - DNA, 1216 bp, Homo sapiens
  misc_feature (45)..(45): n is a, c, g, or t
  misc_feature (253)..(253): n is a, c, g, or t
gtgcagaatccggtgagggtgctactgcattttctgaccttcccntcctggtatggaattcattgtgaacctgaagctgtgacgccgatgctcatatcgggatgcgaggcgagtatatacggtatgcggtgatgtgcacgtgggtgggcccccttcaagagaatgactatcaggacttctccgtcgtatcgcacgatagccttgatcaatggcgtgctccgatggtacatgtgactattgcgcgcagtactanatgctcgtatgctcttccaagctattactgcctgtacgcatgagaggatgatcctgaacataataatactctcgcacaccgaatagtgattggagatgaggcgagtatggtgaaatcctggattgtcgccaatctgagacgtcgtaagcgtatgcgcgatggatatcatccaatcagattctctgggcgtccattccgtaagattgaacaggtagcgagcctgatttagaatggtataactgggcggagctcttgtggggccgatcctaggattgaacataagctggggctggttggacgttaatggagattccatgtacctttgtccgaccaggaatataaggtggggaatccacgttgccatagacgccttcatgggaggatagcaagcaacagattccgtcataacttcgaatgaccgcaaggaattgttgtccgatgggtttgtgaagagacgatgagtcagtattggaattatcgataccgtttcatcactaaaatactactggagaaggaggaataaaagtgggtagacagattcctaaaggtcgtctctttagcatagacagggacgctcgtaataaaaaccccttgggtttgtgactgtttggaacttttggaattcttgcgtgcgcaccctggcaaatctcatgggtttcaagcctggtctttgtgggttaactagaaggggctgggcgtttggcttgggccttaaccccagaaattgaaacactttttggaccacgctgtccacaaacttccacccaggccttgaaccaaaggaaaagtaaactcttttgcccacgtgggcgcctaaccaagggacctgggcgcgacctttccaaacttaccaacctcttaacttgtcaaatgtctcgcggaccacggccatctctgcgaagcgcatccacttgatccccgacaacgcttgggaagcaatcctgaacccttctttaaaccttc

SEQ ID NO: 599263 - DNA, 413 bp, Homo sapiens
  misc_feature (63)..(63): n is a, c, g, or t
  misc_feature (91)..(91): n is a, c, g, or t
  misc_feature (119)..(119): n is a, c, g, or t
  misc_feature (386)..(387): n is a, c, g, or t
catacgtccaaccttgctgctggagagattggggtttatttttaactgacttacatgaacgtnaccccatttccgaggcctggcgcctttntcctcctgtaagtcttcgctcgaatgtnaccttgcgagggaagttgttcctgatcaccctgactatgtcccctaccggtactgtatcctctgtctcaacaatctgttggtttcattcctaacccttaaagcaaagtgtttatatttttatatttatgtatttgttgtctgcctcccctactggactatcaaatcttctaggatagggcttgagtctgtcttaatcactattgatgagcagcaggtgcttagcacagtatttggtgtacctgtggaagtgcccaaatgtttgttgnntgactgagtaaccttccccatataat

SEQ ID NO: 599264 - DNA, 254 bp, Homo sapiens
gtgagggtccagaatcgcacacccttccctatcccccgttccactggctcttagagctgaggcacacatagtaggcgctcaggggacatgagcccaccccgtcttatgggccacagagcgaaatcagtgtcaatgcctgaaacatgcatgtctctgtgatggaggtgagagcttgtgaggtaagattcgcattgtggtgtggcagagtttttgggggattgaagttagatccttgttactcagtaaaccacctc

SEQ ID NO: 599265 - DNA, 188 bp, Homo sapiens
gctctggtacacactatgtagcagctaacaggtcgtcatggctttcagtctttctattatataacagtgtctgaattgtttcagaatgcagtgtcttaacaaaataagattagtcattcttacctggtgctatattataccagccatttgaacctgccacgatcaccacccagtgcttgcctccatct

SEQ ID NO: 599266 - DNA, 100 bp, Homo sapiens
tcgagtcgggccccatttgaagcctgtttttcccgttgattctgtgtttacttttcttctttcttttccttgggtggatgggttctgcgtaattagggtt

SEQ ID NO: 599267 - DNA, 1000 bp, Homo sapiens
  misc_feature (45)..(45): n is a, c, g, or t
  misc_feature (142)..(142): n is a, c, g, or t
  misc_feature (191)..(191): n is a, c, g, or t
  misc_feature (198)..(198): n is a, c, g, or t
  misc_feature (204)..(204): n is a, c, g, or t
  misc_feature (326)..(326): n is a, c, g, or t
  misc_feature (384)..(384): n is a, c, g, or t
  misc_feature (389)..(389): n is a, c, g, or t
  misc_feature (409)..(409): n is a, c, g, or t
  misc_feature (419)..(419): n is a, c, g, or t
  misc_feature (426)..(426): n is a, c, g, or t
  misc_feature (432)..(432): n is a, c, g, or t
  misc_feature (435)..(435): n is a, c, g, or t
  misc_feature (441)..(441): n is a, c, g, or t
  misc_feature (445)..(445): n is a, c, g, or t
  misc_feature (449)..(450): n is a, c, g, or t
  misc_feature (454)..(455): n is a, c, g, or t
  misc_feature (462)..(462): n is a, c, g, or t
  misc_feature (465)..(465): n is a, c, g, or t
  misc_feature (476)..(476): n is a, c, g, or t
  misc_feature (504)..(504): n is a, c, g, or t
  misc_feature (513)..(513): n is a, c, g, or t
  misc_feature (516)..(516): n is a, c, g, or t
  misc_feature (520)..(521): n is a, c, g, or t
  misc_feature (523)..(523): n is a, c, g, or t
  misc_feature (526)..(526): n is a, c, g, or t
tgttgctatttagtaaactagcaaatgatgcatgtatttgttttncatgtactgggcaatatgagtaaaatctgtcccgttttccccctttgaatgaggtcttccatgtttgagggaaagtcttgcactatgcatatatttnggggacacagattttcatagtttccattttgggggggcttaaggatttnttttttntcctgnttggaaacagttttatactttctggatatagtacttgaaattcttaccagaaaattacttgggagtttggaaggcctttataaatactacttttaaagaagcagtggttttatggtcaatgnttttttttcccccaagcatatttctggtattccggttcccatattattattattttanaattnccaatcaggatatggcccgncatccatganaacggtncgggcnccnaaagtnttgncaanntgtnncggtgtnctnaagacaaagtngagcaaagagccttcagcttcagtcttnacataccangantaanncnttnaaacatcatatgggagaagtctacatggttgatggtcaccggcagtacgtggggagtttaaacattgttgtcctcttttcaggtgaaacagagtaaaaatattcatctaccattagtgttatggcggatgggaaaatgcgagggaaatatagctatccttatgacattatgtgcaacccaaattggttttaccatcttgggttttagtaggtttagaagacactggttacatctttatggctgaagggtgtaagcattatatgctagtagaatctagttaattgttccggtggaagtatcttggttccatatggatgtgttggttaacaacataatttggtgttggaaaaaaacaaaaaaaatatggtgggctgggcagaagtttaaacatgtgggggccaaggagatggtacttcagagatggtaagtgttacaaagcggggggttaaccagttggtttgtaggaaaacgggg

SEQ ID NO: 599268 - DNA, 446 bp, Homo sapiens
  misc_feature (9)..(9): n is a, c, g, or t
  misc_feature (23)..(23): n is a, c, g, or t
  misc_feature (52)..(52): n is a, c, g, or t
  misc_feature (79)..(79): n is a, c, g, or t
  misc_feature (193)..(193): n is a, c, g, or t
gaggccccnggattggcccacgnagacgggctatcatcggtgccccacaaanactgcccatggtcccttgtattgacanacccggtctaccaccactacccactgatggtgaaggacaagacttccctggcatccccatcagcaaagtctcaccacagcctccaataacaactacagtctggcccaagtgtgngtgtcacgcctgtaatcccagcactttgagaggctgaggccggtagatcacgaggtcaggagttcgagagcatcctggccaacgtggtgaaaccctgtctctactaaaaatacaaaaattagctgcacatggttgcacatgcctatagtcccagctactcaggaggctgaggcaggagaattgcttgaacctgggaggcagaggttgtagtgagctgagattgcaccactgcactccagcctggtgacagagc

SEQ ID NO: 599269 - DNA, 156 bp, Homo sapiens
cgtacgtgggtaccttgaagggaaaaggcagaagtttattagccaagtgggcaggctatataggaccaggcatgtgatggcttgtctctggagtgctttactactttcataaggccagtcgtttaatcagtgaactctccagctcttagatctcat

SEQ ID NO: 599270 - DNA, 144 bp, Homo sapiens
tactcacgcgtcgtccagaatttagtcagctactaaactcagatcatgccggaagggtccgaagtcgcatgaagatgtgtcctgccacacctatataataccgtccttccatctcaattcatacttcaatttgattagctctgc

SEQ ID NO: 599271 - DNA, 174 bp, Homo sapiens
  misc_feature (39)..(39): n is a, c, g, or t
aagttacaaaaaaatctgacagcaacaaacttaaatatngatagttacctctgtatgtacaacacgcatgcacttttcctctttaggtttgggaaagttcaagtaatagtgaggctgcgccctggtggggtgacacgccgggagaaatcagttggtgggccagcacaagggtgg

SEQ ID NO: 599272 - DNA, 413 bp, Homo sapiens
  misc_feature (128)..(128): n is a, c, g, or t
  misc_feature (132)..(132): n is a, c, g, or t
  misc_feature (135)..(135): n is a, c, g, or t
  misc_feature (139)..(141): n is a, c, g, or t
  misc_feature (143)..(144): n is a, c, g, or t
  misc_feature (282)..(282): n is a, c, g, or t
  misc_feature (296)..(296): n is a, c, g, or t
aatttttatcctttcctctgagtttggacaggagccatctcaaacttaatgataacctctatttatgtagcaccccacaggtacaaagagctcctttcatgtgatctttatcatctgtgtggaaaatntacnatnatcnnnanntgatagctgaataaactgaggctccgggaagcttatgtgttgctgtgggccatatgactagtctatatcaacattagtgttgaatgtggggcgttagctttactctgagacctccatagacctcagtgtgaacacttnacactcactgtgangagtgtgattagattgccccagaattgctggcatgaactttctctgtctttaggacagctctgtcatccagaggacaaaggtttattgggctcacactatttcttgccactccgcta

SEQ ID NO: 599273 - DNA, 378 bp, Homo sapiens
cctgggtcttcgccctgtcatccatgctggcgcgatctcggctcactttgacctctgcctcctgggttcaagcgattctcctggcacagggggctgagcagctgggattacaggcaggcaccaccatgctgagctaatttttgtatttttagtagagaccaggtttcgccatgttgcccaggctactctcgaactcctggcctcatgtgatccgcccacctcagcctcccaaagtgctggggggacaggcgtgagccactgcaaccagctggaacaatcttgatattagggggaacaagggatttcatagctttctctgaaggaggaaacactgggagcatccccccgagaatcaacactgtggatcattctggggga

SEQ ID NO: 599274 - DNA, 636 bp, Homo sapiens
gaggcgcctgggcctctttcccccgtttcacgcccacgtgggacccctctccctggcccccggaaccttccacggcgtgttggggggtctcgaggaattgtctggggagccccattttcgcccccacttcacgaggtatccacgctccccctccacgggtgtagaagacccaccccccctcggttacctgagatgtttggccccccgagagggaacctcggccgtgttcgcccccctttcaccaaccccaaccggggcgccaacattgggggagagttatatttactcccgggttgccctctctacagagagctcccgcgagaatgtggccctgtttcggctcctgctcttatccccaaaagccaccccacgccattatccagaggtggaaggtggagtccaggccagccttccatgaatgctgtgctctggctacagccacacacacacattgggccagactgaagacccctcgccctatcttgccatgagactgatccgcctgtgcccacccttcgctcttgaggagctcaaccggtctggccgggcacccaggaggctttttgggctttggactcccccggaatgcgtgggccaaggaatttgggctaagtagtcataataaattaggacccc

SEQ ID NO: 599275 - DNA, 373 bp, Homo sapiens
  misc_feature (324)..(324): n is a, c, g, or t
cctgaaaatagccgacggaggagaaaaaaggcagttggggagttctgtcatggtgcagcagaaatgaatctgactaggaaccatgaggttgtgggtttgattccgggcctcactccatggatccggccttactgtgagctgtggtgtaggtcgcagaagcagctcagatcctgcgttgctgtggctctggtgtaggctggtggctgtagctcagaacggacccctggcctgggaacctccatatgccttgggtgcggccctaaaaggacaaagcaaaaaaaaggcagtcgggatttggacagggcatggtactggcatatatangatcaactttaggggacgtatggcgtcgcgctaacttttcccgggctac

SEQ ID NO: 599276 - DNA, 998 bp, Homo sapiens
tgagtgccctgtgattgcaccttgtgatttactgcactccaggctggcaaaagatagcgagacctcatctccatactagaaaacataaactctatggtaaggaatgatgttctgtagagatggtctactcaacttgaggagtactcgagtctagtcatgcgttcttcctcagcctcggggagcacgcagtattttcgacatatgtaaagattcatttcacccatctatcggtttttgcactggttagcaccatctgtgtatgttcgtcattcttgagtttgcttggtaccacttcttgcgtgccttacttatttgccatttgttggaatgctatcgttacatctgtcatttttgtaccactaaaaaaatcgctatatatgggcaggggtgagaagacatctcattgagacatctatggtgatgccaagccctggcattatggcaatatcggtggaagagcgttcgtggcactcaatgtatgccttgtcttgcctcgaggtcctcatataccggggtttgttctctcatgtcatatgcggaactctcgaatgcatgagattgtatcttgaaatatccatggagcgtcgtccctgttttgaggctagcccgtgatcatgctgttgtcgccgggtcaaccagggtctcgcaaattgaattcatccaggtcagggcgcagatgtgtgaaaggagacccctatatcgcggatgtgcgtgaaccctggtctcggggagaatgagactagtcaggctatcagtgttgcagaatgcccctctactttgtattccacttagtgtgaggccccggtggcatctgctgaatgggacagaaacttggcgtggttcaacacggggacccacaaaaaaacgcgggggggggcacaaatctaacatcgtgggcggccaagtcaggtcagtcccacggcggggggcgcacaacaccgggcgtccacacttgtgtttctcgtccccgccccctcgggacacgcagcgtcaacgca

SEQ ID NO: 599277 - DNA, 200 bp, Homo sapiens
gcctttggctctgagcataatggttcacacatttttatacaaacgcctcgatttaccaactctattcaggatccagcaaaaggacactgactatctagctagctatttgtggtcaagtaaacacacaccaccaccaggggctaaaaggtccagtctcagtgtagagcagtctcagggaagacatcaccaaatgtcgacgc

SEQ ID NO: 599278 - DNA, 168 bp, Homo sapiens
gagccagcgctgacccctagtgtagaagttcaactagcgatatagatagcttagaatctatttacagaacaattagaaaagatgacagaataacaacagaaggattgaaaaactttattcctgctttattattcaatgaacgtcgttatagcattatctggggatcct

SEQ ID NO: 599279 - DNA, 238 bp, Homo sapiens
tatacaccaacttcctagtgtgcagccaggctgtgggccccgtgctgggcttttttttttgagatggagtgttgccctgttgccaggcagagcttgcagtgagccgaggtggtgccactgcactccagcctgggcaaaagagctagactctgtctcaaaaaaatatatataaaaaaaatttctaagtgatgaatgcttagggtatagctgcttatttcttactgtacgggggtatcag

SEQ ID NO: 599280 - DNA, 380 bp, Homo sapiens
ctgtaccctcggtctgtctgtgtagaaagaagtagacatcactttgttctgtactaagaaaaattcttctgccttgggatgctgttgatctatgaccttacctccaaccatgtgctctctgaaacatgtgctgtgtccactcagggttaaatggattaagggcggtgcaagatgtgctttgttaaacagatgcttgaaggcagcatgctccttaagagtcatcaccactccctaatctcaagtacccagggacacaaacactgcggaaggcctcagggtcctctgcctaggaaaaccggagacctttgttcacttgtttatgtgctgaccttccctgcactattgtcctatgaccctgccaaatccccctctgcgagaca

SEQ ID NO: 599281 - DNA, 242 bp, Homo sapiens
aacgatacgattgccagatggctatgcgtgcatcagcttgcgtcatcatactttgacagcttcgtggcttgtatgactccgcctggtagaccctcattcaaactattcagccttctggacgaagcacaaggatggcatggttcagctctctctggccgagtggctgtgctgcgtgttgttctgacccggggtttcggacatcagtgacactccctgccccactgcttgcttcttgtcacccc

SEQ ID NO: 599282 - DNA, 771 bp, Homo sapiens
  misc_feature (3)..(3): n is a, c, g, or t
  misc_feature (27)..(27): n is a, c, g, or t
  misc_feature (41)..(41): n is a, c, g, or t
  misc_feature (43)..(43): n is a, c, g, or t
  misc_feature (52)..(52): n is a, c, g, or t
  misc_feature (57)..(57): n is a, c, g, or t
  misc_feature (72)..(72): n is a, c, g, or t
  misc_feature (77)..(77): n is a, c, g, or t
  misc_feature (83)..(83): n is a, c, g, or t
  misc_feature (92)..(92): n is a, c, g, or t
  misc_feature (111)..(111): n is a, c, g, or t
  misc_feature (129)..(129): n is a, c, g, or t
  misc_feature (138)..(138): n is a, c, g, or t
  misc_feature (158)..(158): n is a, c, g, or t
  misc_feature (170)..(170): n is a, c, g, or t
  misc_feature (175)..(176): n is a, c, g, or t
  misc_feature (179)..(179): n is a, c, g, or t
  misc_feature (186)..(186): n is a, c, g, or t
  misc_feature (196)..(196): n is a, c, g, or t
  misc_feature (218)..(218): n is a, c, g, or t
  misc_feature (239)..(239): n is a, c, g, or t
  misc_feature (245)..(245): n is a, c, g, or t
  misc_feature (248)..(248): n is a, c, g, or t
  misc_feature (250)..(250): n is a, c, g, or t
  misc_feature (253)..(253): n is a, c, g, or t
  misc_feature (258)..(258): n is a, c, g, or t
  misc_feature (266)..(266): n is a, c, g, or t
  misc_feature (277)..(277): n is a, c, g, or t
  misc_feature (279)..(279): n is a, c, g, or t
  misc_feature (295)..(296): n is a, c, g, or t
  misc_feature (300)..(300): n is a, c, g, or t
  misc_feature (313)..(313): n is a, c, g, or t
  misc_feature (319)..(319): n is a, c, g, or t
  misc_feature (322)..(322): n is a, c, g, or t
  misc_feature (329)..(329): n is a, c, g, or t
  misc_feature (345)..(345): n is a, c, g, or t
  misc_feature (367)..(367): n is a, c, g, or t
  misc_feature (374)..(374): n is a, c, g, or t
  misc_feature (382)..(382): n is a, c, g, or t
  misc_feature (395)..(395): n is a, c, g, or t
  misc_feature (397)..(397): n is a, c, g, or t
  misc_feature (402)..(402): n is a, c, g, or t
  misc_feature (413)..(413): n is a, c, g, or t
  misc_feature (425)..(425): n is a, c, g, or t
  misc_feature (441)..(441): n is a, c, g, or t
  misc_feature (443)..(443): n is a, c, g, or t
  misc_feature (449)..(449): n is a, c, g, or t
  misc_feature (458)..(458): n is a, c, g, or t
  misc_feature (462)..(462): n is a, c, g, or t
  misc_feature (490)..(490): n is a, c, g, or t
  misc_feature (588)..(588): n is a, c, g, or t
  misc_feature (632)..(632): n is a, c, g, or t
  misc_feature (670)..(670): n is a, c, g, or t
  misc_feature (672)..(672): n is a, c, g, or t
  misc_feature (686)..(686): n is a, c, g, or t
  misc_feature (704)..(704): n is a, c, g, or t
  misc_feature (743)..(743): n is a, c, g, or t
tgngttccaaaaaattttatttatggnctcttaaatttcananaattttcanttgtnaaaaaaaaatttcanctgtnattgtnaaagaaaantattttgatttttttaatnattaaaaaaagtaaaaancactctcanagcccttaaattaaaaaggnggggggccaganttggnngcnggggggngtttgcagancccagttctagagggggaaacnaatggtttaatgaccaaagcngcggcncananaanaaganagaaaganatgggccgggngnggggactcaggcctgnnatcncagcactttgggngactgnggnggggggntcacttgagggcaggngtccgagaccagcctggccaanatggggnaaccccgnccctactgaaaananaaaanattagctgggngggggggcatgngcctgcaatctcagcnantggggnggctgaganaggngaactgcttgaacctgggaggggggggntgcagtgagccgggatcccaccactgcactccagtctgggcgacacagcgagactccaactcaaaaaaaccccaaaaagacaggcagggtcagaagtntgagttctggattccaaggtggcaggtgttatcagggagctaanaattcattatttttctcattcttggtccagttacctananaaatggctcctgtnattacaagaccaggaggnagggccaggccctggggagaggagaaggggctggcagtncaggagtgagagtcccagggaatggccc

SEQ ID NO: 599283 - DNA, 148 bp, Homo sapiens
aacaacgatctgagcctgggatgcaccaactgataatgcgtctgtcacgggtactcccagtagtgtctgcaagaaacatgccttgtctcccaaattgcactcagtactcactgttgcaagcatcctcccagttccacagcaaatcact

SEQ ID NO: 599284 - DNA, 133 bp, Homo sapiens
ggagttggtatgaggtgcaggtgggcttcaggaatggctggatccaggtatcatgttcctgactgtcatgattcgggctcatttgtaatacggcccctgtgtgttgaggtcgctgtagacatccgacctctga

SEQ ID NO: 599285 - DNA, 940 bp, Homo sapiens
ggaggagtggagtggccgtctagtgtcgacatgctgctggaggaggttcgcgccgtgagaccggctgagtggggcggcggccggggcgacgtgcaggagtgtgcgccgccttctgcaccgcgagctgagtgcatcccgacgccctcaaccgcttaccggcaaaacggcgctgcagagtcattgatgctttgtgtcatgcgaccgccgatcgtccgtggatctgccgtgaagctaaagggtgccatcccacaatggtccaggacaccgtccgtgtaccagtccagtccatgacgcagccacgcactggtattcctggtacacaccttgaaggtccatagtggagcacgtgggctgatgtcaacgtgcctgatggcaccggggcacttccaatccatctggcagttcaagagggtcacactgctgtggttcagcttactggcagctgaatctgatctccatcgcagggacgccaggagtctcacacccttggagctggcactgcagagaggggctcaggagctcgtggacatcctgcagggccacatggttggtcccgctgtgatctggggctcaccctctccagccacgagaaccccgtggggttatgtatcagacagagagggggaagaaacactttctcttcttgtttctcctgcccactgctgcagtaggggaggagcacagttttgtggctaataggtgtaggaaaggacggtgtgagtgtagggggacgtactcaattagtaatctcactcctttaggtgtgttggacagagaaggggctccttgcaggaccatagtcagctaaagggttccagttcttctgcgccttcagcttgctgggccctcaaacgagacccagggccagagcaatttagaagtgaagtattgactccaggagctaaaactggtgccttggccgcattggactacagaaact

SEQ ID NO: 599286 - DNA, 1359 bp, Homo sapiens
ctattgttggacgtgctccttgttagtaggctgtattgttttgtttcaccgacgacgaacgctgtggaggggtgctgtcactacaaaggaggtcactctacctaccgcgtactgggtgtttttacagggggcccgtgggggcaacagaacataatttctctagtagtctactctagtgtctcccggtttgtgtcgtcctggttggtttgttccctcccccctcctcatttggtgtcgagcctcagcgtgtgtgacaaccctcttgttgctacaacaggggcggcgcccccccggaggtgtttttctccgccctccccggggggcgtttatgctaaggggccgtggcgcgtgttggtgtctcgctccctcgcgggggttgctcccctccctgtggggggcgtttgtttataccgcccccttctctttcaaggcgtggtttatcagctcgcgggcgcgccaatggtggttgttggtagagcaggtgcgtggttggtgtccgcccccggggtgtaatagagtgggcggttttttatgagagaaaggttttgtcgcgcccaaaaaacactgtgttttgtctcgcgcccagtgtgtctctactgagagaggagagagagagggcaacacacgcttttgagagcataccttgtgtggagagactctccacgagaacacccacacgagggggtggcgcccgagaatatttcttcttctctcagagatatctctctacagaaatctcccgcgccttgtgagatgaacctgggagagagaccgcggcgcgtgagaaaccccacatgtgagagggtgtgcgcaataacacattgtgtgagagaatacaaatatatgtgagaactctactactctctctctctctctctgtgagaaccggcgacaccacaacgtgtgccaccctgaccccacaaagtgtgcccccgccactttgttgggagacgctttctttggagaccaccaccttctccctgcgaataagacaccgcggtgtaaaaccactctctcacaaagaattgtggggacaacaccgggccacacaccttggccacacaaatgtggagagccccccaatatttgtggctttcggcggaaatatattttttttgacacaagacacacccctcgggagaaacacactgaatataatgtgaaagtataacctcccgggtataattttcccaataaacccgtcgggggagactttcccgggcacccaagcacgcggcacacgacaacatttggggttttccttatccctttttaaaaaatgtgcccccaacacacccccctaaatttttttaattgtcacccctcccttcccaaaaaaaaaaattgtggacccccaca

SEQ ID NO: 599287 - DNA, 1609 bp, Homo sapiens
gggcgctgtccatggcgggagtgctgcaagcaagcaggctcaagcaatattgtacacaaaagcattcttgcatgttcattgcaggcaacatcccatcaaaaaatgccagccatcatcagcaacagtcatcaccagcaaccatgcattcacaaacatgcagcaatgcttggcatcatgtgtataaacagctgtgcaacccagcattgttcaacacaacattccagcacagcaccgcaacatatccaaatgtgctgtgtcccacattacagcaacagccagggtggcattccttaccgtggccttgtgcaaccattgcacaccttcaccaatcattgcggcccaaggcaaaacaaacatatgcagggtgcacatgttgcacacaacatacaattggggtagaccgcactgtccagcttgtcgaaccatgacatgactccattccccatgtgccccctgtcaattccatagatgtggtacacaaacctggatgtcacccaaaagttaacttctaacgtgtatacgttatcacacatgcatggaagccactaatatagggagaaatgatcgggattagtctacgttgtaggatggcacaaaaacaacgtttgggacagattggattaagcactgtcgtacaacaagcattcacttacatcccgatgtgtgatatatgatacacacatatgatccacacagcgcacagtcagcacgtgactagtggcttcgctcccgatgttgtcacagtttcgtacatcacattcggcgacacccaacaaataatgcactcactgagtgctcacatattgcccgcacacatcgtagatcgcaaaacacaaggcagttgggcacagtatcagatgtacagcctaccacttcacacactatcacgattggctgctcacacgggacgtgagacacacgtcaacaacgcacactgggtgccacagcgcatcacacagcacgagcagcacgactctgactgaggagcgatatcgaggacaactctactcacccattggagcggctttccaccacctttgcacacatggagcgaatcaccaacagtctggacatcggacacgaacgagtacccacacaacatcaatcatcacctcacgtcgacgaattgatacgagcacatgacacgcacagacacggatcacaccgtaccacaacaccacctgccaccatacacgacagctatatggcactaataccccacaccccgtacgagcaccacattgggcaccatgcaaccgatacgaaccccattagtgcactaggtatagacaacgatagatgtacacgtcaataaggcggtgcatccacacataggttggtaggataacaagagaaacacatctttatgtgaagtacatccgcatcacctttactcacatttttctcacactacctgttgcactaactatccaatctttaatccctacgtaataccaactgatacatattgctaatgcaacctcaaccgtgtggtccaagagtacaaagtggacaaaaccccaccagctcatacacccttttacaatagatccaccgactgagtaataaacatacgattagtcaatcgatttattccagtcgatctcgg

SEQ ID NO: 599288 - DNA, 275 bp, Homo sapiens
ctacgcgcctgctgaccggtgatgagcgggaagtgcaggcggcgtttgcccgcgccgcattcaatgtggtgttccacaaccgtgatgatcacccaagaaattttgcctggcgactgggtcgtgattctcgctggcggctggctcctgctttcgatctcaccttcagcgaggggccggcggggcagcacagtctggatgtgggtggcgaggcggacgtcatcacccggcagcatctactgaggctggccagggataacgacatcccggccgctgtg

SEQ ID NO: 599289 - DNA, 508 bp, Homo sapiens
caccttttatatacacttactgtaattttaactttcatgttgtacatttgattcctttcataggatctagatctctggtgaaattctctgtctcttcttgaacatattaatctcttatctgaaacagattatagctatagatcttatagctccaatttctcagtcacttttggatctgttacttttggttggttttctgtcttgattattggccatttgttcttgtttcctggcatgcctactactttctagtgaatgacagatacactttttatggaaattgtacaagttttgaatgatgttatctttctccaaagatgatttgattttcttctggcaggcagatagagtacaggaaaatcatcttaatccagttgaggctggtatatttccagtttgctcttaccctaggttgtagttcttcaggggcctcaaggaccttgagtatttccatggtcctacttctttgaaagccctgaactctgtgagacactgagactgctacaat

SEQ ID NO: 599290 - DNA, 140 bp, Homo sapiens
ttagtatcatcccccgctgacggccgcagccagacatgcctgaacgcagaaacatactacctatactacacccatagtaggctccctacccctactcatcgcactaatttacactcacaacaccctatgctcactaaaca

SEQ ID NO: 599291 - DNA, 281 bp, Homo sapiens
  misc_feature (238)..(238): n is a, c, g, or t
attggctcactgcaacctccagctcccaggttcaagtgattctcctgtctcagcttcccaagcagctgcgattacaagcgtgcaccaacacgctggactaattttcgtatttttagtagagatgaggtttcgccatgttgcccaggctattcttgaactcctgaccttaagtaatccatctgcctcagtcttccaaagtgctgggattgcagaagtaagccaccatacctgttcctgncctgggctgattttttaaaatttatttttttgtaggagagagg

SEQ ID NO: 599292 - DNA, 209 bp, Homo sapiens
  misc_feature (55)..(55): n is a, c, g, or t
ttctactctctgcttctatgagtctattaacagatgaatggatatacaaaatccncgctgcggggtgcaatggaatattattcatgcataaaaaaagaaggaaaccctgccatttgcagcaagatggatgaacctgcaggacattgtgctaagtgaaataagccaaacactgaaccttctctagattgatgttcctcccactgtgtttc

SEQ ID NO: 599293 - DNA, 627 bp, Homo sapiens
gtgggggggggtatatcaaagaaaaaacggcgcgcggcgggcggggggggggggtggtgtttttttttaggggggggggggggcaccccccccccccccccccccccccccaccaccccacgtttttttttattttaaaaaaaaaagccccctccttctctcccccccccccccttatttttttttttttgttttgttttaaacacaaaaccctccgtttgtttgtataaaaaaccaccttttttttttttttttttttttgttttggggagaaaaaaaaaaaaacccctcttcttttcctttttaaaaaaaaaaaaagagagagggtggtgtttttttttttggagaaaaaaaaaaaaacccttcttttttttttttttataataagggcccccttttctccggggaaaaaaaaagagcccccccatatttaaaaaaaaagaagggcccccccccacacctttttttaaatccaaaaaaagggggggggggcccgggtctttcccccccttttaataaacacctcttttaaaattgggggccaaaaaaaaataaaggcttttccccttaggggcttaacctaaggcgaaaagccccttggggaaagtccccttcaaggtccggtta

SEQ ID NO: 599294 - DNA, 508 bp, Homo sapiens
  misc_feature (17)..(17): n is a, c, g, or t
  misc_feature (39)..(39): n is a, c, g, or t
  misc_feature (491)..(493): n is a, c, g, or t
  misc_feature (497)..(498): n is a, c, g, or t
cagccctgacgcttccntggggccacttccttctttgtntcctagcaacggcgggtagcgttgttgacatcccgggaggctgtgccgccggcctgagcccagagtttcgcggcctccgcgatggcagaggtggaggaaaccttaaagaggatccagagtcataaaggggttattggaactatggttgtaaatgcagaaggtattcccatccgaacaaccttggacaactcaacaactgttcaatatgcaggccttcttcatcacctgacaatgaaagccaaaagcacagttcgtgatattgatcctcagaacgacctgacttttcttaggatcagatcaaagaaacatgaaatcatggtagctccagataaggaatatcttctgatcgtcattcagaatccatgtgaatagacctgcgatggccaaggctgtttaagcgacactgggttggaaacacttggctctctcatgagtattaaaattctatttcnnnctannggaattcaat

SEQ ID NO: 599295 - DNA, 421 bp, Homo sapiens
  misc_feature (404)..(406): n is a, c, g, or t
  misc_feature (410)..(411): n is a, c, g, or t
ttgtaaatgcagaagttctggaggttagaagttgaaatcaagatgtccgaaggctcatgctgtctctgaagactctgtgggaggaccattccttacctcttcctagcttctggtattcccatccgaacaaccttggacaactcaacaactgttcaatatgcaggccttcttcatcacctgacaatgaaagccaaaagcacagttcgtgatattgatcctcagaacgacctgacttttcttaggatcagatcaaagaaacatgaaatcatggtagctccagataaggaatatcttctgatcgtcattcagaatccatgtgaatagacctgcgatggccaaggctgtttaagcgacactgggttggaaacacttggctctctcatgagtattaaaattctatttcnnnctannggaattcaat

SEQ ID NO: 599296 - DNA, 416 bp, Homo sapiens
  misc_feature (399)..(401): n is a, c, g, or t
  misc_feature (405)..(406): n is a, c, g, or t
caccctggctacacatccaatcacttggaggacattttaaaattttttccattcctgggactgcaccccaaaccaatgaaatcagaatctctgaggccctaggaaatgggtattttctaaagactgaacaggtaattcatacgtgcagatagggtgggaaaccatctgtctgcacaaggtccctgtgatgttttgaagaaaaaagaagactagttgaaatattccttgattaaatttaaattaagggtgaattgattttatccatctctccatagataaggaatatcttctgatcgtcattcagaatccatgtgaatagacctgcgatggccaaggctgtttaagcgacactgggttggaaacacttggctctctcatgagtattaaaattctatttcnnnctannggaattcaat

SEQ ID NO: 599297 - DNA, 1050 bp, Homo sapiens
  misc_feature (17)..(17): n is a, c, g, or t
  misc_feature (39)..(39): n is a, c, g, or t
  misc_feature (1033)..(1035): n is a, c, g, or t
  misc_feature (1039)..(1040): n is a, c, g, or t
cagccctgacgcttccntggggccacttccttctttgtntcctagcaacggcgggtagcgttgttgacatcccgggaggctgtgccgccggcctgagcccagagtttcgcggcctccgcgatggcagaggtggaggaaaccttaaagaggatccagagtcataaaggggttattggaactatggttgtaaatgcagaagggaagaagactaacaccatgtcacagagcaagaacttcagagcagactcactatagacaagatgttcaggggagtgcatttcatataaaaatatgttaacttagtactcaagtagtcagttaatggcttctgaaagatttatgcacaaaaatgttcatcatcaccccattagctataaaaaatataaggtaccaaatgaccaaacaataggagattgattatatgtccataaaatagtgaagtatgcagttattaaaaataatgttgatgacattgtcaacaaggacaacttgtatgttataattttgtgaagaaaaaagcaacagtcaagtttgtaaatatagtttcacacaactatacttaaaaatctacgtagcgacaaaaggatttgagggaaataaactaaaattgttaccagagagggataagccatcacttttttctcttctttacaactatcagtattttccaatacttccacactgtacttattacttttctaatcagacaaaaatattaaccaaaattaaatttcataataggtattcccatccgaacaaccttggacaactcaacaactgttcaatatgcaggccttcttcatcacctgacaatgaaagccaaaagcacagttcgtgatattgatcctcagaacgacctgacttttcttaggatcagatcaaagaaacatgaaatcatggtagctccagataaggaatatcttctgatcgtcattcagaatccatgtgaatagacctgcgatggccaaggctgtttaagcgacactgggttggaaacacttggctctctcatgagtattaaaattctatttcnnnctannggaattcaat

SEQ ID NO: 599298 - DNA, 81 bp, Homo sapiens
ctagaagattcagcaaagtacttttgtgctcttggggatcaaggggcattcgcactgggggaaaacaccgataaactcact

SEQ ID NO: 599299 - DNA, 102 bp, Homo sapiens
accactttctcttctctctggtacaataggaggcacaatgttccccatggttctacacaaaggttctattgcactaagttgtaaagccttgtgtatacacaa

SEQ ID NO: 599300 - DNA, 543 bp, Homo sapiens
cacgaggggccatcacgttttcgggcacggttcaaccattgacgagttgcgagaagatcaggccactagcgcagatcgtcctccaaatgagatcctggcagatgctttcgcggccttcgtcttgatgccgacacttggcctgcgggaagcttttgcgaagcgcggactggatccgaaccgtgcaacagcgctcgacatgtactccatcgcctgcaacttcggagtaggccaggcgactctggtgaatcacctcgcctatggcatcaacatgatcaaccaagcgcagcgtgatcgtctcgggcgtattacgccaaagatgattcgcacggagttgctcggcgaagtcgtttccacgcccctaacggtagcggatcagcattggaattcaccgacgctcgacacggagcaggacgcgctgctgctgcttccttcgggcgtggtcgtggacgcctcaatgcttgtgcccgagcgtgagctggctgctgggcgactttttcgcgctgcaaagtgtggcatcactcgagcggctatacccggcacacc

SEQ ID NO: 599301 - DNA, 80 bp, Homo sapiens
ttccttttttctgttgttgttgaggatagatcacgatacagaaaaaaggaataaaatatcctttgtttcctagtgaaaaa

SEQ ID NO: 599302 - DNA, 221 bp, Homo sapiens
gctgcttcgtggaggtaacttcaaaaaagtaaaagctttcctccgcctcatcttagacttgtttgaaataacccccccgtttctattcttaaaccttaccatttttgttttgttttttttttttgagtcggagtttttttctttttccctaggctggagtccagtgagctgagatccccccttcccctcccccctgggtgatagaccaagactctttctca

SEQ ID NO: 599303 - DNA, 209 bp, Homo sapiens
ggaccggtccgttctgcacttcggatcatataaaaagaaactaggagaaacaagcaaaggtaacccaagcatcattaggaattgaactcagtaattcccaagaacacaaagtagtagagaatgatggagatgttattttaaatatgaagaaaattataccaagtcacatcataatcaaagtatttgaagccagtaataaaaaaatctta

SEQ ID NO: 599304 - DNA, 205 bp, Homo sapiens
ggcacgaggtaatggaggaggtgcctcacgactgtccaggggccgacagcgcagggcggcagaaggggcttcatgtcagggatgcccaaccagcggctgtgcgcttctggagcgggggccactgcgacgcacggtagtagagcgaggtcaggggacggatggagacgtgtaaaacacagaggtgtggagaatttcttggaaaagc

SEQ ID NO: 599305 - DNA, 139 bp, Homo sapiens
ttcggtcgcgcccctcccctgtggttctgcccactgctccagtctcctgagacttctgggattctgctcaacatcaaacgatcttccccctctctctcagcgtttgttttacatccatggatgcaataagcatggcagt

SEQ ID NO: 599306 - DNA, 100 bp, Homo sapiens
tagaacatattgtcattaggatgagctgttattagatgaaatctacacatcatttcattacaaatagtgccttagaaaacgcaaagctagtagcacatgg

SEQ ID NO: 599307 - DNA, 202 bp, Homo sapiens
attggcattcatagctgcagatggttgaacacacatacacgttttttttatcagagacagggtctcccatcagtcacccaggcgggagtgcaggggtgtgatcatagctcagggcagccttgaactccggggctcaaacgatcctcgggcctcagcctcccaaggtagctgaataataggcatgcaccatcgtgcccagctg

SEQ ID NO: 599308 - DNA, 198 bp, Homo sapiens
ttcatatggccagtatgatttattgtttatttttttaaccaaaaccccccccagtaatttataatggctttccagtaatgtgtatcaaataaaaagccctggaaaaccgatcgtttttaggataatatgcatgtttcaagtggtattgaaaccccccctgatggatatgtaataataaacatatctgttttttatata

SEQ ID NO: 599309 - DNA, 329 bp, Homo sapiens
ggatggtcatagactaaaaggcatgaaaagtagcaaggggtgaagccatgggtatgcacggttagttcggagagcaaagagactagctgcagttgactcgtccactgatcaaatgatcagctggtagggctgtacagagtaatatgtcactgctgttccattcactaatcactaatgtgacacaaacctcaatattaaaacagttataaaaattctaaattttcctgcacccaatcattggagctaattctatttgtacccgttcgcttctcctgaaagtccatgcacatttccacagcaaatgaaaagagacaacatctacacttaca

SEQ ID NO: 599310 - DNA, 997 bp, Homo sapiens
ggggtcgtggggacgggaacatgtgcccgaccgtccatcccgctcgctcctccttaggatgcataacctaccttgtttttgtttttaaattttctttccaggtagagtagctcttggtacctaaggaatacttgaaaaattaatgtatgatgtatgagaagacagagtctcctagtttggcatcttgtggtatgactgccatgagttccaccagaaagccactctatttgggtctctgtgacattttaaatgcgtgacagaaagtgagcaaataaagtgaggaagaaatcaaaaaacaaaaacaacaacaacaaaaaaacaacctgtttggtgcgccgcagtactacgcccgtggtagaaaggcttttgctcgatcaccacttctttttgtggcgcaccgcacggccacatctacggcatgacgtgacccaacgtggccataacctggctggttcccaaagaaaacactcggtgcgcctacatacagtatcgtgagattgccccacaaattaaaaagccggccggcgtggcaccacggcggctttgcggaaaaacctacccgaggtgagtcctgaaggcacccccacgggggcgacatcacaccgggggggctccaccggggaaggtcatgtcatttaatatattagccccccccccgggtgaggttctattccgcgcctactccacctcgtcatctacccgacgccccgtgagcttccccagaacaaacataccaggtcacgcaactaacgcacaagccatcaacagacaacaccaacagcgtgtcgctcagcaccaagacaagctaatcaaaacagacaaacgacacaacccgatagtaacgtaagaccagcacacacaaactgtaaaaccaacaagacgatgaacctacactacgacaccgagttgcacaacgtagccgcccacatcactgccaaccgcaccccgatagcagccagaccacgcgccacctccagcctcctaacaccaacacgtg

SEQ ID NO: 599311 - DNA, 973 bp, Homo sapiens
  misc_feature (16)..(16): n is a, c, g, or t
ggggtttccgaacgcnggcttctcctctatttcattggggggtttgcccccgctctttgtggtttccccgcccccttcatatcctgctgtctccattagtggtgttcgcatagtgcttgctgtgtggccccccttttgttaagcacgctgcgcggcgcacctagctgcgttgcttgttagtgtgcactcacttttcctcacggccggtctccgggcgatgtatgtggacgccctgctgcgtgatgtattgtttccggccgcgcgcctcactatcatatgtgagggtggctgctcatgtgcggcgccactcgctcacattcacttatcgcggctctgtctttatttgtagatgatgcagcgcagcacgggggtgtagcatagatcttcctccctccttttattcgcacgctgccagctatgattcgttggtggtcacgcaccccagcgttggggtgtgagttttcactctcgctcgagtggtcacaccgccgcttgctgtcgcgcgtggggctggatatattttattcttacctcgctctaacatatagtgttgccccaccgtatttttcgtttgtaggcacgccgcggggtcgctgcggggtctcctcttctggtgctgggtcacgatctgctgtgtgttgtttttcctccgcggtggtggcaccctcctcttgtgtgttgaaggatagttacgatcaccacgaagatgttttgcccttctatgggaggtgtcaccccactaagtggggttatcagcaagaaggccactttcgcgcgaggttgttgatcaccccacgcccttcttcccccgccaaccgcccgcgggggttttttttccgagggtcctattttttaaattttggggcccacccccctcttttttccccctttttttgaattatttcccccaaaattttttaaaaagggccccttttttcccttttcccccccctttcccccctttaggccccca

SEQ ID NO: 599312 - DNA, 681 bp, Homo sapiens
agcatctaaaaaccataattttactctatatttccatgagttgactattttagatacttcacatagtggaatcaagtactatttgtctttcttgtactgtcgtatttcacttggataatgtcctcaaggtatatctatgtaacagaattttcttctttttatggctgaataatattctattgtataaatatatagtacattttctttatccatacatatgctgataaacttttaggttgtttctaattcttttcttttttgagacggaatctcgctctgtcacccaggctggagttcagtggcgtgatctcggctcactgcaagctcgccgtcctgggttcacgccattctcctgcctctgcctccggagtagctgggattacaggcacctgctgccaccggctcggtaattttttttcattattttagttagagctggtgtttcacccatgttagccaggatggtctcaatctccttgacctcgtgatcttgcccgccttcggcttccaaaaaatgctggcgattacacggcttgagccaacggtcccgaccagttgttcttaattccttatctatggtgaatactgctgaatgaaccacggaagggcaaatttcttcctgtcctgtttcagctcttttggtaactgccagaaggggatcgtgatccatgtcaattattc

SEQ ID NO: 599313 - DNA, 810 bp, Homo sapiens
  misc_feature (22)..(22): n is a, c, g, or t
  misc_feature (96)..(96): n is a, c, g, or t
  misc_feature (105)..(105): n is a, c, g, or t
  misc_feature (114)..(114): n is a, c, g, or t
  misc_feature (236)..(236): n is a, c, g, or t
  misc_feature (240)..(240): n is a, c, g, or t
  misc_feature (260)..(260): n is a, c, g, or t
  misc_feature (310)..(310): n is a, c, g, or t
  misc_feature (498)..(498): n is a, c, g, or t
  misc_feature (510)..(510): n is a, c, g, or t
  misc_feature (517)..(517): n is a, c, g, or t
  misc_feature (521)..(521): n is a, c, g, or t
  misc_feature (526)..(526): n is a, c, g, or t
  misc_feature (529)..(529): n is a, c, g, or t
  misc_feature (533)..(533): n is a, c, g, or t
  misc_feature (551)..(551): n is a, c, g, or t
  misc_feature (561)..(561): n is a, c, g, or t
  misc_feature (565)..(565): n is a, c, g, or t
  misc_feature (589)..(589): n is a, c, g, or t
  misc_feature (603)..(603): n is a, c, g, or t
  misc_feature (634)..(634): n is a, c, g, or t
  misc_feature (650)..(650): n is a, c, g, or t
  misc_feature (659)..(659): n is a, c, g, or t
  misc_feature (750)..(750): n is a, c, g, or t
  misc_feature (808)..(808): n is a, c, g, or t
gggtgcagaagggagaaccccnaggtcagtccaaaagcaaagatactgggagggaagatggcgctgggcgaggaactcagcactcatcctcacccnagcaggcanaagggtttncggccagccaggctggaccctggagccgaggttggggtctcctcatccccttctccctcctcatccgcatcccggtcctcctctccctcctcctcacaggagctgctcagctcttcctcttncctncctcccgccccgttcacctngcttggccccacccttgccctgcaaaaccaccagctccgtggtctctggnatgggactcccaggtgctttctgttcactgtagcctgggggatgaaaacacaggctgaggcggccgtccactgcgcagccgcaagagactgttggctgctctgtacacatcattccgagccgccttggctgtcttgtaaccacgtttctctgcccaggcttcacagatgtcccaggcacaccaggggntggttccgcctnaggggtncctnagccntcntggnttgcgcaggatggagcanggccatgcangggnaattcgggtagcccaggtaacccnacactatgttaggnctcctgggatctgggcgaatagggttagatncctgtccagaaactgncaaatggcntagggagaagagatggggaagatgaggcctcgggcagtcacagagcttcacagagggggtaagaaagtaggtctgaaagtatcgggtatgnccggggttctggagacactcacgactttccgcccaccagcccattgatcagcgaggantt

SEQ ID NO: 599314 - DNA, 84 bp, Homo sapiens
gcctcggactccgccatgtattattgtgcgagacgcgatatacccctgagaccgtactactattttgacccctggggccaggga

SEQ ID NO: 599315 - DNA, 102 bp, Homo sapiens
tggggggggggggggaaggggggaaaagggggggggggggggaaactttcccttaaaggggggcccacacccccaccaaaaaaaaacatataaacgcctcct

SEQ ID NO: 599316 - DNA, 855 bp, Homo sapiens
ggacagtgctgacactacaagggctcggagctccgggcactcagacatcatgagttggtccttgcagcccccggtaattgaagttctctagcttcgtatgctcgttttattgtctctcttcaagcagtgtgtagcatgattgttgctaccaagagacaagctgcgtgcatcttacggtgaaacgattctggtagttacttgcccatactaccctgtggcattgcagcatttcctgagtctacttgtcaaatccaaagatagacgaaggatctacagatcttgtggaacgacatcttacagtcaaggttgaaaagcaagaacagtcagaaagtcaagacgagcgtgatgaaaagcagatccatactcgacttagtaatccgtgatgaactcatctaaaatcaaatatcgatacgacgctgcttactttgacagtcgcaggagaaatgttaggaagaaaattatgacgactcagtgcaccgcattcgacttttaactacatgtactcaacgtattcgatcagtttgcaggacaactatataattgcacggataatccaaaacgatgtgttaaccgtggaccagagaagcgtagccccaagctctgaagcacagttgccagtgaaccttggcaaaggacacggtgcaatatccatgatatcacctgggaacagattgtcaagacatagccaataagggagctaaacagagcgggctttactttatttaaacctctgaaagctaagcagcaattcttagtctactgtgaaatcgatggggtctggacacatgggatggactgctgtttcaaacgagactgatggcagtgtagatccccgaaacacctggattcaatata

SEQ ID NO: 599317 - DNA, 186 bp, Homo sapiens
gactccctgaggtcctcatcttgtcctgctcttattctgtcagcagatctgatacactccttggtgtgttgacccttgcctcctaggctgcccccgatgcctagctgtcctggggaaactccccagaactctcggggaaagtgcccgacgaaccttcggagtgatgcctccggatccctcactcgc

SEQ ID NO: 599318 - DNA, 1234 bp, Homo sapiens
  misc_feature (834)..(834): n is a, c, g, or t
ttgttaatagaccgtgttgtttgggtggtggttgttccctagattgtggccgatgatgtgctttttatgttgttgtgttctcctccatggttgttgtttgcgtggatgtgtgtgtgtctcgaggggggggggggggggtttttattttgtgtgtgttttttcctccctccccgctcgtgtgtggttggtcctccgcgcgctccccacgagtttggattgaacgacatcgccccccttttatggggtgaatcccaaaacaccccacaactaacacggattttttaagggggcgaacacccttatgttaaggagacttcctggcagagggaagtcccccccccaaagggttttgggcacccccagaaaaaaccccacggcgcttttgtgttataaaaccgacctcgcgccccacgtataccattatttacacccgggtctcttaaaaaggtattgcctgaaagcgcattcggggtgtgggcgcaaatattcgcgctcccacgccagaggggatagagggaagatcttctctctcctctcctctctctctcttatagagactcgtagagccccccaacacggcgcgatagaggcttctttaaatagagccctcacaagagagaagagcccacgcttttgtgaaagagagtgggttcccacccacagcctcacccccaataaagagaagaaagagtttcccgcccaccgcttcacaccacacacactctttccgcgccgcgcgccgcagagagaccacctcggcgagatctctccgcgagagacacacgccccccacacaatattctctctctcgcgagaagagaggcgcgctctccncacagggaggaatacaccacagcgttggagaccacactaatggctaattcactctcaacagtgttgtccgctctcgagaccacactcgagagttctcgcaccactcgagaagagaagatatagagaagaccacaccacacacaccacctctgtggtttcacttgtggagttgttataagcctcacccacgcacccacgagttataaccacggctgtgagaagaaagctgtatgaccacttgaatgtggcccaacaggtcacaccacccctgaattcggcctgagtggagagaagaaagaaaggcactaatgttcgactgggctcctgaattacgatgctttggatgttgccccacccaaattggggtcatctataactgagtccccctgcctaattctga

SEQ ID NO: 599319 - DNA, 439 bp, Homo sapiens
  misc_feature (136)..(136): n is a, c, g, or t
  misc_feature (149)..(149): n is a, c, g, or t
  misc_feature (153)..(154): n is a, c, g, or t
  misc_feature (156)..(156): n is a, c, g, or t
  misc_feature (165)..(165): n is a, c, g, or t
  misc_feature (317)..(317): n is a, c, g, or t
gaggatgctccccctgcctacagctgctatacccacttgcctacatgctcatggcctaggtagaagtgagaggttataggaggtggatggtggctgatggagagtttggagggggctgatgagatgttgtaagggncatgagatgttgnaagnngncatgagatnttggaaggaggcatgagatgttggaaggagcgatgagatgttggaaggaggcatgagatgttggaaggaggcatgagatgttggaaggaggcatgagatgttggaaggagcaatgagatgttggaaggagggatgagatgttggaaggagcnatgagatgttggaaggagcgatgagatgttggaaggagcgatgagatgttggaaggagccatgagatgttggaaggagtgatgagatgttggaggcgtcatgagactgctggaccgcgcgaa

SEQ ID NO: 599320 - DNA, 517 bp, Homo sapiens
  misc_feature (395)..(395): n is a, c, g, or t
cgacgtaccatctcaccacagatccagacctctgagcccactttccccatctcatcacagatccagacctcctgagcccactttcccgatctcatcaccagtgatttctgggccctgcattagttttctattgctgctgcaacaaacagctacagactcagtggcttccatttctgtcttatagttctgattgccaaaagtcctaagaggatctcaccaggctaaagtcaaggtgctggcggggctgtgtccgccatgagatgttggaaggagcgatgagatgttggaaggaggcatgagatgttggaaggaggcatgagatgttggaaggaggcatgagatgttggaaggagcaatgagatgttggaaggagggatgagatgttggaaggagcnatgagatgttggaaggagcgatgagatgttggaaggagcgatgagatgttggaaggagccatgagatgttggaaggagtgatgagatgttggaggcgtcatgagactgctggaccgcgcgaa

SEQ ID NO: 599321 - DNA, 355 bp, Homo sapiens
  misc_feature (233)..(233): n is a, c, g, or t
tatctcatggttagaacattcacacattccccagcagcgtgtgcgggctgactaatgtttacaattccaactaaaaatcaccctgcttccgccatgagatgttggaaggagcgatgagatgttggaaggaggcatgagatgttggaaggaggcatgagatgttggaaggaggcatgagatgttggaaggagcaatgagatgttggaaggagggatgagatgttggaaggagcnatgagatgttggaaggagcgatgagatgttggaaggagcgatgagatgttggaaggagccatgagatgttggaaggagtgatgagatgttggaggcgtcatgagactgctggaccgcgcgaa

SEQ ID NO: 599322 - DNA, 255 bp, Homo sapiens
taccagatcaagccgatctggacctacacacagctcactggaacactggatccttaagccactgagcaaggcaggatcgaacccgtgtcctcatggatcctaatcggattcgtttttgctgtgccatgaagggaactcccccttgtcttctttctccttgtctccactccagtattctctgaagccttgcccttcaagccacacctcctccacaaagtcttaccaagccgaccagattcttaagcatcactcctt

SEQ ID NO: 599323 - DNA, 104 bp, Homo sapiens
aaaaaaccggggggggccccccccaaaaaaccccccgggcccccctttggggggggtttttttcgggggccccatttttttggcggctttttttttgggcccca

SEQ ID NO: 599324 - DNA, 329 bp, Homo sapiens
  misc_feature (207)..(207): n is a, c, g, or t
atgagatgtgggaaggccaacatctcatggcgggaagaggaatgagatgttggatgtggaaggagacatgagatgttggaaggagcgatgagatgttggaaggaggcatgagatgttggaaggaggcatgagatgttggaaggaggcatgagatgttggaaggagcaatgagatgttggaaggagggatgagatgttggaaggagcnatgagatgttggaaggagcgatgagatgttggaaggagcgatgagatgttggaaggagccatgagatgttggaaggagtgatgagatgttggaggcgtcatgagactgctggaccgcgcgaa

SEQ ID NO: 599325 - DNA, 487 bp, Homo sapiens
ggtcccaactaactgagaagccgctgcagcattactaagacacaaccttagccaaaccatttacccaaataaagtataggcgatagaaattgaaacctggcgcaatagatatagtaccgcagagggaaagatgcaaaaattatataccaagcataatatagctagaggactaaaccccatataccttctgcttaagtgaattaactagaaataactttgcaaggagagccgagagcttaagatccccgaaaccgagtacgagctaccataagaacagctaaaagagcacacccgtctatgtagcaaaatagtgggaagatttataggtagagggcgcaaacctaccgagcctggtgatagctcggttgtccacgtagattcttaagttcaaccttaaaatttgcccaaagaccctctaaatccccttgtaaattaacctcttagtccaaagaggaccacctctttggacactggaaaaaaccttgtg

SEQ ID NO: 599326 - DNA, 768 bp, Homo sapiens
agccagattaggccgggtgcggtggctcacgcctgtagtcccatagtcccagcactttgggaggccgagggctggtggatcacaaggtcaggagatcgagaccatcctggctaacatggtgaaaccccatcgctactaaaaatacaaaaaattagctgggtatggtggcgggcgcctgtagtcccagtctacttgggaggctgaggcaggagaatggcgtgaacccgggaggcggagcttacagtgagccgagattgtgccactgcactccagcctgggggacagagcgtgagactccgtctccaaaaaataaagagagccagatggtatttgacacttttcagtccccgtggtcttgcctgcagatactcaagacgtgccccttgcagtgacgagtgaaagcggccgtggatgtgggtgagcagatgggagtggccatgtcttgagtcaaacttctgttgttgccacactgaaatctgaagttcagcacattttcacatggcatggaatcttatcttgcaagaattttacttaatagttagaaaggtgtaaaattaactcttagctcacaagcttgttgcgcaacagtaggtaatgggcagaagtagctccctgggctgtggttggcaaactgcggtggcaggttgtcaagcagtattgttctagagaggtggggcctctggggccccgtgggtggacgggtggcctgtccaaaaggttctgatcctcctgcaggtgttgcggccaggggcagggtgaaggaggccg

SEQ ID NO: 599327 - DNA, 157 bp, Homo sapiens
atcagctcgtacctttaaatctacaccaagtcaatgcctaatgctaacaccaatattagtatctttaaaaagattaggacaaagaaccaaactaagactcttaactgaaaaaccatgcatataacatgaaagatttgtatgttgcagtgtgcttccg

SEQ ID NO: 599328 - DNA, 105 bp, Homo sapiens
caattcgatccggtaccctcggataaggggcaagccaaggacaggagcaagtgtgccctcatttcgtttctacttttaatttctgtgtgttggcccttatgagga

SEQ ID NO: 599329 - DNA, 290 bp, Homo sapiens
  misc_feature (268)..(268): n is a, c, g, or t
tagaatttcaactcactgcaacctccgcctccttggttcaagcgattctcctgcctcagcctcctgagtagctgggattacaggtgcccaccaccacgcccggcttatttttgtatttttagtagagatggggtttcactatgttggccaggctggtcttgaactcctgacctcaggtgattgcctgcctcggcctcccaaagtgctgggattacaggcgtgagccatcacgcccagccagtacttgtggaaggactagctggaacanacaggtgcttgcagacctgaca

SEQ ID NO: 599330 - DNA, 296 bp, Homo sapiens
gggggggggggcccccccccaaattggggggccccccgccccccctcgcccaaggggggggcgcccattttgggggggggggttttttttttttccccccccccccggggggcggggtttaaaaaaaaaacccccggggggtttttccccccccccgggggggggtttccctggtccccccgggggggggggggggggggggggtccctcccctttttttttgggggggccccccccccccctttttttttttttttgggcccccccccttcttaaaaaattttgggggcccccca

SEQ ID NO: 599331 - DNA, 131 bp, Homo sapiens
taataccatatctcatgcgtataggaacctggatgctggagagcactttagtggagcactaaaacctcatctccactatctatataacgatgctacctaaatatccatggacgcgatgttcattcacctct

SEQ ID NO: 599332 - DNA, 792 bp, Homo sapiens
gaaaccttttaacatgagtaaggtcagtgtggtggctcacgcctgtaatcctagcactttgggaggccaaggtgggtggatcatgaggtcaggaatttgagaagagcctgggcaatatggtgaaaccccgtctctactaaaaatataaaaattagctgggcatggtggcagacgcctacaatcccagctcctcgggaggcttaggcagaagaatcgcttgaacctaggaagcagaggttgcagtgagctgagatcacgccactgcactccagcctgggtgacagagcgagactccgcctcaaaataaaggtttccctggctgggcgcggtggctcacgcttgtgatcccagcactttgggaggcctaggcaggtggatcacctgaggtcaggagttcaagaccagcctgaccaacgtggagaaacccagtctctactaaaaatacaaagttagccgggcatggtggcacatgcctgtaatcccagctactcgggaggctgagataggagaatcgcttgaacccagaaggcggaggttgcagtgagcgaagattgcaccattgcactccagcctgggcgacaagagcaaaactccgtcccaaggaaaacaaacaaagaacgcaacaggtttccccaagaaaataaaggcaaagattaagaacacaacaccgaacacctctgcgaacacccgtacacagccgtgactctcactaccgccacgagacattcaccttcattcctacactccaaccatcgaaagacacaaagagcggcaacacaccctcaaaaacag

SEQ ID NO: 599333 - DNA, 189 bp, Homo sapiens
ggatcccccgaacggtgcctggggaagtaccgactgacgatggggtaagagagatggtgggtccaggatgccactttgcctgggagcaccgcggtccttataactaccagctgtctctggtgaggtgcaagacctctctggttctctatatttcatgtgcattcctataaccacacccttttctgtgcc

SEQ ID NO: 599334 - DNA, 997 bp, Homo sapiens
  misc_feature (299)..(299): n is a, c, g, or t
gcgctcgccatggcggtttgggcggctgagcgtgagcggctccgcggacaccgagcagtggtccccggcgcgcgacctgagccgacagccgaagcagcccgggggctctatgcgacctgactgctgctgtggtcagcatgcttgctgcctgctcgcgagctcttctgccgtccgtcgccgcggaccctgccagaccctctttcccaggtgcccgcgtccttcagccacgccgcacagattcgcctgtcactaacgcagatccaggtctctcgtagttgggagcgcgagtgggcgccatnggagcaatagcgacagaggccatgttgtcgtaccgtgaggtgcagtttgaaagtacacctgacagttaaatgtgttcacgggccgagcagtcatgtccagtagggagtgaagttgtacacacgatcacaggcagacagaggtgtgacgttcactgaccgacgagtgccctcaggcaggcttcccaaatggatttcaaatgtcagctctacgccttcgagctgagctgggagcactccattctgcctgggtgacaatgccttggtttcaacactatcggaatgtgactgtcgggcctccagaaaacattgaggtgaccccaggagaaggctccctcatcatcaggttctcctctccctttgacatcgctgataactccacgtgctttttttgttattatgtccattactggcaaaccacgaggaatccaacaggtcaaagggcctttcagaagcgactccattcatgggtaattaaaacctccgaatgtctgttccagtccaggcaattgtttggcacagtgcctttaagcggcgttatgcaacatttttgtcaaacaaagcgggatgcccccggagtcatcaggatcgaatcggggaggacactatggatccgagggagaccgtttccggcgacaataggggcaacatggtaccccgcgtcccactaaagtttaacacacccataagttgaggacacc

SEQ ID NO: 599335 - DNA, 1272 bp, Homo sapiens
cggaaggagcccggacgccgaaccgccggcatgagctacgaccgcgccatcaccgatcttctcgacccgacggacacctcttccaacgtggacgtacgcgcacggacggccgtcaacgaacgggctcgaccgcggattggatgttcgacggaacgacgaccacttgattgtatctatggatgtggacgaacgacagtcacgtgtgccaacacctggccagagcatgcaacagcacaccagtagcggtgcaagcactcactgtgcatatatgcgcatgcacccacacagatcttgccaatggcacatatatgcgcagagcacatcaaccagcaccgcaatgccacacggcatcagatccatcaaaactacgggacacccggagaatgagcacgctgcacaagaacgacacaaacaccaggacctagcacatgatagcgcagagaacgcacagaggatacaccctgagtgagacagctcaccaattcaaacacccgagcattaaccaatacagggcaacgcaaggagaccactgggacaaaaagagcacaaccaaccggctcacaccataaccacacaaccacccacaccaaacacacgccaacaacataggcggaggaccagcacccaaacaagggagcaaccagccacacatcaatgggaggagcgaccactcaatcacaccaacacggtcagctacacccaaatcacaacaagacaactgcacacagtagacaggagaagatcaacaaagcaaacaaagcagataaaagacacgaaacgtaaggaagacaaaaccacacaacccaaacaagaacagaggaccactcacaatacaaatccacaacaaacaacgagtaggcaacacacacccacacagatccacgagaagagagacaccacacgaaacataacaacaaccaagaaaagggacacacaggatgcggaacaacagagaggcgccccccaacaccaacaacacacactcgccacaaacgaatcacacaggaccagccatcacccaagcagggactggcgcggcatactgagcacccacacagaagacagcacataccgccaaatggcactagagaacacccaccacgaaaagcgaactcaacatcccacccactgtgcggcacacaaacccaaaccacagcaacacacaacaatacaaaaaatcacacccgaaggcgcaacccgcgcgacacaccaaggacgacaccaacacaagcaagtgaacacacgaaaccaacacacgcacacagtctcgac

SEQ ID NO: 599336 - DNA, 749 bp, Homo sapiens
tatggaaaagttcttaacaggattattgtaaatgacctccagggtcgcaatgatgatgacgccagtggcacttgggacttctatggcagctctgttggtgaaccagatgatgaaaagtggcttcattgcattgctctatatagccaaccccccaggaccagaagaccaggcatgatgatgacgatgcctatagcgcaatgtgttcgaatttgaattttcagagacccccctcgttaccgtgttataacatccaagtatcctgtggctcaggggccacctgaaaacctgggtctaccctgcgtttttcgggatgatccctttacagaacagtgtgagcaaactggttcctccccggacagttaatctgccgccgtggccaaaatatgtttccccaaaaaatcgctgggccaacaccgttcgggtccagccccacgtttggcaaggaacgggcccaacggcaacgttttctaattcggtggcacagtggcttctatccgtcgcgccacacgggttccattacctatatggagttaacaccttcccttgtgtggcacaattcccgcaaagaataggctaagcccccatggggcaaaaggacacattagtccaaaacgagccccatggaaacccaccagcgttcacacggggcgaagggcccatggcgtacaggaaattccttggggtggcggaccaacgtttccacacctgtaaattacccggtacactcacgtgagtttttcccaagccac

SEQ ID NO: 599337 - DNA, 465 bp, Homo sapiens
  misc_feature (33)..(33): n is a, c, g, or t
tctcgattcttgcctgtgtaaattgttatcgcnaaacactatcggaatgtgactgtcgggcctccagaaaacattgaggtgaccccaggagaaggctccctcatcatcaggttctcctctccctttgacatcgctgataactccacgtgctttttttgttattatgtccattactggcaaaccacgaggaatccaacaggtcaaagggcctttcagaagcgactccattcatgggtaattaaaacctccgaatgtctgttccagtccaggcaattgtttggcacagtgcctttaagcggcgttatgcaacatttttgtcaaacaaagcgggatgcccccggagtcatcaggatcgaatcggggaggacactatggatccgagggagaccgtttccggcgacaataggggcaacatggtaccccgcgtcccactaaagtttaacacacccataagttgaggacacc

SEQ ID NO: 599338 - DNA, 150 bp, Homo sapiens
cccaagctcacgtatcatgttttgataagaaaaatccctttctccacaagttggaaggtccaactcaattggccccgtgcccctaattcctggaacccatatgtataggagagtatatgtgcgcacagtctctgtggagatatgttcaca

SEQ ID NO: 599339 - DNA, 200 bp, Homo sapiens
  misc_feature (44)..(44): n is a, c, g, or t
  misc_feature (49)..(49): n is a, c, g, or t
  misc_feature (194)..(194): n is a, c, g, or t
cacgagggctgtacgccttcgacgccgattgtcgcgccgccgangtggngtggacgctgggcgccagctcggcggtcaccgcggtgctcgacgacaccggtcacgacgccagcttcccgatcatgcgctcggtgcacgaggtgctgcgggatcgggccgacgccatcgcggtccgccgccggatggcgttgccnctggtc

SEQ ID NO: 599340 - DNA, 350 bp, Homo sapiens
  misc_feature (108)..(108): n is a, c, g, or t
actggggctcccttaggtttttaaccatgggggtggccttttcgggggtccaaaggggggcccccttaagcttttccaggccggggataagggtgtgttttccctccnccaaaaaagggcttaaactgctggggccctgttttttaaggcccaaccccatttttttcccccccggggggagggtccacaaaccctttgttttttttatggtttgaccaaaaacccagtttcccccctttttggggaaagggggggattcccccccaaaataactgccttttggtcccccaccccccccccccctccctgggcccccccctgggtggcctttaaaaaggggttgggtggga

SEQ ID NO: 599341 - DNA, 818 bp, Homo sapiens
  misc_feature (59)..(59): n is a, c, g, or t
cacacaaaggtgaactaagaatgcacctaggttaattatcgcacgtatatatcgatggntactcataatagtgggtgatgccttctggtgcttgttaggcccagcaccagtatattatgccttgcctaaagttctgaactggggcagtcatttcagtcgtggtagaataatggagtattgagtcctgatcgctcctgtgcacctcgtgtggatctgcacagttgggctttccggcacaaaagtcatttaaaaacaatctgagtaaatgttcacatattacaagaacgatattcttcctgtaaggcatacaagtatcccaacgtcaaagtggccatttacgatcctctttgtgaatattagcataatacagatacttgagaaagtcgtgggtgtgtattgccgagaaaatgctttttatgggtgcctatatgtaacaattatttttaatgcatggtatgtgaagtaagggtcagttacattgtgcaccatgtgtgtaatgaaagaaaattacagtttataagtcatctgtagaagtctgagatggattgtgcaactcatgtcatggggttaaatgaattattttttggtaaagttaaacgggagaaattgttacatgtgttatttgaaagttacaaggagaatggggtccaagagtacaactggatgggtatcaagtataggattcgtcctggagacgtgctagggaagcaagtcaaggaaggggtcggaaaacaattaatttagggcaagtgagagaaaaaaaaaaattggtggcgtcgtgaataaaactttgggcggcacggttcaatgagcgtaaa

SEQ ID NO: 599342 - DNA, 321 bp, Homo sapiens
  misc_feature (18)..(18): n is a, c, g, or t
  misc_feature (64)..(64): n is a, c, g, or t
  misc_feature (92)..(92): n is a, c, g, or t
  misc_feature (147)..(147): n is a, c, g, or t
  misc_feature (237)..(237): n is a, c, g, or t
  misc_feature (274)..(274): n is a, c, g, or t
acctcatgtacattgccnaccttggaccccgacattgccccctctgccccggcaccattccagnaactgcccaccttccacactgaggtagnccgagcctcttcaaggcagacctacaagatggggtactaacaccacccccaccgnccccaccaccacccccagctcctgatgtgctggccagtgcacccccactcccaccctcaaccgcggcccctgtaggccaaggcgccaggnaggacgacagcagcagcagcaagtcttcttcagttcngggagcttccaagggaagttggtgaaccctccgttggttgggcaatc

SEQ ID NO: 599343 - DNA, 158 bp, Homo sapiens
tgagctagtgaaggatagggtagcacacacattaggctaggagcgctaggccgggtagccggatctcaccgatccgttggtagaggctaggtggctctggtaacttacatgcagcaagaatgaatagctcaacgctgctagctacttagtcactagga

SEQ ID NO: 599344 - DNA, 836 bp, Homo sapiens
  misc_feature (43)..(43): n is a, c, g, or t
  misc_feature (429)..(429): n is a, c, g, or t
ctctcggcctttactccatggtcagggggtcctctacactatnacacccaaatcacagagtaaacaaatgcacaccctcctgcccaaaataagaaaaccgaggctccactccaaataaaccactagcttgttcctccgggggcgcccctggagcccaaacatctaatgcacgactctgcggggggctggctcaagcctgggaactgcatgctactgtctacaccttatctcactgtatctataacttcatgggcgtctgatcgacactctcctttgagacccaccttgctcataaacaaaatgcccatgttggtcctctgccctggacctatgacattctagactattgctgggtttatctggcggccggtgtaacaaccatctaatacattacctcttctggtgattagctgacgatttactggccgncatttaacaacctgggagactgggaaaaacccttggcgttccccccctttaatccgctttgcaggaacatcccccttttctcacagttggggttatagccaaaaaaggcccctccccattcggcttttccaaacattttggcaaccccttattgggggtttgggaacttgtacccccttaattttttttttaaatatccccggttaattttttggcaaaaaaacttcattttttatccacaaaggccgaattgggaaaatcctttaatatcaaaagaatcccccgaataagggtgggtgtggtggccactcttggaaaagattacccttttaaagaggggggctcccacttaaggggggagctgctatgggggggcgcccttccttatccatacctttttttggggg

SEQ ID NO: 599345 - DNA, 1080 bp, Homo sapiens
gagaatgtgagagtacaaatgtgcagtagacttcaacaatcttgagtgccaatgaataatacagaaaaagaagacatgttgatgaatgagtttatagggttctaatcttaagatggtcacaactgtcgaaagacctctgcttggtttatccggcgggtatacggtttcgttaaacaaagtccagaatctaagcttattatagacccgttacagcgtcaccagcacctttactccttcattgaattaagctcacagacttgcctcttggcaaagcgacaggagctgcttgacgttacagacaggcatacaggtagctcctgaagacatgcagcagaccgttatttggtaaagcttcccagtactatcaaaactagactctgatactatacactggatgtctctgcagatgaccactggcgcttcgtagtttgctactaagcccatttttcaaccttgggcactaagtctaagtcacggtccctcagtgaacttgtaattcccctacaagtggtggcttactttgacaacagccgtaagtaggccatagcccttcagttgaaagcaaaagtaacaattggcttgaggtaattcacccggggcacggacacaacacaccactactttcaccccctctccatggacaactctcggacgttgctcggctacggccgtacccccttacatcgactgccactagtagtcacacacggtacacccctctgcagacaccacaccgacggacgaccagcacccacggagcatgagcaaccgcatgacacacccccctgcaacgaacgtcccggacacacaacaccttgggccgaaaaggataaaccacagggggccgcctacccgacaccaccggcgatcccccagcaacacagcttcccacaaacagcccaccaccgcatgcaccacagcccacgacgcccccaactccacacaacattaagtgggggaccgggcacgggccggcggaacacaccacaggcaagaccaacacagacagcggaacaacgcagaacgccgaaggagagcgcaccacgcgcagtgacccataacaagcgcccagtacctaaa

SEQ ID NO: 599346 - DNA, 705 bp, Homo sapiens
atggccgaatccgcactaccgtaaggacggcacgcctttctggaacgagctatcgctttcgaccgtgtacaacgaggtcgacaagcaaacctatttcgtcggtgtgcagaaagacgtcaccactcaagtcaaggcacaacagcgtgtcgcccaactggaagctcagttggccgagctcaagagcgagctcgccgcactcaaggcgacgagtggatttaacaaactgtaaaaaatgcggtctttagagcgacaatggctttttaatgcctcagccttgagccagatcaatgcaacgcgacacgctattgacgcaggacgagctggattttatccaggacatgacacacaacccgcagctcaacctgcgggatgcatggtcgagcctgacggttaatggcggcgcacagattcgcgatctgctcacgcggctagcggctcacgaccaggtcaccatccaggcgcagttcgacaaccagcaactcaccttcccgttgcacttggtggaagatgagtttcatgctgtgcatttacgcttgggcgtaccgagcatttttgaagatgggccgatgatccgcccgtggcgcctggcgcttgaaacgccggtggcgctggaaaacatcaagggctactccagcgcgctgtgggtgcacgaagtgtcattcaaaggggtgctggtagaggtgcgtggccgggtcaaacggcaaa

SEQ ID NO: 599347 - DNA, 649 bp, Homo sapiens
acaagaaggggtgagagtgcgtctcctagccttaatgtgggagggtagtttcagtcactcatcggctttcattattgtgcggaaatattagaaaacctcattgatcaatttgctgatattcaaatacataaaatgatcaatgaggttttctaatatcagcaaattgaaattttccataattatcattaatttgtaaccacatccagtgtcatgcttactccttagagttcagatgaattcttaaaattaaaaaaaaactccatagtactaattttgtttctttatatagtttgcgtttgatattagtgcttgcaattgtattaaagtcaaaagctgatttttatggcatacacaagaatgccactttttcttttatttcataccaataatttaaagattgatatgctaaaaacaatttgcacagcactaaagcatgagctactttcatctaaacctgtaaaaatatgaaagatttttatattttttcactgggaagaaattcttcctggatgaaattacaaatatgtgtagaatatatttaataaaagacttataaaatacctaactacaggacttaaaatatagattggcgcgtagtatatagaacaattatccatatcaataagtttagccttccatacacactgac

SEQ ID NO: 599348 - DNA, 239 bp, Homo sapiens
  misc_feature (35)..(36): n is a, c, g, or t
ggggaacagttgtttttaaaggttttggggtctcnntccccagtcgggaggcccagtggtgagagaaggtatgggggctcgtcccaggtcaggtttcagtggtgagaaaaggtatgggggcccgtcccaggttgggaaggaacagtggtgagaaaaggtatgggggctcgtaacaggtaaagaagaaacagtggtaaaaaaaagtaaaaaggatagaaacaggaaaaaaaacaaaagta

SEQ ID NO: 599349 - DNA, 139 bp, Homo sapiens
  misc_feature (93)..(93): n is a, c, g, or t
cacgaggggggtgggggcgggtggtttcctgcgggaggccgccgcgggtcatgtgaccggaagggctcctcacggacgccgtccctcctcggngcggcctgagcgcccggcccgaccccggtcatggggtgctgctaca

SEQ ID NO: 599350 - DNA, 150 bp, Homo sapiens
actggctggtcatgtcatcaactctgcgctctctccggcttagtgtctccggcagtggtcaagcctacacacagtgctatttttagagagggttcacatgtgccaactgtgtaactctggctaagcatctcctgctagctccaagtctgg

SEQ ID NO: 599351 - DNA, 958 bp, Homo sapiens
tgcttcgcctcccaaaaagggggtatgcctcctcccctcgaccgaaccactttagtaactttctcgtctgttccaaaaagggccacccctctgtagccccggcgttgaccatttctctccgcgacctacctcttccttctaatcccttaattaacctcccccacttggttcgcctcactttggttaagaccccccgaggtttctccggagcattgtgaagaaaaggaaaagtaaatgaaggagagagattgaggggaaagggacactggaaaaacgctgcccacactttgtgatgggcttgtgaaaacgtacgaaggagccttacaacaccccaccaattcaacaagtgggccccggttattctcgcacccaagaagattgtgtgagaatgggtctctcggccttgcttctctgatgagttccgttggaagccgtgagccctttgacacaaaccccgggaggcgcacaacagagttcccggggctccgggagacacccccctttctaatatttggcacgttgggatggcctctctaggctaagccacgaatgtgtctgtgagcttcttcacttgagggcaaggctgctgagaccctgcctgcgccagcaatgtatcaggtggccagcaccaccaaatctggcaagtgccaatgctttctggcctccacacccattccttctgccctgccttctctcttcgtgcacacaggaggcacccctgagcccgagggcggaggacgagaaattctccggcccctgcagcacgccgtagcgacagcgacagcggagaacgagggcgatgaatacgacgaccttgtggttcacaacaaccgcagccacaaaccggctgccttcacaacccaacctccaaacctttttctgacgaccccccccccctgtgaattggttcattggtaaaataatttcccaggttaatgaacccaaaccctaggtggac

SEQ ID NO: 599352 - DNA, 480 bp, Homo sapiens
agttcgacggagactctcctagatcgtgttttgtgacaaacactgaggcagtgcttctctgcttttggctactgcgtccctaggtgatagctagtgaaaggattgctagtaggataaattatatatacctgagtatcagatatggtattgaaactgaataggaaatcgtatttgcgaactttgacttagacatacagatctattttgaggtatggtgactttctaagcagtttcctctttaggggtctttttaaaaaacttagagaaattcttttcagtgggactgctgaatcaagtgtttatatgtattttgaatttggataggctattagctatacattttaatgcgtaggaaagtagtcaataagaaaagtaattggttataaaaaaatttgtttcattagtactcttctgttctctatatggagacatgtaacatgaaagttgttactaatcaaatgaaagtaaagtcatggttaa

SEQ ID NO: 599353 - DNA, 738 bp, Homo sapiens
  misc_feature (12)..(12): n is a, c, g, or t
  misc_feature (88)..(88): n is a, c, g, or t
  misc_feature (122)..(122): n is a, c, g, or t
  misc_feature (130)..(130): n is a, c, g, or t
  misc_feature (167)..(167): n is a, c, g, or t
  misc_feature (188)..(189): n is a, c, g, or t
  misc_feature (196)..(196): n is a, c, g, or t
  misc_feature (202)..(202): n is a, c, g, or t
  misc_feature (205)..(205): n is a, c, g, or t
  misc_feature (207)..(207): n is a, c, g, or t
  misc_feature (218)..(218): n is a, c, g, or t
  misc_feature (223)..(223): n is a, c, g, or t
  misc_feature (225)..(225): n is a, c, g, or t
  misc_feature (258)..(258): n is a, c, g, or t
  misc_feature (260)..(260): n is a, c, g, or t
  misc_feature (270)..(270): n is a, c, g, or t
  misc_feature (273)..(273): n is a, c, g, or t
  misc_feature (276)..(277): n is a, c, g, or t
  misc_feature (284)..(284): n is a, c, g, or t
  misc_feature (288)..(288): n is a, c, g, or t
  misc_feature (323)..(323): n is a, c, g, or t
  misc_feature (327)..(327): n is a, c, g, or t
  misc_feature (425)..(425): n is a, c, g, or t
  misc_feature (438)..(438): n is a, c, g, or t
  misc_feature (466)..(466): n is a, c, g, or t
  misc_feature (565)..(565): n is a, c, g, or t
  misc_feature (595)..(595): n is a, c, g, or t
  misc_feature (606)..(606): n is a, c, g, or t
  misc_feature (735)..(735): n is a, c, g, or t
aaaacaaatgangtacaaaatatttcagatttacatagtgataaacaagaaagcacttatcaggaggacttacaaatggaagtacacnctagaaccatcatctatcatggctaaatgtgagnttagcacngctgtattatttgtacattgcaaacacctagaaaganatgggaaacaaaatcccaggnntcttgtntgtggngtncngggttttccancacgncntcattccagcattctgagattagggtgattggngntcattctggngtnggnntgttcancaanagtgatgttgttaggtaaaatgtacaacttctggntctntgcagacattgatggtgctttgagtctggcttttactctgctgtttctttcacactttagattttaaaagtacgtctgcaaggaatctttctttccantttgagagctcanctgctctttaaaatggaaacacgcaacnaaaaacagatgctgctttctagaactccattgtcatgaaatataatatttgctaaaataagagatttactttaaaaattagagtgcttatttcttgcanagtacaccatgggaaaccctcgggggaaanttgttgccaantgtatccattaactgtatttaaaatttctgattgcctttttgaccatgttattgctaaatagcaaaacaaccaaaaacaaatacaacaaaaatcctatatcccagctagatttcttcctttaagcatanggg

SEQ ID NO: 599354 - DNA, 128 bp, Homo sapiens
ttctatggtgtggggctttgtatgattatgggcgtgattagtagtaattactggttgaacattgtttgtgggctgtatatacttgtaacttgagactggctcgaggcgggggatccctctagcagtcg

SEQ ID NO: 599355 - DNA, 220 bp, Homo sapiens
tcctgtgggagacaggaaatctatttttgcagattgctcaataagcctcctgagccccctaaataaccgctgttaacccctttattccccggggtccactgcccccgaacagattcttttagggggtccccccgccccctgggctttcaaatatttgtttcaatggccttttggggcctttgttttttccgagggcccataaattttttttgggccccca

SEQ ID NO: 599356 - DNA, 301 bp, Homo sapiens
ccccccccaaaaaaaaaaagggggggggcccccggggaggactttttttttgggggggtttttttccccccccaaagggggggggttttttttgggaaggggctattttttttgggaaaagaaaatttttccccccaagggttttctttaaaactttttggaaagggccccttttcattgggggttgaaaaaatttttggaatattttttttggaacaaccccttcattccgaaagaattgaggtttttggtccctccttaaaagccctggggggtcaagtccccataaatgggccgccca

SEQ ID NO: 599357 - DNA, 135 bp, Homo sapiens
aggtcctttgcaatctaaaaggccaccccatttctctctagggagatgttggccagttcttctccacagttccacaggggggaacataatagcatggctacggggtactttttttagtgcaaaatttttataatt

SEQ ID NO: 599358 - DNA, 218 bp, Homo sapiens
tcggtgactctacaggatcttcacggctgtgcctttataagttataacatggataggtgctggaatggtgattcacaattaaaaaacactggtaatccaaacttttttttaaactggtagatcaggcatgtgatggtaaatgtaaataggtacaatggtggtaatgggaagagaaacacacatgccttaaaatttaaaaaggcagggcccaaatgctt

SEQ ID NO: 599359 - DNA, 406 bp, Homo sapiens
  misc_feature (215)..(215): n is a, c, g, or t
gactcagctatcgtcacttgtacaactgaattggtattagatctagactggcggggtgtggtcacactgtaatctcagcacttgagagctgaggccggtgatacctgaggtcaggagttcagaccatgttgatggttaatcagcagtagttgggctatagcaagcagtcattgataatattgagccattttatgtaatgtgagccttctaataantaggtgtagttacaaacataatgggagccatgctcaaactgtgcaatattgagaaaaactgaattcctggtatttgaaagtgtctaattatctgcgttaataggtaagcccctcctgattttctacttaaacatgacacttcttccgtggcgcccatcttcattctcttgaacattgaaccggatagcttg

SEQ ID NO: 599360 - DNA, 228 bp, Homo sapiens
aaggcctttttgggtgatccatctgcctttgggggtgctgcccctgtgggtgttgcccccccaactgctcctgttgttgctgcagccccagctaaggttgaacccaaggaaaagtcggaggagtcggccgaggatatgggatttggtctctttgactaatccccaaaaagcaacccacttagcccgttttttttgccaaccaaggaaataaaggcttccttcttttta

SEQ ID NO: 599361 - DNA, 820 bp, Homo sapiens
caggcccgggggctggcctgagcccccctcccctcctggtgctgaccctcccggggggctctataggggggagatttgacccggaggttctgggagggtgcttctacaacgctgactacctggtggccgagcccggtggcaggtgaactgcaggcaggaagaggaggaagccctggaggggtgcaggtgattggatgtattacctccggtactcagggctccacctcttcaccgggcccgtagagccagggctggtgcagaagttctccctgcgagactgcagcccactggtcagtgaagaatctacaccgctgccgcatcacgcaacctggatggggctagtgggtggccgtgcccatgctggatatggctctctttgagcacggagcaggccaaatagcactatagccccgctggttggcccctaacctacattaccttaccttagtctgactaagacacaggaagggcaatgaagatggtggacagatagagaatgtatgcctgtataataaatatgacaatgtataaaatgtttctgcaaaaaaacaaaggggtggcgaaaaataatctgagggacaaagataaagagaacagatatttgtaaaaagtgtccaaaagagagaggaaaaagagaagaacggcacatagataaacaaatgatgatcactggacacactgaaagagcagatctttgacggggaccaagtttgggagaggatcattaacattagttaaaaataaggataaggaaaaaagttaaagtgtaatgttaaacaatgattgtgtgtagagtgactggatgttagagtaacaggat

SEQ ID NO: 599362 - DNA, 519 bp, Homo sapiens
atcgccacgtgcttctttcaagacttgcccattttcacggaccatggtctgagcaagttcttctttgcgagcttcgagcagatgagcagccttgaggatgatctctgcgcgatggggagcaggagttgctttccatgcaggaaaagccttgtgggcagcatctactgctgctttgacatcgttggcagtggatagcgggaaaaagcctatcacttcatcgttcttggccggattgtatgacgcaaaagtctcgcctgattcagatttgacttgacggccgttgatatagtttccgtaggtttgcggcttgccggcctatagtgtcgcttgttccggtttgcttggagtgcttgtactcattgcattttcctctaaggatttgtttgagaaataattggagatctaggcgatctaagcggtcatggccttttcaagaatgtcgagggccttgttcatttcttcttcactcattgtgagaggcggaatcagacgaatcacctgaccaccagtaccgcaggt

SEQ ID NO: 599363 - DNA, 574 bp, Homo sapiens
agaggacccgtatgcaggttcacaacgcgcttcctgttgcgcaccaccttcgcaagcacagtgaggcacaacctatgtgtgcaatgtgtgccaccgtgctttccgcgtgggctgctggcctgagccatcagtgcactcacgccgaaccgaccgccaacccttcttttgccgcctctggaactacaaggccaagcaaaagttccaggtggtcaagcacgtacgcaggcaccagcctgatcaagccgacccaaaccagggtgtgggcaaagatcccatcgcccccacggtgcacctgcatgatgtgcagctggaggatcccagccctcctgctcctgccgctcgtcacactggacctgagtggctgatagcgtgcctagctcctgtatgggaagagggtatggtctgagatgtgcagactgggaccagcgctagcctgaggagctcagagcctacggaaagactggcttgtggggtacaagggtgactagaaccttcctgggtctctggctatagtactttgaaattatcacccatataacagagggacatggactatcacgttgattacttattg

SEQ ID NO: 599364 - DNA, 396 bp, Homo sapiens
cagtcagtagtggggggctctccaggagtgcaaagctactccacgaacatctttgagtgctttccctcaagacattggagttacactgcagctaatttttgtatttttattagagatggagtttcactctgttggcccggcttatcccgaactcctgaccccgaggtgggcggatcatgaggtcaggagatcaagaccatcctggctaacatggtgaaaccctgtctctactaaaaatacaaaaaattagccgggcttggtggcgggcacctgtagtcccagctacttgggaggctgaggcaggagaatggtgtgaacccgggaggcggagcttgcagtgagaagagatcacgccactgcactccagcctgggggacagagcgagactccgtctca

SEQ ID NO: 599365 - DNA, 430 bp, Homo sapiens
ctactactaaattagcggccggtgcgacgtgagccatgatcttgccactgcactgtagcctgggtgacaaagtgagatgctgtctcaaaaaacaaaacaaaaaacccaaaaaacttcttttccacaggaactgaggttcgagattattttaagaatagaataggtgtttttggccaggcatggtggctcgtgcctataatcccagcactttgggtggccgaggtgggcggatcacctgaggtcaggagtttaagaccagcctggccaacatggtgaagccccatctctactaaaaatacaaaaattagccgggcatggtggagggtgcctgtaatcccagctactcaggaggctgaggcaggagaattgcttgaacccgggaagcggaggttgcagtgagccagattgtgacactgcactccagcctggg

SEQ ID NO: 599366 - DNA, 682 bp, Homo sapiens
taccgggctggcggcctggccgttgccccgggctgctagcgggtccaccgggttgctagccgacagccggccttcttcctcgcagcgcgccgcgattcagcagcctggtcccttctgcggagagcgatgccgcttcccgaccccatgttctgcgctcggctgatccacattcccccgtgagctggccggacatcctgaaagtcaattcaccaacgtgctgcgcatcctgctaccctagtctcggcacgactggtgcttgctggctggatcctgcgtggctgatttcttcatgcgtctagtcagatgcaggagatccacctttcgctgtaaaggtagcagaatgtgaatagtgctccacgtgcaatcccgagatagatagcagacacaggcctgagtcaaggactcctgaaagttattgcagcaagcagtgtcaccacaagcggtatgtggcattatcagatcttgcatgccagaagtggcaagaacttgtgcctgccgaagggaacaattcaaagcgctcttacaatatggattccttgtgacaaaaccacacatcaagtggataaacttttaagcgcttggagtgcagcatgcttggtgggtccttgaatcactgcggctgaaggcacctgtgcgagcatcctcacggactgatccggagggcgggcccgatctgcatccc

SEQ ID NO: 599367 - DNA, 396 bp, Homo sapiens
tcagggaccaggagagcggttacatgcagtcactgtgtaataaactctctgtaataataaaatgagtgaacagacacacaagctctgtggacactgttcttccacagcttatgaataaagccatcggagtagggcaatgaaacccagccagcaagtgggtagaccgggatttgaacctaggttgcttgactctggtcctgtggtgtgatctttccccctcccacctgactgcctaagagtccagactctggtgagaaacagtgtgccaaccacttgactttgggacaacttggaagcagatagctgacccaccatgtttctacacaagggatttccagtggtgtccgtggctttaagtgcagagattgagagaagtgggactaggtagaaaacgag

SEQ ID NO: 599368 - DNA, 367 bp, Homo sapiens
gaacagaaatgatgatgtacagctgaaattaccaacatcatcagatggaggagtccttgtgaggaaatctgacttcgcaagatgccaattatccttaggggatctatgtggtcgctttcggttccatctgccaatccccatgaaggctccgctgtagatctaaaagagctaacagatgacccttgaccatcctaaggttgctcattgtgtctgtccctcttgggggagcacagagaataattttttgtggctactgaaatcttaggactcttccagtttaagtaagtcttaaagaaatactggccttgactttaggatccaaaataaacctgaatccttgtgagtgtctagacaacaactatagaaa

SEQ ID NO: 599369 - DNA, 266 bp, Homo sapiens
gatgcaccactgtgtctattaaccactaattccaggacacttctatcagctaaaaaagcctttacctgtcagcagttactccatccctggctgctaatctatcttcccttgctctatggctttccctatcctggacatttcatatgaatggaattatataatatgtagccttggtgtctgaacaatttcacttagcatgttttcgaggttcatccatgttgtagcatataatagtactgtattccttttagtggcatcgataaaca

SEQ ID NO: 599370 - DNA, 338 bp, Homo sapiens
aacaatgatatgattttacttcatatttccgtaaatgactaataacgctgaacatacttgcgtgcgattattggccatccatgggctcattttgatgaactgcctattcacatctttggtccaattctagataccctggcaagcattggttattattctaaccttgggttgcctaacaataaaatttttgttctgtttttggttttggtttttgagagtctccctctgttgcccaggctggagtgcagtggcacgatctcgactcactgcaagctctgcctcctgggttcataccattcggctgcctcagcctcctgagtagctgggactacaggcac

SEQ ID NO: 599371 - DNA, 150 bp, Homo sapiens
aagcagtatgagcacaacatcatcaactataagacactgacaagctggagggagaccatcagctcatccaggaggcactgtcttggacacaagcacacgactacacgatggagcacattcgtgtgtgtggcgcctactgtcgacaccttc

SEQ ID NO: 599372 - DNA, 204 bp, Homo sapiens
tggagagaacgggggagcctggtcgcctggggaccctgcagtggtgggacctgctgttgctggacccaaaggagaaaagggagatgtggggccctgctgggcccagaggagctaccttgagtccaatgtggaactggggcccaccctggcttggttcttcctgggagaccctgtgccccaaggtgagaccctgtgagacctggg

SEQ ID NO: 599373 - DNA, 395 bp, Homo sapiens
tggtaatatattactacattacgaggggagtgggttgctttttaatgtcttatatttaaaccgttacagaggtaatgggtggcgactttgcggtttcggtgaagcttcatcacgactgggacgtgagttagttcttcaacgtaattttaatcttggtttaggtctcagtgaccttgaaagaaaatggtacggggtctaagtcctagtctgtggatcaggaaggctaccttcgtgatctgtttcaagtggactcggattatcagggtcacttataacaaaaatacacctatcactataccagttacttaagttcaaccttaaccatctttttgaaaaacgacttctgtgtcttcgtttcttgggtaaaagatgagtcctgtgtctaaatctgaacc

SEQ ID NO: 599374 - DNA, 348 bp, Homo sapiens
tgttctgaggatccccgtttgggatctaagctgtatgctctgtcttatggtagtcttaggctctaaacggaagtctgttgctctaaatgggtgtcttgtgctctaaaatggggtctgtgctacaaatggggtcgtgctcaaatgaggtctggtgctcaaatggggtctagtgctcgaagtaatctgttgggaacatatatgaccaaatacaacaccagtagtaagacctatacattttactcgagaggacacctggttctagctgcaggagcttatagtccacaatcaaccatcggtattaaagaccttttggaagctactgtttttaaaaagggagactaaaagtgt

SEQ ID NO: 599375 - DNA, 256 bp, Homo sapiens
tttttcactcagcttctttcatttgatcgcataagttcgcttccgaattcccgttcatactctttagtataatggggcaaattcttgttttccatgtttctcgttcctttttcgttaatttcgttaatgtgcattcgtttattttgtttcatttgcgcctattcttcctcgttttgcatgctttgactgttttaatgttacaaatcgtcgtttcctgtatcgcttccattattttttcttgaagtgtcttttggta

SEQ ID NO: 599376 - DNA, 270 bp, Homo sapiens
cctttttgggggggggcaaactggcggtaaatttgtgatgtcaaaatgcaaactacaatgactgtaaaatggcctggggtgtaaaaacgttttcagggaaagcaaaaggtattaaataaaaaacaaaacctttattccatggggtttgcttcattttggaaaaaaatttttggctcgtgaaccaaattgtaaactttcaggtatttttgtacaaaaaaaggactgatgttttgttttttgtaattaaaaaaaaacattaaaacagtgtta

SEQ ID NO: 599377 - DNA, 413 bp, Homo sapiens
  misc_feature (129)..(129): n is a, c, g, or t
  misc_feature (200)..(200): n is a, c, g, or t
gtctcacatgtgcatgtggtcattctgactcaggtgatcaccactcggctccaaagtgtggattaaggcgtgagcacatgccagaagaatttgttgaggtgcagcagctcaagagtctatgggcagtgnggctcctactttcctactttctggcacaccatcacattgatactgtgcactgtcttttctggtatcagcanaaccgagcaaactctcagtttttaaaaaccacctggaaacactcattgtctacaagagacacatatgtgatggccacgtaaggggagtgaataaatgtaacccagattaaccacagggtaaacacaaactctttctcaatctttcccccgagcctcacaggtgggctttctggtctttaagctttgattgtaacatttctgccttctgtcccc

SEQ ID NO: 599378 - DNA, 957 bp, Homo sapiens
ggtgtggtgagggttcgagtggaaggtgataatgacaagaatgaaccccagtgtatggagggaatgtgttcccttcatttttgtattggcaccctgagagaacatcagcaatgcccagtgctttgcttggatgtatcacctctcctacctgcaggagtgtagagcatgcttcgcttgtgagagtgctacaatatatgattgatgcatgcttctgttgcagatttggggctaggtgctttcatgcccacttccatgtatgacgctgtgggctgtgtggcaatgcatgtgtgtgaatgctgacaatggcttggatatagcacttgattgaagaggctcctcctcctccctccatgcgactcgaacctatgtgtggtgcatgctatgagtgggccgatggactgtgagaccggcaggacagagctggtccttgcctatggccaccagactcaagattgttgtcatcacatgctatcagagacttgagatcaggagaatgagagaggagcccaaatcgaggctggtgcactgtccgacatagtgatccccccaaacccgaggtggaatgaacgcgcccgagcaaggctgggcctgaatgggtgtggccagacgaatatggggtacacccaaacttgcccacacatgtgaaccagaccagatagaataacaaaaacttacaaacatactaagcctccagaggaatgcaagtaacccagaacagagaaatcacaaacaggaactataggaggagttcatgaaccagaagccccgtgaagagtcacagaacagggggaaaccacgccagaaagttccagagacggaaggacccagaagcgacgggaactggataagaaagaataggaatgaaaggagggcgaacacaagtgaccacatagaaaggacaagcacaaggaccttgacactcagaaaagtgacacacacatgaggtggaagaagaag

SEQ ID NO: 599379 - DNA, 518 bp, Homo sapiens
  misc_feature (167)..(167): n is a, c, g, or t
  misc_feature (253)..(253): n is a, c, g, or t
  misc_feature (279)..(279): n is a, c, g, or t
  misc_feature (382)..(382): n is a, c, g, or t
  misc_feature (390)..(390): n is a, c, g, or t
  misc_feature (425)..(425): n is a, c, g, or t
  misc_feature (436)..(436): n is a, c, g, or t
tcttgtagatgacttgcttttaatatcttggaagtttaaaggagtacactgaaaattagttactttcctgaacaattaacagtaatcaactggggaacaataaaagaagacccatttatttatttttcgagatggagtctcactctgttccccaggctggagtgcantggcacggtcttggctcactgcggcctctgcctcccagattcaagtaccacacctgtaatcccagctactcaggaggctgaagcangagaatcacttgaactcaggaggcanaggttgcagtgagccaaaattgcaccattgctatccaacctgggaggcatcaaaactccacctcaaaataaataagtaaacccaaagaactaaaggaagccanatgtgaanaattaaagaaagtattctaatgtctcaccaaatanagaacataganatataaatttgttttaaagaactaaattaaaattctggaattaaaaagtacaataactacaattgtaaaaattactataaag

SEQ ID NO: 599380 - DNA, 932 bp, Homo sapiens
ctgcgcgcgtatcagcagcggcgccgcgtgggcggggggcgcagatgaccctccccaatcccggcctgccaccacctgtgctcgcgcgcagccccggcccagaatgccttaacctgcgccgattgcatgcctgccgaggtgcccctccccgtgtagggacctccgacgccgtcagtccccgttcctcctttcgccgcaggtgcgcactgcatgtgcttgcgggcgggtgggcgcccgcacgtctgcggtcgcggtcgccgctggtcctcccgccgagccccggcgcgggggcatgaggagcccccgggtgccgacccaggagaccattcaggcctgcgcgcaacacactagccagcggacagacggggacatgagcagacgcagcacgggggtcccggagcccgggctggtcaagccctatcccggccggaggccaggcggggtcaacgcgttgcccgggagaaatgaggccaggaggcccgggacgtgaaagacactccagttgtaaacccacttactcccttcgacccatttccgttgcgagacatccagaggcggtcgttcagagggatcacgggagaccgaggacttgagtcgaatacttgatcgatgttgacccccggaggtcagccacacataaaaagcgaccactttccgggcatggccagacctctattcgcggaataaaagccctggctaaaggggccacgaattagaagtgcagcatttatggcacaaacaaccgggaatgggttaaggtcaacatagttggaaaaactggatttgaagaacaggaggggaggatcaaggagaagagaaagggttaaaggagggagagtggattaggcacaataggctgggggatataacatcgggaagcaatagttagacccgagactttgatgaatcattaatgaggtcatcgaaattaa

SEQ ID NO: 599381 - DNA, 167 bp, Homo sapiens
  misc_feature (24)..(24): n is a, c, g, or t
  misc_feature (77)..(77): n is a, c, g, or t
  misc_feature (87)..(87): n is a, c, g, or t
gagcacagggaggaacttgtccantagtttggaaatgtgttcctcgtaaagactgaggcaagcaagtgctgtgaaanaacatcatcntagtcccttggtgtgtggggtttgtttttttttttttatattttgagaataaaacttcatataaaattgaaaaaaaaaaa

SEQ ID NO: 599382 - DNA, 462 bp, Homo sapiens
gtatggttgatacatgaccgtaaaaagacttgagcgacccttgctgtttctggaggagaaccttcacagagaaattactgagcattaatggagggtcttccatggtcccagggattttacactcacagactcggtgtgtttggttacagcaaggatgaggtgcctgctcagaatgggatctgtgctcagaatgggttctgccaggttggaggcagccaccacaaatgtaaagtgggcatccaggcacgagtgggtttgcatagtaagaaaaggcttttctgggacttaaagctactgctcagcgccactgacatcccttctataactctgggttctcctgaaggggtgagtgtttaatcagggccttctggtctcatctctcttgtggtaaagaggagtgaggggcttttcgcccagggctgggggctggattgtaaccgtggacagggttattctcataat

SEQ ID NO: 599383 - DNA, 267 bp, Homo sapiens
agtgagcgaagaaccgctgaggaggatcggcggccggtgagggggagcaagtctggtctctgtgattgaggaggtcggctctgggctccagtgcgggaatcacacacatacctcagaatgccgggtctaagttgtggattttatcaacacaaatttcctaggtggaggatgtggttatggtgaatgtcagatacctttgctgaaatgggggcttatgtcaacttctggaatacaacaacattgagggcatgattctcttggtgaata

SEQ ID NO: 599384 - DNA, 1410 bp, Homo sapiens
gtctccaaggtgaacagcctctaggcatgtaggaacaatgtagggagccgcaccttgtccatgtaccatcaataaagtaccctgtgctcaatcaaaaaaacaaacaaacaaaacaacaaacacaaacaccacccatttttcggcgccgccctagagcccctcctcagataagcgtctttccttaggccacctcttgatgctaggggccggagtgcccccccctgttgtctagtgtagaccgatggccacaaaagccgccggcttacccacaagaggaagaaacccgcggggccaactgaacacaaaagcggcccgggacaacttctagccccgacaccaacaaacaaacccctcgcggcgacgacaacaccaccaggcccgcgcttcggaaccacgacaaaacccccaaaacgagaaggaccacttcctcttagcggcgcttccattaacacaggggggggaccctatactaccaaaagagagggagtgatccacactagaggcctgctctctctttcacattatcagcagagatatcaactggccacgactacgcgcggaagcgcgcactcccaatcacctgacctcgctcccttccacccgccacaccctcccactacactcacacatcaccacactataccaccatacatacacctacagaacaacacaagtacccacaatacaaccacactaccttaacacataccgtatcaaacactcacctcttcaccacacccacattcacaacatcaaccaccatactctactcaataaaccgcacttcccccaactaaactctaaacctcaattataaaccaccatagataaaaactacatcaccataaactaaacaacacacaaaatatctatcaatatccaactatccgacgacttcaccctaaatctgagcaacacaaatacgccgtaccaaccataaacacaaccaaacatcaacaatcataccaacccaaatgaacgcaacacatcaacgacataacaaaaaacaaaacacaaatacagacctaccaacacaaccaactcaaatccaatcacaaaaacattcatatcaacaaatccacacaacatactaacacaatcaaactactattagaacactcaattcaaccaatctataccattacctgactgaacaggccacgccccccgagccccctagtggacccacacctatacataacaacatccgctcatcgagacctcgcccccgctaccagcgcagaagtcgagtcaagcagcacacactacaagtcagagtcacgccgacacgcaccgcctaccaagtgactacgcaatacgccggtaccacgtcatccgtccatctctcagtacagcacactcaccactcgttctaccgctaggctgcaccgcaggcgccatcaagtcccg

SEQ ID NO: 599385 - DNA, 275 bp, Homo sapiens
cacttcaaaaggttctcttatcctcctttatagtcagttcattctcactccctgaaaattcttttcggttcaattattttaacctttttaatgaagtgctcatatatgtagtatcaaaacagtgtgtcaccttattcataaacacagtaaatattggttgatcgaacactctgaataaatcgcagagactagcagaatggatttttaaaataacatgatctaactatatgctgtctattagagatgcaatttatattcgaagccacaaataggtt

SEQ ID NO: 599386 - DNA, 403 bp, Homo sapiens
aagagatgggcaccaagggcactgctattaaacgctaagtaggcatagtctgggaagcagcaagccccttatgctcgcagaggtgaaggtggttatcgccatggctaatgaagagaggattcagatcatggctacctgcctgtggcatactgacaccactgttatcgatgctcaattggagagcctagctaacccagggatcgagggacatgatgctgcaagtcatgtggagaggatgagtccactagtgaccgacgccaaacacatgtgacacagtaatggcgatttatgcacctctatggagaatatgcaagaaacgtatgaggacactgacgaatgctggtcggaacatgagccttctagaggactgctagtggtcacccactgatggcagacccctgcg

SEQ ID NO: 599387 - DNA, 677 bp, Homo sapiens
cgttgtgcgactgttagcacggagcacttcctgcggcatatcgacactctcggccaggcctgtggctcacacctgtgatcccggccctttaggaggccgaggcagcgggttgcctgagctcaggaggtcaagattccgtctgggccacacgatgaactccgtctctacttaggatccgagattatcccggcatggtggcgtacgcctgtagtcccaagctactcaggaggctgaggcaggagagttgcttgaaccccggaggaagaggttgccagtgagcccagatcatgccacatcactcccacctgggccaccagaccagaacccctctccaaccaaccaaccacacctaccaaaaaaaactcttgtctccttaggatatgttacctgctcccctgcacgactagagacaataaatgtgtattgaaccttttactgccaacttgaaaatgctagaaaacccagcctgagagagataaatacctggcgggaaacacacccggcactgtgcatatgcatataccttgtaagttagtaagttagaaagctagctttgttgtatctgaacacatgaatcttttttggtccgtgtaggaagcacagccagatcctataggaatgaatacctcaaatctgttgtctgagattctagagattaaacccctgtgcccttttta

SEQ ID NO: 599388 - DNA, 1086 bp, Homo sapiens
aaatataggtcaggtacgaggcctggtttgaatcggcaccgagggcgtatctcccgcttccgcgtcactgcgcgcttcgctctccgcccgccgaggccctgtgcgctcgccatgtccggccaccgccaccgcggtcgcctcggtgctgtggcaccatggatgatgtgggcgccgcatggacgcgcccgcagcgccgcggccgtgcgcgcctttctggagcgcggcacaccgaactggaacggcttcatgtacagcgacggcagtccgataccatcctgggcggcctggggctcgcgtctgggcggtgtgcgatggtgcaggccatgtgaaaattgccaccaaggccaacccttgggatggaacacatcactaaagcctgacagtgtccggtcccagctcgagacgtcgttgaggaggctgcagtgtccccaagtggacctcgttctacctacacagcaagctgaccacggaccccggtggaaaagacgctgaatgcgtgccagcggtgaccacggatgggcacggttcgtgcgacgcttggcctcttccaactatgctaggctgcgaatttggccgagatcgtgtaccctcctgccaaagaaacaagtggctgatctttgccccactttgttgtaccaccgggtattgtacaacgccaccaaacccgggcatggttggacacaccgcacgctcttccccttggcctcaggcacttttgactgagggttcttttggcctacgaaccctctggcttgggggcctgttgactggaaagtacaaggtatgaggagcagggggggaaaagaggctgtgggcggtctttgggacttggtagtctgagaccaacaggaatcggtctagaacggagcagccttaggcatgagtggtgagaaggcctgagcgtattttggcaggcgccagtgtggatgaggctcgggagattacaaggtaggtggggtgaagggaaggttcaggataagttaactggaagtgaaaggagcctagggggggagaaaaacggatagtacagcaatgtaaaagagtggaatatggagaagacgaagaaggagaggaataggaaagggg

SEQ ID NO: 599389 - DNA, 266 bp, Homo sapiens
  misc_feature (3)..(3): n is a, c, g, or t
ccngagggtccccccccggggggggggttccccccccccaaaagttttcccccggggggggggtttggggggggggggccccccccccccccctgttttccgcggaccccccccccccctttggggctttgcccctttttccccggggggccccccccctttgggggcccccggggtttttttccccccccaccccttcccccccccggggttttttttgggggggggggggggggggggtttttttttggggtttttttccccca

SEQ ID NO: 599390 - DNA, 141 bp, Homo sapiens
  misc_feature (28)..(28): n is a, c, g, or t
agatgatgatgatcagttttctgagaanggtgatgaaaccaaaacacctaccctgcaaccaactccaaaagttcacaatggaaaacgagtgacttctgtcaaaaaaccagcagtcaataaaaaacaaggtgaatgtttgaa

SEQ ID NO: 599391 - DNA, 864 bp, Homo sapiens
ctcacctggctctgcctgaccagtctcctgtcctgccgcacccacttcgttcttcagggtcatggaaccgttcacacgatcactggggctcgggctgttccatctctgaacgttctagccttagtctcatctcaggtcaagaaggtgcaccgccctgaggtcggactcttctgctgcatgtgtgcagacctgcctagtgttttctaacgtcaggccccccctccccggcccccaggtggctggggcttctgtttctctttagtctgcaagttattgaaaaactgagtctattattcttcatttctggtatatcagtcatatagtaggaggctcagaacgggttccttgtgttcatacatttaaccccccatttcttatggacctggacaggttggtgttccccaattccaagaaggggccaggaaatcctcctcggataccgctcttccgtgtggacgcccactggaactccaccgggcgttggcgcaacgcggttgtgaaccgcccaagggtttgccacacaattggaccttccggggtcacagaccaaatgcttaggggtccataactgggcgccgctggtaacggccggtgtcatattacaaactctccagggacacaatttttggtgggggccggacctagacggcgcgaaagcattgccctgcaagggcttgtcacgcgtaacggggactaaactctttgaaaccccggttgttgggatcaaattccacaagacttatgtcacaaacgggattgcccttgtaattgggtttttcaacccaggaattaggtaaactggcacgccggggcagctctcgtgtgccactggcacacagctgacccgggcgtcggccttcagta

SEQ ID NO: 599392 - DNA, 598 bp, Homo sapiens
cgcgatagctcatgcctgtaatcccaggactctgggaggctgaggcgggcagatcacgaggtcaggagttcgaccagtctggccaagaaattcgggactagtctggccaacatggtgaaatcccatctctactaaaaatacaaaaatcagctgggcacagtggtgcacgcctgtagtcctagctactcaggaggttgaggcaggagaattgcttgaacccggaagtcagaggttgcagtgagccgagatcgcaccactacactccagcctgggcgacagagcgagactccatctcaaaaaaaaaaaaaaaaaaaaattgtcagattttcagcaagttaatctatttattcattcaataaatatttggggccaagtgcagtggctcacgcctttaatcccagcactttgggaggctgagtcgggcagatcacgaggtcaagagataaagaccatcctggccaacaaggtgaaaccccgtctctactaaaaatacagaggcaggagaatcgtttgaatcccagaggtggaggttgcagtgagctgaaatcacgccactggacttcagcctgggcaacagagcaagattccgacacacacc

SEQ ID NO: 599393 - DNA, 148 bp, Homo sapiens
tgcttgtctgctctgcctccccagtagttgggactacagtgtgcctgccacgatgcccagctactttttggtgtatttttagtagggacagtgcttcgccacgttggccaggttggtcccgaacctctgacctcaggcgatccacccg

SEQ ID NO: 599394 - DNA, 288 bp, Homo sapiens
atctgtctatcagcatatcagacaaagcacttatcacaagatcccagaaaagcaagcaaggtcagacacaaatttttaggtcaggcgcagtggctcactccgtgtaatcccagcccttgggaggccacggcgggcaaatcacttagggtcaggagtgtgacgccagcctggccaacatggagaatcccatctctactaaaaatacaaaaaattacaggcatgagccactgtgccctcccttcacattttttcaatggtagaaaagcaacctgatgggacgaagactgg

SEQ ID NO: 599395 - DNA, 152 bp, Homo sapiens
gctgtcgcgcctatccggaccgtagaccacgacagaagagatgcccagcctgctcactagcactgtgcaagtggacagtgacaacctgatcccccaaataagacataaagaatacccttaagagatgccccactctcccttgggctctatgc

SEQ ID NO: 599396 - DNA, 251 bp, Homo sapiens
aaagaagaaaaaaaactacataatttctaccagggccatattagcagtgaaacattttaaactgcagaaattgtggttttggttcagaaacaagttgtatatttttcacccctgattatgggaaaaaaatcaggtttctgtcttttgtggggtttgctcttacttatgggagattccaacaagtttactggggacttgaagtcgggccccatttctggtttaagaaataatatttttaaatggttaaggtt

SEQ ID NO: 599397 - DNA, 384 bp, Homo sapiens
ggatcgacacgcagctggcatcgtcccgcgtacggcttgggtcatagccgatccacacagggctgttgccgaatggacgcggatcgtccggtcatagtcggtccacagcgacaaatcggagtaacagcgctccaggtcaggcagagagaaagcgctctgtgtgctgtcgataaatttgcacatgaacaactgttcgaacttgtctccgtcgaactccagctgcagttgctccaggtcgaaccgatcgcacccgccggcgatcgcatccaggatcgtgatgacctggcgccattggccatccgggcatcgggcaccggctgcaatctgcttcgcgctcggccacggatccttggcgcttttatgcttgccgtttcggaacttctc

SEQ ID NO: 599398 - DNA, 126 bp, Homo sapiens
tatgctatcccaataatactaataaaatatacaaattaactaataagatatagaacatcaacataaaacaacctaaaataaaaaagaccaaccctaattattttatttctggtatatcaaggacta

SEQ ID NO: 599399 - DNA, 126 bp, Homo sapiens
ctcatagaggatccccgcactagacgtaacacagtgacccagacgtaacacagtctgacctcttagtgtgaggaaatggggcttgagagtaccctgtatacttgagcgctgggccaagaccctcca

SEQ ID NO: 599400 - DNA, 128 bp, Homo sapiens
tgaggcagtctccccgaagtacactgtgactcctgctagccatgcaacagcctcctagctaccacacctatcctcccgcacatgcacagtggagaggccgggaactgggcactgtgctgcttcactga

SEQ ID NO: 599401 - DNA, 368 bp, Homo sapiens
tagacgggttctctgggtctaatcccatccgggccatggcttaaatactattggtggaaaataatcttggagacagatttcagctacctcccttccaggttcgatttagctgggtggtaatggtcaattggtggtaataggtcttaccggtgtgaaagaaagaaaaagaaagaaagaaagaaagagaagggaaattataaggtcaagtaaacagtttggaggtttggggtattttccgggaactacttcaggtgagaaattaaaaaaaatgggtgacaaagcggtacagatagagatattagaagacaaagagattaaagggaattaaaatggcttgattaaaacctaaaggtgctggaaggggtacc

SEQ ID NO: 599402 - DNA, 1159 bp, Homo sapiens
gaacacagtacagacagattgagcctattggggtgtatcgcggagtgtgagagggaagcgccgcgagtgcctgtatttctagacctgcccttcgcctggttcgtagggcgccattgttgatccccggtgcgcaccatgctcgtactggcgaaagatcagagaatattgagcgactgttgtcgtccctgttgactatcggtactgtgggatggtactgcctgttgacatgggcaatgatggctgagcaagaatgaagactctaccgcatgtggtgtgacccgtagactagctggctgcatggcatcaagcggcggacggctagcgcacgatgggcacgcgtatggacatacgcacatggaggggaacgatgcgtgcgagcggatgggatcagtggcgatccgagcacattgggagcggacctagtcgtaaacgtacactaggcagttcccgtggcagttcggtctccgaaggcaagcgcgtcggccgcagttggagcaggaattcaatcaggcacgaatcgaatgcaagggcaaaaggcgccaattgcaacagacacgttacccctagtggttccgcccattgcatcgtaccgtagagaggggggggcaagcgatgctgatttcgtggctgatagcccctggccagaaggagacccaggcttccacgcttacgccacatgcggccgtaggaatccatctgggtccctgttttggactgaccacaatgggcggggcttccattaccgtagacgcatgcaaacatggtggagtaattggaacccgtgggttcattggttgccagcggcatgggaaccacttcaacacggtgttctctatagccccctgggttcacagaagggatgcgctctccggattagacagaagatagagcgtattaaaggcgctagttacgctagtgttgccaacaagggtttaggactgaaattccggggaaagggcatggggggcgacaaaatatagagaagggaaacaagttttttgacggttcccgctggtacaagtataacgaatatttgtccttggtagcaagttgggagctatgccttccacgctgtagaataggggcgtggagcaaaggaaaagaagctcgggctttggaagtgtgcctttgtacttatgtggtgggaaaaaagggagaa

SEQ ID NO: 599403 - DNA, 579 bp, Homo sapiens
  misc_feature (11)..(11): n is a, c, g, or t
  misc_feature (72)..(72): n is a, c, g, or t
  misc_feature (156)..(156): n is a, c, g, or t
  misc_feature (163)..(164): n is a, c, g, or t
  misc_feature (166)..(166): n is a, c, g, or t
  misc_feature (168)..(169): n is a, c, g, or t
  misc_feature (201)..(201): n is a, c, g, or t
  misc_feature (285)..(285): n is a, c, g, or t
  misc_feature (294)..(294): n is a, c, g, or t
  misc_feature (304)..(305): n is a, c, g, or t
  misc_feature (311)..(311): n is a, c, g, or t
  misc_feature (313)..(313): n is a, c, g, or t
  misc_feature (337)..(337): n is a, c, g, or t
  misc_feature (347)..(347): n is a, c, g, or t
  misc_feature (356)..(356): n is a, c, g, or t
  misc_feature (358)..(358): n is a, c, g, or t
  misc_feature (365)..(365): n is a, c, g, or t
  misc_feature (381)..(381): n is a, c, g, or t
  misc_feature (389)..(389): n is a, c, g, or t
  misc_feature (392)..(392): n is a, c, g, or t
  misc_feature (397)..(397): n is a, c, g, or t
  misc_feature (460)..(460): n is a, c, g, or t
  misc_feature (495)..(495): n is a, c, g, or t
  misc_feature (549)..(549): n is a, c, g, or t
aggtgacactngtttcctaagatacaatttactctttacaaccagggtccacaggtccaggctgcagagcgncagcaggaagcagagcctcccacctgcttctgggggacctggtaataaaaatcagcccatgatgcgctatgcctctcagcacanaccgccnnancnnctagagctctggaaatagtcaacaggggagtnttttccatgggggaaattttaaataagatgcccatgggacaggcaatagaaagtttgccaagttaaatttggtacataattgtnttcactccntttccaaacnnagcttntntgcgttcagttggtcgctcctgcngccgcctcantttggcttntngtttttntgttggccaccacgtngctggttnttnccgtnttttttactaccctgactgtagtcgtagccggggccgtagccgtaatagccatagggcgggtngtcgtagccgccatagccaggcccgtagccctgcnggtagccgtagccctggttccagtagttgccgtagccctgattccaactctgantctgacctccacctccaccaccacctccgc

SEQ ID NO: 599404 - DNA, 701 bp, Homo sapiens
ctcaatggtgcccaggctgtagtgcagggcgtgatctcggtcactacaacctacagctcccagccgtctgccttggcctcccaaagtgccgagattgcagcctctgcccgggcgcacccgtctgggaagtgaggagtgtctctgctggcgcccatcgtctgggatgtgaggagcccctctgcctggctgcccagtctggaaagtgaggagcgtctccacccgggcgcatcccatctaggaagtgaggagcgcctcttcccagccgccatcacatctaggaagtgaggagcgtctctgcctggcgcccatcgtctgagatgtggggagcgcctctgccccggcggcccatctgggatgtgaggagcgcctctgcccggcagctgccccgtctgagaagtgaggagcccctccggccggcagctgccccgtctgagaagtgaggagcctctccgcccggtaggcaccccatctgggaaggttaagcagtactatttctgagaaggaaagtttgcggcctttggaaatagggtctcactttgtcacccaggctggagtgcagtggtgtgatcttggcttgctgcagcatccatctcctggattcaagtgatcctccttcatcagcgttcccaagtagctgggactacaaagatgcacccagctaatttttatagcgtttgggtagagactgggtatcagcatgt

SEQ ID NO: 599405 - DNA, 191 bp, Homo sapiens
  misc_feature (18)..(18): n is a, c, g, or t
  misc_feature (105)..(105): n is a, c, g, or t
tgagagaccgtgttgcantgtctgatacacacacatacgtacatctgcatacattgcatgcacacatctgtatctgtctctctatccatgcagatgtacagatgngttatacaaatactttctggaaatgagaaaagcattagtggagtaaagtcctagattctaggtctgcattgaaacacggtctctca

SEQ ID NO: 599406 - DNA, 272 bp, Homo sapiens
caggctagggacggcatcttcagaagcaacagccttagctgtccatgggccccttattgtcacagctggagctggagtggctgggcagggcatagaaagacaaatactgcataatctcacttacttgtgaaaattttgcaggtcaaactcatagaaacagaaaatagaatgatagttgccagagactggggaggtggcaaaatggggaaatgtcagtaaacaggtacgaatgtcgtattaggccagttaaataagtgttggggataacatca

SEQ ID NO: 599407 - DNA, 299 bp, Homo sapiens
  misc_feature (58)..(58): n is a, c, g, or t
  misc_feature (114)..(114): n is a, c, g, or t
  misc_feature (188)..(188): n is a, c, g, or t
  misc_feature (199)..(199): n is a, c, g, or t
  misc_feature (234)..(234): n is a, c, g, or t
ccgtcgaaaccttatacccaagacatgggctgctagacacagagctagatttagatcnattcacatcttgaaggttgctgaaattgaaaagactgctgatgtcaagagacaatncgtcaagcaattcttgaccaaggatttaaaattcccattacctcacagagtccaaaaatctaccaagactttcncttacaagagnccatcaaccttctactaagccaacaagatatttcnacgttttttagtataataaaattttgtataattcattttgtagattcaaggaaattttaaaatat

SEQ ID NO: 599408 - DNA, 509 bp, Homo sapiens
acaagattcatgaagagtactgagccagggtagaaatcacaggagcagacgagaatgtgggtgccagtgcacagagctccatgaccagcctgggaagttagaaggaaggggaggcagaaggctgcttagtctgctgccatgatgggccccatgaatgttgcctctcaagtttctgtgctacacaggggtgtgtggtagggcgagtgtccttgtaaattgatacctaattggccttggttgagaacatagccatgagtgcccctcgtggatggggcgccagtctgtcattgatctcattgtgtcagcaccttccccccaaggaggctgaccctgccctgccagctgagactgggagatggagatgggctctgatcccagggctatccaggaaagctctggctttggagcagaagcgggtcctaggcattagtgcccctcactcggtgcctgggtccctgtgtgtgtggaacgggtagggctgcaccctgtggaagaggtcagcgtagtga

SEQ ID NO: 599409 - DNA, 448 bp, Homo sapiens
tgctgtcatcgtcagcttctgagaagggcctcaggaaacttggcaaagacatgtgatcaagctaaatgcccatcagtggtggactggataaagaacatttggtacatatacaccatagaatactacacagccataaaaagagtatcatggccttcatggcaatatggatagaggtgtagaccattatcctaagcaaattaatgcaggaacagaaaaccaaatactgcatgtttactcttctaagtgtgagctaaacattgagtatgcatggacacaaagaagggaacaatagacacaaggggtagagtgtggaggatcaggatcaaaatactacttctcaggtactatgctcgttacctggattacttgataatctgtacaccaaacaccacaacacacaatttacccatgtaacaaatctgcacatgtgacccctgcgaacctatga

SEQ ID NO: 599410 - DNA, 864 bp, Homo sapiens
  misc_feature (864)..(864): n is a, c, g, or t
agcggagtgactctagatagcatgagcaaatccggggttagagggaaaaaagctcctgggccaggtgctgacggtcgccgccgtcggtggactcagaccgcctagacctgccaatctctgtcagccctgtccagtcagctgattcgtgtgccctgtcgttcccggatcagatcataagccacttgtctggcttgcacctgctacatacatgctaagttacgctgaaagacgcccttctacagcgtgttctttcagggaatgtcctgtggtcaactttgctgcgagacactagtcctggttactgtgtagaagctggtgcggcctatgtgtacctctatgcaagtaacgtaggatgacggaaatgactctcgaaggaatacattcgtggccttccacgctctagcgacgcttttagttattttcggcccgacttggcaccaacctacggaaagttaattccaggcgttcgttttcgttgagttgccaggaaccccaagattgtgggctgtagagttttttcttgataggatttacctaattataaatttgaccgccaacattcacttcgattccatttcttgtcgggtgatggcgaagagtgggtttaagcacccctttttgacagatagacttgtaattcgctaggaccgtgagggcccttttaaccaaattgtccagcaggacatttgcacgcaaacgggtgcaagtacgctattccctttccctgccgtgaaaatccgaatgtaagctttgtgacaatgagttcatttttttcccggaaatttattaacccccttttaccaggccaaggggaacaatggtaactgccacagggtggaattttccctgtggaaattctgccan

SEQ ID NO: 599411 - DNA, 316 bp, Homo sapiens
  misc_feature (16)..(16): n is a, c, g, or t
  misc_feature (48)..(48): n is a, c, g, or t
  misc_feature (103)..(103): n is a, c, g, or t
  misc_feature (292)..(292): n is a, c, g, or t
gctatgggcgaacccnggcagatcatcagttagaaagggaaggccagncctgagctgccagcatcctgcttagcctgcctcacaaatgccctatgtaggttcnttagccctgacagctctgaagtgtcactgggcaaagatgactgcacatgggcagctcccacctatccttagcctcagcccagcatcttaccccagagccaccactgccctggcccctgttcccagctgtacccccacctctactgttcctctcatcctggagtaagcagggagaagtgggctggggtangcctgctgtaggccagcccactgt

SEQ ID NO: 599412 - DNA, 718 bp, Homo sapiens
  misc_feature (13)..(13): n is a, c, g, or t
  misc_feature (74)..(74): n is a, c, g, or t
  misc_feature (92)..(92): n is a, c, g, or t
  misc_feature (115)..(115): n is a, c, g, or t
  misc_feature (118)..(118): n is a, c, g, or t
  misc_feature (134)..(134): n is a, c, g, or t
  misc_feature (149)..(149): n is a, c, g, or t
  misc_feature (180)..(180): n is a, c, g, or t
  misc_feature (182)..(182): n is a, c, g, or t
  misc_feature (188)..(188): n is a, c, g, or t
  misc_feature (199)..(202): n is a, c, g, or t
  misc_feature (231)..(231): n is a, c, g, or t
  misc_feature (236)..(239): n is a, c, g, or t
  misc_feature (255)..(255): n is a, c, g, or t
  misc_feature (285)..(292): n is a, c, g, or t
  misc_feature (324)..(324): n is a, c, g, or t
  misc_feature (326)..(327): n is a, c, g, or t
  misc_feature (332)..(333): n is a, c, g, or t
  misc_feature (335)..(336): n is a, c, g, or t
  misc_feature (340)..(340): n is a, c, g, or t
  misc_feature (359)..(359): n is a, c, g, or t
  misc_feature (366)..(366): n is a, c, g, or t
  misc_feature (368)..(369): n is a, c, g, or t
  misc_feature (374)..(374): n is a, c, g, or t
  misc_feature (386)..(386): n is a, c, g, or t
  misc_feature (475)..(475): n is a, c, g, or t
  misc_feature (565)..(565): n is a, c, g, or t
  misc_feature (597)..(597): n is a, c, g, or t
tggagacagtgtnaaattcgagggaggtgaagatgcttctgtggctgtggagtggtccggggatggcagtgggnccctgcagaggagtggcngtcttggcaagacccgggatgcngcngcagaagcagtgaagncttggggaggaagcnccaggggacggagccccggcccgccggcggngncgggangggagcagccnnnntgaactatttgaaccaacctagcgcagcnccccnnnnggccccccggggcttnagtgccagctccatggacccctcttcaagnnnnnnnnattcaaccccgccccctggtttgctggtcccntnntcccnncnncccncacagcatcccccattgcncctggcncnnccccncccctaggtggnacagtgaaggggagcagtttaaccagaagattgctgctgcccttagggtctcagccccctcctcaggaatccctcttaggaaggacccncaggacaccctctctgcaccctgtggtcctctagagtagctagctctgaggccccaaggtgggtacaaagcaggtatggccctcagagangcagcctgctgctggcttttcagtcagagggntgggggctggccagccaagctgccttgccctggccgctcttactccctccctctgctgtctcacttcaggtccatgtatttcacttttcttaaataaaagaatcaggtaacctttcaaaaa

SEQ ID NO: 599413 - DNA, 442 bp, Homo sapiens
  misc_feature (199)..(199): n is a, c, g, or t
  misc_feature (289)..(289): n is a, c, g, or t
  misc_feature (321)..(321): n is a, c, g, or t
gtcctgcctgggtcccccccccaccccccaacagccccctcaaccagcatttcccccaattgctcccctgggctcttttcccccaaccccctaagggtggggaccagttgaaagggggaagccagttttaaaccagaagattgctgctgcccttagggtctcagccccctcctcaggaatccctcttaggaaggacccncaggacaccctctctgcaccctgtggtcctctagagtagctagctctgaggccccaaggtgggtacaaagcaggtatggccctcagagangcagcctgctgctggcttttcagtcagagggntgggggctggccagccaagctgccttgccctggccgctcttactccctccctctgctgtctcacttcaggtccatgtatttcacttttcttaaataaaagaatcaggtaacctttcaaaaa

SEQ ID NO: 599414 - DNA, 204 bp, Homo sapiens
gccgcgctttcctgctctcccccgctcgtctgcccgcggagggctggccctggggtacccctccccacctgatggcaccgagcgtcctggccttagctgccccaccccgactcttcctcatggcagggcacctgtgtatatcaaactagccggaccacaggtgccctgactgatgtgcgcaccgggcgctgaaaccagagccgc

SEQ ID NO: 599415 - DNA, 1011 bp, Homo sapiens
attaaacagagtcctgaccttcatttctaggttccttccaagaatggtgtatgcacgtgccaggatggacaccaataacagacgtgcctataacagtgacttgattgccaaggaatgtaaattaccttacacttgcagtatctcccataaacaaatgtaatgggcatatgggactcgaatgtaggaatcaaatatccctccatacagtgtactcttattcttggcaagaatgctttaatgtctaaccaagaattttaattctattcatcttgcttcacagtgttgatcattgtgtcttggtattgcaaactttcaaattgtttcttaccatattgcctcttctctttgagctctgtgggatcacctttaacattcagagatgatagagtggttccccactgagaagccaaaacaaggccttaataaccccttaagttcaccatatgactcagacaggcgacacactacagtggagagactctctcacgagatcctgatcactgacaagccttacacttataactccagacatgtaccataaacctcggaatctatattcgttcaaaaaacatccctttgactttctaagtgtctgcttacgcacggcagctgtcagaatgtgtggttaccttcggttgagatctcccacttcttctggactctctgctcagattccccgtagtgtgagtaaccaaaaccatttacctaagacgtacttggtctacggaatcttggacaaacccccagcctggggtcaaccaccatctccccaagcggaacacggtcactccgagtcggtctaaaacatgcggcgtccgacaacggccccgcacgacacaacttcaatacacgccactctgcatccctcctcctcatcacgcgccagcccctctcccaaaccccacacctgtgccctgtcccctctcgcgcaaacaccatcaccagccaaccatacacactatctaaccccacttcttccttcgtctcacgaccatcaccacacctacctat

SEQ ID NO: 599416 - DNA, 815 bp, Homo sapiens
gcgctggcccgggccctggaggaagccatggagcagaaggcggagctggagcggctcaacaagcagttccgcactggagatggaggaccttatgagctccaaggcatgatgttgggcaatgagtgtccatgacgcttggagaagtccaagcggtgccctatgagcagcaggtggaggagagtgaagacgcagcgtggaaaagctggacggacgagtctgcaggccaccgagagatgccaaagctgcggttaggaggtcaaccgtgcaggccatgagaggcccagttcagagcggagacgctgcagggccagggaccgagcatgagccgagcgagaacgcaagaagacagctaggtccagactagtgtgcaggcgacgactgcgaggcacgagtctgcgaggcacgacggcaggacagcatgctgcttcggattgcgacagtggcctgcccgggagaggaaagcctggatcactggacgctgcaaggaccctaggaggcagcacagtcgaactcgtgcacaatcagagaatccaggggacgaacgccgatcaaatcaggctgcgtgaatgctgcatggcccaggatgaaggactgcattgcgcgagctgggatgacaacccggggcctctcgcagaggagatcctggctcgaggccgaaagagaacgagcaacgaacgctgaagcagtcatgtgaggccgagatgagtcaagttgcaggaggaactggcagccgcggaacgtgcctaggcgccaggccagcatgagcgcgatgagctggctgacgagatcgccaacagcagtggtaaaggagcctg

SEQ ID NO: 599417 - DNA, 200 bp, Homo sapiens
cgataacctaagacatcgctatacgacggcgtgaatgtattagatgattcgctgatctcgacggaaagcaatatgaaatgatctgctgcatgggctctgagccctaggattcatctttctttacagcgtagtgggccttgattgggattgtatttgccacctcatcacgagatctcggactacacgacacgtactacgtt

SEQ ID NO: 599418 - DNA, 304 bp, Homo sapiens
ggtcgtttctagcaggatcccctccactttttgcacctgttgtttggttgtcacttttcatctccatctttgcattttgagaactcttacacgtttctgcatggtccattttatatctagcttgaatgaccgtattactttctggttgccagcaatgtttttctttcttttcttgcttcatcctattttacatgtctgtgcccttatctgtgatataattttccaaatcatataattgccttgaagcagcagatttagcatatatatgctcttcagctggcaattcaatcaacatggcagtttc

SEQ ID NO: 599419 - DNA, 315 bp, Homo sapiens
tgcttcccttctgggctgcataacaaggttctgcaggctttgtcaaggtgtaggcaggcgcacttccttctggggctgtgagggacaatctattccatgcctctcctttagtttctggtggtttggtggcaatctctggtgttccttggcttgtagatgcatcactctgatctccgtcttcattttctcccggcgttgttaagtgcatgtgtctccttgtgtccaaatttcccctccttataaggacaacagtcacctaagatcaggatccaagatgacctcatcttaacaaatgagatctgcaacaaccctgtt

SEQ ID NO: 599420 - DNA, 307 bp, Homo sapiens
  misc_feature (1)..(1): n is a, c, g, or t
ngatgcacacaatttaatataataaaatatttagtcaatatgtacctcacattatgagcacacatgtccattataaggcaatattatttattataattatccaatactatgttttaaggagcaattttatcaaataacatcacatatgatttttgtttatttcacatttacttcaggatttattttttctgttgttgcagttctttactgatctctttagtgaaagaaaattgatagtacttatttcttgaatttcaattatttataattctctctgtgtcaaaatcctaggctactcccaattggc

SEQ ID NO: 599421 - DNA, 201 bp, Homo sapiens
tctgtctaaggtcactcgtatgaggcagtcctgaacttccttaggtcagcttgcaagatcacagtagcacggctaccagcagaccaacggaagctgtttgctccttcagaaccttacagcctggaatgatatcacaccaggtctatgcctctcagcgaatgagagctggcaaaggcaaactgagaaaccgtcgaattcgag

SEQ ID NO: 599422 - DNA, 135 bp, Homo sapiens
ttcaagccatatctttgagcacctgatatctttcatttcctgaaacctcaccactaaagtttttaaagcgccactgaacatagtaagagtcatagcttttaccgggtgaatgacaaatggcatgatcttggccca

SEQ ID NO: 599423 - DNA, 339 bp, Homo sapiens
  misc_feature (116)..(116): n is a, c, g, or t
  misc_feature (232)..(232): n is a, c, g, or t
  misc_feature (236)..(237): n is a, c, g, or t
tcccccgcggttatgtcttacggccaggctattggattcgaatgagtaggctgatggtttcgataataactagtatggggataaggggtgtacgtgtgccttgctggtccgcggtnatgtcttacggcccagagcaacctggggtgatccccgcgctctcatggacctcctgcagctcacaagggaggagggtgctgagggccggccatgggctctctctgtcactatgtcntacnnagaaatctaccaggaaaaggtgaggctcttttctgatcgaggaaggaagagacaaagggttaaatcagacttagttgtagaacccgtaagacataaccgcgg

SEQ ID NO: 599424 - DNA, 655 bp, Homo sapiens
gcaatagacaattatagaagtttaatcataacacactgaagataaaatagcactgattttttttttttctgagacagagctctcatggttacccaggctggagttgcaggggtgagatctcagttcacgtgcaacctcgagtctccgtggactcaagcaattctcggtgcctcagccttccccagtaacggggattacggggtgcacagcgctcgtgcctccgttgggttcaaggcgattctctgtgcctgcggcctcccgagttagctgggagttacaggcaccgtgccgtggttcatacaaccatgtggattgaaactgtgagagacatttaatagctataggtgaaatagagccagaacacaaagtggaccaaatgtgtcattgtgaattccagcgtttaactgagagataccttagaaattagggcaaatttcaacattatgaccagaaagagttagcactggtgaaatgtttcacgtggggacgagacagggacaggaaagcaaatggtgggactgggtcaggtttcaaatggggcgttccacgaaggtttcttggggtgtgcgggaaaaatatggaacaagaagtttctgggggcaagaatgggaatggatggggtgaaaggtttgggccccaataaaggtgttggaaa

SEQ ID NO: 599425 - DNA, 303 bp, Homo sapiens
cctcgccagtgtactagttgtggtatgtgtgcttgtaggcaatctgctccaataatggaaaattaatgctaacctaatataacagcatgaaggcaagctaggtattgcaaacaaagttaaaaagagaaagaccttggccgggtgcggtggctcacgcctgtaatcctagcactttgggaggccaaggcagacagatcacgaggtcaggagattgagaccattctggccaacatggtgaaaccccgtctgtactaaaaatacaaaagttagctgggcatggtggtgtgtgcctgtaatcccagc

SEQ ID NO: 599426 - DNA, 150 bp, Homo sapiens
  misc_feature (138)..(138): n is a, c, g, or t
cctggttttctcacagagaatgacaaaaatatgaataagaaattcagatagtgaaaagtgtaatgaagaaaatatgcaatgtcacagtgacagcgcagaagagctcattcagactggcaggttgggaaaagtttcacntgaagaagggac

SEQ ID NO: 599427 - DNA, 1917 bp, Homo sapiens
  misc_feature (50)..(50): n is a, c, g, or t
  misc_feature (58)..(58): n is a, c, g, or t
  misc_feature (114)..(114): n is a, c, g, or t
  misc_feature (993)..(993): n is a, c, g, or t
  misc_feature (1323)..(1323): n is a, c, g, or t
  misc_feature (1345)..(1345): n is a, c, g, or t
  misc_feature (1710)..(1715): n is a, c, g, or t
gttcccgggacccctgggaggaggccacccccgtgagggggggttagggnagatgggnagggcccccgggaaaagtgattagaagtcaggtatgggaaggctaaataggacagngtcgagtacatctctgcttggaaaaacatatcaacacccttttttttgaacattatatcttgttcataaaagaaaactttccacattgttttaacaaaccccacagctgagagtcaggcctgaatctttgatgtgtgcccagtcacagagttgaccctattggtttgtggtggggcagggcatcaaagacatcattgactaatcacattcccctgaatagctcatatttagaaaatattcttagattgtaaaaatgtactattaatttgtgatattcagtcttttaaatattttatacattaaacaaggcatagttacaagtataaaacataaatatcccaaagccattatgcatggcactcaagattaaaatgggaaataatacatctaataaatcaaatgttccaagacttcaaatgtcttttggaaacaggctatgtaaaacagcacactggtttcaaactttggtaaattttaagaagaactcttacaaaggcatttaattcttatacataattttcaggggaactaatcaaatcagctaatcatgaagacatgattttcgttttagaaaacacttttgaaaacttgggataatctcatgccttaatgatcaaagcattatgagaaggacagtggtttttaacctggggcatacgttctaacacatttactctccactattcgtactctggtagccacgttaaccccatcagagattccttctcaagccatgtctcagagctgagaggcatcccagcaagttttgcagctcacagttttttccgtaaattacttattctataaaatggagtaggccataaacttcggagggccctagaccaatttttggattattttcgtcttctatcattccgntgatcttagatattctctgcattaaatattaaatatcacttctaggctgaaaaatccccctaaaaatatttctagctcagatttttcctccaaattctgcaatagaagatcacaatgtgaactctgcatctccatgttaaagtctaatggacattcacacttagcatgtctcaaagaaatctcatgtaaaccatggccatcctgttctaccttaactttctgagtctatggaatgataatttcacatctcataaacttgactgatgtaagtgtcaagaaaagattgacatttgttaaaagttagtagtgaagtgtgtaacgcttaagcanactttcatatttcaaatctctntagcacgtgtaactcttttttcaagatgtgaaataatcattaggtcagtcatttgtaaatagtacatctgctatggactttttccagttcttcaccatccatttttataaaactcttattgttaaaaaaaaagttactcagaatttcataaagccaaacacctgatttcaggaacacttgagatgtaagaaaattttatagggacctccaatcactaattttcctattttttctctcaaagaaatgctgaagggaggaattcaggttgaatgaaaggaaatagtaacttacagccatatagagttataaagacttcttgtaaatgtgaacatatggtaaaatataaaaacatgtatttttgaaannnnnnattctactcattatttttacttcaatttaagatataatgtttgaaattagtataattctaagctaatacgtatgcaatgtaggaagctgtaattactgacaaaattatgtgaagtggagaaaacctggggaagtggatggtttagatgaaactgagttaatttcatattggatttaacagtacattggtcataaactttata

SEQ ID NO: 599428 - DNA, 302 bp, Homo sapiens
  misc_feature (61)..(61): n is a, c, g, or t
ctggggcatgggtaacaggtactgctgggccgaaggggggcgtcgctggaagcataacttntggcaatttctacagaaacagttgaagtacctggctttctccgtagcggtgaacaccaaccttccgaggcgctaccacttccggccccaccgattttggcgaccggcgagttgctgcccacaaaacaacgaggccagccgtctggaccgttaagggttgacgcatcaccgcctacacagaaaaagcgtggtggttcctgtgcctcaagtcggcgttgaagcctcagaaatttgctattggg

SEQ ID NO: 599429 - DNA, 1725 bp, Homo sapiens
  misc_feature (50)..(50): n is a, c, g, or t
  misc_feature (58)..(58): n is a, c, g, or t
  misc_feature (114)..(114): n is a, c, g, or t
  misc_feature (801)..(801): n is a, c, g, or t
  misc_feature (1131)..(1131): n is a, c, g, or t
  misc_feature (1153)..(1153): n is a, c, g, or t
  misc_feature (1518)..(1523): n is a, c, g, or t
gttcccgggacccctgggaggaggccacccccgtgagggggggttagggnagatgggnagggcccccgggaaaagtgattagaagtcaggtatgggaaggctaaataggacagngtcgagtacatctctgcttggaaaaacatatcaacacccttttttttgaacattatatcttgttcataaaagaaaactttccacattgttttaacaaaccccacagctgagagtcaggcctgaatctttgatgtgtgcccagtcacagagttgaccctattggtttgtggtggggcagggcatcaaagacatcattgactaatcacattcccctgaatagctcatatttagaaaatattcttagattgtaaaaatgtactattaatttgtgatattcagtcttttaaatattttatacattaaacaaggcatagttacaagtataaaacataaatatcccaaagccattatgcatggcactcaagattaaaatgggaaataatacatctaataaatcaaatgttccaagacttcaaatgtcttttggaaacaggctatgtaaaacagcacactggtttcaaactttggtaaattttaagaagaactcttacaaaggcatttaattcttatacataattttcaggggaactaatcaaatcagctaatcatgaagacatgattttcgttttagaaaacacttttgaaaacttgggataatctcatgccttaatgatcaaagcattatgagaaggacagtggtttttcctagaccaatttttggattattttcgtcttctatcattccgntgatcttagatattctctgcattaaatattaaatatcacttctaggctgaaaaatccccctaaaaatatttctagctcagatttttcctccaaattctgcaatagaagatcacaatgtgaactctgcatctccatgttaaagtctaatggacattcacacttagcatgtctcaaagaaatctcatgtaaaccatggccatcctgttctaccttaactttctgagtctatggaatgataatttcacatctcataaacttgactgatgtaagtgtcaagaaaagattgacatttgttaaaagttagtagtgaagtgtgtaacgcttaagcanactttcatatttcaaatctctntagcacgtgtaactcttttttcaagatgtgaaataatcattaggtcagtcatttgtaaatagtacatctgctatggactttttccagttcttcaccatccatttttataaaactcttattgttaaaaaaaaagttactcagaatttcataaagccaaacacctgatttcaggaacacttgagatgtaagaaaattttatagggacctccaatcactaattttcctattttttctctcaaagaaatgctgaagggaggaattcaggttgaatgaaaggaaatagtaacttacagccatatagagttataaagacttcttgtaaatgtgaacatatggtaaaatataaaaacatgtatttttgaaannnnnnattctactcattatttttacttcaatttaagatataatgtttgaaattagtataattctaagctaatacgtatgcaatgtaggaagctgtaattactgacaaaattatgtgaagtggagaaaacctggggaagtggatggtttagatgaaactgagttaatttcatattggatttaacagtacattggtcataaactttata

SEQ ID NO: 599430 - DNA, 254 bp, Homo sapiens
  misc_feature (90)..(90): n is a, c, g, or t
  misc_feature (106)..(106): n is a, c, g, or t
  misc_feature (113)..(115): n is a, c, g, or t
  misc_feature (227)..(227): n is a, c, g, or t
tgcaaggactgacagagaaaagaagtgctttgaattctttctctgctgactagacatgatgtactaatgcgctcaagctgaagaatctanatgttcgtcttgactncagtacnnnaatataatgctattacttaattacttgtgaaaaacaacacattttaaagattacgtgcttcttggtacaggtatgtgaatgacagtttatcgtcatgctgtcagtgtgcatnctaaataaatatatattcggacgtgga

SEQ ID NO: 599431 - DNA, 753 bp, Homo sapiens
  misc_feature (22)..(22): n is a, c, g, or t
  misc_feature (198)..(198): n is a, c, g, or t
  misc_feature (221)..(221): n is a, c, g, or t
  misc_feature (435)..(435): n is a, c, g, or t
  misc_feature (445)..(445): n is a, c, g, or t
  misc_feature (453)..(453): n is a, c, g, or t
  misc_feature (489)..(489): n is a, c, g, or t
  misc_feature (562)..(562): n is a, c, g, or t
  misc_feature (571)..(571): n is a, c, g, or t
  misc_feature (591)..(591): n is a, c, g, or t
  misc_feature (604)..(605): n is a, c, g, or t
  misc_feature (615)..(615): n is a, c, g, or t
  misc_feature (623)..(623): n is a, c, g, or t
  misc_feature (625)..(625): n is a, c, g, or t
  misc_feature (629)..(629): n is a, c, g, or t
  misc_feature (636)..(636): n is a, c, g, or t
  misc_feature (644)..(644): n is a, c, g, or t
  misc_feature (651)..(651): n is a, c, g, or t
  misc_feature (653)..(653): n is a, c, g, or t
  misc_feature (685)..(685): n is a, c, g, or t
  misc_feature (718)..(718): n is a, c, g, or t
atcagcgtgcgcctgcgcacgngaggccggaggagtcttaccctaatgtaagatggtggcccgtctggctgtggaacccaccgaaagctgagagtctctctctcagccgtaaaggtcggactcgctgaagcaatcaggcccggttctgaagagttttttccccgacgctcgttcggtggtttcttgtgaggacgcggnagccgtggagtcggctgaggganaagcgaggcaaggcaggcgggtcgtcaaagtcctacattttagctttcagtgctgaacttccttctcccttaaattattataaacttttgctgctgtttaataaacgtgaagatgtctcgcagtcctgatgcgaaggaagaccctgtggagtgccctctttgcatggagcccttggagatagatgatatcaactttttcccttgcacctgtggntaccagattngccgattntgttggcatcgaattcgcactgatgaaaatgggctntgtcctgcatgtagaaagccatatccagaagacccagcagtttataaagcactctcccaggaagagctgcganaggatcaangaatgagaaaaaagagaaanaaatgagagaaannagaaaatatnagaaaatngnaaanatttggntagtgtangtgtgananaaaaaagctcgtctttgttgtaggtttatatnagggggtaggagagggagaggttttaaaaaganaagaatattttgggaagtttggtaaaatatataaa

SEQ ID NO: 599432 - DNA, 340 bp, Homo sapiens
agagaggatccatgggtgctcatcccccggcagcaggaatggcctggtgtttgcaatatgtttgtcacggaggccaggtacccagtgctggctacacaaacaccctggacaatgtccatgggactaggggtcccacccagttgacactggtggtctttgaaggactctggggtcttcacagctcgcactgtggctttactgcataggccttagaggcaggctatgtgggctctaatcctagcttcaccactgaagtaaccgtgtcagcctggccaagccacaggaaggctctctgtccctaactttccccctcactggcctggggggatggagcacccat

SEQ ID NO: 599433 - DNA, 238 bp, Homo sapiens
  misc_feature (72)..(72): n is a, c, g, or t
cataagtgggagctgatcaatgagaacacatggacacagggaggggagcatcacacacctgggcctgtcggngggtgggggtcaaggggagggagagcattaggacaaatacctaatgcatgcgggccttaaaacctagatgacgggttgatcggtgcagcaaaccaccatggaccaggtttcctggggaaaccaacttgaacgttttgaacatgtatccaagaccttagggcaaatt

SEQ ID NO: 599434 - DNA, 900 bp, Homo sapiens
  misc_feature (111)..(111): n is a, c, g, or t
ttgctctgtgtggttctgttgtggtgttatacgttgtggttgtgtgtggtggctaggctcctgttgctcgcggaatcccgcggtgtcgggggtagtccccagtccgcgccngttctcggggtgttcccctcgccgccggcgggttgtggtattcgagcccgcccttttgggcgcggtttttttcgcgccaggctcatgctggctcgtggggtcgccgagtgctccttttggcctagtggagtccggcgcggggctagtcttttgttgtgggcacgccccttttatccgttgttgtccccttgccgggtctcccggcaccattgtccccgggtgttctcccccctctcccccgcgcggtgatgtttatgcccccgtctcccgggctaagtgacagggtgattcttcccgttgctcccccccgagttggttcttttctgctgctgacgccaactgggtaatattgggtagactaagctttgtgtctgcgcgactcacgactagttctcaacaaggacttttcatcgtcgaaattggctgctttgtagagcaacttggttggggggcgcttaacaaaagaggaagaaacagtttttacacgccccccgcccacgacagattagccccccgtgataaataagggttatatgctgtgcttgggcgccgtgaaatttattatatgtgtgagtccgaggatgcgccagcaattcaatgtcgcgctctgtctgcgagaggagtcgcctctttgtggtagaactcgggtttcgggggttgtttttcgcgacatcgcagtgtcgcaagcacaactatgttggggccaacagctgtggtgcactactcttgttgagccaacgaacccaaaaacccaaccctggggggttacaaaaaaccccgccccacaaa

SEQ ID NO: 599435 - DNA, 257 bp, Homo sapiens
  misc_feature (55)..(55): n is a, c, g, or t
  misc_feature (212)..(212): n is a, c, g, or t
  misc_feature (256)..(256): n is a, c, g, or t
cgggctgggcacatcagaacctgggggatacaggtgtcctctgtggggacagcantaaaacttggataggaggccggacgtggtggctcacgcctgtaatcccagcactttgggaggctgaggcaggcggatcacctgaggtcaggagtttgagcccagcctggccaacatgttgaaactcagtctctactaatacattaactaggcatggnggcgcatgcctgtcgtctcagctatttgggaggctgaggcaagnt

SEQ ID NO: 599436 - DNA, 510 bp, Homo sapiens
gactaccggggcttggtatagcatcctgttccgctcctgttcctcttgcccgtgtgtgctgatgagagacttttggtcagggtcgcagttgtctactttatgcctgtacttcttgcctcagtgctgttcctctgctctccaggctacaccatggtaccacttctcaggtcgactcttcctaggcatcctcccatctcgaggatactcaaagtgaaacgagatatctataaaacacgggaaagttggaaaatagattcattagccattcatgtacacagtgcagtataaactactctcatagatggtacttctaaatgaaaatacacaaatatttataagctttaatagtggtccctaaaacataggcaactatattttcctgtctttataaattcataatggagacaatataacaaaatatttagggtaagaactgtttctcatcagatctctatagtgcatactttaatggcatgcagtgctgatgttcacaataaacgaatatgttta

SEQ ID NO: 599437 - DNA, 381 bp, Homo sapiens
ttggggctcattcagggcaggaaagcaaagtgcgggggtacagtttggcagatgggtggaaacacttagccaaacttaagtggccggggtaggaccatcactcccaaagttggtcagcagagaagggccgctcgggtgtgagtctatccaaaccgggcatggctctgaaatggagtcctcatcccagggggaaggtctgctggggggctttacattccttgtgactagtgtgctgggatattaccttctgcttcccacttcctttttttttttttttgggagacagagtttggctcggtcacccgggttggagtgcaggggggtgattggggctcggggcaccctccagtccgggtacaaggcgatcctcgtggctaagcc

SEQ ID NO: 599438 - DNA, 244 bp, Homo sapiens
  misc_feature (231)..(231): n is a, c, g, or t
  misc_feature (237)..(237): n is a, c, g, or t
tgtcggccgctgcccctacccgccaaattaactttgaaaactctgatccagaaatgctcggggagactgatttgaataataataaaactcctgtctcccgaacagccggctctgcgtgaattactatttctccttacaattcccctgtcttcacaaatcggctctctctaggcagctggcaggaggggtccctgtgtaaacgtccagtggattcaccttgtgggtaccgangctcgnaattcgt

SEQ ID NO: 599439 - DNA, 390 bp, Homo sapiens
  misc_feature (145)..(145): n is a, c, g, or t
  misc_feature (153)..(153): n is a, c, g, or t
  misc_feature (210)..(210): n is a, c, g, or t
  misc_feature (283)..(283): n is a, c, g, or t
gtaacacaaagagtggggcgttgctgtaaagataccaaaatatgtgaaagtgactttagaactagataacaggcagaggctggaacagtctgtagagctcagagaaagatggaatatgtgggaaagtttgagacttcctaaaganttattgantggctttgaacaatgaaattcaggctgaaatggtctcagatggggatgaagaacttnttgggaactggaggaaaagtgactcttgctatgcaaagagactgaagcattttgcccctgccctagagatttntggaactttgaacttgagagaaatgacttaggagtatttggtggaagaaatttctaaggtggcaaagcattcaaggaggaaacatagcataaaagtttggaaaattt

SEQ ID NO: 599440 - DNA, 583 bp, Homo sapiens
ggcatcacctgcgcagggacctctggggctcagccctgagctagtgtcacctgcgcagggccctctggggtctcagccctgagctggcgtcacctgtgcagggtgcctctggggctcagccctgagctggcctcagctgggttccccatcctggtctctcgtggcctgcgtttcgtgcactgagcctcctattctgactgggcatcatcctgtccctaggcgcctctgctgtatggttcctgatatactgtgtgcatgacgtcccgctcggtgccgtgtgcacgcaagtgatccatccgcgtctgccgttcatgctgcccgactagaactgggatttcgtccacacactaaatgcatgctactgtaaacacgtgtaacgattacagttataatatctaactggctacagcttcgtatgttcactacgatgtctttcgtgtacgcattccgagtcgagcccgttcatgacgtaccttggaggagtgaaacccgaaaggtgctaggggatggcccgcatgtagaactttaatctcttcggcgcattctgatgcaggcagtccggaagtggtgcatgtggtgatgg

SEQ ID NO: 599441 - DNA, 813 bp, Homo sapiens
gtactacttcttgtgctgctactgctgttaaaagctattaaaaaatatatttaacatgggcctggcacggtggctcacgcctgtaatcccaagtagctgggattacaggcatgagccactgtgcccggcaagatctaactcacgcttacttttcattaaaatatttctggtcgcttttagctatgtcagaatccaataaacagcttacgcattcattttggtaaagcaaatttcacaggaaaatagaccaacaattataagagattcctggagacaacacaacggaaaaaccacactgtttaccaagcaaaatagcctgtgtacatgtcacggtaatgtaatgcccaagtgaactaaacagatttttcgtcaagcaaacctactgtttctacttgggggcaacaacccacgtccgttttacatcctgtacctctcacggcacagaacagaacaagcacaacaggttcttcttcttctttattaatggctactagaaaatgagcagtgcaagagtctacctgtactattctaatacagtaagaatatgggacacaaaaatggaggtaaccttcttaacatagatcgccttggcacactcggaacctgttcgattcactgataataacccaatagaacgggatcttcaccttaacaccacagcctatttttaattactctctaatttgcacagatgactcagtctcatctctgctttattccatacacggggggaacctgtactgcactccggagcaaatcttcacaagcgacccgggcgctctaaacctcgcctccctgggacacccacgcgct

SEQ ID NO: 599442 - DNA, 426 bp, Homo sapiens
ggggtgtggatcattttgagccgtctggccttgctcagtttattttaataaaagtatttctgggagggaaaaaaaaagaaaaaaaaaaaaaaaaaaaaaaaaaaaaaaaaaaaaaaaaaaaaaaaaaaaaaaaaaaaaaaaaaaaaaaaaaaaaaaaaaaaaaaaaaaaaaaaaaaaaaaaaaccttttggcccccttggcccaatgaactttaaaattgaccaaattttttcaatgggcccaaatttaggcctaattggccaattccccctaatggggggccttttaaaaataaatggcccccgtttaaaaacctgaaaactgggaaaaccctggggttccccaaattaaaccccttggaaaaaaacccctttttcccaagggggttaaaacccaagccccgcccgattgccctttccttggcct

SEQ ID NO: 599443 - DNA, 483 bp, Homo sapiens
gtccgcgtgtgtgagatactcatattcattatacatcactgggttcctcctcgatggcccttaggtacatacagcaaagaaaatctgccatgtgctcagagtacagaagaagctattctcgtgtggtaatcttttaacaatcaggtttttaatactctccttgaacacaagactgctacatgatcaggtgctcaaataagggtatcataacgcatgacagagaatcattaaatggaatcactaatgaggaaaggcattgctgatatcaataccttaatcacttgacattgtgcatctttataagaagggtaaatcttagttacgaccactgagtaggaagactgttaagatggtataacggtgcagatatgcgagaaattctgtccaattacagaacttatctacattacttacaacatatgggccaggcgtggtggctcaagcctggccacgatttactccatcgggggctcctctagagtc

SEQ ID NO: 599444 - DNA, 121 bp, Homo sapiens
gtaattttctgtgtaggtagaaataaatgtagctttcttattttacacaaataggaacttacttttgctaatctactctttgatactgtttgaatagtatttatataatgtttgtgaatta

SEQ ID NO: 599445 - DNA, 767 bp, Homo sapiens
  misc_feature (358)..(358): n is a, c, g, or t
  misc_feature (700)..(700): n is a, c, g, or t
agcggatggggcacaaggtccctccagcgagggatccgctgacattacgcagcctccatgtaagtccacgtttaggttgggaggatctaccatgaagaaggtcaaggaagaaaaggtcagatggccagacgccagcgagatctccacctcccagcatgctagactccaattccacctctcagcagcctagccctgaatccacaccagagcaggctagtcctgaatccacagcacagcagcctagcccgtgaatccacatccagcaggcagttccatgccttgagaagccacctcccgggcaggcgcagcaattccaatgcccgttccaggcagcccgaatagtccggccgacttccantcttgtctggccatctttactctcgcatgaatgcttaacgtcgaaggcgagctccctcgaatccatggaagagcagggcctctgactcgcgccggcccgcattcctgctcctgtgccacttgcccctgcagctcctgcttgctggcgtcgtctggggctatgccatagaccgcatcttcgatgtccttctgcctcgggactggcagatggtgccagggagaggactccccaacctgctcaccttctacagaagatcttcaagaaaaccctccagtcatcgtaacgcgtgtcctccaatgccctcggaactgtggctgtggctctgggggctctaggagctgnctactacatcactggatccttgtgaacaagcccctaggcccacagtctggcagacctccaccagccc

SEQ ID NO: 599446 - DNA, 491 bp, Homo sapiens
gagctggaaccgatgtaagaagaaaaggtgtcctcatagggtctgaccaaaatggggactatccctttaatcccccactaaatcttcccatcagtaaagcagtagcactgtgctgatagttgagagattacagagaacacagagtcattgcccttaacccccaatgagctcacagtgcagtggaggagacagacactgaacacagaataatagggtacaatggataaagccataatagagggctgaatgagacactgtgagggctaaacacttatactgcacattacccatcttgatttgattgcagttgccacagtgggcccagtgcaccatgaagtgcctcgctcattgagatggctaaaatgacctgcttggccagggctcagccgtgcaggtagaagacaggttatacaactctttcttatgatggagactctttacccagttgacattagtgctgagactgaagcacatttttaaaattccaacaa

SEQ ID NO: 599447 - DNA, 230 bp, Homo sapiens
  misc_feature (42)..(42): n is a, c, g, or t
tagtgtaactgtaggttacaggcttagtgctatcgtgataangataatatgtacagcaaatccccatgacacaagtttactatgtaacaaacctgcacatgtacacctgaacctaataaagaaaagagaagaaaagaaagttctacttcctgtacctggttctattccaaatgtggtgaaaccttgccatggttcaattcttcttttttttttttttacttttcctttgg

SEQ ID NO: 599448 - DNA, 324 bp, Homo sapiens
atgttccctaatgcctgatgatgttaagcatctttttatgtgcatattggccatttgtgtatcttctttgtagaaacctctgttcaagtccattgtccattttctaattgggttgtctttttgttgtcgagttgtaatattccataattaaaaaaacctctcgagtagctgggaggctgaggcaggagaatggcgtgaacccgggaggcggagcctgcagtgagccaagatcgcgccactgcactccagcctgggcgacagagcgagactccgtctcaaaagcaaaaacaaaaacaaaaacaaaaactctcccggggtggcctg

SEQ ID NO: 599449 - DNA, 297 bp, Homo sapiens
gatgggcaagatcctccgtctctactaaaaatacaaaaatggccaggcatgggtggtgggcgcctgtaattcctgcctcagcctctcgagtagctgggactacaggcatgcaccaccacacccagctaatttttatatttttaatagagatggggtttcaccactgttggtcaggctggtcttgaactcctgaccccaggtgatccactcgcctcagcttcccaaagtgctgggattacagttgtggaccactgcactcagctcaacctttattttttaacgagatgggatcttggc

SEQ ID NO: 599450 - DNA, 777 bp, Homo sapiens
  misc_feature (77)..(77): n is a, c, g, or t
  misc_feature (83)..(84): n is a, c, g, or t
  misc_feature (234)..(234): n is a, c, g, or t
  misc_feature (256)..(256): n is a, c, g, or t
  misc_feature (260)..(260): n is a, c, g, or t
  misc_feature (268)..(268): n is a, c, g, or t
  misc_feature (311)..(312): n is a, c, g, or t
  misc_feature (338)..(338): n is a, c, g, or t
  misc_feature (358)..(358): n is a, c, g, or t
  misc_feature (376)..(376): n is a, c, g, or t
  misc_feature (396)..(396): n is a, c, g, or t
  misc_feature (401)..(401): n is a, c, g, or t
  misc_feature (409)..(409): n is a, c, g, or t
  misc_feature (427)..(428): n is a, c, g, or t
  misc_feature (451)..(451): n is a, c, g, or t
  misc_feature (457)..(457): n is a, c, g, or t
  misc_feature (464)..(464): n is a, c, g, or t
ccgggtggtctgggtggggggctcaaacgcaggtctctgggacgcaggcactgctccaggtatagtgcgggaacatngccttnnagctgggcaggctgagctcgggcccctctggctcgtggcgcggggcggctgcggagggccccgcgcctggtcccagtgcggcggcggagggctccgagcctggtcccagcgcagcgcagccggacgcgtctgccggccccctggcccggntggcacggagcagagccgcggnctgnggcacggntcgacgtcgagaggcggcccctgggtggggacagggcttggcnngcggcgctggcggggttggtggggcntggccaccgccgccttcggncatgtcagcgggcggagnatgttgcctaagacctcggnggacncgggccanttcggctggggaggccgnnaggaggaggaggatgagctggcncaccgnttgcagncagcttcatggccccgccttgtgaccgacctgggcgaagcttgcgaaagggaggccggggcgactttaacgacccaagattggaggctgctgatctcttggagcaccccaggtgccccagggttttgccatgtctctggccacagcgtagacgggtggcggccaactatttctgttggaccgtttggggagagcacacggacggaggtggccggctaaggctgtgtctttcaaaaatgggtgtgttacgaaaagggctggggtaggcattctgggggtccggggcatcttcgagggacggtggccctatttac

SEQ ID NO: 599451 - DNA, 443 bp, Homo sapiens
atttttcatgctttttttttgtttgtttgtttcttgctgtatttaagcatctccacagaagatatttagaagcaggtagagataaaatttaaactaatcaatactgttttttccctttgaactctttaatgcacaatttgatttctttagacagtttactcattgttattggaagtgactaatagtaactttgcttcaatttattttgatgtatcttatacacaagtataggaaggcttttgggtggtttttaagaaacatgggctgtagattcccataattgctttcctgaattattaagcgtgagctttcattacatctttgtaccggaacttttgcttttgctgtggaacagattcagggacatcgtctaatttttttttttttttttttagataactgctcaagaagttaccttgttttgatttagcagtaaaaaaaaa

SEQ ID NO: 599452 - DNA, 967 bp, Homo sapiens
  misc_feature (318)..(318): n is a, c, g, or t
  misc_feature (607)..(607): n is a, c, g, or t
gcagtaggcagggctggccgttctccgaggtatggcccaaggcgttccgctagaccgaccgttgccgggacctgcccagcgtcctcccgtgcctccttccgggacaagcctggcacaccactcgctgtgatgacgacgctggctgattggccctgggccggcccattcttcaccacgcctgacagaagctggaggggtgctggagacgccattagagctcgatgcggagcgagctggttgctctgggcgttctggcgtcgctgccgtaccctctagaaaagctcgaagggcaacgggtcccagtggtagtgcccactntatggtggggcctaccctaggatgtccacgtcggcggcattggcatccatggccatgcgacgtatttcggagaagcccggagtttcgcttgcaagattccacattccgaggtgaccgacacagtgtctcgctccatcctcatcttagcttccaggttcagcctaagcctgtactaacctgcttggtggacttggcaaaagacttggctctgtcgggaaaggagagacggggctccatcacgcctgttaccagaggatccccgagagccaagcagctctggacatcaccngccctggaactggggccacagccctgggcacgagatttgctctgactttattatatggcatgaaatctctggtttatctcgggataatcaggtcgccggtgtcgtcaaagttcgaactgctaaagtgtgtgataatatatttgacatgttacatttcaagaaaggttatgttggtactacacaggaggaaccacacagaaagggcagcacttggacacaatgtagcctggctctaactacaccaaagacgcgagacaaacaggaaaacctcaactcattcgaacagtcacaaacgacgaacgaaagccgaacgcaacaggtcagaggggagcaccgaagtccaaccaggccaccgtacac

SEQ ID NO: 599453 - DNA, 288 bp, Homo sapiens
tctagagcatccgcttcaacggaactttgctgaacttacccaaaagtcattcagcagcatacgtttaattttcatgtaattgcatggttttgaggattttcttagtcttgacttctatttatattgcactgtggtccaagagcatgtttggtatgattttggttcgtttgcatttgctaaggattgttttatatccaattatgtgattgctttcggagtatgttccatgtggagataagaagaatgtatattcagttgttttaaggtggaaagttccgttgaagccgt

SEQ ID NO: 599454 - DNA, 179 bp, Homo sapiens
ttggtgattagaggatctccgctggccaatggatgagcggaagtgagtcaaatcgagaagaagtatgacgaggagctggaggagcggtggtggagtggatcatagtgcagtgtggcctgatgtgggccgccagaccgtgggcgcttgggcttccaggtctggctgaagaatggcgtgtt

SEQ ID NO: 599455 - DNA, 101 bp, Homo sapiens
acttgctgatgtttgaaatgttatgcacagaattgctaatatattgtatcacattccttaggaggactttggtacttggttcatgcattgatggttttttt

SEQ ID NO: 599456 - DNA, 81 bp, Homo sapiens
atgctttacactctacaagtatggtttaaaggcacaaggtcatggcctttgtcatagcaagttgaatgtgcaattgacata

SEQ ID NO: 599457 - DNA, 195 bp, Homo sapiens
tgaacatcgtgtcagtgagagatgcactgaagacagaattcaaagcaaatgctgagaagacttctttactttcacaatttttacgttgctgccagaagtcttctcagcatttgcttttgaattctgtctccggggggtcccggagctcaattcggaattctgggccttggctgttccaaggcgccaaggcgtgtt

SEQ ID NO: 599458 - DNA, 489 bp, Homo sapiens
aagtcgtaacctgctgatggatcatgtgataaacaggaagtctaaatgggagctatcatagcatcaactcaatctgttttctttcattgatgacggtgtctcgctctgtcgatgcacggctgaggtgcattggcgcaatcagtggctcactgaagcctctctgtggctcacgtgatcctcccaccttagcctcccaaacacctgggactgccgtgcaggcccaatagtgcctgcctagattcggtaattagatcgtagagacagggtctcgcgattttgcccagtgctggtctcaaactcctggagtcaagcggccctcccgccttggattgccccagagtgctggcccgttacgctagtaagcgcactgcgcctggcttccattctttaggattcccattcagactgtgtgtggcaggtacatagagaacaacaatggacttgctaatttctcaggtaacctttgttgaccctcatattaggtctcct

SEQ ID NO: 599459 - DNA, 995 bp, Homo sapiens
ggtcatgacctgtgcatatgccccttctgggaagtatgtggcctgcgtctggcctggataacatagtgtccgtccatgtacaatctgagaatacttcgtgaggggaacgtgctgcgtgattcgtgagctgaacatggatacagctagggttaccctgttcgcgtgctgcccgagttccatggatgacaattagaagaatcgtcaacgctagcgtctggagacacccacggtggtgcccttgtgcgggtacaatctgaagaatcggcccacgaagatgcatcacgttataccgggagcgacactgggggatgtcctgagccgtttctctggcttctctgacgccaggacatgggcgtctctgggtgcttgtgatgccttccagcacaaaactactggggatgtggggatacaggcaattgtcgcccagtgaaggaatcttcatgtggctcaacagaagtctggacatacaaattgccgataagctggcttttccaaatggcaaatgcattttgcacacatgggcctcaagagggaactgcaacactagaaggccagaaagagcgtgtgcggtgcttgacccctgagagcctccatggaactgactccccagtgacaaaattcatcttagcggggatcaccctcttgataatcttttcgtccatgaagcggtgcgcccaccgtcggttggtgggtccgccgactggcatacatgcagaggtcatggcaattgacgtcgaagcagaccgggcagggtggccggggggggcatgacggaccgcgttagctggctcgtgttgactggcgcgaggactgtcggtgccggaacggaccgggataagtgcatcagaacggaactagcccaacagggggggccgtaaagggaaaacatcgctgtggggtacagtgaagaacgttccaaggacaggggacacaacccccgagacaaggggggggcgcgcaatggaagagccaccagaaacggggacaagggtgca

SEQ ID NO: 599460 - DNA, 226 bp, Homo sapiens
actgcggctgaccacctctgctcttcgagactcgcccgccggtaaccacgactactctctgccggatggaaagcagaagcaggacctgctgtaagaggacgactcgccgggaggagtctgtctccattttgacaatgataaggtgtcagtggagttctgctcggcgtgcgcccggaaggcgtcgtcaccttctaaaagtgtagggtcaagtaatctgctctttatc

SEQ ID NO: 599461 - DNA, 131 bp, Homo sapiens
agaggaccccgtgccgatcttgccatcttcagaactgtcccaattggcacacatcacaggaatcaacacacgtgaaacaccaacatcctttaaacttacgccgcttatgtattacacataaagttcctgtc

SEQ ID NO: 599462 - DNA, 349 bp, Homo sapiens
ttttttttccaaggaaaaagtggcaatttaataaggatccataaaacgttgtactttcgaaaacaactttcgaagcatggtcttcaacaggcacattccattagggaaacctttagagccacgaacttggtggttaaacccagaattacaggcctattaagttccaaattaaaggttaaaaaaaccaaaaaccaaccaaccaaaaaccccttaaaccccacaaaaccccaaaaccaaccaacctattcctggctttcatcccccatttttaaaccacagtttttcctcaaatcaatgctcggcgggaacaccggaaattggtccaagcgggcggcaaattaatagtagt

SEQ ID NO: 599463 - DNA, 420 bp, Homo sapiens
  misc_feature (6)..(6): n is a, c, g, or t
  misc_feature (91)..(91): n is a, c, g, or t
  misc_feature (131)..(131): n is a, c, g, or t
  misc_feature (269)..(269): n is a, c, g, or t
  misc_feature (310)..(310): n is a, c, g, or t
  misc_feature (381)..(381): n is a, c, g, or t
  misc_feature (386)..(386): n is a, c, g, or t
atccancccctaaaccacctgaaaaatcctgccccaatgcccttttccagggtgtgtatccttcagtaaataatatgagccttatatatantgaaagccttacctttgcacctaggtacctgcgataaganctttcccatgtgctggcccatgttcagtggttcatgtctgtaatatcagaactttgggaggccaaggcaggtggatcacccgaggtcaggagctcgagaccagcccggccaacatggtgaaaccccgtctccagtacnaaaacaaaaattagctgggtgtggtggcacacgcccgcagncccagccactcaggaggctgagacaggagaaacgcttgaacccgggaggcagaggttgtggtgagccgagntcatnccactacactccagtctgggtgacagagtgagac

SEQ ID NO: 599464 - DNA, 889 bp, Homo sapiens
  misc_feature (294)..(294): n is a, c, g, or t
  misc_feature (318)..(318): n is a, c, g, or t
  misc_feature (413)..(414): n is a, c, g, or t
  misc_feature (474)..(474): n is a, c, g, or t
ctggagaaggtggaaaacagtgtgatcatgtgtcctggagatccggagcagttggcccgttaggacctagaggagaacgaggaaatcctggggaaagaggagaacctgggataactggactccctggtgagaagggaatggctggaggacatggtcctgatggcccaaaaggcagtccaggtccatctgggacccctggagatacaggcccaccagtgtcttcaaggtatgccgggagaaagaggaattgcaggaactcctggccccaagggtgacagaggtggcataggaganaaaggtgctgaaggcagctggaantgatggtgcaagaggtcttccaggtcctttgggccctccaggtccggcagtcctactggagaaaagggtgaacctggtcctcgaggtttagttgnncctcctggctcccggggcaatcctggttctcgaggtgaaaatgggccaactggagctgtnggttttgccggaccccagggtcctagacggacagcctggagtaaacaggtgaacctggcagagccaggacagaagggagatgctggttctcctggaccacaaggatccagcaggatccctggccctcatggtcctaatgcgtgtcctggacttaaaggtggtcgaggaacccaagggtccgcctggtggctacagggatttcctgggttctgcgggccgacgttggacctcgagggccctgctggcagctccgggaccttgcgggaccgccttatgggaaccccggacaggagggacctccaggtcttcgttggggcccctggctctcatggcgtgttggagatgaggaccagtgtatccctggtgtgccggagactagagggccgtgataacatggcacctgtcagtagtccct

SEQ ID NO: 599465 - DNA, 467 bp, Homo sapiens
catatatctcaggtgataggtgaaaccacaagtttgccttgaaaagtgcgttgataccaatagccatagcgagcaagtacgagctgtgttccaaagctcttcctgttagcacttcatgtgtatacagttaaggatagccaaagacagccaggcaccatggctcatgcctgtaatccaaaactttggaaggctaaggtggcaggatcacttgagcccagtagttcaagccctgcctgggcaacatagcaacgccctgtgctcacaaaaaaatagaaattagaagctagccaggcatggtggtgcctgccagtagtcccagctatttgggagatgtgaagcaggaggatctagtgaggctaggtgttggaggctgcagttatctatgttcactgcactgcactccagcttaggtaacacaaaaagaccctgtgtccaaaaaaccgaacgcaacgcacagcactcgagac

SEQ ID NO: 599466 - DNA, 281 bp, Homo sapiens
catgcgtgggggtgatgtagggacggggtttctgagcgtgacatgtcctttctggttgttagtgatccttctaacagacaggaccctcagctgcaggtctgttggaataccctgccgtgtgaggtgtcagtgtgcccctgctggggggtgcctcccagttaggctgctcgggggtcaggagtcagggacccacttgaggaggcagtctgcccgttctcagatctccagctgcgtgctgggagaaccactgctctcttcaaagctcagatggaaatgcagaa

SEQ ID NO: 599467 - DNA, 293 bp, Homo sapiens
tcaagactgccctgagccgtatcgtcggccatctggacctgagcaccgaagaaatgcgttcggtaatgcgtgaaatcatgaccggccaatgtaccgatgcgcagattggtgccttcatgatggccatgcgcatgaaaagcgaaagcatcgacgagatcgtcggtgcggtatcggtaatgcgcgagctggcggaccgggtcgagcttaaaaccctggatggcgtagtggatgtagtgggcactggcggagacggggcgaacatcttcaacgtctccacggcttcctcctttgtg

SEQ ID NO: 599468 - DNA, 853 bp, Homo sapiens
  misc_feature (6)..(6): n is a, c, g, or t
  misc_feature (82)..(82): n is a, c, g, or t
  misc_feature (111)..(111): n is a, c, g, or t
  misc_feature (266)..(266): n is a, c, g, or t
  misc_feature (299)..(299): n is a, c, g, or t
  misc_feature (317)..(317): n is a, c, g, or t
  misc_feature (358)..(358): n is a, c, g, or t
  misc_feature (381)..(381): n is a, c, g, or t
  misc_feature (476)..(476): n is a, c, g, or t
  misc_feature (498)..(498): n is a, c, g, or t
  misc_feature (537)..(537): n is a, c, g, or t
  misc_feature (552)..(552): n is a, c, g, or t
  misc_feature (558)..(558): n is a, c, g, or t
  misc_feature (567)..(567): n is a, c, g, or t
  misc_feature (608)..(608): n is a, c, g, or t
aacggnttaggccaccaagagttaaacaacttttacgtttctgtttttccttttctttctcttcctattatgatgtcaactnttttactgtggggttaagattcatatganaatcaattctctgttaccatgttatctagttctcaattacaaagaaaatgtgttgtatgactttgttttattaattcccaaaccgtaactttcagattggttaaacagccatgaatgtgagggctatgttattgataattgtgttatctgaagcnaaataaaccttcacttaacagggacaatgttgntaactggcaggggtaaancataaatctgccagttactcatgtgtaacaagacaaaaggngggtacatatcttgttccctccngcctctactatcctgccctacttgggaggctccctactctcttctgacatacggtggaacttctccttccggcctccctaggggtgggggggtcngtggggtatggccccctagggngccctggcccgggggatagtgccggccctgccttgggcnctccgtctccatgcnctctcnacctcatcngtcagggcgtcttcatacgggtgtgggtgtggaccgggacnggtgttacggcggtgcggccaaaacacgcgggctctcatcttggtggtttcagcataggctcgtggaccccacaggaactcatagcatggaggatcactgttgcacacctgccggtaaaccacgtacttatcttgcaccaaatcttcagtaatgatcttccgagcatccccatagattgaatgcaggatcccatcatatatccccaacagacccaggaactcccagacctcctcttcagtggcac

SEQ ID NO: 599469 - DNA, 213 bp, Homo sapiens
ggaaatcctgtagttgtatttggttgaactgaaatatttgactcaaaatagttaagactcattgtcatttgtgatcttggcattattgtggacaagttgacatattagggctctttgctttctggtaagcttagcttttaagatgcatttgcccttgtcctgtctttaactagatatacatgcttatattggtggggggtttcacagactata

SEQ ID NO: 599470 - DNA, 184 bp, Homo sapiens
attgtagcgagatttgtctatcgtagtggcagcttagcatctggaagtcccgccacttatgatcgattgccctgcttattggggctattttcccagactacttcttgatggtctctttccccgtggacacgcttactctccccgttcctggtcagcctttggttctctaggttttctcgctctc

SEQ ID NO: 599471 - DNA, 658 bp, Homo sapiens
cagatcataggttcccagtaatgcaccagtatgcgtatattgttagctggcaacactttgtgtcctcattttccagtaacttggcgatcatatcgtgtgagagttcatttccagtactagtagtatccctgatcagcagcaataatatccgttgacattgcacaggtatatcatcagcagcacacatctggacagcttctcacagccctgaatgttagacatgcctgcgcgtttcttcataggctctgtcacggtgctcacttggtccacgtggaagtcctcttcctcggtgtccttgacttcaaagggtctctcccattagcctttaaacaatatgtaattcctcagagcaaaaactgtgtctctgtcaagccctttgtccaaatcctcacttttcccttgagtacctttctccacgtaatcgttgatctgtttcgtggcctcctcggtgtccccgaagttcacagtgaaggcttgtgagtggtacaactttttagcttcctccatcaatttatccccaatcttcaggccctctctgaggaacaggccaattccggtggtcagctgcagctgtctgtctgtctggttgagggtacggaggagttcgtggaagccttcatgtatctgagcctgcataatctcagtgagtatgaaactg

SEQ ID NO: 599472 - DNA, 478 bp, Homo sapiens
agcgggtcggtgccagggccctggccctcactgtccccttgcggtcccctgtgggcctgctggcgcggcggggggcgaggagcgggcgccctgcccttcttgtgcccgctggactccggggcagcccccatcctgtgcgcgcagggacgcgagcagcctgcgcccagaaacgttctgccagctggacggcccgataggcctaatttgccgcagacgggctcgccttgaacctactcattacccccacgatcgcgccttccactcatcggcccagaagacggaaggactgggaacccgaggaatggaaggcacctccggaagcctgggatttaacttcattgcgagtcccgacgggcaataaaccatgtaatgggcagcgaaacggggtgacataacccatggtttccacggaaattcccgcaacgttgggcgccacacaggcaaataacagaaacgctatgttttcgcaacactcggc

SEQ ID NO: 599473 - DNA, 138 bp, Homo sapiens
  misc_feature (29)..(29): n is a, c, g, or t
  misc_feature (51)..(51): n is a, c, g, or t
  misc_feature (92)..(92): n is a, c, g, or t
  misc_feature (113)..(113): n is a, c, g, or t
acccaggttgtatccaatttccagccagnttagttcctgtaacagaacaantgagtctgggatgaagtcctcaaagtacttcaaatggtaantgttttgtttttgtaatagcntaacaaataaacctaggttttctac

SEQ ID NO: 599474 - DNA, 162 bp, Homo sapiens
gcggccgcctaactactactactgctcgaattcaagcttctaacgatgtacggggacatgcgcctgtggtcccagctactcaggaggcggaggttgcagtgagccaagatcgtgccactgcactccagcctggatggcagagtgagaccttgtctcaaaaaa

SEQ ID NO: 599475 - DNA, 971 bp, Homo sapiens
  misc_feature (596)..(596): n is a, c, g, or t
  misc_feature (607)..(607): n is a, c, g, or t
  misc_feature (635)..(635): n is a, c, g, or t
  misc_feature (645)..(645): n is a, c, g, or t
  misc_feature (687)..(687): n is a, c, g, or t
  misc_feature (695)..(695): n is a, c, g, or t
  misc_feature (699)..(700): n is a, c, g, or t
  misc_feature (706)..(706): n is a, c, g, or t
  misc_feature (831)..(831): n is a, c, g, or t
  misc_feature (838)..(838): n is a, c, g, or t
  misc_feature (925)..(926): n is a, c, g, or t
tttgttcatgtctttcttttttggtttttcttgtttgtggcttgttgtttgattcagggttctcattccttttgctctttcttgttgtgtcctttcttgtatttgtcatcatttatgtaccttttgtcttcttcttctctcttcatcttatgttatccctattgtttttattgttcctggcttcttttaacttcagtttcctgtgattatgttgtgctaatatttgtttctgtgcttggtatccgtcatgtattgctggtagtaggtctgcttctgtctaggtctgctggctacatctttttggtacactctggtctgttcccatgtgctagggttgcagcagttatgtgttgttgtgtcttagggtgttaggcttttgagcttgtacgcctgctgttgtgtacagtatgatatattccttgctagtacccaagtctccaggtctgtccttatggggatctatgtttggggcggccggctagtcagggagcctgggtttagtaggccctcgcctaggtgatggcagtgtctaagggtgtgtcctggggctaccctagcggttatgtgcttagtatttggtcacctagccgtcatcntgggcttttcntactgtgtcttgttacaaggcctcagcnaatccacagnactctctctccttccttccacctgtcagcttctctgcttctnagataaanaccnnttgtgnaacaccaacacttaacttcagaaagacatgcattatgtggtgtaatcaaacccgatgctttcagatgacctacttacatcttcaatgtggataagataaagaacaaaacacatgcatctaactgnttgcccntccagttgacttttaaatgtaagaatggaattccaaacacttaacacattcagctatatgacagaaagtaaatctatggatatggtnntttgtgaatgatcttttaaataaaagaaaaccttacgtaatattt

SEQ ID NO: 599476 - DNA, 1448 bp, Homo sapiens
ggacgacgacgtggggaccgtccggcttcggagcgggacgtgttcgttgtgccacgcgacctaccacacacgacgacacttacaactactgggtgactgtatgagacacacggcaacgacacgacttttacttacttgaacgttgttcccatgtgccaccacctgttgaaacacgggacggcaacgcacaacgaacctgggccaaactctccagtgtgtctcttttgggcggaacgacatggtcaaggcccctgtgactacctcgttacacatgccgccacactaacgacaccaacacgtgcactacacctcctgtgggacgacggactaccacctgactgcgacgtactttggacgaactcccacatgacacgtaccactccccttggaagcaacacacactgactctttggctcgggcacttacacgacacggaccggacacgacacacgcggccagaccgcttacactacgccttaactctacacaacacacacgcctacctaaagtgacgtaactaccttgggggccacgtgtacttactttaattacccgacaccacccacgacacgtgtcctgcactggacccttcatttgtatggatggtaacccaaagtccctttgtacactcgcactccttcaataaccaccccagccatttcacggcattcagtggaccattgacctggaccagaaaacttacttagtggtacgggcgaccagatcctgtgatctttacaaatagcttacacgaacctggtgacttctgttgggttttcaagcacttggaacattatttgttttccacggctccatgtcgggacagatttctcaccacttcatggttcaaacttcccacaagttgtcacggttaacacatgggggtaattacaccgtgggtgtacgcccaccattattcaacaggacttaattggacatgaggcaacctatacgaacacgggtcacatgtggttcccaccttatatcaacacaacaaggaatgagatgacagtgggccacataccgttcaacagaacccgtataccggggggcagacatatggagccagacaacaacccgtcagaagaccattatactacactgcaacctgtgggcactactcgtgagcacaactactctatcgaccccaccatcaagcgggagtgcagaaacttgcgcccaccgacgagcgaggtacaagaaccacaccgccacaagacttccaaccggggggcattaagagcagagcacaagcccacacaagtagcacacctcaaacaggcgcgagcggcacgacaaccaaacataaaagcagaagccatagcgcaacaagagaagcgacgaatacatatagaacccaaaacgtaataacacctagagtatacacactgggggtatcaccaccacacaccaccgactcgatgggagacatccacacgtaccagcaa

SEQ ID NO: 599477 - DNA, 429 bp, Homo sapiens
  misc_feature (9)..(9): n is a, c, g, or t
  misc_feature (13)..(13): n is a, c, g, or t
  misc_feature (83)..(83): n is a, c, g, or t
  misc_feature (213)..(213): n is a, c, g, or t
  misc_feature (240)..(240): n is a, c, g, or t
  misc_feature (291)..(291): n is a, c, g, or t
  misc_feature (299)..(299): n is a, c, g, or t
  misc_feature (320)..(320): n is a, c, g, or t
  misc_feature (332)..(332): n is a, c, g, or t
  misc_feature (380)..(380): n is a, c, g, or t
  misc_feature (385)..(385): n is a, c, g, or t
  misc_feature (419)..(419): n is a, c, g, or t
gctgaagtnggangcagaatttaagagtcataaactagcatatatagcagaaaaaatatctaagcagcaaaatgtttgagatnccacatgactacttttggctatgtacagcaaaatgagagaaaaacgatttaaagacagaatttataattaaaagagaagcagaacagaaagatttggaaaactctcagcttgaccatgtaaaaaatacanaagcatgttggggagagaatactaagngtgtgaccaagagactgctaaagagactaatatgggtagatggaagccagnttctattncagaggcctttggaggcaagnctaggatcttgnaggggcaaggtttctagaggaggtacccctagggacttggagcctttngcttnccctgtgccaccttggggactctggtgcttgccnttctgggagc

SEQ ID NO: 599478 - DNA, 864 bp, Homo sapiens
ttttgtttttagtagagacggggtttcaccatgttggtcaggctggtcttgaactcctgacctcaagtgatccacccacctcggcctcccaaagtgctgggattataggtgtgagccactgcacctggccttttttttttttttggttttctggccagttccagatattatggtttttctcttaccccaatttacattacggggtttggtaccacactcactaagggcccaaactcattggaagatacaaaaccgtacattgcaggcgggttggctcggggtaagctcaagggcgtgattggctctcaccgtgctcatagatagtgtatggtgcagccgtgaaacgtggcctcctataaagggaaagcggggtctcagtctctctctgtgaaaaagtgtgacattgtacaacagttaatctcgaataatgtggtttggagagacggctacagtggtttaagggttgggcctataagccttcagttaactgtggctcattttggggtgacctttggtggtcaccacctgtgtacccttaaccgtgacgggaattaacccttacggcctttttgggtggggcgcaagaacagcaacacccgggtgtgttggctgactgttaatccctaagtggggtcctaaagggacaaggggttaatgcgcgacgaaagacaccacaaaacccccaggattgcattgcttttgggtgccataatttttgggcaaaacaaagcacaaacttttcattctcggtcccttttaaaacaaatttttggcaggacaattaacccctccccctgtggggggtcaaaacacgttggaagccaaatttcggcgcgcgtcagaattgcaatttcgccacaacat

SEQ ID NO: 599479 - DNA, 449 bp, Homo sapiens
  misc_feature (15)..(15): n is a, c, g, or t
  misc_feature (45)..(45): n is a, c, g, or t
  misc_feature (326)..(326): n is a, c, g, or t
  misc_feature (401)..(401): n is a, c, g, or t
  misc_feature (405)..(405): n is a, c, g, or t
cccaaccaaattggntcaaaccagttattgccaaggttccccaangggcatcctggtcatcccttcaccccgaatcttcacttccagtgaacttgccagggaggcagagctggtatagctccctttgtgtgagcacaaagagtcaccaaaatggaactttgctaactccagcagttcgttatggcaaacacctccggcggcagccagtacaattcttggtcccttgtagtgtgtggttatgtaatccactaggtccttacgatttatagatttgatattttcagttggtcccagaattgtccgtccaagtgcagtattttgatagntgtcgcatgaagataatcaaaaacaacttcttgcaagttggtttcaacttcctgcatctctctcaggattactcncccncacgctcaatctctgcttctcccagtgtgctgttctgaattatg

SEQ ID NO: 599480 - DNA, 149 bp, Homo sapiens
  misc_feature (99)..(99): n is a, c, g, or t
  misc_feature (130)..(130): n is a, c, g, or t
actcaacacgcatctcagtgtctcatgatggagtgggtgtctgtatgtatcttatgaggaagtgagaggccagtcacatctgaaatccgtgactacggnatctacagacacagttggaaatgataggacncttcctttagagcctatga

SEQ ID NO: 599481 - DNA, 292 bp, Homo sapiens
aaatatgcttgtatacttacgctgttaatgatgatagcagcgatgatgcctgtgaaaaagcctgctttagctcaagaaacgtaagggagacaaatgtagcaagcagaagagcgaacgacagactagggcaagatttggccagactggaagtctaacacttaaataagcattctcttggtcaagtaagaaactgcagttgtggtgggtattaccctacaattaccatttgtattacatattaaattaaactcagcattaaatatgcttggctgatttacgccggtgatgatga

SEQ ID NO: 599482 - DNA, 437 bp, Homo sapiens
agggacaagcattaagcacgcagccatgcaggtcacaacgcttagcctagccacacccccacgggaaacagagtggattagcctttccccataaacgaaaggttaactaagctctgctaaccccagggctggtcaatttcctgccaaccaccgcggtgacgctattaacccaaggcactaaaagccggtgtaaacagtgctgtaaatcaccccctccccaatcaagctcaaactcacctgaggtgtaaaaaactccactggacacaaaatcaactacgaccgcggctttaacatatctggacacgcagttgctaagaccccaactgggatgacatgccccgctatgcttagacctaaacctcaacagctaaatcaacgctaactgcttgtcagaacactacgagccacaccttataactgatacgacctggcggcgc

SEQ ID NO: 599483 - DNA, 227 bp, Homo sapiens
  misc_feature (18)..(18): n is a, c, g, or t
ggggggcccccccccccngttttttttccccctttagaaagccgggggggcgttcccccccccggttttttctttggccgggggggggggaactttttttccccggggaccccttttcccctttggccctttttgggggcccctttaaacccgttttttccaaaaaccgggggggggccgggccgggttttcccgggttttttttccccccggggccgggtttccca

SEQ ID NO: 599484 - DNA, 191 bp, Homo sapiens
  misc_feature (60)..(60): n is a, c, g, or t
  misc_feature (63)..(63): n is a, c, g, or t
  misc_feature (66)..(66): n is a, c, g, or t
aaccacctttctctgacttgcattgagcttttggtatcctcttttaatatttcattctgnagnagnctgtatttatgtgtttgggttattaagaagtggccagcactttgggaggccaaagtgggtgaattgctttacccaggattctaaagcagctggcaacatgtcgggaccccgtctctacaaaaaaa

SEQ ID NO: 599485 - DNA, 132 bp, Homo sapiens
ctgactacagcgcagcgcgaggcgccgttcgactacggcctgttgatctactcgaacggccacatatctgactcgccgcgcaaggtgcttctacgtgcaccgactggtcgcgcggcgacaccaccatgtccg

SEQ ID NO: 599486 - DNA, 140 bp, Homo sapiens
aagtattcggcctatccatacctgttctatagttaagactgtttttaccaccatgcattatgaacagattctgagcacatgttattattgagcaggaggatgggcaggaatttgttgttccatcccacttggatcctgca

SEQ ID NO: 599487 - DNA, 517 bp, Homo sapiens
cagcagtgatccgtctcgtgtcttgtagagtgatctctgacggagcctgtctgtgcatagtgcatctgcatttatctcacagtgtgctgcagagaccaacatcctctgacatgtgaccccattcagatattagacattggggttgcctgagcctgtacagagatgttcccacatacatctctacatgtattctcgcgaatcttactcttttgctgagactatagggaccatgtgactctatagtaatggggagatgatgtccactctcggaataccgtgagacacatcaggaagcttcttcacactattgcctacctagagagaagagtgactctacacacctcctacttcgggccctcaagaccatagtcacgtacgtgagagaactccggatatcgatttgctattatccccaaccatgttatccagactctctcttacatgactataacattttgctggctccgagaactctcgcacacacaccgcagtgtttctacgcctgtttctgacaggg

SEQ ID NO: 599488 - DNA, 389 bp, Homo sapiens
ggtctgccaacgccaaccgctccgctgtgcgcacactgtgctgcaggctctcggctgtagcgctgtgtggatctaggatacggatttaacaagtgtgagctctgggcctccctctggtggccgctgtggttggccaatgcccagggcaagccctctttccataccgtgtcggatgaactcggcaactatgtgaacaaacgggataccacgtggcagggcgggcacaacttctacaacggggacatgagctacttggagaggcgttgtggaaccttgctgggtgggcccaagccaccccagagtggtatgtgtaccgaggacccgaaactgtctggaagcttcgatgcacgggaacaggcacagtgcgccaccctcgagtccgcggccgg

SEQ ID NO: 599489 - DNA, 313 bp, Homo sapiens
tacttacagttactagaagacttctaataaaaataatctacttgcacatactatgtaaaagggtggaggttatgcttgtgatatttagttttcctcaataatgtctttcttgtactgttcaagaactaattaatgtttccacggcaaatttgttttcataatgccgtattgcgaaacaatttgcttggcttctaaagttttctgaataccctttcatagtttctctgcgttgcagtctgtaggtttccttgttatgactcagtgccatgaatcaataaacccaggtgatctatgtttcatgtgcgatcagtaa

SEQ ID NO: 599490 - DNA, 393 bp, Homo sapiens
tacttctgatccttacctttgttgcagctgctgtgctgccccttgatgatgatgacaagatcgttgggggctacatcgtgtgaggagaatctgtcccctaccaggtgtccttgcaatctggctaccaacctctctgcgggggatcccctcatcagacgaacaagggggtggtgttcagcaggtcactgcttaacaagctacccggcatcccacggctgacgaccaggtgtcagaagcacccaacaacagaaactcccctggaacggggacatcggcaacacagccactcaaagtgcgggccaaatacactccccgacaaccccaaaaaaacaacaaacccggcatacccgcgcaaaaatgacaaccctccggtgcgacaagccccccacccca

SEQ ID NO: 599491 - DNA, 235 bp, Homo sapiens
caaggctgttgtcatcctgccacttccctgaatgctcattgggtcatctctgtcatggacgcaagactgttgccaatatgatcaaggggaaaactcctgaggagattcgcaagaccttcaatatcaaaaatgactttccctctttttttgtaaagcaatgtctgcctagtttattgtccagttaactttagtgaccttttaaaagttggcattgtaaataaaacgggatgcggcc

SEQ ID NO: 599492 - DNA, 236 bp, Homo sapiens
aggatcccgctgtgatatgtgggatggaccccgttgcccaccctggtggacggctttatttctaggccaacagagaagaccgtgttcccatttttatgatttctggcgtctgtgattggcatgctgcttaacgtggcagagttgtgctaccggctgctgaaagtgtgttttcggagatcaaagagagcacagacgcaaaaaaaatcaccccaatcaggcccggaagggagccgaag

SEQ ID NO: 599493 - DNA, 884 bp, Homo sapiens
ggtttgctagacgccagcgccgaggaaaaaccgtgtactattagccactggttcaaccccaccgtgtctgcgacattgccgctcgacggcgagcccttgggacggtctcctttgagctgtttgcagacacaggtcccaatagacatgcagaaccattgttcgtgctcgtgagcactgtgcagagaacatggattgctggttatacacgggttcctgctttcacagaatctcattccagggtctcatgtgtcacggcatggtgacgttcacaggccataatggcactggtggcaagtccatctatggggagaaatttgaaggatgagaaactctcagtcgctaaagcatacgggtcctggcatcttgtccatgtgctgatgctggaatgccaactagcaaatggttcccagttttccatctgcactgcccagactgagtgtgtctggatggcaagcatgtggtgtgggcacagtgaacgcgatggcatgcaatattgtggacgaccatgtagcgcttgtggtccaggaatggcaagagcagcaacgtaccgatcaatcatttgctgagctgtggactacctcgagatcaagtttgactgctgtatcagtcttaaccaagcagaattaatgcctttccggtaggcttcaggagagcaagcgctccaaccccattttgtgcggagaatcctagaatgtttgttgctctgcgctgccgttcccatatgggtccacgctgccttgttccctccagggctagtggattgcgcgcgtacgtcatgattattgacataggctaaatattcacgcacacatggctaaaacgtttcggcggcccaagctctacacctgggggcgccgaaagcaccgccaaaacccaacgcgaca

SEQ ID NO: 599494 - DNA, 144 bp, Homo sapiens
ggcccacgtgcgaagtgaatgatctggaggtgctgggcctctgtgttggaaggagtcgagactcaacagccaggcatttcaaaggcaggggccaggaagactggcaaacagatggcaagggatgcccctctttttcataaaact

SEQ ID NO: 599495 - DNA, 387 bp, Homo sapiens
cccggactttaaaaacgcaagaaaaacccagggtttggcgccccatgaaaaaaaacccccaccccttgttgggtagcccctccccccccccggggaaagggtggttttccccttacaaaagaaatccccccggggtgaaaagcaccaaaaaacaaattttgccccaccaaaattagcccgggtgggtggccctggtgttacaccaaaagagggtggggtgtccccccctaggggggttaaaaacccccccaacccaagggggggggttagggttccacccccataaaacccttttttttattttaaaaatccggggggaaagggtgccctccccaaatggccccttttttttttttcaacgggttcccccaaaaaaccttgggcccc

SEQ ID NO: 599496 - DNA, 720 bp, Homo sapiens
  misc_feature (461)..(461): n is a, c, g, or t
tctaaatttattgtctttttttttttaaatcaaaggccccttacgggccctgctcccatgaattacccgtgaccgggaaaaagggaaaggaaccaccggcacaggaaggggtctccccaaaaattttccattttatacccagaactaaacagacaagcacagagtcactatcggcgggtaaaaatgttgcgcacgcttgggaaacgggtggagggaccctgtgtggggacaatggggagattgtttgtctaacaaaaattatcacaggctcccccacaaagtggggtcgcctgggggagacacttgggcctgcttcagcccaagaggattcaaaagatctcaaaaaccactctctgggaaaacggccaaaaacccggtcaagggagattgagaggggacgaccgagaaaaaaccttccacgggggtgtgggcgaggctcatgcttgggccaaactttgggngcatgcaagggattgtgcccctaccccccgtggtgggaaaatcccccccaaaggaccctctcccggttcgtgcgcaagagacaagggtggccaaccccgcgcaaaaccccccccaaagggcaacgagctgttgggagacactttgcccaggaaatgctctcccaatgtagaggggggtccaaaaaaggggcgcctaccaacaaagaggggcttttgaaccctaccaagggaaaaatatgcaccggcatgtagcccccga

SEQ ID NO: 599497 - DNA, 336 bp, Homo sapiens
  misc_feature (17)..(17): n is a, c, g, or t
  misc_feature (192)..(192): n is a, c, g, or t
  misc_feature (216)..(216): n is a, c, g, or t
  misc_feature (240)..(240): n is a, c, g, or t
  misc_feature (279)..(279): n is a, c, g, or t
caggagaatcgcttgancccaagagttccagagcagcctgggcaacatagtgagactccatcgctacgaaaaacaaaaaataaaaaaattagtttgctttggtggtacatgcctgtaatcccagctaaaggcctgaggtgagaggatgaagctgaggcaggaggattgcttgatccctggaagttgacgctncagtgagccgtgactgcaccactncaccgcagcctgggtgacagggtnagaccccacctcaaaaataaataaataaataaacaaatnacaatgttctcttcagtttaggggttgggtctttggcttgtactcatcagggtcact

SEQ ID NO: 599498 - DNA, 1010 bp, Homo sapiens
ttgggtgccctgccggatggggtgaaactaagtgttacgttcaccccaaggcctcggactggtgcgttccccccctatcatgaaggttctgttgtaaagacttcctggtggaatcttgcacctaggatgtcgctcttctccctcttctgacatccgcacccgctggttaagtcttgttaagggaaaaagaagcttgggaagtctgtgcgagaggaatgatcctccgtccagcctagggagtcacgtcgcacttctacacctggagacactcgagtcccttgcgatactctcccagggtgccaacggttaccgacttggtgaaacaacggtcaagactccttagcttacagacgcccacgctctagagtagactttagacctaggaaaccaattatgagatggaaagtggaccctctagttcaagctgtgtccagaggtcacagccatctcagtgcacacctgcctcacgtcctccttatcatgtaccgtggaaaccccctctgatggcctcaaggcagtgcctgcaggccgaggcccttctgggggtttcctatcattgtccttcacaccagagctccaagcccactgctcctccaagactgtgttgtcttttctgcgaccaagagtattaacactactaagtctttcaccttaacttatgactcaggatttattcacgtcctgccacactctaggctcacaggaataaaatcaagtgcgtagacacagctggctgactactaaggcacctagcctctgtagatggtgatggcagctgtggggtgccgcacgcagcgtagcctgggtcatggcagtgcctcatgctgtgctgcacattgagccctttctcagtcagtggagtatacaagttgggcatgctgtctactgacactggccttcatgtaagcagctgtgggctgcgggcagaacaggagctcagagatgcagcatgaggcagcttagaaaaacgtggccatttgctgctaacattccctgttgcttgacgagta

SEQ ID NO: 599499 - DNA, 125 bp, Homo sapiens
cagcactaagggcgcgcgccccattgccccgaaggaggttgcaccacacatcgctcttaagaacggtcttgccccgctcatgtctgaagatcttcctccaagatgtcgacggtgcgttgtgccga

SEQ ID NO: 599500 - DNA, 563 bp, Homo sapiens
tcctgggatgatcccttaccaattcccggttaaaacccccccagctggggtccaagttgtcacgccttgtggtccccagagtgctgagattacaggcgtgagcccaccacgcccggcccagagatccacatctatatttataacaccatttatggatgaaaattaaacaggtgtccgggtgcggttactcatgcctgtggtccgagcacttgtggaggccgaggcaggcggattacttgaggtcaggacttcggagccagcctggccaacatggtgaaatcccatctctgctgaaaatacagaattagccgggtgtggtgtcacgcacctgtagtcccagttacttgaacctgggaggcggaggttgcagtgagccgagattgcaacactgccactccagcctgggtgacagagcaagagaccctgtctcaaaaaaaaaaaaaaaaaaaaattaaatgggtagtgacgttaagagatatatatcagcttctagtaaaagttttttttttttaaacctgctagctacatttacattatgtaaaaataaagggaataatcactga

SEQ ID NO: 599501 - DNA, 227 bp, Homo sapiens
  misc_feature (171)..(171): n is a, c, g, or t
  misc_feature (173)..(173): n is a, c, g, or t
  misc_feature (201)..(201): n is a, c, g, or t
  misc_feature (205)..(205): n is a, c, g, or t
agcgcgcagtgtcgactccccggtctatgccaggcgcatctcagataccagcattgccaccggtgggtagaacactaagtgggctcttggagtccctgattccagaacttgactcttggatgacatttctggacctgctctgggccagagaggagaccacttcccttaagngnacacagaggtctcactatattgcccagnctgntctcgaactcctgggctcaaac

SEQ ID NO: 599502 - DNA, 261 bp, Homo sapiens
  misc_feature (43)..(43): n is a, c, g, or t
  misc_feature (48)..(48): n is a, c, g, or t
ccaggttgataatgctgtcctgggcacacactttgtaaatggnatgtnatggtacagtcgcctctcagtatccatggggcattggttccaggcctcccttaggatgccaaactccatggatactcaaaccccttctataaaatggtgtagtatttgcatatatcctagacacatcctcctgtatgctttaaatcatctctagattacttaaaatacctaatacaatgtaaatgctctgtaaatagttgttatactatattg

SEQ ID NO: 599503 - DNA, 108 bp, Homo sapiens
aaaatctatgtacaaggaacttaaaaatgaagagtcagattgactatcataatacaggaacaaattggcacaaaatgttaaacattgttcccaacactggtgtaccga

SEQ ID NO: 599504 - DNA, 156 bp, Homo sapiens
cgatgtcgtattactgcaacttctactcccagactcaagcaatcctcccacctcaggctccagagtagctgggaccgcaaacgtcaacaccacacccagctaattttttgcatttttggtacagacggggttttgccatgtggcccaggctggtgt

SEQ ID NO: 599505 - DNA, 504 bp, Homo sapiens
atggattgtatgacgattgcgctggagccggacgttcacgatctgttgaccaggcctgtgagtaacaggtgagttgtgactcatcgctgatcgttgaatgtgagttccaattcgcttcgagtctctccacaagatgtatccttgaggtctttccgtcgggtactacaccgaaactacacgtgtaaccactaacagtgtcgagcctcctggacgtgactcggtttacatgaacttgccgcggataatgcctggataacatcggggactacgcattgcccttgaaacacaggtactctgttctgcagaaataagcataattcaattaggtataccatttagttgacacttggacagaagacaacggagaccaaggggtttagggggaaaattcagggagggcaggaacgcggcaatgtgcaatgataaaaaaatgttttggggtatagccaacatgcttgaggaatacaaaggtgagaaaggggataaagcgaatattaacgtgaa

SEQ ID NO: 599506 - DNA, 1219 bp, Homo sapiens
  misc_feature (70)..(70): n is a, c, g, or t
  misc_feature (199)..(199): n is a, c, g, or t
  misc_feature (204)..(204): n is a, c, g, or t
  misc_feature (206)..(207): n is a, c, g, or t
  misc_feature (211)..(211): n is a, c, g, or t
  misc_feature (222)..(222): n is a, c, g, or t
  misc_feature (226)..(227): n is a, c, g, or t
  misc_feature (241)..(241): n is a, c, g, or t
  misc_feature (244)..(244): n is a, c, g, or t
  misc_feature (248)..(248): n is a, c, g, or t
  misc_feature (270)..(270): n is a, c, g, or t
  misc_feature (293)..(293): n is a, c, g, or t
  misc_feature (298)..(298): n is a, c, g, or t
  misc_feature (303)..(303): n is a, c, g, or t
  misc_feature (310)..(310): n is a, c, g, or t
  misc_feature (336)..(336): n is a, c, g, or t
  misc_feature (1066)..(1066): n is a, c, g, or t
  misc_feature (1095)..(1096): n is a, c, g, or t
  misc_feature (1122)..(1122): n is a, c, g, or t
tacagtatctactgtgtacaagtatttgtgttagatgctgtgtgtgtgtgtgtacacttaattatcaggnaaatcctgtgaagtaagaatgatctcaggctgggcacggtctgttcactcattatgactattaagtctttgaacttttttttactttttttgagatggagtcttgctctgtcccccaggctggagtgantggcngnnctcngctcactgcanctcnncctcccaggttcangcnattntcctgcctcagccatcccgagntagctgggattacaggcacgcancaccntgccnggctaantttttgtatttttagtagagatgggntttcaccatgttggccaggatggtctcgatctcctgaccttgtgatccacccgccttggcctcccaaagtgaaaacttttctttaaaatagagatgggatcttgctgtattgcccaggctggtctcagactccttgccttaagcagtcctcccacctcagcctcctaaagtgctgggattacaagcgtgaagcattacatccaagtgaaacttcttgagatggttacataatgtctaaatctgctggtgtagaagttaataaagtgtagaactgaataaatattaaatattagatcaagtttctcatgtttatcttaacgtataacgatttatcttaaagcactgattttcacaaaataacatcagtgtgaaattggaaaagaagccaaatattttatttcatgtatctgggaaatgaggtgctttagtcaactgaatctgcccaaaactaaaaagcattaattaaaaagtacttaactcagaaattataaaaataggagacatcaataaaatacattctacacagaatacgccaaccatacactactcttttttgataataaaaaatgtatttactgagccagttgtggtggctcgcgcctataatcccagcaccttggaaggccaatgagagtggatcagttgaggccaggagtttgagaccagcctggccaacatggtgaaatgccgtctctactaagaatacaaaaatgagccgggcacggtggcncgcacctgtgatcccaggtactccgaagnntgaggcaggataattgtttgaactcnggaggtggaggttgcagtgagccaaaatcatgccactgcactccagcctgggtgacaaagtgagtctctgtcccaaaaaaaaaatgaatcgtattaa

SEQ ID NO: 599507 - DNA, 711 bp, Homo sapiens
  misc_feature (70)..(70): n is a, c, g, or t
  misc_feature (199)..(199): n is a, c, g, or t
  misc_feature (204)..(204): n is a, c, g, or t
  misc_feature (206)..(207): n is a, c, g, or t
  misc_feature (211)..(211): n is a, c, g, or t
  misc_feature (222)..(222): n is a, c, g, or t
  misc_feature (226)..(227): n is a, c, g, or t
  misc_feature (241)..(241): n is a, c, g, or t
  misc_feature (244)..(244): n is a, c, g, or t
  misc_feature (248)..(248): n is a, c, g, or t
  misc_feature (270)..(270): n is a, c, g, or t
  misc_feature (293)..(293): n is a, c, g, or t
  misc_feature (298)..(298): n is a, c, g, or t
  misc_feature (303)..(303): n is a, c, g, or t
  misc_feature (310)..(310): n is a, c, g, or t
  misc_feature (336)..(336): n is a, c, g, or t
tacagtatctactgtgtacaagtatttgtgttagatgctgtgtgtgtgtgtgtacacttaattatcaggnaaatcctgtgaagtaagaatgatctcaggctgggcacggtctgttcactcattatgactattaagtctttgaacttttttttactttttttgagatggagtcttgctctgtcccccaggctggagtgantggcngnnctcngctcactgcanctcnncctcccaggttcangcnattntcctgcctcagccatcccgagntagctgggattacaggcacgcancaccntgccnggctaantttttgtatttttagtagagatgggntttcaccatgttggccaggatggtctcgatctcctgaccttgtgatccacccgccttggcctcccaaagtgaaaacttttctttaaaatagagatgggatcttgctgtattgcccaggctggtctcagactccttgccttaagcagtcctcccacctcagcctcctaaagtgctgggattacaagcgtgaagcattacatccaagtgaaacttcttgagatggttacataatgtctaaatctgctggtgtagaagttaataaagtgtagaactgaataaatattaaatattagatcaagtttctcatgtttatcttaacgtataacgatttatcttaaagcactgattttcactttgggctgggtaccgagctcg

SEQ ID NO: 599508 - DNA, 920 bp, Homo sapiens
  misc_feature (16)..(16): n is a, c, g, or t
  misc_feature (20)..(21): n is a, c, g, or t
  misc_feature (31)..(31): n is a, c, g, or t
  misc_feature (41)..(41): n is a, c, g, or t
  misc_feature (43)..(43): n is a, c, g, or t
  misc_feature (47)..(48): n is a, c, g, or t
  misc_feature (59)..(59): n is a, c, g, or t
  misc_feature (63)..(63): n is a, c, g, or t
  misc_feature (67)..(68): n is a, c, g, or t
  misc_feature (71)..(72): n is a, c, g, or t
  misc_feature (79)..(79): n is a, c, g, or t
  misc_feature (81)..(81): n is a, c, g, or t
  misc_feature (83)..(83): n is a, c, g, or t
  misc_feature (91)..(91): n is a, c, g, or t
  misc_feature (94)..(94): n is a, c, g, or t
  misc_feature (114)..(114): n is a, c, g, or t
  misc_feature (124)..(124): n is a, c, g, or t
  misc_feature (143)..(143): n is a, c, g, or t
  misc_feature (767)..(767): n is a, c, g, or t
  misc_feature (796)..(797): n is a, c, g, or t
  misc_feature (823)..(823): n is a, c, g, or t
ccccccctggtatttntggnncccgatcccnggacctctcntngggnnttgaatggggncccnttcnngtnnatatcangntnctgcactnccncccgggccacagagccaaancccgtttccnaaaaaaaactgccctcccncctgggtgaccgagtgagtctttgtttccaaaaaaaaaaaaaagaaaaaagaaaaaaagtcagttgctgggattacaagcgtgaagcattacatccaagtgaaacttcttgagatggttacataatgtctaaatctgctggtgtagaagttaataaagtgtagaactgaataaatattaaatattagatcaagtttctcatgtttatcttaacgtataacgatttatcttaaagcactgattttcacaaaataacatcagtgtgaaattggaaaagaagccaaatattttatttcatgtatctgggaaatgaggtgctttagtcaactgaatctgcccaaaactaaaaagcattaattaaaaagtacttaactcagaaattataaaaataggagacatcaataaaatacattctacacagaatacgccaaccatacactactcttttttgataataaaaaatgtatttactgagccagttgtggtggctcgcgcctataatcccagcaccttggaaggccaatgagagtggatcagttgaggccaggagtttgagaccagcctggccaacatggtgaaatgccgtctctactaagaatacaaaaatgagccgggcacggtggcncgcacctgtgatcccaggtactccgaagnntgaggcaggataattgtttgaactcnggaggtggaggttgcagtgagccaaaatcatgccactgcactccagcctgggtgacaaagtgagtctctgtcccaaaaaaaaaatgaatcgtattaa

SEQ ID NO: 599509 - DNA, 1120 bp, Homo sapiens
  misc_feature (70)..(70): n is a, c, g, or t
  misc_feature (199)..(199): n is a, c, g, or t
  misc_feature (204)..(204): n is a, c, g, or t
  misc_feature (206)..(207): n is a, c, g, or t
  misc_feature (211)..(211): n is a, c, g, or t
  misc_feature (222)..(222): n is a, c, g, or t
  misc_feature (226)..(227): n is a, c, g, or t
  misc_feature (241)..(241): n is a, c, g, or t
  misc_feature (244)..(244): n is a, c, g, or t
  misc_feature (248)..(248): n is a, c, g, or t
  misc_feature (270)..(270): n is a, c, g, or t
  misc_feature (293)..(293): n is a, c, g, or t
  misc_feature (298)..(298): n is a, c, g, or t
  misc_feature (303)..(303): n is a, c, g, or t
  misc_feature (310)..(310): n is a, c, g, or t
  misc_feature (336)..(336): n is a, c, g, or t
  misc_feature (967)..(967): n is a, c, g, or t
  misc_feature (996)..(997): n is a, c, g, or t
  misc_feature (1023)..(1023): n is a, c, g, or t
tacagtatctactgtgtacaagtatttgtgttagatgctgtgtgtgtgtgtgtacacttaattatcaggnaaatcctgtgaagtaagaatgatctcaggctgggcacggtctgttcactcattatgactattaagtctttgaacttttttttactttttttgagatggagtcttgctctgtcccccaggctggagtgantggcngnnctcngctcactgcanctcnncctcccaggttcangcnattntcctgcctcagccatcccgagntagctgggattacaggcacgcancaccntgccnggctaantttttgtatttttagtagagatgggntttcaccatgttggccaggatggtctcgatctcctgaccttgtgatccacccgccttggcctcccaaagtgtgctgggattacaagcgtgaagcattacatccaagtgaaacttcttgagatggttacataatgtctaaatctgctggtgtagaagttaataaagtgtagaactgaataaatattaaatattagatcaagtttctcatgtttatcttaacgtataacgatttatcttaaagcactgattttcacaaaataacatcagtgtgaaattggaaaagaagccaaatattttatttcatgtatctgggaaatgaggtgctttagtcaactgaatctgcccaaaactaaaaagcattaattaaaaagtacttaactcagaaattataaaaataggagacatcaataaaatacattctacacagaatacgccaaccatacactactcttttttgataataaaaaatgtatttactgagccagttgtggtggctcgcgcctataatcccagcaccttggaaggccaatgagagtggatcagttgaggccaggagtttgagaccagcctggccaacatggtgaaatgccgtctctactaagaatacaaaaatgagccgggcacggtggcncgcacctgtgatcccaggtactccgaagnntgaggcaggataattgtttgaactcnggaggtggaggttgcagtgagccaaaatcatgccactgcactccagcctgggtgacaaagtgagtctctgtcccaaaaaaaaaatgaatcgtattaa

SEQ ID NO: 599510 - DNA, 318 bp, Homo sapiens
  misc_feature (47)..(47): n is a, c, g, or t
  misc_feature (82)..(82): n is a, c, g, or t
  misc_feature (210)..(210): n is a, c, g, or t
  misc_feature (219)..(220): n is a, c, g, or t
  misc_feature (227)..(227): n is a, c, g, or t
  misc_feature (231)..(231): n is a, c, g, or t
gtaaaagttagtggactgccaaagcctgggggttccaggttgcgggngctcaaggcccttctttaaagctgtggccactttntgggcacgatgggggctcccccactgccccatctgcccctcgggttgggggagtatcccaggcctctctgtgggacctgggcccctgacgggccttctcagcccgttttgaggacagacagttccccngaggtaggnnacatttncccncccccccagtggtctgcttggatttcctacagcccccgtgggcatggaccacctttattttatacaaaattaaaaacaagtttttac

SEQ ID NO: 599511 - DNA, 131 bp, Homo sapiens
cttgtgagaagctggcagctatgtgctcacctggatctactataccaggtgtggaggcccccagcagagcagggctgagaggcctggtgagcccctcccgctcaagacagaactgaggtgtggacacttta

SEQ ID NO: 599512 - DNA, 368 bp, Homo sapiens
tgccctggcgcaatatatatagtgtccgcaaggggagagatgatgagggagattataaccaagcatcatatagcaaggactaaccccatataccttctgcattcatgaatgaactagaattaactttgcaaggatagccaaagctaataccccctaatccagacgagctacctaagatcagcttagagagcacatcccgtctatgttgcacaatagctgggaagattctataggtagaggcgacgaaacctaccgagcctggtcatagctggttgctctctaggatatcttagttcaactttaaatttgcccacagaaccctctaaatccccttgtaaatttaactgttagtccaaagaggaacagct

SEQ ID NO: 599513 - DNA, 473 bp, Homo sapiens
  misc_feature (400)..(400): n is a, c, g, or t
gagctcggaccgacgctctctctgttggggcaagtaaacttcgtgccttatttctcgtctgtaacacgggcaattacagtagtacatacttcgttatagtgaggattaaatcggttaagtaccagtaaaacgtctagcagaagtgccaaacacacagcaagcattcacgtgttagctgttgtgtcattatgaccattcggattaacgcactccagttgtcgtgcgagttgcgcttggtaattagttctcaatcaccttgttcttcataccttcttccctggccgttaagctctgtgccatcttttagatgagaggcttgtcctgtctccctcagtgcccctaggcctgtgccctcacatttcacttccacagcatggagggaccacaacagggtcagaancaactacaggatcaagttcaactgcacacaactccctccaccatcctgtctctgtggagcccgtcacccccgt

SEQ ID NO: 599514 - DNA, 355 bp, Homo sapiens
tcccctcggggtctcatattgcatgtggcacttaggtccaggtctccagagggtgaaagctggagtcatgtcaatgtccgagcgagacagcacagccaacctagctagcaacattagtatttagtctgaacaatatatacttataagaattcagacaaagatacacaatctgaaacagcttcatggggtgacactctaacagtagtagcaatgtaaatagaatgaagattacttctctgctatctagatctgaactccttggcttctttcacttagtccaaggccccagctctaggacaagcccagttaaataaaagtgggctcaggagtctaagcagctatcacctaaaatatg

SEQ ID NO: 599515 - DNA, 199 bp, Homo sapiens
cagcttggacggagacattaagctctgttactgttcagagaagaatcgggctgtgctaagggcataattagcattgtgctcagaggagcaacacccattaggagtgagcagacaggcctgagctgagaaaaggacctggggggtagcgatgaatagcgaagtgccgatgaataacgaggtggcgatcactagcgagggt

SEQ ID NO: 599516 - DNA, 382 bp, Homo sapiens
  misc_feature (58)..(58): n is a, c, g, or t
  misc_feature (75)..(76): n is a, c, g, or t
  misc_feature (88)..(88): n is a, c, g, or t
cggccgcccagcttctcggccgccccatctcccttcgctcggtccgggtgcaggctgnaggcaggctcagcccannggatgctgcggncagtgcgcagcccgagaagagcgagcacgtaatgctcgtcgacactgcccttgcggtgatcctctgatgcagtcccagatccgttgatgtgcttcatcacccttggggtcctaggccgttgtgtccttagtttgagtgaacagggtcaaaacacggtcaggcaaacacgctcgataggactgcctcgtcaccaggccatgcatgcccacagtctttatgaacggggtggccggggttgtccactccagtctggatgcactggtccagcgtgtagccgtcgggtgtcaccttgta

SEQ ID NO: 599517 - DNA, 310 bp, Homo sapiens
gcgtcgacgtccatattttcccactgaaatgttttataagtcacagcatggctgagtatggcggctcacgcctgtaatcccagcgctttggaaggctgaggtgggcagatcacctgaggtcaggagtttgagaccagcctggccaacatggtgaaaccctgtctctactaaaaatacaaaagttagctgggtgtggtggcgggcaccagtaaccccagctacttgggtggctaaaataggagaatcacttaaacccgggaggtggaggctacagtgagccaagattgcgccactgcactccaggtcgacg

SEQ ID NO: 599518 - DNA, 173 bp, Homo sapiens
cagtatgaaatcccatcaccatcttccaggagcgagatccctccaaaatcacgtggggcgatgctaggcgctgagtacgtcgtagcagtccactgtgcgtctatcaccaccatggagaaggctaggggcatcattgggccaggaggggagccgaaacagggtctatcatacta

SEQ ID NO: 599519 - DNA, 539 bp, Homo sapiens
ggtcttctggccggcaccactgggggctacacccctcacagtgctccaagatgtcttcccacagctcctctgatggctcccttggccacttctctcattctggcttaacccacaatcccctagggaatgagcacggcatttcccattgttagccatttccaccacaggttctgacaagccagatctgactttgttctccttttgtttggcagctcttttgtgacagggacggcttgttgcgggcacttctcacccctgagaatctgggacctcaacaggtaagagattcatgagcccatgctggcttccagtccaggaggtgagggaaagcttgctgagccagcctctgcctcagttggctgagtggtccaggagaaggctgggaagtggtctagtaggaggcctctgctgtggtgccttctcacatggaatcattcagggttagctggaggagactgctgaagtaatttataataggtaaatagtttcatgtagaatttatgataacaacaacaatttggatttatgatactctttct

SEQ ID NO: 599520 - DNA, 1240 bp, Homo sapiens
gtggggtacaagggggcatatagtgagtggctccaagcacaggacggccaaggtgtggcctttggcctcaggccggctggggcagtgcttacacaccatccagactgaagaccgagtctggtccattgctatcagcccattactcagctcttttgtgacagggacggcttgttgcgggcacttctcacccctgagaatctgggacctcaacagtgggcagctgatgacacacttgggcagtgactttcccccaggggctggggtgctggatgtcatgtatgagtcccctttcacactgctgtcctgtggctatgacacctatgttcgctactgggacctccgcaccagcgtccggaaatgtgtcatggagtgggaggagccccacgacagcaccctgtactgcctgcagacagatggcaaccacctgctggccacaggttcctcctactacggtgttgtacggctgtgggaccggcgtcaaagggcctgcctgcacgccttcccgctgacgtcgactcccctcagcagccctgtgtactgcctgcgtctcaccaccaagcatctctatgctgccctgtcttacaacctccacgtcctggattttcaaaacccatgaccgtcaggccacccctgcctctgggccagggaaaccagctactcagggacttctcttgcctggagggtgcagtgatagctcctcctcactgccccactgtgctcctgggcctgtgaccccagtgctcaggcaccttgcactagaggcttctgactcctgggactttggagcttaccagagatgcagtccctcccaggaacctgttggagaggcaggacctgctgctttagagtgcggctgaacccgggccttgcgtccctgtttggccagagcaaggatctggcctggagaggcccatcctataccccttattagagccatgacagcctacagagtgaggtgaggtgctcccaccttcccagatggttcctttctgccccttcctggaaggaaaggtgaggctgccaatagcctcctggcaccagccagacctcacccttgaccaacctctcggggctgggggttcattcctggggcactgtggcctggttttgctttgaaaccaagaaagagcaaagggaacccagcagttctgagtgagttctgagccagccctacctcaggctggctgttgagacatgctacaattttcatttttgtaaaaataaagcttgattgttcaca

SEQ ID NO: 599521 - DNA, 1220 bp, Homo sapiens
tgaggatccctatggaccaggcagacggcaaggtgtggcctttggcctcaggccggctggggcagtgcttacacaccatccagactgaagaccgagtctggtccattgctatcagcccattactcagctcttttgtgacagggacggcttgttgcgggcacttctcacccctgagaatctgggacctcaacagtgggcagctgatgacacacttgggcagtgactttcccccaggggctggggtgctggatgtcatgtatgagtcccctttcacactgctgtcctgtggctatgacacctatgttcgctactgggacctccgcaccagcgtccggaaatgtgtcatggagtgggaggagccccacgacagcaccctgtactgcctgcagacagatggcaaccacctgctggccacaggttcctcctactacggtgttgtacggctgtgggaccggcgtcaaagggcctgcctgcacgccttcccgctgacgtcgactcccctcagcagccctgtgtactgcctgcgtctcaccaccaagcatctctatgctgccctgtcttacaacctccacgtcctggattttcaaaacccatgaccgtcaggccacccctgcctctgggccagggaaaccagctactcagggacttctcttgcctggagggtgcagtgatagctcctcctcactgccccactgtgctcctgggcctgtgaccccagtgctcaggcaccttgcactagaggcttctgactcctgggactttggagcttaccagagatgcagtccctcccaggaacctgttggagaggcaggacctgctgctttagagtgcggctgaacccgggccttgcgtccctgtttggccagagcaaggatctggcctggagaggcccatcctataccccttattagagccatgacagcctacagagtgaggtgaggtgctcccaccttcccagatggttcctttctgccccttcctggaaggaaaggtgaggctgccaatagcctcctggcaccagccagacctcacccttgaccaacctctcggggctgggggttcattcctggggcactgtggcctggttttgctttgaaaccaagaaagagcaaagggaacccagcagttctgagtgagttctgagccagccctacctcaggctggctgttgagacatgctacaattttcatttttgtaaaaataaagcttgattgttcaca

SEQ ID NO: 599522 - DNA, 1566 bp, Homo sapiens
gtggggtacaagggggcatatagtgagtggctccaagcacaggacggccaaggtgtggcctttggcctcaggccggctggggcagtgcttacacaccatccagactgaagaccgagtctggtccattgctatcagcccattactcagctcttttgtgacagggacggcttgttgcgggcacttctcacccctgagaatctgggacctcaacagtgggcagctgatgacacacttgggcagtgactttcccccaggggctggggtgctggatgtcatgtatgagtcccctttcacactgctgtcctgtggctatgacacctatgttcgctactgggacctccgcaccagcgtccggaaatgtgtcatggagtgggaggagccccacgacagcaccctgtactgcctgcagacagatggcaaccacctgctggccacaggttcctcctactacggtgttgtacggctgtgggaccggcgtcaaagggcctgcctgcacgccttcccgctgacgtcgactcccctcagcagccctgtgtactgcctgcgtctcaccaccaagcatctctatgctgccctgtcttacaacctccacgtcctggattttcaaaacccatgaccgtcaggccacccctgcctctgggccagggaaaccagctactcagggacttctcttgcctggagggtgcagtgatagctcctcctcactgccccactgtgctcctgggcctgtgaccccagtgctcaggcaccttgcactagaggcttctgactcctgggactttggagcttaccagagatgcagtccctcccaggaacctgttggagaggcaggacctgctgctttagagtgcggctgaacccgggccttgcgtccctgtttggccagagcaaggatctggcctggagaggcccatcctataccccttattagagccatgacagcctacagagtgaggtgaggtgctcccaccttcccagatggttcctttctgccccttcctggaaggaaaggtgaggctgccaatagcctcctggcaccagccagacctcacccttgaccaacctctcggggctgggggttcattcctggggcactgtggcctggttttgctttgaaaccaagaaagagcaaagggaacccagcagttctgagtgagttctgagccagccctacctcaggctggctgttgagacatgctacaattttcatttttgtaaaaataaagcttgattgttcacaaaaaaaaaaaaaaaaaaaaaaaaaaaaaaaaaaaaaaaaaaaaaaaaaaaaaaaaaaaaaaaaaaaaaaaaaaaaataaacaaaagcaagacacaaagaatgacgaggagaagaacaagaagagctgaaaaaaaaggtgagtgacgataataataatacacatgaatagaatacgtcgcacactattgacagtaaggaaagagaccgcgacgaaaacaatagaaatatagggtacaatataaagcgagtactggaggtaaaccatgacacagagataaatctcttataagaaagataagtatacttaggtcaaataaaatgtaact

SEQ ID NO: 599523 - DNA, 97 bp, Homo sapiens
ggatttgctggtgcagtacaactaggcttaatagggacatgagttttcagattcacaaccaattaagttaaaattagggaaatggagaggagaaaaa

SEQ ID NO: 599524 - DNA, 991 bp, Homo sapiens
cgttggtcggtggtcctgcactgtttctgtgtacttacgggtcctgacgctctcaagttcgtctttcaagaatgctgttgtgccagaagctggacggtagcagagtcggcgagctcgtggattgcaggagctcgattacgtctcggctcgcctcttcattacatcactgcaagattgctacatgaatccagagcctgtaacggcgtgatgctaccacatgccactcgaagagttgctcgcgtaatgagagcgaagtcggcatgcgcacaaatctgagtaaatgctctggactcgtacgcacgacccgtaggggccccgtaacctttgactaggtggctagcccgcgaatggcacgtagagccttacgttcatatctctttgaaaaggggccacgcgtgcgtggttatgacagctccgaagactcgtacgttgctcgggtaatgcgcctgatttcctcgaatctcttgatatgtggactagtgggttatgtgctctccaggacaaggggggcatgtaaaaggcgcatgctggcccctatccactacgcttgacatagagtgtcatgttccccttcttgttgtgaatgacctcttgcaggtagactaaagttccgtggagatttgaagggtcaatggagagaggcactccctctacgtgggcaagaccagggctctgaaagcccgcatctgaacaccttttggtaaactgcaattctgaggtaaatcatgtcccggtgtactcctgagtataatcctgtggatgcctggggagaagttgcttgtatgacgacgacggcttgctcaagtgtgtgactacatcgaattgtgcctccagaacagctaggtgggtacctagatagactcccggttgccgcttatcctagaccagaagttcggtagatgcctttgtaagcattatggctgtcagggagctggtatatctgccctgtgacccgacacattgcttcttgccaatagggaacaacgggggc

SEQ ID NO: 599525 - DNA, 1182 bp, Homo sapiens
agcgggagggtggggggagcaggctggagccccacaggctgggggctgtgatcacggaggcgtgctagccccgggctgggggccagctagaccaggaacaccagggacagctcgctaagctgctttctcagcgatttttctccccagacacaaagtgggcagctgatgacacacttgggcagtgactttcccccaggggctggggtgctggatgtcatgtatgagtcccctttcacactgctgtcctgtggctatgacacctatgttcgctactgggacctccgcaccagcgtccggaaatgtgtcatggagtgggaggagccccacgacagcaccctgtactgcctgcagacagatggcaaccacctgctggccacaggttcctcctactacggtgttgtacggctgtgggaccggcgtcaaagggcctgcctgcacgccttcccgctgacgtcgactcccctcagcagccctgtgtactgcctgcgtctcaccaccaagcatctctatgctgccctgtcttacaacctccacgtcctggattttcaaaacccatgaccgtcaggccacccctgcctctgggccagggaaaccagctactcagggacttctcttgcctggagggtgcagtgatagctcctcctcactgccccactgtgctcctgggcctgtgaccccagtgctcaggcaccttgcactagaggcttctgactcctgggactttggagcttaccagagatgcagtccctcccaggaacctgttggagaggcaggacctgctgctttagagtgcggctgaacccgggccttgcgtccctgtttggccagagcaaggatctggcctggagaggcccatcctataccccttattagagccatgacagcctacagagtgaggtgaggtgctcccaccttcccagatggttcctttctgccccttcctggaaggaaaggtgaggctgccaatagcctcctggcaccagccagacctcacccttgaccaacctctcggggctgggggttcattcctggggcactgtggcctggttttgctttgaaaccaagaaagagcaaagggaacccagcagttctgagtgagttctgagccagccctacctcaggctggctgttgagacatgctacaattttcatttttgtaaaaataaagcttgattgttcaca

SEQ ID NO: 599526 - DNA, 910 bp, Homo sapiens
gctgcatttgggagagggtgaggtagccaaggacgtgcctagaaagggttggaagaagcctacaatggcacacgtccctcttcccctgggcctggggatcctgggttagggcacacccatgtcccacttggaaagctcttaccacttcctgtgccctcccttccaggccttcccgctgacgtcgactcccctcagcagccctgtgtactgcctgcgtctcaccaccaagcatctctatgctgccctgtcttacaacctccacgtcctggattttcaaaacccatgaccgtcaggccacccctgcctctgggccagggaaaccagctactcagggacttctcttgcctggagggtgcagtgatagctcctcctcactgccccactgtgctcctgggcctgtgaccccagtgctcaggcaccttgcactagaggcttctgactcctgggactttggagcttaccagagatgcagtccctcccaggaacctgttggagaggcaggacctgctgctttagagtgcggctgaacccgggccttgcgtccctgtttggccagagcaaggatctggcctggagaggcccatcctataccccttattagagccatgacagcctacagagtgaggtgaggtgctcccaccttcccagatggttcctttctgccccttcctggaaggaaaggtgaggctgccaatagcctcctggcaccagccagacctcacccttgaccaacctctcggggctgggggttcattcctggggcactgtggcctggttttgctttgaaaccaagaaagagcaaagggaacccagcagttctgagtgagttctgagccagccctacctcaggctggctgttgagacatgctacaattttcatttttgtaaaaataaagcttgattgttcaca

SEQ ID NO: 599527 - DNA, 1350 bp, Homo sapiens
gtggggtacaagggggcatatagtgagtggctccaagcacaggacggccaaggtgtggcctttggcctcaggccggctggggcagtgcttacacaccatccagactgaagaccgagtctggtccattgctatcagcccattactcagctcttttgtgacagggacggcttgttgcgggcacttctcacccctgagaatctgggacctcaacagtgggcagctgatgacacacttgggcagtgactttcccccaggggctggggtgctggatgtcatgtatgagtcccctttcacactgctgtcctgtggctatgacacctatgttcgctactgggacctccgcaccagcgtccggaaatgtgtcatggagtgggaggagccccacgacagcaccctgtactgcctgcagacagatggcaaccacctgctggccacaggttcctcctactacggtgttgtacggctgtgggaccggcgtcaaagggcctgcctgcacgccttcccgctgacgtcgactcccctcagcagccctgtgtactgcctgcgtctcaccaccaagcatctctatgctgccctgtcttacaacctccacgtcctggattttcaaaacccatgaccgtcaggccacccctgcctctgggccagggaaaccagctactcagggacttctcttgcctggagggtgcagtgatagctcctcctcactgccccactgtgctcctgggcctgtgaccccagtgctcaggcaccttgcactagaggcttctgactcctgggactttggagcttaccagagatgcagtccctcccaggaacctgttggagaggcaggacctgctgctttagagtgcggctgaacccgggccttgcgtccctgtttggccagagcaaggatctggcctggagaggcccatcctataccccttattagagccatgacagcctacagagtgaggtgaggtgctcccaccttcccagatggttcctttctgccccttcctggaaggaaaggtgaggctgccaatagcctcctggcaccagccagacctcacccttgaccaacctctcggggctgggggttcattcctggggcactgtggcctggttttgctttgaaaccaagaaagagcaaagggaacccagcagttctgagtgagttctgagccagccctacctcaggctggctgttgagacatgctacaattttcatttttgtaaaaataaagcttgattgttcacagatctggttcctcactggctgagtagtcctagcaggctccaggagaagggaacagcagacccaagctcagggttgtatggtgctgctgaaaccgacaagaccagcctcat

SEQ ID NO: 599528 - DNA, 184 bp, Homo sapiens
  misc_feature (3)..(3): n is a, c, g, or t
  misc_feature (61)..(61): n is a, c, g, or t
ggnccttttctaggtgacacaagtaaggtaatagctagaatggaaaaaagaggggcccccnaaaatgtaaccttaaaatttggtgcttgtgccgctattgatagtaagcagcatggaataggatgcggttctctaaattggaaaaaaaaagtgacacagtaaaaaaaaaataagtgtatctgtc

SEQ ID NO: 599529 - DNA, 1132 bp, Homo sapiens
gtggggtacaagggggcatatagtgagtggctccaagcacaggacggccaaggtgtggcctttggcctcaggccggctggggcagtgcttacacaccatccagactgaagaccgagtctggtccattgctatcagcccattactcagctcttttgtgacagggacggcttgttgcgggcacttctcacccctgagaatctgggacctcaacagtgggcagctgatgacacacttgggcagtgactttcccccaggggctggggtgctggatgtcatgtatgagtcccctttcacactgctgtcctgtggctatgacacctatgttcgctactgggacctccgcaccagcgtccggaaatgtgtcatggagtgggaggagccccacgacagcaccctgtactgcctgcagacagatggcaaccacctgctggccacaggttcctcctactacggtgttgtacggctgtgggaccggcgtcaaagggcctgcctgcacgccttcccgctgacgtcgactcccctcagcagccctgtgtactgcctgcgtctcaccaccaagcatctctatgctgccctgtcttacaacctccacgtcctggattttcaaaacccatgaccgtcaggccacccctgcctctgggccagggaaaccagctactcagggacttctcttgcctggagggtgcagtgatagctcctcctcactgccccactgtgctcctgggcctgtgaccccagtgctcaggcaccttgcactagaggcttctgactcctgggactttggagcttaccagagatgcagtccctcccaggaacctgttggagaggcaggacctgctgctttagagtgcggctgaacccgggccttgcgtccctgtttggccagagcaaggatctggcctggagaggcccatcctataccccttattagagccagacctcacccttgaccaacctctcggggctgggggttcattcctggggcactgtggcctggttttgctttgaaaccaagaaagagcaaagggaacccagcagttctgagtgagttctgagccagccctacctcaggctggctgttgagacatgctacaattttcatttttgtaaaaataaagcttgattgttcaca

SEQ ID NO: 599530 - DNA, 111 bp, Homo sapiens
agactgcttagactcctcgagttgctagtccagttctttgaggacagtgaggatagtcagataggcggaggaagaagaggaagacagtgaggaatgcagcgaggaagagga

SEQ ID NO: 599531 - DNA, 133 bp, Homo sapiens
ctcatgtgattcctctcagtcagcctcccgtgtagctggggctccagtgacacacccccactggtctggctaattttgggtatttttgggtagagtcagtgtttcaccacatggcacagtctgggtctcaaat

SEQ ID NO: 599532 - DNA, 420 bp, Homo sapiens
ccgcggcataaggcacagtcaatgcattatttgtgggcgacagcttcagtcactgcatagcgaccatcgatatttgatcggtatcagaatgcataccagcaggctcgttggacaatcactgcactgttgttgttgcatgaatcgtggtcagcgtcataggtggtaaagggcctcccactgtggaggctcagggcatcccatagcaggcaagggatggaaagcactttggtgcccagcaccatgcatggcacatgggtagatataatgccatggcagtctcatagcaattaagagttgtcttcaatcaggcccaacgagcaacgccaaggggacaggttgtctgcgcagggttattcggctggttgaaccagcgacaggacttgagctcgggcctgtcaggctcctaagctcccagcttat

SEQ ID NO: 599533 - DNA, 915 bp, Homo sapiens
gtggggtacaagggggcatatagtgagtggctccaagcacaggacggccaaggtgtggcctttggcctcaggccggctggggcagtgcttacacaccatccagactgaagaccgagtctggtccattgctatcagcccattactcagctcttttgtgacagggacggcttgttgcgggcacttctcacccctgagaatctgggacctcaacagtgggcagctgatgacacacttgggcagtgactttcccccaggggctggggtgctggatgtcatgtatgagtcccctttcacactgctgtcctgtggctatgacacctatgttcgctactgggacctccgcaccagcgtccggaaatgtgtcatggagtgggaggagccccacgacagcaccctgtactgcctgcagacagatggcaaccacctgctggccacaggttcctcctactacggtgttgtacggctgtgggaccggcgtcaaagggcctgcctgcacgccttcccgctgacgtcgactcccctcagcagccctgtgtactgcttgcgtccctgtttggccagagcaaggatctggcctggagaggcccatcctataccccttattagagccatgacagcctacagagtgaggtgaggtgctcccaccttcccagatggttcctttctgccccttcctggaaggaaaggtgaggctgccaatagcctcctggcaccagccagacctcacccttgaccaacctctcggggctgggggttcattcctggggcactgtggcctggttttgctttgaaaccaagaaagagcaaagggaacccagcagttctgagtgagttctgagccagccctacctcaggctggctgttgagacatgctacaattttcatttttgtaaaaataaagcttgattgttcaca

SEQ ID NO: 599534 - DNA, 179 bp, Homo sapiens
cttcagaggcaaattcatagcgttttacctttggcagtcctgaaggaagagatgtcacagataaccgctgggtggttctccgggcccgaaggagcgtgtttcccggggttatctcctcggtctcggcctctacaacatcaagtggtatagtcgcttcaagaaagggggaaaaaggaatc

SEQ ID NO: 599535 - DNA, 137 bp, Homo sapiens
ctccccttaaatgaccgagcgcaaaagaaaactgattcagcttccaagtgtgactcttgatgctgtactgcagggagacctgagaacgtggcaggtccataggagaggtggggcagagagatcctagtaaagaggat

SEQ ID NO: 599536 - DNA, 112 bp, Homo sapiens
gagtcggcccgtgtgtctccccagtcatctttcttgttccagagaggtgggctggatgtctccatctctgtctcaactttatgtgcactgagccacaacttctaaggttaag

SEQ ID NO: 599537 - DNA, 120 bp, Homo sapiens
tcttctcctgacatcagcccccatcccattgtctcctagccaagacagagtgccataggccaggccgggcagagaaccaacctcccttccagcctgggtgacagagcgagactccatctc

SEQ ID NO: 599538 - DNA, 139 bp, Homo sapiens
gggggcttttttaaaccaaaaaaaaaagggcaggggccccaaccccttttggggttctttttttgggggggacccggttttgggtccaaaaaaaaggcctattttcccataaatttttgggattttgccgggattttga

SEQ ID NO: 599539 - DNA, 384 bp, Homo sapiens
  misc_feature (79)..(79): n is a, c, g, or t
  misc_feature (109)..(109): n is a, c, g, or t
aaaaaaaaaaaaggcgggaggtggaaatccaatggccagggtggtgttggaccaggtaacccttcagaacccttctaantggtgtcctagggccctgggtattttgtgntatgagcattccccgcccacactgaccgggcctcaattttttcttcccttccgtggcccccagaagaaaaaggacgtggaatgggacgtggaaccatctttcaaaagcgaagataattttttaagttgaacagaactttgcccttttttctttcaggttatttgagttcattggagggggggcttgggcaaaaatgctaggtatcttttcccctctttttctttagatcaggggaaatgtttaagctaaataaatttggggggttttttgttcca

SEQ ID NO: 599540 - DNA, 1062 bp, Homo sapiens
gtcgtggtcaatccctgaacgcaccgccgtgatgcccagaggaagacagggtcgacctggaagtcctagacctacttccttaacgattcagtccaacatagttggatgagttatccgaacattgtttcattgtgtggagcagacaaatgtgtggctccaagtcatgatgcagcagagtccgtcatggtcccttcgcgggaaggctgtggtgctgatgggcaagaacatccatgatgcgcaaggccatccgtagggcaccttggtaataacaacccatgtctctggagtaaactgctgcctctatactccgggaggaagtgtgggcgtttagtgttcacgcaaggagtgatcctcatctgagcatcagggtacatgttgctggaccaataagagtgccaagcgttgctgcccgtgctgtgtgtcctattgtccccatgatgaagtcactgtgccatgactccagtaacactggtcatcggggcccgaagaaagacctctctttttcctagtgctttaggtatcaccactaaaatctccaggggacacctattgaaatcctgggttgttcgctatgttgccagtgtctgtctgcagattggctacccaactgttgcatcagtaccccattcttatcatcgacggggtacaaacgaggtcctgggcttgtctgtggagacggataacacttcccattgcttgaacacggtcaaggcttctttggtgatcatctggctttgtgtgtgtgctctgttggttgtgccacacagttggtcctgttgtggtggaaccccagtaaggtgaagccagggaaatcgaggacattgccaggttcggatagagtccttagatattacaaaaagacaattagacgtgttttgagaacaggaaaaaagggacttttttgaaaaaaaaaaggggcgactaagatatccaagggacaaaaggacaaatattatagggcacatgaagtaataaagaggagaaaacaagaaaaatgatgtaagacaatagtatagacaaaagaaaactgtttatgttaatatataaagaaagaagagttat

SEQ ID NO: 599541 - DNA, 253 bp, Homo sapiens
ccccctttgggggcccggggtttttttttttgaaattttcgaaaagggggggccgggggggttttttaaaaagggggccccccgggggcccccggccaaaactttgggggccccccccccccggggggggggggaaagggggggggcccccccccccccccccccccccctttttgggccctttggggtttaaaaaaaaaaggtttttttccccgggccccccggtttttttttaaaaacccccggtttttga

SEQ ID NO: 599542 - DNA, 127 bp, Homo sapiens
tccaaacagctgcagtgctacagcatcagtcatgaatttcccagtcacgaaatcttcccagtaggcagaacttagggcagcacacccagttacgcactttgctgtgaaggagaaatggccagatgtg

SEQ ID NO: 599543 - DNA, 100 bp, Homo sapiens
cctactgatacaatcgagctctgtaccccaggtagacctaacctgactagaaaagctactaaaacaatttcacagcaccaaatctccacctccatcatca

SEQ ID NO: 599544 - DNA, 410 bp, Homo sapiens
gtgaacatgcaattcttcatcagttatgagtatcatgggtgtcttctcaagattgtgagactcatcttctcacttcaagtgtagcttacatataagcctttagttttaacagaattgacttaaccatcttgtcctttatgattactactttatgtctcaagagattctttcctgccctaaggcttttttcatccaaacactgacaatttttgcttttcgtattaaagcccttaacatatttggaacttatcaccaggtaaggtgagagaaagtaaaatttctttttttcccacatgaatagccattgttctgggattacttagggagtggtccttcctgtccccactgacttgccatgtcaccaggtcattttgcaaaggtcaacatatgcacgggtgagtttctaggcc

SEQ ID NO: 599545 - DNA, 308 bp, Homo sapiens
gtttaagacagtcattgtaaaaggggggctgaatttcccaacccacccccaaactaaacactaagtttaattttcagctcctcggtgggacatataagtgcatctctggtgggacataggcaaaataactgggcaaacttagttctggtgatttctggatggttgggaagtctatggctgggaagaaattccatcaggcatattcaggcttataataagcgggggatttttggttggttttggcaaatgctggcccctacttttcaacaattttctatgttagtggtgaagaaccagtgtggagagag

SEQ ID NO: 599546 - DNA, 214 bp, Homo sapiens
gaggtgcctccctggaccggggaagtcaacccagcccagagagatggaggtgcctcgggcggggcccttgggactcctctgatcgatctgcctcctaaaaggcaagctgagggcgcttctaactgcccctcggagccttcgaagatcagcttgttcggggaacgatagacaagattaggccaagcgacttgctataacagttccatctaaggat

SEQ ID NO: 599547 - DNA, 552 bp, Homo sapiens
  misc_feature (12)..(12): n is a, c, g, or t
aagttttgtagnagcaagggaaagaatttctcccgctttggggaaaaaagggaaagaggcccaatatttttaaggctgggggagccccccatttttatatggggtcccgcaaaccccaggggggtggaaggctttccagacaaccccccctggggggcttttttgttttttaaaaaaaaaaaaaccattggggggggggtctccaaaacacgggcaaaaaagggtgggggggggggcaggggccccaattttcccccaaaaacccaaaggggaaaaaaaaaatttccccaaaaccccccccccccccttttaacagggggggaaaaaagggttccaaaacgttttttttcaatgggccctttaagtttaagggaaaaaaggggggtaataaaaccaaggcttgggaaaccccccaaaaaaaaagaaaaaattttttgggcccccttgggttttttttttgggggggggcggttttaagaaataggtttttaaaaaagggcctttttaagggaaaaaccttgcccaaaaatttgtcccaaaattttgaacccc

SEQ ID NO: 599548 - DNA, 631 bp, Homo sapiens
  misc_feature (405)..(405): n is a, c, g, or t
  misc_feature (444)..(444): n is a, c, g, or t
  misc_feature (472)..(472): n is a, c, g, or t
  misc_feature (549)..(549): n is a, c, g, or t
  misc_feature (595)..(595): n is a, c, g, or t
  misc_feature (612)..(612): n is a, c, g, or t
tttttttgtggtgagaacacttgaaatctactctcagcaattttaaagtatataatatgttgttactaactgtagtcacatcactatgatgtgcaatcgatctcttgaacttactcctatctacctgacattttgcatgctttacatctccccagtctcccaacccccagcttctgagaaccaccattctactttctgcttctatgagtccaattttgtttgctttagaggtggtacctcactctgtcacccaggctagagtgcagtggcacaatcatggctccctgcaatctctaactcctggggctcaagtgatcctcccgcctcagtctcccaagtagctgagaccatagggcgtccgccaccacggcccccagctaaagttttaaattttttgtagagatnaaggtcttattcatgttgcccagggtgggcctcaacctncaaagtggtggggattgcagttgtgagncactgcactaaggctgagtcgaattttttgggattcacaattaagtgaggtcatgcagtatttgtctttgtatggtngggttatttcaatttaggtaatattttccggggttatctgtggttntttaaatgacaaggttnatttgtgttgttagggttt

SEQ ID NO: 599549 - DNA, 840 bp, Homo sapiens
gcgctggtgttgcgtgcgctggcgacagtcggggttgcgagctggccctggggcctggggcgtgccagtgacctgctgcagggactgagaccctgtgtgtgttggctgtcctgtgcccgtcgcacgtggagtgtgccgtccatgtggcatcctgctgtggtgagactgaagaatgtttgcccagactgtgccatgcattttgccaacttgcgcaggtgcaatcctgccgcatgtgcccagtgagatcactgtaggactgcgccagtgatgcaggactggagtgcccaccggtgccttgtcatgcgttgcatggcccctgatcccagtgtactgagcatagcccatgtgctctgcaggccgtttccttccggacgatgtggatggccgatggtcgatcctgaggagcttgaacaatgacattggcatgagccagcgcagttttgagtggcgttctgagtgtgcaagctggcacccgaggcaggcaggcagatgtgtgtcattgtacttgtatacccttgggactacccagccagcccagagcgcagggtactgcgatgtgaccatgcatctccgtggaactccacttggctctgtgtgtggccttgtgccgtacgtgccggctggaccatgggtgactggaggcacgcttaaggtccgttcgtgtgtgcgctggaagcctggacctggcgagaccgtgcgtccccaggaaccgtcggccgtggtggagggtccccaatgctggtcctgtggtcttggcctttccatcgccaagcagggccatcccaggttcgcaggaggggctgtaccattggtgacggttgtagggagtagagaccttga

SEQ ID NO: 599550 - DNA, 418 bp, Homo sapiens
  misc_feature (30)..(30): n is a, c, g, or t
  misc_feature (42)..(42): n is a, c, g, or t
  misc_feature (64)..(64): n is a, c, g, or t
aaaacttcacctcactctccagggcaggantggtgggggaancctgaggcagccacagggaaangagaggccctccagaagcccactggggcttggcaaaagccacagcccttagggagtcaagcttggtggctagggcctgggaggtggctcctgcctgttatcccagcacttcaggaggttgaggctggcagattgcttgggcccaggagttcaagactagcttgagcaacatggcaagactctgtctctacagaaaaaatacaaaaattagtcaggaatggtggcacacctgtagtcccagctactccagaggttgaggtgggaggatcgcttgagcctgggaggttgaggctgcagtgagccgagatcgcaccacttcactcctgccttggtgacagagtgagaccctgtctca

SEQ ID NO: 599551 - DNA, 1093 bp, Homo sapiens
  misc_feature (268)..(268): n is a, c, g, or t
aatagtatatcgtgtgtctgatagttctttgtacgaaggtttgtctgatgtcatcctatggtaggtagtaccaatgtgaaaatgataaccgtgtgtcgtcctttttacacatacctccactcttgttggccggagtttttatcactatttttccacaaaccggggttctcccacaagggggtaggttccttggcgttcccgcgctttaaacaatgggcgcccggtgccacatggggaatgctgtaaattctcctgaccccagcttatnaagacgcctgtgaagagagttgtaaagctttctgtctactaccccttgtctccaggccttgtccgccagttcttggtgtgaaaactccagctgatggttaccacccggacatcaggttaattgggcaaaccctgaagtcacatgtgtgtaactgacctctggcctggcctgcacagagagagccctataagtcacaggtctgtggtggccccgaaattgggggggcctgctagttcacggaggatgtctgtgcaacacactcgtggtgtgatggaattctcgcccacgaaaggcttcctcgaggttcccacggttggcacctttctccctgcaaggcccttgtaagaagaattctgctggtccttgcacggcacaaagctaacagccacgaaatgtccctttgagaaactcctatgctcaatctgtcacccgaggcttcaatccgaaatgtgccaccggagagcttgctctccacacttcctccgtgcacagtggccctgccacacacgccctccctcggcaacacactttgagaccccttgtaaggagattggaaattagcacggagactcgggtaatttaaagcacaccacgttctggggtcgcctgggcccctgctgagccccctcctccagaggcagccagcccagcccggggaacaaagacggaacttcctctcccttcggagactcacagcctttgcaagagagtcaaagctccacacttgaaagctcactcagtaatatcccttcaaagtgttttatattgttttgactgcccttttttgtagaaataaaaatctcgcccttagaatttatcgtccca

SEQ ID NO: 599552 - DNA, 628 bp, Homo sapiens
agctcccacttacaagtgagaacatgtggtattatgttcctgtgttagtctgcttaggatgatggcctccagctccatccatgttgctccaaaggacatggtctagttcttttttatggttgtgtggtattccatggtgtatatgtaccacgttttctttatccagtctaccactgatgggcatttaggttgatgccatgactttgcgattgtgaatagtgctgtgatgaacatatgtgtacatgtgtctttatggtagaatgatttatattactttgggtatatactcagtaagggggtcctgggtcaaatgatacttctgtttttcacttctttgagaaattgccatactgctttccacaatggctaaactaatttacattcccaccagcagtatataagtgttcccttttctctgcagcctcaccagcatctattattcattatttgactatatgttaatttctctgttttttttccgagcacagagtctctctctgttgcccaggctggcgtgatcgtgatcttgatctcactgcaacgtcttgcctcccggggttcaaccccgactttatttgcggtctcagcctctcgagtagtctgccctcccgggggtgtgcccccacgg

SEQ ID NO: 599553 - DNA, 934 bp, Homo sapiens
  misc_feature (4)..(4): n is a, c, g, or t
  misc_feature (30)..(30): n is a, c, g, or t
  misc_feature (35)..(35): n is a, c, g, or t
  misc_feature (145)..(145): n is a, c, g, or t
  misc_feature (165)..(165): n is a, c, g, or t
  misc_feature (170)..(171): n is a, c, g, or t
  misc_feature (173)..(175): n is a, c, g, or t
  misc_feature (177)..(177): n is a, c, g, or t
  misc_feature (186)..(186): n is a, c, g, or t
  misc_feature (192)..(192): n is a, c, g, or t
  misc_feature (212)..(212): n is a, c, g, or t
  misc_feature (214)..(214): n is a, c, g, or t
  misc_feature (216)..(217): n is a, c, g, or t
  misc_feature (228)..(228): n is a, c, g, or t
  misc_feature (250)..(250): n is a, c, g, or t
  misc_feature (258)..(258): n is a, c, g, or t
  misc_feature (269)..(269): n is a, c, g, or t
  misc_feature (281)..(283): n is a, c, g, or t
  misc_feature (290)..(291): n is a, c, g, or t
  misc_feature (293)..(293): n is a, c, g, or t
  misc_feature (297)..(298): n is a, c, g, or t
  misc_feature (305)..(306): n is a, c, g, or t
  misc_feature (410)..(410): n is a, c, g, or t
  misc_feature (420)..(420): n is a, c, g, or t
  misc_feature (423)..(423): n is a, c, g, or t
  misc_feature (434)..(434): n is a, c, g, or t
  misc_feature (454)..(454): n is a, c, g, or t
  misc_feature (470)..(470): n is a, c, g, or t
aacngagctacacaatgcattgcgtctatnatgtnaaaacgtgcattagtacacaaatacaaaaaccatgaaacaagccaccattcttcaacaatttgagccaagataaaatgcctaagtaacaacatggatgacttgcaaaggntgggctctttactttaagcnccatnnannnanacaaaagcncaaatngatgagtgtgttcagttatntncnntgaattgatcntttggcactaggaatctgagcnttttgtcntatagcattancatgtattattnnngtgcgtnntntcanngaatagnnccaccagcattcaaaagcagctttgtcaactaggcaataaaacactctacagcatatccctctgttgtccatcattgagaacactggcagcgattttgagatgnaaaagaaaanganagaagagaagnggagctattacccccttttnttttttctctgtttanaatcaaacagaaaacaaacatcaattgttatacactaacatcttcaaagcacatcgtttgtacaagagatagactaagaacaaaaatgtgtttacggagatccaaacataagtgagtgagagtgcctctcacacagctttccgatggtactcaggaggagccacttcataatcgctggcactgaacaaagttgcagaattctttgccaggtactttaggaaatcgtgaagataattgagtaataaagcaaggctcttctcatccagaggtgtataagccaacattgctccaattcgtacaaataatctcaggagatgtggcgctccatacacctgggacatgggtgcatcgggatgatctgcaagaatttcagcatactgtggtctctcaaatttatagagtagctgggtaccaacattacgttgaagtattcttttatccctgccacaacttcattaaccgca

SEQ ID NO: 599554 - DNA, 1419 bp, Homo sapiens
  misc_feature (691)..(691): n is a, c, g, or t
  misc_feature (1046)..(1046): n is a, c, g, or t
  misc_feature (1092)..(1092): n is a, c, g, or t
  misc_feature (1131)..(1131): n is a, c, g, or t
  misc_feature (1230)..(1230): n is a, c, g, or t
gtgctcatcccattgacgttgttctttctcgccgcgggttttttatcttgtcgttcaatgatggccccccgcttgatctctctttgaggttaagctctttctttgtccggggggacaacatgttgggggggttctacaaaattgtccgaccagaaatgggttgtgctcttccaccagagaagtgtttttgctcttctttggcaccaagcactctttggtcgcgggtgtacccacccccccagatttggtgcccccctccccccacttgggggtaggcccgactgtggggggttcttccaacagtgtgctttacacgggtgtggtaattttatttcccgcttggtggacccccacttccccaggtcccccaaaatatttatggcccccccccgggctcttaattgcccccccccctttatattttgggaaatttgctccaacacccaccagggcgttacaaccaacattttgccacaaagaccacaacagtgttttgcgcttgaagagccttggatatagggatacaaatggagatttttggatgtctcgccccccgcttgttttgggggtattaaatcaagcccctgtgagaatagatatggcgccccccctaagaaaattttctcttggagaaatctctctggggtggagattgctctcgcccccaccttgtgtttggaaatatatgggntttcccccttgggcccaaagcccccaaccatgggtgtgtgttttgagagagggctttctctcacgagccttatattcccaccccctcttgggggttccccgcttgtgtgcgtgtgttctgcgggagaaagtatgagggaaccacacacacacgcgttttgcccgcgcgtgtggggtgtgtgaccactcccaaaagcccacgcttgggaacccccaagaaaaaggccttgtcttggagagcctggtgccacaaaaggctccccccaccaagtctctgtcgccctcagaaataagcctgtctacagagaaggcgctataatatgaaaatatatatatatctctccctataatatccnctttcgccaccccgccacccctctcttagaatccacagctggtgtnggagaagagaccggtgtctccacagagacctcgttttgnttgtccacacattgggccacatcttataagtgttatagtatagtataaaagagactgggttataatagagatgataccacacatgcactcgtgtaaacncctctcacgaaaggaaaaggaggaaatgttttgtggagccacctcttggttttctctttttgcgctgtggcacgcttttataagttaattatgtttttaaaaatcacgtaactttttataatggaaaccaaacttgagcccaaaatttgtcccagaattttgagaccccctttaaaaagttaaatgaga

SEQ ID NO: 599555 - DNA, 660 bp, Homo sapiens
  misc_feature (6)..(6): n is a, c, g, or t
  misc_feature (197)..(197): n is a, c, g, or t
  misc_feature (252)..(252): n is a, c, g, or t
  misc_feature (278)..(278): n is a, c, g, or t
  misc_feature (326)..(326): n is a, c, g, or t
  misc_feature (343)..(343): n is a, c, g, or t
  misc_feature (358)..(358): n is a, c, g, or t
  misc_feature (366)..(366): n is a, c, g, or t
  misc_feature (372)..(373): n is a, c, g, or t
  misc_feature (378)..(378): n is a, c, g, or t
  misc_feature (387)..(389): n is a, c, g, or t
  misc_feature (407)..(407): n is a, c, g, or t
  misc_feature (415)..(415): n is a, c, g, or t
  misc_feature (421)..(425): n is a, c, g, or t
  misc_feature (441)..(442): n is a, c, g, or t
  misc_feature (444)..(444): n is a, c, g, or t
  misc_feature (448)..(449): n is a, c, g, or t
  misc_feature (458)..(458): n is a, c, g, or t
  misc_feature (473)..(473): n is a, c, g, or t
  misc_feature (478)..(478): n is a, c, g, or t
  misc_feature (485)..(485): n is a, c, g, or t
  misc_feature (500)..(500): n is a, c, g, or t
  misc_feature (526)..(527): n is a, c, g, or t
  misc_feature (549)..(549): n is a, c, g, or t
  misc_feature (574)..(574): n is a, c, g, or t
  misc_feature (653)..(653): n is a, c, g, or t
gaagcnggggaatcaagttcactattttctgaaacacacaaaaaagggatgggaacaatgacttacaactaagattgctcataaaagaccatcagaaagatccctaaacaaaagctaaatagttacagttaatggtaactggcaaggcatttaatgcatttgctggtattaagtttcttatggaatgaatgaatgancccagcagcattttatgacacagctgccagaacatcccatagaaaaacaattttntaggaacgtgatggcaacaatcagcngccaatattctcaagagttcctaattaccaaaagcatatacaattttngtctagaaaaataagtnaattttataaaattnagtttttngatcgnnaagcnccccctttnnnaggtacagagatactganaaatagtncctagnnnnntcactaaatggtttanngngagnnagggatgcnatgttgagttacggngtgcngcgcgtnccctcagctgctggngaggggctggtggatgggcggctggnngcagcgcacatgctccactggngtgccctccccgtcgcctgaacttnaggtacttattcaggatggtgatgatctcatcattgagaatctggaacttgagaattctctacaccatcttcataaaangcacatt

SEQ ID NO: 599556 - DNA, 349 bp, Homo sapiens
gatccatacacgatccccccagttcctgcttcttgaaaatcaccaccagttggtcttcaggttgtaagatgtgtgtttcagcgcctgtgcatattactgatcagcacttagtacctgtggaggaagatgcatcagctctgaagatgacgaggcaggaggctgtgacactcttaagctatatttgtcaaagcgcgtctgcccccttcaggctggtatcatggttccccagatcatcgtcgaacttgcttgcttgttaaagatgattactattattatcagtaggatcatgattacgatgatcgagtggagtcatacactgttgactcgatatgtacgctgaagtatcaag

SEQ ID NO: 599557 - DNA, 112 bp, Homo sapiens
ggccgttctccccgttgtttcttgcgcagcattctccattttgtatgaagccgctctaactcggtctaagatagtacatcttcttctggcgggcttcccggtcattctttag

SEQ ID NO: 599558 - DNA, 218 bp, Homo sapiens
gtgaaactacccctaaagccaaatgggaaaggaaagactcatatcaccattgtcgtcattgacacgtagattcgggcacgtccacactactggccatctgatctataaatgccggtgcatcgacaaagacccattgaaaatttgagaggaggcttcctgagatggaaagggctcttcagtatgcctcggtcttgataactgaaagctgagcgtgaccg

SEQ ID NO: 599559 - DNA, 862 bp, Homo sapiens
  misc_feature (277)..(277): n is a, c, g, or t
  misc_feature (365)..(365): n is a, c, g, or t
  misc_feature (386)..(386): n is a, c, g, or t
  misc_feature (391)..(391): n is a, c, g, or t
  misc_feature (395)..(395): n is a, c, g, or t
  misc_feature (447)..(447): n is a, c, g, or t
  misc_feature (451)..(452): n is a, c, g, or t
  misc_feature (472)..(472): n is a, c, g, or t
  misc_feature (478)..(478): n is a, c, g, or t
  misc_feature (486)..(486): n is a, c, g, or t
  misc_feature (506)..(506): n is a, c, g, or t
  misc_feature (524)..(524): n is a, c, g, or t
  misc_feature (546)..(546): n is a, c, g, or t
  misc_feature (568)..(568): n is a, c, g, or t
  misc_feature (570)..(570): n is a, c, g, or t
  misc_feature (586)..(587): n is a, c, g, or t
  misc_feature (663)..(663): n is a, c, g, or t
  misc_feature (772)..(772): n is a, c, g, or t
  misc_feature (801)..(801): n is a, c, g, or t
  misc_feature (824)..(824): n is a, c, g, or t
cgctcccggagctgggcggagcggggcgcagcccacgtggttcgggcgggaggcgccgggacgtggccagttgcccgcctgccccggagagccaggcgctaaccagccgctctggccccgcgccctgcttgcccccattatccagccttgccccggcgccctgacctgacgccctggcctgacgccctgcttcgtcgcctcctttctctcccaggtgctggaccagggactgagcgtccccggagagggtccggtgtgacccgacaagaagcagaantggggaagaaactggatctttccaagctcactgatgaagaggcccagcatgtctggaagttgttcaacgagattttgacctccgaagnaaagaagaggaacggctagangcgtngaangggcaagattaagaaggaaagctccaagagggagctgctttccgacactgcncatnntgaacgagacccactgcgcncgctgnctgcagcnctaccagctgcttgtgaatngcaaaggcagtgcctggnatgtggcctcttcacctgcaanaagctgtggccgcgtccacccngnaggagcagggctggtnntgtgaccctgccatatggtcaatgtgagtcgtcatgagtgtatatgagctgtgaaggcgctcagagtcgagtgcangtctcagtctcacggcgctgaggtgagtggctgatgatattgagaagatgaaagacaaagatgagatgagctgtcaagcagcagcaccttgacaaaaacctcttctcanattgattgagaatcaatatcattactcantatctgacttctcatctgagcangaagcaatctaatatttaaagactaagtagctgagagt

SEQ ID NO: 599560 - DNA, 735 bp, Homo sapiens
  misc_feature (277)..(277): n is a, c, g, or t
  misc_feature (365)..(365): n is a, c, g, or t
  misc_feature (386)..(386): n is a, c, g, or t
  misc_feature (391)..(391): n is a, c, g, or t
  misc_feature (395)..(395): n is a, c, g, or t
  misc_feature (447)..(447): n is a, c, g, or t
  misc_feature (451)..(452): n is a, c, g, or t
  misc_feature (472)..(472): n is a, c, g, or t
  misc_feature (478)..(478): n is a, c, g, or t
  misc_feature (486)..(486): n is a, c, g, or t
  misc_feature (506)..(506): n is a, c, g, or t
  misc_feature (524)..(524): n is a, c, g, or t
  misc_feature (546)..(546): n is a, c, g, or t
  misc_feature (568)..(568): n is a, c, g, or t
  misc_feature (570)..(570): n is a, c, g, or t
  misc_feature (586)..(587): n is a, c, g, or t
cgctcccggagctgggcggagcggggcgcagcccacgtggttcgggcgggaggcgccgggacgtggccagttgcccgcctgccccggagagccaggcgctaaccagccgctctggccccgcgccctgcttgcccccattatccagccttgccccggcgccctgacctgacgccctggcctgacgccctgcttcgtcgcctcctttctctcccaggtgctggaccagggactgagcgtccccggagagggtccggtgtgacccgacaagaagcagaantggggaagaaactggatctttccaagctcactgatgaagaggcccagcatgtctggaagttgttcaacgagattttgacctccgaagnaaagaagaggaacggctagangcgtngaangggcaagattaagaaggaaagctccaagagggagctgctttccgacactgcncatnntgaacgagacccactgcgcncgctgnctgcagcnctaccagctgcttgtgaatngcaaaggcagtgcctggnatgtggcctcttcacctgcaanaagctgtggccgcgtccacccngnaggagcagggctggtnntgtgaccctgccattctgtgccagagctcgtgacagaatcggctcactggcacgtggtactatgcagcatgtgaacagccctgcttcaacgaggttcggaagttgccaaggttcatccggtccctccactgggctggctgcacggtgg

SEQ ID NO: 599561 - DNA, 482 bp, Homo sapiens
gaatatcttcttggatcagccgggatgctcagaatgtcccaggtgtatgaggtaccgagatctactgagattatattgtaagaataggagcaaggtatggactatacgcccctagatgagaaaagcctatgctgatagtcgggctattggcatgatgtcctaaaagtgagtctggcaaagaattgctgcatctctcttatactgccagggattactaagtggcttctgcatgagtaccaccggaaaggcctgtgagcgtctacagactagtgtcaccatcttcgtccagtatctgtaaacactgttagttcggagtcggccgctggtaaaatcgatgttctttaaaatcgttaatgtataacagggcttatgtttcagttggttttccgttctgttttaaacagaaaataaaaggagtgtaagctccttttctcatttcaaagttgctaccagtgtatgcagtaattagaacaaagaagaaa

SEQ ID NO: 599562 - DNA, 1117 bp, Homo sapiens
agagctgagtcttagagtagggaaggatcagaggaggcaatcaatgcaggcaactggtcagtgtcatgctcctgtaaggcaacccagcagcaggcagccagtgccagcacagttcccagcaacagtaaagcccccgaaagactcaatcgattaaacgagggcaaggcaaataggcagtcagtgtcaaaagtgctcctcaggcaaagcagcatgtgcatgctgttgtcacggggacctgtgctgggaggcactgagtgaagattcatttcagcatgttagtgtaaggctgtgactttctcagctccttcctcctgtgtaaatttcactgtcattcccttcttacatttggattccccccatccccttttaggtacggtttatacctgcatattcctcgtcgacgtcctcttgatactactatatcttgcccaagagagctccctcatcaaggaccaacagtataggcatccatctatgcccttgtacaaaactaaagaaaacgtcatttggtatgtccatttacttacctggggtatagaaagtggtcttggaaagagtccatttgatttagatagcatgctccatcaatctagccttgtgaaaccaattcacaaactaatctgtataaaagcataactgattgtgtccatttagtattgaggtgatataaccaagtctagaagttagaaactgtgggtcatttccacatacattacgactacaaactgatgtcctttgggaacacagcaaactttattgagaagggctgggagggtccatctacaatactggttatgcaaggagtgaaaggtaggcacaacgtgactttaggactgaaaactctagaaagtaccctcaggcatgggtgtacttgggcaacaaggcagagggaagccaacgataagacagcggaacataaagccactggacacagtacacagagcaacgcatagcagaacagaggaccacaaaccattaaaaaggcacgcgcagaagcaaagacacaacacggcaaacaacctgggcacaacaagatgagtaagaccaaggaccacacccaagacaagacacacgacagaggacaaaacagagaggaaagacaacgacagcagcaaac

SEQ ID NO: 599563 - DNA, 116 bp, Homo sapiens
ttatcgagctcggtaccgattggtctgcatgtgaggttacagtaagtagcttgtcatgttaaaggttgcaaagagctgcttgttcttcatctcttgttaggtgttggaggagcaca

SEQ ID NO: 599564 - DNA, 429 bp, Homo sapiens
  misc_feature (171)..(171): n is a, c, g, or t
  misc_feature (191)..(191): n is a, c, g, or t
  misc_feature (193)..(193): n is a, c, g, or t
  misc_feature (210)..(210): n is a, c, g, or t
  misc_feature (239)..(239): n is a, c, g, or t
  misc_feature (247)..(247): n is a, c, g, or t
  misc_feature (270)..(270): n is a, c, g, or t
  misc_feature (360)..(361): n is a, c, g, or t
  misc_feature (420)..(420): n is a, c, g, or t
tcattcttccaaaagcagaatccgaagctggttttcattgagaccaaaaaagtccatggcttttcaggacctgcaatgttgacaggtgtgtggatatcatgggaaagggtacaggtagaccagcagtcccggttgggcacttgcccagcatgtccggcggcagaagtgcanctggtcgcaggcctggcacntnccgcgctggtagctgtngcagaggcgcacagaggacacggccaccnaccctccnagcggaggtgccgccaccgcccnaccctgtcgccccgcctcgcctccgcgtccccgaggccctcctgcgtctccacctcctgcagcaggaaacgctcgggcccggccgctganncacgtcccggagcctggcctccgacagctccacgtggccgcgcaggtccttcaggaacnatcggtcgc

SEQ ID NO: 599565 - DNA, 221 bp, Homo sapiens
agttagtagtgcaggagatgaggacagggaggagtgcaggagatgaggacagggaggagtgtagcatgatgaggacagagaggtgtgcaggagatgagtacagcgaggtgtgctggagatgaggacagagagcagtgttggagattagtagagagagtattgctgcacacgaggacagggagttgtactcgtgatcatgacaataagttgtgcctgtgatt

SEQ ID NO: 599566 - DNA, 191 bp, Homo sapiens
tcagcgctttatacttcctcagctttatacttcctcaacgctttatacttcatggccaggtggtgcctattagagaaaattttcttgaggaatggacacttgagccaagcgggcaaggaagtataaagcgtggaggaagtataaagcgtggagaggaagtataaagcgttgaggaagtataaagcgttgag

SEQ ID NO: 599567 - DNA, 629 bp, Homo sapiens
gaaacattcaatgatttctggtgtattatttataatatacctcttcctccaaatatttaagttaaattacaataaaaaacatgtttataataatgctgttgaaatagaaataaaaatccaaagccctgaaatgaggaaattagcacattcagctcaaagacacaatgcttattgtgatgactccttaatcagaacaacctgacaaggtgatggaggaagtatgatgggtttaaattttaacaggattaatttctaaaatagatttttatcacctgagacctttaacagaggacagtatgtggcacaatatgcaaggtcgtcatagatttatagcaaatgcaaaatacattgggtttcattggaaggttgatgccacacatacaaaagctggcaattaatttatgattgatcacggttctggtagcaaaattcaaccatagtcttcttttataatacaatttataagcataataacaaactacctcttataaagtacctttatgtccaggcactccacaaggatgatttacatatataatctcttaaggtctcccatcctctatgaaggagaaaatatcattttaccatgtccaagatgaggaaattgggaggtcaaatgaataaagaag

SEQ ID NO: 599568 - DNA, 650 bp, Homo sapiens
  misc_feature (354)..(354): n is a, c, g, or t
  misc_feature (445)..(445): n is a, c, g, or t
atcagggaaggagacagccaaagagctggctcagagaggagctcgagatatatttagcttgccgggatgtggaacagacgggggaatgtgcgtggccaacagagatccagacgcacgacaggggaaccatgtcaggtgttgtgtgcggaaactggacctgtctgatactaagctctattcgagcttttgcgtacgggcttcgttagcttgaggataaagcgagcgctccacgtattctgatcaagcaaatgcaggaagtgatgagtgtgtcctgtactcgaagatctgcagatggctttgagagtgcacataggatgtcagaccagcttgggtcacttcgctctctaatcccantcgtgctgctatgcagataacttaatacggatatcaggtccctcgagtcagagggatacggtaaaatggtcgtctttcccatcgacatcantcgacctgggggaacggaatccagcttgccagtaaaccgtgcgagggccgtagatagattcttagataggtgcgagggccattggctctacgtgtcagcatgccataggctagctcgatactagtcgcttcttgtcagcgccaggggaacgtggagacaccaggagaacctatataacggtcgtcctcgagacgggttgagagaa

SEQ ID NO: 599569 - DNA, 228 bp, Homo sapiens
  misc_feature (3)..(3): n is a, c, g, or t
acnatataacgtcacaagaccgtaattctcacctccctttgtcttatgaattcgacacagataccgcccattccgctacaaccgaactcatacacctcctatgaaaaaacttcctaacacgtcaccctagcattacttatattaaaagtctccatagccattacaatctccagaattccccctcaaacctcagaaatattgtcttgggtaggtgtcatgaacaggacg

SEQ ID NO: 599570 - DNA, 125 bp, Homo sapiens
agtgattacaccgtatctgtgaagagcgttaggcccttcttgtgccagtttgtaaatctgctccttcaggtcgtcagatgtcaacttacccccaagtggggacgctgcgtcgatagggtaaagcc

SEQ ID NO: 599571 - DNA, 738 bp, Homo sapiens
catatattgtccaaatcacatcactcaccttgaggtggatacatggtgtttttatcgttgaacaatacatttcacaaccatcaataagaatcaggttagtctagcagagacaatctggcaagataggagaggatatacacagaggacatatatagagagatagagagacagagacagacagatacacaggcgattgttttaagtggtattgtttttcctataggctgtccttgtcactctttctcggttacggtttggtcggaattagctgccggggcctccaccggcttgggctcttctgcagaggctgcggggccctgggccttgggtgtgaaactaggcgcttccgtggctgcgggggtctccttggaagagggggcagcctccgagctgccgggttttgagtctgaagatggggccccgtcacttttggtctcctgggcggcaggagctgcgggcgcctcagtctttttggttccccttcctccttgctgggctcctccccgcggcagggccgcgctctcggccgggccgcggcggcctcagcagctttggggcctcgccgcccgcagcgggccgggggccgcctgctcctgctcgggcgcttcgggggctcagccttggcctctgccgcgccctccgtcttctcggtccgcttcggggcctcctccttgcagccgccgcgtccttctcgccctccttctcctcggccttccctcggcgtcctggtcgggcttc

SEQ ID NO: 599572 - DNA, 158 bp, Homo sapiens
ctcgcacccgtgttcatccctcttcgtcctgccctccctcttcagagaagaataccttccatggcaatcctctgaagatgcgaatccacagatacaatgtgtccctctgttgtgaacatgtatctggttccatacttgtggcctggattgtgttcatc

SEQ ID NO: 599573 - DNA, 888 bp, Homo sapiens
cccagaggaccaaggaaacctctatattgggtacacgatgcaggtaggcagcttcatcctgcaccccaaaaacatcaccattgtgacaggtgccccacgggacagaatatgggcgcggtgttcttgctgagcccaggaggcaggcggaagaactgcggaggaggcaggtgctgaggggctcgcaggtgggcgcctatttgggcagcgccaattgccctggcagacctgaatcaatgatgcgtgcagtgacctcctgttggcgccccctactattcgagaggcaaagaggaagtagggggtgccatctatgtcttcatgaaccaggcggaaacctccttccttgtcacccccttcagtccttcttcatggccccagtgctctgcctttggttaatctgtggccagcatttggggtgaccatcaaccagcgatgattacacaggcgatatgtgctgggcgaagctccgtttgaagggctttggccacggtgtaccattcttatcagagtagctctaaagggcgcctctatagataagccccacccaggtactccagtggacgagaagctggaaactgccttgggtgggccaacttcgggaaaattcccctcagagggccagaatgcattggtggaatgacacaaaattttaaccccagaaccttctaggtgggaaagccctgtcaaaccaattgtgctgctgctggtgaccccagacgccagtacacaagggcacaactcgttctcaaactttgttcgtgccaacttcccatttggctccaaggttggcgacactgttaagacgtgtgcccacctttgtaaattcggcggacacaatagatcgcgatattgaaccgcctttcccgagaaggccctagacaggggggagct

SEQ ID NO: 599574 - DNA, 878 bp, Homo sapiens
  misc_feature (565)..(565): n is a, c, g, or t
  misc_feature (632)..(632): n is a, c, g, or t
  misc_feature (708)..(708): n is a, c, g, or t
agcgggagcgggtgggctgtggacggaggttgtggagagagcagggcggcattggtggctgcggctgaggcttgagccagagatttaaaaatggacaatgatgattttttttccatggactttaaagatggagtctgtctctgttgtccaggctggagtgcagtggcatgatctcggctcactgcaacctccgcctcctgtgttcaagcgattcttctgcctcagcctcccaagtagctgggactacagaagttgttgaaaacctggttacaaatgataattcacctaacataccagaggcaattgatagactcttcagcgacatagcaaatatcaacagggagtctatggctgaaataacagacattcagattgaagaaatggcagtaaacctatggaactgggcacttaccataggaggaggttggcttgtaaatgaagagcagaaaattagattacattatgttgcttgcaagttgctgagtatgtgtgaagcctcatttgcctcagaacaaagtattcaacgactgattatgatgaatatgagaataggaaaagaatggtnggatgctggaaattttctaatcgctgatgaatgttttcaagctgctgtggccagtctggagcaattntacgtcaaattaattcaaggagctcccctgaggctgacttgaccatggagaagattactgttgagagtgaccactncagagtgctttcttaccaagcagagtcagcagttgtcaaggggattttcaaaagagcatctatgtgtgtactgcactgtacagatattgtcgatgagggtcccccagatgaacttccaagtccttcatcaactctccggtacaccctttggagttagaaaccccgaagaa

SEQ ID NO: 599575 - DNA, 212 bp, Homo sapiens
agtagcctcggactgacagtgactctgggcgttattttaatttccaagatgtgactcttttaagaggctactttaaggctgtgaactgtctcactgtcttttcactctttctttttagttcttcaatactgggcatccaatgcgctctagacatgtgatgacgacctcagtttcctacctcttccaacaaatctggctagctattgaaccaa

SEQ ID NO: 599576 - DNA, 756 bp, Homo sapiens
  misc_feature (443)..(443): n is a, c, g, or t
  misc_feature (510)..(510): n is a, c, g, or t
  misc_feature (586)..(586): n is a, c, g, or t
agcgggagcgggtgggctgtggacggaggttgtggagagagcagggcggcattggtggctgcggctgaggcttgagccagagatttaaaaatggacaatgatgattttttttccatggactttaaagaagttgttgaaaacctggttacaaatgataattcacctaacataccagaggcaattgatagactcttcagcgacatagcaaatatcaacagggagtctatggctgaaataacagacattcagattgaagaaatggcagtaaacctatggaactgggcacttaccataggaggaggttggcttgtaaatgaagagcagaaaattagattacattatgttgcttgcaagttgctgagtatgtgtgaagcctcatttgcctcagaacaaagtattcaacgactgattatgatgaatatgagaataggaaaagaatggtnggatgctggaaattttctaatcgctgatgaatgttttcaagctgctgtggccagtctggagcaattntacgtcaaattaattcaaggagctcccctgaggctgacttgaccatggagaagattactgttgagagtgaccactncagagtgctttcttaccaagcagagtcagcagttgtcaaggggattttcaaaagagcatctatgtgtgtactgcactgtacagatattgtcgatgagggtcccccagatgaacttccaagtccttcatcaactctccggtacaccctttggagttagaaaccccgaagaa

SEQ ID NO: 599577 - DNA, 102 bp, Homo sapiens
  misc_feature (3)..(3): n is a, c, g, or t
ggnacatatatctatatatatatatatatatatatatatatatatatatatatttaaacaaatgaagtcataataaaatttaaaaatgctggggaaaaaaaa

SEQ ID NO: 599578 - DNA, 138 bp, Homo sapiens
aaaggggtcaccgacatgggacgaataaccagtcacatgctgcctgacacacttcttcctactccgatggataccaagggttaaagtctagtagtcctatgctacttggagaggctaagtgcagcgagggagagatcc

SEQ ID NO: 599579 - DNA, 934 bp, Homo sapiens
gaaagactcagctatctactaggaagaaagaaaaggccaattcagtctaagtttgatgtgaccggacgtggacccatctttgacatccaggtactggcagcacctagtcgtgggaggtctgacagtagcagagagggtctcgtacatcacacgacatgaatagtctacagaacagggctactcgcaggataagatataagggaagtgaaacccaatctcctggtggaatgatatcgtgatagaatgtaacgtcgacagcatgaagagacagcacgtcaggttgcgaacttacacttgggcttgtgttcccggatcttagcatcgggagaaggggtacatcgaacacagccctagtaggaacttaaccctatacatactcatcgtgaagggtaccacttgtcggaacacaatccggactactagaatttgcgatgaggtaccattgggcgttaaagataggaagaaagcgtgaagtccatttgttcccttcaaagcaactacgaaggttagtcgcgtctctagaaagggacctaggcttcggtgggcatcgaaaagaaaggtggtttttccataatttaggtactagagaccttttccttaaccagagaaattaccacctccctttcgcggtggttataacacctatccaaaggaatgattgggacaggatggccttagacggtaaattgtcggtaaacacttctaaacaccacgcgttcataactcgtatcttaaaaacctatggagggggacaaagagaagtatgatgcgccatctgatggaaaacggacagacagggtgtgaacactttggacttggacggcgaaaggccaccaaacaattcctccggcgtggggacccattaaagagagacacttaaaggtcactccgacttgaagacatagagggcgcccccgagtaacacaggtagaag

SEQ ID NO: 599580 - DNA, 586 bp, Homo sapiens
tctactgtcaggaagaatggggtcctaggtatcttgatctgattatttgagtgttgtgctgacagtttacatcgtctctatgatactacgggttctattgatccttcctccttgggagtaaagcacataattgtcctactgttcttccaaagaaatacttaagtgagataccttgaggaggtggtaaggctaagaaagtggattcctgagtaagatgtcctggattccaatcctcgtattatttgtgaaattgagggtgagtcacttaatctctccaagactaaattttcctatctatgaaatgaatttaattgatgtgcctactccataggattattataagaagtaaatgatgccgggtacagtggctcacacctgtaatcccaggtggctgggattacaggcatgcgccaccacgcccagctaaattatgtagttaaaagtagaggcggggtatctaccatgtaggacaggctggtctcgaactcccgacctcaggatataagaagatccttcctgggatttactcaaagtggtgggatacagatgtgagcaatgacccagcccttattctttatacatctca

SEQ ID NO: 599581 - DNA, 692 bp, Homo sapiens
ccgcggaagccccgccgcgccatgtcttcgcctcccgaagggaaactagagactaaagctggacaccctgcccgccgtgaaatgctggtggaatgcgaattgtgcagaaacacccacatacaggagacaccaaatgaatgagaaatgacaatggatgaccagtgaatgggaaatgccccagtccacctaaacccactgtgttcatctctgtgtgtgtcatctgccctggtggtgacaaatgatttccccccgtgctggctgcgcagtgtggctcaccatgaagccgcatgcctccatggacaatgcatccttccccaagaacccatgcacatccatgcatgccactgcaatgtgatgcctggatgtccaccatgcctgccccatggccccggctctgctgcacattggtatattcctctgacatgatgagaaccatgcatgtttcgcccaaatcctactctgctgggaaatctaagtgcaaaaccaagtgctctgtccttttgccttacatttccatatttaaaactagaaacagctccagcccaaaccttgtttatggggagtctggttggatgtcatctgaggatcattgttgctcctagagtgtgccattagcagactttgccaagatccgagaaaacattttagctttagttctatttcagcaggtcacctcaccgtccttgtccatg

SEQ ID NO: 599582 - DNA, 390 bp, Homo sapiens
tctaaccagcttgaagggggagggagaaggagggagagaagagagaaagaagctgcgtaagacaagcgagtgtcagtcagcgcagagagtcgaggagcctcggagtgcagcgcatgagggctcgttcagctgctcaagtacgaacatcacacgtcccaggaaccccaagcggagaaaggagggcatttaaccctttgtagaaggctcggggccctccttctggagcatggtaagggcacagtgtgcagcgctactgtactggcccaggcagagttcatgtatcttcgtcccctggaacccaacggctccttaaccaggcggggaagtgccgattgaccagtttgggggttgccaaggaaagcctgccccaaaagggccagaaaggtggaa

SEQ ID NO: 599583 - DNA, 103 bp, Homo sapiens
ccatctatgcctggggtgttcatgtctccccctcttgttgtgtggtcgcctgcgtctctttgtcggtctctaagcccttgtctcgtgcctctgggcggccgag

SEQ ID NO: 599584 - DNA, 814 bp, Homo sapiens
  misc_feature (270)..(270): n is a, c, g, or t
  misc_feature (279)..(280): n is a, c, g, or t
  misc_feature (384)..(384): n is a, c, g, or t
  misc_feature (392)..(392): n is a, c, g, or t
  misc_feature (467)..(467): n is a, c, g, or t
ggtgatttgttctgtatcaaaacgacaatatcatgcaagtgtggtcaaatggcagtagaacatttataatgatgatgaccctgaaggaagcgtggatccataaggacaagggtcctaatatgtcttcacttgttgtgattttaagactccccttatttctcttctcaaccctgagagtgatctctaacacatggcttcttgagtacacgcatctttattcagctatccctctatataataggtaccaccgataatgctattagcccaaancgtggtgtnntctaaatattaataggggggcttgattcaacaaagccacagacttaacgttgaaattttcttcaggaattttctagtaacccaggtctaaagtagctacagaanggggaatnttatgtgtgatattttcttcttatgctatatccccaagtttttcagactcatttaagtaaaggctagagtgagtnaggaatagagccaaatgagtaggtgtctgagccatgacagtataaaatactgaaagatgtccacttttatttccaggaaaattaggggggcagattccaaggtccgaattagaattcctaattcgaaatttcttgaaaacctggattttccaggttgcacattttttacatacggtagaccagtttcctctgggttctcttcagttaagtcaaaacaacatgttcctctttccccatatattcatatatttgggctcgtaaagtgtatttctgtgagctgttttcatgtggtttatttcctgtctgtgaaatggtgtctaaaagggggggggataaccttttactta

SEQ ID NO: 599585 - DNA, 230 bp, Homo sapiens
  misc_feature (83)..(84): n is a, c, g, or t
  misc_feature (144)..(144): n is a, c, g, or t
  misc_feature (197)..(197): n is a, c, g, or t
ctagagactctgagctggtgagtgatcttgtctctcatagagatggacaggatgatctactggtcttttcagttagtcctganngggctggattaagcatccatgggtatctgatgagaagggacagtctctgattctgatggnggaggagtttgggtggggccctgggctgtcttgctcctccatggccgctattngagagagttctagagaaaacccaggctccaggg

SEQ ID NO: 599586 - DNA, 827 bp, Homo sapiens
gagctgtaggctcgtagggccgtagacgctgcagacccgcgaccggaccagctcggagggggtgaataatagctctttccacgtctgcattacaaaatggtctccaacaaaactacattgcgaagaaatgggcaagagaacagacagaatggaaagagtacgacagttagaagtaggcagtcgcctgtacgcatattggtcgtggaccagggtactagatcgacgtgtagatgaatgggacaagtgggcaatatttcctgaagtgcaagggaatttacaagatgctgacaataacttttgggaagccgtgaacaaggtcgagcatggtccaggaagtcgatggcatgcgttagctatatacctctcaagaacagctggcagtagaaacatccatggtactgcaggaaaatcttgaatctgacacgttgaatctgattgactaggaacaatcaaacgagggaaaaagaagcatgcgtgcatgaccaagaccaagtaggacttggccacaggtcttgggaatcctgaccgcgatattaattgtgtgccacagacggcagcgtggagaattgcccggtctcggcaatcgacagcgggtgcacagcatgcccgcattgacggcagaactaggtggctgccgcgaagccgcgcatactatgctcgtgttgctccgactttgtccatcggctgcttatggacgccgggactacgtggcgccttctttgcgcccggaaggtgatccctccgcctcggtcgccttggtggccatgtctcctccacgtccttttcccttgggcccccttggctcccgagggcccactgcccccggg

SEQ ID NO: 599587 - DNA, 118 bp, Homo sapiens
gggcctttctgacagcacagtggtccacgcctgtaatcccagcattttgggagactgaggctggtgaacattgtcaccctaaagaagtgataaatgttgaaagtgattgttccccgct

SEQ ID NO: 599588 - DNA, 310 bp, Homo sapiens
atcttgaatcacgaagactgagtcaagcaggccaagctgttcagtggggaagagaaatgatgaatgattagatagattcatcaccaaggtcctctgtagacagcctcagagtgtgttcactcttcaaatggaaataatacattacatagaactcccacataaaaggacatacaatatgtaacaaagaaaaataatgaatagtaagtgaaatcataataatgagatctactttattggtgctgtgtatattactgcgtaagtccaaactcaatatccaggactgtcactggaatataatttctcatgttta

SEQ ID NO: 599589 - DNA, 457 bp, Homo sapiens
  misc_feature (31)..(31): n is a, c, g, or t
  misc_feature (34)..(34): n is a, c, g, or t
  misc_feature (40)..(40): n is a, c, g, or t
  misc_feature (90)..(90): n is a, c, g, or t
  misc_feature (259)..(259): n is a, c, g, or t
attgcagctcagctgaggagaaggtgacagnccntggccnacggtacagccttgattccactatgacccacaccactgcctgtatgtagncccctttaatatagtcagtctctagatcagttagaatagaaaacagcaagattgggaacacagttaaacaaaccacgtcagcgctggtaagttaattaggaacaatgcccactgataaaaatctgtaatattgttctccgcaacaagttggataagtgatatttgtttntaaaaatcactgcaaaatatttccagtgctgtacaacacaaatttgaaagaggattagtgagttaagccctggaccagggtcacagtctttgaaaagtgaatcatccataaaccacccttagttatatccatggttcaaatggtgatcagctcaggccaagatggtaaattgcacaaaaacccacccaagtaaattag

SEQ ID NO: 599590 - DNA, 392 bp, Homo sapiens
  misc_feature (307)..(307): n is a, c, g, or t
atagtttcccgccaccccacgggggtggaagatctccccacaccaccccctttggggcgtttttcgttttttaatatacacacaccctctccggggggggttatcaaacccggggaccaaaagggtgttggggtgggcagggtcccccattttcccccaaaagcccaaaagggtaaaagaaatttttccccaaacccccccccccccctttttaacagggggggaaaggggggttcaaaaaggtttgtttcaaaggccccctttattttaaagggaaaaaagggggtaattaaacccaggctttggnaccccccccaaaggaaaggaaaaattttttgggccccccttggttttttttttgggggggggccggtttaaggtattagttttta

SEQ ID NO: 599591 - DNA, 909 bp, Homo sapiens
ggctgcctgggcggggacactcagagcccggggggcgggaggaaggcggcatgccccatgactggtgatcctcccgggcgctgcgccctggggcttcaggcgtctcaggggggcatagacttcaaccagctctttggtcatcaccatggattacaccaggaagcaaggcggcagctgtggcaacctgtgtcctggagatgtcatccttggtcgtattgactggtgtttgggacagaggtccatgacttcatgtctgatgcgcagagagaggatgtaaatgcatgcaagtctcatcctagcttgtgtctcataaattgactacggggagaaactcacttatggtctccacaagtagctgaagatgggaaagcccatccgtttcaaatatcaacttaggaatcagaacgcacgaggaattcaaagccatttggtaccgcgcacaactagaagggcccagccttgttgttagcagctgcataggatcattgatggacaaaagacaggtagtgagcgcgttcctataactcgccaattgggctctaattcgaacgtagcaatatacataggatgctgcttcacggtagcagcgtgccggggtctcagttcctagcgtcacctcaaaacgagcccagagcctcggtgtgccccgagtcggaggtgtaccgggatgcgtccacgaagatgcggaatgatgccagcacatgctcgccagtcgggctccttcagagtgctccagggaatggtggacgatgggtctgatggaccgtccggctggaacgcggagtgtggagagctccggtgacggaaagtccatggcggatcaggcggggcacagaggatgccgcgtctgtgaccaaatgtgggagtggcataagttggtgctgggtgaaagggcgggataaggtaccg

SEQ ID NO: 599592 - DNA, 236 bp, Homo sapiens
tccagtacccgagcatgcatgaatggctgcaggtcgacgtgtattcagctacatgcgctgcatgcctccctggactaagtatccggcgagacgtgagcaaccgtgctgagctccaaatatcgttaagctggagcctggtcgacgtgtattcaccactgcggtgcatgcctccctgtactagttccgtcgacacgtgagcaccgtgctgacctccaaatatcgttaagctggagcct

SEQ ID NO: 599593 - DNA, 198 bp, Homo sapiens
gaacccagtaaatatttattgggggagggattaaaggcattgagtccttttcttttttcactcacactcagtgggctagtccatacttttagtcttgaaaccttctgaatattgggatctcatattattatcctgcagacataggtttccacacagctttccccatagccacttcaaattcaacctgcccagcactga

SEQ ID NO: 599594 - DNA, 170 bp, Homo sapiens
tatgttctcgactcgttatacccttcccagtttttgtttttatactttaaaccccgctccttcagggcctgtggccctttctggaagcatgcttccttctttataaatatagcttttggcgcgaaactatagtttttttattagcgagatcccaacaatataatggaagg

SEQ ID NO: 599595 - DNA, 526 bp, Homo sapiens
agtgaccccagattttatttgtcggcgccacctcccgtgtctctttactgaggagacgctgatccagattcggaaacaaatccttttctcatttgaggaggggggtaatagtgaccatgcaggcactcttttaaacaggccacacaggaagggggaaaaggtgggattcatgtcgaggctagaggcatttggaacaacaaatctacgtagttaacttgaagaaaccgatttttaaagttggtgcatctagaaagctttgaatgcagaagcaaacaagcttgatttttctagcatcctcttaatgtgcagcaaaagcaggcgacaaaatctcctggctttacagacaaaaatatttcagcaaacgttgggcatcatggtttttgaaggctttagttctgctttctgcctctcctccacagccccaaactcccacccctgatacatgagccagtgattattcttgtacagggagaagatcatttagatttgttttgcattccttagaatggagggcaacattccacag

SEQ ID NO: 599596 - DNA, 269 bp, Homo sapiens
ctctagtggacatccagaccaaaacaaaatacatatttagaacacttgcaagagtatgagattctccagccagtagtccttcttctatcaccttccattttagggcctgcatacttgactctccacttgtttttacttaaaaagtgggctcaacaagcaacataatccagtcttgtggtcaccatggcctaggcagcacagtaagcaagcagttgcaaggttcattagcacaggttcaccagcaacacatgccagtgccagcagtctgc

SEQ ID NO: 599597 - DNA, 252 bp, Homo sapiens
agggagatcacacctgtgctgacacagaagatcataaattctagttctgagtgcagacccatatcaaaggccgggtgcatggttttaaatggaagtaactacttggagtctactcgagactttcatgagttacatctcattattagccttctgtaatgtaataaaacaatcctcaacataactggagtcccctagttgtcaatgtatgccttctctcatggcacagggtagtgtaacacgtcttggccgaaa

SEQ ID NO: 599598 - DNA, 107 bp, Homo sapiens
tatgcaatcgacggtttctctgccgggaagtaccattacagttacagccttggtaacataaccagtggcttcacttcttgtcattgcaaaagcaaaacagattctta

SEQ ID NO: 599599 - DNA, 373 bp, Homo sapiens
  misc_feature (27)..(27): n is a, c, g, or t
  misc_feature (80)..(80): n is a, c, g, or t
  misc_feature (123)..(123): n is a, c, g, or t
  misc_feature (146)..(146): n is a, c, g, or t
  misc_feature (162)..(162): n is a, c, g, or t
aggaatcccatgttaggtttaagtgtncttggaatgttgtgacccctcctgaacattacagcccttgaggcatcccctgntctttgatgtgctgtatataagaaaagagactggcgtggtgtnacgcctgtagtcccaccactttnggaggccgaggcgggnagatcacctgaggtcaggagaccagcctgaccaacatggagaaaccctgtctctactaaaaatgcaaaattagccgggcatcgtggcgcatgcctgtagtcccagctgctcgggaggctgaggcgggagggtcgcttgaacccgggaggcagaggttgcggtaggctgagatcacggcattgcattccagcctgggctcggaactccatct

SEQ ID NO: 599600 - DNA, 666 bp, Homo sapiens
agtggatcgcctgagatcgggagttgagaccagcctggccaacatggtaaaatcctgtctctactaaaaatataaaaattagccaggtgtagtggcgcgcgtctgtaatcccagctactcgggaggctgaggcaggagaattgcttgaatccgggaggtggaggttgcagtgagcctaggtcgtgccactgccctccagcctgggtgacagagcgactgcgtctccaaaaaaaaaaaagggtaacatttaaaatttaaaaaaattaatattacccagtatttggttaactaaattaaatgggccttgggtaacaaacagcaaacacacgaaacaccaacaggaaaaacaaacacaatcatgtgtggtgggaggcgcgcaggccgacccccgagaaaaacaggttgtcctgaagacacatgtcgtgtggggggccgcgtgccccaagagggtagaagatgaccacggtggtacacacacggttcacccaaagaaaaaccggcggggacgagcacataggggggtggggaatcccacccacaaagtaaagagagcgacggggggaccacggcgtggttttggacaacaacccgcagagggagtctcgagggaacaaggaggggctactcaagacgggtcacgacgagcggacaactaaaaagcagcct

SEQ ID NO: 599601 - DNA, 1158 bp, Homo sapiens
gccggtgccccattatccccccaaagagggaaagtttgttcgcttgatgggcatttttcctaaacgtctgaacttgtatggatgtgttcgttaacttccgggaaatctgggccttgaaagattggcttacttcctgtgaattttaagggtgccggaggttacaaccccccacccaggtcccacgaaactccatgtgattgttttaacccccccccgggaccaccccaggagatagtttcttttggtgtgtaagagagggggcccgcccggtattttctcggggaaactggacctttcgttgtaagtttccaagaaagaaggtttttggcccttttcccacgagggcgccacctgtgttaagagcctttatatgtcttgaaaaaaaggtggggccacccatatgaaaggttctttgtggtcgcacacatttgccccacgggccacagaagtctttctttgccggttatccaaactctcctatggaaggcgccttgcctcgtttcggcgagagggcccctttcctatttgtgttgttgcctcctccggtttcttacatcacatgtgagagaattgtgggggccacaaagggccctgtacgagaggttttgttgtgtgtttctttgtggagaaacacttcccgcaggagacacaccgagagggggctatataattccactgagaaggtttgtttgtgagatgggcctcgatgtgagattcccccacagccgcgagagagaccctcgttgtatagactatactatacgcttgagacacacttggctgttggcgcccaccgctggtgtggctccacagaacacggggtgttgctcggggcactcacaaggtgtaaagagtcactgcttggccctcgggagccccacactcggtgaaagaattggcgcctcaaagagagccccctcgcctcgagccacacgtggaggcactttgttgagaaccccaagaatgagatatctgcccacccaccccccactctcacgaaacacgaaagggtgggaaagccacgaagccgccctgccacatgccccacgccacgtccccaccacgcactaaaccgggtctccctggcacaactgtaattcctggagtttggatgttgctcttcttaagacccttttataaaattttgtaccaagacca

SEQ ID NO: 599602 - DNA, 1073 bp, Homo sapiens
gggctgccccggggaccctgccggccgctccccccgtcgccccgtgagcggcagcctgtcttgtggaccctgatgccctggtgtctgtctgacctgtgcccgcgccatcccctgctgtctgctgcctgcagtctcgccctccaagctccctgaggactgacgagcctccggcccgtgctccccctcctcgccggcagtgtgagaccacaaggcagagaccgatgtcgaccaccagacagaaaagaaaacagaaaaaaaaaaaacaaaacaaaaaaaaaaaaacaaaaaaaaaaaaaaaaaaaacagagagaaaaaacacacacacatggccaggacacgacacagaagcaaaacaaggaaacagacacacaaggaagacacaaaaccaaaaaaagacaacaaaagaagacaaaaaagagaaagaagaccaaaaaataacaaaatgcaaaagaaaaataaagaaagagaaaatgaaaaaaaaaaaaaagaatagaaaaataagaaaaataaaaaagaaagaagaaagaagatgagaagaaaaatatgaaagaagggaaagaaaaaaataatgataaagaaagaaaagaaaaaagaagagaaagaaaaagataagagaagagaaaagaagaaaagaaaaaattagaagatagagaaaagagaaaaagaaaaaaaaacaaataagcgaaataataaataaaagaacacacaaaaagaaatacaaaaaaaaaaagaataaaacacataacgaaaaaaaatcaaacaagacaaaccaaaaaacaataacagaaatatgaaagttaatgaatagtagaaagaaaaagaagagaaacaagtaggaaggagaggaagaagaacgagacataataaaaaaagagaagagaagcaaaagaggagaaaagacaaaagagaaaagagaacgaataaagcaaaagagaaagagaagagaaagagagagagaggaagcaagaggaacaagcagagaaacgactgataagagacacaagcaaagaagacagaaaagagagagcgacgagaagcagcatgacacttgcgcagtgtcttcaaatcaaaga

SEQ ID NO: 599603 - DNA, 707 bp, Homo sapiens
caggtagggaaccccgttaaagacccactggccctcacagtactcccggttcaagatcaatcgtgatgagacctcaagaaaagatggggacaatctatcatgccttaagaatagtagagagacacacatgatggggaaatgaggaggaaacagaagtttcatggacttcgcttccctggtcaccatttggatggccgctgaagccaatttggaatagtcccagctatttctgtccaggacctgaaacttactaccagatgaggaaaaggaaagcctggtattatccctctggcaccagaatgtttaattccagtagtctagtgcctttgccagaatccaatgcctactattttataatcgccatatatttaaagaaaagccaagacctgagccgaggagaggatgaattcaagtttccttacctgcgtatctactaaccaacatgagacctccctgttaccggtggtccagttggcccaaatgtactaacgggcaccatgaaagaaagacaccagccaaattacccagtgtctccagaaaatgcaccaaaacccatattttgaccagtttatttaatcccgtgtggtagaaaaggcaccattcccatgtatcatttagaattgaatgtcattaacctggctttgttctttggaagaaaccacttctttaaagagcttctttggctctagaaaaatttccaaccatta

SEQ ID NO: 599604 - DNA, 294 bp, Homo sapiens
acaactgtacctgactaccggctccactatagcatatgcgcagcagaatagagagagagggaagtaagagtcagaagcttatgtcgtttctgcggggaaacgccatatcgagggcaccgattattaggggaactagtcagttgccaaagcctccgcattaagcatgggtcattactatgcaagcaacattcattacaaatgccatgggcgtgtgcacgcatacacgttgtcagcatgtggtcgattaccactgtaagcattgcgttggcgtgggagggcatcctctcagcagtc

SEQ ID NO: 599605 - DNA, 378 bp, Homo sapiens
  misc_feature (13)..(13): n is a, c, g, or t
  misc_feature (50)..(50): n is a, c, g, or t
  misc_feature (78)..(78): n is a, c, g, or t
  misc_feature (90)..(90): n is a, c, g, or t
  misc_feature (231)..(231): n is a, c, g, or t
gcaaaaaaattantccctaaaattgaaaaaacttgaaaatgtgtatgttncccttacctaatttttaaaaaaatgtantcccttcccccnggcaggcaaagggtcgtcacgccctgtaatccccagcaccttcaggaggcctgaggtgggcggatcaccctgaggtcaggagtttgagacccagcctgatgaaaccctgtctctactaaaaatacaagaattagccgggcntggtggcgcatgcctgtagtatcagctactcaagaggctgaggtgagattatcgcttgaacccaggaaacggaggttgtagtgagcggagatcgcgccactgcactccagcctgagtgacagagtgagaatccatcttttaaaaaaa

SEQ ID NO: 599606 - DNA, 250 bp, Homo sapiens
gttcgatctagaggatcccagcggcgccctttttttatcaatgtattattcctgaaaaatggtgactgggggaactgggagactgagagggatgagaggattcctgtacattatatactcttttttttttttttttttggaaacagagtcgggctctgtcacccaggcgggagtgcaggggcgtgatctgtggccctatgccccccagggttcaagcaattctccggtctcaacctccggagtagctggg

SEQ ID NO: 599607 - DNA, 436 bp, Homo sapiens
gtgtgaacgctccagtcacgacgtgagaacgcacatgccacgacgctgactagccgtctcacactacgatgttcccaagcgatcctactgcctcagcctaccgaggggctagtactacaggcaggcgtcaccataatttttgtatttttagtagagacatggtttcgccatgttggctgggctggactcgaactcctgacctcaagtgacctgtcctggcctcccaaagtgttgggattacaggcgaaagccaacgctcctgtccaggtaacaactttagaatgaaggaaatatgcaaaagaacatcacatcaaggatcaattaattaccatctattaattactatatgtgggtaattatgactatttcccaagcattctacgttgactgcttgagaagatgtttgcctgcatggggagagtggagaaggccagga

SEQ ID NO: 599608 - DNA, 834 bp, Homo sapiens
gtttgtatctacatttttcccctcctggggttgcggggacagggacagaactacaggagtcatgggaaagaaaattctggcttcactactgctcactgctcactttctgatcactctgatacttttttttttttttttttttggcaaccgtgattacctttgaaaaagctttctagtggtgttcctcctccttttggtggcctgtggcagcgtgtcataggagtgactcacgtgattactatttacataagttagccacatgtgcaaattaaaagtggttgggtaaagtgtggaaaaaaaaaaaaaaaaaaaaaaaaaaaaaaaaaaaaaacaaaaaaaaaaaaaaacaacaaaaaaaaaaaaaaaacaaacaaaaaacaaaaacaagaagaggagcggcgcggcgcccccagaaactatctaccctccccgcgggcggcggcaaccacaacatcactcccgcgcagcacacacgaactttttagataggagaaaagaagggggcgcgcccacaataaagggggaggcggatctataattacaaagaacaacgggcggggggcggaggtaaaaaacaaaacacagtgagaggagagaaacaaacgaggcggaacggaagtagatactagagaagaaagaacaccatattttgtgggggggggggggagaacaaataggagatggaaaaacatctctaagaagagaataatttataagcgcttactgaggagaagatattaatacataatgaagggggtagttaaggtgggtaggcaaaaagagggaaagttagacggtggtgagaaaaaaaatttatgcgaaaccgtagaattt

SEQ ID NO: 599609 - DNA, 869 bp, Homo sapiens
gtctctgtagaccaaacgaatagatgcgctttacgtgtaggttattgaacatgtccatatcgggtctgtacgaggttcgtgtgtatgaaaagtgggtgagaattactctactaagtaatatagtccgggagtacatgctgtgccgattttggaggattacatggtgggattctgatgacagttatgggatcattataatatgaggcacatagtaactatagtgattcatcttaagctctgcagtggaatgtattttcaatttttgccacaagggggagaagttatttttatagtaatatgtacatttttttattttaaaaatagaattcacacaactttacagcatccatgaacattttgctatcccaattatgtgtgtgtgtgcatgtgtgtaaacaagattctgaaagtcttgcatgagaaaaatttcaaaggaaattaataacaaaacaaaacagttttgaagaacatgtgcacagtggacacaggaattgaacaaagtttaccatgattaacattatgtcttcttagttatatatcacatggaattcctttatcaactctaattaagaatctactggattagtgttctacaattctgctttttacaagaaaaattttttgacacaatcagacttaacagaagggtgtaacatactgtacaacataaacttttccctttcgggatgcacgaccacacacacgaacaaaacttttgggggctcggggcctcggaggagtttttgacacattctttggggccggcgccgtggtatggacatggccctggccccggagcccgggccgagtgggggtccaccaaaaagccgggcacgggttgaaccggggcgggccggctaagggccggc

SEQ ID NO: 599610 - DNA, 839 bp, Homo sapiens
gaggcttcgggcggccgggtattctccggtctcccaacgccgtaggagaagcttgtaacaggcagctggtagctggccctgccaccagcgctgtctagggacgtgcgctgagagtccatccgattctccctcagctctctgagctgaggccccgaaccagagatagggggcggtccggaagcctgtgccccggaatggcgaggaccggacggcggggctccctggggctgacgggcgtggagccggcgtccctgggggcatgctggaggcccccgctcggcctcctgctgcaggctgctgacatgcgggtgctgagcggggctgctgggcggcctgggggtgcatccggtacgctggggcgaggtcgcggtctgggagcctcttcagctggggtcgcttggcgtcgaggccccttgtgcgcggtgaggatgccggttcgtgcctagggagccctgactggccggtcttgggcagctgataacccacgtgcttgctgcgattgccccggaatatgcgcacagacgggaaaacctttggattggtccgcttagcatagatttgcgacgacgtaccagtggccacttcgctagccaggaaagaaggtggggagttccattctacagtgtagcattaggaggaattggcgcccaagataggagaagctttaaacgcgccggtatacacccggcaatgccctgggagctccagatggcctatggcgggcagaattaggcatggacgcaagggggcttttggcgtgagcactggtagaccactcagaatttgaaaggggaggcatttcttccagcgtggttgtcgacaaagaatggccggaagac

SEQ ID NO: 599611 - DNA, 196 bp, Homo sapiens
ccgcgtcacgtcttacggctggctaatggttgcacaccaatttttacctgagtacaacaaaagaacgtactccctcttttgcaaagagcaatgcagaacgaacaccacgaaaaccaagaaaagaaaaaaaagtcttaagaggaattatctatctatagttctatttccccgcaagacataaccgcgggggtaccga

SEQ ID NO: 599612 - DNA, 962 bp, Homo sapiens
ttaatttttttatttccctgtacacccccggccggctccagcggaaacattaattactgcaatatgaagaaactagacagtcagacctccaggactaggatgaagtgagccgagaggagatcgtatcataagaatgcttctgtcgttagccgggtgctgtgctgtgtgtgtctagctccagctacttgacaggctgaggcaggaggattgcttgagtccataaagtggcagttgcatttgagtggagatcgcgccactgtttttcagccttgtttggttgagcgagaccctgtctcaaaaaataaacaaaaactatatgcttgtcgtcgtccaacaatctttatgagaggggtttttagtgctttctttctcatcttgtctgtttatattgtgctgactaatcgcagggtatattgacttaattatatctttcttttgttatttgtctcgccccttatacctctaacactctttgatcgtctggtttgtatggtttcttctcccctctcttgtccgtctctctccgtctttcctcgctctacttatcttctcgattactattctattttgtttgcatcgactttattcctcgtcatatcacactattctattccttctcttttttgatttttctatttgttttctctgcctgttcgttcttctttaccttcatcttccatcactttgcaatatgactgttagcgctctcgctctattgtccccccctcctgctccctcagctgtttttctgcatcatgtggattctgctccttttggcggttattcatcttttacgactcattataatgactttatatatttacttagtatcattttatataattgttgttatatctgtacgtttgtagcagtgtttacgttagtagacgcgacgtgtcgactatttgtcggtcgttatacaacctattgtgtttttcctccctgacatgtcagcttcgtcg

SEQ ID NO: 599613 - DNA, 280 bp, Homo sapiens
gacaggcgatgtgaggatttgttgatgtactattacaattggtcaggctctcaatatgaaatttgatgatataagatggattggacctaccaggagggatagtcagagttcagtgtcagaaaatgtgtcaaattctggaataaattctgcagaaatagatagctcccaaattataaccaggcccccttcccttcagtctcttcacctcctcctggcatcaaaaacaaaggaggttccagatggccgagaatctggacaggatctcgtacctcctgatatc

SEQ ID NO: 599614 - DNA, 573 bp, Homo sapiens
  misc_feature (573)..(573): n is a, c, g, or t
tatccggcactctagtcatagtataatgatgactgtaggatcactgatagagtacaaagtctgctgtttgtcttcaatacagaaatcttaactaatatgatttggtctttctctgtgtgctgattggccatggtgatattggctataaggaatattaagcaagatactccttagcatgttttctctcccagggttgtggtggtggaagacaggtttcatggaagttcacagtgattatgtcttttaaaacaactcctaaggattagagacagagagtgccttaatgaacagtattaagatggactgacaagtactggtttaatgctaatctggctcatcattttgggacaggggcagatggtttgcagttgattaaatcacccactcaattcttccccattgagcagccatccaaatgacagagaaataaaggctaggataaggaaatacgggtgaccattgctcttgtattccattaggtaattagcctcagagtggtgtgttcatatatcacactacctgccttggtgaatactgggttttgatatgttcaccataatacaggctgaaaan

SEQ ID NO: 599615 - DNA, 166 bp, Homo sapiens
tgatatcggccgctccaatcgcgcgaggtcttgcgatcccccgctttcatccatagatcgtatgcggtattagcgtaactttcgctacgttatcccccacgactgggcacgttccgatactttactcacccgttcgccactcgccaccaggattgctcccgtgctg

SEQ ID NO: 599616 - DNA, 117 bp, Homo sapiens
gcaagacgctacttcccctatcatagaagagcttatcacctttcatgatcacggcctcataatcaatttccctatctgcttcccaggcccgtatgcgcctttcctaacactcacaac

SEQ ID NO: 599617 - DNA, 278 bp, Homo sapiens
gccttcgacatcagggattctgcagtccaacgtggagcacctacggagaaattgaagacacccatcagaagggctttgtgctcaagaatagaggctgatgtaaaaactacacccagtcttactttacacgctgattacgaagggacaagggcgttttagctacgaagcgtgctggacacataacagcggtggaccctactagaaactctcgaccgtaaccggaccgacttatgcgtgtcagctaccggaccgctagaacctgtaccgccctagggttt

SEQ ID NO: 599618 - DNA, 832 bp, Homo sapiens
  misc_feature (28)..(28): n is a, c, g, or t
  misc_feature (249)..(249): n is a, c, g, or t
tttatttataccactaacaatatcctcncccgaggtccaggatggtgcacaagtgaggcgtctcgcccgcccggagcggggaaccgtagtacggctatatttgtcgtcttcttaccgcgaccctgggcgtgagttcggcgcacacacgccccgccacagccaggggcgacaaagagccaaacagacagagaaggcggagaaatagacgcgcgacgcggcgcgctcgcccccccccgctgcccttgttcntacaacaccgcgactgtccggcggatttccgcagccagggaggggaattaatttaattttttttttgtcatccaatttttctcaaattctcatccaccttgcggtttatgttcgttggggcggtgttggtatgttgcgcgccgcccctgtacgtgcggcgggagcgtgatgtgtttctggtctcgcgcgggcaatataggagcgatgagggcgttctgtgagccgctccccgtggcttgtaatttccggatgtcgagtggagagtaatcgggtgtgagtggagtgataccgaggcttgccgtggctgtaagaagggcgtgttagctgagacccagggacgtgccggagagtgatcgcaggggtaaccgtctagattgtcctgcatttcgacttactatcctggatttagttagctactgtagtgatgcttccccacccaccgctttcagcgttcggaacacgatgagggagaggctcggacgtggtctggcggccggtcccaggctcaggggtcgtatacgcgacctcgtgtgccgtcgagttcgacgctttctgacaagagagcctatagtgatgtaccgca

SEQ ID NO: 599619 - DNA, 373 bp, Homo sapiens
cgtagactggttgctatctctactggttcttacttctcaaaaaaaaaatttttttttttgagatggagtctcactttgtcgcccaggctggagtgcagtggcgtgatcttggttcactgcaacctccactcactgggtttaagtgattctcctgccttagcctcccgagtagctgggactacaggtgcccgccaccatgcccagctaatttttgtatttttagtgaagacagggtttcaccatgttggccaggttggtctcaaactcctgacctcaagtgatccacccgcctcagcctcccgaagtgctgggattacaggcatgagcaccctgccaggcccagcgtctattgattcctatttctaggtcgacg

SEQ ID NO: 599620 - DNA, 110 bp, Homo sapiens
gtagcgccaagccctacatcacaatcaacaacttacaccccagagagaataaggatgtcttaacctatcagctgtaaacctaagagtgagaactacacctacatattggt

SEQ ID NO: 599621 - DNA, 1736 bp, Homo sapiens
  misc_feature (1241)..(1241): n is a, c, g, or t
ggagactccctaagggtgcgttatgctacgtgattgagctcgctcctgctggtggggggtgctacctactctcagagtctatcatgtctactgctaccgcgatgggttgtcgcttgttggtgtcgtctttctttcgctgcctccgccctctctgtggtattaagatgggagggcacgcaacgactgtgttttgctgctctgctgttggtatgcccctcgctctggtggtgtgcccttcgcgagccacactcgtgtgggtgggaggcacatcctcttaaggggggcgtcctctgacgttctcgctgcctgctggatggtgtgtgtgtaggggcggccgtcctcctctatgctctctggcgctctgcgtgtggtttcctgccctaccgagtccgcctgttggggtggtgcctccctctcctttctgggggtggggtcttgtcctcagcgattggtattatgagctaggtggtggtttcgtgtctggttggggtggcgccgcctcctcggccgggttggtgtgtcgtcaacgagcgaggatgtgtgggtggcgtggttagaaagaggagcgtggtctctgtgttgtggtctggttcttctgggtgttgccgcccccctccgtcggttggagtaagatgctgtctcttacgtcatgggtgttgttgttttgttgattgtggttgccccaccgccgtggtgtcctcctcggggggtgttgtaacatttgtgaagagtctttgtatccaccaccacaacaatggaggatcaatacgttgaataagagcccttctgtgcctttttataagatattatggggtgcccctctcctgtcgtattaataggcggggagtagatgctttgtaatgaagaggatgtagtgatgaggggggaccccaacatcaggagagaagaataagatgctgacatcatcatgaggtggttgatctcccgcactagaggtgttgttatggagaggcgttgttgttgttgtttctgtgcgcctcacgacacatataaggctctccgggggttgatgagaagagttgcgaaatgtcttgtgagaaatgttatgttcttcttgggggcagcccccgctcttccctgctgagaaattgggagacactcccctcacagcatggtgtctctctccccttgcgttgtgttgtggaaaaagagtgtgtgcccccctgcgagattttttttccccctcctgatacacacgcccacacctcttctcttctccncgctcttctgtcacacggctcactcgcgctgtgagtgtggccacagcatagagaagaatatatagagacacttgtgtgagagcccacatgtgtgtgctcacacttgggagagagaggagaaacacatgtgttcacatgctctggcgcttgtctcgcgagaaataggggttctcaccccttagacggcgctctgcgtagaggaccaccttgatattctctgttgagtcagtagatggtggctatggaatatatcacgtaatttaaaagcgacccacaaaataatggttaaaatatactctgagaatgaggcgtgtggtaattaaaaccacactaaataattacttgaggagtagtcgtggcggttcccgcggctgaaagtgagattcactgtccttattttagtcctgctttagtcccttgtcaatcttgtggtaattaagcttttcttttttaatacccaaaaaagtgtatataaaatataaacccgtgaaaaag

SEQ ID NO: 599622 - DNA, 224 bp, Homo sapiens
ccccccccccccccccccttttatttatagttgggcgcgctttcctagggggccggggggggtggggggttaacccccccccccccccccctttttcacctgtgttttggggggggggggggggggccccccccttgggttttttcccccccccctggggggggggggttccgcggggggtttgtttttttcccccccgttttttaaaaaaaaggggtttttta

SEQ ID NO: 599623 - DNA, 424 bp, Homo sapiens
  misc_feature (65)..(65): n is a, c, g, or t
  misc_feature (67)..(67): n is a, c, g, or t
  misc_feature (86)..(86): n is a, c, g, or t
  misc_feature (97)..(98): n is a, c, g, or t
  misc_feature (236)..(236): n is a, c, g, or t
  misc_feature (261)..(261): n is a, c, g, or t
  misc_feature (266)..(266): n is a, c, g, or t
  misc_feature (278)..(278): n is a, c, g, or t
  misc_feature (282)..(282): n is a, c, g, or t
  misc_feature (382)..(382): n is a, c, g, or t
  misc_feature (408)..(408): n is a, c, g, or t
  misc_feature (415)..(415): n is a, c, g, or t
  misc_feature (424)..(424): n is a, c, g, or t
atttaaatgagacattccaatatttttgaaatccctaacaatgcttccttgcttttaggattganangaaaggatttcatatcctnccaacattcanngattaaatgtttttaccttagctccagggccccccccccttttacgcttgtaaagtgaagagtgattctaagtcccgtgaaaccgtgggctgcctggggcttggctgtgcccactaacctactgcgcctggggggcancatggaaggggccagttggcatttnattancagtgccaccanggtnggcaatgcataaaagttgcattgccacaagtatgtaaaataaaaatattcactttaagaataataattctacttttttgaataatgtctttttatagccnccattggatttttctgggagtttttncccttanttcccctgn

SEQ ID NO: 599624 - DNA, 134 bp, Homo sapiens
atgtatacatgagatggatggatgggtgaatatatggtagatgatgggtaggtagatgatggatggatggatagataataaatgatagacagatgacaggtgacggagcattgttagaaggccagacgcagtgg

SEQ ID NO: 599625 - DNA, 175 bp, Homo sapiens
ctagaggatcctttttttttttaagaaaaacccatttaattggcgggatgtgggatgaaagaggaggattggggctcggaaattaaagatgcctccaaaaaagagggggctgtggagtctatctcagtgccagatatggtgacaaaaacttaaggtgtcctgaggaagaggacac

SEQ ID NO: 599626 - DNA, 397 bp, Homo sapiens
ggtactggtgagttctcctcgtatggtcgggacaccagctagttgggtgcacacgttgcccttcacccgtgtaaatctggcgtggggatatatacgtcggcgacgggagccggggcaggctcactgccatcagtgggagctggagctggtggaagtgggtagttctccacagctggagggtccttggcctcggtgcctttgtctgtgccggggtgggctaggggaggctcagcacctggcagcggtggttcccccggggccccatccttggcagtaggggtggtggtggcggcagccacggtggcctggaggacactgtaggccttgatgggagtgatgatgatctgctgcagctcctgcagagcgtttcgtaggttcccgccttccagcacaagaa

SEQ ID NO: 599627 - DNA, 148 bp, Homo sapiens
cctcacaagacctgaaccatcaatatgactacacatttgattggacaatgttaaggcagaagcaggaagcaggcagaagcaggaagcggcagaagcaggaagcagcaggaaccggcagcaagcagcaagcggcgtacctgaccaccac

SEQ ID NO: 599628 - DNA, 221 bp, Homo sapiens
gaaatgaaggcggaggttcatgaccgttaattcttgacttcggtgcatctgcaggcttaacaccacctagaacctgaaaggcttggaacttgcaccctctgaagccatggcctgaggtgtaccttggccccttttacctatggcaggagcagctgggatgcagggccccaagttcctaggctgcacacagcagggggttctggacccacaaaaccattttt

SEQ ID NO: 599629 - DNA, 201 bp, Homo sapiens
ctgagtgttacccacgctgttacggacgaagactctaggatctacatgccgacaaatgagccccagagctcttgtactttactctccatattacctccctaacttttctgatgtcacacagctactgaatagtagctctgggataacagccaggtgagtcccattccagaccctgaactgggcgtcctaggtacactttgc

SEQ ID NO: 599630 - DNA, 134 bp, Homo sapiens
tgattatgatctagaggatccctgatccaagtacacgttctcatgctgcacttgaactcccacctgccactgacattttgttcctgtgcgtttccgtagcgcacagcgtgacattgaggatctccatgaccaac

SEQ ID NO: 599631 - DNA, 1048 bp, Homo sapiens
ggtcgcccgggctcgaaagggggtgcggtgcccgcaggccggaggcccggcccgcggcagtgaggcgctctctccttcgccaccgcttgtcttcgttcaggacttgtaggaatgtgaagatttaggatccgacttaatcctgatacatgtacgatgtgcgaatcagtatctgaaagaagagccagatagcgaaaaggacgttgtgttgcaaatcgagtctatcaaagaggagcctacgcgtgggtagtgtgatttgaccaaagacctgtgagagcgacatgaattacccacgttctgtgtcgtgtcgccaaagagaggtagcgagcagccagtttcgcacggcgtcatgatggagttccggcggaaattttatatagcctggctttgccaggtaacatgctcaattcccgatcatctgcgtcaagatgtgctaaattttcaggagtgaaaacatcacacgaggaaggccattaaagcccctctcgaggcgagtccatgtcacagacatccgatactcgctggaactgttattacattgcatcttaccggcgacgggacgaggcatggccgtaaacacagatgccgactgttgacccgtcctatttcttatagaacactgcacaggcaagcgaggactcttaaattacttggcttgaggaatatattcgcacatagttcattcatgttcctgaaaaagctcatggatgagatacttcagaatcagactcatgaagaactcgggagtgcactttttgactggtagactggtccgagggacaccatctgtaaaattttcaagccacgaatatagaaacgaaattcatgcatctccaacaaatgtggcgcagtgcagcagagactgacgtccttcggggttacaacaacctgtgctcttacagaacaatcaatctagtcacatcacatcaataccccaggttcatgggtaacatcatccgatagcaactgcgcgagaacaggaccggggaaccccttaaaaattcctggcacgcaccgtatggtgaagcaccacctgttggcacccaatcca

SEQ ID NO: 599632 - DNA, 126 bp, Homo sapiens
agaagtggacccatctacaggtgaactccagtccctacagatgccagaatccgaaggccaagctctctggacccctcccaggaggacccacaggctgaaggaagctgccttgtacccacatctccc

SEQ ID NO: 599633 - DNA, 906 bp, Homo sapiens
actagttctagatcgcgagcggccgcccttttttttattgttttagtgaagttaaacaaacattgggataccgacacagacaacttgaaacagtttttttaatcttttaattcaggtgttaccctattggtgcgtgcgtgcgtgctcaagaagcgtggactccatacgagggtgtggtggtgccatctgtgtccctcttgaggtttcaggagaatttcataaattgtgacatatctccagcggcttgggagacagtcatccggaaagtttgtcccctagtaatcttataatatttctgcggtattgtagtgtctcacaatgtggttagtggccagggcgccccaatatataagacattagcccaaccaagtttgcggatatcagtggtgggccattaacaatctcataaccaagaccccgagaacattagggcagtctcacttgtgggaggaaaagccgtgatagtggtgcggtgtttgaaacgcgtaattaaaagtttgattgaaaagcaaacaagggggagaagcgaagcgacacattaaaaggcggtgctccaagttgtctagggtgccactcatatatgtgatgatcatcaaggccgcgtgggctttctctcagtgtggcacacaacaggcgtgacacactgcccagtacttgcacttgtccaccggagagccctcttaaactctcagtgttctcacaaaagggggctccacaacagtcgaatgctccgggttgacggggccacaatgtaaaaacgcccacaaatcactggggaacaaactaaccaaaaagaacacaacaaaaacaacagacgggggaggccccactcaccaacaagagaaacacccactacaaaagggcacccaaactgctgtcaagcagcattacccccagagaagtgac

SEQ ID NO: 599634 - DNA, 155 bp, Homo sapiens
atctcaaaaagagagagagagatgtaatctacataaaattcacacgttggaagtgcacaatccagggtttttaatgtgttcacaaagtagtgtgattatcactccagcctaggcaacaaggcaagactccatctcaaaaagagagggagcggtgg

SEQ ID NO: 599635 - DNA, 492 bp, Homo sapiens
tactttttggtatgaattggccgtttgtggtaaaacagagagcccttctactaaacgaagagaactctagcaaatttgtgactaaccaatggatcattattttcgccacagcctttctctctagtttaagggactttgtccttcatcactgcatcacgttcttgtcatacccttcctatttttctatgataaacaagtagctacgtctggtttgtcagtcaagcaatacttaattctttctaggggggggattttttttaattcagcttggggcatgcttgtataaatatccgtataagtctaattttcccgtcctagtagtgtcatgtccaatagtgtttttatcctgcccccttctaccctcccccttgagtcttagtgtccatatgcccctcgtaacccttttgtacccataagttagctttcccttataagtgagaccccccagtattgtggttttccattcctgagttgcttcacttagaataatat

SEQ ID NO: 599636 - DNA, 900 bp, Homo sapiens
gggcgatgcgtcactgatcggaggaacgagaatgaatatgactcaagcccgggttctggtggctgcagtggtggggttggtggctgtcctgctctacgcctccatccacaagattgaggagggccatctggctgtgtactacaggggaggagctttactaactagccccagtggaccaggctatcatatcatgttgcctttcattactacgattcagatctgtgcagacaacactacaaactgatgaagttaaccctgtgcctcgatggaacaagctggtgcgggtcatgcatctatattgaccgaatagaagtggtcaatatgtcggctccttatgcagtgtttgatatcgctgcaggaactatactgcagatcatgacaagaccttaatcttcaataaaatccaccatgagctgaaccagttctgcagcgcccacacacttcaggaagtttacattgcaactcgtcctgaagcagcagcacgcattgcacccagtggcacccaattcgcgtttcacgcacacccgctcatggcccccgcacactgacccagcgcatccctgaaactcgacgatgctgcacttcctggcccgagagaaagcgaaagcagatgctgactatcatgctgcacacaacctctgcacctccaacaagcacaagttgacccggcaatatctggagcctcaaaaagtaccaggccgatgcttctaacacgtaagatctactttggccagcacaattcctaaccctgttccatgactccataatggtaaatggaaaatataacacacacacgatggcaacacaaagcatactcccgacaacgacagatactaacccccgttacaaaacatacccagacacaaaaacacaccaccagtaaatactctacacgacaca

SEQ ID NO: 599637 - DNA, 172 bp, Homo sapiens
  misc_feature (24)..(24): n is a, c, g, or t
gtcgacgggatgtcctatattttncagggatcactgaaagtacacaccatagggctggcaagatgggggaaggtgctcgctgccaagtctgatgacttgaacctgtgtggtgggacagaacagactcctgcgaattgtcctaggacctcgatgtatgctgtggcaatgcttt

SEQ ID NO: 599638 - DNA, 861 bp, Homo sapiens
ggggtccccagtcgtgccacctcacccaccgtcaattcatttagtacgcatgtgcacaggggcagctccggcacggctttctcagtgcctatgccggagcctcgacgggctggaggcagcgggaagacatggcagtgctcgagggagtgcagcaggacatcaccaggagggcgaagcggccacgggaggggtggcccccgtgggacatttgcagcaggcactggacggcttgcaggtggcgctctggcccttggctgtgtgccgccgtgtgtccccacgaggggcacttgggggggcccagggggtcgtgggttgctgagacgaagggggccccaactagggtgggaaccttctgtgttggacgtgcttgttatttgcccccttgcgatcgcgggctcctagggcccccccttgggtgtgggcttggggctttgggccgcaatggaatcggaggctacgagggctaactcccaatgggggcgaacggtcctagcatgggcgcaatagggtcgtgcccgtatggacccagatggaaccttaagggcccgcagcggctggtggtctcggagtgttgctaccgagcactggttggacaactttcgactggccgtaccttccaaagcggaacggaggggaacggccgcactttgggttgggccacagaggccatggggcgctcgtacgccaagtgcgagagccggacaacgcactgtggggcagcagaggcagaaaagccctggcggcaacagtcgcacaattagtggttgcccctttcaccaaaggaaaacgaccccacgggttggggccaccaaatagagtgcgccggcgaggcgcaccctcctcgcagcgaggagcacccgg

SEQ ID NO: 599639 - DNA, 130 bp, Homo sapiens
  misc_feature (38)..(38): n is a, c, g, or t
  misc_feature (90)..(90): n is a, c, g, or t
aattcaacgcttctaacagatgtacggggcacatgaanaacattcctcctcccgcataacgcctgcgtcagaattaaaccacttgaactngacaatttaacacgcccacatatctacatatcaaccaaca

SEQ ID NO: 599640 - DNA, 129 bp, Homo sapiens
  misc_feature (94)..(94): n is a, c, g, or t
tgcccccctttgccagggggtaaaaaaggacaaaggtttttttgtggttggaaaaggtcctatttcaccccctttttcctgtcaaaagaccccncccccatgttttattaaaagggggggtgggggtga

SEQ ID NO: 599641 - DNA, 130 bp, Homo sapiens
gactgcatcaacgcgcattggtagagtgctgcagaagataggtccttgtaggattgtcgtactcaaggaatgctcacttcatgtccctctgtctccatgtccagtattccagacagcgctgtgctcagga

SEQ ID NO: 599642 - DNA, 1504 bp, Homo sapiens
gtgcaggctgaatccgttcaatccgtggccccactgtgtacagttcagagttgtggtctcacaagccacccagacgaggcggccaagtggatcaatcgcagtgacggtcatcaatcttaattctcgaaaacgatgaaatcgagaatatctacttcttataagagaagggttccagtatggagtccccatagattacttgagttcatagcgtacgcgctcatgacttcaattgttactgcgtagagcagcgttgggagagtgtcttcccatgctccccactgtgtccttggtgagacctcgattgctcagaagcgagtcctaattgatatgtcagtaaagtgaactggcagtgaatgacgaagcgttagggacaccgtggtatcgcgaagtaattactggcgttctctcgaggggccacgaggcagcgtgggtatcagagggggagactggggtatcccactcacaagcagagaagtggcgtgaaggcacagatggcataggcagagacgggccatttcgcccgtcactttcgagttgcataaacttcactactatgatggggaccatatacacactccgtggtagagcggacgtattgggagaaggctactctaagattacacttctctcccaatgcacccgatttagttcacccattaaatagaagttttggcttaaggccctggtgggtgaggaaatccagatccctccttaggttgacatcccaaggtgaggtggatccacgaagacggaatacccaaggaatgtttactgccccacttttccggttgagcgtttctatactttctccattacgtgtggctttcgcggatcgctcgtgcttatcaaggaactaacctaacgattagaggacatagagataaccgtcatgtacacaggttgggacacttggtcccagagagggaacatttttgccgatttttgtcccccaaattaagtccctttcgttgacttggtagttcgaacgacttcctggcgaatggaaaccatggagaagcgagcaaattccctaagggtgccaaggataaaggcgtccaagcaatcccccacgcgcaaatgcgaacaaattatccttccaaggccccttttcaagcaattggttgcacacgggaaacaaacagcaggtggtctgtgggttccaaaggggcaaaacgggcttggctttggaacattttccccaattttctaatgagaatggcccacacttaaagagcacaagggtttaattggaaaacggcctaagggaaagccgcgtcgccattgtacctgggtggtggtacaaccatggtgagtttcactttggggtgaacacacgcgattattaacttggattcaaccctaagacgtggggtgtcccaaagaggaaaggtggaacggaaactggaataacactttcacaggtttcagaacattcctttaaggtggggccacgcgacttcttgacttgattcccaacacacagcgggagagaaaacagttctaa

SEQ ID NO: 599643 - DNA, 286 bp, Homo sapiens
ttaggctgcccgcccagatttccatccagacaagatagtgcgcgtgatacactacccccattgggtcggtttcagcgtagcggacttcgactgtttttcagctactttcaacgtcgttcccccattcgtttgttgtttcttttatcttatcatatcagtgggaatttgtcccacgaagaaagcgaccccatcgttggggtcgctttcgtttatctatagccgttttcccttgctctcgcttcgtctttaatttcttcgcgcatcgcagcaattgctggttccgctg

SEQ ID NO: 599644 - DNA, 304 bp, Homo sapiens
ccaacccccccctttggggtttttggttggggaaaagggggtttttttttgaaacaggggccagaaaggccaggtttttaaaaaaaaaaaggaagggaaaaaaaaaaaccccccctttttaagaaaaaacccaacgggttttttaaaaaggtttttctcccccctttttttttaggtttttgattttcaggcccggggggcttttaactcaaactggggagacaaagggggttttggttccgaaaaatatgaaatttggaaaggttttatttgggaaaaaaaaaaaaaattcctttacccttta

SEQ ID NO: 599645 - DNA, 761 bp, Homo sapiens
tggagggcctgagagtcgctagtggaccatgtagaatgttgcagagtatgttgtacagagctctgtatcaccaagcccggaagagtcagagatgtatattggaaagatttacaattccatctacattggttcccaggacgctcgtcatagcgacattacccaagaatcgtacaacgatgagtaagaacacctatattcgttatgaacgttgagctatatcttagtagattcgattgtggatacgtcgtgtataagtgcacagctacttcacaccttaaacttgcttggatttggtgatgtaaagcttttaaacatatgcagatcaggtggtagaacgtgggtcatagaggaacgagctaggaagatccagtagcagtgacttcttgaagagtagacctggtcttggggttttggagtgtttaagagcatgtaaagtgccaggtaggtgaagcgaaggaagcagcaggtggagttatagtagcagcgtagtagcgtgggaggggacttttcgagtttagtgaagttcagtcgtgttagtggagaggactttaggagagcgtcgagtatcgcgtgtggtgggttcgtaagaaagggcgaagagtgggtgtgtagatgtgggaaggagaggagtagaaggcagtgtgtgggtggatagcagaagagtggcttaagaggggagaaaggaggaggggagagggggaggaggagagtgatagagaaggaaagagggagagaaggagaagagaagagaagagagggag

SEQ ID NO: 599646 - DNA, 144 bp, Homo sapiens
tgcccccggttgcctgattgggccccatgtggaaggcagatgcatgctcactctgtcacctgtgcctctcagaacaccggcagttaacgttcaagacattccacatgttaaaattatttattttgtaaggagaggttttattta

SEQ ID NO: 599647 - DNA, 276 bp, Homo sapiens
gttactaccagacaaccttagccaaaccatttacccaaataaaggtataggcgtatacaattgacacctcgcgcacataagatataggtaccccaaagggaaaagatgtaaaaacttatatcccacgcataaatatagcaaaggacctatccccctataccttcttgcataaatggaattaacctagcaaatatctttgcaaggggcaaccagagctaagacccccgcaaaccagacgcgctacctcagcaccacctatagcgcacacccctctat

SEQ ID NO: 599648 - DNA, 728 bp, Homo sapiens
ccggctgtataaaggcccgaaatacagtacagtacaaaaagtatcctacttatgcagactcaataaatagtcaatttagtacagataaatataggaaactactttaaataattggacaaataagaatttcagtagtgtcactaacctaataattaagtagcagcacaccacaaccacagcaagtaaacactaatctcctctactgccttatattaggggtctatttccagatcacagagagctaaattatacagggataaaccactgagtttcaaaccaaatctctagaaagttcctattatatatagagttttagaaatattacacaaatagcatacacctaacaatatcagtaagagctagtattttttacttaactacttccactaactcagaatttaaaataacacatatagtaatagtaattacaaatatattataaaacataaggtgtttgtacttaaaattgatataaattggcatattgaaaataacaacaaataggagtaaggatagtataaccaaaaaacaataggagatttaaagagtaataataagaaaagcgattaaataggttaacttagaaaaaggcaacagagattcacaaattgaatacaggatacaaattataaaaaaaaacctgctctataaattaatccagtagtatagtaaagtgcataaagttttagaagaaaagaatatttaggagagaattaccaaaacttgag

SEQ ID NO: 599649 - DNA, 110 bp, Homo sapiens
cggatccccctaaaaacttcccgcgcagtccggtaggccggataggcgtttacgccgcatcggcagtcgtgcgcagatgcctgatgcgacgctaacgcgtcttatcaggc

SEQ ID NO: 599650 - DNA, 323 bp, Homo sapiens
cgcgcatcttctcccatcagcttctcactcagcgcatggtaaggctggtcagaggcttcctgaatgaatgaacctcgaggactttgccccagacactgggctgctccatcagtgcgctgtcgttcgtgggtcttaaagttcccaagcacatccttccttctctgcctttcaatggaaggatcgggtggagagcgtggcaagcctgaagactgggagggggtagttctagcctgatgggagaagactgcgcgcatcttctcccatcagttttctttagttctcattacatctgtccaggctcttctatcagcatcaatcctttc

SEQ ID NO: 599651 - DNA, 736 bp, Homo sapiens
  misc_feature (143)..(143): n is a, c, g, or t
  misc_feature (165)..(165): n is a, c, g, or t
  misc_feature (268)..(268): n is a, c, g, or t
  misc_feature (309)..(309): n is a, c, g, or t
  misc_feature (314)..(314): n is a, c, g, or t
  misc_feature (331)..(332): n is a, c, g, or t
  misc_feature (362)..(362): n is a, c, g, or t
  misc_feature (381)..(382): n is a, c, g, or t
  misc_feature (387)..(388): n is a, c, g, or t
  misc_feature (422)..(422): n is a, c, g, or t
  misc_feature (425)..(425): n is a, c, g, or t
  misc_feature (434)..(434): n is a, c, g, or t
  misc_feature (438)..(438): n is a, c, g, or t
  misc_feature (441)..(441): n is a, c, g, or t
  misc_feature (475)..(475): n is a, c, g, or t
  misc_feature (486)..(486): n is a, c, g, or t
  misc_feature (488)..(488): n is a, c, g, or t
  misc_feature (494)..(495): n is a, c, g, or t
  misc_feature (498)..(498): n is a, c, g, or t
  misc_feature (521)..(521): n is a, c, g, or t
  misc_feature (531)..(531): n is a, c, g, or t
  misc_feature (533)..(533): n is a, c, g, or t
  misc_feature (535)..(535): n is a, c, g, or t
  misc_feature (556)..(556): n is a, c, g, or t
  misc_feature (582)..(582): n is a, c, g, or t
  misc_feature (584)..(584): n is a, c, g, or t
  misc_feature (600)..(600): n is a, c, g, or t
  misc_feature (605)..(605): n is a, c, g, or t
  misc_feature (612)..(612): n is a, c, g, or t
  misc_feature (623)..(623): n is a, c, g, or t
  misc_feature (628)..(628): n is a, c, g, or t
  misc_feature (636)..(636): n is a, c, g, or t
  misc_feature (638)..(638): n is a, c, g, or t
  misc_feature (640)..(640): n is a, c, g, or t
  misc_feature (678)..(678): n is a, c, g, or t
  misc_feature (680)..(680): n is a, c, g, or t
  misc_feature (687)..(687): n is a, c, g, or t
  misc_feature (689)..(689): n is a, c, g, or t
  misc_feature (692)..(692): n is a, c, g, or t
  misc_feature (695)..(695): n is a, c, g, or t
  misc_feature (701)..(701): n is a, c, g, or t
  misc_feature (704)..(704): n is a, c, g, or t
  misc_feature (709)..(709): n is a, c, g, or t
  misc_feature (717)..(717): n is a, c, g, or t
  misc_feature (720)..(720): n is a, c, g, or t
aaaaatgtggtggggtggggtcaattccatagtctatgacctgattcggtaggcgactgaaaaacatgtacaactcttaaaaaaagggaggaagaactcacacttaaccaagcaaagcaaggacaccgtgttgacatacacangtttcggttaacatggtatcanggaaagcgaggactgcctgtacttaaaatgatcattaagactaatgattctacgttttggcattgaggatgaatgcagatatatcgacataatgtatagcaangaatatttaccgtcacatttcatggaccaataaataacgcntttcnttctcaaaatgcccaannaaaatgtgggagagaaaatgttcatttatnttcaagattaaactttctnnctttnnatcatcagacttcagctgtaaatttatttcagtnganaggtttgangacntantaatgaatattctaaaattccggaaggtgtttanaagataatttnancctaannaanaaatcctgcctagaagtgacatnataagcattntntngagcacctactatgtgtcatngtgctaggtgatgtactacgttattncnatactccggtcacgtntcgtnctctcanttctctatcanaacgntacatgtnantntaactatatactgtacgctagttattatcataagtggncnaagagtncntancangagggnccngaagnactacctnttnctatcgtaagatctgt

SEQ ID NO: 599652 - DNA, 721 bp, Homo sapiens
atggttagagaaaactgaagacggcacccccatgggagggagacccgaagggactcagacggagccccgtgtggcagcgcctgggtgtgggcccactttggggacccaaccacaagactgtggtcggatgagtgcccggacccggtgtaccgggacacgtgggagtcctccccagcctgaagcttgactgacccgaggaaggtcctcaagttgtcgtgcctcgtcattctcggatggctgtgaggcattccttggccagggacgctgcgtacccgcggtcctcaccgcatctcacctggcgtcctgtgaatgcatgttgtcgctttcccccccgggagtctccctctctcttcccttcctgctgtcacgtaagagatcacatgtctgtgtagtgtgaatgccttgtcgctgtcctgtgcttttgcacccttgagttgagctgcctctgagagagcagcacctaggcctgttgagaatgccatgtgctgccctgagatcccgtttccagaatgggcacggtataacgcacgtgtgggagaaggaatgtgggatgagaaacttggtggttcaccgctgtactatttgtgtaaatgtttacgtatgtgataagctacatgtatgtaatgttgccataccccttaccgtcgagtagtagtctcccttaccgggatttttgacggggttcctcatcatccatacccaatcatatatgtaggatgga

SEQ ID NO: 599653 - DNA, 673 bp, Homo sapiens
cgctctcgccatgtttccagactgagagcctcgggcgcggagacgctgttggaaggaacgccgatatggctgatcagggagagccccaggtccagttcaaacttgtattgcttgctgatgactgtactggaaaaacgaccttcgtgaaacgtcatttgactgcagaatatgtgaagaagtatgtagccaccttgagtgctgaggttaataccctagaggtccacaccaacagaagacctatctaagtgcaatgtatgggacacagccggccagaagaaatacatcggactgagagacggctattatatccaagcccagtgtgccatcataatgtttgatgtcacatccagagttacttacaagaatgagcctaactggcatagagatctggtacgagtgtgtgcatccacatagtggagtgtggcaacaaagtggatattaaggacaggaaagtgaaggcgaaatccattgccttccaccgaaagaagaatcttcagtactacgacatttctggcggtactacaactatgagatgccgttactatgactagctaggaagcacattggagaccctaactctgtttgatgccatgcatgctctcgctccagcagacattgtcattgacccagcttttgcagcacagtatgagcactacttagaggctgctcagac

SEQ ID NO: 599654 - DNA, 271 bp, Homo sapiens
cctactttgtctgcttttctttatagtgaaacatctagaaagttttacttatacttccttagttccttatatccttttcattcacttcccacttcagttttgtctttgtcctcatcactacaccaaaatcacactttgaaagttacaggtttgcatctagacggtctattgtgtgtttctgtcccatttcagagtatctcagcattctacagtgttgatttcctcatcctgcagctgtcacctcctttggctgtcatgcttccctggtgta

SEQ ID NO: 599655 - DNA, 103 bp, Homo sapiens
ggcacataccaaggcacacacaccacctgtccaaaaaggctacgatacgggataatcctatttatacctcagaggttttttcttcgcaggattttctgagcct

SEQ ID NO: 599656 - DNA, 112 bp, Homo sapiens
catattctttattcgtttaattcctgttccattggttctttgaaaggacaaataatattgatagtaccattaacaagattaaccaagaaaagaagagagaaaatccaactaa

SEQ ID NO: 599657 - DNA, 194 bp, Homo sapiens
tttcttacgcgacatgatgtttctattcagtatcctccctctggccttgcctatgaaatgacgaaaaatggattggatcctgaagctgcctgcgggctgctctccagacatgatcctgcaggcatccctgcagacaaggtcattagcctgacagcagggacatgaacatactgcttagcaagctgtgatacctg

SEQ ID NO: 599658 - DNA, 750 bp, Homo sapiens
cgggggctagagtccgccgagccggacgtgtccgcggaagatggcggggcggtagcatgcaagcggaaagatgtcctacagatgaattatctttaaccacatggtgcagttgtgaatgaagaaggatttgccagtctggccagtcgatgtgattgtgaggacctcatcccaatcacaggtacacatttacactgaatgacacatccatcggatggttccagggagcattggcattcagttaacctcagagaaaatgggctgggcgtttctatcgggcaagaacatacgaagtctccttagtatacacttgtgacaaagcacaaacagtgtattggcacgaatgaccatcgagagttgattctcctgcagaaaaaaagcattgactccagcccttatgacaccgacaagatggcacgcagaatttagttcagcaagttcaacagaccaggccttctcagtgggacaacagcttgatctttagcgttcaatgaacagcttttctggcttactggtgaaggaccattgaagcccatggatcctagcatcctgaagggagagccgtgcgatagggaacaggcagacacgatgacagtaggactggttggttggaaacagttcaagatcgccatctgaccaacagcagaacgattcgtcactgacttctactggcaaagctacaaaccaaggaccgtcgcaaatcaagatactcaagtctgactggaacttgacaagagggcataggaggtgaca

SEQ ID NO: 599659 - DNA, 106 bp, Homo sapiens
gtttcgaagtgtgcggcacatgatctatgaccttattgattggcgatcacaaatctttcttggacctctgcttatgatgatcttaagaccttagaggatggctaca

SEQ ID NO: 599660 - DNA, 224 bp, Homo sapiens
ctagaggatcccaagttagtcgggacgaatggaaagtattactgaagtatagcctctaatgaggagtggcacttaaactatctgggacaccactactggacacggtcttgtagaggcagctgtccagttttggtgcttgactcttgaataggaattgttaaatggaaagatgctctgaggactaggtcaaagcctggtcttttttttttttttttttttttttt

SEQ ID NO: 599661 - DNA, 611 bp, Homo sapiens
acacatcctgggcctatggcgaggacgaacgggtgcgacgccgcaaacgcataaatgggctttatggcgcaacgggtgccccgtggacattacccccatagggtttcatcttcaggcattcttgggttttttgggagcaacattgcggtactggcacatattttcttagacaagactattatgttcagagagtgcttgattacactcgcccttctataggcaccccacaataataagaaccatctcgtcgtcgaggtcgtggtcatcgccccagagaatacccccccgggtagatgcccaacatatacaactatagggaaagatgggatgcaacgattaaaggaggaagttggatacttgatggagtgcttggggattcacacgggaggaactccacacgtggcacacaattctttacgcgcccacaaaatccttgttggtagccataaagaacggacacacactctctggggtgggtagcatctggtcgccgccaatatcatcctcgagaatacatatagtgggggaagttgcggccgacttacccacgatggataatgggttctttttaaaacaaaaaaaagggattcccttcccccgcgtacaaaaca

SEQ ID NO: 599662 - DNA, 171 bp, Homo sapiens
ctagcctcaaagatccaagaaacagctgtttgtggggcagccattggcactcatgaggcatgacaatgtatagggctggacttgctcgcccaggctggtgtggatgtaggggtttgtggactcttcccaggtgcaattccactcttccagaatcaatcatgatcaatgtac

SEQ ID NO: 599663 - DNA, 165 bp, Homo sapiens
gtgtctttgctgagggtcacaattgagctgcaggttgaatcccgggtgcccttaggattcagcaccatagcgggagacatgtagacccaaatcaagagctacaagacgacccctttgacaacagcgttcccaccagagcagactgaacatctggagactaccatg

SEQ ID NO: 599664 - DNA, 561 bp, Homo sapiens
ccatgtatgtttgtattcattattattggacatttctatcattccgcgtttggctattatgaagaaactatcatgagcatccatacgtggcaggccaggtctcactaacacaggcctccctaacaactgtttcagtaccgactgagtggttcaattaaatattaagaggaaaaaaaaaaagaagccagtgcccttatacaaaggctggaatgtaacaaaagcccaccaagagtttggcctaggttttccctgggccttaaagcatgacgaaataacgaaggcattcttaacaggagccatttagtataaaacgagttttatggggggtctgaagaaactccccaggcctccacaaacaagtttatggcagatctgaagggactctccaaacctctgtgatttagcaggagacaagataagggcccccagcacctagacccatttagattaactgaatttaactgaggtcccagaggaaggtcttcaggactcagacttatagattaacagaagttcatcatttatgtatttagatgaatgcgcccttccacatacacatat

SEQ ID NO: 599665 - DNA, 252 bp, Homo sapiens
gggaaacagctttcgcaacattgcaaaggcccaccccagatacgagtagagcagccggagcatgcgcgtcttggattgttcgccgttcgggatagaatgaagccggggcgaaacagatagaccgcgcggaatcccaggcgctgtagcgatgtttccgtcttgcctttgacacgcgcccacatgacggggcctcgttcggtggaatcggtgccgccgcctgatacgtagacgaacaccatggcggcgtgacgg

SEQ ID NO: 599666 - DNA, 644 bp, Homo sapiens
  misc_feature (577)..(577): n is a, c, g, or t
gctgctatatgtgttgaatctaatatagcagttcacacgatggtacaatctaacagcactaaatataaaattaactacgatactccaaataagaagcaaagatgatcacataggattcatgaagtctcagataacaacaacagtagcaagtagcagaaattaaactgatgtggaacaaagatagggtgaaggtaaaacgataccaaaagtacccgcatgccatcactaactgaagaaagagcttccacagactaactaatatcagacacgtgtgtactgcaggtggtgagcgatgtcggaggaagagaggcatttcataaccacccaaatgccgtgcaacaggtagataaaacaattatcaataagagagcaatccacttcatataatattcaaaagtatgtgaaccaaaaagttacagaactaagagacagactcatccagaagcgcagactctcaggggccgctgacccagcgttcctacttctggatctgtactcaacagaagtgtgaatacatgcacagcagaaggaggaaagaagctttcattgtaaaagcctagaattcagaatgtacccnatgtccactaacaggagaccggatacatgaactgtgggctattcatatcataccatattatatacga

SEQ ID NO: 599667 - DNA, 963 bp, Homo sapiens
  misc_feature (697)..(697): n is a, c, g, or t
ggcggttttcctgcctcagcctcctgagtagctggaactacaggcgccgcgccagcactcccggctaatttttttattttatttatttttattttagtagagacggggtttcaccgtagccagaatggtctgtgatctcctggactcgtcattccgcccgcctcgtgcctcccaaagtgctgggcttacaaggcgtgagaaatgcgcctggccatatactacttttgtgtaaatacctaggaatagaatggtttgtattacatggaataattggttttaaaaaaggtgaaatgagagagcgaaagtagaatatactcaccccaaagtttgcctcagagttgctggaggtcactcttattctctcatgttgctcagacctccacttcaagaacagggacaccacattgacattgtggtgcaaaacctggacaggaaagattccttcaggagacttggtaccctgtcctcaatcatcactccggggaagggcaattccacctatgacctgtgggtcctcaagaaccccaccagggccaagggaaacatttttccaccaaattgtgcgatatccacgtatggtcctcatttgacaaaagacaaactgtggagctggctataattggtttcatgtggaccaacaataattactttcagttgggaaaaccttttctccaaaacaaaagcttcaaggagaggncatccaaatagttgaaaaatggcttttccaagcaattatgtggtttcctgaagcaatcactgggaggttccaagtttggcatttttcccctgtgggtgcccggggaagaatggacaagtttgaggggaatttccacaacaaggaggaaaggacatggggcggtgcaattggtaagaatgccagtttaagtgtaaacgcagggcgaaaatatcatggcatacatattggagtgttgtggaatggcaaatggatctaaatgggtatag

SEQ ID NO: 599668 - DNA, 156 bp, Homo sapiens
  misc_feature (111)..(111): n is a, c, g, or t
  misc_feature (138)..(138): n is a, c, g, or t
gtgcagttgtcgtgagtcactggcgtcttcaccaccatggagaaggctggggctcatttgcaggggggagccaaaggggtcatcatctctgccccctctgctagatgcccnccatgttctgtcatggtgtgtgaaccnatagagaagtatgacaac

SEQ ID NO: 599669 - DNA, 469 bp, Homo sapiens
acgagtagagcttactaagtggcaggtgtagagacccggtgtgacggtcatgttcctcgagaatctttcccaggcctcttcttcctagagggattacgggagagctcccctcttagttggcagtttctccggggcaacattatccactcacacccttggctagggccagtgtgcccaggaatgctacatgtgagacccagacagcctcggatgagtccaacacctctacgggggtatccacacatgtccctccatccccaactcagggaacggcacccggccatggccacacacagagccggggagccaccatcagctcctctcttaaccctacagccaagggctaactcctaatatcaacccagaccttctctttaccccatgccagtcctggatccagaccgtccatggcctcaggccctccaccccacttctaaccagttctccttgcctcctggatacctagcac

SEQ ID NO: 599670 - DNA, 134 bp, Homo sapiens
tctcgtattatcgactgtagtgtgtgatgatggtgctgtaatagccactgcactccagcctaggcacacagaaagaccctgtctcttaaaaaacaaacaaaaaaatttatttttcctttttaggaaataatgat

SEQ ID NO: 599671 - DNA, 134 bp, Homo sapiens
ctcttccttcttagttcttcttcctcctctccttcttctcttcttcttctccttcttcttccttttcttcttttcttcttctcctttcttcttccttcctcttcttcctcctctcccccttctgtcgtcttctc

SEQ ID NO: 599672 - DNA, 676 bp, Homo sapiens
  misc_feature (79)..(79): n is a, c, g, or t
  misc_feature (157)..(157): n is a, c, g, or t
  misc_feature (196)..(196): n is a, c, g, or t
  misc_feature (497)..(498): n is a, c, g, or t
tggctgtaggcccgggtggttgctgccgaaaggggcaagttcatgaaacctggggaaggtggtgcttgtcctggtctgngacgctactccggacgcaaagctgtcatcgtgaaaaactattgatgatggcacctcagatcgcccctacagccagtgnctcgtggtggctggaattgaccgcatacccccgcaaagntgacagctgccagtgggcaagaagaagatcgccaagagatcaaagataaaatctttggtgaacagtgtataactacaatcacctaagtgcccacaagggtactctgtgggatatatcccctgtggacaaaactgtcgtcaataaggatgtcttcagagatcctgctcttaaacgcaaggcccgacggaaggccaaggtcaagtttgaagagagatacaagacaggcaagaacaagtggttcttccagaaacgtggggtttatagaatgcttggtttggactcattaaacttttaatagaannacaaacaaagagaagaaaaaaaagagcggagagatcataatattcggggtgggaacaagggttaattgaaggggagagtatatagttgtttggaccggtttttttgcaaagtggaaaaagcgggacacccatgaggagggaaaattgaaataccggtactttatgtgcgcgagaagta

SEQ ID NO: 599673 - DNA, 551 bp, Homo sapiens
  misc_feature (127)..(127): n is a, c, g, or t
tatgttcttgtaatagttggcatgtttctggttggatagaagctttcctgtgtaggagagctgatgctatggcagtagctaaggagttataagaacatgtgtttcctttatggggcatctctggaanaatctccagtgacagaggaactcattttattggacaaactatgaagcagctaaataaagtgttagaaacacagtggtactaccattgtccctttcaccctcagtcttctggaaaggtcaaaaggacaaatattttaaaactaaaattggcaaaattaactgaatcgattggattatcttggccaaagataccaccattggctttgaatttcatttttttctgatctctgaagaagaaagccaaccattgcctttggtcagcagatcagatccattcctacgacagacacagattgacccctatgaaatagttactagaaagcctgtgctcctaacagaacttcacgtagttcctactctcctaaatgctgatgccactaaatactacaaagctgtaaagcattctgtcacgctgtattttgaca

SEQ ID NO: 599674 - DNA, 414 bp, Homo sapiens
  misc_feature (401)..(401): n is a, c, g, or t
caggtgttgccaatgtgaagataatgagaggtgggacctttaggaggtgattaggccatgaggactcctccatccttcatgggattaaggcccttataaaagagcctccacagcttgggcacggtggctcatgtttatagtcccagcactttgggaggccaaggcgggtggattgcttgaggtcaggagtttgagaccagcctggccaacatggtgaaaccacgtctcacgtctaaaatacaaaaattagctgagcatggtgtcatgcacctgtaatcccagctaccagggaggctggggcaggagaattgcttggacctgggaggcggaggttgcagcgggctgagacggcatcactgcactccagtctgggcaacaagcgagactggcgataagcagtnctccgtctcaaaa

SEQ ID NO: 599675 - DNA, 855 bp, Homo sapiens
  misc_feature (193)..(193): n is a, c, g, or t
  misc_feature (224)..(224): n is a, c, g, or t
  misc_feature (234)..(234): n is a, c, g, or t
  misc_feature (263)..(263): n is a, c, g, or t
  misc_feature (318)..(318): n is a, c, g, or t
  misc_feature (321)..(321): n is a, c, g, or t
  misc_feature (323)..(324): n is a, c, g, or t
  misc_feature (329)..(329): n is a, c, g, or t
  misc_feature (577)..(577): n is a, c, g, or t
  misc_feature (767)..(767): n is a, c, g, or t
cgtatgctgagatactcacgccggatctcgcaccggaacttgcgagcgacatatgcggtcaacgagggcacacatagtacatcgcaggtattctttttctttgattgagtctccacttcgttgtgtcttattcatatgagttacttgtttaacgacttcgaacacacgcatcttattgacacacgaaatactntttgagcacttttacaacacgaagcaaacgntgcagtgccnttttttgtataatatatataacgcacttnttgtcgtgtcgagagaacatatgtggacgccttctcacactcctctaatgagacnganannagaanatcataaggagcgttttcacagtccattttcctggccacgcgacaaagagttctatctcaccaaaacaatccctttctagggatagcctgtatattttaccaacttctttacttttaccgcgacagcgcataatattttcaagatttactcgaggacagggaccattctcctcaacccatcttggatctggtttcaaaagccttttagaagtcttcaaaataggtgaacccaggaacctctactaaantcttatccatatacattatgaccgccagacgcatttgcattctaaaaacgtgtcttccaacgaacacacgcgaaaccatctaattttaatttctaacatatctccacactttgcaatatctcattatgctcgcttcaatgcaggggaaactatctctcatttctgcgttccacaaacagacctaatgaancttgtgctactttttgctactctatagcttttttcttttagggacacaccaacgccttaaattctcttagcgtttcttctggcgaccg

SEQ ID NO: 599676 - DNA, 519 bp, Homo sapiens
ccgggcaggacgccgccagcgctgaaggcgcagcccggaggccgcgcggatgcagatctgtggatccagcgtagcatcctgtaagcagctggggacattcatttccagggttttgggccccgcgtgtgtctgcgcaacaacgtggatctcgaagatgcgcagctcagggctgcctttgcgggtggtctacagccttgctcctgagttgccttgtgcgcttggtccttccctttttcccgaccaggcacccggtgccctaatggttggcaaccccccaagggacttgcaagttcctttcccaaggttccccacttgacgtgttcggtcgcgcccgaagcgaccagtcccttggcgcccgttcatgtgcccgctgctgtggccccttggggacggttttttacccccccatgtctatgtcttcccttgcctgcttcggggttggccttctttttcccccccttgtgctttggatttcttccccggggttttcccaagccccttttccttttgcggcccttg

SEQ ID NO: 599677 - DNA, 337 bp, Homo sapiens
cttttgctagaattaaggtagtttgctgcatgataaagtagtatggtctcatggtcaggagcttgggctttagagtcagtcctttgagttttcagtttcctctctgtaaaatgggaatgagagaatgcctgcttgcaaggtggctgtgagtgttagaggtgatggtaatagctatggctttattattgttgcatctttgttatatgaaagcgctgtttttccctgatgatggtgctgttattctgaacttgagagcagggtctgtgtctgagttgctccagggccccatcactcaacccaggactggggacatctcagggactttcacattcttttg

SEQ ID NO: 599678 - DNA, 1409 bp, Homo sapiens
  misc_feature (314)..(314): n is a, c, g, or t
  misc_feature (1409)..(1409): n is a, c, g, or t
tttttttggaggggtgtcctttttatggggaaaccttaaatactggttcaagaatcaatcaagggctcttgtgccagcctacacagaaaaatggaaggctttttgggtgttagggcgcaaggaagagatgacagtacaaggggacaaagacccctcacgatgaatgtgctctttcagccagcctttatctcagcttttgtgccaacagctttcttctcaatgtgggtctcccacccattattatagaaggccgtgtttcgtgggaagagtggctcatatattctcaccctgtgcacaaaatctctgtgcgtggnaatctcctgttgtgagtggtctctctcctgtctacaggggcgtatcacccaggcttctccccatatattgtacccgtgtgtgaagagacctctctagacaacccgtgagaatgtggcgtgagaaaacaagagaaaaacgcgccgtgtgtatatttgtctccggtgtgaccacgcgggagacacaacgcgggcctcaaacctgtgtgtgtctttctcccctctcacagaaaaaggtgtctcaatctcacatatatcccacaggtagatgtggggcacatggtgaaaatatctcctgtgagaggggcgattttctggagacacataaggttctctaatagagatatcgcgcgaaagggcgagggccgcggtctcctataagaaggatatatcccccctccagaagggggggccccccaaaaggctatataacccgcggattacccccaagggcgttctccttttcggttcacccacaaagcggggtgtggctccccccattaaatatagggtgggaagcctccgggaaaattaataattaaacgacattatgaggccacttgttgtggcgccggatatcagcagtttattaacacaacagccgtttcgtcgtaggcacccttgtggggaaaacaacaccgtgggggtaaaacctcttgggggaacttcctttctgggtcggaacaacggggaacaaacccctttataaacttccccgttggagggcgcgggtgggtggtgggcacccactaaaaatcgtctggcgaccaccacaaaaaccattataacccctcttatccacaggagaaggcactctatttaacaaaaaagggcgccccctaaaagaggggggaaaaaaaccttcttatctcaaccacacctctcttttaacaacaaggtggtgcacctatctacactcgggtcgtgttcgaaacacccctaagcgcctgcgcaataaataatgagttacttgactagccgccctttcataaccaagcaactttctgcgccactacacccggagaggactaccacaacttctttgtgcaaccaaattttaatcgtgcggcgtcgtctcagactataactactaaaccn

SEQ ID NO: 599679 - DNA, 194 bp, Homo sapiens
cttttttcttgtaaatttgtttgagttcattgtagattctggatattagccctttgtcagataagtagattgcatttttgtataaggtgagaaaagaggatccagtttcattcgcctacatgtggcttgccaattatcccagcaccatttgttgaatagggtgtcttttccccactttatgtttttgtttgctt

SEQ ID NO: 599680 - DNA, 457 bp, Homo sapiens
  misc_feature (99)..(99): n is a, c, g, or t
ccgttttggtaaaaagcggaagatggccctaattcttgaagtctggggaagccgccattgttgatatggttcctggcaagcccatgtgggttgagagcncccagacctacccacctttggggcgctttgctgttcgtgatataaaaccacacgtttcggtgggggtcctcaaaaccgtggccaaaaaggctgctggagctggcaaggtcccccagtttgccccaaaagctcagaagggttaatgaatattatccctaaaacccgcccccccccttttaatcagtgggggaagaacgggctcaaaaccgtttgtttccattggccccttaagtttaggaggaaaaggctgggttatgatacccatgcctcgttaacccctccaaaggaaaggagaatgttttgggggcccccttgggttttttttttggggggggccggtttaaggtattaggttttt

SEQ ID NO: 599681 - DNA, 411 bp, Homo sapiens
  misc_feature (6)..(6): n is a, c, g, or t
  misc_feature (27)..(27): n is a, c, g, or t
  misc_feature (37)..(37): n is a, c, g, or t
  misc_feature (72)..(72): n is a, c, g, or t
ctttcnaaacccccaatgttatattgncctgtctggnaaatgtttcccttatacaactcaaaggggaagagnggaatatgtccgtgagtaaatggaattatttttctctgcacccacatcattataaaaactcgaagaggttgggtgccagtgtcacgcccatgatcccagcactttgggaggccaaggcaggtggatcacttgaggtcaggagatcaagaccagcctggccaacatggtgaaatgctgtctctactaaaaatataaaaattagacgggcatggtggtgggcgcctgtaatcccagctactcgggaggctgagccatgagaatcatttgaacatgggaggcggaggttgcagggagccgaagtcgcgccactgcactccagcctgggtgtcagagtgagac

SEQ ID NO: 599682 - DNA, 181 bp, Homo sapiens
gtagagagatagagggatgacagaaacagaagcctattgagctctggggacagggaagcctggtcagcgtgtcacaggatacccgaccagcccaaggtcttcccgctgagcctctgcagcacccagacagactggaacgtggttatcggctgcctggtccagggcgttgttgccccaggaa

SEQ ID NO: 599683 - DNA, 242 bp, Homo sapiens
gattcggatacgacaacacaacagaagggaggtcagatcttcggcacagaaaaagtgtaatattacgttccggagcagcgcaagtttgatcacaaagctgtggcctcccaaattttaccaaaaatcaaagctattcctcaggtccagggttccctccgatctgggtttgctctatcgaatggaacttatcctcccaaattggtgtttttaatgtcttaagaacctaattaaatacctcactg

SEQ ID NO: 599684 - DNA, 337 bp, Homo sapiens
  misc_feature (35)..(35): n is a, c, g, or t
cctcccaaagtgctgggattacgaggcatgagccnaccgtgcccagccccattcagtatatatagcttttccaaagtatgctattgatttattcatttatatagctttatacaggatgagtatccctaatccaaaaatctgaaatttgaaatgctccaaaatccaaaacattttgagtgctgacatggtgccataagtggaaaattccatacctggggccaggcaccatggctcatccctataatcccagcactttgagaggccgaggtgggagcattgcttgagcctaggagtttgaggccaggctgggcaacacagggagaccacacctttaccg

SEQ ID NO: 599685 - DNA, 760 bp, Homo sapiens
ccccaaataaaaaaacctggccccccccccttgtgggaacaaacacccttaaaaaaaaggggggctctttaagagccccccctctgaaaacccaaaaaaaaagaacccttccgggggggggggcgtttttccccctttaaacaagggggggaaaaaaggccatttatgccggggtttttcttaatatttgaaaaaaaaaggggcccagcccgggtaatatacagtttgaaaagggttgggccaagggccccccccggggcccctttccaaaaaaaggccaaaggaaaatgttccccccccaaaagggggaatccccggggctaggcttcaaaagcgcggccccaaaaatggccgagttgcatgaaagttaagccacctgtcagaaaatggatttaagggggtgccaattgatcccattagagcggatcggggaccaacaagcttggatttgggttcgcaattgcccgggccccttttggttctaaagggaaagtgcggtcccattatcccaaagttaggaattaaggccaccaagaaccttatcacgccacgcatagaggtcaaagcccggctagagggtatcagcaaaggggtgctcctagtcatgagaggacttgggagcgcctccctgggggcacccttgaggggccgtacatagatgattatcctgttaggggttgtgatccggccagctttctggtgttcagaatcaccgttatccaagcggagggtttgaattttctagaaagcctctacctgc

SEQ ID NO: 599686 - DNA, 414 bp, Homo sapiens
ttgcgcctcctaatacctctcccctcagcacactggcctcctggccactctgccaataggactggctcctggtcacctcagaggcacagcgccagcacccctgcccatagacctcacctccctcatagctgcaaggtgggaccctcgggtgcctggaaggctcagataccaccttctagagacctgcctaccaccttcacggtgctgcctgaccctgcagcctcagcctcccctgctcctgctctagctccagctttcctttgctcccaaggctcttagctcctcacagttgtgtaatttacatgttcgctgggggctgattattcattgcctgtccccactgcgcaacggagctccatgaggtggggacatggctgcttaattcacgataacgcccgcaactggtacggcggg

SEQ ID NO: 599687 - DNA, 251 bp, Homo sapiens
cggaccttttctgccaacgcttattttgaaatgatgtatgcatttatatgtagaataaagcaaataatgttaatgtagtaatgaaccaagattttcagcttaagaggtaaaatcaaagaatatttaaaaacccttataatcttaacatttgaatggaaaacagtatgaattcatatttttcaaaaatacatgtgtatatcccatgctaaagtagttaagggtgaagggtcctgatctctaatacaacctca

SEQ ID NO: 599688 - DNA, 243 bp, Homo sapiens
tgaagattagtcctgccgttatctgtgtactcgctggttcattaccattggtggctaatttatttgatggtaagggagggatcgttgacctcgtctgttatgtacaggatgcgtatggatgggagggcgatgaggactaagatgattgcgggcagagtatacttcagatcggtttcgtattgtcctgagcgtctgagatgttcgtacttagttcgttgtgtcgtgagtgtgaagactatggcg

SEQ ID NO: 599689 - DNA, 305 bp, Homo sapiens
tgtcacccaggctggagtgcagtggcacggcctcggctcaccgcaaccttcacctcccattccaagtgattctcctgcctcagccacccgacagctgggaccacaggcatgcaccaccacgcccagcccactcttgcattcttagcagagacaggtcccaccacctcggccaggctggtctcgaactcccgaccccaggcgatccacctgcctcggcctcccaaagtgctgggattaaaggtatgagccacctcgcctggtgtgagccacctcgcccagcctgagccacctcacccagcctaagc

SEQ ID NO: 599690 - DNA, 261 bp, Homo sapiens
ttttcttttagcccccttaaaaaaaaaaaaaaagccccaatgggtgagtgtggtccgttatataccctgaattgaacctttggccctagggatcagagccttttgtcatatagcctttacatgttttattaaagggcatagtgtcaaagggatagaaccccccgccttccaaaacagctttgtccactaggccattaaacccttttcagcatatccctttgttgtccctcctttaaaaccctggcagccacttttgaatga

SEQ ID NO: 599691 - DNA, 219 bp, Homo sapiens
agcgaccgacgctaaatgggatgaaccggatcagcgaaggaggcacctgtagaaggtgaccgtcgtcaaggggctgggtgtctcaaattcgctctcacacagccgttgcttaaagcagtctccccgactgctgggtgtttaagatggctgtggggactcgatcagctttataacgtcggtgatagatcttttatgtttgctatatactcactttgtgaa

SEQ ID NO: 599692 - DNA, 403 bp, Homo sapiens
aaagctaaattaaccagataagtctttctgaaagttttagtgtcttagtttgttcctgcgctgtaacagaataccttagactgggtaacctataaataataggaatttatttctcacagttgggtgcgggtgtcgcgcctgtggtcccagcactttggggggccgaggcgggtggatcgccggaggtcagaagttcgagaccagcctggccaacgttgtgaggccctgtctctactaaaaatacaaaagttggccacgtgtggtggcgggcgcctgtgatcctagctgcttgggaggctgaggcaggagaattgcttgagcccgggaggtggaggttgcagtgagccaagatcatgccattgcactccagcctgggcaacaagagcgagactccatcttgaaa

SEQ ID NO: 599693 - DNA, 109 bp, Homo sapiens
cccactcaccttaccacagacaaccttagccaaccaatttcccaaaataaagtaatggcgaatgaaatttgaaccctggccgaaatagaatatgtcccgaaagggaaag

SEQ ID NO: 599694 - DNA, 266 bp, Homo sapiens
  misc_feature (1)..(1): n is a, c, g, or t
  misc_feature (11)..(13): n is a, c, g, or t
  misc_feature (22)..(22): n is a, c, g, or t
  misc_feature (39)..(40): n is a, c, g, or t
  misc_feature (52)..(52): n is a, c, g, or t
  misc_feature (57)..(57): n is a, c, g, or t
  misc_feature (68)..(69): n is a, c, g, or t
  misc_feature (74)..(74): n is a, c, g, or t
  misc_feature (77)..(77): n is a, c, g, or t
  misc_feature (84)..(85): n is a, c, g, or t
  misc_feature (136)..(136): n is a, c, g, or t
  misc_feature (160)..(160): n is a, c, g, or t
  misc_feature (249)..(249): n is a, c, g, or t
  misc_feature (263)..(263): n is a, c, g, or t
nacattataannntaaaacatncccacacttatacacanntaaaactagttnccctntttttccagtnntaatntgnacttttnnttttttgcaatttttgaaacagctacattaatccctaaaaatcccaccatnctgaaaatgtatggcgtgtatttnctatagtaagtaatatgaggaaaacatgattagctgtgccaaagaaattttatacattgtttacatgatgaggccacagtacttactgngggcttcatatggnttt

SEQ ID NO: 599695 - DNA, 229 bp, Homo sapiens
tatagacacggctcccctacttcttcagctactgcagagctgaaagggcagatgaaaacttctacagctccaacttctatttacacaaacctctaagctacaacatcagcggcgacttctgcaaacgccaatctacagacagcaagctcaactgctagccatttcccctgactggcttggcctcctctttccttccctgctgctgctgacaacttccctactcctagct

SEQ ID NO: 599696 - DNA, 182 bp, Homo sapiens
aagcacctgggctccagcgcgaagccccccggcgacaagacgctgcgcaacgtggggccctcggtcacctacaagctgcgggacgcgagcggccagtcgcgcgagttccacaactacatgctgccgatcgaactcgacgctcagcgcgtgttcttggccggcgtgcgcgacagcccggccga

SEQ ID NO: 599697 - DNA, 185 bp, Homo sapiens
ttgcgatccaaccatcggcaagccgattccgtgtgcttgatcacggggtgggagggaaccgtggcgtacccagcgtgggcccatgggtgagacactccagtactgagacctagagtccagatactttgtaggagccaagtcgtgttctaagtatttatttaaaacaaaaagataccgttttttta

SEQ ID NO: 599698 - DNA, 142 bp, Homo sapiens
tctagagatccccctcccctgtacgggacatacattgccctgtgggctcgaggaatggaagtggtccttttctaccgggagttgatccactgcgttttacagtttgtcattctctctgtggcacaggagaaattcatgttag

SEQ ID NO: 599699 - DNA, 162 bp, Homo sapiens
cctagacatttattccaaaggaaatgaaaactatatattcacataagaatttatacacaaatgttcatagcactttatcagtaaaagcctcaaagtggaaacaagatagatgtccctgtcaagtaggtggttaaattctgctatatccataccatgaaatac

SEQ ID NO: 599700 - DNA, 818 bp, Homo sapiens
  misc_feature (93)..(93): n is a, c, g, or t
  misc_feature (322)..(322): n is a, c, g, or t
  misc_feature (359)..(359): n is a, c, g, or t
  misc_feature (361)..(361): n is a, c, g, or t
  misc_feature (369)..(369): n is a, c, g, or t
  misc_feature (372)..(373): n is a, c, g, or t
  misc_feature (397)..(397): n is a, c, g, or t
  misc_feature (399)..(399): n is a, c, g, or t
  misc_feature (412)..(412): n is a, c, g, or t
  misc_feature (415)..(415): n is a, c, g, or t
  misc_feature (424)..(424): n is a, c, g, or t
  misc_feature (448)..(448): n is a, c, g, or t
  misc_feature (470)..(470): n is a, c, g, or t
  misc_feature (488)..(488): n is a, c, g, or t
  misc_feature (510)..(510): n is a, c, g, or t
  misc_feature (575)..(575): n is a, c, g, or t
  misc_feature (577)..(577): n is a, c, g, or t
  misc_feature (588)..(588): n is a, c, g, or t
  misc_feature (624)..(624): n is a, c, g, or t
  misc_feature (631)..(631): n is a, c, g, or t
  misc_feature (636)..(636): n is a, c, g, or t
  misc_feature (645)..(646): n is a, c, g, or t
  misc_feature (666)..(666): n is a, c, g, or t
  misc_feature (671)..(671): n is a, c, g, or t
  misc_feature (675)..(675): n is a, c, g, or t
  misc_feature (681)..(683): n is a, c, g, or t
  misc_feature (685)..(685): n is a, c, g, or t
  misc_feature (694)..(694): n is a, c, g, or t
  misc_feature (697)..(697): n is a, c, g, or t
  misc_feature (705)..(705): n is a, c, g, or t
  misc_feature (718)..(718): n is a, c, g, or t
  misc_feature (721)..(721): n is a, c, g, or t
  misc_feature (730)..(731): n is a, c, g, or t
  misc_feature (734)..(735): n is a, c, g, or t
  misc_feature (743)..(743): n is a, c, g, or t
  misc_feature (750)..(750): n is a, c, g, or t
  misc_feature (757)..(757): n is a, c, g, or t
  misc_feature (763)..(763): n is a, c, g, or t
  misc_feature (770)..(770): n is a, c, g, or t
  misc_feature (776)..(776): n is a, c, g, or t
  misc_feature (787)..(787): n is a, c, g, or t
  misc_feature (790)..(791): n is a, c, g, or t
  misc_feature (797)..(797): n is a, c, g, or t
  misc_feature (799)..(799): n is a, c, g, or t
  misc_feature (804)..(804): n is a, c, g, or t
gaggggccgagagaacaaggggggacaacacagcaggcggggaccgggccggaaggcccgggagcacaggcgggcgggaaaacgaccccgaanagccaaaaggggaaagcgcaaaagcacgcagagcaacaggggcggcaggggacacggagaggcgggcaaggccaccacgacgggccagcggagcgagaaaggcgggggcagcgacaaaagaaccagggaaaaaggggagaaggaggcggcggagaggggaaagggcgccggcaaggaggccgggggcggggagaaacggaaagcggagcgggaacgggggagcaccagngagagcgccggggggaaaggggagaccagcaaggacnangggacgancanngaggccccaggacacagagacggnancaaaaacaggagnacngggacagcncaggcggacggggcgggccggagnggggcggcgggggggggggaangggaagcggggagcgccnagaaggggcagacccgagagcnggcccggcgggcggacacacggggggggaaacaacgaaggggcggggggaacaaaagggaggccncngagccacccgncagccagaagagagaggaggaaagggggaaggaagncagcacntacantaagaaaannggcgacaaccccgacacagnagcanttgngccaannncngggtggaanggngacaacangcgggagccaagngcnaacatgccnnggnncaaggganggaaagncacccgnaaggangggcaangccagnggaaccacgcngcnngaggcncnggacngcagccgaccacca

SEQ ID NO: 599701 - DNA, 484 bp, Homo sapiens
taaaatagaatgtaatgggttgaagcttttataaaccttgtattagagacatttttattgtgttctcacctcatgcgaagggtgactcctttaacatgccaccaaagattttttttaaacacttggttctttttgtgtgttaactttctaagccaaattaatggatatataagtatatctaatttagctttgccacagtttgatcaccaagaagccaaagctgacaccccgtaatgggctttagatagcatatatgtttccttggtgaacaatgtgtgtgtgtgcgcgagcgagtgtgtgaacattttcacccccaatggtatataaccagatgttgtccatgtataaaatgggtacaagtccacatagtttaacaaatgttacagtgcccgtgccaaagttttaatggcctcctcccattccctctatgtattatgaatgatgtgcctttattaggcggctaagaataagccactgggcaatt

SEQ ID NO: 599702 - DNA, 389 bp, Homo sapiens
ctttcagagacagcagagcacacaggcttctaggacaggagccaggaagaacccaccggagggaaccatctaactgtgtgtaaacatgacttccaagctgcccgtggttctcttggcagccttcctgatttctgcagttctgtgtgaaggtgcagttttgccaaggagggttaaggacctaaaatgcaagggcataaggccatactcaaacctttcccacccaaatttaatcaaggacctgaaggggatgggaagggccccccctgggccaaccccgaatttattgcaaggtttttgggtggaaagaaagctttgtttgaccccaagggaaaccgggttcaaagcggttgcgcacagttttttgaagagccttggcatttcttactact

SEQ ID NO: 599703 - DNA, 872 bp, Homo sapiens
taacccctctttattttttgggctcaaaaaccaatttaaacccccccgccattttaagagggggggaggggaacataaggacaataaatctcacaggaagccatgctctggtgaacccacctcgttcggtgcccccggagatttgattgcccctgtgattgtcgatttggtggtttacacctcttgctccctgtgtatggcttgggaggtaggactatgaggagtgtggacgccgtctctgtgggcggcgagccatggtcgactatgtgatgcccctttggagagacttctctaacgggccgatgggaacaagagccgcagttgtgcgcgcaccagggattcgtgggggacagaagggtggtggggtcacccgcaacaagagtgtccagtgagaggcgcgccggaagcggcgcgagtgtctgggcgaagaggggacctctcccccaggagtggatcaagagagagggttcgaccggagacgcccacagggagggtggggcacccctgtgctcgtcgccatgcggtgcttgagccccgaaagagacaagagtgggcctcgccaagcgggttggttgttaagccccgagagggtgcacaaatcgaagagggcggtggtgcgcagggaagtcagcacggcttccaccgcgaaacacttgtgaaggggacaccacactcgccaattttcccctgtcaggggagccaacagatcttgtgcacgcgcgcctccctattaaggaaacacagtggccggatctgatatatccacacaagacaaggtcgccacgagaagaagtctttggcggtagggagaaccacttacctatcgtggtgggagcgaacaccgtgaggagagatgtagcagcccccaaggg

SEQ ID NO: 599704 - DNA, 201 bp, Homo sapiens
cccgctcccgggaggtaccactattgatgccgaacttagtgcggacacccgatcggcatagcgcactacagcccagaactcctggactcaagcgatcctccagcctcagcctcccgagtagctgggactacaggggtgagccaccgtgcccaacctcacttgcttcttatccttacactcccccagccccagagaaactgg

SEQ ID NO: 599705 - DNA, 414 bp, Homo sapiens
  misc_feature (10)..(10): n is a, c, g, or t
  misc_feature (35)..(35): n is a, c, g, or t
  misc_feature (43)..(43): n is a, c, g, or t
  misc_feature (45)..(45): n is a, c, g, or t
  misc_feature (123)..(123): n is a, c, g, or t
  misc_feature (134)..(134): n is a, c, g, or t
  misc_feature (171)..(171): n is a, c, g, or t
  misc_feature (227)..(227): n is a, c, g, or t
  misc_feature (244)..(244): n is a, c, g, or t
  misc_feature (277)..(277): n is a, c, g, or t
  misc_feature (282)..(282): n is a, c, g, or t
tggggggttnggccaaactttttatttaatattcnggagttgntnaacacacacttaaatggttttattgggggaagggaaaggggaggtttttgcaaattcccaaggaaatgtcaaaaaggnaaaatggccancattatccatttgcttttttgggtttactgggggaanaacactttccttacataggcatgtgatttcaggtttttcgtactgaaaacattganatttcagttggaaaacnccctgaaattttatgagtagcataccccaaccnccctntaataactagcttgtttgtataggtaaaatgattcatctttccattttaaagggctaaatgttttggggaaaaacttaaaattgcctgcctcatttgctgggaaaaatcaaataggaaggggcctttagggg

SEQ ID NO: 599706 - DNA, 236 bp, Homo sapiens
tggtcatgggaaaagtttatggaaaaaaaaaaggtacaattaagtcctgggatggatagcaacaagggctcatgtccccccttccctccctattcttggaaaaattaaaaagggaagaaacaaaacaaaaagttcatccccacaaggccagacacgagtgcttcttgaccagagtctgcccagaaagcccctccgtgggagctcctttctcaatcccactactccccatatctaac

SEQ ID NO: 599707 - DNA, 146 bp, Homo sapiens
gtatctgcccccggttcacctgtgctattgctatatcatattgtcaagctcaaatgccatcacagccctcggagagtgtacaaattcagacggctgggaccgccctcaggatttctgatccaagaggcctgggggcgggcagaggg

SEQ ID NO: 599708 - DNA, 1811 bp, Homo sapiens
gactcttccgtggtgtgcgcggacgcgatagacctgggcatcgcaggctgtggtgtgtaccctggtgagccctcacgagctccgcatacaatcctcgtgacccaagcattattggcagtgagatacaactcatcgcaagtggactagcagctacgtccgaggcgcatcgtatcgatacgaccgcactctgggccacaatgaactaggctagtccgagcgacgaatccgcgcgagcgtagcgacagagggtccgagcgccgaagctcgtggcaaaatgctccaaggggagcgcacgcatgcatttgggggcgcgggaggtggaggactggtacttcctgtctagaaaccagccatatcgtttccaacctagaacggatccgggtggggtcggtagcgttgagagcctagcagctcgcctgcgctgggtggctaggtcgttcgtggtcacgcagcgtgtcgcgcacaactcgcgaacgacgttgcgaatctcgtagtagcagagggtctgcaagcccatcgtggaggcaagccctttaccacaaggcacaagggccatgcttcttgctctatcggctcgttcgtaggacaaggggcatgcgagttcgatcgaggaggctaaacgcgggagacagtaatagaccatagtcctacatttataccctgagttgtctcacagcacgggacagcaagcaataaacgaatctgctactcttgtaggcaccatggacgaacggcacactccaatttctcgaaggccaattttgagcttggttatcgaaggagccacagaacgcgtctgctgccaaaagggaactttgtggtagcctgaagcaaccatgtggtaaggctaaacacatggttgggtggcttattgcgacacggaggggctatttttctgtggtgggcgcactcctgttgcgccacccgaagagcggtattgttgaacgcttgaggggtggtggcacatcggtttgggcctcctccgtggggggatttggcaacgcggttcaccctactgagacggttgcacttggtggacatctgtgtcccttcgtgcgaggactatggcactttatcaatggggggcacttccaggaaagaatgtctccccggacagtgttcctgggggagggatcggcaatccggcaaatatatgaacccccggaagaccaaccccgcctgattggcttgttcgccaagctaggggcatggttctatgctactccaagtcccccagtcaacacgggcactctcgcgaattcacggttcaactcgcaagacccaacagaaccaagcacaccgtggggaggacacagcgttcctctgcgaaattgtgggaccgcgttacgggtgggagtaacggagccacctgggaggggccccactttctttatgtgacacacactctgtggtccgagtagaaaaaaccacttctcgaatcattacgaagacgaccccccaaacccttaagacttaacaccttttaagacaggaacttatatttaaccccagaatttgtgtgtcctccccaatccaactgtggttccccttgaagcacttgtcggtcgggagccccttgaatttggttgagcccttgacacgaaacttcagaaaccacaccttgtgtgggcctaaaccccagcggattccatatccctctttgggccaacaaattatgccctgtgaattctctcggggagaaaacgcaacctcatgacacaagggtctgtgagaacagaagaaccacatgttgtgtttgaacgaccgacaacgatggtgtgaatctgagcccggacgcgacagaacacagg

SEQ ID NO: 599709 - DNA, 246 bp, Homo sapiens
ttggggtgggggccctgctggcaacccttagccctgtccaaggttccctcttgtcagatttgaaatttcctagttatgtttggggccctttgggaggtgttatcatttcagatcttttcgcccatatatgggtgtgttgtaacatttgtcccctcatttttgagatccccccattttttggaaatattttgctgcccccttttttgtgtttggggttcccccatcccatttaggggtcctccaaga

SEQ ID NO: 599710 - DNA, 1518 bp, Homo sapiens
cgtcgtggttggtcggccgcgctaggttgtgtggagcacgtggtaggtcattttgttcagcggagcgtcgctgcgttggtcggcgcttcttgtgtcagtcctcttttttccgcggtgggttatatagcgcctcctgttgtggctcgccgcgtgtgtttgccccctcttttttatcggcggcacactcattttgttggggggcgcccacccgcggggtctcgccccgcgttgtggcgtgggctcacctgtgtgttagcgaggcggggtttctctccgcgggtgggttttttgcccccgccttgtggggtgtgcggcccccccccccctgtgtgtgaagagcggtggtgcgttttgttgggaggcccaaccttttgtggggagttgttttaaaagagaagcgggttgtgtaattcactcgcgcgtctctcgaaagaggctccctctatgtgtgggtagaatttgctctccgggggaagggtgtgttaccacacgccgggaggaggcccccaaatgggcgtgtccccaccaggagccgttttcgcgagaggtttggaatgggcgcccccgcaccaccgcggggggttgtatttggtttcagccggagcccactgttgtgaaggagagttgcccccggaaggggcccagagtgttgtgtgttgtgtgggaccgcccacccgtttctgtgttgacgtttttgtgagacaccccccggtccgcaaagtgttgttttgggggaaaggagccgggagacgtttgtatatcccagagggatatgtgttgtttgagcccccactctgtttttgtgtggagagttgggcttataaaatttgggggccactcacacataagaggggtccacacagtgtgtatagacccacaggagagttagagatataaagagggctcgtctcactttggaggtgtagcagcacgctgggggccctctgtgtgacacactgggaacacacagagatttattgggggccacacaataatggagagagtctatactctacacctctctattgggggagattcggcccacgctgatgagaagatatataggggggaaatgtgttcttttttagaccaaccacactggccacgccaacgagacactctccacggagatgtgggaggctgctcgagatgaatgttttgagaagcactcttgttgtatattgagcccccgctataagagacactataaatttggggtttatctgccacacaaattgagtcacgagcccacgaggagaaaaggtataggttggtcacagctcacataggcaccacacactcggaccactcttgggaaaccacgccacgtggcacaccacactgtgatgaccaccaccttaaagccctcggagaacccacaattctgagacacacaaagtggagaaaaccacccctctttgaggttcttttctgagataacctgcgaggtttttaagcttataatttttgttttttgaaaaaaaagcccctaaatcatagtaaacccattataaacta

SEQ ID NO: 599711 - DNA, 1265 bp, Homo sapiens
  misc_feature (389)..(389): n is a, c, g, or t
caccttgactaccagaacaaccttgagccaagaccagtttgatcccgaagaatacatagtactaggcagcatagagagattgacaacctgagcgcaatagatgataggtaccagcaagggtgaaatgatgagaacattataaccaagcataatatagcaaggacgtaaccccttatacgcttctgcattaatgaattaacgtagaaataagctttgcgaatggagagccaataggctaatgacaccccgaagaccagtacggagactaatcgctaagaagcagctaatatagagcatcatccacgtcttatgatagctaaaagtagtggggaagatttgataggtatgaggcgacaagagctaccgatgcctggtggataagctgtgtntgtccaaggataggaactccttagttcaagctattagaattctgcccacgagatagaccttctagaagtccacctgtgtaacaatttatacctgttacgtccataagacggaacaggctcgtgttggtagaactaggaaagaaaagcctagtagagtagagttaaaatagattgtaagaggccagtaggtaggccgtaaaaggaggcagcaattaagagagcgtacaaggtcagaacgactatgtagaagagtcccagaagatagtaactgaaagtccctcagcagccaattgggagccaatcgtatcagccgtatagaaggaactaaatggtagtataagtaaacatgaaaacatttctcgctccggataaagcctgcgtcagattaagaagagtgaaatggagaattgaacaggcgaataatctacaattcaggcaacacggtcattattaccttcaatggtgaaccaagaagaacatggttcatagggaagggttaaaaaagttaaaggaatcggggaaattttaacggctggttagaaaaattcacctcttagagactaccggaattaaagggccgacgtgccaaggacaacaggttaacgggcgggggaacctaacgggcagaacgggtagaatataatgggtgcctaaaatgagcgcgtgaataggcaccaagggcaaaaagacaaactaacacggagataacatccgagaagaggggtaaaaagtaaagactagtacgaaaattaagagaacaaaacagaagaaaagcgctgatgagcgataaaaaaatagtaaaatcatgatcagaatagcggataaagaatttactgccgataccacctatttagcgctatagaaaaggaagaatag

SEQ ID NO: 599712 - DNA, 159 bp, Homo sapiens
  misc_feature (7)..(7): n is a, c, g, or t
  misc_feature (47)..(47): n is a, c, g, or t
  misc_feature (67)..(67): n is a, c, g, or t
  misc_feature (119)..(119): n is a, c, g, or t
agctggnacttggcccgcctcgaaagaccaggcccttaaggccgganccagagacacaggcacgacnagaagcaccgctagaagcagcaggaagcggcaaaccggcaactgctgacggnaaagctccggcagaacctgaggcactccggagacagacaa

SEQ ID NO: 599713 - DNA, 111 bp, Homo sapiens
accgactcaccaatgcacagacttgttttccacaagcacgttcttaccttagccacgaaggtcaccaagccacacggtactaaagggtggaacttcaaaggttatgtccgg

SEQ ID NO: 599714 - DNA, 409 bp, Homo sapiens
gtccagaggcgccttttgatccgtccaagcccccagttatcgagggcttcagccgacggtctactccaacccagaggcgtttaaggaaaagtttattcgcaagacccgtgagaacccaatggtgcctatagggtgtctggggacggcggctgcctcacctatggcctttactgcttccaccgcggccagagcaccgatcccaactcatgatgcgcacccggatcgctgcacagggtttcacggtccgtagccatcttgttggggttagcggcatctgctatgaagtctcaagcctgagtatagccgggtcttaaagcgccatggaaaccattacaaaacccaaggaacaacagacatcccttgtcagacttgctccctccgtttcagaccggaccttattgtcatttgg

SEQ ID NO: 599715 - DNA, 370 bp, Homo sapiens
  misc_feature (256)..(257): n is a, c, g, or t
  misc_feature (261)..(262): n is a, c, g, or t
  misc_feature (273)..(273): n is a, c, g, or t
  misc_feature (290)..(290): n is a, c, g, or t
  misc_feature (292)..(293): n is a, c, g, or t
  misc_feature (298)..(299): n is a, c, g, or t
gggccgggctggggggtggtttgcgccccgagccccttcccttgccggggatggggccgcaggcattgctcccttctctggaggggtcaggggcgtttgccatcctctccaaaagaacccgtgtggggtatctttgtgtccattgtggggtaccctataatggtgtatttaattatgacttaccctttggtcagtggagtaggagtgttgtacatcctttgaataagggttttccccacgaagcaagagggccagnncggnnggctcgcgccngaaatccctcccaaagngnngggannacgggcgtgacccccgcgtgccagccttttgtggacattttaaacagcagggaaattaatcctgagcaata

SEQ ID NO: 599716 - DNA, 551 bp, Homo sapiens
  misc_feature (42)..(42): n is a, c, g, or t
  misc_feature (68)..(68): n is a, c, g, or t
  misc_feature (144)..(144): n is a, c, g, or t
  misc_feature (219)..(219): n is a, c, g, or t
  misc_feature (315)..(315): n is a, c, g, or t
  misc_feature (367)..(367): n is a, c, g, or t
  misc_feature (407)..(407): n is a, c, g, or t
  misc_feature (427)..(427): n is a, c, g, or t
  misc_feature (439)..(439): n is a, c, g, or t
  misc_feature (480)..(480): n is a, c, g, or t
  misc_feature (486)..(486): n is a, c, g, or t
  misc_feature (534)..(534): n is a, c, g, or t
tcttgtcaaattatagttttctctttttctaaaacagcaggnagtcccttccagtccttgacaaaganaaagggagcccccatggacttgagttactccagaggagcaccgtggtgcacagatgttttcccacagtggccagcngttatcacgtcttccaccacaggaatggagccataggagccagcctcaaagattcgatagcattttgtgtttacnccgaccgggcacaatgtgagaccactctgaagcaagggatctgggtaattcttaagactttcatttgtttcctgaggctgccagtttcctcttgcngaaacccaacaaagcttatggttcccatcttttttcaaaatgttcattagtncctgtttggatgaattttcataaatcgttcctaagaaatnacataaatatggcctctcancaggcagcattnaccaactggcctccaccacaggaaaatccctgtctgtggcnactccnaaaggccactgaaaaacatccacgtcattcacccaggggctgtgatanattatgaaaagcagcgc

SEQ ID NO: 599717 - DNA, 183 bp, Homo sapiens
cagtttaagttttcctgcaaggtttaatttgttttcatgtaaatattccaaagcgggctgccttgtggttttggccagccttgtgctatgttgataagattgatttgctgcttaaaatccctttgctttatccaatttttactggactttttatgtaaaaaaattaaatcgtttaaagaccca

SEQ ID NO: 599718 - DNA, 484 bp, Homo sapiens
gctggtgtctgtgcctgtctcctgctgtcctgggcctgggcgttctgctgctacaggtgcgcctggtatgggcagcggacgctgacctcctctgtgcgcatcttcctgtcacgtgctcggcagctgtccgtctgccgcgctcgaagctgtttccgtctctcgtgtcaattggactctgagcatgcacgacgacgttcgtcgctcacgtcaagcgcgctacgatgcacgatcatggtcttcgtcagcggcgccttaatctgtgtcgtccttcaaaggagtcactccgaagagtgggtggtactgcaggagtcatgcgagtcaggacgcagtgtgatcatgcatagcatccattgtcttaatgtgtagctctcggctatcgctcacaacacgaacctagatgaacgttgcggagacaccgtaacactttcttttccatgcccccggattatgggcgagaagtggctccaaatgcgcacatatcagt

SEQ ID NO: 599719 - DNA, 290 bp, Homo sapiens
  misc_feature (250)..(250): n is a, c, g, or t
ggtattagagatcgtatgtgtgtacgtgcgtctgtgatatggagtcaggatagggtcaatcgagtgtagcgcgttaacagagcaagcaatgggaattgagcacgttgcaactgcacacagtcagggaacgcgggatcttaaccatgagcaaggcagggatcgtatggaggtcccaggataggggtcgaatcgaagctgtagccgccgttctacaccagagccacagaaacaggggatctgagccaaggtntgcaacctacaccacagggttaccgagcttcgaatcggta

SEQ ID NO: 599720 - DNA, 137 bp, Homo sapiens
attaccagcagtcatccagcaatgagagaatactgcctctgtagaccaacatccagatgtgattattagtagtctagagaccacaccccagatagcagagttacagccatgatcaccgatgccccacttgattccca

SEQ ID NO: 599721 - DNA, 425 bp, Homo sapiens
cactaaatgaaaaccatggttgaaagacacagaaggtctacacgctacagggtgcgggcatggattcaagcactaaatataaattcattaggtggtcatattaacctcagatgttatggtgttattatcattttttgagacagggtcttgctctgatgcccagggtggaatgcagtgatgcaaacacagctcactgtagccctgacctgccaggctcaagcaatcctcctgcttcagcctccagagcagctgggaccacagcagcacaccaccacacccagcgtaaatatgtgggtctgtattgattttatttcttataaataaaaagggggcccccccctgtggcccaggggggtcccaacccccggggcccaaggtacccaccggcccccgccccccaaagtgccgggcatccgggcttaacc

SEQ ID NO: 599722 - DNA, 242 bp, Homo sapiens
gaaaacagccaaaattaccaaggcgtgattaccatactccctttgcttaaaataatttagtggctccccattaggaaaaatatccaaattcttaaggaagcctacaggggtctgaataatcttgcccctgctgacttctgtagatttgtctcaggacagtctccctttctctgtctttatttcaggtgattcctttcaattctccaagaccaggctcacttgtatcacatgacgtttgtacc

SEQ ID NO: 599723 - DNA, 179 bp, Homo sapiens
accgattatgctcctagacggggtttcgccatgttggccaggcggtctcgatctcctgacctcagctgatctacccacctcggctcccaaagtgctgcgattatagacaggagccaccgcccccgaccctctctcacttctcgaatctctttcctttttccaccttctaggagcgtaat

SEQ ID NO: 599724 - DNA, 857 bp, Homo sapiens
ctaaccacagacatcatgacagggtcacccagccacagaggcaagggctgtgtttgaggactgggctgctgtctgtactgaagggtccgctggtgatgtgatataatagtactgagtcttttcagatttatatttcaaatatttggcctattcctctaaaatttcttgaatcctttaaaacgaaggtggctatcatttaattgattagcacatgacacaacacttaacatccttttaggctcttcaaacagagatccagacctagcttgaaaagggtacagttggacccaataatgcctgtgctgctgtggtgaaaggagatgggtgtaggggtggagatcggtaagataggctttttagacatgttggacagaatggatacagttctcccactcatggagaaacggtgtaagaaaggtacagcagatgcagcccccatgtgtcctgtggtgaggcttctttacccataagggctaaacccaatcacttaagaatctcttgcctgggctacttgttgctgaattcttcacattgcctctgactgcctgggtccctcaaacatggtaagttttctcctaagtcaaagagtcggaggctgagcatggaggtgcctcctgtacccaaccaacttcagtttcttttatcagctttatataggcttttgaataggatttattcaggaaataaaaatagtcttgctactataaagtaagaatacctatggctagaagttttaaaaaaaagtattatagagtagtggtctggtcaatactatttgctccaagcttattaaatgggcactttaatatagattgttaaaaatctcatttgttctacttagaaaacacagggatatg

SEQ ID NO: 599725 - DNA, 197 bp, Homo sapiens
tagggggtttttttgggaaagccccccatgggttttgtgaaaaccctttccaaaattttttcccgcgggtttttccctaaaaaaaaaccagttttttcccccttttaaaattttttcgaaaaagggggtttttttttccttctgggggtgaaaagaaaggggggtttccgggagaaaaataaacttttggggcccca

SEQ ID NO: 599726 - DNA, 131 bp, Homo sapiens
gaggatctcgtcgacattctgctctagcctgtgaacagagtgagacctgtctcaaataaaacaaaaaatagggcaggtgtggtggctcacacctgtaatcccagcactttgggaggccgaggcgggcggat

SEQ ID NO: 599727 - DNA, 757 bp, Homo sapiens
  misc_feature (20)..(20): n is a, c, g, or t
  misc_feature (494)..(494): n is a, c, g, or t
  misc_feature (510)..(510): n is a, c, g, or t
  misc_feature (553)..(553): n is a, c, g, or t
  misc_feature (610)..(611): n is a, c, g, or t
  misc_feature (626)..(626): n is a, c, g, or t
  misc_feature (661)..(661): n is a, c, g, or t
  misc_feature (665)..(665): n is a, c, g, or t
  misc_feature (673)..(673): n is a, c, g, or t
  misc_feature (679)..(679): n is a, c, g, or t
  misc_feature (681)..(681): n is a, c, g, or t
gggcagccgggaggagcggngcgcgctcggacctctcccgccctgctcgtacgctctccagcttgggatggccggctacctgcgggtcgtgcgctcgctctgcagagcctcagtgctcgcggccgtgcctgggcgccggctggccctgacagcccccacctcgcaagagcagccgcggcgccactatgccgacaaaggatcaaggtggcgaagcccgtggtggagatggatggtgattgagatgacccgtattatctggcagttcatcaaggagaagctcatcctgccccactgtgtgcacatccatgctaaatgtatttagagctcgtggtctcccaaacctgtgaccatgactgatgtaccatggtcaccattgactctgcactggccacccagaaggtacatgtgtggctgtcaattgtgccaccatcacccctgattaggcccgtgtggaagacgttcaagctgaagaagatgtggaaaagtcccaatgnaactatccggaacatnctgggggggactgtcttccgggagcccatcatctgcaaaactnccacgcctagtccctgtgctggaccaagcccatcaccattggcaggcacgcccatgnncgaccagtacaaggncacagactttgtggcagaccgggccggcactttcnaaantggtcttnaccccnanaagcatggcagtggtgtcaaggagtgggaagtgtacaacttccccggaggccgccgttgggcgttgggcttttcaa

SEQ ID NO: 599728 - DNA, 566 bp, Homo sapiens
ggcgacgcggcggctgcggggactggtgcggctggtgctggatggttgctggcgtgcgtgctgcggcgcagccccgggcggcgggtgggaagaggactaccagaggggcctgcgggagacccagggtcggacccataggagtcctgtcgtcaggacctccttgatcggtcttctgcttgggttctcggtgaaggaggagcttcggggtgttggctgggctgcgcggactcctcttgggatccgatgatggatcccacccggtgatcgggaatggggttacaatgcagtgaggcggaaaggctctcgccggggcacagaaagatccccagtggccgcaaggctgtgctgtcgcctgcaaaggcactgacccacgagcccactgcctccctccttcctgggtggagcaggggcctgccttcatctccaaggcccgggggctccggcatctcgacgcggcttctggcgacacgggcaacagagagacagaggctagtccgagccggagccagtgtgaccacacgtggcacttgacgtcccccaagagcacatgcagtgagcctgtgtct

SEQ ID NO: 599729 - DNA, 576 bp, Homo sapiens
  misc_feature (20)..(20): n is a, c, g, or t
  misc_feature (313)..(313): n is a, c, g, or t
  misc_feature (329)..(329): n is a, c, g, or t
  misc_feature (372)..(372): n is a, c, g, or t
  misc_feature (429)..(430): n is a, c, g, or t
  misc_feature (445)..(445): n is a, c, g, or t
  misc_feature (480)..(480): n is a, c, g, or t
  misc_feature (484)..(484): n is a, c, g, or t
  misc_feature (492)..(492): n is a, c, g, or t
  misc_feature (498)..(498): n is a, c, g, or t
  misc_feature (500)..(500): n is a, c, g, or t
gggcagccgggaggagcggngcgcgctcggacctctcccgccctgctcgtacgctctccagcttgggatggccggctacctgcgggtcgtgcgctcgctctgcagagcctcagtgctcgcggccgtgcctgggcgccggctggccctgacagcccccacctcgcaagagcagccgcggcgccactatgccgacaaaggatcaaggtggcgaagcccgtggtggagatggatggtgattgagatgacccgtattatctggcagttcatcaaggagaaggttcaagctgaagaagatgtggaaaagtcccaatgnaactatccggaacatnctgggggggactgtcttccgggagcccatcatctgcaaaactnccacgcctagtccctgtgctggaccaagcccatcaccattggcaggcacgcccatgnncgaccagtacaaggncacagactttgtggcagaccgggccggcactttcnaaantggtcttnaccccnanaagcatggcagtggtgtcaaggagtgggaagtgtacaacttccccggaggccgccgttgggcgttgggcttttcaa

SEQ ID NO: 599730 - DNA, 584 bp, Homo sapiens
  misc_feature (553)..(553): n is a, c, g, or t
  misc_feature (573)..(573): n is a, c, g, or t
  misc_feature (579)..(579): n is a, c, g, or t
ttcaggtgatttatatctcattaatatagaagggttttttctgtctttttattttagctatttcggtgggtgtgtagtagtatctcattttggttttaatttatatatttccctgatgattaaaaggggatgtcctgtaaatgttttcttttgtgaaataccatagcacacatttaagggataaagaaggcccgtcccagaggcaatgttgcatacagttcctgtcccactggccctgctgactagatggggagtccagggtaacagctacccgataccacggctcgagagttaagatttatggcagattgatacctgcctggtcgcatgatgcaatgagtatttttagacgagggaattatttcaagggccatgataggaggccttgagctaaggtatccgcttcaaggcctcctatccatggcccttggaagcggataccttagctcaaggtgggacaaacaggttatttgtagcccagggagttcagatgaacctgggttccctctgcccttccccttcactccccgtgtgccctggggcaggttatttncccatgtctaaaagttaccnggcctnagagg

SEQ ID NO: 599731 - DNA, 1379 bp, Homo sapiens
ggttgtaagtgaagtctgtttagtagcgtgccaaggggactctgagaagccctgcggagatctagactgactgaatgcaatactctgaccgtcaccggaggtcgcccgaccgttctgatggacgagcatagtatatcttctgggcttgccgtggtaggcagaccctgatccatggaaatattgcagtcaaggactgtgacttccgtgttgatagaagccgtctcgtcaatgatactggacatgtggtcggagcactggcccactcagtggcatgcatgatgatgcgcttgatcgggactggtggcatatactactgaatgtgacaacatacgcttatactattgagaagatgtgtcatcgtcgctagtaatagcagtaggcttatgtctaattaattggctcgtggatgtcaatcatggacgcataggggcacatctttctcttgtacttggtacgccaaatatgtgggggcaccttgtggtcccggatgcgttatggtgttacttgtcttacaacattggttgagcaggtttccaaaatgggtaaccagatgtgtttcccgagttcccttaatggcagccattttcaaggggaggccaaagcagtacacagaccccctttgttgggtaaaggtcagcatccagaggaaagaggtgcctattcggcgtacggagcgaacctcggtataccgtgtccaaaggttcacattggagcaacaggtttactttggaaggccctaccttacaactatagaccccacgcgttgggacgaaatcggtgaacacacaggttggacaccaattggcaattcccattgcccaatgtggggcaaccaaaagtgtcgccatatttcccctatagaccgcgagggttaactacacattaggacaagttttttacgatggaccgaaacgaatgatggcccaaaatccctatttaattcatgagagcacgttgttatgttaactagaggacaatgtccgttgacgacatggggatccttccaagtagtaaccggggacaacaggggaagtcgactccggatggtggacagcaacgggcggcacaggggagacacagttctatccagttcacacgtattaacaaacccaaagagattcgcaagaggggggcgggaaagaacagggcggatacacaaccgttcggggcaaagcgccaggaaaatataacaaggtcagtcacagcatgtggtattcagcgcccggaaaccgacgggcaagcgcctatgatgccgggactacgttaaaggcacacgaacgctaggtatcggcgttagggatacatatccggagggatacgcagcactttgtacctgcatcaagttgtgggtagcgagagttcccgcaggacgcgccaca

SEQ ID NO: 599732 - DNA, 302 bp, Homo sapiens
taaaaggggaaaaccagaggcttttattgtatgggtatggggaaccaacttaataatgggcatctctactatatagaaggcggcttggaatacgggggaaaacaactagggctataggaaaacatatgcaaactagcttcatggtctctagactaggtccttcttatggatctcacgtcatcacaaagcagcaccagcagctcctagaaaaagggagaaacagtaaagtccggcaaggaagctataattagggtagaaccatacatcccgctaatccggcaattttcctacaatcattttcc

SEQ ID NO: 599733 - DNA, 186 bp, Homo sapiens
caaaaaaaaaaaaccaaaaaaaaaaacgaaaccagaattctgtttgtttggatgccctgttatacttatttttgatcttgctgaaataagcaaattttaggaatcttagtctccagtttctgccagttttttttgttgttgttgtttgcccaattagaactaaataaaaagaacgtgattttccca

SEQ ID NO: 599734 - DNA, 378 bp, Homo sapiens
tgtctatcaatatgaatataataaataggggtccgaggtaaatagcatacatgaaagtggtggaacataaatcttcactgtgggataagatacacttggagcttatgtccttctaattgcacaaaagctcttgaccaaacatgacgaggtatgaccttttacagcacatgcatacaagaattcccagactttcaaagaatacgttggccattaagattaactttaaagcaacaaaggccgataccatcactatagatatcaatagtaagagaaaattgatgctaattagaacgaatgagactctgtggggtaataacaaggaagtaacttcttaagcagaggacagtcacattttacatgcgaatctacaatactaag

SEQ ID NO: 599735 - DNA, 758 bp, Homo sapiens
agcgggctgcctcctgcgcggtggtgccgggccgggccgaggccccgggcgctgtggcgacgcctggatcctggctccgccaggccggctgccgtggtgccccgaggaggctgctgatgccccaggccatggtcccctctcgcaggacgtggtaacctgggagccacgtcccatcgcgtgcggggcctgtggagagtgggccggggctcctcggagcccagagccggggatggcgtcgcccgcggccgcgagactcctagacaaagcaaccgggccttgaccggacctttctacgagaaaacaggcctcggggaggttgaggaacatgggcggtggagaaaagataatccccaagttgcggtagcaggtgatcgtagtgaactacgcgaggttggcacctgaaggttgcaagacttcgcaccagacgctcgtaagctcagtgcacagaagcgccgttaggcagttggagctggagactgtgaacctccggaaaggaccccgccccattgggaccctcatactcgtagaacagcaccttggacaagggttacgaacagcaatcccgtgcacaggcggacgtagacggccatactcttgtaagaacacgaagggggccacaaggggacgatgtggacagcccggaagactggcaggaagataccatggacggctagcgagacgggggcagcacaggacctttgaggcacgaagaagcgaacaccgggggaccatggcttgcagtgaggtggaagaaaatg

SEQ ID NO: 599736 - DNA, 1024 bp, Homo sapiens
tacagagctctatgatcaaatacaggttcctgatatatataagttctcatagatgcttcagactaacatcgagtcatagtgatgaagtggcttgatgaatgtttcaaatccgcatccagtatgggacacgaaagtgcctcgaaacgcattgacagaattgccttccatggaccgaaactctcacactctgttggcgcgaacatcttccaaacacatacgtagatctaacgaaagatccagtcactgaaaccaaaaacttgggggaatacatcagaagtaacagttttacatattcgatcagtgtgggcatgttctggaggcaatcttaaatcagagtgctcaaagtattagacaattctttgctaggctgatcactgtaggtgctcttattgatttgacacaagatgcttcaagtgaggctaaaagtgaaggtaatcatcctggcattagcctgtggaagacctcgcggatgtgcgggctgatacaggctacgatgaagataattgtaccggaagtccccacgtgcacccgtggcataacaggccctttaaaatgcattgtctgaggaaacctatatcgacttgaccacagaatctcccagttcatgtgaagtaaaaacgagatgagttcagaatccatgagcccggatccaccttgtgattaactccgaatttggcctgcggaactttgcacctaattctccaccacaaagaggaatgaagcatttctgatctaaaattcatccctcattaaaaaactacacgaaagcgtacaagcagagctttcatcgtacataacggccgcagagccaagaaaagctaaccaagaattcttgtgcagaaatacatgatgaggtcgaccctgtatgataaggccctctggaaaaaggtccctcctgtgaacatataagagtcccctcataatttaaaggggagccctggggttacggatacatacagggggctgtcgcttctacacagactttcttcgccaacacggtctttccagcgcggggcaatatcac

SEQ ID NO: 599737 - DNA, 355 bp, Homo sapiens
gcaggaattcggcacgagatggaatactatgcagccataaaaaatgatgagttcatgtcctttgcagggacatggatgaagatggaaaccattactctcggcaaactaacacaggaacagaaaaccaaacactgcgttttctctctcataagtgggagctgaacaatgagaacacatggacacagggaggggaacatcacacactggggcctgttgggagtggggggctaggggagggatagcttaggagaaatacctaatgtagatgatgggttggtggatgcagcaaaccaccatggcatgtgtatacctatgtaacaaacctgcaatttcctcacatgtataccaagactta

SEQ ID NO: 599738 - DNA, 275 bp, Homo sapiens
taggctggtcttgaaagcacgaagcagatgatttagctggatacttgatccatatttttaagcagcattagaaagcaaatagtctccttgggcataatgtaatatttattggcaggaattaaaaagcagtgtcctttaattttctttctttctttttttttttttagttttgggagagggagtgcactctggccggcccaggctgggatgtgaatggggccgatggggttccatggcaagctccggcctcccggggttctctggcgatcatcggg

SEQ ID NO: 599739 - DNA, 427 bp, Homo sapiens
cgtactgcactacgggtgttcactatgttgtcaagctggtctcgaactcctggactgaagggattctcctgaccttagactgataaagtgttgagattataggcatgggccactgtgcctggctcaatgtagctttttttttttttggacataaaatctcgttcggtggcccaggtgggagtgcaggggcacaatctgggctcactacaattcccacctccggggttcaagcaatcctccggcctcacccgcccaagtagtggggaccacgagcactggccaccagcgcgggagctaattttggcttttttaagggagagcggggtttccaccatgtgggccaggcgtgtctcaaactccgtgaccccgaggtattctgaccacctcggcgctcccaaagtgctaggattatgggtgtgaaacactg

SEQ ID NO: 599740 - DNA, 647 bp, Homo sapiens
ggagagaactagtctcgagttttctaggtaatttgttcaaaaactgatgtttattttccatcaaccatttttccatggctgttaaaaagcctatggaagaagcgttaaaaccagccagtggtggcgccctacccattcaggggcctgaccagtggggagcctgctagaaccagttcttctcctggtgggcaggcttgagaggccccagatctttcgagaacgggaaatggcttggaataggccacaggagggcccctgtgtgtacaccttttcaagaaccatgctttgtgcaaacctttcgggggtgcagtacgcgagttggacaccttagggagcgggggagcgaaggtcccattttcaaccccgtgagaaaattcgcctccctgttggggtctaccaactgggcgcagtttactttcagagccgagatggagcctgtggctctcttttctttatgtctgacgaggatctgtctctctcagggggggaatacctctgtggtgagaaagagctttgcgaaagtatcagagggcagattgaacctttcctgcagagagagggggtgttttcccacggggacaaaatagtggggttggccccacgggaatattgccgcgaagaaaattttccccggaaacccgagggat

SEQ ID NO: 599741 - DNA, 261 bp, Homo sapiens
  misc_feature (261)..(261): n is a, c, g, or t
gcttcttgctcaccccatctgctctcccgtgctccccctccagccctgttggccactagggaaatagaaggaacagcttgatcaagggttttcctagaaaaggctttccatgggcccattatgggaaacggagctgtttttgttttccttgattaatcacagtggtcttgtgttccctaagcgaaatgtgtgcctctggctctctcccagagagccacagagctgtgctcgtgtcagagagggctgtcagccgccctctgn

SEQ ID NO: 599742 - DNA, 265 bp, Homo sapiens
tcctgggtgacagagtgagactctgtctcgaaaaaaaaaaaaaaaaaaaaaaaaaaaaaaaaggctttttttgggtttttggaagcgggatttaaaaaaaggccggggaaaaatttggggggggaaaatcccccctttaaagaggcccccccttttttttgtaaaaatttggaaaccccaaaaaaagagggctttttttttttttggccccccaaaggggggcgaacaaatgtgggggggtttttcccctgggggaggaaggggg

SEQ ID NO: 599743 - DNA, 647 bp, Homo sapiens
ggcatataaagtatgttagtctccctaaagaggattggttcattgtgtttttcctttattctttgtttcgttctgagacaggttctcactctgtcacccaggcggagtgcaggttatgatcacagctcacgcagcctcgatctcctgggctcaggtgatcctttcacctcagcctctcaagtagctaggactacagcatgtgccttcatgcccagctaattttttaaattttttgtggagatgaggtcttgttatgttgccctggctggtcttgaactcctgggctcatttgatccttccactttgacctcccaaagtgtagggattgcaggtgtcagcctgtgctctagggctgttttccttttttcttaattttttactgaaattttatttaatagaattttatttctattaaagttttacacacacgtatttgaaagaggcaagtaattttataagtcgtcacaacagatagctcttctgcttacctcttctacccaattttctcttccccaaagataacctcttttacttccttaactgattctttttggttttaccctcatatctttaagcaacatgcatacatttcttcttaattttcagtacttttgcatcatatatgtggctcccgggggatcctctag

SEQ ID NO: 599744 - DNA, 105 bp, Homo sapiens
ctatttcagtgacatgggctcacactgggagatgggagagagaaggcttgaacggctgtcctacctgtgctcagacactgcctgtgctgttccccagaggcttga

SEQ ID NO: 599745 - DNA, 799 bp, Homo sapiens
  misc_feature (236)..(236): n is a, c, g, or t
ttggtcgccccccccccgcgtgtccagtggttgaaaggggtctggattttgtggccccccgcttgttgagggatgcaccgcttgtcagaactcacactcctggtcagcacgcaccttccacattggcgaataccaaggtcggtaatcttgcacccacaaggttcctctctttctcgggacggtgcggcctgtatcgcatcatcatccgacagagattaatcaggtgcgggttcccncgctcgtctcgctcgcgcagacagatgtgctcgagaagataatgtggctgtttctcacacaaagatgtcacgtgcgagatgagcacatttcgtatactattctcttctttctgtcgcgcgcccccgctcactcatagcagtgggttattatctcactcgccttctctctttggctctccctcgccttctgtaggggcgttggtgtctctcgccggctagatacacagctcgttctcgtgtagatataggccacgcgctagtgacgctccctctgtgtaacagagactggatatggggccgccaggatagagagagatgatgacgcgcgcggtgtacatatctgtttgtatacagatacgtgttcgagaaatatagttatttccatcccctcttggccacattagaatcgacccactatgatagcagactacccgagttttatctccactgctgtagataatacttcttattagaaaacactacacctctttgttcatatatatgcggaggaaaaacatataataacatttaccttgtcgaacgaaacaatagatacaaaaaac

SEQ ID NO: 599746 - DNA, 673 bp, Homo sapiens
  misc_feature (54)..(54): n is a, c, g, or t
  misc_feature (62)..(62): n is a, c, g, or t
  misc_feature (129)..(129): n is a, c, g, or t
  misc_feature (173)..(173): n is a, c, g, or t
  misc_feature (179)..(179): n is a, c, g, or t
  misc_feature (182)..(182): n is a, c, g, or t
  misc_feature (235)..(235): n is a, c, g, or t
  misc_feature (251)..(251): n is a, c, g, or t
  misc_feature (254)..(254): n is a, c, g, or t
  misc_feature (266)..(266): n is a, c, g, or t
  misc_feature (269)..(270): n is a, c, g, or t
  misc_feature (285)..(285): n is a, c, g, or t
  misc_feature (287)..(287): n is a, c, g, or t
  misc_feature (291)..(291): n is a, c, g, or t
  misc_feature (315)..(315): n is a, c, g, or t
  misc_feature (324)..(324): n is a, c, g, or t
  misc_feature (332)..(332): n is a, c, g, or t
  misc_feature (351)..(351): n is a, c, g, or t
  misc_feature (365)..(365): n is a, c, g, or t
  misc_feature (369)..(369): n is a, c, g, or t
  misc_feature (385)..(385): n is a, c, g, or t
  misc_feature (389)..(389): n is a, c, g, or t
  misc_feature (395)..(395): n is a, c, g, or t
  misc_feature (401)..(401): n is a, c, g, or t
  misc_feature (420)..(420): n is a, c, g, or t
  misc_feature (429)..(429): n is a, c, g, or t
  misc_feature (469)..(469): n is a, c, g, or t
  misc_feature (472)..(473): n is a, c, g, or t
  misc_feature (509)..(509): n is a, c, g, or t
  misc_feature (557)..(557): n is a, c, g, or t
  misc_feature (619)..(619): n is a, c, g, or t
gctcggcgtctgagaccattcggtgtccagagatttctgtacacagggcgccancagggccntgaggaagcagcggaattccaggcagagtttgtgtctacccctgagctggctgcccaatctgatttnatcgtcgtggcctgctccttaacacctgcacccgagggactctncaacanggncttcttccagaggatgagggacacagctgtgttcatcaacatcagcaggggcnacgtcgtaaaccaggncgncctgtaccaggnctnngccagtgtaagattncngctnctggactggatgtgacgagccagnaccactgcntacgaacnaccctctcctgagcctgangagctgtgtgattntgcnccacattggcagtgcnaccnacagancccgcnacaccatgtgcttgttggnagctaagancttgctggctggcctgagaggggagcggatgcctagtganctnnagctgtagcgaaagagtagagatggagggcgcgggnagcaaaccgtgccctggtattgtcagacacacccaggcttgatttggntccacaggcagagccaagggaaggtgtgattctctgaggaaagagtgattctgatatatgtncttgtcacattggtgttggacacatttgcgccaaaagtatggtaattctattat

SEQ ID NO: 599747 - DNA, 979 bp, Homo sapiens
gtcttgtctcctgaatcacctcggttgtaaatgtccagttcgtggctcttcctctattgctcttcttgtttgatcctgtggcggacttatgcacagagtgtaccgatgtagattacggtaaaagtgttagtttgttcataaccacactcacgagaaggtcgcttttgattctttgcaaactctagtccaagtaaatctcgacaatgcgacggttttgcattcgatgaagatgctgatgggattatgactactggcaggcaggtgatcccccgttgagaagtagccgcatatagttccctcaagtgctggacatcatatggaacatgggacgtacttgtgtaggtggaccattacttggatttctgaaactgagagtcagagttcctggaagagtgcggtaagcggcatggcttaaggacacagactaatgcactaaaaggctattagtccgttttggcaacttgggttcatacatctgattgagaaaggacattggaagccttctctacattgcatctgttgaagtgagcgtctccttgtggacccctggtgggtgctagaatgtaaaagtttgacgataatgtcgctcttgtagacaattacggtctggtgatcacgacttttacttgggcaaaatcagtgtggtattcttagattgttcacccgtatgttgtgtgatctgttgaattgttctgaccactttatggtatcttaatgtaggattcactataatgcgttgtggggaactctaacggattaggtgtctaggtcatggcagaattagtatgcgttgtgtttgttacagttgtggtccgggattgttgaatgtgactggggcaattcactgggggtggagttgggagggccataggggcgcaaatttttacaggcggaaggtgggggcaatattttttataaacacaaaaaaagtggggggggagagaaaattgcggcgaataagagatttatgctcggtaaa

SEQ ID NO: 599748 - DNA, 492 bp, Homo sapiens
tggggcagagaattaagaatcgtcgcctatcttctgcgtggcgtggcctcaacagtggagggactcccaagtttggaaagaaaagagcagtggtgagaccccagaacgagggcgagggagaggtggagggcccggcgaggcccccaagtcccaccaccaagccctgtgattgtgcgccgcagaggtggtctcccctcggattctctcctccattggagtatgcatatatcggactcttcttcggcacaataataaataaccaagacacgcacccacaaaaacatgaaaacacaaatggtgaaataaaaaaaaaacattatttcacccacagagtgcgacactacaagagttccccccttccctatctcgcgaatatcccatcggggacccccgtggcgcgcgagcgggcgcaacaagcactacggtccactggggcccccaccatgcgagcgcgatacggcacaacgggctgtgtcaataccatagaggggc

SEQ ID NO: 599749 - DNA, 518 bp, Homo sapiens
tctaatctgccattaagtcataaatgtatttttcatctcagacattatagtttccatctccgaaaggtcagttggagtttttttataccttccatgtctctatttaacatgttcagtcttggccaggcgcggtggctcatcacgcctgtaatcccagcactttgggaggccgaggagggtggatcacaaggtcaggagatcgagaccatcctggccaacacagtgaaaccctgtctctactaaaaatacaaaaatcagctgggcatggtggtgggcacctgtaatccctgctgctcgggaagcagaggcacaagaatcgcttgaacccatgaggcagaggttgcagtgagccgagatcagccattgcactccagcctgggtgacagagtgaagactctgtctcaaaaaaatggaaagaaaacaggaaagcggagggctgggcaagccttggtgagacttgtttcccaagagtggagggagcaagcctggggcaagcaggaaatacgtgaaaaggaata

SEQ ID NO: 599750 - DNA, 1905 bp, Homo sapiens
ataggcttaggtatgaggcctggtatttaatttggcagaagggagagagagagagagattgagagagagagagagagagagagagagagagagagagagatgagagagagatataactgctggtgagagagtagagttgtgttgtggtatgtgtgtgcttctgtgtcggtgttctgctcgacgaagagagtagagatgacgacacgtgaggcggcgtgcgacgtcgtcgctgtgcggtcgtgtcgtcggggacgctcgtctcatccgcgcgcgctgcttctgctgcttgctgctcttgctgctcgtagcggtgccgctcgctcctcgctcgtagctagctgtttgtcagactgactggacggcgtgcccgccagtctggtcgttgtacgattccgtcgaagggagagaatagaatatgacgcgccgcgggctgtccgttcttactgcctcctaatcgtagtttgatcttgcagactggacagcatggaggaacgcaagcatacgctactagttaggaccacaccacctagcggtgcatgccgtccgcgaaggtccgtggccagaactacacttctcactagcttcactgccagttcctagcacccccgcacacaaagagtgcttaaattatcgaccccggtccacgcagcagttcctcgatcgaacgaacggggcgcgccatgccctcagagactttccgaagcggaagaataagcagagaaatgggactgtccggccctggcctgtttgtcgtgcctcaccgcgccgtcacacgagaacgggggtgaacgaatccaattcaaagtaaaacctaggtgcgcgaccgaaggatctgagaaccatagaacacgcacacaatcaaaatcacggcgcacgccgggcaggagagcgaacgcgaacaggcaggaaagaagaatagaacagacacagccgtcatgaacacacgaaaagcttgcgcaggcgagccagctcgcgcagcgccccccctgcaccacagcccaggacaacaatataactagaaccagccgagccaaaaataaaaatatacattacacccgccagcaagctaacattctcttccatcaccacccttcacattactttaataggagtgagaacgaccatctacggtaagcaacggcatcgagttgataaacaacaaaataaataaagaaacagatatacataggtgtacaatacccgcacaactataggatactgtttagcagtcaatcctacgacacaacaacaccaactggcacgagcgtgagagaatagcatcggcagctactaaaccgctacctatccactcttatgacacagaacctcaacgaatagcataacataggcgcacaacggcagcccgagctggcaactaggcatcaacgagcaacacacaatgagctcgtactcactgcagcacaacagaaacaccggcgcacccaggtacgtagacgaacacaccatagcacacccgtacggagttaaaacaagaataaagttagagcgcggcttctccaatcgcgatacgctatactatatacggcaccacccacggaacacacagacgaataatacaccgacatgagcagccagacatcgcaatgcgccaacgaagacagacgaacaacccaggagcacccgcccgtgaacaactacaacaaacagaaaaaaccaacagacaatagcctaagtctgaggataacaggaagacaatcgtccatattacacgcacacacacgaccgacccatagcgacggccaccgagcgacaattcgagtagcgaacgtccacagctcctacgcacgcactcagtgaggcgagcgactgaattaatcattgcatatgggagcagctgatatttttagagagtgcaaagaatacatgatgaccgcgtccgaccac

SEQ ID NO: 599751 - DNA, 898 bp, Homo sapiens
  misc_feature (47)..(47): n is a, c, g, or t
  misc_feature (95)..(96): n is a, c, g, or t
  misc_feature (100)..(101): n is a, c, g, or t
  misc_feature (167)..(167): n is a, c, g, or t
  misc_feature (172)..(172): n is a, c, g, or t
  misc_feature (180)..(180): n is a, c, g, or t
  misc_feature (190)..(190): n is a, c, g, or t
  misc_feature (192)..(192): n is a, c, g, or t
  misc_feature (252)..(252): n is a, c, g, or t
  misc_feature (256)..(256): n is a, c, g, or t
  misc_feature (366)..(366): n is a, c, g, or t
  misc_feature (369)..(369): n is a, c, g, or t
  misc_feature (478)..(479): n is a, c, g, or t
  misc_feature (509)..(509): n is a, c, g, or t
  misc_feature (521)..(521): n is a, c, g, or t
  misc_feature (539)..(539): n is a, c, g, or t
  misc_feature (588)..(588): n is a, c, g, or t
  misc_feature (699)..(699): n is a, c, g, or t
  misc_feature (710)..(711): n is a, c, g, or t
  misc_feature (713)..(713): n is a, c, g, or t
  misc_feature (718)..(718): n is a, c, g, or t
  misc_feature (734)..(734): n is a, c, g, or t
  misc_feature (736)..(736): n is a, c, g, or t
  misc_feature (747)..(747): n is a, c, g, or t
  misc_feature (749)..(749): n is a, c, g, or t
  misc_feature (769)..(769): n is a, c, g, or t
  misc_feature (780)..(780): n is a, c, g, or t
  misc_feature (788)..(788): n is a, c, g, or t
  misc_feature (816)..(816): n is a, c, g, or t
  misc_feature (828)..(828): n is a, c, g, or t
  misc_feature (830)..(830): n is a, c, g, or t
  misc_feature (832)..(832): n is a, c, g, or t
  misc_feature (895)..(895): n is a, c, g, or t
cagtagtacaaattagcgttcaagttacacatagctgaacaaaagangttgagcgagtcgaaggaggggtatggagtgaggggaaggaggtaggnngagnnggaagtgatgaagaaacaaaagaattgaacaggcatgcgaggcttttgcgcataccaccttcatangctancctgcttnagtgggagantnaagtaggcaagaatgagcagccagcggattgttgtactgttgaccagcaccatgcttttnagcnacatttcagcggagttgtgataagcatttttatacatggcaaaaccattacaacgaagtcgcctgcccgcaaacgcaccgtgttaatcgcatctcaagctaacactccanttncttgcaaacactggtataaaacacagtttaaacgaatgtaggaaaatgaatagactggtagccacttatgcctctatagtgtgattaacctcttttttagatgcttgcnncccctgtcagtctaatggctttcaaatgtnatttccatttgntaatggtgatcttgccanatctggcacggagacgacacagtaatgctgtaaaagcctctatgtagtnctgtcagtgtcttaaagaacctaaaagctgggaccagtaaaatccacagaaattcactcttgcctttaagaacttttgaaaactgtttaaaaaaaaaaaaaaaaaccaacngggaacggggnngnttctnaaacaaatgtaaaatnanatttggtggtntnagtaacaatggggagtttcnaagggtggganggggaggnggggtggtcagagatggtttctcttgtnggcttatgtttnantnattttcgtcttccacgtcctgcagcgcttctttattctgctcttcaccgtcaccctgcatgtntga

SEQ ID NO: 599752 - DNA, 1750 bp, Homo sapiens
  misc_feature (260)..(260): n is a, c, g, or t
  misc_feature (511)..(511): n is a, c, g, or t
  misc_feature (1750)..(1750): n is a, c, g, or t
gattagatggggtgaaggaagaagccccatgaattatacttgtgccttcagagagaccaagatgattcatggacgaactacaacgtagccatcctgatactttcgagggagcctgtcctgggacatcatcttcgatcaaatatcgtgtgctcagcctctctatcgggatcatagggataggtggtacaagatggccagtggggctcatgctgttcccagtgctagtgcccacacgtcaacacggttgtcttataccgcgncattacgagtcgattgaccgagatggcatgtgagtctaggcacacgcgcgcgtggcgtgacgtgtgctgaggcctgaccatgtgtgtcgacccgtgcggttctgatggctcggggtagagcaccccaagtaactggatagccgtcaagtggaccagtgtcccgctaggtgtactatgtgttaatcgaatcatagggagagctaaacaccgagttcaaagatcgctttggagaccattgcacacaggcgctntctaccgactaagatgattactcttgcttacatgtggcgtcccttgtgtgcctagtacacttcggtacacaaggacgctcgcctattcgttgacgtcgattcgcttgagaagggaatcgcttccacagtcgtggggacccaactaattgcagaggaccatactttgtggagctcctcttaccagtcacaaaccccccaataacgcgaggtgggaacagcataacataacacgcaatagtcggccatccgggttctgtaccaaacgtggccactatccataatgaacggagcctggccaccacaaagcggcacttttcacaggatgctggcgcagcaatcctcccaccatatgcgaacagacgaccattagaggtagggccgcaaagttatgttggctcggaagcagaaagactgtatacaaaggaggccatcactatcctttatcacaccaccgaagacaatttaggcaccacgtgaattggcccctataacaatctcattttttcggggagcaagggtgtgaacttacatttggcaatttgcgcaaaattggtcatttccagaaataactccaaaaaaggtaacaatgggtttcggggactatatgggcgcattcaccccttatggatacattctatcaaccgtatacgatcgccggtagatgttaccgccccaaacttacctttacactgggttttaaagcaccttggagtacatattacgggtaagattggaaacgaaacgcaccaacgacgagatacgcgcgagataacaccaagggggaccccccttaccgggtgcacaggttggaacttcccacattgtggttcccccttaatttccgaaagccctttacaattaaagccgttaaacgccaacctggtttggcgcagaccctacaccccacttagaaaaggtccagatcctttggatagatcacgattgcgtgaacacaacttaaaggccccctcgctttcataccattaaccaaatattcccattacactattgttataaaaacacacctcctttcaaggaagtgtacacactcatgtgcagcttcccaatgtgtactacccaatggtgttatataccgacctctgcgggaagatctccttcccaacgagcccagagggcccacagtgaggtgcgaatacaaagacgatgattattaaaggcgcccacgagaagtatctgtaaacaactgacaggcggccacagtgattctatcaacaacan

SEQ ID NO: 599753 - DNA, 442 bp, Homo sapiens
  misc_feature (14)..(14): n is a, c, g, or t
  misc_feature (43)..(43): n is a, c, g, or t
  misc_feature (58)..(58): n is a, c, g, or t
  misc_feature (95)..(95): n is a, c, g, or t
  misc_feature (261)..(261): n is a, c, g, or t
ggaatgttccttgncccttcccctccctgtgcggccaggaagntccctgtgtccatcnacctcacctctggcagcttctctcccatcccagcagnctgcggcccactccctggctcccaaggaggtcctgaaactcagcctgagtgggtaggagcctcttacaagagttccttttcctgctgggcatggtggctcatgcctgtaatcccagcactttgggaggctgaggtgggtggatcacctgaggttgggagttcgagnccaggctgaccaacatggagaaaccttttctctactaaaaatgcaaaattagtgggatatggtggtgcatgcctgtaatcccagctacttgggaggctgaggcaggagaattgcttgaacccgggaggtggaggttgtggtgagccgagattgcaccattgcactccagcctgggcaacaa

SEQ ID NO: 599754 - DNA, 119 bp, Homo sapiens
ctggcatatcggtaatacatagactagatgagagcaacgtccaggaagccaggaagtacctatactaactactagcatgctacctatactacatagtacactactagctagtatatagg

SEQ ID NO: 599755 - DNA, 82 bp, Homo sapiens
ccccttttttggggccaagagaattttaaggaaaagccattttttggtccccggctaaaaaaggactcctgaatttttttca

SEQ ID NO: 599756 - DNA, 4665 bp, Homo sapiens
ggtaaggctctggaaaagggggcgctgggagcgcattgcgagggggctggagagggagagaggagcggaagctgagggtgtgaaacggctggccccgaacacacctcgcggcgctccagtgattcctggtgtccgacctcagccccagtcagtgcgggtccagtttccaggctctcgcggaaggcctggctgagcacatgcggcagccacggtcgccctccctattcctcttagcccgaggaggggggtcccaagttacatggccacgcagatggggcctctccctcatttctgaaccttgtggggaggggaaccttgaagggagcgccccccagagccatggcttagggcctcccccacccctctggagctccagtctgcaagagtcaggagccgaaatatcgctgactgtgggtgacgactcttgcgcgcacacacacatacaagcgggcacgacgcgttcggtcctattaaaaggcacgcaagggtgcggctgcacgcggtgacacggacccctctaacgtttccaaactgagctccctgcaggtccccgacagcacaggcccctgtcccaggacccctccaggcacgcgctcacacgcacacgcgcgctccccggctcacgcgcgctccgacacacacgctcacgcgaacgcaggcgcacgctctggcgcgggaggcgccccttcgcctccgtgttgggaagcgggggcggcgggaggggcaggagacgttggccccgctcgcgtttctgcagctgctgcagtcgccgcagcgtccggaccggaaccagcgccgtccgcggagccgccgccgccgccgccgggccctttccaagccgggcgctcggagctgtgcccggccccgcttcagcaccgcggacagcgccggccgcgtggggctgagccgagcccccgcgcacgcttcagcgccccttccctcggccgacgtcccgggaccgccgctccgggggagacgtggcgtccgcagcccgcggggccgggcgagcgcaggacggcccggaagccccgcgggggatgcgccgagggccccgcgttcgcgccgcgcagagccaggcccgcggcccgagcccatgagcaccatgcgcctgctgacgctcgccctgctgttctcctgctccgtcgcccgtgccgcgtgcgaccccaagatcgtcaacattggcgcggtgctgagcacgcggaagcacgagcagatgttccgcgaggccgtgaaccaggccaacaagcggcacggctcctggaagattcagctcaatgccacctccgtcacgcacaagcccaacgccatccagatggctctgtcggtgtgcgaggacctcatctccagccaggtctacgccatcctagttagccatccacctacccccaacgaccacttcactcccacccctgtctcctacacagccggcttctaccgcatacccgtgctggggctgaccacccgcatgtccatctactcggacaagagcatccacctgagcttcctgcgcaccgtgccgccctactcccaccagtccagcgtgtggtttgagatgatgcgtgtctacagctggaaccacatcatcctgctggtcagcgacgaccacgagggccgggcggctcagaaacgcctggagacgctgctggaggagcgtgagtccaaggcagagaaggtgctgcagtttgacccagggaccaagaacgtgacggccctgctgatggaggcgaaagagctggaggcccgggtcatcatcctttctgccagcgaggacgatgctgccactgtataccgcgcagccgcgatgctgaacatgacgggctccgggtacgtgtggctggtcggcgagcgcgagatctcggggaacgccctgcgctacgccccagacggcatcctcgggctgcagctcatcaacggcaagaacgagtcggcccacatcagcgacgccgtgggcgtggtggcccaggccgtgcacgagctcctcgagaaggagaacatcaccgacccgccgcggggctgcgtgggcaacaccaacatctggaagaccgggccgctcttcaagagagtgctgatgtcttccaagtatgcggatggggtgactggtcgcgtggagttcaatgaggatggggaccggaagttcgccaactacagcatcatgaacctgcagaaccgcaagctggtgcaagtgggcatctacaatggcacccacgtcatccctaatgacaggaagatcatctggccaggcggagagacagagaagcctcgagggtaccagatgtccaccagactgaagattgtgacgatccaccaggagcccttcgtgtacgtcaagcccacgctgagtgatgggacatgcaaggaggagttcacagtcaacggcgacccagtcaagaaggtgatctgcaccgggcccaacgacacgtcgccgggcagcccccgccacacggtgcctcagtgttgctacggcttttgcatcgacctgctcatcaagctggcacggaccatgaacttcacctacgaggtgcacctggtggcagatggcaagttcggcacacaggagcgggtgaacaacagcaacaagaaggagtggaatgggatgatgggcgagctgctcagcgggcaggcagacatgatcgtggcgccgctaaccataaacaacgagcgcgcgcagtacatcgagttttccaagcccttcaagtaccagggcctgactattctggtcaagaaggagattccccggagcacgctggactcgttcatgcagccgttccagagcacactgtggctgctggtggggctgtcggtgcacgtggtggccgtgatgctgtacctgctggaccgcttcagccccttcggccggttcaaggtgaacagcgaggaggaggaggaggacgcactgaccctgtcctcggccatgtggttctcctggggcgtcctgctcaactccggcatcggggaaggcgcccccagaagcttctcagcgcgcatcctgggcatggtgtgggccggctttgccatgatcatcgtggcctcctacaccgccaacctggcggccttcctggtgctggaccggccggaggagcgcatcacgggcatcaacgaccctcggctgaggaacccctcggacaagtttatctacgccacggtgaagcagagctccgtggatatctacttccggcgccaggtggagctgagcaccatgtaccggcatatggagaagcacaactacgagagtgcggcggaggccatccaggccgtgagagacaacaagctgcatgccttcatctgggactcggcggtgctggagttcgaggcctcgcagaagtgcgacctggtgacgactggagagctgtttttccgctcgggcttcggcataggcatgcgcaaagacagcccctggaagcagaacgtctccctgtccatcctcaagtcccacgagaatggcttcatggaagacctggacaagacgtgggttcggtatcaggaatgtgactcgcgcagcaacgcccctgcgacccttacttttgagaacatggccggggtcttcatgctggtagctgggggcatcgtggccgggatcttcctgattttcatcgagattgcctacaagcggcacaaggatgctcgccggaagcagatgcagctggcctttgccgccgttaacgtgtggcggaagaacctgcaggcagtaccatcccactgatatcacgggcccgctcaacctctcagatccctcggtcagcaccgtggtgtgaggcccccggaggcgcccacctgcccagttagcccggccaaggacactgatgggtcctgctgctcgggaaggcctgagggaagcccacccgccccagagactgcccaccctgggcctcccgtccgtccgcccgcccaccccgctgcctggcgggcagcccctgctggaccaaggtgcggaccggagcggctgaggacggggcagagctgagtcggctgggcagggcgcagggcgctccggcagaggcagggccctggggtctctgagcagtggggagcgggggctaactggccccaggcggaggggcttggagcagagacggcagccccatccttcccgcagcaccagcctgagccacagtggggcccatggccccagctggctgggtcgcccctcctcgggcgcctgcgctcctctgcagcctgagctccaccctcccctcttcttgcggcaccgcccacccacaccccgtctgccccttgaccccacacgccggggctggccctgccctcccccacggccgtccctgacttcccagctggcagcgcctcccgccgcctcgggccgcctcctccagactcgagagggctgagcccctcctctcctcgtccggcctgcagcccagaacgggcctccccgggggtccccggacgctggctcgggactgtcttcaaccctgccctgcaccttgggcacgggagagcgccacccgcccgcccccgccctcgctccgggtgcgtgaccggcccgccaccttgtacagaaccagcactcccagggcccgagcgcgtgccttccccgtgcggcccgtgcgcagccgcgctctgcccctccgtccccagggtgcaggcgcgcaccgcccaacccccacctcccggtgtatgcagtggtgatgcctaaaggaatgtcacgca

SEQ ID NO: 599757 - DNA, 177 bp, Homo sapiens
tatctgctaccataaatttccatgtaccagcaagcagcatggtcatattgcagtctcctgctagaccgcttggactctggcagctctgcccctttcagggcattccacacagcatcgcgtcagaacaagaaatccatctgaggctggctgcggtggctcacgcctgtaatcccagca

SEQ ID NO: 599758 - DNA, 110 bp, Homo sapiens
cacgaggtggctgtctagaggctacggggacaaccacatgaccctgtcctgatactccctggctatgtctctgcacaatgagggtcaccatcaactgccagtccatccag

SEQ ID NO: 599759 - DNA, 5138 bp, Homo sapiens
ggtaaggctctggaaaagggggcgctgggagcgcattgcgagggggctggagagggagagaggagcggaagctgagggtgtgaaacggctggccccgaacacacctcgcggcgctccagtgattcctggtgtccgacctcagccccagtcagtgcgggtccagtttccaggctctcgcggaaggcctggctgagcacatgcggcagccacggtcgccctccctattcctcttagcccgaggaggggggtcccaagttacatggccacgcagatggggcctctccctcatttctgaaccttgtggggaggggaaccttgaagggagcgccccccagagccatggcttagggcctcccccacccctctggagctccagtctgcaagagtcaggagccgaaatatcgctgactgtgggtgacgactcttgcgcgcacacacacatacaagcgggcacgacgcgttcggtcctattaaaaggcacgcaagggtgcggctgcacgcggtgacacggacccctctaacgtttccaaactgagctccctgcaggtccccgacagcacaggcccctgtcccaggacccctccaggcacgcgctcacacgcacacgcgcgctccccggctcacgcgcgctccgacacacacgctcacgcgaacgcaggcgcacgctctggcgcgggaggcgccccttcgcctccgtgttgggaagcgggggcggcgggaggggcaggagacgttggccccgctcgcgtttctgcagctgctgcagtcgccgcagcgtccggaccggaaccagcgccgtccgcggagccgccgccgccgccgccgggccctttccaagccgggcgctcggagctgtgcccggccccgcttcagcaccgcggacagcgccggccgcgtggggctgagccgagcccccgcgcacgcttcagcgccccttccctcggccgacgtcccgggaccgccgctccgggggagacgtggcgtccgcagcccgcggggccgggcgagcgcaggacggcccggaagccccgcgggggatgcgccgagggccccgcgttcgcgccgcgcagagccaggcccgcggcccgagcccatgagcaccatgcgcctgctgacgctcgccctgctgttctcctgctccgtcgcccgtgccgcgtgcgaccccaagatcgtcaacattggcgcggtgctgagcacgcggaagcacgagcagatgttccgcgaggccgtgaaccaggccaacaagcggcacggctcctggaagattcagctcaatgccacctccgtcacgcacaagcccaacgccatccagatggctctgtcggtgtgcgaggacctcatctccagccaggtctacgccatcctagttagccatccacctacccccaacgaccacttcactcccacccctgtctcctacacagccggcttctaccgcatacccgtgctggggctgaccacccgcatgtccatctactcggacaagagcatccacctgagcttcctgcgcaccgtgccgccctactcccaccagtccagcgtgtggtttgagatgatgcgtgtctacagctggaaccacatcatcctgctggtcagcgacgaccacgagggccgggcggctcagaaacgcctggagacgctgctggaggagcgtgagtccaaggcagagaaggtgctgcagtttgacccagggaccaagaacgtgacggccctgctgatggaggcgaaagagctggaggcccgggtcatcatcctttctgccagcgaggacgatgctgccactgtataccgcgcagccgcgatgctgaacatgacgggctccgggtacgtgtggctggtcggcgagcgcgagatctcggggaacgccctgcgctacgccccagacggcatcctcgggctgcagctcatcaacggcaagaacgagtcggcccacatcagcgacgccgtgggcgtggtggcccaggccgtgcacgagctcctcgagaaggagaacatcaccgacccgccgcggggctgcgtgggcaacaccaacatctggaagaccgggccgctcttcaagagagtgctgatgtcttccaagtatgcggatggggtgactggtcgcgtggagttcaatgaggatggggaccggaagttcgccaactacagcatcatgaacctgcagaaccgcaagctggtgcaagtgggcatctacaatggcacccacgtcatccctaatgacaggaagatcatctggccaggcggagagacagagaagcctcgagggtaccagatgtccaccagactgaagattgtgacgatccaccaggagcccttcgtgtacgtcaagcccacgctgagtgatgggacatgcaaggaggagttcacagtcaacggcgacccagtcaagaaggtgatctgcaccgggcccaacgacacgtcgccgggcagcccccgccacacggtgcctcagtgttgctacggcttttgcatcgacctgctcatcaagctggcacggaccatgaacttcacctacgaggtgcacctggtggcagatggcaagttcggcacacaggagcgggtgaacaacagcaacaagaaggagtggaatgggatgatgggcgagctgctcagcgggcaggcagacatgatcgtggcgccgctaaccataaacaacgagcgcgcgcagtacatcgagttttccaagcccttcaagtaccagggcctgactattctggtcaagaaggagattccccggagcacgctggactcgttcatgcagccgttccagagcacactgtggctgctggtggggctgtcggtgcacgtggtggccgtgatgctgtacctgctggaccgcttcagccccttcggccggttcaaggtgaacagcgaggaggaggaggaggacgcactgaccctgtcctcggccatgtggttctcctggggcgtcctgctcaactccggcatcggggaaggcgcccccagaagcttctcagcgcgcatcctgggcatggtgtgggccggctttgccatgatcatcgtggcctcctacaccgccaacctggcggccttcctggtgctggaccggccggaggagcgcatcacgggcatcaacgaccctcggctgaggaacccctcggacaagtttatctacgccacggtgaagcagagctccgtggatatctacttccggcgccaggtggagctgagcaccatgtaccggcatatggagaagcacaactacgagagtgcggcggaggccatccaggccgtgagagacaacaagctgcatgccttcatctgggactcggcggtgctggagttcgaggcctcgcagaagtgcgacctggtgacgactggagagctgtttttccgctcgggcttcggcataggcatgcgcaaagacagcccctggaagcagaacgtctccctgtccatcctcaagtcccacgagaatggcttcatggaagacctggacaagacgtgggttcggtatcaggaatgtgactcgcgcagcaacgcccctgcgacccttacttttgagaacatggccggggtcttcatgctggtagctgggggcatcgtggccgggatcttcctgattttcatcgagattgcctacaagcggcacaaggatgctcgccggaagcagatgcagctggcctttgccgccgttaacgtgtggcggaagaacctgcaggatagaaagagtggtagagcagagcctgaccctaaaaagaaagccacatttagggctatcacctccaccctggcttccagcttcaagaggcgtaggtcctccaaagacacgagcaccgggggtggacgcggcgctttgcaaaaccaaaaagacacagtgctgccgcgacgcgctattgagagggaggagggccagctgcagctgtgttcccgtcatagggagagctgagactccccgcccgccctcctctgccccctcccccgcagacagacagacagacggatgggacagcggcccggcccacgcagagccccggagcaccacggggtcgggggaggagcacccccagcctcccccaggctgcgcctgcccgcccgccggttggccggctggccggtccaccccgtcccggccccgcgcgtgcccccagcgtggggctaacgggcgccttgtctgtgtatttctattttgcagcagtaccatcccactgatatcacgggcccgctcaacctctcagatccctcggtcagcaccgtggtgtgaggcccccggaggcgcccacctgcccagttagcccggccaaggacactgatgggtcctgctgctcgggaaggcctgagggaagcccacccgccccagagactgcccaccctgggcctcccgtccgtccgcccgcccaccccgctgcctggcgggcagcccctgctggaccaaggtgcggaccggagcggctgaggacggggcagagctgagtcggctgggcagggcgcagggcgctccggcagaggcagggccctggggtctctgagcagtggggagcgggggctaactggccccaggcggaggggcttggagcagagacggcagccccatccttcccgcagcaccagcctgagccacagtggggcccatggccccagctggctgggtcgcccctcctcgggcgcctgcgctcctctgcagcctgagctccaccctcccctcttcttgcggcaccgcccacccacaccccgtctgccccttgaccccacacgccggggctggccctgccctcccccacggccgtccctgacttcccagctggcagcgcctcccgccgcctcgggccgcctcctccagactcgagagggctgagcccctcctctcctcgtccggcctgcagcccagaacgggcctccccgggggtccccggacgctggctcgggactgtcttcaaccctgccctgcaccttgggcacgggagagcgccacccgcccgcccccgccctcgctccgggtgcgtgaccggcccgccaccttgtacagaaccagcactcccagggcccgagcgcgtgccttccccgtgcggcccgtgcgcagccgcgctctgcccctccgtccccagggtgcaggcgcgcaccgcccaacccccacctcccggtgtatgcagtggtgatgcctaaaggaatgtcacgca

SEQ ID NO: 599760 - DNA, 5028 bp, Homo sapiens
ggtaaggctctggaaaagggggcgctgggagcgcattgcgagggggctggagagggagagaggagcggaagctgagggtgtgaaacggctggccccgaacacacctcgcggcgctccagtgattcctggtgtccgacctcagccccagtcagtgcgggtccagtttccaggctctcgcggaaggcctggctgagcacatgcggcagccacggtcgccctccctattcctcttagcccgaggaggggggtcccaagttacatggccacgcagatggggcctctccctcatttctgaaccttgtggggaggggaaccttgaagggagcgccccccagagccatggcttagggcctcccccacccctctggagctccagtctgcaagagtcaggagccgaaatatcgctgactgtgggtgacgactcttgcgcgcacacacacatacaagcgggcacgacgcgttcggtcctattaaaaggcacgcaagggtgcggctgcacgcggtgacacggacccctctaacgtttccaaactgagctccctgcaggtccccgacagcacaggcccctgtcccaggacccctccaggcacgcgctcacacgcacacgcgcgctccccggctcacgcgcgctccgacacacacgctcacgcgaacgcaggcgcacgctctggcgcgggaggcgccccttcgcctccgtgttgggaagcgggggcggcgggaggggcaggagacgttggccccgctcgcgtttctgcagctgctgcagtcgccgcagcgtccggaccggaaccagcgccgtccgcggagccgccgccgccgccgccgggccctttccaagccgggcgctcggagctgtgcccggccccgcttcagcaccgcggacagcgccggccgcgtggggctgagccgagcccccgcgcacgcttcagcgccccttccctcggccgacgtcccgggaccgccgctccgggggagacgtggcgtccgcagcccgcggggccgggcgagcgcaggacggcccggaagccccgcgggggatgcgccgagggccccgcgttcgcgccgcgcagagccaggcccgcggcccgagcccatgagcaccatgcgcctgctgacgctcgccctgctgttctcctgctccgtcgcccgtgccgcgtgcgaccccaagatcgtcaacattggcgcggtgctgagcacgcggaagcacgagcagatgttccgcgaggccgtgaaccaggccaacaagcggcacggctcctggaagattcagctcaatgccacctccgtcacgcacaagcccaacgccatccagatggctctgtcggtgtgcgaggacctcatctccagccaggtctacgccatcctagttagccatccacctacccccaacgaccacttcactcccacccctgtctcctacacagccggcttctaccgcatacccgtgctggggctgaccacccgcatgtccatctactcggacaagagcatccacctgagcttcctgcgcaccgtgccgccctactcccaccagtccagcgtgtggtttgagatgatgcgtgtctacagctggaaccacatcatcctgctggtcagcgacgaccacgagggccgggcggctcagaaacgcctggagacgctgctggaggagcgtgagtccaaggcagagaaggtgctgcagtttgacccagggaccaagaacgtgacggccctgctgatggaggcgaaagagctggaggcccgggtcatcatcctttctgccagcgaggacgatgctgccactgtataccgcgcagccgcgatgctgaacatgacgggctccgggtacgtgtggctggtcggcgagcgcgagatctcggggaacgccctgcgctacgccccagacggcatcctcgggctgcagctcatcaacggcaagaacgagtcggcccacatcagcgacgccgtgggcgtggtggcccaggccgtgcacgagctcctcgagaaggagaacatcaccgacccgccgcggggctgcgtgggcaacaccaacatctggaagaccgggccgctcttcaagagagtgctgatgtcttccaagtatgcggatggggtgactggtcgcgtggagttcaatgaggatggggaccggaagttcgccaactacagcatcatgaacctgcagaaccgcaagctggtgcaagtgggcatctacaatggcacccacgtcatccctaatgacaggaagatcatctggccaggcggagagacagagaagcctcgagggtaccagatgtccaccagactgaagattgtgacgatccaccaggagcccttcgtgtacgtcaagcccacgctgagtgatgggacatgcaaggaggagttcacagtcaacggcgacccagtcaagaaggtgatctgcaccgggcccaacgacacgtcgccgggcagcccccgccacacggtgcctcagtgttgctacggcttttgcatcgacctgctcatcaagctggcacggaccatgaacttcacctacgaggtgcacctggtggcagatggcaagttcggcacacaggagcgggtgaacaacagcaacaagaaggagtggaatgggatgatgggcgagctgctcagcgggcaggcagacatgatcgtggcgccgctaaccataaacaacgagcgcgcgcagtacatcgagttttccaagcccttcaagtaccagggcctgactattctggtcaagaaggagattccccggagcacgctggactcgttcatgcagccgttccagagcacactgtggctgctggtggggctgtcggtgcacgtggtggccgtgatgctgtacctgctggaccgcttcagccccttcggccggttcaaggtgaacagcgaggaggaggaggaggacgcactgaccctgtcctcggccatgtggttctcctggggcgtcctgctcaactccggcatcggggaaggcgcccccagaagcttctcagcgcgcatcctgggcatggtgtgggccggctttgccatgatcatcgtggcctcctacaccgccaacctggcggccttcctggtgctggaccggccggaggagcgcatcacgggcatcaacgaccctcggctgaggaacccctcggacaagtttatctacgccacggtgaagcagagctccgtggatatctacttccggcgccaggtggagctgagcaccatgtaccggcatatggagaagcacaactacgagagtgcggcggaggccatccaggccgtgagagacaacaagctgcatgccttcatctgggactcggcggtgctggagttcgaggcctcgcagaagtgcgacctggtgacgactggagagctgtttttccgctcgggcttcggcataggcatgcgcaaagacagcccctggaagcagaacgtctccctgtccatcctcaagtcccacgagaatggcttcatggaagacctggacaagacgtgggttcggtatcaggaatgtgactcgcgcagcaacgcccctgcgacccttacttttgagaacatggccggggtcttcatgctggtagctgggggcatcgtggccgggatcttcctgattttcatcgagattgcctacaagcggcacaaggatgctcgccggaagcagatgcagctggcctttgccgccgttaacgtgtggcggaagaacctgcaggagcaccgggggtggacgcggcgctttgcaaaaccaaaaagacacagtgctgccgcgacgcgctattgagagggaggagggccagctgcagctgtgttcccgtcatagggagagctgagactccccgcccgccctcctctgccccctcccccgcagacagacagacagacggatgggacagcggcccggcccacgcagagccccggagcaccacggggtcgggggaggagcacccccagcctcccccaggctgcgcctgcccgcccgccggttggccggctggccggtccaccccgtcccggccccgcgcgtgcccccagcgtggggctaacgggcgccttgtctgtgtatttctattttgcagcagtaccatcccactgatatcacgggcccgctcaacctctcagatccctcggtcagcaccgtggtgtgaggcccccggaggcgcccacctgcccagttagcccggccaaggacactgatgggtcctgctgctcgggaaggcctgagggaagcccacccgccccagagactgcccaccctgggcctcccgtccgtccgcccgcccaccccgctgcctggcgggcagcccctgctggaccaaggtgcggaccggagcggctgaggacggggcagagctgagtcggctgggcagggcgcagggcgctccggcagaggcagggccctggggtctctgagcagtggggagcgggggctaactggccccaggcggaggggcttggagcagagacggcagccccatccttcccgcagcaccagcctgagccacagtggggcccatggccccagctggctgggtcgcccctcctcgggcgcctgcgctcctctgcagcctgagctccaccctcccctcttcttgcggcaccgcccacccacaccccgtctgccccttgaccccacacgccggggctggccctgccctcccccacggccgtccctgacttcccagctggcagcgcctcccgccgcctcgggccgcctcctccagactcgagagggctgagcccctcctctcctcgtccggcctgcagcccagaacgggcctccccgggggtccccggacgctggctcgggactgtcttcaaccctgccctgcaccttgggcacgggagagcgccacccgcccgcccccgccctcgctccgggtgcgtgaccggcccgccaccttgtacagaaccagcactcccagggcccgagcgcgtgccttccccgtgcggcccgtgcgcagccgcgctctgcccctccgtccccagggtgcaggcgcgcaccgcccaacccccacctcccggtgtatgcagtggtgatgcctaaaggaatgtcacgca

SEQ ID NO: 599761 - DNA, 312 bp, Homo sapiens
  misc_feature (277)..(277): n is a, c, g, or t
cgcgctcatagcctccagattcaatccatttgttccttcagatgtgaccaaagctgccctctgtgcctagccatgggctgggtgctggagacacgagatcaggcaggccctgcccctggggctcattctagggtctgcggcagacagggagacagagggagctgtgagagccctgaggctgagtggctttctggggaagcaccatccctagggacctccgcgttgagacaccaaggcgagctgattgcttgagcccaggagtttaagaccagcctgngcaacatggcaaaaccctgtctctacaaaaaaata

SEQ ID NO: 599762 - DNA, 1632 bp, Homo sapiens
ggtaaggctctggaaaagggggcgctgggagcgcattgcgagggggctggagagggagagaggagcggaagctgagggtgtgaaacggctggccccgaacacacctcgcggcgctccagtgattcctggtgtccgacctcagccccagtcagtgcgggtccagtttccaggctctcgcggaaggcctggctgagcacatgcggcagccacggtcgccctccctattcctcttagcccgaggaggggggtcccaagttacatggccacgcagatggggcctctccctcatttctgaaccttgtggggaggggaaccttgaagggagcgccccccagagccatggcttagggcctcccccacccctctggagctccagtctgcaagagtcaggagccgaaatatcgctgactgtgggtgacgactcttgcgcgcacacacacatacaagcgggcacgacgcgttcggtcctattaaaaggcacgcaagggtgcggctgcacgcggtgacacggacccctctaacgtttccaaactgagctccctgcaggtccccgacagcacaggcccctgtcccaggacccctccaggcacgcgctcacacgcacacgcgcgctccccggctcacgcgcgctccgacacacacgctcacgcgaacgcaggcgcacgctctggcgcgggaggcgccccttcgcctccgtgttgggaagcgggggcggcgggaggggcaggagacgttggccccgctcgcgtttctgcagctgctgcagtcgccgcagcgtccggaccggaaccagcgccgtccgcggagccgccgccgccgccgccgggccctttccaagccgggcgctcggagctgtgcccggccccgcttcagcaccgcggacagcgccggccgcgtggggctgagccgagcccccgcgcacgcttcagcgccccttccctcggccgacgtcccgggaccgccgctccgggggagacgtggcgtccgcagcccgcggggccgggcgagcgcaggacggcccggaagccccgcgggggatgcgccgagggccccgcgttcgcgccgcgcagagccaggcccgcggcccgagcccatgagcaccatgcgcctgctgacgctcgccctgctgttctcctgctccgtcgcccgtgccgcgtgcgaccccaagatcgtcaacattggcgcggtgctgagcacgcggaagcacgagcagatgttccgcgaggccgtgaaccaggccaacaagcggcacggctcctggaagattcagctcaatgccacctccgtcacgcacaagcccaacgccatccagatggctctgtcggtgtgcgaggacctcatctccagccaggtctacgccatcctagttagccatccacctacccccaacgaccacttcactcccacccctgtctcctacacagccggcttctaccgcatacccgtgctggggctgaccacccgcatgtcgaagcgaacatgcggccaaaaaaataaaaaatttttaaaaaaagtatgtaaaacactttgaaaatgagtagtgtccctaaatatgtgctgaataaaaaaacaattcatctggactcgggtcaagaaaaaggaacagcagcaacatttccagcacgccggatg

SEQ ID NO: 599763 - DNA, 4838 bp, Homo sapiens
ggtaaggctctggaaaagggggcgctgggagcgcattgcgagggggctggagagggagagaggagcggaagctgagggtgtgaaacggctggccccgaacacacctcgcggcgctccagtgattcctggtgtccgacctcagccccagtcagtgcgggtccagtttccaggctctcgcggaaggcctggctgagcacatgcggcagccacggtcgccctccctattcctcttagcccgaggaggggggtcccaagttacatggccacgcagatggggcctctccctcatttctgaaccttgtggggaggggaaccttgaagggagcgccccccagagccatggcttagggcctcccccacccctctggagctccagtctgcaagagtcaggagccgaaatatcgctgactgtgggtgacgactcttgcgcgcacacacacatacaagcgggcacgacgcgttcggtcctattaaaaggcacgcaagggtgcggctgcacgcggtgacacggacccctctaacgtttccaaactgagctccctgcaggtccccgacagcacaggcccctgtcccaggacccctccaggcacgcgctcacacgcacacgcgcgctccccggctcacgcgcgctccgacacacacgctcacgcgaacgcaggcgcacgctctggcgcgggaggcgccccttcgcctccgtgttgggaagcgggggcggcgggaggggcaggagacgttggccccgctcgcgtttctgcagctgctgcagtcgccgcagcgtccggaccggaaccagcgccgtccgcggagccgccgccgccgccgccgggccctttccaagccgggcgctcggagctgtgcccggccccgcttcagcaccgcggacagcgccggccgcgtggggctgagccgagcccccgcgcacgcttcagcgccccttccctcggccgacgtcccgggaccgccgctccgggggagacgtggcgtccgcagcccgcggggccgggcgagcgcaggacggcccggaagccccgcgggggatgcgccgagggccccgcgttcgcgccgcgcagagccaggcccgcggcccgagcccatgagcaccatgcgcctgctgacgctcgccctgctgttctcctgctccgtcgcccgtgccgcgtgcgaccccaagatcgtcaacattggcgcggtgctgagcacgcggaagcacgagcagatgttccgcgaggccgtgaaccaggccaacaagcggcacggctcctggaagattcagctcaatgccacctccgtcacgcacaagcccaacgccatccagatggctctgtcggtgtgcgaggacctcatctccagccaggtctacgccatcctagttagccatccacctacccccaacgaccacttcactcccacccctgtctcctacacagccggcttctaccgcatacccgtgctggggctgaccacccgcatgtccatctactcggacaagagcatccacctgagcttcctgcgcaccgtgccgccctactcccaccagtccagcgtgtggtttgagatgatgcgtgtctacagctggaaccacatcatcctgctggtcagcgacgaccacgagggccgggcggctcagaaacgcctggagacgctgctggaggagcgtgagtccaagagtaaaaaaaggaactatgaaaacctcgaccaactgtcctatgacaacaagcgcggacccaaggcagagaaggtgctgcagtttgacccagggaccaagaacgtgacggccctgctgatggaggcgaaagagctggaggcccgggtcatcatcctttctgccagcgaggacgatgctgccactgtataccgcgcagccgcgatgctgaacatgacgggctccgggtacgtgtggctggtcggcgagcgcgagatctcggggaacgccctgcgctacgccccagacggcatcctcgggctgcagctcatcaacggcaagaacgagtcggcccacatcagcgacgccgtgggcgtggtggcccaggccgtgcacgagctcctcgagaaggagaacatcaccgacccgccgcggggctgcgtgggcaacaccaacatctggaagaccgggccgctcttcaagagagtgctgatgtcttccaagtatgcggatggggtgactggtcgcgtggagttcaatgaggatggggaccggaagttcgccaactacagcatcatgaacctgcagaaccgcaagctggtgcaagtgggcatctacaatggcacccacgtcatccctaatgacaggaagatcatctggccaggcggagagacagagaagcctcgagggtaccagatgtccaccagactgaagattgtgacgatccaccaggagcccttcgtgtacgtcaagcccacgctgagtgatgggacatgcaaggaggagttcacagtcaacggcgacccagtcaagaaggtgatctgcaccgggcccaacgacacgtcgccgggcagcccccgccacacggtgcctcagtgttgctacggcttttgcatcgacctgctcatcaagctggcacggaccatgaacttcacctacgaggtgcacctggtggcagatggcaagttcggcacacaggagcgggtgaacaacagcaacaagaaggagtggaatgggatgatgggcgagctgctcagcgggcaggcagacatgatcgtggcgccgctaaccataaacaacgagcgcgcgcagtacatcgagttttccaagcccttcaagtaccagggcctgactattctggtcaagaaggagattccccggagcacgctggactcgttcatgcagccgttccagagcacactgtggctgctggtggggctgtcggtgcacgtggtggccgtgatgctgtacctgctggaccgcttcagccccttcggccggttcaaggtgaacagcgaggaggaggaggaggacgcactgaccctgtcctcggccatgtggttctcctggggcgtcctgctcaactccggcatcggggaaggcgcccccagaagcttctcagcgcgcatcctgggcatggtgtgggccggctttgccatgatcatcgtggcctcctacaccgccaacctggcggccttcctggtgctggaccggccggaggagcgcatcacgggcatcaacgaccctcggctgaggaacccctcggacaagtttatctacgccacggtgaagcagagctccgtggatatctacttccggcgccaggtggagctgagcaccatgtaccggcatatggagaagcacaactacgagagtgcggcggaggccatccaggccgtgagagacaacaagctgcatgccttcatctgggactcggcggtgctggagttcgaggcctcgcagaagtgcgacctggtgacgactggagagctgtttttccgctcgggcttcggcataggcatgcgcaaagacagcccctggaagcagaacgtctccctgtccatcctcaagtcccacgagaatggcttcatggaagacctggacaagacgtgggttcggtatcaggaatgtgactcgcgcagcaacgcccctgcgacccttacttttgagaacatggccggggtcttcatgctggtagctgggggcatcgtggccgggatcttcctgattttcatcgagattgcctacaagcggcacaaggatgctcgccggaagcagatgcagctggcctttgccgccgttaacgtgtggcggaagaacctgcaggatagaaagagtggtagagcagagcctgaccctaaaaagaaagccacatttagggctatcacctccaccctggcttccagcttcaagaggcgtaggtcctccaaagacacgcagtaccatcccactgatatcacgggcccgctcaacctctcagatccctcggtcagcaccgtggtgtgaggcccccggaggcgcccacctgcccagttagcccggccaaggacactgatgggtcctgctgctcgggaaggcctgagggaagcccacccgccccagagactgcccaccctgggcctcccgtccgtccgcccgcccaccccgctgcctggcgggcagcccctgctggaccaaggtgcggaccggagcggctgaggacggggcagagctgagtcggctgggcagggcgcagggcgctccggcagaggcagggccctggggtctctgagcagtggggagcgggggctaactggccccaggcggaggggcttggagcagagacggcagccccatccttcccgcagcaccagcctgagccacagtggggcccatggccccagctggctgggtcgcccctcctcgggcgcctgcgctcctctgcagcctgagctccaccctcccctcttcttgcggcaccgcccacccacaccccgtctgccccttgaccccacacgccggggctggccctgccctcccccacggccgtccctgacttcccagctggcagcgcctcccgccgcctcgggccgcctcctccagactcgagagggctgagcccctcctctcctcgtccggcctgcagcccagaacgggcctccccgggggtccccggacgctggctcgggactgtcttcaaccctgccctgcaccttgggcacgggagagcgccacccgcccgcccccgccctcgctccgggtgcgtgaccggcccgccaccttgtacagaaccagcactcccagggcccgagcgcgtgccttccccgtgcggcccgtgcgcagccgcgctctgcccctccgtccccagggtgcaggcgcgcaccgcccaacccccacctcccggtgtatgcagtggtgatgcctaaaggaatgtcacgca

SEQ ID NO: 599764 - DNA, 4728 bp, Homo sapiens
ggtaaggctctggaaaagggggcgctgggagcgcattgcgagggggctggagagggagagaggagcggaagctgagggtgtgaaacggctggccccgaacacacctcgcggcgctccagtgattcctggtgtccgacctcagccccagtcagtgcgggtccagtttccaggctctcgcggaaggcctggctgagcacatgcggcagccacggtcgccctccctattcctcttagcccgaggaggggggtcccaagttacatggccacgcagatggggcctctccctcatttctgaaccttgtggggaggggaaccttgaagggagcgccccccagagccatggcttagggcctcccccacccctctggagctccagtctgcaagagtcaggagccgaaatatcgctgactgtgggtgacgactcttgcgcgcacacacacatacaagcgggcacgacgcgttcggtcctattaaaaggcacgcaagggtgcggctgcacgcggtgacacggacccctctaacgtttccaaactgagctccctgcaggtccccgacagcacaggcccctgtcccaggacccctccaggcacgcgctcacacgcacacgcgcgctccccggctcacgcgcgctccgacacacacgctcacgcgaacgcaggcgcacgctctggcgcgggaggcgccccttcgcctccgtgttgggaagcgggggcggcgggaggggcaggagacgttggccccgctcgcgtttctgcagctgctgcagtcgccgcagcgtccggaccggaaccagcgccgtccgcggagccgccgccgccgccgccgggccctttccaagccgggcgctcggagctgtgcccggccccgcttcagcaccgcggacagcgccggccgcgtggggctgagccgagcccccgcgcacgcttcagcgccccttccctcggccgacgtcccgggaccgccgctccgggggagacgtggcgtccgcagcccgcggggccgggcgagcgcaggacggcccggaagccccgcgggggatgcgccgagggccccgcgttcgcgccgcgcagagccaggcccgcggcccgagcccatgagcaccatgcgcctgctgacgctcgccctgctgttctcctgctccgtcgcccgtgccgcgtgcgaccccaagatcgtcaacattggcgcggtgctgagcacgcggaagcacgagcagatgttccgcgaggccgtgaaccaggccaacaagcggcacggctcctggaagattcagctcaatgccacctccgtcacgcacaagcccaacgccatccagatggctctgtcggtgtgcgaggacctcatctccagccaggtctacgccatcctagttagccatccacctacccccaacgaccacttcactcccacccctgtctcctacacagccggcttctaccgcatacccgtgctggggctgaccacccgcatgtccatctactcggacaagagcatccacctgagcttcctgcgcaccgtgccgccctactcccaccagtccagcgtgtggtttgagatgatgcgtgtctacagctggaaccacatcatcctgctggtcagcgacgaccacgagggccgggcggctcagaaacgcctggagacgctgctggaggagcgtgagtccaagagtaaaaaaaggaactatgaaaacctcgaccaactgtcctatgacaacaagcgcggacccaaggcagagaaggtgctgcagtttgacccagggaccaagaacgtgacggccctgctgatggaggcgaaagagctggaggcccgggtcatcatcctttctgccagcgaggacgatgctgccactgtataccgcgcagccgcgatgctgaacatgacgggctccgggtacgtgtggctggtcggcgagcgcgagatctcggggaacgccctgcgctacgccccagacggcatcctcgggctgcagctcatcaacggcaagaacgagtcggcccacatcagcgacgccgtgggcgtggtggcccaggccgtgcacgagctcctcgagaaggagaacatcaccgacccgccgcggggctgcgtgggcaacaccaacatctggaagaccgggccgctcttcaagagagtgctgatgtcttccaagtatgcggatggggtgactggtcgcgtggagttcaatgaggatggggaccggaagttcgccaactacagcatcatgaacctgcagaaccgcaagctggtgcaagtgggcatctacaatggcacccacgtcatccctaatgacaggaagatcatctggccaggcggagagacagagaagcctcgagggtaccagatgtccaccagactgaagattgtgacgatccaccaggagcccttcgtgtacgtcaagcccacgctgagtgatgggacatgcaaggaggagttcacagtcaacggcgacccagtcaagaaggtgatctgcaccgggcccaacgacacgtcgccgggcagcccccgccacacggtgcctcagtgttgctacggcttttgcatcgacctgctcatcaagctggcacggaccatgaacttcacctacgaggtgcacctggtggcagatggcaagttcggcacacaggagcgggtgaacaacagcaacaagaaggagtggaatgggatgatgggcgagctgctcagcgggcaggcagacatgatcgtggcgccgctaaccataaacaacgagcgcgcgcagtacatcgagttttccaagcccttcaagtaccagggcctgactattctggtcaagaaggagattccccggagcacgctggactcgttcatgcagccgttccagagcacactgtggctgctggtggggctgtcggtgcacgtggtggccgtgatgctgtacctgctggaccgcttcagccccttcggccggttcaaggtgaacagcgaggaggaggaggaggacgcactgaccctgtcctcggccatgtggttctcctggggcgtcctgctcaactccggcatcggggaaggcgcccccagaagcttctcagcgcgcatcctgggcatggtgtgggccggctttgccatgatcatcgtggcctcctacaccgccaacctggcggccttcctggtgctggaccggccggaggagcgcatcacgggcatcaacgaccctcggctgaggaacccctcggacaagtttatctacgccacggtgaagcagagctccgtggatatctacttccggcgccaggtggagctgagcaccatgtaccggcatatggagaagcacaactacgagagtgcggcggaggccatccaggccgtgagagacaacaagctgcatgccttcatctgggactcggcggtgctggagttcgaggcctcgcagaagtgcgacctggtgacgactggagagctgtttttccgctcgggcttcggcataggcatgcgcaaagacagcccctggaagcagaacgtctccctgtccatcctcaagtcccacgagaatggcttcatggaagacctggacaagacgtgggttcggtatcaggaatgtgactcgcgcagcaacgcccctgcgacccttacttttgagaacatggccggggtcttcatgctggtagctgggggcatcgtggccgggatcttcctgattttcatcgagattgcctacaagcggcacaaggatgctcgccggaagcagatgcagctggcctttgccgccgttaacgtgtggcggaagaacctgcaggcagtaccatcccactgatatcacgggcccgctcaacctctcagatccctcggtcagcaccgtggtgtgaggcccccggaggcgcccacctgcccagttagcccggccaaggacactgatgggtcctgctgctcgggaaggcctgagggaagcccacccgccccagagactgcccaccctgggcctcccgtccgtccgcccgcccaccccgctgcctggcgggcagcccctgctggaccaaggtgcggaccggagcggctgaggacggggcagagctgagtcggctgggcagggcgcagggcgctccggcagaggcagggccctggggtctctgagcagtggggagcgggggctaactggccccaggcggaggggcttggagcagagacggcagccccatccttcccgcagcaccagcctgagccacagtggggcccatggccccagctggctgggtcgcccctcctcgggcgcctgcgctcctctgcagcctgagctccaccctcccctcttcttgcggcaccgcccacccacaccccgtctgccccttgaccccacacgccggggctggccctgccctcccccacggccgtccctgacttcccagctggcagcgcctcccgccgcctcgggccgcctcctccagactcgagagggctgagcccctcctctcctcgtccggcctgcagcccagaacgggcctccccgggggtccccggacgctggctcgggactgtcttcaaccctgccctgcaccttgggcacgggagagcgccacccgcccgcccccgccctcgctccgggtgcgtgaccggcccgccaccttgtacagaaccagcactcccagggcccgagcgcgtgccttccccgtgcggcccgtgcgcagccgcgctctgcccctccgtccccagggtgcaggcgcgcaccgcccaacccccacctcccggtgtatgcagtggtgatgcctaaaggaatgtcacgca

SEQ ID NO: 599765 - DNA, 980 bp, Homo sapiens
accttgctaattagcagcttaatattgcaatgtatccggtggtatataacatctttaagagcgtgatcatgagagagctattattgaaacgcaccccccccatgtttattactatatagaggcttgaggataagtggtttgaacttcatgctgcttactgtcctgtgatttgtttcccataacgagtgacattgcacccgagtactaatgtgcgctagtgaaaaagacgctctagttcggaaagctcaatagggtagtatcgcagagagggtgggataaatttcatcgttgtgagtaatgttatctgaggaagaaatgcctgtagaatacccgcggtgtcctgtgtcttcaagtgcctaagattgacatcgtagtcttctcatcgtatggtcccatgcccttattactggcgggtccctcaaattccacattatgttacttgtgatgtttatacggacccgtgtgctttaatcctctgtccatctctcttgtcctgtgatgtatttatgcatggaatattcgtctgattaatcctgcttattatatggccgctttacttataggacggaacttttctgtgcatgtcaatggttatatctgttttggtaacttttttacacgtttcacaattagtaccatgagttttctggtcgtgtcccgctcaggggtgtaacacctaatattaccgtcaagtatagtaggtgctattttgtggttgggatctctcttagcgctactgctgagcggcggcggcgtatgctggtgggttaccagtgggttctcgataccagatcaatgcctttgtgtacttgggaacctggaatccaaggtgcccattgggtgggctcacaaaccacgctggggtcctctttttttgcccttgtaaattccgccgcgggcggggcaaatctttgttgcttgcaaccatattttctcggcaggccatctgggggcacaacatttgggcggcgcatccggcc

SEQ ID NO: 599766 - DNA, 315 bp, Homo sapiens
atgaggacccccaagcagttatacagactcatgtcgctttaggtcagctgggctggtattactctctggatgtggtgtgacgtgacccagagagagctgggtggatccccagcccaagtctctggtgcctccttctccagcctcaggcacaacgcgtggaaggcaccttcagcatctcctcctctctcaccgcagaacctggctctgcaggtcgacacttaacacctgccaggtcacacacatctctctggagaagccccttgtggcacagcacccagggatgcccacacagagctgagaacagcctatggaagt

SEQ ID NO: 599767 - DNA, 4003 bp, Homo sapiens
ggtaaggctctggaaaagggggcgctgggagcgcattgcgagggggctggagagggagagaggagcggaagctgagggtgtgaaacggctggccccgaacacacctcgcggcgctccagtgattcctggtgtccgacctcagccccagtcagtgcgggtccagtttccaggctctcgcggaaggcctggctgagcacatgcggcagccacggtcgccctccctattcctcttagcccgaggaggggggtcccaagttacatggccacgcagatggggcctctccctcatttctgaaccttgtggggaggggaaccttgaagggagcgccccccagagccatggcttagggcctcccccacccctctggagctccagtctgcaagagtcaggagccgaaatatcgctgactgtgggtgacgactcttgcgcgcacacacacatacaagcgggcacgacgcgttcggtcctattaaaaggcacgcaagggtgcggctgcacgcggtgacacggacccctctaacgtttccaaactgagctccctgcaggtccccgacagcacaggcccctgtcccaggacccctccaggcacgcgctcacacgcacacgcgcgctccccggctcacgcgcgctccgacacacacgctcacgcgaacgcaggcgcacgctctggcgcgggaggcgccccttcgcctccgtgttgggaagcgggggcggcgggaggggcaggagacgttggccccgctcgcgtttctgcagctgctgcagtcgccgcagcgtccggaccggaaccagcgccgtccgcggagccgccgccgccgccgccgggccctttccaagccgggcgctcggagctgtgcccggccccgcttcagcaccgcggacagcgccggccgcgtggggctgagccgagcccccgcgcacgcttcagcgccccttccctcggccgacgtcccgggaccgccgctccgggggagacgtggcgtccgcagcccgcggggccgggcgagcgcaggacggcccggaagccccgcgggggatgcgccgagggccccgcgttcgcgccgcgcagagccaggcccgcggcccgagcccatgagcaccatgcgcctgctgacgctcgccctgctgttctcctgctccgtcgcccgtgccgcgtgcgaccccaagatcgtcaacattggcgcggtgctgagcacgcggaagcacgagcagatgttccgcgaggccgtgaaccaggccaacaagcggcacggctcctggaagattcagctcaatgccacctccgtcacgcacaagcccaacgccatccagatggctctgtcggtgtgcgaggacctcatctccagccaggtctacgccatcctagttagccatccacctacccccaacgaccacttcactcccacccctgtctcctacacagccggcttctaccgcatacccgtgctggggctgaccacccgcatgtccatctactcggacaagagcatccacctgagcttcctgcgcaccgtgccgccctactcccaccagtccagcgtgtggtttgagatgatgcgtgtctacagctggaaccacatcatcctgctggtcagcgacgaccacgagggccgggcggctcagaaacgcctggagacgctgctggaggagcgtgagtccaagagtaaaaaaaggaactatgaaaacctcgaccaactgtcctatgacaacaagcgcggacccaaggcagagaaggtgctgcagtttgacccagggaccaagaacgtgacggccctgctgatggaggcgaaagagctggaggcccgggtcatcatcctttctgccagcgaggacgatgctgccactgtataccgcgcagccgcgatgctgaacatgacgggctccgggtacgtgtggctggtcggcgagcgcgagatctcggggaacgccctgcgctacgccccagacggcatcctcgggctgcagctcatcaacggcaagaacgagtcggcccacatcagcgacgccgtgggcgtggtggcccaggccgtgcacgagctcctcgagaaggagaacatcaccgacccgccgcggggctgcgtgggcaacaccaacatctggaagaccgggccgctcttcaagagagtgctgatgtcttccaagtatgcggatggggtgactggtcgcgtggagttcaatgaggatggggaccggaagttcgccaactacagcatcatgaacctgcagaaccgcaagctggtgcaagtgggcatctacaatggcacccacgtcatccctaatgacaggaagatcatctggccaggcggagagacagagaagcctcgagggtaccagatgtccaccagactgaagattgtgacgatccaccaggagcccttcgtgtacgtcaagcccacgctgagtgatgggacatgcaaggaggagttcacagtcaacggcgacccagtcaagaaggtgatctgcaccgggcccaacgacacgtcgccgggcagcccccgccacacggtgcctcagtgttgctacggcttttgcatcgacctgctcatcaagctggcacggaccatgaacttcacctacgaggtgcacctggtggcagatggcaagttcggcacacaggagcgggtgaacaacagcaacaagaaggagtggaatgggatgatgggcgagctgctcagcgggcaggcagacatgatcgtggcgccgctaaccataaacaacgagcgcgcgcagtacatcgagttttccaagcccttcaagtaccagggcctgactattctggtcaagaaggagattccccggagcacgctggactcgttcatgcagccgttccagagcacactgtggctgctggtggggctgtcggtgcacgtggtggccgtgatgctgtacctgctggaccgcttcagccccttcggccggttcaaggtgaacagcgaggaggaggaggaggacgcactgaccctgtcctcggccatgtggttctcctggggcgtcctgctcaactccggcatcggggaaggcgcccccagaagcttctcagcgcgcatcctgggcatggtgtgggccggctttgccatgatcatcgtggcctcctacaccgccaacctggcggccttcctggtgctggaccggccggaggagcgcatcacgggcatcaacgaccctcggctgaggaacccctcggacaagtttatctacgccacggtgaagcagagctccgtggatatctacttccggcgccaggtggagctgagcaccatgtaccggcatatggagaagcacaactacgagagtgcggcggaggccatccaggccgtgagagacaacaagctgcatgccttcatctgggactcggcggtgctggagttcgaggcctcgcagaagtgcgacctggtgacgactggagagctgtttttccgctcgggcttcggcataggcatgcgcaaagacagcccctggaagcagaacgtctccctgtccatcctcaagtcccacgagaatggcttcatggaagacctggacaagacgtgggttcggtatcaggaatgtgactcgcgcagcaacgcccctgcgacccttacttttgagaacatggccggggtcttcatgctggtagctgggggcatcgtggccgggatcttcctgattttcatcgagattgcctacaagcggcacaaggatgctcgccggaagcagatgcagctggcctttgccgccgttaacgtgtggcggaagaacctgcaggatagaaagagtggtagagcagagcctgaccctaaaaagaaagccacatttagggctatcacctccaccctggcttccagcttcaagaggcgtaggtcctccaaagacacgagcaccgggggtggacgcggcgctttgcaaaaccaaaaagacacagtgctgccgcgacgcgctattgagagggagggtgcaggcgcgcaccgcccaacccccacctcccggtgtatgcagtggtgatgcctaaaggaatgtcacgca

SEQ ID NO: 599768 - DNA, 658 bp, Homo sapiens
gtagatcttcttttaacagtctaagtacgccctcttgtgggtcaagctagaatcacatctgctctccagcatcttctgtttcctggcaagagtttcctgctactttggattggccacgatgggctggagctgtcttgagacacgagtattagggcttggtgctcagaggatcagccgcctgttgctgaaagacaaggaactgaaggacatcagggccttggacaaggccttcataccagaattgagagaggaattttctaagctccagaacaggaccaagctgactgtgcttgaaggagacattctggatgagccattcctgaaaagagcctgccaggacgtctcggtcggcatccacaccgactggatattgagtgctttgggggcactcacagagagtccctttgattgtcatgtgaaagagccccagtttctgttggaggtctttaggcaaaaccagggggccactctttataacaaccagaccaataaaagaaacggggccctatttcctcaagacgtggccgaggcgaggacttaagacttgattattgagagggtccctgccgctcccacccagattttttctttgttgtttttttaacgcgctgtcttcatctcggaatcgatataatgattgcccccgcttctcatcatc

SEQ ID NO: 599769 - DNA, 4007 bp, Homo sapiens
ggtaaggctctggaaaagggggcgctgggagcgcattgcgagggggctggagagggagagaggagcggaagctgagggtgtgaaacggctggccccgaacacacctcgcggcgctccagtgattcctggtgtccgacctcagccccagtcagtgcgggtccagtttccaggctctcgcggaaggcctggctgagcacatgcggcagccacggtcgccctccctattcctcttagcccgaggaggggggtcccaagttacatggccacgcagatggggcctctccctcatttctgaaccttgtggggaggggaaccttgaagggagcgccccccagagccatggcttagggcctcccccacccctctggagctccagtctgcaagagtcaggagccgaaatatcgctgactgtgggtgacgactcttgcgcgcacacacacatacaagcgggcacgacgcgttcggtcctattaaaaggcacgcaagggtgcggctgcacgcggtgacacggacccctctaacgtttccaaactgagctccctgcaggtccccgacagcacaggcccctgtcccaggacccctccaggcacgcgctcacacgcacacgcgcgctccccggctcacgcgcgctccgacacacacgctcacgcgaacgcaggcgcacgctctggcgcgggaggcgccccttcgcctccgtgttgggaagcgggggcggcgggaggggcaggagacgttggccccgctcgcgtttctgcagctgctgcagtcgccgcagcgtccggaccggaaccagcgccgtccgcggagccgccgccgccgccgccgggccctttccaagccgggcgctcggagctgtgcccggccccgcttcagcaccgcggacagcgccggccgcgtggggctgagccgagcccccgcgcacgcttcagcgccccttccctcggccgacgtcccgggaccgccgctccgggggagacgtggcgtccgcagcccgcggggccgggcgagcgcaggacggcccggaagccccgcgggggatgcgccgagggccccgcgttcgcgccgcgcagagccaggcccgcggcccgagcccatgagcaccatgcgcctgctgacgctcgccctgctgttctcctgctccgtcgcccgtgccgcgtgcgaccccaagatcgtcaacattggcgcggtgctgagcacgcggaagcacgagcagatgttccgcgaggccgtgaaccaggccaacaagcggcacggctcctggaagattcagctcaatgccacctccgtcacgcacaagcccaacgccatccagatggctctgtcggtgtgcgaggacctcatctccagccaggtctacgccatcctagttagccatccacctacccccaacgaccacttcactcccacccctgtctcctacacagccggcttctaccgcatacccgtgctggggctgaccacccgcatgtccatctactcggacaagagcatccacctgagcttcctgcgcaccgtgccgccctactcccaccagtccagcgtgtggtttgagatgatgcgtgtctacagctggaaccacatcatcctgctggtcagcgacgaccacgagggccgggcggctcagaaacgcctggagacgctgctggaggagcgtgagtccaagagtaaaaaaaggaactatgaaaacctcgaccaactgtcctatgacaacaagcgcggacccaaggcagagaaggtgctgcagtttgacccagggaccaagaacgtgacggccctgctgatggaggcgaaagagctggaggcccgggtcatcatcctttctgccagcgaggacgatgctgccactgtataccgcgcagccgcgatgctgaacatgacgggctccgggtacgtgtggctggtcggcgagcgcgagatctcggggaacgccctgcgctacgccccagacggcatcctcgggctgcagctcatcaacggcaagaacgagtcggcccacatcagcgacgccgtgggcgtggtggcccaggccgtgcacgagctcctcgagaaggagaacatcaccgacccgccgcggggctgcgtgggcaacaccaacatctggaagaccgggccgctcttcaagagagtgctgatgtcttccaagtatgcggatggggtgactggtcgcgtggagttcaatgaggatggggaccggaagttcgccaactacagcatcatgaacctgcagaaccgcaagctggtgcaagtgggcatctacaatggcacccacgtcatccctaatgacaggaagatcatctggccaggcggagagacagagaagcctcgagggtaccagatgtccaccagactgaagattgtgacgatccaccaggagcccttcgtgtacgtcaagcccacgctgagtgatgggacatgcaaggaggagttcacagtcaacggcgacccagtcaagaaggtgatctgcaccgggcccaacgacacgtcgccgggcagcccccgccacacggtgcctcagtgttgctacggcttttgcatcgacctgctcatcaagctggcacggaccatgaacttcacctacgaggtgcacctggtggcagatggcaagttcggcacacaggagcgggtgaacaacagcaacaagaaggagtggaatgggatgatgggcgagctgctcagcgggcaggcagacatgatcgtggcgccgctaaccataaacaacgagcgcgcgcagtacatcgagttttccaagcccttcaagtaccagggcctgactattctggtcaagaaggagattccccggagcacgctggactcgttcatgcagccgttccagagcacactgtggctgctggtggggctgtcggtgcacgtggtggccgtgatgctgtacctgctggaccgcttcagccccttcggccggttcaaggtgaacagcgaggaggaggaggaggacgcactgaccctgtcctcggccatgtggttctcctggggcgtcctgctcaactccggcatcggggaaggcgcccccagaagcttctcagcgcgcatcctgggcatggtgtgggccggctttgccatgatcatcgtggcctcctacaccgccaacctggcggccttcctggtgctggaccggccggaggagcgcatcacgggcatcaacgaccctcggctgaggaacccctcggacaagtttatctacgccacggtgaagcagagctccgtggatatctacttccggcgccaggtggagctgagcaccatgtaccggcatatggagaagcacaactacgagagtgcggcggaggccatccaggccgtgagagacaacaagctgcatgccttcatctgggactcggcggtgctggagttcgaggcctcgcagaagtgcgacctggtgacgactggagagctgtttttccgctcgggcttcggcataggcatgcgcaaagacagcccctggaagcagaacgtctccctgtccatcctcaagtcccacgagaatggcttcatggaagacctggacaagacgtgggttcggtatcaggaatgtgactcgcgcagcaacgcccctgcgacccttacttttgagaacatggccggggtcttcatgctggtagctgggggcatcgtggccgggatcttcctgattttcatcgagattgcctacaagcggcacaaggatgctcgccggaagcagatgcagctggcctttgccgccgttaacgtgtggcggaagaacctgcaggtagggcaggccaccctccgaggcctgggtgccagggccctggctggccacggccctcctccatcccctgaaggccgtggccactgggactctgggctctggtggggcagggaactggagatagcgagccaatggccaggggcagtggcagagtggctcccaagggcacgggggacgaaaccgaatgaggggcatagcatgaaggtggatagcccactgcaaaagccggggaccgaagggaaggccaggcaccatgaaacaa

SEQ ID NO: 599770 - DNA, 119 bp, Homo sapiens
tgtctactgtgggcaggtgtatgagaagtcccccctgcgtggtgaagaacttcgggtatctggctgcgctatgactacccggtagcggcacccacaacatgtacctgggaatacctggg

SEQ ID NO: 599771 - DNA, 1949 bp, Homo sapiens
  misc_feature (31)..(31): n is a, c, g, or t
  misc_feature (43)..(43): n is a, c, g, or t
  misc_feature (48)..(48): n is a, c, g, or t
  misc_feature (62)..(62): n is a, c, g, or t
aactcaggggcgagctgagctcatgtgcganctgtaactcagngtcgngctgctaactcagnggcgagctgctaactcaggggcgagctgctaactcaggggcgtcctgctcaactccggcatcggggaaggcgcccccagaagcttctcagcgcgcatcctgggcatggtgtgggccggctttgccatgatcatcgtggcctcctacaccgccaacctggcggccttcctggtgctggaccggccggaggagcgcatcacgggcatcaacgaccctcggctgaggaacccctcggacaagtttatctacgccacggtgaagcagagctccgtggatatctacttccggcgccaggtggagctgagcaccatgtaccggcatatggagaagcacaactacgagagtgcggcggaggccatccaggccgtgagagacaacaagctgcatgccttcatctgggactcggcggtgctggagttcgaggcctcgcagaagtgcgacctggtgacgactggagagctgtttttccgctcgggcttcggcataggcatgcgcaaagacagcccctggaagcagaacgtctccctgtccatcctcaagtcccacgagaatggcttcatggaagacctggacaagacgtgggttcggtatcaggaatgtgactcgcgcagcaacgcccctgcgacccttacttttgagaacatggccggggtcttcatgctggtagctgggggcatcgtggccgggatcttcctgattttcatcgagattgcctacaagcggcacaaggatgctcgccggaagcagatgcagctggcctttgccgccgttaacgtgtggcggaagaacctgcaggatagaaagagtggtagagcagagcctgaccctaaaaagaaagccacatttagggctatcacctccaccctggcttccagcttcaagaggcgtaggtcctccaaagacacgcagtaccatcccactgatatcacgggcccgctcaacctctcagatccctcggtcagcaccgtggtgtgaggcccccggaggcgcccacctgcccagttagcccggccaaggacactgatgggtcctgctgctcgggaaggcctgagggaagcccacccgccccagagactgcccaccctgggcctcccgtccgtccgcccgcccaccccgctgcctggcgggcagcccctgctggaccaaggtgcggaccggagcggctgaggacggggcagagctgagtcggctgggcagggcgcagggcgctccggcagaggcagggccctggggtctctgagcagtggggagcgggggctaactggccccaggcggaggggcttggagcagagacggcagccccatccttcccgcagcaccagcctgagccacagtggggcccatggccccagctggctgggtcgcccctcctcgggcgcctgcgctcctctgcagcctgagctccaccctcccctcttcttgcggcaccgcccacccacaccccgtctgccccttgaccccacacgccggggctggccctgccctcccccacggccgtccctgacttcccagctggcagcgcctcccgccgcctcgggccgcctcctccagactcgagagggctgagcccctcctctcctcgtccggcctgcagcccagaacgggcctccccgggggtccccggacgctggctcgggactgtcttcaaccctgccctgcaccttgggcacgggagagcgccacccgcccgcccccgccctcgctccgggtgcgtgaccggcccgccaccttgtacagaaccagcactcccagggcccgagcgcgtgccttccccgtgcggcccgtgcgcagccgcgctctgcccctccgtccccagggtgcaggcgcgcaccgcccaacccccacctcccggtgtatgcagtggtgatgcctaaaggaatgtcacgca

SEQ ID NO: 599772 - DNA, 1607 bp, Homo sapiens
  misc_feature (31)..(31): n is a, c, g, or t
  misc_feature (43)..(43): n is a, c, g, or t
  misc_feature (48)..(48): n is a, c, g, or t
  misc_feature (62)..(62): n is a, c, g, or t
aactcaggggcgagctgagctcatgtgcganctgtaactcagngtcgngctgctaactcagnggcgagctgctaactcaggggcgagctgctaactcaagctgcatgccttcatctgggactcggcggtgctggagttcgaggcctcgcagaagtgcgacctggtgacgactggagagctgtttttccgctcgggcttcggcataggcatgcgcaaagacagcccctggaagcagaacgtctccctgtccatcctcaagtcccacgagaatggcttcatggaagacctggacaagacgtgggttcggtatcaggaatgtgactcgcgcagcaacgcccctgcgacccttacttttgagaacatggccggggtcttcatgctggtagctgggggcatcgtggccgggatcttcctgattttcatcgagattgcctacaagcggcacaaggatgctcgccggaagcagatgcagctggcctttgccgccgttaacgtgtggcggaagaacctgcaggatagaaagagtggtagagcagagcctgaccctaaaaagaaagccacatttagggctatcacctccaccctggcttccagcttcaagaggcgtaggtcctccaaagacacgcagtaccatcccactgatatcacgggcccgctcaacctctcagatccctcggtcagcaccgtggtgtgaggcccccggaggcgcccacctgcccagttagcccggccaaggacactgatgggtcctgctgctcgggaaggcctgagggaagcccacccgccccagagactgcccaccctgggcctcccgtccgtccgcccgcccaccccgctgcctggcgggcagcccctgctggaccaaggtgcggaccggagcggctgaggacggggcagagctgagtcggctgggcagggcgcagggcgctccggcagaggcagggccctggggtctctgagcagtggggagcgggggctaactggccccaggcggaggggcttggagcagagacggcagccccatccttcccgcagcaccagcctgagccacagtggggcccatggccccagctggctgggtcgcccctcctcgggcgcctgcgctcctctgcagcctgagctccaccctcccctcttcttgcggcaccgcccacccacaccccgtctgccccttgaccccacacgccggggctggccctgccctcccccacggccgtccctgacttcccagctggcagcgcctcccgccgcctcgggccgcctcctccagactcgagagggctgagcccctcctctcctcgtccggcctgcagcccagaacgggcctccccgggggtccccggacgctggctcgggactgtcttcaaccctgccctgcaccttgggcacgggagagcgccacccgcccgcccccgccctcgctccgggtgcgtgaccggcccgccaccttgtacagaaccagcactcccagggcccgagcgcgtgccttccccgtgcggcccgtgcgcagccgcgctctgcccctccgtccccagggtgcaggcgcgcaccgcccaacccccacctcccggtgtatgcagtggtgatgcctaaaggaatgtcacgca

SEQ ID NO: 599773 - DNA, 1100 bp, Homo sapiens
cataattatttgccctgaggtctatgctgttttctacaaaatgccaagacgttattttgagggtgtgtgggtgtgtgtgatgtgtgtggaggaggccgaagacccaatagaatcacctgtctggagactcgacgatacaggaaccaacaacgaaaggacgcccccacacagacacacgaaggcacaagaagagaacacacagcacaccatagaaaaggagaggacccaatgccaaacgcaactacacactacaagaacaagcaaatcagacacgtaaccagaacagatcagaacagcgcagccccgatgctcacaccagcacagctacaaccaaacaataacagacgcccaaggaccacgcaacacaaacaaccgcgccaccacgggaagacagagacacacacaacaacccggcaccgcaagaccaacagaaccaacaagccgcaacagaacgccccccccaggcgaacccacccacgccacaaccacgcaccacaaacacaacacgcaccacacccactaggaacaacaacacacggaagcaaaacacacaagcaacagacgcaccaaaggagaaacaaaggcaagcaccggaacacgaaagacacgcagacgaccgaagacccgaagccgagccaaaaagccgaagacatcacgcaaacaacacaccgggcgcggacgaaaacagccagcgaggcaaccgctggagcaagacacacaacacagcacaccaaacaacacgcacgcgaacacacccagacagagcagccgaccaatcaacacaaggaagtaaacaggcgggactaagaggacgaagtagaggcgcagggagcacggagcgaagaaacaggaccagcagagcacaaacgagatgaataaagagatgcggaaacagaaacactacgacagggacgccaggaaggaagagctgctgagcgtcgagggagcggagggagcgaagcagcggacgtagcaccgacgagcgcgcttctgcaacgagggtgtgtaggagctagtagctaagagctgcgatcagccactcagagcgaggcagacggcgaccaggacgcagcgcgatgctagacgtgataggaaccgtt

SEQ ID NO: 599774 - DNA, 260 bp, Homo sapiens
  misc_feature (217)..(217): n is a, c, g, or t
cttctgaatcactcgagctatgcaccacaaacaaacgagagacagagaaagacagtcagccagacacattaaaaaaaaaaaaagaaaagtaaaatctgagttgttactaagcctaattctctggttaaagtttggggtcaatgttttctttttgggtcttctatttcagggaattggaattggagcctgtgtaaaattcctctaggtctaaaactgngaatctcatggcaccgttctcttttcccgtcttcattttctct

SEQ ID NO: 599775 - DNA, 1129 bp, Homo sapiens
gccaaggttcaagattaataagaaaattccccggggaccaccttctcctcctgcgcctgtcatgcattctcctagccgaaagatgactgtaaagggaacaacaagagtggaagattcctccttgtatttctaactggaaaaatgcaaagggttatacaattccattagacaaacaaggaggaatctaccaccttctcctcctgcgcctgtcatgcattctcctagccgaaagatgactgtaaaggaacaacaagagtggaagattcctccttgtatttctaactggaacaaatgcaaagggttatacaattccattagacaaacgtctggctgctgatggacagaggactacagacagtacacactaaatgaaaatttcgccaaatcggcagaagacctctacattgctgatcgcgaaggctcgtgaagctgcggaaatgcgtgcccaagtagagagaaacactgggtcagaaagaaaaggaaaacgcatgcacagagaaacctcacagaacccggcccaagaaaagccaggcagagcacgacctggggaccacacacctcccaggtggcacccaccgagcgacacggggacgccacacggcagaacggcactgcaaacacggccatggaacgcggcggaccagacgagaccacctgcaccggccaacccgaccagcagcaacaccccgaccacaacgagcacacacccaaccaagagaaaaacggcgcaaccaaagctggaacatactaggaacccggcgagacataaccccaaagacgtccaaaggcacacacacagacacccccacgcaaacacaacacacacacgggacaccagcacacggctcaagagagccacagaccaaacgaccacgcataagacacacggacacgagcaaaggacgggacacgacaccacgagaccagcaacgtgaaaaggctaggacgaaggcagccccacgcgaagacaagaggacaggcacggccagcacacggaagccaaggacaggtacaagaccgaggacgcaatacaagaaagagacaacaagagcagacagaacgatcgctcgcagcccacagagagcagataaacacgaagacacgacgatgcgagaaagcaaccacaacc

SEQ ID NO: 599776 - DNA, 228 bp, Homo sapiens
actggctgcccatgtgctatgcactgttatctgttgtgtatccgtcaaccccaggaagttttcccagatacccatgtggacctgccatgctcttcacgttctgagccaggatcagaagtgagggaagccagacctgtgttgtcatggccgattcttgactttccacatgatctcccagtgtccagtggtctccacttgtgaaggatttcaactgcactggtaagcacc

SEQ ID NO: 599777 - DNA, 718 bp, Homo sapiens
tgatgcggagtcttgctctgttgtccagcctggagtgcagtggcatgatctcggctcactgcaacctctgcctcccaggttcaagcgattctcctgcctcagcctcctaagtggctggtattacaggagtgtgccattagcctggctaattttggtattttagtagagatggattttcatggtgtgggccatgctggtcttgaactcctgacctcaagtgatcctcctgcctgtggcctcccaaagtactgtgattactatcatgagccaccacaccgtggcctaaaagatcatggattagtttggagtaagatttaagtgattaaattatggtatcgtgtgtctggaatatctgatataggggttatcttaatcatctttttataacacggtttctggaataatgcttaattgggggatatgttggtttaccaaacaatataagggaaataatagggagtggtccccatttacgtttttaaaatataaacagcggtgtctataacacggggggcagggtggcgctcaaccccctgtgataaccccagcacctggtgggaaaggcctgaaggctgtgtaaaatccggccgtgaggtcccaggagtattgggacgaccccgcccgggcgcaacaagggtgaacaccccggctgtcacttcacacacaccaaccaaaaacacaaacaacacaaaagcgggcggcgcctagaaatacccgc

SEQ ID NO: 599778 - DNA, 1089 bp, Homo sapiens
atgaccggcgagcgtcatgcattactaatggtctgtggcagatcttagaatctgcaatctctaggaaccatgcatgctgagtgcgtccatgaacattgttatctgtcggctcgtgggtgatcccccctctggggccttttcttgagaacttggctatcaacatgactctgcctctgacatgagtactgatcttctgatgaatgtgtactaagtgtgtccttactcgtcgtcatggagaggccaggattgactcaatcatacctcgatacattcagtgtctcaccgtaccacgtacccccgagaaggcatcatccgacattctattggcagaaatgccctttgtagaaggtcgtcttgggccatcatcatggtgtcctgcctgatttcgtcatacctccatggcaagacttggcattcgttgcgaacaggaaacagttgggtcctcatggtctttagcttgcactctctggacataccagtcccttcggcagactggagttggatcctttatctacctcgcaccatgtcaacagctagaatgtgagtgacgcgatgatcgtgatatctagcaaggtccagatgcatgaatccgcttaaaagattgtggggacccgtgtggcgcaagaatagaattttgctatgggctccctgatggacgactacttggggcttgtaagcgtgagcctggtggcctctacccttggatcctactctaggaagtgtgattgtcaccacttatcgatgtgaccaggaggtccagctgacttggtgtagtgacacggtaatggaagggcaagtcatccccagagggcatctgactgctcctggtagctagctactggctccctcataactccggatgtgttctaaggtgttaacccgtgctgcgttctctaggcaacatacaattgcctaccgcattgcgttcgaacatttcacccaaaggacatacccaccccacaccaccaaccgggcgcaaaaccccaccacaaccccacattacacgacaccagacaccacaccacgccaacacacggagaacacgcgacgctcacgtgtcaaaccaacaacaaatactgctcgcggaaa

SEQ ID NO: 599779 - DNA, 426 bp, Homo sapiens
agttttgataaatgtaccaaggttatatgtaagctgttaacattaggggaacctgggtgaaaggtgtatgaaactcttctgtgaatctgggcacggtggctcacgcctataatctcaacactttgggaggccgaggcaggaggatcgcttgagcctaggagttcgagactaccccaggcaacataatgagaccctatctctacaaaaaaaaattaaaagtattagctgggtgtggtggtgcctacctgtagtccctactactcaggaggctgaggtggcaggatggcctgaaccagggaggtcgaggctgcagcaagccgtgatcacaccactgcactccagtctgggcgacagagcaagatcttgtctcaataataataataataataataataataataaataaataaaaaattgaaaactctg

SEQ ID NO: 599780 - DNA, 388 bp, Homo sapiens
ctccctgcatcagcagacacatgccctccatccccgcatctccacatagatagatggaagaacaaatcatccatgttcctattacagtcgtcctgtgagcacggcgagatggggctttgcttgagaggggatcactcaggccagtgcctcccacatcttactggacagatggcgcgaaactagcatgtgatttgtctcttgcacagtgggtggccggaagggaagtgacaactcttctggctggggcctccagggataggtcagagcagaaccttccaaagggcacccatggtgccggccccagtaacctacaattcccttgtggtcaaccagcttctccagaaccaagaacccactggctcctgggtggccaagagcaatctgacca

SEQ ID NO: 599781 - DNA, 290 bp, Homo sapiens
actggtgttattcagtcagaattggggcttcacaattactagccaatatctatctcatgcctttcctcgttcatggttcgatattctggtgtcctaggcgtagaggaaccacaccaatccatcccgaatttggtggttaaactctactgcggtgacgatactgtaggggaggtcctgcggcaaaatagctcgatgccagaatgataaaaagcttaacacctcttatttgactttttcactattttgaaataagaaaaagatccaaatctaaaatgcatagaaaatatctg

SEQ ID NO: 599782 - DNA, 230 bp, Homo sapiens
  misc_feature (192)..(192): n is a, c, g, or t
gctcacccgacggggtgggtgtgaagagcagagtttcactctgtgtgccaggctgagtgcaatcatggctccatcttccaggtaatactcccacctgtctcctgaatagctgggactacaggcgtacgccaccatgcttggctaatttttgtaattttttgtagagaaagggttttgccatgttacccaggnctggtctcaaattccttgggctgaagcaatcctccgtg

SEQ ID NO: 599783 - DNA, 869 bp, Homo sapiens
gacaaatgtgggaaaacttactcattcaataattcaataaacatttgttgagtagatatagttggtcaaattctggataactgccatgaacccaaagggatgcacataagctttgtccccgtcggtctggtggagcccacagattcactattgggtggaaggaggagaatatacacatgatagttatatatacaatgtgacaacgtgtaataagtatttcagtgagaatgccttgggcagtaaaggaagtaatctctgatctgtgctattgaagggtacataggaacttgacaagcagagagctatgaccgaagtaatactggatgtacaaagcgcgaagtgaggtataatcattcaatggtcttattatttggccatagaaaggaatgataggccaggtgctacgctgtgactcgcgacctgtaatcaccctaagcacttttggggaggcccggagaactggtgtggatcaccctagagtttcagagtaggattatgaatgaccaggcctagtgcaacgactgtgtgagggactcgtcatctggctaacaatatacaaacctttagactggaactttgtttgacaatatgcctgtatgcccagactgtctagggggagcgctgaaggccaagagtaatcggcttgtgacccggggtgattggaggtcgcagtgagcccatgatcgcgccacagggactccaaccttggggaccagaagcaagaatctatcgccgggacaactgatttggtaaacaataacatttttgtggcgctggccctaaagaagtttaacccatctgtgcgcgcggcccaagaaaacaacatggccaaggccccaagaactcgggaggacaggggggccacaaaa

SEQ ID NO: 599784 - DNA, 113 bp, Homo sapiens
ctggcaagattatgcatgcgtgtatacgactcaaggctgctggtcagcgctcccaggatgggaagctcatcatatagggacagctacaccaccaacagtgtacctggctccca

SEQ ID NO: 599785 - DNA, 246 bp, Homo sapiens
cccgccacagccggctaattttgtatttttagtagagatggggtttcagcatcttggcagacgggtcttaaactcctgacttcatgatccacccagctcggctcccaaagtgctgggaatacaggccaccatgcccagcatcggctcatttttggtagagaacaggtttcatcacgttgcccaggccggtctggaattcctggactccagcgatccacctgcctcagcctcccagcaaatgtcagc

SEQ ID NO: 599786 - DNA, 214 bp, Homo sapiens
  misc_feature (31)..(31): n is a, c, g, or t
  misc_feature (35)..(35): n is a, c, g, or t
  misc_feature (37)..(37): n is a, c, g, or t
  misc_feature (42)..(42): n is a, c, g, or t
  misc_feature (62)..(62): n is a, c, g, or t
  misc_feature (80)..(80): n is a, c, g, or t
  misc_feature (86)..(86): n is a, c, g, or t
  misc_feature (91)..(91): n is a, c, g, or t
  misc_feature (93)..(94): n is a, c, g, or t
  misc_feature (103)..(103): n is a, c, g, or t
  misc_feature (123)..(124): n is a, c, g, or t
  misc_feature (136)..(136): n is a, c, g, or t
  misc_feature (181)..(181): n is a, c, g, or t
  misc_feature (194)..(194): n is a, c, g, or t
gcaattgggatggcagagtttttggataagnatgntnacctntgaacaggagtcggacaagntactgccactatgattgnctgggnctggntnnggaattggncctttcccgtcttttctcannctccagagtttngaagaccccttagttggtgaagatacagaacgtgccaactctatnggcctgtttctgnagaaaacaaacatcatccgt

SEQ ID NO: 599787 - DNA, 1537 bp, Homo sapiens
gtgctggctggagtcacctccctccctgcagcccgcaatggggaatggagtaaaggggagacccgtcgatctggccactgagggatcacgcgattgtgaagttaaaagcaagtctttgtccagaccactctggcataaggccgaagaatgcctgcgtgagtgcgctattggggctggtggatggacgacctggcttgtgatagacacggtatacgacctggaggaagaacaatgcagctgtgacaatcatctccatggctgtgatgagcgaccatgagtagcacagagggaggaattgatgcgtggatgagtggcagagaccacgttcagcgtcctccgagagaagggtcataggttccgaccgtggcagttctgagacctcacgggttcaatgcatgatgcaagtcttatgcacaaaatagtcgttaccgtatcttcatgaacgcccttcaggttgagccgttctactcattgtataatggtaggacgcaatggcaagtcctaggatattcttctggcaaggtgggtggaatcaaattgaacgtgacggataaccacagagggaattcaaaaggcggtctttgccaagggtagggtccaagggcccgaagattgacccttggctaaacgcgaagagaatgggattggaccttttccccaagcttactaggccacatggaactattcactggggacctttggagaagcacggggatgctaggcacgaaacttatgggaccgcccaattcctcacgcaatacactcgactctttagaccataaacttgcaagaaacgccgcagaagagggatgatcctacattcccgagacagaatcccaccacacactgggctgcccgacacgaagcaaccttcctgggtgggcacgatagcggggagggtcggagcgggcccaaggagaggccagacagagcccacggaagcgtggatggatactgcagaaatcagtgcacccgcctgcacacagcaccgactcccaccaggccgcacccgcacgcacgacgacgtaaaaaaaaaccaataccaaaaggacaggaataacccgatttcgcaacaccttatcaaataaacccacaacgctctgccatcaccacccaacagtaaacataaaaccacccaaaatatatgcatataacaatcacactacacaaaaatcaaaaaatcaactaatacaatatatatcactctttttatctctaaatcacacagcgcgcagcgcggcagccgatagcgcgagacaacggcgactaggcatatgacgaagcaagaaagacgaaaggagcacacgcaacaccaataaacgaccaaaggcaaccaactgacaagaacgcgagaaacgcgagtacggcaggaggatgcacgaaatagagcaagaacggagagtagcagagacacagcgcaagagacagcacgaacgcggcgcgcacggcagacagcaagagtgcggagaagaagcaagaatagtgacacgcactagagagcaagacccgaacggcgaggacatcgccgggaacagaa

SEQ ID NO: 599788 - DNA, 108 bp, Homo sapiens
tacaggttttttgtgtgtttttgcttatagcttgcttgggagaacaaatctcattttggtggactgtagatatcagctttgaaactggaagttctaaaaggcttgcca

SEQ ID NO: 599789 - DNA, 433 bp, Homo sapiens
cacagggtccccgggacgggtgggtgcttataacatgtaccgcattaggaaggggacaaaccaggctccgcacaaggatcacacactaacatgctcacgcatctgtgatgcttagcacagggtggccagtgcaaatggagcccaaggccccctcggcattctgggcaacttggggtacacaggatactgagggtgccgctcctcactcaaccccaggctaagggtacacctgacccagctggcctcggtcccgggcaccttcgactggtcatgtggggccctgcacggtggcccagtggtggcaggggttgctcctgtctgtggttgtgcgcccggcgcttagaaacggccggtcacgctcctgtgggcccgagtgtgttgcatgtccacgcaccacccgttcagggccctgaattaaccgttggcatcagca

SEQ ID NO: 599790 - DNA, 105 bp, Homo sapiens
agtagcctaagcatcctgagcaaaaagaacaaggttgcatggcagcataccacctcacttcaaaatctattacagtgactatagtggtgggtcagaacataatgt

SEQ ID NO: 599791 - DNA, 317 bp, Homo sapiens
  misc_feature (222)..(222): n is a, c, g, or t
  misc_feature (230)..(230): n is a, c, g, or t
tatatatatagtttaagaagctcccattgcatcgtttaatttatatgttatgtctaagacactctctctcctatttcatcctgaagcaactcaaaatatttaaaataaagttacattgtagttatttcaaactttcttataagattagaatattgacttgctccgtattaaagctctgttattttgttccgtttgatttttgggagggagactgtgtttatntgaatatnagctgagctccggtctggaacacacaagagttgttgaagttacaagcagctcgcatgctctgatctttgtatcattcttagaatcgc

SEQ ID NO: 599792 - DNA, 823 bp, Homo sapiens
ttacgctcttgggcggcttgttctctgcgagcagtcgttcttgtgatctaccatgcgcggcttctcgtgcgtacctaagtgcgtgtcggacacccgaggggaagatacgatggatatggtacatgagccacccgtcaggaccgcagaagcgtagtctgtgttcgggttggtgaagcgtaaaggccgagcaaaggagtatagtcagcttgtaacggctggcgtatctgagtgataactgagactgccagattaatcgtattagagaaacggtcaggtttacggggctggtgacacaagagatgagttgtcacatagttgaacgcagatgagcaagtagaattatcgaaggcagtccaactgaaagtaacacatggcgcacttagaaaatgtctagtacaggtccaacggatttcccattgaggcggcttgggaatataacacccgaaccgagatggatcttaaggttgaagtgtggttcagggacctagtgcggattataatctggacatgcgacattagtagactgtggaggaagatgcagagtctgaagatgaagaggaggaggatgtgaaactcttaagtatatctggaaagcggtatgtgcctggatggtggtaagcaatggttctcaacagaaaaatagtaaagacttgtatgttgatttgcaacgttgatgagcgatgtactgatgaacgaggaatggatggatgtaccatgtagtgcacgatgaatgactttgtggctgaattatagcagttgcacctgcactgtggcctgtgcggacactccctacgacatactccccggcaatgcccaacatgac

SEQ ID NO: 599793 - DNA, 450 bp, Homo sapiens
  misc_feature (92)..(92): n is a, c, g, or t
agcttcccacaaatcagagaggtaattattttttaagaatgttagctctgagtatatcatgccaagattgattaccctatgcaactagtttntgtcagacttctcccatttatatttggcttagcatgtttttattttgatatctaggtggcctacagaatttcttgagacagctgcctctaacagtaagagaatacacagtgatggataatagccaaatccactaaagcagcctgtgagcaatgctaaagactggggataggaagaatatggattttgttttcctgctgttaaatttttacatctgagcagggatgagctaaaatccctgaccacactccttcagaaattatatttgccattggtttcctgccgatggatattgatagaacagagtgttaaactagctgtctagtggctagctttttacttccttttctccactgatct

SEQ ID NO: 599794 - DNA, 398 bp, Homo sapiens
ttcattattaatctaaatgttaaagatatttttgtctgttacctgaagttctaagaatccatagataaaacttaaggactagtgtagcttcaaaatggaattaagctgaaaatgcattttagtctgaaaatatgaaagccatgggatatgattaaagtctttatgaataattttcttttaccatcttcctttcctggtcaatcatgaataatttaaacagaacaaatgtggatctacttggatgtggacagtaacagacctggaaggtactcttcaataagtactagtgttaccagaaagaggtctggcccagattccaggagagggttcttggatctctcatgagaaagaattagaagcaaatccatagagtaaagtgaaagcaaggttataaaaaa

SEQ ID NO: 599795 - DNA, 1792 bp, Homo sapiens
  misc_feature (983)..(983): n is a, c, g, or t
aaagtggctaggaccgagttcggctgtgcccgctttccggccaggtacccctaatggtgagagcagctgtggcgagaacgctgaaatgccatatgtcggaatgtccctacctccatagagatatttgcatggagcttcctgagctcaaatggaacatgactgcggcgggcgcacacagctgacgcagttcgtgagatgagacttctctcaattggctggcctacgatgtgtcactgatcctgaagttgaatcgaataagcgcatctacacagggaagcgtcgcatccttgaagttctagcgtggaacaatgatcgcgggggagattaacactgaagattcaacatcggatgtactttttcctgcacatgcctttgttgccttaatctgggtaattgactgccatggatgtggccggagaacagcagctggatgtggaacacaacctgttcaagcaacgactagatcacacgatggcatccccgtgagctcagaggctgagcggcatgagcttggggaaagtcgaggtgacgggtgtttggagccctgaactcccttggaaccctgatccgctgtgaagacgctggctatgggtgctgaggcacgacgatatccagtgcttgtaccacctgtgaaagatgtgcgggaggcattatcggcgcagagggctgggctttaagaaaccagaatactatttgagcattggcgggaaacggcttcaagccagaagatcgcaggagcagaagaatgacgggtgcagggtgagaggctcttggaagcaacaaggtggcgggaaacttcactttgcactgtgaaacacttcagcagccatgtgtacgtcatgactgcgagcttggctacaataactcagccacactcagcgctcgagcaaacaccgttagactcagccaatattcccacatcatctattgtcgcgctcatacggtagttcttgcttcgctcctccctccctcctcactctctnaaatcagagaacaacaaataataacacaaccaaacacaacgaaccaacacaacaacactcacacaaacaacacacacacaaaacacaaaagacaccacaacaaactacagacaaactatgatcaacaagccatacaaccataacacataacaaccaacaaatcaaacacaaacacaaacactaaacaaaaatccaaaaccagaaacataacacagactctacactacaatacaatcagacaaccagtacaggcgagagagaagcgacagagaagacagagagagaatgacggggacaacgggagaagaagcgaaagaaagagagacaaggagcagagaagagaggtacagagactggacatgagaacaccagggacgacagaatgaccacaaggcggagaatggagaagagataccaaggagagcgagaacaggccgacgcaggacaacactaacagaagagccataacacaggagaacaacacggagcaccataacgccgacagacacgggaacgagagaaaatcgaagcacagaaggcaaccagactgcaccagagccactacaacggacgcagagatagacccacagcgagagagggaggctatagggcagcgagtcccagcgcacagcgccaggacaccacgacagagcgacagacacgcgctagaacacggaaacgaccgacgcggagggagcaggcgaagaaacgagacagaaaagcgagcgggatagaaccacacacgagaacagcagagcgcaggcagagaggcaggcgaatgaggacaagtaacaaactcaagcgcagac

SEQ ID NO: 599796 - DNA, 125 bp, Homo sapiens
tcctttgatttacgagctgttttgatatggctatcgtacctgattgtggttcatatactgaggtggttcctcttcatgcaacaaggaattgggactggttatatcttaaagctgggggtctataa

SEQ ID NO: 599797 - DNA, 1027 bp, Homo sapiens
  misc_feature (325)..(325): n is a, c, g, or t
actatgttggagatactcaactgggcgtgtgtaacactgtcagccggatcactgtataacactagacagagacgtaagcggtcctgctcgatcagatgactcgagaaggaggaagctcccggtccactagaatgaacgtcggactggagcttcaagtatacgcgcacaggagactactgtgacgcgtagcacatatctattgagcaagatatattgtgcctgtcactgttacctgtgtccagtatcgatgagcgagtagtcctctcgtggtcgttgggagaacacagagtgaattgagtgctaagatgagtagcaatggtcatcncgaccgtgaggtatactgtactcacataccgcagagtacaaccggttgttcgcagatagcgcctcgacgaatgaagcagtgtctcgtactactcctgttggccccctgcttcatcaatggcatcggtctcgatgactcggtcgacagtcgtctccatgtggccagagtgcacaggacgcgtctgatgcaaagatgacgtgcggcttccaagtgtggcgtcgaaagtgcctagcagatggtggcaggggcttccaaatgaagcgagtgaccaagaagttctgaggcgggaacactccgtgcccgttggctcgcaatgacataatggttgttcctcgattgcgggcatctaataaagcaggtttctagagcctacatttctggcgggctttcccactacaaacggttggttcctcaactgtgtgagccaggcgcccgttccgggctgcaagggtggacgtggcctgggtgtaaaagatggggcagttgatgttgaagtttgccaaaccaactgcgcggccccgggtggacaaggcccgggagggagaggcaccccggttgtcgaagggcaagggttcttcccccgagaggatagttaaggtttgtcaacagaactcctgccgcttttttatatccacaactgtggcgaataaataaggggcatacatagcctttgcgaacggtcgcgctgctctgaccgcgcgg

SEQ ID NO: 599798 - DNA, 220 bp, Homo sapiens
aatcctaaatcaccacccaatgacttaactttaccagtggcatcatttaagacggctgtggctcgggttcttatagtatcgaccactattttcatagatagccccaacgtgcttgatattctcataggcttcacgcataacactgtgattgatgcacactgcttcaagtgttgacttgtcagctactgtgatataacccatttattcaagcagggctaag

SEQ ID NO: 599799 - DNA, 113 bp, Homo sapiens
cggatcgcccttttttttggcagctgaattaacattaagatcttgcttggcaatttcattcccctttgtaatctgacgtccactagcaatggtctatcagaacagatgtgctc

SEQ ID NO: 599800 - DNA, 1637 bp, Homo sapiens
cgagggggaggtacgagggtaatcatctcggacctcgctgttgacgacccctggttcggccggggtgtgaacccatgacgaaagtcatgacaacagcctctatgaatccatcgatgctatcggcatcacgtgaccctgatcgagaacgtgcttgaatgctatcccctgggaccgataggatctatcccatgagctacctttggatactcgcggacaggcactcatgtacctgcagggtccactgacgactgagcttggcacacctaggaacgtacttgatgagaattggcgccccttgccggaggagagaactgtgtggcgttggaggtgggcccggctgggggggtggttcgtacggagaatatatcttaatctcgtgaggcgatattctcagagagtcgttggaagaggggatcgtggaggcggaaggaacgttcgcgttttcttaagaggtagacaaataggaaaaaaaaatagaatagccaagactgcatctagcggaataggtaaaataatgggataattccaatgggtgggcgagaaggtcatgttttccctagtaaatgggcataaattaaagcgggtgaactcccacaaggcccaggaattgtaaaggaatcaccttcattctactcaataataatctcctccatttctcccttgttcgcctactcgtattggaggggtggcactcatccttgttagacaactggggtatctcagggtggggagaaatcaagaggttccttctgtggggaacaacccctggggggtgccggtcaaaaaccatcttggggcggcactcataaagccccgcatggaaaaatagcatggtaatagggggccccttggccgtgtgggatactaatcacctgttcaaaggagggcggcgccccaattaagaaaaaaaatatccgtagttgcggccccttgtgagcttctggcaccagttgggggcacctctttctttttaaacccactaaaacattacgtaaccaacggtggggtccccactctaaagcacaaagggtgggcaactttggaccccagtatcttttccgggtttgccctataatgtttgtccttgtgggacggcactctgtgtggaattttggccactgaaagagggcccacggtgtctcccaaaaaaatattactccaaagggtctttgaccttcaagtagagcaaatcagattttccacgtggtggagggaaataaccatttacaaactgggtttacccccattttatatgtgggtcaggcactttataagaggcccgaaaagaagctcccctagaggagatattgagcttctgtagatgggtgtccgccccccatatgagtgaaaacggttatcacaccgctactggtgtgaacccggggggttacacaagaaaatgcgggccacaggactcagtggagcgaagtcccccctgcgaagacaagggggagggtacaacggagacccacgggacctaattagacgacgctagctgggggcagataccacggggcgaccaacgcggggaactaagacgagcagaaaaacaagcgaatatgggagaagaagctggggacccgtgaagacaacaaatccggcagagacaaacagagagagcaaacacacacagacaa

SEQ ID NO: 599801 - DNA, 312 bp, Homo sapiens
gggatgtggggcacagagaaacaaggactgctgctgctgctctgccctgaaggagccaagtggcatatcgtaaacggggtgccttgtgggccttcttgctgtccacaggtaaatttgaggagtgcttagaatacgtcatgtccgccgggcgtgttggctaatgcttgtatccctgcacttcgggaggctgaggcggacggatcacgaggtcagcagatcgagaccatcctggctaacacggtgaaacctcatctctactaaaaatacaaaaaattagccgggcgtggtggtgggcgcctgtaatcccaacta

SEQ ID NO: 599802 - DNA, 340 bp, Homo sapiens
  misc_feature (27)..(27): n is a, c, g, or t
  misc_feature (62)..(62): n is a, c, g, or t
  misc_feature (74)..(74): n is a, c, g, or t
  misc_feature (76)..(77): n is a, c, g, or t
  misc_feature (100)..(100): n is a, c, g, or t
  misc_feature (113)..(113): n is a, c, g, or t
  misc_feature (127)..(127): n is a, c, g, or t
  misc_feature (149)..(149): n is a, c, g, or t
  misc_feature (166)..(166): n is a, c, g, or t
  misc_feature (178)..(178): n is a, c, g, or t
  misc_feature (182)..(182): n is a, c, g, or t
  misc_feature (193)..(193): n is a, c, g, or t
  misc_feature (201)..(203): n is a, c, g, or t
  misc_feature (206)..(206): n is a, c, g, or t
  misc_feature (211)..(213): n is a, c, g, or t
  misc_feature (216)..(216): n is a, c, g, or t
  misc_feature (237)..(237): n is a, c, g, or t
  misc_feature (240)..(240): n is a, c, g, or t
  misc_feature (244)..(245): n is a, c, g, or t
  misc_feature (338)..(338): n is a, c, g, or t
ggaggaagggggaggaaggggggagangacctacaaatggaatttcatcttgtttccatgcngagtagtgaaananngaaaaagctaatcataataaccnacatcaaaagggnactaagctaacacngctcactttctttttaacaggnaaaatataaatatatgnactctataattncacnattttttattncagtaaannnttnaaatnnnatntttaacatcctattacatagnacnggcnnatatatgatatataatattatgtatttattttatattcaactttttcttttatggtttgcagtatgaaagaaaatattgaagaaatgattaanga

SEQ ID NO: 599803 - DNA, 292 bp, Homo sapiens
  misc_feature (9)..(9): n is a, c, g, or t
  misc_feature (54)..(54): n is a, c, g, or t
  misc_feature (57)..(57): n is a, c, g, or t
  misc_feature (64)..(64): n is a, c, g, or t
  misc_feature (86)..(87): n is a, c, g, or t
  misc_feature (212)..(212): n is a, c, g, or t
  misc_feature (248)..(248): n is a, c, g, or t
gtcccggcntgcgggatagaccgagggccatggcgccatctcccggacccgccngcnttggcgnccggaggcagtctacggctccnntctttcgggcttcgctcggactcgggactggagatcaaaactcgctcggtggagcagacgctactcccgctggtttctcagatcaccacgcttattaatcataaagataataccaaaaagtcttnattaaaactcttgcaagcaattcagcgtgtaggggncaagctgttcaatttgggcagttgggaaggtttttttaaagtag

SEQ ID NO: 599804 - DNA, 902 bp, Homo sapiens
gtacctgagtctcctgagcagttgctggcccaccgggcggctgcgctcgatttctcgctgggccttggctgccttcccacggggcagggctcgggaccttgcagcccgccatgcctgagcctcctacccaatccatgggctcctgtgcggcctgagcctccccgagcgagcaccacctcctgctccacggcgcccagtcccatcgaccacgcaagggctgaggaatgcgagcgcccggcacaggactggcaggcagctccacctgcagccccagtgcaggatccactaggtgaagccagctgggctcctgagtctggtggggacgtggagagtctttatatctagctcagggattgtaaatacaccaatcagcaccctgtgtttagctcaaggtttgtcgacgtgcaccagtcaacactctgtatctagctgcctcctggtgagggacgtggaagagtcttaaatgtctagcgtcaaggaacttgtaaatacaccaatcagcactgctgtgtcaagctcaaggattcgtaaagacagcgcaatcgggcactcgtggtaatctagcttcaaggttcgtaaacacaccaatacagcagccctagtgatttagtctcaaggtcttgtcgagtgcacacagtcagacaactctgtatctagctgccctgatggggaacgtggagaaccttatgtatgtagctcaagggagttgtaaacgcaccaatcagcgacctgacgaaacaggccagctcggctcgtaccaagtcagcaggactgtaggtggggccagataagagaataaaagcgggctgcccgagccagcacatggcaacaacgactcgggtccccttccacacgtggaatacgcttctgtgctctgcaaaatcgttgcttctcgccccccc

SEQ ID NO: 599805 - DNA, 224 bp, Homo sapiens
cggtgggatgtggtcctctgtaatgtggcatcgagtgtgtgccttggaggtgtgacgtgactgtctgtcatggctgtcgactgcgtgccctggacatgggaggtgactgtctgtaatggccatcaactgttgtccccagggggtgggaggtgactgtcttgtgatcgtcattcctcagaggcagggaaagatgaggtgtccctctaacagggctccaaggtgag

SEQ ID NO: 599806 - DNA, 574 bp, Homo sapiens
  misc_feature (164)..(164): n is a, c, g, or t
  misc_feature (166)..(168): n is a, c, g, or t
  misc_feature (170)..(175): n is a, c, g, or t
  misc_feature (178)..(178): n is a, c, g, or t
atggctgagttgggctctggtggggagatcatgggaggtagtttccatagaactcatcactgcttgctctccttcccaacctaacttcacatgagatcttgaaagcagggaactttctctctgagtcagacctgtcgagcagaagaagttagagagatttgagngnnngnnnnnncangtactgttgtcagagggagtaatatagaaagcatgagaaaaaaccagaagcctccaggagcaaagcccagctcccagctgacaacctcaagaaaatgaggacctcagttctacaactgcaaggaactgaatttggccaacaacctaaaggagctcagaaacattctttcccaggacctccaggaaggaatgcagccccgcccgcaccgtgatttcagcatcctgaaacccttactggaggagctggtggagctcatccagacttctgacctacagaaactgagataacaaatgtgtattgttttaagttgctaagtttatggtgattggttatataacaatagaaaagtaatacaatcaccatcacactaccatcaccactaccaccaaattatta

SEQ ID NO: 599807 - DNA, 170 bp, Homo sapiens
  misc_feature (1)..(1): n is a, c, g, or t
ngttctatcttctttcttctctcttctccttcttaacacataatcccatatatcttggaggctttgtatacttctttatcattctttaaactctcatcttgtctacacactgtatatcattacattgatcttcattctctgatagcctttcctacgctggaatggaattg

SEQ ID NO: 599808 - DNA, 231 bp, Homo sapiens
attggtaagtagaagatcaggacgatgatgagtagtacagagagaggagagctattcagttggatggattaatgcatcacaaataagagacttagagagaagtcggaaagtttaccttccagccgaagttaacagaatgatgaacttatcatcaatcattgtataacaataaagagattttcctgagagacctgatttcaaatgcttctgatgctttagataagataaggc

SEQ ID NO: 599809 - DNA, 188 bp, Homo sapiens
agtatttcaccggcaggatgacacagtaccacttcccaggcagcacgtggcatgccttggaatattgccaacgcttccagctgcctcttctcttaaagcattcctaggaaatattttccccgcccaatgctggcgcgtacacccttagtccaacgggcacaatatcctacgagggtataaagatcatc

SEQ ID NO: 599810 - DNA, 198 bp, Homo sapiens
acacacatccatgttcatccagcaccagcccacagcacagggtgcagcagcttcacatttcccatgtatgccttttccccgccgccctcactcccttcgtcttccttctcttcctcctggctttctcattccgtctttcgttttggtttgttttcagtccttctcgggtcccgcagctcgcaacttcgaactactggt

SEQ ID NO: 599811 - DNA, 307 bp, Homo sapiens
tgggggcaaaggtttgaaaacacagcctcccccgccagccccaagttgggccgaggggggtttgggtatatttgcctcccctgtttgtaaggagcagggggaacggagtttgggagcccccccagtgaaggggggggggctgccggatttgggctgtggggcccttgggccccgcttttgaggaagcccagggtcgggggcccctggaaaacagaggggtttgagactgaaattgttttccccgcccccaggggggacttcagggggggtatttgggtaaatgagtaaaacattttattttttttta

SEQ ID NO: 599812 - DNA, 452 bp, Homo sapiens
  misc_feature (10)..(10): n is a, c, g, or t
  misc_feature (32)..(32): n is a, c, g, or t
  misc_feature (94)..(94): n is a, c, g, or t
  misc_feature (214)..(214): n is a, c, g, or t
  misc_feature (403)..(403): n is a, c, g, or t
  misc_feature (422)..(422): n is a, c, g, or t
gccggcattngtatgggggttgccaatgaccnccccaagggccaaaagggttaaagggccccgactgggatttcttctggagactgtggtgaanctccttccccaaggctgagggggtcagtaggtgctctggagggactcggcaccacttgatattcaacagccacttgagccaaatataaaattgtatttacagctgatggactcaatttgngccttcaaacttgtagttatcctattatattgtaaactaatacattgtctagcattgatttggttcctgtgcatatgtatttacagctgatggactcaatttgagccttcaaacttgtagttatcctattatattgtaaactaatacattgtctagcattgatttggttcctgtgcatatgtattttcnctatgtgctcccctccccngatcttaattaaaccagattttgcaattca

SEQ ID NO: 599813 - DNA, 499 bp, Homo sapiens
tgtacatagatgggtacataattattgtctgatcattgtatgtatattgagggaggcgtcagtattaacatccctcttgtaattgccgattgtgatgatctgaatcgtctctacttatacaatatttcatatttgaagacaactgtacggaataggaaagagataaaagacttcaaatgaagaccctaagatagctatcctaaagactgagctttgtaaccgtatcaggtatcatggtaaaacactgaaaagtttgcactttgttgtcatttcttaatcgaacatacataataagtattacaaactataatctacaatacagacataccttgttttatcataatttgctttatagcacttcaaacaatttgcgttttcttttttttttttttttttttttggggcagggtttggtcctgccccaggtcctggtgtgcccccgtgcagccttggcccagggaggccccaattccccgggcccaagcaatccccggctccg

SEQ ID NO: 599814 - DNA, 930 bp, Homo sapiens
cacgggggcgccgtgggcacaaagaggtgtgtgaccttcctcgtgagaggaatcacctttgggtgggataaccccgccgggtttgggtagcgcccttccgccgttcctcacaaagtggatggggtgcacgaaggcgcccgccgcccttgtgttggcgggaaatagagatgtggcgcgcaatacctcgccctttgtggccgctgttccctgtgggcggtgtacgcacccacaggtgtgcgcgcccgcgccccagtttttgtcgctcgaggagattgttgctggcccgcttcgaacgtacattgcggaggccgctttcgccccccacggggtctctctatacaaacaagtgcgctttctttttcccggaagacagctttttctctttatcccccctctttttcgcacaccacaaaaaatttgctccttctgttattctctcccgcacaagggtgatatctatgtcccacacgagaaaggcgagttctcctcgacacaattgtgttctctctctatccaagcatgcgatagaagtgacgacccaccaccacggcgtctgccactcacaaacacccaagtttttctcccactaatagacaacaattcttctcaagtacccactgaccctaggccgaaccactttcttccatttatatcaaaagcgcgatacttcactattacgccttccctctagatcttttctcttttcccctcctgtaagggtttttatgccctccatgataaaaagttaaaaaaaatagtaatggattataaccatttctattccaataaaaagagtcaataatcccccacccctaaacaagaagaccctctataaaatcgtttttaaaaaaccacatttctttgacatattctttaattttttttaataatttaaaaacccaacaaaacttttatccggcaaccaaaaca

SEQ ID NO: 599815 - DNA, 329 bp, Homo sapiens
gaacgcggcttcgggggatgcggagcactgggccagaccccacaggtgcaggctgcgctgtcagtgatgccaggatatatccagagatggagggccctgagcgagaccagcttgtcatccccgacggacaggaggcggcgcaggcagctgccggggaagggcgaaaccagcagaaactgagaggagaagatgactacgacatggataaaaatgaagcagaatctgagacagacaagcaagcagccctggcagggaatgacagaaacatagatgttatcaatgttgacaatcagacaagagacaccataaatttacttgatcagcggtaa

SEQ ID NO: 599816 - DNA, 175 bp, Homo sapiens
agaggtgtggcgtcgtgattcaagcccgttgttccccacgaggtggtggtgcagagactcttccaggtcaaatggcggcgtgtggtccgtggcaccgaggtaactgtgtcctgggagagcttcaacaatggctgacttggttgatccgtggacttagggtgacaactagtccaac

SEQ ID NO: 599817 - DNA, 387 bp, Homo sapiens
atatgccacgggagacgtttctgtcaagtaatagagctgtccacgcatattctgattcactgcaggccacatacagccaccaggagtctctgtgctcgtgcctcaggtctaaacttgactgtaagtcctacaggcttagagatcaatgtatatcagaacatatccagtttccaaagatattagtggcaccatcaatattaattagttctccagtaatgtcaaagggcacacttagcagtgctgtcagaacaaccagaaaaaccacattcaaaagggaacacagcctaaggcacacaactcatgataaatacctgggaaaagaccagttagctctgcctttagctgttcccaccccaattttcacgattaaaactacaatcgacatac

SEQ ID NO: 599818 - DNA, 1033 bp, Homo sapiens
tccaaaactgcaaagtaaatttatggggtgggtggccggttaaaatgacaaatgatgatctgaatccaatactttaaatggctgataaatattggcaatattccaactggattttactaattggaggcctagcagtgggtatgttgggctacaactgggacacagtttatccaacctcagggttatttggaggcgcaaggaagatcacagaaaaaaaaaaaatttggggtgtatcgcaacacagttaaggtgcccaaaatataatttttcacccacggtgtgagagcaccgagacacaccccaatgcgcactgttgtccactctacccacgtgggtgcgccaggacgtgtccgtggcgtgagatatgcgccctggcgtgtcctggtcccccattcccctgcgtgtggcgcaccgcaccgcccttgaggtccactatatatgttcctcctatgtgttgcgggcagcgtctcctcttttcaaatattgcgccccggagatgtcttccccccaaagtgtgtgtgcgcccatcctccaaagaggagacaacccagcgcaccagtgtgagactgtggtgagtgcgcccatgaaaagaaccccccaccccgggcgcccaaataaaacaaagaggctcttccctcccatgtataatcgaggaagatctttttccctaacacagagaaggggcagacctttccaaaacagtgtaccttaaatccagagaccgccatagaaagacatagattgtctacacaaaaagagtactccctgggacagtgcgcctactctataaggggagaaaagtggtccccaccaggggcttgctcaccattttctccgtgagaacacccctataaagctgttggggagacacaccaaaaattctcgttgcgtttctcaaaggagacaactgttgtgcgccccaacctgtgtggaacaacccccggcggtgttccccaaaacttttctcccaacccaaaataaccagacacagcggtgttacacacccccttggaatgttggacttctccccccc

SEQ ID NO: 599819 - DNA, 690 bp, Homo sapiens
atcagtcttgtgaatatgttcattaagtcacatatttgagagcaaggaagggtaataagatgttgcaaatacaaatattagccaatacacagatgataacatttaaggccttcaaaagtacagggttttatccattgtttctccagacagattattgtcaactctacatagttttttcatacaacatattattatttagtataattgccaaccagtttccagcaacattcatccaccacactattccagaccccattatacacactgtacgtttatcgcatataagcctatcatcacttgcgccaacactaccattggtcatctacacaattcgcaggtgtgctcatacacgacactgcatatatcaggtattctaacacacaatggagttatacaagttgccaaacataacatgcaccggtaggcttaaaatcgcgttccatcatgacgctcacagctttgctcacgtactgggccagacgaacacaaccagccactacggaaaagtaacaaacaattgacagtaacacttatgttacacaaaggcatggccctttcggacttaagacgacataatactgacgtacctgtctacagacaaaacacaaaaaacaaaaagggcgccgacccagacaccaacaaaagattttcccccccacgacggggcgcccacaaacgcccctaacgcag

SEQ ID NO: 599820 - DNA, 835 bp, Homo sapiens
  misc_feature (484)..(484): n is a, c, g, or t
agcggagaagcgggagctgaggggatgagagaggccggtcctggtctggccgctgcggctgctagcccgcaggtctccaaggccgggctgcggctccatcctcgagtctctctgggctagccgttctgtctgaggcatccgccgaccagagtgagaaagccgcgggctggcgaccgccgcatcatgtcagccaatggacgaagcggtgccaatgagtagatcctgaggggcttcaacactaaattggatgaaccattcgggatgctgaggactagggaagatactctgtgcaaggataagcagaagaccgtgtctgtccctggtgtggagcatgaagcccgtgttcccaagaagaatcctcaagtgcataggcatgtgtctcgagaacttaatttttcttcgatcagaatcaaatggaaaaattccgcctggaacaaaaagtttacttcaatagggcaatgcctagaagaatggttcttcgagntttggctttgtgatccctaagctccgacaaatacctggcagtccttgatagaggcagcacccgagtcccagatgatgccagcaagcgtcttaactgggaacgttatcatagaaaacaaagtttcttgaccgacgatcttcttgatagcacatccagatgtgagacttttctatgttttgaaagaagcaatgtgtgtacctttcaacgaatttgggttatggacgggaggcaggaaactgtctacttttttcctccacgacgtttgatttttgacgacatacacccgtaattccctcacatggagaacctaacttgaactaccagggaaccagctctgtgtaccgtaaccga

SEQ ID NO: 599821 - DNA, 199 bp, Homo sapiens
gagggtgtggtggtagtgaaggtgctggtggtggtggtagaggtgatggtagaggtgatggtcatggtggaggtgctggtggtgatgatggtggtcgtgaaagtgatggtggtgatggttgagggtgtggtggtacgtgccggtgctggtggtggtggtggcggtgctggtcgcggtgctggtagtcgtgatggtgatg

SEQ ID NO: 599822 - DNA, 197 bp, Homo sapiens
atatacgaactcgagctggtaccctcgatagggccaataggagtgtttcgccagtgataggaggctcagttcgctgatttcccctatgtcacaggctacaccctagaccaaacctacgccaaaatccatgtcacgtatcatattcatcgggcgtaaatctaactttcttcccacaacactttcttggccttatcgag

SEQ ID NO: 599823 - DNA, 1705 bp, Homo sapiens
aaaaaatcgatggtgacctctgcttatgagtcatgagtgatctgttcgttgtaggtccctgaggacctcactctccactcctgtttcaggcatggggcggctggttctgctgtggggagctgccgtctttctgctgggaggctggatggctttggggcaaggaggagcagcagaaggagtacagattcagatcatctacttcaatttagaaaccgtgcaggtgacatggaatgccagcaaatactccaggaccaacctgactttccactacagattcaacggtgatgaggcctatgaccagtgcaccaactaccttctccaggaaggtcacacttcggggtgcctcctagacgcagagcagcgagacgacattctctatttctccatcaggaatgggacgcaccccgttttcaccgcaagtcgctggatggtttattacctgaaacccagttccccgaagcacgtgagattttcgtggcatcaggatgcagtgacggtgacgtgttctgacctgtcctacggggatctcctctatgaggttcagtaccggagccccttcgacaccgagtggcagtccaaacaggaaaatacctgcaacgtcaccatagaaggcttggatgccgagaagtgttactctttctgggtcagggtgaaggctatggaggatgtatatgggccagacacatacccaagcgactggtcagaggtgacatgctggcagagaggcgagattcgggatgcctgtgcagagacaccaacgcctcccaaaccaaagctgtccaaatttattttaatttccagcctggccatccttctgatggtgtctctcctccttctgtctttatggaaattatggagagtgaagaagtttctcattcccagcgtgccagacccgaaatccatcttccccgggctctttgagatacaccaagggaacttccaggagtggatcacagacacccagaacgtggcccacctccacaagatggcaggtgcagagcaagaaagtggccccgaggagcccctggtagtccagttggccaagactgaagccgagtctcccaggatgctggacccacagaccgaggagaaagaggcctctgggggatccctccagcttccccaccagcccctccaaggcggtgatgtggtcacaatcgggggcttcacctttgtgatgaatgaccgctcctacgtggcgttgtgatggacacaccactgtcaaagtcaacgtcaggatccacgttgacatttaaagacagaggggactgtccccgggactccacaccaccatggatgggaagtctccacgccaatgatggtaggactaggagactctgaagacccagcctcaccgcctaatgcggccactgccctgctaactttcccccacatgagtctctgtgttcaaaggcttgatggcagatgggagccaattgctccaggagatttactcccagttccttttcgtgcctgaacgttgtcacataaaccccaaggcagcacgtccaaaatgctgtaaaaccatcttcccactctgtgagtccccagttccgtccatgtaccattcccatagcattggattctcggaggattttttgtctgttttgagacggagtctcactctgttgcccaggctggactgcagtgagccaagatcgtgccgctgcactccaacctgggcaacagagcaagactccatctc

SEQ ID NO: 599824 - DNA, 241 bp, Homo sapiens
  misc_feature (11)..(11): n is a, c, g, or t
  misc_feature (48)..(48): n is a, c, g, or t
  misc_feature (75)..(75): n is a, c, g, or t
  misc_feature (94)..(94): n is a, c, g, or t
  misc_feature (97)..(98): n is a, c, g, or t
  misc_feature (127)..(128): n is a, c, g, or t
  misc_feature (147)..(147): n is a, c, g, or t
  misc_feature (149)..(150): n is a, c, g, or t
  misc_feature (154)..(154): n is a, c, g, or t
  misc_feature (173)..(174): n is a, c, g, or t
  misc_feature (176)..(176): n is a, c, g, or t
  misc_feature (180)..(180): n is a, c, g, or t
  misc_feature (222)..(222): n is a, c, g, or t
  misc_feature (234)..(234): n is a, c, g, or t
  misc_feature (236)..(236): n is a, c, g, or t
aataaattganagatggagtctaaaaattattagctgttacaaatggnacatttcattataacgtgatcactttnacttgagcaaatggtttanttnncatcttaaaaatcagttaagaatatatannctcctactttggccaagtntnntctnttcattatagtttatatgnnangatnaccttaagtgaaattattttcctttaatcttttatgtatttnttacttctggangntagga

SEQ ID NO: 599825 - DNA, 1887 bp, Homo sapiens
aaaaaatcgatggtgacctctgcttatgagtcatgagtgatctgttcgttgtaggtccctgaggacctcactctccactcctgtttcaggcatggggcggctggttctgctgtggggagctgccgtctttctgctgggaggctggatggctttggggcaaggaggagcagcagaaggagtacagattcagatcatctacttcaatttagaaaccgtgcaggtgacatggaatgccagcaaatactccaggaccaacctgactttccactacagattcaacggtgatgaggcctatgaccagtgcaccaactaccttctccaggaaggtcacacttcggggtgcctcctagacgcagagcagcgagacgacattctctatttctccatcaggaatgggacgcaccccgttttcaccgcaagtcgctggatggtttattacctgaaacccagttccccgaagcacgtgagattttcgtggcatcaggatgcagtgacggtgacgtgttctgacctgtcctacggggatctcctctatgaggttcagtaccggagccccttcgacaccgagtggcagacacagtcccgctctgtcacccaggctggagtgcagtggtgcgatctctgcttgctacaaccttcgcctcccaggttcaagcgattctcctgcctcagcctcccaagtagctgggattacaggcacccgccaccacgcctggctaatttttgtattatcagtagagacggggtttctccatgttggccaggctggtctcgaacttgcgacctcaggtgatccacccgcctcagcctcccaaagcgttgggtttacaggagtgagccactgtgtccggcctcgcggctccattcttgaagtcagcgagactgtgaaccctccggaaggaaaactctggacagacagatgcctgtgcagagacaccaacgcctcccaaaccaaagctgtccaaatttattttaatttccagcctggccatccttctgatggtgtctctcctccttctgtctttatggaaattatggagagtgaagaagtttctcattcccagcgtgccagacccgaaatccatcttccccgggctctttgagatacaccaagggaacttccaggagtggatcacagacacccagaacgtggcccacctccacaagatggcaggtgcagagcaagaaagtggccccgaggagcccctggtagtccagttggccaagactgaagccgagtctcccaggatgctggacccacagaccgaggagaaagaggcctctgggggatccctccagcttccccaccagcccctccaaggcggtgatgtggtcacaatcgggggcttcacctttgtgatgaatgaccgctcctacgtggcgttgtgatggacacaccactgtcaaagtcaacgtcaggatccacgttgacatttaaagacagaggggactgtccccgggactccacaccaccatggatgggaagtctccacgccaatgatggtaggactaggagactctgaagacccagcctcaccgcctaatgcggccactgccctgctaactttcccccacatgagtctctgtgttcaaaggcttgatggcagatgggagccaattgctccaggagatttactcccagttccttttcgtgcctgaacgttgtcacataaaccccaaggcagcacgtccaaaatgctgtaaaaccatcttcccactctgtgagtccccagttccgtccatgtaccattcccatagcattggattctcggaggattttttgtctgttttgagacggagtctcactctgttgcccaggctggactgcagtgagccaagatcgtgccgctgcactccaacctgggcaacagagcaagactccatctc

SEQ ID NO: 599826 - DNA, 573 bp, Homo sapiens
ggggtccctattcctgaggtacagaagagtttcctctctcctgtttcctcaaatgcctttctggtagctctgggctctgagagcattctgagctgctctctccctgtgagtagtagtcacctgcaagtctcccatcagtcactgtctcgccagagcaccctatgtggaccatctcagtgccccggtgcagcagacaggtgctctctgagtcctgtgtctcctaacccaacggtgccaaaccttcatctcccttcaaaagcacaacacaatcccagggatgcctggtcactgtccccagtatgagccttctgtttctggggtccctcccacccctcagctctggctgctgccccacataggactagcttggctgaggggaacaagatgggagagtagacagacatgggggaggggaggccaccccagaagtcttcgaggcttttgaggtttaggtctgggaccaagaaagagtatttgtgtgtatgtgtgtgtatgagtgcgtgcaagagggtatatgtgtgtgtgtcttcccacaaccccaccgtaccttgtctatgtatgcatgtttttgta

SEQ ID NO: 599827 - DNA, 243 bp, Homo sapiens
cccccccccccccccccccgaaggcccgggttttttaaaaaaagggtgggggttcccccggggtttgttccaacccaagggggggggattttccttttttccccgggtttaaaaaaggcccaaagggccttttttttttttgcccggggggggagtgggttttcccccaaaaaattccgggggggccctgccttagggccagggttttcttttttttttttgaataacccccccccttcttta

SEQ ID NO: 599828 - DNA, 510 bp, Homo sapiens
ttttttttatttccccctccaacaaaatttttttaaatacgctacacggatccactttattaacaaggtttccgggggaaatgaaaataagggctctcaaaacgatcggtcgttgacagcagtttatggtaccgctttttcttttactttcgttcggacattaattttgaaccgtgtttatgaacactgactccggcccctctataagactggaaatacatgtctcgcatgtcggattttaaaccctcaagaccgtattcttgtgtactgttgaaacccaggccctcattcttgccaagagcactgttgccatcccctagatagtaatagatgaaaagggcgcgtgaaagaaaacacggatgggaaaacgttcagctaacctggctaatgctgtcacccccttgagttaagaatcgggcccattgacactggaaccttttgcttgagcagcctcgtaggggcttttccgaaaggcgcccccaacttaatttaagccctccaacataaata

SEQ ID NO: 599829 - DNA, 212 bp, Homo sapiens
atgattctagcagcctcgatcactagccctactagtctcaatctccaacacatcttgcctagactactgtacataacctaaacctactccaatgctaaaactaatctgtcccaacaattatattactacccactgacatgactttcccacaaaacatcataatttgaatcaacacaaccaccgcagagcgctacattattcagcatcatccc

SEQ ID NO: 599830 - DNA, 95 bp, Homo sapiens
tgggaaagctaaatgaggcaaaacaagattttgaaactgttttacttctggaacctggaaataagcaagcagtaactgaactctccaaaattaaa

SEQ ID NO: 599831 - DNA, 128 bp, Homo sapiens
cttggctcagtgactcatgtcatgttatgcagagtattcccaatcaccttgtttctcctagtactgtaacaacttcttttcctccatgaattcatgatgcatgacttagggagccctaaatggaaaca

SEQ ID NO: 599832 - DNA, 142 bp, Homo sapiens
tgtggtagtctacaggatctccctcagtgtatagagtcctcattggacttatctatgacaatttctgtgccatagctaggttaattgggaccaagacatgtagacaggtgtatgagtttagagtcaaagaatctagcatcat

SEQ ID NO: 599833 - DNA, 228 bp, Homo sapiens
ataggatacagccgtcaccttgcgtggacggataagcacgcttagtgtaaaacaacgctagtgtgtattcactacactaggatattatcgtcacttttgggagatgaattcagtaatgtggttggtgaggaaaacgcgatataggaggccatattcgaagatgtcaaaaactcttgagggttcaaggacacaaacaaggaacgagttgacgtttacataaatcactcc

SEQ ID NO: 599834 - DNA, 145 bp, Homo sapiens
agatgtgcacgagtacatgggcagcacaaatggtatgaacaggaaaaagaaatgtcacatgtacaataatttttttaagaaggtgaaggttaactactggggagataacagttcccctctccctcccccggcacattcttccaag

SEQ ID NO: 599835 - DNA, 839 bp, Homo sapiens
gtgaggagcaagctgagccagatggcactgaagttgctgacaagggcagcctatctccaaaatctgaaactctgatagatcctgctcaaagccctcgttgctaccctagggtcaaggtcggcgaatgacgtatgtcaccaaaggctcgaaattgtgcagcaggctgtacaatgcagtgggtgctctggccaaggctggtctacgtataagatgtacttgtggatggtcacccgcatcaacctagtcaagcatggaacacccaagcagtcccaggtcggagtacattcattggggttcttggaactattgctggctttgagatctttgagtttcaactagcctggagcagctggtgcatcaagttcaccaatgagaaactgctagcagtttttccataccaccacatgtatcgtgctggagcaggaggagtacaaagaaaggagaaggctatccgatgtggacgtgtgcattgactttggtatggacctggcatgcctggatcggagctcatcgagaagcctatgggcctcttctccatcctggaagaggagtgcactgtactgcctaggcgagagtagcacctcgttcaacgagcaaagctgttatgaacaacatctgtgtgaaattccaataaactgtcgcataaagcccgagcctgccgataggcatgacctgagggccacttctcttagattcactatgcttggtcgccgtggactacaacattgcgggtgggttggccaagaacaggggaccccctgaatgagactgtggtgggggcgtacccgaaaggctggcaggaaactctggttgccctccttgtggggcaccggggaccg

SEQ ID NO: 599836 - DNA, 472 bp, Homo sapiens
  misc_feature (449)..(449): n is a, c, g, or t
tattaaaggagaggggtctaactctgtggcccaggcaagagggctgtggtaaatcatagctcattgcagcctcaaactccggggctcaagtgactctctggcctcagcctcttgagtagtcaagactatgggtgtgagctacctctcggggctaattttaaaaaatttgggtagatataaggtatcactatttggcccaggtgggtctcaaatcccggggcctcaagcaatcctcccacttttactccccaaggtgctagggtaacaggcataagcctccacaccgggccataagtactcagttaaaaaggtcggctctaaaatcaggtctggagaaattgggttcacctgtgtagaagaaggttgggggtcaggcctatggatactccttttcatgcacaatggggacctataagtgaattccccttggtagaatatggatagtcttnaaagaatagtattcctgaatacc

SEQ ID NO: 599837 - DNA, 320 bp, Homo sapiens
agaaatcgcaaacctctgagcttacacacacacacacacacacaccccgcccacccccaacaggctttcggtcctgagcaaccataacctgtgtttgtctctgccgcgtgtcctatttggactctaacgcgaatgcgcccatacaccacgtatacggtggtgtctgactctatccacttatggcgctgtgttcaaggctcatacatgctcgagcccatgtcagagcttcacttctttttatgggtcaaaaatcgcctatggggggccacgcacgggggctctctcctgtgatcccaccactgtgaggccgaggcgggcgc

SEQ ID NO: 599838 - DNA, 568 bp, Homo sapiens
acgcggagcagatacaggtcattgagctgcaggtgagcccgtgcagctgggaaggcctcacgtgacaagacgagcaggttgccgatggcgatggccagtgacctgcggcagaaccatggaacaaatacgcttagcgagttgccattttgagtgagttgtgcacagacgaaactaagggtcagaagcggagagggtgcctacaatgaggagtcaaatgggcaaatgggttgagaccctctccacctggtccagcttggactactaggcctcaggtgatatccgtgctccttgggggcaagttgtgtggccctgtgatgggccccccctgtgggggctgttgggcggtgcgaggcttgatcctgccagaggcccttccaccttggcgcctggcccagtgtgctggctagcacccagtggccctgttttggccggccctgtcccccaggttacagggccagaacctggaagcagagcgcaggaccagccagatcgcgccagggttccccggggcctccccagtgcctctgtgccacctggagccaggcccggcttctccatgggtgccgtg

SEQ ID NO: 599839 - DNA, 136 bp, Homo sapiens
  misc_feature (98)..(98): n is a, c, g, or t
  misc_feature (106)..(106): n is a, c, g, or t
gcagatggagcttgttataatatagctcataggatagtacaaggagggtagctatgtgtttggtcaggggtgagaatagagtgtgaggcgtatcatancatagcgnctagtttaagagtactgcggcaagtactat

SEQ ID NO: 599840 - DNA, 175 bp, Homo sapiens
  misc_feature (4)..(4): n is a, c, g, or t
gagngaggtggatcggtcgcatctacgtgacttgggcaatacggccggtctgtatgtaaaatgaggatatcataacactcatctttatagggtggtggggagaaatcagatagataatccatgtaaagtgtttagaataaggcctggaatcaaaagcccacattcttcgcctgat

SEQ ID NO: 599841 - DNA, 154 bp, Homo sapiens
gctcaccctgattgttgtggtggctgagattcttgattcacttccctagtgctgtgtgcccataggaaagctgggcttccttggatgaactctagcgtctcaaacacagtggagggccatgatgacttgtctattgtttaaaatggaacatttg

SEQ ID NO: 599842 - DNA, 393 bp, Homo sapiens
tttttttttacatattggaaaataaaagcatttaatatctcttaaagggcatccacatctgcgttaatccctagcgaaagagtgagggggcttcacacgtgcactcacctctgtggacgagagtgggatattcccagacccctgaggtcacctgtcaggttcatccccatgggtgctgcttgaggctacgggggactggtggcacctggacgtggcttggcgcaggtggtgtcacctgagtacattcttggctagcagacagtggatagaggcccctttcctcttcctcaccaaagcctggggctgtcgccagcctgtcttaggccaggcctttgcagaaggcgctccaggccatgaaagcagcgggtaaaggcgtggtgcctcatggccttg

SEQ ID NO: 599843 - DNA, 269 bp, Homo sapiens
ctgatgctgcaggtactctaaggatccctaggtcttagggaggagggggatgagggggccctaaaccagagctcaccccaaaatgcatttgaccttcactgcatggcaggagtacgatgcgaaaggtgagggggtttgaagatggagtggcagaatgaaaaatcaagtcagtagatgcagaggcgaagtcatcaaatggtaaaccaggagattaaagaaggaaaaggtagggaaaggggtgccgtgaaaggttcttccctaagacctta

SEQ ID NO: 599844 - DNA, 977 bp, Homo sapiens
taagtggataacccgaggttttgagaaacatccttagttaaatctcatcctatgaagtgggtcagttcatgatcctacccagctaaaacagaggccaggagccagggaggaaaagcagtcaggccacgcaacattgtttcgcgaaagtggcacttctctgcaagcctgagctcctgagactgtgcattgtaccctgaaacgcagctttatccatagacttctgtcgataaatggctgtaagtcgttggactccttgctccaaacgcgagcgactctagtcaatagaacctcccagcgtcccacgtcgccttccatatgctgcccatgggctttacataggagcaagagaacatttactccttcgtataattgccatctctttgcatctctcaacatggatgaacaccgatccggactcctgtgtatgtctcgaaattaagcagattccgtcttctgttgcacatatgagaactatgaagagttgtagacggctcttctaaactagctttaaagttgtgatattgacatttatcacaagcatgatgtcagttagagagaatgagattctccactaacatagatgaccctttcatgctgtggcctccatagaagcatgtcccaggccaggtgcccacatggcaggcatttattttctcacagatctggaagctgcaggtccaacttcgaggggtgggtggggttgtatcctctgaggcctgtccttctggctggcagggagtctcttccagccgtgtcctctgttggcctttcctctatgcacacgcacctctgggatctctctggctccaatatcatcttgtggtcaatacaaattaatctatggacgacagagggttagacgatttggtcccgcgcgaactgactgtgggcaattttgggcctcctgtgagcctccgattcccagatttacgagaaccatggggtagaacttcccgatgtcacaggtcgtttacaca

SEQ ID NO: 599845 - DNA, 451 bp, Homo sapiens
cgaatcctatagtgttcccctctctagtggtacactgtgacactagttaactagatcacactagcactggaggaaggtcccatagtggttagaaacataaaatggaggcagggcgccgtggcttggatatatcttccccggcactttgggaggccgaggcagccagatcacttgaggccaggagttcgagaccagcctggccaacatggtgaaatcctgtctctactaaaaatacaaaaattagctgggcgtggtagctgcgcctgtaatcccagctacttgggaggccgaggcaggagaattgcttgaacctgggaggtggaggtttcggggagttgagatcatatcactgaactgtagcctgggcaagagagtgaggctctgtctcaaaaaataaaaagggggggtattgcagacatgtggtggcctctacctagtcgtttaatactgc

SEQ ID NO: 599846 - DNA, 1084 bp, Homo sapiens
ggctgctccggcgcggagcccagagccggttcggcgcgtcgactgcccagagtccttgcgtgcctggggcgctggggaggatgccaagcctgacatggcctaccacagcttccatggtggagcccatcagctgccacgcctggaacaaggacctgacccagattgccatctgcacccaactaaccatgaggtgcatatctatgaaaagagctggtgccaaatggaccaaggtgcacgagctcaagtgagcacaactgggcaggtgacatggcatcgacatgggcccccgagagtaaccgatattgtgacctgcggacacagacacgcaacgcctacagtgtgtgacgcatgaagggccgaacaatggaaagcccaagcttggtacatcctgacggatcaaccgggctgcccgctgcgttgcgctgggacccccaacgagaaacaagatatgctgtgggcagcggctctcgtgtgatctccatctgtatattatcgagcaggagactgactgagtggagttttgcaagcacaatcaaagaagacccaatacagactccacgcgagtcctcaagcctggaacttggcaacaccaagaaatggtgcatcgctaggactggccagggcatcactggtgaacttacaaagtagctccagaatcatatacaagagctacacatccaacggcacgggttggaggagacacgtggacgggaaaccaaaacacccggtggagggccttcccagagaagtgccacctaacggggagaaaacattaactgatacaggaaaatcctcaggcaggtaagcatgacggaatggggtaaacatgtgcattacatgcattgaactatcaaggacagacgacgaggcgaagtccagtctgcttggggccctatggagcataacagaccaaggaacccgaggaaaccccgaggctatgccctttggtaatggcaattgcccgagacaagacaacagacatggagccggccaggggaaagatccatgggacgttacttgtaaagacgaaaaaaacaagcgtgcagtggagaggcatggacacctaataaatcaaaagtacaag

SEQ ID NO: 599847 - DNA, 207 bp, Homo sapiens
cgagaggttcatgacagttgtcctactagatagtgaccgtcatgagatctggggatgacctacagaaggaggaacacaagttactacactaacactatagctactacggtccactacatattccaatcagcttgaaggaaagggggaatttatcttaacggatcctggagtatcttgtgtgaatgggatatcctctatgagtcgacc

SEQ ID NO: 599848 - DNA, 832 bp, Homo sapiens
agcggacgctccaggccgggaggcccagcgagcggacgccagtggatgacccgcggtgggggaggaggagataccatcagtcaaaatgccagacgtctagacggagagtgtgcccccgtagaatatcctggcggacttcatgagggctatggtcgctgtcatgccctgaaatgctcgaggagcctccccatggaacgaggcaacgagcgggcctccggatgacccgccgctcgccgtgatcttggacagacaacctgttgaaatgaaagttttgccaaagcgtgaggcaacacaccgatttgcggattgaactcgctgatgtactaacagtggacacgaagaacggttttaccgtccaaagcacgtctgccaagggcaaccggtcggatggagagactgttgcactacattgccttttctgggaccatcttcaattgaagcaacctaatcacgcaactccgccctgaccttctagcgtggtgcgctctttgaaacttcgtgaaacgaacgctctactacgaggactctttgctaatcacttgcgtattgaccacgccgagaaccgacgcatgatgaacttgagcatttgaacggaagcgtcctggaacgtggtccttgctccagtcgcgaggaggcaagaaacactggggggcccttgaaaaggttccgtctatcgtcgtcgtaaggtaccgattcttgcacgcattgactgcgcttttggctggggttgcaccaagttcgagatgaaggcagtgaagatatgtagaaaaaaattgacggattcctgatttggttactgaagagggagtctccaaggatcgtggggcggatg

SEQ ID NO: 599849 - DNA, 1169 bp, Homo sapiens
  misc_feature (670)..(670): n is a, c, g, or t
gttttgtgttttgttgtgtgttttgtgcgcgagagagagctgcagccaagcgaggaggtagggaagacacggaacagcgcgcttgtttgtgttgcggtgctactactttgtcttggttgaagactcttcttctgttctgtgcttttcctcttcttccctcccgttcgtgtgggagccccctccttcgttttaactttgatacacatcttggggctgttgtttgcaaccaccgccggcgttgttagatatattgtctgagctcccgtggttgacaccttggggcaacacagaggggcgacccccgcttgccattgaggtgttgccatgttccgccttggttcccatttcctacccagcgttgtcccttgggcaacataagttgttgttgggcgccaggcagagttgcgggtccaatttggcaagggtccagcattagagattcccccccccacctcgtttgtccactttggtctcacccactgcattgcccataacccaatggcgttgtcccacgggctgcccccggttttcccaacgggcccagcttgggaggctccccacgccctctccccccttattgccgcacggcctgcctcgatgcccacccttcacggcatgccttatgggaactccgggccccactctgtccactcggtccacccgctgtggncccgaagtgggtcccgttgttccccgcacacactccgtgggctgcgcctcaagacacactcttggcacggaatcttttctggggcctcacccacgacacaggaagcggcgttgtccaagcccgggcacaggctggtccaccctatgagcccaccacgcccctctgggagagcacccccaccctcctgtcgtgtgaatagtaagctttctctccctcacgcctcgccagggtgccgagtttgcccctcgccaaaagagccacctcctactctgtttttctttctgtattttgagtaaacacctgagagctcggagctgttaaatttattcttggggagaaccctccacgaagctggttctatttggtggttcgtggaacctcttactgctttccatacccgattagtaatccactgttttgtaaaacttgttttcacgtttcctttcgaccaaccagccccgtaattatagctattagaattaaatctcttaactattta

SEQ ID NO: 599850 - DNA, 848 bp, Homo sapiens
  misc_feature (186)..(186): n is a, c, g, or t
  misc_feature (645)..(645): n is a, c, g, or t
  misc_feature (689)..(689): n is a, c, g, or t
  misc_feature (695)..(695): n is a, c, g, or t
agcggggctgtcgttgtcccgcgagccgccgaccaggcctcgaacgggatggcagaggaggtgaggagggaggaagcgtccggagtggggcgggcccggactccgacccccggggcgcttcgagccccccagctggtcaccgaggcaccgccgcttcacccagtgccagtatgccgccccctcgcngcaccccggccccgcctcacacgcgcgcccgagctgagccccgggctcccctcgggcccagcgtggcgcagggtgtcagtggttctctcgggtctctgggacaggtgagcaccctgatgaaggccacggtcctgatgcggcagcctgggcgggtgcaggagatcgtgggcgccctccgcaagggcggctggagacctggttacaggtgatttctggattttgacatgaccttgagcaggtttgcatataatggaaagcgatgcccttcttcttacaatattctggataatagcaagatcatcagtgaggagtgtcggaaagagctcacagcgctccttcaccactattacccaattgagatcgacccacaccggaccgtcaacggagaagctacctcatatggtggaatggtggaccaaagccgcacaatctcctatgtcagcagaagattcagaagtntcagatagcccaggtggttcagagagtccaatgcaatgctcagngaaggntataagaccttctacaacacaactctaacataacaaaattcccttacgatataactgcgggcatagatgatatctgcaaaaataaccgcagataaagtgtcaccaaaatcaatggtttacaactgaaaaagaaaagcacccagaaaaggcgcc

SEQ ID NO: 599851 - DNA, 148 bp, Homo sapiens
tgtgagcgataatcagggttgttgatgcagacagttgctaggtagatggggatgatgtgctgcttacacatcagacctagcaactgtctgggctagtcgtgtggccccgacctagccctgacacgtgtgtgtcgcacgtgcgtgtgtt

SEQ ID NO: 599852 - DNA, 500 bp, Homo sapiens
actgcaagctgtgctctgacaaaagtgattgaaacacaaagatcaaaaaagacaaaaaagggcactgcataatggtaaagggaactattcaacaggaagagctaactattctaaatatatatgcacccaatacaggagcacccagatgcataaaacaagttcttacagacctacaaagggaattacactcctgtgttaataatagtatgagattttaacaccccactgtcagtattagatcaatgagacagaaaattagcaaggatatccaggacttgaactcagctctggatcaagtgacctagtagatgtctaaagaactctctaccacaaatcaatagaatatacattcttctcagtgccacatggcacttattctcaaatcaaccacataattggaagtaagacacttcttagcaaatgcaaatgaactgaaatcataatagtctctcggaccacagtgcaatcaaattagaactcagggaggcacagattgcagt

SEQ ID NO: 599853 - DNA, 274 bp, Homo sapiens
  misc_feature (87)..(87): n is a, c, g, or t
agtgtaaagggcagggacagttggagtccaagcatttgctgatgcatagctcattattcccaaggtgtcttgctcagacactctggntgtttgaccttcaggaaacattagttcacacattcaagcagaaacattcacgaatccaggtcagcttgtggggttgtggacctgaacacaggtgagcccaatggttggccagcgcaagtaggcgtatgggataactactctgtggtccagaaaccggttcttcactctgccctggggattgccacaa

SEQ ID NO: 599854 - DNA, 1253 bp, Homo sapiens
  misc_feature (501)..(501): n is a, c, g, or t
  misc_feature (509)..(509): n is a, c, g, or t
cagggtcgctcatgcctgtagcccgagcatgagggtgagatggtgggagcacgggagggcaggaggtcaagaccagtctagccagcatgcagaaaccccagctgtgctaagagtacaccctttaggcagggacgatgacgcttgcccggaagcccagctacttgataggctgaggcaggagaatggctcgaacccgggaggtggaggctgcagtgagctgagagcatgccactgcactcaagcctggtgacagaacgagactctgctgacacaactatgagaatgagtcgaccctagagtagctactgatcaagggcaggctatagcacaaccagactagcacagttagagccagggacagcgcccaggaggaacggactagtgataagcactgaactgtgatgatcttgagccagatccttgacacacctctctcctaccagcatacggttcatatgtgccagacctgctgtgacagactgcgtagtctggtgaagtagncgttcganaggagtcgacctgcacctggtcctgcgtctgagagtggtaagcagatcttcgtgaaaaccctgaccgccaaggacattactctggagggtgagcccagtgacaccaatcgaaatgtgagggccaggatccaagattaaggaaggcatccccccgaacagcgaaggcttaattttgcaggcaggcactggaagatgccggaatcttttggctacaaatcccaaggagtggccctgaactgggtctggcttgaggcacgctgaattcttagccaggctttgcagtcccaaggatgcataacttggccttaggcattgcccacttaagttagagatcccagttagaatagctaacctgataaaggttaacaggtttcgtcgggaaaaaataaggacccatctagaaaattgctggcccttgccaaagatttatacttgcaattttacatggccagcattggcactaggcatatccctatggggcgataaaacagtgggggtttcaaacggttgggaaaccggtgtcccattaatcctggaaacccttttgacgggcgtaccaggatccactaacgctttcaacgtcgactgtggttcgaacctcgctacctttacaagcgtgattcgtgatctctttttcacagccctgtacacctctatacaccccacgttgttctccactatagctttaattcgtcactctaaccatctacttttcggagtctgcacccttcgtggggcgggccc

SEQ ID NO: 599855 - DNA, 249 bp, Homo sapiens
tattcaacgtcaatcgcttcaccagacttttctcttgaaagtctgtccagactttcaactaacaatgtagttcctggcaatatataaccatgctctatagcatctaaaaattccgaaaaagctcctgattgtgcatgctttcctttgaatgcacttaatcctaaatcttcatatgttatggtatcaagataataatcactatttacctttaaccattcagcaataagtcttctctgtcggtttaatgag

SEQ ID NO: 599856 - DNA, 448 bp, Homo sapiens
  misc_feature (1)..(1): n is a, c, g, or t
ncctggccggtgaagagagaatcaaaataacctacgaagattttttgaaaacacaccaggtaaggaagggttctgcaattctaccacaggaacagttaccataacttaaaaagaaatgctttccacactgaactgacagcgctgcagaccacgcctgagtggggacggcagccccaagcccaggggcaagcgcccacaggctggacccaggccaggcacacctggggagtctcttactgctgaaaacctcagccatctcacttcatgtacttatcctgctggtcagccaggattttggcggaggacttggcatcatagaaaagttcactgatctcttcgacatgctctttctcaatgctgtccttcccgttgattttagcaagcaagttggccggggtcagcaactgcactgagtacctcaatgtggtcttggtgccaatcttcctca

SEQ ID NO: 599857 - DNA, 271 bp, Homo sapiens
gaagacatctctggggtaaggagagaaatactggaatttcttttttatttaattatgtagaaatttttctatatatgttacaatgcatattactgtagtcatatatgtatatgatgtacacgtaattcataaatacacatatgtttggctgcctcttaacatttttggtcatggccatgtgtaatcatgccaaaaattgaccacaggtctatgtaaagggtcttcataaatggaagaagtccctgtgtaaaatgggagatttcaaggcatt

SEQ ID NO: 599858 - DNA, 240 bp, Homo sapiens
tcgaggaggctacccgccgaaatatgatcatctatatcgccctctattgttccccaccgtccagagatatctcatcgagcaaccgacttaagcacgcagcccaacactgacgtaagtcacagctaacctcgaaaagcaaagtgataagcatgcattacactaaaggacgaacctgatctcttatgctagtatccttaatcatttttattgccacaactaacctcctcgaacgacctaccg

SEQ ID NO: 599859 - DNA, 375 bp, Homo sapiens
  misc_feature (121)..(121): n is a, c, g, or t
  misc_feature (223)..(223): n is a, c, g, or t
  misc_feature (369)..(369): n is a, c, g, or t
  misc_feature (371)..(371): n is a, c, g, or t
  misc_feature (373)..(373): n is a, c, g, or t
agttatgtttctatctttaagtagggagaaacatgaagaggaagacaatagagtttgggatgagctgctgcccagagccctttgtttctgtcctcaggtaaaaatatcctctagacctgantcccattggatggcagccttgtggaccctgcagagatgtcaccgtagagaaccttctgtcagctacccccagtcactaaaggaaggatagaaggatctgtgncctggaagtttaggactttgcagaatgtaacttttaggatgaaggctggaaacagtgcaaataatatctggacactgtttcacactctgttcgttgcaaaaaagggcatttaaaaccctccctttgatgtgatgaaatttccaatnancnca

SEQ ID NO: 599860 - DNA, 292 bp, Homo sapiens
  misc_feature (103)..(103): n is a, c, g, or t
tcggtgctggggacagaaatctcccccgagctcgtccccgctcgtcccggcgagaagatccagtccactcaagcgaagataggtccctacgagctgcaggacnctaccctgtaccacctgctgcgccacgggatgcgccccagccggatcattttcctgtcccaccatgcctggcgggatgcatcggtaggctcctggcctcccgggttccgtgacgaggaccgacactcctatgacctgtcagcaatcaaggactggacgcggctgtttctgcgccggttcgtcggaaatc

SEQ ID NO: 599861 - DNA, 371 bp, Homo sapiens
gccccctaccagcagcagcagccacagccgcagccaccgcagccggcttcgtcggggcccccctgcacaggggccaccctcagcacatgcagcagatgggcagctatattggacgttgggatttttccatgccagcaccatggtcagccacaccagacgggttacccagttttcccacggccaagagggcctataattaagggaaatccttttattcccaccttagggccctgcccacttgtcccacgtgtccccagcagagtccccgcatttgcacctttcttgctttaaatatggggcagcagtttattacaacccctttattattctcaatggaggagcccctgtcccccacgccagagctccccaat

SEQ ID NO: 599862 - DNA, 118 bp, Homo sapiens
  misc_feature (69)..(69): n is a, c, g, or t
tagcactaatatggagattatcctttcattgagccttttatcctctgttctcctttgaagaacccctcnctgtccccttcaaagagaacaccctaaggcccataatacttcagatatc

SEQ ID NO: 599863 - DNA, 705 bp, Homo sapiens
gagcgagctgaatggttgtgtggctcatcgtctcggaaaccggtagcgcttgtgatatggctgaccaactgactgaagagcttggatgcacgcaattcactaggaatgcttcttcactatttgatcaaagatggtgatggatacatatatacaactataggaatggggaacgtgtaatgagatcgtcttgggtagaatggcacgagaagcatgagttacaggatatgattaatgaagtagatgctgatggtaaatggcacaatggattcccgtgaatttctgacaatgatggtaagaagaatgaaagagagtagacgagtgaagaagatattagagaagcgatgccgtgtgtcctgataaggatggctatggctatattagtgctgaagaacttgggcatgtgatgacaatgctgtgggagagaagttaatcagatgacgaagtggatgaccatgatcagggtaagcagatattgatggtgatggtcgagtaaactatgaaggagttgtatcaaagtgatgacagcgaagtgaagaccttggtagtgaatgtgttaacatttcttgtgcaaattgttgattggccttttcttgtgtatgacttattgggaaggttctccctatgtgaaaatatgcatgtatgtattagacttattcctcagtgtcttctattaatgctgtctaaactattagaaatgtcagtacg

SEQ ID NO: 599864 - DNA, 208 bp, Homo sapiens
cacattgacacacagtttaagcttttatattagtagcagttgaatatatagattaattttacatagattaatttactatttttctttgtttaaacagagaaccaattgaaagccgacagatactgcaaatgactggaatttttgtttctgccttatctttttgtgtttttttttctgaataaaatattcagagggaatgcttttacag

SEQ ID NO: 599865 - DNA, 1146 bp, Homo sapiens
ccattccaagttgtaaatgctagtctttcttatgttttgttttccagattaaaaagaccagttacgctctaagatgtgggtgtaaaagtgcttggataaagctgagaagtctaaagtggggacaaggcaggtgtggaggggaggccaggtgctacatgtgttaacatgtgcccacaggcccagacattggggtttcccttcccaagggccccaggaaccaaccttcgtgaggcccaagagaccttgtgccggtgaaaacaaggcatgattacccggatgtggcgtatcaatcccataaattgtaggagaccattgttggggctcatacggtgggccattttcaccgctgtggtgggcgaagcgcggcggaagagggcgcaactcagtggactaacctcttacacagtgatctcatatatctcgacgcgccacgtctagaagccctcttatagagggcacacacaacaaaaacacccccaatgttgtccgctctgctagagaagaacgaggtggattatttataaaaggggagcgtttgtgcctcgccccccaaacgtgtgtgtagcctgtagacgagcgcatctaatcagccctgtggcgtcccttaaaagtcgtataaagccatcagtggtttgacaaaacaatcccagtctgctggtggtccaaatgagaacaaacaccgtggtgggatatctgttcagacagacgcggtggtcgtaattaccggtgggtaatacgattctttctaacaagaaatattttctttactgccgagcacggtggatcgaggcggtatggcagtcgggcggcatacagaaccacaaggggccagacagctcaattgaatgcaccgacaccacatgcattctagctatggtgggtatcaacgacggccccccccagatgagatacatgcttccatagttacttacgatggtagggccccctagataaaacagcgcgaagggaaatacgcaacatatattaaacgcgcaagcgggtactgcacaccacccatttgttgggagaaaatttctccagcagcggtagacgtggttgttgagagaaacgagggttgatagaatagcggcaacaatcataactcgactcgactagcgagggcccccatccatcactgccgccttc

SEQ ID NO: 599866 - DNA, 504 bp, Homo sapiens
cagcctgtactgtaactgtctggccactgcagtaagcaaagatgcacaagactgtactagcataccagccagatcttacatactatacacataattcagtaagacaaactaccaatagacagaaccaccagttgtagctgcaggtaaaaatgacatattatcaagtaacagccttcaacagaacaggtccaaatgctaggttgacatggatcacatttgccattactaatgcacacggctagaaatcgggcacacttatgggctatacttcgtcctgcctcaaagaagcaaacacgtacgatgtactgacagacattttcgtagtagaatgaaagtagagttctcatttccttcctttgagcttccgggtccattagaatgaactccagctaaccaaaagagagtatccaacacaaggctctgggcatgtactgtgatctggccatcatctgtaatactgcaaagagtatacagcagcttctcatgaaaatctgaaaactgtaa

SEQ ID NO: 599867 - DNA, 2476 bp, Homo sapiens
  misc_feature (298)..(298): n is a, c, g, or t
  misc_feature (432)..(432): n is a, c, g, or t
  misc_feature (1349)..(1349): n is a, c, g, or t
  misc_feature (1366)..(1366): n is a, c, g, or t
gctgctcgcggcgccgcctcctgctcctcccgctgctgctgccgctgccgccctgagtcactgcctgcgcagctccggccgcctggctccccatactagtcgccgatatttggagttcttacaacatggcagacattgacaacaaagaacagtctgaacttgatcaagatttggatgatgttgaagaagtagaagaagaggaaactggtgaagaaacaaaactcaaagcacgtcagctaactgttcagatgatgcaaaatcctcagattcttgcagcccttcaagaaagacttgatgngtctggtagaaacaccaacaggatacattgaaagcctgcctagggtagttaaaagacgagtgaatgctctcaaaaacctgcaagttaaatgtgcacagatagaagccaaattctatgaggaagttcatgatctntgaaaggaagtatgctgttctctatcagcctctatttgataagcgatttgaaattattaatgcaatttatgaacctacggaagaagcaatgtgaatggaaaccagatgaagaagatgagatttcggaggaacttgaaagaacacaggccaagattgaagatgagaacaaaggatgaagaaaaaggaagacccccaaaggaattcctgaatttgtggttaactgtttttaacgaactgttgacttgctcagtgatatggttacaggaacacgatgaacactattctgaagcacttgaaagatattaaagtgaagttctcagatgctggccagcctatgagttttgtcttagaatttcactttgaacccaatgaatattttacaaatgaagtgctgacaaagacatacaggatgaggtcagaaccagatgattctgatcccttttcttttgatggaccagaaattatgggttgtacagggtgccagatagattggaaaaaaggaaagaatgtcactttgaaaactattaagaagaagcagaaacacaagggacgtgggacagttcgtactgtgactaaaacagtttccaatgactctttctttaacttttttgcccctcctgaagttcctgagagtggagatctggatgatgatgctgaagctatccttgctgcagacttcgaaattggtcactttttacgtgagcgtataatcccaagatcagtgttatattttactggagaagctattgaagatgatgatgatgattatgatgaagaaggtgaagaagcggatgaggaaggggaagaagaaggagatgaggaaaatgatccagactatgacccaaagaaggatcaaaacccagcagagtgcaagcagcagtgaagcaggatgtatgtggccttgaggataacctgcnactggtctaccttctgncttccctggaaaggatgaatttacatcatttgacaagcctattttcaagttatttgttgtttgtttgcttgtttttgtttttgcagctaaaataaaaatttcaaatacaattttagttcttacaagataatgtcttaattttgtaccaattcaggtagaagtagaggcctaccttgaattaagggttatactcagtttttaacacattgttgaagaaaaggtaccagctttggaacgagatgctatactaataagcaagtgtaaaaaaaaaaaaaaaagaggaagaaaatcttaagtgatggatgctgttttcttttaaaaaaaaaaaaaaaaattcattttcttggggttagagctagagagaaggccccaagcttctatggtttcttctaattcttatggcttaaagtatgagtatgtcacttacccggtgcttctggtttactggggtaattaaaagggggtagtactggtgttacctaactacctcatggatgtgtaagggcatatggagttaaatctcatataaggtttctcaatctggttaaaagctcaaaattttggggcctatttggtaatggccagtgtgacactaagcatttggttcacaccacgcttggataactaacctgggaaaacaagggtgttaagtacctctgttctggatctgggcagtcagcactcttttaagatcttggggtggctcctatttttatagaaagtgggggggatgcctatttcacaggtcccagattgtgtttccagatattttggatgactgtttgtaaatactacagggatagcactatagtatggtagtcatgagacttaaggttgaattaagactattttgtgacaaagatgcattaaatttcagactgttagagccaaatttacaatacctcaggtacttactggtaattttggggttgaactttttttttgacagggagggggggtaatggtttgtccatagaggaggtctaaattctgcctaaaaaaatacatgaattggtttagggtatggaacttctttttggaatatggttagttggatgaccattgtgttggtcatcttctggataatttggaatacaatataatttttaa

SEQ ID NO: 599868 - DNA, 2557 bp, Homo sapiens
  misc_feature (1430)..(1430): n is a, c, g, or t
  misc_feature (1447)..(1447): n is a, c, g, or t
gctgctcgcggcgccgcctcctgctcctcccgctgctgctgccgctgccgccctgagtcactgcctgcgcagctccggccgcctggctccccatactagtcgccgatatttggagttcttacaacatggcagacattgacaacaaagaacagtctgaacttgatcaagatttggatgatgttgaagaagtagaagaagaggaaactggatgcagagaaactaggatacgtcaaagacacgtcttagcctagactggttcagcattgattgcctaacaatcacttctaggattgcttgctacgcccattctaagcaagagcacttcgatcggtcatgagttagatagagtaccgaactaggaatcaccattagcaagagccttgccttaggagtcagttcacataaggaccggagttgaatgcgtactcaatgaaactcgtgctaccagttaacactgtggcacagatcaggaagcccaagattctcatgcaggaagtctctatgcatcgttgcaaccaggaagtatgctgttctctatcagcctctatttgataagcgatttgaaattattaatgcaatttatgaacctacggaagaagcaatgtgaatggaaaccagatgaagaagatgagatttcggaggaacttgaaagaacacaggccaagattgaagatgagaacaaaggatgaagaaaaaggaagacccccaaaggaattcctgaatttgtggttaactgtttttaacgaactgttgacttgctcagtgatatggttacaggaacacgatgaacactattctgaagcacttgaaagatattaaagtgaagttctcagatgctggccagcctatgagttttgtcttagaatttcactttgaacccaatgaatattttacaaatgaagtgctgacaaagacatacaggatgaggtcagaaccagatgattctgatcccttttcttttgatggaccagaaattatgggttgtacagggtgccagatagattggaaaaaaggaaagaatgtcactttgaaaactattaagaagaagcagaaacacaagggacgtgggacagttcgtactgtgactaaaacagtttccaatgactctttctttaacttttttgcccctcctgaagttcctgagagtggagatctggatgatgatgctgaagctatccttgctgcagacttcgaaattggtcactttttacgtgagcgtataatcccaagatcagtgttatattttactggagaagctattgaagatgatgatgatgattatgatgaagaaggtgaagaagcggatgaggaaggggaagaagaaggagatgaggaaaatgatccagactatgacccaaagaaggatcaaaacccagcagagtgcaagcagcagtgaagcaggatgtatgtggccttgaggataacctgcnactggtctaccttctgncttccctggaaaggatgaatttacatcatttgacaagcctattttcaagttatttgttgtttgtttgcttgtttttgtttttgcagctaaaataaaaatttcaaatacaattttagttcttacaagataatgtcttaattttgtaccaattcaggtagaagtagaggcctaccttgaattaagggttatactcagtttttaacacattgttgaagaaaaggtaccagctttggaacgagatgctatactaataagcaagtgtaaaaaaaaaaaaaaaagaggaagaaaatcttaagtgatggatgctgttttcttttaaaaaaaaaaaaaaaaattcattttcttggggttagagctagagagaaggccccaagcttctatggtttcttctaattcttatggcttaaagtatgagtatgtcacttacccggtgcttctggtttactggggtaattaaaagggggtagtactggtgttacctaactacctcatggatgtgtaagggcatatggagttaaatctcatataaggtttctcaatctggttaaaagctcaaaattttggggcctatttggtaatggccagtgtgacactaagcatttggttcacaccacgcttggataactaacctgggaaaacaagggtgttaagtacctctgttctggatctgggcagtcagcactcttttaagatcttggggtggctcctatttttatagaaagtgggggggatgcctatttcacaggtcccagattgtgtttccagatattttggatgactgtttgtaaatactacagggatagcactatagtatggtagtcatgagacttaaggttgaattaagactattttgtgacaaagatgcattaaatttcagactgttagagccaaatttacaatacctcaggtacttactggtaattttggggttgaactttttttttgacagggagggggggtaatggtttgtccatagaggaggtctaaattctgcctaaaaaaatacatgaattggtttagggtatggaacttctttttggaatatggttagttggatgaccattgtgttggtcatcttctggataatttggaatacaatataatttttaa

SEQ ID NO: 599869 - DNA, 138 bp, Homo sapiens
atggcgctggtactgcataccatcctgggccccatgctgttgaaccgaccactggcatgggtcaccagcagcctgccctcccctagcaactgaaggggaagatcctgctgaaggggaagacgctcggggggctcctgc

SEQ ID NO: 599870 - DNA, 1320 bp, Homo sapiens
  misc_feature (298)..(298): n is a, c, g, or t
  misc_feature (432)..(432): n is a, c, g, or t
gctgctcgcggcgccgcctcctgctcctcccgctgctgctgccgctgccgccctgagtcactgcctgcgcagctccggccgcctggctccccatactagtcgccgatatttggagttcttacaacatggcagacattgacaacaaagaacagtctgaacttgatcaagatttggatgatgttgaagaagtagaagaagaggaaactggtgaagaaacaaaactcaaagcacgtcagctaactgttcagatgatgcaaaatcctcagattcttgcagcccttcaagaaagacttgatgngtctggtagaaacaccaacaggatacattgaaagcctgcctagggtagttaaaagacgagtgaatgctctcaaaaacctgcaagttaaatgtgcacagatagaagccaaattctatgaggaagttcatgatctntgaaaggaagtatgctgttctctatcagcctctatttgataagcgatttgaaattattaatgcaatttatgaacctacggaagaagcaatgtgaatggaaaccagatgaagaagatgagatttcggaggaacttgaaagaacacaggccaagattgaagatgagaacaaaggatgaagaaaaaggaagacccccaaaggaattcctgaatttgtggttaactgtttttaacgaactgttgacttgctcagtgatatggttacaggaacacgatgaacactattctgaagcacttgaaagatattaaagtgaagttctcagatgctggccagcctatgagttttgtcttagaatttcactttgaacccaatgaatattttacaaatgaagtgctgacaaagacatacaggatgaggtcagaaccagatgattctgatcccttttcttttgatggaccagaaattatgggttgtacagggtgccagatagattggaaaaaaggaaagaatgtcactttgaaaactattaagaagaagcagaaacacaagggacgtgggacagttcgtactgtgactaaaacagtttccaatgactctttctttaacttttttgcccctcctgaagttcctgagagtggagatctggatgatgatgctgaagctatccttgctgcagacttcgaaattggtcactttttacgtgagcgtataatcccaagatcagtgttatattttactggagaagctattgaagatgatgatgatgattatgatgaagaaggtgaagaagcggatgaggaaggggaagaagaaggagatgaggaaaatgatccagacttgaagtgacagaatttgaagatattaatcaggttacagatgagatttttatt

SEQ ID NO: 599871 - DNA, 281 bp, Homo sapiens
cttacagtgtagattctgactgtcctgcagcagatttgagtgtgagtactgaatctcatctttggtggagcttgggtgattgtgtctcagtgtgagtggtgtgcaggatgacaggacaccattcattgtgagtctgagtttagggcactcttgggttctcatgtctcctgaggctcacataagccccaggtgaccagcctacctgtgttcgtcaaacatatgagtgtttgactggacttctttgagggatgggggtgctggcagagttgcagataaagacc

SEQ ID NO: 599872 - DNA, 257 bp, Homo sapiens
ctggccctgtggttcggcaagcgctcatctcgcctttcaccagccatcctccgtgaattagaaaacacggatttccatctccaatgagtgtttggttctggggcagggttgaggctccagtccgcagtgtgatcttggctccacctgctctggcctttccccggctgccctatgtgtgcgccccagcccggggctcccagcctgaacctgatgcaaggccatgctgacgtccttccggcccttcgtgactctgtcgc

SEQ ID NO: 599873 - DNA, 235 bp, Homo sapiens
aactgcgaccatcaggtatcagcatagtacccaacaggcaatatcaatcttcatcctcttcccaacctccacccataagcccgtgtctactgttcccttctttgagtccatgtgtaatcaatgtttagctcccacttataagtgagaacatgggatatttcattttctgttcctgcattaattcacttaggataagagcctcagctccatcgtatgttgtctgtaacagtgacac

SEQ ID NO: 599874 - DNA, 142 bp, Homo sapiens
cgatagtgagtgatgacttggactttgaaacacacgaacctgcgaagaggctatccctgaaacgaacactatataatctcaagtcatacattgcccagatggaccaggaactagcacacgcctcaatcagcaaaagtttcac

SEQ ID NO: 599875 - DNA, 702 bp, Homo sapiens
  misc_feature (547)..(547): n is a, c, g, or t
  misc_feature (585)..(585): n is a, c, g, or t
aacaatgtaacatagatacaatataactaaagtggtatgaccagtaaaaaaaaaaaaaaaaaaaaaaaaaaaaaaaaaaaaaaaaaaaaaaaaaaaaaaaaaaaaaaaaaaaaaaaaaaaaaaaaaaggggggggggggaaattttgggggaaaataaaaatttttttagaaaagggggccgctgtttgggggtgcttttattatactggctgcgccgcggggggctgcgttttatataaaaaaggtgttgtgtgtggggagacaaacctggtgtcggatgggtgattatgttggaaaggagcctccacatttgtcttgtggagagggagataatacaatatgaggggaacaaatcaataccatcagaagatatgtatattaagagttgtctgcaggagaggaatatactccataacaatgatcgaaggagtggagtattgaggtgtagggagtaaaaccacccgaatcgctgctatctattagtgctgtagcgtgagcaggaaagaataaattctggtccaccgacggatgtttatttatgatganagaacaatatttttcgataaccgggagtcgcgctggtnagatagtaaatcaggagcgacccagccgaagaagaaaaacgaagcatggcgactgactacgcacgatagatgactaagaatcaagacgagagatgggagacaaaaagtatgatcgcg

SEQ ID NO: 599876 - DNA, 1320 bp, Homo sapiens
gccctgatcaaccgtgtttatcccacgcggggtagtgtgtataattccttgcgtgcgagatagtgtcgcccacgctgataatgcttctttagtaagtgtgaacatctcttttttcctcgtgggggagacgacaattttggggggcgctctccaaaaggtccacaaacggaagcggtgtttccctttatacatagggaaagttagtcttaccttctggtagggcacaaaccgcgtttgcgcattgtgtgtacccacgacacaagtacttgttgccccccccccccaactttggggaaagaccgaacccttgggggtttctaccttgctccaagaggtgggattcgaattccgcttggtaggacccccaatatcccgagaggcccccaaaattataaaaggcgtcgcccgggggcgttaaatggccccccctggcttattttctggcactgttggccccgaaccaccaggggtcttaccacccaatgtggcacaaatgcccctatattttctacctttgagcgactttgagagggggaaacaaaagagttttgtggatttccccccctgtttttctctggtcatataaaaggtctcgggaacagattgcggccccctctaaatatttctcttgaaagtttctcgggtgcagagatgctcgaccactatacgtgtttgagatattgggtttccccgggccaaaaccccccacatggtgttgctttgcaagagagccttctctcacgaagactattcccccccctcttttggcgatctcccctgtctgccgtgtatgtctcgtcgaaatatatgtcagagcaccgacacaccagtttgccgcgttgaggtcgtgtcacttcacaaagccacgtgggaccacaagaaaggcctcgctctcggagagcctgtgccacaagtgtgccccacaaagtgctcggcccacagacaaagctccacgaaaaggcctatcaattgaaatacttatgccctatataacctcgccacccccaccttcttaatccacgttggtggaagaaccggctttcaagaacactcgtttgtttcacacattggccaccttacagtttaagtaagtaaaagagctggttaaatgaataatcacaatgcactcgtaaaacccttcacgaaggaaaaggagaatgttttgtggacccacctttggttttcttcttttgcgctcgtggcacgttcttaacgcttatttatcattctttaaaaatcagtactttttaatggaaaccacttgacccaaaattctgtcacagaattttgagaccccattaaaaacagttataatgagta

SEQ ID NO: 599877 - DNA, 302 bp, Homo sapiens
cttctctctgcttccctttgtatcgtatgtcttgctagttttttgtttttctctttacaagattgctgatggtatggcatatattgagagaatggactatattcaccgggatctcgggctgctaatattctgtagggagaaatcttgtgtgcaaatagcagactttggtttagcagggttaattgaggacagtgatacacagcagacagggtgcaaaatttccatcatatgacagctcctgagctgcactgtatggtcggtttacaatagtctgatgtctggtcatttggattctgcaacag

SEQ ID NO: 599878 - DNA, 234 bp, Homo sapiens
catggcaacaggcactggaaattagtgttcctgccaagcccaggaccagtcccctgggatttcccatgggttccacatgagacccttgtcccagaccttgcaaggagaggatttctggaatgactgaaagaccaccgaaaaggatcccccttcaaataggaaataccctgtttgaaagtatagtgaaaagaagttcagttaggagtataaatttaaaatatatgaaaaaaaaaa

SEQ ID NO: 599879 - DNA, 157 bp, Homo sapiens
tgtcatctcattcttctcggtggaccatgcccggacctcgctggagaacatccccgagaatgtgggtccccgatgtgtgaatgcacttcttgtcccaatgtgcccatcatccgtggtggccaacaaaaacagacctgctgcagcgacgacgcatgtc

SEQ ID NO: 599880 - DNA, 121 bp, Homo sapiens
  misc_feature (92)..(92): n is a, c, g, or t
cccagctgacgtttctcccccgagtttgtggacttcactgctcagtgcctgagggaagaaccccgcaggagagtatagagctacctggagcntgatggagcacccctttcttcacctttgc

SEQ ID NO: 599881 - DNA, 545 bp, Homo sapiens
agcagcatagcaccatatagggatgtccatgatccaacatcgaggtcgtaaaccctattgtagataatggactctagaataagattgcgctgtatatccctagggtcacttgttccgtaggtcaagttattggatcaattgagtatagtagttcgctttgactggtgaagtcttaacatgtactgctcggaggttgggttctgctccgaggtcgccccaaccgaaattatataatgcaggttaggtagtttaggacctgtgggtttgttaggtactgtttgcattaataaattaaaactccatagggtcttctcgtcttgctgtgttatgcccgcctcttcacgggcaggtcaatttcactggttaaaagtaagagacagctgaaccctcgtggagccattcatacaggtccctaattacaggaacaagtgattatgctacctttgcacggttagggtaccgcggccgttaaacatgtgtcactgggcaggcggtgcctctaatactggtgatgctaagaggtgatgtaattggtacacaggcgg

SEQ ID NO: 599882 - DNA, 295 bp, Homo sapiens
ttttttggggttttgggggccccccccctaaccgtcccccttttggtttggggggccccgcgccgaaaaacccaaacttttttaaatacaaaggttttccccctgccccaagacccattttaacttttttagccccggcaggggggtttgcttcccaaaaaggcctcttttccccgggggtttcccccaagggtggggccccccttggaaaaaaaaaaattgcccccccctggggggaacaaaaacccgttccccctgggggtgtggcccaaaaaaaacccctttttttttttta

SEQ ID NO: 599883 - DNA, 206 bp, Homo sapiens
tcctggtacccagccatttgcccaggggtgccccctcctttcccatccccctgccctcgtggccagcccggctggttttgtaaaatactgggttggggcccagtgatttttttttttttttaaacaggcccagcattgctggttttatttaatggacatgagataatgttaaaggttttaaagtgattaaacgtgcagactatgca

SEQ ID NO: 599884 - DNA, 470 bp, Homo sapiens
  misc_feature (15)..(15): n is a, c, g, or t
  misc_feature (61)..(61): n is a, c, g, or t
  misc_feature (129)..(129): n is a, c, g, or t
  misc_feature (210)..(210): n is a, c, g, or t
  misc_feature (279)..(279): n is a, c, g, or t
  misc_feature (409)..(409): n is a, c, g, or t
  misc_feature (434)..(434): n is a, c, g, or t
  misc_feature (449)..(449): n is a, c, g, or t
  misc_feature (459)..(459): n is a, c, g, or t
caaaatgctgggatnacaggcatgagtcaccacgcccagcctagatgtctttactattctnaagatggcagtagtccccaagttgatctatggattcaactcaatccctctttaaaccccaaattgctnttttttgtagaaatcggcaggctgatcctaaaattcatatggaaataaaaagggactgagaatagccaaaactattgaaanagagtaacgttggcaaggttatgttgcttgatttcaaaacttactacaaagctagagtaatgaagactntgtggtactggccataaggatgaccatacagacccgtgggaccggaattgaggatccagaaataaatgcatactttcacaacccatcaatttttgggcagcggtgtttaagacagttttttgggcaaagnattgggtttttccacaggtgatgcnggggacaactgattntcccctgaanaggatgaagtt

SEQ ID NO: 599885 - DNA, 246 bp, Homo sapiens
gggggtgggggttaggattaataaggtgaactgttcaggaattttttgccccagctgggcaaaaaagcaaaaaacaagcgctgctttggcattaatcccaggaacccctaacagtagtgggggccccccaatttaacatgagcccaggggtttcatgacaaacattactagcatgttcaactgccccatgttttggccctgttttttgaaagcccttaattttttaaataaattgtatattttcca

SEQ ID NO: 599886 - DNA, 688 bp, Homo sapiens
gagagacctcacccgcttagtgagatggccccgttatatcaggttgctagctggcgagagagccatcctctataaatcggactgaacaggtgcctcctgcgattaagcacagttcacccaggccctggaccggcgaacagctactcagctgtttgagctggccgcatcgaagtacatgaccatgagacataagcataggagaagaatgcagagactgttggcccgggccgagaagaaggctgtgtggctaaaggggacgtcccaagctagaagtagtaccacctgtccgttcgacgcaggagttaacaccgtcaccaccttggtggagagacaagaaagctcagctggtggtgatttgcacacgacgtggatcccatcgatgctggtttgtcttcttgcctgccctgtgtcgtagaatgggggtcccttactgtcattatcaagggaagaggcaagactgggacgtctagtccacaggaagacctgcagcatctggtcgtcttcacacaggtgaactcggaacgacgaaggcgcttgaggctacagctggttggacagctatcaggaccaattacaagtgacagatacgatggagatccgccgtcactggggtggcactgtcctgggtcctaagtctgtggctcgtatcgccaagctcgaacaggcaaggctaaacgaacttgcacta

SEQ ID NO: 599887 - DNA, 95 bp, Homo sapiens
aactcattccagtaatatattcaaacgaaacagcttggaaaagagggtgggagaaagggaagtgagggggaagataagaaaggaattaagtgatc

SEQ ID NO: 599888 - DNA, 152 bp, Homo sapiens
  misc_feature (50)..(50): n is a, c, g, or t
gcggaccagctagagcattgagccgctggcaggctggtcctgccccgagntctagtcacctggggcctggctgatgtgacttcctgcgatctcataactatttcctcaccagtgaaacacccccagtgcccagtgtcagctagactcggtgg

SEQ ID NO: 599889 - DNA, 87 bp, Homo sapiens
tgggatgttcagctccatggggccgcccttgttgtcgaagccccaggcgcccagttccagcgcgcgctggtaggcgtgggcggggtt

SEQ ID NO: 599890 - DNA, 121 bp, Homo sapiens
  misc_feature (13)..(13): n is a, c, g, or t
  misc_feature (63)..(64): n is a, c, g, or t
  misc_feature (74)..(74): n is a, c, g, or t
  misc_feature (79)..(79): n is a, c, g, or t
gcacgagaaaaancatgataattctttgagtagatgccccggataatcctctgaaggaagagnntttagtccancttantgaaaaaccatgataattctttgtatataaaataaacatttg

SEQ ID NO: 599891 - DNA, 421 bp, Homo sapiens
atcacggacgtgagacaagttactcgtgtcaaatccgtttggatccactctagcccacaggctaaagcggggggaaaacagggatcccatcaatgcaaacacactttggactacctgccctataaaaacacgcttcttctggaagaccatccaacaggtgagaatgacatggccgatcatgaaacctgcaaacaaatatcagtacaattcaggctttgaccttcctgagggccctctgacaacatccttcaaaggaaaatatgggtgcgtatactactggatgaaggctttttttgaccgcccgagccagccaactcaagagacaaagaattttgaagtagtggatctggcggatgtcaatacccctgatctaatggcacctgtgtctgctaacgaattgacagatacggctctgtgcgcg

SEQ ID NO: 599892 - DNA, 181 bp, Homo sapiens
atacacacgcccatgccacatgctcacaaacatacattggcacatacacaggggtgcgtacacacccatatcaactcctctcaaacacacacatacacacacacccctacacagacacatacacagaggtgcatacacacacccatgccacatcctctctctcacccacacacacccctaa

SEQ ID NO: 599893 - DNA, 263 bp, Homo sapiens
  misc_feature (16)..(16): n is a, c, g, or t
  misc_feature (54)..(54): n is a, c, g, or t
cacagatctgccctantcccgccaggggggctgaaggtgggcagatcactgagntcggagtgagaccagcctggccaacatggcgaaacctgtccgtactaaaaatacaaacattagcccagctgtggtggtggacacctgtaattccagctacccgggaggctgagacaggagaactgcttgaacccaggaggcagaggttgcagtgagctgagatcgtgccattgcactccagcctggatgacagagcaagaccccatctc

SEQ ID NO: 599894 - DNA, 324 bp, Homo sapiens
ggtgttcctatctaagttgtttgtttctatgttggcccggtatggttcccaatcagaggcagctgtttatcgttgtctctgattggggatcatatttaggcagccatttccccactgtgttttgtgggatcttgttgtgttgttgcctgtgagcactgtatttacgtcccgtttcatttattctttattggttttgtacatttcactcaaataaacatgtggaacccagattacgctgcgccttggtccgaatgttatttcgacaatcgtgacacattcagccatatctagtatacttcagccgtaggaaatcaatgtcgacgc

SEQ ID NO: 599895 - DNA, 535 bp, Homo sapiens
acaaatttaacttcaagtaaaaaaaaaaattacaaccacagatttcgcataaatgcaaactggtctttccttgatttccctttgaagtcactaatcagtatctaaacctgttgcactgcaggttttaatcaacttcctgagggctgtgcctgggaggaaggagccatgacaatctgtgaaagtgcaggctcggtgctctggtctgccatctgggtgaggactgaagtggctccagcttctgttttggatgtgaactgactccattggacgtactgacagagctgggctggatcgcttctgtattgtggggctgcttgggcacggaaaggtcttcttgagcttgtcatcttttatcagaggattgataggccagacttctcctgaatgggggggttacagggaacttttgagccagaagaagctgtcacttggccacttccatcctcaagaaggggattccctcctcaggtggcccattggggacccaagcctccctgccttcctcccctaggcttgcccccccttcccgaggggg

SEQ ID NO: 599896 - DNA, 198 bp, Homo sapiens
taagtaatgagtccaatgtacttcatcctgccaacactcgttatttactgctatttttgatagccgccatcctaacaggtgcgaagtggtagttaactgtagttttggtttgcatttatctaaggatggtagcatgtattcacgttttttttttttttggcttcaaaaaatatctattaatttctgtgcccatttcaa

SEQ ID NO: 599897 - DNA, 413 bp, Homo sapiens
aacagatcctctatcaagcgcgcacaactgtgtctagagctcacagctcttgtatagagctcgaggacagtacactgacgctactactatggacgtagatgcagcactgcctgggactatcgacttaccgagggttatgctgacacaagcaaggccaatggcctcacatgtgcagtcacctggactctatgttgctgggcttacagctacatcaggatatgctgtgccggcaccagtctggccatatctgagaaagtaaggggattgagatacgttgcccagtacattgctgactgaacccgatgggagatgactgtgaacacttgcggataccacgctgagagctatttgggatacgaagctcatattatcatattcttttacgagatatagatgatgtctgctcgggcttg

SEQ ID NO: 599898 - DNA, 929 bp, Homo sapiens
gcaggagacctggtactgggtactctggtgaatataacagaggtggtgatgagtggagtgcgctgcaacaggaactgagctgtccctggatcagtgtgcccatacatggcacccacatcacctgcaagaggacatgggacccgcttcacctgctggattcatctgttctgacactgcatcagatctgttgctgcactcagcactggtgcaggagagcgcctacatctgacagacccgtgcccctgcattatgtttgtacttgtgtcgtgcaggaatgagaactgccatgtgatcagctcagcccgtcgtcactccaagctggtccctatggtctccggcgtcatgcatccgattctcctcccagaatccacgacctgggacgagctgacttcaggcccatggctgggcgccaccgtcctgggtgtggcaacagagtgccatgggcattaccacacgtcatggacgtcttcactcactatgtatatcctcaccccaaatggtcaccacactgtggctgaccggccacaaagctagtttactgtctcgaagacactgagtgtcaggaggactgtctccaagcggtatgagtgtgccaactttggagagcaaggcatcactgtgggttgctgggatctctaccggcatgacattgactgtcagtggattgacatcacggagtgtgaagccaggaaatctacattctccaggttgtcatcaatccaaactttgaagtagcagagacgtgactttaccaaacaatgcatgaaatgtaactgctactatatggcccttcgatcctgggtgccgattgccacatttggtgatccttcatgaagaagccaaccggccggttgaacgtaccctggcagaacgaccgttatcttagtccctgctttgacccccgtggcccatggggggttgggggccac

SEQ ID NO: 599899 - DNA, 998 bp, Homo sapiens
aaaaaaacggtgttgaggccaatcccaagaaagccaaacgggttcccaaaggggcacaaacacgggggccaccccacaggggacgtgaacaagggcgccacaaggccctctcacaggggcgaaagaattccacccggggttatagcacggccgcaaaagatcacagagcactttggtgagccaacatatgagtcgaccacgagggctcgcacacagaaaaaaaagtgtgtgcttataaacgggccgcgacctcttatgaggacccccgggggggttttctccaaaataaatacctgcggactttatagagagataagctgcttctatcaccctcggcgggggacaaaatcgagaatggttgtttaaaaaaggggaggaatccccccggcagcacatgtggaatataccacccgtgttggtgagaggctggcgatatagaaagcccacactttgctgttttacacagagatatagacaagagaaagggttatatattgggagaagagcgcccccgagggagtgaggaaaaagggagaacatttctgtcttctcctagagattttgtgagaagaaagagcccaggtacatatatcatggaacacacagcggacaacatgtaaaaggagatatgttttaatgtggaggaaatgataaagccgctgaaagggtcacacctcaaaagaggcttaacccctcctcgtgtggcatcttgtgaacctaggcaacagagaattagcccctgtggatcactcttttattcacggccaaagatgtaatatcggtttcccaaaatagggggacactcccgaagaattgacccgcggggaatatagtattgtcccagagagagcttatgggagaatagttcaaagaacataggggtcccttatgggtggaacaaaagtgtttgtcttttatttcccttttattttttaaaactttttaaacaaactgtgggtttgcccaaaaaataaattgctttttttaaaacctttcca

SEQ ID NO: 599900 - DNA, 816 bp, Homo sapiens
gtcatgacgagtgacgcttgcacaagatgaggggctgtcagctgggtcgcctgcttgttacctctcgtctgactgaaaggcagtctcagagccctattcctgtacctactaattacagcgagcgggaagcagtgagcgcttcgggacgcaattggaaaccagcgtgcagggtcaaagacagagcggacaccccatgtcagtggtctaggatggccagtgaaggcaccaacatcccaagtcctgtggtgcgccagattgacaaagcagtttctgatttgcagtatatgacctggaacggtacaagaatcacaaggttctcccctgtttgcacaactttctgcgagaggtgcctgcagaactacattcctgacccacagtataaccctctcctgcccagttgtgccgcacagaacctccatacctgcccgagaaaaggggtggccaggctccagaacaaatatctttcatcaacacaacctgatggacagtgctgcaagaacgaactccaggcagcaaccgctgaaggagtcttccatcctggagaacagtcactgatgtggctggtggtgaaagcctctcatcatgcacgaaaccagagaggggcactgtgactggactaaaacatgccaggacctgtgagaactgcccatgtgtacgtgagtagcacggaaggggaggacggcaaggacccaagagatcacacacggaaggtggtgaaacaagacaaggctagacacaggaccaggtggatgatgtcaacagaggtaccggaataaatctgctaaagtcaactcagaatcaacaacagataaaacc

SEQ ID NO: 599901 - DNA, 593 bp, Homo sapiens
cggcatgtatgcctcaagttttggggcgctgttcatgtcgcgccccgggtgatcttttcttgcggggtgttccctcctgtcgttgttgccacagtcctggccgctcgcatatgttgacccgatgggggtgttcttcttggaacgggtgcggttttggtcacccacttcggccgggagctgcacccagaacagcgctgatcgtggtttgacaccccccccgatggccttgctgggatggtttgtcgattaccgaccggcgtgccccagtttaaataatatcatatcccctccttttcttgaccctgtgcccccccccctcgtctcgtttttccatagagtcggttatccaccctctttcctgatgacagagtccacacttgaccaacgacccagaaatcagtcttttcttacaggttcccccggggtctacttttcattctgtgtctatttgtttcaatggacaccacaaaaattttcctcttttctatatgtgtaccaatgatccattgccgaaaatctaaacactatcccttatgttcttcaacgcaggggattttccaacaaaaacaaaaaacggaaggaacaaatcacac

SEQ ID NO: 599902 - DNA, 262 bp, Homo sapiens
tgactctacaggattccggtgttcctttgtctacaaatataaaagaattagccaggcatggtggcaacacctgtggtcacagatacttagaaggctgaggtaggaggatcacttgagcccaggaagtggaggttgcagtgagctgagatcatgccactgcactccatcctgggcaacagagcgagactctgtctcaaaaaaaagctatagtaatcaaaacagtgtgttactggcataaaagacatgtagacaaagggaaaca

SEQ ID NO: 599903 - DNA, 337 bp, Homo sapiens
  misc_feature (322)..(322): n is a, c, g, or t
ttgtttgccacttactgtgttccaaaatgctgggcctatttcacattactataatcacactgcgagatagggacttgcatttcgtcaggaatttagcacgaaagattcacaaagtgaatgtgttatacttgtacataaaagggcaacactttcagattcttagtaaataaacagctataaacaaggtcgatggtatctaaacacaagttttttacagtctatcaaataagtagaatactcaaatagctcattcatgaatataattaatctttatgcgaacatattatcagactaatatgatataacgtgtttataccttacnattatttcatacata

SEQ ID NO: 599904 - DNA, 333 bp, Homo sapiens
attaccttgctgagaattaaaaagaaaattttatattagagtgctgtttcttttgtggtaccaaatctttatttgtaataattggggggcttgcccgtgattacattcccctctgggggtggtctctagttctctctcatgaggaggcacgccccacccacttgtggctgcctcagggctgagaaatcaggacccacctaatgtgaagaataaccccagctctcagcaacacggaaagaaactggccagcaaactagcttgaatgattctcacatactgtggcgacaactctgtgcacagaccaaggaaggagaagccgtgggagcccgtaaa

SEQ ID NO: 599905 - DNA, 535 bp, Homo sapiens
  misc_feature (185)..(185): n is a, c, g, or t
  misc_feature (240)..(240): n is a, c, g, or t
gagggactttttctcttctcccttaccccggaaatttttaatattttttcccccaccccccggggcattcattttttaaaaagaagggttaaaagaggacatggcccaactttaaccgttaaatatctgatcccttaggctggattccccaggactggagaaaaatatgctaatataaaaggaanctgtggctagaatagggaggggctttaaaaataatacaataaaataaagaagacnctggggaggtggctaatgcctgtaatcccagtactttgggaggccgaggagggaagaggatcgcttaaggccaggagtttgagatcagcctgggcaacatagcaagagaccccgtttctacaaaaaaaatttaaaaattagcttggtatggtggtgcctgcctgtgtacccagctactcaggaggctgagttgggaggattccttgagcccaggagttcgaggctgcagtgagctatgattgcaccactgcactccggcctgggcaacaaagcaagaccttgtttctggaggaaa

SEQ ID NO: 599906 - DNA, 225 bp, Homo sapiens
ccatagggtagccaggttgatgaaccgcacatgggcgcggttcaagtccgggtgcagttcagtctgttctggcgtggctagggcgcaggtgccagatcgtgcaaacgggcgttggctggcactcatggtttagcttcccaaccgacctggtagagcttgccgagggacttgtccaagggcgcacgcaccaccggcgagtgtaggtagatatcgacgaccttgatc

SEQ ID NO: 599907 - DNA, 432 bp, Homo sapiens
cttcccccccactgacgaataagtagaaataagtgaggatttaactgtgagcctctagtatgcaaatgtatgctgagcggtattggggttcagcagatactctccaaacacttgaaaatactgtcttgtaataattctattatgggtcaatccagagtggatcaaaccagaaatgaacgtctctggccagagcaaaccttactgagagaaataatatatctaactcaggaattgagccaagaaaaccctgggaagtaaatatttctgaagtgaaaagtctcctgtgtgtgtacaaaactatctggttctagtagtagagatagtctcatctctctattaaagcttaatgtgattccattaaatatttgaatcataaaactggaccttttattctgttccttttctcaataaatgcagttctgaatattattt

SEQ ID NO: 599908 - DNA, 298 bp, Homo sapiens
  misc_feature (67)..(67): n is a, c, g, or t
  misc_feature (90)..(90): n is a, c, g, or t
  misc_feature (122)..(123): n is a, c, g, or t
  misc_feature (145)..(145): n is a, c, g, or t
  misc_feature (170)..(170): n is a, c, g, or t
  misc_feature (181)..(181): n is a, c, g, or t
  misc_feature (192)..(192): n is a, c, g, or t
aatgggccaaagtctgagttcttagagactgtgtaccaatgttatgcatagtgtcttctaaatcttntactcttcctaagtagacttggntcggctatcttaggaagacacagcatagaaanntttctctctcttgtgaatattnttagacgtgcaaggttgaaaaaaantaaaaagaaantgagggcaggnttccagggccctgaaatgtaggtatgttgcaaggcttttacattgaatttgaccctacatcacttcaagactaatgcataatattaaacatcatgttgaagaaata

SEQ ID NO: 599909 - DNA, 395 bp, Homo sapiens
gtgagcctaggggttcaagactagcctgggcaacatagggagacctcgtctttacaaaacattttaaaattaggtgggtgtggtgacgtgtgcctcttgtcccagctacttgggaggcttgaagttgggagggattgctttgaacccagaaaggtttgagggcttcaagttgaaaactttttggaacttttgcccacttacacaacagcctggggcaacagagtaaggactctgtctcaaaaaaaaaaaggattaattccaataaatgggtagggttatttggccaccttttgggaaaaaaatttcagggggtaaaggcagtaaacccaagggactttttaggccccaaggaacagggaggggccttttgagtatccatgacccccgaggctaaa

SEQ ID NO: 599910 - DNA, 165 bp, Homo sapiens
gaattcggcacgagaagaaccagatgtcaaaactgatttcagagattgcatagttttatccagataaggagaaaacaaacccgagagacactgaccccaggagcatgagctaccccaggagcagagtcagcttccaattccttcagaggccagcacaaccttcct

SEQ ID NO: 599911 - DNA, 921 bp, Homo sapiens
  misc_feature (6)..(6): n is a, c, g, or t
  misc_feature (76)..(76): n is a, c, g, or t
  misc_feature (82)..(82): n is a, c, g, or t
  misc_feature (86)..(86): n is a, c, g, or t
  misc_feature (88)..(88): n is a, c, g, or t
  misc_feature (90)..(90): n is a, c, g, or t
  misc_feature (128)..(129): n is a, c, g, or t
  misc_feature (132)..(132): n is a, c, g, or t
  misc_feature (135)..(136): n is a, c, g, or t
  misc_feature (139)..(139): n is a, c, g, or t
  misc_feature (141)..(141): n is a, c, g, or t
  misc_feature (165)..(165): n is a, c, g, or t
  misc_feature (169)..(169): n is a, c, g, or t
  misc_feature (179)..(179): n is a, c, g, or t
  misc_feature (201)..(202): n is a, c, g, or t
  misc_feature (204)..(204): n is a, c, g, or t
  misc_feature (229)..(229): n is a, c, g, or t
  misc_feature (236)..(236): n is a, c, g, or t
  misc_feature (247)..(247): n is a, c, g, or t
  misc_feature (250)..(251): n is a, c, g, or t
  misc_feature (269)..(269): n is a, c, g, or t
  misc_feature (286)..(286): n is a, c, g, or t
  misc_feature (289)..(289): n is a, c, g, or t
  misc_feature (309)..(309): n is a, c, g, or t
  misc_feature (313)..(313): n is a, c, g, or t
  misc_feature (338)..(338): n is a, c, g, or t
  misc_feature (340)..(340): n is a, c, g, or t
  misc_feature (354)..(354): n is a, c, g, or t
  misc_feature (356)..(356): n is a, c, g, or t
  misc_feature (359)..(359): n is a, c, g, or t
  misc_feature (362)..(367): n is a, c, g, or t
  misc_feature (377)..(377): n is a, c, g, or t
  misc_feature (380)..(381): n is a, c, g, or t
  misc_feature (388)..(388): n is a, c, g, or t
  misc_feature (401)..(401): n is a, c, g, or t
  misc_feature (412)..(412): n is a, c, g, or t
  misc_feature (419)..(419): n is a, c, g, or t
  misc_feature (441)..(441): n is a, c, g, or t
  misc_feature (458)..(458): n is a, c, g, or t
  misc_feature (464)..(465): n is a, c, g, or t
  misc_feature (471)..(471): n is a, c, g, or t
  misc_feature (473)..(474): n is a, c, g, or t
  misc_feature (476)..(476): n is a, c, g, or t
  misc_feature (478)..(479): n is a, c, g, or t
  misc_feature (513)..(513): n is a, c, g, or t
  misc_feature (556)..(556): n is a, c, g, or t
  misc_feature (825)..(825): n is a, c, g, or t
  misc_feature (836)..(836): n is a, c, g, or t
  misc_feature (847)..(847): n is a, c, g, or t
gaaaanaattctatagccaaatgacattgataaacagtgttcttacacaaagttaagcctgtttctttattataancctttncccncncnttcccagtgcatagtgtgactctccacaaagcaagccnnacnccnntancnccctaaacttacttgaccacagantgcntcattctatntccatggaaaccacttggcaanntntcctactccaatttttttttccaanaaaactnacctgtttgtnttnntctgaactcattttgtgntcttgcctttatataanagngaagttctgtgaaatgttgnggangcagggttatggggctggtgatggngngggggctatagaantngtnaannnnnngggttatttnggnncagaggncctaaccataggnattctaacagnggattgngggacccagtatgggtgtttgngacatgttacaaaatanaggggnnattttngnnangnntccatttaataatactgctagatgctgtgggggncaggggctccccggcccagcacacacgcttgagcaggaatggngacatgggcatgggtaggcaggctggtggtcagcagataccctttctgtccctcctctgtgacaatcacccccaagtaatttttgggattcagaataagggagctgctctcccatcctggttactatgagtcgctcttggcagaaaggaccacagatggagagcttggcactcgctccaactttgccgaaaagaggacaaccaccaaagtagtaggtaaaaacacaattttagcagcagtgaaataaaaagaggaagtgaggatggggncaggccgcaantataattaaantgtctgtttaggagaagctgaatccagaagaaacacaagctgtaaagtgagagaggacagggagcagggccttt

SEQ ID NO: 599912 - DNA, 176 bp, Homo sapiens
caggcgcaggaaaatccgggtccttggtcttgttgtttgtctgtaatacagcgtgtgcttgcctgaagtgcatctgcaggggctcagttaagatggacagccacagcccaaactgcttagggagataaaagaagagtaagaatgtggggttgtgtttctttttgggcttttttctc

SEQ ID NO: 599913 - DNA, 167 bp, Homo sapiens
aggctggtgattagcaggatcttcagaggacaaggaggtcgaggctacagtgagccgtgatcatatcaggaggttaaggcaggaggtcgaggctacagtgagccgtgatcatgtcactgaacttcagcctgggcgaagagtgagacctcgtctcaaaaaaaaaaaag

SEQ ID NO: 599914 - DNA, 154 bp, Homo sapiens
tcgctattcatcggcaccatcaactttcgatggtagtcgccgtgcctaccatggtgaccacgggtgccgatgaatagcgaggtgccgatgaatagcgagaggtgccgatgaatagcgaggtgccgatgaatagcgaggtgccgataaatagcga

SEQ ID NO: 599915 - DNA, 254 bp, Homo sapiens
acacaataatgtcagttcaatcatactattcaacatgtcccaagtccacagtggggactaccaacgctgtgattcacaattcttgagagtcaactgttcttatatgtcaatgtgggctaccatgttaaaagaagaaagagaaagaaaagaaaaaaaggaaggaaacagagagagagaaaagaaaaaaggagaaaaaacaattcaggacatcaaagactcattgaggtcagaacatactataatgagataccata

SEQ ID NO: 599916 - DNA, 307 bp, Homo sapiens
tattaatcagtataatattagtatgcatggacctctagagctatggtgccgataatagcgctattcatcggcacccgtattgaattcaagtataatattaagtatgcatggacctctagagctaatggtgccgatgaatagcgaggtgccgatgaatagcgaggtgccgatgaatagcgaggtgccgatgaatagcgaggtgccgatgaatagcgaggtgccgatgaatagctcgctattcatcggcacccaagcctgaccaaagtctcgtattcctgatctgtccttccgatggtgccgatgaata

SEQ ID NO: 599917 - DNA, 357 bp, Homo sapiens
  misc_feature (135)..(135): n is a, c, g, or t
aggtcacgagaaccgctgagggatcgccacgggtgtttcaccagcaggaaaacagctactgagctaggatttacgaagttcgacgctcggacccatcgctattcatcggcaccggggttggtgtaaaataggcgnaggtagaagtagaggttaaggagggtgatggtggctatgatggtgccgatgaatagcgaggtgccgatgaatagcgaggtgccgatgaatagcgaggtgccgatgaatagcgaggtgccgatgaatagcgaggtgccgatgaatagctcgctattcatcggcacccaagcctgaccaaagtctcgtattcctgatctgtccttccgatggtgccgatgaata

SEQ ID NO: 599918 - DNA, 641 bp, Homo sapiens
tgaacctgtacacagacatcatcaacatactcttctgggctcaggtacagctgctggggaacaagcagtgtccctgagcgcatatagtgtgtgcttgctgcgcgaacctggtacacagactcatcgagcatctgccgtgtaacattcctctaaccattcgaattgatgctagctgcaaaaggagagtacccagatattgcagcatgaagaggatgctagcgcacacatcagaggtagagcacagtgcataggcaacctgaaagcactgcccctatgaacacaggaaggtcacaagattgttactatcccaatctcatctttgatcacacaagagcacaaagcataaggaaaagaaggaatagcctacgttctcgcaaaagccagaataactgtaatatgatacgagcttgcaagcaaatatcggattaccaatagagggagaccacaggactagaatggagacacgaagacaattgggaagcccttataaaaatcccaatcaacagaaagaccacaggctcaaaaggtagaataaacagaaaggggagcaaagaataaacccaggataaccatcactaccctagatctaactcaaataatgtatgcgcaatcaggacccagtggatgtgggccaaatccca

SEQ ID NO: 599919 - DNA, 299 bp, Homo sapiens
  misc_feature (18)..(20): n is a, c, g, or t
  misc_feature (25)..(25): n is a, c, g, or t
  misc_feature (27)..(27): n is a, c, g, or t
  misc_feature (30)..(30): n is a, c, g, or t
  misc_feature (32)..(33): n is a, c, g, or t
tcgctattcatcggcacnnnggacngnatngnnagattcatcggcacttcgcgtattcatcggcacccgtattgaattcaagtataatattaagtatgcatggacctctagagctaatggtgccgatgaatagcgaggtgccgatgaatagcgaggtgccgatgaatagcgaggtgccgatgaatagcgaggtgccgatgaatagcgaggtgccgatgaatagctcgctattcatcggcacccaagcctgaccaaagtctcgtattcctgatctgtccttccgatggtgccgatgaata

SEQ ID NO: 599920 - DNA, 301 bp, Homo sapiens
ctcgctattcatcggcacctcgctattcatcggcacttcgctattcatcggcacctcgctattcatcggcaccgggattcggcgagtgctgctgccgggggggctgtaacactcggggggggtgccgatgaatagcgaggtgccgatgaatagcgaggtgccgatgaatagcgaggtgccgatgaatagcgaggtgccgatgaatagcgaggtgccgatgaatagctcgctattcatcggcacccaagcctgaccaaagtctcgtattcctgatctgtccttccgatggtgccgatgaata

SEQ ID NO: 599921 - DNA, 731 bp, Homo sapiens
  misc_feature (72)..(72): n is a, c, g, or t
  misc_feature (79)..(79): n is a, c, g, or t
  misc_feature (82)..(83): n is a, c, g, or t
  misc_feature (92)..(92): n is a, c, g, or t
  misc_feature (156)..(156): n is a, c, g, or t
  misc_feature (166)..(166): n is a, c, g, or t
  misc_feature (168)..(168): n is a, c, g, or t
  misc_feature (195)..(195): n is a, c, g, or t
  misc_feature (197)..(197): n is a, c, g, or t
  misc_feature (211)..(211): n is a, c, g, or t
  misc_feature (227)..(227): n is a, c, g, or t
  misc_feature (287)..(287): n is a, c, g, or t
  misc_feature (317)..(317): n is a, c, g, or t
  misc_feature (322)..(322): n is a, c, g, or t
  misc_feature (324)..(324): n is a, c, g, or t
  misc_feature (328)..(328): n is a, c, g, or t
  misc_feature (363)..(363): n is a, c, g, or t
cctcagaattatttgctttattttttcatacaacttggggaagggaaccatgggagtatgcacatgggatcntaatccnttnngtggtttgnaaaaagaaatgttatccccaacaaagctagtagctaccctctaaagcagaggttagctactagntttgttgggnanaaaagtgtaaacatgcattttgaactntnaaagtttgccaatntgaaaaggggtgtttntgaagaccactatttttacgaacacttaaaaataagtgtttgcagttgtgtatgggcacnatactgtattctttacatttttatggcccnacagntncttnttatccctgcaagtatataaattaaaaccaagtcnctttagaacagctttgaaactagagtttcaaaggtaaaaggatctcatgtttctgaatctgcgtaaagcaagatggctgtgatttgacaggtttaattgctaggttttataggtggatagaaatgaatagtttggagtctttaaaatgttttaaaaaatgtctgcttactatctatatatatgacattattcccaattagttttatatctccaagatatatatatgtatataggtatatacgcctttgtctttttcctagtctatatattctattttagaatttatccataagaattattccatacgggatattttagtcctgatgtattcgccggtacattcacagctattttaccaaataaaaaaa

SEQ ID NO: 599922 - DNA, 1685 bp, Homo sapiens
  misc_feature (606)..(606): n is a, c, g, or t
  misc_feature (1258)..(1258): n is a, c, g, or t
ttttgaatcccccttgggggcgcccgcacaattgtggagtcgtatattgtttgtcgtcccccccgccaacaagtggagtggtatatgattgcgttttgtctatcagcatgcttttgtttgttatcggcctcctggccggccctgttctatatttttttgttgcgtgctcagctggtgggttctgtgttattccccccccccctgttagttagccctcgctttgtgttcctgcggcgacacactattatagtggcgggaagtgtgtttagtagctgttttatgggggaaagatattaatctgccttttgttgccccatcagcgggggtgtggttggtgccgccccaatagcgccgcgtgttattaggattccccctcgctccctccgggtgtgattctcctcacgggtacgctctgcgatggtggctttatatcctcctctttattatggtggtaccactagcgccctttgttatatatagtggagtggggggcagctaccatatccgcccgcccggtgtgtcttaagattgggttatgggcccgccacgacatttaatagcgttgggggggactaaaagacagactcttttaacattaaagagcgnttatacagaagaggggccgcgtacacccacaaagaccccctgtcttttcccgcggtagagctcccccttcggcggtgtgaaagttaatagactgccttcggtcggctgtgttgtgtcgccacacaacggctagattattggagatgtttctctcttatagggtgtttcgacaacaccgtcgttgttatacaagatgtttgtggtgccccccaccaccacggggtatccccgccttgctttagagagaagatgtccgcccgcctcctcgggtagaacagatctgttagaacaccttcggtgttattagcttcccccacaaaaggagagtgatgatcacacagtgttctcttcttttgggaggacacatcttatttgggagaataataaccccctcctggttatagagagagaggtgtaggtttattaaaaaagattttagagacacccccccactttatagttataggggcgcctctagatgagaggcacgtgccccacgcgcacacgtgtataaagatattaaggacggtttctcacagagggcgttcacaaacactaccccacgcttatacccctttataataatatttccccacacacacacatatatatacacgtcgagaaactccctccacacacacaccacacattngtgagacccacacttcgtatgtcaccccctcatatatagagaagagacactataatgtgtgtatagtatatataagtatacacacatgtagaataaacactttctctctcccgcgcactataagccctgtgcgctcaagagattataatacacacacgtgagaactgagcacacacattataccacggcgccacaatattcttaccacacatcacacaccacacactacgtgcactgtattaaccctcacctgtcacacccctaacaccacggcactggctcactaaggagaaaggtttaaaaaaagttaaaaggagaactcggcacaattcttataccccgccctcgtttttcccaaaaacactcacccttctagcatcacccagtattagaggcaccgcctgccccagtgacacatgtttaacca

SEQ ID NO: 599923 - DNA, 278 bp, Homo sapiens
gcccttatcggcactcgctatcatcggcactcgctatcatcggcacattagctctagaggtccatgcatacttaatattatacttgaattcaatacgggtgccgatgaatagcgaggtgccgatgaatagcgaggtgccgatgaatagcgaggtgccgatgaatagcgaggtgccgatgaatagcgaggtgccgatgaatagctcgctattcatcggcacccaagcctgaccaaagtctcgtattcctgatctgtccttccgatggtgccgatgaata

SEQ ID NO: 599924 - DNA, 707 bp, Homo sapiens
  misc_feature (72)..(72): n is a, c, g, or t
  misc_feature (79)..(79): n is a, c, g, or t
  misc_feature (82)..(83): n is a, c, g, or t
  misc_feature (92)..(92): n is a, c, g, or t
  misc_feature (132)..(132): n is a, c, g, or t
  misc_feature (142)..(142): n is a, c, g, or t
  misc_feature (144)..(144): n is a, c, g, or t
  misc_feature (171)..(171): n is a, c, g, or t
  misc_feature (173)..(173): n is a, c, g, or t
  misc_feature (187)..(187): n is a, c, g, or t
  misc_feature (203)..(203): n is a, c, g, or t
  misc_feature (263)..(263): n is a, c, g, or t
  misc_feature (293)..(293): n is a, c, g, or t
  misc_feature (298)..(298): n is a, c, g, or t
  misc_feature (300)..(300): n is a, c, g, or t
  misc_feature (304)..(304): n is a, c, g, or t
  misc_feature (339)..(339): n is a, c, g, or t
cctcagaattatttgctttattttttcatacaacttggggaagggaaccatgggagtatgcacatgggatcntaatccnttnngtggtttgnaaaaagaaatgttaccttttgctttagagggagcactagntttgttgggnanaaaagtgtaaacatgcattttgaactntnaaagtttgccaatntgaaaaggggtgtttntgaagaccactatttttacgaacacttaaaaataagtgtttgcagttgtgtatgggcacnatactgtattctttacatttttatggcccnacagntncttnttatccctgcaagtatataaattaaaaccaagtcnctttagaacagctttgaaactagagtttcaaaggtaaaaggatctcatgtttctgaatctgcgtaaagcaagatggctgtgatttgacaggtttaattgctaggttttataggtggatagaaatgaatagtttggagtctttaaaatgttttaaaaaatgtctgcttactatctatatatatgacattattcccaattagttttatatctccaagatatatatatgtatataggtatatacgcctttgtctttttcctagtctatatattctattttagaatttatccataagaattattccatacgggatattttagtcctgatgtattcgccggtacattcacagctattttaccaaataaaaaaa

SEQ ID NO: 599925 - DNA, 316 bp, Homo sapiens
tagaggttccccgccagtgcttcggcccatgatgggctgctccagcgtgcgcccgagctacccgcagctattacagaccctcctcctagacctgggatttctaataccacacctcgtgtctcccagaccagtaccgggtactggtacgcactctgactgggtggggtattgcctctggcgtcgctcacatagacgtccttgtattcctttacgagtcctcagttttccccactcctgtcacagcgggcatgtgatgctcttgagcggtaccgacgctcgatcttcgtaaatctctagtcagtagctcttttcctgc

SEQ ID NO: 599926 - DNA, 293 bp, Homo sapiens
tcgtgatagctgactctagaggatacacctattcatcgggacccacgagggtgtttttggctgcaattgcagtgaaaacccaatggtgtagaccggcgccgatgaatagcgaggtgccgatgaatagcgaggtgccgatgaatagcgaggtgccgatgaatagcgaggtgccgatgaatagcgaggtgccgatgaatagcgaggtgccgatgaatagctcgctattcatcggcacccaagcctgaccaaagtctcgtattcctgatctgtccttccgatggtgccgatgaata

SEQ ID NO: 599927 - DNA, 268 bp, Homo sapiens
gtcacattggtaacctgttctactaaaaatacaaaataagcgggcgtggtggtgcgtgcctgtaatcccagctactcgggaggctgaggtgccgatgaatagcgaggtgccgatgaatagcgaggtgccgatgaatagcgaggtgccgatgaatagcgaggtgccgatgaatagcgaggtgccgatgaatagctcgctattcatcggcacccaagcctgaccaaagtctcgtattcctgatctgtccttccgatggtgccgatgaata

SEQ ID NO: 599928 - DNA, 942 bp, Homo sapiens
tataaaattattagttataaaaggggagaataggtaggagttagcggtggtaggggcgatgaggtggtggggaggaagtgggggtgggtttggtatgtgtccaaacgtggtcattttatttttacgtgtgttagattagtggggagtaggggtgatgtgagggtgggagttagaattgaggcgcgttaggttagaaagttagaagggttaaggggaggggtgacagtgcggtggcctcatgaagtgcggtggaggcatgaagtggagggcctatgggtattaatgggtgaagtgcagtgtgtgtgagggcgttattgaatacccaatagaggcgcgccataaaattataaaagagaatgatactggcggcgcaagagataacataatgggagccacaaggagacaaggggggcgctatccagaaaattggggggctataagggagaggtgcacatacagcggtgagaagacacggaacaaaagacgggtgtatatctatgagactttataaaaaaaaagggacatataaggtggggatgaagaggctaaagatgcaattttataaaaagagttgtgaaggtgaagcattacaaagagaagatttttggagattaagagtacactaggggggcgcaatgtgagaaagaagtgagcaattaagaggtacaagcacacctggtgataacgagaagaaagcacccaaaaagagagagcagatacatgcacacacgagtggagcaaaaaagtaaacaaggacggcaagacaatcaaaggaaacagagcgcacaaaacgtgggaaacacaccaaaaaacaaaagaaggagctcgcaacacaacaaacacagcgaacaaacgcaataggtaggcacacccgaccggagacaaaaaggaagagaacaaacacggcacaccgcaacaaacaaaccccaccaatagaaccga

SEQ ID NO: 599929 - DNA, 248 bp, Homo sapiens
tcgctattcatcggcaccgacataagctgcacgtcgattcaatcccagtgctgatttctctctttaaggtgccgatgaatagcgaggtgccgatgaatagcgaggtgccgatgaatagcgaggtgccgatgaatagcgaggtgccgatgaatagcgaggtgccgatgaatagctcgctattcatcggcacccaagcctgaccaaagtctcgtattcctgatctgtccttccgatggtgccgatgaata

SEQ ID NO: 599930 - DNA, 240 bp, Homo sapiens
ttcgtgataatccttattgtctaggtaggagagtcttaagttctttcatccttttggcaggtgccgatgaatagcgaggtgccgatgaatagcgaggtgccgatgaatagcgaggtgccgatgaatagcgaggtgccgatgaatagcgaggtgccgatgaatagctcgctattcatcggcacccaagcctgaccaaagtctcgtattcctgatctgtccttccgatggtgccgatgaata

SEQ ID NO: 599931 - DNA, 209 bp, Homo sapiens
  misc_feature (17)..(17): n is a, c, g, or t
  misc_feature (19)..(19): n is a, c, g, or t
  misc_feature (69)..(69): n is a, c, g, or t
  misc_feature (110)..(111): n is a, c, g, or t
tgtatatcccatccctngnaggcggtggttgcattgggctgagattgcacaattgtactctagcctggncaacaggagtgaaactgtctcacaaaaataaaaaaacaaannataaaatttccactcccattttatcgcaaagggttatactgggactccagtaaattcttggaagtttttattccttgtgaagttacggccgaaaacac

SEQ ID NO: 599932 - DNA, 170 bp, Homo sapiens
  misc_feature (93)..(93): n is a, c, g, or t
  misc_feature (147)..(147): n is a, c, g, or t
tggggaagccctgtctctgctagaagtacaaagtcagccgcacatggtggcctatgcctgtgatcccggctgctcggggggctgaggcggganagtcgcctgggcctgggaggcggaggttgcggtgagctgagatcgtgccatttnactccaacctgggcagcaagagg

SEQ ID NO: 599933 - DNA, 164 bp, Homo sapiens
atctcaagtattgcaatagagctgggatggatactgcagacctagagcaagctgtggaggtcatgctgctttgtgcccaggcgctgcaaacgatatgattacgctgggcgagattgcggggcatttgaggggaaaagaccctgtgtgatcttcttatcctcaaa

SEQ ID NO: 599934 - DNA, 730 bp, Homo sapiens
  misc_feature (144)..(144): n is a, c, g, or t
  misc_feature (174)..(174): n is a, c, g, or t
  misc_feature (200)..(200): n is a, c, g, or t
  misc_feature (209)..(209): n is a, c, g, or t
  misc_feature (212)..(212): n is a, c, g, or t
  misc_feature (254)..(254): n is a, c, g, or t
  misc_feature (260)..(260): n is a, c, g, or t
  misc_feature (306)..(306): n is a, c, g, or t
  misc_feature (311)..(311): n is a, c, g, or t
  misc_feature (606)..(606): n is a, c, g, or t
  misc_feature (698)..(698): n is a, c, g, or t
agcggagtcggccgacaccacaccagccggggagccgccgccgccgccgccacctctgagcagccggctgggagcgagagccgacagctagtctgcaagccaccgctgtcgccatggggagccgcgtctcgcgggaagacttcnagtgggtctacaccgaccagccgcacgccnaccggcgccgggagatcctggcaaantatccaganatnaagtccttgatgaaacctgatcccaatttgatatggattatnattatnatggttctcacccaattgggtgcattttacatagtaaaagacttgnactgnaaatgggtcccatatttggggcgctatgcggtttggcgagttggccattaacccactccatggactctgggctattccctggagattggcccacaatggctggcctttgggcaactggcaaagcaatggtgggaatcgcctgggtttgggacatggtttgcgtaatccttccttattggggattccattattcacatttccctttaacgaaggtattcacagtgggatcatcactcgggtaccttgtgagcctgagtggcgtcgaatgtagaatattccttaccgattttgaggngcgtggttctcctggtaccgcgtttcagacaagtttatatggggttattcttcaggcctctcttttatgcctttcgacctctgttcatcaancccaaaccaattacgtatctggaagttatcac

SEQ ID NO: 599935 - DNA, 524 bp, Homo sapiens
aagcagtaaaaacagactcacttccgtagatagacccggtaaggctaggcctttctatgctagctcgtgattatcgagcggctttgcaggatacgctgctctgtgtgtcacgacagaatattgcaatatgtttgtgtgtacatcgcagtctaggaagttactccgggctctgctaaagttatccttaatgtgccccgtacctatagcagttaagtgataatggaaggtcattgggtacaaatattcactgaaatgaaaatggaagttttccaatgtgtatgtatatgttaactaattaccccttttttaatgggaccgagggggtaagggtaggttaaccacttgcatttgttccacaagttaatttttacaataactaaaaatgtttttacattcttaaaatgtattttaccacttcttaaacacacatgaatcttatatggtagtactttatttttcaagagagcgagacaaaaggtggttcagatgttcttaccaagctgtttagcatatctgggaactaa

SEQ ID NO: 599936 - DNA, 512 bp, Homo sapiens
  misc_feature (144)..(144): n is a, c, g, or t
  misc_feature (174)..(174): n is a, c, g, or t
  misc_feature (200)..(200): n is a, c, g, or t
  misc_feature (209)..(209): n is a, c, g, or t
  misc_feature (212)..(212): n is a, c, g, or t
  misc_feature (254)..(254): n is a, c, g, or t
  misc_feature (260)..(260): n is a, c, g, or t
  misc_feature (306)..(306): n is a, c, g, or t
  misc_feature (311)..(311): n is a, c, g, or t
agcggagtcggccgacaccacaccagccggggagccgccgccgccgccgccacctctgagcagccggctgggagcgagagccgacagctagtctgcaagccaccgctgtcgccatggggagccgcgtctcgcgggaagacttcnagtgggtctacaccgaccagccgcacgccnaccggcgccgggagatcctggcaaantatccaganatnaagtccttgatgaaacctgatcccaatttgatatggattatnattatnatggttctcacccaattgggtgcattttacatagtaaaagacttgnactgnaaatggatcatatttagagcctatacatttaacagttacattaaccactcaataactctaactattcataaaattacccacaatactacctttaacaactacaaagcaatataaaatcactaatttaaaatatttactaatcttcctattagaattccatattcaatttcctttaagaaatatcacatagatcatcatcag

SEQ ID NO: 599937 - DNA, 254 bp, Homo sapiens
  misc_feature (3)..(3): n is a, c, g, or t
cgncaagagtccaggatccaacaagacgcagcaagttaactgttaaactggaacagggacgaactggcgttcttgcgggggctgccggcagcccccgcgagacgtctatgtcacgagaaatgacgcaatagcctctgtatttggaatccagaactcagtgagttgcaaaccgcactgacccagtcccccgtggatgtcctctttcggccggacacccccttcatttccctcccagactcgtctggcgcgggctg

SEQ ID NO: 599938 - DNA, 172 bp, Homo sapiens
tgcatttcgcgggaaatctgcttcaagtgtgcacattccataaagaaacacacacatcaattacagaagatgggatgaggaatgatgtatataatcccagccaggcgaaaatacaggtccaatgtatttgctccagaaatactttctgagtgaggtcaagtaggttggaact

SEQ ID NO: 599939 - DNA, 392 bp, Homo sapiens
gacatatcttcaagtgaaagatgtgtgactcttcccatcacttgaatacttagaggccatgatagggttattaattggctggaattcaatactggtgtgtcttaggcaatagagagaactaagatggctggtcagtggagcaatcagaacacacacatttattgattaagatctggtatttgatagcccaacagggtgactgtagtcaaaaataatttaactgtatatttaaaaataactaagtaagcatattgtttgcaacacaaaggataaatgcatgaggtgatagatactccatttatcctgatgtgattattacacattgtatgcctgtttcaaagtatctcatgtgccctataaatgtatacacttactatgtacccacaaaaatt

SEQ ID NO: 599940 - DNA, 1432 bp, Homo sapiens
tttgtttgttttttaactttccataataaaatggagttctcttcaaaaaaaaaaaaaaaaaaaaaaaaaaaaaaaaaaaaaaaaaaaaaaaaaaaaaaaaaaaaaaaaaaaaaaaaacaaacaaaaaaaaaaaaaaaaaaaaaaaaaaaaaaaaaacagaaagcaagagcgaagcgaccacaaaaagaaactagtcaaaagcaagcgaagccacaccacacgaacacagaacagacgacgcaccgagcggacagcgccacatacgaggaccagacgcacaacacacaccagcacacagccacaacgcgcagcacacgaacagaggcaaaaaaacaactagcgacaggcacacaaacaggaaacacgacctacagcagacaaacaacgagagacaaagaaccaactgaaggaaaacagagcagaaaagaaaacaacacaggacaacagacgcgagcgaccggacagacggagagagagagagaggggagcacaaaggtggaaaataaacagaacgaagactaaggacagaggcacgagagaccgacaggacagcgagcaaagccaagagatcacaacacgcagacgagagacacacgcgaagaacaaaaacaaggacaccaacacagacaagaaggccgacagcagaagaagaagaaagcacaaggcagcgaagaggacacaggggccgcagcaacaggagaagaacactaaagaagagcagcgagagcaccaacggccaagaaggaaacacagacagcaagaaaaaagataacagcagacaaacaggcagaagggagaaagaaaaccaaccgagaggagagacacgacgaagacgaagaaagacgagaaccaagggagagagaaacagacagtaagagaccaagaaggagaagaaagaagaggagaagaggaaagaaacgagagaaaacgaaaagacaaccacacaaacgcagcgagagaggagaccaaaaacgcaacacagaagcggacgcaaagacaagcaagcacgggagagagaacacgagaagcgaggacaacacagaggaaaagcaacaacaaggagacgacgaagcggaggaagaggagagggagaaagagggagggaggcacgaaagagaaaccaagagagagagcgaaaacaggacgaaaaaaaggagcaaggaggagagacgagaagcaagaggcggagagagcaaaagcggagaacgagaaaacgaagagaacagagagaacgcagaacaacaaaaaagagaggaacagagaaaagacaaagaggcagaagcagaggaaaaggcgaaagacgcgagagcacgaaataggagcagcacaagaaaaaaacaggagagacaagatggaaaggagaagaacgaggagacagcgcgacgaagaggaggccacggggcgagaagagaacaagaacaccgagaagaag

SEQ ID NO: 599941 - DNA, 250 bp, Homo sapiens
cgacgtattctactgcatcagatgctcttcattcacaggcagaggtcagtaatcctaccagaggtcaatttacccaccactattgttccacaaccatgaactaaaaataatgttcatattttttaatggttagggggaaaaaaaacgaaagaagaataaatttactgatgtgacaattacatggaattcacattccatttgttgggtaaactaaaatttttcttgttgttatgcctctgttttagagatg

SEQ ID NO: 599942 - DNA, 163 bp, Homo sapiens
cgatcgagctcggtaccacgcggggcaacaaaacggttgctccaataatggctatttcatctgcatgctccttcggggataggttcagtatcgtgacgcaggccgatgtgcctgctgcgtggtgtttactctagtccttaacaatagccgtgattagtgccat

SEQ ID NO: 599943 - DNA, 443 bp, Homo sapiens
taaattgagacaagagtctagctctgtcaccctggctggagtgaaatggcataatctcggctccttgcaacctcaccggcctgagttcaagcgattctcatgccttatcctcctgagtaggtgggactacaggtgctagctaccacacctggctaattttttctgtattttttagtagagacagggtttcactatgttggccaagctggtctcaaactcctggcctcaggtgatctgcccgcctcaccctcccaaagtgctgggattacaggcgtgagccaccgtgcccggccaagaccctatcttaaaaaataaaaaataattggaagagggtggtaacttgatacattaagaaaatatatgtgaaagaaacctcagttaatgcccccaaagtttatcctatcacaagagtatgattaaattgagaacctccttttgagttc

SEQ ID NO: 599944 - DNA, 702 bp, Homo sapiens
ccgctacggacgccctgtagcggactgatcaggttggctctgctgcctctggcgccgttgcaacgacggtcgccaggcgcagggcttcgatgcttgcctgggccttgaccaggtccagctcaagcgccttgttgtgctgctgatactccagcagtgacgcttggcgcgattggctgtccagcacggcaacccgtaggcgctcctggagcagggtgcgctcgctgtcgatctggctgagctgctccttgggtttcagctgtagcgcctggtcctggcgagcttgctcctgcagcgtattcatgaccttggttgtcactcgctgctcactcagcacgcgctcgttgtcgcgatgcagttgcgtccgtagcggccggacgctacggactgcccgcctggctcaaacgctggcgccagccgcctcggcctttgcgcgaagcggagatcggtgccagggaatgcaactgcgcgatctgcttttgcgactccaggtagaacgccttgtgcagcccccacatcatcagcagcaggatcagcgagaacggcagcgaggtcagtaccagcgcagaattgagcgagtcgatacttgacggcgaacagaacgcactggtgaccaggcggtcatcgcgcccagaaacagcggcccttggccatcttctccggttgcgctttggagagggtaaagacacaccggccggagtcgcg

SEQ ID NO: 599945 - DNA, 728 bp, Homo sapiens
cgcaaaattaaccccctaataaaattaattagtccactcattcatcgacctccccaccccatccaacatctccgtcagtgatgaacacttcgagctcacctcctatggctgcccatgtcataatcgctcccacaatcaccactaggactatgccataggccatgcactaatcaccaggacgcctcaacccgtctatctcatcaatcgcccacatcaatctgcgagacgtagattatggctgcatcagtcccgctacccttcatctgccaattgcgcgcctcatattagttcttctatctcgcctcttcctacacatctggggcgaaggcgctactattacggatcattatctctatacctcagaatcctcgaaatgtcgtgattactcctcctgccttgcaactatacgcaacagccttcagtaggctaatgtcctcccagtgaggccgaatatcattctgatgggccgcaggtaatatatcaaacttactatctcgtcattgtcgcactatacttagtttgacaagacctaagatctcgatgaaatctggagagaaggcgtacctcaagtatagcacgtcccacccgtcacaccgattcctttggctcttacacttacagtctctatccctatcatttgtggcacgccctggtgcaggcagctccagcgtcctaattgctttgcgacctgaaaacgggatcatactctaggccgcccgtattgagtc

SEQ ID NO: 599946 - DNA, 87 bp, Homo sapiens
ctatagctgaagagaaaagggaagctgccaatttaagacacaaattattagatttaacacaaaagatggcaatgctgcaagaggaac

SEQ ID NO: 599947 - DNA, 407 bp, Homo sapiens
caacgattggtctcagcttcccaagtagcttggatcacaggcgcccgccaccacgccaggctaattttttttaatatatatttttagtagagacgggtttcaccatgtttttcagcctagtctgaagctcctaggataaagcgatctgcttgctacgggatcccaaagtgctaggattacaggtgtgagccactgtgcccttccatgatttcttttatactaacgatttttttttttttttttttttgggaaacccggagtttaattattttccaaatcagtctctctgaaaacccagggatggaggttttaagggataactgggtgagtagagggccagtaagtcgggattgctgatgggccggttccaagataaaatcttagggagctgaagttgtcctcttgag

SEQ ID NO: 599948 - DNA, 243 bp, Homo sapiens
tgtttcaagtgaatggataagttaaagggaggaagaagggggaaggggctaagaatatgaggaaacagaagggatctgaagtgggcatagacaaggtagagccgagagacaaggtagagccaagagacaaggtagagccgagagacaaggtagaggcaagagacaaggtagagccgagagacaaggtagagcccgagagaccaaggtagagccgagagacaaggtagagccgagagacaaggt

SEQ ID NO: 599949 - DNA, 1142 bp, Homo sapiens
tctcctgtccctcgggcagttgttggcttttttgttcacctttctcgttctcgtcttctctcactttccctttcgcatgcattctggtcttttccctccgtgtgctcttcttccttcttgtagtttctgtccttcgtcctacttttctttgctccgtgtcccatgcttgtatcggtcatgtgtgccttttctttcttagcgttcttctatagtctctattgggctggttcccttgaatgctttcagaattgagtccatttgctacgccgcttatccacacttctgattgggtcctataagtacctggcttgtactcaacatagttcgctggcaatctgtcattgctgcttactctaacacttgtgctacactctcacagtgcaagatcccaggaatcagttccaagaggagcagtcatccctttgctcttaatgatcaggaatgatgctgtatttagtatactttttgcttgacccaggcacaagtggcttagcttaagtaaacttggctttgctcagatccctgatccttccagctggtctgctctgagtggcttatcccgcatgagcaggagcgtgctggccctgagtatctgaactttctgagtaacaatgagacacgttacagaacctatgttcaggttgcgggtgagctgccctctgccatatcctagccagagatgcacattcctcggtccagtctcagccatacagtaccaatagtgagttttgagtgtgccagggtaaaggctttcagttcagcctcagttattttagacaatctcgccatctttaatttcttagcttcctgttctaatataatgcacggctttaccatttcctgtcagaaataaaccaaggctctaaatagatgatttcccttcggtaactcacctagagccatcaggttgctcattccgtttcaccatgatacttctcacgattcagtttctatgagtgggatcaccgtgatttttttaacaatatatttctgacgggaatgggtgggtagtgtctggtgtaaagaggctgtaaatgtggattgtatgagccaatatatttgtgattttttaaaagaaagtttagaaaggaatatctgttctgaacgccacttaagtcattgtttttagtataaaacaagtg

SEQ ID NO: 599950 - DNA, 262 bp, Homo sapiens
tcgctattcatcggcacctcgctattcatcggcacccggcaagaagatggcactcatatatgacgatgtacccagctatcacgccgatggctaacaggagaaggtgtcatctgtgtgggtgccgatgaatagcgaggtgccgatgaatagcgaggtgccgatgaatagcgaggtgccgatgaatagctcgctattcatcggcacccaagcctgaccaaagtctcgtattcctgatctgtccttccgatggtgccgatgaata

SEQ ID NO: 599951 - DNA, 417 bp, Homo sapiens
cgcttcttaaaacaaacagaatcttgtcctgttgcacagggtggggtacaatggcgccatctttgctcactgcaacttctgcctcacgggtccaagcgattgtcctccctcagcctcccaggtagctgggactacaccacactgggactacaccagctgccaccatgcctagctaaatttttggatttttagtattgacagcgtttcactgtattggccaggatggtcttgatctcttcaccttgtgatccccttgccttggcctccaaattttctggaattacagtccaaagccaagatccatatttattaaatgaaaaaaaatttcaaaggtactctgcttggtacaataatcaaatgtataaactgaggaataaaacataaccatgaaacctacttataactgcaaaaaaaaaa

SEQ ID NO: 599952 - DNA, 119 bp, Homo sapiens
tcacccgcactctattcttggatgcttaccaaaccagtcaccaagctttcttcttagaccagatctgaaatcccatctctcaggaagccttaacttgaaagtcagcggcgttggatagt

SEQ ID NO: 599953 - DNA, 244 bp, Homo sapiens
gcgtcgaccaaaaatacaaaaattagttgggcatggtggagcatgcctgtaatcccagctactcgggaggctgaggcaggagaatcgcttgcgaggttgcagtgagccaagattgtgccactgcattccagcctaggtaacagagcgagtctccatctcaaagaaataaaaggaaggaggaaggctccaacagagaggctccagaaacacttttgaaagtggcttttggccatgcacggtggct

SEQ ID NO: 599954 - DNA, 212 bp, Homo sapiens
  misc_feature (52)..(52): n is a, c, g, or t
cgttatcggcacagactgccctctaaggatctcgttaaggattaaagtggantcattccaattacagggtgccgatgaatagcgaggtgccgatgaatagcgaggtgccgatgaatagcgaggtgccgatgaatagctcgctattcatcggcacccaagcctgaccaaagtctcgtattcctgatctgtccttccgatggtgccgatgaata

SEQ ID NO: 599955 - DNA, 490 bp, Homo sapiens
ttgagtagtcaagaccatatagtgtatagctgctttaccatgtcccatagtatacccagtgaaacatgcctgacaatgacctaaccgcttctttcatactcacattgaatatccacgtgttttccttgatttggggggagtcgttatactggcgcaatccagaaaaagcaaagtattcttcaacatactggtttactacaccttcctctcctacggtgcttacggattcagctcagtttccttccttccttccttctttctttccttccttccttcgttccattctatcgagcttgctgtcttgctaatgtaggccacggtcatctcttttctggataacttaccatatttccttattggcttcctgtggagctagttcacttggccaatgactccttatacggtagctggagtaattgtctatgaataaaatcgactctttagaatgactcatggcatgatcatgagacatgtcgttatagggtcggcc

SEQ ID NO: 599956 - DNA, 314 bp, Homo sapiens
cgaagtcttgggaagggagttggagtgtgtggttcggatgaacttctttctagatcactcattaaaaggcacattcatgctaagggaatggatagtctagtttgaccctgagtgccacagtcaagttttaggggacaggctagaggcaaaggaacaaaaagggagacgaggtgccgatgaatagcgaggtgccgatgaatagcgaggtgccgatgaatagcgaggtgccgatgaatagctcgctattcatcggcacccaagcctgaccaaagtctcgtattcctgatctgtccttccgatggtgccgatgaata

SEQ ID NO: 599957 - DNA, 228 bp, Homo sapiens
gcgttgtggactgagagatgggctggtgtagtacgagggtctaggtggtgtgatctggagagtatgtaatgggcgatggtaggtgcggtattcgtcgaaagtagatggggctggttgtaattatgcctcagagggatagtacacagaaggggtaggctatgtgttttgtcagggggttgagaatgagtgtgaggcgtattataccatagccgcctagttttaagagta

SEQ ID NO: 599958 - DNA, 301 bp, Homo sapiens
ctcgctattcatcggcacctcgctattcatcggcacttcgctattcatcggcaccctttgcaggttagggatgctagctagaaggtcatcaatcaagctattagtgggagtagagtttgaggtgccgatgaatagcgaggtgccgatgaatagcgaggtgccgatgaatagcgaggtgccgatgaatagcgaggtgccgatgaatagcgaggtgccgatgaatagctcgctattcatcggcacccaagcctgaccaaagtctcgtattcctgatctgtccttccgatggtgccgatgaata

SEQ ID NO: 599959 - DNA, 515 bp, Homo sapiens
  misc_feature (97)..(97): n is a, c, g, or t
ctgggtcatctagaggatcccattgatagcggtgaggcggagtttctgcaggggcaacgtgacacatgtccagagatgaggtagaactgccgagttnaggtcatagctgaggtttcttaggaatagaggtgctggcacaggaagtgcaatgtcctggatcaaatgttggaaggagcatgtggcatattctggcaagtgatactctccacttccacatgctgagcattcttgacagcatcaaaatattggctaaagttgagccctcttctgttcatattctacttctagctttctcaattctttgtaaatatctggattctctttttcatagagtcgtagaatacgttcaaaggtttcacgcagctttttacgcttgtctttcagtactttctcatttaattgtggctgttgcactgggttaaactccatttcatccaatttctccatgtctcggattatctgttttggatccttcatctttaaaactgcagctcgaaccatcatgcgctgttttt

SEQ ID NO: 599960 - DNA, 234 bp, Homo sapiens
cgtccacccgaagctggcgctcggtcgaagaggacgaccatccccgatagaggaggacggtcttcggtcaagggtgccgatgatagcgaggtgccgatgaatagcgaggtgccgatgaatagcgaggtgccgatgaatagcgaggtgccgatgaatagctcgctattcatcggcacccaagcctgaccaaagtctcgtattcctgatctgtccttccgatggtgccgatgaata

SEQ ID NO: 599961 - DNA, 226 bp, Homo sapiens
ctattcatcggcgcccccccccgagtgttacagcccccccggcagcagcgctcgccgaatcccggtgccgatgaatagcgaggtgccgatgaatagcgaggtgccgatgaatagcgaggtgccgatgaatagcgaggtgccgatgaatagctcgctattcatcggcacccaagcctgaccaaagtctcgtattcctgatctgtccttccgatggtgccgatgaata

SEQ ID NO: 599962 - DNA, 568 bp, Homo sapiens
aaaggaaggaaatagctgggtgcctaccacatgtgttcactggagtgacatttttaatttcctacaataagtggttttgttttttgtgtatgtgcaatttggttaactggtgcaagaggctgagcttttggcctgtcttggctttcaacatccttcctcactaagcttaatcatttctagcttttgatttaaagtgtgagacatgcataacacacagaggccattgtagggttattaattgatctaatttcaatattgttgtgtctcaggcaataaaaaggactgaggagagggagagagatgggaacagctaagtggtggagcaatcagaacatacatatttattaagtatgctgtgatatgggcacagttcatggcaccccaaaacaattataatagtaacaccaaagatcacacatcaccgtagcagatagaataataatgaaaaagcttgaaatattgtgagaaatacctaaatgagacatagagctacaaagtgggcacatgctgttggaaaagtggtaccaatagacttcctcaacagaattgccacaaatccttagattgt

SEQ ID NO: 599963 - DNA, 221 bp, Homo sapiens
accgctattcatcggcactcgttattcatcggcaccctgggttggtatctgacagcgaggtgccgatgaatagcgaggtgccgatgaatagcgaggtgccgatgaatagcgaggtgccgatgaatagcgaggtgccgatgaatagctcgctattcatcggcacccaagcctgaccaaagtctcgtattcctgatctgtccttccgatggtgccgatgaata

SEQ ID NO: 599964 - DNA, 271 bp, Homo sapiens
  misc_feature (13)..(13): n is a, c, g, or t
tcgctattcatcnggcacctcaccctgtggactgactctctcaccaacaggtgccgatgaatagcgaggtgccgatgaatagcgaggtgccgatgaatagcgaagcgaggtgccgatgaatagcgaggtgccgatgaatagcgaggtgccgatgaatagcgaggtgccgatgaatagcgaggtgccgatgaatagctcgctattcatcggcacccaagcctgaccaaagtctcgtattcctgatctgtccttccgatggtgccgatgaata

SEQ ID NO: 599965 - DNA, 207 bp, Homo sapiens
tagcaggcccatgtataacgagtaatattggagttcagcacggtgctcacgatgatcgacggaaccttgtacagaggaggcatgcaccgctagtggtgaatacacgtcgaccaggctccatcttaacgatattgggaggtcagcacggtgctcaccgtgtctgacggaacttgtccagggaggcatgcaccgcagtggtgaatacac

SEQ ID NO: 599966 - DNA, 193 bp, Homo sapiens
tgctgcttctcccctcgagtccaggacaggactgttgagaaagcagccatgagcagcctgttgggctctttttaaagccgcccaactccaccccgcagcatgagaatctgagaaaaggatagaaaacagtcatttccaggcaggcgtggtcgctcatgcctgtagtcccagcactttggaagtccaaggctga

SEQ ID NO: 599967 - DNA, 157 bp, Homo sapiens
ggagttcaaggctgcagtgaactatggtcaccattacactttagcctgtgtgacagagcgagacccatctcaaaaaaaataaacagcgtttatttaaaaaaaccacaaaaacacgccaggtatgggggcctcgcattggtaatactaacattttggg

SEQ ID NO: 599968 - DNA, 566 bp, Homo sapiens
catgccaataacctcctctcataaaaggaaaaccaaatgcatgagttcagcactggcgactggaatcacatatttgcatgggaaaaaaacaagcgtacgactcgtttgttatagatacaagttcgcaatttgtagtggccatgcaggtccagcgaagcgaagcttccgactccttcacggaagctacccgggaagagatgagggacttgcaggactctcttgttaacgcaaacggcgagatcttcgaacgaccaggcgattatggtcttaccgtgtgcgaggaggtgccttcttgggccctcgagtgaagatccgacaccatcaatgattcatcaaacccgccgtttggcgggtttttttatgggtcgaaatcctccctacacatccatgtgcagcatcccctcctaccaggccttcgcaacgtctggcccaactttcaggagagtcacgatgcaacacgcaatcaaaaaagctacaagccaaccagagatgctggatggcttcgaccagaccaaactcccgatcgatcgcgattccattcgcggaggttatatggctgggtaccg

SEQ ID NO: 599969 - DNA, 470 bp, Homo sapiens
ctcgcccacgggtttctacgctcactttggtagtttgctctgcccccgatgagtcttttagtagtgatgtcgggtgtcaatttgagatatgtctagctatctgatgtggtgcatttagtgctataaatttacctcttaacactgctttagttgcctcccagagattctggtacattgtctctttgttctcatgggtttcaaagagcttcttgatttctgccttaattttattatttacccagaagtcactcaggagcacgttgttcaatatccatgtagttgtgtggttttgagtgagtttcttaatcttgagttctaatttgattgcactgtggtctgagagattgttatgctttccgttattttgcatttgctgaggagtgttttaattctactcttgtgatccattttagagtgtcatatgccacttagaataatatatagtctgtggttccgtgttggagagtctg

SEQ ID NO: 599970 - DNA, 902 bp, Homo sapiens
catggtggctcacatatgtaatcccagcactttgggaggccaaggtgggcagatcatttgaggtcaagagttctagaccagtctggccaacatactgaaaccctgtctctactaaaaatacaaaaattagccaggtgtgatggtaggcacctgtaatcccagctacttgggaggctgatgcaggagaactgcttgaacccaggaggtggaggtcgcagtgagtcacgattgcaccactgcactccagcctgggagacaaaatgaggctccatctaaaaaaaaaaaaaaaaatttcacgcttgaaaagactgctttgggccaggccccggtggctcaaactttagaaatcccagcatttggggaggccaaggccggcgaatcacttgaggtccggagttcaaaaccagcctggcaacatggtgaaaccggtctctactaaaaatacaaaaactggctgtgtgcaaatggtcacgcctgtattccagcactttcagagggccgaggtgggcggacccatgatgtcagagatcaagtgatctcagggttcacatcttcaaaatgctgctgaactaaggtagatcttacttgccgggaaagccgttacttttgaaggacattttgaacatgacgagttcatattcacgttggtaatactcacttttcggaagagaatggagaaacagaagttcaaggccttagagcggttgggattcggtatacttcacagggcgggagggccaaaatttaccgcacttgtgcccaggcgaatttcggcaagtgtcaccggcgacatgtggcgttgaaacacataggggggacacacacgtgacggagagccacgggtcgagactcggaggtgttaacaaaaagtcacttgcggcctgacgcaatgagagccatga

SEQ ID NO: 599971 - DNA, 235 bp, Homo sapiens
  misc_feature (200)..(200): n is a, c, g, or t
  misc_feature (229)..(229): n is a, c, g, or t
ggatccctattccaaaggttcccggtccccgccccctttgtgacctcatacaaagacttggctaatactgcaaagtttgggatgcacagtctacaaaaccccacatcccctgagaattctctcgcctgccttaggacttaggctctggtagattgcaaatgacctgctttctttctgttcccgggtggcatcgacccgtnggagagtaaatcccaagtaaggtacctgncgttgg

SEQ ID NO: 599972 - DNA, 1394 bp, Homo sapiens
ggtgcggagcgttttgctaagccgaaggtgcacgagtattagttgcaccagatgtgcttttccactcatcgcaccggagtgcgggagacgggcacgtgaggcagctgctgggtcgagtaccctcagacactaaatgcatctccctgtagatggctgttagcatccgatgtcactggtgctaggcatcaactgactggttcctcgcgtagcctagtgagttttcggtacgctcgatgagacgagtagtaaggtagtgtcgaacgtgatgctgtcctcacagctgatgcggtgggtgatagacgctcttgctaaacttacattgactgatagcaacggacttgcaacaatcaggtcctaaagttcatggagctgttgcagcttcggcctacatcccagtgccttgctgagtattcatatcactcctaagctttaccatggacttaggaagatccgtctcgacggcgatcccttgtctagagagcgccgatccagtcaatctgggggcctccaccagaggaagggaatatcgcatggactcctaattggtcgtcggctcctctgtggactgtgtttgtagaacaggaaccagagacgttggtgcggaattgttgttccccctcgcataggccggtgctgaagttcgaataccacaaagtgcccggactacttggaggaattgaccgaaggtatgcaaacaacgggtcgagcctatcttacttgtagggcgtctttagccctcttatccctagggaggttcagataaataagtaagggccaaatgggtcctttgatggttggccccttggttcgacgtaagatgaatcgcttccaattcacatttggccttgtctcaaaattgggtggcttccctccggcacacttccttattgcccaatttcaaagggaacatgagagcgggaacgggaagccttcgttgaacggcctggtagtttgcggctccaaatgctcccaaaatcccggcttggaattaattcgctccaggggcttatggataggcgccctaattttaaagaacggcgtatgttgccttgggccccttttttggggaggggaccaagttccccccaccaaagggccctccaaaaagtggtattagtgcacccccttggaaaagcccgcaattaatcgtagacggcgggcactatggttaattagatgtcccgacgccgcttgtgctgagggcgataaacacatgcaaggcggatatattgcagcacccggttggtggggccacacggtttgggtcctctcgtcaaaagtcgctatggtcataattgccagatgcgtcacccacagaggtttttatcttcttttgtgcgtcacgaggaaacggcggtggtgctacgaaactttgccctgtggtgttctacaca

SEQ ID NO: 599973 - DNA, 324 bp, Homo sapiens
  misc_feature (45)..(45): n is a, c, g, or t
  misc_feature (47)..(47): n is a, c, g, or t
  misc_feature (62)..(62): n is a, c, g, or t
  misc_feature (64)..(64): n is a, c, g, or t
  misc_feature (73)..(73): n is a, c, g, or t
  misc_feature (76)..(76): n is a, c, g, or t
  misc_feature (78)..(78): n is a, c, g, or t
  misc_feature (83)..(83): n is a, c, g, or t
  misc_feature (87)..(87): n is a, c, g, or t
  misc_feature (91)..(93): n is a, c, g, or t
  misc_feature (97)..(97): n is a, c, g, or t
  misc_feature (102)..(102): n is a, c, g, or t
  misc_feature (112)..(114): n is a, c, g, or t
  misc_feature (122)..(122): n is a, c, g, or t
  misc_feature (138)..(138): n is a, c, g, or t
  misc_feature (223)..(223): n is a, c, g, or t
  misc_feature (227)..(227): n is a, c, g, or t
  misc_feature (233)..(233): n is a, c, g, or t
  misc_feature (236)..(236): n is a, c, g, or t
  misc_feature (241)..(241): n is a, c, g, or t
  misc_feature (301)..(301): n is a, c, g, or t
ctcggacgcgtgcctagagtcctggggagcttctgtccacctgtncngcagaggagtcgttncnagcccggcngcncnaggangggngagnnnaacnagaanaacaaaaaannnccaaaacnggcaagaaacgaaagnagcgggaaagaaaaggcagcaggagccagccagccaagccagcgaagccaacgcccaagagccaacagccaaagaaacacgcaanaaanaacaancanccaanaaccaaaagaaagccaaaaacaagaaagaagccgccgccacccaaagcgacgaagccgcnagccccgaggcccagcagcacaa

SEQ ID NO: 599974 - DNA, 852 bp, Homo sapiens
tggtaaaaacggggggtggggctcctgctgtggctgaggcgggtcttgaattcctaggctcaggtgatccttccgcctctgttctcccaaatggctggggattacaggcatgagtcaccatgctgggccagcaacaatttgggtgtgtttggagaattaacctgagccatttcctggaagctacctaacagggccatcccacagtggggaaatatcttcagcgtatctaccggctaagggaaaaatcggggggcagaaaaatcacctttattccagaagcagcaatttagaacgacgtagctaaggagttcggtcaaggggagatgttcacccatagggaatttccctattaaaatggagcatgaaaagggggatatcccttctggacttccacgattgtatagggctatcagtggcaccaatattttacacctgggaaaagggccatccaggggatcagttacatggctccccggggcagaatccaattatcggagcacatgattcctaagctatcgggattgggacatctgggtcctggccagcaactggtttggacatctcctcaaaactccaatccaaagccatggcctgaaagacaagcttcctatgtcagagactaagcccagagggtttccatcaagcccgtgatcattagggtcccccaaggtccccggagagccggactgcggctgggaccccgggaatttcgaatctgaacatctcaggtcgggccagataggtgtcccagaattccctggtcacgggctcctgtgcacctcccacgggggcacaacgtctggtgcgccatgccggggggcctccttcgagagaaacccgcctcccaaaatg

SEQ ID NO: 599975 - DNA, 110 bp, Homo sapiens
aaaagtttaacaagcacattatggctgagcatggtggctcacacctgtaatctcagcactttgggaggccggatcaactgagttcaggaatttgaggggaaaagaacctg

SEQ ID NO: 599976 - DNA, 140 bp, Homo sapiens
agaataataatagagtccaccaagatcaccatatgagccacaaccaccctgcataggaatactcatatccggagccaccctgtagatacataagccatcatgcattctagatgaggctccatagtatctaattgcaagag

SEQ ID NO: 599977 - DNA, 102 bp, Homo sapiens
tgaggaggatgcacgcactcctctctcggagccctcagacattccagtgtgcagacaaatggagtgagtgttgttgtgtgtgccacgtgtgttgagtgcgcg

SEQ ID NO: 599978 - DNA, 374 bp, Homo sapiens
tccattgtgaaaggaaaatgttaggagtatggtttttaaacctgggcttccttttaaacttttttttttaaaccccgttatttcccctgatttgctagcttcaaagaaaagatccgaatctgtgcccagcgctaaagggtcagtgttagcatggcttgtgctggccggtgtgccatattcttgttggaaatgaaccgtagccccaaagcccctttttccttgtcagttttggcccaaagatgtcccccttcctagttatttgtccccccataattggtgttgattggaaacttttttttaaatggggcaaaactgctggggtgtctttttccctgtaacttaagcatagtaatataaataaagtaatagttgga

SEQ ID NO: 599979 - DNA, 389 bp, Homo sapiens
  misc_feature (382)..(382): n is a, c, g, or t
tcagccctgtgacatccataggaacccaaccttcacctgcatgtttcccatgggtatttaaagagttacccttaaataaacgtagtcaagaatgtaaatgaacccccatttttattcccaaaaatagcaggctggccaggcacagtggctcatgccgataatccctgtaatcactttgggaggccaagatcgggggattgcttgaccctaggagttcaagaccagcctgggcaacatggtgagaccctgtctctacaaatttttttctttttttaattagccaggcatggtggtggacccctgtacatccagctactcaggaggctaaggcaggaggatcacttaagcccaggaggtcaaggttacagtgaacagtgtttgngccattg

SEQ ID NO: 599980 - DNA, 333 bp, Homo sapiens
tatcaatgggtggagaagcacgttgtctgcaaagtcatcccacacagcatcgaaaaggagacattagccgaagtgcattgcttacctgaagctgctggcatagaaggctcaagcacagtcagttatgttaatatttctatcccagtttagacagctagaaacagttaactgactacagtaagactaggtctatttaccaagtctttctgtgttggtgtctacggaacttattgtttccccttccttaaattgattagtttgtttcagtattgtgagagaacgatttctctatcggccagtctgcatgtttcgcatccttcttgctctgccttt

SEQ ID NO: 599981 - DNA, 233 bp, Homo sapiens
ttttatttttaaaaaattttccttttttttttggattttaaacccggtggttccctcggccaagcccgcccccccaaaggggaaaaaaattaagaaaggggcctttttttgaaaagaaaattttggcttaaaagccaagggccgaaaaaaatttggaggggggtggttttggttcttccaaccgggacctttaaaaaaatttcccccaaaaaaggtttgtttttcccctttta

SEQ ID NO: 599982 - DNA, 903 bp, Homo sapiens
accatgctggtcgtcgtcggtggacgccggaggcgtcggtgaggtagatgaatctggagcagctgtctcatctggttcatcacttgtgaattggaccgtgtggatcacatcgaaaatttgagtgcctttatacggagtaatacatgcagaaaattggtaaatgcacgacattttatagctaaaatggattatgagcaatagttaacataatgatgggaaaaatctttaatgcatgcattagtttcacagaaggcaaagtacagcatgtagatggggaggacgatcaggatggtgagaacttcggtgcagatgtggaggagtatgaggttgcggggacatgcgggggatttgatcaccgaagaagctgtggagcttctacaaactattaatgcatgagctttctgttgacattggcactcagacttctcagggactaccgtagaggcccgagacgttacggccactggagagaactggaatgctaattcctcagcgacacggcgggtcgctcgaatgcggtgtctctacggacctctgggttaaatatcgcctgaggaattactggatattatccggtcagctaggtcaagggctatttctccaggcgctccatggctgagccaaggcgaatgaagagaacccaaggtactgccagcatcactggtggaaaactggtgcaggaggcagctcgtgataaacgcgcacaagcggggccaagacggctgtggggcgaagcatacaagacatccggggaggccttggagggaccaaacacgctaagctgcgcgccgtggcgtcaacggacacaggcgcccttccaatccgcccgcggggccccaaggcccccggaccctcggacacggccgcggctcgggcaccccaagcaacggctgcgggcacaaa

SEQ ID NO: 599983 - DNA, 1161 bp, Homo sapiens
gctgataggctgttgagttgcctgagtgttttggcaccgccattctatatgacctggcaatccatgcatctgtccgagctgtcggttactgggagttgtacaacagatagtaagagctgctcagcgattatttgccacgagaaatagaaacacttctatagatgacatgatgatatggatagaacagatggcctgtaccgtattgaggagaaggaaggtgacagcggctggtctcattcctggtacaaatctcttgttgtctgcacactatggagctgctgatgttcagttttagtacggctatatgccgacatctcagtaccaaggtggtcagactcttccaagtcgacatagccgacttaggaatctcgactatcagaatgaaagtgctcgtttggtggcagccacagttaccatactctctgatttaccatccctttgttcacccgctggatgtatgacaatcctgcccacaattctgtgtcttaatgtgcaagaatattgaaagacacagcaataaagtctgcagataatcaggttcctccaccagtcagtgcagctcttcaagggattaaaagtattgtgacactttcaatggccaaaactgaggctggcgttcaaaaaacagtggacagctctgattcgtaacacgcttgcttgcatcctggaatattctcaacagaagaatcctgtagctaaacctgatgaaataagcatggaaacagcaattgcactcttccgggggctgctagtaatgaatactagggaacccagtcatttccggaaagtggcgcagtggacagaatttaaagaggcgttaattcctggcgacaccaggggttcaaaccccagttgccacgcgattccctcgaagttcacattcacaggtgcatgtgaacctaaatgctaaagtcgccaagagtgtcaaccaacacgtgcgggcaaacaaacacccgcggcatatagaacatgcggcgagaagagaacgatcaacatgggaggtgtgctagcaaaaagcagcaaacgtgcctaagccagaagaaagagcagagtatccacacagcacgaagatcgcaatgatggcggcgcgaatagatcgcgggtggacggtccctccctctgttttctctccgtgctcagacgaagaagaaaagagaggac

SEQ ID NO: 599984 - DNA, 148 bp, Homo sapiens
gaggtgggattactggagggggtagcaaggttccacagaaaaaagtaaaatgggctgtgatgaagatgatgacgatgatgatgaagaggatgatgatgaagatgatgatgatgatgattttgatgatgaggaagctgaagaaaaagcg

SEQ ID NO: 599985 - DNA, 755 bp, Homo sapiens
tgtggtggctcatgcctgtaatcccagcactttgggaggccgaggcgggtggatcacgaggtcaggagttcgagaccagcctgaccaacgtggtgaaaccctgtctctactaaaaatacaaaaattagctgggcgtggttacaggcacctgtagtgccagctactcaggaggctgaggcaggaggattgcttgaacccgggatgtggaggttgcagtgagccgagatcagcactcattgcactccagcctgggcaatagagcgagacactgtctcacaaaatcaataaataaacaaataacataaataaattccaccagggtagtctcgctataaggacacacctactggcattaccggaccacttacctggattcacaacatgagcaggtttcgaccagctcgagctcccagatcaccacacacttacgtcccccacgtcctatactgcccttacctgtacgcagaccatccgacgcacacctcacaccacgccacacagctgggcacacctcgtcaaagcaccctgtccccgaccagcgttcccccttctagatgcttcttaccaccagcacagtagcagcaacagcacatcgtcaccaaatcgcaacacttcaaccgaccaacgcagccgcgcacaccgcccccccccctcctccaccccacacaaccccgcgcatcacaccacacgctccaccggcccacccccccaccaccacgaaccaccccccccaccccccaccccccccccacacc

SEQ ID NO: 599986 - DNA, 436 bp, Homo sapiens
ggggctttccgggggtgacgacctacgcagactagaacatgcctgtggtaaaggatcttgttcatgcctctccagaggaggagacgaggaagcacaagaagaaacacctggtgcagagccccaattcctactttatggatgaggactgcccatgatgctatgaaatcaccacgggctttagccatgcacaaacggtagttatgtgtgttggctgctgcactgtgcagtgccagactacaggacgaaaagcaaggcttacagaaggatgtttcttcaggaggaagctagactaatagcactctaagtcaagatgagtgggaaactatatcagtaatcacattatggaaagaatacattcaatcgttggtaagatgtcgcccgccacggactaactggctctggacttgagcgcttatgcatgcttcgctcgggcttg

SEQ ID NO: 599987 - DNA, 447 bp, Homo sapiens
ctgtcggtcgtctctagcaggatcccccccgcaaattatgggatgaatcctgtctcctttgaccttttttatagctcatgaatccatcccagttgcctccccagctctgtcccacacctgctgcacacgcttagtgccttgattttccttacctcagtctccttttctattaatccctcttttgcgtggctggctgagtccactttctcaaacagcgaacctcactatgccactttgtgaatctctgtcggctcacctttgccatttcttaatattgcattctccaaattgctaatctctatccagtctcttgaactagacttggcacatggtgattccgctcagaaagtgctcttcacacttctacctgcttgactaaccccagattatctttcacgactttaatctgctcttgtgtcttatagaagcccccattattcgggtggc

SEQ ID NO: 599988 - DNA, 729 bp, Homo sapiens
  misc_feature (5)..(5): n is a, c, g, or t
  misc_feature (62)..(62): n is a, c, g, or t
  misc_feature (114)..(114): n is a, c, g, or t
  misc_feature (140)..(140): n is a, c, g, or t
  misc_feature (146)..(146): n is a, c, g, or t
  misc_feature (149)..(149): n is a, c, g, or t
  misc_feature (170)..(170): n is a, c, g, or t
  misc_feature (254)..(254): n is a, c, g, or t
  misc_feature (277)..(277): n is a, c, g, or t
  misc_feature (279)..(279): n is a, c, g, or t
  misc_feature (293)..(293): n is a, c, g, or t
  misc_feature (298)..(298): n is a, c, g, or t
  misc_feature (319)..(319): n is a, c, g, or t
  misc_feature (335)..(335): n is a, c, g, or t
  misc_feature (341)..(341): n is a, c, g, or t
  misc_feature (416)..(416): n is a, c, g, or t
  misc_feature (421)..(421): n is a, c, g, or t
  misc_feature (499)..(499): n is a, c, g, or t
  misc_feature (601)..(601): n is a, c, g, or t
  misc_feature (665)..(665): n is a, c, g, or t
  misc_feature (715)..(715): n is a, c, g, or t
gactngtagaacaacaggtacagaactgcaagggttcatccccagcgccgtgatcaccaganccacaagctctgggggagtgacatcatagactagattgaacaaccgtaggantgcgtggttttgccagttagccagcncaacangtnctccccgcttacattgcagancatcagggtcatctagctcattagagaaaaaggcatcagtttgcacacgctcacagaacttgtatgttttacagcaaaccagcnctggtacattatgggctcgagcnancagggctaactgtnctgtncctacccgtgaaaacacaganccgttggccaagagtncatgancccccaatagcaccttggaaacctctgggagcacataggaggctgcaggaatcagcaggtaggaggctgggacancagcntggactagagaacgtagtggggtgcctgccttccagcgatgggcggctgtgcaccactaccacccgaaaccgccggcnctgtgtgcaagcgtcctgaagaattggtgagagcagagatgagcatccatataccaggatcacatctgcattactgagctgctggtaagcgaagcgtgagantgcctgaccggctagcacaatcttcttttgcacataccgatcaatggctgcccgaagttctganttggcctcctcttcccgcttggaactgcccacactggtgaattccttgtnaaggaacttgatgg

SEQ ID NO: 599989 - DNA, 631 bp, Homo sapiens
  misc_feature (52)..(52): n is a, c, g, or t
  misc_feature (54)..(56): n is a, c, g, or t
  misc_feature (63)..(65): n is a, c, g, or t
  misc_feature (67)..(68): n is a, c, g, or t
  misc_feature (330)..(330): n is a, c, g, or t
  misc_feature (344)..(344): n is a, c, g, or t
  misc_feature (373)..(373): n is a, c, g, or t
  misc_feature (388)..(388): n is a, c, g, or t
  misc_feature (461)..(461): n is a, c, g, or t
  misc_feature (516)..(516): n is a, c, g, or t
agccgctcgcaagcactcccggtagtccccacctctctcagcttccggctgnannngttccgnnncnngtcgactgtggtgtctttgctgagggtcacattgagctgcaggttgaatccggggtgcctttaggattcagcaccatggcggaagacatggagaccaaaatcaagaactacaagaccgccccttttgacagccgcttccccaaccagaaccagactagaaactgctggcagaactacctggacttccaccgctgtcagaaggcaatgaccgctaaaggaggcgatatctctgtgtgcgaatggtaccagcgtgtgtaccagntccctctgcccacnatcctgggtcacagactgggatgagcaancgggctgaaggcacngtttccccggggaagatctgaacgtggttgcatctcccttttcctctgtcctccatccttctcccaggattgntgaagggggggacctggtacccagtgatccccaccccaggatcctaaatcatganttacctgctaataaaaactcattggcagagtgataacgtcaagatgtcatactgattgcgcggcctatagcccgggtcgcgaagacagagctggggatgggcctgggctaaagcg

SEQ ID NO: 599990 - DNA, 236 bp, Homo sapiens
cttgcggtctcatagatgactggtgacaccccagaagcagctgcactccgggagcttgaagaagaaactggctacaaaggggacatacgccgaatgtactccagcggtctgtatggacccaggcttgtcaagactgtactatacacatctgtggcacagtcaccagttaacggaagatgatgccagaaaacgcagaggcgatagcccaaagcctggtatgttgtgtgtcggaatgt

SEQ ID NO: 599991 - DNA, 2038 bp, Homo sapiens
gggcagagcgagcagctgagctggctggatctgccgagcgcgagtgagggagcctgatgcctgccctgcctgctgcctgcatcctgccttcccctcctgctgaacatgtgatgccctggtgcctggtggccctgtgcactgcctgccccatgccctgtctcctcgtgctgtcatgtgcctgctgatggtgtatgctgctgctgctgagctgagctgatgcgcggcgacgcgcgaagatgcgatgcagatgctgccctgcggatggggacgtgctgtgctctgtgaacactgatcccggtgtgcttgcacactggctcgctgtttgtagcgcctgctccgacgtgccgaaactgccctgccatgtgcacctctggacaccctacaatcatgcctcactaccaccaccacacctcccccctgctcactctaccccccgtcagacaccaccacaccactcaccaccccgtagcaaccgaacccagccctacgacacgcacaaagcagatcgcgaccctacacccagaacacccatcccacactatcctcaccaccggagcaaccgaccacactaagcgatagcctacatcacagaaggcctctgataatacgaccacatccagccacccgaccttcatcttagtcacacacctcacataactaacactctatcactacccttcttcctctaatcaataataaatactcacactcactaacatcaaccatactatcacctccattcgacatatgcctccacaccactctcacacaaattcaaccacatactttctgaacctcactcatacacccaaacaacactatatacaacatcaacaacatacaaactaagctaacccaaccaaccacacacaatcgaagaccacaatcgacaacaacactccatacaccctcaaccttcacataataccgccgggcgggagagcgacgctagggacagaggagatcatcgcgttgctgtgggcacgggagcgatagagccagcttccatcagcgcagagggagggagcattgcggcaagtctgacggggaggcgcggccctggtaacgaccggctcaagcatcgtcattcgcacccgctccctctggactcgccactgccctcgacgcacgcgacactgcgagagcttcgcagcatgacatctaggccgactatgtgcgcgcttcgagtcaccagcatcaactcaacacacactctctcctactctcacgatctccaccagccatacgaagctactagtctcacccacctctaccatacgcacctaaatcaacccattactaccccatacacttattcctacatcttacataacgaacactattcatgtaaccacttactactaccttatttaactcctcacacaatcttacttacatccaactcattatcatacatactaacatccaccaaacctacaattctaagtatcacgcataacccaagatatctacatatcatgaaacgacaagcccgccttccccactatacacacaacactatcaatcatatcaaccccctaatcctacaagatcaactgacctccaaccacactcacaaccaccacacacctccacccccacacacactcctactactactaccacaatgtcagacctagcagcactacacactaacatctccacgacgctcctacaccgactacaccactacaaatcacacccactcacccaccagcccaccctcacactcacacacacccatcactcacacactacacatcacacacaccccgagaccatcacatacactcacacacccacacatcctcccacccaactcctccacactagaccaccacatacatcaccaaccacacaccgccgtatcccactacaatccaatccgtcatcaaaccgacaccatactaatcccatcactcaccacaccaactccccacaccgacacctaacatacaccaaacacaacacacacgctacaactcacacactacacctacactatcgatcccatcacaccccataaccacacaccaat

SEQ ID NO: 599992 - DNA, 316 bp, Homo sapiens
acctttatggagtgagtggcataatctcgcctcactgcacccccgcctccggggttcaagtgattctcttgcctcagcctcctgagtagctgggactacgggcatgcgccatcacgcctggccaatttttgtatttttagtagagatgaggtttcaccatgttggccaggctggtgttgaactcctgacctcaagtgatccacccgcatcggcttcccaaagcgctgggattacaggcatgagccacctcgccaggcctgtgtatggcttttcttttaaaaagtttacatgtcatatttaccacggtgctataacg

SEQ ID NO: 599993 - DNA, 922 bp, Homo sapiens
  misc_feature (2)..(3): n is a, c, g, or t
  misc_feature (12)..(12): n is a, c, g, or t
  misc_feature (34)..(34): n is a, c, g, or t
  misc_feature (36)..(36): n is a, c, g, or t
  misc_feature (42)..(42): n is a, c, g, or t
  misc_feature (49)..(49): n is a, c, g, or t
  misc_feature (64)..(64): n is a, c, g, or t
  misc_feature (66)..(66): n is a, c, g, or t
  misc_feature (109)..(109): n is a, c, g, or t
  misc_feature (118)..(118): n is a, c, g, or t
  misc_feature (126)..(126): n is a, c, g, or t
  misc_feature (151)..(151): n is a, c, g, or t
  misc_feature (154)..(154): n is a, c, g, or t
  misc_feature (228)..(229): n is a, c, g, or t
  misc_feature (244)..(244): n is a, c, g, or t
  misc_feature (253)..(253): n is a, c, g, or t
  misc_feature (261)..(261): n is a, c, g, or t
  misc_feature (277)..(277): n is a, c, g, or t
  misc_feature (310)..(310): n is a, c, g, or t
  misc_feature (313)..(313): n is a, c, g, or t
  misc_feature (333)..(333): n is a, c, g, or t
  misc_feature (351)..(351): n is a, c, g, or t
  misc_feature (353)..(353): n is a, c, g, or t
  misc_feature (426)..(426): n is a, c, g, or t
  misc_feature (445)..(445): n is a, c, g, or t
  misc_feature (461)..(461): n is a, c, g, or t
  misc_feature (477)..(477): n is a, c, g, or t
  misc_feature (495)..(495): n is a, c, g, or t
  misc_feature (529)..(529): n is a, c, g, or t
  misc_feature (549)..(549): n is a, c, g, or t
  misc_feature (552)..(552): n is a, c, g, or t
  misc_feature (591)..(592): n is a, c, g, or t
  misc_feature (594)..(594): n is a, c, g, or t
  misc_feature (645)..(645): n is a, c, g, or t
  misc_feature (669)..(669): n is a, c, g, or t
  misc_feature (731)..(731): n is a, c, g, or t
  misc_feature (801)..(801): n is a, c, g, or t
  misc_feature (816)..(816): n is a, c, g, or t
  misc_feature (831)..(831): n is a, c, g, or t
  misc_feature (843)..(843): n is a, c, g, or t
  misc_feature (894)..(894): n is a, c, g, or t
cnnatctcttcntcttttcatcgtcgctcgagtngntcagcnccggagnacctcagcagctatntngaatccccatagtgtaagccgggactgccgttcgagttgcgangacccagcntctgcacncagccgatggctgacacattcctgnagnacattttatccgcctgtacatttgtatttcaccacccatcacagcccggaacactggcatcatctttaccattnncccatcttcccgatnagtggagangttgaagnagatgattaagtgctngaatgaatgtggtcttcgtctgaactttctctnatngaactcatgagtaccattcngagaccatcaagaatgtncncacagccacggaaagcttttcttctgaccccatccgtctaccggcccgttgctgtggctctagacactaaagnacctgtagatccgaactgngctcgatcagataggnagcggcactgcagtangtggagctgtagagaagngagcgcactcctcaaaaatcacgctgtgataatncctacatggaaaagtgtganganaacatcctgtggctggactacaagaacatctgcaaggtnntngaagtgggcagcaagatctacgtggatgatgggcttatttctctccaggtnaagcagaaaggtgccgacttcctngtgacggaggtggaaaatggtggctccttgggcagcaagaagggtgtgaaccttcctggggntgctgtggacttgcctgctgtgtcggagaaggacatccaggatctgaagtttggggtcgagcaggatgtngatatggtgtttgcntcattcatccgcaangcatctgatgtncatgaagttaggaaggtcctgggagagaagggaaagaacatcaagattatnagcaaaatcgagaattatgagggggttc

SEQ ID NO: 599994 - DNA, 393 bp, Homo sapiens
gagctacgctctggtgctttgggccatgcagtcgggctcgattgccgaggctgccgcgctgcggagagtcagcgtgattctggtggtgctgttcggcatgcgttacctgaaagaacctttcggccgcccacggtctatagcctgtgggttggtgctgatcggcatgttcgtgatgaaactctaaccgtcggacagaactaaaaaaggaatgggttatgacagtcgctttctggtgtgtgttgatcgctatttttctgccgtatctgtgcacgggcgtggccaagttcagcggtggcaagttcgggcccggcagaaccatgacccccgagctttcctggaaaacctcgagggattcgccaagcgtgcccacagtgcgcaactcaacagctttga

SEQ ID NO: 599995 - DNA, 120 bp, Homo sapiens
tgattgcgacaggttgtcaacatggcagaggctccatctctagtaaaaaggcacggtcacgcacaccggtaccccagctacttgggagcactaatgcaggagaatcgcttgaatttggga

SEQ ID NO: 599996 - DNA, 360 bp, Homo sapiens
aggaagaagggcccaggcgaggcccagatgcccaggccagaaccccctccctttcacagagagggggctttattgcacaattgggtgccttttagctattgtgtgaagaaatgggcgttatggaacctcgggtctggcaacagcttacaaaggcgtgaggctctgacctgagcatgtgggcagtgcaggcagcctgggtgctcttgtgattgaggttagggacagctatacccaggctatgcctggtcccacccagaatgaagttggcgtccccccacaggctgtgagctctagtggccctgggatgtgatctagctcagatgccttctcatccttgatgtcatagttgagcgcacacaa

SEQ ID NO: 599997 - DNA, 143 bp, Homo sapiens
tctctgcgctcagactggcgacacgatagaatgaaaatacttgtacacatcctcatcaactctcagagggatctgagccgtagatggaggaagcgcagaggtagggcaggtactattctttttatttgatagacaaggaagct

SEQ ID NO: 599998 - DNA, 598 bp, Homo sapiens
tctgtcatagaaaaagctagatatcaaggggcctgaagacaagaagaaacacctccttataggtagtagtcctcagatcgaggactgtgtggtgctacttcattcctccattgctaacagatgaaaagcgaggttgctacactaacagcagctagggaaagaagttatgcttgtaggaattggtgacaaaatcagaggcatactttataggactcattctgaccagtatctggtggcattcaaagaagtgggaagaaagccccccacttaaggagatgcgtcagtcatagcccttgaattactaaattctggatatgaatatgatgcaggctccatcatctttaatcaattcaggtctgtcatctcctataagacagaagaaaggcccatcttttcccttaataccgttgcaagtgctgacagaatgagtaatctaataacgatattgatgctgacgtgctgcaaaattaccaagaatacaatctggccaacatcatctactactctctgaaggagtccaccactagtgagcagagtgccaggatgacagccatggacaatgccagcaagcatgcttctgagacaattgcacaattga

SEQ ID NO: 599999 - DNA, 378 bp, Homo sapiens
  misc_feature (123)..(123): n is a, c, g, or t
  misc_feature (332)..(332): n is a, c, g, or t
  misc_feature (336)..(336): n is a, c, g, or t
  misc_feature (349)..(349): n is a, c, g, or t
  misc_feature (351)..(351): n is a, c, g, or t
  misc_feature (353)..(353): n is a, c, g, or t
  misc_feature (355)..(356): n is a, c, g, or t
  misc_feature (359)..(362): n is a, c, g, or t
tgataattgtagtttaagaactaatatttccctctcagaagagttaacatcatagtaatttaattctctgaccagaatgtaaaaatattagaaatcagtaacagacaaaaaaataaaattccncaaatctagaaacttaaggaaaaattccatttaagttaaagcaaaatgagttgagttataagtcctacaagggaaagacaagggaaacatgaggatgttgagatttatgagacatggttaaagcaaagcaacgcttggaggaatatgcatttctttggctgcattggtcagaaaacaagacagatttcagacttgaagaaggcatcatnaagntagcactcctccncnancnntgnnnntcatccaaaagcaaaa

SEQ ID NO: 600000 - DNA, 1016 bp, Homo sapiens
agcatttaccatctcacttctaggaatactagtatatcgcgcacacctcatatcctccctactatgcctagaaggaataatactatcgctgttcattatagctacgctgcataaccctcgaacacccgactccctcttagccaagtattgtgcctatggccatactagtctttgccgcctgcgaagcagcggtgggcctagccgctactagtctcaatctccaacagatatggcctagactacgtacataacctaaacctactccaatgctaaaagcgtaagtcgtcgccaagcaattatattggcataccactgacatgactttccagagaaaacacagtaattgaatcaacagcaagcacccacagcctaagtgatcagcatcatccctctactattgtttaaccaaatcaacaacaaccgtatttagcctgtatccccagaggcttgcgctccgaacccgcctaagcaagccccaacgtgcctaagtacttagagctaccgttgactcgctaggcccggtcacgaatcactggccagaggccgaaggacgcacatgtatccagtggacaccaactagtaccgaagacaaacgtgtaccgtctcgtatcacttaattcgtccctacggagcatcctccgtttaatttactaaaccatttacaccagcccaccagaacgttactcaagtagttgccagtaatcgtgtcattccgacaacccaccagcttaatccgccacacttgggggtagtcatcagcccgatgaggccaccaggcccaggaaaccggccgttggaaacgggacaggccgccaattaacgattagctcatggcctgacgaagccccatcaagaaggcgcccctgatccagcctaaaatccattccggcagatgaagggtaacagggcacaagacaagcactaacgggtccactaacacgattgccaaataactgcgaccctaccgggggccgagacaccgtccaaacggcctgcagcccaccagctaatcatcg

SEQ ID NO: 600001 - DNA, 275 bp, Homo sapiens
  misc_feature (43)..(43): n is a, c, g, or t
  misc_feature (100)..(100): n is a, c, g, or t
gtcatcaggcaggtgtcgacaatggcagcatctacaaaccccntgaggcttatatcacagaaggaactctgggcatctcgcttctggagggtgtccgcanatgttgcaagtgtctgtctgcagattggctacccaaactgttgctcagtacccccatctatatcaacgggtacaacgagtcctggccttgtctgtggagacggattacacctttcccctgctgaaaaggtcaaggccttcttggctgatccatctgcctttgtggctgctgcccc

SEQ ID NO: 600002 - DNA, 173 bp, Homo sapiens
cctcaaactgcgcccgactagcttggatacaggtgcccgctgccatgctcagctggcttttgcattatcagtaaagatgggtttcaccatgtctcgaactcctgacatcaagtgatccatttgctttggcctcccatagtgttgggatcacaggcttgagccaccgtgcccgg

SEQ ID NO: 600003 - DNA, 229 bp, Homo sapiens
accttctacccacgagaggagctgttccagcgtcaccgtttcgccaaagagccggcggcccaacacctcctcggtgaggcgcgctttcgcagaaccgctgcgttcgctttcggtttgcaacacgaagacgttaccggcgccgaactcacgctcatagcgcaggactgccaacgcgttgagctccggcgaaggcgagagggccaacaggaaattgatgggtaccgagctc

SEQ ID NO: 600004 - DNA, 226 bp, Homo sapiens
gtactatcatgtttcataggtaaatgccctaatccaatgatcactttcatttaacatatcctactctagtgagcagatagggcttacatagcattctgtcttgacgacgtttataaaaatgcagctgcaggtcctcatctttgaaactccatttggtaaaaatggccatgtctacctattacctagtagatttaacgtgtccacacgccgcgatagtaccgatacg

SEQ ID NO: 600005 - DNA, 204 bp, Homo sapiens
gaaaagctgttttcctggctagagacaagcatcacctctctgacatctgccacctggtccgccatgacgtgccctacctgttccagaagtatgtgaaggagtcacatgggaaggacatccgggtggtggtggtgggtggccaggtgatcgtctccatgctgcgatgctccacagatggccgcatgcaaagcaactgcttcctag

SEQ ID NO: 600006 - DNA, 729 bp, Homo sapiens
tacaggcttattactgggcctcctcccgcttcatccctctcaagtaatggctcagctaattaaaggcgcacattgacctccaaaaaaaaaaaaaaaaaaaaaaaaaaaaaaaaaaaaaaaaaaaaaaaaaaaaaaaaaaaaaaaaaaaaaaaaaaaaaaaaaaaaaaaaaaaaaaaaaaaaaaagaaaaaggagggggggggcgccaaaagaaaacacacacgagcgggggcggcgcacaacaacccacgagcccgacgtcgatatgtagaaaagaagagggaggaaaaaaaaaaggagaggaagaaaatacacaaacgagcagagcgaggggcgcgagggaaacaaaagcaccaacacaggagagggagagaacaagaaggaaacacaaagaggagaatacatcaagcgaggaaaacaacaaaaccctaccgagggcagagaagagcagacacaaagaggcgagagacaaaacagagaaagagaaaaagaaaatacaaacaagcgacaaaaagagggggaaaaaacaaaaccaaaaacatcaaaaaagaagaggacgatgagcaacagagggggagcgacagaaaaacaacaaacacaccccaaaagcaaaagaaacactcgaatgacaacacagaaaacaggaagtcgaacggggtcccaacaacagcggaggacgaaaaaacaccaacaaaaaaacaaactatcacaacaagacacgagaaacaca

SEQ ID NO: 600007 - DNA, 344 bp, Homo sapiens
gtttcaccatgttggccaggctggtctcgaactccgcatctcaggtgatctgctcgcctcggcctcccaaagtgctgggattacaggcgtgatatactgtaatcacgcccggccaatatactgcattttgtaaaagcatttatttattattattttgttttgagactgagtctcactctgtcgcccaggctggtgcaatggcacggtctcagctcactgcaacctccacctcccaggagaatcgcttgagcccgggaggcagaggttgcagtgagacaagatcgcaccactgcactccagcctgggcaacagagtgaaaccccatctcaaacaaaaaaaaaaaa

SEQ ID NO: 600008 - DNA, 147 bp, Homo sapiens
tctagcggatcgcttatctctgcaggcaactgcttggggctgcaattcttaggggcgtcgatagccgccgcgacagagctgagagcaggggcagcagcaggagcaacggggggtcagcatggtgtgggctgatgcaagcagcagccc

SEQ ID NO: 600009 - DNA, 344 bp, Homo sapiens
accgtgacgaatatagtgctcagtagaagaccgtagggaagagcaccacgcactgaggatcagtgtgagagggaaaacatgactgtactgaggaacaaatggaatgcgagaatctcataggcacatatatgtgcatctgtggacccgggtatcagcggaaaacctgatggagaaggctgtgtagattaaaaatgaatgtcagacgaagcccgggattctgtgagaatgggcgctgcctcaacaacccgaaggaactacacctattaagtgttatgaatgggttaaccgccagccccaaccaggacgagtgccttgacaaaacgggaagggtaactgttcacaga

SEQ ID NO: 600010 - DNA, 174 bp, Homo sapiens
gcaatccagaccaaagtacgctggctctgtcactgctatagccagtcaccacttcgacaggctcaagcgttcgtcggaaagggccctgtgggtaacatctgtatctgcagatgtttccatggccgatgtagtactctatcactaaatcgagtattctacttcagcttagtaaag

SEQ ID NO: 600011 - DNA, 279 bp, Homo sapiens
ggatatagtagttagtgatacagacaaaaactttctcttcttttggagtttatgtctttttgagagaaggtctcactctgttgcccagcctggagtgcagtggcttgatcttggctcattgcaacttctgcttcccgggttcaggtgattctccagccttagtgtcccgagtggctggtactgcaggcgggggccaccaatgcccggctaatttttgtattttttgtagtgatggggttttgccctaattttgtatttttggtagagacggggtttcgc

SEQ ID NO: 600012 - DNA, 694 bp, Homo sapiens
aaggacagtgtgcaagcgcggaagttttgtctgtggctgtcccccacaaccccctcccaggttaagctcgtcggagctttgctgatcccatccaggtcggtgagaggttggcagggaaatacacgaggctgctatagtcctaccagtggtagatgctcaacacgtcctccgtgctggagcagctgatcgacagtttaactgggtgtcccggctggcagacctcacgcaaggcgtagaccagtactatctgcgggtcaccacggtggcttccctcacttctgactcggacgttccttccggtgtcactgaggtggtcgtgaagctctttgactctgatcccctcactggcacggtccctgtagaagtctccagggagaaccctaaatttatggagaccgtggcggagaaagcgctgcaggaattccgcaaaaagccccgggaggagtgagatgtggatgttgcttttgcaccaacgggggcattttgagtccagctccccccgagatgagctgcagccccccagagagagctttgcacgtcaccaagttgccaggccccagcctccaggccccccactccgcccagcctctccccgctttgggtcctgccctttaacgctcgcctctgctgctcatgggaagaacagaattgctcctgcatgcaactaattcaataaaactgttttgtgagctga

SEQ ID NO: 600013 - DNA, 252 bp, Homo sapiens
ttcgtcgaagaacaacggcataggagttcgaggagcccttgtcagcattgatacgctcatctgcctggcctcagcaatggtcttaatgttccggaaggcagcctcacgaccgcctgtgcacagcatcccagatggcctggttcacaccgtgtagggcgcacacatccacagcctgtcgtctcacagtcccggcgcgccccatgcgtgtggagtcctcccggggaccactgttgatgatggcgttcaccagga

SEQ ID NO: 600014 - DNA, 250 bp, Homo sapiens
aggaattttccagatggaaaagactgacaacaaggaaaaatattggttatttcttgattaacaggaatctttattgttttaaaattttcaaactgttgatataaaaagaactttatctgtatcttgattaagttgagaagaaaacttaaagtacaaaactcatcttaggcccggcacggtgggctcatgcctgtaatcccagcacttggggaggccgaggcaggcagatcacttgtgaggtccaggagtt

SEQ ID NO: 600015 - DNA, 206 bp, Homo sapiens
  misc_feature (34)..(34): n is a, c, g, or t
  misc_feature (71)..(71): n is a, c, g, or t
  misc_feature (163)..(163): n is a, c, g, or t
  misc_feature (182)..(182): n is a, c, g, or t
  misc_feature (191)..(191): n is a, c, g, or t
ggtaaatgcataaatgagaatctataatgtttantgaactttatattacagattttctcttcttttaggantagctcagcttgcccccgctttccatctccaccatctatagtgagcctctccataattagtgccaaccattagtctcgttcatatttttacnccaggagtcaacaaacatngtgcaattngcaaatatggcctcc

SEQ ID NO: 600016 - DNA, 150 bp, Homo sapiens
gtatcagagttgcacttcattagacaccatggcagagctcttatagtgctcttggcagtatatcagtagtgtcatttatattctatgtactttaaatcaaatgtgatcaaacatttgataaataattctctctgcttttaaaaaaaaaaa

SEQ ID NO: 600017 - DNA, 388 bp, Homo sapiens
atgaggatccccgatatcttacattattacgtccacacattatttagattgtccttacgcttaattctattatcattgttccacgattccatctatcgacaccacattatgcttagttgcatgtctccataatctcctcttcgccgtgactgtaaagcccctgcgggtcaggtatcttgtaggatgcccctctactggaatttgtctgatgtttttcttattagactggggataagcttttgggagaacagtaattgtattttgtaatatgccagcttgacaatttctttctttctttttttttttttggaaccgggggaatggaatctcactctgtcccccaggctgaattgtagtgccgtgaacttggctcactgcaaactccgcc

SEQ ID NO: 600018 - DNA, 450 bp, Homo sapiens
  misc_feature (96)..(96): n is a, c, g, or t
  misc_feature (102)..(102): n is a, c, g, or t
  misc_feature (333)..(333): n is a, c, g, or t
acagggccatggtgtggggggggtctctacaaaattcggggtcttgtttccccagagcccgagagctcaaggccccgtctcaggctcagacacaantgaatngaagatggacacagatgcagaaatctgtgctgtttcttttatgaataaaaagtatcaacattccaggcagggcaaggtggctcacacctataatcccagcactttgggaggccgaggtgggtggatcacttgaggccaggagtttgaggccaacctaaccaacatagtgaaattccatttctacttaaaaaatacaaaaattagcctggcctggtgcacacgcctgtagcnccgctatgcgggaggctgaggcaggagaatcatttgaacccaggaggcagaggttgcagtgagccgagatcacaccactgcactccagcctgggcaacagagtgagacttcatctta

SEQ ID NO: 600019 - DNA, 475 bp, Homo sapiens
taaaaagttcatcatcttaagaacttaaggaattaacaggggtcggggaaactaccccaggcggagggcttctgggtcccgggaaacttgcccagcttacaggcaacacacggggaaccacgaggggggcagcgcgaagatggggtcgtggaactgggggggggcggctacagtgatgactccccacgatgggagcagcaggaaggaagtggtgtctgaggacagtgcggggccgcccagagggacagcccgtgcccgaggagctggtcgccgggagggacagggaaccaagcccccgtccctcagggctgagagagaaaaaggcactggcgaggggtactccatcacgggcgcctctccccatccggggggaagagacgggggtccatggcctccatggcccctttaagcccggcccaaaagccgggaccggggtacacgcctcgggaaagaacgctttcggccggaactcata

SEQ ID NO: 600020 - DNA, 378 bp, Homo sapiens
tgtgttattatttttttaaaaaaccctcttaaaaaaagggaaaataaaaaaaataagaaaacaattttaaaaaaagggaaatatagggggggggtttaaaaaccaaagaggagtggtttggggtgatgaacgggacgaaataatttggggggggcgctctcccgcacacctatgagggagaaagttggccccaataaagagcgggagaaaagctcgcgagaaagcacagaggggaaacaacaacaacgcgtggtgccgcccgcaacacctactcccctgacgcacacgcagctcgagcaagcggcgcgagcgccctccgactaacactcgtcgcgcgagtgatccgtgtcgaggcgttacttacacacacagagacac

SEQ ID NO: 600021 - DNA, 105 bp, Homo sapiens
tatgagtcccggtgagtgtggggggtgctcttcccttgcaggtaatgcagcaggagtggcaggtaggtttctgtgcctccaggtgcgagggtagaggctagacgt

SEQ ID NO: 600022 - DNA, 105 bp, Homo sapiens
cagcagcaccagcacggtctggatttccttacgcgcgctggcaatggcgtaagccatcgggtagccgatcagcaggcagaggatggtgctgaaaaacgccatctt

SEQ ID NO: 600023 - DNA, 188 bp, Homo sapiens
tctcccatcatgatgaacttggacttttttttttgatttctggttttaaaaaacataaaattataaaatcccgataattcgctggagtccttttgatccccctgtagatctgtatttagtatcctttggatttggaaaagtgttgattaccttatggctgggtaataaaatttttttttaaactgcca

SEQ ID NO: 600024 - DNA, 524 bp, Homo sapiens
  misc_feature (1)..(1): n is a, c, g, or t
naaaaggcaaagggccgcggccccccccccagggaaagatcataacagcggtagaggacacgtatagaaaaaagcgtttaaggttccgcagacccaagggaaagctccttggaaacgatatgctaacagagcttctcccccgtgaatcatataaaatccccctcttagcgggtaaatgaatttgaatcgacatagtagccccataagcatcagccctgtagagtgagaagccatctctaacgggcccttcattcctctccatgctacaaacactgtcctgggcttaaggtgctatggactaggggtcctttgtgaaaaagcaagatggaccaatggaaaaaagccctcttcctgaatccctggactccaaaaatgtgcatgcagatcagctgttgccttcaagatccaaaaaaactttcctgtcatgtgttagaactttattattattaaaattgttaaacttttgggcggttcctgtgaatctccaaattttggaccttgttttaagctaatatatagccatt

SEQ ID NO: 600025 - DNA, 284 bp, Homo sapiens
ggccggggatctagaggatccgtcgacggggatgtggatatatagtagctctactttagtttctgaggaagtccaaactgttctctgtagtggttatacttatgttcccaacaacactgtttaagggctccttctctccacattttcttgggcattttggtggctggctttttgaatataagccattttaactggagtgagatgatgcaatatctcattgtagtttggatttacatttggattgatgatcgatgatgttgagcacctttccatatgcctgttgg

SEQ ID NO: 600026 - DNA, 582 bp, Homo sapiens
acttattcacagactgcgccgccaggcagtatcccgtagctgacgcagatcccctcgaggagggtccacggggcggccaggatataggttgtgtgagtgcccctcctctgttcccgccccggaggaggaaatgagggtggcctcccaagaaatgaactccaccccatggacagcagaacagggcagccccctatgtgtggacaggaaggggaccccttgggagccccgtttcttaccagcagagtctctctactcactgctcaggccttcctagaaaggctgagcctgtccacggttgggaaatatgcaaatacgtttacataggggaatagtcagctagcccactatatgaaaatatacacatacatataagccctcaagtgcttgcgttctggaagatagcagtggacacgtctcccggggcgcagatcctgtgagagcctcacaggactgcgcccgccggcccagacacttcacaggtcgaagccattgctatctgcattgtcgcccgaaaattttgtcgtaaaatgtccgcatggatactcagcccacttgtagccgcgcacgaaactcctatctctc

SEQ ID NO: 600027 - DNA, 233 bp, Homo sapiens
gaagtatcatcggtcattttcaccgttacccgccggagctgctggaaaagttccgagtggagaaggacaaatatggtgcccgagaagaggaccctcatcctacactcacttccccaagtaaggctccttctaggcctaccagtgatttggccccaaagttcacatacctccctagttgtcccctatttttccagggaaggcttcctggcattggtccctcactctccctacca

SEQ ID NO: 600028 - DNA, 1260 bp, Homo sapiens
gtaaatcattcagttttggcgcgcgggcccaagttaggctaacgtgaacatggtctagtcgctgttgccgtagtgacatcctgtgtgtcatgacttagtgccttggtattctcagtcaagtacttgaaacgcctcgtgcgagattaaccgaagactggtactgaatcaattcggcggatgtgagttccctgatgcggtcacttaactggaattctagtcaaccaggtgagctccataggtcgatgctacgattactcgaactagtcacagccctcgcacctgtagtgttacatgggtacagaccgttagtccaaatgggagaagttcagaaggagctagagcctgtgactgaccttgtacagccggggacacattatttggggttgctgttgcattctataccgattgtgcgacttgtccagccgttatgtgctgggtgtcccgtacgacgagagactgtgctccagccgttttgtatgtcgcacgaattgcttaagctgtagatatttccaagcgcattgtgaacacttgattgtagacggtttgatcccgacagggttccttccacggaagaggaatttttccacgagcattgtttaggccccactccttttggcccttggcggccattacaaagttagccaacaccagaggcaaaagaagaaagtttgggctgaggttttatagagagagcccaacctaagttgaaacgcccaatctgtccgatcgtcccttctgggttacaacgcaccctgtgcacacctacagcagagatgcaattttctccccccacgaggggaagccttaccgtccgtggttagactttggtccaacccacaggcgaatctcgatagagatacgttggggatcacccataaaagggcacagtgggttcactacagtttccagcattaagagtgttcggaaggcacccccccatatagttggtcgaattcttcccagtttccaaaacgggctgagttttttgaaacgacctcgtttcggaaaaccggaatttcgtgcacaccaaagtaaggagggagctcgggaacagactggtgtgtgagaaaggagacaaccccgcttcacccggaatttatgtgctttgggaaacctgggatgtgtggccacaggtgagttggtaaagaatagggcaacaattgccgagaaacagtgccttgggcccgagcgcgaaaacgttggtggagcactccagagaaatactcgccgataaacacaatgtcacgggcccaatgtgca

SEQ ID NO: 600029 - DNA, 423 bp, Homo sapiens
  misc_feature (40)..(40): n is a, c, g, or t
  misc_feature (74)..(74): n is a, c, g, or t
  misc_feature (114)..(114): n is a, c, g, or t
  misc_feature (117)..(117): n is a, c, g, or t
  misc_feature (119)..(119): n is a, c, g, or t
  misc_feature (123)..(123): n is a, c, g, or t
  misc_feature (126)..(126): n is a, c, g, or t
  misc_feature (134)..(134): n is a, c, g, or t
  misc_feature (158)..(160): n is a, c, g, or t
  misc_feature (170)..(171): n is a, c, g, or t
  misc_feature (173)..(174): n is a, c, g, or t
  misc_feature (176)..(176): n is a, c, g, or t
  misc_feature (186)..(186): n is a, c, g, or t
  misc_feature (189)..(189): n is a, c, g, or t
  misc_feature (194)..(194): n is a, c, g, or t
  misc_feature (203)..(203): n is a, c, g, or t
  misc_feature (215)..(216): n is a, c, g, or t
  misc_feature (220)..(220): n is a, c, g, or t
  misc_feature (223)..(223): n is a, c, g, or t
  misc_feature (235)..(236): n is a, c, g, or t
ccgttgcgaagggtctgggttgtggtgtacggagagggtnactggtgtctaggctggatagggagcaacaaatnagtttaaaaccccaaatgttctgacgttttctgagagcanttncntttnccnctgaattntagcagctatttgttttttaaacnnncagtactganntnntntccaaagatngtnttgtnatgtactcnttttgctgtttnntgtngtnttgttttttttnngaggttccctctctttagctaaaaatcacaaaacattaaacaatggaaaaagccctcccctcagttcttgctaattgaggtgtccgtgatttacaaaaaaagagttccttaaacactgcaggattcttatttttttaatataatttatcttgctgagatagcaagtcaagtttataaagaagatgca

SEQ ID NO: 600030 - DNA, 1797 bp, Homo sapiens
tggtggcacacaagtccttccattcctaggtcattctcattggcattggcaacatctgtcagccaagcatgcttgtctcacaacattcacccatcatagtaaacacatcattcatcactatcagctcgtctgtgctcatctgccacacttccttttctcgttgcttccagcacagattcagctatccacacattcttgcctcacgtcatgccatcaccatttcaccttcgttcacacattatttccttggcgcaatagacggacacattacatatgcggacaactcatcacactttatgtgaatcccaaccccgtatttttaggcacaacactagtcagcacattcctgcttactacttacaatcaccagacacaattactcacaaaaaagatatgcaccaatcacaaccacatcgtcctggccacttcaactacacacctatctacaacacacaccatccccctcccatcacacatagcatcatctatttccatcgcaccttcccctctgcggcgccggcgatcaacacacggaacatccacgcacacaaccaacaccaccgacacacctcccaacccagccaagatcgccacacgacaaagacttcacactacgtcccaccggcccaccaatcccgcacacacaccgcgccacgaaactcatgacacccccacaccaaccaccacgcgccctctcacccacgcaccacatgctgcggcaacacccacagaccccgtgcacactaccaccacgcgggctacctacagacatcgcacacgacctagtggcacccacgacggagggtcccagtgtgccgaccttaaccatacccagaacaacaacgacaccaacaaaacacaaatggaccaccaacaccagaacacgacagcagcagcagcgcatggcgacgatacacgcccgtgcgggcctaggacacccccacacctacctacgactgagacaccaacgcgcagctaggctcccacaacagcaccctacccggaccaccactcaacaatggctatcacagatgtccgacccaacgacgccactggcacaccccaacgcagatacccgcctcgtatcacctagcaccacactgcccagctcacccacccagcacccagccccagcaccacccccaactcggcaccccgcgacaccacctcacgcaccgctacagacagcacctacacccgtgccgtcggccaccacacacaacctacacagcatgagaagaaccgccgacactgcgcgaccaaccccacacaccaacaacgccacaacagcaacgcaccacacaaacaacaacaccaaacaatcacaacacgcacgacaccagacgccaccaaacgaaccacgccccgcagcacgccaccgcagcacacagccaacacaagcaatgacagaccaaatggcagaggcgccgcgacagccacccacccgacactaggataagaagcgagtgagcgaaagacacgaacaccagagcctacaccgtcactcagatacaagctgcatgaagaccagcgacaacaacaacatggtcgcgacacgcgtacatgccagaagactcacagagcgaggcagaacaagccggtatcagtccaaagcagtccgcgacgagaacagacaaccacacagcaagcgagaacatcactaaccgcactactgcacgaagcaagtagtgaagcagcgagacagacaatccatgtgcgttctccttatagtggctcacaacgaacaggtcgagtccacctaatcacgccctatttctacccagagcaagctagtac

SEQ ID NO: 600031 - DNA, 132 bp, Homo sapiens
gcggccgcctactactactactgctcgaattcaagcttctaacgatgtacggggacatggagatcaaggctgcagtgagctgtgattgctccgctgcattccagcctgagtgacagagtgagacactgtctc

SEQ ID NO: 600032 - DNA, 966 bp, Homo sapiens
gcggcgctcgtttcccgcaccgcggccgggcggccatagccagccctccgtgcacctctgtcaggcgcaccctcggtacatgccccaagggccccgccggcgctccagcgccgctgcagctcgtccgccgcgcgactgacgactgcctcggtccattagtcgccgacaatgacggacgcgcgttccacgcgtctgtcaggttgcgccaggaacatacacacacagagactctatgaggcacggccatctaaccagtctagatcgaacctcggagcgtcatacgccttgcctgacgcttgtacctagtgcccatgtcgttacctacttatgacccggcggaatgaatgtgggcttttgcaaggaacctttcgtccaagagtagcttttctgtcatcaacatctgcatgaggaggacgggaaccatgctggacgagagcgtgactcgagagtcgtgcataaacgcgaccgaagggttggccagaagtctatcacattacaggaatagtccatagtaataggcgagaactgtggattgactggagggatgaacgcggtgggcatggataatgcagagtggggaggtggtggcatataccaattgtgtgggaaaaaaagaagtggtgagattcaagtgcaaattaattgggaaattggcggcaaagcatgggaccaaacgtggatccatatgaagagtgaaacccgcacaaattatggtgctgaacatattcacattggaggaaccgacagttacacttggaacttgaccgtcacgggctcgaacgacgtcccaatttcaggaggaccactcggggagtttgaccctaagcgttgtagacccaaacccatttggccggccacagcgaagttggggacagctgccccggaagctccttggggcctttgggcccggtaaacatactcaattcctgtttggaccacaggcacaatccgcctgggggcacaccc

SEQ ID NO: 600033 - DNA, 218 bp, Homo sapiens
gcttacagcacacagagctggctccctatgcccacaggccccgaaagtgggagtcagatagcgctcactcgtcaacccaatggatcaaacggaagcctagttggtgattaccagacagacaacgggatgtgactgcgggaaccgcaaaccagtcttgcgtacgcctatgcaaggggcagtccaagagcagagacagacaccctgggtggtccgagcgg

SEQ ID NO: 600034 - DNA, 118 bp, Homo sapiens
  misc_feature (2)..(2): n is a, c, g, or t
antcactctactgatcgcttagaggtcgcccaaccgaaatttttaatggtagttggtagtttaggacctgtgtggtttgttaggtactgtttgcattaataaattaaagctccatagg

SEQ ID NO: 600035 - DNA, 733 bp, Homo sapiens
  misc_feature (677)..(677): n is a, c, g, or t
  misc_feature (697)..(697): n is a, c, g, or t
aagttttcaaactccaaactagtctccccatcaactctatggtgctttttgacacgtaggcggtttaaagaaatatgacccggtgtgggatttctaagagcctttttttgacctcagccttaaatattatggattaagaaaagaatggctcctaggaatgcttggtgctgaatctgctaaactgaataatcaggctcgctttttcttagagaaaatagatggcaaaataatccttgaaaataagcctaagaaagaattaattaaagttttgattcagaggggatatgattcggatcctgtgaaggcctggaaaaaagcccagcaaaaggttccagatgaaaagaaaatgaagagagtgcccccgaaaaggaaactgaaaagagtgactccgtaacagattttgggccacccttcaactattttcttgatatgcccctttggtatttaaccaaggaaaaaaaagatgacctttgccggctaagaaatgaaaaagaccaagagctggcccccttaaaaaaaaagagtccctcagatttgtggaaaaaagacttggctccctttattgaaaaattgggggctgttgaagccaaggaaaaacaaaatgaacaagtcggccttcctgggaaaggggggaaggccaaggggaaaaaaacccaaatggctgaagttttgccttntccgggtggtcaaaaagtcnttccccgaataaccataaaaatgaaagcagaggcca

SEQ ID NO: 600036 - DNA, 1145 bp, Homo sapiens
agcggagtctggagccgggcttgcccgggcatgtgggaactgccggactatccggacgccactgtgtcggaccggaagagacatcgcggggcttcaggctgcatgcacctgattgctaagattacgtcctccttacggacgtgttccccttgcctgcgcaacggcagtgaagcgggcacctggaaatgggtcacccctgcggaggctgcactgcatgtctggcgtacaggtgacctgctgtccttttctcctcgagcaatcaccacgatgcacaccggatggtggcgtacacgcaatgaggcacagatagacatagatgccggaacgacgtcacccaggcgggttccatgggccccggcacatgtgctctttgcttgcgtcgtaatgccagggggtcttgctggtacgtcgattgtcctccctagtcaccgagggtggtcctcgccccatttgtggctgcctccttttacgggggcatgaaccgagcggtggtgcatgcttcccagttcgagtggcgtggccatggtgtcatggaagggctaggtatctgggtcagttgccccccaatgcctcgacagaaagggcctgcatccctgggaaagccttcagtgtcccttgcccaggcccgtgtgtggctaatcggacgtgtcagaatggtgggcacgggtacccccgtaggggcggggtaagctgagctgtcccgcttgttcccctttgtgacgactaccattggcgatgtcctctatgagcaagtacatcaggcctgagatgcccattggttgaactttaccgttacccgctggaagtggcattcaactcgggcagcacattgcgcaagggttgtccccctttccaggttgggccacaaaaagagaatccctttaagccttccttgaagtgggcaaagggggttgggttggaggaaccagcgccttgtgacaaaacgggacacttccacaggcggggtcacagggtttgcgtcccaccccctcgggagagcccagaacccggcgaataccaccccttatgttcccacaaatttccgcaaaggaaagcccggactccaaaaacacccggggccgggggccctctaaaggaaccctgcccctcagtaaagaactccccaccaacactggtgacctacg

SEQ ID NO: 600037 - DNA, 369 bp, Homo sapiens
tcagtgctttggagcttagtgttttatgtcttgctctcgttaaacaataacagaaaatctcttgcagggaatggtggctcatgcacgtaatcccagcattttgggaggccgaggcaggtggatcacgagttcaggagtttgaaaccagctctgaccaacatggtgaaaccctgtctctgctgaaaatatacaaattagtagggcatggtggtgcatgcctgtagtcccagctactcacgaggctgaggcaggaaaatcacttgaccctgagtggcacaggttgcagtgagccaagactggtgccagtgtcctccagtctgggcgacagagtgagactctatctcaaaagaacaaaaaaatctcttaact

SEQ ID NO: 600038 - DNA, 374 bp, Homo sapiens
gtttactattaggaggtgggaggatacttgagcccaaagttcaaggctgcaatatagcaagaccccatctctaaaaaattaggcatggtggtgcatgcctgtattcccagctactcaggaggttgaggtgggaggatcacttgagcccagaagttcaaggctgcaatgagccatgattacaccacggcactacaaccttggtggcacagtgagaacctgatctctaaaaaaaaaaaaaaaaaaaaaaaagattaactaaaacttctaaaactctcttttttacggttacccaaaaattatacaagtggtttaacatgctttatcttactcaatccatacaaaattcttttggaggttttagcacctcctttagt

SEQ ID NO: 600039 - DNA, 187 bp, Homo sapiens
gtataactgaagcaatagtaggtggttattaactaaagtccaactttattcagatttctttagttcttaatgaccattttctgtcccaaaatccctatccaggttatcatgttacacttcagttgtcacgtctccggaggtagtactagtccaagaggcaggtacaaggaggtaccgcagctcggaa

SEQ ID NO: 600040 - DNA, 308 bp, Homo sapiens
  misc_feature (137)..(137): n is a, c, g, or t
  misc_feature (172)..(172): n is a, c, g, or t
  misc_feature (206)..(206): n is a, c, g, or t
  misc_feature (212)..(212): n is a, c, g, or t
  misc_feature (229)..(229): n is a, c, g, or t
  misc_feature (258)..(258): n is a, c, g, or t
  misc_feature (299)..(299): n is a, c, g, or t
  misc_feature (301)..(301): n is a, c, g, or t
ataacaggacgtcatcattctttcccagagtttgcttccttaatgccaatcaagggcatcataagtcagcgttctcaagacgatgaacacttgtctttcaaaactggttaagccagataggaaaacatgtataaggntaaaaacatcagcaaacattcttaaatgcttttgngagtctttttcttaatttcagagactaatgaccncacacnatggccctttaaggaantgtgggaaatgaggccaaggtattgctcnctgatatcccaatgctttcctgttgcagaaacattgatgangnttggccg

SEQ ID NO: 600041 - DNA, 636 bp, Homo sapiens
tacctgagagttgccaagatacttccaggtcaagctgatcttgacaaagcaaacaaaaacataaagtggggaaaggacacccttttcaaaaaatggtgctgggataattggctagccacatgtaggagaatgaaactggatccttatctctcatcttatacaaaaatcaactcaagatggattaagggcttaaacctaaaacctgaaactataaaaattctaaaagaaacattggaaaaacccttctagacaatggcttaggcaaggatttcatgaccaagaacccgaaagcaaatgtaataaaaacaaaggtaaatagctgggacctaattaaactaaagagcttttgcatggcaaaaggaacagtcagcagagtaaacagacaacccacagaatgggagaaaatcttcacaatctatacatctgacagaggactaatatccagaatctacaacaaactcaaacaaatcagtaagaaaaaaacaaataatctaatcaaaaagtgagctaaggacatgaatagacaattctcaaaagaagatatacaaatagccaacaaacttatgaaaaaatgttcaacatcactaatgatcagggaaatgccaattggaaccattatgcgataccaccttactc

SEQ ID NO: 600042 - DNA, 548 bp, Homo sapiens
aatttaggggggaaaaaaacaccccaatataaaaggggtaaaaacacgtcccatcccctcaaaaaccatgtaaaaatcctaaatcgactcccccccctccttctaataaaaataaaaaatttttccacaaactccccccttaaaaacctataaaacacattcacagtcaaaaaatctagcaacttcaaaaacaaacaaaaaaaaactttctttcaaaaaaaaacaacataatctccaccccacaacacccccaccaaccaaaaaaatctttcctaaccctccacaaccccgcacatctacaccccaaaacaaaaaacgcaacgtcattcccacaactccaaaaaccacacaaatcaccccgcaacaccccagaaattactgcctcacacaaaaaaaaaaacccactaaaaagtgcgggaaaaaacttcgtacacacccaccatacaatacataccaaacggccctacaccctaaacatacccgctcctccaaaacttcaacccacaaacaaaaacacccctcacatcagaaaacaccccaactcatcg

SEQ ID NO: 600043 - DNA, 120 bp, Homo sapiens
tggcacagcaggataataggcggtgagccgacgaggcgtcacaccaggtaatgacgaggcctcgacgaacttctccttcacttcgggcactaggctggctgggaatcacctagctaactc

SEQ ID NO: 600044 - DNA, 659 bp, Homo sapiens
  misc_feature (5)..(5): n is a, c, g, or t
  misc_feature (71)..(71): n is a, c, g, or t
  misc_feature (95)..(95): n is a, c, g, or t
  misc_feature (163)..(163): n is a, c, g, or t
  misc_feature (181)..(181): n is a, c, g, or t
  misc_feature (183)..(183): n is a, c, g, or t
  misc_feature (198)..(198): n is a, c, g, or t
  misc_feature (236)..(236): n is a, c, g, or t
  misc_feature (239)..(239): n is a, c, g, or t
  misc_feature (249)..(250): n is a, c, g, or t
  misc_feature (252)..(252): n is a, c, g, or t
  misc_feature (405)..(405): n is a, c, g, or t
  misc_feature (422)..(422): n is a, c, g, or t
  misc_feature (435)..(435): n is a, c, g, or t
  misc_feature (439)..(439): n is a, c, g, or t
  misc_feature (454)..(454): n is a, c, g, or t
  misc_feature (485)..(485): n is a, c, g, or t
  misc_feature (491)..(491): n is a, c, g, or t
  misc_feature (553)..(554): n is a, c, g, or t
  misc_feature (557)..(558): n is a, c, g, or t
  misc_feature (572)..(572): n is a, c, g, or t
  misc_feature (590)..(590): n is a, c, g, or t
  misc_feature (599)..(599): n is a, c, g, or t
  misc_feature (629)..(629): n is a, c, g, or t
attcnttggatttataaataacgtatcaagtgagcagtgaatttaaatcaagcttgtacatcaagaccgtnttgccaaaacaacagttgcttttngctgctgggagctgtagcttttcaaaacgttcacacatttctttgtttcgtcgttgttttttaattgnctttccgggggggtggcncnccgccaaggcccgcnggccctcgttgccccgccgtccaggttgggtgctgggnggnggggggtggnngngggggttcttttttcggtgtctgggctttgactccgctttctgttggttttgttttctttcttttaccttttccttcttgtctgggagcctgtggggggcctgtcaccttagaggcaagggttccttgtttgcgccaggcaggcaaatgtcanaccgcggccccgggggntgcgctgggggtngggnccgggggcccccggncatccggccccggctctttcgtgcctctgcncctggngggggggcccggggttccctcgggggggcgcggggggggggctgcgtcctggtccagtgtcnnggnngggggggcgctgcnggggcctggacaggaccncctagcccngccagggacaggagggtgagaccacctggnacaaaggcacagaggctggagagaaggcgg

SEQ ID NO: 600045 - DNA, 308 bp, Homo sapiens
  misc_feature (194)..(194): n is a, c, g, or t
  misc_feature (297)..(297): n is a, c, g, or t
gagaaattccgcacaccaccctcaccttcctgtaggtcaggccggttccttctgcggtgggcgtgggagagccacagcccagtggagaggcgttgcaaggccccacaccccttccaccatgttctaccaaccacggcaaatcaaaggccaccgagacccagggcctagggacacagacccatcccgggaggganggtgccgcccagtcacagtcccaccagtgcatggacacagggagaattgcccgggccccggttttggtgaatccggcagcccgccctctgccccagcgagtcncttcccctctc

SEQ ID NO: 600046 - DNA, 137 bp, Homo sapiens
tgctgggattacaggcatgagccactgcgctggctaggtcaacctttaatagttaaccatagctatttgttctatcaaggacatatcacaactactagaagttagctgccaccaccttgattcatgccacagtgcca

SEQ ID NO: 600047 - DNA, 239 bp, Homo sapiens
gactctagaggctcccccctcgtcctgtatagtgaggccgtccagtgatgccttcctcaccctgcccggcttcactatacatgacgatgtttacctacatttgccacatcaccacctctctgtaccgagctcagcagatcatccagctcaacatccaagcttcccctaaagtacgactgagcttggcaaacgaagctctgctgcccaccctcatctgcgacactgctggctgatgaatt

SEQ ID NO: 600048 - DNA, 358 bp, Homo sapiens
  misc_feature (173)..(173): n is a, c, g, or t
  misc_feature (182)..(182): n is a, c, g, or t
  misc_feature (197)..(197): n is a, c, g, or t
  misc_feature (215)..(216): n is a, c, g, or t
  misc_feature (230)..(230): n is a, c, g, or t
  misc_feature (240)..(240): n is a, c, g, or t
  misc_feature (243)..(243): n is a, c, g, or t
  misc_feature (251)..(251): n is a, c, g, or t
  misc_feature (285)..(286): n is a, c, g, or t
  misc_feature (300)..(300): n is a, c, g, or t
gaaaaaggggcccccccggggtttaatggtgacagtccaaaccactccactggcctcctggcaaaaaccgagtgtgttggggtttccgaaaagggtccctcctttttgggggaaggtcagcccagcccctccaaaggtttgatgtttccactttcacccgcaggccttaccgntttgtttanagtgaccccccctanattttccccaaaagggannggggtttttggggnccattttttnagncaggggtnatttgaaaatttgattttgattttattttttttnngtaaacttccaagngggcttttcccattcaattcctgtgatttatgccaataaagtttgcccatgattttca

SEQ ID NO: 600049 - DNA, 913 bp, Homo sapiens
tggtggcggatggggactagcgactcccgggtccggacaggagttgttacgtggcctggaacagcgttgagcaccggtctggtgcctcggctgcgctggtggcttgtgtgtcttccctggaccacgcgtgtagcatctccctgccactaggaaagatggagctcctggagctggctggtaggaggttcttgagagtggaaccacggagctacattcggtacctggaggatgtggttcggtggaggtcgctgcagaaccgatctgaaggcctaacatctccactctgagttctggaatgccatctctcaatgcgagaactcatgtggatgatgccccgagatgccttttggtatctccttgacgtctttttgggctgctggatgatcgcggctggtatgcctacctgggtaggctagagctgttggagaaatggactcggctggggttgctgatggtcacctggtgcttcaggggactgcgacgaagaagtccacatcgtatgttgcgccgtgacgtcttgttctatagcatgccccagaatcttccacgagatgatcccagcgactgtatgggtgccttctatgagagttctactaatgcacgagataaggagggacaggagggcaaaggcgagggacggaaactggcacaccacgtgggaacttccgtagccgcaggggcctcgtccaggcgactggtggcactgcaaagccggcacgcgaatatccggtgtcaccatcagattgttaccatagcctcatagaggctccaataatgggagcatgagcacccaaatgggagagatagtcgggcagatgacacgctgcatgcgtttccagaagaggaccagggcaggggcacaggcgagggtcgccgtaatgatgagcaacgatctcagacgacaaggcgtggg

SEQ ID NO: 600050 - DNA, 437 bp, Homo sapiens
gtgttgcagtgttgtcagggtggtcaaactcctgggctacgtattctcctacctcggcttccaggtagctgggaccattagtgtgtaccaccatgccaagcctaatttttttgactttttttttcttattttttaggtgagacagagtctcactctttaacccaggctggagtgcagtggcgtgatcttgggtcaccggaacctctgcctcccgggtacaagcgatactcctggcttcgagctcccaagtagctgggattacaggtgtctgccaccacagctggttaactttggtattttcagtgacagcacggattccaccatgttggacaggtggggctcgaactcctgaccttgtgatccacccacgttcgagctcatgctccatgggccctgggacaccctattggtaccctgggacaagagcgacaccagcc

SEQ ID NO: 600051 - DNA, 325 bp, Homo sapiens
  misc_feature (217)..(218): n is a, c, g, or t
  misc_feature (221)..(221): n is a, c, g, or t
  misc_feature (223)..(224): n is a, c, g, or t
  misc_feature (227)..(227): n is a, c, g, or t
  misc_feature (230)..(232): n is a, c, g, or t
  misc_feature (234)..(234): n is a, c, g, or t
  misc_feature (290)..(290): n is a, c, g, or t
  misc_feature (299)..(299): n is a, c, g, or t
tgttctgctctctcccgtggtgtgtccccgtccgctcctgtcctactgccccgcggtctggcctcatgggcagaagcgttatgagcagatttctggtcatgctccatctctcttccttcttccgccgttcgggcctcaccacctcttcctcctcaatcacccggtctgcttgaatcaggtcagcttcctctgcgatctctatcagcgaactctcctnntcncnntcntcnnncncatccccttctgcctgggctgtattctcaggtcctgctggagaaacactttgcgtnaaagaaccnacaccaagacctgagcaagccatgga

SEQ ID NO: 600052 - DNA, 1046 bp, Homo sapiens
  misc_feature (1044)..(1044): n is a, c, g, or t
aaatttagaagtcgaaaaatacattgtccataaggaattcgatgatgacacttacgacaatgacattgcgctgctgcagctgaagatcggattcgtcccgctgttgcccaggagagcagcgtggtgcgcactgtgtgccttcccccggtggacgctgcagctgtcggactggacggagtgtgagctctccggctacgggaagcatgaggcctttgtcctcctttctatttcggtagcggtctgaaaggagggcacatgttcagagctgtacccatccaggccgtctggcacattcgacaacatttacttaacaggaatcagtctaccgatcgaacatgctgtgtgctggagacactccggtaggcggcgggccccaggtcaaacttgtcacgacgacctgccaaggcgattgcgggaagggcccctggtgtgtcttgaagcgatgggccgcatgactttggtgggcatcatcagctggggcctgggttgtggacagagggatgtcccgggtgtgtacaccataggttacccaactacctagagcggggattctgtgacaacatgcgaccgtgagccaggagagcacccgactcctcaaaagcaatgagatcccgcctcttctttcttcagaagatcactgcacactggcgcaggtgcttctctactgatttctccagacccacaaacgctagaagcgggacgagaacctacgggagacggaagagtgcatttcccagatacttccatttggaagtttcaggactcggtctgattcaggatactctgtcggaggggagagtgatgcaataggctctcaagaatgctcttcctgggagaaatggcctgcacctgttaagtaaggcaaactctgacgtccggacagtggaacaggaccaaaagagggtcaaagaaaagacgacttgggagcggggtaataagaatttatcaaaacacgcacaaggggagggggcataaagagcgagatccaccgggagggagaggacacaaaagagcgcattcattcctataagtcgagtggtccgngc

SEQ ID NO: 600053 - DNA, 923 bp, Homo sapiens
  misc_feature (469)..(469): n is a, c, g, or t
ggcgcgccttttgttggtctttgtttaatacagaaacttcattgaaaaaacctagccgtgtacagctgccctttgaacgaggtggccattgcagggtactctgcctccccatcaggtggagtatgctgcccggccactcgttataattaactgtcccctgtagggggccgggttttgaaggcagggacgccctgcgcactcctcctgggggagcacccgttgcagtgtatgacgctattctcacttgggtagtgtacagtggccggtaactatggcaaagacggaggcattacaatataacctgcctccgagagaacgcatggacctcgtgtgtcctggaacacgggagagggacgcctgcgtggaggaccgctggtgtggacagtggtcggttgaatgtcacggtacaccttgctcggtggatttgtcggattgcacctcgatggatcattctgtcctctcactccanagggcatcgtccgccctgataccatgctagtcgttgaacagtttgaccgagggaccgtgctccagagaatcgtagggggggggcactctttagaggggtggcacggggggtcagggtttgtacccagacgcccaggcccaaaaccccgggcagggaagggtcagggggccttccccacagggggcacgctcgggggcgatcccaccgtgcgatcatgaagttcaccgggggcatcgcgcggggcgccagatgtcctccccgaaatatggggcacacacgagggaatggggcgagcctctgggggcaacaatgagcgggccccgggtaatttccaaaaacggaaaatgggggggggtacacggcggcagcgagtcccatagagcctcacggtaatggggacagggaaccccccatgactgaaggggaaaacgccggagaggacgccagaaaggtg

SEQ ID NO: 600054 - DNA, 103 bp, Homo sapiens
ctcggtacccttaagctctttcacatctgtatatcacatttggttatccactcaatcatctatggacaggaagtgaaatgttggttgctaggatcccggcaag

SEQ ID NO: 600055 - DNA, 892 bp, Homo sapiens
gagtacagccatgcggctccctgatctgagacctggactccctggtgctgtttggacgcggctttactgtgtgtctgcttcagggccctctggggactttgcttcctcaagggctgtcaggattatggctgtaggggcaccctgctggtgtgaggtgctgtgggtggctgctaaagctaggagtggctgctgggacttggtgggtgacactgctgtgtcccgctctgtctggccaaccctcctgatctgtctccctgagagtcctggtctggcgggggtccctcactgtgctccctcccagccatgagtcgcttcagccccttggagctggctgctggtggggtacggggctgcggggctcagctggtcactgtgggctgttctgagccctcctggagcccaggagaaggagcaggaccaggtgaacaacaaagtcttgatgtggaggctgctgaagctctccaggccggacctgcctctcctcgttgccgcttcttcttccttgtccttgctgtttgggtgagacattaatccctcactattctggtcgtgtgattgacatcctgggaggtgattttgaccccatgcctttgccagtgccatcttcttcatgtgcctcttctcctttggcagctcactgtctgcagagcttgcgatgaggctggttcactacaccatgtctcgaatcaacttgcggatccgggagcagtattactctcctggtgggcaggactcgggttcttacaggagactagacaggggagtggactccggtgaagtcggatacacctgatgagtaatggttctttaaagcaaagtgtcctggaactgtgaatgtggggcgttggcaagcagaatgccgcacccccttttgggaaccaaaacaggaggt

SEQ ID NO: 600056 - DNA, 141 bp, Homo sapiens
cttatggaagatgttagtagctctgacagggtgctcccatctgccagctgactttccggcaaagatcaacctctgctggtcaggagcgcatgccttccttgatccatggatctatatgctttgacagttctcgcatggtgt

SEQ ID NO: 600057 - DNA, 239 bp, Homo sapiens
tgggactacaggcaaaaactaagagagcccccatgcccagctaatttttttattttttgtagagatggggtttcgccatgtaggccaggctggtctcgaactcctgacctcaaaatgatacacccgcgtctgcctcccaaagtgctgggattacaggcgtgagctatttttaatttttaatagaaaataaccctgttatttaaagcatggattcactacaaaataaagattaaggtcca

SEQ ID NO: 600058 - DNA, 462 bp, Homo sapiens
gggcaggatcagaaagataaatacttcatcttctcactcaaatgcaggacttaaaaaatgagctcatagatctagagagtagaattgtggttatgagagattgggaagggtagggggaggggaggctagggagaggttaattaacagatacaaaattacagcaatataggaggaataaattctgttctactgttctatagtgctatgtggtgaatacagttaacaataatttattgtatattttttcaaagctagaaaaggatttcgagtgttcccagtacaaataagtgataactatttgaggtgattgatgtgctaattactctgatttgatcattacacactttatacttgtatcaaaatatcactctgtagccaataaatatgtacaatttttacatgtcaactaaaaataaacaggcataaaggtgaattttgttaagcattaaagcagtttgaact

SEQ ID NO: 600059 - DNA, 359 bp, Homo sapiens
tactttcaggaatttacttgttaaagctcccacatgtttcctaaagtgcagtctgtggcaagatcacagcgtggagacgcattggtcaagatgtggcccgagaaatagctaggaaaatgataaataacattcagcaggtcattcagggttcttgagaacagagaatgaccgaagggacttctgtgtactggcagtgcaaggcaaggtagcaacatagagcaaagggtttggagcaaagcaagcagaaatttgagtcctagctccagcattttgcccaccatgtgacctgggtaaagccactcattcattctgagccttagtttcctcacctgtaaaatgaggctgcttcccttgctgga

SEQ ID NO: 600060 - DNA, 169 bp, Homo sapiens
ctgtgtgacgttactgtcgtcgtaccagagatcgcaccagatagggatcatctgtgggataccaccatatttatcccctatttctagttatctggatcgtccaggaatggacattggctagacgtcccatagagatcacccagaccatcataaagatcccatcccatga

SEQ ID NO: 600061 - DNA, 410 bp, Homo sapiens
tcccccacgctgaaagctcatttgtttgttaactctcgtgttttagaggatatttgatggaccgtggaatttaagcgggctaaggagggaagagaggagaacataagtgcgtgaagtgtagagagaaggtagtagggtcaatggcatgatgtttcactatttcctaatctctgctctactcttacatgaccttatgttttgaatatagttttctctctctgcgtgaaatgcttcttttatacacaggttagatgtcatctcttttatacttttatttcctctgctggggccactgataatatggaaaatgctcagtaaatgctgaaaattgaaattctccacttcagtttgatagggaagattatttcaaattgggagattgtgaaagtttgtttatccacagtatttct

SEQ ID NO: 600062 - DNA, 821 bp, Homo sapiens
  misc_feature (3)..(3): n is a, c, g, or t
  misc_feature (12)..(12): n is a, c, g, or t
  misc_feature (19)..(19): n is a, c, g, or t
  misc_feature (25)..(25): n is a, c, g, or t
  misc_feature (39)..(39): n is a, c, g, or t
ttnggctaggtncgaggcnggtgtnaatcggccgaggtnctttagttgtgtactggggccttggctgtgctgatggccagaagccaggggccttctccacagtccctttggacttgtcttggtccctgagtactcccatgaagatcctccttggaggtgcctgtcaggtatcctgtggcctccctgcctggactctgcttgccgtgtaaacacccccaactgcgctgctctgtgctcctctcccaggtttcttgttcgattcctcttaggtctttggctttcaggacctcagattctttatccttgtagccaccagaggacagagccccagaagtggatgttttaggcccagaaggaccagggcatcgagaagacattgggaccctgttgggggtgagcatggaaccctcttactctcgcttcaccctctcaagctccttagatgctgggcagaagtgggatgagtggcccaagaccgagatccctaaggttctgagagccagtgtcttccctaatctggctttcctctatccttgccgtcgttcccacagcccttcagtgaagtgcaaactcagtggccaagtgtgggccaagtgtgcattgtactggcacagagaggggcagtgactcactggagatcacaggaatcaaagggctggcccagacccagtgggctcctttcccagacctttcttgggccaagcttggtgctggctttggggcctgggctcatttttgacccatttgctggcaggtatgccgtggaatggtgcgggtggccccggatattctgccggctcgaaagactttcttccgcgcgg

SEQ ID NO: 600063 - DNA, 272 bp, Homo sapiens
gcacgaggtgattaggtggagttaggagttaccctcaggcacactcaccgtcatacataggcatccctggcagaggatccacgcctatgacaaggaagaagcgagccttgctattagttttttctcttagctacaatttattttatcttgcgtggtgactcgtccagttatttgacttctggtaaaatagcacacatttacatagcatatcaagacgttcatattttaggctatgatgtgaaaatgggcagtcttatagagcctttccatta

SEQ ID NO: 600064 - DNA, 664 bp, Homo sapiens
  misc_feature (40)..(40): n is a, c, g, or t
  misc_feature (210)..(210): n is a, c, g, or t
  misc_feature (458)..(458): n is a, c, g, or t
  misc_feature (550)..(550): n is a, c, g, or t
  misc_feature (626)..(626): n is a, c, g, or t
  misc_feature (634)..(634): n is a, c, g, or t
  misc_feature (649)..(649): n is a, c, g, or t
ctagagtaacatacttcgctcatatactctcctctagatngaaataggatagccactgcctaaaccagtttaatcacactagctacttcaaaccattattatatttcaaaccacttctattcttttaaacatattaccttctaattaaattaaatgcctttatggtcacttaagcaacaacagaatatattcaaacataaaccatatttngtaaatcaatgatgagcacattaaatagctttaaggggtgggccaaaaagtgccaaaggtaatcaaacttttatgtgactccactgttactttactgcttctaagcagaagctatattcattttcagttctcttatatcaacattgtaaggtgcttacacaagcctgggcagtttagtcacttctgctcatacagatttttacacggaagaaaattttaaagacaggctatttaatacgagcctcgtngtatatatttactaaaataactaaacttgttctgttaatgaaattttactccttgtgcaaagtagtaagtatttcatctcttagtgcatatntttttctattactgctcctgtaatctttaatgatcctgccccaagattgaaatctgaatgagaggtcattttatanaagtttanagaattcttaatcanttaacaatactagaa

SEQ ID NO: 600065 - DNA, 3489 bp, Homo sapiens
tctgccggagagagggttggaggcgtcttcgctcgcttatcgcatacttccgcccgctccttccagttagttccctaacccgagtgaagccacttccggcttcccgggcgccttccgcagtcctcttccgggtgatggcggccgggtgccccggatgtagccctggcgcaagcatctcttcttttttccacctcgccttccgcggattcccagcttgagaaacacctctttgccccgtcatgccaaagaggaaagtgaccttccaaggcgtgggagatgaggaggatgaggatgaaatcattgtccccaagaagaagctggtggaccctgtggctgggtcagggggtcctgggagccgctttaaaggcaaacactctttggatagcgatgaggaggaggatgatgatgatggggggtccagcaaatatgacatcttggcctcagaggatgtagaaggtcaggaggcagccacactccccagcgaggggggtgttcggatcacaccctttaacctgcaggaggagatggaggaaggccactttgatgccgatggcaactacttcctgaaccgggatgctcagatccgagacagctggctggacaacattgactgggtgaagatccgggagcggccacctggccagcgccaggcctcagactcggaggaggaggacagcttgggccagacctcaatgagtgcccaagccctcttggagggacttttggagctcctattgcctagagagacagtggctggggcactgaggcgtctgggggcccgaggaggaggcaaagggagaaaggggcctgggcaacccagttcccctcagcgcctggaccggctctccgggttggccgaccagatggtggcccggggcaaccttggtgtgtaccaggaaacaagggaacggttggctatgcgtctgaagggtttggggtgtcagaccctaggaccccacaatcccacacccccaccctccctggacatgttcgctgaggagttggcggaggaggaactggagaccccaacccctacccagagaggagaagcagagtcgcggggagatggtctggtggatgtgatgtgggaatataagtgggagaacacgggggatgccgagctgtatgggcccttcaccagcgcccagatgcagacctgggtgagtgaaggctacttcccggacggtgtttattgccggaagctggacccccctggtggtcagttctacaactccaaacgcattgactttgacctctacacctgagcctgctgggggcccagtttggtgggcccttctttcctggactttgtggaggaggcaccaagtgtctcaggcagcgaggaaattggaggccatttttcagtcaatttccctttcccaataaaagcctttagttgtgtactggggccttggctgtgctgatggccagaagccaggggccttctccacagtccctttggacttgtcttggtccctgagtactcccatgaagatcctccttggaggtgcctgtcaggtatcctgtggcctccctgcctggactctgcttgccgtgtaaacacccccaactgcgctgctctgtgctcctctcccaggtttcttgttcgattcctcttaggtctttggctttcaggacctcagattctttatccttgtagccaccagaggacagagccccagaagtggatgttttaggcccagaaggaccagggcatcgagaagacattgggaccctgttgggggtgagcatggaaccctcttactctcgcttcaccctctcaagctccttagatgctgggcagaagtgggatgagtggcccaagaccgagatccctaaggttctgagagccagtgtcttccctaatctggctttcctctatccttgccgtcgttcccacagcccttcagtgaagtgcaaactcagtggccaagtgtgggccaagtgtgcattgtactggcacagagaggggcagtgactcactggagatcacaggaatcaaagggctggcccagacccagtgggctcctttcccagacctttcttggcacaaagcctttgctgcctggccttggaggccctgcggcctacattctctggaccccactatgtgcctggcacagggctagtgccttgaggaaactgaggtagctgggttggtccccttccaggaattcagagtctggtggcaggggcatgggaaatagacagatgtaattctatagcctgggcctggcaccctccacctccacgccccaccagcattgccttacgcctcccttgccccacgttagatggtttcttccggttttgcactctggctgccccttggagtctcctggggagctgtaatatctctttggagattcagattgagctggtctaggttgtggcccaggcattgggcattttggaagcccccaggtgttttcagcttgcagccaggccgagagagagcccctgagtcagatccccatggtttaggcacacctagcgggaggggtggctcctggaccccaccgtggttggagagctgagcatgtgtgtggctttagtggggtctgttagttatgggggtctgggcactggagctgcaggacacttgggatcccaggtcagaaagggccagatgagcaactaggaaagacttgggggccagggcggagtggggtcacctgacactcttgtgaggccccttctagtgcctgctcacaccggaatttcattcactccaagaagccatcaggggtaagataccttcctttaaacgtcactaagaaagaagaggcctgccggtgacacagtaagatgccattgatctaaagatgcgtcttgatttcagaaaggtccggaagtggaaagcaggtttcagggctgctgaggtacagggttctcctgtaggccccagggatggtctcaggggtgctgagtgcgtgcgtggtaaatggatggagcccaggggcgcctcctgccagtgtcctccaggcactcaaacctagcccttctgaagccgacctcacgtgacctcacagcccctcctgaaggcgcctcactgatgacggtgggtggaataacagcccccagagatgtccaggtttggaaccccaggacgtgggaaagtgttaccttgcgtggcaaaagggacccggcgcctgtgcttcagttcaggatttcgtggtggggagatgaccgtggatggttgaggtgggccctgagtaatcatgggggcccttataagggaaggggagtcacgagggtctgcgcatgaagcaaggaagcttctggctgtgaagatggcaagaaggcctggggccaggcgatgaggtggcccctggaggagctggaaaaggcattggattctgccccagagcctccgtggagaaacaaagccgcactgacaagacttcagcctggtgaaaaccattttggactcctgacctctagaactgtaagataataaattggtgtggttttcaacctaaaaaaaaa

SEQ ID NO: 600066 - DNA, 211 bp, Homo sapiens
  misc_feature (8)..(8): n is a, c, g, or t
  misc_feature (27)..(27): n is a, c, g, or t
  misc_feature (36)..(36): n is a, c, g, or t
  misc_feature (38)..(38): n is a, c, g, or t
  misc_feature (55)..(55): n is a, c, g, or t
  misc_feature (63)..(63): n is a, c, g, or t
  misc_feature (76)..(77): n is a, c, g, or t
  misc_feature (82)..(82): n is a, c, g, or t
  misc_feature (86)..(86): n is a, c, g, or t
  misc_feature (88)..(89): n is a, c, g, or t
  misc_feature (92)..(92): n is a, c, g, or t
  misc_feature (111)..(111): n is a, c, g, or t
  misc_feature (115)..(115): n is a, c, g, or t
  misc_feature (145)..(145): n is a, c, g, or t
  misc_feature (152)..(152): n is a, c, g, or t
  misc_feature (163)..(163): n is a, c, g, or t
  misc_feature (168)..(168): n is a, c, g, or t
  misc_feature (172)..(172): n is a, c, g, or t
gtcttagnttctgcttcagtaaggganttctgaggncnttgctatgataccatcnttaagacnttcacatgtcttnntatantatntnntcntttcaaatcctaatcactntttnatactattacagggctttgatgctgccagnactgtcntttacataggnacttntagntttgcacagtaatagaggacttagaagtacctaactata

SEQ ID NO: 600067 - DNA, 733 bp, Homo sapiens
tggtgtgatccctgtgggccctgagtctactccatctcacatcacatggtgtgtgccctggtgtggacctggagcctgtctcaccaatggagctgcctcaccaaagtgccaacctcagccccaagcctgtggcaagcccaataatgagccctcacagcagccccaccaatgctcccttccaatgtcaccaaccaatggtggtgcctcgacctggtggctcctgctagtcaccaaggatgtcccccaatgcctgacaaatgtggaagtggccctccctgtggcagactgtgtgtagtaccacggcccagtccacacccctagtacctggccccactgacccaatgtcatgggccctgatgggtgctggccccacactcagccatcgatggagaatggtgatgaagggcatttgaggagaactgtgcttgcgtgctccatgtggccatggagcgagcccctggcgccgatggtcaatgcaccgcaacaccagcagcatcgccagctggttcggccttaagaagagcaagctgccagcgctgaacctgccgcacagagggccaccaagaacaatggagggggctggcgggggctccccgctccggagggaagtcaagatggaagcccggaagctggaggccgagagcctcaacatctccaagctgatggccaaggcgggaagacttgcgtcgggcactggaagaggagaagcctactaagcagcgtgccggcaagc

SEQ ID NO: 600068 - DNA, 4005 bp, Homo sapiens
tctgccggagagagggttggaggcgtcttcgctcgcttatcgcatacttccgcccgctccttccagttagttccctaacccgagtgaagccacttccggcttcccgggcgccttccgcagtcctcttccgggtgatggcggccgggtgccccggatgtagccctggcgcaagcatctcttcttttttccacctcgccttccgcggattcccaggtgagtgcgcgagggtgggaccgcccgaatccccgtggccctctaagttgtacacagcccgggacagttggggctcaccacacggaattgggagttcggagcagggaggaacgggtcggcgagagcgccaggtcctgggtctgcccgggcccggcgagctccgagagagccagggtagagagcgggggtcagcccgtggagccgtaggcgcgcagactgcgggggctggagttgggggcggtcacgtggtgaagcctgtctcctttcagccagggtcgggggatccagagggtccgctcctccgtccccgccccgtttaactcgcggatgctagacccaagtcctggaggcctcctggctgccagcttcctttcggcccctgcttttgtgctccctccgctcccaaactgtacctgtcacagaccaggaaaaatgtttgctgtgctgcgtctgttggcgagtcccctcctcacccggttcccttcctctgcatcctttccttccgcggattcccagcttgagaaacacctctttgccccgtcatgccaaagaggaaagtgaccttccaaggcgtgggagatgaggaggatgaggatgaaatcattgtccccaagaagaagctggtggaccctgtggctgggtcagggggtcctgggagccgctttaaaggcaaacactctttggatagcgatgaggaggaggatgatgatgatggggggtccagcaaatatgacatcttggcctcagaggatgtagaaggtcaggaggcagccacactccccagcgaggggggtgttcggatcacaccctttaacctgcaggaggagatggaggaaggccactttgatgccgatggcaactacttcctgaaccgggatgctcagatccgagacagctggctggacaacattgactgggtgaagatccgggagcggccacctggccagcgccaggcctcagactcggaggaggaggacagcttgggccagacctcaatgagtgcccaagccctcttggagggacttttggagctcctattgcctagagagacagtggctggggcactgaggcgtctgggggcccgaggaggaggcaaagggagaaaggggcctgggcaacccagttcccctcagcgcctggaccggctctccgggttggccgaccagatggtggcccggggcaaccttggtgtgtaccaggaaacaagggaacggttggctatgcgtctgaagggtttggggtgtcagaccctaggaccccacaatcccacacccccaccctccctggacatgttcgctgaggagttggcggaggaggaactggagaccccaacccctacccagagaggagaagcagagtcgcggggagatggtctggtggatgtgatgtgggaatataagtgggagaacacgggggatgccgagctgtatgggcccttcaccagcgcccagatgcagacctgggtgagtgaaggctacttcccggacggtgtttattgccggaagctggacccccctggtggtcagttctacaactccaaacgcattgactttgacctctacacctgagcctgctgggggcccagtttggtgggcccttctttcctggactttgtggaggaggcaccaagtgtctcaggcagcgaggaaattggaggccatttttcagtcaatttccctttcccaataaaagcctttagttgtgtactggggccttggctgtgctgatggccagaagccaggggccttctccacagtccctttggacttgtcttggtccctgagtactcccatgaagatcctccttggaggtgcctgtcaggtatcctgtggcctccctgcctggactctgcttgccgtgtaaacacccccaactgcgctgctctgtgctcctctcccaggtttcttgttcgattcctcttaggtctttggctttcaggacctcagattctttatccttgtagccaccagaggacagagccccagaagtggatgttttaggcccagaaggaccagggcatcgagaagacattgggaccctgttgggggtgagcatggaaccctcttactctcgcttcaccctctcaagctccttagatgctgggcagaagtgggatgagtggcccaagaccgagatccctaaggttctgagagccagtgtcttccctaatctggctttcctctatccttgccgtcgttcccacagcccttcagtgaagtgcaaactcagtggccaagtgtgggccaagtgtgcattgtactggcacagagaggggcagtgactcactggagatcacaggaatcaaagggctggcccagacccagtgggctcctttcccagacctttcttggcacaaagcctttgctgcctggccttggaggccctgcggcctacattctctggaccccactatgtgcctggcacagggctagtgccttgaggaaactgaggtagctgggttggtccccttccaggaattcagagtctggtggcaggggcatgggaaatagacagatgtaattctatagcctgggcctggcaccctccacctccacgccccaccagcattgccttacgcctcccttgccccacgttagatggtttcttccggttttgcactctggctgccccttggagtctcctggggagctgtaatatctctttggagattcagattgagctggtctaggttgtggcccaggcattgggcattttggaagcccccaggtgttttcagcttgcagccaggccgagagagagcccctgagtcagatccccatggtttaggcacacctagcgggaggggtggctcctggaccccaccgtggttggagagctgagcatgtgtgtggctttagtggggtctgttagttatgggggtctgggcactggagctgcaggacacttgggatcccaggtcagaaagggccagatgagcaactaggaaagacttgggggccagggcggagtggggtcacctgacactcttgtgaggccccttctagtgcctgctcacaccggaatttcattcactccaagaagccatcaggggtaagataccttcctttaaacgtcactaagaaagaagaggcctgccggtgacacagtaagatgccattgatctaaagatgcgtcttgatttcagaaaggtccggaagtggaaagcaggtttcagggctgctgaggtacagggttctcctgtaggccccagggatggtctcaggggtgctgagtgcgtgcgtggtaaatggatggagcccaggggcgcctcctgccagtgtcctccaggcactcaaacctagcccttctgaagccgacctcacgtgacctcacagcccctcctgaaggcgcctcactgatgacggtgggtggaataacagcccccagagatgtccaggtttggaaccccaggacgtgggaaagtgttaccttgcgtggcaaaagggacccggcgcctgtgcttcagttcaggatttcgtggtggggagatgaccgtggatggttgaggtgggccctgagtaatcatgggggcccttataagggaaggggagtcacgagggtctgcgcatgaagcaaggaagcttctggctgtgaagatggcaagaaggcctggggccaggcgatgaggtggcccctggaggagctggaaaaggcattggattctgccccagagcctccgtggagaaacaaagccgcactgacaagacttcagcctggtgaaaaccattttggactcctgacctctagaactgtaagataataaattggtgtggttttcaacctaaaaaaaaa

SEQ ID NO: 600069 - DNA, 934 bp, Homo sapiens
  misc_feature (8)..(8): n is a, c, g, or t
  misc_feature (32)..(32): n is a, c, g, or t
  misc_feature (36)..(36): n is a, c, g, or t
  misc_feature (97)..(97): n is a, c, g, or t
  misc_feature (99)..(99): n is a, c, g, or t
  misc_feature (109)..(109): n is a, c, g, or t
  misc_feature (115)..(115): n is a, c, g, or t
  misc_feature (118)..(118): n is a, c, g, or t
  misc_feature (146)..(146): n is a, c, g, or t
  misc_feature (156)..(156): n is a, c, g, or t
  misc_feature (165)..(166): n is a, c, g, or t
  misc_feature (170)..(170): n is a, c, g, or t
  misc_feature (180)..(180): n is a, c, g, or t
  misc_feature (182)..(182): n is a, c, g, or t
  misc_feature (191)..(191): n is a, c, g, or t
  misc_feature (195)..(195): n is a, c, g, or t
  misc_feature (207)..(207): n is a, c, g, or t
  misc_feature (212)..(212): n is a, c, g, or t
  misc_feature (222)..(222): n is a, c, g, or t
  misc_feature (224)..(224): n is a, c, g, or t
  misc_feature (235)..(235): n is a, c, g, or t
  misc_feature (242)..(242): n is a, c, g, or t
  misc_feature (251)..(251): n is a, c, g, or t
  misc_feature (266)..(266): n is a, c, g, or t
  misc_feature (271)..(271): n is a, c, g, or t
  misc_feature (275)..(275): n is a, c, g, or t
  misc_feature (294)..(294): n is a, c, g, or t
  misc_feature (296)..(296): n is a, c, g, or t
  misc_feature (334)..(334): n is a, c, g, or t
  misc_feature (341)..(341): n is a, c, g, or t
  misc_feature (366)..(366): n is a, c, g, or t
  misc_feature (390)..(390): n is a, c, g, or t
  misc_feature (392)..(392): n is a, c, g, or t
  misc_feature (396)..(396): n is a, c, g, or t
  misc_feature (404)..(404): n is a, c, g, or t
  misc_feature (413)..(413): n is a, c, g, or t
  misc_feature (421)..(421): n is a, c, g, or t
  misc_feature (435)..(435): n is a, c, g, or t
  misc_feature (439)..(440): n is a, c, g, or t
  misc_feature (443)..(443): n is a, c, g, or t
  misc_feature (446)..(446): n is a, c, g, or t
  misc_feature (466)..(466): n is a, c, g, or t
  misc_feature (518)..(518): n is a, c, g, or t
  misc_feature (549)..(549): n is a, c, g, or t
cttttccngcccccgtgcactctccgcccgangcgngcccccggctcgcggggttcgcccccgagcgctgcgtcctgcgggtcacctaacccatttntngcttcctctncctgtnctnagccatggccagcgagagctcacctctnctggcctacnggctccttnnggtngagggggttncnctccctgcnaatngggccgggggtnctggnggggcgtctncncggtatctgtncaccttnctgggtgtngtggtgcccactgtnctgtncatnttcagcatagttgtttttntnaggattgggttcgtggtgggtcatgctgggctactgcnggccctngccatgctgctggttgcctactttntcctggcactcaccgtcctctctntntgtnctatcgcnaccaatggngccgtgcnggggggcggagctncttnntgntcngccgcacactggggcccgangtcgggggcagcattgggctcatgttctacctggctaacgtctgttgctgtncgtctccctcctggggctggtggagtctgtncttgatgtcttcggggccgatgccacagggcccagtgggctccgggtcctgccccagggctacggctggaacctgctgtatggctccctgctgctgggccttgtgggtggggtctgcaccctgggagccggcctctatgcccgggcctcattcctcacattcctgctggtctctggctccctggcctctgtgctcatcagttttgtggctgtgggggccgagggacatccgcttgactcctaggcctggccccaatggctcctccctgccgccccggtttggccacttcaccggcttcaacagcagtaccctgaaggacaacttgggcgctggctatgctgaggactacaccacgggagccgtgatgaattttgccagcgtcttt

SEQ ID NO: 600070 - DNA, 3260 bp, Homo sapiens
tctgccggagagagggttggaggcgtcttcgctcgcttatcgcatacttccgcccgctccttccagttagttccctaacccgagtgaagccacttccggcttcccgggcgccttccgcagtcctcttccgggtgatggcggccgggtgccccggatgtagccctggcgcaagcatctcttcttttttccacctcgccttccgcggattcccagcttgagaaacacctctttgccccgtcatgccaaagaggaaagtgaccttccaaggcgtgggagatgaggaggatgaggatgaaatcattgtccccaagaagaagctggtggaccctgtggctgggtcagggggtcctgggagccgctttaaaggcaaacactctttggatagcgatgaggaggaggatgatgatgatggggggtccagcaaatatgacatcttggcctcagaggatgtagaaggtcaggaggcagccacactccccagcgaggggggtgttcggatcacaccctttaacctgcaggaggagatggaggaaggccactttgatgccgatggcaactacttcctgaaccgggatgctcagatccgagacagctggctggacaacattgactgggtgaagatccgggagcggccacctggccagcgccaggcctcagactcggaggaggaggacagcttgggccagacctcaatgagtgcccaagccctcttggagggacttttggagctcctattgcctagagagacagtggctggggcactgaggcgtctgggggcccgaggaggaggcaaagggagaaaggggcctgggcaacccagttcccctcagcgcctggaccggctctccgggttggccgaccagatggtggcccggggcaaccttggtgtgtaccaggaaacaagggaacggttggctatgcgtctgaagggtttggggtgtcagaccctaggaccccacaatcccacacccccaccctccctggacatgttcgctgaggagttggcggaggaggaactggagaccccaacccctacccagagaggagaagcagagtcgcggggagatggtctggtggatgtgatgtgggaatataagtgggagaacacgggggatgccgagctgtatgggcccttcaccagcgcccagatgcagacctgggtgagtgaaggctacttcccggacggtgtttattgccggaagctggacccccctggtggtcagttctacaactccaaacgcattgactttgacctctacacctgagcctgctgggggcccagtttggtgggcccttctttcctggactttgtggaggaggcaccaagtgtctcaggcagcgaggaaattggaggccatttttcagtcaatttccctttcccaataaaagcctttagttgtgtactggggccttggctgtgctgatggccagaagccaggggccttctccacagtccctttggacttgtcttggtccctgagtactcccatgaagatcctccttggaggtgcctgtcaggtatcctgtggcctccctgcctggactctgcttgccgtgtaaacacccccaactgcgctgctctgtgctcctctcccaggtttcttgttcgattcctcttaggtctttggctttcaggacctcagattctttatccttgtagccaccagaggacagagccccagaagtggatgttttaggcccagaaggaccagggcatcgagaagacattgggaccctgttgggggtgagcatggaaccctcttactctcgcttcaccctctcaagctccttagatgctgggcagaagtgggatgagtggcccaagaccgagatccctaaggttctgagagccagtgtcttccctaatctggctttcctctatccttgccgtcgttcccacagcccttcagtgaagtgcaaactcagtggccaagtgtgggccaagtgtgcattgtactggcacagagaggggcagtgactcactggagatcacaggaatcaaagggctggcccagacccagtgggctcctttcccagacctttcttggcacaaagcctttgctgcctggccttggaggccctgcggcctacattctctggaccccactatgtgcctggcacagggctagtgccttgaggaaactgaggtagctgggttggtccccttccaggaattcagagtctggtggcaggggcatgggaaatagacagatgtaattctatagcctgggcctggcaccctccacctccacgccccaccagcattgccttacgcctcccttgccccacgttagatggtttcttccggttttgcactctggctgccccttggagtctcctggggagctgtaatatctctttggagattcagattgagctggtctaggttgtggcccaggcattgggcattttggaagcccccaggtgttttcagcttgcagccaggccgagagagagcccctgagtcagatccccatggtttaggcacacctagcgggaggggtggctcctggaccccaccgtggttggagagctgagcatgtgtgtggctttagtggggtctgttagttatgggggtctgggcactggagctgcaggacacttgggatcccaggtcagaaagggccagatgagcaactaggaaagacttgggggccagggcggagtggggtcacctgacactcttgtgaggccccttctagtgcctgctcacaccggaatttcattcactccaagaagccatcaggggtaagataccttcctttaaacgtcactaagaaagaagaggcctgccggtgacacagtaagatgccattgatctaaagatgcgtcttgatttcagaaaggtccggaagtggaaagcaggtttcagggctgctgaggtacagggttctcctgtaggccccagggatggtctcaggggtgctgagtgcgtgcgtggtaaatggatggagcccaggggcgcctcctgccagtgtcctccaggcactcaaacctagcccttataagggaaggggagtcacgagggtctgcgcatgaagcaaggaagcttctggctgtgaagatggcaagaaggcctggggccaggcgatgaggtggcccctggaggagctggaaaaggcattggattctgccccagagcctccgtggagaaacaaagccgcactgacaagacttcagcctggtgaaaaccattttggactcctgacctctagaactgtaagataataaattggtgtggttttcaacctaaaaaaaaa

SEQ ID NO: 600071 - DNA, 185 bp, Homo sapiens
agtagtgatgccatgacgggtgccgtagccgtgatagagttgatgcgacgaagagccgacggctggaaggcggttcgcaggagcggtactaacccgtgtctttgctgagaaataccgtgtggtgcgaaggtgaaacatttaatgaggatatgcacggagttgagagtcgagggaattggccggaa

SEQ ID NO: 600072 - DNA, 2328 bp, Homo sapiens
tctgccggagagagggttggaggcgtcttcgctcgcttatcgcatacttccgcccgctccttccagttagttccctaacccgagtgaagccacttccggcttcccgggcgccttccgcagtcctcttccgggtgatggcggccgggtgccccggatgtagccctggcgcaagcatctcttcttttttccacctcgccttccgcggattcccagcttgagaaacacctctttgccccgtcatgccaaagaggaaagtgaccttccaaggcgtgggagatgaggaggatgaggatgaaatcattgtccccaagaagaagctggtggaccctgtggctgggtcagggggtcctgggagccgctttaaaggcaaacactctttggatagcgatgaggaggaggatgatgatgatggggggtccagcaaatatgacatcttggcctcagaggatgtagaaggtcaggaggcagccacactccccagcgaggggggtgttcggatcacaccctttaacctgcaggaggagatggaggaaggccactttgatgccgatggcaactacttcctgaaccgggatgctcagatccgagacagctggctggacaacattgactgggtgaagatccgggagcggccacctggccagcgccaggcctcagactcggaggaggaggacagcttgggccagacctcaatgagtgcccaagccctcttggagggacttttggagctcctattgcctagagagacagtggctggggcactgaggcgtctgggggcccgaggaggaggcaaagggagaaaggggcctgggcaacccagttcccctcagcgcctggaccggctctccgggttggccgaccagatggtggcccggggcaaccttggtgtgtaccaggaaacaagggaacggttggctatgcgtctgaagggtttggggtgtcagaccctaggaccccacaatcccacacccccaccctccctggacatgttcgctgaggagttggcggaggaggaactggagaccccaacccctacccagagaggagaagcagagtcgcggggagatggtctggtggatgtgatgtgggaatataagtgggagaacacgggggatgccgagctgtatgggcccttcaccagcgcccagatgcagacctgggtgagtgaaggctacttcccggacggtgtttattgccggaagctggacccccctggtggtcagttctacaactccaaacgcattgactttgacctctacacctgagcctgctgggggcccagtttggtgggcccttctttcctggactttgtggaggaggcaccaagtgtctcaggcagcgaggaaattggaggccatttttcagtcaatttccctttcccaataaaagcctttagttgtgtactggggccttggctgtgctgatggccagaagccaggggccttctccacagtccctttggacttgtcttggtccctgagtactcccatgaagatcctccttggaggtgcctgtcaggtatcctgtggcctccctgcctggactctgcttgccgtgtaaacacccccaactgcgctgctctgtgctcctctcccaggtttcttgttcgattcctcttaggtctttggctttcaggacctcagattctttatccttgtagccaccagaggacagagccccagaagtggatgttttaggcccagaaggaccagggcatcgagaagacattgggaccctgttgggggtgagcatggaaccctcttactctcgcttcaccctctcaagctccttagatgctgggcagaagtgggatgagtggcccaagaccgagatccctaaggttctgagagccagtgtcttccctaatctggctttcctctatccttgccgtcgttcccacagcccttcagtgaagtgcaaactcagtggccaagtgtgggccaagtgtgcattgtactggcacagagaggggcagtgactcactggagatcacaggaatcaaagggctggcccagacccagtgggctcctttcccagacctttcttggcacaaagcctttgctgcctggccttggaggccctgcggcctacattctctggaccccactatgtgcctggcacagggctagtgccttgaggaaactgaggtagctgggttggtccccttccaggaattcagagtctggtggcaggggcatgggaaatagacagatgtaattctatagctgggctgggacctccacttcaagccacaggattgcttaagctccttggccaggtgaaggttctcccggtgacctggggcctggggtcgggagggaaactggg

SEQ ID NO: 600073 - DNA, 225 bp, Homo sapiens
aatattcataagtggatggcagcaacttcttattttaatcctcacacagcctgaggaggtgggctaaatctccattttgcacaagaggaaattaaaggccgggcatagtggctcatgcctgtaatcccagcactttgggaggctgaggcgggaggatggcttgaggccaggagtttgagatcagcctgggcaacacagggagaccccatctttacaaaaagtgaa

SEQ ID NO: 600074 - DNA, 3574 bp, Homo sapiens
tctgccggagagagggttggaggcgtcttcgctcgcttatcgcatacttccgcccgctccttccagttagttccctaacccgagtgaagccacttccggcttcccgggcgccttccgcagtcctcttccgggtgatggcggccgggtgccccggatgtagccctggcgcaagcatctcttcttttttccacctcgccttccgcggattcccagcttgagaaacacctctttgccccgtcatgccaaagaggaaagtgaccttccaaggcgtgggagatgaggaggatgaggatgaaatcattgtccccaagaagaagctggtggaccctgtggctgggtcagggggtcctgggagccgctttaaaggcaaacactctttggatagcgatgaggaggaggatgatgatgatggggggtccagcaaatatgacatcttggcctcagaggatgtagaaggtcaggaggcagccacactccccagcgaggggggtgttcggatcacaccctttaacctgcaggaggagatggaggaaggccactttgatgccgatggcaactacttcctgaaccgggatgctcagatccgagacagctggctggacaacattgactgggtgaagatccgggagcggccacctggccagcgccaggcctcagactcggaggaggaggacagcttgggccagacctcaatgagtgcccaagccctcttggagggacttttggagctcctattgcctagagagacagtggctggggcactgaggcgtctgggggcccgaggaggaggcaaagggagaaaggggcctgggcaacccagttcccctcagcgcctggaccggctctccgggttggccgaccagatggtggcccggggcaaccttggtgtgtaccaggaaacaagggaacggttggctatgcgtctgaagggtttggggtgtcagaccctaggaccccacaatcccacacccccaccctccctggacatgttcgctgaggagttggcggaggaggaactggagaccccaacccctacccagagaggagaagcagagtcgcggggagatggtctggtggatgtgatgtgggaatataagtgggagaacacgggggatgccgagctgtatgggcccttcaccagcgcccagatgcaggtgagctgctttctccctcctcctgccttgtccctgcttcccccactcctgtcagttgttccccagctctgccctctccttgcagacctgggtgagtgaaggctacttcccggacggtgtttattgccggaagctggacccccctggtggtcagttctacaactccaaacgcattgactttgacctctacacctgagcctgctgggggcccagtttggtgggcccttctttcctggactttgtggaggaggcaccaagtgtctcaggcagcgaggaaattggaggccatttttcagtcaatttccctttcccaataaaagcctttagttgtgtactggggccttggctgtgctgatggccagaagccaggggccttctccacagtccctttggacttgtcttggtccctgagtactcccatgaagatcctccttggaggtgcctgtcaggtatcctgtggcctccctgcctggactctgcttgccgtgtaaacacccccaactgcgctgctctgtgctcctctcccaggtttcttgttcgattcctcttaggtctttggctttcaggacctcagattctttatccttgtagccaccagaggacagagccccagaagtggatgttttaggcccagaaggaccagggcatcgagaagacattgggaccctgttgggggtgagcatggaaccctcttactctcgcttcaccctctcaagctccttagatgctgggcagaagtgggatgagtggcccaagaccgagatccctaaggttctgagagccagtgtcttccctaatctggctttcctctatccttgccgtcgttcccacagcccttcagtgaagtgcaaactcagtggccaagtgtgggccaagtgtgcattgtactggcacagagaggggcagtgactcactggagatcacaggaatcaaagggctggcccagacccagtgggctcctttcccagacctttcttggcacaaagcctttgctgcctggccttggaggccctgcggcctacattctctggaccccactatgtgcctggcacagggctagtgccttgaggaaactgaggtagctgggttggtccccttccaggaattcagagtctggtggcaggggcatgggaaatagacagatgtaattctatagcctgggcctggcaccctccacctccacgccccaccagcattgccttacgcctcccttgccccacgttagatggtttcttccggttttgcactctggctgccccttggagtctcctggggagctgtaatatctctttggagattcagattgagctggtctaggttgtggcccaggcattgggcattttggaagcccccaggtgttttcagcttgcagccaggccgagagagagcccctgagtcagatccccatggtttaggcacacctagcgggaggggtggctcctggaccccaccgtggttggagagctgagcatgtgtgtggctttagtggggtctgttagttatgggggtctgggcactggagctgcaggacacttgggatcccaggtcagaaagggccagatgagcaactaggaaagacttgggggccagggcggagtggggtcacctgacactcttgtgaggccccttctagtgcctgctcacaccggaatttcattcactccaagaagccatcaggggtaagataccttcctttaaacgtcactaagaaagaagaggcctgccggtgacacagtaagatgccattgatctaaagatgcgtcttgatttcagaaaggtccggaagtggaaagcaggtttcagggctgctgaggtacagggttctcctgtaggccccagggatggtctcaggggtgctgagtgcgtgcgtggtaaatggatggagcccaggggcgcctcctgccagtgtcctccaggcactcaaacctagcccttctgaagccgacctcacgtgacctcacagcccctcctgaaggcgcctcactgatgacggtgggtggaataacagcccccagagatgtccaggtttggaaccccaggacgtgggaaagtgttaccttgcgtggcaaaagggacccggcgcctgtgcttcagttcaggatttcgtggtggggagatgaccgtggatggttgaggtgggccctgagtaatcatgggggcccttataagggaaggggagtcacgagggtctgcgcatgaagcaaggaagcttctggctgtgaagatggcaagaaggcctggggccaggcgatgaggtggcccctggaggagctggaaaaggcattggattctgccccagagcctccgtggagaaacaaagccgcactgacaagacttcagcctggtgaaaaccattttggactcctgacctctagaactgtaagataataaattggtgtggttttcaacctaaaaaaaaa

SEQ ID NO: 600075 - DNA, 339 bp, Homo sapiens
  misc_feature (30)..(30): n is a, c, g, or t
  misc_feature (33)..(33): n is a, c, g, or t
  misc_feature (37)..(37): n is a, c, g, or t
  misc_feature (40)..(40): n is a, c, g, or t
  misc_feature (83)..(83): n is a, c, g, or t
  misc_feature (244)..(244): n is a, c, g, or t
  misc_feature (266)..(266): n is a, c, g, or t
  misc_feature (312)..(312): n is a, c, g, or t
  misc_feature (330)..(330): n is a, c, g, or t
ctttttttctttccaacattgggcacattncancttnctncccactcttgggcatgtaaggaaataaggcatttacataattnggaaaaatctgggatttctgatgccaaagggttaaagcttcttggatttcatttcattgatatacagccactattttatttttgatcagtggcctttgggcctggtgtcagggtactgaccatcagtgtcagcattagggttttggtttttgtttcttttnggtctttcttttttggcacatntgaatcttgttttgtgtaaaatgaaattactttctcttgttctctnatgatggggttaaaattnaaagagcat

SEQ ID NO: 600076 - DNA, 3159 bp, Homo sapiens
tctgccggagagagggttggaggcgtcttcgctcgcttatcgcatacttccgcccgctccttccagttagttccctaacccgagtgaagccacttccggcttcccgggcgccttccgcagtcctcttccgggtgatggcggccgggtgccccggatgtagccctggcgcaagcatctcttcttttttccacctcgccttccgcggattcccagcttgagaaacacctctttgccccgtcatgccaaagaggaaagtgaccttccaaggcgtgggagatgaggaggatgaggatgaaatcattgtccccaagaagaagctggtggaccctgtggctgggtcagggggtcctgggagccgctttaaaggcaaacactctttggatagcgatgaggaggaggatgatgatgatggggggtccagcaaatatgacatcttggcctcagaggatgtagaaggtcaggaggcagccacactccccagcgaggggggtgttcggatcacaccctttaacctgcaggaggagatggaggaaggccactttgatgccgatggcaactacttcctgaaccgggatgctcagatccgagacagctggctggacaacattgactgggtgaagatccgggagcggccacctggccagcgccaggcctcagactcggaggaggaggacagcttgggccagacctcaatgagtgcccaagccctcttggagggacttttggagctcctattgcctagagagacagtggctggggcactgaggcgtctgggggcccgaggaggaggcaaagggagaaaggggcctgggcaacccagttcccctcagcgcctggaccggctctccgggttggccgaccagatggtggcccggggcaaccctggtggtcagttctacaactccaaacgcattgactttgacctctacacctgagcctgctgggggcccagtttggtgggcccttctttcctggactttgtggaggaggcaccaagtgtctcaggcagcgaggaaattggaggccatttttcagtcaatttccctttcccaataaaagcctttagttgtgtactggggccttggctgtgctgatggccagaagccaggggccttctccacagtccctttggacttgtcttggtccctgagtactcccatgaagatcctccttggaggtgcctgtcaggtatcctgtggcctccctgcctggactctgcttgccgtgtaaacacccccaactgcgctgctctgtgctcctctcccaggtttcttgttcgattcctcttaggtctttggctttcaggacctcagattctttatccttgtagccaccagaggacagagccccagaagtggatgttttaggcccagaaggaccagggcatcgagaagacattgggaccctgttgggggtgagcatggaaccctcttactctcgcttcaccctctcaagctccttagatgctgggcagaagtgggatgagtggcccaagaccgagatccctaaggttctgagagccagtgtcttccctaatctggctttcctctatccttgccgtcgttcccacagcccttcagtgaagtgcaaactcagtggccaagtgtgggccaagtgtgcattgtactggcacagagaggggcagtgactcactggagatcacaggaatcaaagggctggcccagacccagtgggctcctttcccagacctttcttggcacaaagcctttgctgcctggccttggaggccctgcggcctacattctctggaccccactatgtgcctggcacagggctagtgccttgaggaaactgaggtagctgggttggtccccttccaggaattcagagtctggtggcaggggcatgggaaatagacagatgtaattctatagcctgggcctggcaccctccacctccacgccccaccagcattgccttacgcctcccttgccccacgttagatggtttcttccggttttgcactctggctgccccttggagtctcctggggagctgtaatatctctttggagattcagattgagctggtctaggttgtggcccaggcattgggcattttggaagcccccaggtgttttcagcttgcagccaggccgagagagagcccctgagtcagatccccatggtttaggcacacctagcgggaggggtggctcctggaccccaccgtggttggagagctgagcatgtgtgtggctttagtggggtctgttagttatgggggtctgggcactggagctgcaggacacttgggatcccaggtcagaaagggccagatgagcaactaggaaagacttgggggccagggcggagtggggtcacctgacactcttgtgaggccccttctagtgcctgctcacaccggaatttcattcactccaagaagccatcaggggtaagataccttcctttaaacgtcactaagaaagaagaggcctgccggtgacacagtaagatgccattgatctaaagatgcgtcttgatttcagaaaggtccggaagtggaaagcaggtttcagggctgctgaggtacagggttctcctgtaggccccagggatggtctcaggggtgctgagtgcgtgcgtggtaaatggatggagcccaggggcgcctcctgccagtgtcctccaggcactcaaacctagcccttctgaagccgacctcacgtgacctcacagcccctcctgaaggcgcctcactgatgacggtgggtggaataacagcccccagagatgtccaggtttggaaccccaggacgtgggaaagtgttaccttgcgtggcaaaagggacccggcgcctgtgcttcagttcaggatttcgtggtggggagatgaccgtggatggttgaggtgggccctgagtaatcatgggggcccttataagggaaggggagtcacgagggtctgcgcatgaagcaaggaagcttctggctgtgaagatggcaagaaggcctggggccaggcgatgaggtggcccctggaggagctggaaaaggcattggattctgccccagagcctccgtggagaaacaaagccgcactgacaagacttcagcctggtgaaaaccattttggactcctgacctctagaactgtaagataataaattggtgtggttttcaacctaaaaaaaaa

SEQ ID NO: 600077 - DNA, 2956 bp, Homo sapiens
tctgccggagagagggttggaggcgtcttcgctcgcttatcgcatacttccgcccgctccttccagttagttccctaacccgagtgaagccacttccggcttcccgggcgccttccgcagtcctcttccgggtgatggcggccgggtgccccggatgtagccctggcgcaagcatctcttcttttttccacctcgccttccgcggattcccagcttgagaaacacctctttgccccgtcatgccaaagaggaaagtgaccttccaaggcgtgggagatgaggaggatgaggatgaaatcattgtccccaagaagaagctggtggaccctgtggctgggtcagggggtcctgggagccgctttaaaggcaaacactctttggatagcgatgaggaggaggatgatgatgatggggggtccagcaaatatgacatcttggcctcagaggatgtagaaggtcaggaggcagccacactccccagcgaggggggtgttcggatcacaccctttaacctgcaggaggagatggggagatggtctggtggatgtgatgtgggaatataagtgggagaacacgggggatgccgagctgtatgggcccttcaccagcgcccagatgcagacctgggtgagtgaaggctacttcccggacggtgtttattgccggaagctggacccccctggtggtcagttctacaactccaaacgcattgactttgacctctacacctgagcctgctgggggcccagtttggtgggcccttctttcctggactttgtggaggaggcaccaagtgtctcaggcagcgaggaaattggaggccatttttcagtcaatttccctttcccaataaaagcctttagttgtgtactggggccttggctgtgctgatggccagaagccaggggccttctccacagtccctttggacttgtcttggtccctgagtactcccatgaagatcctccttggaggtgcctgtcaggtatcctgtggcctccctgcctggactctgcttgccgtgtaaacacccccaactgcgctgctctgtgctcctctcccaggtttcttgttcgattcctcttaggtctttggctttcaggacctcagattctttatccttgtagccaccagaggacagagccccagaagtggatgttttaggcccagaaggaccagggcatcgagaagacattgggaccctgttgggggtgagcatggaaccctcttactctcgcttcaccctctcaagctccttagatgctgggcagaagtgggatgagtggcccaagaccgagatccctaaggttctgagagccagtgtcttccctaatctggctttcctctatccttgccgtcgttcccacagcccttcagtgaagtgcaaactcagtggccaagtgtgggccaagtgtgcattgtactggcacagagaggggcagtgactcactggagatcacaggaatcaaagggctggcccagacccagtgggctcctttcccagacctttcttggcacaaagcctttgctgcctggccttggaggccctgcggcctacattctctggaccccactatgtgcctggcacagggctagtgccttgaggaaactgaggtagctgggttggtccccttccaggaattcagagtctggtggcaggggcatgggaaatagacagatgtaattctatagcctgggcctggcaccctccacctccacgccccaccagcattgccttacgcctcccttgccccacgttagatggtttcttccggttttgcactctggctgccccttggagtctcctggggagctgtaatatctctttggagattcagattgagctggtctaggttgtggcccaggcattgggcattttggaagcccccaggtgttttcagcttgcagccaggccgagagagagcccctgagtcagatccccatggtttaggcacacctagcgggaggggtggctcctggaccccaccgtggttggagagctgagcatgtgtgtggctttagtggggtctgttagttatgggggtctgggcactggagctgcaggacacttgggatcccaggtcagaaagggccagatgagcaactaggaaagacttgggggccagggcggagtggggtcacctgacactcttgtgaggccccttctagtgcctgctcacaccggaatttcattcactccaagaagccatcaggggtaagataccttcctttaaacgtcactaagaaagaagaggcctgccggtgacacagtaagatgccattgatctaaagatgcgtcttgatttcagaaaggtccggaagtggaaagcaggtttcagggctgctgaggtacagggttctcctgtaggccccagggatggtctcaggggtgctgagtgcgtgcgtggtaaatggatggagcccaggggcgcctcctgccagtgtcctccaggcactcaaacctagcccttctgaagccgacctcacgtgacctcacagcccctcctgaaggcgcctcactgatgacggtgggtggaataacagcccccagagatgtccaggtttggaaccccaggacgtgggaaagtgttaccttgcgtggcaaaagggacccggcgcctgtgcttcagttcaggatttcgtggtggggagatgaccgtggatggttgaggtgggccctgagtaatcatgggggcccttataagggaaggggagtcacgagggtctgcgcatgaagcaaggaagcttctggctgtgaagatggcaagaaggcctggggccaggcgatgaggtggcccctggaggagctggaaaaggcattggattctgccccagagcctccgtggagaaacaaagccgcactgacaagacttcagcctggtgaaaaccattttggactcctgacctctagaactgtaagataataaattggtgtggttttcaacctaaaaaaaaa

SEQ ID NO: 600078 - DNA, 222 bp, Homo sapiens
  misc_feature (24)..(24): n is a, c, g, or t
  misc_feature (34)..(34): n is a, c, g, or t
tctctgctcccagattcaagcgantctcggctcnctgagtggctgggactgcaggcatgtgccaccatgcccatggtgtattttgtgttttggtagagatggcatctcactatgctgccctggctgatcttgaattcccgagctcaaatgatcctcccacctcagcatcccaaagtgctaggattacaggcatgagccaccatgcctagcccatatgtttct

SEQ ID NO: 600079 - DNA, 2658 bp, Homo sapiens
aagaaaataacaaggttttttttccccaatgttttaaaaaaaatttattatttaatagggggggggtataaaacaggtcggagttttcccacctatgtattaatggttttaaaaccaaagagtgttaaaaaccaacacccccaccctccctggacatgttcgctgaggagttggcggaggaggaactggagaccccaacccctacccagagaggagaagcagagtcgcggggagatggtctggtggatgtgatgtgggaatataagtgggagaacacgggggatgccgagctgtatgggcccttcaccagcgcccagatgcagacctgggtgagtgaaggctacttcccggacggtgtttattgccggaagctggacccccctggtggtcagttctacaactccaaacgcattgactttgacctctacacctgagcctgctgggggcccagtttggtgggcccttctttcctggactttgtggaggaggcaccaagtgtctcaggcagcgaggaaattggaggccatttttcagtcaatttccctttcccaataaaagcctttagttgtgtactggggccttggctgtgctgatggccagaagccaggggccttctccacagtccctttggacttgtcttggtccctgagtactcccatgaagatcctccttggaggtgcctgtcaggtatcctgtggcctccctgcctggactctgcttgccgtgtaaacacccccaactgcgctgctctgtgctcctctcccaggtttcttgttcgattcctcttaggtctttggctttcaggacctcagattctttatccttgtagccaccagaggacagagccccagaagtggatgttttaggcccagaaggaccagggcatcgagaagacattgggaccctgttgggggtgagcatggaaccctcttactctcgcttcaccctctcaagctccttagatgctgggcagaagtgggatgagtggcccaagaccgagatccctaaggttctgagagccagtgtcttccctaatctggctttcctctatccttgccgtcgttcccacagcccttcagtgaagtgcaaactcagtggccaagtgtgggccaagtgtgcattgtactggcacagagaggggcagtgactcactggagatcacaggaatcaaagggctggcccagacccagtgggctcctttcccagacctttcttggcacaaagcctttgctgcctggccttggaggccctgcggcctacattctctggaccccactatgtgcctggcacagggctagtgccttgaggaaactgaggtagctgggttggtccccttccaggaattcagagtctggtggcaggggcatgggaaatagacagatgtaattctatagcctgggcctggcaccctccacctccacgccccaccagcattgccttacgcctcccttgccccacgttagatggtttcttccggttttgcactctggctgccccttggagtctcctggggagctgtaatatctctttggagattcagattgagctggtctaggttgtggcccaggcattgggcattttggaagcccccaggtgttttcagcttgcagccaggccgagagagagcccctgagtcagatccccatggtttaggcacacctagcgggaggggtggctcctggaccccaccgtggttggagagctgagcatgtgtgtggctttagtggggtctgttagttatgggggtctgggcactggagctgcaggacacttgggatcccaggtcagaaagggccagatgagcaactaggaaagacttgggggccagggcggagtggggtcacctgacactcttgtgaggccccttctagtgcctgctcacaccggaatttcattcactccaagaagccatcaggggtaagataccttcctttaaacgtcactaagaaagaagaggcctgccggtgacacagtaagatgccattgatctaaagatgcgtcttgatttcagaaaggtccggaagtggaaagcaggtttcagggctgctgaggtacagggttctcctgtaggccccagggatggtctcaggggtgctgagtgcgtgcgtggtaaatggatggagcccaggggcgcctcctgccagtgtcctccaggcactcaaacctagcccttctgaagccgacctcacgtgacctcacagcccctcctgaaggcgcctcactgatgacggtgggtggaataacagcccccagagatgtccaggtttggaaccccaggacgtgggaaagtgttaccttgcgtggcaaaagggacccggcgcctgtgcttcagttcaggatttcgtggtggggagatgaccgtggatggttgaggtgggccctgagtaatcatgggggcccttataagggaaggggagtcacgagggtctgcgcatgaagcaaggaagcttctggctgtgaagatggcaagaaggcctggggccaggcgatgaggtggcccctggaggagctggaaaaggcattggattctgccccagagcctccgtggagaaacaaagccgcactgacaagacttcagcctggtgaaaaccattttggactcctgacctctagaactgtaagataataaattggtgtggttttcaacctaaaaaaaaa

SEQ ID NO: 600080 - DNA, 2036 bp, Homo sapiens
  misc_feature (3)..(3): n is a, c, g, or t
  misc_feature (12)..(12): n is a, c, g, or t
  misc_feature (19)..(19): n is a, c, g, or t
  misc_feature (25)..(25): n is a, c, g, or t
  misc_feature (39)..(39): n is a, c, g, or t
ttnggctaggtncgaggcnggtgtnaatcggccgaggtnagatcctccttggaggtgcctgtcaggtatcctgtggcctccctgcctggactctgcttgccgtgtaaacacccccaactgcgctgctctgtgctcctctcccaggtttcttgttcgattcctcttaggtctttggctttcaggacctcagattctttatccttgtagccaccagaggacagagccccagaagtggatgttttaggcccagaaggaccagggcatcgagaagacattgggaccctgttgggggtgagcatggaaccctcttactctcgcttcaccctctcaagctccttagatgctgggcagaagtgggatgagtggcccaagaccgagatccctaaggttctgagagccagtgtcttccctaatctggctttcctctatccttgccgtcgttcccacagcccttcagtgaagtgcaaactcagtggccaagtgtgggccaagtgtgcattgtactggcacagagaggggcagtgactcactggagatcacaggaatcaaagggctggcccagacccagtgggctcctttcccagacctttcttggcacaaagcctttgctgcctggccttggaggccctgcggcctacattctctggaccccactatgtgcctggcacagggctagtgccttgaggaaactgaggtagctgggttggtccccttccaggaattcagagtctggtggcaggggcatgggaaatagacagatgtaattctatagcctgggcctggcaccctccacctccacgccccaccagcattgccttacgcctcccttgccccacgttagatggtttcttccggttttgcactctggctgccccttggagtctcctggggagctgtaatatctctttggagattcagattgagctggtctaggttgtggcccaggcattgggcattttggaagcccccaggtgttttcagcttgcagccaggccgagagagagcccctgagtcagatccccatggtttaggcacacctagcgggaggggtggctcctggaccccaccgtggttggagagctgagcatgtgtgtggctttagtggggtctgttagttatgggggtctgggcactggagctgcaggacacttgggatcccaggtcagaaagggccagatgagcaactaggaaagacttgggggccagggcggagtggggtcacctgacactcttgtgaggccccttctagtgcctgctcacaccggaatttcattcactccaagaagccatcaggggtaagataccttcctttaaacgtcactaagaaagaagaggcctgccggtgacacagtaagatgccattgatctaaagatgcgtcttgatttcagaaaggtccggaagtggaaagcaggtttcagggctgctgaggtacagggttctcctgtaggccccagggatggtctcaggggtgctgagtgcgtgcgtggtaaatggatggagcccaggggcgcctcctgccagtgtcctccaggcactcaaacctagcccttctgaagccgacctcacgtgacctcacagcccctcctgaaggcgcctcactgatgacggtgggtggaataacagcccccagagatgtccaggtttggaaccccaggacgtgggaaagtgttaccttgcgtggcaaaagggacccggcgcctgtgcttcagttcaggatttcgtggtggggagatgaccgtggatggttgaggtgggccctgagtaatcatgggggcccttataagggaaggggagtcacgagggtctgcgcatgaagcaaggaagcttctggctgtgaagatggcaagaaggcctggggccaggcgatgaggtggcccctggaggagctggaaaaggcattggattctgccccagagcctccgtggagaaacaaagccgcactgacaagacttcagcctggtgaaaaccattttggactcctgacctctagaactgtaagataataaattggtgtggttttcaacctaaaaaaaaa

SEQ ID NO: 600081 - DNA, 124 bp, Homo sapiens
  misc_feature (1)..(1): n is a, c, g, or t
  misc_feature (112)..(112): n is a, c, g, or t
ntgggattacaggcatgagcagcgtgcctggcaaaatttattattagtagtagtagtagtatttttgagatggagtttccatcccaggctggagtgaagtgacatgatcttngctcactgcaac

SEQ ID NO: 600082 - DNA, 222 bp, Homo sapiens
  misc_feature (215)..(215): n is a, c, g, or t
tcaggtatctctacctcaggcgtaggtgtatacataggcccatagtataaagcctagctttcagcagagatggccagggtagatacatgatcctctggctggttgggaagcacagacaatagggcaagcggtgaaatctttgccagtggtgatagatgtggtctatgcatataattagcatgtaaaaatacaaacactggtctactcgataaggntacgcac

SEQ ID NO: 600083 - DNA, 1010 bp, Homo sapiens
gcagaaggcgccctaatagtgggacaaagtaggtggtacagagcggtccccctacaagcgtgaagattgtcgggcacgctcccccggggggaacaacgtgttcgggaacacaaaggacctcccacgcgggggggttccccccggaggcacactacccggtttgaaggccggtaaagaaggatgggaaacaaggagacccgcctggggggagggcccaccctccctccgggaaccgtgacagcaggggccaatagtcccctgggtggccaggtggagaacaaacactctctttaaccccgggggatgggcccccccctctgctttccctggaaggaggaattcttcgttggccctccttcacgcgttttttttttctacctgcgcgcctatccccccggttttcgtaagcccgcgccgtgctggtaaatattttgggcgaaacaatttaaatagagccaggggggataaaagaaaaggtttctgatggaccaccctcgcgtcggccctgggggcaaagaattgctgattcctctcgaccaagccaatcgtggtgcagcaccctgcggcttaggcttctcagaagaccttcgtggggtcacacagagtacaggccccaccgaggcagttgtcctagcatcagttcgcaccgcgccacacacggggagcgtggttgctacatgatacgcctcgtcgcgcccactccacgggttacattatgaagtggttctctccacttgctgtggtgagcatactaaattatttcaaaatggcgggtacacaaataattgtaagtaggaactaaacttagtatttactggttttgtcaacgagtttatagatacatacaaaaaaacttcggtcggtagccagaagcccgtgcggcaacacccccgagtgtgtccacccgccctagggggggagccaaagttgggtgggttcaatgctaagggcaccggtctttgctaacccccccgcgcccaaaagggaaacccctttacagccaacaagac

SEQ ID NO: 600084 - DNA, 133 bp, Homo sapiens
catagaggatccccgtcgtacagcatcaacattaagcctgagaacttctctgttaactgttccttgccaaatgaaaatcaaacaaacatcccctttaatgagttgaacaagtctcatgctcatacagacgctc

SEQ ID NO: 600085 - DNA, 357 bp, Homo sapiens
  misc_feature (27)..(27): n is a, c, g, or t
  misc_feature (35)..(35): n is a, c, g, or t
  misc_feature (54)..(54): n is a, c, g, or t
  misc_feature (61)..(61): n is a, c, g, or t
  misc_feature (219)..(219): n is a, c, g, or t
aatgtgtgccattataagaaaagagtngggggccngggctcatgcctgtaatcncagcatntgggaggccaaggcgggcggatcacctgaggtcaggagttcgagattagcctggccaacatggtgaaacctcatctctactaaaaatacaaaaattagctgggcttggtggtatatgctggtaatctcagctactcaggaggctgaggcaggagaatngcttgaacctggaaggcagagtttgcagtgagccgagatcatgccactgcactccagcttgggcgacagagcgagactcaatctcaaaaaaagaagagtctgtaaagatgtcttttaggctgggcacacattatggag

SEQ ID NO: 600086 - DNA, 111 bp, Homo sapiens
ggtgcgggacacgacaggttttggggccctcccagggttttcttatgccgatgtggttgcaaagataaaagaaaaaatcaaaaaattttttatttgtggttgttactcaaa

SEQ ID NO: 600087 - DNA, 1128 bp, Homo sapiens
gcccctcgttgttgggtccccctctcccctgcggttgtgtgttgtatccaaccccttgctcggttggtttggatgggtggggccctctctttttctctttggtgtcctccccccaggtttgcgtatgttatattggtttgtgaaggaccgtctttattttgtgggtgtttgtgtaagtgctttccctctgctctcgttttttcggagaaggacgtgtcggaatggcgcgggggttgtttgcgccctcttctctgcgctgatgaatgttttttttgtgggatagggggggggaagctctcgctcgggcgttggttgtttgtaagctcctctcgctctgagatttctgttttgggcgtgatagtgctccccttctgtctcccccactttctctgtaggtctttctctacacgagtgagagggtgtctccctgccacccagttgttctatttgtgctccccccccttgttctcgcgtttatttctccgcgctcgccgagtgcttgtctttcttctttgtggagagagatatcttttttctccaccctctcttcttctccctatttgtgggtatctcctgtccccctctgtctcctctcgcctgttgtctctctctcctctctccctctctccgctctctctctctctcgccccgttattcccgtgtgaaaagagggcctaaaagagggtttttgtggaggggggcgaacaaaaaacacccccctctgtggcgtccctatagaccctcctcgctaaacagagttgttttgtatatacacccccccctgtgtttgtttctcccccccatagaagagaaatgtgcgccccccccgcgtctcttggggtgggtggtaatatctcccgccacacaccaccgcgtgttcgagagcgccgctccctccccgcgggagagagggggccccccccccctctctttttttccaccactctcttcctctttttcccttttctattggttccccccccacacacacacacctggctttttttttattcccaccacactttgaagattttatttttattttctttacctttctgcttttttttatatatatttaacaaaaagaagacacacttcccccacgagcccccaaaaaatggggattta

SEQ ID NO: 600088 - DNA, 162 bp, Homo sapiens
ttggatcattagagcggcgcggtgcccgtactgctgttaggacagttaccaacagcagggcacgagcttctctgcaattaggcaagtctaccagacaagaaatgtacgggcaatcttctatccagagaaatcatccaagccctacctgtatcaaaacatcct

SEQ ID NO: 600089 - DNA, 1541 bp, Homo sapiens
  misc_feature (799)..(799): n is a, c, g, or t
ccgtggttatgagctgccctcgttgtgtcagagggtgtagttttccgtctgttggggggtgggctggcggtgttctatctgatgtgtgttcgctgcctctactattctcatttggtttcaacatacactgggcggtggtcgatgtgttggcgcctcgtggtcgtgtggtggttctaccgctcgccttactgacggttggtccaccgtcgtgtttgtttcccgtgttattagtcccttgtctcacgggagcacagtgtaaatatcaccgtgctgcgcttctgtgtgtatctctgcctctctctgtgtgtctctggtcactcgtggggggggtgtgggggacttgttttgttgctgtctgtattgtcttggtgctggagtctgtatcgtcttcgcggtccttcgtctttcgatcacatccccggcgtgtgagtccacatcgatgtgtatatgagcggagtggtgatcccctgcttcaagttcggtggtcgacaatatctgttcatgctcgtgtggaccgacaccattattttggtgcggaggtctacatcttcctcgtggtgagttgatataatctctctccgtggtgagggtcgtagttgtttgcgaccacaacaagactaattaccactatctaaattacactatggcgctacacccgtatcattctggggctaataactcccctccacgagacccttgtgggggttgcactcactactagagccagcggcgtctcctctaccatggcgtttttgatgcgcaatgtgggctcttaatggcgcgactgtgtcctacgagnggttcgttcctcagctccacttctgttggtctacaacagggggatcaactgggcactactcccctgagggggttccacatgggagcacacacatccaggcgaccacacccacgattgtggccattttggtgatcaaggggaccatattggggcccaccaaaaacagatgggggcccccaacgttctataggggaggcagattctcaacctcaaacgacctctacctctacgtcacactctgtgggtctctctacacagtcacactctctctttgtgcacaacacgctgtctattccagaggtggcggaagaatgttctggataagagattgtaacatcgtcattgaccttgctttgtgtggaatatgaaacccgggaccactcttggacgcgttccaacaagaggctgcgcccatagccatcgagtgtttttcggcgcgaataacacccggcggcgccacaacaggcgtctccaccacagcccattggtagcagcggggttttccgcccttgcatacattcgctccaagttccagcccaggatcgagacacaacgtggggccccacaagcactcaatcacttggccgcacttctccgatccgcgatctatggggcgaatcgggaccatgaggatggccacccaaattcaaggaccaaacatgaggacaacagacctttttctaacagaaaaatattatgtgtatcttgacaacctattttatatacatctacttgcctttgt

SEQ ID NO: 600090 - DNA, 258 bp, Homo sapiens
  misc_feature (35)..(35): n is a, c, g, or t
  misc_feature (66)..(66): n is a, c, g, or t
  misc_feature (107)..(107): n is a, c, g, or t
  misc_feature (110)..(110): n is a, c, g, or t
  misc_feature (190)..(190): n is a, c, g, or t
  misc_feature (227)..(227): n is a, c, g, or t
  misc_feature (249)..(249): n is a, c, g, or t
aaacaacactggtgtgacctcgagggcagaaaggntctgccctgtgaaggtcaccagcaccaacancacggtaggcctgaaattttcaccattgctgtcaagttccnttnggtttaagcattaccactcaggcatttgactgaagatgcagctcactaccctattctctcttttacgtttagttatcagnctttttaaagtgggttattctggagtttttttgtttngagagcacacctatctttagtngtttcccca

SEQ ID NO: 600091 - DNA, 917 bp, Homo sapiens
ggatgccgcgtagcgtcgccgttcactccgatgagataccagctcggctagaggatgaagtcggagggttagcagggacccctgggaggcgactttgcatggtcgtgcaagtctgacagttcgacgggtgcaagaagatgcagagctagagtaaacacgtttctaatcttggagatggctaaaccagtactccatacgaaagcatcatcacagcatcacctaccagtctaggcagcgacctagccagtcacgacaactagtcctgtgagcgcgcgcgaccgaccggctatatgacctcgctaaattggtgcgaagcagcgcctagccagcacgaaagacatgcatatggcttgtacgtattctgaccttgaaggatattgtgtactgataggagagcgcacgggcaggacgcagagtagcgctttacaccgcatactgaaggcacgtcgtctattatggatgggaaagactcgtatccatccgcgaagcattcacctgtacgcgcaatgacacactgaacgtgaagacggtattgtgcaggagcaactactgggacacacgggccagggggggcatacggtgcttacattctgcactaaacgcgatttacaacgcggactttcgtgactaagaatgcctgacgtctgggcaccatcgccagaaactccgtatgcgagaaacattgggcctaccaagctgagaggcgtaggaaccgcaaattagtgagttcaacgtccccggtgtgcggaaaattcgctagcttggaaggtggattgcgggcgatccgggcccgtggccaaggtaggtggagaattccctaatttaacaggtgttcttgacagaccctgttacctagctagtaattgctgatcccaatcagaaagcatggcttggcacagcacagccccgttgtacaa

SEQ ID NO: 600092 - DNA, 228 bp, Homo sapiens
gtcacagcactctccttttcataggcctctagcatatcactttccagtaccaaccactttgcacctcttcataggctttctcctccctgacaggtattcccacacccagagcagggccctgcacagaggagacaccaaagactccaggactcaaggctgctggattccccttaataacagcaaacaacggctgggcgcagtggctcacgcctgtaatcccagcacttt

SEQ ID NO: 600093 - DNA, 575 bp, Homo sapiens
gttggctgttcggagggtacaggacggcggtgataaacggtatcatgatcgtacttggtaccgcgagttgtaacaggaaggtcggtggtactctgtggtccttcgtgtttgtatatcgtacgccaggatgatgctggttgctcggttgtacctcagtcctagcttcatcagacactggggccgtggaatcctgtctgctgctgtcttcctagattcactgaatccacttctgtgtagcaccggggtcagctgtcaattaatgctagtcctcaggatttagaaaataatcttaactcaaagtccaatgcaaaaacattaagttggtaattactcttgatcttgaattacttccgttacgaaagtccttcacatttttcaaactaagctactatatttaaggccttccaaattcttctaactcttccaaaagccttctgccttagttttttttaaattacaccagtccttttagtagcttttggatgcgatttttaaccaacttccccttctagcttcaagtattcttctaaatgggttctggtctacgtaaacaccctcatcttctcaagctttaa

SEQ ID NO: 600094 - DNA, 133 bp, Homo sapiens
ggcgcattgtctgtgaacaagaaggctcaggcccttgcttattctgtggcactctggtgtgtactcatgaggaccaagatattttacagcgtgactaaacaaggagccagaactgctaaagaactcatgtcag

SEQ ID NO: 600095 - DNA, 213 bp, Homo sapiens
agtttccccctccccctttgcctatcccctccctttggtttaagccctgaagccttgattgggagctgaaaggagttgcagctgttggcatgagacccccttctccccgttttggggagggggggaccagcagataaatcccccccttccttgagcggtcgcggtactttgaagttcagccagctcagattttataaaaattaattaaaatct

SEQ ID NO: 600096 - DNA, 254 bp, Homo sapiens
ccccctaagcttcctgggtgaaaggctggcctttgggggcctcccccccttggttttactcctttattcaatcacatgagactcctgaatttcaaagcaggaagcatgtggagatcattttttcagccctctgttttcaggcaggtaaaagggatctgtcattctcattttgaagttttatgtaatgaaatgcaaaggttatgtgacttgttccagattttttggagtaaataaactggaatttgctcctccca

SEQ ID NO: 600097 - DNA, 353 bp, Homo sapiens
acctgggtgtgctatagtgagatagtgtaatagtagtgcatgtgtgtacccatgcaggaggagctccagccagggctctgccttaccctaactgcgtgaccctgggcccgtgacttctctctgggcctgtttgaccatctccagcactggaataagaggtgccattgtggggcgattctgagtgctcacagggctaggtccccacagagttgctcaggagccataagctgctgcagggatcatcatccccatcactgcctccctgcaatctcacataccatctagaacctcctgccccccgaggtctgcagtctcctgaacccagacagccatctacgccaatcaacgatgat

SEQ ID NO: 600098 - DNA, 321 bp, Homo sapiens
ttgcacctgaatcctgtaagtctgaatctagagtatcccctactggtcgcaggcggtactggttctgcagcggagcccaggctcttgatgaggaaatatgttgtgtaaagtacatagagagagtgcgtcatattttgtaccctacgcaagattgtatctggtgagggtgtaattataatcatgtttgtgtattcggttactggtttgcatcgtctactcgtaatgcagcgggctttgcagcgcctactggctttgcagggccgtatccgagctccaacttcatatactcatgtgtcatacgcttatttccttgtcgtgaga

SEQ ID NO: 600099 - DNA, 159 bp, Homo sapiens
  misc_feature (66)..(66): n is a, c, g, or t
  misc_feature (92)..(92): n is a, c, g, or t
caagtcgttgggtataagctctgaacttcacatctgaagaggcaagaaaaatctttgccattgtgncttgtctgtggaagatgatggttgtntgtttctagtttgtatatgttaccatctttgtgatccggtgatttaatcaatctctttgaatacaaa

SEQ ID NO: 600100 - DNA, 1008 bp, Homo sapiens
agtttgggcccggaggaaccgttatggaaaccgttcgtgaacaccagggtcaggactacacgcggctccaagcattcgtaggctcgaggaagaagctagcaatatagcaggggacctgccacccccagccctaaccccgagcaacggctcaatcggcaacgagggctctgtgccggcctccacgctgccggggaagacccatctgacaaggcggacaagacaggcccctccaggcctcaccaagcccacggtttcgcgcgacgcacttggatcagcttccgccgaccacggggcaccctcgttcttcacagcatcccggtcctggctgggggcttgtccgggaagacaccttacccatgtgggcacatcagggttgtgacacagcgccggcccctggctcagggaggaactctcagggttcctggagaattcctagcagtggaactccatgccccgcctcccaacggacctggacgtagagggcctttggttccgccattatgatttcagacagagctgctgggtccgtgccatatccccaggaggaccggcgtggccccctgctggcaggctgtacaccatgcggagcgggtgagatcggctttcgctgcacccagcatctgattccgaccagggcacccccttcagagcctagggacgaacagcagtgtgctcccatcctcagggcattgcactcgtgcggcgatccacttggaaagttctcagttccctgccaggcttctagaagcatctgggccagggctcatggctgagataatttccctaggcttaacaacccaagctaacgcttcgcatcctcgtatttattatttgggtaaacttatgtcaaatgtacttaagtaagagtgcagctcgagagagattcagagatggaacacaccagaccaccagatcacgaagccaaccatggcccagcccctcccagcacccccagccccacgaccatcgttctgaattcgacgaccctacggcctggttgtacttcaa

SEQ ID NO: 600101 - DNA, 901 bp, Homo sapiens
cagcgctctgggggcccctccgcacagtggggaattggggccccaaaagtgggggccgctcctcgcggctgagtggtgacccctcgccgtctggggcgggcccacgccactacttgtcggacacccgcgggaaaaaacccccttgggtacaccggcccgcgcgcccccgcggttgctggcggcccccactggggccccggccgccaacaaatctgcccgaagatcacgaaaaagggggggaaacaagagctattcagcgcccaaaattcgggaaagcgtataattctggcgccccactttatcggcccacccccccgggtgggtaccgcctcctcccgccgcccccccgcgcggtgaaaaaggcatgcccacgcggcgtcccagaccgggcggtaccacagaagtccaccacgacggaccccccccactggcttctgataattggagggggggcagcccccactacaggaaccccgctagccctccccacacagagggcccactccttcggcaggtgaacccccccatggcagaagattttctccacgcaacgagatgctggccaatggccggcgccaaccgccacacaaaagggggcaagcacagggcgccacaacctcggcgaacacccaacaacatgggaggataacgtgtcaacggaggaaccccagtattctgaaggtgcgtgccccagaagagttgcccttcatttcttggaggctggtacgcaccgatgagagcgcgcttccctttttctagaaagcatagaatttacccggggacttcttctacagcaggtcacgccgcccacaaggagcaaaaacggcgtgggtgaacacaaaaagacgggaatttcccggggccaccccaaacaaacccaaactttttcttccacaaaaca

SEQ ID NO: 600102 - DNA, 554 bp, Homo sapiens
ggtgagacacattttgcagaatcctgccaaacaaaggaactgaataggctgtgggcaaagcaaatgagggagagttaaggaatgaagtattttaaatattaataattaattccgacacggttctgtattttccgcaaaagaaattaaccttttaggtaccccactaatgaattttattttccaaagaattattgccctggcaaaagtttttggaattccaggggaaagctgtgcccagcttattccgaaaaccccccaccctgggaaatcccgaggaaaggggggccttcattgacccctcctttttgccaaggttccaaaaaggaactttcaggatgaacacctggcctggtggctttccactttagagggaaatttttggtgccaaagaggctccccttgggggaggagaccaaaaaaaaaaacgtgtaaaataaccaaaaaccccggccttttttggccgggccctattcttggggggattaaataaaaatttctttgttgtgggaaatttcgataaaccccattgccgggataaggagcggggcaagaga

SEQ ID NO: 600103 - DNA, 170 bp, Homo sapiens
ggactgtctgttgcgtggtgttggatgaggctggatgatcattcaggagctgatggccagcacaagggtcggcctcacagaggataaactcgagaaccaggaaacggcgagagctgtcagcggggaaaatccgtggctggaaaatccaggtgcccagacagggttcccgg

SEQ ID NO: 600104 - DNA, 990 bp, Homo sapiens
tcggccggaagtttttataatgtgaccacgcgctcgagggataggaagattagggtctagagaaatcctggttacctccgaggcctggaacttttacggcccttggtgcttaagtaattggatttctcaaccccgctccaggcatttatcccccgtgtaatcctaacctcatgggcttagcaaaggaaacaaaggcattgaaagggtttgcaacttgtccctgacactgagctcctgtagctgtgagccctgccgactgagtgttcctcctttgcctcctctgcagcatccaccgtctctctcaaaatccttgtccccaggagtctgtttttctagcctgcaggccttggttcctagccctgctaagcagatggaatttacagaaggagccgtttcctgccagtccaccttcctgtacctcggggaggtgccatctctgaccctgctggccactctgcagatggggaagagccaagggaggctggtaactcctgtaggaggcagagagaggccctggaaagggattctgagctgagaaccctgcctggatccatagaccaactttctctacttcatgttctcccttgagtgtgaccctttgccaagtcattcctctgatggcttgaataggctcaggctggggtacagagggctgtcctactgcatcaggcctgctggacccagatagaggaactgtgccttccccccatggctcattattgccttacacctagttctacggggaggcatccagaaatggttttcaagggcagacctggcaggtgtgtcagagatgtcacccatattatcttgcacggggatccactggactgaactcttcccatctaggacccttaagtgttacgccatcctattctcgccgtggtttagactagtataactaaacgagaagaggctacgaaagataaaatggcgggtctgaccacgattcgaggggcgaccaacttaaacacaggtggacgaagcaac

SEQ ID NO: 600105 - DNA, 817 bp, Homo sapiens
  misc_feature (3)..(3): n is a, c, g, or t
  misc_feature (81)..(81): n is a, c, g, or t
  misc_feature (92)..(92): n is a, c, g, or t
  misc_feature (107)..(107): n is a, c, g, or t
  misc_feature (113)..(113): n is a, c, g, or t
  misc_feature (132)..(132): n is a, c, g, or t
  misc_feature (148)..(149): n is a, c, g, or t
  misc_feature (154)..(154): n is a, c, g, or t
  misc_feature (160)..(160): n is a, c, g, or t
  misc_feature (177)..(177): n is a, c, g, or t
  misc_feature (190)..(190): n is a, c, g, or t
  misc_feature (196)..(196): n is a, c, g, or t
  misc_feature (210)..(210): n is a, c, g, or t
  misc_feature (214)..(214): n is a, c, g, or t
  misc_feature (220)..(220): n is a, c, g, or t
  misc_feature (229)..(229): n is a, c, g, or t
  misc_feature (243)..(243): n is a, c, g, or t
  misc_feature (276)..(276): n is a, c, g, or t
  misc_feature (278)..(278): n is a, c, g, or t
  misc_feature (315)..(315): n is a, c, g, or t
  misc_feature (322)..(322): n is a, c, g, or t
  misc_feature (325)..(325): n is a, c, g, or t
  misc_feature (351)..(351): n is a, c, g, or t
  misc_feature (354)..(354): n is a, c, g, or t
  misc_feature (399)..(399): n is a, c, g, or t
  misc_feature (411)..(411): n is a, c, g, or t
  misc_feature (414)..(414): n is a, c, g, or t
  misc_feature (418)..(418): n is a, c, g, or t
  misc_feature (440)..(440): n is a, c, g, or t
  misc_feature (442)..(447): n is a, c, g, or t
  misc_feature (453)..(453): n is a, c, g, or t
  misc_feature (462)..(462): n is a, c, g, or t
  misc_feature (464)..(464): n is a, c, g, or t
  misc_feature (473)..(473): n is a, c, g, or t
  misc_feature (478)..(479): n is a, c, g, or t
  misc_feature (487)..(487): n is a, c, g, or t
  misc_feature (495)..(495): n is a, c, g, or t
  misc_feature (498)..(498): n is a, c, g, or t
  misc_feature (506)..(506): n is a, c, g, or t
  misc_feature (651)..(651): n is a, c, g, or t
  misc_feature (743)..(743): n is a, c, g, or t
  misc_feature (807)..(807): n is a, c, g, or t
gtnaggcgtcaaattagtagtgacaatcttttttttaatcttgaaagtccctagttttaaagaaagtagaatccatctggngcatgtctgcntcacagggtatcacncaagantcatcatcaggccaaaaanactctgaagggaaccnngaggntttggnccttgctgtggaaagangctactgaaagtntaaganaacaccctaatgcncgcntcaggnacgaaaccntaccatgccccgcnaagacatgggaccagagaacacgtcaacgtcangncgccccaggaaaaccatccacaaagacaacagaagcnaacccgnggncgacactgccatgaagagtgtgggcnganaccgcagtgaccagtgtctttactggacgcgaacatccctaaggncacggctgtgcngcntccnaagcatacgtgaccacgaaacngnnnnnncccggncctccttancnccacccctnccccnngcccagcntgcctcangtnctccaganccttctcctgagacagcactaggggccacgtcagaccccaggctgcagcccttcaccgtgcccgtccccggtccggtctgccctgctggggctggtgggtatcatggggaccctgtgtagacacggacaccggagagcgtggganaggaggcgtctcagagctccccacccacacgctcaagggtcagcgtcactcatgtttccttctgttcccatggtgcctccaaaagggtttcnaacaaagtcatcattgattaccctggagtatgtgaataagccacacaccagcagcgagatacancaaagctagt

SEQ ID NO: 600106 - DNA, 101 bp, Homo sapiens
attctagaggatcccagagccggcaccgttcctggacgtgcagatgacttctcgcaggttaatgtcatccagttgtcgcagctcaccaggtgtctattgta

SEQ ID NO: 600107 - DNA, 477 bp, Homo sapiens
caacgctacgagtagacatgggattctgcatgacctagcacttgtccagggtggggatatatatgccagcatagctctctcccgcgtcacgaacagttagtacgtgctatgtaactcctggaacgaggcggaagatatctatgaagggcctcaatattgctctgggcgacctcagtgtcattagttgcataaaacttgtcatcggattatgagaagcccacccctagctggggactccaggtataacacattggcaatcagattccaagaataggggttgtactccagggatgacaccatctggctggaccaagaaggggccatgctcagtgaggagcccatctaagtgagctgcagccgggacccccattgagccaaagcaccacagggctgttctcgggatccttactgggactccacaaaccagtagtgaaggtagctatggagccggagccttagaggtaagccagaatactg

SEQ ID NO: 600108 - DNA, 159 bp, Homo sapiens
ctcacgctatacttacccaagcccctgatcccttatgtactcttggcagatgccccaacttatactacttaccagaacctaaggccaactagcatacaaatccctatgagcacacttacgatatggcactgctatatatactagtagacatactgtaac

SEQ ID NO: 600109 - DNA, 368 bp, Homo sapiens
ttcttgtgctgtttagacataaagtgaaaataagatacatccatgctataaaaactattccaactactgattaaaatgaacttttgcggaaaggaaaccttacaatccttgctcaaagttaacctggccaggtgcggtggctcatgcctgtaatcccagcactttgagaggccgaggtgggcggatcacctgatgttgggagttcgagaccagcctgaccaacatggagaaaccccgtctcttctaaaaatacaaaattagccgggcgtggtggcacatgcctgcaattccagccactagggaggctgaggcaccatgcctggcctattttgatctcatttttaaaaaatgttttaatatatactcat

SEQ ID NO: 600110 - DNA, 116 bp, Homo sapiens
tggggtgctggcttggacagttcatcctccgacttggatccgtcacgtaggtcctgacaggtactgctgcaggtattgaggagaacgacctcaatctgctcctggcaaggctatga

SEQ ID NO: 600111 - DNA, 130 bp, Homo sapiens
ttgagcagctaacattctgagcttatgttcccaactgtaacatggggaaaataatggggctgtggagaagataaaataacttaatatatgtaaagtacatctctgtggcccatatgaaattaaatgctca

SEQ ID NO: 600112 - DNA, 403 bp, Homo sapiens
ctgaggtatccccccgccagtctggggcttggcagaaaggattatgtggtggaaaacatttggctcttccttgcgggagtgatgctggggatagggaagagagtggctccagcctgcacgttcaatagtgctataaaagccaacgtcaaatgctggagggtagaggacagtcagcatgttcagcctggggtctgtgtgtagggttatcccttctccgctgtgccttcccatcctcgtgcaatgagcctaggtcttgcagccttgtgttgtaggctgctgtgatgtcccggaaccggggatctgtctagcgttttggccacttcctgggacctcacgcccctttttaccgattgtgattgggcggcaaggccttgctgtctttttctctgctgttccgccttgg

SEQ ID NO: 600113 - DNA, 1066 bp, Homo sapiens
gattacgacgagaacaagataaaaaatcatacatcaatttcatttatctccttcatatcatactctcttcttcctaatacttccctaacaaggccatagctaaacagttgaggttatataggatgtcactttagtaatggcagaagacaagagagaagacactcttattatagtcttaaagccttcgactggtcttagaacctcctggggcttacgacgattcggcaacggctatattaacgaaaagtgtacatacgatttccattgatcacatgtcactgatcataacacgatggtaacgatgcttaacgtggttttttagagaacgatgaggacctctgtaatgcatccatctggaacctaagtatagtcacttcatagcacgtcttatcgtgtactgattaagcttccgatgcttgacattcacccttatctagaataactagagtggaccagtcgttttatcttaagaattaagacatataaataccgcaaaagtatgtcaggatcgaactaacaaccagatacagacggaaaatttatcttgaatacacccagtagagttgtgccgtaggcaagccaaagttctacaatttgccacataaaatccaccagactcactaaactcgttaggctttgctagtaatcaaacatagtggacaatagagctttcgatttcgatggttttctggtctattttgtgctgaaagtcagtgcaagtcaattctagctcttcattaatatttcatgagccacagtgagatggactttgtcctggtgatgactatactgcaggatcaatgggcccagcgtcctctcaacttaagaatcgcctcatctcagcatcctataaacagaacatcactgttgaccagcatttcagctaacggttcatccgatggctaaataattaccaggggcctgtcatgggaacctcaaaagacaatctgataccccgttgttactctagaacgcacgtgcattacaaaaagacaaattcccctgatgacatttcaggtaagcaaaaaaacccgggaaagttaaatgaaccgcaagcgtatacaac

SEQ ID NO: 600114 - DNA, 350 bp, Homo sapiens
  misc_feature (77)..(77): n is a, c, g, or t
  misc_feature (319)..(319): n is a, c, g, or t
gcaagaagcatctttgctttgaagaaggccattgtcaaagtgcaagaccatgtcaggctctgcagaattgcctgacntgttttagtgatttaaatatgatctctgccctggctcacagaaagtgcttacagatttaatcctctgatacataagggttgttctgaaggtagggagtgttcagatattctgaaactctaagattgtttaaataacccatatgttcatctttttgatgcagtataaaacgttcatattctggtgtttagccatccctggtcctaaagataataaaggacaaacataatggtttaaaaagggnaaggtttcttaatatgctaaccaaaaaaaaa

SEQ ID NO: 600115 - DNA, 920 bp, Homo sapiens
gagcgggtttccctttccgggcgggcaggcggcggaccccagtgtctttatccctcttttgcacagtcagcttctgcagctctcccgggctagcatggcagcgtggaagagttggacggccctgctggctctgcgccacgagttgttgtacttgatatggtcgtctgtaaaggatttgtagaagatttagatgaatcgtttaaagaaaatcgaaatgatgacatttggcttgtagatttttatgcgccatggtgtggccattgtcaaaagctggaaccaatttggaatgaagctggtcttgagactgaaacagcatgtggcttctccagattaaggttggaacagatggtctgctacgttcgctattctatgcacttgcttcaggagctttggcagttcgacggttatccaagcaattacagctcttaacaggggacttggcttataattatacgaggaccacgaacaaaagctgatatcatcgagtattgctcacagagctatctggggctctaacttcggccacttccaagtcaacaaatgtttgaacatatgcagaagagacaccgtgtattttgcgtgtatgtaggtggcgaatcacctcttgaaagagaactacatagatgctgcttcagaaattggattgtctactacatactctcttttcttgcctcagaagaacgtggctcctgaagtcatgtgacccctataaagacgatgccgactgtcgcttgtttttcaaccatggacccaccttcaccttgggtctactgaatgagctactgcaccgcctcgccctgatcctgccccctcctgtcatcccacagcccccccgcgcccacgacatcgccctcgctactcacggcctccctcctgtatgaccctccgcaccccccgcacactctcctcgctccctgtca

SEQ ID NO: 600116 - DNA, 131 bp, Homo sapiens
ctgtggtctgatctaagtgatcccgggatggcgaaccacgccaggtcgtgcgagatgaacaggtggtcagcccctgctcggcctgcaggtcggcagcagatcagcacctgcgccttgaccgagacgtcgag

SEQ ID NO: 600117 - DNA, 1189 bp, Homo sapiens
ccgtcatctactctaccatctttgcaggcacactcatcacagacgctaagctcgcactgattatttacctgagtaggcctagaaataaaccatgctagcttttcattaccagttctaaccaacaaacaatcaaaccctcgtatccacagaagctgccatccaagtattatcctcacgcaagcaaccgcatccataatccttctaatcagctatcctcttcaacaatatactctccgagacaatgaaccataaccaatactaccaatcaatactcatcattaataatcataatggctatagcaataaaactaggaatagcccccatattcacttcatgagatacccagaggattacccaaaggcaccccgtcatgacatccggactgaattcttctcacatgacaaaaacatagaccccatctcaatcatataccaaatctctcccatcactaaaccgtacaagccttatccttcactcatctcaactcttaatccatcatagcaggcagacagaagagtggacataacaaacaaacacaagataccgcaaaactcttagccatactacctcaattaaccacacatagagatgaaataatagcagtcacataaccgtaccaaacctaaccataaaccattcctttcattatacacatataacatctaaatcctaaactactaccgaattccctactacatcaaaataacaaactccagacaccacagaacctaaactaatatcatcggcaacctggaacgaagcacagcatgaacgaacaccccttaaatcaggacaaacgacgatgaaccataggaaggccatggcacagaataaccgcgcatatggccaacaggggcatatcgaagaagccacaaacaagaacatacaaagcagaaagaatagcaccataacctcatagacaaataagccagggaaaaaggccactaataaaaacacgaaaaaagataaataggaagcaacagcagaccacaaggacgaaagacgaacacacggagccacatacaagaaaaacataagagacacaaagcaaaagaaagcgcaacgaggacgaatagcagtaaagataaaggacagagctccgaccaagagatatcagcaacacgagcccacaagaggagacaaaaagtaaggagagggagcatcgaggcagagaagaaggaaacggac

SEQ ID NO: 600118 - DNA, 380 bp, Homo sapiens
ttatgggtcggatggacattgcgtactgaaccagcgtagctcgctaacactgcacaggagtagccagcaattgtggaagttcaggccgttggtttgcgtcatattggagtgttcagctcggagacctggatggccctgtgtaccttttctcatgggacagaatagggaatcattttcataactcttgccattaaagcaaaatcacaagtcaatgaagaatagagacatcatataccctctgattttagatcttatgcagttatctctatcactctgagcctcagcttcttcacccatgatccacggttgattatacttacttcttgagctttttgacaggattctatgaaatcatgtatgtacaagccttagtctggggt

SEQ ID NO: 600119 - DNA, 462 bp, Homo sapiens
cacgaggtgttttcgatgcgcgatgtcacgccctcacgtgagaacagaacaccgaccttgatgggatcgtttgtggacacgggtttgcggccgggtgacaaaaaacgtgatcgatactaacagagcttgaccgcgcgaaagaggctcactaagattcactcaacgcttcgtcccgccaacactgccgggcgcgaagacgggcaaaaaggcctgcacggatgtccggatccggcaggcctttttgttttggtttttcgctttcgtgttttcgcaatttttcgcgatttttcgcattggccagtgccggccggtcgcgacaggagcttccagatgttcaacccttgaaggagagtgcagtgattccgatacccaggaaaggcacgccggaacgccaccggctgatccaggagcacctcgagtgcgtgaagtccatggccggcgtggccggcttctcggtgctca

SEQ ID NO: 600120 - DNA, 480 bp, Homo sapiens
  misc_feature (338)..(338): n is a, c, g, or t
  misc_feature (376)..(376): n is a, c, g, or t
  misc_feature (411)..(411): n is a, c, g, or t
  misc_feature (430)..(430): n is a, c, g, or t
agggaaagaaggaagatttgggacgagttgcactgggcacagagactaggaagggactgatgtgtaaaagaatgcctggacatcaggcacctcagaccatttgcccattttacgactagaattatttagatcttgtaggatggaaacattgaaagtgccgttttccagctatttggaactactgtggagtttgtattggggtcaagcggcattgcagaagaaaataagacgcttagattttaggtcaggtgagagttgaagaggtttataagttcttaagaatacaggctaagggagaaggaggaggaatggagggtggaaacttgcccatagtgaangaggcaagcccagagaaaagagtagagacacggagaangggcgggggtttcttgcccttcagaaaagcagagnggttggggcatggaataangggatgggggttcttgccccctaggtggggacttaccacttaacggtgag

SEQ ID NO: 600121 - DNA, 711 bp, Homo sapiens
cataaaccaggaggtggccaggtggaagtaaaatctgagaagcttgacttcaaggacagagtccagctctgaagattggtgtccctgggacaatatcacccatcgtccctggcggaggaaataacaaagattgaaacccacaagctgaccttccgcgagaacgccaaagccaagacagaccactggggctggagatcgtgtacaagtcgccagtggtgtctggggacacgtctccacggcatctcagcaatgtctcctccaccggcagcatcgacatggtagactcgccccagctcgccacgctagctgacgaggtgtctgcctccctggccaagcagggctttgtgatcaggcccctggcggcggtcaactaattgtggagaggagagaatgagagagtgtggaaaacaaaaatgaatacatgacccggaccccgccctctgcccccagtctgctccctcgcagaaacggtgtaactcggtaaatcacgttaagcctgctttgtgtcactcggcttcggctcgggacttcgaaatcagtgatgggagtaagagcaagagtgtgcatctttcacaagattgatgggctgggctagtagataacaatcttgtaaggaaacaagcattcaacaaggcatggccatcatccaaacatttcctcaggcaagttccttttggatacctgttttacttccccctccatgtagaaggg

SEQ ID NO: 600122 - DNA, 515 bp, Homo sapiens
gcaaaggctcgccccaaatgcagcatttcatacgatccatcgccccacatgccaacatgagcacccgtgtgagatctcaggagctcctggtaagccatgggtgcaggacactggtagagagccaaaggtccctccccagacatctggacgctgggcatagatttctcaagaaggaagactcccttgcctccccagggcctctgctctcttgggagacagagcaataataaaagcaagtgtttgtaatcccagcactttgggaggcctaggtgggcggatcacgaggtcaggagatggagaccatcctggctaacacggtgcaacccctgatctatgcgcgtgtagtcccagctacccaggaggttgaagcaggataatcgcttgaacccgggcggcggagattgcagtgagcggaggtcatgccaccgcatcgcagcctgggcgacagagcgagattccgcctcaaaaataagcaaataaattttaaaaataaataaataaggcaagccagtgtt

SEQ ID NO: 600123 - DNA, 555 bp, Homo sapiens
gagatcccttataatgtgactattaatctaatttttcgaatgctggtgtatcagcacacatagtcactttcctctccagatttgagtcaaccgtagtgtggtcagtttatcttcaatattaagttcaatgtcctatttatctaagttcttggtaaaaacttggaccaattctagaaaagcatcctccagggaccgtagccaatcatcacgagttatccaatcactcaagcaggcatctcttcctttcaatttgctctgtactaacacggtccaataacgatttcaaatttcttggtctaccattctaatttctaaccctcttctcatttttccatcagagagaaagggagatttgggtcacaacaaatttaaacatttacaaatataatgaataataaaaaaatgttgaaaaggactaaatgggttctaaaatacagtatttaaattctaaaactcaagtattttacatagattgtttacatagaagtgcagtgaattctcctgagtttagcatgaattactctccccagtgtaacttacttgaaggagaaatct

SEQ ID NO: 600124 - DNA, 338 bp, Homo sapiens
  misc_feature (109)..(109): n is a, c, g, or t
  misc_feature (158)..(158): n is a, c, g, or t
  misc_feature (162)..(162): n is a, c, g, or t
  misc_feature (201)..(201): n is a, c, g, or t
  misc_feature (206)..(206): n is a, c, g, or t
  misc_feature (228)..(228): n is a, c, g, or t
  misc_feature (230)..(230): n is a, c, g, or t
  misc_feature (242)..(242): n is a, c, g, or t
  misc_feature (293)..(293): n is a, c, g, or t
ttatgaacgccatcgtcgatcacaacggcgcgtatatgatcaccgtacaactggctatctgctacgttctgttaatgtacgcccatcaacaatcaccgagctaattaancggtctatatacaccctatgctgccccgccgttcatcgaacttctcacnctanatcgcacccggaagcgttgcttggccctcgctctcccanatccncccgtctcgtgcgcacgacccncnagcgatcgtacncatcggataccgaaacttacaagccaagcgactaaagcctgcgcttcaagncccctacactttaacaccatcagtgcaccacgaaaaacactccga

SEQ ID NO: 600125 - DNA, 128 bp, Homo sapiens
aaaactcctacaccagagacccaacctgaatccaggcgatgttgcctggatataaaaatgtaggcctagtgagctgggctgccttcgcaatgaaggtgcgggttcataaagaccttagttttgaaagt

SEQ ID NO: 600126 - DNA, 159 bp, Homo sapiens
gtagcgactctagaggaccccttcgtgttagtatttgaaagcacgaaagaacagaaggaagggcagagttctgatgaggaagttaagaccatgacatgtcaggtagtggttcttctcctgctcacagaagagggtgagcagtagagattggagcagccg

SEQ ID NO: 600127 - DNA, 281 bp, Homo sapiens
gcaggtgactctcagatcatacctacagcgctgcttatcagaagccattcgcgagtttgcgtcagcccttccccactgcacgcggtgcttcatgggcttcgcgttcatgcgggcccactctgtctttgcctacattttctctgtctggtgatcactcacatctgaggaaaagtttgggctcccactgcaacacatgtattggaactatgggttcatgggcagggccttctttggacaaggagacggaattcgcataaagttccccaaatttgtgcatacac

SEQ ID NO: 600128 - DNA, 262 bp, Homo sapiens
acacaagtactacttcctcgtgggctacagtgaaactctgctgtcctacttttacaaatgtcctgtgcgactccacctccacactgtgccctcaaaggttgcgtatcagcacctctagaacaatcccctttcttccatcaagctgcaccccgccgagactggaaacgcgcgacagcaatgctatgtgggcgacaacgcctcccctcagaggactcagcatcagtctctcatctgctcttcaacaaagaccttctatctcgac

SEQ ID NO: 600129 - DNA, 317 bp, Homo sapiens
ggtgtcgagtaagaagaaagacttcagtagaaagctggtgaactccaaataagttgtacttagtttaatgtgtactaagtttaatttctcagtttggatcaatgttttataattatgtaagatgtcaacataaggggaagctgggtaaagggtacacagaaactctctgtactgtttttacaactcttctataagtctaaaattatttcaacatttaaaaaaaaatggtcaagttccaatacttctgggttgtttcactttcttcttactcattaacataaatgaaaatatcaaccatcattcatttaggaactgca

SEQ ID NO: 600130 - DNA, 282 bp, Homo sapiens
gatgttatatgtttaatgaggcggatgagggttggatgtggcttgctgtgcgctagcgggatgttgcccgggagcggcgtctctcagtgtgagcgggtctgaactcgactgagctgctggagaaagttgaggcttatctccacatctgtggaatccagagtgttttggtgggcctgtaaactttttttgtgctgccgaaggccatttgtttgtgtggattgaaatacaacactgtgtgtgtgtgtgtgtgtgtgtgtgtgtgtgtgtatgtgtgtgtgtgtt

SEQ ID NO: 600131 - DNA, 252 bp, Homo sapiens
gctgatgtcattgtgggacctccccataccggcctgcccgtcttatcttggtgtctttggggtttggggctctgtaaagccaagaaattgcagggttcaaaagaatgaaagtttcttaaccagaaaggaaaagccaaaagagcgaacgggagaaaacacttaagtctttataagttgggtagttaatgtatcccgttacaatacctctgactttaaaaattgtaataatgaacgatttatcaacgtaacatt

SEQ ID NO: 600132 - DNA, 417 bp, Homo sapiens
catacaggatcccagtgcacttcgtaacgcctaatatgatctctgaaatcaggtttgtctaataaatacagaacttagagtacatctatgagttactttatggcaagtcttagcgctattcaacggcacttatactatgcacatatctcattgtgttctctcaacagccatgtcatattaagtaatattactttgtttgatagaagaagaaactgagggtctggaccattggtagtaaagggcaaagttaggaactctgaacagatcagacaaagcctgtgtacttcaagtgttctcctaatgtctgcaatagaaatgtggatggagaggcttctggtcagctattctggaagctaaaaaaccttgtcaatagaataacattggaaattgtgaccacatagccatgacatagccatg

SEQ ID NO: 600133 - DNA, 400 bp, Homo sapiens
tagaaacacacgcttggcaccacgccactgtctccacggcttcactgtctgtgcacgctggggcaccccctcgtgaattttgggcacaaaccacgtgtgcgtgtccacaggagtcccccactcgtctgaaagtcttcttttaggtggagactcatcaacccacactctggggcactcttctagaggtgccacaataagtttaatgattcttcggcctcgttataaaaagagaaagtggagccacgtggttagccttagttttcctctcttgatgtaggttattatgattagctttgtcactgtttcactactcagcatggaaccagatgaattccctttgtaggtagtgagaccaaattgatgatcccttaagtgaacaccaataaaagggtcccattga

SEQ ID NO: 600134 - DNA, 419 bp, Homo sapiens
aaataagtttgcctttcaatcccgtcatcctcttccatccatgttgttaataatatttagcgcttgtcctagtaaccttgggggaaattaaggaccctaccttaccttagccagcgtccttgttacccagtggtcctgttaagaagatttagattgtaccaagaaggaagtcaggttttagccttgaaatagtccctgttctcggatctcctatagctaagggcaaagttaagcatcgaagaagggagtgggcatcaaagttggtgtgttggaatgctactttttaagaacccagatgttcttatttctgggtacctccacatgtagacacaaagagggggataagcctcaacgacagagcagtccttatctcaaacattactgctggaactgtggaacccctgctatgagcagggtgc

SEQ ID NO: 600135 - DNA, 119 bp, Homo sapiens
  misc_feature (41)..(41): n is a, c, g, or t
  misc_feature (63)..(63): n is a, c, g, or t
tctagaggaccgcgtatcgtacacagacagctgggaatgcncaggatcaatatctccacagtnctcccacaacacgtgggaagtattggagtacattcagatcagattggtgggataca

SEQ ID NO: 600136 - DNA, 1067 bp, Homo sapiens
  misc_feature (1067)..(1067): n is a, c, g, or t
ggagagagagagagaactagtctcggtttatatttctctatttccataactttaaatgctttatggggattgcaacgctttacaaggttaaaaacaaaacccaaccttggaatttggccgaaaatattagctgtaaaaggagatgttagatgttagatgtcaaacagggccctgcattggtgacccagaaggcgcgacgcgccacagtgtgacttccatgtagttagcggcgtgaggagtgtctccagtgtcgatggcaagagagatgggagacccaaagatgggggccccccatgtgaaagactcttgggggagaccacgggcgaaaagagaaaacaaaagaatggagacaacgcccaacagaacatatggcacagagatgtgtctaagaccacgcgcacgcccgggagcacaagagatgggtcatgtggcgccacatggggagaagagctgagcaacaacctgggtggagaacgcgcaaggggcgctagcgcatcggcagaaaaatttttgcacccccccgggtgagaaaaacaacacccaatccatccgcgggcagaatgtgcccaaacatataataacaccactccgttggtgttctgtgacatcgagcgtgattgtcccttgacaagactagtggtgcacacagagaaaaaatataggggatagataggacatcaaaaaaaagctgatagctgggaagaaatattaaaagaaccaccaaagatgaatacgagtttccacccacaaaacattgttgataatcaacaacatgtatgtgggacacaactatagagcgagaattacattgttgaccccaaattgtgattcctacagaattatatgacaccaacaaatctaccaaaaaggagacgacatgcttaatcgccatctgactaggaggtcacacctaatcatatggaaagcaatatatagaatcagactgaagaaattatggtgacacgtttaagaagaaaaaaaaacaccacccatcagggagatgtacctcaaacagacgacgaagagccacccactcgcataacacaactaaggagagcaccccaaan

SEQ ID NO: 600137 - DNA, 710 bp, Homo sapiens
cggacatcgaggtcaagactgcacatgaggcactgtcaggcgagaccttcagcagcgagcaaggacgttcagtgtgactcgaaagcatgccacgtatgctgagctgtctggccctgtgactggatgcgatgagcctggccgacgactagctcacggaagtgaagtgtcgtggcctgcatgtgatcctgcaggacttcagatgcacacgcaggcgcatagctgctactaggaaacctactatgcaaccgatgatgccacgcccagtcaaatacgaggataggtcaggctgcaatcaaagctcgagcagacaagctgacgtaagagggactgcaagacaccggatcgctaaggcaggcccaatgataggaaactgaaatgcctggtctgaatcaaactggtgtctgaggacaaagtactgaggcgaatgctcaactgccccatatagacccaagttactgcggaggctgagtagtaccatgagacccagtgcctgatggagcatcggactgatacggacctacacagcgtgtacgttcccagtacagatactcgtactcgatggccctgcccgcgcagtatagctcagcgcttgcgatgccgtgtatgcctgaaggcacgcgatgcacgtcgctaaccccagcagtaggtatctccagctcattcaaggctagtaggaaactccgctccaatcccccaagccgatgaatttt

SEQ ID NO: 600138 - DNA, 230 bp, Homo sapiens
cgtggacgacgggctgacggtgctgggagggatagcggggggctgctggccccagctgtgggtacagagaggtcaagcccaggcggactgccccgtgcagactggaggggacgctggtcaagctggaggaggaggcaattgggatggacactaggcataccaaaagcaagtggggacacacgaggaacacacgagcttttccgcacaccaacgcacatgaacacgcaaac

SEQ ID NO: 600139 - DNA, 180 bp, Homo sapiens
gtggatcgctccttagcgttcgttgaagcatctttcctctctggttcgcggcgcccacacacccccacttccatcggtcccgcctctggggtgtttttttaaaaagataaataaacagtagattttaacataagataagtagatatataatattgacataataaaatagaataaaaagaa

SEQ ID NO: 600140 - DNA, 914 bp, Homo sapiens
  misc_feature (42)..(42): n is a, c, g, or t
  misc_feature (67)..(67): n is a, c, g, or t
  misc_feature (130)..(130): n is a, c, g, or t
  misc_feature (327)..(327): n is a, c, g, or t
  misc_feature (340)..(340): n is a, c, g, or t
  misc_feature (432)..(432): n is a, c, g, or t
  misc_feature (538)..(538): n is a, c, g, or t
  misc_feature (587)..(587): n is a, c, g, or t
  misc_feature (597)..(597): n is a, c, g, or t
  misc_feature (648)..(648): n is a, c, g, or t
  misc_feature (714)..(714): n is a, c, g, or t
  misc_feature (716)..(716): n is a, c, g, or t
  misc_feature (765)..(765): n is a, c, g, or t
  misc_feature (794)..(794): n is a, c, g, or t
  misc_feature (826)..(826): n is a, c, g, or t
  misc_feature (832)..(832): n is a, c, g, or t
  misc_feature (835)..(835): n is a, c, g, or t
  misc_feature (880)..(880): n is a, c, g, or t
aggggagagggggcagaagaagagcctccactctcgcctctncctccgggggtctggcgctgcagcngggacaggccagtaagggcccagcttcaggcccagcggggtcacacccgttacaaaggcagtngccgcgacttccctagagactctgcagccccagccgtaaggcgagggctgcagcctcctccggatggatccagggcggctactggtcccagagctgggggctgagtgggcccgtgccgagggctgtggcgtctgaaaagccggctcccactctagaagctcctggcttgaccaggacccaagccctgccctgcgtanccaggccccagcnccacagagcgcacccccttagcaaacttgagggaatagagcgttttgctagttttcttctccacgggggacacctgttccaccatgagggtnttgctgttaccactaagcgaattctgcagcaggaaggtgagcctggagttgcggaagggcacgtggccctggcgggagcgcagggcagccattacgttccccaganccgacagcgacttgttgaagttctgcgccttccgcaggcggctgccctnggcccccganttgcccacgcgctccgagccagcaaagttcaccaggttcagcttccccgtngtgcggaggcctgttctgcagttcacgccttgcaccgtcacgatgagcagcgcgttcgaacgggancngttctcgttcaggttggtgaactcggtcgtgcgaattgtgttggcaaantcaaacaccttgttgaagttgttcacgcnctgcacttggaactcagttagccctgggacanacagcngcncactgccgtttgggcacagccggattttcagttttttcctgaagntctttccctagcagggcccttaggacttaaatgt

SEQ ID NO: 600141 - DNA, 358 bp, Homo sapiens
  misc_feature (164)..(164): n is a, c, g, or t
  misc_feature (184)..(184): n is a, c, g, or t
  misc_feature (194)..(194): n is a, c, g, or t
ttaggttggggattaaaatgccggtaccgtcagtgcccagccctgttccaaacagtgctgcctggaagatttttgggctttcctgaggcgccaccccgcacctgagccacctccttggactcctgtcctttaccccttgaggacctccctcccttttaccctanctgtttttttgaacttgggnctttcctttnccaagacttccatcactagctcctggagggactggactttgcattttccctttgcgtggagcctcagtgtgaaaggccctgccaatgggtgcatgtcaaaggtggtgggggccccatcaaaaaaaaaggggggtgatgaaattaacaaataaaaagtatgggga

SEQ ID NO: 600142 - DNA, 832 bp, Homo sapiens
gccgctccggccggtctcgtgtgctctgccggtcgcaagtggaataagagatcgccgggctggtcatggacaatggctccggcttgtgcaaagcgtgtgtatcgcgtgtgtgatctgcacgcgtccccgatctccgagttctgttccatcgtcggcgcgcctccgagacaccaatgggtcgctcgattgcatggcgcatgtgggccataaatcgatgtcctagcgtgaagctgagcaaatggccgcagagaacataggctgttggctatccatgagccctgtagaagtaccccagttgatgcaatggcagtccgatcaccaaaatgcggtacgacgatttcggacaaagaatctaggcatcgcacgaccttctctagcaactgactacttcgctgttggtctccctggatgtgaagctatctcgcatgattgccttgtctttggatccgatggcaccactccttgagattcccccaagggaccaatgatgacgaagaagtaatgatcttcatagataattgattcggaggaactctttcatatctacccatccggtggacaatgttaacggtagtggcaattcccatgggacctgttgcttgtacccgtcttacgccttctggcgcagcacccatcgtgtccattgtcagttggaactcttgagagtgatcggcgcggttcatcctccatgaaccgtgttgccccatcctagcggtacgggtgctacggctcccttccctctcatagcccgatcccttgcgtctaggatccttaggcttggctcgggggatcctgaccgtgtactatctcatttgaagagagtccctcagtt

SEQ ID NO: 600143 - DNA, 99 bp, Homo sapiens
  misc_feature (93)..(93): n is a, c, g, or t
atgtgggttaaaacattggggcatgaatttattttcaaagtataaaacccatcccttaaacattttatgtgtcaaataaaatttgtttatgtnacccca

SEQ ID NO: 600144 - DNA, 456 bp, Homo sapiens
  misc_feature (329)..(329): n is a, c, g, or t
  misc_feature (341)..(341): n is a, c, g, or t
  misc_feature (351)..(351): n is a, c, g, or t
  misc_feature (367)..(367): n is a, c, g, or t
  misc_feature (380)..(380): n is a, c, g, or t
atgcctctggctcgactctagcagtatcccctccatatgtcacggccaagacgcccaggctctgtgcgctccagctctgcatttcctggttctggcggtcgtggctgggatgaccccctcttggactcgctgctgggactggaactggaactgtccctcggagggccgaggagctcacctcttgatcactcatagcagtctgggcttgtcgactctggtcgcctatgctgtgtgctactgcacgtggtccgggaacggcggcagcgggtccaggctcatactggccctgtagccagcaagccaggccggaatcgcacgaagaggtggcngctctcatggcnacaaagagcnggccggggtggtgtcngagaggacagctnaaaaatttcttttgtgactccgttcactgctcccaccttggccttgccatatgccaggttcccgagctccaattcg

SEQ ID NO: 600145 - DNA, 126 bp, Homo sapiens
tactgtatacggagttcttcgaatgtatggtagggtggggggcatacatatagtcactccaggtttatggagggtactaactactatataggacttatatcgctatcgaagcgaaggcttctacaa

SEQ ID NO: 600146 - DNA, 760 bp, Homo sapiens
gacccgtcatctaagttagtactgaagtcggagcaggaacagaacagagaagactctgacctcggaagaagtctgagccagatgcaggacgctgctcgtgcaattggctattgggcctttgagtgcctcactgtccgagactacaatgacatgatctgtgtgcactctgtgtgtgtggcccccaaagtggaaatggctcagaaggagtgaagagaatgtgctagcactgaagagcgatggagattcacctggccatgaattacctgagactctaaatgaggtaaatagataggaggacttatgaggccacgatggagacagaggtgatatgagcaggtggcattaactgccagcatccccaaatcacccggaaataccgacagcgtctagtagatatagccccctataattacccacacagtacatagaggaggagctagtaggtacgtacacacactagacgaaacgaacaaagaactctaggaaaagtgcaagccaagtaacctaggacagagggcacaaggaggccatacgagaatgaacgagcaatgcacccaagcgcagggggcacccaatgccaacatgacatggaaaaccgaaaaacagaaccacagaagaacagcaacaaagaagacgaccagaatcacaacaacgaaaacaaaccagcaaagacgcgagaacaacagacataggaacgaacacaacacaacacgacgaacaccgaacaaagaaaccaacaaacccaagaacaaccaaaacg

SEQ ID NO: 600147 - DNA, 307 bp, Homo sapiens
  misc_feature (9)..(9): n is a, c, g, or t
  misc_feature (35)..(35): n is a, c, g, or t
  misc_feature (234)..(234): n is a, c, g, or t
  misc_feature (273)..(273): n is a, c, g, or t
  misc_feature (277)..(277): n is a, c, g, or t
  misc_feature (282)..(282): n is a, c, g, or t
  misc_feature (284)..(284): n is a, c, g, or t
  misc_feature (305)..(305): n is a, c, g, or t
aaaataaanaaaatttcacccttggaaaattccancttttacttttttagcaccaaacagacttgataacagcctgatgctgatctgacaatgggttgatagcctcccccactgcccttaaatctgcttagtaacaagtcctttgcttctgtcattcccctgggggatgcctactccctcctttctgtacaatctgggaaaccgactggtgatggaagagtggtgtaatgaagnggctacacagctgagagacaattttagtcgagagctagngatncctgntntccacacatttacccaacatnac

SEQ ID NO: 600148 - DNA, 148 bp, Homo sapiens
ttttgacaggtcaaaaagaacctttattacttttgacgattgccaataaagctttcgtgacatatgcctgtggagcaggtgctttttgggaaggagcaatttggccgctctgtcgtcgtattgcagcagtagagtagtagtagtaggc

SEQ ID NO: 600149 - DNA, 107 bp, Homo sapiens
accagtgtagcatatatgtagccagaaactgatcaaaccccgcacacctgcccaacctgctactcctcttgccactgcctcttcctccctcattccaccttcccatg

SEQ ID NO: 600150 - DNA, 675 bp, Homo sapiens
  misc_feature (488)..(488): n is a, c, g, or t
  misc_feature (624)..(624): n is a, c, g, or t
  misc_feature (670)..(670): n is a, c, g, or t
catggcgcattgctgaccaaaaggctattaatgaccaagagacagtactaaatgagtctgaccagccagggccatagattaataggaatggcattaacaagctcaggatagctgtggcagcggttgaagaaaggaattagcaactctgagccctttgaagaaactcttacacagatgcacatatacatatcgggaaagacagtgattattacagaatccagactccctctctggcctcatagatgactattcacccgtactttacgtcctagctaccatcccaaagttgtgatgctgcacaaatcctctgtgcctgacacatgccttatcaccactgacttcattcactacgcaactactcacttactcaaaactctgcccaaggctgggctccgtggctcgtgcctgtaataccagcattttgtaaggctgaagcatgcagattacttgaggccaggaatctgagatcagcctggccaacatagganaaccccgtctctaatagagatgcataacattagcttggccctggtggtgcatgcctgtaatcccagctactctggtggctgaagcatgaaaatcgcttgaacaaggtaggctatagttgcatgaagccgagatcgngcactggactgcagcacgtgtgacacagtgagaccttgttcagaanaaatg

SEQ ID NO: 600151 - DNA, 357 bp, Homo sapiens
tacccaactgagagctgcgtatagctgtctcatatcttgggcatggcggaggagacatgttggaccctctcatctcgaggtgttccaggacggtcaggttcttcagcgaaagaccagaacacggaagtagggctgctctcctcagatcccctagaccgacgtggctcgctgagaggccccgccccagcctctgcactcctggagggcaggccagccagcgaactccgacgcgaacgccccatttcctcctgcagcttccagcagaggcccgagaggtccccgcggccccttcagctgaggtccctcagccgcttgcagtgcttcaacatgtctgagagctgcagctcgccctgagtt

SEQ ID NO: 600152 - DNA, 311 bp, Homo sapiens
atctcccgattgcagtgtcacgcatctccctgaatatagggtctccttaaacacatctgagcactgacctggatgagtgcaccttggaaaccctggtgaacaggcaccaaaaaggcattgatcagggcctaggcctcaatacaggggagaaactcatgggattatttaacaaattacttttttttggaatttcaagatttcccgtttattgacttggaaagaagcaaccacccgtgtttggagaacctggaaggacagaacaggggtttctgggtgcccagaaagctctttcttccaattcctttacaagg

SEQ ID NO: 600153 - DNA, 136 bp, Homo sapiens
agcaagaccctgtctttaaaaaaaaaaatagggcatggtggcgcatgccatggtgctagctacccaggaggctgaggtaggaggattgcttgaacccaggaggttgaggctgcaatggtgctatcatagctcactg

SEQ ID NO: 600154 - DNA, 158 bp, Homo sapiens
  misc_feature (38)..(38): n is a, c, g, or t
tcaaaacacttctatacacctggctccgggcctgcggntgagtcctataacaacgcataatgttctgtaatgacttaccttcttttgtgacctttgccatcacataaatggcacacattaacaactggtccagatgtcatgcccatcataatttcagg

SEQ ID NO: 600155 - DNA, 833 bp, Homo sapiens
ggttctgaggggacatgttgaccctggaggtagccataggcccccgagatgatgcactgtctggaaaagatctggcactgggtctccattgcgcatgtctcatgtgcacactcccgtgctgttgccctgaccagattcatcgtgcctcgttgagcagagtacgctcatgctactgcagatgtgtgaagagaggcctttgtagggcccagatggagaggccctgggacctggtgggtgcgcagtgctccttgttactgagtgagcatgaggctgcctcctcctcttctactctagttgaagtcaccctgggggaggtgcctgctgcccgagtcaccatgatcctccccagagtcctcagggatgcctccagaactccccactaccatgaactaccctctctggagccaatcctatgaggactccagcagatcgcaatgaacgaggatggggccaagcaccttccctgacctggagtccgagttccaagcagcactcagtaggaacggtggccgagttggttcattttctgctcctcaagtatcgagccaggagccggtcacaaaggcagaaattgctggggagtgtcgtcggaaattggcagtatttctttcctgtgatcttcagacaaagcttccagttccttgcagctggtctttgggcatcgagctgatggaagtggaacccgatcggccacttgtacatctttgcacctgacttgggctctcctacgaatggctgctgggtgacaatcagatcatgcccaagtgaagcctcctgataatcgtcctggcattatcgcagagaggccgactgtgcccctgaggagaaatctg

SEQ ID NO: 600156 - DNA, 1100 bp, Homo sapiens
  misc_feature (208)..(208): n is a, c, g, or t
agcggaatccatgaagaagtcgattgtcagcatagaagtgggaggctaggtttcattcctctgccactatgaagtatccagcttttcccatgtatcatcaatacttgaagatactgtaccttcccgccacaggtgatctctctgggactctatgacctataggtcgccatggttgggagatcctgcgtagggtagaagctcgcacagnaagtgtgcggtctcggcaccatccttgagactgtttccccgagcttttctcagtctcactagctccacaaacgagacatccagacaccagctatatgggcatctggccagtttctgctccaggtactatcacgtgagcgagagctgctactattttaccttggtgccatttcgttcaacatgttgtttgaaagtacattaacagcgctcttagcacattcaccttattcagcttgggctcgatctagctgatcccacggtttctgctctttccttacgtgaagagttgactgatgcgccgcttcacgctatgctacgggtctactcactggtgacgtgtcactagttccggtatttctcgtggactgggttgcctttgtacgatcttgctgacctgggagctgctctctctgctctgtttgttgtgtcttgcagccttcgagtgaagatgactcaagcaccacttgagagacatgttgccccgatccaaggcggtcttgggccctcactggaacgatcatcgcggggcaaaggttctatccccgtttcaactcagatggcccaacgtcgagcttgatcgaagcctacatgtccaacagcgagtcaaaattgacgaactgtggaataatggccagggtccggtgtttgaaagaattactagacacgacagggccacctttgcaccttttcctcatgtcgtgaaagttagggtcaaggagtgttaaaggtgaagcggccgaatcaacgaagttgcagaaagacctgggggcatatcaggaagaccatgtgcttttaaatatagcatgaaacagaggaccggtttggcctaccatccggagaattctgccgacccccaggaattgccgaattgtttcagaaaagttctgcccccg

SEQ ID NO: 600157 - DNA, 425 bp, Homo sapiens
aaaagaaaaggttgtgggagactgaccagggtaagatcccacctggtccaaaagctttcgggccttactttttttattataaaaattctcacgtcgggtaatcttctatgtcagagctagtgttttcaaaaggtttcacattcccccaagacaaaagtgatttccgtccattataatagggtcacgtgatatgtgatccatagcaattttggatgtgaagaagggaaggcacatcatggacttcataatagtatcagtcggtgcaacagtgggcaacatgtgccttcacactttcaccataaagagacgggttggagggttggccttctaaagtctgcaactccaagaaaaaaaatcgaccctgtggatggccttccccggtcactatataaagcaattaaacttaagacacttggcatccagag

SEQ ID NO: 600158 - DNA, 951 bp, Homo sapiens
aagactagtcgtccgacggtcactgattcatcaccagacaggaggctgcccttcctgtcctagcatgccgcaagtgaaacatcagaggatggaacctagagagatcacctgcgcaatagtagtctaatcaagcagaggctccaagggagtggcagagtccgaactcttgctcagtttcgcagctgtcatcgaagattattaaggcgacggccaaccatgccgcaacacgcaagtagtggccatccccaacaatgctaatattcacagcatcatcacagcacgtgagtgccaagggcaaaagagagtggcagtagtgggcccaacaaattcatcctcatcagctgtgggggagccccaatcagcctccaggactccggcctcaaacccaaacagctatgatgccaaaaggacagaagtgaccctggagaccttgggagcaaaacctgcagctagggatgtgaatcttcctagaccacctggagccctttgcgagcagaaacgggagacctgtgcagactggtgaggcagcaggtgcatatcaacaatagctatccaaacatccagtggttcgaaagatgagttctgatggactgggctcccgagattcagcaagagatggaggccacggagaattgtcacctggagcagcgcacaggttaaggttgaggagcctcgagaccatcaggtctggcaaactctgtgtctgaccggcaccttatcttacatggcagtatacagtcggcatcaaagcctggaggacgcataactgagccctataggggttgggcgcacttcctatttgcatgcaccggggaaatcatggagactttcgtgtatttttcgggacgttgcaggaggccttggctacccgccgttatgccgtcacggacgcaaacccggtaaaacaaggccggataaacccggggaacacacaaatccgaggccctcaaa

SEQ ID NO: 600159 - DNA, 989 bp, Homo sapiens
aaggtcatgtagcccattctgtagatcctacagcagaaattctgcagctcaccctcccccctcgatgtgctgattattgaccagctgggctgcctggtgatcatcggagatcaatacatctatcaggaagtgtggaaactcttccagtcgggatcagtgtgacgcgccagctccgtatgtattactcagaccaccaaagattgacgaggaccacggctatagagcattgctccctgttagtgataaatgccctggtccaacatcgcggcacaatatccaagacgagtcacctggtgtcatgagctgctcatgaacctgttggagttgtttgtgcagctggggctggaggggacgcgagccagcgcgagggcaagcgaaagggccctgctctaaaggcttctagacagtgcagtgtcacttggcagtactcattcctgtacatagctgtgctcacccgacgactgtcatccatcaaagaagctttagcctcggtaacaggaagctctttcgagacttctggctgtattccgtctgattgggattcgctgtgacagggctcaggagtctggacagacaatggtacgagggccgtcaggaaatagggcctaagtccccttgtgcacctatcccacctaaggtggaccagctgtgggccgacctcccagtattaacctcagcccatgacagaatgtcactgtggagcccccgagtcagctgcggtaaccccagcatacgtataatcaagctggggggaccccgctccgaaggagtcggagtcaccaacaaggagttgcaagtacaccagacacgcctgtgagtcagcacggagccaggggacggtaccacacgcaggcagacaaggcagggacacagaccacaaaaagcgaagcggggtagcacgcgagaaaacaccgcgaagtgagaaccaacaagagggagcactgtgggcacacagggggagtctcataggacgacgacggacgcgaggc

SEQ ID NO: 600160 - DNA, 351 bp, Homo sapiens
  misc_feature (14)..(14): n is a, c, g, or t
  misc_feature (26)..(26): n is a, c, g, or t
  misc_feature (129)..(129): n is a, c, g, or t
  misc_feature (162)..(162): n is a, c, g, or t
  misc_feature (187)..(187): n is a, c, g, or t
  misc_feature (247)..(247): n is a, c, g, or t
  misc_feature (296)..(297): n is a, c, g, or t
ggggggggggggangggggggagggngggggggggggggggggggggaggggggggggggggagggagagggagggggggggggggggggagggggggggggggaggggggggggggggggggaggggnggaggggggggggggggggggggaggggggggngggggggggggggggggaggggggngggggggggggggggggggggggagggggggggggggggagggggggggggggggggggnggggaggggggggggggggggggggaagggggggggggggggggggggnngggaacccccccttttttctttccccggggcccctaaattccctccgggcttta

SEQ ID NO: 600161 - DNA, 433 bp, Homo sapiens
cttcgacggtgtctgtattagttaattttttttttttaagagatagtgtctggtcctggtggtccaggcgggagtgcaggcgcaagatcatacttcccggcagtcggaaactccggacttcaaaggatcctcccatcttagcctcctcggtagcggggactacaggcgcacactactacacccaattattggtttatttacttattttggagatggattctggctcggtcgccaggctagaaggcaggggagcgatctcagctcacggcaacctccgcctcccgggttcaagcacttctccggcctcagcctcccgcgtagctgggactacgggcacccaccaccaggcccagctaattttggtatttttggttttagtagagacagggtctcacccggtgggcaaagcgggtctccaactccggacctcagg

SEQ ID NO: 600162 - DNA, 373 bp, Homo sapiens
tctgtacgtctacaggtggagtgggtcacttgaacccaggagtttgacatcaactgggcaacatggtgacctcccgtctctactacggaaaaaaaaaagaaaaaagaaaaagccgggtgaggtggtgtgtacctgtagtcacaggtacttgggaggctgcggtgggaggatcaccttgagcccaggagatagaggctgcagtgagctgtgatcgtaccacatgcactccagcctgggcgaaaacatgagaccctgtctcaacagaaagccctctcattagactgagcagaggaagggaaggagtgtggatatacagaatcatgcatttatgccattttctgtattacaaatctagcaagatcctctaacagtc

SEQ ID NO: 600163 - DNA, 157 bp, Homo sapiens
ggcacgaggctacgatccatcccacgacacgcttaaaaagattaaagccggttatcactcacctgctacagcatggccttttaaagcctataaactctccttacaattcccccattttacctgtcctaaaaccagacaagccttaagagttagttca

SEQ ID NO: 600164 - DNA, 150 bp, Homo sapiens
atcactgctcccaatacaagcaatggtctgaagcctctgttgtggctctcactattcatctttccctaagtcatcaagctccacatcactgaggtcaatgttatcctccacgggaagctcgccatccctgccgtcccaatgctctctctc

SEQ ID NO: 600165 - DNA, 356 bp, Homo sapiens
  misc_feature (222)..(222): n is a, c, g, or t
  misc_feature (225)..(225): n is a, c, g, or t
atgatgtgtggcttagatgcttgtcctgtctggctcatttctggccgcttgttggtctctgtgcaggatgaaggcatctggcgacccaacgcttcctgtggactctgatgaggaaagggtccttgtgctcagtctcctgctcctggtcaccagcttgccctgtctgtttcatgctcaatgtgtgttaaattgaactgaaagagaaatacccggcaccagcgncanccaaacatcatgcagaacacattctaagaggtgaccttttccttccctccccttcaggaaaattccccggtgggcaggagcacttgggaatttgccttgtggccccctttggtcccttgaccaaagcttca

SEQ ID NO: 600166 - DNA, 205 bp, Homo sapiens
gatcaatttgtatattctaaaatatgtaaagctttttgtatgtcataatatctcagtaagtaattaaaaattaaaaatttggcacttctattgtttaaaaaaggaaattaattttctattttatggcaatttggttattatttttaaaaaattcctggtgtttaaaatatgtgtagataccctttgtgtgcgtctatcgtgtgta

SEQ ID NO: 600167 - DNA, 855 bp, Homo sapiens
  misc_feature (799)..(799): n is a, c, g, or t
  misc_feature (801)..(801): n is a, c, g, or t
ccatcactatcccagtcaactcggtggcacctgacaacgactggtctgatttccatcactatggatgcaattttttgtttctggagtgtcacacaaagggaagaatacagtgtgtatgcagagttcggaggctgttaccatgacatagcacagagggcatcttttctcatcagctgaacctagaactccgtgagcccttccatgcctactctgcaggcgtcccccaactcaggggagagttccgatatgtaatgactgcccttcctccatctgtgattttccgcgctcctgtaacttgttactctcagatcagatctcctgggcccgacccccaagcctcctgcattccgtcggcgtcggcctctttcccgctctgctgtgtctgcctagctgtttctcacccttttccttcctcgggtcagcgtctgcatcaagagtgagtcttcaatcgtctgccggatgttttcatgatgcgggccaattttgaagctcctggacttcgttcgcgccctggaattgggatcttctcacgtgccctgtgggttttgatctcaggtgttcgtgggcctcctcccacgctccgtttcgctggccacgtgggtggacggctccctctgaccttcctcacctgacaatacccaggcgctccctccacccccttctatgcccacccggccagatggaacgttctttttttcccacctttgtcagcaatttggggcacaggtctattgctgcaatgtccttaatgcccaacaggttaaagacaacaataacaactaagggatccgccccaccngnttaaaggttctcagcccctccgaggccctaaggaactctccttgccctctccct

SEQ ID NO: 600168 - DNA, 119 bp, Homo sapiens
aaggaccctgtggaatcctcctgctgctgtcctaccccttgtctttcccttacagcacctctcagctaccaggtggctctgtgtgtgcctgtaccacccccaccacccagctcaatgga

SEQ ID NO: 600169 - DNA, 141 bp, Homo sapiens
aggcaattttctcgttgtctgtttagggggaactacagcgcttgtataagtggcgcaccctcgagaacaggaactctgtatcgtatacctgtaatgttaccgttctgtatttacacttcctgactaaggtcttgagctggt

SEQ ID NO: 600170 - DNA, 189 bp, Homo sapiens
  misc_feature (117)..(117): n is a, c, g, or t
  misc_feature (162)..(162): n is a, c, g, or t
  misc_feature (188)..(188): n is a, c, g, or t
ctcgcgctggcctccacggcgagtaacgccgcgcgcccccccggcccctattggcggtgagctgtctgttggctggcgttggtctctttccccggtccttgcttttcacttcctggncgcccaggcccaggccatcccattcggtagagtggagaggccttngaaaccatggtctggtcctgggagcnc

SEQ ID NO: 600171 - DNA, 405 bp, Homo sapiens
attcaagctcaaccagcaactgacgtctgtggcatgggcattcggtgcacccagcattgcagcggcggctggaacgatcgacaaccctgggtgaccttgagccgtaccgtgtcgagtgtgcttgaaatcgactcgccttcggccaccctcagcgccgggcgcaacatggtgattactgggcagaacttcaccaatcgctacagcgtggtgtcggccgccaatgacctatcgattactggcgaaaacatcctcaaccaggcagctaccggtggttccggttcccagagccaggaatacggtggcacttacaaaatctccaaaggccagtacaaccagatggttgccgcggtgcaggcctataaccgtgcgcacccgcagggctcgccggtggatgagggtcgacgc

SEQ ID NO: 600172 - DNA, 485 bp, Homo sapiens
ggcaaatgaacttgtaaacctaactgagttactatgtgaatcacatcctccctgattgaacaatcagctaactgtgaatgaatttcctgtccttaaagctgacggtatcagaatatattagtgatttttagaaatcaagtgccaaaagaacatcttttagtctcgattcctctcttgattaatcatcttcaagctgaaggtactgttgttcatacttacgcagctcatgctcttgaagcggctctttactatgcgagggcctaacaattgccactctctttacacgcgtgccagaaactcggcaccgatatgtgttgacgattgctgactaaacaaagccgttttcaaagtctctgcacacttcctggactctgtcacgaaaattgaactatattgatgacaagctatcagtgagaagttatactctcctacaagaagccataatcccctacatccctactctcatcactcagcttacacagaag

SEQ ID NO: 600173 - DNA, 646 bp, Homo sapiens
  misc_feature (572)..(572): n is a, c, g, or t
  misc_feature (646)..(646): n is a, c, g, or t
tggggtggagcacggggtacttaatggagggtacatgaacaagggggggttccctaggcccctcccctcttacagggggtctacagggaaatcggggaggaggggaaatccatgtggtgggtgggggagactggagtggtgggcaggggactccccagacagtgagagggtctctactactaccctctggtggctgctggctgggggctgggtgggtccagggggtctaacctcctgggagcgccaggtggggccatagaggtccaccacccggttgctggtaggccaaatccgtggtcataccgaggaaaagtgagctggacaaagtgggctcgttggaagggcaagtgccagccccaagggctcaagagggtgggaggagtgggggtgctcgcgtgtggaagctcgagagggagacccaccggggtgcctcaggtgtagccacaggagtgccctggaggggggccctcgcgaaggccggtttacaccacctttctggatggtcactcaatatgggcgcagggtttctcataaacgggcaggtcagggtccaccagtggacactgtgggcngtgggggacccgggaagggcacatgccaggagagctacccggtaacacgcctcaggggattagacctggcgccn

SEQ ID NO: 600174 - DNA, 264 bp, Homo sapiens
tgcatggcggatgacgtgtgctcataattggtggctcggacaagatcacgtatgactccgacagatatcagacacacacatctttgtgcaggctggtgagatgtacattgagtctgtggtgatacttcagcgattgtatattagacaacaagaaacgggcagccatgattatttgtacccgacaggcaactgggagctgaagggagaggcacggtctcttttgatggaccaccttcaggtaaagcgtctacgaatggttggtgg

SEQ ID NO: 600175 - DNA, 174 bp, Homo sapiens
  misc_feature (37)..(37): n is a, c, g, or t
  misc_feature (69)..(69): n is a, c, g, or t
  misc_feature (90)..(90): n is a, c, g, or t
  misc_feature (126)..(126): n is a, c, g, or t
ctggagtggaaccagaagggaagagagaagataagcnagaagcaaggacaaattaaaccatggcatttnagcctccttattcctccagcntcttcagaaaaagggacaatgcctccggagccagcntggtggccatagacaacaagatcgaacaggccatggatctggtgaaga

SEQ ID NO: 600176 - DNA, 279 bp, Homo sapiens
  misc_feature (245)..(245): n is a, c, g, or t
tgaaggtgctccagacacacaggcccacccagcaggaaacactgttccataatatttcataacaagataaaagatactcagaagatgacggaagctgtgaaagaacagcataaatcagaaatagaaaagcccaggccaggctcagcggctcacaactgtaatcccacctacttgggaggctgaggcatgagaatcacctgaacctgggtggtggaggttgcagtgagccaagaccgtgccactgnactccagcctgggcgatagagcaagactcagtct

SEQ ID NO: 600177 - DNA, 1480 bp, Homo sapiens
ggaatgagagtggaggctgcggcctggtgctatgggcagaggctggctgggtctgcttcttccctgtcactgccgcagcagcttgtgggtgcaatggcggcctggtggctggcggaagtgggctgcccccacgagttcctgtcttgcaggacagctggctggcttgcccgcaggcacagtcctactgcagcagcctgtggtccctgcactgccccatggggtcctggtgtgcttgagtgctgcctgcctgggcctgactcacaccgaggacctgaggggcacacgacatcacgaaccacagacgcgaggccgtcttcacacctggtggaccgacggccagacgtgccagatcaggggccccattcccgtcgtaaggcaaggcacatagtgaaaaaagtggtagattgcagtgtgcattggagcacctggcccatcgcgcaagtcacattcgacttgccctagcgcggacagaagcatcgtcaacttcatgggaccatctttgctcgcgcgcaatcgtctggcatcgtcgcttgccccccctggggaacagcacccaggaggaacgtcacccagtccactggcacatcatcggagacccgaaacagcagttggcgcgctgtacatggaccgcccaaccacacggaattacggggactttagaggtaacgatccggatccaggggcgactcgcactctttgggaccagcacaacagacgcggcgggtcttcaagtattggcccacaggtagcgacgtcattccatttggcaagtttccccaaacggggctgacaacaacaccttgcgttcacaagtctagggggaggaatcgcccgccggcggttcgaaaccaattacagaacattcataatgggccgcaaagtcttatgtacacaatcaacggaacacactgtagggtccgcgttttaccaggcatctagcagctgcggcacggaaggaacactgaatcgagacaacttcagacgagggccaatgcaccttggacccggcgttgaagcgatgtgcgctccacagcaagtggttcatcgactggccatgtatcagaacgggctagccaaaccttgtgagcaggtctagctacgccagtctcaagcttgacgacaagcccttgtggcacgctgcaacgcacattgttggtgccaacccgccttcgatgacacaggcaacacacagcggtgggataaccagacaacagaacgacagtgggcactaaccgcaagaatacaacacacaagcggcagaaagtacacgccggacaccacgacaaccaaggaaggccccacgagccccccggcgcacacactaacgagcagtcggcacgacggcgggcgcaaggacccccgaaaggaaccaccacaccgccagaccaacgacgggccgaacgacaaacccacaccagcaccgacggcacaacagccaagccccacaaccgcgcaccatcaccacaacacaggccaagga

SEQ ID NO: 600178 - DNA, 333 bp, Homo sapiens
tcggtacccgggtgctgctagaggctgacgggaggcagaggctgggcctggaggggtcatcaagatcaggagctgggcctggagaggctgcataagaagcatgagtctgtgcctggctgaggtcgactctgagaaagttcagggcctgcagagaaggctgtgaggcaggagctgggtcttaagaggccattgtagcgatggagctgtgcctgtggaggctgttgtggggcagtaggctcatctgcggagactgccatgacgtagggtatgggcctaaataggccattgtgagtcatgagcttggtctgtagaggctgactggagaaagttctg

SEQ ID NO: 600179 - DNA, 658 bp, Homo sapiens
  misc_feature (585)..(585): n is a, c, g, or t
aattaccacttcaaacaaaattacatttagccttgtttactttaaattgtttgactcctggtacggatggcaagaccccagcagaacgacactggcaactgctagaggaaaagaggcaagtttatccaaaagtgttatggaaatccccagaagaaggacaatggaaaggtccggtggatttgctgacgtggggacgagggtatgcttgagtttttacaggagatggacaaaccgtgtgggtgccctccaggtgtgtgtgaccatggaacgggagaccggagggatccatggtattcaaccgtgggcctgttacctccagtacgagccatgagccagcggaatctgaatgcaaagacagaacaagggccgaccggagtcacaatgacatccaaccccataacatggggacagatcaagaaaacgacacatgaagctgagaaactactggagcgccagggtcaggcaacccctgactccatgttcttggccatgctagctgtagtgtcctgtgcggtatgtttcccctgtgtagaggcacatattgggcatatgttcctaatccacttgtagtacgactggtactcntgagcgacactttctctgagatatcatatgatcatggagcgtgggcaccaggatccctcttcgtctgacacgg

SEQ ID NO: 600180 - DNA, 491 bp, Homo sapiens
caggcccctagcaaactctttataccaaacgtctgatgaacagttattgaactagagtcttgagtttcacagacttttccaggcagagtggtgtgatctcccctaagtggatagatgcctttaatacttgtcatcttttctgttgtactacaaacacaaaccaaaccaaacatcaacaacaacaacaaaaccacttaagaatatttaactttctgttcttccgatggcagtttagcaagcgcctaagaggagaagagagggggaaatcccagcaggctaattaatattcacagaaagcctgttggttttggtcacagatctttgtctgtacccgtctggactgtcggactgggttattggggaattgagatttcctgcctttcagtctagggcctcttggaggtggtgactgctgcggatgaaaaaaatcagactgtcagcaagaatgctgtttattatggtgttgaaatcacaaaacctcgggtttgctc

SEQ ID NO: 600181 - DNA, 298 bp, Homo sapiens
cccagcagtagcgtccatcctaggacgtctaactatgtcactccccaactaccatgtcatattagaatcctagaatgctgttgttttagtctattcttatactgctataaagaaatacctgaaactaagtaattaataaacgaaaagaggttgaattggctcatggttctgcaggctgtacaggaagcatagcagcttctgtttggcttctgaggaggcctcatagagcattcaatcatggcaaaaggcacagggggaacaagcacctcacatgaccaaagcaggaggttattggcat

SEQ ID NO: 600182 - DNA, 629 bp, Homo sapiens
  misc_feature (35)..(35): n is a, c, g, or t
  misc_feature (105)..(105): n is a, c, g, or t
  misc_feature (179)..(179): n is a, c, g, or t
  misc_feature (234)..(234): n is a, c, g, or t
  misc_feature (245)..(245): n is a, c, g, or t
  misc_feature (253)..(253): n is a, c, g, or t
  misc_feature (318)..(318): n is a, c, g, or t
  misc_feature (380)..(380): n is a, c, g, or t
  misc_feature (393)..(393): n is a, c, g, or t
  misc_feature (514)..(514): n is a, c, g, or t
  misc_feature (537)..(537): n is a, c, g, or t
  misc_feature (545)..(545): n is a, c, g, or t
  misc_feature (575)..(575): n is a, c, g, or t
acatttctacagctagcaggcataacaaaagactnaaaaggactcacactacatccaaggcgcaatgctttattgcgcgccgcatcccaattacaccacaagccnaaacgcacttccagccgctttcctgctctttgctactttcttcatttccacctttgccccaagctcatctgccnttttcatggcaccaccagctgatgccggcccaatgcatgccaatggctctcctgnagcagtgcagnatcacagnaatcttcaatagcacacatcgcgcccacaccatctttgctcagccagctcacattgccccaagtntccaacatgcctctcttcatcctttggcccaccgtgttttctggatagaggattaaagtaangacctgcactggnacagcctgctgtattatctccaaactcatgaacatggaatccatgcaggccttcagtcagtcctttaatgcttccccacaccttcactgcgtccattactttccttctgctcgaaattaangatgccctgcactgggccgctcncccttcancacgcacacggccttcgctcgccataactngctaggacacgccgcaggtcctggatccgcaggactgcaacgaaaaccccacaa

SEQ ID NO: 600183 - DNA, 934 bp, Homo sapiens
gttgttccgcaacattcctcacactagacgagaggtgtgtatgaaacccaactaccgacacaatagtacaccacacacgtggggggggggagaatactccagagacactactgttttgtaaattaggattagtagtggcgatacactatagtatagatggtgtggtaatacaggatgtacaatcttgtccggcagatagtaatataaagactacagttctacactagatctccacgagttttactaaacggcccactagtgtgttgtttcaacttgggctaaatatcttctgtgtgagataatagattattaaatagaggttctctgatgattttacacacaatgggccgcccaacagtgggacacactctcatatctctgtggtgcgcaagacgattgtcgccccgtgtagcacagggagcgcgcgctctccctctgtatatgtggcgcaaatgtgcacactgtgaaatagaggatccccgcaggggatattaccacacagatagagcgcatgaactattaataatatacattttgtgaacgaaatcttctgtataatttgtgtcacacagagtgtaagatgtgcttgtggttacacatctccgggccatacacgggggggtacacttctacatctcagggtctattttttctggagagtgtggaggaaaataattttaccctcttaggacacgccttctgagagactctttgacatggagtaattgcattttcattttatgtggaaagagaatggggatcctctatgttgtggattaactacctcttccccataagagagaaacattcagagaggtttttcatttgctgtaataagaaattgtgaaaccaggaaaagttatagggataaaaaaattatttttttaaatttgcaaaaattttttttatccagtagaaaattaatcccttgtta

SEQ ID NO: 600184 - DNA, 517 bp, Homo sapiens
  misc_feature (3)..(3): n is a, c, g, or t
ctnacactcaaatatgcatgtcattttaaaaaaaaaaaaacctataccacacacacacatataaacacaaacaccagcatccttctccatatcttaatacttaacatgtacagaagctcaattacttgtcaacacagtaaatcccaaaggggcaattggtaactatatttatccaaaagtccaaaatggcaacggggagggatgggagtaaagctaacagtctcaggattcatttctaccaaataggagttattcaattcttcagaactttaaaaggtcccaaatcctcctttctataacacggtagcaaactatttttctcaaaaataggtgagtcacatcctatacggaaccggttcgggcagataccatcccttgatacacttggaaagacctacagaaatgtctgggaacctacagtattccaattatgccaccacccctctacactctgaggtcgtatacggcttgaaaggaccatgaacctacagccccactcagggttccccaaaagtgt

SEQ ID NO: 600185 - DNA, 929 bp, Homo sapiens
  misc_feature (2)..(2): n is a, c, g, or t
cngtagaggatgcagaagggggccggccacccgtatttgaccctttacggcctttggttgtcaaaactggcctcacaggcgttgcaatttatgttgcgctcttaattttcgcgctaccgaatattttggccccgcctctcggaggcgctctatgtcccaaaggctatgttacgggacccaacggacttgttgttccacgagcgctcgctcacaggctgtgtttgcccacaccgcggtttgtctctttgtgctccccctccctcaggacgcctcgtctggacacccaggaagggccttcataggtgccgagcagaccacagcggtctctatacgcctaggttcggaccgaagcacatatcccttggtcttggcgggctacctccaagtggcattcttccggtagcaacccatcgctttgggatcaaatacccaattcatctccgcggtctgggagcagcccatcatacgccaagagtccgctccttggcgccataaagcgatgtgtgtccattcttccccgggtcgccaaacaagcgcagtagagaccccccgttgggggacccttttctcgagagatgccagttccaggaggcgcactctgccccaagagcacacagcgttggagaacgccgtgcacaagtgcatacagacagggcacctgcccggtggccgccacaaacacttgggcaccccgacttgctcacccatcaatatgcctcaggctattgtaacgcagcgtcgattcctcgcggacacacggtgcggccggctctttatatatgaactcaaccgaggataggtggaaatttatatggagtgtctggccagggcaggttaactaatcaactcccgttcaaattttctgggaaacaggtcaaaaaacctccaagaggggggaaaaaaaatattttggaaaaacaccaacatac

SEQ ID NO: 600186 - DNA, 960 bp, Homo sapiens
  misc_feature (57)..(57): n is a, c, g, or t
  misc_feature (65)..(66): n is a, c, g, or t
  misc_feature (68)..(68): n is a, c, g, or t
  misc_feature (87)..(87): n is a, c, g, or t
  misc_feature (95)..(95): n is a, c, g, or t
  misc_feature (108)..(108): n is a, c, g, or t
  misc_feature (123)..(123): n is a, c, g, or t
  misc_feature (143)..(144): n is a, c, g, or t
  misc_feature (150)..(150): n is a, c, g, or t
  misc_feature (159)..(159): n is a, c, g, or t
  misc_feature (165)..(165): n is a, c, g, or t
  misc_feature (176)..(176): n is a, c, g, or t
  misc_feature (198)..(198): n is a, c, g, or t
  misc_feature (201)..(201): n is a, c, g, or t
  misc_feature (241)..(241): n is a, c, g, or t
  misc_feature (251)..(251): n is a, c, g, or t
  misc_feature (312)..(312): n is a, c, g, or t
  misc_feature (316)..(316): n is a, c, g, or t
  misc_feature (320)..(320): n is a, c, g, or t
  misc_feature (344)..(344): n is a, c, g, or t
  misc_feature (352)..(352): n is a, c, g, or t
  misc_feature (364)..(364): n is a, c, g, or t
  misc_feature (368)..(368): n is a, c, g, or t
  misc_feature (374)..(374): n is a, c, g, or t
  misc_feature (378)..(378): n is a, c, g, or t
  misc_feature (391)..(391): n is a, c, g, or t
  misc_feature (395)..(395): n is a, c, g, or t
  misc_feature (416)..(416): n is a, c, g, or t
  misc_feature (430)..(430): n is a, c, g, or t
  misc_feature (432)..(432): n is a, c, g, or t
  misc_feature (450)..(450): n is a, c, g, or t
  misc_feature (454)..(454): n is a, c, g, or t
  misc_feature (472)..(472): n is a, c, g, or t
  misc_feature (522)..(522): n is a, c, g, or t
  misc_feature (527)..(527): n is a, c, g, or t
  misc_feature (536)..(536): n is a, c, g, or t
  misc_feature (678)..(678): n is a, c, g, or t
attttttttttattgttttaataagttgatgtggtaaggaaaggcgtggtgctggancaccatgnngntggacactcagggcctcanccacactnaacctaggggtcntccaaatcggtttcngcggcaaagaggtaatcaanngctgcntattcacantacgtnaaataaggaanccctcggatgagcatgctgaanccnggaatcaactggtcaaaatgatgcaggaactccaagcagncataatgaanagcttataattctgcgataggccgtgaagaaaaagaacaagatgtcccgaagacagcgcantgtncgcntctgctggtcggtcattgggggtncccctganctccgaactgtnagcnaatgtntgtncaacatcacagtnagcnctatgaacaaatccacattanaatggaagttggananaataactgggggcaaggngctntgcacaccaagcttaganaggagcaaaaaaaactcttgttccagctggagcaattgtgtatccaaggncactntgtaaggcngtgatgtgatgtaaatgtacagcagcagcaggaggaagcatgagtgggaacagagctgaggtgccagctggtcgtggtccgccagcagggagaggagctcaacaacaagaagaacgctaggaaggggtgtatctgggctgangcactttggcagcacttggaacacacactggaacctgggcaagaaatcacaggaagtgttttcggctaatttcaccaaaaccttaaggcactggggtcaggacactggcttgaaggtgacctgttgctgcagaagagaaagccaacaggtgaagaagcatcttcaacagtgggtgctgtccttggtcatcagcaaccccccttagggctgaggtcatatctccatcactaagcctgtgaaccaggctcctgtttccttccccagcagcagaatctgccccca

SEQ ID NO: 600187 - DNA, 180 bp, Homo sapiens
tcaacgctattatacttctggaatcgaatggcagggaatcgaacggacgggaatcgaacggaatggactcgacgggaccaagactgcacactggacacaggtctcgaactggaatggaacattaatagtgaactggaactgtgaactcgaactgaaactggagtctaacaggaactggaa

SEQ ID NO: 600188 - DNA, 937 bp, Homo sapiens
  misc_feature (6)..(6): n is a, c, g, or t
  misc_feature (453)..(453): n is a, c, g, or t
  misc_feature (502)..(502): n is a, c, g, or t
  misc_feature (509)..(509): n is a, c, g, or t
  misc_feature (532)..(532): n is a, c, g, or t
  misc_feature (538)..(538): n is a, c, g, or t
  misc_feature (551)..(551): n is a, c, g, or t
  misc_feature (555)..(555): n is a, c, g, or t
  misc_feature (569)..(569): n is a, c, g, or t
  misc_feature (575)..(575): n is a, c, g, or t
  misc_feature (592)..(592): n is a, c, g, or t
  misc_feature (640)..(640): n is a, c, g, or t
  misc_feature (664)..(664): n is a, c, g, or t
  misc_feature (718)..(718): n is a, c, g, or t
  misc_feature (725)..(725): n is a, c, g, or t
  misc_feature (756)..(756): n is a, c, g, or t
  misc_feature (794)..(794): n is a, c, g, or t
  misc_feature (806)..(806): n is a, c, g, or t
  misc_feature (815)..(815): n is a, c, g, or t
  misc_feature (831)..(831): n is a, c, g, or t
  misc_feature (839)..(839): n is a, c, g, or t
  misc_feature (883)..(883): n is a, c, g, or t
gcagtnacgtcgttatgacacacactgaaagtcgcataactgtggcctcgagggccactcacttgtttggacttagttatggtcacagtttcacgacaaagcaacagaaaccacaaacaggcacacgcatgttagccagcccgttggaagctgtcgcagaccccggccggtggcctgggcctgaccacgcgcctgtctggtgcagggcaccagggtgttagggtccccatgcttcctcagggggtgggcatgacaggcaggtcgctggtgacaaggcagtggacgtcacttggggaaggatggcgggagagggctggacaggcccccgctgcccaccgcctggcgcatgccaacacacttaaagcacttctcggaggcttctcggagaatcaaggcgaacgctcgtctccttccctaggaaggtgccaattcttcctcccgccccactctctncagagccccgagacccttagggtgttctggctgggggtgctaagcagcngtgtctncgacccccagaaccttccctgcncatgancccacggcatgcncggnagggggtgggcctnttaggnagattggcacagctgcncccacaccctgcctggctgggccccagaaaactggggttctccaagtnagcatggggtgctgggggcctgcncgggttccttcaccagaacagaagccccccaccccctcttccatttcagttganggaagangcagaggaggaaaaggccctggggaggggtnccctcgtgccttccattagccccttgggttccactttnttgggggcagcncttaatttnttttttcttccgtttnccagcctnggaaaggggctggcagggggccccaaggggcggtgcggcctgcnggaggagggcaggggttcccgggttgggggggacagggatgttttgtgggcagg

SEQ ID NO: 600189 - DNA, 749 bp, Homo sapiens
agcggagtgcaccgggcacgccgcgccaggctgggggcaggcaccgagcctccgtgggaggtccctgaggcagcttcgcctgctcgccctggctccagtccctcacctgccgtagacttagctgagcagccgtcgcactgggcgccccccgtccccattcggcagcgcccgctcgtcggctcttgcccggggtagtttgtatgggacgcagcaatctccacgctgcacgactgcgaggctggtactgctactgggctcctgcgtaaacgagtacaccgagacatttgccacaatgactgtcatcccacttgactttacagtttgctctcctgggacgcttgtgggtccgcgttgaccatcccaatgcaagagcacgcacgaaagaacgtcacactgagagtatctggagagcttcatcgttgcgaggagtgatgcgcaaaatatatcccaagactggtcagactttgctctttgagtgggaacagaagcattcgctggcttctgaaaaacccactggagccctgtgacaaatagtggggtccacggcagatgcaaaacgcttctcttcacccctcaggcataatagatgctgcgccttcgtctgccgaatttgacagatggtgaggctagcgagtcagcttctcagctgtggatttaaagctgtcagtgatatctgcaaaaatacctgaatattacaagatcacgaagagctttcccttgttaaagccgactggtgactattttaagaa

SEQ ID NO: 600190 - DNA, 674 bp, Homo sapiens
ccaccaacgattacagccgtcctcgtttgtatttcatgctcgggctggcgttaattcatacgttactggccctctgttcttacaatcaacatgactcggaggagtgaggtggcttcaaggatctgggcgttggatggcatgagctacctgtaagtttagtctgctgcccgcttggtagtagtgaccagtcagtgtcagcatcagtagtcccaaccccagtactctgttatactagcctttagaacagaacttacttcctataccccatagctatatagggtcacctacgggctagcaaccctagtctagtagccagattagcccggtactgaccctgcaggaagcaaagaggtagagcttaaagaacaaccaaactctgccagggtcccagaaagcccaggtccagcagtctcagcacttaggccccttgccccttcacaccatcctaggggcaggggctgggcctaccctaggtaggcaggggtagggtaggagaattagggagagggtgcaacgagtctggcccctatgcctcgggctaggctaggtagtactatccaagagcctctgctcacattgttggcctctggattctggcccttcttcattggctgttgcttaggactggactgttgctgagcctgtgtcctgcaaacccagatgtctgtaggtgc

SEQ ID NO: 600191 - DNA, 271 bp, Homo sapiens
caacatagcactgagagtcctagccagtgcacttaggcaacaaaatgaaataaaagacatctaaattggaaaggagaaataaaattattattattatttttttattgagatggagtctcactctgtcacccaggctggagtgcagtggcacaatcttggctcactgcaacttccgcctcccgggttcaagcaattctcctgcttcagcctcccaagtagctggaattacaggcatgtgccaccacgcctgactaatttttttgtattttta

SEQ ID NO: 600192 - DNA, 167 bp, Homo sapiens
atatcagcatgcgtgatcacgccgacgcctacaccccgggacagtacttttacccccgcggtgttggcagcggaagctggagcgcatcgcgcgcttggagaacaaggtgaagacgctcaagcgcggagaacgcggggctgtcagaataccgccggcctcctcgggga

SEQ ID NO: 600193 - DNA, 549 bp, Homo sapiens
  misc_feature (30)..(30): n is a, c, g, or t
  misc_feature (66)..(66): n is a, c, g, or t
  misc_feature (84)..(84): n is a, c, g, or t
  misc_feature (387)..(387): n is a, c, g, or t
  misc_feature (393)..(393): n is a, c, g, or t
  misc_feature (464)..(464): n is a, c, g, or t
taatgtaggacttaaaaaaaggagccactncattgctaatgaaaagaatgcaaaagtttcgtaggncgagtctttcactgagtntaaggacccggagctgagaagacacggggtttatctgcatcaaatcacgggagtacgtttaatgaatgccaaagctattggatttaaccccataatgaatgtctatgttgatgttataggaaatgaattctttttcttctttctccttcatcaccgacgtcctctttgagcgtggagcgctccaccagcaccgtgtggactgcgggtccgaaaggaacttgcgcatctgctccagggcgctcttctcctcccaaggccgcctcccaagctgcggcgcgcctcgccgccgtcctccagcagcangctgcnccagttgcgcaggtgcttctgcagcaccgacacgtccgccacattctgcacggccgacacttccaaattcngccgagccgtcctcgccgccgtcgccccgggctccgacatggtgtcgcgctcgggaccttccaggagcgatgagaaggcggtcgc

SEQ ID NO: 600194 - DNA, 353 bp, Homo sapiens
  misc_feature (244)..(244): n is a, c, g, or t
cttggttggcctttacttgagactgatttttttcactgaggccacatgatcttcagagattgcaagacgcctcaaaacatcagccgaagccgcctttagcacagtcatctcaccatcatgttcacggactcgtgactcaacagctgacaggcgatcttgaacatcagaagtacttgcagaagaaatactatcatcgacacggccgcacaaaccgtccctcctgcggggaaagcgccgggctccnggctcagaagggcgggcacttcattcagcggaccgacagagtggccgacgctgagcctgacccgctcgctctctaggtcgcccggctcggctaccggctcccgcctccg

SEQ ID NO: 600195 - DNA, 776 bp, Homo sapiens
  misc_feature (21)..(21): n is a, c, g, or t
agcggagtctagaactgtttnggctgaaaaaaaaaaaaaaaaagggcagaaatgagaggcggccagttctaagcctaggccccaatagaccttctatctttctggccatcattttggtaacctagctggccaccaccaggtgaacaaactggggctggccagctgggatgtggaggcatgtgggtatagtctctccattatccccactaaccattacccccattaaccaataagccaccaaacccgtgaatgaagttactcggggacagtcacctggcagcctacggtaactggagacacagtttcagtcactcaccactggcagagttcaattaacagagtggaggtcgggtataaagaaaggtggaccttttattccaaacctagcttcggggaagtatggcagggcttcctaccttcagggtacggcttcaatttgggagcataaggcaggggtttataaaagaggactgggcatgcattgacttgcccgggaaggagcaagcagggggggtccacgtgactgcttcagtgccctttctaccgggtgggttgagcagccaccactgggggcagaactaggttgtaaagaggtctggtctcagaatactgtccaggtgggaacgagaagtttggtaacgcagggcattccttgggctggtaacatggacgtgtggtccctcaagggaaatcccctgggaagaaggaagattcctctctgggagctttaaataagccccaagttagagaagcaagtctgaaggagtcaggtaaag

SEQ ID NO: 600196 - DNA, 988 bp, Homo sapiens
cctttatcatccttaagaacagttctggtgacatacatagttatctcattttacacaaagggaagtcgggcatggtggctcatgcctgtaatctcagcaactttggggaggctgaggcagaggaggattacctgaggcaaggtagttagagaccagcttagccaacatagtaggacccccatctctttaaaaaaaaaaacaagaaagaaaaaaacaaaataaaaaggtaagataaaaaagtgatatatatattttaggtcgaggatttcaccacattctttaagcctttgagttgagcagctgtaaatagtgattttgcctattaactgtatggtgtatgatgaacttgctcaagcgactttggtaaagaaattagggatattttgaggaatgagtacactatgcattcaagatgaaatgtgcctttcactatgtcatttctagagaaaacaagtggttgtaaatgcagctcataaattgattcacaaaatggccacaaattaaaggtctactactagaattgaacagtttggaagatataacaccacaccactgttgttaaaagaggggacacggacaactgtgtatagggcacgcgggaacaacaggtttttagcgccccaaaaaggaaaaatttctcccccttatatggccgaaaaaaatttcttcctctccacagacaacacctgttgtggggggggaaagcccagacggacaaatacacggggacaatctcttgggggtgtgcaccgcagcaactccactgttcgcgggtaaagtgcatcgtcacgccttgaccgcgagggagaatcccacgggggaccgcaaagaaccgcgttgtagaccccgttggtacacaccagccgagaggaaaggcttcaggcggaggacgagaacaaagaacccggctcggcgtgaacactcttgtccctggatggggaaccacgcgaaaaccgctgtgtacccgagaagtcgagcaatacacggc

SEQ ID NO: 600197 - DNA, 799 bp, Homo sapiens
gctgccccaaggcgggcttgggtgccccctctggcaggaagtggggccgggtgcacccgcgtggcggtgcatgcggtcggggtgcgctgctttcccgcgcctgcaggagcggcctgcgcccctccccccgctagcgccctgtgccccagggtccctgcctgtgcctggtcctgcaactgtgctgtgtgctgcatgacacgttgcacgagtcaccctctgtggccgaggtcttggagcctgatgcctcgggggtttagccctagccgctaggcgggtagtgcaaagtgtcgggttgacaagggtctccgtggaacctacttcttcctgctcgccaacttgctagtgagaccttaggcaactcaatggacttctctgggctaccttaataacgcggggaccggggcaagaaacaccaagggaaccccccaagaataatttacctaggcgcctttcctgcagagtacttaagtataatgacggagcacagtttgcaatgcacaagtgtatggaggagacaaggcttgaagggccaagcgggccttattacaacagtgagggaataggggtaaggccctaaaatgtactactccaagaccaggcctcaagatagtcagaaacagtgatcgcaaagacaaacgtcacttgagccataactggaaaaagggcctcaaggcctacaatataagaaagtagaaagaatagcctgaggcagactaaacaagtaccaaaaaacaacagaataaaaagcacgcacaaaaagaacatgaaagaaaccaaaaaaaccaaaccagaaatcaag

SEQ ID NO: 600198 - DNA, 285 bp, Homo sapiens
ggcactctagaggaaccccacgcgtcagagaaacctttacagctctcaacggccacgtgttatgatcttaacctaagtggggcattcagcacgaacactagcatgtcttaagagtcatgtcattagctgggtgtggtagcgcatgcctgtaatcccagctactcgggaggctaaggcaggagaatagcttgaacccgggaggtggaggatgcggtgagccaagatcacgccaattggactccagcctgggcaacaagatcgaaacaccgtctcaaaacaaacaca

SEQ ID NO: 600199 - DNA, 213 bp, Homo sapiens
ccaatgttcagtgaggaaaaaaaggggaagttgggggtaggccgatgttgacctgaggagttaatgtgctctttggggagataccttttatagagttagaaatagaatttgaatttttaaagggagattttggcttgggaaggacatgtaggagtttatccctgggtaggctgttgtaaagaaactgttgaaaataaaaagaagccatgtgga

SEQ ID NO: 600200 - DNA, 198 bp, Homo sapiens
  misc_feature (13)..(13): n is a, c, g, or t
agcggggaacaantccactttggctacaacctagcaaaagtgaacaaataggattacatgaagtgaaaaagcttatgtacagcaaaggaaacaatcaacaaagtgatgtgttccccgctagcggggaacaatcacttagcggggaacaatcaagtgatggttcaggtgatggttcgagtgatggttcaagtgatggtt

SEQ ID NO: 600201 - DNA, 322 bp, Homo sapiens
  misc_feature (24)..(24): n is a, c, g, or t
  misc_feature (37)..(37): n is a, c, g, or t
  misc_feature (49)..(49): n is a, c, g, or t
  misc_feature (61)..(61): n is a, c, g, or t
  misc_feature (92)..(92): n is a, c, g, or t
  misc_feature (101)..(101): n is a, c, g, or t
  misc_feature (109)..(109): n is a, c, g, or t
  misc_feature (117)..(117): n is a, c, g, or t
  misc_feature (128)..(128): n is a, c, g, or t
  misc_feature (156)..(156): n is a, c, g, or t
  misc_feature (273)..(273): n is a, c, g, or t
  misc_feature (319)..(319): n is a, c, g, or t
taagcttatagtgggagcaggtcnctgtctctcgttnaggttgttaaanggcttttatccnactgccccagctctttgtcatttgactaaanggagagaanaccggttnctctttantaatcaccaanaaaactcctttttcacagtctgtcttcnagaactatgatcacgaccaggatggatacatttctcaggaagaattcgaaaagattgctgcgagttttccattttccttctgtgtgatggacaaagacaggtgagggtttgtacttnggaatatgtggttatgagcccattggtgagaataggtttataggtntgt

SEQ ID NO: 600202 - DNA, 364 bp, Homo sapiens
gcccaaccagtctgactgtgcccagcccgagggctagcatgctcagaccacccccagctcatgaactcctggggagcctggacagcacattgccattccaccaactcatcattcgaaaccaagacagcctggcacctgccacctgcttctgtctgtgccactccctgcccagccatggagagtctcataggactcctccctcccatggagaccttcttggctagaaaatcacacatcctgcttccacaaagtccctctgctcagggcaccagcacctttcccctggagcagggcactctgcacaaaagcatcaacgcagtcctcaaggtcccagcccggctcagcggcatgaaaacacgctcaa

SEQ ID NO: 600203 - DNA, 378 bp, Homo sapiens
  misc_feature (378)..(378): n is a, c, g, or t
ggcgcgaggctggtgagtcggcagtcctgtggacagcctggctgggactggtttccatgtgttgcactggattatggaatccaccatgctgctgcatcccatggccagggtgtggcgtccagtgtgggcgagatggcagcttaaggaacggccaagggccttgagacctggggggcacaggatcaacccgtggcgtctcccggggcattggtcaagggaaccctgccagtaacctgtgcttacttgtgggcccaggaggttgggccaagtctggtgcaggccgtgcccgcgaggctgctgctgcagttttggggtgctcttctggcgaccatcctcgcttttgctcttggcgtgtctgtgcttgcctcctatgggggn

SEQ ID NO: 600204 - DNA, 284 bp, Homo sapiens
cggcggcagtcacaatgcctatgcccctatcccacccaaatattttaaatacacacaaactgcacatcgtctaaatatcaccaagtgaacataaaactctacacttgggtgggaagacaagccgagcgcaaggacccatcacctcctttcaaacggggccacgccgtgatcacaaaaagtacccaactggcagctatcagtccatctatcttctctgggaagaaaaggctcaaacatcgggcagcttcggccaagaaaactcctggaacacagtttggggactg

SEQ ID NO: 600205 - DNA, 849 bp, Homo sapiens
  misc_feature (45)..(45): n is a, c, g, or t
  misc_feature (84)..(84): n is a, c, g, or t
  misc_feature (89)..(89): n is a, c, g, or t
  misc_feature (103)..(103): n is a, c, g, or t
  misc_feature (127)..(127): n is a, c, g, or t
  misc_feature (138)..(138): n is a, c, g, or t
  misc_feature (157)..(157): n is a, c, g, or t
  misc_feature (161)..(161): n is a, c, g, or t
  misc_feature (163)..(163): n is a, c, g, or t
  misc_feature (183)..(183): n is a, c, g, or t
  misc_feature (191)..(191): n is a, c, g, or t
  misc_feature (201)..(201): n is a, c, g, or t
  misc_feature (210)..(210): n is a, c, g, or t
  misc_feature (234)..(234): n is a, c, g, or t
  misc_feature (337)..(337): n is a, c, g, or t
  misc_feature (345)..(345): n is a, c, g, or t
  misc_feature (371)..(371): n is a, c, g, or t
  misc_feature (395)..(395): n is a, c, g, or t
  misc_feature (433)..(433): n is a, c, g, or t
  misc_feature (436)..(436): n is a, c, g, or t
  misc_feature (466)..(466): n is a, c, g, or t
  misc_feature (474)..(474): n is a, c, g, or t
  misc_feature (483)..(483): n is a, c, g, or t
  misc_feature (570)..(570): n is a, c, g, or t
  misc_feature (625)..(625): n is a, c, g, or t
  misc_feature (649)..(649): n is a, c, g, or t
tggaccttagaattctgcttttgtccctgctgggcccccaaagtngggcattttttctctctgttccctctcttttgaaaatgnaaaanaaaaccaaaaatanacaactttttcttcagccattccngaatagagaanaaaaccttatggaaacagnaatntnaattgtgtaatcattgttcnaataaggnaaatagaagnccttatgtntgtgtaacaagaatttcccccacnacatcctttataactgaagttcaataacagtttgtgtttggtggtaaaggattttctccatggcctaaattaagaccattagaaagcaccaggccgtgggagnagtgaccntctgctaactgttcttgtgggtcttntgtccaggaacatggggtaacatncctcgtatgtgttagagggtggaatggatgtgtttggngcngcatggggtctggtgcccctcttctcctgnattcacanccccccccngggcccgcttttactaagtgttctgccctagattggttcaaggaggtcatccaactgactttatcaagtggaattgggatatatttnatatacttctgcctaacaacatggaaaagggttttcttttccctgcaagctacancccactgctttgaacttccaagtntgtctagtccccttttaaaatgtaaacattttcagaaaaatgaggattgccttccttgtatgcgctttttacctttactacctgaattgcaagggatttttatatattcatttgttacaaagtcagcaactctcctgttggttcattattgaatgtgctgtaaattaagttgtttgcaattaaaacaaggtttgcccaca

SEQ ID NO: 600206 - DNA, 248 bp, Homo sapiens
gtcagtatgactggatcatcaggtaggggcaggtaacctggtgcaggtggttcacacttgtgctaatcccagcactttgatcagtgccacggtgggacggactcacccgagcccaggagttagagaccagcctgggtaacctagcaaaaccgtctctgaaaaaaatttcaaaaattagccaggtgtggtgacacacacctgtggtcccagcaactcgggaggctgagctcgccccacagagagagcgt

SEQ ID NO: 600207 - DNA, 1283 bp, Homo sapiens
  misc_feature (45)..(45): n is a, c, g, or t
  misc_feature (84)..(84): n is a, c, g, or t
  misc_feature (89)..(89): n is a, c, g, or t
  misc_feature (103)..(103): n is a, c, g, or t
  misc_feature (127)..(127): n is a, c, g, or t
  misc_feature (138)..(138): n is a, c, g, or t
  misc_feature (157)..(157): n is a, c, g, or t
  misc_feature (161)..(161): n is a, c, g, or t
  misc_feature (163)..(163): n is a, c, g, or t
  misc_feature (183)..(183): n is a, c, g, or t
  misc_feature (191)..(191): n is a, c, g, or t
  misc_feature (201)..(201): n is a, c, g, or t
  misc_feature (210)..(210): n is a, c, g, or t
  misc_feature (234)..(234): n is a, c, g, or t
  misc_feature (337)..(337): n is a, c, g, or t
  misc_feature (345)..(345): n is a, c, g, or t
  misc_feature (371)..(371): n is a, c, g, or t
  misc_feature (395)..(395): n is a, c, g, or t
  misc_feature (433)..(433): n is a, c, g, or t
  misc_feature (436)..(436): n is a, c, g, or t
  misc_feature (466)..(466): n is a, c, g, or t
  misc_feature (474)..(474): n is a, c, g, or t
  misc_feature (483)..(483): n is a, c, g, or t
  misc_feature (570)..(570): n is a, c, g, or t
  misc_feature (625)..(625): n is a, c, g, or t
  misc_feature (649)..(649): n is a, c, g, or t
tggaccttagaattctgcttttgtccctgctgggcccccaaagtngggcattttttctctctgttccctctcttttgaaaatgnaaaanaaaaccaaaaatanacaactttttcttcagccattccngaatagagaanaaaaccttatggaaacagnaatntnaattgtgtaatcattgttcnaataaggnaaatagaagnccttatgtntgtgtaacaagaatttcccccacnacatcctttataactgaagttcaataacagtttgtgtttggtggtaaaggattttctccatggcctaaattaagaccattagaaagcaccaggccgtgggagnagtgaccntctgctaactgttcttgtgggtcttntgtccaggaacatggggtaacatncctcgtatgtgttagagggtggaatggatgtgtttggngcngcatggggtctggtgcccctcttctcctgnattcacanccccccccngggcccgcttttactaagtgttctgccctagattggttcaaggaggtcatccaactgactttatcaagtggaattgggatatatttnatatacttctgcctaacaacatggaaaagggttttcttttccctgcaagctacancccactgctttgaacttccaagtntgtctagtccccttttaaaatgtaaacattttcagaaaaatgaggattgccttccttgtatgcgctttttacctttactacctgaattgcaagggatttttatatattcatttgttacaaagtcagcaactctcctgttggttcattattgaatgtgctgtaaattaagttgtttgcaattaaaacaaggtttgcccacaaaaaaaaaaaaaaaaaaaaaaaaaaaaaaaaaaaaaaaaaaaaaaaaaaaaaaaaaaaaaaaaaaaaaaaaaaaaaaaaaaaaaaaaaaaaaataaaaaaaaaaaaactaaaaaaaaaaaaaaaataacaaaaaaaaaattgggtgggggcacattcccctatttacccttttgcgaaatatttaaaaaatcaattgccgatcgttaaaaacaacagtaactgaaaaaacatggggaattccaaattaaaagccttaaaataaaattcaatttttccataatggctaattaaaaaaaatcatcaaaaaaccaatattacaaaaaatgtaaaatccttaataaatcaagggaatattctaacattaaaaataattgaaaaaccagtttaaaaattagaaaattatcatttttttaacaaataggcaaaaatccca

SEQ ID NO: 600208 - DNA, 111 bp, Homo sapiens
aactctgttctgaaccacggtgattttgtatgagcctgggtagctcaagatgggccagacatgaggtcgaacatacagtagctagtcctgctgcctctgactctgaggcag

SEQ ID NO: 600209 - DNA, 1465 bp, Homo sapiens
aagaaattcgtacgttcgacgtttcgatttttcacagcctcagccctaggaaaaatggttcatgggataaacagctggtatttgttattctaaaactcaaattgtggctcacattaaattgccacggcattctccgaagttttggattttggatttaacatttgacaggatttacgtgtgttgttttaatttttttaaaaacctgaaccccgtgtgacttattggggtttgtgggctaatttttacgcagaaaacttctttcacgtgcgttagaaaaaaacattagacaccgtgaaatttagtgttgttacacttttgtgggaagaggtttataatctctgtgaattatctcacacaattacactccattgtgcacaattcacaacttctcccctatgtgtctcacacgtctgtgtcttccccagacacacagtctctttctcacgacaccccactctctatctatgtcgcgtgacagtgccccgttggcacacacttgtggcggcgctgtgtcagacaccccacccctctccttcttgtcgcgccccttttgtgccactttgtgccactgtgtgtgtcacctctctccaccagagccctcagatgtgcctgtgccgcggtgtgtgctctctccgcgacgacacctcttcacacagcacaccctctgttgcgcacgccgtgttttttgtgcggcgccctgtgtgtcgccccccactctttctacacagcgtctctccgagtggacacccccaccctccactgtgtctccccaccgcagcgtggtctctcctctccccctcgtgcgagcgggacacccctccgcgacattccctgtgccaacttgtggcgcccccccttctcctttgtggtgtggcgcgcccggctattcacacgtggccctctctattggcacccccccttttcgcacacgacgctcccccagggtggccccctatctttctacccccgcccaccctcttgcaaccccccccccgttgtcccttacccagcgcacatctgtgctcccccctagctgttttcccccccttctttggcccacctttcggtgggccttcacacagggcggggacctcctcacgtttctccctggggctaccccccttggacgctttcgcggccacccaccaacgccccgcggggatccctcggcattacccccttttttcggtgttgccccgggggaacattccccctttttagcaccatctagtgcctctccagctcagccgcatgcgggggacggaccgcgcttttagctcccccctatctttgggcggcgttgtccccgcgcagcatctccttctatgccccgcggctcttaaatcgtccgcgccccctcggtatttgccgcggttgaatatagtctccccccccctggggccattgcgagcctcctcctctcgagcacgcctacatctcgatggctgtctttgtacgctagggt

SEQ ID NO: 600210 - DNA, 222 bp, Homo sapiens
  misc_feature (114)..(114): n is a, c, g, or t
cgctatcgatggcgcgttgaggcggcgcatatgcatctaggctataatatccggatatacgtagccggtaatgtaaacaacggtaccctctagaatatagctagcatggcaatnaaagcgctgatatcgatcgcgcgcagatctgtcatgatgactcattgcaattggatccatatatagggcctgggtaataataacctcaggtcgacgtcccatggccat

SEQ ID NO: 600211 - DNA, 304 bp, Homo sapiens
aggacccttatatgctgtctcatattttctaggtgactactgctgatgtggtggaattctgatttttaatgtagacttgtagccagcaatcttatagaactatttattcattctaatagttactaaataattctgcttcatattctatgtagctaaatcaaaacaaatgtgcctctatgagaaactatatagcaccaaggttaacaggtgaaatctggaaagccataaaaactagtatcaaaactgtagtaaattcctctactttcctttccagattacaaatttaatatccaatattctagcc

SEQ ID NO: 600212 - DNA, 922 bp, Homo sapiens
actcactcatcgacctccccaccccatccaacatctccgcgatgatgaaacttcggactcactccttgtgcgcctgccatgatcctccacaatcacccacaggacgtattccctagcccatgccactactcacacagacgccatcaaccagccgttattccatcacatcgcgccagcatccactcgcagcacgtacaacttaatggactgacactcactcacgacataccatatcaccgacccaagtggccatgccatccaagtagtatcgtatatactcctggaccatctatacgctgacccacatacaggagcctgcacggccctacactctatcaacagagcattccaatatctactacctcagctaaccagcaaagaccacgtgccacaccagcacgttccgggccccgttcaactttccttccaccgtggcccatcatgaccaacacgccttcacgttaccgtccaacaaactaggcccccagtgtaccacatacacgaggacccatataaacattgaaattccccatatatcccccaccagtacatcatggcaaaggaagaccaccccacaaaaccactttaactttcccgacacttactaccacatagagaacgaaggaggctgaccacccaactcacacaggtgcagttcaaccacaccattctgcacgccaaccacaaccaacccaatgagcaaaaccaccacttcaacatctttctacacacacatggagtccccacacagaaaaacattttccctctcgcaagaaaaacatttacacaagcaaccacgcctttcaatgtggacaggacgcgaacaacatcgactaccagggtgcgacaaagacacccccccgctttttacaacggtgcgtactatgagttcccacaccaacacaacgcgttgtgtgggcaa

SEQ ID NO: 600213 - DNA, 631 bp, Homo sapiens
  misc_feature (370)..(370): n is a, c, g, or t
gttacgtgatgtcaatgatcatcaggttactcggaacatatggaccccttggcaagactgatgtatgagcagtccagactgtctagcctttagaataagggcccacatcaatgcaagtatagttccgccaatgtcgacttgtgttctaagtcgctatgcacgttgataccaaggccgctgactcacactggagtgtaatctgcccacataatcttgggcaagtccatgtaggacttggtctgtatgagtaagtgtcactagggatgtgagtcatcttcatgcagttctcaaggtgcatgttgcacgctagtgggcattctctagaccgtcagtggctgttccgcaggttcgcaggaccattgcagctggnctagcagctcaatgtctcgtcatgacaatcttggcaccatgtggattgctcatgttgaagtcccagcaggtggcagcctctatcatgaagtcagtgcagccgtaacatgcatagatagtatcaatgcgcatgtcactagtgatacctatatccttgaaatctttgaaccgctctgattcgacatcttggatagcggcccttatagtcaccagctgtgtcagcacggcaacccccacagagtagatgccctattggcattag

SEQ ID NO: 600214 - DNA, 1215 bp, Homo sapiens
  misc_feature (30)..(30): n is a, c, g, or t
  misc_feature (119)..(119): n is a, c, g, or t
  misc_feature (370)..(370): n is a, c, g, or t
  misc_feature (404)..(404): n is a, c, g, or t
  misc_feature (440)..(440): n is a, c, g, or t
  misc_feature (474)..(474): n is a, c, g, or t
  misc_feature (484)..(484): n is a, c, g, or t
  misc_feature (625)..(625): n is a, c, g, or t
  misc_feature (631)..(631): n is a, c, g, or t
  misc_feature (643)..(643): n is a, c, g, or t
  misc_feature (649)..(649): n is a, c, g, or t
  misc_feature (655)..(655): n is a, c, g, or t
  misc_feature (657)..(657): n is a, c, g, or t
  misc_feature (1187)..(1187): n is a, c, g, or t
  misc_feature (1206)..(1206): n is a, c, g, or t
ccaatgagatgcacttactaatatctgcantgtacaatgcaggcagcagcagcgccagctaaagctgagctctggtagagttggattggatgtttacagtgacctacctcttcagtgtnatatttcctcacggtcatcagctacaggctgtgagacagcctgggggagacaggatagccatgtttcccactacctcccaaaccactggctggtgcaccagcctcctggccttaggtcgcagccacagtgacgtgacctcctacaatccctggcaagctggaggagcagccctgcaaccaagcctgctctaagataaggctttctgtttactaacctggagctgctctattctttcacccttgttcccctntcagctgtctcgcgcaagtactaattttgccatnaaatacgcattttgttttgcaaaatgagaagagctnataaatacttcaaattttctccgtctgtttcacncctttccatntctttctaaaattacagtaaaatattaactatacaaaatattgttgtatttatacaaaacaacaataccataaaataaaacactacatagttgaagccctctgaggatctctccatatcaaccagccaaaacgaaaacccngaactntacgtttctttncccttngcggtngnttaatttttctacatctgaatatatccttacacgtttttaaaatttatagaaatatcacactgaatacatttttctgtaacttgcctttgcactgcattgtgagattcagctatgttgatctgtttaactccagctgatgtatgtaatgatccctgatgattattctgtcgtttgactataccaaaatttattcaggtctctgataatgagcatttagattggtttgttttcccatttatgaatttagcaattatgtgtttctaattttttgttattataaactatggtgctacgaatattcctgtatatgccaccttcaaaattgtaaaatttcaactgttttaaaatacagtcatgtcaggatacattctgagaaatgtatcattgggcaatttcattgctaggcacacatcaatgtatgcaaatctagatgcatagcctactacacacctagaccacatggcgtagtgtgttgctctgaccaccatcatatatgtagttcgtcattgaccaaaatggcattctccgncacgtctgtattaaaattntttagtgga

SEQ ID NO: 600215 - DNA, 572 bp, Homo sapiens
gctactcctggactctgagcaatcctccgaccactgcctcccgagttgctcggaccacaggtgcgcaccatcacacctgataatttgtcaacatatttgtagtgatggggtcttgctatattgcccaggctggttccctaactcctgccttagccattttttgtttgtaatattagcaaattatctcctccatccctcccttgggcaggagacagctatgagtgttaaggctcctccaagggccgccgagatacagagggagaggcacctgacgagaggcgcttcccagcctgggctgaagggcgaaatgagctctctcagctcaagccaatcctaagaagcagattcccctcaggtgacagcagcgtgagtaggtggagcgaggacaccaggactcgtcccagcccggaagcaggcaaaaggggccccgaaggactgcctcgaccctgtgtcccccgaactgctcagggtagtacccaaagagctaggaagatgtccacactcactacaaaacagaagggctagggggctccctcatcttgaacatgggaggtgcagggtgcttagtttgc

SEQ ID NO: 600216 - DNA, 275 bp, Homo sapiens
  misc_feature (262)..(262): n is a, c, g, or t
accttgatgagctagtcattgtactcttactcaataataattttgagaaaatcagcgagctatacagctttgtaaaatagttaccgctgaattcatcgtaaagaaaataacctttgcaaaaatctaccgtgtagctcataaaaccacgaacaaattagaccttgcgataaaggctatttacgaaagaacgaacactgaattaatccacatttacgaattaatcagattaggccattcatacaaaaagaatcttgcacagatngttttacagacag

SEQ ID NO: 600217 - DNA, 836 bp, Homo sapiens
atgttgtcgctggaggaggacggcttacatgtttgtttctgtagaaaataaagctgagctacgattcaaaaaaaaaaaaaaaaaaaaaaaaaaaaaaaaaaaaaaaaaaaaaaaaaaaaaaaaaaaaaaaaaaaaaaaaaaaaaaaaaaaaaaaaaaaaaaaaaaaaaagaagaggagagagagggaggagagagaataatatttatatgaattacatggcggaagaaattatagtctcatacatacggatacgatgtgttattagaggtggtagatgtatgatgatgattgatttattatagagtacataaacattaggacaaaaacacgagcagccagagaggagaggaataaagaaccacagaaaccagaggaggagaagacagcaagaagggacacagagcgacaccacaacacaaaaaagcatagagagggaaagagaagagacaaacgaaaggacgacacaggacagaacgacacacacacacaaccgacgaccaacggccagaagacatatcgacaaacgcatagacagcacacaacagggcgaacggcgagagtctagaatcatgcagagcacacccgagagcgaacagagaacgtgcagcagcgaagacggtagcagagcatatcgacagtactctggcactcgatcgcatgaccgcaagagacatagatagcttgcagatcactccgaccgaccaatagatgagagaacgcagctaggagcacgaggaagcagaaggaagagtagaaggccgggagcacgcacagacgacacgaaccgaaaagaccacaagcacagatgaaaaaacgggcgaaaagcacaaaccga

SEQ ID NO: 600218 - DNA, 153 bp, Homo sapiens
tcctgagtattgcatctgctgctataaagctggaggctatgcatgctataatcaggaagaaaatgaggaagcaggccgggcgcggtggctcacgcctgtaatcccagcactttgtggaggccaagggcgggtgaatcactgaggtcagtgagt

SEQ ID NO: 600219 - DNA, 394 bp, Homo sapiens
gtaaaataaaaagagagaactacgtacaaagctaacataaccattcatcatctaactagttatatatatcctaactactacaagcattccatactactcaactataaactccagccaccacgaccctcactactatctcgcagctgaaacaagctaacatgactaaaaccgcttaataccatccacactcctctcgctaggatgcctgcgcgggataaccggctttttgccaaaatgggccattatcgaagaattcacaaaaaacaatagcctcatcatccccaccatcatagccaccatcaccctccttaacctctacttctacctacgcctaatctactccacctcaatcacactactcctcaattacccacataggatgaataatagcagt

SEQ ID NO: 600220 - DNA, 634 bp, Homo sapiens
aaaagttcaaaaattagctgggtggggttacgtgtgcctgtaattccagctacttgggaggcggaggcaggagaactgcttgaacagtgtggagatgtttttgtcttgtccaaataaaagattcaccagtaaaaaaaaaaaaaaaaaaaaaaaaaaaaaaaaaaaaaaaaaaaaaaaaaaaaaaaaaaaaaaaaaaaaaaaaacaaaaaaaaaaaaaaaagtaaaaaaaataaactaaaaaagaaggaaaaatatgaattacagaactggagttgtttaaatttacagggcgctagtttttaagcgatctactggaaaaaccccatggttttcctaattaaaaacgttgtgaaactctccgttttggcaaacgggtttatctgagaaaccctccctaatattcttttccaaaacttggccactcttatgcttcatggaaaactgccgcccaagtttgggctaaaacgcggcaatttctttgaaaaccctctcttttttataccatgtggctcatctgggaaattccatttaatcgcacaaatatcctggtatctctttggtgtttccccattggaacaagtccctcttttacgtggtttctaccccgggcaccttttttggggtgggcccctct

SEQ ID NO: 600221 - DNA, 316 bp, Homo sapiens
agcctcgcttgtgcctccactcctggattcaagcggttctcttgcttcggcctcccgagtagctgggattacaggcatgtgccaccatgcccagctgatttttgtatttttggtggagatggggtttcgccatgttggccaggatggtctcgatctcttgacctcatgatccgcccgcctcggcctcccaaagtgctgggattacagacagatgtgagccaccacgcccagctgatctctatatttttatagtctattttgggatgcctgatctctgtatttttacagcccattcctgctcagctataatggcgtg

SEQ ID NO: 600222 - DNA, 830 bp, Homo sapiens
gctctctctctctctctctctctctctctctctctctctctctctctctctctctctctctctctctctctctctctagcttggtgtgcgcgtgtgtgtgcgccatattcaggtggccaacagagaaacgagtgcaccacataccgcgcgcggcattagctccacaaaagaagaaaacaaaacaagaaaaacccaagagaacaacgtgcttggagagaaagacgagcatcacacaaaacgaagagggcggacatccacaacagacacgcataagacaaacaccactcaagatctacgaaaaaaacggtgggtgtacactctctctgttgccagaggaaagacgtagaatcatgtaccacaaaaccagaaagcagaagaatacatgtaacccaccccctacaaacacacgtaatctcggaaccacgaacagacacaaccataaaacacaacagaacacaacagacacagaacagatagccgacacagccagaataaaacaacacagaacagggaacagaaaagacatgaagtacaaacagaagagacgcgtagagacggacccttcccaccatatccacgtcgttgtactggtacgaacccacggcccacacgctgccacaaggacgaaacacatgaaactatcaacacaactagccgcctccgtgaggcaaccagacagattgcgcgcccgcccagaagatgacccccaaagcggaactgacacaccctgcggcacaatcaaccagcaaaaccgatgcagaccgaatgtcattcatagaaccgaggcgaccccaatgcgtgtctaggcaccagacaagaccacacacacg

SEQ ID NO: 600223 - DNA, 317 bp, Homo sapiens
  misc_feature (281)..(281): n is a, c, g, or t
  misc_feature (308)..(308): n is a, c, g, or t
  misc_feature (313)..(313): n is a, c, g, or t
ctcattttgttttgaggaaacatatccaagaaagctaaatgagttgtacaaggaaagcagtaggagaggtggcagagcagttcctggatctcacacttaacaatctagtgatttgttaaccttttatcaccctaaaagaggaaatgtttagaaatattttggggctgggattacaggtgtgagccactgctcctggccggtatcaattattttagctgtttcataatcattaattgttatgtaagaagaatgtctgtgtttttccaggggatgcatacttnagtgtgtagaggtaaaatgacatgccnggganttgc

SEQ ID NO: 600224 - DNA, 623 bp, Homo sapiens
taaacctttccttatgagcatgccggtgtggggttgacagggagggtaataatgactggtgggtggatggtaaatatggggctggtataaattggtcagttcagtggtttaaatctggacgcaggcttaatgcgggaggaaaatggttttcatggtacacttatatcctacacattaagttcttctataagggtgatcaaatgggtccaatggggttgtgaggagtcacagtaatatgtgtttggggaatttataagtgtaagaaggagtagataggaagctttgaaacgcttacctaaaaaattgggtgggctggctttaagaggcgctaactaatgggggtgtgtaaaaaatttggttagacactcactccttctaacagagagttattatacactaaagaggcgacccccaaaagagagcgcgtcgtacacacacacctatgagggaccccaacagcaagggagacacctactttctcacccagcagggcgcgccactacacagacgacgggtgtacacataggggggcgaacaaaaatgtgacacagacgcggagccaaccacacacaggaaatacgcacatcactgtgggccaccgaacccccaagaaaataatacac

SEQ ID NO: 600225 - DNA, 751 bp, Homo sapiens
  misc_feature (590)..(590): n is a, c, g, or t
gcactgagctgagattgtgccactgcactccagcctgggaaacagaacaaggccctgtctcaaaaacaaaaaaaaaattaacttggtgtggtggtgcatgcctgtggtcttagccactctggaggctgaagtgggaggatccctctggctcaggagttgaggttgaagtgatgaagtgagccatgatcactccactgcactccagcctgggtgacagagccagaccctgtctcaaaaaacaaaaacaggctgggtgcgttggctcacgtctgtgatcctagcactttgggaggctgaggcgggcgtattgcctgagctcaggagtttgagacagcctgggcaacatggcaaaaattctgtctctactaagaacacaaaaaattagctaggcgtggtggcgcatgcctgtaatcccaggtacttgggaggctgattcaagcgattctcctgcctcagcctctagagtagctgggattacaggaatgtgcgacaacacctggctaattttgtatttttagtggaggcggggtttcaccatgttggccaggctggtctccaactcctgaccttgggtagtccacccgcctcgngctcccaaagtgctgggattacaggcgtgagccatggctgcccagcccgttcatgcattcgatgcaaaatactgagctaggactgcactgggctagtagagagaagcaagggaaccagaccaggaaaattggaggacccagcagagatgccgagaaggaaa

SEQ ID NO: 600226 - DNA, 358 bp, Homo sapiens
  misc_feature (62)..(62): n is a, c, g, or t
ctctagctcggtaccccgtgctgaagaatgttgcttgtgcttgggcttattgtgcttcctgngtctgtaggtctatagccatctttaagtttggaaagttttttgttgttgttgttttgtgtttttgagacgggagttttgctcttgttgcccaggctggagtacaatggcacagtctcagctcactgcaacctccacctcctgggttcaagcaattctcctgcctcagcctcccaagtagctgggattgcaggcatgcaacaccatgacccactaatttttgtatatttagtaaaaacggggtttcaccgttttggcctggctggtctcaaactcctgacctcaagtgatcaaccca

SEQ ID NO: 600227 - DNA, 403 bp, Homo sapiens
tactgtccagtcaactgatttcagcaaaaatgtttgggttcaccagcgagttgttgtgtgaggcccccaaaatggaggtgatatcggcctcagggttcttcctggaggtggaaaagtggtcaaagtcctttgtggtgaaatggccctaccccaaagtgggagacatttaaaatcgaggggaaattggcctcagtgctctttttggaggcaaaaaaccagtaggagtcggtggttaaatggccctgtgtgaatgtggaaacccagcaaattggaggtggaattggcctcagggttttttttggaggtggaaaaggggtcaaagtccttggtggtgaaggggccctgcccaaaaggttgttcccccttggccggtgaaaaaataaaaaaaagttggccccttgca

SEQ ID NO: 600228 - DNA, 345 bp, Homo sapiens
gcaacacaggaaatccctctctactaaaatacaaattagccgggcgtggtggcggcgctgtagtcccagctactcgggaggctgaggcagaagaatggcgtgaacccgggaggcagagcttgcagtgagctgagattgtgtcactgaactccagcctaggcaacagagcgagactccgtctcaaaaaaaaaaagggtcttcagcttattgcttggccttaagaatttctgaagcgttatgtgagcggtgactctgattcctctacagttaacatgaaatacacgcttaaccagacacatttctatgtgatgccatcccactgagtgatctctatttgtgcaaacc

SEQ ID NO: 600229 - DNA, 389 bp, Homo sapiens
ccgttcggtgggcaggctctgatctctctcttcagagaatagtaggtcgaatgcgcttgctgcggggcaggggaaatccaaggtgtatggccatcgccaatgacaaaaatgtgggaaagcctcgtggccaagcggtggccaggggagtccttcacatgcgtcgagatcaaaagaacgaggattgtctgaccctgtagatgatcacatgaagacgagcgaggttggctccgagcagtcaccatacacagaatggctgtatcaaattggataaagttgattatcttgccagtccctaaatcaatctgcacaagtatcgttcaccttgatgacaggatctgggtaggggatggttcgagcatcatgagtcaccaggtgagggattcccttca

SEQ ID NO: 600230 - DNA, 909 bp, Homo sapiens
gttttgaaaacctgccgcaactggggacgtcgcgagtttcgaccccccagaatcatatttgggggttattcccagggccaacccagggggtttctccagccccgttgacgggaggtccgctgccactcctccgctttccaaagtgacccgaattgggtccccctgacgagagagttttttttcagggccgccaaatattgggccccgcgacccaaagtttttgcgggccttcccttagtggttccttcaattcctttccgggggggggagactctgaaaagtaccctatctatctcacgtaaacctcgtgttttggggccttcgcccattgggcaaagaccaaatcatgggggggcgccccttccggattcttgaagccctctggcccaagtaaaaacccgcgtctcctcttagattttataagaaggatgcttggggcaacaccaaggcctataattatttccccgcccagtattttcttagaacaaccccctggccacacatatagctgctggggacggcaatacgacctcggtgcagcatcttggggtagaacacaccccctctccctcgtgtccgctctcgggcctgctctgagggccccccgcagccacacttacacggggtccccctcctatgtggccgcccccccccccttgtggtgttgtacccgccttcctccttatgagatttttcccgaagcgccatcgttcccgggaggcaccgttggccggctcttgccttcttcactctctggtgatgtggcgccccatctcgttggtttttttctccccccatttcccccaaattttagagttaagggagccccgtgtctatttccgggggggccccagggaaaacccccgggggtttttgcgcctcaaaaacaaaaccccctggccccagaga

SEQ ID NO: 600231 - DNA, 182 bp, Homo sapiens
ggggggtttttgggggggggttgttttttttttttccccggggggggaagtttccccggccaaaagggttttccccccccccttttttttaaaactttccccccggcgggggcgggggcccccccccccccgggggttttttttttccgggggcccaaaaaaaaggtttcttttttttttta

SEQ ID NO: 600232 - DNA, 134 bp, Homo sapiens
agtaccctccccacctctgggttcattcagatctctctgtctgaactccagacccagagatccacagcccccttggtaaatctctacttgaatgcctagcagccactaaatatcatattcaaagcctaaaccca

SEQ ID NO: 600233 - DNA, 564 bp, Homo sapiens
tctggtggttgcggggatgtgtttccactggcgtagtcggtcagatacttctggtccttttgggagtgcatggatgtgacgcggttcagtgccacatgttagccaagtgctagtgtaattcctgttcacagtcactacaatccactatggtgcagctacaataggtctatgttaacatgctgaagcttgaatcatacaaatcgtctcctctatatatcaagatatattcctagtattcaactgttcccaaccaaataaaaaaaaaaattaaggaaaatacatactaaacaaggaaccattccatcagtggttgtttagaacaagtaatgtactcatcaatatataatcacccaacctttattattctcattgcactactgtcaggagacatgttacagccgctaaggacaatgtacttcaggtttgaaacctgggcaagaagccacacgactgcatgagacaagccgtgagaggcactgctcaggaggaaacgctgggtctcttcaccaaaatcagattacagcatattctgggagcacacgcccttgtagcgtccgtagcggg

SEQ ID NO: 600234 - DNA, 240 bp, Homo sapiens
gagctgctcgctccattcatgatgccctacgtgtcttcgtgttacgtgcgacacgggccttattgcggacggtggtgctccagaatcgcgttggcctacgattacctgcatcttcaccgaacactgagtggtatggaatcctactgcgttcgtgcttttgcagatgctatggaggtcattccatctacactagctgaaaatgccggcctgaatcccatttctacagtaagcagaccgtcg

SEQ ID NO: 600235 - DNA, 303 bp, Homo sapiens
aacttaagctaatgaataagttatctgagtccagtgaaaagacaagcatttaacagtgtacatcctactttagataactcagttccttctaaaactgacgcaaaggataattccttcgaagtgtttaccccagatgtctgaaaggaattccagatggtcaaatcaacacaccatgttcctaaacttggtgttatgaattcatcattagaagatgtatcatttattttattctttctggtataattttgattcttggagcaacattttcttatttatatacatgcatacaaataaaaagcagac

SEQ ID NO: 600236 - DNA, 340 bp, Homo sapiens
tgttctgtgctgggtagggagatcactgctgataggaaaggacggagggagaccccagctcctcttccagagggccaaatgcggaagaagtgcttcaagcaggaacgtttcttgtgctgcacaacgtcactggagaaggcgctgtaacatcacatcaacttaacataggggtgcacgataaaacctgaaataacacaaagaggaacaaaacgaagcaactgaaaattactggatcacatcctcacatcaaagaaaaaaatctaaaaccatcactacaagttagctacaaataatactggaaacactgcaacaccaaaagctatacaatccagcacaagaa

SEQ ID NO: 600237 - DNA, 150 bp, Homo sapiens
tctcgtacttcgagtactcagggacatttaagagttggaggtgcaaatatattccaaaagtgcaacagacacagtgtatccccctgcttctgttttgtatattttgctacttggtttttcttgatcatagctatttgtgcttgatcttta

SEQ ID NO: 600238 - DNA, 81 bp, Homo sapiens
gaccccaccccccaaaaaagctacttcttcattccgtggtacgattattttttttaactaaaggaagataaaattctaaaa

SEQ ID NO: 600239 - DNA, 346 bp, Homo sapiens
  misc_feature (176)..(176): n is a, c, g, or t
  misc_feature (183)..(183): n is a, c, g, or t
gttttttgttgttgttttttgaggcagagtctcactcagtctcccagggtggagtgcagtggcacgatctcggctcactgcaatctcccatctctcaggctcaagcgattcttgtgcctcagcctctcgactagatgggatcacaggcatgcgccataacacgtggctaatttttnatttttnagtaaagacagagtttttccatgttggccaggctggtcccgaactcctggtctcaagtgatccacccgcctcagcctcctaaagtcctgggattacaagtgtaaggcaccaagcctggcccagaagtattttttttaataaacttttatatgtaaggatgact

SEQ ID NO: 600240 - DNA, 1232 bp, Homo sapiens
ggatccagactccatggtgttgctatatgtggtggtagaactgtccagatgaaagcttcattcaacaccatctgtgagaatgccaccgttgtcagacggtaccaaggaaaggcagatgcccccgatggccttggtggtacacatggccccagacatctgtgactatgtggacagcaggtaccagcagtggatggagaggtttgggacctgacacccagcacattggatcctggaatgagaactgtgcctcagtatcacaaccttcgcagccacaagattcaaaccacagctcaaacatcatccacaccggacatcttcccccatgactcaccaggtattccagctgataagaaggagggccccacccatcagtgatgcccatggattcagggtgaatgcctccatcacagtaccagaatccgatcccaggagggagatggcagaagaggatgccatatattactatgcaatcctgaggaattcatagttgaggctgctgcagacttcccaacattccagcagacgcgtgcaggagtacaggaggagtgcgcaggacggcaccagacaccagcagagaaaagcaagtcagtaaccagaaatcatctaccattggaaacaggatctgacatcccgatgcacgactcgaatgtcagatgcccacacatgtcacacataagccccagaacgtcttctgcataacatgaacatgatgaatgaagggcacatctatgggacaaactgtgccagacaataacgagaagaccaggtggaaaagggtaccatgaaaaaacctgggatgcaggtgcaacggaggacccaacatgacacggacgatcagcccacacggggatagacaaagaaatcatgctgccaaagatgacagcggcactaggagactccagggaaaaaccgttacaacaattgcacgacaggatgcacacaacccagtcaaacatggacctacagaccacacacagaggccagaagccgaaccacactacacgatcggccacaacgcctcccgcacgtggccacaaccccaaacctccaggaaaaaagccaacaaggaacatgacaccgaacaaagacaaccaaaggaagcacacacacaaaccatgaagtaccaaccagaagaaaaagcacaacaagctaactagaagaccaacaaagagatacagaacaacatgagagaatactgacagcgtcccggataacacaaaacaacagcagat

SEQ ID NO: 600241 - DNA, 120 bp, Homo sapiens
acgaattgagctcgctaccgttttgtgggcgcggggcgtcgtgcggggtccgtttcgttgagaggtcgttgcctgtgtgtaggcgtctatagccgtggcccctgtggtatgtgccccacg

SEQ ID NO: 600242 - DNA, 535 bp, Homo sapiens
ttaaactgtacccagatcaagaagccatacattacctgtaagcccttcttattctccagtgaccgctatcctaacagcataggttagttttgcctgttttatcctttacagaaacaaaatcatatagggtctgtgtttttgggcctgactttttcactcaacattgtttcagaggttcatctatattaagcatagcagtggttcatgcagtctcattgctgtctgggattccgctttgtgactataccatcacaatggctgggatccattctgttggagggcatctgggtcatttccaatctgggctattgcaaatatactggtatgatattctaggtcatatcctttgggtaacatacacactgattgaggttgggtggacatccaaaaggggaattgttggttaaaagggtcgtgggcctctcaaattttaattagatcctgcccaaagagtttttccaaagggcttgtaaaaattttaacactcccacttccgggggtatgaaaaatattctttggtatgaggatgtatttt

SEQ ID NO: 600243 - DNA, 338 bp, Homo sapiens
gaggactccccgagtaacttatagtgcatatacagtcaagtcaggtatctacaaagtatcaatgatacagtgttttaatgacagatggcagatttgatacacgacaatggtagggtctatagaaataacagctccgtcaagtttttagaaagaattctagtaatttgaaaagcctttacactaaaatactccacttacatccattcagaaatgccagtactgcactgcaatcaagaaggactcttcaaagagagaatcagctcaaactggtcagctctagattagaatggaagttcttggtgccggcttttcttgatttggaagcttcagtcactcac

SEQ ID NO: 600244 - DNA, 295 bp, Homo sapiens
gaggatcacggagaggcaagatcccgggtggggtatcaaatagtaggtcgttcttcatcctttctatctttggatacgcattagccattcccacctctcccggcagtgcccccactacccttcccagcctcggtaaccatccttctattatttatgtccatgacttcaatggttttgatttttagatcccacaaataagtgagaacatgcaatgttggtctgattgtgcttggcttatttcacttgacataatgaccatcaatatggttgcagatgacaggatcttggcctcgtg

SEQ ID NO: 600245 - DNA, 196 bp, Homo sapiens
gagcccagacttggcaaatggggggaattttcataaaggggatgaaaatttccttggccaggggaattattttcccctgggttttttttttttctataaagggattcagaatttttctggttctataaaattatgcaaaggattggggcaaaactgcctccatttgttggctattaaagggccccttggcccttta

SEQ ID NO: 600246 - DNA, 124 bp, Homo sapiens
  misc_feature (30)..(30): n is a, c, g, or t
  misc_feature (116)..(117): n is a, c, g, or t
gggcgtacgccatggcgcccagcggaatgnatggtcttgaagccccacttcacaaggactggcagcggctggcacgtggttcaacagcggccgtaagatcgcagacgtaaggcccnncaagcaa

SEQ ID NO: 600247 - DNA, 624 bp, Homo sapiens
gactattgctaactaacccatgggactcccactaccttcatgaggctcagatgaggtgaagggtccctaaaatcgtgccaactagtcaggaactcagttgtcaataatttctttatttgtgatacaagcaggcgtggggaaagagaaatgaacagacttggaagcttctccgaggccctagagaagacctctgggttccgaacaccagacaccaggagtaaggagggtagttgatgatttcccactctttctccagcccctgctcctctgtttctccccttcacccactgcagcttcctcaggtcctgggtcccgcgccatcatctcttcgaatgacctcccttctattcctgttaataaaggagcatcagctaagtgaatatggtgatttgcatacacttacattgattcagaaattgtgtttaattccacacaagaaaaagaatgtggatctttttcactgggaaaaaaagtcgccatgtatcatcttaatcatgttttcctgggatataatctatacgtgacgcccatttaagccttcattgcatctatgcacgtggtttgctttcctcttgtgtgaaatagtttggaccacacgggtttgggccacagcccaggaagact

SEQ ID NO: 600248 - DNA, 461 bp, Homo sapiens
gtctagtcttcctttgtatgacttcgtaggttgtgattgatcattttcttttcaccctgtaagtgaatccctgaacttggttccctctgaagccagtcttggttaactaattctattttactataactttaaaagtgaaagatattctctaaatttatagcaggtgccttatttcctttgaatcaaatcattccataccagaatttcccttggtttactatagataattggctttaagatattcttgtttttaaacatacaatgttttaattattttgttaaattgctgtagccatcaatcatttcacatttgtaaaattacattccctttgtatcatgtaatttacctattcagtgcattttatattcaggttggattatgcatatttgggtcaatgaaagttgtgtctgtttgatttatggtttaaaaataaagttccctggatatttgatgctgttgt

SEQ ID NO: 600249 - DNA, 149 bp, Homo sapiens
ctatccgacatcacataggactggtgaggaaatcctggctcccacaattgctccttcgtccagccctgcacgtctcaattaaaataatgctttcttttttcttttcttttgtttgagacggagtcttgctctgcgcaccgggctgtgtg

SEQ ID NO: 600250 - DNA, 256 bp, Homo sapiens
gtaaatagttggtcattgatggagggaaatcattgtttatgataaacatatggaagagggtgaatttgtaaatgatcacaatttttaatcaaatcatacgagtcttataaaagattttaaaaatgtgttttaatgaacgaggcttttaaagtcaaggtacagtagaaattttaaacgaaatatgattatattagtcggcgaataggggatatagtccgaattgtcggctgagaaggatcaactgaccaagcaattt

SEQ ID NO: 600251 - DNA, 190 bp, Homo sapiens
ctgggtgcagtggctagcctagcgacagagcgagactccatctcaaaaaaaaaaaaaaaaaaagattacttatggtttgaaaggctttgacccagtgtaaaaaaaaaatccacattatccatggccctccaaaattcggaggggctcaaccctctcagaatgtcggtggtgtagttggcccggttgaaaa

SEQ ID NO: 600252 - DNA, 968 bp, Homo sapiens
  misc_feature (79)..(79): n is a, c, g, or t
  misc_feature (195)..(195): n is a, c, g, or t
  misc_feature (243)..(244): n is a, c, g, or t
  misc_feature (248)..(248): n is a, c, g, or t
  misc_feature (258)..(258): n is a, c, g, or t
  misc_feature (275)..(275): n is a, c, g, or t
  misc_feature (305)..(305): n is a, c, g, or t
  misc_feature (327)..(328): n is a, c, g, or t
  misc_feature (330)..(330): n is a, c, g, or t
  misc_feature (347)..(347): n is a, c, g, or t
  misc_feature (353)..(353): n is a, c, g, or t
  misc_feature (355)..(356): n is a, c, g, or t
  misc_feature (366)..(366): n is a, c, g, or t
  misc_feature (369)..(371): n is a, c, g, or t
  misc_feature (380)..(380): n is a, c, g, or t
  misc_feature (399)..(400): n is a, c, g, or t
  misc_feature (415)..(416): n is a, c, g, or t
  misc_feature (426)..(426): n is a, c, g, or t
  misc_feature (469)..(469): n is a, c, g, or t
  misc_feature (496)..(496): n is a, c, g, or t
  misc_feature (509)..(511): n is a, c, g, or t
  misc_feature (555)..(555): n is a, c, g, or t
  misc_feature (642)..(643): n is a, c, g, or t
  misc_feature (932)..(932): n is a, c, g, or t
ggcctggaggggctgggaggcgtccggttttcagcagaggattttgcagttcccaaggggacaggaaatggagcctgtnatttcggttgcagagagggggatggccgacactcttattttctgtatcgtttcttcctcccagttagtgcgctgcaggatttgtgaaaatccatcttgaggactctcctagataanatcaaagacaaaattaaagagagagacaaagaaaaagagagagaaaannaganacataaagtnatgaatgagatccaganagagaatggagaagtaaagattttgctganaagtgggaaggagaaaccaaanncnaatatagaagacttacnaattancnngcgtaaagcngannnagacaaagncacacaaagagaatgacanncggaagcgtccgacnntgtatagccnatctattcagaccatctgctcaggattgctaactgatgttgangatcaagccgccaaagcgcatcctacntgataacctaccnnnttacgttgggaagcctttggctaccaagacctatgattcccccnttccagagacccgtgagtttccctttgtctcattaaaggagccacgagttcagaataacctcaaaaggttggacactttggaatttnnacaactcattcatatagagcaccagcctaatggaggtgcatcggttatccatgcctacagtaacgaactctcccacctgtctcctatggagatggagaggtttgcagaagagtttgtgggtctagtgttcagtgaaaatgaaaactctgcagctttctacgtgatgggtattgttcatggggcagctacttatttacctgactttttagactatttttcatttaattttcccaattcaccagtgaaaatggagatattgggaaagaaagatatagagacaacgactatntccaattttcatgctcaggtaaaagaacgtattctc

SEQ ID NO: 600253 - DNA, 369 bp, Homo sapiens
atggaatattactggccataaaaatgaaagtaataataccatttgtggcaatatggatggacctagagattgtcatattgagtgaagttaagtcagacagagaaagacaaatatcatgtgtatatgtggcatctaaaaaaaagactacaaatgaacttacctataaaacagaaattgagtttcagagatagaaaataaacttatggctattggaggtcaagggaggagggataaattggaaggctgggatggacatgtacacattactatatatcaaatagataactagtaagaacctactgtataaaacagggactcttctcaatactctgtaatggtctaccactgatgagacgtataaaggggtag

SEQ ID NO: 600254 - DNA, 162 bp, Homo sapiens
cgcttgtcagcatcagaacaatttcatcaatatcagacatcttcaaatcagaatcttccaacactttcttgacgggcttcatagtagacctggaacatgatccttgttgagctctatggatactggtgctggtttgtgtggtctcagaatattcatgtcctg

SEQ ID NO: 600255 - DNA, 2740 bp, Homo sapiens
attgtaaactagtttttggtttgcaaaaaaaaaaaaaaaaaaaaaaaaaaaaaaaaaaaaaaaaaaaaaaaaggtcttttgtaactgacttctttcacttagcaaatggaagggtttttgatggaatcttagctcagatgtcgccctaggcttggccttctggaactcactgttctcttgcttccttccaccctgcctccctacccgctttgctacaagaagacagaatgtagaaacccccagttgactttttgagtagaaatgagccatgttctatttagtggtagaatgtttgctgggttagcccaggacttcagatggagtgcttcctcctttttaataccttgtgactgctgtgttggcaagcagagggttaaatgctgcaggaggacatgggagagtttttgctttgagggtccactggagcaagagaagcttgagagtctgtctctgagatcccagaacagacatgaagatatggtaccgattcccttggtgctaaaaggaactccaggggaatttcaggaaacccctccttttctcgtctttattctcaccccgtccccccgccacctctctccccaagttcacactcaggagggaggaatcttttaccttttccgttctgggcagcagcctgtagggaatgttatcagtgttgggactgggcacgggaccaagccttcctggtgcctggactgcaacctagctgagagctgacatggcagggcgagttgtgtgtgagttggctgcccctaggctcataggcctagcacaatagagaccctgtcaatggagggacactatcaggcaggtcactatcaatgtgacagacactatcaggcaggtcacattggtgcagatccttggaggactcccccccaccccccatgagtggattcctccaggtcaggggctggctgggactgtggatgctggagtaagtggaattgtgggtgcactctgcttcagcagtactctccaaggagaatgattgttttaataaattactgttttaataagggaggtggaagagctttttaatcacttgctttttaaaaatttttaattttattttaattaattagtttatttattttttgagacggagtcttgctctgtcgcccaggctggagtgcagtggcacgatctcggctcactgcacctctgcctcctggattcacaccattctcctgcctcagcctccagagtagctgggactacaggcacccgccaccacgcccgactaattttttgtatttttagcagagacggggtttcaccgtgttagccaggatggtgtagatctcctgaccttgtgatcctcccgcctcagccttccaaagggagggattactggcgtgagtcaccgcgcctggcctttattttttatttcttttgagatggagttttgctctgtcacccaggctggagtaccggtggtgggatctcgcctcactgcaacttgcgcctcccgggttcaagcgattctccagcctcagcctcctgagtagctgggattacaggcgtgtgccaccgcctccagctaatttttgtatttttagtagagaccgggcttcaccatgttggccaggctggtctcgaactcctgacctcaggtgagcgtcctgccttggcctcccaaagtgctgggattacaggcgtgagccactacacccagccaatcagttgcttttaaactacttaaataaaaagagccaacccaaaatcttgtgcatgcttgggaaactggcagtggaatatgagaagtttttatttgtggtgcacacaggtgactcgggctgttgtgtattggttcttgcctcgatctgtagcaagcaatctgttgtttcttgcctgccttttgggaagaaatgaaaaaagaagcagcacgagtctccatacatcatgattgtgatggcactgggcctgagaccttttctgctgtccaggtaaaaatgtgaagaccatggttttgaggtttcttaataaattcaggtgttaagtgccaagtgatgctcccagcccctgagctagagcaactatgctgttcatgtccccaggaatggaagtggaccctagttaggtgctggtggccagccatgtgtacctagggcagggccaggtcctgtgtgtgtgtgtgtgtgtgtgtgtgtgtgtgtgtgtgtgtgagagagagagagagagagagagagagacagagagagagatagagagaaacataaaggtgatcggcactcagacatcctgtgtggtccacctcacttctcaagcaggtgtctttccagtctacaactcgttgaccacaggtggaattcataagctctgttccctgtcctgcttgggtcctccagagaaagaaatgttgaattatcatcttggtgatggtcaactctgaaagcctaaattttcatgatcaccaaagtgtttggatttaaaagggtggctcactccgtaattccggcactttgggaggctgaggcagaaggatcacttgagcccagaagtttcagactaggctgggcaacaaagcaagacccggtctctcccaaaaaaaaaaaaaaaaaaaaaaaaaaaaaatcaaaaaaattagctgggggtggtggtgtgctcctatagctccagctactcaggaggctgaggcgggaggatcgcttgagcccaggggtttgcggctgcagtgagctgtgattgcaccactgcactccagcctgggcgactgtgagaccccgtctttaag

SEQ ID NO: 600256 - DNA, 1040 bp, Homo sapiens
gcccaagttggaggctgatctggagaagaagattcaaggtggcaaagctcggctataagaaacaagaccggaggacggcaaaggatgtggtggagaatggtcgatggacgttgctgaccagaccctgtctcttgatggagcagctccgtgggggaggcgcttaatggttccacaagactctggtgagaactacatagagcccatggctatgtggtcactccaccacaccatgaatctactaaagcagcacctggagattactggtggggcacgggtacgtacccggatcccgtcagaatccaatggaatcctgcatattggacatgcgcaaggccatcggaattacaactttggctatggacaagggcgaaaggaatggctatctgttttcttgcagtttgtgatgaccaccacaccctgagaaggagggacagcaccaagattcttcacggacatctgtgacatggtagtcctggcttatggctacaaatcttacaaagtcacattatgcgtctgactattttgaccagggtaatatgcgtggagctgcggacgctgcatccgcaggggtctggctgattgtgtgccagcagcgaggagaggagcttcaaaggccataatactcctgtcttcacctggagagaccgttccatggaggagtcacgtgctagttactttgaggcatgcgcaagagaaagtgtccgacgtgcgcgaggacacactactggattacgctggtgatgtacggacggcagaaggaaccgagcctgccattgatgtcaagtatacacgaatggccggcacgggggaacgggggctacccacttagattaacgcacgctgttgatgcgtcccgcgcttcttcgtctctctgcgccacgagtcggcgcacggcgatacacacaagggaccgaccgagtctcgcccggagtgggcatcggcccacgcaaagagctggtcaaagcaacacactgcaggcgggggggacacaccacacgggcaagggaccacacaatctgcggacggtcacacaccactct

SEQ ID NO: 600257 - DNA, 676 bp, Homo sapiens
gctttacacggtatccacaaggttcgaaggtgtaggaaattgggatcggatcccatttcaaacagggtgagccatggcatgatcccacaagcccaaaattacccctccttaaaggatcaaaaatggaggtgcagctgggtgacaacactctaaagtaggggatcctctgtttgcagtaattgggcctaggacctgttcacaggctttaaccaaagcgcacaaaactatgacctctaaggtttcattggaaataaagtgttctgtgcaccatccatttcagtaaatgatttcactgggttcgcaatccaagggttcacttcatgaggtctgatgttagagctaagctacccttggcagtgtgctttggtgagcatatcaattcacaaatgtggtttcttcgggaaataacaatctcctttacagatagagcgtccttacgggctttgaaacgtgcaacaaagaatgcctgtgctgagcagaatgtagcagatctaattgcataatgattgagaatgtcgtttcaatgatgctcatttcctgtgaaaagcttttaagcgcatgtacatccataatcctagtttgagtgaacacaagctgaatacgcagcactgttgtttataactgttattttaaactttcgggtcccaggtctgtatcgctataagtgtttactagc

SEQ ID NO: 600258 - DNA, 338 bp, Homo sapiens
ggccagtgttcttatgattcataaaaccttacatgatctgggccgggcatggtggttcacgcctgtaatccagcactttggtaggctggggtgggcagatcacttgaggtcagcagttgaagaccagcccggccagcatggtgaagccttatgtctactaaaaatacaaaaattagccagacgtgatggcatgcacctgtggttccaggtgcttgggaggctgaggcgggagaatctcttgaacctggaaggcggaggttgcatgcagtgagccgagatcgtgccattgcattccagcctgggggacagagtgagattctgtctacaaataaataaat

SEQ ID NO: 600259 - DNA, 160 bp, Homo sapiens
accctggttaattggcactgctcctctcacctcaatgcgtaatctcctgatgctcatgaccagccttcggccatactctctgtagtccacgggcttcacgtccatcacagtggccttaattcgagactcgtcgttgtaggtctccactttgaccctgact

SEQ ID NO: 600260 - DNA, 789 bp, Homo sapiens
gcggacttcgacacctacgacgatcgggccgtacagcagcttcgcgcgccggtgggagagtgtcccgcggcagctgctggctgtggccatggttcccgtacccaagaaggagttgtcccacagagctccccctacacagtataccgtagtgaaatctacctttcaatacggtccagggcgacatagatgctatctttaaggatctcagcatcacgagtgttcggctagtcagagacaaccgacaccgatgaatttcaaggattctgctatgtcgacattcgatgaagtggattcccttacggaagccttgacatacgatggtgcactgttgggcgcatctggatcatcttcgtgtggacattgctgtaaggcagaaaaccagatgaaggtgtgctttcgtcacttcagaaataggtggtatccgacgtagtgcatcatgatgcggcttcagggagtgacttcttactggggcaggggaggtagtcgcccaggcgaccggcgtaacaggcccccccatggggtcggtccgctttcagagatggccctcccctccgtggatccaacatggatttcagagaacccacagaagaggaaagagcaccagagacctacgactccagcttagacctcgaacagtcgcgacgcccctcaatcaagtagccaatcccaactctgctatcttcgggggtgccaggcctagagaggaaagtcgttcaaaaggagcagaatgagcctgcggtgggaggaatggggcgtgggggtagatgcaggccacaggctggtgattcc

SEQ ID NO: 600261 - DNA, 132 bp, Homo sapiens
taagtcggtacgcgttactgactcacagttcagcatggctggggagacttagaaaagaaacacaatcgtggcagaaggcaaaggaaaagcaggcaccttcttcacaaggcagcaggaaagtcagtgcgtatg

SEQ ID NO: 600262 - DNA, 1092 bp, Homo sapiens
tatgtcctcatggtacccaattctaatcgcaaggcattccgtaagcttaccgaacgaaaaattctaggctatatacaactacgcaaaggcccgcaacgttgtagagccccctacgggctagtacaacccttcgctgacgccataaagactcttcaccaaagagcccctaaaaccgcgccgacattctaccagcatcctctacatcaccgacccgacttagctctcacacatcgctcttctactatgaaccccccctccccatagcacaaatccacctggtttatccgtcaatctaggccctccaattaattctatacctagactttttagcctagtctcgtacaatacaaattcctcgtgatcagtgatgagcatgcagaacgtacagagacgtaacgtcgcgctaatcggacagcacctgcgaatgccagtagaccacaaaacagatctcgatattgatgtctagccaaagtccgtgattcaaaactagtacaacatcagtaataactggttgccatcaacctctcacagccccttatcacagatacaatgaatctagcctctgtctgacgtcccgtgtacatcatgacctctagggccataaatatgatgatatctaccagcacatacgtcaataggacacataccgaggccggctatcgaactcgcgcgaaggggagtccgaggtagtctccggcttcagcattcgaatgacgccgcaagggccctgcgccctactccttcatcagccgaagtaaccgaccggtcattgatacatgacaagagccccatttacataacaatactgcgtaggaaccactatatgaggcacgctagacttgaaagtgctacgaaactaatctggtcaccaaaagcctagtgtagacacacctgatcttattgcattgcaagggatacccgaataccagaacaataaacactccttggaacaggctacaataacgacgcgcagataaatagccaccataagccgcaccccgacgaaaaagacgggccacacacccgagacaacaacgccgaaggcacaaggataaagagcgcaacagcaccgcctagcaccgagaacacacg

SEQ ID NO: 600263 - DNA, 383 bp, Homo sapiens
taaaaatgaattggatttaaccaaaattaaaaacttttttgggtaaaagtaaaccaccaagaaaatgggaagacaacccacagaaggggggaaatttgttaaccaaaaaccggataagaacccaggcggcggtcaaaatgtttatgtccccccccccccaattcatatgggaaggccccaaccgcaagggagtgggattagggcaaaaggaaaaggaggggggcccttggggcactgtgggggggcccatgccggaaaccccagcactttggaaggcggaggcgggaggattgcttgggcccaggagtttgagaccagcctgggcagcaaggggggaccccatttttacaaaaatttttttaaaaaaagaaaaggggcccaag

SEQ ID NO: 600264 - DNA, 123 bp, Homo sapiens
ttactactccggaaaaaaagaaccatttggatacataggtatggtctgagctatgatatcaattggcttcctactgtaaatatatggtgtgctcacacgataaaccctagggtcgacgcggcc

SEQ ID NO: 600265 - DNA, 473 bp, Homo sapiens
  misc_feature (253)..(253): n is a, c, g, or t
cctttctctctgggtatttggtggttcttttgatgctattataaatggtattactctttgatttgcattttctatttattggctgttggcacatgggaataaaatgaatttttgcataaaaatgaaagtcggagggtatggggtggtggcgggggcgagtgcattaatgcgggtcggcattgaacatcaacagctgttaatatcacagaaaggcagcggggatgaggtgctgcgaaaaggaatggagcagcangctgatcaagcgctctggcgtccgaggggcagatgtgtggggagcacaaagaatggagaaagacgatcttcctggtgagagtgtaatcagcaaaactgctactatgggaaattctacatatggatcaagatgctccaggctcttgaacagatcaactctaaggaaaataaagggatgcacagggaaacctgtggattaaaagagatttggaagacaaaaa

SEQ ID NO: 600266 - DNA, 174 bp, Homo sapiens
gtccaagcgtactaccccagctcctgtcaaagttgtgactgccactttgcgatagattaagaaggccccgtggactgttggtcttgaagagtggcagtgtgtgcatttgaggacctctgcagaccatcatatcaaaggaggtagagctgttttgggtactacgctttggcaggc

SEQ ID NO: 600267 - DNA, 674 bp, Homo sapiens
ggatcccccccccccggggagacaaaggcaagagggtgctgtaaagggggccgaccagtgggggtcagccccccctgccccaaaggagagaaccgcagataccccccggagaaagagtgaatcccgctgccaagctcacacccgggggaagtacagatatcccgccaaccccgcgcagttagaggagctcctaggataacaaccccccctggtggcgtgccgctttttacattggtacacgccgtcggttgaaaaacagtgaggggcaggtcaggagaaacacgtgttcgctggcctttgtgtgaacaccctcccataagggggtgtgtggttcaggaaaagttctgaaccccccctgtgcccgggatgttctcatataagccggctagtaccccagcactctctcgggcaccccaacgtcgagcgcacctctcccatcagccgggccgtgagtcacacagggaataacagaaagcattggcaccacaatagccagccttagtcccacaaaagttcactagtacggcgcggaggaggagcaaccagtgtattgaccacccctcgcatcctcggaggcgtgcgtgaagcggtgcggtgacccgacaccgcccgcccaccaaggcttaagtgcccccctgacaggcagagccagcccccccgcccacaaagacaaa

SEQ ID NO: 600268 - DNA, 126 bp, Homo sapiens
gccatttaaagcccaaaggttgcccggggcccttaaaaaattaaaaaaaattttcccccttaaaaaaccccttttgtttaaagggttttttcccttaaaaaaaaatttttagccattgggggaata

SEQ ID NO: 600269 - DNA, 493 bp, Homo sapiens
ttattgtaatgcatgtagataacttattatcagcataaaactgttatggagatttcaacatggggtcttcagctcctaaaatgaagcgaagctttgcacgtccattgtccaataggaaaactattatactctctgttcagataaaggcctttaaaaaacgtaatctctcttgaaacggacttttaaacgtctacagcctgcaagggtccccccaggtggtgttgctgtccttctccaattgcgagtctgttgaatgggatcatcttcatagcggatgatattcatggaactccgccggaatccccaagtggcccaactagtgccatcatcataaccattaggagtggatgctcttgagtgagtgccaccttggccactgactccatcgatatggccagcgtgacacttgttcatccaccaacccgatccattctggtcagcacagttgccttcaagctcatcatttgcatttgtccaagtacctgacttgcac

SEQ ID NO: 600270 - DNA, 210 bp, Homo sapiens
gacttttggaaattagtgcagtgccactttcagatctcttagaacaaacacttgaacttataggacaaatatcaattgaaacccatattggttagggagcaagagacataccattacatcttcttatatccacatgtgagcatttcacatatagagatctatctctcattgaagcacacatgtagtctcgctgtgcctcggtgttgaaga

SEQ ID NO: 600271 - DNA, 525 bp, Homo sapiens
  misc_feature (24)..(25): n is a, c, g, or t
  misc_feature (28)..(29): n is a, c, g, or t
  misc_feature (135)..(135): n is a, c, g, or t
  misc_feature (144)..(144): n is a, c, g, or t
  misc_feature (259)..(259): n is a, c, g, or t
  misc_feature (283)..(283): n is a, c, g, or t
gggatcggggggggttgagagggnnggnnggctgccgcatccctttttttggaattcattcagaagtaacttactttttttctatgcctggggacattattttctatacgggtgggggtggtctgattacaactnttcaatctnctcaaattctttcccctcatctgagtgcttctttttcttttgtgggtacttttcacgaagcagaatggtggccactaaaaaaatcacctcaaccactattgcaagaaatggtttnaggggcaccaggggggggggccanccacaagctcaatgtggtcttcactctcgggtaaaggggaatagtccatcggcacccataaaaaccccccctctttccttccaaaaggggggtaatcttgcagctttggttgcattaccgttatgggccattggtcacatatttatgcattgggaacaccaagcgggaaccttgtcacctcccattgcttatttggccgagggcgaattttaaaggaatacgatttgggacatttacgaggt

SEQ ID NO: 600272 - DNA, 343 bp, Homo sapiens
ggatcctatgcgcgacgcttccatcaagattttgctctgggggcaagaataaaaaaaagagaggctaggtgtggatggctcatgtcctgtaatcccagcactttgggaggacgaggagagtggatcacgaggtcaggagattgagaccatcctgacctatatagtgaaaccccgttctctactaaaaatacaaaaattagctgggcgtggtggtgcatgcctgtaatcccagctactcgggaggctgaggcaggagaatcgcttgaacccaggaggcggaggttgcagtgagctgagattgcaccacttcactccagcctgggcaaaagaacgaaactctgtc

SEQ ID NO: 600273 - DNA, 473 bp, Homo sapiens
  misc_feature (17)..(17): n is a, c, g, or t
ggatacgggagttcctnccttgctctcgccccgtactctttctggtgttagatcgagctaccctcgtaaaagcagtttagagtggtaaaaaaaaaaaaaaacacaccaaaaggctcgcgagccacaaaggggatgaaatttctttcgtggacatcctccgggtttctcccgttacggatcgtctggcgtccctagagtccttcgtggaagctttttaattccctaagagggagaaattcaggtcaccgggcggaaatcgtggctggataacacgggacgctggggcttgggacatggggacgactggactggcgctatgaattcggctaaaccttacaaacgcaacgctgggtctctctgggcgatataaataacgcttgggcctgggacggaaacaggctggccacaatggcacggggacctggggtgccaagggttctcataccctctggcgggtagactggcagcaaccg

SEQ ID NO: 600274 - DNA, 178 bp, Homo sapiens
actctctgatgtggtctcagtggtggtgattgaagaagtgaagccgggagtacttgtgtagaggtagtctcagtggtgttgcattgatgaagtgaggcccggagtaatgtgtgaggtggtcttggtggtggtgacccatgaatgtgaggccaggcgtactgtgtaacgggggtctcag

SEQ ID NO: 600275 - DNA, 277 bp, Homo sapiens
tggagctggttttctcaccataaacaaaaatcgagccaaaatagattagttaatatatgacccaaaactggccgggcgcagtggctcatgcctgtaatcccagcactttgagaggccgaggtaggcgaatcacctgaagtcaggggttcgagaccagcctggctaacatggtgaaaccccatcactactaaaagtaaaaaaactagtcgggcatggtggtgcatgcctgtaatcccagcaactggggaggctgagacaggagaaaaccaggctccag

SEQ ID NO: 600276 - DNA, 770 bp, Homo sapiens
  misc_feature (118)..(118): n is a, c, g, or t
  misc_feature (238)..(238): n is a, c, g, or t
  misc_feature (248)..(248): n is a, c, g, or t
  misc_feature (524)..(524): n is a, c, g, or t
  misc_feature (528)..(528): n is a, c, g, or t
  misc_feature (624)..(624): n is a, c, g, or t
  misc_feature (627)..(627): n is a, c, g, or t
  misc_feature (633)..(633): n is a, c, g, or t
  misc_feature (638)..(639): n is a, c, g, or t
  misc_feature (653)..(653): n is a, c, g, or t
  misc_feature (656)..(658): n is a, c, g, or t
  misc_feature (664)..(664): n is a, c, g, or t
aagtattatgtaacaaaacactgtaactctggtaaatgttctgtgtgatgttaacattccacagattctacctttgtgtttgttttttttttttacaatggttttaaagccatttcantgttccagtggtaagataaggaaatgtgataatagctgtttcatcatggtcttcaggagagctttccagagtggatcatttcctctcatggtactctgctcagcatggccacgtaggttnttggttggtntggttggtcttttttggagacggagtctcactctgttacccaggctggaatgcagggggcaatctgggctcactttaacctccatttcccgggttcaagcaattccccgtgccttggcctcccgagtagctgggattacaggcacacaccaccacgcccagctagtttttggtattttagtagagacggggtttcaccgtgcaagcccagtggccacgtaggtcttaaagcaaggggcgtgaagaaggcacagtgaggtatgtggctgtctcgggnagtncatgcggactaaatagacctggattaaatttcaagaaggttggggattttctctttgttggacccttctcttttagagggtaacatattatgtttngantgccangatgnntttttcacataatntgnnngtcccnggtggaaattataatttacccaatttaaaggtgggaaatgttttggtgggcctaacggcggggaggggggggaaggacaccttcataaaggggggaactcggttga

SEQ ID NO: 600277 - DNA, 188 bp, Homo sapiens
ttgaacgggttctttgtgttctatttccttcagccttcgtctgattttagttatttctctgccttctgcctagctttctgaactgctgcgcgcaggcgcgcatgggcggactccctcctagcagctcgaccatgcagagcactgccaacgcttgcgccactaggcccgctcgcttcttacacacgctc

SEQ ID NO: 600278 - DNA, 633 bp, Homo sapiens
ttctgatccagcgtagaatggatgtgcccagtgactctggtactcatattggtatgttaataatcagggctaaaccgaggtacatgattatgtgtaagttcagggcttgacccccacccccttctaaactatgcctcaatttagaagtgttaatctaattctgcagtaggatcaaactatttctgtatcatatgtaatcatctgttatagtgacagattccagctggtgaggtagagaaaggcatatggaagagacggttaagcgtttttacaaaagtgcttctgaagcactagctacaagggagattctagtgtatctcaaaatgaaagtcaagaatggtatatgtatctgtagccacaatacaggtctcatataagcgtagtactagctccgtatattaggtagtcaatctaacttcaactttcaagaagttcataagcttaataaacttagaatgtcaacttgataaaatgaaagagaaaacttcagcttgaagtagacaactgtaatattattactactttgattaagttacttttgtgctttaagcaaactccaaaagttagcagagtcctccagtattcaatataccagcctctggacggttgggcccctgaaatccctggtattag

SEQ ID NO: 600279 - DNA, 110 bp, Homo sapiens
ctaccggatgcttatggaattgtgctggcgtaagggaattctcttagcacaggacgaattccttagcaccagcacaattccttagcacaggacgaattcccttagcacca

SEQ ID NO: 600280 - DNA, 993 bp, Homo sapiens
tctgttgtaaattagtggttaaggttatctatattgccacttttccagcgctaaaggctgtttgggaaccagtgtagcttgtaccgcgggtgattggcttttttttctttgggcaaaccagttattcaagtttctggtctttaaaaaaattctgtggcggtacggtaaccgaggaggttccagcgcggtggaattaccccgcggttggtttgttttgcgcaaggccaggcccagaggggcacgtggccgccgggagggacgagagaatgtcttttcgaggcggaagggtcgtggaggctttaaatcagaggtgttggaggtaggcggctttcaaacccgagggcggcagcaggcaacccaatttccgaagggtggagcgccggcggtggagaaggcagggcggggcacatttccaggagggccggcgggcagggacacgggaatctctggaccacaaggggtgttggcccgggagagcgggttttaaacgcaaaaggggcaaagaacccaaggggaccctcccaagaaacggttggtagttccataatttaagggaagagttcccctgcaatcccctttgttgaaggcattcacccatacggtgctgcataaatttgttccccccgaggattgacaacaattacagcggtggcgttatatttccaaaagtgctccccttgttttagctttagaaagacaaccgaagggacccaattgtgggcaacaacgtggctttggaacaattttttttgggcgcaactccaagaagaatttttaattttttcccaggttcaaacgtttgtccagcagcacaattgaagggggttcaattccctttaaaaaaaccttcagcaggaggttattattatttgagacccatataataagtgggtgccacgtagcgaaaaggttttttacctcgacctctccaggtaagaaaaggcctccagagggtggtgacggaggcccagaggagaaatcgatcggtgtccg

SEQ ID NO: 600281 - DNA, 216 bp, Homo sapiens
cacgaggcggggccccaagatgcacttaaagcgtgttgcagcgccaaagcattggatgcttgacaaactaacgggtgtatttgcacctcgtccatcgacaggtccccacaagttgagggaatgtcttcctctgattgtcttcctcaggaatagactcacgtatgcgttgactggcgatgaggtaaattacatatgtttgcaacgtttcatcaaaat

SEQ ID NO: 600282 - DNA, 192 bp, Homo sapiens
cgactctgaggatccccttcgtccactcagatctgtgtggagcctcggcgtgtgcatgcacacgccgaacaaccaaactcgcggacgtatgggaggtcgggatggacgaagttgttgctgcacacgccgaggccccatactttttttaacctttccttatgagcatgcctgtttggagtttcggcgtgtgca

SEQ ID NO: 600283 - DNA, 229 bp, Homo sapiens
gagaacgcgaacgccccgacgagcacagagcctcagactctttgccgatccgtcgcccggtcgcacagctcctgcgcgtcgcaagacatcaccaatggatgatgatatcgccgcgctcgtcgtctgactaacggctccaggtcatgttgcagaggcacgggcattcggcgaggcagactgagtgctcgcccacaggtgccggtcgttccccatccaatctgtggggcgc

SEQ ID NO: 600284 - DNA, 514 bp, Homo sapiens
gagaatctcattaaagtttattttctccaatttcttagtcacttctgtcctaccatgcaaatacacagattatgccaagaggtaccacattttcatgacagatacattcatgcacaatccataatttgagttttacataaaatagaaatttgttagaatttgttagattttattgcaatgatgcctaccaaacatttccagacttaacattttggtctctgcagttaagtgccatgaaaatgtggttgaattattcattatgcagtgttattggtaagtgtattttcacttttagtttagtgaattctaacacataattcttgaattctctactattggcatgtaacgaatttaaattttttataccatagggcaggctgcctaatattgttttttttgaagattgaacaacaattttttttttttccactcgaagaacaaccttacttttgctggaccaggtttttttaaggggtgtcctcttaaaaaccccccctgggtcctttgggggggg

SEQ ID NO: 600285 - DNA, 316 bp, Homo sapiens
agtacctcgacgcccatggtggcctggcacggcgtcacgcccggcgcatgcagcagcggctaaacctcaagtacgctgtggacatcgatataggtgcacacatcgcgcccgggctgcgcatcgcgcacctaccgggggtagtgatcacccggcacgtgcgcatcgggcgcaatttcttcatccggcagaactgctcgatcggcatcaagacccttggcctggaggaatacgcgctgcgcattggcgacaatgtgagcatgggcgccaatagctgcattgttgccgatcgcatcgatattggcgacgacgtggtgat

SEQ ID NO: 600286 - DNA, 346 bp, Homo sapiens
atctacaggacctgacagcatcctaaccaggacactagtcttggagcctgtaaagtttcacctccctcggccaggcgcggtggctcacgcctgtagtcccagcactttgggaggccgaggcgggcggatcacagggtcaggagttcgagaccagcctgaccaacagtgaaacccccgtctctgctgaaaatacagagattagccgggcatggtggtgggtgcctgtggtcccggctactcgggaggctgagacaggagaatcgctcgggcctgggaggtggaggttgcagtgagccgggatcatgccactgcactccagcctagcgacagagcaagactctgtctc

SEQ ID NO: 600287 - DNA, 265 bp, Homo sapiens
ccggggttgctgagagtgtttctgaccagatagctgatgtaccttgacagggagacactgagcaggtgcgccttctgccataggcagcccagctgctgagccagaaccgaggagcccatgggaaatgtgctgaccacggagttcacgctgacgccccaaatcttggaagttgtgtccccagaagcagaaagcaaatggaggctgtcggaactccaactaattgcgtgaatcccaccgccgcgggccttgcttccgcccagcgcgc

SEQ ID NO: 600288 - DNA, 385 bp, Homo sapiens
tatctgaaattggtatacagatgatgatgcacattcaggatcagcaaaccaaggagatctgtgcgctgggtgggttctcgtgaagaaggaaaaagaatgccatgcggattctggtccccgccaaagtggcctccaagaatgtcatccctgccctggaacgggtggagcccattaagaagcacgaggtcccagcaaagtctgatgtttactgtgaggtgtgtgaattcctggtgaaggaggtgaccaagctgattgacaacaacaagactgagaaagaaatactcgacgcttttgacaaaatgtgctcgaagctgccgaagtccctgtcggaagagtgccaggaggtggtggacacgtacggcagctccatcctgtccatcctgct

SEQ ID NO: 600289 - DNA, 252 bp, Homo sapiens
  misc_feature (204)..(204): n is a, c, g, or t
tcgtaccatgatttgtcgtatggacagacctgatgaacgagagtcccagtgcactcctaggaaggtgcagtgggacacggtgaagatggcagctgacactggagggggcctgtgcgtcccaatgtgagtgatgctggaattccaaggtggcttgaccactccaggccctgtgggttcacccaaggcatcagccaagctctcctnctagctccagcccctagtgctggtgagaagctgcttgaaactgagact

SEQ ID NO: 600290 - DNA, 538 bp, Homo sapiens
tgaacaatgtcgctgtggatcccacctcattctgcaaaatttgacgcatgttactttcatatgatttctctaactctgcagcagcccacttgcttgcagccttagcaagtgccttgttagttagcctactgggtttgtgtaacacctttgatgaagaaactgctgaaccacttgagggtgaagtatctcttgatgttttcaaagactggacaggcctctctttatctatgtcaggatttacttcattctgccgtttgtgggaggcaccaagacgcacggactttctatgttgagactgatggaaagagtatgatttgctcctttctggagagtagcttctgctactgacactggaaccagatctgctgtgtggagaatcctttctgccaacaggtgattctctgaaaaaagtattgtcccttttataaggagaccgctctctcgcattaatgggaagagtagaaactttttcttctaaagccatctctcatgtccctgtattcaagttgcctgcttgcagaatgatcgtctcttgtcc

SEQ ID NO: 600291 - DNA, 613 bp, Homo sapiens
cgacgcatcacacagtgtctattggctggccggtggtagagagtggaattttccacttctggcaaaaaattgtatttaccaaagggtacttcatttcactgtgggcttttggtctgggtcatgaagcattttatagaagtgatggcagccagggtgtactaacatccttggggcctcgggaacgtttggccagagtcggttcacgaaaacaggaaaagagatccttctagtgtattcccatttctcgctgtcatgaggccacagacggtttcataaccacaaactgagctgctaacctcagtgaggaatgtccaaagactccattcctcccacggctgaaaaaataggtcatcgggtgcgtggggaatctgcacatttaattgtcattttttaaaagcagcaaagagcaggccttctttggttgttctcagacatctcgtctcagtggaaccttacgagaccaggagttaagacttgggcttcaaacaggttcgcttgcaaagaaaagtcctgggtgtgaaccaggacacgtaaaccagtccgaggcagggtgggagccacaacgggtaggggggtaaagaaaagggtcccgatccttagtactcaatgggac

SEQ ID NO: 600292 - DNA, 677 bp, Homo sapiens
ccccaaacccccccacaacatcctcaacaaacacgcccgcaccggcgagaatgccccaaacattacaaaaaagaaaaaaacataaaaccaaaaacctacacaccaaaatacacgaccataaaagacaacggcaacgaccggccagttctagcggtgaacttacgacccaccccaattctaggtataacacccccaaaaaacgacacctaaaaacatcaacacaaaaaaacgccccacaacaaaacacactcacagagtcactacatgaccccttacatctcgaaactccccgactatcattccacccactattgcactaaacagcctctccccaatcaaataaattatacagctgcccagaaatcgactatccacatggccgtgtaaagcagctcctataatagcagtagagaagtactccctaatagcagtagcggtcacaggcaaagctaaaatcattcctaaaagctgacaaattcgaggacgtgaaaggcgcccttccgctctgactacaatatgcgtaagactcttcagatctcctaaaccagtaaactcgctactcctttgaacaccgctaacgcaaagattaagtcgacgtctgagcgactcttaactaatatgagcaaaaacccgcggacaaaacctagttaactctacaatcccccatcgactaaatt

SEQ ID NO: 600293 - DNA, 191 bp, Homo sapiens
  misc_feature (31)..(31): n is a, c, g, or t
  misc_feature (65)..(65): n is a, c, g, or t
  misc_feature (122)..(122): n is a, c, g, or t
  misc_feature (163)..(163): n is a, c, g, or t
gcgctcgacaggcggagccgtgagaggcggnccagccgccccgcggggcggtcgcggccgtgacngcggctccggtgcccggtttcccttccgcgcccggctccccttccgtcgcccatccngccggatgatgaggggaagatgtccgatgtcaggactcaangcacgagctgaagctcttggcgtacatc

SEQ ID NO: 600294 - DNA, 124 bp, Homo sapiens
gcttggtctatcctgtatgtgtggtagggtggggggcatcatatagtcatccgaggtttcatggatgggttcttctaccatactggaaagaacctaagctacctggtggatccctctaaagtct

SEQ ID NO: 600295 - DNA, 369 bp, Homo sapiens
  misc_feature (303)..(303): n is a, c, g, or t
  misc_feature (323)..(323): n is a, c, g, or t
  misc_feature (349)..(349): n is a, c, g, or t
  misc_feature (359)..(359): n is a, c, g, or t
tagctcggacctctgatgcaaggtcgggatacaggtgtgatccactggtgccagcctgagagttaagttttaccttttcactaaagggtggtcacaggactggtcctatttggatttgatggggacagagcagtgtggcccatatttccattactgtattagaaattgcagagaagagcacctgaggacaggaaaggagaaacttgtattattatttccatagagcagcttattgttctgagtctcttctgttataaagcgaaagaaatgaagtgaactcttttcctgtagcgtcttgcttcntttggccaagtgtgactgtnggtggtagcacggtaacacaggtggntgctgacacnctttaacagg

SEQ ID NO: 600296 - DNA, 677 bp, Homo sapiens
  misc_feature (508)..(508): n is a, c, g, or t
cagacgacatgaataggtcggccaggcttggcggctcttgcttctctccaatggccgatggaccatcgcttgggtctccaaggaccacttcgctgggtcatgactcagccggcgcgtgtcgccggacaacagttcattcactacgcagaagcaaggcagggcagtatcggagtaaacgcggtccagttgtgatattacttgcccttttcataaccatgaggtaatattcaacttttgtggataccccgatgaacattcggttcacgcgacttgggacacaccctcattgggattttgaccaaaaaccacgaagccaggaaaacaatttgtatccaggcgtttaacttggcttttattcaaaattgttcagccctggattactatcctatacacacgcagatggggtcaccttcaacagcttcacaccagcgaacatctaacaagtaaccaaccaggccatacattgggcctccatttctgcgccttggcctaattccaagcgacaaanagaaccacttggggtccatttcccttaggaagaaacagcgcttgcaaacttttggccaaaaatccctgcaagacacgcccgcaaggcacactggacgacaccacgtcgcaaacattggtactttcagaacccaaaggttcacaggcaaccaaacttcacatggccttgc

SEQ ID NO: 600297 - DNA, 950 bp, Homo sapiens
  misc_feature (6)..(6): n is a, c, g, or t
  misc_feature (25)..(25): n is a, c, g, or t
  misc_feature (27)..(27): n is a, c, g, or t
  misc_feature (32)..(32): n is a, c, g, or t
  misc_feature (34)..(34): n is a, c, g, or t
  misc_feature (50)..(50): n is a, c, g, or t
  misc_feature (54)..(54): n is a, c, g, or t
  misc_feature (58)..(58): n is a, c, g, or t
  misc_feature (67)..(67): n is a, c, g, or t
  misc_feature (69)..(69): n is a, c, g, or t
  misc_feature (97)..(97): n is a, c, g, or t
  misc_feature (133)..(133): n is a, c, g, or t
  misc_feature (136)..(136): n is a, c, g, or t
  misc_feature (157)..(157): n is a, c, g, or t
  misc_feature (179)..(179): n is a, c, g, or t
  misc_feature (231)..(231): n is a, c, g, or t
  misc_feature (237)..(237): n is a, c, g, or t
  misc_feature (244)..(244): n is a, c, g, or t
  misc_feature (246)..(246): n is a, c, g, or t
  misc_feature (253)..(253): n is a, c, g, or t
  misc_feature (266)..(266): n is a, c, g, or t
  misc_feature (268)..(268): n is a, c, g, or t
  misc_feature (274)..(274): n is a, c, g, or t
  misc_feature (281)..(281): n is a, c, g, or t
  misc_feature (283)..(283): n is a, c, g, or t
  misc_feature (286)..(286): n is a, c, g, or t
  misc_feature (291)..(292): n is a, c, g, or t
  misc_feature (298)..(298): n is a, c, g, or t
  misc_feature (301)..(302): n is a, c, g, or t
  misc_feature (314)..(314): n is a, c, g, or t
  misc_feature (321)..(321): n is a, c, g, or t
  misc_feature (331)..(331): n is a, c, g, or t
  misc_feature (339)..(339): n is a, c, g, or t
  misc_feature (349)..(349): n is a, c, g, or t
  misc_feature (372)..(372): n is a, c, g, or t
  misc_feature (404)..(404): n is a, c, g, or t
  misc_feature (423)..(423): n is a, c, g, or t
  misc_feature (429)..(429): n is a, c, g, or t
  misc_feature (474)..(474): n is a, c, g, or t
  misc_feature (496)..(496): n is a, c, g, or t
  misc_feature (577)..(577): n is a, c, g, or t
  misc_feature (731)..(731): n is a, c, g, or t
  misc_feature (851)..(851): n is a, c, g, or t
  misc_feature (876)..(876): n is a, c, g, or t
  misc_feature (886)..(886): n is a, c, g, or t
  misc_feature (933)..(933): n is a, c, g, or t
tcactnaaaacaacacacatttatnanctcananaatttctgggggtcangaanccangagtcactnanctgggggttctggcttagggactttcanggggctgcacaaaaaaagtctactgggctgtgatcncanccgaaggccctactggggcanaggatccacttccacattcacncacgtggctgttggcaggaggccttagttccttgccatgtgggcctctccanagggcnccttaanangccaacnggcttccccaaantnaaaaanccaactnangtnaaaannagggcnaannaacaaaaaaaangccaaantgtctttccnaaccaaanctgggaaatnaggaaccaacacttctgcctcantctattggttacccaaacccaccctggtacanagtgaggggactgcacaanggtgtnaatactgggcatcactggggccatcttggaggtggaccaccaaanaaacaaacccttgtctcccaantcctgcagccttggcctttggccctcaggataagattgagtggaggctgcctttgggatagggttgctagatttagcaaanaaaaataggggacaaatttcagagaaacaacgaatgattttttagaatatgtatgccccaaataatgcatgacaaccctaatttggagaggagtaggtgctggggggcagggaccctttggggagaggtgctgcgttctggtcctctaggattntgtgtgcacctcaggctgaccccaagtctttgtggatgtcgatcctgacctttccactccagtcctcaacttcccaaagggacctaggcagagaggtcaaggcagaaagagctaggaaangatactctggggtctggagggaggnggtgtctcanctcagtccaggtgaggctcagaagctgaggttgaagggaggtagganaaggaggtggaggggca

SEQ ID NO: 600298 - DNA, 909 bp, Homo sapiens
gcaagctcaggttgatgccccgtcgactgtcagaactacattgtccgcctagagatttattcgaaagttctgcactggtattgaccctatcagcagctctgctcgtacactctctcggtatagtgcctgacccagacccagaaaggagggtggagccaggatcctcaaacagtgcactgggagcatttcagctataaactgtatcttcctgctgtctcataccagttgccctgggagatccaggtattgtgggcatatgtggtctcctgtccaacccgcaagctcatgtctcaggagttcgattcctataccagtgccagtctatacaggattctcagcaagttacagaagtatcttgtgacgaactcttgtgaactttgtggacgttacccaggaagccacagcctccaaggggccaaggccaaaatggactggaaatgggcattcgaccttctttcccttcaagagtggcacttcacgcagaggagtactctctcagcacatgctcagtctctcccatccttatctgtgcctcttactacttggagttctcaacctagagactatgtgaggaaaagaaggtaatcagatttcagttttccctatgagacactctgaggcagccacttatcttggtaggtagaacttcacctggtcattgacccggagagcatttaacgcctataggttgacctacgtgtacggaatcttgcctatgaaggcggtccataagaaaagcctaccacttttttgtgctccctaccaggaacacagcgcgcctccagattcccccggcccgggggccacccgttttaacggcccattacgtataaacagcgggggacacaaatgggacgccgatggggcactttggcagcacccaataggttaatttgggccacccactaa

SEQ ID NO: 600299 - DNA, 934 bp, Homo sapiens
gacctctgcgtcactagtcgttacttgctggttccgagtgcagcctgggaagtaggatgcggtccctgtgacatgcagctctaccctggctgtgaatccggaggaagtggaggtgctggagccccgacgagagcgatttctgatgcgagatctctgtcgtcccgagtctactcaaacgaagatgacgtctgatgggacatcgcgttcagcatgtatcgcgctgagtcgcaggtgtctggtgcggtgcactcgccgtgacatctctggagccaaggcatgattgggtagtactgtgtacagacttatgcttcaaatcccattatctaccaagacgcatgtggacgcgccgtcgtgaagtacgcatctgctctctagctggcatcctagaaacctcgggctacgtcggacggagagtgcacgtggactgcctcaaatgatgggtgtccgataacatggccggtaggagaaggcccgggagattggtgaaggatgtgcagatatgcttggtggaatgctggtccggcgcgagtagagagaagagctgcatgtcagtcgtgagctgcggtcggcggtttccagccaagtggattctggtcaaactggtgtgggaagattttgggcttgaacgaaccctgtgacgtaagtcctaaaaccagagagaccttttcgtttcctctatctccctgtctatgcttctgtctcacttaacactacgtttgctgtcatatggtctgtggttgatgagcctcagtaatgagtttcgacttgttaggcgtgatcaagttcgggacgtaatgtcgtattgcctaatgcttctcacatacagggaatttcgggctagagtagtagctcttgcaggaagatcccactttgttcccgcgggttgggggtccttactaaatttggacggtggtgggtatttcatagcgttgac

SEQ ID NO: 600300 - DNA, 508 bp, Homo sapiens
  misc_feature (508)..(508): n is a, c, g, or t
tgtctagaatccggagtagtcatagaggagttacgagaggtaccatgtagcactgaggtcagatttcgagactcatataggacatcttaaacaggcatgagggactggatacagattattttcagtgatctctccatattgattaagggatgccttggaggcattaaattcttgtcacttctaggctgctattcaccagaactgagtaaaactaccatggcactgtagaagtccccaggaaaggagtgggagatggagtattgcggaataatgagagattttcaagaaatcaggattctctgaggaccagatctagtttggtgatgactaaaaggtgcatggacaggaacacagatcattttgaagatttcagaattggtcaagaaaactaaagaaagactgtgaacatctatgcacgtgtacaagctgtcaataaacaagctgaagaatacaccaaaggcccagatgctacttctggcaaggcagtgataattcctctgtcttccan

SEQ ID NO: 600301 - DNA, 433 bp, Homo sapiens
  misc_feature (20)..(20): n is a, c, g, or t
  misc_feature (82)..(82): n is a, c, g, or t
  misc_feature (137)..(137): n is a, c, g, or t
  misc_feature (153)..(153): n is a, c, g, or t
  misc_feature (181)..(181): n is a, c, g, or t
acgagctgagatcacctgangtatttggaactctacgctgatgcctccgcttctatagcagtttatggggagccattgaagngcgtgtgtactgtattttttttccaggcaaaatggatgcaaactgtattttttanctaatatataacgtcnttttctccctgttgccgctaagtgatcnttcatatgtgtggttatactcataataatgggccttgtaagtcttttcaccttcatgaataataataaatatgtactgctggcatgtaatgcttagttttcttgtatttacttctttttttaaatgtaaggaccaaacttctaaactaattgttcttttgttgctttaatttttaaaaattacattcttctgatgtaacatgtgatacatacaaaagaatatagtttaatatgtattgaaataaaacacagt

SEQ ID NO: 600302 - DNA, 526 bp, Homo sapiens
gggtatacctttttatgcccgctttcggaaaaggaggcccattgaaggcccccccacaaccccctccacccaggggcactcttcttgaaggttcacatctggtgaatggcctcccaaaacccccgaggcccccctggagagagatcacattcttgcaccctcgccccttgctcgtgtggaaagacccacgaatagtggccctaacgggtgttgtgccgctccccaagcacggccctcggggaagaagcctcttggggttctccccaggcctcgttcacttcgcctcgtttctcgtcacccacatccaaagaaaggctcccacagctgtaacacgcacagagtcccacatccacattcacccacgtcccttgaaaaggcttttatgtcttaaacccgtggcctctgccacaccgtgctccctgccacagcgttcccccctgaggttgtgtatccatattatctgtgttagccagtagtattttcagctactctctattgttattaaatgtagtactaaattctggga

SEQ ID NO: 600303 - DNA, 1380 bp, Homo sapiens
gcgagcggccgcccttttttttttttattggtcccaggatacttgtgcaggtttctttatattctatttcttattttttatttgagagaagagggattcctcaacctctattatggcccagaggcctgtgaagtgtgcaagggggtgccactcttgggcttccagtgcaaagcctcgtgcctctcgcggggtattaaccaccaatttcctcctgtgccttcaagccttcccgcgaagatagcgtgggaacataccggggtgccgcgcacaccacaacagcgagggaaatattttgtgaggatatatttcaagcataaagaagcgggggttataacagcgcggtgttacaccacagaagatgggctcctcgaactcctcgcggagaacccgcggagaacagcgagccaacactctgcggaatcctccccaaagagagtggcgtggacaattgtgcgcgggtgtgtgtgacacgcccacagtgtgaccacacaccgagccccttataatgtgtgcgtaaatcacctatacaaatgtgggcggtacacagtgtgcgtgaatcagacgggatagagaaacattagtccacatatctcccgcgaaaaaaagaagagcgcgtggtaataaaaaacaaaaaaacaaaaacaacacacaatcagcgtataacacaaagcgggacacccgaggaggacaccccgcgatagagcgaaaaaaaaatgttgtaccgccatacagacgaccaacagacacaaactatcgccgagagaacacagccccccaaaacacaaaacaagtcgatgtttaccatacaacaaaaagatgtgggccatcacgacaaaacaaagttaatatcattaaagacaagcctacagctattacgaaggcagagaaaaaagagatgcctgcacacaactagtcatatagacgcaccgcccccaccaacacaacgagagacgggggcagtcgacccaacatcatcacttaaccaccgccactccacaagcgcaccacgaaaacaacaaaggtggctgccacgtggcattccacacaccacaaacaaaaaacagccgtcgtctacatacaaagacaacaccaccaagagtatgcgctggtggagcacaacagcggcatgcaagcggagcgcaacacaaaacagaggggggacaacccgaggataatacaccccaacagtgaggtacaccaacgaggcaggcacaagtgccgaacaacacagatgcagaagcagcacagaccacccttcagcatgaggtggggcacaacaacacagagcccgagcattggagagcacaaattactctgcagcaggcagacaacaagcacgtccacaatacagatgcagaacacaccaccaccacatctagt

SEQ ID NO: 600304 - DNA, 140 bp, Homo sapiens
tctagaggacccctctctccacactggtatttcgtctgcagtctatgttgggttcatttttcttgcataatccaggaatcataaatcatgccaaagcctagtgtctttttctttttttttttcccccagggtggagagag

SEQ ID NO: 600305 - DNA, 249 bp, Homo sapiens
  misc_feature (7)..(7): n is a, c, g, or t
ggtcggnaccctggagtgctgaggggaattaggtctggaagtggagctagggaaggtggttaacaaagagggtggcaggccgggtgccgtggctcatgcctgcaatcccagcactttgggaggctgagacaggcgggtcacttgcggtcaggagttcgagaccaacctggccaacatggtgaaactgcatctctacgaaaaatacaaaaaccagcagggtgtggtggcagacgcctgtaatcccagcca

SEQ ID NO: 600306 - DNA, 370 bp, Homo sapiens
agtattggttggacgatgtcatttatagattcatcatttccatagcactatatgctaaaagtgaaaatcagcccaaaaaacttcgatgtggtattaatttggaagttacattcattgcactgtatattaaaaaaaaattttttttacgtgagtgtttggcgtgagccaccactcctggccaagcatccacttgttaacctcccacatatcagtgacaacatgtgatcatttgtcttcctgtccttcgcttatttcatttaacgtaataacctccacttccatccatgttgtggcacataacaagttttcattctttttatggccaggaccaaatattcattatgtacgtataccacatttcctatatcat

SEQ ID NO: 600307 - DNA, 220 bp, Homo sapiens
gctttttatcggagtctcctcccctggggaacctacgaaatcaaacactgagattggcactccacccttagggaataagtgaagtgtccaaagtgatggtgttgaatcccttacaggacattggtccacagcttctttttcagtcctgcaagcactggatctttcttttagaatacaaagagagggagagaaagaaagagaggtaattgagaagtagtaa

SEQ ID NO: 600308 - DNA, 186 bp, Homo sapiens
tgtaccatgagcctatgcacatggtgaaacttgtctctaccagaataaaaattagctgggcatgtggcacgtgcctgtggtcccagctacttgggaggctgaggtgggagcctgggaggtcaaggctgtagtgagccatgatcatgccactgcactccatcctgggtgacagcaagatcttgtctc

SEQ ID NO: 600309 - DNA, 106 bp, Homo sapiens
actgcaggacacctcaacgtgtgtgctgcatcaactgaattgcttgcttgatagcagtgaggagacctccctttacgtctagtcacagaaatcttgtgttggagag

SEQ ID NO: 600310 - DNA, 1101 bp, Homo sapiens
cgtcatgccattgagtcgagcgcgcgcgtgcagtaatccatagaccttctactgctctcctagtccgtggaatgcccatatggttcgcattagaccaacttactgccacaccagataacgttacacctcacatgagctgactcgagtctcgacgatgctgcaggcataggttccacatgccgatttgaactattctggcacgccatgcatccgtaggtactccagtcgagctaccatggctaggcatccgtttacataacggacgaggtcaacgatccctccgcttaccatcgaaatcaatctggccgagccaagtggctactggaacctacgagctacaccgactcacggtggcactaagtcttcaagctccatactagtactatcaccgccattgattcgctataacccaggctgacgcttgcgactccgttgaccgttagacaatgcgaggtagtacgtccgcgattgaaggcccccatttcgtattactaattacatcacaagacgtcttgcactcatgagctagtccccacattaaggcttaaccaacagatgcaattcccggacgtcttaaaccaaaccactttcaccggctacacgaccggggggtatactacggtcaatgctctgaacatctgtggagcaaaaccagagtttcatgcccagtcgtcctaagaattattcccctaaaaaatctttgaaagtagggcccgtatttaccctatagcgaccccttctaacccctctagaggcccaaaaaccaagaacatagacaacaagaacaagccaaacacaaagaccaacaagaacggcacgcagaaaaacggccagagaggcacaaagacaggcccccccacccacagaggaacacaagggacacacaaaaagagcaactctaaccagaagcacgcccacccacaaaaaacaccacgccgtcgaccacaagcccccatggacacagacaagacgacaaactacgagccgagagtacaatgacagaacccaccccactaaacaccccagaacaaaacacaagaggagcacagacaacacaagcaagctacgaaagaaaacacccaagctgaataacaacacgcg

SEQ ID NO: 600311 - DNA, 390 bp, Homo sapiens
ggggcaggtgcccccagagtacgtactctgccagcggtggtgagaggagcctggcgttcacgtgagtctacaacaccgctctggggctgctcgttgcacctgccactgactgaggtctgctgcccaggccggtcaacaatctgttgggtgatgcggtactctgtgatggtctaggctgtcccttgtgctcaaagatttgtcccaggacacttccccaccaaaactcctgatgatgaaggccagggcctcacggggcacctctcggttcaggaagaacttcaggccctcaaaaagcttcttgtgcttctcctgcgcctccagctccttcctgcggtcttcctcctgcgctgacatctccccatcggtgggaaactcatccacctcggcctc

SEQ ID NO: 600312 - DNA, 762 bp, Homo sapiens
gtgtctttgcagtttggtaattctgtggtctatttatacagatattaaaactgcaaagacagagtgtggaaaacaggtttgaaacccgtgcatagagccctctgtctttgcagttgtggtaattctgtggtctatttatacagatattaaaatcttgtttatagaaagaaaaaacaaaaatgagctctcgagtgcctcttatatcggcgaggggccgaagaacacgagtgtcttggatcagtgcggcctcatgtgggtcatgtaagctggttcccttcgtagcccaatccttgcttgcgaccacatcttgggtaccaatcctcgccgggacatcccgtaataagccgagtaccaattcaagttgacggactaacgccagggtaataccgtgctagtcatatagacttgcggccaacagtgtgcgacagcaagcgactgcgagtcattcgcgaacgtgggagaccaagagtcagcccgtcctgaggtacagccgcaagggcaaaccccaactgtcactactgtgtcccgcccttccttctgatggagcctccaatgccgaacaaggcccacacgtagttgtgtctggatacagtgacattctaccgcgaggagctgtgaacagttggccctggaagtgcaagatggcacgcccccgtcaacggcggcgagtggagacccaccaaatccctccaagacagagcaacaacgaagtacgcggccagcagctacctgaggctgaacgccgagcagggggaagtccac

SEQ ID NO: 600313 - DNA, 853 bp, Homo sapiens
  misc_feature (853)..(853): n is a, c, g, or t
tgtgatcggcacgagggtcgggagggaggaaggtggcaagatggtgttggaaatgcactatgtgtgtgtgtggacaacagtgagtatatgctggaatggagacttcttacccaccaggctgcagtgcccagcaggatgctgtcaacatagttatgtcattcaaagaccctgcagcaaccctgagaacaactgtgggccttatcacactggctaatgacttgtgaagtgctgaccacactcaccccagacactggcctgtatcctgtccaagctacatacttgtccaacccaatgtgcaagatcacctatctgcactgggcatccgctgtggcccatctggctctgaagcacctgacaaggcaatgaatcacaatgatgctgcatcatttgccttcagtggagcaagcccatgtggcaggcacacatgcagcaaggcatcttggttgcaccacttgtgctcaacaacgcctcgaagcaagtgcagcacacagtcaacctcgtatgcaccattcataccaattattattgggtgtgcacaccacggagtgttgacaaaaacaagcaaaatatgcctgtaccagccattttgctacaaagcacggtatcgacatgggccccaggaattgtcgaacgctggattactcaatcttgggtcgcaccagcttgcactttcccttgtggccccacgcttctgtggcgtttgttctgcctccgtcaagttcatggttcactccccgcactcttctgggactcgggtttgacaatcggttgggttgcccccttgcatttgcgggcacctcttgcggtcggccaatgttgtagcttttggacattttctgggccgttccacttn

SEQ ID NO: 600314 - DNA, 109 bp, Homo sapiens
tgaaagcgtgatgaacggtgaagatgcagaattaatgtctgtagagttggaagagaacttatagcgaataatcattgttaaaaaaaataaaacaaacaaagaaaaaaag

SEQ ID NO: 600315 - DNA, 117 bp, Homo sapiens
tccaagcagtcgcagttttcacatttggggaaatcgcagggtcagcacatcggagtgcatggataagcctcgccctgggaaaaccaccttccgactgcttggatttacaaggagggt

SEQ ID NO: 600316 - DNA, 336 bp, Homo sapiens
cctcatccgtagcatggggaggagagtgctccctgcagggctgttgggagaaggccatgagggctgttgggagaaggccacctctcaaatagtgacaggcgttggcattgctgtcctttgtcgtattatttttgagatattctttatatttcaaattagatcataatttttaaaaattaagtgcaggacaaaagaaacagaggggaacccacagatgaaaaggatcttaaaccagattgtagccaactacaaaagaaacctcagtcatcatcagtggccacacagcccctttgtgtacctattgattatacaactacataaatatgtcactaacaa

SEQ ID NO: 600317 - DNA, 503 bp, Homo sapiens
  misc_feature (357)..(357): n is a, c, g, or t
  misc_feature (368)..(368): n is a, c, g, or t
atcttggatcctctaaagcggccgcccttttttatttaatatttattttttttaagactagaaatggtccgctatatattcaacgtctcgacaggactgtagcattcgcccaattacattggctgagttgagggagagataagttagtaattctggtgacaaaactgtccagcaaacgcaaacgctatacacaatcttactctcttcgttcagctatgtacaaaccttaataaagatagtaaatgttagatctaaaactcttgcaactagcaatagtcgtctacctaaggacaggcttttgtttggtcggtgacagttgaacgtctccgttcagaacagatcccacgaacctttcancttcttccagngtcaccttgtcgtcgtacaccgcgaacctcccccggcgaggcttgtaggcgatgagcagcctgtcagatgacttatatggagacttatcaaatgatgacaggaatgcagattgtttggccttatccaacaaagcc

SEQ ID NO: 600318 - DNA, 284 bp, Homo sapiens
gaggatccaccaaccatagaaagtaaatactgtataaaaagctccagctgttagatacaaatgcaaaacgcttcctaaaaaacggcctgaaaaaaaactcacagacaatgccaaactttataggtctgtattttcctttatacaaaatgccctcaaattaaaaagtaattcccatatagcaataaagtccacatctctggattacctataaccggtattatggggtgtgtttatactgcctagaatgttaaccctcataaagccttaaaagtacatttgtgaaa

SEQ ID NO: 600319 - DNA, 386 bp, Homo sapiens
gttactcatatgcttgggttaacagactaccgtgcttatgagctctgaaagtcagtaagactgacttgctcaacatgtgtaatagctgacatcgtttaccagtcgttcagatatatgcacacttattgacaacgtgagacgatgactgatgctcagtgctctgacagagctagctatacgcagacctatagcaacgtctgagcagctgaaagctgtgatggatgattgatcatgatttatagagaagtgccgcgtggcatgacgataaggagtacctgattaccgtggctggtttactagatgctgtccgtctagctgccttatgattatgacactgcatagagtagcgtctcatcctaccatgatagtacgagcgaggcctgtgc

SEQ ID NO: 600320 - DNA, 379 bp, Homo sapiens
tactgacatagagagccacttagatagaggacagagcttgcatgaaagaggatgactagaaggctgccttgtccatcccttgcgtctgtgccaagccacactatttctcggcaatgtttcctgctttcaggtctatttccatgctcattcagcgtggaagcttgcataccttcacctcaaaaataaaaacacacttattaaagacctactgtgccccagacctactgtgagctgaatgatggcgttctaagcacgaacgagcaaccctctcttctctcggtcgctcaccgtctaggggctgcaacacatgagacaggctccagtttaaaacagaattaaatgcacgctaggtcagagatgccaagacatctgggggcac

SEQ ID NO: 600321 - DNA, 383 bp, Homo sapiens
caccaccttcgtactgcatgctagagtggagagcagcagcatgtgtctaggctctgataacgcggtgaggaggctatcccagcctggatctagcaaatcacatgagaacagaatcccgttgcccacagcctgcaataacatggttgctgatggggacagcagtgtagaagctccaggagaatggagggaagcctgggatgttacattcttgaggccttcacaggtacatgtcatcgtagcccggcggggtggatgatggtctgggttaggtccgggtgggctggtcccaatgggtccaaaggggtcaaagcgagctcctgggggcacagcgcctggaggaagtcggttcgggaggcctgaggaagggtcaataagtgcagatc

SEQ ID NO: 600322 - DNA, 835 bp, Homo sapiens
cctccttttataagcatttcacggcgaccgacccctcttgtcgacttctttgtgctctcccccccccccccctccccgctcttggtaagatggttccaccaaagttacgccgcctttcgcttgaaacaattgactctccggtgttcctcatgatccaagtctgactaagtccctttctttaaaaacagtcttcaattcccccgatgtatccttcccgcaaaatcttttgtggacagcccgtctgtccacgttataaactatggaatataggcccgccacgcacttgttttaatggaaatcgatcccattacactcctaaacacagttttttctttaccaccacaccattagttgaccaccaaatttgtcctcgcgttcaactactggataaaagaaacaaattagcttgacacctccttagcgcagtaaaatcttgaaaacagtgctcccgcgttttaggcccacacaatatttctgcaaccaacccctccttcaccctcactctatgtgttcctccacttctcactctttctagaacactttatgaactattgcacgatcagcatcaactcatccccccttctttttttctggcgtaactcccccacagttgtctgtagtacctcccgcgttcatatctgtggcccgccccccccagggtcacattactcttctgcctggctccccacagaacacattttccaaaaacatttgaaaacagtaaaacttttctacactcaatttaaatattgctagtttcctgttcaggtctgcccgacaagactgtgatagtattcatgggccattaacccaattttggcctgtcaacaaaaca

SEQ ID NO: 600323 - DNA, 212 bp, Homo sapiens
gtgatagaggaccccgtctcaggaactagtagctacacaagaacgattatacaatagtttaataactaataatatctacttttgcctctttttttttattatactttaagttttagggtacatgtgctctcatggttcaattcgcacctatgagtgagaacattgactcagcaatcccattacggggtatatacccaaaggcggtcccggtt

SEQ ID NO: 600324 - DNA, 292 bp, Homo sapiens
gtggcacacgcctgtggtcccagctactctggaggcagaggcaggagaatcacttgaacctgggaggcggaggttgcagttagccaagattatgccactgcactccagcctgggtgacagagtgagactccatctcaaaaaaataaaaaaattagccaggtgtggtgatgtgcacctgtcccagctacaggaagctgaggcaggaggatcacttgagtcttggagaagagctgcgttaggaacgatttcaccatggtactttagcctggtgacaacaagatctgtctaaaaa

SEQ ID NO: 600325 - DNA, 1674 bp, Homo sapiens
  misc_feature (1655)..(1655): n is a, c, g, or t
gtgggtgttatatattgatatgtgtttgtgtaagtggctaggatagtgtaatgtcagtatggtgggtaggtgagataagtggtctatgtagtgttgtctgatctacgtatgtgatatgtgtggtgtgagtgtgtaggtgtgtgtggttgatgggacgagtggtatgggtgtttgtgtgtggatgagtatagattgtttgtgcgttgttgtgtcgttcttatttagtcgggtttgtctagtaggagtgttcaaggtacgtcgttgaaagagtctttatacggggggtgttgattatagggcctggtgtagtcgtcgtgttacatgtgttgtaattggtgtatgtctgggatgggtgtgtctgatggctggttgggaatggctttttcgtgcgagaaggttatgtgggggatgtggcagttgcggtacggctggaagttggtctggtagtgtagtatgagtgggtgtccgtgtctaggtgcatggggtaatgatgagtgtggtttgagttgttgctgctgagtggggtggatgtgggggacgtagagggagtcgggggtagtatgggtcagagggaggtggtgtgagttgtcgggtcggagaggctcctcgcggtgtggtgtggcgctggtcgccaaggtgaggaggtccgcggtgcggcgtagtgcggtgtgcgaggcgggtgagtctctctggttcgcgttggttgagacgcgcctgcccgaagggcggctggggtgtgtgtgtgtggccgacgcttgtgggacgccgaggggggaggctgtggccgcttggtgttctggtggtgttcgggttgtcgcctgggggttgcggagggtgcgaggtgccttgttgtggggtggttggcgtgagggtgtgcgttggggttcgtagggtgtgcgccgcgagtggggtcgccgtgggtgtgggtaaggtcgtctggctgggggcgcgcgtgcgtggcgcctgtggtcaggtgggagtgggggcgtagtcaggtacggtcaggggaagggagtgtggtgtttgcgcagggtctgcgtgggctgttcatcttgcgtcacgggttgcctggcagttacggtggagtgtaggcttttgcgggggtttgtggagcagtcgcttattggttgtgtgggttggggcgcgagagtcgcaggggccaggtattagtgcgcagcagcctgagggctgggatcagtggtctcattgtgtggcgctggccgtggttcatgcgcgtcggtgcgatagcaatgcgctgattcatgtctgtgctccgtgttcacccggtggcgcaggggagttgccagcagagtccaggtacatgttccagtgtggcctgcagtggtcagctgccgcagcgcggggcccgtttgcacgctagttgttgcatgtttcaggtttctttaaaagatgcttggtaagagagctcgctgagcgaacgacagcagcatgccttaattgggaagagctagctctgatgacgaaggcgcaccagtgccgctcgtgccctctagccttcttgggactgaccaggagctgtctcatgtgtctgtagagagatgggaaccatactccttgcaggcagtggcttccgcgtgccccgagtgctggtgcaggttccacagtcacgcagatcaggaagggtgttgcagcantatgattcacctgcaactt

SEQ ID NO: 600326 - DNA, 174 bp, Homo sapiens
tcgatggcatgcaacgccacttatgcagtgaaccactatcacgaaaaaaactcgtacctcgctatactaagtctccctacaaatctccttgattataacattcacagccacagaactaatcatatttgatatcttcttcgaaaccacacttatccccaccttggccttatcgag

SEQ ID NO: 600327 - DNA, 1323 bp, Homo sapiens
ggatagacccagtggctaatgacaatagctacgatgaactgaaaagagatgcaaagttatgttcatcacttacctgtctcagggagttgctatagcacctcatcaatgtgcctttggtacttcaggtgctacaacaaacagcatatagtcaaaagcagcttcgttggccgtgcacgcatgacaccgattactgagcctagctccagacccatggtcatcttcataacgctctttatctattcctcaaacaatgaagcatgccaggtaaagagaatatccaggtggcctggcttcatacagtactttctggacaggacgaaaacaaactgtgagacgagtatcagaacatacatgtgcttcgctacctaggcattactagctgagtcctcgattaacagcatgtacagctcatcgttagcacacatgggaccacgtcactactggcagactaccaattttattgatggacaaaagtacgctaaacggaaagaaactactctacagacaaaaaggaaccaatgccgaggaaacgccatgagaatcagtggtgaagaggagcactacgcccaaatgtcacctctacaatgcaacgaagactagtcgaggatactaagtcgcgcacccgaattcacatcggcacggatggcataaggggaacctatggagatcgcgcattggttggttctccgttttgcctcagcgtacccactttatacacggaatagttgatcaacaacaccttggggtcataggcccgcacacggtgcaccaccgtcaatttgcacgattacgtcacgtctggcaacaagagttcgctctacaattgcacttccctggcaagccccacatcaatcgagacgaaatggcagccgcagcaccaagacacgacaaaaacgacattacatggcaaagtgtataccggatagtgtaacatccaccccaaatgagaaaagacacttgggatcatgagaaaacgaatacaaaagatagcacagacttcacactctcggagttgtgagcgcaaaagcataggctatctggacatgcatagaaccacagacatcatcaacatttgaatgttaaaccccagataacatcattatatcagcagatcagaaaaacggcatgacacgttcagtccatacgacacatatcaaagaggcatcgtatgatacacacaacagtacacatttcccacgatgcacttcaaaagttatacgcacacatgggctggtgggagagaacatgcctgggagaagactcattacaaaagacacatgccccccacggcactgtaggcttccacataccacatacaatagg

SEQ ID NO: 600328 - DNA, 238 bp, Homo sapiens
actcgatgccactcataaacatgtactcttattcagggccaggtttatgagtggcctaagtgaaagcaaacaaacccatgtacacctgaggaaggtcgatgctgccaccttacagataataataacttatgcatacacgggtaactgggcaaggactgccagcacggtagaacagctttatgcacacagctggcttcctaccaggtagaacgacgtggtgtacaaccgtgtcgacgac

SEQ ID NO: 600329 - DNA, 139 bp, Homo sapiens
  misc_feature (42)..(42): n is a, c, g, or t
  misc_feature (63)..(63): n is a, c, g, or t
ctagctagttagtactgtagactgtccatgtatcggatttcnacaaagaaagaacttcttttnaagaaagaaaagaggaggaccctcatacaactctgcataaaacaccaacaactgggaatcactatccgagcaatca

SEQ ID NO: 600330 - DNA, 143 bp, Homo sapiens
  misc_feature (40)..(40): n is a, c, g, or t
  misc_feature (45)..(45): n is a, c, g, or t
  misc_feature (112)..(112): n is a, c, g, or t
  misc_feature (116)..(116): n is a, c, g, or t
gtccggcgtgtcaaaactaacgtacctgtcaagctctttncccgntccacagatgtcaccaccagctcagccaagatcaagttaaagagcagtgagctgcaggccatcaagncggngctgacacagatcaagtccaatatcga

SEQ ID NO: 600331 - DNA, 157 bp, Homo sapiens
ccgaaatcctagttacgcactaaagaatatgcttgtaactttttcataaattttaaacagttaatttcatgctattgttgtttagtatccactatacttagaatttctctcgtccatccttgcatgttaactgtctcactattttctggcgcttcac

SEQ ID NO: 600332 - DNA, 130 bp, Homo sapiens
gcagcagcgcagtgcacagcggcttctgaaggcggcgtcgacggggagctgcgcgtggctcccggtttcctggttacgtgcgcgccggcagagccaaaacctgcagccgaaactcccgcttctccgtaag

SEQ ID NO: 600333 - DNA, 266 bp, Homo sapiens
  misc_feature (2)..(2): n is a, c, g, or t
cnctgctttagcttggaataaagactttaggagaaaatggtggcttcatcttaccccgcttccgggtgccagttcaaaatacatatattgtgcacttgtgggggccccagatttttttctttgaagcagtttgcccccattcccgactctctcagaaaatatcgaagaacaggtggctccccccctcttgtttcttctcctccccccccccccccaaattcttttttctatttataaagacaatataaaatagttatcttccccct

SEQ ID NO: 600334 - DNA, 129 bp, Homo sapiens
atcacagccgggcagacagtgagaccgcctttgtgttcaaaaaggtagtatcaaatattaactctggcttaatttcatttactcctaattgataaaatcattgttatagtgtggttgcttgttccgctg

SEQ ID NO: 600335 - DNA, 596 bp, Homo sapiens
  misc_feature (161)..(161): n is a, c, g, or t
  misc_feature (190)..(190): n is a, c, g, or t
  misc_feature (225)..(225): n is a, c, g, or t
tataaacatatccctctttttaatctccccccccccggggagttcagagggtgaaaggggggtttccctttttttgttttttgccagggggggatttttttttacccaagggccctgggggcccttgggcccctttgttagttcctttttggggcaggggnaccaatgggggggggaagggggttatttnttttctttttttcctgccccccggggtccaaaaangggaaatttcccaacccccccaaaaaccccttttgggggtttttttttttgggtttctccccccaacaccccccaaggggggggtttggggtgggttttccctttaaaaacaagtttttcccaggggcccttttttccctggggggtttccccccaatacccttttgggccaaggggaagcccccccgctcctttaagggtttttggggttaccccccccggggggggccctttttccccttttttttttgggggtttcccccctttgggggttcccccccccccccggggggttttttggggggaggggggggcccccctctttttctccccccccggaataaagccccgccctcccccctgttgggaga

SEQ ID NO: 600336 - DNA, 272 bp, Homo sapiens
ggagtgaaaccctatctcaaaaaaaaaaaaggcaaaaaaagggattgatgggtttttagagagggagtttgtctgataaactgaggatgctgcttgggaattaacatgacttaatttttaccaggggcattggttatcaggaagttatggcccgttttatatcagccccaaaacataaaaatttattgtttcacccattttttggggctgagggctggccaccatgaccagggagcccatgaaaagatagtgacaccaggggccctagtttc

SEQ ID NO: 600337 - DNA, 321 bp, Homo sapiens
  misc_feature (21)..(21): n is a, c, g, or t
  misc_feature (26)..(26): n is a, c, g, or t
  misc_feature (46)..(46): n is a, c, g, or t
  misc_feature (137)..(137): n is a, c, g, or t
  misc_feature (320)..(320): n is a, c, g, or t
cggggctatcttccactcagnggctngccattcattttaatgatgncctttgatgaacagaagttcttagttttaggccaagtatggtggctcatgcctgtaatcccagcgctttggaaggccaaggcaggaggatngcttgagtccaggagtttgagaccagcctgggcaacagagtgagaccctgtttctgcaaaaataaaatatttagctaggtatggaggcatgcacctgtgtggtcccagctactcaggaggctaaggcaggggcattacttgagcctcggaggtcgaagctgcagtgaaccatgattgcccggnc

SEQ ID NO: 600338 - DNA, 478 bp, Homo sapiens
  misc_feature (94)..(94): n is a, c, g, or t
  misc_feature (170)..(170): n is a, c, g, or t
gacacactcaatactgtgcttctgatcactgaaactagatcaagtcatagctcacagctgatacacaatccttatatacaggtagttaatgtgnaataggcaagctactgtagtcctattatttcgatataatgagatacctgctatacataataggtaccgtatgttancatgctactatggtgtggagtaattccattaccatatttatatttattggtcacacagcatacatttatgctcccagatacctggatctgacaaatggttactttaatgtcttttaaagaagatgactaaatttagaagaatggtttatccctagtatctcatttcaattacgatacaatttgcagagaaacattactgttacctaacatcaataatctccagttctaagacgatgcttctgtcaattccaaagtaataaggttctaatgaaaattgctcctagtttaagtataaagaatacaaaatg

SEQ ID NO: 600339 - DNA, 301 bp, Homo sapiens
ttaaaatagcgaggggttaatagagctgtagccgcctgtttatgccagagcacagtaacaccagatccgagctgcgtctgtgacctacaccacagctcgtggcaagcgtgggatccttaacccactgagcaaggccagggatctaacctacaacctcacagttcctagtcagattcattaaccactgagccactacgggaactcccaatcatcatgttagatgtgagatgggagtgaaggtaactacaacagacatatgagactgtgctgaagagaatgtatttaattttccgggtaccga

SEQ ID NO: 600340 - DNA, 1024 bp, Homo sapiens
ggtaccggaagaggctggcaatcgccgatcgcctgtgatgcctacctgtgctgagtgtaagttctgcctgcgagagccaggcaccttccttaccaccatcctagtacgatcccatggtcgagcgcgaccgcgtctgatacatagtggcttcgcaaacagttcatttgacacgaaatggcgagtaagcgccgaaacgccgacgtccaagtatccctcactacatgttggcgtaggcggatgtctggtgaacagatctactggggacttgctattgaatgtcattctcgttgtgtgaccctgaggtgaatgctcgcgacttcacagaatgtgggcatctccctctgccacaggagaaggacgagtgacgaagcatcccttgtcgcattggctgtgcagtcttccctcaagtctgtttcaaagttagctggttgcacagtccctgggggactgtgaccatggctacacagtctgttggttccctgttgagctcttgctcacaggaacattgagcagtgacattgctagccctacttgcccacccctcacctgcatgcaggataccctgacactgcgatgttcgtgcaggacaattgcaccgctttagagcttccaggagggccaagcattatggcaggtacttgtgagcagccaggtcaggctggcatggtagcataggaattgggtggtcttgaggtcctaggctatctccaggttagacttggaggtgtagccctgaacctgttgtgacacaccggggtgggtcatacggaacggtacgtaactgggttgtccacagggaatgttttccaagtactttggacgtgccgtccacgttccagagatggagagggttgagagtcacaattttcacgcagcaatcccagggcttccgcagtttcccacgtatggtttgcactgacacacagatacttagcccgtgcccttaatcggtacacaggcgtcacacccaaatagggcgagaaccacaggagaccatccacgtaacatataaaaaagctctagg

SEQ ID NO: 600341 - DNA, 918 bp, Homo sapiens
ggtcacttcagacccccactagttgacagagcaggagaatttcagactccagtagacttgaaatgtgcctctgggtcaatagaagcagagctagcgaggtaaagggattgaaagagtttttgctgggggtgtgagtcaaacttttaattccctgtctgtgtgcagaggggattcagactatcagagtttgtctggcagtggctctgggtccagccccttacttgaagatctgggagagcatgaagactgggctttttttgcctatgtctcttgggaactgcagctgcagtcccgacgaagtgctagattattatcgtgatcattccaagagcagatgttgaaacggtagcacccgagtaacactgcaatgccccatgtgaaagggctgacgatgacgaaccctgtgacaataagattcagacctagccgattgtggggggtcgtgccttagaagattttggggccacgggatttgggagtggggtcatagaaggtagtcgagtgctcgtccagtacccaagggtcccggtggaatatctgctttggctttttcaccccaggaaaacacggggggggccaccggcgcgtgttcgacgaacacgatggggcactgaggctgaacggctctgtgccaggggaccaggggacgtagaataaataccggagccgcgcggggacgtgtccccacccggaaatttggggtctggtacagacacgggttacccgtgtgcccgggagtgttcgaacccggggcagatgccggcaaatgcactcaaaggggggataaggactgaccaagtcgggcacagtgaatttgaccaggtcgaaaggtgaaaccaagtgaaggtagttgtgcacacacgcgcgacagaggagctagacgagtaaggcaccatacaccaattaggagactacaaa

SEQ ID NO: 600342 - DNA, 457 bp, Homo sapiens
tagaaaaatctttcccccagtctatcgggtaatgcaagctaaattctgatagatctatcttagtatgtcattgtcttagcctatcagaagtcctcagaaagtggagggtacaacttcaacaaggacaggtcagttagcgttgtataagaaccagcatgttggtgccgggcatggtggatcacgcttctaatcctagcacttcggtgaggccgaagagggaggatcacgaggtcaggatttggagaccactctgagccaacatggtgagaccctgtctctactaaagaatacaaacattacctgggtgtggtggcgcagggctgtaaacctcagctggctgaggcaggagaattgctggaagctgggaggcggagggtcgcagtaagccacaggacatctcaaaaagaaaaaaatggacagcgaggcaattggtggacgacaaaggggagccccgggg

SEQ ID NO: 600343 - DNA, 1103 bp, Homo sapiens
aaggagcccacggatcgagccaaaggcccgcgcgccgttgcatcccgcgtccagcacctacgtcccgactgccgatcgccgccggcacccatgcccaagagaaaggctgaacggggatgctaaggcggagataaagcaaaggtgaagggacgaaccacagagaagatccagtgaggatgtctgcatagacctgctcctccaaagccagagcccaagccttaaaataggccccgtgcaaaagaagggcagagaaggtacccaaagggcaaatcgggaaaagcgtgatgctggcgaaggaggggaataacccgtgcagaagaatggagatgccatgaacagaccaggcacatgaaagctgaaggtcctggagatgccaagtgaaggtgtgtgcattgttgataactgtgtacttctggtgactgtacagtattgacaatacatattttggtatcgaagttttataaacaatgcagaatttgggtattactttagtaagatttgtgtgtatttaaaagctatgttggttcagcgacacagaaacacttcagtggagggtaatgggggcacaggggcaatagtgctcccatactagaagggtcctcccaaagcgggcatcgacggggacaaaacaccacattgcccttgcaacactgggcaaagtactccgctctggcgcatcaccaggagaggaaggggcactcccggaacatggcacaccacagtggaaccacctgggacacaagaagcactcgggcgacaagagacagaacacagagagacaagatgtccctctggaacaccgataccagggctttacaagggacaacacatacaacgcccatttaaggcgcaaaacatcggagagaaacctggggccgcaaagaccatgggtgtaacccgacgaggttacaggcagaacacgggaactttcgcccaggcaccgccacacgaaatcgtggcccggggccaacacacacgcggccgccacgagccagacaagcgagcgacggccgaaaacagtggcacagaacacacaccccgccgccgacacaggacacgcaggccaaaagagcgcaccacagcttcagtgacacacgcccaga

SEQ ID NO: 600344 - DNA, 906 bp, Homo sapiens
  misc_feature (81)..(81): n is a, c, g, or t
  misc_feature (155)..(155): n is a, c, g, or t
  misc_feature (186)..(186): n is a, c, g, or t
  misc_feature (199)..(199): n is a, c, g, or t
  misc_feature (214)..(214): n is a, c, g, or t
  misc_feature (217)..(217): n is a, c, g, or t
  misc_feature (253)..(253): n is a, c, g, or t
  misc_feature (256)..(256): n is a, c, g, or t
  misc_feature (258)..(258): n is a, c, g, or t
  misc_feature (271)..(271): n is a, c, g, or t
  misc_feature (279)..(279): n is a, c, g, or t
  misc_feature (301)..(301): n is a, c, g, or t
  misc_feature (305)..(305): n is a, c, g, or t
  misc_feature (315)..(315): n is a, c, g, or t
  misc_feature (320)..(320): n is a, c, g, or t
  misc_feature (327)..(327): n is a, c, g, or t
  misc_feature (336)..(337): n is a, c, g, or t
  misc_feature (349)..(349): n is a, c, g, or t
  misc_feature (357)..(357): n is a, c, g, or t
  misc_feature (364)..(364): n is a, c, g, or t
  misc_feature (377)..(377): n is a, c, g, or t
  misc_feature (379)..(379): n is a, c, g, or t
  misc_feature (381)..(381): n is a, c, g, or t
  misc_feature (383)..(383): n is a, c, g, or t
  misc_feature (409)..(409): n is a, c, g, or t
  misc_feature (512)..(512): n is a, c, g, or t
  misc_feature (521)..(521): n is a, c, g, or t
  misc_feature (571)..(571): n is a, c, g, or t
  misc_feature (655)..(655): n is a, c, g, or t
  misc_feature (740)..(740): n is a, c, g, or t
  misc_feature (760)..(760): n is a, c, g, or t
  misc_feature (811)..(811): n is a, c, g, or t
  misc_feature (820)..(820): n is a, c, g, or t
  misc_feature (829)..(829): n is a, c, g, or t
  misc_feature (833)..(833): n is a, c, g, or t
  misc_feature (835)..(835): n is a, c, g, or t
  misc_feature (846)..(846): n is a, c, g, or t
  misc_feature (879)..(879): n is a, c, g, or t
ccatatctggacccaaaagggacttccctgctcggctggctctcggtttctctgctttcctccggagaaataacagcgtcntccgcgccgcgcatggagcctcccggccgccgcgagtgtccctttccttcctggcgctttcctgggttgcttcnggcggccatggtgttgctgctgtactccttntccgatgcctgtnaggagccaccaacanttnaagctatggagctcattggtaaaccaaaaccctaanatnanattggtgaacgantagattanaagtgtaaaaaaggatacttcnatanacctcctctngccanccatacnatttgtgannggaatcaaacanggctaccngtctcanatgacgcctaatnanananaaacaagtccataaatacgggatccnttaaatggccaaacaatccctgcaaatgggacttacgagtttggttatcaaatgcactttatttgtaatgagggttattacttaattggtgaagaaattctanattgtgaanttaaaggatcagtagcaatttggagcggtaagcccccaatatgtgaaaangttttgtgtacaccacctccaaaaataaaaaatggaaaacacacctttagtgaagtagaagtatttgagtatcttgatgcagtnacttatagttgtgatcctgcacctggaccagatccattttcacttattggagagagcacgatttattgtggtgacaattcagtgnggagtcgtgctgctccagantgtaaagtggtcaaatgtcgatttccagtagtcgaaaatggaaacagatantaggaattngaaaaaaantttncnacaaagcacanttatgtttgaatgcgataagggttttactcganggagcgacacaattgtctgtgacagta

SEQ ID NO: 600345 - DNA, 329 bp, Homo sapiens
tatgtatgtgcgcatgtgtagagtgagtaagtcatgcctatgtctactctgctagggcttctcgtttccacagtgtgtgtttgaaccatgatggctgtaataggtgtgcaatggtatgctgttaacatggctgttaaggatcattttggatgctcaaatgcaagttttaaggcaactttgtgtgaagtaaaagtttttacttcagttaagtaaagacaggaaaaggctgaacctttagaaagccagaagaaaggataacagcattaaaatgccagaagatggaaaagaagtggggccgagtatggtggttcatgcttgtaatcccagca

SEQ ID NO: 600346 - DNA, 958 bp, Homo sapiens
ggtttcggagttgtttttctttgatacgggagttcctccttgctctcgcccctactctttctggtgttagatcgagctaccctctaaaagcagtttagagtggtaaaaaaaaaaaaaaaaacacaccaaaggctcggagccacaaaggggatgaaatttcttcgggaaattcctccgggttctcccgttaactggatcgtctggctccctaagaagtccttcgtgaaagctttttaatccctcaagaaggagaaatatcagtcaccggcggaaaatctggctgattcacaggacgctggggcatgggaatggggagactggactggcctaatgaaatctgcgctaaaccttaaagagcaagctgggtcactcggggatcaatacattaagcatgggacctgggagcgaaaccagttgccaaatggcaaggggacctgggggtgccaagggtctcataccttcgggggtacactgcagcacccgagaaagatttttacagctctgccaaggaaagggtgaaggcagaaaaatgggagatgtgagtatgtaaggtaaataaggcggggatgtagtcctactacactcagaatgtggatggctacacaaagaaccttcagattgaaacagcacctttggaacgttacgggtaccttgcacacattatctgggacttcaccagggacatttcttcccgtgcaatgccgaagaaaataacctagtggaccataatgcgaccccttgctggctttctggccagctggacacaatgttctccgggtccccatttcttaacggggcgctaaacggtgttcaagtgaacagtttggctgagtagttgggatcttccatgcaaactttttgtacatggagtgaaacctgggcgtgccttatcaaaatcactggggtacaaacaaaagtgtggggtccccaatccgggaaacaagggattacttaacaa

SEQ ID NO: 600347 - DNA, 494 bp, Homo sapiens
  misc_feature (358)..(359): n is a, c, g, or t
gcctggttgctcccatgactccatgcttggttggcccttattttatttgtgcccaaaagattgaggattagactgggcgagttcttacctgtcctaggggagccgccaagcacttccactagggagggggtgggggaaaggaatgacacatgacatacatggcatacacattaagcagttgatcatatgtctgactgggttccagtttcttgggaatgttggtccccttgttcaggcttgcatattttaaactaaaaatttcagtctattgtttttagtaacttcatttatagtcctccataacaagttagaaggatgtatctgctaccatttattcctataattttagaaagttggnncttgacattatactcatttagtgagagtagatgcaaaaaagtggaggggcaggagaacttctccagacacctcagataaagtccggagcccaaggctttatcttaaccatgtatggtaccccattcattcatcaa

SEQ ID NO: 600348 - DNA, 90 bp, Homo sapiens
gagggtctggggagtcgatggagggagccaggcagggagggcgaggtggtaccggattgccagcccggtgcgccaaaaaaaaggcggggg

SEQ ID NO: 600349 - DNA, 458 bp, Homo sapiens
ttccccaccctatcctggagcttgtcaaggccaccagagacctgctccctgtgccgtctcagactggactctggggtctccggtgcctcctctgattctgcacctcggtgcagcctctggcctggctgcgctctgaggagctccctgtggccaccgagcccttggaacgtggccagttccattctcaaactgctgtgagtgcaaagctcatgctggattttgaagatttgattgctggccaggcatggtggctcactcctgtgatcccagcactgggaggccaaggcaagaggatcgcttgaggccgggtggttgaggctgccgtgagctgtaatggtgccactgccctccagcatggatgacagagaccccacctctaaaaacaattaattaattaaaattaaatcagtaaaaaatttttttaattaaaattttaaaaaatagattattaaaacaaa

SEQ ID NO: 600350 - DNA, 316 bp, Homo sapiens
atgatagcacaactagggtcagttttgcaggtggtaagccatttaccaagatagttgtaggtaaagaagggcagatttattagagaaatgtgaaaatatgttgcagtgggcagctcagcagagaaggggctacctgcaaagaggcaagggctggaggaaagttttatagggtcctgctgaagggtgctacgtgtggaatgaggtcattgtgcccgcaggttgtttgtgattagctgtctctaacaattgttcctacaataattgttcattattgttctcaacttggggctctccccaacctggggacccttcctta

SEQ ID NO: 600351 - DNA, 641 bp, Homo sapiens
gccaagggtccaacgaggaggcatgcgaggggtctgagggagcaaggtaccaggtgagggccggagctcaagaggaagcctcagagaggaccacggaaccgggacacaccatcaagccactccgtgtgaggggcacgcccagtggagcataccagcccgccgggaggtccttggcacccaaaaaaatcaaaccctacccccagggaagaaaagcagcaaagcgagaatccgccaaggtctcaacaagcgtagtggaaccacccaatacatgccacggtgtggcagcgcaaccgtgcaaggggtccataagacaggacagcgaggagaacccgcttggcaaacactggcagcaagcccagacagctcaaggtgcacaggagagtgaggggacaagggactgaagtatctgtcccggcgacactgagaaggggcacaccaggcacaagaaggccgcagcgatactcaaggcgcgccaggggggggcaagggccacaggccagaagggggcagcacacacggggaaagagcccagacagccgtcacgacaaacacaggccggccagcaagcaggacaaggcgcagcagggcacacacggaagcggaagacgaacaacaaactggaggccgacgagacagccgaa

SEQ ID NO: 600352 - DNA, 98 bp, Homo sapiens
gccaggtgattggtgaaaacactaaacaaccctgagcccagggccaacccctacggaacaccactactttacccagacgccacaggtcatcatctgga

SEQ ID NO: 600353 - DNA, 706 bp, Homo sapiens
catggaatgaatgtgtgaccagaaagtggcttgacaccaaggtgctactgtccccttgtaattggcttctaacaggattcaaccagaaataattgataatgtgaattttgttaatgttcacttgtaggaaaatagaacatgtatcacccttgttaggtagacatgaacttttcctgcacaaagccttgcttttagagaatgcccaataaggcaagaaaaagcatagtaacttgtgctttgagagctcaatattgtatcttatcagtacagaagaaatatttctggtgtaacttgatcttctgtctagtacttgtcttataggtaaccaacactgaaaacttggtagtgatgactaccaaagaaatacatagtaaaacaaccttttatttccaaatggttaaagagccagccattgatgctgctacatgagttccatgctcaagagccatcgtaagagatctaaggggtctctctagcgttcccgctgatccccgtccgtctcaccctcgtctgctcacatcagggttcccttcttccttcttcaatttctttgattaaaacatacacacagctgttagcataaagtcgtggggggcattcttctgggaatgctcagcagttctgattaactggcaagcccaggttgctctcatgaggcactgaaaaaatcctgtgtcttgatagcatgggtgctgtgtgtgtgctg

SEQ ID NO: 600354 - DNA, 1726 bp, Homo sapiens
tcggcgctgcgcgacatcatgagggaaatcgtgcacttgcagtgcctgggcagtgcggcaagcaaatcggcgccaagttttgggaggtgatcagctgatgatgcactggcatctgaccccactgtggcacctaccactgtgggacagctgaccgtgcagcatggaactgcatcaactgtgtactactaatgatggccacctgtactggcgaagtactgtgcccctgcgccgttgctctgttggatcttggagtccctggaacccactgtgacctcctgtgctgcatctgtgggccctttcgtggcatgactcttcacgtgcctggagaactatctgttatacgtgtcagacgttggttgcttgggaaacaacttggtgccatagtggtgcatctaccaccacgacagtgctgcgtgcagcataggtagggacctctgtgatgcattggcactgctcggctgactgaacatgtgcaggcatgaagaaggcttgttgtacattggcccttgccgaggcatttcgcatgcgtgacaccccacaaacataccccaacatggagaggctatgggacagcagcgcgaccacattgtgggctaccctaggcgaggaacataggggcgatcaacccaccatcccccatcccaaatccaacagtcaaaaagaacaatcacagagcgaacatggacagataacacccacacgcaccaacggggacatacacattgacacacacccgccgtccaacggctgcacgagcgtgcgcaccaatactctaggcacccaccaccacaaggactggcttcacgtacgcaccaaagggatggagatggaggaacggcacccaattaaccacaaaaggggcacccaccacgccacgtacacgtacaacgagagtacacaatacacgcaaggacctatccaggcatcacggcacaaaccaacaacacaccagacaccacgcaagcaaccacccgtaaccacaagggcgcaagaaagtgaaagaaacagcacgagcaagagagaccgcccagtccaattaacaggcaacaaacagtactacgaggcatgagccacgagacaaacacaccccctaaacaacaaggccgtcgaacgccacacaacgcccaacacccaagacatgggacttgcaccccattaggaagccccacacagataggaatggacaccacgggataccacgcccagagaacgagctagggagcgtcaccaaccacacaacccatgggcacataagcgcaagccagaccaccacaaagcgccccagagagatcgcaacgagacctcggccacctacgcacacacaaacagccatggagcacgtgcgcaacacaacatgtacgacaccaggcacatcaacccagggagtcgtgcagacacaacaatcaaacgaacaccggaaccaggggcacgccaacgatgcaaccatccagggcgaaacaaccacgcaaccacacgggtaggtgcatgaaccagaggaccagaaacagacacacccccagagaagactgatatagatagcgaacaacatacaaccgaacatagagaaaccaactcgagagaacccaccagcacaaacgccagatacagataaggagtacaccaagcaatacataagagccacagcctaccacaagcaacgagcaaatagatcaatcacgacgacacgacgacgcaaaacaacacacacacgagcaaagaaactgac

SEQ ID NO: 600355 - DNA, 694 bp, Homo sapiens
  misc_feature (3)..(3): n is a, c, g, or t
  misc_feature (5)..(5): n is a, c, g, or t
  misc_feature (118)..(119): n is a, c, g, or t
  misc_feature (156)..(156): n is a, c, g, or t
  misc_feature (272)..(272): n is a, c, g, or t
tcncncggcggggcaggcggttttattacctttgggcggccccctttttaaaaaaaaaaaaaaaaccccctttttcaaaaaaaaaaaaaaaaaaagggggggcgccaacaaaaaaaannttttttctttaaaaaaaaaaaagagacggggaggggncccccccctctttttttttttttttttttaaaaggaggggggggggggggggttttttttttttttttttttagaaaaaaaaacacacctccccctcccccccgtggtttttttgnccccccccccaccccacttctctcttctcttttttttttttttttttataaaaagaaagggggcggcggggtttttttttttttttttaccacaaaaaagaaaaaggaaaaaaaaatttttttttcccacaaaaattgggggcgccaccccccccaacaaagtgttttttttaaaaaaaaaggcccctccccccccttttttttcactctttttccaaaaagagggccccccttaaaaaaaatttttgtgaaagaggagcttcccccccccggggggtttaattttttttttccccccttttttttaccggggggcccccccctcttttttgggggttttttgggaaaacccccccccgggaaaagccgggtaaaaagaaaaaaaagggaattaagggttcccccttccttgggccaaaggc

SEQ ID NO: 600356 - DNA, 701 bp, Homo sapiens
  misc_feature (12)..(12): n is a, c, g, or t
  misc_feature (14)..(14): n is a, c, g, or t
  misc_feature (16)..(16): n is a, c, g, or t
  misc_feature (18)..(19): n is a, c, g, or t
  misc_feature (22)..(23): n is a, c, g, or t
  misc_feature (32)..(32): n is a, c, g, or t
  misc_feature (53)..(53): n is a, c, g, or t
  misc_feature (55)..(55): n is a, c, g, or t
  misc_feature (64)..(64): n is a, c, g, or t
  misc_feature (66)..(66): n is a, c, g, or t
  misc_feature (72)..(72): n is a, c, g, or t
  misc_feature (74)..(75): n is a, c, g, or t
  misc_feature (93)..(93): n is a, c, g, or t
  misc_feature (99)..(99): n is a, c, g, or t
  misc_feature (101)..(101): n is a, c, g, or t
  misc_feature (113)..(113): n is a, c, g, or t
  misc_feature (129)..(129): n is a, c, g, or t
  misc_feature (133)..(133): n is a, c, g, or t
  misc_feature (139)..(139): n is a, c, g, or t
  misc_feature (143)..(144): n is a, c, g, or t
  misc_feature (152)..(152): n is a, c, g, or t
  misc_feature (155)..(156): n is a, c, g, or t
  misc_feature (159)..(159): n is a, c, g, or t
  misc_feature (162)..(162): n is a, c, g, or t
  misc_feature (172)..(172): n is a, c, g, or t
  misc_feature (179)..(179): n is a, c, g, or t
  misc_feature (181)..(181): n is a, c, g, or t
  misc_feature (183)..(183): n is a, c, g, or t
  misc_feature (187)..(187): n is a, c, g, or t
  misc_feature (190)..(190): n is a, c, g, or t
  misc_feature (193)..(193): n is a, c, g, or t
  misc_feature (198)..(198): n is a, c, g, or t
  misc_feature (201)..(202): n is a, c, g, or t
  misc_feature (204)..(204): n is a, c, g, or t
  misc_feature (207)..(207): n is a, c, g, or t
  misc_feature (210)..(210): n is a, c, g, or t
  misc_feature (213)..(214): n is a, c, g, or t
  misc_feature (218)..(218): n is a, c, g, or t
  misc_feature (220)..(220): n is a, c, g, or t
  misc_feature (225)..(225): n is a, c, g, or t
  misc_feature (228)..(228): n is a, c, g, or t
  misc_feature (231)..(231): n is a, c, g, or t
  misc_feature (236)..(237): n is a, c, g, or t
  misc_feature (244)..(245): n is a, c, g, or t
  misc_feature (257)..(257): n is a, c, g, or t
  misc_feature (259)..(259): n is a, c, g, or t
  misc_feature (261)..(261): n is a, c, g, or t
  misc_feature (264)..(265): n is a, c, g, or t
  misc_feature (276)..(276): n is a, c, g, or t
  misc_feature (280)..(280): n is a, c, g, or t
  misc_feature (282)..(282): n is a, c, g, or t
  misc_feature (285)..(285): n is a, c, g, or t
  misc_feature (294)..(294): n is a, c, g, or t
  misc_feature (299)..(300): n is a, c, g, or t
  misc_feature (304)..(304): n is a, c, g, or t
  misc_feature (310)..(310): n is a, c, g, or t
  misc_feature (324)..(324): n is a, c, g, or t
  misc_feature (327)..(327): n is a, c, g, or t
  misc_feature (333)..(333): n is a, c, g, or t
  misc_feature (335)..(335): n is a, c, g, or t
  misc_feature (340)..(340): n is a, c, g, or t
  misc_feature (345)..(345): n is a, c, g, or t
  misc_feature (351)..(351): n is a, c, g, or t
  misc_feature (363)..(363): n is a, c, g, or t
  misc_feature (368)..(368): n is a, c, g, or t
  misc_feature (381)..(381): n is a, c, g, or t
  misc_feature (418)..(418): n is a, c, g, or t
  misc_feature (431)..(431): n is a, c, g, or t
  misc_feature (458)..(458): n is a, c, g, or t
  misc_feature (622)..(622): n is a, c, g, or t
  misc_feature (678)..(678): n is a, c, g, or t
tataggttggantntnannttnngattatttnttttgttttagcaatttagananatttatttncntttttnanngattttttatttataaantttcgntnttaaattttttntgctcgtttttaaccngttnctgttnagcnntaagaganttnnatntgntttttttttntttttananantttnttnttnttttntannanttntantannaaananttttngtnttnttatnntttattnnagaagagaaaantntngtnnatcattttttntttnanatnttagttttntttanntttngatttngaaaggtatttttntcngagaananctttnttttngagatntttaggaagatnttttnttaacccttgatntttagagattgggggctggtgatgggggtttggcttnattgactggatantgttatctttcatgagatatattatangaagaagggcagatatatatatgaattaagttcagccaaaaggatcaaatgagaataaaacgatttaaatatatgtacacacgcatgcacacacacacttagtcttgtaatttcaggccagaaattctcaacactattttgcatctgttttctttttctaagtnatgataatatagatgttctggtctatcataaaagaatgtttatgtacatttcagtnattcggtatgtggctttgtaaat

SEQ ID NO: 600357 - DNA, 365 bp, Homo sapiens
cctggtttttggtttggtttggtttgttttgccaaccacaagccggtttttaacccaagtttggttgggtaaaggaaataaaggtgtttatttaaaagggggcccttcccccaaggccaagggtttttaaaatttattgggggaaagggccggggatttttttttttcccaaatggttaaaaaaaaaaccggtttatatgtttttctggggttaaaaccaaaggtttttttttttatggccttcccccggaaattttgggggtttccagggcagccggccaaattttggtccggtagtgggccggattcaaccacccccgaaaggttttttggccctttgtttaaaaaaaaaacccgtttgggga

SEQ ID NO: 600358 - DNA, 237 bp, Homo sapiens
aatccttgataaatcagactaggtcttgtggcaaaggcacccaaagctaatgaagaagagtaaatgatatttgactgtcacatatgaatataaggacgaaaaagaaaatacaccaatacacatatctacaaggaaaaaatcaaatgcatgggtatgtaagtaagatattttaagtatgctagtatccacaccaagaggctaggcattcacctgtatatctctaattgaaaaatacgc

SEQ ID NO: 600359 - DNA, 479 bp, Homo sapiens
atcttccttcagcgagatgcacatgagccagtggtttaatagaacatttagcaggtgaacacgcaccctaagcccagggttttatacccgcttcttaagatggccaattcttcttctcccccccacccaaagacatgtgagcaactgctaatgaaaagcagtaaacagccgcttaggctatagcagtatcaactccactctgaggtgacgattccaattacatacgagacttaagttctttcaattttttcctaacaaaagttcctgagtccagtatttacaatattacagcactagcagctcagtgtctacaactcatattaaactgcagtatcctcttcaccagtagggggagggactgcacttccatagagtaagcagataattggtagaacaatttcttccagttccttcttcttagctctgaagtcttacaatgtcagcatctaggtggcttaccggccatacaatctttacta

SEQ ID NO: 600360 - DNA, 524 bp, Homo sapiens
  misc_feature (135)..(135): n is a, c, g, or t
  misc_feature (377)..(377): n is a, c, g, or t
  misc_feature (474)..(474): n is a, c, g, or t
  misc_feature (483)..(483): n is a, c, g, or t
tgacaaggccttgctcagttgcccaggctggagtgcagtgctgcaatcatagctcactgcaacctcaaactcctgcgttcaatcaatcctcccacctcagcctcccgagtagctgggactacaggtgtgcactgnaatatctagttaatatttttacttttaatagagatggagtcttgctatgttgtccaggctggccttgaacttctggatccaagtaatcctctcacctcggcctctcaaagtgctgggattacaggcataagccaccacgcccagacttgatcatttctttaaaagttaaatatacatacctccatgacccagacatttccactcatgggctatttatctaacaagaaatggaaagcattatngttccacacaacttgtaacatggaatgtttcattagggagctttatttgttaatagcccaaatctggaaacaacccaaatgtctattcaacaggtgnaaggggttnaacaaatttatgggtctaggccataccctgggcatattctt

SEQ ID NO: 600361 - DNA, 145 bp, Homo sapiens
atcaatatgtctcatattcatgtaaatggaagggagggtaacatgtactgaaataatctgcatgctaggcattggcttagaatatccgtacctttcgtcacttagcatttgtggactaggaatatccagattcagagcatcatgt

SEQ ID NO: 600362 - DNA, 112 bp, Homo sapiens
agtttggagggaggggaatggaagggcatggaagttttttttaataatttaaaaaatatatatataattttgagaattgagcctttaataaactgacttttgtttttatgga

SEQ ID NO: 600363 - DNA, 595 bp, Homo sapiens
tcctttcctcctctctgcacaccagcactttgtacccgaaaaaaactcacgggggtgcactgcaaacaccgcccagctccagggcccgaaaaccctcgcaaccaggccccgggatgcctgaggtctcccaggtcatttacggtggaggaactcaggccgtgcctccctgtgcgcaggaggaggaggcgtcgcgggagctgcagttccccgatcctttcccaggaagccggccgggttggaaggggagagggccgtatatcggtggtgcgaattccaactcgacagcctcgtgggagcacgttgcttaattaagggtcaatttaaaacaactaagtggtgccggcagggacgccgccgcatgggtcaggaagaagcccgcgctattattcatccataagggagcatggcttatcctggggtgtcgggaaaatgtgggcgctgtgccagacaggcccccgcggaggttgccgctctgctctgaacctataagcttcccccagagcaagtggatttgccgcagcctattaaccgccaccttccccagggcccccctctgggggcggaaccacccttagatggcaggaattcggagaca

SEQ ID NO: 600364 - DNA, 165 bp, Homo sapiens
ccttcaagccaagggtagaagagaagctattgtgtctcttttagccttcccagaagaaatgagtcagactagttacttcatggccagccccaccaagaaactctcagaaacatttagcataaactagctactatctttttccgttctcacatttccattacttcc

SEQ ID NO: 600365 - DNA, 163 bp, Homo sapiens
tatcctttgaaccccttagtgggaagagctttacactttccacagaacagaaactacaataacctgtttatacaatatagtcacaaattacagtcctcgatttttatgcccatacacttaattttttgtctaaaacattttttctttgtagcagctaaggccc

SEQ ID NO: 600366 - DNA, 101 bp, Homo sapiens
accccgtattggagagaagtttgggatggagtgggcgagagattgagagagcgagcaggctccccaacccttgtgaagctcatttcatcatcggtgccatg

SEQ ID NO: 600367 - DNA, 1390 bp, Homo sapiens
  misc_feature (203)..(203): n is a, c, g, or t
  misc_feature (1390)..(1390): n is a, c, g, or t
gatcagtctggctcagcaagcaggaatatcgtgatacacatggtagcgagcggccctgcgagtgttataactgagtgccactctaccacgttgtggatacacacgcgaagatccattaggttgagcgcagagtgcgtggtgtatcaagccctcagagcgaagctcaatgaatcgcttgctggactctagtgctgttcctatcncatccatagtcctcgaatgtaccgggacttgcgcattggtggagacgtatgctcgccataggcgcgttgtcaacccgataacctaagttttaagtaggactttcgagcacaatctgactagagtccacaatcaagtgcagctcacatgatcgacatgatagcaagtccgtaggtagaaagggcgtgatcagtgttacgcctcgatggatgcgcctccgcggagcaacgagagataactctagcgatgggtgagctcgtcgtcagtggcacagaagatgcgatgtcgaacgagaaccccctgggaatctacctctgggctgcaagggaactaacaagggttgggcagcgtgcggagggaaagcgataaggcacgaatacaggccaagcggaacgcatcctccggcgagtaggcctcacaatgcataacgacgcaagcagaaaaacaacaggtgctcgcacgttgcgcttcgatgcaaagcgacataggcataaccgggcccacattcctgccacatgaataggacggacacaacgcttaactgccatggaaaaagccctgggacgcatgagataggaacaagcctccgctggcgcagccaatggtgcgacggtttgtacacgaatcacagagtgcccaaatgtggctgtgaccgccaatgtcccgattgacccacctaaagtgcagtggatgccgcgacctattcgattgtgcgattcacaccgtgctgtatccattgtggccgttacgacttcaactcgtcgcgcgcacgcacagtgttgacaaccaccgtttgtgcaccctatggggatgttacgcccttgttgcaggcgttattgagcacatactcgtgagaaacacatggtattacacacatgtgctctgcggaggatgcgctcctggatatgttgatgcgaatccgcctttctgtttgaattctgagccaccactgcccatatcattcggatgccagcgctatcgaccatgcggagcacactctgtcgaacagacgccggttcagcgtcaatgccgctttaagacagttctggtaaccaaagtttttcgtatcgccccatagtggggggtacgccaattcggtgactagatcttcctgagcaaccacataatgtctgtttccaacacgcgaaacaagagttatgacggtaatgtttcgtgaatcccaccccgn

SEQ ID NO: 600368 - DNA, 483 bp, Homo sapiens
  misc_feature (48)..(48): n is a, c, g, or t
  misc_feature (76)..(76): n is a, c, g, or t
  misc_feature (185)..(185): n is a, c, g, or t
  misc_feature (198)..(198): n is a, c, g, or t
  misc_feature (297)..(297): n is a, c, g, or t
tcttcaagcccgggggtgcccttatgagggtctcccccatcttccgcnttcttccccaacgccaggaagtcatccngatgcacttcacggcggttccaagtaagttcactgggatagatgacggagggagggaaatgagagcccaggcaggctgagaccccccaagccacaggcaaacgttcaantcccgcgtggaanccatcaaccccaggggcccttcaacggtgcgtcccgtctgccccatccccctgctccccactgaaggggctctctcggttcaccagccctcacactagncagggcccatctgagatagttttgactccgggggacagcagaaggtgagtgggtcacatagtgtcccgccaaattcacgtccatccggaaccttagaatatgacctggtttggaaatagggttggctgggtgtggtggctcacacttgtaaccccagcactttgggaggccagggtgggcagattg

SEQ ID NO: 600369 - DNA, 139 bp, Homo sapiens
cggctggctgtatacactcgccatacttcagagaagtcagtggagaaatgaagaaaaaggtggtgaaatcactataccatcggttactgtttcgttgacaaaatatataatggtttactgtgtcattgtccatgcctac

SEQ ID NO: 600370 - DNA, 307 bp, Homo sapiens
tgccagataaactggctgttgtggaccaattactagccctctttctctgtataaatcgtccacaacatccagtgtactgagcgattacaaagtcaggataatcttgtaacacatggtgcgttagcattaacataactacagaaggagaattggcttataaacctgaagacaggctcagcacggtggctcacacctgtaatcccagcactttgggagtgcaaggcaaacctgaactatagaagcatccttgagttgccaacgttcacagtgatgaactttcaaaaatagcgaaactggctgcagagca

SEQ ID NO: 600371 - DNA, 932 bp, Homo sapiens
ctggggctgtggcgttccgagcgccggttgtccctcgtattctctgacaggtttccttcatctggttttcctcttccgcgtgttcttcgggctcctagcgcttcctggttcccctgactcctctctggccacaccctgggctcctaccctggtggggctgtccgcaccctcttgggtcccggggcgaaatacctctgcccggtcgtgtatcatgcctcccaggggtcaactcctggccctttggccacgggcgtgtatttcgtcgtgttgccaacccccggcccgtgttaaggaccacaccgtttcctcttcgcccaagaggcgaacttaacattacctggtgcaagattttgtgcggcgcatcacacgcggcggccttgtgccatgattggcccgcctcggaccaagtctttggcctcccccgagggcctcagcgtccgtctctcccgggcgtcaccacccaccgtactctcccggtcgtgcccgctggggcacctcacccctatcgcgcgggctgtttttgttcgctcggctctcaaatccatgacgccggtccagcgggccccccactccccgctcctcccgcgcgccccttcgccgtctcgccccctggagtgcagctagccccctccgcgcccccctcacagggcggcagtgtctctccccgcagcggcaccgagcccgggcggttggccaccccccagcagttccaagcccggcgggtgccggcggttggcgctccccccacaggggggggagaacagaaggccttctccctttcctggggaggtgtggctccgcggtggcccccacccccgtggagtgacgcaattttttggtctgttctatagcgattttctggggcgcaccacccccctcgcgggcggcttcatacagcgggcaccaaacgcccccggcccaacaatgacaaa

SEQ ID NO: 600372 - DNA, 112 bp, Homo sapiens
cggagtttgagagctcacaaaggaagggctatatgtaaattaaccgagaggtgcccaatgtttgaccaagggcaacttaacatggcctcttgcttggagggcccttacatat

SEQ ID NO: 600373 - DNA, 878 bp, Homo sapiens
cctaaacttgggaaaggccccatgggggaagagcccccagggcttttaagccactgatttttgcgttctcccagaaggagcgtgtggggtcaccagtttttcccctgtggggccccccccatccccacccagaacccactttgtggagaccttctcgccccccccccagaccccgctgtggaaaggggttgggggtggcccccctgcgttgcgcccggtggtcaccacgatgcgtgcgattttctggggagtgctaccctcccctgccagagagagttggcctcgtggaagactgtgcccgcgttataggcctttttttcacagagggatatctcctcaaaggttttaagagcgtttataccacttccgcgcgcttctactttgccagagctctggccccatacccgctgggttgggatgggaagagagatttgaggatattcttcttctatatcacagggcttgaccatatagactggggggtgtgtgtggataccctctccacgcatacccccactaatctctgaattgtgagaagaaagggagccacgccccggaaaactgtcttatgagggaatgctttaaaccccacccctccttcctcccccgctcacttgttatctgtataactgggaccacacagagaaatatatggggaataatgttgggaattttttaccaaccacggttataattgggaaagcactagaccacttatgctgtagaccactgaatataaaggaaccattgggaagtttttagactcgaagatttgattaaagtaccctttcaagtggggaccattgtgtgttgattgggctagggttttccccggtgttttaaaccaaaatgggattgataaaccccttttttaccca

SEQ ID NO: 600374 - DNA, 173 bp, Homo sapiens
gactcttctggggagctaggagtaatgggagacaaaggtgaaagaggtgaaaactcagtgtccgtcaggagtgtcggcagtactaaacgaggccgggctgaagtttactacatgtggtaccgtgggggacaagtttgcgatgacgacgtggcacaaattcttgatgccacttg

SEQ ID NO: 600375 - DNA, 1061 bp, Homo sapiens
ccgtgttgttgttgtgttttgttttctttgatatcacctagtgctcgacgtgacagacagaagatagaactgaatacgtaactgtcgtcatatgtagcgcgtgtttttgcatcccttttcgtcgcttctcgggcctgccccttgtcctggtggggcccggtgtccgggttccccagtcgtatggccggggttcacacttgagggccggcagtaagccccgggactttcggggactatccctggattacgaggtgaagccctgcaccaaggcgccccgttgtccagggacatgaaggttcagtccctggggattcttatgtgcgttgtccgcccccatttaagggatcagaggtctcttgagttctgtcctggggccttttttcaaaggatgagggttttgaagagttatccccggccagaagcacgaccccgttgccggcctagcagcacccaggttcaaggcatttgttgctatccggggacatacctatggccaccatccggtctgggtgttaaatgctcccaaagaggtggcccccccccatcccgtgggggcccatcaatcactggcgccagcatttcgcatctgtccccctgccccaggaggctatcttgggggaccacagatcggccagccccacacctgtgccctctggcaaaggtggaacaaggccccttgcggcttctgtgctgggtgacgcctcatccctgcaacccacggggcaactggcacttgttctgccgcaccccgtggcctaagaaagctgcttcactgatggctggtatcgatgactgctacacctcagcccggggctgcacctgccacacctgggcaaatttcgcccaggccaccctttgatgccacttttctaagacctacagctacctgagcccccgaaaccttctggaaaggagactgtattcacccagttctccctatcaggagttcactgaccccctcgtccagacccccccccgagtctccctgcaacggactccggctcccactgtggctaccaacatagggtttttataccagaaaaataaagtgaattaagccg

SEQ ID NO: 600376 - DNA, 87 bp, Homo sapiens
cccgaggacacggctgtgtattactgtgcaaggggtcgtaccataccgggcggtacaaacaactggttcgacccctggggccaggga

SEQ ID NO: 600377 - DNA, 449 bp, Homo sapiens
cttaaatatgtaacactggtttgaccaaactctcagattcatggcacactatcatcattggtaggtgatggtttgctacggtttttaatagctggtaaagtgaacacccagttcattctcctcattatctcctggattcccgcctaccgccatcagtcagtatgccctacatttttcttgacgtgaagcacagcctggagaatattccctgaaacagctctttaaacgcaatccaaaaaaggcatcatgctgacttaaccatgttatgaggaaattctctgagagctggggctgggcaagagccaagagagctgctgacagcaaagtgagagaaggcaggcctcagaaaggagaagagaaagatgcctggcaagcgagaagcaactggaatgctctgtaactccacattctcctataatttctccaaatttctctcactaaaaaaaaaa

SEQ ID NO: 600378 - DNA, 284 bp, Homo sapiens
gtttcatgggccgttgtatacatactccgggaacctgccatgatcattattcctggttccacggtctgatgtcgcatacccaggtcacatggatcatctcatctccgcttccaatgtctgatgcctccttccaagatatcatagctccttccaacatctcatcactcgtcccaagatctcatcactcggttccagcatctcatgacccttccaatatctcatcactccttccaacatctcatcccccttccaacatctcatcgcgcctatgagatgtaggaaag

SEQ ID NO: 600379 - DNA, 1634 bp, Homo sapiens
  misc_feature (1399)..(1399): n is a, c, g, or t
ccccacatgtgatccccgccccaagagccatgcatgtctgtatggaggaggtgctagcccggatccaccgggctgctgcaccaccaccatgcatgccacaagatatgcaggcacacagcgaacatgacccaatagaccatagaacgtgagacacagcattgagtcacaccggcgtccatatccgcacaccgctcgggacagaggaatgtgcaaaagtctataacgattcagccaacggttccctagaatcacgtcacgccaccacatagaagacatcactattgatataacgtacaccgcccatccaagacctatagaccatcggaaaaaacctgagatccatttgataatgaacagaggaacataacatcaggacgagagaatccaaaatagattacaacatatcgaataacatacagagaatgggaatcatatgataggaaaagaatgatatacaggggaccacactgaggaataaataagaaatagtatgaataagggataaaataggaaaataaagaaacataaatacaacgtcatatcataaataatcaagaaaaaaaaacacaacaaaagaaaaacaaacaaaagaaagaaaaacagaaacaaacgaaaaaaaacaaaaaaaaggggaacccacaagaagaaaaaaacaaagacacaacagaaaaaaagatacccaccaagaagaagacaaacaacagacaaaagaaaacagaaacaacacaaacaaccgaacaaaggaaagcaaaaacaaaaacaacaaacaacaaacaaaccagacacaacaaacacaaacaaagacaacagaaaacacacacacgcaaaaaaaaagaacaaaaaaaacaaaacaaaaaaagacgaaaaacacacaaaaaaacaaaagagacaaaaacagtaaaaaactaaccaacacaaaattcacacgaagccaaactaacaaggcaaccacaactaaagaacacacacaacaacggaaacacgagaatagacaaaccaaaagaggagagaacgaaacacaagcaaggaaaacagcacaaaaacaacaagaacagcgagcggagagacagtagcacacagcaaagaagagacagcagaacacagcagagcagacacacaaccaagaccacactagactcacatcacacatcataaacacagacacggacgcggatacacaagcaaactgacgtacaatcaacaagaagaccagacaacagaacagcaacacagcacacagaaccgacacaaagagagaagaaaacacagacacagagcaacaagcaaagaagacgcgcgagataacacacgaaacaagagacgaaaaacaacacaagacaagaaagagaaacaagacacgacacagaagaacagcagacacgacaagcaaacaacgacnaccagagaaaagagagaggacagcagaaggagagagagagaagacagcagaaagaaggagagaagagaccagcgagaaagaagaagagcaggcagaaacgaaacagaaaggatagacaacagaagacgacacacaaacagagcagaaggagacagcacacgacgcagcacacagaacagaaaaagaataagaaagagagacgacagagagaaggcaaaacgaaacagcgacagaa

SEQ ID NO: 600380 - DNA, 305 bp, Homo sapiens
  misc_feature (114)..(114): n is a, c, g, or t
  misc_feature (124)..(124): n is a, c, g, or t
  misc_feature (133)..(133): n is a, c, g, or t
cttctgtggtgtaccgtcaattgacttaagttcattcagtacataacccagcaatagacactttggtcccacctaacagtctgtctctgcctgaggctccaagagacctgttanagtacagttngaggttgtnctcaatggctaaggacatcaacaaatatcctgaagttgaagagataattacaagggaacccccataggttaccagatgatttctctatagaaacatctctggcaagaagggagtagcaagatatattcaaagctcctaaaagggaaaaacttgcaacctaggatatgctacc

SEQ ID NO: 600381 - DNA, 116 bp, Homo sapiens
ccaggctcagtccccccaaagtacgctgggactacagtgcacgcatcaccacatctggctaattttttggtcgagactggacattcgctatgtggcccagactggcctcgaattcc

SEQ ID NO: 600382 - DNA, 682 bp, Homo sapiens
  misc_feature (2)..(2): n is a, c, g, or t
  misc_feature (319)..(319): n is a, c, g, or t
  misc_feature (321)..(321): n is a, c, g, or t
  misc_feature (353)..(353): n is a, c, g, or t
  misc_feature (408)..(408): n is a, c, g, or t
  misc_feature (438)..(438): n is a, c, g, or t
  misc_feature (448)..(448): n is a, c, g, or t
  misc_feature (454)..(454): n is a, c, g, or t
  misc_feature (456)..(457): n is a, c, g, or t
  misc_feature (469)..(469): n is a, c, g, or t
  misc_feature (510)..(510): n is a, c, g, or t
  misc_feature (539)..(539): n is a, c, g, or t
  misc_feature (565)..(565): n is a, c, g, or t
  misc_feature (620)..(620): n is a, c, g, or t
  misc_feature (669)..(669): n is a, c, g, or t
gngaaggcggggagacaataaagtgtaataaggcacacagtttacactcgtaattgcatcctaaactgttgaatagttgatatttacaaccccccaataacgtttttgcatcctgaattagtccttcacatcttgatatttggcataatgttcaaacacactttatacacactgaccgctccttaaaccactcacagatttaataaataccgaaaaaattaagagatttgaaggcttgatcttctatttacttcaagatgacagaagagtaggtttcttgtgatgaaatactacaagaatgaagaattaacaaactgtngngtaattcatcagaaaagcatattaactctgcngaagtaccactgaatgaaacaaaaatgaagcggggaagtagcaatcggattggcnggcgggcgtgctatgtcccatcactctcgnagtcttcgancaccangnntgcctccacgcnccccttgggctgaaaagggctggggcgggcgagcaggcggntcacgggcgacgatgcggactcaaaggangagaccaggtttccggcacagtggcntgagtgggttcaccagagattcctctgcagaatgtcctccattaagctgggcgtnatctccgctgtcagggtctatcactccatgttccctgtcagtcagggcntccattttcaatc

SEQ ID NO: 600383 - DNA, 890 bp, Homo sapiens
  misc_feature (2)..(2): n is a, c, g, or t
  misc_feature (73)..(73): n is a, c, g, or t
  misc_feature (114)..(114): n is a, c, g, or t
  misc_feature (346)..(346): n is a, c, g, or t
  misc_feature (419)..(419): n is a, c, g, or t
  misc_feature (442)..(442): n is a, c, g, or t
  misc_feature (454)..(454): n is a, c, g, or t
  misc_feature (498)..(498): n is a, c, g, or t
  misc_feature (507)..(507): n is a, c, g, or t
  misc_feature (509)..(509): n is a, c, g, or t
  misc_feature (627)..(627): n is a, c, g, or t
  misc_feature (722)..(722): n is a, c, g, or t
  misc_feature (761)..(761): n is a, c, g, or t
  misc_feature (777)..(777): n is a, c, g, or t
  misc_feature (784)..(784): n is a, c, g, or t
  misc_feature (811)..(811): n is a, c, g, or t
  misc_feature (828)..(828): n is a, c, g, or t
  misc_feature (875)..(875): n is a, c, g, or t
cnaccagttacttttcttgtttcttctccccaacagtgaatcatcaaggccatggtgcttaaacacaagtgtnttcctttcacgtcttactactctccaaatcggagtccatcncttcacttcagttattccacaaatttcatataaactagtccaagttattgtgctagggctaagattctcaaacctgaaatccgaagggggccatgcattggtatacccgccgcaatacagggactcggtccaaccacggcgggggtataggctttcacctggttaaccattttggccttggcgaggggggtttatccagtcgctgtactaaacccatggtggtggggtgatnttaatatccctgtgggggtcccaattaaaccagggccggtggcattctttagtggatattcccctggggcggnaagaatggctccccccgtggcgntggcggtggtcnctggtccagcgacaggttgggcgtttgttttctcctccctaccnccggttctntntttgggtgttttaataccaaactgtccccagaacaggagtatagcaaaaattgggaaaataacaataagaatattttcatttggagaaaccatgaaacaacacgatattttagctcgntgatcgtttcaccttctctggttaattctgttacttcacaagtgtagtttcctgtgtgtgagacagcatcactcttatccatcttcaaagaggcntctccttttagtaattgtgagacttcaatttttgcactnctaaagtcagtggggncagtggncttgtttagagctccatcaaaggtgtnaatatctcttcctttanatttccccttttacgtatacttcagtagtgttttgtgcctccatatnggtatcaaagcttgg

SEQ ID NO: 600384 - DNA, 371 bp, Homo sapiens
  misc_feature (1)..(1): n is a, c, g, or t
  misc_feature (279)..(279): n is a, c, g, or t
ncgatctatgtgtcctggatttggttctccactcccgcatatggtcttatatctcaccacgagagtatgttgcccaaatgtgccatcgaccacttctcttggtgtttaagccccacagtagaatacatatttggcgtgtagctcagtgaaagcaatccttaatctatgtccattctgtggtttaaaagcaggtattgtttataagattcacacaacagccaatcacttccacagtagtgaaagtgtggtccataaggttgtccagttccagaaacacanagcgaatgtccttcatccccatggtaaccatatgaatgcttatcacaccttggtagtctattcatgttcacacctacttcaaaataataaat

SEQ ID NO: 600385 - DNA, 142 bp, Homo sapiens
atctatctatgataagtaatgtaagggcctgtccatcagtactcctgtagagcgaacttcctctgaaatctcttggcagccttgggagagaagcactaaactacgtagacctcctctacactccaacggactagagattact

SEQ ID NO: 600386 - DNA, 630 bp, Homo sapiens
ctcctgcgcacgcggcccggtcgctgtcggaagcggctgtgcgggtggcggccggcgcgcggtggggcatggcgggttcgcggggtgcggggcgcacggcggcgccgagcgtgcggccggagaagcggcggtctgagcccgaactggagcctgagcccgagccggagccccccctcctctgcacctctcctctcagccacagcaccggcagcgattctggcgtctccgacagcgaggagagtgtgttctcaggcctggaagattccggcagtgacagcagtgaggatgatgacgaaggcgacgaggagggagaggacggagcccttgatgacgagggccacagtgggattaaaaagaccactgaggagcaggtgcaggcgtttctgtttttatcagtttaatctgcttgtcacagtcaagaatgtgagaaaagactggatgcggtgagccaagacctgtaatcccagacactttgggaggccaaggtgggcggatcacttgaggagttcgagaccagcccggccaacatggtgaaacctcatgtgaattgcttgggcctgggaggcggaggttggagtgggctgagatcatgccgctgcctccatcctgggtgacagagtgagtgggact

SEQ ID NO: 600387 - DNA, 2633 bp, Homo sapiens
ctcctgcgcacgcggcccggtcgctgtcggaagcggctgtgcgggtggcggccggcgcgcggtggggcatggcgggttcgcggggtgcggggcgcacggcggcgccgagcgtgcggccggagaagcggcggtctgagcccgaactggagcctgagcccgagccggagccccccctcctctgcacctctcctctcagccacagcaccggcagcgattctggcgtctccgacagcgaggagagtgtgttctcaggcctggaagattccggcagtgacagcagtgaggatgatgacgaaggcgacgaggagggagaggacggagcccttgatgacgagggccacagtgggattaaaaagaccactgaggagcaggtgcaggccagcactccttgcccgaggacagagatggcgagcgcccggattggggatgagtatgcggaggacagctctgatgaggaggacatccggaacacggtgggcaacgtgcccttggagtggtacgatgacttcccccacgtgggctacgacctggatggcaggcgcatctacaagcccctgcggacccgggatgagctggaccagttcctggacaagatggacgatcctgactactggcgcaccgtgcaggacccgatgacagggcgggacctgagactgacggatgagcaggtggccctggtgcggcggctgcagagtggccagtttggggatgtgggcttcaacccctatgagccggctgtcgacttcttcagcggggacgtcatgatccacccggtgaccaaccgcccggccgacaagcgcagcttcatcccctccctggtggagaaggagaaggtctctcgcatggtgcacgccatcaagatgggctggatccagcctcgccggccccgagaccccacccccagcttctatgacctgtgggcccaggaggaccccaacgccgtgctcgggcgccacaagatgcacgtacctgctcccaagctggccctgccaggccacgccgagtcgtacaacccaccccctgaatacctgctcagcgaggaggagcgcttggcgtgggaacagcaggagccaggcgagaggaagctgagctttttgccacgcaagttcccgagcctgcgggccgtgcctgcctacggacgcttcatccaggaacgcttcgagcgctgccttgacctgtacctgtgcccacggcagcgcaagatgagggtgaatgtagaccctgaggacctcatccccaagctgcctcggccgagggacctgcagcccttccccacgtgccaggccctggtctacaggggccacagtgaccttgtccggtgcctcagtgtctctcctgggggccagtggctggtttcaggctctgacgacggctccctgcggctctgggaggtggccactgcccgctgtgtgaggactgttcccgtggggggcgtggtgaagagtgtggcctggaaccccagccccgctgtctgcctggtggctgcagccgtggaggactcggtgctgctgctgaacccagctctgggggaccggctggtggcgggcagcacagatcagctgttgagcgccttcgtcccgcctgaggagccccccttgcagccggcccgctggctggaggcctcagaggaggagcgccaagtgggcctgcggctgcgcatctgccacgggaagccagtgacgcaggtgacctggcacgggcgtggggactacctggccgtggtgctggccacccaaggccacacccaggtgctgattcaccagctgagccgtcgccgcagccagagtccgttccgccgcagccacggacaggtgcagcgagtggccttccaccctgcccggcccttcctgttggtggcgtcccagcgcagcgtccgcctctaccacctgctgcgccaggagctcaccaagaagctgatgcccaactgcaagtgggtgtccagcctggcggtgcaccctgcaggtgacaacgtcatctgtgggagctacgatagcaagctggtgtggtttgacctggatctttccaccaagccatacaggatgctgagacaccacaagaaggctctgcgggctgtggccttccacccgcggtacccactctttgcgtcaggctcggacgacggcagtgtcatcgtctgccatggcatggtgtacaatgaccttctgcagaaccccttgctggtgcccgtcaaggtgctgaagggacacgtgctgacccgagatctgggagtgctggacgtcatcttccaccccacccagccgtgggtcttctcctcgggggcagacgggactgtccgcctcttcacctagctgttctgcctgcctggggctggggtggtcgtgctgaagtcaacagagcctttaccctgtgcaaaaaaaaaaaaagcatagacaacagaaaaagactagaacaaactaacacagaactacgctcggaggggacattattagacgggcgcgggcgagcagaaagaaaggggtataataaagctacgggcacgtggtggcacagaagtggtgtcacaggccccaagttttttttggacccagggtagtaaactaccgcgggggcccccaaaaagaggagggggaaaaactccagcaagcacaggtacaccccgataagagaagcgg

SEQ ID NO: 600388 - DNA, 2430 bp, Homo sapiens
ctcctgcgcacgcggcccggtcgctgtcggaagcggctgtgcgggtggcggccggcgcgcggtggggcatggcgggttcgcggggtgcggggcgcacggcggcgccgagcgtgcggccggagaagcggcggtctgagcccgaactggagcctgagcccgagccggagccccccctcctctgcacctctcctctcagccacagcaccggcagcgattctggcgtctccgacagcgaggagagtgtgttctcaggcctggaagattccggcagtgacagcagtgaggatgatgacgaaggcgacgaggagggagaggacggagcccttgatgacgagggccacagtgggattaaaaagaccactgaggagcaggtgcaggccagcactccttgcccgaggacagagatggcgagcgcccggattggggatgagtatgcggaggacagctctgatgaggaggacatccggaacacggtgggcaacgtgcccttggagtggtacgatgacttcccccacgtgggctacgacctggatggcaggcgcatctacaagcccctgcggacccgggatgagctggaccagttcctggacaagatggacgatcctgactactggcgcaccgtgcaggacccgatgacagggcgggacctgagactgacggatgagcaggtggccctggtgcggcggctgcagagtggccagtttggggatgtgggcttcaacccctatgagccggctgtcgacttcttcagcggggacgtcatgatccacccggtgaccaaccgcccggccgacaagcgcagcttcatcccctccctggtggagaaggagaaggtctctcgcatggtgcacgccatcaagatgggctggatccagcctcgccggccccgagaccccacccccagcttctatgacctgtgggcccaggaggaccccaacgccgtgctcgggcgccacaagatgcacgtacctgctcccaagctggccctgccaggccacgccgagtcgtacaacccaccccctgaatacctgctcagcgaggaggagcgcttggcgtgggaacagcaggagccaggcgagaggaagctgagctttttgccacgcaagttcccgagcctgcgggccgtgcctgcctacggacgcttcatccaggaacgcttcgagcgctgccttgacctgtacctgtgcccacggcagcgcaagatgagggtgaatgtagaccctgaggacctcatccccaagctgcctcggccgagggacctgcagcccttccccacgtgccaggccctggtctacaggggccacagtgaccttgtccggtgcctcagtgtctctcctgggggccagtggctggtttcaggctctgacgacggctccctgcggctctgggaggtggccactgcccgctgtgtgaggactgttcccgtggggggcgtggtgaagagtgtggcctggaaccccagccccgctgtctgcctggtggctgcagccgtggaggactcggtgctgctgctgaacccagctctgggggaccggctggtggcgggcagcacagatcagctgttgagcgccttcgtcccgcctgaggagccccccttgcagccggcccgctggctggaggcctcagaggaggagcgccaagtgggcctgcggctgcgcatctgccacgggaagccagtgacgcaggtgacctggcacgggcgtggggactacctggccgtggtgctggccacccaaggccacacccaggtgctgattcaccagctgagccgtcgccgcagccagagtccgttccgccgcagccacggacaggtgcagcgagtggccttccaccctgcccggcccttcctgttggtggcgtcccagcgcagcgtccgcctctaccacctgctgcgccaggagctcaccaagaagctgatgcccaactgcaagtgggtgtccagcctggcggtgcaccctgcaggtgacaacgtcatctgtgggagctacgatagcaagctggtgtggtttgacctggatctttccaccaagccatacaggatgctgagacaccacaagaaggctctgcgggctgtggccttccacccgcggtacccactctttgcgtcaggctcggacgacggcagtgtcatcgtctgccatggcatggtgtacaatgaccttctgcagaaccccttgctggtgcccgtcaaggtgctgaagggacacgtgctgacccgagatctgggagtgctggacgtcatcttccaccccacccagccgtgggtcttctcctcgggggcagacgggactgtccgcctcttcacctagctgttctgcctgcctggggctggggtggtcgtgctgaagtcaacagagcctttaccctgtgctgcctggtgctcccaccttcttgaattggggttgccaacaaagccgcccccaccacaaa

SEQ ID NO: 600389 - DNA, 255 bp, Homo sapiens
ggaggtaccctagtgaacgaggtgcacctcggtcgaatcaggtcgtcagtgtccccggtggcgcagagaagggctgatgggaagacactttcgtccgtggtggaccaggccccgatactctgcggtgcggaaaaaatgtataatatggtctgacacaggtgcctcaccttctcctccctcaaaactcaagttcccctcatgggctatacttgcccgcctcgagtttttcctaagggcccgaggcgaacccctggt

SEQ ID NO: 600390 - DNA, 2701 bp, Homo sapiens
ctcctgcgcacgcggcccggtcgctgtcggaagcggctgtgcgggtggcggccggcgcgcggtggggcatggcgggttcgcggggtgcggggcgcacggcggcgccgagcgtgcggccggagaagcggcggtctgagcccgaactggagcctgagcccgagccggagccccccctcctctgcacctctcctctcagccacagcaccggcagcgattctggcgtctccgacagcgaggagagtgtgttctcaggcctggaagattccggcagtgacagcagtgaggatgatgacgaaggcgacgaggagggagaggacggagcccttgatgacgagggccacagtgggattaaaaagaccactgaggagcaggtgcaggccagcactccttgcccgaggacagagatggcgagcgcccggattggggatgagtatgcggaggacagctctgatgaggaggacatccggaacacggtgggcaacgtgcccttggagtggtacgatgacttcccccacgtgggctacgacctggatggcaggcgcatctacaagcccctgcggacccgggatgagctggaccagttcctggacaagatggacgatcctgactactggcgcaccgtgcaggacccgatgacagggcgggacctgagactgacggatgagcaggtggccctggtgcggcggctgcagagtggccagtttggggatgtgggcttcaacccctatgagccggctgtcgacttcttcagcggggacgtcatgatccacccggtgaccaaccgcccggccgacaagcgcagcttcatcccctccctggtggagaaggagaaggtctctcgcatggtgcacgccatcaagatgggctggatccagcctcgccggccccgagaccccacccccagcttctatgacctgtgggcccaggaggaccccaacgccgtgctcgggcgccacaagatgcacgtacctgctcccaagctggccctgccaggccacgccgagtcgtacaacccaccccctgaatacctgctcagcgaggaggagcgcttggcgtgggaacagcaggagccaggcgagaggaagctgagctttttgccacgcaagttcccgagcctgcgggccgtgcctgcctacggacgcttcatccaggaacgcttcgagcgctgccttgacctgtacctgtgcccacggcagcgcaagatgagggtgtgtgggggtggcacaccagggggtggcacagggggcaaggctgacctggcgctctcctgccccgggtgaatgtagaccctgaggacctcatccccaagctgcctcggccgagggacctgcagcccttccccacgtgccaggccctggtctacaggggccacagtgaccttgtccggtgcctcagtgtctctcctgggggccagtggctggtttcaggctctgacgacggctccctgcggctctgggaggtggccactgcccgctgtgtgaggactgttcccgtggggggcgtggtgaagagtgtggcctggaaccccagccccgctgtctgcctggtggctgcagccgtggaggactcggtgctgctgctgaacccagctctgggggaccggctggtggcgggcagcacagatcagctgttgagcgccttcgtcccgcctgaggagccccccttgcagccggcccgctggctggaggcctcagaggaggagcgccaagtgggcctgcggctgcgcatctgccacgggaagccagtgacgcaggtgacctggcacgggcgtggggactacctggccgtggtgctggccacccaaggccacacccaggtgctgattcaccagctgagccgtcgccgcagccagagtccgttccgccgcagccacggacaggtgcagcgagtggccttccaccctgcccggcccttcctgttggtggcgtcccagcgcagcgtccgcctctaccacctgctgcgccaggagctcaccaagaagctgatgcccaactgcaagtgggtgtccagcctggcggtgcaccctgcaggtgacaacgtcatctgtgggagctacgatagcaagctggtgtggtttgacctggatctttccaccaagccatacaggatgctgagacaccacaagaaggctctgcgggctgtggccttccacccgcggtacccactctttgcgtcaggctcggacgacggcagtgtcatcgtctgccatggcatggtgtacaatgaccttctgcagaaccccttgctggtgcccgtcaaggtgctgaagggacacgtgctgacccgagatctgggagtgctggacgtcatcttccaccccacccagccgtgggtcttctcctcgggggcagacgggactgtccgcctcttcacctagctgttctgcctgcctggggctggggtggtcgtgctgaagtcaacagagcctttaccctgtgcaaaaaaaaaaaaagcatagacaacagaaaaagactagaacaaactaacacagaactacgctcggaggggacattattagacgggcgcgggcgagcagaaagaaaggggtataataaagctacgggcacgtggtggcacagaagtggtgtcacaggccccaagttttttttggacccagggtagtaaactaccgcgggggcccccaaaaagaggagggggaaaaactccagcaagcacaggtacaccccgataagagaagcgg

SEQ ID NO: 600391 - DNA, 2551 bp, Homo sapiens
ctcctgcgcacgcggcccggtcgctgtcggaagcggctgtgcgggtggcggccggcgcgcggtggggcatggcgggttcgcggggtgcggggcgcacggcggcgccgagcgtgcggccggagaagcggcggtctgagcccgaactggagcctgagcccgagccggagccccccctcctctgcacctctcctctcagccacagcaccggcagcgattctggcgtctccgacagcgaggagagtgtgttctcaggcctggaagattccggcagtgacagcagtgaggatgatgacgaaggcgacgaggagggagaggacggagcccttgatgacgagggccacagtgggattaaaaagaccactgaggagcaggtgcaggccagcactccttgcccgaggacagagatggcgagcgcccggattggggatgagtatgcggaggacagctctgatgaggaggacatccggaacacggtgggcaacgtgcccttggagtggtacgatgacttcccccacgtgggctacgacctggatggcaggcgcatctacaagcccctgcggacccgggatgagctggaccagttcctggacaagatggacgatcctgactactggcgcaccgtgcaggacccgatgacagggcgggacctgagactgacggatgagcaggtggccctggtgcggcggctgcagagtggccagtttggggatgtgggcttcaacccctatgagccggctgtcgacttcttcagcggggacgtcatgatccacccggtgaccaaccgcccggccgacaagcgcagcttcatcccctccctggtggagaaggagaaggtctctcgcatggtgcacgccatcaagatgggctggatccagcctcgccggccccgagaccccacccccagcttctatgacctgtgggcccaggaggaccccaacgccgtgctcgggcgccacaagatgcacgtacctgctcccaagctggccctgccaggccacgccgagtcgtacaacccaccccctgaatacctgctcagcgaggaggagcgcttggcgtgggaacagcaggagccaggcgagaggaagctgagctttttgccacgcaagttcccgagcctgcgggccgtgcctgcctacggacgcttcatccaggaacgcttcgagcgctgccttgacctgtacctgtgcccacggcagcgcaagatgaggtctacaggggccacagtgaccttgtccggtgcctcagtgtctctcctgggggccagtggctggtttcaggctctgacgacggctccctgcggctctgggaggtggccactgcccgctgtgtgaggactgttcccgtggggggcgtggtgaagagtgtggcctggaaccccagccccgctgtctgcctggtggctgcagccgtggaggactcggtgctgctgctgaacccagctctgggggaccggctggtggcgggcagcacagatcagctgttgagcgccttcgtcccgcctgaggagccccccttgcagccggcccgctggctggaggcctcagaggaggagcgccaagtgggcctgcggctgcgcatctgccacgggaagccagtgacgcaggtgacctggcacgggcgtggggactacctggccgtggtgctggccacccaaggccacacccaggtgctgattcaccagctgagccgtcgccgcagccagagtccgttccgccgcagccacggacaggtgcagcgagtggccttccaccctgcccggcccttcctgttggtggcgtcccagcgcagcgtccgcctctaccacctgctgcgccaggagctcaccaagaagctgatgcccaactgcaagtgggtgtccagcctggcggtgcaccctgcaggtgacaacgtcatctgtgggagctacgatagcaagctggtgtggtttgacctggatctttccaccaagccatacaggatgctgagacaccacaagaaggctctgcgggctgtggccttccacccgcggtacccactctttgcgtcaggctcggacgacggcagtgtcatcgtctgccatggcatggtgtacaatgaccttctgcagaaccccttgctggtgcccgtcaaggtgctgaagggacacgtgctgacccgagatctgggagtgctggacgtcatcttccaccccacccagccgtgggtcttctcctcgggggcagacgggactgtccgcctcttcacctagctgttctgcctgcctggggctggggtggtcgtgctgaagtcaacagagcctttaccctgtgcaaaaaaaaaaaaagcatagacaacagaaaaagactagaacaaactaacacagaactacgctcggaggggacattattagacgggcgcgggcgagcagaaagaaaggggtataataaagctacgggcacgtggtggcacagaagtggtgtcacaggccccaagttttttttggacccagggtagtaaactaccgcgggggcccccaaaaagaggagggggaaaaactccagcaagcacaggtacaccccgataagagaagcgg

SEQ ID NO: 600392 - DNA, 487 bp, Homo sapiens
  misc_feature (111)..(111): n is a, c, g, or t
  misc_feature (178)..(178): n is a, c, g, or t
  misc_feature (180)..(180): n is a, c, g, or t
ggaggaccctagccggaacccggtacctgccaggctacgtacgcccaggttatatatacgtacaagagaacactgcagatgcttgcagggtttatagtatgacctcatttnggttaaaaaaaaatctctatacaaatctctatttgtatgtagtggctcatgcacgtatgaacataananggtgttagaaaaactacagatgtatttaccttggataccatgagaaacaggaatgaaggcaagtaagacaataaccgtaagagttcagggccatcgtgtaattggaatgccaataccctgaatgtcattgacatttcaaccaaataggatctcagtccaacctactcagacgtgaaccttgacgcacgtaccagggaacgccacactgcttccacagtgcccatgtggagagtcgaaactgaactacatgcaatttcatataactcgacttcatagaaaagatttaatgcttcggaattacaacagc

SEQ ID NO: 600393 - DNA, 449 bp, Homo sapiens
  misc_feature (254)..(254): n is a, c, g, or t
  misc_feature (319)..(319): n is a, c, g, or t
agggtttgcacaggcccctaactgtctactactttgatataatctataaacatcctggtatgctgagctggtaaaatacattgtaaattacatattaaatattttatctgcttttacaagcgcaaggtgcaaaaatatatacaattgtcatcttgatgactgtgaggtgaattaaccgttggtgataacacctaagcttttgactctgttatagcgctcaccaccccttcccttgtcttaacgtggaagtgcgncttacgtgttcacagacttacctgactcgcttacttaccggctgctgtcaccttccccttccccnttttctgtttcttttttcctttctttttcttttttcttttctttttttttggcctctgtatgtcccagtgatccaaaagcagcgtttgcctttttattgttattaaacaagtttccttctgccaaaaaaa

SEQ ID NO: 600394 - DNA, 2644 bp, Homo sapiens
  misc_feature (2171)..(2171): n is a, c, g, or t
  misc_feature (2174)..(2177): n is a, c, g, or t
  misc_feature (2179)..(2179): n is a, c, g, or t
  misc_feature (2182)..(2182): n is a, c, g, or t
  misc_feature (2184)..(2184): n is a, c, g, or t
  misc_feature (2194)..(2194): n is a, c, g, or t
  misc_feature (2200)..(2200): n is a, c, g, or t
  misc_feature (2208)..(2208): n is a, c, g, or t
  misc_feature (2212)..(2212): n is a, c, g, or t
  misc_feature (2222)..(2222): n is a, c, g, or t
  misc_feature (2234)..(2234): n is a, c, g, or t
ctcctgcgcacgcggcccggtcgctgtcggaagcggctgtgcgggtggcggccggcgcgcggtggggcatggcgggttcgcggggtgcggggcgcacggcggcgccgagcgtgcggccggagaagcggcggtctgagcccgaactggagcctgagcccgagccggagccccccctcctctgcacctctcctctcagccacagcaccggcagcgattctggcgtctccgacagcgaggagagtgtgttctcaggcctggaagattccggcagtgacagcagtgaggatgatgacgaaggcgacgaggagggagaggacggagcccttgatgacgagggccacagtgggattaaaaagaccactgaggagcaggtgcaggccagcactccttgcccgaggacagagatggcgagcgcccggattggggatgagtatgcggaggacagctctgatgaggaggacatccggaacacggtgggcaacgtgcccttggagtggtacgatgacttcccccacgtgggctacgacctggatggcaggcgcatctacaagcccctgcggacccgggatgagctggaccagttcctggacaagatggacgatcctgactactggcgcaccgtgcaggacccgatgacagggcgggacctgagactgacggatgagcaggtggccctggtgcggcggctgcagagtggccagtttggggatgtgggcttcaacccctatgagccggctgtcgacttcttcagcggggacgtcatgatccacccggtgaccaaccgcccggccgacaagcgcagcttcatcccctccctggtggagaaggagaaggtctctcgcatggtgcacgccatcaagatgggctggatccagcctcgccggccccgagaccccacccccagcttctatgacctgtgggcccaggaggaccccaacgccgtgctcgggcgccacaagatgcacgtacctgctcccaagctggccctgccaggccacgccgagtcgtacaacccaccccctgaatacctgctcagcgaggaggagcgcttggcgtgggaacagcaggagccaggcgagaggaagctgagctttttgccacgcaagttcccgagcctgcgggccgtgcctgcctacggacgcttcatccaggaacgcttcgagcgctgccttgacctgtacctgtgcccacggcagcgcaagatgagggtgaatgtagaccctgaggacctcatccccaagctgcctcggccgagggacctgcagcccttccccacgtgccaggccctggtctacaggggccacagtgaccttgtccggtgcctcagtgtctctcctgggggccagtggctggtttcaggctctgacgacggctccctgcggctctgggaggtggccactgcccgctgtgtgaggactgttcccgtggggggcgtggtgaagagtgtggcctggaaccccagccccgctgtctgcctggtggctgcagccgtggaggactcggtgctgctgctgaacccagctctgggggaccggctggtggcgggcagcacagatcagctgttgagcgccttcgtcccgcctgaggagccccccttgcagccggcccgctggctggaggcctcagaggaggagcgccaagtgggcctgcggctgcgcatctgccacgggaagccagtgacgcaggtgacctggcacgggcgtggggactacctggccgtggtgctggccacccaaggccacacccaggtgctgattcaccagctgagccgtcgccgcagccagagtccgttccgccgcagccacggacaggtgcagcgagtggccttccaccctgcccggcccttcctgttggtggcgtcccagcgcagcgtccgcctctaccacctgctgcgccaggagctcaccaagaagctgatgcccaactgcaagtgggtgtccagcctggcggtgcaccctgcaggtgacaacgtcatctgtgggagctacgatagcaagctggtgtggtttgacctggatctttccaccaagccatacaggatgctgagacaccacaagaaggctctgcgggctgtggccttccacccgcggtacccactctttgcgtcaggctcggacgacggcagtgtcatcgtctgccatggcatggtgtacaatgaccatatactaaanaannnntnaanantgacacacantaaaangatgaatnaaanaaaaaataanaacccaaaatangagaaatactggacgtcatcttccaccccacccagccgtgggtcttctcctcgggggcagacgggactgtccgcctcttcacctagctgttctgcctgcctggggctggggtggtcgtgctgaagtcaacagagcctttaccctgtgcaaaaaaaaaaaaagcatagacaacagaaaaagactagaacaaactaacacagaactacgctcggaggggacattattagacgggcgcgggcgagcagaaagaaaggggtataataaagctacgggcacgtggtggcacagaagtggtgtcacaggccccaagttttttttggacccagggtagtaaactaccgcgggggcccccaaaaagaggagggggaaaaactccagcaagcacaggtacaccccgataagagaagcgg

SEQ ID NO: 600395 - DNA, 339 bp, Homo sapiens
  misc_feature (111)..(111): n is a, c, g, or t
  misc_feature (178)..(178): n is a, c, g, or t
  misc_feature (180)..(180): n is a, c, g, or t
ggaggaccctagccggaacccggtacctgccaggctacgtacgcccaggttatatatacgtacaagagaacactgcagatgcttgcagggtttatagtatgacctcatttnggttaaaaaaaaatctctatacaaatctctatttgtatgtagtggctcatgcacgtatgaacataananggtgtattctcgtgtgaatcagggttctatgttgttaatgtggtgcgtaagtaagccccattgtgtagtgctaaatatttcgagggagtatagggctgtgactagtatgtagagtcctgtaagtagaagagtgatatttgatcaggagaacacggggac

SEQ ID NO: 600396 - DNA, 179 bp, Homo sapiens
  misc_feature (177)..(177): n is a, c, g, or t
gatcacatgatttttgttctcagttctattaatgttcttggattctgttcaatgttctgttcacattgcagaaaaagcatttgacaaaataatttcagtagctgctgaaaaagcatttgataaaattcagcatacctttatgatacaaaaaaccttcaataaactgggtatatatgnac

SEQ ID NO: 600397 - DNA, 2421 bp, Homo sapiens
ctcctgcgcacgcggcccggtcgctgtcggaagcggctgtgcgggtggcggccggcgcgcggtggggcatggcgggttcgcggggtgcggggcgcacggcggcgccgagcgtgcggccggagaagcggcggtctgagcccgaactggagcctgagcccgagccggagcagcactccttgcccgaggacagagatggcgagcgcccggattggggatgagtatgcggaggacagctctgatgaggaggacatccggaacacggtgggcaacgtgcccttggagtggtacgatgacttcccccacgtgggctacgacctggatggcaggcgcatctacaagcccctgcggacccgggatgagctggaccagttcctggacaagatggacgatcctgactactggcgcaccgtgcaggacccgatgacagggcgggacctgagactgacggatgagcaggtggccctggtgcggcggctgcagagtggccagtttggggatgtgggcttcaacccctatgagccggctgtcgacttcttcagcggggacgtcatgatccacccggtgaccaaccgcccggccgacaagcgcagcttcatcccctccctggtggagaaggagaaggtctctcgcatggtgcacgccatcaagatgggctggatccagcctcgccggccccgagaccccacccccagcttctatgacctgtgggcccaggaggaccccaacgccgtgctcgggcgccacaagatgcacgtacctgctcccaagctggccctgccaggccacgccgagtcgtacaacccaccccctgaatacctgctcagcgaggaggagcgcttggcgtgggaacagcaggagccaggcgagaggaagctgagctttttgccacgcaagttcccgagcctgcgggccgtgcctgcctacggacgcttcatccaggaacgcttcgagcgctgccttgacctgtacctgtgcccacggcagcgcaagatgagggtgaatgtagaccctgaggacctcatccccaagctgcctcggccgagggacctgcagcccttccccacgtgccaggccctggtctacaggggccacagtgaccttgtccggtgcctcagtgtctctcctgggggccagtggctggtttcaggctctgacgacggctccctgcggctctgggaggtggccactgcccgctgtgtgaggactgttcccgtggggggcgtggtgaagagtgtggcctggaaccccagccccgctgtctgcctggtggctgcagccgtggaggactcggtgctgctgctgaacccagctctgggggaccggctggtggcgggcagcacagatcagctgttgagcgccttcgtcccgcctgaggagccccccttgcagccggcccgctggctggaggcctcagaggaggagcgccaagtgggcctgcggctgcgcatctgccacgggaagccagtgacgcaggtgacctggcacgggcgtggggactacctggccgtggtgctggccacccaaggccacacccaggtgctgattcaccagctgagccgtcgccgcagccagagtccgttccgccgcagccacggacaggtgcagcgagtggccttccaccctgcccggcccttcctgttggtggcgtcccagcgcagcgtccgcctctaccacctgctgcgccaggagctcaccaagaagctgatgcccaactgcaagtgggtgtccagcctggcggtgcaccctgcaggtgacaacgtcatctgtgggagctacgatagcaagctggtgtggtttgacctggatctttccaccaagccatacaggatgctgagacaccacaagaaggctctgcgggctgtggccttccacccgcggtacccactctttgcgtcaggctcggacgacggcagtgtcatcgtctgccatggcatggtgtacaatgaccttctgcagaaccccttgctggtgcccgtcaaggtgctgaagggacacgtgctgacccgagatctgggagtgctggacgtcatcttccaccccacccagccgtgggtcttctcctcgggggcagacgggactgtccgcctcttcacctagctgttctgcctgcctggggctggggtggtcgtgctgaagtcaacagagcctttaccctgtgcaaaaaaaaaaaaagcatagacaacagaaaaagactagaacaaactaacacagaactacgctcggaggggacattattagacgggcgcgggcgagcagaaagaaaggggtataataaagctacgggcacgtggtggcacagaagtggtgtcacaggccccaagttttttttggacccagggtagtaaactaccgcgggggcccccaaaaagaggagggggaaaaactccagcaagcacaggtacaccccgataagagaagcgg

SEQ ID NO: 600398 - DNA, 1759 bp, Homo sapiens
ctcctgcgcacgcggcccggtcgctgtcggaagcggctgtgcgggtggcggccggcgcgcggtggggcatggcgggttcgcggggtgcggggcgcacggcggcgccgagcgtgcggccggagaagcggcggtctgagcccgaactggagcctgagcccgagccggagccccccctcctctgcacctctcctctcagccacagcaccggcagcgattctggcgtctccgacagcgaggagagtgtgttctcaggcctggaagattccggcagtgacagcagtgaggatgatgacgaaggcgacgaggagggagaggacggagcccttgatgacgagggccacagtgggattaaaaagaccactgaggagcaggtgcaggccagcactccttgcccgaggacagagatggcgagcgcccggattggggatgagtatgcggaggacagctctgatgaggaggacatccggaacacggtgggcaacgtgcccttggagtggtacgatgacttcccccacgtgggctacgacctggatggcaggcgcatctacaagcccctgcggacccgggatgagctggaccagttcctggacaagatggacgatcctgactactggcgcaccgtgcaggacccgatgacagggcgggacctgagactgacggatgagcaggtggccctggtgcggcggctgcagagtggccagtttggggatgtgggcttcaacccctatgagccggctgtcgacttcttcagcggggacgtcatgatccacccggtgaccaaccgcccggccgacaagcgcagcttcatcccctccctggtggagaaggagaaggtctctcgcatggtgcacgccatcaagatgggctggatccagcctcgccggccccgagaccccacccccagcttctatgacctgtgggcccaggaggaccccaacgccgtgctcgggcgccacaagatgcacgtacctgctcccaagctggccctgccaggccacgccgagtcgtacaacccaccccctgaatacctgctcagcgaggaggagcgcttggcgtgggaacagcaggagccaggcgagaggaagctgagctttttgccacgcaagttcccgagcctgcgggccgtgcctgcctacggacgcttcatccaggaacgcttcgagcgctgccttgacctgtacctgtgcccacggcagcgcaagatgagggtgaatgtagaccctgaggacctcatccccaagctgcctcggccgagggacctgcagcccttccccacgtgccaggccctggtctacaggggccacagtgaccttgtccggtgcctcagtgtctctcctgggggccagtggctggtttcaggctctgacgacggctccctgcggctctgggaggtggccactgcccgctgtgtgaggactgttcccgtggggggcgtggtgaagagtgtggcctggctggggtggtcgtgctgaagtcaacagagcctttaccctgtgcaaaaaaaaaaaaagcatagacaacagaaaaagactagaacaaactaacacagaactacgctcggaggggacattattagacgggcgcgggcgagcagaaagaaaggggtataataaagctacgggcacgtggtggcacagaagtggtgtcacaggccccaagttttttttggacccagggtagtaaactaccgcgggggcccccaaaaagaggagggggaaaaactccagcaagcacaggtacaccccgataagagaagcgg

SEQ ID NO: 600399 - DNA, 1696 bp, Homo sapiens
ctcctgcgcacgcggcccggtcgctgtcggaagcggctgtgcgggtggcggccggcgcgcggtggggcatggcgggttcgcggggtgcggggcgcacggcggcgccgagcgtgcggccggagaagcggcggtctgagcccgaactggagcctgagcccgagccggagccccccctcctctgcacctctcctctcagccacagcaccggcagcgattctggcgtctccgacagcgaggagagtgtgttctcaggcctggaagattccggcagtgacagcagtgaggatgatgacgaaggcgacgaggagggagaggacggagcccttgatgacgagggccacagtgggattaaaaagaccactgaggagcaggtgcaggccagcactccttgcccgaggacagagatggcgagcgcccggattggggatgagtatgcggaggacagctctgatgaggaggacatccggaacacggtgggcaacgtgcccttggagtggtacgatgacttcccccacgtgggctacgacctggatggcaggcgcatctacaagcccctgcggacccgggatgagctggaccagttcctggacaagatggacgatcctgactactggcgcaccgtgcaggacccgatgacagggcgggacctgagactgacggatgagcaggtggccctggtgcggcggctgcagagtggccagtttggggatgtgggcttcaacccctatgagccggctgtcgacttcttcagcggggacgtcatgatccacccggtgaccaaccgcccggccgacaagcgcagcttcatcccctccctggtggagaaggagaaggtctctcgcatggtgcacgccatcaagatgggctggatccagcctcgccggccccgagaccccacccccagcttctatgacctgtgggcccaggaggaccccaacgccgtgctcgggcgccacaagatgcacgtacctgctcccaagctggccctgccaggccacgccgagtcgtacaacccaccccctgaatacctgctcagcgaggaggagcgcttggcgtgggaacagcaggagccaggcgagaggaagctgagctttttgccacgcaagttcccgagcctgcgggccgtgcctgcctacggacgcttcatccaggaacgcttcgagcgctgccttgacctgtacctgtgcccacggcagcgcaagatgagggtgaatgtagaccctgaggacctcatccccaagctgcctcggccgagggacctgcagcccttccccacgtgccaggccctggtctacaggggccacagtgaccttgtccggtgcctcagtgtctctcctgggggccagtggctggtttcaggctcttcacctagctgttctgcctgcctggggctggggtggtcgtgctgaagtcaacagagcctttaccctgtgcaaaaaaaaaaaaagcatagacaacagaaaaagactagaacaaactaacacagaactacgctcggaggggacattattagacgggcgcgggcgagcagaaagaaaggggtataataaagctacgggcacgtggtggcacagaagtggtgtcacaggccccaagttttttttggacccagggtagtaaactaccgcgggggcccccaaaaagaggagggggaaaaactccagcaagcacaggtacaccccgataagagaagcgg

SEQ ID NO: 600400 - DNA, 926 bp, Homo sapiens
  misc_feature (22)..(22): n is a, c, g, or t
tgcaccctgcaggtgaggggtntaggtgacgggcagggcagtgcaccctgcaggtgagagcgggaacacctgcataacagcctttggccctaggtgacaacgtcatctgtgggagctacgatagcaagctggtgtggtttgacctggatctttccaccaagccatacaggatgctgaggtgaggaaagctgggggtggaggcggccagcagagcccctcccttcagcccgagcctgccttcaacctggttccctccccccagacaccacaagaaggctctgcgggctgtggccttccacccgcggtacccactctttgcgtcaggctcggacgacggcagtgtcatcgtctgccatggcatggtgtacaagtgagtgctgaccctgcctggccccctccccagggcagtggtgtctggccgtgccctgagccctcctcgtccccacagtgaccttctgcagaaccccttgctggtgcccgtcaaggtgctgaagggacacgtgctgacccgagatctgggagtgctggacgtcatcttccaccccacccagccgtgggtcttctcctcgggggcagacgggactgtccgcctcttcacctagctgttctgcctgcctggggctggggtggtcgtgctgaagtcaacagagcctttaccctgtgcaaaaaaaaaaaaagcatagacaacagaaaaagactagaacaaactaacacagaactacgctcggaggggacattattagacgggcgcgggcgagcagaaagaaaggggtataataaagctacgggcacgtggtggcacagaagtggtgtcacaggccccaagttttttttggacccagggtagtaaactaccgcgggggcccccaaaaagaggagggggaaaaactccagcaagcacaggtacaccccgataagagaagcgg

SEQ ID NO: 600401 - DNA, 431 bp, Homo sapiens
  misc_feature (29)..(30): n is a, c, g, or t
aataaacctgtatccgagtacgaagtggnngaacagggttttacaggacaaaggaataaaaggcttgagtctccaaaaagaacttaaagttattcttggtagggtacagagtagaaagggttgttaagagggtagaaggaatcagaattgcctgtagccttcgcttctgttttggactaactgataaaagatagacttacttgcataggaatgtaaattagataagtgagataatttcagctcttttttaacttactagcattgcttttatgtgctaagtcatgctttgatttaaatattaagaaagtgtccttgcttaaatcaatacttgattggaatcgatacaaaaatctgtgataaggataaacccgggcggccagattatgatatcctaaggaaccattgataggtttcatggaggttatttaggt

SEQ ID NO: 600402 - DNA, 354 bp, Homo sapiens
gttgccttgttcacgggcctcatcctctccttacattttctgtcatgtctcccgggtccagatcagcatcctcatcctctccactggggacaggttcactcccgtgtttaaatttgtatcccaaaaagagatcgctttgatttactcgaagatttggcatcaccacttttaggcttctctttcttatcttttgacttctttctttccttgtccccttctttgtctttcctagaactcatttgtttctccttgttctccttgttctctttcttcttctgttttttttcattggacttttttccaagccatcatctttcacttctccctcttctgatggattatctgaattcctag

SEQ ID NO: 600403 - DNA, 543 bp, Homo sapiens
  misc_feature (85)..(86): n is a, c, g, or t
  misc_feature (365)..(365): n is a, c, g, or t
cttttccacagggacaagggacactaggaggaatgggtggaggacaggcacagcactgaggctccagctagatgtatgacagggnntgggggtgaaggggcagaggtgagaatagatagttgaggatttgtggggttctgggttatgtccagggtaagcgaacactttcagtaagctagtaggtgggtggacagaaaggcctccaagagctcatcttcaagagatctctgtgtctcagctgctcatccacctctgtagaacatccctgcagatcactcacccaacaaattccattgattcaaatcctaaggtatccaactctgggttgtggaggccacaaaaaatattttccccatcttcactgnggacagaaaagttcaagctttggattctaactgatctcattttaaataaacctcagctctctcgtctactagctgtaaggcctggacttcagtttccttagctgtacatgggatgctcacttccacaaatgttggaggtgaggtgagataatgctggtgaagcagcacacacggttcc

SEQ ID NO: 600404 - DNA, 344 bp, Homo sapiens
aggcggctcttacacacagggttctgtgcatagaggtacatggcaaagctagagaggaggcatgtagagagcctcgggccttatggggcttttaggagtgcctagttcagcccttttaaatgtgggattaccccctcagtccttgtgaggcagaagtcgtggctatgaatcttgcaggcaacatttgtatttttcatgcatttaatggtggggacaatggcagccaattgggtaaaacccacagaatgagtcttttggatgacaggtttacgcacttgcccccagatggatgttttgaattgggcacacgccgtagcataacatggaggctatacagcgccgtt

SEQ ID NO: 600405 - DNA, 724 bp, Homo sapiens
ggtgagcggtggaggttattccttccgcggagttaagggctccgtggatcaatctcaggtcttcagggtcttccactctggaactatataaacggttcatgaaaacatgtgctcgaagatatgactacaggatcacgtatattttacctccagaaggtcgcttataccgaatgttgaatatgccatggaagctattgtagatgcaggcatcctgttggggaattgagagcaaatgatggtgttatggttgcagaagagagacgcatgattgagaagcttcttgatgaagtcttttgtctgaaaaagaatttataaatcaatgaggagatggttgcatttgtgtgcaggcataacttctgatgctaatgttactgagtaatgaagctaagggtcgtgctcaaaggtattaatatagagtatcaggagccaataccttgtgagcagttggttacagcgctgtgtgagtatcaaagcaaggcttatacggcaatttggaggaaagcgtaccttttggtgttgcattgctgtgcatgggttgggataagcacatatggttttagatcataatcagagtgaccctaaggtggaaattaccgggggatggataggcacatgttttggtaactaatagtcgatgatgctgtgtacatgctgacaagaatatattaaggtaatcgtcgttgactgcaacttgcttggctatcaagtatcaatagaactggtt

SEQ ID NO: 600406 - DNA, 393 bp, Homo sapiens
  misc_feature (331)..(331): n is a, c, g, or t
  misc_feature (354)..(354): n is a, c, g, or t
  misc_feature (367)..(367): n is a, c, g, or t
gcctgtagtgccatctactcaggaggctggggtgggaggatcacttgagcctggggaggtggagattgcagtgaaccaagattgtgccactgcattccagcctgggtgacattaaaaaaaaaagagagatcatcagtgtaaaagatacacaattataaaatcaagtaagtaaaaactcttaatattacatttaattggggaatattcaggaatttaactctttattttttaaagtgccaaaagtttttaatttttcatttaagtctggacccatttttgttcttttatttgcttgtacttttgggtgtttggatcctaattaaatccattngattaaccctcaggtcccctaangggtttacctttnggttttccttcctccgggggtttttc

SEQ ID NO: 600407 - DNA, 151 bp, Homo sapiens
atcttgaattactaaccacgtgatccacatgcgttagcatccaaagtgctggattacagtagagcctctgcttctggcctttttaaaaatttaaaaaatttatatttaaagtagagcaagggtttgctgtgttgcacagtctgggcttcaa

SEQ ID NO: 600408 - DNA, 193 bp, Homo sapiens
attcggcttttggcaatcccgggcccttttttcccccccccccaatgtcagggttgaaaactgccccccagtggttggggatgggtttttggccccccgggatctaggtgctaatatatctcctccgaaaagatataatgtatgttttgttttattttcagaaaaagaaaatgaataaaaatgttgccctcca

SEQ ID NO: 600409 - DNA, 454 bp, Homo sapiens
  misc_feature (65)..(65): n is a, c, g, or t
  misc_feature (403)..(403): n is a, c, g, or t
  misc_feature (453)..(453): n is a, c, g, or t
ccatttagagccccaggtgtccagcgtccctctctgccaggaggagtgtgccgggcatagccagnagccaggctcaaccgtgtgcccaagcccgaggccgaggtctgactctactgccatgttacgtggcgtgagaatcacactgcagctgctttccatttttatatatataaatacatataaatatatactttttaaaaataatttataaatcttaccaaaacgttatgctgaatatactttccagtatgagtgcacgagtgtcctgagcaggcagaaccgcagtctagatgaatggcgactccatcagcagtccggcacctgttcctgagacaaggcctagccagtgcccagggcgaggggcctgtgatctgcctgtactagcagtttgtcactcttctgncttttctgtgtaatattaagaactgaatgtgaagttttatagctagcctnt

SEQ ID NO: 600410 - DNA, 126 bp, Homo sapiens
cgctacctacacgctcgtctcactcaattcaatgtcacacttctgcctctgcaaaattgctggaggcagaagtgtgacattgaattgagtgcgacgagcgtatggttggtattggagagtcgccaa

SEQ ID NO: 600411 - DNA, 179 bp, Homo sapiens
  misc_feature (1)..(1): n is a, c, g, or t
naaaatatagcggaccgtgtatttacatggaaacaatgtgaaatgagagaaatgcaacagctttcagtgtggacagaaatccttggtagcccttgccttgattttttgccattcagaaatgtgaccctggctccattttacttgttttgatgaaatttgaccaggctctgtgatgctca

SEQ ID NO: 600412 - DNA, 755 bp, Homo sapiens
aggcgagaacgaccccgcggaccgaccaaagcccgcgcgcctgatgcatcccgcgatcagcgacctacgtcccgctgccgtctgcggcgcaccatgcccaatgagaaatggctgaaggggatgctaagggagataaagcacaggtgaaggacgaaccacagagaagatccgcgaggttgtctgctaaacctgctccgtccaaagccagagcccaagcctaagaaaggccccgtgcgaagaagggagagaaggtacccaaagggcaaaaagggacaagctgatgctggctaaggaggggaataaccctgcagaacaatggagatgccagaagagaccaggctacagaaagctgaaggtgcgtggagatgccaagtgaagtgtgtgcatttttgataattgtgtacttctggtgactgtacaggtgttgaaatactaattgttctaatcaagattttataagaatgcacgaactgatgctgtgacgttcctatggttcccagtgtgtgagaaagctagtgattgataagcgacgacagaaccactctgcatgtgctggattaatggaggggacagggcgccttattgtccattcaatcacgcaatgtcctcccaacgcgcagtgattagatggtgggacgaaacacaccttttcccttgatgagtccttgaagagacttcctcgtggggctcccatggcaggagggatgccccggagttggaccacacatgggcccactgggcacaaacgccttggg

SEQ ID NO: 600413 - DNA, 320 bp, Homo sapiens
  misc_feature (16)..(16): n is a, c, g, or t
  misc_feature (194)..(194): n is a, c, g, or t
attgcgcgtaattttntgaacaccccgcccagccatctgttcccggccgaattcgccaagcgggcaaaaactctggcgacgaccgagggcatcgaggtcgaggtgctcgacgagaaggaactggccaaggccggctacgcggcatcatcggagtcggcaagggctcctcacgcccaccgcggctggtgcgcctnacctaccggggcgccaagggcaagaaggccaagaaggtggcgctcgtgggcaagggcatcaccttcgacaccggtggtatctcgatcaagcccgcgggcggcatggagaacatgacctccgatatg

SEQ ID NO: 600414 - DNA, 1065 bp, Homo sapiens
gttatgaaatggctgccaccttcggcgtgcccagtattgacctcgtttgtacacttccacttcaccgtctccccacatggtagtaccgcctttgcctccccatacatcgtataagaccattgatatgtcttaggggtcattaccccatatcccttatagctggccaaaagcatcagtgggctgtgagggtacacggtctggagtggaacagtacagcctccacgcctagccatgatatcactcgcggtgtcgttggttcgggaaaaacctctctgtgtgtttctcttgggggtctgacacgttttctcgatttacactaccaatgattttcttgacttacatcaatcaagggatgactaaccaagatcctagcattcgtatagctgccgccaagccagatccaaggaaagaacctcgcagacaaaataacaccgaaatcgtcaagggaggcagcacgcaggcacacggacgagtgtaggagatcatcacatggggaacatgactggtgatacgttcaccagaacgaacccctcgccgtgaatcagccatgcacagtttggggagtgacagatacaaccggcgaatatggaaaataccagcgtcgagaggcaaagccgagagtctcgtggtagcaaaaccacgtggaatcgtcgatgttgcccgtaacacgggcatggggagcggacacacgcgaacggacgggccaccacaaagctaggtcctggaatgacaatcaagaacccacgggggcggtagaagcattgcattttggaggagcgcactacactaaaggcccaattcaggacgcgatctcaaattgccggtcacagacctcgcaaaaccgaaagtgaacgaggtacttacagctatcagtagaaacaaagacactcagacaggcttccaaggtcactgtacccatagcggccaaggagtttttactggtgggtatgcaaagtaaatcataccatcagctttcatactagctcctacgaattctaattctaccagatacgcgtgcacattacctcctaaacagctatgctaacttgtgtagatcacacttca

SEQ ID NO: 600415 - DNA, 496 bp, Homo sapiens
ttctagtgcatatcagttggtcttatttgaaatactttctctaggcataaaggagtttaaggcagaaccatagacactctttactttgatgttctcagccaccttgtcttagatgtggaaaaagatagggaaatccgtggttgttttcggtattcaggattctgagattcttctactgggagagacgtcgtccatagggaataagagaaagaaatgcttgaggttgaccccttgagaagggatcaacctgacaggttccagtgctgagggtcataagtgggtggggagatgtgagacctgcaggtctggaattgcccacctttgtcctgtgccattggatcctgggtgggcaccacacagctgggccccctgcacctgtattggcttgtcatggcttacctttagaaatactttgggggagggcaaagagacaatgcaggtttctggtagaatgctgtggtagagtaaaaaaaaaaacacaaaaaagagaaaacaa

SEQ ID NO: 600416 - DNA, 305 bp, Homo sapiens
  misc_feature (191)..(191): n is a, c, g, or t
  misc_feature (211)..(211): n is a, c, g, or t
tcatacttgaagccaaggcgttgggaagctaaagtcccccgatcacaaggtcaagagattgagaccatcctggccaacgtggtgaaaccccgtctccactaaaaataaaaaaattagctgggcatggtggtgcgcgcctgtggtcccagctactcaggaggcctaggcagggggtctcttgaacctgggangccgacgttgcaatgagccnatatcgtgccactgctctccatccctgggtgacagagcgagactctgtctactaaaaactaactgggcctaataacaattcgcctactcttggt

SEQ ID NO: 600417 - DNA, 1065 bp, Homo sapiens
  misc_feature (243)..(243): n is a, c, g, or t
tcgacccatcgcgatccggaggagaagcaggagctgtcgggaagatcagaagcgcagtcatggatgagcatgcgcgagcttatctccaacaatgagcaactggccatgctgggccaggcgccctggggccccggagagcaagtgcagcctgcggagcctctgtacacgaggcttttccatcctggtgactcgtgctcctcgcgtggccaggccgaccacgcgccatacgttcctggtaccagncgagcagggccggctggacaaaactgagcaggtcacctcccagaaccgtgcagctggagaacctgcgcatgaagcttcccaagcctcccaagcctgtgagcaagatgcgcatggccgacccgctgctgatgcaggcgcgtgcccatgggagcccggccccaggggcccatgcagaatgccaccaagtatggcaacatgacagaggagcatgtgatgcacctgctccagaatgctgagcccctgaaggtgtacccgacactgacaggggagcttcccggagaactgagacacgttagaacgccatggagaccatagaccggaaggtcatagagagcaggatgcaccatcggctcctgaacgacaggagcaggcacaccttggagcaaaagcccactgaagcacaacgaaagagtccgtggactggaggacccgcaccgagctgagtgtgacacagccggacagggacccaagcccccacgtaagaggacgacaagcagacacaaagcacggcagaccacaaaggaagatgacaagaccaaaaagcccaaacacgcacacgacaaaccgacagagacacaacaaagcgcagcgcagagagggcgacgaaggacagaaaacgcaacaggacggagaagagagaagaacagaccagacgaggcaagaggcagacgagagacgaacacgcaagcagagagacacagacaccagcagaacgagcagacagacaccaacagacacaccgccgacagggagacgaggagaacaagagcagagcgaagaacaacaacagcatcagtacagcaagacagaccacacacaccc

SEQ ID NO: 600418 - DNA, 313 bp, Homo sapiens
  misc_feature (296)..(296): n is a, c, g, or t
tgtggcgagggggttgtgggtcgtgtgtctattgtgtgtccgctgcgctgcagcgtgtccttcccgtctccgagtgtatctgcggccgccactccacgcacttgccttccaggtaggctctcgcgtgctccgcctcaggggccgcctcccagttgcgctgggtgatctgagccgccgtgtccggggtggcccaggagcgcatatcctcgttcagggcgatgacctcattgccgtcgtaggcgaactggttatacccggggaggaggcgcccgtccggccccaggtcgcaggcaaanatcctctggagggtgtg

SEQ ID NO: 600419 - DNA, 404 bp, Homo sapiens
cagggtgtatgttctgatagtcaactgcgtcaccatggttccgaaaaccagggtctcgtatgtgacaacagaggatcctcaacggcgactggctgtcctcggtcatgctcaggtgagtgctggaggtgatatgaagcctgtatcatagtttaactcttctcattcatttctccattatacataatatcgaggcagctcacaaacgctttgaactcgatgagctggtccttgttgtcatccgagagcctgaacgtcctttcggcgagtatctccgtgtgggccccgcaggtccagggcgagactagctgaaacaggtgtgcaaactgccgggcgtctatgcggtactgctcagcaatagggccggctggggtcgtggcgtgaggccatgggcctgggctgcttcc

SEQ ID NO: 600420 - DNA, 375 bp, Homo sapiens
  misc_feature (166)..(166): n is a, c, g, or t
gcgatccgtataaaagtgaggtcagcatcggggactaggtgggcactcactggtactggcctttatgctttgcttgccttggtcgaggggtgcacatggcggcagcagtggcgcgctgctgtggtggtggcatgcgcgagaagggggggtccactgcgagtgttgngggaagccttggacgaggccttctttgaggctccccgccgcagagggctgttccctagcttcttgggtgtgttgaggatgctgaaggccatcgactggcgccggtcagcttgtttagtagaagctggagctgctttcttctgggcctcagtagtgctctgtttgcgcccttcatgtcggtctcggggagccatggggcgtgggaaacag

SEQ ID NO: 600421 - DNA, 207 bp, Homo sapiens
gaggagaccccgctcatggcggccgacaccagatggaggagatccacagttgcgggggtggtcagcttgagggagcggaaacagatgtcgcaaagtgacctcttgtcgatgcatgaggcttcatacgtattctcaaccagctggagcacagacagcgagtcgtgatatggctacaccaccgcgcctgacactttgtgcgagagcgcc

SEQ ID NO: 600422 - DNA, 302 bp, Homo sapiens
attcgcggccgcgtcgacagagattaagaggcatgcatcaaccttaagatttaaggttatttgggaggccaaggtgggcagatcagttgaggtcaagagttcgagaccagcgtggccaacatggtgaaaccttgtgtctactaaaaaaatacaaaaattagctgggtgtggtgttgcacacctgtagtcccagctactcagaaggctgaagcaggagaactgcttgaaccctgtaggccaaggttgcagtgagccaagattgtgccattgaactcctgggtgacagaggtagactctgtctc

SEQ ID NO: 600423 - DNA, 150 bp, Homo sapiens
gactttaggtgtaattctactccagagctcttggttatgtgcactctaggataatttgattatgaacaccatcatataggaatcttttcatacatagtctctgtatttatgcctgactgggacatgtcgtatactttcaagcaaggcaca

SEQ ID NO: 600424 - DNA, 680 bp, Homo sapiens
tcagcttgcccctcttgctcgacttgaaaatggaaaagatgctcgcaggctgctttctgctgatcctcggacatgatcgtcctcctccctgccgatgccaatgaacggtcacgtgggaggtccatctctaggggcagacagctgctcggacccaaccggaggacggcccttctggagcagttccgtgtgataacaatgcggcgcagagcgggttttcatcatagacagctctcgcagggtcaaggacccatgacgtatgcaaaggtcaaggagttcatcggggacatctatgcaattcttggacatttggtcctgactgtcacccgagtggggctgtccacgtatggagcaactggtcactgaatgagttcgtgcctcaagaccttcaagaggaagtccgacgtggagcgtgctgtcgcagaggatgcggcatctgtgcaaagggcagccatgactgagctggccatccagatatgcgcctgaacgatcgcattctccagaagcacaaggtcagtgccggacccatgacgaggagaatgtgccactggcctcataaatgcatcgtgcgctggcatgggagaccaccggggctccacgacacggggcttgcggcaaacagcagggcactgacacaacccagcgcgacagccgagcccgaaaaccatccccatcggacatcc

SEQ ID NO: 600425 - DNA, 714 bp, Homo sapiens
acttttaattcaacatgagtatcatatggtatctctctagatttcaaggaaacacactggatactgcctactgcccaaaacctcattcttcctcatttggcctaaaccatcatgtctcacacacttgtccaaatcatccaatcaatgtcaaccacatcatcacatccaactcttcatttgtccagccatttggtcaccatcacagcacaacattcattttccagcgttgatgcacatccacacatttcattctctcactttcatggcctttgtggtgggggcgctttctgctgagggcattctttaaatcaaccacatttcccaaacactgtgctggcgggcaacaatctttcccccccccacacagttttttcaacacgacacaccgcggcccccacaacccgttcttactcacactccacatctaccatctcgatccgcgttctccccgccaacaacaaacacgcgaacaagtacactcgcatccttcttgtgggcgggggagcctcccgtggtctcatacacaacacacacgatgcttttttttgaccagaaccagcaccacccaacccgtaccgtccgatctatttcttcatccagcagcatcacactcacctactttatactctcctcccacccacccaccacccccctcccctccccaacactacattatctatttccttcaacacacacaacacacctcccccacca

SEQ ID NO: 600426 - DNA, 136 bp, Homo sapiens
ggcacagtgtgcggcatgctacggtctttagctactccttttcctacaagcatctcaagcacgagcggctccgcaaataccactgaagaggacacactctgcacccccccaccccacgaccttgtgcccgagcccc

SEQ ID NO: 600427 - DNA, 703 bp, Homo sapiens
gttaaaaaaaaaaaaaaaaagtggcagatcctggctcctatacccaaaattattataacatttttccagctaataatcacctgatcctttaacttatatttctttaaaatagcaactaacaggctgggtgcgggggctcatgcctgtagtcccagcactttggggaaggccgaggtgggcggatcacaaggtcaggagtttgagaaccagcctggccagcatggtgaaaccccgtctctattaaaaatacagaaaaaattagccgggtgttgtggcgcgcgcctgtagttcccgtgcttactcagaaaggctgaggcgggaaaaatagctggggcctgggagaacagaggctgcagtgggccgggaaccgcaccattgcactccagccgtggaacagatcgagactccgtctcaaaaagatagcaaactaagataataagtgtatttcactgtaactttttacttactttagcaggtttttcacctttcacttccactttttccaatatccttgccactcctattccttaaattactgtggccaaacaccacaatgtttcccatccaaatgaggagtgggacctgtggtgataacaaaatggagaaaccgttggtgttgcggcctgcatttggccatgctcagtaaaaccctcccgatcatgctgtgacataaaaaaacaacacaaaatcaaaaaaccacttg

SEQ ID NO: 600428 - DNA, 463 bp, Homo sapiens
  misc_feature (178)..(178): n is a, c, g, or t
gggggtgatctaaggatcttagtcgcgtttttacattagtagggatcaaaataaaaaatagatctgtagaagtaaatgactgttcactagattgagcgtgttgattcaaagcaatagtacaaaatgaggtgcggtttgattcacatcaccagtcactggaaattatgtcacattagtntcataagtcatggtctttgatttttctaaacagagctattacaaattaatacaaacttgaaacataccctaatttaaactaataagcttggggcccggctttttaaattttaaggcatgtgtgtttctctaccataacaacatggtacaaatttacatttacaatcacatgcatgatctacagttaaaaaaaaaggttgggattacagggtttttaaatggtgaatcacaattcagcacctatcaggttataactaataaggcaacagcagtgttgtatactata

SEQ ID NO: 600429 - DNA, 962 bp, Homo sapiens
  misc_feature (959)..(959): n is a, c, g, or t
aagacaaaatgaggaagaagcaaaagcagaaacccctgataaactgatcagatctcatgagacttattcactgtcacgagaatagcacgggaaagactggcccccatgattcaattacctccccctgggtctgtcccacaacacgtggaattctgggagatacaattcaagttgagattgtggggggacacaaccaaaccatatcagcatcctttcaagaatatcagataatggagctgagtactcaggaacttgacctgtagtagaatactgctagttcccttacttttaattcacatcacctgaaaagtaaaaacaaacaggcttggccaaggtgcatgcttttcagtaacacgtgaacgtgcagtgaatacccaacatgtttgcccgtggtggttcctatctcttcaggcaaaccatggtcagtattctggtaaaggttcccccgtggcctaaatgattacttgtgctctggggcacccgcggatattctattaaggctattcacaaagccacaagcaataagaattgtcagcctagccaaagagtctgaagatctcgagtacagactagcgacagagtctaaagatacgtgtatcctctgacattttggacatgctaacactactgcttaagtgatgactcctccaagatttcaagtatttatacaaatatatggcaattccttatagctaatcggttctggctcttaaacctgggaaaaccctgaattgcgtgggtccaataaaagggttagttcttccatcacccgacacggtcatatcggggagacatagcgagtcaggacatcccaggggaccaccctcggccccacagggtagtataccacaagatacggatctaagcacttgaggcctagccacggtttcacagaggaccacactcttttatacacagttgtccgtctcataattttataatttccacttatttatggngaa

SEQ ID NO: 600430 - DNA, 123 bp, Homo sapiens
agaagctgatgctggtggtccctgctagtcagtgtggctctctcattggaaaaggtggatgcaagatcaaggaaatacgagagagtacattgtgctcagtgtccaggtggcagggtgatatgc

SEQ ID NO: 600431 - DNA, 103 bp, Homo sapiens
  misc_feature (5)..(5): n is a, c, g, or t
ccagntatatgagtgtacaacgctgcaatgtgatcccaaacatgtgcacaactggtgtgcacatggactacagatcgggtacagctattcaagaaccagaaca

SEQ ID NO: 600432 - DNA, 546 bp, Homo sapiens
  misc_feature (382)..(382): n is a, c, g, or t
tcctgctagaagctgttattgtgctgtgtaggaagaaagagagcacctaggagtaggccctggtccagctggagcgagaggcaaatcatctttaagttcctcttcttcaaaggctcagaaattaaattaagtatactttgtggtcacgaaggggaaagaacattgctttttaagagaccagaagtggtattcaccatggcttcttccctattattctctgtttaaatcatctgttctgtgtccaggaccagccactgttgcagcatgagttcccagcagcagaagcagccctgcatcccaccccctcagcttcagaagcagcaggtgaaacagccttgccagcctccacctcaggaaccatgcatccccaaaaccaaggagncctggcaccccaaggttgcctgagccctgtcatcccaaagtgcctgagccctgccagcccaaggttccagagccatgcaccccaaggtgtctaagccctgcccttcaatagtcactccaggaacatgccagccgaagaccaagcagaagtcatgtggtcacagc

SEQ ID NO: 600433 - DNA, 231 bp, Homo sapiens
aaatcgagctcggtcccagagttactccagcctgggcaataagagctagactccgtctcaaaaaaaaagttcgacacagaggtttctagactggccaggctggtcttgaactcctgacctaaggtgatgctcccaccttggcctcccaagagtgctgggattataggtatgagccactgtgtccggcccagctaagaattttctctttttgagacagtcaagctcttattg

SEQ ID NO: 600434 - DNA, 475 bp, Homo sapiens
ctcaggtccaagaggcaggcggacagagggctgagcactgttccgggagcacgaagagcgacacaggtgttcgtcccgcgccagctctactctcccagaaaaaggcagggacagtattctgggtctggagcacaggattgggggtagggagggggactgggtactcctggatcaggtgctggccagagcaggtcttttccgtctttaagacatgcccaggtgggttttagcggcaacttcctagcagcgacactccccctcacccatcctgccgcggcatcccaccttctcgccttcttccaccttggcttgagtgtgacaatgaactcccccaagaagaagggcacccaactgtgtggggcgccttctgtccttcgctatacccctcccccgagaaataaaagctcctgccacccaccccagaatagcagctggtgatgccctaaataacagctcccagcaggcactttcccca

SEQ ID NO: 600435 - DNA, 645 bp, Homo sapiens
aagcggatagggtagcaggcgctgcagaagctgagataggctgcacggtaggcctcttggacaaacacttagccaagttgtgactgcaaagggaaaagttcttgaaattaagtgttactccagtgaacacaaatgattagaaagccttattgctgataggaaaaaaactttgctctaggtagaagatcaagccagccaaaatactcccttaagcccaggcttaatacagagcaaggccccctgttcaactctgtgaatgctgagagaggtgaggaagcagcagaataaaagtttaaagctagcagagttcagctcatgaggtttaagggaagaagctgtctccataatataaaagtgcaaggtgaaacagcaagtgatgatgtagaatctgcagcaagttatccagaagtccagaagacatagctaagatgagtttatggaggcagctgtgctaaacaacagattttttcagtgtagacaaaacagtcttaaattggaagaagatgccatctaggactttcttggctagagaggagaagataatgcctggcttcaaagaacaggctgactcttgttagggggtgaacagctggtgactaattgaggcagtctcatttccattctgaaatcatggtcctcatccgt

SEQ ID NO: 600436 - DNA, 407 bp, Homo sapiens
cacatgctaaatgggaggactgcggacacataattcccgctacgtgttcttgtcgctgattggggaaatggtgtacttcaccccccttggtctcattagctcaggaaaaagttaaatttgatgcttctatatttgcctataggaagaggaacatttgtctcttctgcctacttgaggatcgacacaataatcactggaacattagatggatatagctatatgcctctaattatccaacttggaccttgcatgataggggtataatagttggaaattttgaaaaaggatgtagtcctgccatatgagggacagctgcatcagaccttctctctcttttttttttcttttttttttgagatggaatcttgctctgtcgcctaggctggagcgcagtgtcgcaatctcgg

SEQ ID NO: 600437 - DNA, 267 bp, Homo sapiens
caaataaaacacaaccagccgggccacggtggaatttgcctgataatcccagcaccttgggaggccgaggcaggtggatcacccgaggtcaggcgtatgagaccagcctgggagacagaggtagcagagagccatgatcatgctactgcactccagcctgggcaatagagcaaaacgctgtctcagaaaacaacaatgacaatgaaaacaattttcaaaacttagccgggcgtggtggcatgcacttgtaatcccagctactaggga

SEQ ID NO: 600438 - DNA, 1105 bp, Homo sapiens
  misc_feature (481)..(481): n is a, c, g, or t
  misc_feature (623)..(623): n is a, c, g, or t
ggtgatccgggctgggcgggaagtcgggtgtcccgaggctccggctcgcgttaccgggccgcggagaagcagccgagcggcatggagctgtgcgggttgtgtgggctgccccggtccgaccggtgctgactggcgcctgcctgttggtcgacacgtgcgtggcaggcgactgttggcgctgctgactcatcgtgtgcgtctggtggtgcaggtggcgggatggcggttcgggcccccgagcgatctcggccaaagcgcaggtggaccaggggcgtgctgtgcacaccctgcccagcattctatgcgtgagaagacttgataccgcgataccttagcgtgtctatctcggtcccctggtacgtatacttctatcagtcacggccgacaggatcgctcgagatttctcgacgggacaggtgtccgccgtcacatgaccatctcccttgtctgggcaagggtacatgccagtttatccgaagcnaaggtagatcaattgtggcttaataattatctttgaggtgtatacttacagaaggtagaggccaatacagtaggagatcgccgttgccgttggatacttttccccatgtggcgtaggaaaataactccaaggggatatacancgacagaaacttgttcgtatggtacctgcgagagtaccaacgccgtgtgcagtgttccacggacggtgttggaactggcgtttgttccctctcaagatctaaattaggtcttttcaggaaagttggaagggtccttatataacgttttaagctgtgggttgaaaaaagggaaacccaaggtgggcttggttccgttttaagggccgcagaacacgggaagatatttggggcgggatcggacaatataccggaaaggggcgtatttaaggaagcgtgaaccccttttttaggctgccagggtttaggttgtataaattcacaacggaaattttcctttaacttgtggagaacttttttccagccccaattccaacgtggaaaaatcgcagcccaatttaatttggaaatttcgttcccagaggggtttttggtctttcagcgaggagggcacaatttttcggagtttggattaaccattcccg

SEQ ID NO: 600439 - DNA, 140 bp, Homo sapiens
accatccgaaacatgagcatatagtcccagaggactcagttctcaggtccaccagggggtctcccacttcacagcgccttgtatttgcagccctttttgcctgtaaactcgctcaagcctcttatcctccttatccccgg

SEQ ID NO: 600440 - DNA, 943 bp, Homo sapiens
  misc_feature (511)..(511): n is a, c, g, or t
  misc_feature (876)..(876): n is a, c, g, or t
  misc_feature (931)..(931): n is a, c, g, or t
  misc_feature (940)..(940): n is a, c, g, or t
ccgtgacatcagcacttcccaggtcccactggtatcattctacacctccgagactccgtttctgtctgagcacggccacacaatcattcctgtcagggtcgttcacttgcttcttattagtactgcaaacagtttaattagttagtaagaaacttggcacagtctggaaatccacatggccacagcgagatcttcaccgatttgcccgttcttagcacacaaatcaatcttgggcattcacatggcgtacaaagcaggacttaggcacttccaggctttcccactgtgttggcatggccttgatgtatatggagcttctcctgagacatcctgctggcttgaggtcagcgcccagtttagcagctgccagagaacgaaagcacagcaaggccgcttcctgcggctaagatggacaggcgactgcttgcagggatccgggggtgcgatcgaccgaggcccctgtctccagcaaatgccttcagaccatccacctcggggttgcaatccagcnacagcatttcccgcctaaggcagatgacaagagtccttggaagtgcagagaggtgagacactcgccgcaccccgacaggtaagaatgcgcaggctggccctagcacgggagaatttaaagaccgctgggacttccggccgcccttgcagccgcgccccagctccggttacgcccgagcagcctaatcctcaacgacccgaccctgtccagccccgcacggccgcacgtacacaaacactggcacgtggagcccggcccgggggcagggggaggggcgggcgcgcgagccatccccgattggccagctgtggatgcgtcaggccctcccacctcggggcgcccgcggcggccccacggagcctcgnggcgtgcgcagggtaagtcagtgggcgtgagaggactggagtaggagcgggtggngtccgcggncgc

SEQ ID NO: 600441 - DNA, 376 bp, Homo sapiens
  misc_feature (45)..(45): n is a, c, g, or t
  misc_feature (275)..(275): n is a, c, g, or t
  misc_feature (373)..(373): n is a, c, g, or t
tgagacagagtctcactctgtcacccaggctggagtgcaatggtntgatcttggctcactgcaaccaccacctcccaggttcaagcgattctcctgcctcagcctcctgagtagctaggattacaggtgcacgccaccatgcccagctaatttttgtattttttagtagagacggggtttcaccatgttggccaggctggtctcaaactcctgacctcaggtgatccacctgcctcggcctcccaaaatgctgggattacaggcgtgacagctgncgtgccggcctgtaggggcacattcttgatgaggtaagttaaattacttttttcttgctcatatgtcttttacattacatactgatgtatggtagggnagc

SEQ ID NO: 600442 - DNA, 204 bp, Homo sapiens
ctcggtacccccacctcctgggttcaagtgattcgtctgcctcagcctttggagttcaagtgattctcctgcctcagcttcccaagtaccaagtagctgggactacaggagtgtacaaccatgcccggcaatttttgtgtttttagtagagatgtgggtttcaccatgttggtctcgaactcctgacctcaggtgatccacctg

SEQ ID NO: 600443 - DNA, 230 bp, Homo sapiens
  misc_feature (107)..(107): n is a, c, g, or t
ctgaggtgactctagacggatccctactttacgcaggcttatacccgcacttactgggaattcctcgtcatggggaataattgcatcccgatcccatcacgaatggngtacaacgggtaaccgcgcctgcgggtagggtaggcacacgctgagccagtcagtgtagcgcgcgtgcagccccgggacatctaagtggcatcacagaacctgttatttgctcaaatctcggg

SEQ ID NO: 600444 - DNA, 403 bp, Homo sapiens
  misc_feature (288)..(288): n is a, c, g, or t
  misc_feature (297)..(297): n is a, c, g, or t
  misc_feature (379)..(379): n is a, c, g, or t
  misc_feature (400)..(400): n is a, c, g, or t
gactggagaggtggtcatgggtgtttacagcgtatcttttacgggatacgtctttatcccagcagacagtctaatgcctaagcatcctatccattaccaggtgtccctctcataggaaactcatttacactggcagtacccctgtggttcttgtctgacctacatctagtctattcctgccaagatagccattctctaggagatccctgaccaggaaagaagttcaattcaagtgtgttggtcaggtgagacacagaggaagcaactcaacaaaacacatgaaatganacaacagangcagtttattacttacagatcctgcatgcctcacagggccagcgggaaggggaaagcctgtatttgcaggctatggcatttnccaagcaggtttcctgcaggngag

SEQ ID NO: 600445 - DNA, 177 bp, Homo sapiens
tgcaaagtggagtattcagtcacatcttcaagctccacttccaaatgtagttctccggctactgtaccacatcgcagctacctcctcaaagtcatctggtagtcgtgagcccctcaaagttatccaaaagagatagaatctactccggtgaagatcctgtgttacgtctaggtcggg

SEQ ID NO: 600446 - DNA, 626 bp, Homo sapiens
  misc_feature (195)..(195): n is a, c, g, or t
  misc_feature (626)..(626): n is a, c, g, or t
tcgcggcctgtccgtacgtgcgatacgtgctccggctctcgtggctagcctgacttagatgcatagggatcgatatgttagagacttactttgggaaggctcgaagtggtacggcatcaatattggggatagagaaacagtctatgggcaagttgacagttcgacagcacgggttggccttgtcggctgccgaancggagttgggccgccccaaaattatgcagcctggcaagtgataccagcggaacaaacaaacaggggaggggagaggcacacacacacgtggcacgggggaacccacaacaagtggacaagcaggggggtgacacacaccacataaaacaagggccccagcgagggagtagacccaacacaacacggccgggggggtaaataatcatcaaccgcagcgcacaacacatttttcttgcgggggggcggggcagagcagaacataaaagcagaggcggcagcacagaccaatcaactactcctcgggtgcggcgagtagaatacaaaacacaccagtctgagtttagacagtagcaaggacgcagcatatcttttatatcgccgaccaccgcaccgcacagtattatgttcgtcgcaccagcaagctgcatagn

SEQ ID NO: 600447 - DNA, 373 bp, Homo sapiens
cgggaattcttctcgggaggcagtgctaggtcctttccaccatggcacctaagaaagcaaggggagagccggggcagcaactccaacgtgtactccatgttcgaacagacccaaatccaggaatttaaggaggaccatcactatcatggaccagaacagggatggctacattgacaagaacgatctgagagacacctttgctgcccttggaaggtgaacgtgaaaaatgaagaaattgatgaattgatcagggaggctacgggtccaattaacttggctgtgtacctcacatgtttggggagaacttagggagcggacctgaggaaccattctcacgcattcaagtgttgacctgaaggcaagggtgctgagg

SEQ ID NO: 600448 - DNA, 226 bp, Homo sapiens
taaacgaaacaaaacagagtcttgctctgttgcccaggctggagtgcagtggcatggtcttggttcactacagcaaaacacacctggacccaagcttgcagtgagcaatcatgtctcaccgcaagctccacctcctgggttcacaccattatcctgcctcagcaatgaagaagaacagaaaggtagagatttctcttaaaggtgacttcagacttgagcccatagc

SEQ ID NO: 600449 - DNA, 198 bp, Homo sapiens
acacccattgaggggaagaacatgtccttggtgaatgctcttacagtcactcaggatgggaggaagatttatgtcaccgattctagcagcaaatggccaagacgagactacctgcttctggtgatggagggacagatgacgggcgctgctggagtatgatatgtgaccagggaagtaaagtttattggacagctgggg

SEQ ID NO: 600450 - DNA, 365 bp, Homo sapiens
  misc_feature (14)..(14): n is a, c, g, or t
  misc_feature (19)..(19): n is a, c, g, or t
  misc_feature (121)..(121): n is a, c, g, or t
  misc_feature (126)..(126): n is a, c, g, or t
  misc_feature (147)..(147): n is a, c, g, or t
  misc_feature (213)..(213): n is a, c, g, or t
  misc_feature (223)..(223): n is a, c, g, or t
  misc_feature (304)..(304): n is a, c, g, or t
ttttgatatcaggngagancatttcctaacccaatctatgaggctaatattatcctgatagattgggttaggaaatgttctctcctccgttttttttggaagagagagattggtgttaatncttgngggaacctttggtagaatttnccagtaagcctatctggtcttgggtctttgggaggattttaattcgattcaatctatgtatttgtnatagatcgtncggattgtccatccttgagtcagttgctagcttgtgtgtttcttggagtttttccgtttcgtccatgttatctcatctgtnggcataccgtcgttcacgggattttattgatgtgtgtgaggtctctgagaacgtccctgcc

SEQ ID NO: 600451 - DNA, 397 bp, Homo sapiens
cctctgtgtccacttcaggtaaggatctattcatgttccacacaaccaccaaaccagtcgtaagagggcacgacaaatgcctcttccaactgaggaggctaaaaatatttggtatgggccctcagatcctcaaaaggttctagagctgcgtctttgagagcatcttgactggctgcatcactgcttggtatggcaactgcttatcaacggaccaaaaggtgctacagaaggtagtgtatacggccaaacctctataccaggcggtgtcaggggaagcccctaaaaacttactcctgccacccaagtcatagactgttcagtctgctacctcacaggaagcggaaccaacaggacccaagccgagccaaaataatgctaaatagttagtcgtcgacgc

SEQ ID NO: 600452 - DNA, 112 bp, Homo sapiens
tatgactgccatgtggagcatctgtgaatacccagctgttccccccgtttttaagctccccctaggagacctcttgtaacagctactgccttatccacatgttgtatgacct

SEQ ID NO: 600453 - DNA, 100 bp, Homo sapiens
taccacggcacccctgctccacgctgtgtacgtgtcccgctccacacgcaccagcacacgcttgcggtagcccccagcagtaacacctggatacgccttg

SEQ ID NO: 600454 - DNA, 247 bp, Homo sapiens
ctccctatagggtgtcaccttggcatgcttactgtgtgcgtgacaggtgcacctccagcgaggctgcgtctgtgtacgcccggtgacagttgtggcacttgaagggtttatctttgttgtgctgccgcctgtgggactgagaaaattgggagaaaccaggatgaatgtgctgaactctgacctcctggctccttgaccttcacagagaaccctgagctaggtgccgggcctcctagttctctttcca

SEQ ID NO: 600455 - DNA, 255 bp, Homo sapiens
gcatagagagatatatacacagagaggacatacatatatatatatagagacacagagacagacatatagagatatatatatacacagcatagagatacagagagatagagagagatacacatacacacattcatcaacgagagagaagagaggaaagagagagagagcgagcacagacagagatagagcacacagagagatcgcgcagatctatacagagggatattcaccacattgtatatggaaagcgcatct

SEQ ID NO: 600456 - DNA, 337 bp, Homo sapiens
cccaaacccccctaaggtttaaggaaattaattttgaagctttttaaccattgccttttaacctgctgagatttaaaaaaactggtataaaaacctttttaaatttcggaattttttcgggaatggatcttcctggggccttaggggttttttatggttagcccccccatggttttggttaaaaccttttccaatttttatcccggcggtttttccctaaaaaaaaaaccagttttttccccttattaaatttttttcgaaaaaaggggttttttttcccttctggggcttaaaggaaggatgggtaaccaggaaaaaattaaacttttaggcccca

SEQ ID NO: 600457 - DNA, 100 bp, Homo sapiens
ggacatgtcatcagcagtgaaaaggttttgttccgtttcctggcttcagaacttgcacgtgctgcttattaagacaggtggggtggagtttggggagagg

SEQ ID NO: 600458 - DNA, 153 bp, Homo sapiens
gatctggctctgtgcagttaacttctcaccacacatgtgaggaacatggtgaaattgatggggctggagcctcatacatcatggcatctagatactcatcagttggatacttccccgaatgaagcaagcatatcatgcagatcttcctatgtc

SEQ ID NO: 600459 - DNA, 1474 bp, Homo sapiens
agacgggtcattgggtctaggagagccacgacttctatctagcgaccggcgttgcccgacgccgaggtagagacagagtcgtcggcccggtgactcatgtaccgccgacggctggaagctggctggactgctgctagctggtgtcatgtactacaggtgcttgctgctagacgcacgagtagactagtcaatatcagcacaaggacgacaccgtacagaatcccagcgaaaattgctaccaactggacgtttcgtagtacccatgcagtctcctgcaacctgagactctgacccgattcggactgcgttcttagcatcattcgtagacgctctctctgtccaacggactcattgccagttgccccctattgcttggactgtcacaccatgaggaactttctaataatgctctgacggtgagcatactcatgggcgtataccgaatttcatgtccagtgcttggtgtattcaaggtggtacacgtcaattgagacctagcagagaattggttctcgaatggaagtgggacctcgacgaatccatcataccaaaccaccgaaagttgaataactcgaatgtattccctcttgtcaaaccgtaattccatcaagcacaatcagtcatggcaagtccaaggtggatatcgagctagggacgcaggtggtggacccaatgataccacatcctcatagtttaaccttaaataaatattgatgagcctttgatgtatggaaagaatcctgttcaacttcaagaaaaacctttgagacgcgataaatctttgcccaataaatattggcaaaccagctaggacagggaggaccttgagcccgactcccgtacgaattagataccatacatcgtatagacaggtatacaacgttggaccaaaaacggtaccctggtggggtcccttggcatccaagttggcatacgttgcgtacaaagagtaaagaatctactaattaatctatcagaaagccccacccaatgatgtggtaccaagattcaagaaacaagtctacccaaagcttgtggaccaggattggaactagtcacggagacggacatttttgtgggatgagcaccaaccaagggggtttgtgtaaccacaggcaatgtccaaaggaaagccgtgggagacaaactgcggcggtggcaaagggggtatcagaatgtggcccacctatggttgaccgcaatggaacctgccccgggacaatacataggggggccacacacaggcgttcgaggagcaggaccaagcgtgggaccaacaaaccggcacccgagggacaccactgagtgcggtaaaaccagggacagatgcacacaaggaaagaccagaaccacgcaaaagaggaagtaaaaagaagaacccaggagaacaaatacaacacaagagagcaccaagtagacaccggaaaaaagggcacacaccagataagaagacagcgaaaagaaagcacacaaa

SEQ ID NO: 600460 - DNA, 419 bp, Homo sapiens
ccctaggattacctcacgtcgggcattagaaaccagcctgggcaacaaagtgagaccccatctctacaaaataatctggaaaatatcctgtggacacctcctagcttctttggcaagctgaggcaggacgatcacttgggcctatgaatttgagcctgcaatgagctatgatcccacccctacactccagcctggtaacagagcaagactccgtctcaaaaataataaataaacatacgtgtgcatgtgtctttacagtagaatgatttataatcctttgggtatatacccagtaatgggatggctgggtcaaatgttatttctagttctagatccttgaggaatcgccacactgtcttccacaatggttgaactaatttgcactcccaccaacagtgtaaaactattcctatttctct

SEQ ID NO: 600461 - DNA, 429 bp, Homo sapiens
  misc_feature (24)..(24): n is a, c, g, or t
  misc_feature (28)..(28): n is a, c, g, or t
  misc_feature (30)..(30): n is a, c, g, or t
  misc_feature (35)..(35): n is a, c, g, or t
  misc_feature (68)..(68): n is a, c, g, or t
  misc_feature (161)..(161): n is a, c, g, or t
  misc_feature (319)..(319): n is a, c, g, or t
  misc_feature (348)..(348): n is a, c, g, or t
gctactactactactactactagnttcncngccgntcgactgaggcagacagctggttggcggggccngaatgagagattagaaccctctcgcggtcatcccagtcgttatggcgacgggatgtgcgctggatcagtggctcttgtctgaaaggccatgcnagtgaccatcagctctgtcagcactgatgcacacacacacacacgcacacacgcacacacacacacacacacacacacacgcatacacacacacacacacacacacacacacacacacacacacacacacacactccgccctgtgttattttcctgcncgctccaactgacctgagatcattcttcnctcttagctaataactggcaggcactcgctctgatcgctaatcaatgctagaggggggctgtgtgcgtggactgtgtgtgc

SEQ ID NO: 600462 - DNA, 197 bp, Homo sapiens
ttgtgttcaacacggcactgtggagatcatctgccacacaggcaaccgcaccacccccagctactgtggccttcactggacacctgagctggctcatcttgggatgctggccaatgaaccattgtggctgctagaaccctgcagacacacctgtgttttgacggcgaatgctggctgatctggcctgcaatgttctg

SEQ ID NO: 600463 - DNA, 383 bp, Homo sapiens
  misc_feature (358)..(358): n is a, c, g, or t
tgatacagtctcactctgtcccccaggctggagtgcagaggtacagtattggctcactgcaacctctgtccccaggcttaagcaattctcatgcctcagcctcctgagtagctgggattacatgtgcaccaccacagccagctaattttttgtattttttgtattggggttttgtcatgttggccaggctggtctcaaactcctactctcaagcaatccacccacctcagcctcccaaattgctgggattataggcattagccactggcacccagccagactttatagaaaatcttggatattctggtcatgggaagttcccctaggcttggttatttttttttggtaccgctttgtnctattttcgggcctttccatttcca

SEQ ID NO: 600464 - DNA, 970 bp, Homo sapiens
  misc_feature (1)..(1): n is a, c, g, or t
  misc_feature (19)..(21): n is a, c, g, or t
  misc_feature (25)..(26): n is a, c, g, or t
  misc_feature (29)..(29): n is a, c, g, or t
  misc_feature (916)..(916): n is a, c, g, or t
  misc_feature (919)..(919): n is a, c, g, or t
  misc_feature (928)..(928): n is a, c, g, or t
  misc_feature (932)..(932): n is a, c, g, or t
naagcatagtctaggtacnnngctnntgntccccgccgctgcagccgtcgccttcggagcgaagggtaccgacccggcagaagctcggagctctcggggtatcgaggaggcaggcccgcgggcgcacgggcgagcgggccgggagccggagcggcggaggagccggcagcagcggcgcggcgggctccaggcgaggcgggctccaggcgaggcggtcgacgctcctgaaaacttgcgcgcgcgctcgcgccactgcgcccggagcgatgaagatggtcgcgccctggactcggttctactccaacagctgctgcttgtgctgccatgtccgcaccggcaccatcctgctcggcgtctggtatctgatcatcaatgctgtggtactgttgattttattgagtgccctggctgatccggatcagtataacttttcaagttctgaactgggaggtgactttgagttcatggatgatgccaacatgtgcattgccattgcgatttctcttctcatgatcctgatatgtgctatggctacttacggagcgtacaagcaacgcgcagcctggatcatcccattcttctgttaccagatctttgactttgccctgaacatgttggttgcaatcactgtgcttatttatccaaactccattcaggaatacatacggcaactgcctcctaattttccctacagagatgatgtcatgtcagtgaatcctacctgtttggtccttattattcttctgtttattagcattatcttgacttttaagggttacttgattagctgtgtttggaactgctaccgatacatcaatggtaggaactcctctgatgtcctggtttatgttaccagcaatgacactacggtgctgctacccccgtatgatgatgccactgtgaattgtgcttgcanggngcaccgcanctangtgttgctaagccttcacgtgggcggagctgagggcag

SEQ ID NO: 600465 - DNA, 801 bp, Homo sapiens
  misc_feature (1)..(1): n is a, c, g, or t
  misc_feature (19)..(21): n is a, c, g, or t
  misc_feature (25)..(26): n is a, c, g, or t
  misc_feature (29)..(29): n is a, c, g, or t
naagcatagtctaggtacnnngctnntgntccccgccgctgcagccgtcgccttcggagcgaagggtaccgacccggcagaagctcggagctctcggggtatcgaggaggcaggcccgcgggcgcacgggcgagcgggccgggagccggagcggcggaggagccggcagcagcggcgcggcgggctccaggcgaggcgggctccaggcgaggcggtcgacgctcctgaaaacttgcgcgcgcgctcgcgccactgcgcccggagcgatgaagatggtcgcgccctggactcggttctactccaacagctgctgcttgtgctgccatgtccgcaccggcaccatcctgctcggcgtctggtatctgatcatcaatgctgtggtactgttgattttattgagtgccctggctgatccggatcagtataacttttcaagttctgaactgggaggtgactttgagttcatggatgatgccaacatgtgcattgccattgcgatttctcttctcatgatcctgatatgtgctatggctacttacggagcgtacaagcaacgcgcagcctggatcatcccattcttctgttaccagatctttgactttgccctgaacatgttggttcattattgaatgtgctgtaaattaagtcgtttgcaattaaaacaaggtttgcccacatcaagacaaatacttagacgccaaaacttggggggatttttgtgtccggggtcgggaaacacagggtttcgtgaatgtggcctgtcgccatagcgtgtgtccctgtgccccggttttttgtgtc

SEQ ID NO: 600466 - DNA, 1131 bp, Homo sapiens
gagagattcattcgtactgctactcacaactgcacggacgatctgtgctagtgaggataccagagacttaaaacagatttgaaagcagcgatttagccagtacaagggcatagtcgattggaagaactgggataccagtgcgtgcgattgtatcagaggaacgcgacgtgcatatacattatctatatgaggtaaagaccgaagacgtgacgcgtaagtcaatgaacgccgtaagaacgtatgctaatatagcggtgatgagacccgagctgctgcctcatcctgaacaaactgcgaggtacgaggctatcgcacggtaggtactcgagggcagcgccgttgcaagaagacttccgtatggaatgctgggaacgtgatcaaaacgtgcatatagcgggagttagcaagaagtcttcaaagcatacgttcacccgcgccggttaaaataaccgaaggagtggaaacgatgtcgtccagacttgcttgcgcttgattgaatgacactgggaaactacgtgctctcagagcgcaaggcatgtcacgaattttcggcacagagacttcacaaggcgttgtaatctaggaatccatggaaaagcacagatgtaacatgcaaagatgcgtcggcaagaggcgtgtcccatgtcctaggagattacgccgacgatcgaaacgaccggtttggacgaaaaacggggcgcaccaatcgatcgccaatgaagcggtagtccagctcccgaaggccaaccattgggtttactctcttgggtacacatagggccgtgtgcatgggatctcggttcgctggatccccaatcgaattaagcacgaatcctccttattctaagcaccgaagcgaatagactcccaggggtttacacgccgttaccattgagaacgtgaatttcggaaggagacacatggcggggcccccatagacaagctgggcatcccatgacagcgcgagcacataagggatttcatcctcagatccgatgtcggtggctcagacagacatgacacacggcaccctacccccgtcgcaccctagcccaacgcactgagtagacccacactcctttccccaagaccggacctcatgacacgcatccaactgaacccatgcgcaac

SEQ ID NO: 600467 - DNA, 309 bp, Homo sapiens
tcagcagctcttcaacccgtttgtcctcctgcgcatcctcttgcttcgttgtgggccttgccgaggggcacacggactgtcgtgattgacagtcctctctcgaaaaacccttgcgacttccctgaccacgtcagtgtggtggccatgatgggtgatggcaccagtcagcagaggcagcacgccagctttcaccaggtcttgcagatactgtacatgttacaggcaagcgtgacgcacacagcggatcccagagcaggtcaggtcagcctcatcagcattctgggtcagcgtggccactaggagctgcaa

SEQ ID NO: 600468 - DNA, 891 bp, Homo sapiens
  misc_feature (837)..(837): n is a, c, g, or t
  misc_feature (840)..(840): n is a, c, g, or t
  misc_feature (849)..(849): n is a, c, g, or t
  misc_feature (853)..(853): n is a, c, g, or t
gtatctgaggagtgcagtgcccgctttgctgcactgggctgagctgtggcctgggatgcctgtgagctggctgtgatgtgatgcactgtgcatgcatgctgtgctgctggctggtgctccatgtgctgatggctggtcgacgctcctgaaaacttgcgcgcgcgctcgcgccactgcgcccggagcgatgaagatggtcgcgccctggactcggttctactccaacagctgctgcttgtgctgccatgtccgcaccggcaccatcctgctcggcgtctggtatctgatcatcaatgctgtggtactgttgattttattgagtgccctggctgatccggatcagtataacttttcaagttctgaactgggaggtgactttgagttcatggatgatgccaacatgtgcattgccattgcgatttctcttctcatgatcctgatatgtgctatggctacttacggagcgtacaagcaacgcgcagcctggatcatcccattcttctgttaccagatctttgactttgccctgaacatgttggttgcaatcactgtgcttatttatccaaactccattcaggaatacatacggcaactgcctcctaattttccctacagagatgatgtcatgtcagtgaatcctacctgtttggtccttattattcttctgtttattagcattatcttgacttttaagggttacttgattagctgtgtttggaactgctaccgatacatcaatggtaggaactcctctgatgtcctggtttatgttaccagcaatgacactacggtgctgctacccccgtatgatgatgccactgtgaattgtgcttgcanggngcaccgcanctangtgttgctaagccttcacgtgggcggagctgagggcag

SEQ ID NO: 600469 - DNA, 521 bp, Homo sapiens
aactcttactatctttacctactttagtgttttctttgtaacatgaaattgttgtgcgtcatagtgcatgaaactttgcctgtctccactttattttattccatggctttaagaataaaagtgcgaacgggtatgagagcaggagcactagcctttgttttcttaattacttcgaagaggcaataagattgtggtcagctattagcgcaaaagtgaattctaaacagtaaaatcagatctagctttttctttgtgttataaaagctgaatatgtaaaagaagcataattattatttaaggtggcacagatcagattctgccccaagaaataaaatttcaaggttccaggcaccgatttctgcaccggagtacacgtaagattttatctgctctgcttttgacaagtagttgttttgattttgaaggattatgttaatactaatctattcaccaggtaattgacatatgctatcctaattatctggtgaatagattagtattaacataatccttcaaaaaaa

SEQ ID NO: 600470 - DNA, 551 bp, Homo sapiens
aactcttactatctttacctactttagtgttttctttgtaacatgaaattgttgtgcgtcatagtgcatgaaactttgcctgtctccactttattttattccatggctttaagaataaaagtgcgaacgggtatgagagcaggagcactagcctttgttttcttaattacttcgaagaggcaataagattgtggtcagctattagcgcaaaagtgaattctaaacagtaaaatcagatctagctttttctttgtgttataaaagctgaatatgtaaaagaagcataattattatttaaggtggcacagatcagattctgccccaagaaataaaatttcaaggttccaggcaccgatttctgcaccggagtacacgtaagattttatctgctctgcttttgacaagtagttgttttgattttgaaggattatgttaatactaatctattcaccaggtaattgacatatgctatcctaattatcttcctgtttggctttttagtacctctgtttcaggatttctcaaactgtcattatatgctttattaagga

SEQ ID NO: 600471 - DNA, 298 bp, Homo sapiens
gtacccccaccggcagatatgtactaccgcggtttcttcttcgtcctctgtcctctgcccagagtgaggccatcaccatgtgagaagacatcttggggtgatttgctgccaccagcgtcccctctctcagggggccagaactcgccagccccagctttcagaggagaaagcggtcctctgaaatggattcctcccaaccccgcatttaaagggactcaaggcgcctgccacttcctcagcgaagaagtctgtgctcctccccgttcttgccagtggcgatcatcccttcacaatccca

SEQ ID NO: 600472 - DNA, 730 bp, Homo sapiens
caagtacctgatgggggacctgctgcgggaaggctcttacggcaaggtgacaaggatgtgctgtactcggagacgctgttcatgagggccgtcatgatcctcaagaagaacaagttgctgaagagatccccagacggggaggccaaggtgaatagaggatcattcagacgtacgtgagcgagtgttacgggtacatgtgatgtcatccaagctggtggatgttgttatacatacgaagagtaagcagataaatgtatatgtgtgatggatgtactgctgtgtgtggcatgcatgaataatgctgggactagcgtgccggagaagcgttctcccagttgttgccaggcccacgtggagttactttctgtcagctgattgataggcctggagtacctgcatagccaggcattgtgcacaaggacatcaagccggggaacctgctgctcaccaccggtggcaccctcaaaatctccgacctgggcgtggccgaggcactgcacccgttcgcggcggacgacacctgccggaccagccaggctccccggctttccagccgcccgagattgccaacggcctggacaccttctccggcttcaaggtggacatctggttggctgggtcaccctctacaacatcaccacgggtctgtaccccttcgaaggggacaacatctacaagttgtttgagaacatcgggaaggggagctacgccatccgggcgactgtggccc

SEQ ID NO: 600473 - DNA, 401 bp, Homo sapiens
  misc_feature (354)..(354): n is a, c, g, or t
caccatggcacctgctggacgcccgatgctacatgaaggggacagtgcagctcctgcatagtggagagtgtgacataggatatggcagcatgtatattactctggggaacataggctatattgaggctgatctctgtgactaccaggcactgattgaacacccatacgcagtacgtcaactacacatggtattcttgatagcacgacctgtgacgcagacttatacgctatttgccagagacgacaatatggctagcaagtgtgaagatgtacaatgcgtgtgactgtgacctcgacgagtaagtggctgtcattgtgatagctcatgagcatgtttgatctgctgacattaangttcaccaccagtagcagaagctagattgacagacttgtcgacacct

SEQ ID NO: 600474 - DNA, 695 bp, Homo sapiens
  misc_feature (296)..(296): n is a, c, g, or t
taacatatggaccgtgcagaaatctggtaagacttaaattcccgtgtgaggaataactctagttctctcctatgagcatttcctgaaagcccctctgatttggcattcttactggagctgccagaccagaaatctcaccaagcaccaaagtaacaccaaattaagttattattcccctgttaggaatggaaataaacttgtgaagtctgtttattttgaagtacttggtgaaactaggcttgctaaattgagataactgcacggcccgtttgtgtttaactcccgttcactcacgncttatggtcacatttgaagacagaatattataagaggtctttatagggccacacgagaagaaactataccactggagattctaatttgaaggagcacacacgagacacttcttggagaaagcacgctcccgttggtttttcaactgtccaacttgaatgtgtaagtccccccccgagcactggacccgtcggtgcaacgagttcccaggaaaccattattgcctgatgaccaccttcccttttgtatacaacctctttggttcgtataggccatattcccactggctttttagtaatagaaatcccgtatataatgtatccaataccattgaggttctaacctagtgtgttaatttatctgaatttggatttttaaaaagtaataaaaagttaaatgta

SEQ ID NO: 600475 - DNA, 155 bp, Homo sapiens
atctgctgcctcgacctcccaaagtgttgggattacaggtatgagccatcgcgcccagcctataaaaactaatggaattcttgccaggattaaatgatgggcatatggcaattattctataaacattaaaatttgtaattatgaagaattattct

SEQ ID NO: 600476 - DNA, 451 bp, Homo sapiens
gagaacgtgggggtggccatcctggtaaggttctttgtgacttcccccgggccaagcagtacttcagccagttcaagcacatggaggatcccctggagatggagcggagcccccagttgcggaagcacgcctgccgagtcatgggggccctcaaccctgtcgtggagaacctgcatgaccccgacaaggtgtcctctgtgctcgcccttgtggggaaagccccctttttttagcttctactccctgttagagagagacctagctgagcggctggcaggaagcgggacaggtttaggagtcccttagggaataaaccagccccgtttttatcagcccggccagcatgcgggtttccccatccccatttagagtatcccgcccccatttcccatatatccagatatattttatatccgagctatatataaatatatatatacatatatatata

SEQ ID NO: 600477 - DNA, 168 bp, Homo sapiens
gtgtcccatcatcttccttttctcctctctcacacaggggtccatctagcagccatactcgcgtgtccccgttgcctgcgcgtggcgtggcttatgtccagacgtacaggtacctcagtgcaccagttcgctgcactggtccattcatctctctcgtaccagcttcct

SEQ ID NO: 600478 - DNA, 204 bp, Homo sapiens
ccacttgtgctggattctggtggacgcggagccagctcgcctcacattccacaggtccatggactcacttttgtaagaaactcgtatcaacactgaccactcaaaaaaaaatgtgggttttttttttttttttttttttttttttttttttttgtttttattattaaattaaaaataaaagcaaaaaaataaatcaaaaaaaca

SEQ ID NO: 600479 - DNA, 370 bp, Homo sapiens
tatcccgggtctgcgacaaaggatgcccttcataaggaacaagcgatctctctaaaaccaatcctagagtatggcttcagattctgctcccatttctcaatgattatgagttttgtgccacatcttctccccctttatccctacaatatttgcatttcatgtttttattctcttactgcctgagcaatttgaaactctcatatttaggcaattcccagatctcgttcttaaagcattgtgattccctttcagcttttcagaggcacgtgtgctggggaaggcactgagtcctccctgtcaatccaatttgtgataaggatttccccaggtgcacccattccatagtccctgtgttgctctgagcctggtt

SEQ ID NO: 600480 - DNA, 1269 bp, Homo sapiens
tttgagatcagcctgaccaacatggatgaaagcctatctctactaaaaatatagaattagccaggcatggtagcgcacgcctgtaatcccatcttcttgggaggctgaggcaggagaatcgctagaaactgggaggtggaggattacagtagccgagatcgcgccactgcattccagcctgggcaacaacaagcgaaactctgtctcaaaaaagaaaaaaaagaaataaaaagcacgtgaccttatgaggctctcgctgtattgttattttaaaggactcataacagcagtttgcatcttaacacattcatgcaagggcccctcatgctgggcataattattcaaacacagcaacacttggtgtgtaattctccatgtggatttgcacagccccagcctacaccaagcgaccatagtgaggtacaaacccacatgacatcatatacatggtcctcggcatacgaaccaggaataaaagaaaaggatcaggctactcacatagatgaaccatgggtaaggctcaacaccaggacgcaccggaacggaaggcacgctcacacaaacaagcctggacacaccccaaaaccccacgccaacgccccctggcaactgcacccaaaccgcagcgccggctaaccatcacccaaacagccacctacgcgcgacaccaaaaaccaaatcggaaccccactacgaatggaacatcccggaccaggccaagttcactaacctgggccagaaaaactaaacgagcaccccatctcagggggaacccaggaacgtcaacacagcaacccccctaaaaacacacaacgatcaccgtaaaacggaggaagggataatgcccatccctggggcacggggcgcccgcgcagcacctgcaccccccaacacacgaccgtgcctacaggaagcacctaaagaaccaacacgccacctccaacgggcccttataaaccctgtacacatgggacaaaaaccagtggacgcctaacacacacgagcctggcaattacacaaccacgctggcccggccgccacaacacacaagcacagccccacacaacaccctgccccgcgccgctcccacaatagcccacaaaccacgccaagacggcaaccccctggtcagaccactaaccgccgcccactgaaactaacgcttaacaaaaataaaaactcaagacgggacccacgagacgcagcaccacgcgggggcgacaaacaagccaccacaggcgcccacggatccacaccccacgcatggac

SEQ ID NO: 600481 - DNA, 525 bp, Homo sapiens
aagaacaaacgagagagggtcatatatcctcataatttggtcttttaagtctccgaagtttagtcgacggtgtgaaagtaagtttgggataagtccataagtgtataagaagatcgaatagagacgcatactggcttacacaaggacagactgtgagagagatataagaacttataactagagtgggccacactaagaatggacggtggcatcattggcttggaatgaaataaatgagatctaacatagaagatacacatctcaagctggcatatagtaccggcttctggtctgagtatactccagctcctgagacatgttaccggcactataacctgatggcgtgccaatagatatcacagtgaagtggatggtctgcctggtacatctcaacatactggaaccactaaaggtatgtaacaagatctgcacttgagatacttcagatcaaatgcaccatctcttaccttaagatgtcctgaaattataactggaccctagagtatcacatatcttacataacca

SEQ ID NO: 600482 - DNA, 809 bp, Homo sapiens
ggcgccggcttgctgaccactgcagagccccgccatggaagacacgccgttggtgatatcgaagcagaagacggaggtggtgtgcggggtccccaaccaggtggtgtgtacggccttcagcagtcacatcctggtggtggtgacccagtttgggaagatgggtcaccctggatctccctggagcccagacaggcgtggcgcatgtgacgtcgagacaagcactggtgcgtcgagccgacaagaatgtccttctggggcaggatgagcctctcatccatggtcttgtgctaagagaacctggtagcgtttgtgtctcaagaagctggaaacagagacagtcctccgtcggccgtggaccgtgaaggacaaaagcatggaggggctgaaggcgctgagggaggtgatccgggatgtgccaggtgctggtgaccgtggaagagcagggcggcgccgcagcgtagcgtcagcgagagacacgtgaacaccgcagacacccactcagaggactcaagtctcacctccctccccggatggagggaggaacttatggcactagcccttggagccaggaaaaaagactcgtgtctcaggcagactctgactctggttactaagatcatctgtgcatgacggggacggtggaacaggtcccggaggagtcgtgaatggttctgtatcaggacctgaatcgatgcttgtggttgagaattggaggaatgagtcaggaggcgtagggtcatggccgcccgcggtgtgcaggatcaattgtaggaggaagatacttgaggattgaaagggaatgtgttatc

SEQ ID NO: 600483 - DNA, 113 bp, Homo sapiens
tgctattttgcgacattgaatagagtgagggtcctgtgcattggacagctgcagcctgggacgacaaactgcacccccggatcctgggtagaaatcacatcagtgggtgcagt

SEQ ID NO: 600484 - DNA, 92 bp, Homo sapiens
gtggtggattctctgacggacggatgatgggcacaccccagatccccgtgaggcattgttaaatgctttcagatctttcataaatgccaatc

SEQ ID NO: 600485 - DNA, 1076 bp, Homo sapiens
gacaacaaaaggccgcgggcggcgggcagtggtgtgccattcttcctcgcggtgcttctcctgaggctgaggcgcccggtctcacggaccggcggggcatccaggatgaaggtgtgaacagcttgctacggcgcagagggaattgtagataggagaaacagaatagactgatgaccaaggagaatgtgtcacggcgatgcagcgatgatccagtccgggagaatggacgacgatagggagaattccacaaggttggcgtggatgccaaggatattcttgagagactgcctgtggatgtagacatgctgtatgactgatgaggaatggagttggaacttatctactagtaataatgctaagtgaattacttgccgcggttctgatagacttattcataatcattaaccctcaagaacatactcacaatagatattaatgggggtatattgcgttgtgtataacatgttttcatcaaatcaatcaagttgggaagttgattaaagttgatgcatggcaaatgtgttggatatggtgggggaaaggtacaacagtacctattaatgtggggtggggaaatacgaaagatctgacattctgggaaaggggtgactcagttatgaagaagggcaccagcttgggtcagaatcttggaaatgggaggctttttttggaagtcttttctgctaagagaacatctcagaactgctgtggctcgccctcgcgcgaaagggcataacttctggagggccaggaaccacaatgggaccgtggccagctttccacacaggcaagcttcttcaatgcctcggggcagtcgattcttgttggccaaacccttgagggaacactggcgacatatatttctaacctgaagagaagccaaactggccccggtcttccgttgaaggaataaacgttcatgctctcttttagtacatactgggtaaaccttggagggacattccttttgggggccaagagctcccgctacccgtccaggttcactgtacccgctgagttctgtccaacggaggtcacattccatttacaattaaaggagcaattttagcctaact

SEQ ID NO: 600486 - DNA, 295 bp, Homo sapiens
gaaaagtgtatctgtgtattatctccatcgcttagcctatcctaggatctcatagagttgcaaccctccataggcatagccttttcagattggcttctctcacctactcatatgcagatgagtacccccatgtcttttcatggcttgctagctcatttcttcttagtgctgtggaataatattccattgtctggatgcaccacagctatatatccattcacctgctgaaggacaccttcgctgcctccaagttccagctgttatgaataatcgtgaataaagtcgctatgaacac

SEQ ID NO: 600487 - DNA, 330 bp, Homo sapiens
gaacgcttaccaggaatagctatactctggatcactcgctctaccaggaaactgatatgaccaggaatccgcactaacctagcaaacacatatccacaggcggaactcgtctgccgagggagaacagcgtattactcggcaaacagctccaactctgcctgagctgtgccgctcccgggcatgacacggtgctgaggacttgaggaagtgggacgagcacctttctattgtcttcacttggatcaaaagcaaaacagtctctaccgaccccgacacgcactatcaagatagttaaggaccctacggcgttgtgcagggcgatcctactag

SEQ ID NO: 600488 - DNA, 1098 bp, Homo sapiens
cctttcttcagtccccatgtgctgatccttcccggcaactttttctgagaaaaatgcccaaattcaaggcggccctgtggggtggggggtcatggaaaaacatgcgcccctgtgacgatcagatcctggcttgggaatgcgtgtgctgtgtgcgtgggtgtcctgggagaatgctggctggtggtcgcggtgacatggagaatgctggaggaagagtattgtgggtgcccctgggttgatgcctgactggattaatgcatgcaatgcacggggcagcaacatggatgtgaactctgatggcctgatgcatggtgacttggggacaatgccctgcggctgcctgctgggaacggcaccactgctggctaggggtcccaaggacatgccgtccagtgatgcgatccaggcactgaccgcaggcactgaggaggttgtgcccaacgccttggaacgaaacgtgcttgacacgaatggacaagccaagcggcgccatacaattgcacgagggtgcgttgtgtggaccccatgagggcactgaacgcctgtggcccaatacgaccagtggtccaattgaaacacacaagacacgccctcacttggccaagaggcggcaacaccactgtgcgttgcccaacttcgctccactgcgcacgaaccagctggcagctttggccgaaaacggcaggaccgatggaagggatctggcagaacactggttccagtgggtcacggcaggcgcgtggtacgggggcctaatccccgtatattcggcccacacagacctggggcaccccgcctgggcggaaccgtacgaaggttaggtcaaagtctggtgtgtcccgagcgataggggaatagttcaattacataaaaagagataacgccgtggacatagatggggcaccaatgagtatgtgcacccgaaaagtgatgcagtatattaaaaggaaagtcgcagttaggcattggaacgtatcgtgcgaagaaagcttggtaggagtgaagagagtcggatgaataagggatataagaagaaagagccgtgtgagaggggccttgggtaactatgcgaggtatttggcgagttgtgttagagaa

SEQ ID NO: 600489 - DNA, 447 bp, Homo sapiens
tcccccccatcactagcaatctaggtcctactaaatactaatctcagggtggatgatcttctagatacgtattattaaatgaaggagttttacgtaataatgaaattgatttgtcgtctgtttggccgtaaactggtgtgtctttaaatagttcttacggtgatatcttactatttttaagctggccggggtttcagatatggggatttcagcccctggttaatcagtcttgtcccctacaagtccctgatgcagtatgtttatttgtgatgtttaaagaacatttcttggctgggcgctgcggcttgcgcctgtaatctcagcacttggggaggctgaggtgggtggatcacctgaggttgggagttcgagaccagcctgacaaagcatagtgaaaccccgtctctactaaaaatacaaaaattagctgggcgtggtgttgggcga

SEQ ID NO: 600490 - DNA, 283 bp, Homo sapiens
ttcgattggcgggcaacaatgttgggtatttctgcaagaacgaccgtgctcgttatctttatccgttcgtgttcatgagagtaaggtctctgcacatcgttcaccaggctggactgcagtggtacaactcacagctcactgcaggctcaaactccagggttcaagcgatcctcccacatacgactccagagtagcgtaggacttcaggcatgcaccaccatgcctgggtaacttgcgtattttcggtagagatagggttgcagtaagtaggccgccaatcgaa

SEQ ID NO: 600491 - DNA, 270 bp, Homo sapiens
aaacaaagatcatggagtggtcactgacttaacagagtgggagaagcagggacccaaacgcctaagagaaatacttccatagaaatgtgtatgcatatttacaataatatagctactaatttgttaacactgaacctagaattgtgttctaaattagttgaaagaatgaagagataataactgggtagaattacataagagtctaatattctctcttaataggaagtccatagaaaatgtttgaaattgatgtattaagaaatactagtg

SEQ ID NO: 600492 - DNA, 176 bp, Homo sapiens
tgcctcaagctgactctagagtatcccctcataggttcgcaggtggaacattttttttgcccttcaaatcttcatatctgcctccttaatcatttaaattttatttctatattccatgtcttgacagaaggctcctctgtactacatttctagtctaaaatatctctatttttcta

SEQ ID NO: 600493 - DNA, 110 bp, Homo sapiens
tagctgttcttgagtgatcccggtcgtcagtatcaccattaacctggtattatccagcagaagacaaaaagacaaacataaatgtctagaaataaaactggtacaacccc

SEQ ID NO: 600494 - DNA, 461 bp, Homo sapiens
acagcccctgttgggaggggccatgatgggacaacccacatttatgacatgtccccggttatgagccggaagggcccggctccttaactgcaaggtgtggaaatggcgctggggccttaaaaattggagctggatcctatggccctgacccaaaagtattaggagcatgtgcgggaacagcaggctcaagtaaaaaaggaggacttcagttacatggtgggtgagcccgctgcccaacaaaagcaaaaaaaacggaaagctcagccccaggacaaccgtgggggcagcaaaaaatataaggagttcaagttttaggtcccctccccctagccctttttttggccctaagtttggaaggctggggtttacacaaaaaccccctctcccgcagtttccaaggacttgtcatttcatgtttttattttaaacctgttttgtaaaaaaaactgtttccccaggga

SEQ ID NO: 600495 - DNA, 316 bp, Homo sapiens
gggggggggggggggtcggggggggggttttttttacccccctttttttttttccccccgggtttgtgtgggggcccccccccccttttttttcccccccttaaaaacccgggggccgttcccccccccggtttttttcttgggggggggggggggttccttttttccccggggaaccgtttttccccttgggccttttccaaaagtttttttggttcccctttaaggggggcccccccggggggcggttgggtttttccggggggccccccgggggggggtttttttttttttttaggcccccctgggtgggcca

SEQ ID NO: 600496 - DNA, 219 bp, Homo sapiens
gccactcgcagaagtcatatgttgaagccctaacctccaatgggatggaatagaaagcagggcctttgagaggtaatcaagtcatcagtttagagccaccatgatggaacgtagctctctcccctctcactcttctcacacacaaagaggaggtcatgtgagcacataacaagatggtggcactataaggcaagactagaggtctcagaataaatttca

SEQ ID NO: 600497 - DNA, 108 bp, Homo sapiens
atgagcggtccagtagtagtagtagtagtagtatgtatatgtatgtaaaataaaaactttttttcccacgctgcctcccagggtgactcctctagcagtcgaccgtgc

SEQ ID NO: 600498 - DNA, 249 bp, Homo sapiens
  misc_feature (38)..(38): n is a, c, g, or t
tacgacgacagggatctggagagtatgttacagaagantctggccgagaggctggctgagctgctcttgatgacttactgcgtcagaagtcagcgaccactgatcaggcatcagctcactgctcccagtcccacccatgcccctctgcagcatggagcccaggccaggctgaggacccagccatggttaaccatttccacctacctcatgcacagaggtttgtttataaataaaaaattaaatagacaa

SEQ ID NO: 600499 - DNA, 773 bp, Homo sapiens
  misc_feature (711)..(711): n is a, c, g, or t
ggccgtgatggtgtggggggggagcgaggaccctagctggttgcctgggtctggtcgtcgtggtgggcgtccggtttgggttctttgaatcctcatgcgcccatgcgcggtcgtccccggtcggggtttgcgactttgttgtcgcccatctattgtgttcttgtccctgccgcctccgttggtcgccttgtgtcgttccgttgttgctgtccactaccttccttgggccgactcttgtgtcgtgtacgattgtagacgctggttcgtctctcgtcctgtcagcttgtgagcgctagcgtccgtctgtccagcttgtagtgcttgtttacctcatcgctggcaggctgacaatattgtttttccgtgtgtgtgagagaggagtaggttctataatgtgtccctgcgcctcagagagtatacagacacaccagattattctacaccaatgggacacacgctctgtgcttcaccactcgagtgtcatactcccctgacgcgtattcgtgccgttgatagtacgccgtgcgagtaattcctggtcgctcacagccgtgcgcgtgtaacgctctgtttactctcgacgcgagcgggacccacgctagacttctgtaaatttgatggtcaagcttactagcccgctacgcttcatcggcaggacacagaaaccaatcacgaccgccctcacgaagtacacgctgagacgatggaaangcggcagccggcaagaaaaatacaataataaacaataacacctacacacaaaatcacacaaa

SEQ ID NO: 600500 - DNA, 445 bp, Homo sapiens
tgacccactatcgctagaaaccctccagagagaaagtaatgtaatttttatatgtagaactctaaatgctatggaaagcctatgaatgttagcaatatggggcgtttatgctaaaatacacgcaaacattagagacgagcctaactgcttttcttactttcctgaatatggtaggacctgatcgctgcaaaatgaacccgtgccttaacggaggcacctgttatcctactgaaacttcctacgtatgcacctgtgtgccaggatacagcggagaccagtgtgaacttggtaagatgagacttggctgaaaaggtgcagttctttcacagaagatatattgggggagaatttatgttgtcgaatcaatcagagatttcaaagaaacccatatgaagattaattatatgttaaatgaagttaaaatctgagggtttcttagcgatag

SEQ ID NO: 600501 - DNA, 396 bp, Homo sapiens
cacgaggagacgaagtcgaggcccagctcgtcgtagaggtagttgtggaagcgcgtaccgatgttgctgggccgggccgccagcgagatgcacaccgcggtgtccttgttcagcagcgggcgccgcgagtacagcgattccgtcatcagccgaccgccttgatcacttgctgcgccaacaggtggatttcgcgatactgcttgtgcgacaacgacaattggtccggtttcgggacgtcgaattcggtgacgatcatgttgcggtcgtcgcgctcccaggtggcgccgtaatgctcgaggatcttgcgcatcgggaagttgtcggacagcacccgcgcggcgaaccgctcgacgcccgagccccgggccgcgggtaccagcgcgtccatcagaaagg

SEQ ID NO: 600502 - DNA, 469 bp, Homo sapiens
ccccgccgggcgccggcgccaattggagcgcctcggggggcgggggaggggcggagcgcgcctcttgatggacggcggcatttccggctctcgcgagtctgggtgggagcgcgccaaatttctcccctgaagcagaggtggtagccaacggctccatgtctctgaggagcggcgggcggcggcgcgcggacccaggcgcggatggcgaggccagcagggatgatggcgccacttcctcagtttcggcactcaagcgcctggaacggagtcagtggacggataagatggatttgcggtttggttttgagcggctgaaggagcctggtgagaagacaggctggctcattaacatgcatcctgtaagcactaggtccttctcccacccaggaatatggctgcaacccttctggtcatagcgtggtccttatctaaagagtgggggacacatgagggaactttgagtgaatca

SEQ ID NO: 600503 - DNA, 156 bp, Homo sapiens
ctcatagcacgatcccctccactttttgcattattaatgtaaatataatcttatctttgttattatattgtagcaaagtcaccccttttatcacagtattcacatcattttaagataatgcttacaaaattctattatgctaaaattttaatcctg

SEQ ID NO: 600504 - DNA, 516 bp, Homo sapiens
ccccgccgggcgccggcgccaattggagcgcctcggggggcgggggaggggcggagcgcgcctcttgatggacggcggcatttccggctctcgcgagtctgggtgggagcgcgccaaatttctcccctgaagcagaggtggtagccaacggctccatgtctctgaggagcggcgggcggcggcgcgcggacccaggcgcggatggcgaggccagcagggatgatggcgccacttcctcagtttcggcactcaagcgcctggaacggagtcagtggacggataagatggatttgcggtttggttttgagcggctgaaggagcctggtgagaagacaggctggctcattaacatgcatcctaccgagattttagatgaagataagcgcttaggcagtgcagtggattactactttattcaagatgacggaagcagatttaaggtaagcccctgactgcgacaagctaaaacccacttttatgggtgttcatgtagctctgtgactgtcagggagggca

SEQ ID NO: 600505 - DNA, 7963 bp, Homo sapiens
ccccgccgggcgccggcgccaattggagcgcctcggggggcgggggaggggcggagcgcgcctcttgatggacggcggcatttccggctctcgcgagtctgggtgggagcgcgccaaatttctcccctgaagcagaggtggtagccaacggctccatgtctctgaggagcggcgggcggcggcgcgcggacccaggcgcggatggcgaggccagcagggatgatggcgccacttcctcagtttcggcactcaagcgcctggaacggagtcagtggacggataagatggatttgcggtttggttttgagcggctgaaggagcctggtgagaagacaggctggctcattaacatgcatcctaccgagattttagatgaagataagcgcttaggcagtgcagtggattactactttattcaagatgacggaagcagatttaaggtggctttgccctataaaccgtatttctacattgcgaccagaaagggttgtgagcgagaagtttcatcttttctctccaagaagtttcagggcaaaattgcaaaagtggagactgtccccaaagaggatctggacttgccaaatcacttggtgggtttgaagcgaaattacatcaggctgtccttccacactgtggaggatcttgtcaaagtgaggaaggagatctcccctgccgtgaagaagaacagggagcaggatcacgccagcgacgcgtacacagctctgctttccagtgttctgcagaggggcggtgtcattactgatgaagaggaaacctctaagaagatagctgaccagttggacaacattgtggacatgcgcgagtacgatgttccctaccacatccgcctctccattgacctgaagatccacgtggctcattggtacaatgtcagataccgaggaaatgcttttccggtagaaatcacccgccgagatgaccttgttgaacgacctgaccctgtggttttggcatttgacattgagacgaccaaactgcccctcaagtttcctgatgctgagacagaccagattatgatgatttcctacatgatcgatggccagggctacctcatcaccaacagggagattgtttcagaagatattgaagattttgagttcacccccaagccagaatatgaaggccccttttgtgtcttcaatgaacccgatgaggctcatctgatccaaaggtggtttgaacacgtccaggagaccaaacccaccatcatggtcacctacaacggggacttttttgactggccatttgtggaggcccgggcagcagtccacggtctgagcatgcagcaggagataggcttccagaaggacagccagggggagtacaaggcgccccagtgcatccacatggactgcctcaggtgggtgaagagggacagttaccttcctgtgggcagtcataatctcaaggcggccgccaaggccaagctaggctatgatcccgtggagctagacccggaggacatgtgccggatggccacggagcagccccagactctggccacgtattctgtgtcagatgctgtcgccacttactacctgtacatgaagtacgtccacccattcatctttgctctgtgcaccattattcccatggagcccgacgaggtgctgcggaagggctctggcactctgtgtgaggccttgctgatggtgcaggccttccacgccaacatcatcttccccaacaagcaagagcaggagttcaataagctgacggacgacggacacgtgctggactctgagacctacgtcgggggccacgtggaggccctcgagtctggggttttccgcagcgatatcccttgccggtttaggatgaatcctgccgcctttgacttcctgctgcagcgggttgagaagaccttgcgccacgcccttgaggaagaggagaaagtgcctgtggagcaagtcaccaactttgaagaggtgtgtgatgagattaagagcaagcttgcctccctgaaggacgttcccagccgcatcgagtgtccactcatctaccacctggacgtgggggccatgtaccccaacatcatcctgaccaaccgcctgcagccctctgccatggtggacgaagccacctgtgctgcctgtgacttcaataagcctggagcaaactgccagcggaagatggcctggcagtggaggggcgagttcatgccagccagtcgcagcgaataccatcggatccagcaccagctggagtcagagaagttcccccccttgttcccagaggggccagctcgggcctttcatgaactgtcccgcgaggaacaggcgaaatacgagaagagaaggctggcggattactgccggaaagcctacaagaagatccacatcaccaaggtggaagagcgtctcaccaccatctgccagcgggaaaactccttctacgtggacaccgtgcgtgccttccgggacaggcgttacgagttcaaagggctccacaaggtgtggaaaaagaagctctcggcggccgtggaggtgggcgacgcggctgaggtgaagcgctgcaagaacatggaggtgctgtatgactcgctgcagctggcccacaagtgcatcctgaactccttctatggctatgtcatgcgcaagggggctcgctggtactccatggagatggctggcatcgtctgcttcacaggggccaacatcatcacccaggcacgggagctgatcgagcagattgggaggcccttagagctggacacagatggtatatggtgcgtcctgcccaacagcttcccagaaaattttgtcttcaagacgaccaatgtgaagaagcccaaagtgaccatctcctacccaggcgccatgttgaacatcatggtcaaggaaggcttcaccaatgaccagtaccaggagctggctgagccgtcctcactcacctacgtcacccgctcagagaacagcatcttttttgaggttgatgggccctaccttgccatgattcttccagcctccaaggaagaaggcaagaaattgaagaagaggtatgctgtgttcaatgaagacggttctctggctgagctcaagggctttgaggtcaaacgccgcggggaactgcagctgattaagatcttccaatcctcggtgtttgaggccttcctcaagggcagcacgctggaagaggtgtatggctctgtagccaaggtggctgactactggctggacgtgctgtacagcaaggcagccaacatgcctgactctgagctattcgagctcatctctgagaaccgttccatgtctcggaagctggaagattacggggagcagaagtctacatccatcagcacagcaaagcgcctggccgagttcctgggagaccagatggtcaaggatgcagggctgagttgccgctacatcatctcccgcaagcccgagggctcccctgtcacggagagggccatcccacttgccattttccaagcagagcccacggtgaggaagcactttctccggaaatggctcaagagctcttcccttcaagactttgatattcgagcaattctggattgggactactacattgagcggctgggaagcgccatccagaagatcatcaccatccctgcggccctgcagcaggtaaagaacccagtgccacgtgtcaaacaccccgactggctgcacaaaaaactgctggagaagaatgatgtctacaagcagaagaagatcagtgagctcttcaccctggagggcaggagacaggtcacgatggccgaggcctcagaagacagtccgaggccaagtgctcctgacatggaggacttcggcctcgtaaagctgcctcacccagcagcccctgtcactgtgaagaggaagcgagttctttgggagagccaggaggagtcccaggacctcacgccgactgtgccctggcaggaaatcttggggcagcctcccgccctgggaaccagccaggaggaatggcttgtctggctccggttccacaagaagaagtggcagctgcaggcccggcagcgcctcgcccgcaggaagaggcagcgtctggagtcggcagagggtgtgctcaggcccggggccatccgggatggtcctgccacggggctggggagcttcttgcgaagaactgcccgcagcatcctggaccttccgtggcagattgtgcagatcagcgagaccagccaggccggcctgttcaggctgtgggcgctcgttggcagtgacttgcactgcatcaggctgagcatcccccgtgtgttctacgtgaaccagcgagtcgctaaagcggaggagggtgcttcgtatcgcaaggtaaatcgggtccttcctcgctccaacatggtctacaatctctatgagtattcagtgccagaggacatgtaccaggaacacatcaacgagatcaacgctgagctgtcagcgccagacatcgagggcgtatatgagactcaggttccgttactgttccgggccctggtgcacctgggctgtgtgtgtgtggtcaataaacagctggtgaggcacctttcaggctgggaagcagagacctttgctcttgagcacctggagatgcgctctctggcccagttcagctacctggaaccagggagtatccgccatatctacctgtaccaccacgcacaggcccacaaagcgctcttcgggatcttcatcccctcacagcgcagggcatccgtctttgtgctggacactgtgcgcagcaaccagatgcccagccttggcgccctgtactcagcagagcacggcctcctcctggagaaggtgggccctgagctcctgccaccccccaaacacaccttcgaagttcgggcagaaactgacctgaagaccatctgcagagccatccagcgattcctgctcgcctacaaggaggagcgccgggggcccacactcatcgctgttcagtccagctgggagctgaagaggctggccagtgaaattcctgtcttggaggaattcccactggtgcctatctgtgtggctgacaagatcaactatggggtcctggactggcagcgccatggagcccggcgcatgatccgtcactacctcaacctggacacctgcctgtcgcaggccttcgagatgagcaggtactttcacattcccattgggaacctaccagaggacatctccacattcggctccgacctcttctttgcccgccacctccagcgccacaaccacctgctctggctgtcccctacagcccgccctgacctgggtggaaaggaggctgatgacaactgtcttgtcatggagttcgatgaccaagccactgttgagatcaacagttcaggctgttactccacagtgtgtgtggagctggaccttcagaacctggccgtcaacaccattctccagtctcaccatgtcaacgacatggagggggccgacagcatggggatcagcttcgacgtgatccagcaggcctccctggaggacatgatcacgggtggtcaggctgccagtgccccggccagctacgatgagacagccctgtgctctaacaccttcaggatcctgaagagcatggtcgtgggctgggtgaaggagatcacccagtaccacaacatctatgcagacaaccaggtgatgcacttctaccgctggcttcggtcgccatcctctctgcttcatgaccctgccctgcaccgcacactccacaacatgatgaagaagctcttcctgcagctcatcgctgagttcaagcgcctggggtcatcagtcatctacgccaacttcaaccgcatcatcctctgtacaaagaagcgccgtgtggaagatgccatcgcttacgtggagtacatcaccagcagcatccattcaaaggagaccttccattctctgacaatttctttctctcgatgctgggaatttcttctctggatggatccatctaactatggcggaatcaaaggaaaagtttcatctcgtattcactgtggactgcaagactcccagaaagcagggggagcagaggatgagcaggaaaatgaggacgatgaggaggaaagagatggggaggaggaggaagaggcggaggaatccaacgtggaggatttactggaaaacaactggaacattttgcagtttttgccacaggcagcctcctgccagaactacttcctcatgattgtttcagcgtacatcgtggccgtgtaccactgcatgaaggacgggctgaggcgcagtgctccagggagcacccccgtgaggaggaggggggccagccagctctcccaggaggccgagggggcggtcggagcccttcccggaatgatcaccttctctcaggattatgtcgcaaatgagctcactcagagcttcttcaccatcactcagaagattcagaagaaagtcacaggctctcggaactccactgagctctcggagatgtttcctgtcctccccggttcccacttgctgctcaataaccctgccctggagttcatcaaatacgtgtgcaaggtgctgtccctggacaccaacatcacaaaccaggtgaataagctgaaccgagacctgcttcgcctggtggatgtcggcgagttctccgaggaggcccagttccgagacccctgccgctcctacgtgcttcctgaggtcatctgccgcagctgtaacttctgccgcgacctggacctgtgtaaagactcttccttctcagaggatggggcggtcctgcctcagtggctctgctccaactgtcaggcgccctacgactcctctgccatcgagatgacgctggtggaagttctacagaagaagctgatggccttcaccctgcaggacctggtctgcctgaagtgccgcggggtgaaggagaccagcatgcctgtgtactgcagctgcgcgggagacttcgccctcaccatccacacccaggtcttcatggaacagatcggaatattccggaacattgcccagcactacggcatgtcgtacctcctggagaccctggagtggctgctgcagaagaacccacagctgggccattagccagccccgggccccgggtgcctctgcgtccgtgccaggcctcctgatgccaaggccacatccccgtgcttccagtgaccagaccactgaccaccctgactgtccaaacctgtgaccccaggccagggaacggggaggaaaccaaagaaaaccattttcagggagctcagacgtcacaggagggagcgggagcaggatgtggccctggcctcgccagagcacctgaagaagcaggccgtgagcgaggctgcgagtgccctgggcgccgtttctcacgcagtgaatgcttttccaggcctctgttgcttcctgcaccacacctggtggggtgggagcgtcctctaggtgcccctagttctttgtcctgcctcccagagggaggaaaagcccctgggggcttctggctccctgagattgggctctgagacgagacgggttcccaaggccctggtggggctggagtctcacctgtttgcatggagaaatgggctggccccacagcctcacaggagcagtttgtgggctggtttccccgggaatccagaccctaacccgtgagaatctggattttggcttgtgagccctgcttatttggagccgggtctagagggaaccctctatcagcctcaggaaaacaagacctctgtgcacctcacttttggctcactgcagcccttgtccttcacctccacacaggaccagctggaagcagaaagaagaaaggccaatttcacagggcaccaaacaagtatgaaatgtaaatcagaaatgcagacaccccagacgagagcctcacaggagggagggggccccacaggctccccaggaggctcgtgtctttggcccagagccagccttagtttgtccctgccatctactgtctgaggccatcgctgctacactttgtttttatttgtatttcatactgaagtttctaaaaaaaaaaa

SEQ ID NO: 600506 - DNA, 8036 bp, Homo sapiens
ccccgccgggcgccggcgccaattggagcgcctcggggggcgggggaggggcggagcgcgcctcttgatggacggcggcatttccggctctcgcgagtctgggtgggagcgcgccaaatttctcccctgaagcagaggtggtagccaacggctccatgtctctgaggagcggcgggcggcggcgcgcggacccaggcgcggatggcgaggccagcagggatgatggcgccacttcctcagtttcggcactcaagcgcctggaacggagtcagtggacggataagatggatttgcggtttggttttgagcggctgaaggagcctggtgagaagacaggctggctcattaacatgcatcctaccgagattttagatgaagataagcgcttaggcagtgcagtggattactactttattcaagatgacggaagcagatttaaggtggctttgccctataaaccgtatttctacattgcgaccagaaagggttgtgagcgagaagtttcatcttttctctccaagaagtttcagggcaaaattgcaaaagtggagactgtccccaaagaggatctggacttgccaaatcacttggtgggtttgaagcgaaattacatcaggctgtccttccacactgtggaggatcttgtcaaagtgaggaaggagatctcccctgccgtgaagaagaacagggagcaggatcacgccagcgacgcgtacacagctctgctttccagtgttctgcagaggggcggtgtcattactgatgaagaggaaacctctaagaagatagctgaccagttggacaacattgtggacatgcgcgagtacgatgttccctaccacatccgcctctccattgacctgaagatccacgtggctcattggtacaatgtcagataccgaggaaatgcttttccggtagaaatcacccgccgagatgaccttgttgaacgacctgaccctgtggttttggcatttgacattgagacgaccaaactgcccctcaagtttcctgatgctgagacagaccagattatgatgatttcctacatgatcgatggccagggctacctcatcaccaacagggagattgtttcagaagatattgaagattttgagttcacccccaagccagaatatgaaggccccttttgtgtcttcaatgaacccgatgaggctcatctgatccaaaggtggtttgaacacgtccaggagaccaaacccaccatcatggtcacctacaacggggacttttttgactggccatttgtggaggcccgggcagcagtccacggtctgagcatgcagcaggagataggcttccagaaggacagccagggggagtacaaggcgccccagtgcatccacatggactgcctcaggtgggtgaagagggacagttaccttcctgtgggcagtcataatctcaaggcggccgccaaggccaagctaggctatgatcccgtggagctagacccggaggacatgtgccggatggccacggagcagccccagactctggccacgtattctgtgtcagatgctgtcgccacttactacctgtacatgaagtacgtccacccattcatctttgctctgtgcaccattattcccatggagcccgacgaggtgctgcggaagggctctggcactctgtgtgaggccttgctgatggtgcaggccttccacgccaacatcatcttccccaacaagcaagagcaggagttcaataagctgacggacgacggacacgtgctggactctgagacctacgtcgggggccacgtggaggccctcgagtctggggttttccgcagcgatatcccttgccggtttaggatgaatcctgccgcctttgacttcctgctgcagcgggttgagaagaccttgcgccacgcccttgaggaagaggagaaagtgcctgtggagcaagtcaccaactttgaagaggtgtgtgatgagattaagagcaagcttgcctccctgaaggacgttcccagccgcatcgagtgtccactcatctaccacctggacgtgggggccatgtaccccaacatcatcctgaccaaccgcctgcagccctctgccatggtggacgaagccacctgtgctgcctgtgacttcaataagcctggagcaaactgccagcggaagatggcctggcagtggaggggcgagttcatgccagccagtcgcagcgaataccatcggatccagcaccagctggagtcagagaagttcccccccttgttcccagaggggccagctcgggcctttcatgaactgtcccgcgaggaacaggcgaaatacgagaagagaaggctggcggattactgccggaaagcctacaagaagatccacatcaccaaggtggaagagcgtctcaccaccatctgccagcgggaaaactccttctacgtggacaccgtgcgtgccttccgggacaggcgttacgagttcaaagggctccacaaggtgtggaaaaagaagctctcggcggccgtggaggtgggcgacgcggctgaggtgaagcgctgcaagaacatggaggtgctgtatgactcgctgcagctggcccacaagtgcatcctgaactccttctatggctatgtcatgcgcaagggggctcgctggtactccatggagatggctggcatcgtctgcttcacaggggccaacatcatcacccaggcacgggagctgatcgagcagattgggaggcccttagagctggacacagatggtatatggtgcgtcctgcccaacagcttcccagaaaattttgtcttcaagacgaccaatgtgaagaagcccaaagtgaccatctcctacccaggcgccatgttgaacatcatggtcaaggaaggcttcaccaatgaccagtaccaggagctggctgagccgtcctcactcacctacgtcacccgctcagagaacagcatcttttttgaggttgatgggccctaccttgccatgattcttccagcctccaaggaagaaggcaagaaattgaagaagaggtatgctgtgttcaatgaagacggttctctggctgagctcaagggctttgaggtcaaacgccgcggggaactgcagctgattaagatcttccaatcctcggtgtttgaggccttcctcaagggcagcacgctggaagaggtgtatggctctgtagccaaggtggctgactactggctggacgtgctgtacagcaaggcagccaacatgcctgactctgagctattcgagctcatctctgagaaccgttccatgtctcggaagctggaagattacggggagcagaagtctacatccatcagcacagcaaagcgcctggccgagttcctgggagaccagatggtcaaggatgcagggctgagttgccgctacatcatctcccgcaagcccgagggctcccctgtcacggagagggccatcccacttgccattttccaagcagagcccacggtgaggaagcactttctccggaaatggctcaagagctcttcccttcaagactttgatattcgagcaattctggattgggactactacattgagcggctgggaagcgccatccagaagatcatcaccatccctgcggccctgcagcaggtaaagaacccagtgccacgtgtcaaacaccccgactggctgcacaaaaaactgctggagaagaatgatgtctacaagcagaagaagatcagtgagctcttcaccctggagggcaggagacaggtcacgatggccgaggcctcagaagacagtccgaggccaagtgctcctgacatggaggacttcggcctcgtaaagctgcctcacccagcagcccctgtcactgtgaagaggaagcgagttctttgggagagccaggaggagtcccaggacctcacgccgactgtgccctggcaggaaatcttggggcagcctcccgccctgggaaccagccaggaggaatggcttgtctggctccggttccacaagaagaagtggcagctgcaggcccggcagcgcctcgcccgcaggaagaggcagcgtctggagtcggcagagggtgtgctcaggcccggggccatccgggatggtcctgccacggggctggggagcttcttgcgaagaactgcccgcagcatcctggaccttccgtggcagattgtgcagatcagcgagaccagccaggccggcctgttcaggctgtgggcgctcgttggcagtgacttgcactgcatcaggctgagcatcccccgtgtgttctacgtgaaccagcgagtcgctaaagcggaggagggtgcttcgtatcgcaaggtaaatcgggtccttcctcgctccaacatggtctacaatctctatgagtattcagtgccagaggacatgtaccaggaacacatcaacgagatcaacgctgagctgtcagcgccagacatcgagggcgtatatgagactcaggttccgttactgttccgggccctggtgcacctgggctgtgtgtgtgtggtcaataaacagctggtgaggcacctttcaggctgggaagcagagacctttgctcttgagcacctggagatgcgctctctggcccagttcagctacctggaaccagggagtatccgccatatctacctgtaccaccacgcacaggcccacaaagcgctcttcgggatcttcatcccctcacagcgcagggcatccgtctttgtgctggacactgtgcgcagcaaccagatgcccagccttggcgccctgtactcagcagagcacggcctcctcctggagaaggtgggccctgagctcctgccaccccccaaacacaccttcgaagttcgggcagaaactgacctgaagaccatctgcagagccatccagcgattcctgctcgcctacaaggaggagcgccgggggcccacactcatcgctgttcagtccagctgggagctgaagaggctggccagtgaaattcctgtcttggaggaattcccactggtgcctatctgtgtggctgacaagatcaactatggggtcctggactggcagcgccatggagcccggcgcatgatccgtcactacctcaacctggacacctgcctgtcgcaggccttcgagatgagcaggtactttcacattcccattgggaacctaccagaggacatctccacattcggctccgacctcttctttgcccgccacctccagcgccacaaccacctgctctggctgtcccctacagcccgccctgacctgggtggaaaggaggctgatgacaactgtcttgtcatggagttcgatgaccaagccactgttgagatcaacagttcaggctgttactccacagtgtgtgtggagctggaccttcagaacctggccgtcaacaccattctccagtctcaccatgtcaacgacatggagggggccgacagcatggggatcagcttcgacgtgatccagcaggcctccctggaggacatgatcacgggtggtcaggctgccagtgccccggccagctacgatgagacagccctgtgctctaacaccttcaggatcctgaagagcatggtcgtgggctgggtgaaggagatcacccagtaccacaacatctatgcagacaaccaggtgatgcacttctaccgctggcttcggtcgccatcctctctgcttcatgaccctgccctgcaccgcacactccacaacatgatgaagaagctcttcctgcagctcatcgctgagttcaagcgcctggggtcatcagtcatctacgccaacttcaaccgcatcatcctctgtacaaagaagcgccgtgtggaagatgccatcgcttacgtggagtacatcaccagcagcatccattcaaaggagaccttccattctctgacaatttctttctctcgatgctgggaatttcttctctggatggatccatctaactatggcggaatcaaaggaaaagtttcatctcgtattcactgtggactgcaagactcccagaaagcagggggagcagaggatgagcaggaaaatgaggacgatgaggaggaaagagatggggaggaggaggaagaggcggaggaatccaacgtggaggatttactggaaaacaactggaacattttgcagtttttgccacaggcagcctcctgccagaactacttcctcatgattgtttcagcgtacatcgtggccgtgtaccactgcatgaaggacgggctgaggcgcagtgctccagggagcacccccgtgaggaggaggggggccagccagctctcccaggaggccgagggggcggtcggagcccttcccggaatgatcaccttctctcaggattatgtcgcaaatgagctcactcagagcttcttcaccatcactcagaagattcagaagaaagtcacaggctctcggaactccactgagctctcggagatgtttcctgtcctccccggttcccacttgctgctcaataaccctgccctggagttcatcaaatacgtgtgcaaggtgctgtccctggacaccaacatcacaaaccaggtgaataagctgaaccgagacctgcttcgcctggtggatgtcggcgagttctccgaggaggcccagttccgagacccctgccgctcctacgtgcttcctgaggtcatctgccgcagctgtaacttctgccgcgacctggacctgtgtaaagactcttccttctcagaggatggggcggtcctgcctcagtggctctgctccaactgtcaggcgccctacgactcctctgccatcgagatgacgctggtggaagttctacagaagaagctgatggccttcaccctgcaggacctggtctgcctgaagtgccgcggggtgaaggagaccagcatgcctgtgtactgcagctgcgcgggagacttcgccctcaccatccacacccaggtcttcatggaacagatcggaatattccggaacattgcccagcactacggcatgtcgtacctcctggagaccctggagtggctgctgcagaagaacccacagctgggccattagccagccccgggccccgggtgcctctgcgtccgtgccaggcctcctgatgccaaggccacatccccgtgcttccagtgaccagaccactgaccaccctgactgtccaaacctgtgaccccaggccagggaacggggaggaaaccaaagaaaaccattttcagggagctcagacgtcacaggagggagcgggagcaggatgtggccctggcctcgccagagcacctgaagaagcaggccgtgagcgaggctgcgagtgccctgggcgccgtttctcacgcagtgaatgcttttccaggcctctgttgcttcctgcaccacacctggtggggtgggagcgtcctctaggtgcccctagttctttgtcctgcctcccagagggaggaaaagcccctgggggcttctggctccctgagattgggctctgagacgagacgggttcccaaggccctggtggggctggagtctcacctgtttgcatggagaaatgggctggccccacagcctcacaggagcagtttgtgggctggtttccccgggaatccagaccctaacccgtgagaatctggattttggcttgtgagccctgcttatttggagccgggtctagagggaaccctctatcagcctcaggaaaacaagacctctgtgcacctcacttttggctcactgcagcccttgtccttcacctccacacaggagccatccgggaccacgaacagagagaaagcgcccatttaccagggcgacacacaagtacggaaactacatccagcaacgcagccatccccgctcgtagagcctcaacacagagggagggggacacacacgtgctcccacaagcaggcatcgctgcactttagcccaaacaccacgtcccagggcctggcagcgcaacgcgaatggttcttggtgaggccatgccccgagcacacccatgtgtggtagaatagcagtttgagagataggacgcctcaacaaaaaggcatccacaaacgtcgaactagattctctgtctatgcc

SEQ ID NO: 600507 - DNA, 7882 bp, Homo sapiens
ccccgccgggcgccggcgccaattggagcgcctcggggggcgggggaggggcggagcgcgcctcttgatggacggcggcatttccggctctcgcgagtctgggtgggagcgcgccaaatttctcccctgaagcagaggtggtagccaacggctccatgtctctgaggagcggcgggcggcggcgcgcggacccaggcgcggatggcgaggccagcagggatgatggcgccacttcctcagtttcggcactcaagcgcctggaacggagtcagtggacggataagatggatttgcggtttggttttgagcggctgaaggagcctggtgagaagacaggctggctcattaacatgcatcctgtggctttgccctataaaccgtatttctacattgcgaccagaaagggttgtgagcgagaagtttcatcttttctctccaagaagtttcagggcaaaattgcaaaagtggagactgtccccaaagaggatctggacttgccaaatcacttggtgggtttgaagcgaaattacatcaggctgtccttccacactgtggaggatcttgtcaaagtgaggaaggagatctcccctgccgtgaagaagaacagggagcaggatcacgccagcgacgcgtacacagctctgctttccagtgttctgcagaggggcggtgtcattactgatgaagaggaaacctctaagaagatagctgaccagttggacaacattgtggacatgcgcgagtacgatgttccctaccacatccgcctctccattgacctgaagatccacgtggctcattggtacaatgtcagataccgaggaaatgcttttccggtagaaatcacccgccgagatgaccttgttgaacgacctgaccctgtggttttggcatttgacattgagacgaccaaactgcccctcaagtttcctgatgctgagacagaccagattatgatgatttcctacatgatcgatggccagggctacctcatcaccaacagggagattgtttcagaagatattgaagattttgagttcacccccaagccagaatatgaaggccccttttgtgtcttcaatgaacccgatgaggctcatctgatccaaaggtggtttgaacacgtccaggagaccaaacccaccatcatggtcacctacaacggggacttttttgactggccatttgtggaggcccgggcagcagtccacggtctgagcatgcagcaggagataggcttccagaaggacagccagggggagtacaaggcgccccagtgcatccacatggactgcctcaggtgggtgaagagggacagttaccttcctgtgggcagtcataatctcaaggcggccgccaaggccaagctaggctatgatcccgtggagctagacccggaggacatgtgccggatggccacggagcagccccagactctggccacgtattctgtgtcagatgctgtcgccacttactacctgtacatgaagtacgtccacccattcatctttgctctgtgcaccattattcccatggagcccgacgaggtgctgcggaagggctctggcactctgtgtgaggccttgctgatggtgcaggccttccacgccaacatcatcttccccaacaagcaagagcaggagttcaataagctgacggacgacggacacgtgctggactctgagacctacgtcgggggccacgtggaggccctcgagtctggggttttccgcagcgatatcccttgccggtttaggatgaatcctgccgcctttgacttcctgctgcagcgggttgagaagaccttgcgccacgcccttgaggaagaggagaaagtgcctgtggagcaagtcaccaactttgaagaggtgtgtgatgagattaagagcaagcttgcctccctgaaggacgttcccagccgcatcgagtgtccactcatctaccacctggacgtgggggccatgtaccccaacatcatcctgaccaaccgcctgcagccctctgccatggtggacgaagccacctgtgctgcctgtgacttcaataagcctggagcaaactgccagcggaagatggcctggcagtggaggggcgagttcatgccagccagtcgcagcgaataccatcggatccagcaccagctggagtcagagaagttcccccccttgttcccagaggggccagctcgggcctttcatgaactgtcccgcgaggaacaggcgaaatacgagaagagaaggctggcggattactgccggaaagcctacaagaagatccacatcaccaaggtggaagagcgtctcaccaccatctgccagcgggaaaactccttctacgtggacaccgtgcgtgccttccgggacaggcgttacgagttcaaagggctccacaaggtgtggaaaaagaagctctcggcggccgtggaggtgggcgacgcggctgaggtgaagcgctgcaagaacatggaggtgctgtatgactcgctgcagctggcccacaagtgcatcctgaactccttctatggctatgtcatgcgcaagggggctcgctggtactccatggagatggctggcatcgtctgcttcacaggggccaacatcatcacccaggcacgggagctgatcgagcagattgggaggcccttagagctggacacagatggtatatggtgcgtcctgcccaacagcttcccagaaaattttgtcttcaagacgaccaatgtgaagaagcccaaagtgaccatctcctacccaggcgccatgttgaacatcatggtcaaggaaggcttcaccaatgaccagtaccaggagctggctgagccgtcctcactcacctacgtcacccgctcagagaacagcatcttttttgaggttgatgggccctaccttgccatgattcttccagcctccaaggaagaaggcaagaaattgaagaagaggtatgctgtgttcaatgaagacggttctctggctgagctcaagggctttgaggtcaaacgccgcggggaactgcagctgattaagatcttccaatcctcggtgtttgaggccttcctcaagggcagcacgctggaagaggtgtatggctctgtagccaaggtggctgactactggctggacgtgctgtacagcaaggcagccaacatgcctgactctgagctattcgagctcatctctgagaaccgttccatgtctcggaagctggaagattacggggagcagaagtctacatccatcagcacagcaaagcgcctggccgagttcctgggagaccagatggtcaaggatgcagggctgagttgccgctacatcatctcccgcaagcccgagggctcccctgtcacggagagggccatcccacttgccattttccaagcagagcccacggtgaggaagcactttctccggaaatggctcaagagctcttcccttcaagactttgatattcgagcaattctggattgggactactacattgagcggctgggaagcgccatccagaagatcatcaccatccctgcggccctgcagcaggtaaagaacccagtgccacgtgtcaaacaccccgactggctgcacaaaaaactgctggagaagaatgatgtctacaagcagaagaagatcagtgagctcttcaccctggagggcaggagacaggtcacgatggccgaggcctcagaagacagtccgaggccaagtgctcctgacatggaggacttcggcctcgtaaagctgcctcacccagcagcccctgtcactgtgaagaggaagcgagttctttgggagagccaggaggagtcccaggacctcacgccgactgtgccctggcaggaaatcttggggcagcctcccgccctgggaaccagccaggaggaatggcttgtctggctccggttccacaagaagaagtggcagctgcaggcccggcagcgcctcgcccgcaggaagaggcagcgtctggagtcggcagagggtgtgctcaggcccggggccatccgggatggtcctgccacggggctggggagcttcttgcgaagaactgcccgcagcatcctggaccttccgtggcagattgtgcagatcagcgagaccagccaggccggcctgttcaggctgtgggcgctcgttggcagtgacttgcactgcatcaggctgagcatcccccgtgtgttctacgtgaaccagcgagtcgctaaagcggaggagggtgcttcgtatcgcaaggtaaatcgggtccttcctcgctccaacatggtctacaatctctatgagtattcagtgccagaggacatgtaccaggaacacatcaacgagatcaacgctgagctgtcagcgccagacatcgagggcgtatatgagactcaggttccgttactgttccgggccctggtgcacctgggctgtgtgtgtgtggtcaataaacagctggtgaggcacctttcaggctgggaagcagagacctttgctcttgagcacctggagatgcgctctctggcccagttcagctacctggaaccagggagtatccgccatatctacctgtaccaccacgcacaggcccacaaagcgctcttcgggatcttcatcccctcacagcgcagggcatccgtctttgtgctggacactgtgcgcagcaaccagatgcccagccttggcgccctgtactcagcagagcacggcctcctcctggagaaggtgggccctgagctcctgccaccccccaaacacaccttcgaagttcgggcagaaactgacctgaagaccatctgcagagccatccagcgattcctgctcgcctacaaggaggagcgccgggggcccacactcatcgctgttcagtccagctgggagctgaagaggctggccagtgaaattcctgtcttggaggaattcccactggtgcctatctgtgtggctgacaagatcaactatggggtcctggactggcagcgccatggagcccggcgcatgatccgtcactacctcaacctggacacctgcctgtcgcaggccttcgagatgagcaggtactttcacattcccattgggaacctaccagaggacatctccacattcggctccgacctcttctttgcccgccacctccagcgccacaaccacctgctctggctgtcccctacagcccgccctgacctgggtggaaaggaggctgatgacaactgtcttgtcatggagttcgatgaccaagccactgttgagatcaacagttcaggctgttactccacagtgtgtgtggagctggaccttcagaacctggccgtcaacaccattctccagtctcaccatgtcaacgacatggagggggccgacagcatggggatcagcttcgacgtgatccagcaggcctccctggaggacatgatcacgggtggtcaggctgccagtgccccggccagctacgatgagacagccctgtgctctaacaccttcaggatcctgaagagcatggtcgtgggctgggtgaaggagatcacccagtaccacaacatctatgcagacaaccaggtgatgcacttctaccgctggcttcggtcgccatcctctctgcttcatgaccctgccctgcaccgcacactccacaacatgatgaagaagctcttcctgcagctcatcgctgagttcaagcgcctggggtcatcagtcatctacgccaacttcaaccgcatcatcctctgtacaaagaagcgccgtgtggaagatgccatcgcttacgtggagtacatcaccagcagcatccattcaaaggagaccttccattctctgacaatttctttctctcgatgctgggaatttcttctctggatggatccatctaactatggcggaatcaaaggaaaagtttcatctcgtattcactgtggactgcaagactcccagaaagcagggggagcagaggatgagcaggaaaatgaggacgatgaggaggaaagagatggggaggaggaggaagaggcggaggaatccaacgtggaggatttactggaaaacaactggaacattttgcagtttttgccacaggcagcctcctgccagaactacttcctcatgattgtttcagcgtacatcgtggccgtgtaccactgcatgaaggacgggctgaggcgcagtgctccagggagcacccccgtgaggaggaggggggccagccagctctcccaggaggccgagggggcggtcggagcccttcccggaatgatcaccttctctcaggattatgtcgcaaatgagctcactcagagcttcttcaccatcactcagaagattcagaagaaagtcacaggctctcggaactccactgagctctcggagatgtttcctgtcctccccggttcccacttgctgctcaataaccctgccctggagttcatcaaatacgtgtgcaaggtgctgtccctggacaccaacatcacaaaccaggtgaataagctgaaccgagacctgcttcgcctggtggatgtcggcgagttctccgaggaggcccagttccgagacccctgccgctcctacgtgcttcctgaggtcatctgccgcagctgtaacttctgccgcgacctggacctgtgtaaagactcttccttctcagaggatggggcggtcctgcctcagtggctctgctccaactgtcaggcgccctacgactcctctgccatcgagatgacgctggtggaagttctacagaagaagctgatggccttcaccctgcaggacctggtctgcctgaagtgccgcggggtgaaggagaccagcatgcctgtgtactgcagctgcgcgggagacttcgccctcaccatccacacccaggtcttcatggaacagatcggaatattccggaacattgcccagcactacggcatgtcgtacctcctggagaccctggagtggctgctgcagaagaacccacagctgggccattagccagccccgggccccgggtgcctctgcgtccgtgccaggcctcctgatgccaaggccacatccccgtgcttccagtgaccagaccactgaccaccctgactgtccaaacctgtgaccccaggccagggaacggggaggaaaccaaagaaaaccattttcagggagctcagacgtcacaggagggagcgggagcaggatgtggccctggcctcgccagagcacctgaagaagcaggccgtgagcgaggctgcgagtgccctgggcgccgtttctcacgcagtgaatgcttttccaggcctctgttgcttcctgcaccacacctggtggggtgggagcgtcctctaggtgcccctagttctttgtcctgcctcccagagggaggaaaagcccctgggggcttctggctccctgagattgggctctgagacgagacgggttcccaaggccctggtggggctggagtctcacctgtttgcatggagaaatgggctggccccacagcctcacaggagcagtttgtgggctggtttccccgggaatccagaccctaacccgtgagaatctggattttggcttgtgagccctgcttatttggagccgggtctagagggaaccctctatcagcctcaggaaaacaagacctctgtgcacctcacttttggctcactgcagcccttgtccttcacctccacacaggaccagctggaagcagaaagaagaaaggccaatttcacagggcaccaaacaagtatgaaatgtaaatcagaaatgcagacaccccagacgagagcctcacaggagggagggggccccacaggctccccaggaggctcgtgtctttggcccagagccagccttagtttgtccctgccatctactgtctgaggccatcgctgctacactttgtttttatttgtatttcatactgaagtttctaaaaaaaaaaa

SEQ ID NO: 600508 - DNA, 208 bp, Homo sapiens
atatcactccccatccctgacaaaggcatcttcccagaatcaggcacatagcccacccaggaccggagaaacagagaacacccactaggacggaggccgctgatggtgcagaaactggtgctgacatgtcaagtgactcctttggtccaccctactttccaacaatcagccaaccacacttgaccacagagaacacgtcgaattcgag

SEQ ID NO: 600509 - DNA, 7504 bp, Homo sapiens
ccccgccgggcgccggcgccaattggagcgcctcggggggcgggggaggggcggagcgcgcctcttgatggacggcggcatttccggctctcgcgagtctgggtgggagcgcgccaaatttctcccctgaagcagaggtggtagccaacggctccatgtctctgaggagcggcgggcggcggcgcgcggacccaggcgcggatggcgaggccagcagggatgatggcgccacttcctcagtttcggcactcaagcgcctggaacggagtcagtggacggataagatggatttgcggtttggttttgagcggctgaaggagcctggtgagaagacaggctggctcattaacatgcatcctaccgagattttagatgaagataagcgcttaggcagtgcagtggattactactttattcaagatgacggaagcagatttaaggtggctttgccctataaaccgtatttctacattgcgaccagaaagggttgtgagcgagaagtttcatcttttctctccaagaagtttcagggcaaaattgcaaaagtggagactgtccccaaagaggatctggacttgccaaatcacttggtgggtttgaagcgaaattacatcaggctgtccttccacactgtggaggatcttgtcaaagtgaggaaggagatctcccctgccgtgaagaagaacagggagcaggatcacgccagcgacgcgtacacagctctgctttccagtgttctgcagaggggcggtgtcattactgatgaagaggaaacctctaagaagatagctgaccagttggacaacattgtggacatgcgcgagtacgatgttccctaccacatccgcctctccattgacctgaagatccacgtggctcattggtacaatgtcagataccgaggaaatgcttttccggtagaaatcacccgccgagatgaccttgttgaacgacctgaccctgtggttttggcatttgacattgagacgaccaaactgcccctcaagtttcctgatgctgagacagaccagattatgatgatttcctacatgatcgatggccagggctacctcatcaccaacagggagattgtttcagaagatattgaagattttgagttcacccccaagccagaatatgaaggccccttttgtgtcttcaatgaacccgatgaggctcatctgatccaaaggtggtttgaacacgtccaggagaccaaacccaccatcatggtcacctacaacggggacttttttgactggccatttgtggaggcccgggcagcagtccacggtctgagcatgcagcaggagataggcttccagaaggacagccagggggagtacaaggcgccccagtgcatccacatggactgcctcaggtgggtgaagagggacagttaccttcctgtgggcagtcataatctcaaggcggccgccaaggccaagctaggctatgatcccgtggagctagacccggaggacatgtgccggatggccacggagcagccccagactctggccacgtattctgtgtcagatgctgtcgccacttactacctgtacatgaagtacgtccacccattcatctttgctctgtgcaccattattcccatggagcccgacgaggtgctgcggaagggctctggcactctgtgtgaggccttgctgatggtgcaggccttccacgccaacatcatcttccccaacaagcaagagcaggagttcaataagctgacggacgacggacacgtgctggactctgagacctacgtcgggggccacgtggaggccctcgagtctggggttttccgcagcgatatcccttgccggtttaggatgaatcctgccgcctttgacttcctgctgcagcgggttgagaagaccttgcgccacgcccttgaggaagaggagaaagtgcctgtggagcaagtcaccaactttgaagaggtgtgtgatgagattaagagcaagcttgcctccctgaaggacgttcccagccgcatcgagtgtccactcatctaccacctggacgtgggggccatgtaccccaacatcatcctgaccaaccgcctgcagccctctgccatggtggacgaagccacctgtgctgcctgtgacttcaataagcctggagcaaactgccagcggaagatggcctggcagtggaggggcgagttcatgccagccagtcgcagcgaataccatcggatccagcaccagctggagtcagagaagttcccccccttgttcccagaggggccagctcgggcctttcatgaactgtcccgcgaggaacaggcgaaatacgagaagagaaggctggcggattactgccggaaagcctacaagaagatccacatcaccaaggtggaagagcgtctcaccaccatctgccagcgggaaaactccttctacgtggacaccgtgcgtgccttccgggacaggcgttacgagttcaaagggctccacaaggtgtggaaaaagaagctctcggcggccgtggaggtgggcgacgcggctgaggtgaagcgctgcaagaacatggaggtgctgtatgactcgctgcagctggcccacaagtgcatcctgaactccttctatggctatgtcatgcgcaagggggctcgctggtactccatggagatggctggcatcgtctgcttcacaggggccaacatcatcacccaggcacgggagctgatcgagcagattgggaggcccttagagctggacacagatggtatatggtgcgtcctgcccaacagcttcccagaaaattttgtcttcaagacgaccaatgtgaagaagcccaaagtgaccatctcctacccaggcgccatgttgaacatcatggtcaaggaaggcttcaccaatgaccagtaccaggagctggctgagccgtcctcactcacctacgtcacccgctcagagaacagcatcttttttgaggttgatgggccctaccttgccatgattcttccagcctccaaggaagaaggcaagaaattgaagaagaggtatgctgtgttcaatgaagacggttctctggctgagctcaagggctttgaggtcaaacgccgcggggaactgcagctgattaagatcttccaatcctcggtgtttgaggccttcctcaagggcagcacgctggaagaggtgtatggctctgtagccaaggtggctgactactggctggacgtgctgtacagcaaggcagccaacatgcctgactctgagctattcgagctcatctctgagaaccgttccatgtctcggaagctggaagattacggggagcagaagtctacatccatcagcacagcaaagcgcctggccgagttcctgggagaccagatggtcaaggatgcagggctgagttgccgctacatcatctcccgcaagcccgagggctcccctgtcacggagagggccatcccacttgccattttccaagcagagcccacggtgaggaagcactttctccggaaatggctcaagagctcttcccttcaagactttgatattcgagcaattctggattgggactactacattgagcggctgggaagcgccatccagaagatcatcaccatccctgcggccctgcagcaggtaaagaacccagtgccacgtgtcaaacaccccgactggctgcacaaaaaactgctggagaagaatgatgtctacaagcagaagaagatcagtgagctcttcaccctggagggcaggagacaggtcacgatggccgaggcctcagaagacagtccgaggccaagtgctcctgacatggaggacttcggcctcgtaaagctgcctcacccagcagcccctgtcactgtgaagaggaagcgagttctttgggagagccaggaggagtcccaggacctcacgccgactgtgccctggcaggaaatcttggggcagcctcccgccctgggaaccagccaggaggaatggcttgtctggctccggttccacaagaagaagtggcagctgcaggcccggcagcgcctcgcccgcaggaagaggcagcgtctggagtcggcagagggtgtgctcaggcccggggccatccgggatggtcctgccacggggctggggagcttcttgcgaagaactgcccgcagcatcctggaccttccgtggcagattgtgcagatcagcgagaccagccaggccggcctgttcaggctgtgggcgctcgttggcagtgacttgcactgcatcaggctgagcatcccccgtgtgttctacgtgaaccagcgagtcgctaaagcggaggagggtgcttcgtatcgcaaggtaaatcgggtccttcctcgctccaacatggtctacaatctctatgagtattcagtgccagaggacatgtaccaggaacacatcaacgagatcaacgctgagctgtcagcgccagacatcgagggcgtatatgagactcaggttccgttactgttccgggccctggtgcacctgggctgtgtgtgtgtggtcaataaacagctggtgaggcacctttcaggctgggaagcagagacctttgctcttgagcacctggagatgcgctctctggcccagttcagctacctggaaccagggagtatccgccatatctacctgtaccaccacgcacaggcccacaaagcgctcttcgggatcttcatcccctcacagcgcagggcatccgtctttgtgctggacactgtgcgcagcaaccagatgcccagccttggcgccctgtactcagcagagcacggcctcctcctggagaaggtgggccctgagctcctgccaccccccaaacacaccttcgaagttcgggcagaaactgacctgaagaccatctgcagagccatccagcgattcctgctcgcctacaaggaggagcgccgggggcccacactcatcgctgttcagtccagctgggagctgaagaggctggccagtgaaattcctgtcttggaggaattcccactggtgcctatctgtgtggctgacaagatcaactatggggtcctggactggcagcgccatggagcccggcgcatgatccgtcactacctcaacctggacacctgcctgtcgcaggccttcgagatgagcaggtactttcacattcccattgggaacctaccagaggacatctccacattcggctccgacctcttctttgcccgccacctccagcgccacaaccacctgctctggctgtcccctacagcccgccctgacctgggtggaaaggaggctgatgacaactgtcttgtcatggagttcgatgaccaagccactgttgagatcaacagttcaggctgttactccacagtgtgtgtggagctggaccttcagaacctggccgtcaacaccattctccagtctcaccatgtcaacgacatggagggggccgacagcatggggatcagcttcgacgtgatccagcaggcctccctggaggacatgatcacgggtggtcaggctgccagtgccccggccagctacgatgagacagccctgtgctctaacaccttcaggatcctgaagagcatggtcgtgggctgggtgaaggagatcacccagtaccacaacatctatgcagacaaccaggtgatgcacttctaccgctggcttcggtcgccatcctctctgcttcatgaccctgccctgcaccgcacactccacaacatgatgaagaagctcttcctgcagctcatcgctgagttcaagcgcctggggtcatcagtcatctacgccaacttcaaccgcatcatcctctgtacaaagaagcgccgtgtggaagatgccatcgcttacgtggagtacatcaccagcagcatccattcaaaggagaccttccattctctgacaatttctttctctcgatgctgggaatttcttctctggatggatccatctaactatggcggaatcaaaggaaaagtttcatctcgtattcactgtggactgcaagactcccagaaagcagggggagcagaggatgagcaggaaaatgaggacgatgaggaggaaagagatggggaggaggaggaagaggcggaggaatccaacgtggaggatttactggaaaacaactggaacattttgcagtttttgccacaggcagcctcctgccagaactacttcctcatgattgtttcagcgtacatcgtggccgtgtaccactgcatgaaggacgggctgaggcgcagtgctccagggagcacccccgtgaggaggaggggggccagccagctctcccaggaggccgagggggcggtcggagcccttcccggaatgatcaccttctctcaggattatgtcgcaaatgagctcactcagagcttcttcaccatcactcagaagattcagaagaaagtcacaggctctcggaactccactgagctctcggagatgtttcctgtcctccccggttcccacttgctgctcaataaccctgccctggagttcatcaaatacgtgtgcaaggtgctgtccctggacaccaacatcacaaaccaggtgaataagctgaaccgagacctgcttcgcctggtggatgtcggcgagttctccgaggaggcccagttccgagacccctgccgctcctacgtgcttcctgaggtcatctgccgcagctgtaacttctgccgcgacctggacctgtgtaaagactcttccttctcagaggatggggcggtcctgcctcagtggctctgctccaactgtcaggcgccctacgactcctctgccatcgagatgacgctggtggaagttctacagaagaagctgatggccttcaccctgcaggacctggtctgcctgaagtgccgcggggtgaaggagaccagcatgcctgtgtactgcagctgcgcgggagacttcgccctcaccatccacacccaggtcttcatggaacagatcggaatattccggaacattgcccagcactacggcatgtcgtacctcctggagaccctggagtggctgctgcagaagaacccacagctgggccattagccagccccgggccccgggtgcctctgcgtccgtgccaggcctcctgatgccaaggccacatccccgtgcttccagtgaccagaccactgaccaccctgactgtccaaacctgtgaccccaggccagggaacggggaggaaaccaaagaaaaccattttcagggagctcagacgtcacaggagggagcgggagcaggatgtggccctggcctcgccagagcacctgaagaagcaggccgaccagctggaagcagaaagaagaaaggccaatttcacagggcaccaaacaagtatgaaatgtaaatcagaaatgcagacaccccagacgagagcctcacaggagggagggggccccacaggctccccaggaggctcgtgtctttggcccagagccagccttagtttgtccctgccatctactgtctgaggccatcgctgctacactttgtttttatttgtatttcatactgaagtttctaaaaaaaaaaa

SEQ ID NO: 600510 - DNA, 8036 bp, Homo sapiens
ccccgccgggcgccggcgccaattggagcgcctcggggggcgggggaggggcggagcgcgcctcttgatggacggcggcatttccggctctcgcgagtctgggtgggagcgcgccaaatttctcccctgaagcagaggtggtagccaacggctccatgtctctgaggagcggcgggcggcggcgcgcggacccaggcgcggatggcgaggccagcagggatgatggcgccacttcctcagtttcggcactcaagcgcctggaacggagtcagtggacggataagatggatttgcggtttggttttgagcggctgaaggagcctggtgagaagacaggctggctcattaacatgcatcctaccgagattttagatgaagataagcgcttaggcagtgcagtggattactactttattcaagatgacggaagcagatttaaggtggctttgccctataaaccgtatttctacattgcgaccagaaagggttgtgagcgagaagtttcatcttttctctccaagaagtttcagggcaaaattgcaaaagtggagactgtccccaaagaggatctggacttgccaaatcacttggtgggtttgaagcgaaattacatcaggctgtccttccacactgtggaggatcttgtcaaagtgaggaaggagatctcccctgccgtgaagaagaacagggagcaggatcacgccagcgacgcgtacacagctctgctttccagtgttctgcagaggggcggtgtcattactgatgaagaggaaacctctaagaagatagctgaccagttggacaacattgtggacatgcgcgagtacgatgttccctaccacatccgcctctccattgacctgaagatccacgtggctcattggtacaatgtcagataccgaggaaatgcttttccggtagaaatcacccgccgagatgaccttgttgaacgacctgaccctgtggttttggcatttgacattgagacgaccaaactgcccctcaagtttcctgatgctgagacagaccagattatgatgatttcctacatgatcgatggccagggctacctcatcaccaacagggagattgtttcagaagatattgaagattttgagttcacccccaagccagaatatgaaggccccttttgtgtcttcaatgaacccgatgaggctcatctgatccaaaggtggtttgaacacgtccaggagaccaaacccaccatcatggtcacctacaacggggacttttttgactggccatttgtggaggcccgggcagcagtccacggtctgagcatgcagcaggagataggcttccagaaggacagccagggggagtacaaggcgccccagtgcatccacatggactgcctcaggtgggtgaagagggacagttaccttcctgtgggcagtcataatctcaaggcggccgccaaggccaagctaggctatgatcccgtggagctagacccggaggacatgtgccggatggccacggagcagccccagactctggccacgtattctgtgtcagatgctgtcgccacttactacctgtacatgaagtacgtccacccattcatctttgctctgtgcaccattattcccatggagcccgacgaggtgctgcggaagggctctggcactctgtgtgaggccttgctgatggtgcaggccttccacgccaacatcatcttccccaacaagcaagagcaggagttcaataagctgacggacgacggacacgtgctggactctgagacctacgtcgggggccacgtggaggccctcgagtctggggttttccgcagcgatatcccttgccggtttaggatgaatcctgccgcctttgacttcctgctgcagcgggttgagaagaccttgcgccacgcccttgaggaagaggagaaagtgcctgtggagcaagtcaccaactttgaagaggtgtgtgatgagattaagagcaagcttgcctccctgaaggacgttcccagccgcatcgagtgtccactcatctaccacctggacgtgggggccatgtaccccaacatcatcctgaccaaccgcctgcaggtgagactttacttcccgtgtcagagtcggagctctctctgcccagccctaagtgctttctcacccctcccagccctctgccatggtggacgaagccacctgtgctgcctgtgacttcaataagcctggagcaaactgccagcggaagatggcctggcagtggaggggcgagttcatgccagccagtcgcagcgaataccatcggatccagcaccagctggagtcagagaagttcccccccttgttcccagaggggccagctcgggcctttcatgaactgtcccgcgaggaacaggcgaaatacgagaagagaaggctggcggattactgccggaaagcctacaagaagatccacatcaccaaggtggaagagcgtctcaccaccatctgccagcgggaaaactccttctacgtggacaccgtgcgtgccttccgggacaggcgttacgagttcaaagggctccacaaggtgtggaaaaagaagctctcggcggccgtggaggtgggcgacgcggctgaggtgaagcgctgcaagaacatggaggtgctgtatgactcgctgcagctggcccacaagtgcatcctgaactccttctatggctatgtcatgcgcaagggggctcgctggtactccatggagatggctggcatcgtctgcttcacaggggccaacatcatcacccaggcacgggagctgatcgagcagattgggaggcccttagagctggacacagatggtatatggtgcgtcctgcccaacagcttcccagaaaattttgtcttcaagacgaccaatgtgaagaagcccaaagtgaccatctcctacccaggcgccatgttgaacatcatggtcaaggaaggcttcaccaatgaccagtaccaggagctggctgagccgtcctcactcacctacgtcacccgctcagagaacagcatcttttttgaggttgatgggccctaccttgccatgattcttccagcctccaaggaagaaggcaagaaattgaagaagaggtatgctgtgttcaatgaagacggttctctggctgagctcaagggctttgaggtcaaacgccgcggggaactgcagctgattaagatcttccaatcctcggtgtttgaggccttcctcaagggcagcacgctggaagaggtgtatggctctgtagccaaggtggctgactactggctggacgtgctgtacagcaaggcagccaacatgcctgactctgagctattcgagctcatctctgagaaccgttccatgtctcggaagctggaagattacggggagcagaagtctacatccatcagcacagcaaagcgcctggccgagttcctgggagaccagatggtcaaggatgcagggctgagttgccgctacatcatctcccgcaagcccgagggctcccctgtcacggagagggccatcccacttgccattttccaagcagagcccacggtgaggaagcactttctccggaaatggctcaagagctcttcccttcaagactttgatattcgagcaattctggattgggactactacattgagcggctgggaagcgccatccagaagatcatcaccatccctgcggccctgcagcaggtaaagaacccagtgccacgtgtcaaacaccccgactggctgcacaaaaaactgctggagaagaatgatgtctacaagcagaagaagatcagtgagctcttcaccctggagggcaggagacaggtcacgatggccgaggcctcagaagacagtccgaggccaagtgctcctgacatggaggacttcggcctcgtaaagctgcctcacccagcagcccctgtcactgtgaagaggaagcgagttctttgggagagccaggaggagtcccaggacctcacgccgactgtgccctggcaggaaatcttggggcagcctcccgccctgggaaccagccaggaggaatggcttgtctggctccggttccacaagaagaagtggcagctgcaggcccggcagcgcctcgcccgcaggaagaggcagcgtctggagtcggcagagggtgtgctcaggcccggggccatccgggatggtcctgccacggggctggggagcttcttgcgaagaactgcccgcagcatcctggaccttccgtggcagattgtgcagatcagcgagaccagccaggccggcctgttcaggctgtgggcgctcgttggcagtgacttgcactgcatcaggctgagcatcccccgtgtgttctacgtgaaccagcgagtcgctaaagcggaggagggtgcttcgtatcgcaaggtaaatcgggtccttcctcgctccaacatggtctacaatctctatgagtattcagtgccagaggacatgtaccaggaacacatcaacgagatcaacgctgagctgtcagcgccagacatcgagggcgtatatgagactcaggttccgttactgttccgggccctggtgcacctgggctgtgtgtgtgtggtcaataaacagctggtgaggcacctttcaggctgggaagcagagacctttgctcttgagcacctggagatgcgctctctggcccagttcagctacctggaaccagggagtatccgccatatctacctgtaccaccacgcacaggcccacaaagcgctcttcgggatcttcatcccctcacagcgcagggcatccgtctttgtgctggacactgtgcgcagcaaccagatgcccagccttggcgccctgtactcagcagagcacggcctcctcctggagaaggtgggccctgagctcctgccaccccccaaacacaccttcgaagttcgggcagaaactgacctgaagaccatctgcagagccatccagcgattcctgctcgcctacaaggaggagcgccgggggcccacactcatcgctgttcagtccagctgggagctgaagaggctggccagtgaaattcctgtcttggaggaattcccactggtgcctatctgtgtggctgacaagatcaactatggggtcctggactggcagcgccatggagcccggcgcatgatccgtcactacctcaacctggacacctgcctgtcgcaggccttcgagatgagcaggtactttcacattcccattgggaacctaccagaggacatctccacattcggctccgacctcttctttgcccgccacctccagcgccacaaccacctgctctggctgtcccctacagcccgccctgacctgggtggaaaggaggctgatgacaactgtcttgtcatggagttcgatgaccaagccactgttgagatcaacagttcaggctgttactccacagtgtgtgtggagctggaccttcagaacctggccgtcaacaccattctccagtctcaccatgtcaacgacatggagggggccgacagcatggggatcagcttcgacgtgatccagcaggcctccctggaggacatgatcacgggtggtcaggctgccagtgccccggccagctacgatgagacagccctgtgctctaacaccttcaggatcctgaagagcatggtcgtgggctgggtgaaggagatcacccagtaccacaacatctatgcagacaaccaggtgatgcacttctaccgctggcttcggtcgccatcctctctgcttcatgaccctgccctgcaccgcacactccacaacatgatgaagaagctcttcctgcagctcatcgctgagttcaagcgcctggggtcatcagtcatctacgccaacttcaaccgcatcatcctctgtacaaagaagcgccgtgtggaagatgccatcgcttacgtggagtacatcaccagcagcatccattcaaaggagaccttccattctctgacaatttctttctctcgatgctgggaatttcttctctggatggatccatctaactatggcggaatcaaaggaaaagtttcatctcgtattcactgtggactgcaagactcccagaaagcagggggagcagaggatgagcaggaaaatgaggacgatgaggaggaaagagatggggaggaggaggaagaggcggaggaatccaacgtggaggatttactggaaaacaactggaacattttgcagtttttgccacaggcagcctcctgccagaactacttcctcatgattgtttcagcgtacatcgtggccgtgtaccactgcatgaaggacgggctgaggcgcagtgctccagggagcacccccgtgaggaggaggggggccagccagctctcccaggaggccgagggggcggtcggagcccttcccggaatgatcaccttctctcaggattatgtcgcaaatgagctcactcagagcttcttcaccatcactcagaagattcagaagaaagtcacaggctctcggaactccactgagctctcggagatgtttcctgtcctccccggttcccacttgctgctcaataaccctgccctggagttcatcaaatacgtgtgcaaggtgctgtccctggacaccaacatcacaaaccaggtgaataagctgaaccgagacctgcttcgcctggtggatgtcggcgagttctccgaggaggcccagttccgagacccctgccgctcctacgtgcttcctgaggtcatctgccgcagctgtaacttctgccgcgacctggacctgtgtaaagactcttccttctcagaggatggggcggtcctgcctcagtggctctgctccaactgtcaggcgccctacgactcctctgccatcgagatgacgctggtggaagttctacagaagaagctgatggccttcaccctgcaggacctggtctgcctgaagtgccgcggggtgaaggagaccagcatgcctgtgtactgcagctgcgcgggagacttcgccctcaccatccacacccaggtcttcatggaacagatcggaatattccggaacattgcccagcactacggcatgtcgtacctcctggagaccctggagtggctgctgcagaagaacccacagctgggccattagccagccccgggccccgggtgcctctgcgtccgtgccaggcctcctgatgccaaggccacatccccgtgcttccagtgaccagaccactgaccaccctgactgtccaaacctgtgaccccaggccagggaacggggaggaaaccaaagaaaaccattttcagggagctcagacgtcacaggagggagcgggagcaggatgtggccctggcctcgccagagcacctgaagaagcaggccgtgagcgaggctgcgagtgccctgggcgccgtttctcacgcagtgaatgcttttccaggcctctgttgcttcctgcaccacacctggtggggtgggagcgtcctctaggtgcccctagttctttgtcctgcctcccagagggaggaaaagcccctgggggcttctggctccctgagattgggctctgagacgagacgggttcccaaggccctggtggggctggagtctcacctgtttgcatggagaaatgggctggccccacagcctcacaggagcagtttgtgggctggtttccccgggaatccagaccctaacccgtgagaatctggattttggcttgtgagccctgcttatttggagccgggtctagagggaaccctctatcagcctcaggaaaacaagacctctgtgcacctcacttttggctcactgcagcccttgtccttcacctccacacaggaccagctggaagcagaaagaagaaaggccaatttcacagggcaccaaacaagtatgaaatgtaaatcagaaatgcagacaccccagacgagagcctcacaggagggagggggccccacaggctccccaggaggctcgtgtctttggcccagagccagccttagtttgtccctgccatctactgtctgaggccatcgctgctacactttgtttttatttgtatttcatactgaagtttctaaaaaaaaaaa

SEQ ID NO: 600511 - DNA, 8083 bp, Homo sapiens
ccccgccgggcgccggcgccaattggagcgcctcggggggcgggggaggggcggagcgcgcctcttgatggacggcggcatttccggctctcgcgagtctgggtgggagcgcgccaaatttctcccctgaagcagaggtggtagccaacggctccatgtctctgaggagcggcgggcggcggcgcgcggacccaggcgcggatggcgaggccagcagggatgatggcgccacttcctcagtttcggcactcaagcgcctggaacggagtcagtggacggataagatggatttgcggtttggttttgagcggctgaaggagcctggtgagaagacaggctggctcattaacatgcatcctaccgagattttagatgaagataagcgcttaggcagtgcagtggattactactttattcaagatgacggaagcagatttaaggtggctttgccctataaaccgtatttctacattgcgaccagaaagggttgtgagcgagaagtttcatcttttctctccaagaagtttcagggcaaaattgcaaaagtggagactgtccccaaagaggatctggacttgccaaatcacttggtgggtttgaagcgaaattacatcaggctgtccttccacactgtggaggatcttgtcaaagtgaggaaggagatctcccctgccgtgaagaagaacagggagcaggatcacgccagcgacgcgtacacagctctgctttccagtgttctgcagaggggcggtgtcattactgatgaagaggaaacctctaagaagatagctgaccagttggacaacattgtggacatgcgcgagtacgatgttccctaccacatccgcctctccattgacctgaagatccacgtggctcattggtacaatgtcagataccgaggaaatgcttttccggtagaaatcacccgccgagatgaccttgttgaacgacctgaccctgtggttttggcatttgacattgagacgaccaaactgcccctcaagtttcctgatgctgagacagaccagattatgatgatttcctacatgatcgatggccagggctacctcatcaccaacagggagattgtttcagaagatattgaagattttgagttcacccccaagccagaatatgaaggccccttttgtgtcttcaatgaacccgatgaggctcatctgatccaaaggtggtttgaacacgtccaggagaccaaacccaccatcatggtcacctacaacggggacttttttgactggccatttgtggaggcccgggcagcagtccacggtctgagcatgcagcaggagataggcttccagaaggacagccagggggagtacaaggcgccccagtgcatccacatggactgcctcaggtgggtgaagagggacagttaccttcctgtgggcagtcataatctcaaggcggccgccaaggccaagctaggctatgatcccgtggagctagacccggaggacatgtgccggatggccacggagcagccccagactctggccacgtattctgtgtcagatgctgtcgccacttactacctgtacatgaagtacgtccacccattcatctttgctctgtgcaccattattcccatggagcccgacgaggtgctgcggaagggctctggcactctgtgtgaggccttgctgatggtgcaggccttccacgccaacatcatcttccccaacaagcaagagcaggagttcaataagctgacggacgacggacacgtgctggactctgagacctacgtcgggggccacgtggaggccctcgagtctggggttttccgcagcgatatcccttgccggtttaggatggtgtgcttcttccctgggattcagattcttcccactcttgtgctgtgaatcctgccgcctttgacttcctgctgcagcgggttgagaagaccttgcgccacgcccttgaggaagaggagaaagtgcctgtggagcaagtcaccaactttgaagaggtgtgtgatgagattaagagcaagcttgcctccctgaaggacgttcccagccgcatcgagtgtccactcatctaccacctggacgtgggggccatgtaccccaacatcatcctgaccaaccgcctgcaggtgagactttacttcccgtgtcagagtcggagctctctctgcccagccctaagtgctttctcacccctcccagccctctgccatggtggacgaagccacctgtgctgcctgtgacttcaataagcctggagcaaactgccagcggaagatggcctggcagtggaggggcgagttcatgccagccagtcgcagcgaataccatcggatccagcaccagctggagtcagagaagttcccccccttgttcccagaggggccagctcgggcctttcatgaactgtcccgcgaggaacaggcgaaatacgagaagagaaggctggcggattactgccggaaagcctacaagaagatccacatcaccaaggtggaagagcgtctcaccaccatctgccagcgggaaaactccttctacgtggacaccgtgcgtgccttccgggacaggcgttacgagttcaaagggctccacaaggtgtggaaaaagaagctctcggcggccgtggaggtgggcgacgcggctgaggtgaagcgctgcaagaacatggaggtgctgtatgactcgctgcagctggcccacaagtgcatcctgaactccttctatggctatgtcatgcgcaagggggctcgctggtactccatggagatggctggcatcgtctgcttcacaggggccaacatcatcacccaggcacgggagctgatcgagcagattgggaggcccttagagctggacacagatggtatatggtgcgtcctgcccaacagcttcccagaaaattttgtcttcaagacgaccaatgtgaagaagcccaaagtgaccatctcctacccaggcgccatgttgaacatcatggtcaaggaaggcttcaccaatgaccagtaccaggagctggctgagccgtcctcactcacctacgtcacccgctcagagaacagcatcttttttgaggttgatgggccctaccttgccatgattcttccagcctccaaggaagaaggcaagaaattgaagaagaggtatgctgtgttcaatgaagacggttctctggctgagctcaagggctttgaggtcaaacgccgcggggaactgcagctgattaagatcttccaatcctcggtgtttgaggccttcctcaagggcagcacgctggaagaggtgtatggctctgtagccaaggtggctgactactggctggacgtgctgtacagcaaggcagccaacatgcctgactctgagctattcgagctcatctctgagaaccgttccatgtctcggaagctggaagattacggggagcagaagtctacatccatcagcacagcaaagcgcctggccgagttcctgggagaccagatggtcaaggatgcagggctgagttgccgctacatcatctcccgcaagcccgagggctcccctgtcacggagagggccatcccacttgccattttccaagcagagcccacggtgaggaagcactttctccggaaatggctcaagagctcttcccttcaagactttgatattcgagcaattctggattgggactactacattgagcggctgggaagcgccatccagaagatcatcaccatccctgcggccctgcagcaggtaaagaacccagtgccacgtgtcaaacaccccgactggctgcacaaaaaactgctggagaagaatgatgtctacaagcagaagaagatcagtgagctcttcaccctggagggcaggagacaggtcacgatggccgaggcctcagaagacagtccgaggccaagtgctcctgacatggaggacttcggcctcgtaaagctgcctcacccagcagcccctgtcactgtgaagaggaagcgagttctttgggagagccaggaggagtcccaggacctcacgccgactgtgccctggcaggaaatcttggggcagcctcccgccctgggaaccagccaggaggaatggcttgtctggctccggttccacaagaagaagtggcagctgcaggcccggcagcgcctcgcccgcaggaagaggcagcgtctggagtcggcagagggtgtgctcaggcccggggccatccgggatggtcctgccacggggctggggagcttcttgcgaagaactgcccgcagcatcctggaccttccgtggcagattgtgcagatcagcgagaccagccaggccggcctgttcaggctgtgggcgctcgttggcagtgacttgcactgcatcaggctgagcatcccccgtgtgttctacgtgaaccagcgagtcgctaaagcggaggagggtgcttcgtatcgcaaggtaaatcgggtccttcctcgctccaacatggtctacaatctctatgagtattcagtgccagaggacatgtaccaggaacacatcaacgagatcaacgctgagctgtcagcgccagacatcgagggcgtatatgagactcaggttccgttactgttccgggccctggtgcacctgggctgtgtgtgtgtggtcaataaacagctggtgaggcacctttcaggctgggaagcagagacctttgctcttgagcacctggagatgcgctctctggcccagttcagctacctggaaccagggagtatccgccatatctacctgtaccaccacgcacaggcccacaaagcgctcttcgggatcttcatcccctcacagcgcagggcatccgtctttgtgctggacactgtgcgcagcaaccagatgcccagccttggcgccctgtactcagcagagcacggcctcctcctggagaaggtgggccctgagctcctgccaccccccaaacacaccttcgaagttcgggcagaaactgacctgaagaccatctgcagagccatccagcgattcctgctcgcctacaaggaggagcgccgggggcccacactcatcgctgttcagtccagctgggagctgaagaggctggccagtgaaattcctgtcttggaggaattcccactggtgcctatctgtgtggctgacaagatcaactatggggtcctggactggcagcgccatggagcccggcgcatgatccgtcactacctcaacctggacacctgcctgtcgcaggccttcgagatgagcaggtactttcacattcccattgggaacctaccagaggacatctccacattcggctccgacctcttctttgcccgccacctccagcgccacaaccacctgctctggctgtcccctacagcccgccctgacctgggtggaaaggaggctgatgacaactgtcttgtcatggagttcgatgaccaagccactgttgagatcaacagttcaggctgttactccacagtgtgtgtggagctggaccttcagaacctggccgtcaacaccattctccagtctcaccatgtcaacgacatggagggggccgacagcatggggatcagcttcgacgtgatccagcaggcctccctggaggacatgatcacgggtggtcaggctgccagtgccccggccagctacgatgagacagccctgtgctctaacaccttcaggatcctgaagagcatggtcgtgggctgggtgaaggagatcacccagtaccacaacatctatgcagacaaccaggtgatgcacttctaccgctggcttcggtcgccatcctctctgcttcatgaccctgccctgcaccgcacactccacaacatgatgaagaagctcttcctgcagctcatcgctgagttcaagcgcctggggtcatcagtcatctacgccaacttcaaccgcatcatcctctgtacaaagaagcgccgtgtggaagatgccatcgcttacgtggagtacatcaccagcagcatccattcaaaggagaccttccattctctgacaatttctttctctcgatgctgggaatttcttctctggatggatccatctaactatggcggaatcaaaggaaaagtttcatctcgtattcactgtggactgcaagactcccagaaagcagggggagcagaggatgagcaggaaaatgaggacgatgaggaggaaagagatggggaggaggaggaagaggcggaggaatccaacgtggaggatttactggaaaacaactggaacattttgcagtttttgccacaggcagcctcctgccagaactacttcctcatgattgtttcagcgtacatcgtggccgtgtaccactgcatgaaggacgggctgaggcgcagtgctccagggagcacccccgtgaggaggaggggggccagccagctctcccaggaggccgagggggcggtcggagcccttcccggaatgatcaccttctctcaggattatgtcgcaaatgagctcactcagagcttcttcaccatcactcagaagattcagaagaaagtcacaggctctcggaactccactgagctctcggagatgtttcctgtcctccccggttcccacttgctgctcaataaccctgccctggagttcatcaaatacgtgtgcaaggtgctgtccctggacaccaacatcacaaaccaggtgaataagctgaaccgagacctgcttcgcctggtggatgtcggcgagttctccgaggaggcccagttccgagacccctgccgctcctacgtgcttcctgaggtcatctgccgcagctgtaacttctgccgcgacctggacctgtgtaaagactcttccttctcagaggatggggcggtcctgcctcagtggctctgctccaactgtcaggcgccctacgactcctctgccatcgagatgacgctggtggaagttctacagaagaagctgatggccttcaccctgcaggacctggtctgcctgaagtgccgcggggtgaaggagaccagcatgcctgtgtactgcagctgcgcgggagacttcgccctcaccatccacacccaggtcttcatggaacagatcggaatattccggaacattgcccagcactacggcatgtcgtacctcctggagaccctggagtggctgctgcagaagaacccacagctgggccattagccagccccgggccccgggtgcctctgcgtccgtgccaggcctcctgatgccaaggccacatccccgtgcttccagtgaccagaccactgaccaccctgactgtccaaacctgtgaccccaggccagggaacggggaggaaaccaaagaaaaccattttcagggagctcagacgtcacaggagggagcgggagcaggatgtggccctggcctcgccagagcacctgaagaagcaggccgtgagcgaggctgcgagtgccctgggcgccgtttctcacgcagtgaatgcttttccaggcctctgttgcttcctgcaccacacctggtggggtgggagcgtcctctaggtgcccctagttctttgtcctgcctcccagagggaggaaaagcccctgggggcttctggctccctgagattgggctctgagacgagacgggttcccaaggccctggtggggctggagtctcacctgtttgcatggagaaatgggctggccccacagcctcacaggagcagtttgtgggctggtttccccgggaatccagaccctaacccgtgagaatctggattttggcttgtgagccctgcttatttggagccgggtctagagggaaccctctatcagcctcaggaaaacaagacctctgtgcacctcacttttggctcactgcagcccttgtccttcacctccacacaggaccagctggaagcagaaagaagaaaggccaatttcacagggcaccaaacaagtatgaaatgtaaatcagaaatgcagacaccccagacgagagcctcacaggagggagggggccccacaggctccccaggaggctcgtgtctttggcccagagccagccttagtttgtccctgccatctactgtctgaggccatcgctgctacactttgtttttatttgtatttcatactgaagtttctaaaaaaaaaaa

SEQ ID NO: 600512 - DNA, 133 bp, Homo sapiens
cacgcgttgtatggatacagaaccacgatgccaacatcggtgtgactacaggacacggggcattgtagcttgtaggagtaaaaatgaagcggaagccccaaagttcacattaactcaggcatatcattatatt

SEQ ID NO: 600513 - DNA, 8592 bp, Homo sapiens
ccccgccgggcgccggcgccaattggagcgcctcggggggcgggggaggggcggagcgcgcctcttgatggacggcggcatttccggctctcgcgagtctgggtgggagcgcgccaaatttctcccctgaagcagaggtggtagccaacggctccatgtctctgaggagcggcgggcggcggcgcgcggacccaggcgcggatggcgaggccagcagggatgatggcgccacttcctcagtttcggcactcaagcgcctggaacggagtcagtggacggataagatggatttgcggtttggttttgagcggctgaaggagcctggtgagaagacaggctggctcattaacatgcatcctaccgagattttagatgaagataagcgcttaggcagtgcagtggattactactttattcaagatgacggaagcagatttaaggtggctttgccctataaaccgtatttctacattgcgaccagaaagggttgtgagcgagaagtttcatcttttctctccaagaagtttcagggcaaaattgcaaaagtggagactgtccccaaagaggatctggacttgccaaatcacttggtgggtttgaagcgaaattacatcaggctgtccttccacactgtggaggatcttgtcaaagtgaggaaggagatctcccctgccgtgaagaagaacagggagcaggatcacgccagcgacgcgtacacagctctgctttccagtgttctgcagaggggcggtgtcattactgatgaagaggaaacctctaagaagatagctgaccagttggacaacattgtggacatgcgcgagtacgatgttccctaccacatccgcctctccattgacctgaagatccacgtggctcattggtacaatgtcagataccgaggaaatgcttttccggtagaaatcacccgccgagatgaccttgttgaacgacctgaccctgtggttttggcatttgacattgagacgaccaaactgcccctcaagtttcctgatgctgagacagaccagattatgatgatttcctacatgatcgatggccagggctacctcatcaccaacagggagattgtttcagaagatattgaagattttgagttcacccccaagccagaatatgaaggccccttttgtgtcttcaatgaacccgatgaggctcatctgatccaaaggtggtttgaacacgtccaggagaccaaacccaccatcatggtcacctacaacggggacttttttgactggccatttgtggaggcccgggcagcagtccacggtctgagcatgcagcaggagataggcttccagaaggacagccagggggagtacaaggcgccccagtgcatccacatggactgcctcaggtgggtgaagagggacagttaccttcctgtgggcagtcataatctcaaggcggccgccaaggccaagctaggctatgatcccgtggagctagacccggaggacatgtgccggatggccacggagcagccccagactctggccacgtattctgtgtcagatgctgtcgccacttactacctgtacatgaagtacgtccacccattcatctttgctctgtgcaccattattcccatggagcccgacgaggtgctgcggaagggctctggcactctgtgtgaggccttgctgatggtgcaggccttccacgccaacatcatcttccccaacaagcaagagcaggagttcaataagctgacggacgacggacacgtgctggactctgagacctacgtcgggggccacgtggaggccctcgagtctggggttttccgcagcgatatcccttgccggtttaggatgaatcctgccgcctttgacttcctgctgcagcgggttgagaagaccttgcgccacgcccttgaggaagaggagaaagtgcctgtggagcaagtcaccaactttgaagaggtgtgtgatgagattaagagcaagcttgcctccctgaaggacgttcccagccgcatcgagtgtccactcatctaccacctggacgtgggggccatgtaccccaacatcatcctgaccaaccgcctgcagccctctgccatggtggacgaagccacctgtgctgcctgtgacttcaataagcctggagcaaactgccagcggaagatggcctggcagtggaggggcgagttcatgccagccagtcgcagcgaataccatcggatccagcaccagctggagtcagagaagttcccccccttgttcccagaggggccagctcgggcctttcatgaactgtcccgcgaggaacaggcgaaatacgagaagagaaggctggcggattactgccggaaagcctacaagaagatccacatcaccaaggtggaagagcgtctcaccaccatctgccagcgggaaaactccttctacgtggacaccgtgcgtgccttccgggacaggcgttacgagttcaaagggctccacaaggtgtggaaaaagaagctctcggcggccgtggaggtgggcgacgcggctgaggtgaagcgctgcaagaacatggaggtgctgtatgactcgctgcagctggcccacaagtgcatcctgaactccttctatggctatgtcatgcgcaagggggctcgctggtactccatggagatggctggcatcgtctgcttcacaggggccaacatcatcacccaggcacgggagctgatcgagcagattgggaggcccttagagctggacacagatggtatatggtgcgtcctgcccaacagcttcccagaaaattttgtcttcaagacgaccaatgtgaagaagcccaaagtgaccatctcctacccaggcgccatgttgaacatcatggtcaaggaaggcttcaccaatgaccagtaccaggagctggctgagccgtcctcactcacctacgtcacccgctcagagaacagcatcttttttgaggttgatgggccctaccttgccatgattcttccagcctccaaggaagaaggcaagaaattgaagaagaggtatgctgtgttcaatgaagacggttctctggctgagctcaagggctttgaggtcaaacgccgcggggaactgcagctgattaagatcttccaatcctcggtgtttgaggccttcctcaagggcagcacgctggaagaggtgtatggctctgtagccaaggtggctgactactggctggacgtgctgtacagcaaggcagccaacatgcctgactctgagctattcgagctcatctctgagaaccgttccatgtctcggaagctggaagattacggggagcagaagtctacatccatcagcacagcaaagcgcctggccgagttcctgggagaccagatggtcaaggatgcagggctgagttgccgctacatcatctcccgcaagcccgagggctcccctgtcacggagagggccatcccacttgccattttccaagcagagcccacggtgaggaagcactttctccggaaatggctcaagagctcttcccttcaagactttgatattcgagcaattctggattgggactactacattgagcggctgggaagcgccatccagaagatcatcaccatccctgcggccctgcagcaggtaaagaacccagtgccacgtgtcaaacaccccgactggctgcacaaaaaactgctggagaagaatgatgtctacaagcagaagaagatcagtgagctcttcaccctggagggcaggagacaggtcacgatggccgaggcctcagaagacagtccgaggccaagtgctcctgacatggaggacttcggcctcgtaaagctgcctcacccagcagcccctgtcactgtgaagaggaagcgagttctttgggagagccaggaggagtcccaggacctcacgccgactgtgccctggcaggaaatcttggggcagcctcccgccctgggaaccagccaggaggaatggcttgtctggctccggttccacaagaagaagtggcagctgcaggcccggcagcgcctcgcccgcaggaagaggcagcgtctggagtcggcagagggtgtgctcaggcccggggccatccgggatggtcctgccacggggctggggagcttcttgcgaagaactgcccgcagcatcctggaccttccgtggcagattgtgcagatcagcgagaccagccaggccggcctgttcaggctgtgggcgctcgttggcagtgacttgcactgcatcaggctgagcatcccccgtgtgttctacgtgaaccagcgagtcgctaaagcggaggagggtgcttcgtatcgcaaggtaaatcgggtccttcctcgctccaacatggtctacaatctctatgagtattcagtgccagaggacatgtaccaggaacacatcaacgagatcaacgctgagctgtcagcgccagacatcgagggcgtatatgagactcaggttccgttactgttccgggccctggtgcacctgggctgtgtgtgtgtggtcaataaacagctggtgaggcacctttcaggctgggaagcagagacctttgctcttgagcacctggagatgcgctctctggcccagttcagctacctggaaccagggagtatccgccatatctacctgtaccaccacgcacaggcccacaaagcgctcttcgggatcttcatcccctcacagcgcagggcatccgtctttgtgctggacactgtgcgcagcaaccagatgcccagccttggcgccctgtactcagcagagcacggcctcctcctggagaaggtgggccctgagctcctgccaccccccaaacacaccttcgaagttcgggcagaaactgacctgaagaccatctgcagagccatccagcgattcctgctcgcctacaaggaggagcgccgggggcccacactcatcgctgttcagtccagctgggagctgaagaggctggccagtgaaattcctgtcttggaggaattcccactggtgcctatctgtgtggctgacaagatcaactatggggtcctggactggcagcgccatggagcccggcgcatgatccgtcactacctcaacctggacacctgcctgtcgcaggccttcgagatgagcaggtactttcacattcccattgggaacctaccagaggacatctccacattcggctccgacctcttctttgcccgccacctccagcgccacaaccacctgctctggctgtcccctacagcccgccctgacctgggtggaaaggaggctgatgacaactgtcttgtcatggagttcgatgaccaagccactgttgagatcaacagttcaggctgttactccacagtgtgtgtggagctggaccttcagaacctggccgtcaacaccattctccagtctcaccatgtcaacgacatggagggggccgacagcatggggatcagcttcgacgtgatccagcaggcctccctggaggacatgatcacgggtggtcaggctgccagtgccccggccagctacgatgagacagccctgtgctctaacaccttcaggtgccaccctctctgggaaggagtgttactaatagaaggctcttatccttggcccttaatttggaaagctaaggtctaagacagggtccattgggcttcccttagtcttaatggcagagccagagaccactgtgtggcgagttttccatagtctattgtctttaccactgtgggggtccggcctggtccctggcgactgttcagtgtactgcctctgacctccctgtggccagaggtacttcacacagagtctttctaaccagggccacttttcgatgtgaccaaaggtacatcacagggatctccagccagctctactgagtatgatgtgtgaggcatcagcacttaggtgtcaggagctgtcggtctgctgcagagggcgtggttgagggtcaggagccatcagtctgcggagagcatggttgagggcagctactcgcattacccaccagcggtggttcatgctgggcaatgcttgctgtgtaccaggaggtgggccgagcacttcgcattctgcctctgtccccacatcagcccagggacggggagcggttattgtctgtttttcagataaggaaactgaggtcagaggggctgcctttgtggtcataccacaaatgaatggaagggatcctgaagagcatggtcgtgggctgggtgaaggagatcacccagtaccacaacatctatgcagacaaccaggtgatgcacttctaccgctggcttcggtcgccatcctctctgcttcatgaccctgccctgcaccgcacactccacaacatgatgaagaagctcttcctgcagctcatcgctgagttcaagcgcctggggtcatcagtcatctacgccaacttcaaccgcatcatcctctgtacaaagaagcgccgtgtggaagatgccatcgcttacgtggagtacatcaccagcagcatccattcaaaggagaccttccattctctgacaatttctttctctcgatgctgggaatttcttctctggatggatccatctaactatggcggaatcaaaggaaaagtttcatctcgtattcactgtggactgcaagactcccagaaagcagggggagcagaggatgagcaggaaaatgaggacgatgaggaggaaagagatggggaggaggaggaagaggcggaggaatccaacgtggaggatttactggaaaacaactggaacattttgcagtttttgccacaggcagcctcctgccagaactacttcctcatgattgtttcagcgtacatcgtggccgtgtaccactgcatgaaggacgggctgaggcgcagtgctccagggagcacccccgtgaggaggaggggggccagccagctctcccaggaggccgagggggcggtcggagcccttcccggaatgatcaccttctctcaggattatgtcgcaaatgagctcactcagagcttcttcaccatcactcagaagattcagaagaaagtcacaggctctcggaactccactgagctctcggagatgtttcctgtcctccccggttcccacttgctgctcaataaccctgccctggagttcatcaaatacgtgtgcaaggtgctgtccctggacaccaacatcacaaaccaggtgaataagctgaaccgagacctgcttcgcctggtggatgtcggcgagttctccgaggaggcccagttccgagacccctgccgctcctacgtgcttcctgaggtcatctgccgcagctgtaacttctgccgcgacctggacctgtgtaaagactcttccttctcagaggatggggcggtcctgcctcagtggctctgctccaactgtcaggcgccctacgactcctctgccatcgagatgacgctggtggaagttctacagaagaagctgatggccttcaccctgcaggacctggtctgcctgaagtgccgcggggtgaaggagaccagcatgcctgtgtactgcagctgcgcgggagacttcgccctcaccatccacacccaggtcttcatggaacagatcggaatattccggaacattgcccagcactacggcatgtcgtacctcctggagaccctggagtggctgctgcagaagaacccacagctgggccattagccagccccgggccccgggtgcctctgcgtccgtgccaggcctcctgatgccaaggccacatccccgtgcttccagtgaccagaccactgaccaccctgactgtccaaacctgtgaccccaggccagggaacggggaggaaaccaaagaaaaccattttcagggagctcagacgtcacaggagggagcgggagcaggatgtggccctggcctcgccagagcacctgaagaagcaggccgtgagcgaggctgcgagtgccctgggcgccgtttctcacgcagtgaatgcttttccaggcctctgttgcttcctgcaccacacctggtggggtgggagcgtcctctaggtgcccctagttctttgtcctgcctcccagagggaggaaaagcccctgggggcttctggctccctgagattgggctctgagacgagacgggttcccaaggccctggtggggctggagtctcacctgtttgcatggagaaatgggctggccccacagcctcacaggagcagtttgtgggctggtttccccgggaatccagaccctaacccgtgagaatctggattttggcttgtgagccctgcttatttggagccgggtctagagggaaccctctatcagcctcaggaaaacaagacctctgtgcacctcacttttggctcactgcagcccttgtccttcacctccacacaggaccagctggaagcagaaagaagaaaggccaatttcacagggcaccaaacaagtatgaaatgtaaatcagaaatgcagacaccccagacgagagcctcacaggagggagggggccccacaggctccccaggaggctcgtgtctttggcccagagccagccttagtttgtccctgccatctactgtctgaggccatcgctgctacactttgtttttatttgtatttcatactgaagtttctaaaaaaaaaaa

SEQ ID NO: 600514 - DNA, 8757 bp, Homo sapiens
ccccgccgggcgccggcgccaattggagcgcctcggggggcgggggaggggcggagcgcgcctcttgatggacggcggcatttccggctctcgcgagtctgggtgggagcgcgccaaatttctcccctgaagcagaggtggtagccaacggctccatgtctctgaggagcggcgggcggcggcgcgcggacccaggcgcggatggcgaggccagcagggatgatggcgccacttcctcagtttcggcactcaagcgcctggaacggagtcagtggacggataagatggatttgcggtttggttttgagcggctgaaggagcctggtgagaagacaggctggctcattaacatgcatcctaccgagattttagatgaagataagcgcttaggcagtgcagtggattactactttattcaagatgacggaagcagatttaaggtggctttgccctataaaccgtatttctacattgcgaccagaaagggttgtgagcgagaagtttcatcttttctctccaagaagtttcagggcaaaattgcaaaagtggagactgtccccaaagaggatctggacttgccaaatcacttggtgggtttgaagcgaaattacatcaggctgtccttccacactgtggaggatcttgtcaaagtgaggaaggagatctcccctgccgtgaagaagaacagggagcaggatcacgccagcgacgcgtacacagctctgctttccagtgttctgcagaggggcggtgtcattactgatgaagaggaaacctctaagaagatagctgaccagttggacaacattgtggacatgcgcgagtacgatgttccctaccacatccgcctctccattgacctgaagatccacgtggctcattggtacaatgtcagataccgaggaaatgcttttccggtagaaatcacccgccgagatgaccttgttgaacgacctgaccctgtggttttggcatttgacattgagacgaccaaactgcccctcaagtttcctgatgctgagacagaccagattatgatgatttcctacatgatcgatggccagggctacctcatcaccaacagggagattgtttcagaagatattgaagattttgagttcacccccaagccagaatatgaaggccccttttgtgtcttcaatgaacccgatgaggctcatctgatccaaaggtggtttgaacacgtccaggagaccaaacccaccatcatggtcacctacaacggggacttttttgactggccatttgtggaggcccgggcagcagtccacggtctgagcatgcagcaggagataggcttccagaaggacagccagggggagtacaaggcgccccagtgcatccacatggactgcctcaggtgggtgaagagggacagttaccttcctgtgggcagtcataatctcaaggcggccgccaaggccaagctaggctatgatcccgtggagctagacccggaggacatgtgccggatggccacggagcagccccagactctggccacgtattctgtgtcagatgctgtcgccacttactacctgtacatgaagtacgtccacccattcatctttgctctgtgcaccattattcccatggagcccgacgaggtgctgcggaagggctctggcactctgtgtgaggccttgctgatggtgcaggccttccacgccaacatcatcttccccaacaagcaagagcaggagttcaataagctgacggacgacggacacgtgctggactctgagacctacgtcgggggccacgtggaggccctcgagtctggggttttccgcagcgatatcccttgccggtttaggatgaatcctgccgcctttgacttcctgctgcagcgggttgagaagaccttgcgccacgcccttgaggaagaggagaaagtgcctgtggagcaagtcaccaactttgaagaggtgtgtgatgagattaagagcaagcttgcctccctgaaggacgttcccagccgcatcgagtgtccactcatctaccacctggacgtgggggccatgtaccccaacatcatcctgaccaaccgcctgcagccctctgccatggtggacgaagccacctgtgctgcctgtgacttcaataagcctggagcaaactgccagcggaagatggcctggcagtggaggggcgagttcatgccagccagtcgcagcgaataccatcggatccagcaccagctggagtcagagaagttcccccccttgttcccagaggggccagctcgggcctttcatgaactgtcccgcgaggaacaggcgaaatacgagaagagaaggctggcggattactgccggaaagcctacaagaagatccacatcaccaaggtggaagagcgtctcaccaccatctgccagcgggaaaactccttctacgtggacaccgtgcgtgccttccgggacaggcgttacgagttcaaagggctccacaaggtgtggaaaaagaagctctcggcggccgtggaggtgggcgacgcggctgaggtgaagcgctgcaagaacatggaggtgctgtatgactcgctgcagctggcccacaagtgcatcctgaactccttctatggctatgtcatgcgcaagggggctcgctggtactccatggagatggctggcatcgtctgcttcacaggggccaacatcatcacccaggcacgggagctgatcgagcagattgggaggcccttagagctggacacagatggtatatggtgcgtcctgcccaacagcttcccagaaaattttgtcttcaagacgaccaatgtgaagaagcccaaagtgaccatctcctacccaggcgccatgttgaacatcatggtcaaggaaggcttcaccaatgaccagtaccaggagctggctgagccgtcctcactcacctacgtcacccgctcagagaacagcatcttttttgaggttgatgggccctaccttgccatgattcttccagcctccaaggaagaaggcaagaaattgaagaagaggtatgctgtgttcaatgaagacggttctctggctgagctcaagggctttgaggtcaaacgccgcggggaactgcagctgattaagatcttccaatcctcggtgtttgaggccttcctcaagggcagcacgctggaagaggtgtatggctctgtagccaaggtggctgactactggctggacgtgctgtacagcaaggcagccaacatgcctgactctgagctattcgagctcatctctgagaaccgttccatgtctcggaagctggaagattacggggagcagaagtctacatccatcagcacagcaaagcgcctggccgagttcctgggagaccagatggtcaaggatgcagggctgagttgccgctacatcatctcccgcaagcccgagggctcccctgtcacggagagggccatcccacttgccattttccaagcagagcccacggtgaggaagcactttctccggaaatggctcaagagctcttcccttcaagactttgatattcgagcaattctggattgggactactacattgagcggctgggaagcgccatccagaagatcatcaccatccctgcggccctgcagcaggtaaagaacccagtgccacgtgtcaaacaccccgactggctgcacaaaaaactgctggagaagaatgatgtctacaagcagaagaagatcagtgagctcttcaccctggagggcaggagacaggtcacgatggccgaggcctcagaagacagtccgaggccaagtgctcctgacatggaggacttcggcctcgtaaagctgcctcacccagcagcccctgtcactgtgaagaggaagcgagttctttgggagagccaggaggagtcccaggacctcacgccgactgtgccctggcaggaaatcttggggcagcctcccgccctgggaaccagccaggaggaatggcttgtctggctccggttccacaagaagaagtggcagctgcaggcccggcagcgcctcgcccgcaggaagaggcagcgtctggagtcggcagagggtgtgctcaggcccggggccatccgggatggtcctgccacggggctggggagcttcttgcgaagaactgcccgcagcatcctggaccttccgtggcagattgtgcagatcagcgagaccagccaggccggcctgttcaggctgtgggcgctcgttggcagtgacttgcactgcatcaggctgagcatcccccgtgtgttctacgtgaaccagcgagtcgctaaagcggaggagggtgcttcgtatcgcaaggtaaatcgggtccttcctcgctccaacatggtctacaatctctatgagtattcagtgccagaggacatgtaccaggaacacatcaacgagatcaacgctgagctgtcagcgccagacatcgagggcgtatatgagactcaggttccgttactgttccgggccctggtgcacctgggctgtgtgtgtgtggtcaataaacagctggtgaggcacctttcaggctgggaagcagagacctttgctcttgagcacctggagatgcgctctctggcccagttcagctacctggaaccagggagtatccgccatatctacctgtaccaccacgcacaggcccacaaagcgctcttcgggatcttcatcccctcacagcgcagggcatccgtctttgtgctggacactgtgcgcagcaaccagatgcccagccttggcgccctgtactcagcagagcacggcctcctcctggagaaggtgggccctgagctcctgccaccccccaaacacaccttcgaagttcgggcagaaactgacctgaagaccatctgcagagccatccagcgattcctgctcgcctacaaggaggagcgccgggggcccacactcatcgctgttcagtccagctgggagctgaagaggctggccagtgaaattcctgtcttggaggaattcccactggtgcctatctgtgtggctgacaagatcaactatggggtcctggactggcagcgccatggagcccggcgcatgatccgtcactacctcaacctggacacctgcctgtcgcaggccttcgagatgagcaggtactttcacattcccattgggaacctaccagaggacatctccacattcggctccgacctcttctttgcccgccacctccagcgccacaaccacctgctctggctgtcccctacagcccgccctgacctgggtggaaaggaggctgatgacaactgtcttgtcatggagttcgatgaccaagccactgttgagatcaacagttcaggctgttactccacagtgtgtgtggagctggaccttcagaacctggccgtcaacaccattctccagtctcaccatgtcaacgacatggagggggccgacagcatggggatcagcttcgacgtgatccagcaggcctccctggaggacatgatcacgggtggtcaggctgccagtgccccggccagctacgatgagacagccctgtgctctaacaccttcaggtgccaccctctctgggaaggagtgttactaatagaaggctcttatccttggcccttaatttggaaagctaaggtctaagacagggtccattgggcttcccttagtcttaatggcagagccagagaccactgtgtggcgagttttccatagtctattgtctttaccactgtgggggtccggcctggtccctggcgactgttcagtgtactgcctctgacctccctgtggccagaggtacttcacacagagtctttctaaccagggccacttttcgatgtgaccaaaggtacatcacagggatctccagccagctctactgagtatgatgtgtgaggcatcagcacttaggtgtcaggagctgtcggtctgctgcagagggcgtggttgagggtcaggagccatcagtctgcggagagcatggttgagggcagctactcgcattacccaccagcggtggttcatgctgggcaatgcttgctgtgtaccaggaggtgggccgagcacttcgcattctgcctctgtccccacatcagcccagggacggggagcggttattgtctgtttttcagataaggaaactgaggtcagaggggctgcctttgtggtcataccacaaatgaatggaagggatcctgaagagcatggtcgtgggctgggtgaaggagatcacccagtaccacaacatctatgcagacaaccaggtgatgcacttctaccgctggcttcggtcgccatcctctctgcttcatgaccctgccctgcaccgcacactccacaacatgatgaagaagctcttcctgcagctcatcgctgagttcaagcgcctggggtcatcagtcatctacgccaacttcaaccgcatcatcctctgtacaaagaagcgccgtgtggaagatgccatcgcttacgtggagtacatcaccagcagcatccattcaaaggagaccttccattctctgacaatttctttctctcgatgctgggaatttcttctctggatggatccatctaactatggcggaatcaaaggaaaagtttcatctcgtattcactgtggactgcaagactcccagaaagcagggggagcagaggatgagcaggaaaatgaggacgatgaggaggaaagagatggggaggaggaggaagaggcggaggaatccaacgtggaggatttactggaaaacaactggaacattttgcagtttttgccacaggcagcctcctgccagaactacttcctcatgattgtttcagcgtacatcgtggccgtgtaccactgcatgaaggacgggctgaggcgcagtgctccagggagcacccccgtgaggaggaggggggccagccagctctcccaggaggccgagggggcggtcggagcccttcccggaatgatcaccttctctcaggattatgtcgcaaatgagctcactcagagcttcttcaccatcactcagaagattcagaagaaagtcacaggctctcggaactccactgagctctcggagatgtttcctgtcctccccggttcccacttgctgctcaataaccctgccctggagttcatcaaatacgtgtgcaaggtgctgtccctggacaccaacatcacaaaccaggtgaataagctgaaccgagacctgcttcgcctggtggatgtcggcgagttctccgaggaggcccagttccgagacccctgccgctcctacgtgcttcctgaggtcatctgccgcagctgtaacttctgccgcgacctggacctgtgtaaagactcttccttctcagaggatggggcggtcctgcctcagtggctctgctccaactgtcaggcgccctacgactcctctgccatcgagatgacgctggtggaagttctacagaagaagctgatggccttcaccctgcaggacctgaaggaggcagacactcccaagtgtgaagagaaggaaaggaggaagagggagttgcgcagctcggccacaggaaggtcttgccgaggggcatctgagcagaggctgggggacgcgccaagctgccgtgtggtggtgcacggcgttcaggcctgcaggatggagggagtctgcctgaagtgccgcggggtgaaggagaccagcatgcctgtgtactgcagctgcgcgggagacttcgccctcaccatccacacccaggtcttcatggaacagatcggaatattccggaacattgcccagcactacggcatgtcgtacctcctggagaccctggagtggctgctgcagaagaacccacagctgggccattagccagccccgggccccgggtgcctctgcgtccgtgccaggcctcctgatgccaaggccacatccccgtgcttccagtgaccagaccactgaccaccctgactgtccaaacctgtgaccccaggccagggaacggggaggaaaccaaagaaaaccattttcagggagctcagacgtcacaggagggagcgggagcaggatgtggccctggcctcgccagagcacctgaagaagcaggccgtgagcgaggctgcgagtgccctgggcgccgtttctcacgcagtgaatgcttttccaggcctctgttgcttcctgcaccacacctggtggggtgggagcgtcctctaggtgcccctagttctttgtcctgcctcccagagggaggaaaagcccctgggggcttctggctccctgagattgggctctgagacgagacgggttcccaaggccctggtggggctggagtctcacctgtttgcatggagaaatgggctggccccacagcctcacaggagcagtttgtgggctggtttccccgggaatccagaccctaacccgtgagaatctggattttggcttgtgagccctgcttatttggagccgggtctagagggaaccctctatcagcctcaggaaaacaagacctctgtgcacctcacttttggctcactgcagcccttgtccttcacctccacacaggaccagctggaagcagaaagaagaaaggccaatttcacagggcaccaaacaagtatgaaatgtaaatcagaaatgcagacaccccagacgagagcctcacaggagggagggggccccacaggctccccaggaggctcgtgtctttggcccagagccagccttagtttgtccctgccatctactgtctgaggccatcgctgctacactttgtttttatttgtatttcatactgaagtttctaaaaaaaaaaa

SEQ ID NO: 600515 - DNA, 171 bp, Homo sapiens
tagacccttcgtcttcttctatgtcttccttttcttcagcctcatcatcgctctacttcttcatcacgtgccattctccacaataaagagtaatgggatatccaattaaactgagaatgtttcttcacaatctccttaattcttcgttcctcccgtaagacataaccgctg

SEQ ID NO: 600516 - DNA, 1239 bp, Homo sapiens
  misc_feature (423)..(423): n is a, c, g, or t
attaatccccggtcccaaccgcgtcgaatctagctctacgcatcattgcaggcacactcatcatagacgtctaagccgtcgtcgactgattttcttatcgctggagtacgggcctagagaataaaccatgtcgtagctttatagttccagtgtctaatcacaataataacataaactcgctcgtttgccacagcatagctggtcaatcaccaggtcattttaccttcgactgcaaaggctaacctgggatccaatcaatccgtgtctaaatgagcgtaatccttcatttcgaaacgatatgataactccgtccggagacaaaatggaaacgcaatgatagctcaatattagctatctcgaattctacattatcgttgcattccatctaatattagagtgcacttagatggggtctttataggncagaataatacactagggcacattagtctccctcatatattcacgtttcgtggaaggttcgccagagacagggcgtttagcccccaaagggagcgatcgcactctttcatggtaacaatctccgtggcccaatgtgctggtccatttgctttcgaaggaattgggaaccataggaaacatcgtaaggccccctctgcaagtcaatcgagaagtccaagttatttagcccgaaaagagtcagttcgtctgcgcggtctaacttgttacacagagccgtgttacagggcccaattttgcattccctatactaactttctgtcgtttccacaatcctgtagtaaattcccgaaatccaattagtacaagggacggaggactatctggcaccgccgctgtgggcaacttcttcacatgagagcccaaggagagaatcctcccaagggcaattaaaacagagccatggagacaccttccgttgtgaagtcccaattaaactctttcgcgttacaaaaaatttataagactccacaaagcccaactttaaggcgggcacacctggcacaacctttacaagggtacaggcccagggatattgacgagtaaaccggcgggataacataacaaaggccgcgtattacagacgcatattttatagagagcccaaattgttttcttgtttacacacgtgtgtagtagaacaactcgcttaaacacgtatgtcgacaagttaagtttttataattgccccatataaaaagcgttaagcattaaataccacagggcgaaagtttagtctccgtaaagcattaaagccgt

SEQ ID NO: 600517 - DNA, 306 bp, Homo sapiens
  misc_feature (85)..(85): n is a, c, g, or t
  misc_feature (147)..(147): n is a, c, g, or t
  misc_feature (164)..(164): n is a, c, g, or t
  misc_feature (179)..(179): n is a, c, g, or t
  misc_feature (183)..(183): n is a, c, g, or t
  misc_feature (306)..(306): n is a, c, g, or t
tttctgtgagctattagtgctgtactcttaaataaaaagagagttggttgggcgtggtggctcacgctggtaatcccagcatttntcgaggccaaggtgagcagatcacgaggtcaagagattgagaggatcctggccaacatggtnaaacctgtctctactanaaatacaaaaattanctgngcatggtggcatgtgctgtagtcccagctactccggagctgaggcaggaaaatcgcttgaacctgggaagtggaggttgcagtgatccaagatcacgccactgcactctacgcctggagacan

SEQ ID NO: 600518 - DNA, 824 bp, Homo sapiens
  misc_feature (99)..(99): n is a, c, g, or t
  misc_feature (112)..(112): n is a, c, g, or t
  misc_feature (172)..(172): n is a, c, g, or t
  misc_feature (177)..(177): n is a, c, g, or t
  misc_feature (213)..(213): n is a, c, g, or t
  misc_feature (224)..(224): n is a, c, g, or t
  misc_feature (283)..(284): n is a, c, g, or t
  misc_feature (369)..(369): n is a, c, g, or t
  misc_feature (392)..(392): n is a, c, g, or t
  misc_feature (401)..(401): n is a, c, g, or t
  misc_feature (422)..(422): n is a, c, g, or t
  misc_feature (427)..(427): n is a, c, g, or t
  misc_feature (442)..(443): n is a, c, g, or t
  misc_feature (452)..(452): n is a, c, g, or t
  misc_feature (465)..(465): n is a, c, g, or t
  misc_feature (476)..(476): n is a, c, g, or t
  misc_feature (480)..(480): n is a, c, g, or t
  misc_feature (483)..(483): n is a, c, g, or t
  misc_feature (491)..(491): n is a, c, g, or t
  misc_feature (507)..(507): n is a, c, g, or t
  misc_feature (542)..(542): n is a, c, g, or t
  misc_feature (547)..(547): n is a, c, g, or t
  misc_feature (551)..(551): n is a, c, g, or t
  misc_feature (554)..(555): n is a, c, g, or t
  misc_feature (566)..(566): n is a, c, g, or t
  misc_feature (584)..(584): n is a, c, g, or t
  misc_feature (596)..(596): n is a, c, g, or t
  misc_feature (602)..(602): n is a, c, g, or t
  misc_feature (604)..(605): n is a, c, g, or t
  misc_feature (609)..(609): n is a, c, g, or t
  misc_feature (615)..(617): n is a, c, g, or t
gagggaaacctggggcgtctcgcgcaaacgtccataactgaaagtagctaaggcaccccagccggaggaagtgagctctcctggggcgtggttgtcgtnatccttgcatctntaacttagggtcaaggcttgggtcttgccccgaagacccttgggacgacccggccccagngcagntatgaacctggagcgagtgtccaatgaggagaaatngaacctgtgcnggaagtactacctggggggggttgcttcctgccttttctctggttggtcaacatcttcnngttcttccgagaggccttccttgtcccagctacacagaacagagccaaatcaaaggctatgtcgggcgctcaagtgtgggcttcntcttctggggatagtgctcaccntcctgatancatcttccagatctacggccncgtgnggtgcctgtgggganntacctctcnttcaccatacccntgggcaccccntganaanttctgcanatactggggcctgttnattctcccaggacaggctccttaaagcagaggagnctgtnctgngannccctttctcanactcctaagaatggttcnatggtccacgtnctctgntnnaatnccccannnaagggaccctgaacttacaaaaaacaccaccacacagagaaaaaaacggggcggccgcaggcgcacggaaagtttaaaacctgcgtgggagggacccacagaggcagcgaacgggccagggaccagagaccggcaagaaggggggtccaccaaaaacggggacgggcttgacacacagccggagaggcaaaaggcgactaaccgggg

SEQ ID NO: 600519 - DNA, 189 bp, Homo sapiens
tctggcgcgggaccctgatgacggatgtgcgcggtggcctggggcgggaccccgcaggacctgctcggcttcctgctctcgccggaatgtttcctgctgtagagtggctgcatcttgcctgtgcccggtggcccttggtgcggcgtggcgcagggcgcggcgtggggcgcgcgtgggcgcgtgcggcag

SEQ ID NO: 600520 - DNA, 191 bp, Homo sapiens
atgtttcagaaggagaattacagtatgtgtagtttcttacagctttatcaaagggcgtcacggggcattatcttaattagcagtctcaaatagaaagtcaaaaagtgggagtctaaacttagggcactctgcaatgaacccatcgcacacacctctgcataggaacccacgctctgcaagtgaacccacgg

SEQ ID NO: 600521 - DNA, 221 bp, Homo sapiens
  misc_feature (66)..(66): n is a, c, g, or t
  misc_feature (68)..(69): n is a, c, g, or t
ggaagaaccatttccttttctggggagtcttgcggtttttattaaggctgtcatgtaaaagcccangnngatgaaaggattgttcttgttgacaacaaatgtaagtgtgcccggattacttccaggatcatccgttctttcgagatcctaatgaggacattgtggagagagacatccgaattattgttcctctgaacaacagggaggatatctcttgatcc

SEQ ID NO: 600522 - DNA, 276 bp, Homo sapiens
aggggggttttttttttttcccccggggggtttaggggtctgggggcaaaagggtcccccccccccggtttccaaaggccagggccaagtgggagttttttccccggccccaaggcccacaaaagggttttacccccttaaaaaaaaggcctttcaaaaatgggtttgttggggggggagtttttttaagggggaaattggaaattccccccaaaaagttttttttgcggggtccccaaaaaaaaaaacccaaaaaagaggggtttggggggccca

SEQ ID NO: 600523 - DNA, 786 bp, Homo sapiens
  misc_feature (134)..(134): n is a, c, g, or t
  misc_feature (139)..(139): n is a, c, g, or t
  misc_feature (175)..(175): n is a, c, g, or t
  misc_feature (186)..(186): n is a, c, g, or t
  misc_feature (245)..(246): n is a, c, g, or t
  misc_feature (331)..(331): n is a, c, g, or t
  misc_feature (354)..(354): n is a, c, g, or t
  misc_feature (363)..(363): n is a, c, g, or t
  misc_feature (384)..(384): n is a, c, g, or t
  misc_feature (389)..(389): n is a, c, g, or t
  misc_feature (404)..(405): n is a, c, g, or t
  misc_feature (414)..(414): n is a, c, g, or t
  misc_feature (427)..(427): n is a, c, g, or t
  misc_feature (438)..(438): n is a, c, g, or t
  misc_feature (442)..(442): n is a, c, g, or t
  misc_feature (445)..(445): n is a, c, g, or t
  misc_feature (453)..(453): n is a, c, g, or t
  misc_feature (469)..(469): n is a, c, g, or t
  misc_feature (504)..(504): n is a, c, g, or t
  misc_feature (509)..(509): n is a, c, g, or t
  misc_feature (513)..(513): n is a, c, g, or t
  misc_feature (516)..(517): n is a, c, g, or t
  misc_feature (528)..(528): n is a, c, g, or t
  misc_feature (546)..(546): n is a, c, g, or t
  misc_feature (558)..(558): n is a, c, g, or t
  misc_feature (564)..(564): n is a, c, g, or t
  misc_feature (566)..(567): n is a, c, g, or t
  misc_feature (571)..(571): n is a, c, g, or t
  misc_feature (577)..(579): n is a, c, g, or t
gagggaaacctggggcgtctcgcgcaaacgtccataactgaaagtagctaaggcaccccagccggaggaagtgagctctccgggtcaaggcttgggtcttgccccgaagacccttgggacgacccggccccagngcagntatgaacctggagcgagtgtccaatgaggagaaatngaacctgtgcnggaagtactacctggggggggttgcttcctgccttttctctggttggtcaacatcttcnngttcttccgagaggccttccttgtcccagctacacagaacagagccaaatcaaaggctatgtcgggcgctcaagtgtgggcttcntcttctggggatagtgctcaccntcctgatancatcttccagatctacggccncgtgnggtgcctgtgggganntacctctcnttcaccatacccntgggcaccccntganaanttctgcanatactggggcctgttnattctcccaggacaggctccttaaagcagaggagnctgtnctgngannccctttctcanactcctaagaatggttcnatggtccacgtnctctgntnnaatnccccannnaagggaccctgaacttacaaaaaacaccaccacacagagaaaaaaacggggcggccgcaggcgcacggaaagtttaaaacctgcgtgggagggacccacagaggcagcgaacgggccagggaccagagaccggcaagaaggggggtccaccaaaaacggggacgggcttgacacacagccggagaggcaaaaggcgactaaccgggg

SEQ ID NO: 600524 - DNA, 190 bp, Homo sapiens
cccaaccttttcctccgccccctaacagcccccctcctaatactaactacctgactcctaccccttacaattttggcaagccaacggcacttattcaggtgaaccactatacggagaaaacctttacctttttttctattttcctcaatttcttaattatagcattacaggccaggcttttcctttttgc

SEQ ID NO: 600525 - DNA, 229 bp, Homo sapiens
cccattaataaagatgccggctcattagtaaagataccggtcattagtaaatgatgccgggcattagtacagatgccggtcattagtaaagatgccgctcattagtaaagatgccgcgcattagtaaagcattgcgcctattagtaaagatgccggtcattagtaacagatgccggtcattagtaaagatgccgctcattagtaaagatgctggatcatagtaaagcat

SEQ ID NO: 600526 - DNA, 900 bp, Homo sapiens
ggcagaatggagagcaagatcatgtaggaaaggaagttaaggaactgaggcaccaggatgttacaaagataatctgacctggttatgagaatggtaatatgggtatagtggtatactgtcatggtttaataaatgcctcttatataatgttcttttctggttcttctaataattcagtgaagtaaatagaagaggtactaatcctatttggaagatgaagaaatggggcccagataaattatttggcctagtgagaactgaagttgaacttggctctttggacttctttgtgttctttcctttttaaataaaagagacggaattttgttacattgcccgggctgacttgaactccctgggctcacaccatcctcccacctctgctccctagtagctgagactacaggtgcacgccatcgagcctggtgatttctgtgtatagtatcgtgtatggtggtatatagatgtggcctctcttcaaggtatatgtactgtggtatatagatggtggtcatgtacagtgtgggtatatctccagtatgccaaaacattgtacttcttgtgataacatggagcatttgtgtaccagttaataaactggtagaacactagttggatgcttatcaagatcttcactcttgttcagacatctcagtttaacaccatagttgcagcgtgggggtcgtgcctgggtccggcttggggccagtggtgggtactgcgtccgggtgggcccctggcgctgggaaccggctctcagatcaaactggggggggggggccggtgcccacggggcggggggggacttgatccgggggggtagtcccccgggggggggtgaaaaaaagcgggcgccatggggggtcttctcgcctctctcgccgtcgtctctggccttga

SEQ ID NO: 600527 - DNA, 136 bp, Homo sapiens
gctggctccgtagacgctgaactatgtgggccaagcgggctgattttcccacctcagcctcctgagtagctgggaccacaggtatgcacaaccatgcctggctaattttttgattgtttttttgcagagaccaggt

SEQ ID NO: 600528 - DNA, 224 bp, Homo sapiens
gtcggacgggcgcttcctccgcgggtacacagtacggctacgacggcaaggattacatcgccctgaaagaggacctgcgctcttggaccgcggcggacatggcggctcagatcaccaagcgcaagtcggaggcggcccatgtgcgcggagcagcagagaggctaacttggacggcacgtgcgttggacgggcttcgcagatacctggagaacgggaaggagacg

SEQ ID NO: 600529 - DNA, 1040 bp, Homo sapiens
cattgctcgtagtcaaaaaccggaagtgtcggatgtcatgcactccgtgattgcaatatatctcaagaggtcgttcataggctatgtcatcgtcgtgagctcaaaaatataagttctgaggagtcacagctcttatacactcgagagtagtctcgcagcaccatacagtggtgccaagaggatccataggtgcaaatgaactctcgaggagagtacatcaggtcagctatacgtccaaacactggagcatggacctctgtttacacttatgcacgtctcgatctgggccaaatacataataagaagtcctatgggaaactcccagctagctattctctgataagaaaaccgtgtggatctaacacaaaagacgcacgcataggtaatggaccttcccatttaccgaatttcctcgacacgttggacagccccttacatacgtgagtcaattaacgtcactcaggtttaattttcattgccttgttctcattcgtgaagattagataggtattcttctacctaggaggcatccataaggcagaaccgatgatattaagtgaccactatcaaaggctcgttaaagcaagccgctcattcagatcgaagcccggatctgatagtttccatattcgggcttagattattcatccagacttccgacgctaagaagataggaggcagtcgttggccttagttaatagaacattgtgcatacgtatacaaaaaatccccatcgtcgagatatccaaagaacaaaggtagtatcggcactagcgatcacttatgagcctaggcgagactcttcatcggagctgaccggggacaccaggaacgcaacccttggccctctcggagagtaccctcgggatatgtcgaatcttatcttttcagaattcctatgaaaaagaagccatgggcgcagaaaaagaaaaaatagttggcgggccaaagacaatgtggcggcgaaaaagaagagagagagagcgggaaaacaagggtccgaaaattctagcagcgcatagcactaataacatatatgc

SEQ ID NO: 600530 - DNA, 1013 bp, Homo sapiens
gaagctaaggctgcgttggggtgaggccctcacttcatccggccgattagcaccgcgtcggtcagcgcctgccctacattcgcccggcatgtgctctgtctccgagctctgcctgcataactcgtccctcattctgcacgacgatgaggtgacatgtcacggagtataagatcaatgccctcataatacggagtcaggtgtacagctctttgacgccacttttgtggcctgcattgtttagcacagagggcgcgcgtgcccaagacgttaaaccattatgtggatgccttcatctgcagatgtacggggcgccgttaggacctgtttctaggaaagtttggttggctggactcaagccagcggagggtcctaggctctcctcgaataggtggttgttggaacccaggttgagagaacaaaaagaacgtgtgaaccccatggagacatttgagtgacatcccggaacggagtgtccgcgtttgaatgcccatgggcgcttgttgtgggacctgaacgggagttaagacccccgtcgttttgtactagaccattggtgtgcgacactcaagaaatacggcttgccacgttttgagccatagatacccatagagagaacaaccaacctagggtgatcattggggagcctggccaggcttgggggagcttggttgctccaagggggggcccccctgaattgtggggccaatgggacccttccccctgcaggaaaacctgcgaggggttcctcatttgttgacgcgaatgggagggctcgatgccaaccacccgaaaaggccagttagccctatagggggaaacagttggaggtcccaagctgccattgtctaggacagaattgcgcggcggcacaaggggacctgtggtgaacgctccaaggcctttttgtaagttccaacctttgggcacaacgttcgtacccaccttccaagcggtctattggggatagggccccttaaaaagccccggggaatatgtggaacccttgggggtcc

SEQ ID NO: 600531 - DNA, 383 bp, Homo sapiens
ctttccccttttaaatatttaattcttatgtgggcttatttccagaaaactttggtgataattcttgagaccaaaggtgggtaagtagccttattatgtaatgcttatatcccatagagtttttaatagaagagaaatccctttcctccgagggtccctattaacaatggacttccttaaatttagtttaatgattggaatgggggctgcctttgccccttgccttaagttatgatgagacgaattggtgttaaaaattatagccaaaagaaatgtaaacttgggtaaaatcccttccctctttggattggtttttttaagggttttattccttaaatgtaaaatggctccctaattttttgatgttaatccctttaattcca

SEQ ID NO: 600532 - DNA, 124 bp, Homo sapiens
gttgtacgctcgtacctctctgccgccagattcacaatgttctctcacgtccactcacactatctctgcctcctctcttttctttatcctgaagcctgatggcctgagaacttctcctgggggc

SEQ ID NO: 600533 - DNA, 587 bp, Homo sapiens
aggctgcaaaaagacatcagggggaggacatgctttgcctaaagttgtggttattgcatgctgcggtgatttacttcaggggacagactccgtagaatcctttgatcttgatatcccgaaaagcggttcctcgcctcacagataggaagcctctcctttggcgcttaagtgcttacatatttccagcaggctgcattcattgccagaatttgcactctctttattaacgcagacttcaggactctctgctttgcaggacttattcactacatcagccatattcgtatacttagactgccgcattggatatgtgcggtcatgcttgagttaccctacattggcgcgaaacctgtctcgggttactcagaggccctcagtctgagaccgacacacgtatgcgtgacattgctatcgaatttgagagagctgtggaggcccatatggtttatcaccgttggaacaccaaaaccaagaccgttctgagtgccagcttgctctacagtacttgcccacagcccagtggagtagatcgatgtcattgtactccacatactgtgctaagacctaatatgtcttattatcaacca

SEQ ID NO: 600534 - DNA, 359 bp, Homo sapiens
tgagcggactcttgagtatcccagtcatctcgtatacaccagggctacaacgatatgtagtatagtagtgtaatgatcactcctacattcagataatgttaaggctggaacatacttaggaagtcacttaagttttagttacttctagtagaacctaagaaatataagagcatacccacacagagaaaagaaatgatacaattacatggaaaattgcacacgtattatatacaactatatttataacacaaatggaaagtacatctttacaagcttccacagaacatttacaaaaatgacttggaatgcattcctctaatatctgcctacgaaatccctaagcattcttcattcccatc

SEQ ID NO: 600535 - DNA, 881 bp, Homo sapiens
ggtggtttttcgctcgtcgactgcgggtcttcctcggagcagacggaagcggcgcggaggtcgtagaagtggcctaaaacttcggcgttgggtgaaagaaaatggcccgaaccaatgtcagacgtgctctgctaatgtccaccggtgtggaaagcctcccgcaaacagctggccatggtaaagccgcctagtgaaaagcgctcccatctacgcaggcggtggtgaagaagccttctatcgtctacaggcccgggaccgtgagcgcttcgagaagattcgtcgtgatcagtaagtcgtaacgtagctgctctatccggaagctgcccttccatgcaggttggtgagggagatcgcgcagtgatttcaagaaccgagctgaggtttcagcagcgcagccatcggtgctgctgcagtgaggctagcgaagcgtacctggtgggtctgttcgaagataccaacctgtgtgccatccacgctaagagagtcaccatcatgcccaaatgacatccagttggctcgccggatacggggagagagagcttaagtgaaggcagtttttatggcgttttgtagtaaattctgtagaatacttgggtttaatttggtgacttgtttggtaagaaattgtgtataagtatgttgcattttgtacttaagtcattccatctttcactcaggatgaatgcgacaaagtgactgtgcacagacctcagtgatgtgagcactgtttgctcaggagtgacaagttggtaatatgcagaagggatgggtgatacttcttggcttctcatgatgcatgtttctgtatgtaaatgacttgttgggtagttattaaggtactagaagtggttaaatgtgtaaccgggtccgttgcaataaaa

SEQ ID NO: 600536 - DNA, 1330 bp, Homo sapiens
  misc_feature (824)..(824): n is a, c, g, or t
gggacacccgggaggtagaaccgggttctgctaggactgcgaatgcctaagatacaacatgccattatcgtctcattacgagaatttcaattgacttggtctctagttatctagggggtgatgcgtttttgatgtgcatctactaggagatgaaggaaagcagtgcatgaacttactgcacagataaggatgaccaatgagaacagatgtatgcacatcgtctctcaagcgagaaaagtgccatcttaaggtgactgaagtcaaagaagacgtggaagaattccttaccatacaattggaccccatgtgtgattggatcagggcgtgacccattgagtttataaagaatcggggtaacgacatagtgtactcaccttggagaagttcggaggagcaagaaagatattggatatggtgatcgaaatcaccctatatactaagggttgacgcgtatttctcgggggttcgattttcgtgggacacaaaagattaccactattacaaaaagaggtttcaataaagaacgaggattaaggccctttgttagacccccccgagctgacattaggttggccccacattaggaggaggttgaaaaatataaggcggcctggatataaacatcttgattaagctgttattacgtgaagcgttctccacactttttttcggaacttggctcggtctaccattagccaaggtggacaacacgcgcgagcaaatctggtggccaatataggtctgggccaaactgggaaaaaggttgggccgaagatccgaaaaggtttacccccacagacttcccggtgggggaataataggtncccttaggacttcatctcttttaagaatccttatatcccctggctaggacacttcacttttttagaatgagacaccttttctaacatatgccaataaaggtggggaagcctccacaccaaaaagggggagggctcaggaccagtggcaaggccccaatttgtgggacctgacacacagctcattagaccccggccacaatcacgattaacctgaatccattgggggaggaagcgacactttctaggaggacaaatggggccccaaggagcgttttcctttctctctcaaagaaggcgccttcgtagaattggcaaagtttacaactattcccacatttcctaaaaagccgtttggggccattaggaccgaggtggaaaatgggctccagtcgcccatatcaccaataccggcacatttggcaacggaaacaatgtgcccataccccgccttggaaattcccacagggggtcgaacgtataattctccacaagtggacactgggccg

SEQ ID NO: 600537 - DNA, 503 bp, Homo sapiens
  misc_feature (395)..(395): n is a, c, g, or t
tgcggtggctcatgcctgtaatcccagcactttggaaggccaaggcaggtggatcacctgaggtcaggagttcgagaccagcctgaccgacatggagaaaccctgtctctactaaaaatacaaaattagccgggcgtggtggcgcatgcctctaatcccagctacttgggaggctgaggcaggagaatcacttgaacccgggaggcggaggctgcagtgagccgagaccgtgccactgcactccagcttgggcgacagagcaagactctgtctcaaaaaaaaaaaattatgtaactaatattaaatttacgtaatatatacatatgaagaaatgcctgtttgcctgggggcgcataataaaatacatgtgtcacatcagtcatggtgtctgacanaaaccctcagccttctaagaaaaacagaatggcacaaaattcttaatacatagcatagaaaaatagtgttttatttcatagtggcaccaaatcaagggacaaccatag

SEQ ID NO: 600538 - DNA, 1001 bp, Homo sapiens
  misc_feature (458)..(458): n is a, c, g, or t
  misc_feature (775)..(775): n is a, c, g, or t
gctagagtgagagttagtcccatggtgcggagggtctaaggcccacacccggaaacctagcgaggtaaagttgcgtctctggtatgtcagagagtgacaaatttctccgcttcctcggctgtatggcgagcggtcctgtgtgagacgggtaatgcgcaccgatttataaaccgtgtgtgtaactggaccaagcaactactgctacggaagctcagtagttatctgtctgaaatctacatatattatcgacaatgatgcagcatggtctaagaaaatccgtggcgtgcctgaagaccctggcacataatggactcacctatgtactttaaagataccttgtcaaagcatcttcaagccatttgggcctcttgcatagaaaagcatggtgatggctgatagcccaagaatctcgggtcacgcaaaacatatgtgcacagattgcatgcggtcattggatngcatcagggcaacaggttgcgcatcgcgttgtacatcccgcatgttatctcattgagtggctacagataaagggcgtgtgtagcacatgcgtgtgacatgtgtgccgcgtagatatatatccccgcacgttatatatttgctacctaagtgcgtggcattcgtcttatagtggaaagttaccaaatgtgtggttcgcccataaatctattatgtaaacaattgtccaaatattacgtaaggagtttggggacacgtggcctcttttggaaacaccgtgagcaaattacgggcgccttgggttttatccaagtatagnaccagcggccgtagagacattgatcgtgctttgctttacgcgcctttctcatttgcgggcattcgcattctgttttcaaggttgacgtacaaacgaatagtctcccaaatccaaagcgaaagtttccccacggtgaatagcccaatgtcttgttaggccaacgttcggccatagcattctggaatccccaacgagaggaagcataaattattccctcccaagggga

SEQ ID NO: 600539 - DNA, 689 bp, Homo sapiens
  misc_feature (567)..(567): n is a, c, g, or t
gggagagtagtaattttagacatttaagtaactaaagatttatatagctttagtatgtaagctgttatatttaaaaatgcttgaaaaaataagagttgttctccagaaattattcattttcctatgattagcacagctgagaccttacaggtgcactgctattgagtattctcccaaccttttaaattttataggtctaattgttggtaaggtattgtggaaggagttctaagacttgctcctgctttaattgacgttgcaataataatcataataaaattgttggtcaaagagtagcacaggagtggttttggtagtgaagaaaataaaaagaaatctgaaggtagagatgaatggaatcagcaaaagtgaaattggttagattagtaagttgtttttctactgggacactcatggatgatactgacatatactccattctcccttgctatatctagattttttagtacctctaatactaagagattttaatttctttgctatacttctgtccttttcttctctattcatgctcaaaagaaagtaagtgctataactactcttttntggtggctttaaaaatgactcatgaacttaggtacttaagtatgacacttctgacactaataccatagcggagaactactgagtggtaccagtgcaatagagggctgcaaggggtcatcggg

SEQ ID NO: 600540 - DNA, 1750 bp, Homo sapiens
  misc_feature (179)..(179): n is a, c, g, or t
  misc_feature (369)..(369): n is a, c, g, or t
ttgatgtctttctttttctctctgctgtgcgtcgtgtctggcgactcgacttgcatgccggtgtgagtacgtgatgtcgttgtcccgcttcgtgcgtggagccacaccactctgtggtgttgtctaatctaataagatacggcgcgcgctatctcttctcccttcctttatgtttattntttcgcgccggggcggagtgatatatattattttcatacggcgctgtcattgcttgctcccttctagcgtctcttctttgtgggtcgcgctacacgtatgaacaccgcttggtgtggtccaccaaacaacacgcgtggtgttgatctcctcgcctgcttgattctttctcccgcgggggtttgttttgtntcactcctccccctgtgttttgcaccgtcctctctcgttctatcttgtgttgttggttatcctcctctccccccctctctttgcctctctcttatcatggggggcggtcgcttttatactgctccttccctttaatctggtgatctcctcctggcgccgtggtttcagcacacgtcgtgggtgtgttgttttcgtttgctctcgcctccgctcttttcgtttacacgtcgttctgtgttctattattagtatgtggggatccgttgtgttcgttcgttcctcacgcatctgccctgttcgatcatgatactgtacgcccccacgaatgttggtgggccggcctgtattgatttctttcccctctcgcggtggggtgcactacctatctcttctatcgttggggccggctgtgtaacactagacacctccctgctggtgttccctctctaaatgggggccgtctttattttattccgcgcgggaggatatatcgtcctcttgttgtattgtgcctcccccctcccacacggagatgttttttttttttttcccccccgcgcgctgttttttttttgtgtgcgcgccttttttgttcccccacgcgcactctccctgcggtggtccgccgcttcgtctctccccctcccccctattagtgagagggcgcgcactgtgtggcgcccccccctcacacagtgtgggttgttactaccccccctccgctgtgatatcatcccctctctgctgagagggagcgctccccctcgctcttttatagacacacacacgctcgctcgtttatatatgtgtgcgccttctctcgcgcgagagagatatatatatacacactcgcgcgggggtctcgcgccccatcgtctctcttgtatatagtataggagacacacacacctccgcgacacccatcacatatatgtattttacgacgcacctcgcgcgcgttgatatctacacacactcttttgttcgcgggtgtgtttattttttctccctcctctctcacacagcgcccccgagagtgtttttgcggagtgtctctcctctctcctcctcctcttttctctccggcgcgtgtttatctgcgcgcgccgcacacacatttttgtgtgcgcccaccccggtgttctccccggtgtttctctccccttatttgtgggcgtcacacacactttctctcccacacatatgtggttttttccccccccccaatattttctctccttttactccccacacacacaacacctttgtgtggtttaaaacccccccccccatatatgtcgctctttttaagagaaaggggtgtgtgtgcttttttttttgttttctctctcttttttgtgtgatggggggggtgtttata

SEQ ID NO: 600541 - DNA, 848 bp, Homo sapiens
agcgggtgttgtggactcgtggtgctggactgccgcatgttcacgcgcgagacgggaacgggcggaggggagcgggcggaggctggccctgcctctgcctggccggcgccgcagatcggcgcgggccgcgcccgccgaccgcctagctgcacctgagtcgcttgactagatggccgaagggagatcgtcggggcctgtcacctggagggagcctgccgcgctggccccgatggagggtggcgttagccataggttgaacaagtctctccctgctgctgacggggggtcgggggacggaacctgggaaaggagggtcgtggtctccttggacccccgcgcactcctcccacttactctacaccgtggatgcttggatgcggcccaagatttgtgtggccaaacactcaccgaggcatttgtggcgcttctccagtcgtcgtccatcagataccttcaggcattcccctagactgtcgcagggtcttgcgcatctatcgccataggtagcggagagctgtgaagatgacttgcgtggatgtttcaatgcttagcacctttaccagactaggagcagctcgaatgtccttcgtatttactttcatagagcaagaaaagtgctagggctcccacttattttctccctgatggtgtaccaggagttctgctccatatccaggcagaaatgctggcggtccacggtgtttggcgcatccatggatggcaactggtgatccttcccctaccccagaggatatcacgtacattttgtagatgctggactttgagggccatcgttgcaaggaaagccaacagattcatcctcaaggacaagtcatcgaggtttccca

SEQ ID NO: 600542 - DNA, 550 bp, Homo sapiens
gaaagaccctgtaaagaggttgaaaaaatgaattacagactgggagaaataatttgataccatatatctgacaaagaacttacatctagcatatgtaaaaaattctcaaaactcaatagtaataagataccaattagaaaataggcatatgtgacctctctgtattataacttaaacctcatgtgactacaattatttcaaatgaaataaacaaaacagtaatgcctgtttctggcatataaaataatcagagaacatagaattgtacgaagttaaattattgggccatttacttaatttaaatatttttaaatgcgtgtacccattttgcttgaagggtgtgtgcaaggatgcttggatttttttaacgataatatgggcacatgagcattaaatttattttttaaaagtttataggtaccccacacaaatttcttattgaatccctcaatcttaacacctggctaagatttcattttataattaatggaatggagggttattcttttaaaacacctgtggtaggcccaattttttttttactaaaaag

SEQ ID NO: 600543 - DNA, 126 bp, Homo sapiens
cgatattgaccagatgtaccaggttgagtttgacgatggattccagatagcaatgaagagagaggacatctacactttaaatgaagagttacccaagagagtgaaagctcgattaaccacagactt

SEQ ID NO: 600544 - DNA, 364 bp, Homo sapiens
ttatgtcattcgtctggagcctctgctacagaaggtggtagagaagggggccattgataaagataatgtgaaccaggcccgcctagagcaggtcattgccggggccaaccacagcggggccatccgaaggcagctgtggcttaccggggctggggaagggccagccccaaacctctttcagttgctggtgcagatccgtgaggaggaagccaaggaggaggaggaggaggctgtagtcactctttttcaataaggttagtatggtcacttctgagtgcctttataggaatctttattgtagacttatatcacacttactgttcttgcttcttattttttcttctaatgcgtttacttggttttt

SEQ ID NO: 600545 - DNA, 801 bp, Homo sapiens
ggacaaacctacagtgatgtgtgacggagtggtagtctcgtgtggaacagcggtctacctccactcactggaccagctggtgaatggagaatgtggctgagtatggtcatgttatccattgggtgtggaacgacgtgtgtgtccggcgacacatggtgcctcaatcatgcctgtaaaatggaccaataaaggtatggtcgtgagtggagaagggatgatctacgggagctatgtggatgcgtcgtggagtagattgtatcacacatgcgtgtgttaggatggcatggggactctatggtgattgaacagcaaatctgagagagcgataggaggggacgaggtcagagtggggaggaattgctagtctgggtcgtctattcttagtactattctgcgctaggagtaagatctatgctccagggagcttggaaccgaggaggtaggcgacggaggttagcagtgtcctgcaagggttaataccattggtagacctcgaacgcctgtggcccccatgaggtgccatgggttgctgtcccgatcgacaattctgtggcagatatcgggggaaagttgactggcttgaagtaattcgcagggagaggtgacgagacatacgaatgagcacaagataaatcgtgaggataaaagactgaatacgttctgccaggtgtctgacataattctgatagcatcaagaaagtgtgtccctgaaattttcattctatagcgtaactacaaaatggttatatcaagtgaagatttagagttaaagagaaggtggggagttggggctgcgggaaa

SEQ ID NO: 600546 - DNA, 486 bp, Homo sapiens
  misc_feature (308)..(308): n is a, c, g, or t
cctgtgttacctcatccatacccatagcttgtagctataagcaagtatgataaaatctccctaagctatagccaagaactgtcttccaggctcaacccattttagtaccatgcttgtctggcaggattaagtaagtgcaaaactgaactcagttttctttctaatgcaagcctgttctgcgacttcccatcatgggtgaatggtaccatgacgccacctagaccacccaccccagaacctccaacgttatcttacatagggtccctcattcctctggttcctttagcatcaatcatgtagtacagggnctgatgaggtctgtcttcttgaatagttctcgaatgctgctcttgcctctcaaattccactaccgtggtcttgaaggtcctcatcacttcttgctgtccgccctctacaatgaactaaggtttgttttccaaaacacaaataatcctatttctctcttgcgctcgtcacttaagagag

SEQ ID NO: 600547 - DNA, 123 bp, Homo sapiens
tctcacttagcaaagattatgaatttatggcaaaatgctgagtgaattaaacaagaaagtcagctgcagcataagcttcctaagccacttagtgcaggatgctaaggacagtctaacctgtta

SEQ ID NO: 600548 - DNA, 832 bp, Homo sapiens
  misc_feature (696)..(696): n is a, c, g, or t
ggtcgcggttcgggtctcctggtgtacggacaacgccaagtaggggatggcgtaccctccagtgcgcaaaaccttagtcagaactatgtggagtatgatccattgcgataatattgcacttggcatttttaccaagatggattatcagacaaggatgttgcatagaggttgtgttagggatatagtatagagaaaaacctggtaaaatctgggtagtcttccatgtaggagtggggaatacatgtctggaggacacaagacgaagcgatgtgacggactagcagtgcgtagaacaggagtgaccgagaaactatgtgacaaatcactgtcctcgagagcatatacagtcgccacattctcgaagcaactagaccaattgctgtgcattgactgttatgatcaacttattgaatctaggtgatgcgcactaatgttgcgatgactctgtaagaagtggtggcatacaaatcatatcccttcactgtcatattcgaagtggccgatatgttaatttgctcggatggaatatggtagctgagaccgagtgagaacggtcttgttcagaagtgccacaaatgtataagagacaattgcaattctacattaattgaagcgaagattgtaaaatcctatgtgcctaaatgtgttggcacttataacattgtactgtcgtttgggggtacacttaatgtatcnggaacatgaagacatagataaggcacatactagatgtacaagacgcaggtttcgcgcaagagaattgttattgcgtctaagtgatgggttcgagaacgacacgaagggataagggtggaagctaatgattctacta

SEQ ID NO: 600549 - DNA, 1214 bp, Homo sapiens
  misc_feature (355)..(355): n is a, c, g, or t
agtctgtgggaggaggctggcgtggaagtgtcgaggagctcaagactcgctggaccaagtccgccaccagattacctgcgtgcactctgcagccattaaacacatgcaattcagtagccggtggaaggacgaagatcgggccgagatgtggtccagttgactcccgtagagtctgggctctgtgtggtaggcccctctgtgagctgatgatcaagcgaatgtgtcccgcattacatagacgaggagctgtggtagctctagagtgatacccaatagattgctcatcgaattgagataccacatattagctaatatcaccagtaggagcataattgagctcgttattgcttggtcnagtgtagcgacttaagagagtaataaagaccactctatccatacgagactatctacgagatgagcaacaattgcacagtggaacgcagggccctgctctaggcacagtcctgtgatgcgagcgagtgcctgagagcttgtactcctccccttatgcgtgatagcttggcgcacatgtcggggtcggtattcattgagacatgtttatgggcatgatgcaattgacactgacttggcaaacatggacacacattgacagactgtgaggcacattggcagaaccttctcaatctatccactagtcatctcgctagctccaattactggcgtgatggttgcccccaaaggtctaccaaagcagacatcgagagattgcgctcggcaccaggcggcgatccgggagacacggaggactgggcgggatcagacagtgtactggagcagatgtcccttgggctccacatccggacaggggctcaatcactcagcgcctcccgaaaacatcgcacgggggaccagcacgaaccggcagactaaatcaacctggaatgacagttacgccgcagcgtatgacgacagagatggaggcggagaacctccgatacgcgagcacgtccccggaagctacgcagacataccccagggctggacaacaaggagaggggcacccgctggtcctctggcccagtgagacccttccagaatccgcgtataattagaggccgtgcgctacctttatactctacattagaaatactaaatacttcagcctcaccacattttatatgcaggcacttcggctgagcaaggctatctactatataaaaggtaatcagcagtatatccctctcatagacgtc

SEQ ID NO: 600550 - DNA, 234 bp, Homo sapiens
gcttggggtggtagcaccttggtctatgggtgctaccttagaaggatggatgatgggaagaatgtgaaagggaggtgagatgcgcagcactgggatgtgtggcttatctgtcttgaggatagatagaagaggagtcagatacagttgcagaacagagatgacgtctttacttgatgacttgaatgatgtgtctggatgcgaacatgttgacgcatagcgagagaattttagtgt

SEQ ID NO: 600551 - DNA, 240 bp, Homo sapiens
  misc_feature (130)..(131): n is a, c, g, or t
  misc_feature (143)..(143): n is a, c, g, or t
  misc_feature (157)..(157): n is a, c, g, or t
  misc_feature (226)..(226): n is a, c, g, or t
gggggggccccccccccttttttgtttttcaaaaaaaaaaaaataaaattttttttgtaaaaaaaaaaaaaaaaaaaaaaaaaaaaaaaaaaaaaaaataaaaaaaaaaaaaaaaaaaaaaaaaaaaaannaaaaaagagagnggtttttgatatangaatgctgttcttgtaaaaatcaatcttgacactttattttaaactttttattggtaatgtcagggagnagaggaccgacgac

SEQ ID NO: 600552 - DNA, 320 bp, Homo sapiens
tagtcgaactgctggacgcgtccggcatggagattcagcatgcggtgcagcgcttggccgtgccagaagctcaagctcgcggcgtgtcagtgcatgaaatcattcgcgcctatcaggccttgatcgatcgggccatcgatcgcctggtgaaggacggccgaaagaaagtgtttccgaagttcaccgtcacgaccttcccccaggcggtggccaagtgccagggcgagagcgagagccaatacctgctcggtggcgccgttgcagggttcatcgccgtggctcctgattggaacgccaaggtcggattgatccttggcttg

SEQ ID NO: 600553 - DNA, 209 bp, Homo sapiens
  misc_feature (99)..(100): n is a, c, g, or t
  misc_feature (112)..(112): n is a, c, g, or t
  misc_feature (126)..(126): n is a, c, g, or t
  misc_feature (195)..(195): n is a, c, g, or t
gtcgctggtccctctactcccgacacttttctttttcaaaaccgtcctaaactcatacccattttcagcatcaataaaaacacaaagatgaataaaaannaaaaaagagagnggtttttgatatangaatgctgttcttgtaaaaatcaatcttgacactttattttaaactttttattggtaatgtcagggagnagaggaccgacgac

SEQ ID NO: 600554 - DNA, 921 bp, Homo sapiens
gagcttgtctcttctgtcaaccccacacgccttctggcacaactgaagtgcggtaacctttatttcgccttcttctttctctttagtctcgtgacttattccacggcgtgtagtttctgctcgtagcatgcatcatcgataggagtgatggtttgcttacactcgagtatctaacatgacttgtcggtgcatgaacgatagaaactttctacaggccttggttgtgtgactatagcctttgctcagtatcttcagcagtgtccatttgaagatcatgtagaattagtgaatgaagtaactgagatttgcaataaatacatgtgttgctgatgagtcagctgaaaaatttgtgacaagatcgacttcatgaccctttatggcagacaaattatgcacaggttgcatacctcttcgtgaatcctatggtgagatggtctgactgtctgtggcaaaaccgatgaacctgagtagatagactgatatgcttgcttgcaatcacaaaagatgacaatccaaacctcccccgatggggtgagaccagaggttcgatgtgatgtgcactgcgttttcactgacaatgaaagagacactctattgaagaaagctaccttagtactgagaattcgccagaagacatccttgacttttatgccctcggaactccttttctttggctagacacggtatcaacgctgcgttgcacagaatgtcgccaagctgctgattaagcttgcctgctgtgccaaagctcgatgaacttcgggatgaacgggaaggcttgcgtctggccaaacagagactcaagtgtgccagttctccgaaactttcggagaacagagctttcaaagctttgggccatgtagctcgcttggggccagagatttcccaatgctgatttgcagaagttcccagttagggacc

SEQ ID NO: 600555 - DNA, 401 bp, Homo sapiens
  misc_feature (387)..(387): n is a, c, g, or t
taagagacagggtcttcttccatcgcccgggcaggagtgcagtggtgccatcatggcttgtggtagccttgagctcttgggctcaagcagtcctttcacctcagcctcccgagtagctgggactacagacgtgcaccaccatacctggttaactttttaatttaaatttttgtagagatggggtctcgttctgttgtccgggctggtctagaattcctgggcctcaagcaatcctcccgccttggcctctcaaagcagtagggaatacaagcatggggccaccgtgctggaatgggatttaggattcataggagggggcaaaaagatcatgagggaagtttgttttctctggattttgaagttggctgtaacatttgcagggttttntagtttaggagggg

SEQ ID NO: 600556 - DNA, 1151 bp, Homo sapiens
gcttggagggattacacatgagactaataacattgggagatcatggtgctctgtgacccggtacaatagtagccctgtgagtcctagcatcatgatcttatcgttaactagactataaggccccattactcctgaggtataaaacagagctctacttgttataaacccgtcaagagtctactccttcagggagaaatatatgcatcagtcctgtgtttagctatgcacctactcttagtaccagaaactgtgaagtatcgaatagcatactagtttacctacttctctctttaaacttggggcacacagtcccatggtccattctgccatttagtcaaaattgaactataattgcaagcacctgatagggtttggccacttagaaattctgcaaaataaggtcaacatctgtttctaaaatccttaagtttccactagttattgccaaactcatggactgatagcaatacaggcctttttaacacaggtgaattgtaacacttcagctattatggcttactctagagtaacacatgcagttttcagaattattgtccccacagtggagaacgtattaaaggactaatgcaagaaactcagataggacgcacacaacggttaaggttcacgagggtcccagacaaggacgacatttataagcactgggaccttggagtaacttcaaccttaccgtggattcactgcatggtacatgaagcagggtttaccgtaaataacacttttctaactctcactttgggacaacacacatttttggggccattacacgtaattctaccaggtttgtcctagaagtaccgattttggtgttgactcaaacagtgtgtgaaacagtcttactagtcaaccaaggcgcttagaccaattgcctttgctttggcaagaaaaagagggaatatgtattacccctgagctagaaccacgtgtttaggttgcgagctgcttggggcaccatgggcccgtctgtgcgtgtgatatgtcaccgcaagaaagaactattgcgggaccacagagctctaccgggtcataacgcgctaattggcagttgacatgacccgttataccgggggtgaaaacttaccggcacccagggggaatgaaatgttacgtacatagagagcaccgccggt

SEQ ID NO: 600557 - DNA, 309 bp, Homo sapiens
ggtttattccgatggccagtgcccccaggagaaggcaggaaccctggagcctgcaataagggaggaaagaggactggaaagtgtggggaatgggaagaagtagttttctttgggctaaagaatattttgggggaaaaataaagggggggcttgccgggacccaccattgggagggcccggaaaaaaaagagcttaaaatggggaaaaccagagttagaactgttggatacaggagaaaaaaccgcagctccccttccggcccccccccaggtttgatgtccttccaagaataaagtttttccctggtga

SEQ ID NO: 600558 - DNA, 367 bp, Homo sapiens
  misc_feature (10)..(10): n is a, c, g, or t
  misc_feature (41)..(41): n is a, c, g, or t
  misc_feature (273)..(273): n is a, c, g, or t
cgaatgtgcnaactccagcctgcgaaggctggaggcatganacttcaaccccatgaagagctgcctgggtggactgagccccagcaaagccataggggcagggctgcctcaagaccttggggcccagcccagctctagtgtgcccaagatgcaggacgcagagtcaaagatcattctccagctttaagacttaatgttggctgggcacggtaatcccagcagttcgagaggctgaggtgggtggatcgcttgagcccaggagttcaagaccancctgggcaacatggccaaatcccatctctacaaaaactcggggagctgaggtgagaggatcgcccgagcccaggaggttgaagctgcagtgagc

SEQ ID NO: 600559 - DNA, 820 bp, Homo sapiens
agcggcctccgttcgggggggggagattgaggacaatgctgtaatgcagggattaggagactctgttccttcatccgatacagcctggagaagatcgaccaggctcactaagaatcatggtgtctatcttatcatcctttgagagccgccttatgacgactgtgagagggtccatcatccctgtgcgacaagccaagcacggagaatctgcagcggctgcggcgcgcatgaaatgtatgaagcaaggacgctgtcctgcctggagcatgtcatcagcctactaccatgtgggccagtgacgactgagaagatcatcaccagagggccccacaggtaggctggaaggagtacctgggaagcatggccaagattcccgcaaggcagtggagtcattctccagggagcacacaggcccagatgagcccggaagctcaagtaaagtgaaactgctctttgagccgcgggaaggaggccctggagtccgaatttcgcaggctgatgacgcggcacagtaaggtcgtctcgccgtgctcatcttggcatctgatcagtggtgaacgactgatctggaaggcccagcgagggacgtgaaccctgggagcaccttgcccgaagagcgtgcaccagggatgtcaatttcgcaatcctccccgatggggtgggtggaataatgggcgcaaccacagatttccttgaacgtcctacctagcagattacggctcccagccactgttggagcgcgtcccattcacacggcgtggcgagagccttctccttacaggagcccggcgcataacacagagagggcctcacacacccg

SEQ ID NO: 600560 - DNA, 222 bp, Homo sapiens
gagaagacgacagaaaggggtagagatcttttcccatgtattctgctcaggtatttcccccaaataaatgagaaccatggagtagagaaaagagacctcaagaacagggcgactgagcacaagagggaaaaaaaaaaaacaacaccaaaaaggcgggcccttggcccccgggccgggggaaacttttcaaaaagggagggggggacccccaccaggggccca

SEQ ID NO: 600561 - DNA, 1376 bp, Homo sapiens
ttagtgtggcacagacgatcagcagcgcgtctatgtctctctgcgtgcgtcatggactagagcaactgctttaggtgatataatgtggggcatatgtgctgtgtcattggtaatagtgcgattgtgcatacaatgggccccttagggcccttctccgtgtacgtgcttccctacatccctctaatcttatctgtgcccctctacggtggctcctctatctttcgcgcatgttggaggaaatggtaaatgcctcataccgcagattatatgtgaacccttttggtaccctcaaggatctgttcttctatggacaacttgagtcgcgcgaacatctcatgtggtttgtgtcacggggaaaaaaggatcctaggataaaatgacggcggatcgtgcagttttccatgacgtcgccgtaatagcaatttaggggccccctagggggcgccatacgttctgtgagcccgtatggttgccctctccaatggctccctcatcctggtaggagctcttgtggcgtggaacacacaggtggtcaaatccggcccccgttgtcggtttaacgtgcgagtgtaatattggtaacactggtccaactcttgttgctgttcccggggaaggtgtgtacagatcaaggtacacaacggaattccaagcgaaacggctggacaaaggaagatgcttctttcctgctggatggacctggccggatcgtgtggtcctggacgtcagaaggtctgtaatgcgaggacacaaagtggccatgctcgtgtttccgagagatgcccccacccactgcaagccactgaccatcaggtgccaatagcttgggcaccaactctcagtgccagcagtgccggtgcgcattttcgcactgccaattactggaccccatggatcaagagacaagaaggacatcagttgctccagtcatcgtgattccccgtgccatcttgcacataggaacagcctgtcccccaccagcaagccatggctggctaggcggcgttaagccaagccacctgactgccaggaattggagcctcagttccctcctgtgtcaatgtagtctaactgcagcagctggactgagggcagagtctgtgggtgcagagaccctgcatgtaggtcacagagttcgaggcccaggccactctacctggggccatggtgggtaggcaagtagaatctggggcacacctcaagtgaccaaatgctattaatttccatccctttagcaggctgggccctaggcaggaagctggcttctgggagaggagtgagaacgtacagggcatgcctagcttgcgtgcattgaggaaggtggcattccgtgcttggcctccgtgagtaagcggtcgcaggtctgtgtcttctgc

SEQ ID NO: 600562 - DNA, 270 bp, Homo sapiens
catgagagtcacttgaaacagggaggcagaggctgcagtgagccaagatcgcaccactgcactccagcctgggtgtcagagtgagactctgctcgaattcaagcttctaacgatgtacggggacatggagtagagaaaagagacctcaagaacagggcgactgagcacaagagggaaaaaaaaaaaacaacaccaaaaaggcgggcccttggcccccgggccgggggaaacttttcaaaaagggagggggggacccccaccaggggccca

SEQ ID NO: 600563 - DNA, 938 bp, Homo sapiens
tcaagtagagtaagccagatactaaacgagaagaaacccgtaagccaagcaaggttgaatgctgggtggcgaggtgacgaagggtaacctctaatctgataagcccacagaagtgcgtagatgcctattgatacgatacgtgtccttgtcacaggaatggacacggtagtactgcgattctgacaatgaattccaggaagaggtccgattgttagcaacgatgtgacatgtaacattagtacggatagagtccaaggtgtgatgaatgatgaaagaaggatgagatggtttctcggaagctgtataacaaagatcgagtggtgtgggtgattgaatgataggcgggaggtgtacacacgtggtggttaaagattgctgcagaaagtgtctatgatagttatcgtatggatatgattgtgcctcgagaagcgagctgagccactggcgataataagtccgttcagctcaatgactgtagacgaaaacgtggccgacgtcaagtattaaccccggtgagcatagctggatcatacctcatttgggacagccaccagagggcaaagatgggcttggttgtgacttgaacgcagattggcctagagtcgttatgacattgtgactgaaacgtcgtggatgcgtaaagtcgatgtttgctcttaataaaggaagtagagccagtagagttggtacatgggccacattctaagccagaaattaagtatatcaaggcatatgtggaaagattctctaagaaacactctatagctgattgcttagctgtcaagacagaagaaagctggtagtaaggtcgcagaaaccaggaaaggtgggatcttcggacacagaacaaaagagaaaatttgagagttacggaatcatcttcagattgatttagaaaggtgaggacttcagaaattttaggcaaaaaataccgctaa

SEQ ID NO: 600564 - DNA, 324 bp, Homo sapiens
cacgagggcatgtgtgtgtgcgcatatgtgtgcgcctgcatggatgtgaggggtgtgtaacgtgaggctatatgagggggactgtgtacatgcacatgatcataggtatgtatgttggacagtgcactcgtgtgtgttcacagacaatgcaacatgccctctatggtgccccaggtcagtggtatccccagcttagtgaccagacttacttgcactgtaagttgtgaaatacaggcttggagtggcctgggaggaggtcctgccagcagctgccacgggaacagcctttgggctgttaaagtcacattaaagtctctttcagta

SEQ ID NO: 600565 - DNA, 107 bp, Homo sapiens
ataacgactgcggcgtcgctgcgcggcgcgagtggcatcggtaaacgcgacggtggcggacttaacgcttgcgcggggggccatcaccgtgacctgtggggccgtga

SEQ ID NO: 600566 - DNA, 169 bp, Homo sapiens
ccccatgttgtgtggttgatatcctagggtcgtgatgcatcatcattaaggctccgcccgtccaagctatccagatcggagtggagactgtgtgcctgagggagttcctgctcagttttggtctttttttgtgtgcattggtctcctcactttcactctcatgagatcc

SEQ ID NO: 600567 - DNA, 349 bp, Homo sapiens
ggggggtccccccccccccccaaaaaggtttttttggggaaaccccccccccccttggggggggtccccaggggttttttcccaaaaaaaaaccggggccccccccgggggggcccgggggggggtggggaccccccccttttccccccccccgaaaagggggttttttttttttttgggccccccccccccccccgggggtttggggggtttcacccccgggggttatttttccaaaagggtttaaaggggcggggggcccccccctttttagggggccccaaaccaagggccttttttttttggggcccccccccccaaaaaaaaaaaaggcggggtttttctttta

SEQ ID NO: 600568 - DNA, 458 bp, Homo sapiens
aaaacaaaaggtttttattcaaaaaaccccaagtttaaaaaaaaaaaaaaaatcttttttattccccgggccagtttttcactcaaaaaaaaccagcgggctccctgttgttaaaaacacacccccaaaggggatttggagggccccccatccaaaacgggttttaaaaattatcctatatacccaggcggcaatgcccctccccataacccaaagagccgggacccacctgggaaaggggggggggggccccacaaaacccagggagctgcaacactgccccccctgagtcccgtccccccaaaaacagagaaggggtggaagccctcccccaaaaggtccccacgtcagggggggaaagggggaaagaaaactggggccccccctttggaaacttggaatgggaggggacccacttaaataaattaaaaaatccctaccctggcccccccaggtta

SEQ ID NO: 600569 - DNA, 376 bp, Homo sapiens
gtgtaatagatgtcatgcaggcaatccaaacgggagatactactggggtggacagttcacctgcgacatggcaattcatggcacagatgatggtgtagcatggatgaattggatggagtcatgggactcaatgtagaagatgagtatgaagatcacggccttattgccacagctatagtccacaatacgtagattctggctcttgtgtatgtgacaacatttctgtacattatgctattggaattttatttcatacattatattcctgtaatactctcacagcagacgtgagtgtgactttctgaaataagcatatgatttacatttagcacatgaatgtctttagagtgttcattactattgctcaccaagaggc

SEQ ID NO: 600570 - DNA, 102 bp, Homo sapiens
atgcgctagatgcaaatttattagtgaacggtcatcatctggaacaatcactgtaagcttgggatttaaagcatgatagacttttccaatggcccccttata

SEQ ID NO: 600571 - DNA, 149 bp, Homo sapiens
cgcccttaatcagatcttcttttgataagtcagtcagtacttttcctaacgcctttcttctggtgtgagccaggtggcctactatttttcactgcgaagatctagtgacgtcttctttacttcttccatgggaacaaaaaattcaaatg

SEQ ID NO: 600572 - DNA, 115 bp, Homo sapiens
cccggggtgggctagtcccttgaggcccagagatctaggctgcagtgacgccatcattggcatcactgcactccaatctaggcaacagacgcacgaccctgtctcaaaaaaaaaa

SEQ ID NO: 600573 - DNA, 142 bp, Homo sapiens
ctcactcatttacaccaaccacccaactatctataaacctagccatggcatcccctatatagagcgggcgaagtgatatataggctttccgctctagagattaaaaatgccctagcccactttcttaccacagggcacacct

SEQ ID NO: 600574 - DNA, 207 bp, Homo sapiens
ttcgctcagtgctcagaagacttcctgggcttctcataggggtggtcaggctgttttccttccaggggctgttctggactggagcccgttctgtgctccagcctcaggtcctgttggctgcagaccctcaagggtatggggtgggagagtgcgagaaggtggggctgcagactctggaggaggttttggcacttgggatacctcttc

SEQ ID NO: 600575 - DNA, 282 bp, Homo sapiens
aatgagaaccgaatggaggagagcaaggccctgttccgcacaatcatcacctacccctggttccagcactcgtctgtgatcctcttcctcaacaagaaggaccttctggaagacaagatcctgcactcacacttggtcgactacttccccgagttcgatgggccacagagggacgcacaggccgcccgcgagttcatcctgaagatgtttgtggatctgaaccccgacagcgacaagatcatctactcgcacttcacctgcgccaccgacaccgagaacatc

SEQ ID NO: 600576 - DNA, 161 bp, Homo sapiens
ggtgggtcttggagaagggagagatggctcaagcttgtgagcctctccctggtcaggggtccaagggaaagctcaggttgttcgcttctgccagagaacgaagatcaaaataatacttggcagagacactggaagggaacatttgatgttagaacttgcag

SEQ ID NO: 600577 - DNA, 201 bp, Homo sapiens
tagcaaccatgttttagcaatcggtgttgggttaaatgaaccaaacgtctcatttggaaaaggtcttgtcccgatttttggtcataacatgggtgattataatgctatttggccatatcatccaacatagtttagtgccttacaaaatatgacggccaagtcaattattggtaaaccgatttacgtctccgagggtaaaac

SEQ ID NO: 600578 - DNA, 102 bp, Homo sapiens
tgttgtcaatccctagactgtaagctcttcaaggagcagaggcgcattttctccgtgtcatgtaatttttctaaggtgtttggcagcactctgtaccctgtg

SEQ ID NO: 600579 - DNA, 168 bp, Homo sapiens
cactgatgttcataggggttgtgtgggatcggaattgcctgtgtgcatgctcgtatactagtgatcattcacgatgactgcctgtacaggagtctcatgactgagaatgacactactgaccctgacttgggccttgctgctgctgcacccaacggtgaccggcgactt

SEQ ID NO: 600580 - DNA, 1431 bp, Homo sapiens
  misc_feature (666)..(667): n is a, c, g, or t
taatcttctgcgatcggagtgtgtcgtccatcagcgtgatcaacccgaaatataatgtgggggcgggggagaaagcttgatatactagccgggcttctttcttcatcttttggggggagaaaacaccatctgcttggaatgagaagaagtgtgtcacccaaaaaaaggggggggcgtcttctgtttagtgaaatattgttgggatgagacgttcggcttttttttaggacgaacaggaagcattttgggttttcaaacaccaacacccgtgagagtgccgcacaagatttttgtctacaaacaagcgcggggagattgtgtgccgacaaaagaggtttttcggcgcccctccttttggagcctttaattgtggccccaaccctccaccacagaagaaagggggggtggttctggaggggatcacaaaaggagtgtcaacactacttgcctcgtggtggtccacaacacaaacaaagggggcgcctacgaacgacactttcatactcgtgataaaacgactcttctggggcggagaaatttgcggtgtttggtgtgttctcctctgacaacagtgtggtccctgtgttgtagagggaaaaagatttttgtgcttggtagacaccgtggtgtagtaccctcctccctactatatattctacacaaatnnttttgaagaggagcccaccaacagtagaagtattgctactactagttgacacaacaacaccggttgtgctgttgacaacattagagcacagcgcctcgggtggccaccgagaaatctccctgtatacaccacgcgttttgtagatgtgtgcgcgttggttagagatgttcccccacacatttgtcgtgtatatggtggggagacaccacatagtatatggtagacacaacacattcttagtgagcgtgtgtctttggacccctctgagttttttgtggcgggagagcactgtgcgtgtgttggtgtgctcccctctggtgtgagaagagagcgtatataaagtgtgtatagaaattataccgcacaggtgtctcttttgagagacacgcgtgtgtgcgctccggcacacaccacattgtgcgccacagggcacagtggcgcacaggagaatatatatagcgcacacatctccacccgcgcgcacatgcctgctgtgtctggcgttctcacacacacatgctgtcgggcgacatctttatatatctttgaggtattcacactccacgcactgagtcgcaagaatgcggtgaaagaaaggtgagatcacaaagttggcaaaggttctgaaacctttgaacacatgggtggctatatgctaacttgccactgaacttcacctgagaggctgtcaattgctgccttgccccacccataggcccctgtccatacccatgtaaggtgttccaataaagaacatgaaccca

SEQ ID NO: 600581 - DNA, 964 bp, Homo sapiens
tttggtgatacaagtgcttgttgcgcctctatctcccgcatgtttgcagccggttgttctggtttcctgttggcgcgtcaaacctttggtgctccgcccatgattggtcttcgtgcaggccttgtttgttgtgaccacgatgtggtgctgtcatactaccggtgtttcccagccgtatgcctccgggccgcggtcgaggtgtcctgtggttgacgcccccccgggttttcatgttgtggctgcgcttttagccataccaatattgcgggtgggccccaaccccagaggcggtcctgcctgtgtgcccccgtgtaacaataccccccaagtggttggttctttatacaacggctccggagattaccaaaattctctctgttccagctacataactcttgcacacccccccaatttgtaaagtcacctgcgtcacccttcatgaaacgccccctcgtggtcatctttaaataaaaaagtatgtccccccgtcacacacaccgggtcttttcagggaaaaatcttctccctccttcttggcctccttccattaggatttcaattctttgcagcccccgcggcccatgaatttttgtttcaattgcacacacccctttaatccatcacgcatacacatacgagaagtcttcctttaaaaatagatccctcctaatttgttctcccataattatttttccttcttgcatccagaagaacagctgtactcatttcgaactcttgtttactgccataccccccctaattatgctgacagcgtgtaggccaccataacaatcatataacccgatcaagccttcttataaatgaaccaattcgtgtcggggtctctcctcaccaacccaccaaagttgcatttcacggcgaatacacggcccactgttggtgttcccccaaacaaaaaaaaggtttttccccccacaataacgaaaatcacggaacatataaa

SEQ ID NO: 600582 - DNA, 681 bp, Homo sapiens
  misc_feature (493)..(493): n is a, c, g, or t
  misc_feature (538)..(538): n is a, c, g, or t
  misc_feature (681)..(681): n is a, c, g, or t
tgggttgagcacaggtactttattgatggtacttgacaaggtgcggctccctaggcccctcccctcttcaaggggtctacttggcaacggtgaggaggggaaattcaggtggtgggtgggggacgtgagtgtggtggcagggactctccccagcagttgagggctcttcctcttcttctccctctttgtgtgcctctttgcgtgggcgcgtggtgtggtctccaggggtctctatactctccttttggaggccatgtgtgtggcgccatgtggaggtctcccacccacccgtgtgtgtggcgtggtagcccaaaattctcggtgtgtctcattcaccaggaaaatgtgaagctttgaacaaaagtgtggctcgttgtgaagggacaatgtcgccagccccacaggcgtctcaagagggtgtgagagagtgtggcgtgtgtctccgcgtgtgtgtgaacagtctctagagagggagacacccaccgtggtgtgncctcagtgtgtgtagcccccgaggagtagtcgcccttgtggaggngggcgccctctctcgagacgccctgtgttgtctcacaccacaccttctcgtgtgagagtgtctatcatatatatgtgggccagagggttcttctctaagacacgggcgagcgctccgagtgctccccaccccatgtgcaccan

SEQ ID NO: 600583 - DNA, 252 bp, Homo sapiens
attcgcggccgcgtcgacttgaaatacgactcacacaccccacaccagacactccacacaatccacataccacacactccacgcgcacaccacacactacacacaccacacacactccacacaccatagactccacacagtccacaactccacacacaccaatcacacactccacacacaccacacatcacacactccacacacaccggatactccacacacaccgtcgacgcggccgcgaatttagtagta

SEQ ID NO: 600584 - DNA, 153 bp, Homo sapiens
agtagtccggctagacgccgacaatgacatggcaacgattgagaactgaccaaggtctacaagtcccggaaggattggccgtatcctggccgttgaccgcctgtggctgggtgtgcgtcctggcgagatgcttcgaggctcctggagcgtcaa

SEQ ID NO: 600585 - DNA, 102 bp, Homo sapiens
cacccggtacggttatctggagcacaatttctttgcacggcagcagaatcagaagccagacttggccatattaacctcgaaactcggtttcccggccgccat

SEQ ID NO: 600586 - DNA, 201 bp, Homo sapiens
  misc_feature (24)..(24): n is a, c, g, or t
  misc_feature (44)..(44): n is a, c, g, or t
  misc_feature (69)..(69): n is a, c, g, or t
  misc_feature (77)..(77): n is a, c, g, or t
  misc_feature (90)..(90): n is a, c, g, or t
  misc_feature (92)..(92): n is a, c, g, or t
  misc_feature (109)..(109): n is a, c, g, or t
  misc_feature (114)..(114): n is a, c, g, or t
  misc_feature (126)..(126): n is a, c, g, or t
  misc_feature (134)..(134): n is a, c, g, or t
  misc_feature (137)..(137): n is a, c, g, or t
  misc_feature (144)..(145): n is a, c, g, or t
  misc_feature (160)..(160): n is a, c, g, or t
  misc_feature (181)..(181): n is a, c, g, or t
  misc_feature (187)..(187): n is a, c, g, or t
gctggagcgattcggtggcacgcngagccacggcgtgggagtanggggctgaaggcaggcagcagccgncagggcgncctctggtagccntncggtctccgggtacccngtttnttcctcgtaggntgtccggncgngtgtccnngcgagataggacatnccccgctatccggattccggngtccgnatcccgtcgatccc

SEQ ID NO: 600587 - DNA, 769 bp, Homo sapiens
agcggagcgcgagccccggagcccttgagcgcgaggcgcggagcccccggtagcccccaaaccgcatacacatccacgcgccccagaagccccggactgcgcgcccagccgggcccgcgcgatgccctcagaccggtcgctttcaagtcagcgagacgtgatgcttcagcgcgtacctgctgtaagggaggtactagtcagtatcctgcgtaccgagcaccccagcaaaatcccggtgatcatcgagcgctacaagggtgagaagcagctgcccgtcctggacaagaccacgtttttggtcccggaccatgtcaacatgagcgagttgtgtcaagatcatccggcgccgcctgcagctgaaccccacgcaggccttcttcctgctggtgaaccagcacagcatggtgagtgtgtccacgcccatcgcggacatctatcgagcaggatgaaagtactgatgactggcttcctctatatggtctacgcctccctaggtaaaccttcggcttctgagccagcagtcatgggggctcggcctgggagtcggggggccccggtcaggccctgcccagagatgctcctggttcctgaactgagctgcctctaccgtggtgggctgggcaggcatgttgcccccctaggtcagagggtccccaatccatctactctgcccatgggtggatcctgggccggtcgtgtccgggtttgtccctctgggtgctggctggtggggatggcggaggggtgggggagcagctcgccgaaccct

SEQ ID NO: 600588 - DNA, 724 bp, Homo sapiens
  misc_feature (539)..(539): n is a, c, g, or t
  misc_feature (637)..(637): n is a, c, g, or t
  misc_feature (686)..(686): n is a, c, g, or t
  misc_feature (708)..(708): n is a, c, g, or t
tgagacagtgtctccctctgtcgcccaggctggagtgcagtggcgccatcttggctcactgcaacctctgctttcccaactcggatgattctcttgcctcagccttccaagtacattatgctaacttttaaaacatagatattagctattccttaaagtataaaggaactttaactttaaaaccatagtgcaattttaatgataataacaatcatcctattttcttctaccatctattcatgcttctaaatctttgtgacctaatttttgagaatcagcatttgtcagaaaatccgtgtcctagactaaaagttatatttttaagtttatacataatattttccatagcttttctaatagcaagtataatggctatgtccctctgtgttttctaatattgtatattttcattgtacctcatttagaattaatagtggttaattactttattgatcttttcaataaacaagctttttcttttttctcatttgtttcttttttatatttaatttttcctttgttccattctactttttccngattttccaatgttataatttttcacatgatttcaagagcacatttcaaaacagaaatcacttaaggagtataaatttttcctacagaataatgaggnaaattttgaggtaaaacaattgatctatataatataatttaagtttggnggaaatcatcaagggttatcanaagaggattggggact

SEQ ID NO: 600589 - DNA, 108 bp, Homo sapiens
  misc_feature (102)..(102): n is a, c, g, or t
tggccggtccctgttgagcagtattgtgctattgcatactagtctttgccgctgcgacacacggtgggctagccctactagtctcaatctccaacacatatngcctag

SEQ ID NO: 600590 - DNA, 204 bp, Homo sapiens
aggagatcagaccatcctatcctggctaatacagtgaaaccctgtctttaaaaaattagccgggcgtggtggctggcgcctgtagtcccagctactcgggaggctgaggcaggagaatggcctgaacccaggaggcagagcttgcagtgagctgagatcgcgccactggactccagcctgggcgacagagcgagactctgtctc

SEQ ID NO: 600591 - DNA, 184 bp, Homo sapiens
  misc_feature (56)..(56): n is a, c, g, or t
  misc_feature (59)..(59): n is a, c, g, or t
  misc_feature (63)..(63): n is a, c, g, or t
  misc_feature (132)..(132): n is a, c, g, or t
  misc_feature (136)..(136): n is a, c, g, or t
  misc_feature (138)..(138): n is a, c, g, or t
  misc_feature (152)..(152): n is a, c, g, or t
  misc_feature (155)..(155): n is a, c, g, or t
  misc_feature (162)..(162): n is a, c, g, or t
  misc_feature (175)..(175): n is a, c, g, or t
aaaggaggctttttggaaaggggtcccccaggttttttggtgttcctgcttggggntcnctgntgctaactgactggcccccccccttggaagtttgtgattttgctttggcaaagtttcattgactagtanaacncnttttgttttagggnatntttcaanataaatgtaaacnttttgccca

SEQ ID NO: 600592 - DNA, 248 bp, Homo sapiens
agatcccggccgcctgggctccaggagccccggaaccaggataagttggatggctgccgcggcgaatcggagggcggggtggaccgagcccggtatttactatacgggtattgtggcccgggagaagccctccatgaggaaaggtgattgcctttatttgcaactctcgtttttttctagtttgctatctagtacaagttctagctgcaaatttttttatgatcctttgatggtgctttttcttgagc

SEQ ID NO: 600593 - DNA, 136 bp, Homo sapiens
ctgactagaggatcccgtggacatttccacgagtcaccactttatgaatcttgtatgccatatgcctggcatatggcatacagattcataaagtgggagaagagtagtaaaaggtcagtatgggtggagcagagtg

SEQ ID NO: 600594 - DNA, 108 bp, Homo sapiens
tatcgcatcactcagcactccacggaccctccctgaccctctgtgagcagacaccacaggtaagcaggggcaaaactgaccctcacgcattgtgcgctccaggaactg

SEQ ID NO: 600595 - DNA, 311 bp, Homo sapiens
caaactctattacttcatagaattccatcttccagaccggtcccacttaattgaatacttagaaaaaaatggccagtggccgattgaaaggtatattaaaattaagggcagttataatactagaagacaaatatcttcatggaaatctatttgtaagcttctgagattgctgctagaaagtctacagtctgtagaatataccaattcccctatatacaactgcaatgcagatcatatatgaaatactggcaaggctataccctaacacattaggcaattggtagtaggctgccaactgctaatcgctctca

SEQ ID NO: 600596 - DNA, 329 bp, Homo sapiens
ccagcttgaacgaacagtgagcatgtgctgaagatactaggggagaggatctggtgaaaaaaataccaaatttaaattatatgttttgtgttcgttccatttaaatggaacgaacaccggatgaactgaaggcctaaggcaaaaaagccgcggatgacgcggctttttgctgtcttgtgattagctttttctcagcgatggtataaataaatctgtccgtttgtgctgtcttttggtgttgtttcaacaggaatatttcgtgggttggagccacgcggtactaagctgttcgttccatttcgaaatggaacgaacatgagggtgttttc

SEQ ID NO: 600597 - DNA, 128 bp, Homo sapiens
tgtacttgaggatccctcggggccttacctgttcatcttctgggggcccgagcaagatgcagaagcccaggcagcctcgtgcgtgtgatccagcgagctgggctggtgttccccaacatggaagcata

SEQ ID NO: 600598 - DNA, 937 bp, Homo sapiens
ggagtatacaagggagagatgtctcgcgtccgtgggcttagctgtgctcgcgctcactctcgtctgtctactggactgaaatgctatccaaatgtactccatagattcaggtatacgtcacgtgattcatgaaagaatggaaggtcagaattatcgctgaaataagctatgtgtctgggtatcatccgtccgagattgaagttgaattactgaagaagtggaggacgagaactgtgaagaaagtggcaggcattgagatttgtcttgtcagccaagggcactggtctatgtggcatactatgctatgtgagctaaacattgaaatggcagtcaccaccgtgagatgagatgagtgcaatctatggcctgggcgtgctgagatcatggtggacgtggtgatgcgacgagcccacagagattagttaagttgggatcagatgactagtggtagcgcaagcaatcattgggacggtttagaaaggagttgccagcgaatggggatttgggagagaattgtctgaagacttcatgtcatgaatgtctattggaagtagtaagatattaccttagtaaaactgaggaaatttctaatgtgttaaaggatgctaagagggttaatatagataattctgtaatgatgagattctgagtcgtctagttatataatctactaacttatcgagtgctggtctacctctgtgagtactgtttcctgagacagagttgctccgcgcttgtaggttctaatcgaggaggtgggaccgttgcaaagcaggccgaggggaaaatgcccgaagttcaccatggaacgttgtatgggcacgagacggagctcctgtaatctatatgccatgtttcttcaggccaacacttgggatgacgatagatttcagcacacatgacgggtttgacatcacgtggtttaagagtgaggcga

SEQ ID NO: 600599 - DNA, 716 bp, Homo sapiens
  misc_feature (276)..(276): n is a, c, g, or t
  misc_feature (332)..(332): n is a, c, g, or t
  misc_feature (386)..(386): n is a, c, g, or t
  misc_feature (549)..(549): n is a, c, g, or t
tggctctaaagggggtaaagggggtgctatagggtaaatacgggccctatttacaaagattttaagggagaattaatttctaggacgatgggcttgaaactggtggtgtttggcctccacagatttcaagagctattgaccggtatgtatacccccgggtctgtgtagcgggtagaaatgtggtgtttggtgttataagactgtccgggagaattggctatctgtgttttataacgctctaatggtggggagacaggctcatgagatgtgcgccanaagacgtgttctgtggtgagatgtgtgatattttatctatatccacgacaaatggnggggcgtcttccacactcggggagatgtcacctacacctccgtatgtgggtgcnacacgtgctcaagggatgtcccgccagtgtccgccttgggtctctaagggattatcaatgcgggggagaatgtttatgtgtagagcgatgtttgagaaatattaatgtccgcggcgcgtaatgtcgcgcgtgtgtacctcgcgtaaaggtgttcacaggtaancactttgtggtgtgtgcgcgcacatttggtatcttgagagtggcgtaaagggagagggggatactgtgtgggacccttccgtttcttgtgtgttatgtgtgtaaaagggatgcgcggtaagggggacttgggagaaggggccagaatagagggacctcagcgactgc

SEQ ID NO: 600600 - DNA, 479 bp, Homo sapiens
  misc_feature (147)..(147): n is a, c, g, or t
  misc_feature (224)..(224): n is a, c, g, or t
  misc_feature (237)..(237): n is a, c, g, or t
  misc_feature (240)..(240): n is a, c, g, or t
  misc_feature (255)..(255): n is a, c, g, or t
  misc_feature (266)..(266): n is a, c, g, or t
  misc_feature (270)..(271): n is a, c, g, or t
  misc_feature (286)..(286): n is a, c, g, or t
  misc_feature (293)..(293): n is a, c, g, or t
  misc_feature (296)..(296): n is a, c, g, or t
  misc_feature (304)..(304): n is a, c, g, or t
gaatttaagggttttaaatatagcattcagatagtaattggtatgttttgccatctggtccactcaatgtatatttttatttgcaaaacaacccaaaacttactttacgttgcttgttcagtacctttgaattcccccagaagagtngttttcaaaacaaacattccagaatgaatgtcgctcttcaatggaacgtctttatgtgcttgaagtatttcttctcnggtgtaattctanatnacagagtcatttganctttctccccncccnntagtatctttacagnagcaggnaanagcagtanaggatgtataattttgggtaaagttaaattacaattaatttgaggttattcctaaacatacttatttggtgttttgaagaagatcactctctaagagatcgtagatagcctcggttattgttctggctgggctctttggtcacttttccacgcatgttaataaatgtcactgatt

SEQ ID NO: 600601 - DNA, 109 bp, Homo sapiens
gcggccgcctactactactgctcgaattcaagcttctaacgatgtacgggtacatgtaataaaggtgtttattgttttgttcccacatttatgttgcctgaacaaaaaa

SEQ ID NO: 600602 - DNA, 270 bp, Homo sapiens
gggagggcccgggccgcgtgctcatggcatttcagccatgcttcagcttttcccaaaacccgtttttaacacatcatcgaatgtgtgtcagttctccactttccttcacccacgaggggttatgaggatgcctttgatttctgtatacagatttgctagccagaagcattttttcttagaagggcataacttgaaaatgtgcacaggtgcctaaatccttatctcacaaactttatagcaaagaaagtgtagttttcacatctccatgtt

SEQ ID NO: 600603 - DNA, 1281 bp, Homo sapiens
agtgagctcctccgacagcgaggcccccgaggccaacccctgccgacggcagtgactgctgactgaggacgatgatgtgacctgggggtgtcatgtgcctgtcacatgctgtgtaacctgccacatgctgccatgctgacatgtgatggatgacgctgactcatgactcagtacaatgatgtagctgacaacatgtgtgccttgaagaagtgaatgactgccatgcttgctaaatgactgtctgtgtctctgataactgatgccctgaaatggcctccatgctgagccttgtgactcatgtgccatgctgttggtccccatcctgacagatggatgaagcatctgtgaaaatgctacatcttgacgtctggatgaagaccaagctgaaccagtgactatcaacaccttgatgaacgacaatgcaagctgtgtcctggtgctgcccactgggagtggtggcccctcttggagtgtgggactgtggaaccaaacaaatgatatgtggctgcctgatcatgcactcccgaaccatctctgcatctcccaaatggtgccctgatatcctgtgacctgtgagagaccaaatgccattgaatgacctgtgttgtgcccacatagtgctggctggggtcgagtagattccattcgcatcggctatcgctacattatcacatacccgtatccatacgcttcacgaagctacactgaaagtgagtggtacttggttcgagagggagaatgcacagtaccagaaagtgggtggcatagtgaaatgacccaaagagatgggaagagaacacgacccatacatacgctcctagaaaaacgcccatggccggaagggggtggccggagaaaaaacgcgagagagagggcccattgacaacatggggcccaatcacaggatgcaacaggggcgttccaatgagcaaggatttgagccaatggttgcaccaagggtcagtcaagcactcaatggggtattgtgggaacagccggagcatattccaagggtggaatgcaggggagaaggagccgtggtggcagtgtgtagaaactggaaaggtgactgtgcggtgaaaggtgggctgtacgagatgggcagtgggggattgtgtgacccatggtgtaagggtgatgtagtatgaaagtagtgtctatggtgaaatggttagttataaatgcaatatgatagtgtacgtagaccttttgacagtgagtaatggcaaagagagaagtagaaattgtgaaaggtgaatgtgattgtgagcgtattaaaaa

SEQ ID NO: 600604 - DNA, 603 bp, Homo sapiens
aagagaaccggaccagatgctggcagggaaactgtgttgctttgctgcaagatgtacagaaccaaagtgggcttgaaggaccgccagcagctctacaagctgatcattatccagctgctatatgacgggtacatcagcatcggcaatggcctcatgaatgaaatcaagcctcagtatgtgtgtgcaccctcggagcagctcctgcatctcatcaaactcggtagattgtgaacacaaatccatacgtcccatggcagggaatggaaaacgatgacaccagagtgcagtatgcaatcgggcgatcagatactgttgccccttgcacagggatcgacctggaattagatgcatatgttcagactatgtgcgcagaagcttctgagtacgaaacatgctatgtcacatgacatataggaccatgacgcgtaactacctatagtagagatggacagtcaatagctaccgggcctgctggtgcttcgataaaaaactcgacaccacaagatgtcgtgcaaaatggccatgccatgtcatgatgaatgagacccacaacaaatatggttccaacaacaaacaaaccctgatttgggtaaagggattcct

SEQ ID NO: 600605 - DNA, 261 bp, Homo sapiens
tagggaaaaggagtttttggttttagggttttttttttattttatggtaaggaaaaatagatatttagatataatttgttaaaaaaatgagtttttattaagaatgaaataaaaattatatttaacttctataatatatttattcaaataagttgaataatatgtttagaaaattaaagttttaaataatggtttatatatagataatgataaatttaatatatgaatttaatttaaaaaaaattttattttgaaataatt

SEQ ID NO: 600606 - DNA, 415 bp, Homo sapiens
  misc_feature (6)..(6): n is a, c, g, or t
  misc_feature (33)..(33): n is a, c, g, or t
  misc_feature (44)..(44): n is a, c, g, or t
  misc_feature (155)..(155): n is a, c, g, or t
  misc_feature (226)..(226): n is a, c, g, or t
ccttantatatatgaaatgaattattaaaattnaagtaaaaatncattttttacccccaattatttcaaattccagggtcctcccagtggctgccagccctatccccagaagcctcagggtgcaaggcaagaagtaatccgtgggacccaggcgnccgtgtctcgccctgtaatcccagcactttgggaggcagaggtctggtgaatcacttgaggtcaggggttnccagactagcctggccaacatgatgaaacctcgtctccactaaaaatacaaatattaattggatgtagtggtacatgcctgtaatcccagctactcgggaggctgaagcttgaacccggaggcagcggttgcagtgagctgagttcgtgatactgcacttccaccctgggtgagggagtgagacttcta

SEQ ID NO: 600607 - DNA, 176 bp, Homo sapiens
  misc_feature (8)..(8): n is a, c, g, or t
  misc_feature (53)..(53): n is a, c, g, or t
tgaatgtntctcctgagacaagcatcgtgatagagttcacagtcttaaaagtntgcattttcaggtggggcaaggtggctcatgcctttaatcccagcattttgggaggctaaggcagggagatggcttgagaccaggagttcaagaccagcctgggcaacatagtgagacgcccc

SEQ ID NO: 600608 - DNA, 189 bp, Homo sapiens
atcagccagacgggcattcttggtaccactgcaccaccatgcccatggcaaaaatggcgttataggaaacttctggatcagcatcactgagagaatttgcttagggtatccaggctgttgagtcgtggatttgaaacagagatgagggccagtgatacaaggtacagccctccggagtgtaggctcccc

SEQ ID NO: 600609 - DNA, 380 bp, Homo sapiens
gggagccgggagcctgaccctcatctttcttccaaacaggctcagagggtgtcctgcaccggggcctgggcaggagggaggtgcttctagttctgccaggagacaggttagctgctccccacgtcagctgggacaccccgacttttgtttaccagagaggtgcggagagacacgccctggtggcggctctcaaggctaagcgttgtactcagccccgcgtggaactcgtgtctggcacagccatgactgtggcctaacctgacgagagtacatcagcctgcatcctacccactgtgccttgtcacgccagacttgccacggttgctagagagcccaacactgtcagcatttgccttgcttcctctactgtatacctgcta

SEQ ID NO: 600610 - DNA, 212 bp, Homo sapiens
tcatgagcacggccgcgatgagtcccccagacgaggagcaaaccgtcctacatccgccggtgcagttgcggatcagcgggatgacctgcgctgcgtgcgccacaacgatcgagaaaaggctgtcccgcattgacggggtgcacgcgagtgtcaatttcgcctctgagcgggcgacggtaactggcatgggcgtcaaggatgcgatagccgct

SEQ ID NO: 600611 - DNA, 178 bp, Homo sapiens
agagcgaaactcagtctcaaaaaaaaaaaaaaaaaaaaaaaaaattttaagtttcccaattggaagtttttgtgccttgggatttttaattgggtttccgggccaataatttttcaaggttcaaaaggggaatatattgttgtccagtgtcctgattgtgtccccctccaaattccat

SEQ ID NO: 600612 - DNA, 1609 bp, Homo sapiens
  misc_feature (644)..(644): n is a, c, g, or t
tcctcctttaaacttttttaagtggggcctcaaaatctctggtgacaaatttggggccaagtggttccctataaaaaagttccgtgattttaaaaacctaattaactttaaaacgtgccacacgcaaaaaaaaaaaaccaaggtgggctccacaaaaacattctcctcctttctcctctcgtgaggggtttacgagtgcatgtgtgttatctcatttacccagtctcttttatacttcacttaacactttagagagtggcccattgtgtgcacacacaacacgagtttctctgtggagacaccgtgtctcctctcccaccacactgtgagatttagagagagtgtgggggtgtggacacgagacacagcggtgttttacacagaagtcgcgtgtgtggttcactctatttcaccccgagtctctcgtgcgcgtctccccaggctgtgtctctcgcgagacacgcgagagcctctcgggggtgtgtgatatgtgggggaccgggagagagacacacgccggtctctcgcgggagtgcccccgcgaaatcagagcgggggccgcgccccccaaacgagaacacccccgcggggtcgtgtggcagtggtagaggggctctcctccctgtgtgatctctgtagagaangtgtgggctataccctctctctcagatatttgtgacgcccagtgtgtgcgctgttgaaatttggcgcgtgctcgggtgtcgcctatgtgtgggagacccacggtgtttccaaggggcgccccgtgtgatctccccccaacgatgtgggggcccccctgtgtgtgtggtgggccccctctcgagagaagtgtggttgcagaagtctcctccatttgtggtgagcggagcgtgctgtgtgtgcgcagggagggcctttctcacacatttcgagccaccagtttctcgcgaggagggggtgggctaaacccggtggagcgcgacacgtggaaagcggcctattggagaggctttccccaatgtgttttgttcccggcgactagaaagagacactgtttttgttcgcccacatcttccccgacaatttagccccggcggaagacacactccaggggtgtaccccccgtgtggtgtgttttgactcctttgttcgtgacccagggaccccttaggggccctttcttgggggacaggggcaaccccccccaccagggccttgccccagcccgaaaaacgcgaccaaggagggatctatggagtccccccagattacataaaagggccataaaaatacccttactagcacaagttggctagcgtcacccgaaaatttagtaccccaagaaacacttctggggcgacacagtgggttgaatgacgaaccacacaagggagacaaataagatcgagcaaaaaaatatggccacaaatgggcacacgccgggtggtgtacaactggcaccgaccaccaagactatgtgtgagccacaaatcacactgtgagtaggcaatgcgtcattagtagcgaaaaagtgaagcaccccctggaacaatagcacacgaagatcatagtgtcgtaacacaaacataatagtagtgacacaccacgcagcgaagtaataacagat

SEQ ID NO: 600613 - DNA, 540 bp, Homo sapiens
acatctcaaaaacaaaatgaaacacaaagtttctcttattctggtgattttctttcattacttgtcttgcttcccttttccatatttgtattttccagatgtggggttattaccttagcagcgttttatataatttaaacttactggattcaacattataaagtgtgaagatggctaagtcatgatggccatattttgtacaaaatgctatttatatgtgaaaatgttggttttacttgacgcttattattgggtattataatttttatgtcaaagttcaggtaataaattgtgtcttactttgatttgcatttttaaattaatgagattgacatatttggatgtcgtatgttaatttgtttcctaccttttaataatttatccattttgattatttgtatgaatttcttgggtaataatgtatcttttccatatttatcgcatgtatttttttcccattctttgctgttgtttctgttttttggagcaagggacatcgatatttcttaacttttaagtggtgggaacatcaaagaaagg

SEQ ID NO: 600614 - DNA, 554 bp, Homo sapiens
gatgacatgatagatcgagctcggtaccgaattccgcggaaaagatctgggtgctgttcatggaactgatctggtgtacagctgggtgggagatcctggaaccggctctcgagtcacaggagtgctccagctgtgcgccatccctggttctggggaaggtgaggctcagctcacggagcagagctccctgcctcccggagctcctgttcccatcccgctagcaaatgcttcttggcatttctctccctttgtttttttttggtagaccaaagtgaaggagttgggaatggaccctcaaaacatgtgcgagttcggggatgtaagtacaagcacttctgcacggggtgaataaagtgtccttggccaagacatggttgttgagaggcccatgaggtcaggtcagtgtttatggagtaccttgtggaatacctagctgggggaacggtagagaggccctcagagaggcttggagggcaagagcaacccaggcaggatgagggctccatttccacctgagggcgggctgagctttgcagggccacatgacactcccc

SEQ ID NO: 600615 - DNA, 404 bp, Homo sapiens
  misc_feature (388)..(388): n is a, c, g, or t
gcaaaaaatgtgtccttgaatcgagcgagggtcaccttatgtccaccaaggatgctcgagaaggtccccaagcagcaaacttcagtcccactatttcaaactatttattctccagacggagctggttcatcatgttctcagctctcctggctgccgtgtacgtgtgcagtcactccaagtaacgtacccttttatttgaatgtatttttaaagcagtaggtaggacggcaaaggagggtgaccaccttggcgtggatggaccgtgtcacatgttcagaggggcctcctgtccgcactggaaacaccagtgtgagaaccggcacttcagaggtcgtgatagtgtagttagcaaaccggtggtcaacattgagccacacttcctaaaagnctgttgtaatgcatca

SEQ ID NO: 600616 - DNA, 385 bp, Homo sapiens
  misc_feature (12)..(12): n is a, c, g, or t
aagatcccccgnattctcaacgggtgctatatcacggcaaggtgaaattggctttccgaaagcggcgatagttatgaaggcgagttttcctatggcaggaaacacggtggcgggcacattcgtttacaaggaacccattgatggtgtcagtaaaattacggggcgttgggaatatgatcgcctcgtggatagcggtagcgacgtaaaaatctattcacccgaagaggtcgccgaatatgccctctacaaagaatccgatgagctaacacgcgcattggatgtggtacaacagtcagatgcaaagcagatcgaactatacagcctggttgttgcaggttacggcactgaagaagtattccgccgggaaagcaaattcatcgaaaac

SEQ ID NO: 600617 - DNA, 378 bp, Homo sapiens
cgggtggtgggggctccccgcccccccacccccccccccccccgtattagggcccccggggttttttgcccggggggggtttcccctggggggaccccggttaaaaaaaacccccccccgggttttgggcccccccctggggggccccccccaggggggcaaaggccccccccctttggggcccgtttggatttagttaatttgggggaaggggggccccctttttgggggcccccccccgggggttttttcggggccctttttcccccccccggggggggcccatttttttttttttttttttggccctttttttttttttgggcctgttttgggtttttttttaaaaaaaaaaaattccctttttccccccgggga

SEQ ID NO: 600618 - DNA, 424 bp, Homo sapiens
  misc_feature (424)..(424): n is a, c, g, or t
aaatggaatcttctctgtcatataacatgctttgttcatatttagttgtttaaatattatctctgctacccttctgttactaaaactcttcaacatcttaggtttttgttttgttttgagacaggctctcgctttgtcacccagcctgctgtgcagtggcgtgatctcagctcactgcattttcctcccctaccaggctcaggtgatccttccacctcagcctcccaagtagctggaactagggtgcacaccaccatgcccagctaatttttgtgtagtagagatgggctttctctgtgttgcccaagctggtcttaaatgcctggcctcaagcagtcctcctgccttggcctcccaaagtgccgggattacaagcatgagccattgtgtctggcccatctttgttcttcattgtattctttan

SEQ ID NO: 600619 - DNA, 167 bp, Homo sapiens
cactaagccgagacaaagcttaagtgactattcctctatattcctctcacatgtaaattgtgtattcagtgaaaggctaatcagagactctaaacagaatgcaacccttttgtgctcttatatatcctattaccatggtaagccgcccgtccccgtgggctgttgct

SEQ ID NO: 600620 - DNA, 541 bp, Homo sapiens
ccgtcctgaactcagtgactctttgcacatggactgttatatattcttaataatcctgtttccacttctccattctctagtggacgtagcagttttgtcgatatagttccatgtatccccatgttgtgcacattcaggatgcgacacgtctctgcccccattcccttgagatggggctgtatttagtactcacctttggcctggatctagattagagctcataccattttacattctctgtttgaatttttccaaagcagaactcactttgacccctattaagaggcaagcgctggcacatctattccctgggcctttagaaagccatgttgcctcaaatggctatagggcttgtggggtggagggaggaagggctcgtggaggcagcggggaggaattgctagctgtagtgtgacacattgtagtgtttgccaggaaaggagccagtcatgccggaaacactgacttctgggaagccacccaggtctcattcctcctgctgttggaggcaacatctataatctcgtaggagaggtacatt

SEQ ID NO: 600621 - DNA, 202 bp, Homo sapiens
ctatagcatggatgctatcaaggactgtggcccgttcagatgacgactacccctccagctcgttctcccaacttgccatcatatgaattatatgccaggtgagatattagaaaggcaggttgttggatgtgagtgctagaccttagagaaacctcttggaagacgttcttctcgaatggactatatcacctgaagtagagtg

SEQ ID NO: 600622 - DNA, 412 bp, Homo sapiens
ctattttagtctcaaaggaaaccatgtaaattcatcaagagaggtgaagattggatttgtctaaatggaggcactactaaaagtaacagctctgttaggggagtgctgacggaatctcacggggttttcccagaatgggatggagttgaagagagaagaggcaatgaaagaatagaaacaagactagagaccaacaatttccagacattttgctctaaatagggcactagagaagtggggtggtatatggggttaagagaggattctgtgatagatgatgataaagttctttgtgattattattcatgttggaatgatcttgtatttaacagggaaatgttgccgaagaaagaacagattaaccacagcaaacccttggaccagaagtagactccacagatcacccttcgtg

SEQ ID NO: 600623 - DNA, 735 bp, Homo sapiens
agcgggatgggggagttcctccttgctctcgcccctactctttctggtgttagatcgagcaaccctctaaaagcagtttagagtggtaaaaaaaaaaaaaaacacaccaaacgctcgcagccacaaaagggatgaaatttcttctggacattcctcctgcttctcccgtttactgatcgtctgctccctagagtccttcgtgaagctttttattcctaagaggagaaaatcagtcaccggcgaaatcgtgctgattaccggagcctgggcattggcacacttgggcagactgacctgcctatgaattggctaaaccttaaaagcaagcctggtcctctgggatactacaatacagcattggcactggcaggacaacagcctgccaaaatgcaagggactgggtgccaaggttcataccttgcgtggtacgactgcagcaaccgagacagatttttcacagctctgccaagaaggtgacggccagaaattgggaccatgtcagctatttaagtacaatacatgcgtggatgtcgtctactaccttcagcatcgcgctctcgctaccacaagaatcctcaagcattcgaaaagacttttcgacgttacatgtacttgcaccatttctggactaccaaaggcatttcttctcctgcacatgaccgaacgaataacccatggccataatggtacacctgtgcgtctcacggacagctggacactgtctcgggacccctc

SEQ ID NO: 600624 - DNA, 715 bp, Homo sapiens
cagtagcgaattacaccaaaatgatttactttgagattcgaataattcgcatagcagtaaaatgtgttttgtgtaacatacgacatagaaaaatgacccacgtagtcttaacttagatacttatctggcagagtatcagacattacccagcaggctcttacagaatgccataaattctttagagactaaatgattcgaagatcagattcattatgagccgtactgtttgctagatttacttgttaaaaagcttgctgaggctcagtttttaggagatatcatttatgcctgcctgttcccttatgacagtgaggccttctttgtggctccacctagtatgataactcatgggattcgtgtttacggttagatgagaagtggctcctatgaatgcctctgctcaattcttttatttactttatttatcgaaggggtctcgccaactcctgggctcgagtgatttctcctgcttccacctgccccacagtgctggggattacaggcattgagccaacacgcctggtcgtctctgttctttgcagtgtctccgtgccatcagtcagcagtgcttacattgtttagcatattgtcatgcagtttctcttctgtgcccacgagatatttttggaccataaattgacaaaagtacatgtgtttgtcccaacctatccttagaaaacctaatgtgtactggtatttttaaacaccaaaaaga

SEQ ID NO: 600625 - DNA, 373 bp, Homo sapiens
tggggcccccagtgtgaccggcaaaattggccctgacatccaggacaacaaatgcagttggttggtggttcagtgtttgcaacgggccactccagaccagtcccagatcctgaaggaaaattacgggcagaaggaggtttaaaaagtggcccgggtgaaggcgctatataaggagttggatctgccaccagtgttttttcaatatgaggaagccagttccagccccatttttgttttcattgaacagtacgcagcccccctgcccccacccgtttttttggggcttgggggcaaattttccaagcggagaaagtgccctaaagattgcaaggggggggagagggggttttcaataaataatcgtgtaccctta

SEQ ID NO: 600626 - DNA, 672 bp, Homo sapiens
  misc_feature (344)..(344): n is a, c, g, or t
tgctgtaacagtgtttattgatgatgagtccaggctcctgctgaacccctgtgtggggaggggcacaaagcgaaatggggcgtaatggaatgcttgaagtgctgctctccgtgatgtcggctcggagctttccaaactaggcaatgggcagggtagaggccctcgtggcacaacacgccggccgcccagtcacccggcccaaattgagagggcggcctggagccctgcacaggcacttgccaaaggtgtgggctctccacaaactctccacgcccacaacctcgttaacgtgaagacactctcaaagggccgattcttccaaaaaaacctccaaaccgaggtgncaaaattgcactttagagtgaccaaatttaaaaaatatcagaaaagggaacggagggaaaacacaaagaaactcgtgaggaaagagcttttgtgaaaactctctctctcgagaaaaaacagagggacacagacacagagaggaacagagactctcccagacaaaccaccaaaaaagaaagacacctagacagagagattattgaaaacaacaaagacacaaaaaagacagagagacagagtgtgagtgtgggagagacaccgaggagttacaaatcccccgatgttgaggaagagaaaacctcaaaacctctgtggagaaataaatgg

SEQ ID NO: 600627 - DNA, 283 bp, Homo sapiens
tgggtttaaaaccagtcgagttaggattagcattttcagaacagccctgaatcccagcttagaaactggaatttacaaataaatagaaaattaaatcagttttttaaaccgggatttttgaaaatcccaaaccaggttaccaaatttaaggtttatacaaaaccagagaaaatttttgacttaattttaattaaacttcatgaaggattcgattgataaatgggaaggggacaaagccttttttcagccttcccaaaagccctgaaaaatgttgagggcttta

SEQ ID NO: 600628 - DNA, 426 bp, Homo sapiens
ccccccgaccccgcgcccccaccccgcccttcgactcccaagggcctgagagacactgaaacaaaatgtccatcaaccctttcactccactttctgaacttcggtgtctacacaagtccttccaccggccaaaaccaagagcaacggctccccactcccaccccaggcccctggaatgagtaagcggactctggacaggcgctataggggtagctacagggacaggcagagatgcgcaaggaccacgctgtcgggtgaaaatgcctgtccttattgctcttccaaaggaaaaaagttttgtttttttttaaatcactatagccagaataactgctgcgggcaaagcggcgacgctttagctgctataccgcttctccggtttccagcaagctaaacacagaagcggatgggaggggaaggcggccg

SEQ ID NO: 600629 - DNA, 966 bp, Homo sapiens
  misc_feature (891)..(891): n is a, c, g, or t
tgggggggggcagggtaaaggaaggagggaggcctgccgctctctctttttgcttttgggggcgaatagggggatattttaacccgggctccttgcctgttttcacagactcggagtcgggaactctgttacaaaggaaatgattgagaaaatgaattcgagtctttgaaatacaaccttacacaaaaatcactgtcttaaagcttcaagggcaggtggaaatataactatccccagttcttcttgttcaagggaattccccctcctttattgggcatcccccaacttggagaacagggtgacacctgagctcactcgggcttagggagtctaaggggggaccacaatcatcttaagcagcccttttcctaagccttgggttcaggacagttgaggagaggcccaaagattctaacttccagtttaggtggcggggagatgtttttaaaaaggcggggttcttaagcttggcgcctggaggccaaaaatcttgttagaaaacgggtttggccttttttcttgggcgagccggcccccaaaaggagagggggggatagttttctttaattttcctggaaaaaaccaagaaaggcattgccctgggaaaaaactccttttacgcagttttgttttaaagaaagggtttcaccacactgtttgtttgcgtgttaatatcccatggttgggggtagaaagaggttggtttttgtactgtgctggaaagagatacttgggggccctcgccacattgtctctgcgaatggatgcggcagagcaattgcatgtctgttacggtggggaactccgaggggtcacctagcatcgaagggcgtgtgggtgcgggttgtggtctgttggacgagggtgagaggaatagagggacgtgctccntctgatcgcacgagggtgtgtggtcgacagtatgttgagcggttgtttgtgtcgttgttggttcggatcgcgcgg

SEQ ID NO: 600630 - DNA, 918 bp, Homo sapiens
  misc_feature (111)..(111): n is a, c, g, or t
  misc_feature (165)..(165): n is a, c, g, or t
  misc_feature (176)..(176): n is a, c, g, or t
gcttcgtgacagagtaatagccatcataatcggaggcttgggaacctgtctaggtaaggaccagatctacaacgttatcgtcacagcccatgctttggtaataatcttctncatagtagatacccatcataatcggaggcttaggcaacatgactagattccccntaataatcggngcccgcgatatggcgtcgccccgagataaacgaacgtaagcttgtgactcttacctcccttctctccgtagctcctgctgcgcgatctgcttatagtggtaggtccggagcaggacacaggttggaacagctctgaccctcccttagcaggggaactgacagagatagagaaacacaaacaaaaagtaaaaagagaatataaaaaggaataaatacagaaaaaaataaaaagaagagatggtgtgcgtggtttgggtagggggataggagcatgccgacattaactgtggctactccatgcagggtattctgcaagtatggtttttatgaagtctttaaagtctggtatacgcaatatagtgggagaggagaatacttatctctgggcacatcagtatatttggttgactcttgcagttggtgaattctttgctgacattggcctggtcctatggaaagctgcctaaaggttcgaattcaaaccagacaggttatggccaacacttggagggatgcagtcccacaaggtataaggagaaggctaaaagcatactcaaaagaggtagccctctccggagaacaggtaacctacccaagaagaagatgcctggttggacgacgggaagcgggcagtggggccaaaccccgcaggaagcaaagccagcaacgtgcactgggccggcacacgggtggcgcaggcccacgcaacgggaacggcaacaaacgtggccccgccagaaaa

SEQ ID NO: 600631 - DNA, 508 bp, Homo sapiens
taagcagtgatgtccaagctgatgctcgaatattcaacattacgccccgcgcctggatattatggaaatttggagacaaccaaaaatagcagatgatgtagctacatagcctaaacattccaacacaaacaacctactttaagtagaactacttttagcccaaactccaaaagcccacaacagctcagtcttcaccacttgacttatagctctacaatgctgacagggctcacgcaagtaacagccttcatagcagggaacaaccatcgcgagaaccactcatattgtgcaccttttgataagctagcgtcccaaatactttcaagtttcccagtcttcccattcctccaccccataacgcacactacacgcgtcccacccgacatacgaacagccggcacacccacaccagatcgttcacgaccgaacaaaagacacggaccagaaacgatgcgcagacgaaaccaaggccactacacggacatgcgcaggaccagcaccaacacca

SEQ ID NO: 600632 - DNA, 1008 bp, Homo sapiens
  misc_feature (18)..(19): n is a, c, g, or t
  misc_feature (25)..(25): n is a, c, g, or t
  misc_feature (62)..(62): n is a, c, g, or t
  misc_feature (238)..(238): n is a, c, g, or t
  misc_feature (242)..(242): n is a, c, g, or t
  misc_feature (260)..(260): n is a, c, g, or t
  misc_feature (405)..(405): n is a, c, g, or t
  misc_feature (445)..(445): n is a, c, g, or t
  misc_feature (461)..(461): n is a, c, g, or t
  misc_feature (466)..(466): n is a, c, g, or t
  misc_feature (505)..(505): n is a, c, g, or t
  misc_feature (507)..(507): n is a, c, g, or t
  misc_feature (544)..(544): n is a, c, g, or t
  misc_feature (553)..(553): n is a, c, g, or t
  misc_feature (555)..(555): n is a, c, g, or t
  misc_feature (567)..(567): n is a, c, g, or t
  misc_feature (586)..(586): n is a, c, g, or t
  misc_feature (592)..(592): n is a, c, g, or t
  misc_feature (594)..(594): n is a, c, g, or t
  misc_feature (597)..(597): n is a, c, g, or t
  misc_feature (604)..(604): n is a, c, g, or t
  misc_feature (615)..(615): n is a, c, g, or t
  misc_feature (624)..(624): n is a, c, g, or t
  misc_feature (627)..(627): n is a, c, g, or t
  misc_feature (629)..(630): n is a, c, g, or t
  misc_feature (648)..(648): n is a, c, g, or t
  misc_feature (654)..(654): n is a, c, g, or t
  misc_feature (669)..(669): n is a, c, g, or t
  misc_feature (671)..(671): n is a, c, g, or t
  misc_feature (702)..(702): n is a, c, g, or t
  misc_feature (720)..(720): n is a, c, g, or t
  misc_feature (725)..(725): n is a, c, g, or t
  misc_feature (735)..(735): n is a, c, g, or t
  misc_feature (801)..(801): n is a, c, g, or t
  misc_feature (805)..(805): n is a, c, g, or t
  misc_feature (821)..(821): n is a, c, g, or t
  misc_feature (872)..(872): n is a, c, g, or t
  misc_feature (885)..(885): n is a, c, g, or t
  misc_feature (977)..(977): n is a, c, g, or t
aattgttcaaatttttanntttaantgcacagtatgagaaatgaacttttttaaatcaactnatttgtatggaaaatgacacggcaaataaattagacctatgttaaagcgaaggtcagctaaatatccaaacttaaggatataatgggcaccgataaacagattccacagtcttctttaatagagtatctttcaaacacaactttgctagaaactggtccaaagatcgacagcacgngggnatgcttaacagggggggngatcagggacacgtttcctgggggccgctttgatgatgttgtccacacgcagaatcacctctgctgcttcagctgcactcagaagaacctgtcgcttcacttgaaaactttctgttatacccaggatagccatatctccaatggngccttccctcatatccaatccagcagtggtattgccttcnctgggggcagccctgngctgngccaccaggtctgcactgtcatagcctgcattgtcagcnanggtggttggcaacattctcagtgctttagcataagantccattgcnanagcttctttgcntggtgttctattggcaagntgtgtnanagnatgagcnatcaacatctnagaaaagcntcntnnataaaatgttctagagtnctttanagtttgcgcaagaananaaagagcatcatgcaatgatctttctgcttnatctaaaatttgttgagnggcancacgcaaaanaatggtacaagcctcaccaagggcaaccccagaaaagtgaatgagtttgtcttctccaatcatganttcntcgataagtttgcaanttccaagcttcaccagttctgggtgatcaaaggtagaggcaatttcaccanctgtgaaaagagntaggcgttccacacctgcaaaatctgcatgctcaatagccatgacaacagcagcaccaaagagctgttcaggataattataaattaattgcntgtaaataaagcaatttattccatgctttag

SEQ ID NO: 600633 - DNA, 842 bp, Homo sapiens
tggaaacagagtcttactctgtacacccaggcgggagtgcaagggcgtgatctcagctcactgcaacaccgcctcccgggttcaagcgatttttcctgcctcagcctcctgagtagctgggattacagacgcagccaccatgcccggttaattttggtatttttagtagagacaaggtttccccatatgggccaggctggtcttgaactcctgaccttgtgatccgcccgccttgacctcccaaagtgctgggatgacaggcgtgatccaccgtgcccagccgggaaaatccattttttgaaaataaatcaattatgtcttgaatgtactcagaaaacgagctgtttaaaatgtcccatggtgactgtatatgtgaacaaggacctctaatctggtatttaattgggcaaggatgggggatgtgcatcaaatcttcacctcggggattcctgaggctgggtctactgggtcaccctcaacaccgaatacccaccccactcctagattattaactacaaatttagccttgacaccgcctactgctccaccaccgcatacgtgttagggcactacagaaacctgggagtaacaacacgcgaaggcaatgacatgggcgaggctggttaaaaaatcactgatcaaaaccccccagttaagtagccatgtggccgcaacagacggaggccccatgaaccacagggtgtggcgcatgaagccgaaaaaaggctgaccacggcggagactgccggctccaccgtcgagtccggcggagcagaccaccagcggcacggcacgaggtgaggccccgccacaatagcggtgcccggactccacacgacgac

SEQ ID NO: 600634 - DNA, 264 bp, Homo sapiens
tgacaccgcacgctacgtctgtagctaacctagcccaaactcataaccttgagtacactcatgagaacaatgccagacaaatacccaatatgagaaacatcctggcaaatttctgattagtacttcttaaaaactaaaacatcatcaaaaacaagacaactcttgagaaactgtaacaggcaaagaggaacctacagccacaaggccactcaacatgtaatgtgggtatctgcgatggagattcctggaaccagacaaaagggg

SEQ ID NO: 600635 - DNA, 174 bp, Homo sapiens
acacttcggagctgagggagtgatcgctgaggtaggagttgagatcagctggacatgtgaaatctcgctctactaaaaacacgaaagtagctggtgtgtggtgggtgctatagtctcagctactcaggagtctgaggcaggagaatcgcttgaacccaggaggtggaagtttca

SEQ ID NO: 600636 - DNA, 111 bp, Homo sapiens
cgactctagcaggatccccccagttcctgcttcttgaaaatgtccgtgtctaagtggctatcctagagcgtgcggtaccactgtcccaactactcctcatcactcctagtt

SEQ ID NO: 600637 - DNA, 281 bp, Homo sapiens
tgttaccaatctgcctatccaagttcaggatcacaggtggctgcagcgtattgcagcagttcagggtacaaggcaggaaccaaccatggacaggatgccattccatcataggctttgctcatacacacacacactcactcagattgggacaatttagacacatcaattaacctaacgcacacatctttgggatgttggaggaaattggagtacatggagaaaacccatgcagacacggggaaaactaacaaactccatatagagtggccttcggtgggaat

SEQ ID NO: 600638 - DNA, 208 bp, Homo sapiens
ggttctctaaaaccagcatcgagatgtagtttcctgagcatgagggctccagcagtgagccttcacttaacttaagggaccttggattatctgactaaaattggacgattgatcagctggtagacaatctacttcctggattttgtaagggcaaaacattctcccattggcatacatccatgtctctgcacatccttctttgaaaata

SEQ ID NO: 600639 - DNA, 1276 bp, Homo sapiens
gcttcgctgggtagtattgggacccgtcgggtccggggctctccggagcgggcctagacttggaggaaagactggcgagtgtctccggcgcagtggagcaggcatcacggccgggagccatgagttaccagtcagagggtctagttcgatcgtggagcccggctagccggcgccatgtttgcccataatacggatgtaaaagtgtcctgtcggcgcgttctcctgggtagtatctaccgatttgtgatcccgctttctgctatgatcgtgacagcgtcagtatagcaagaactttgactagctcttacttgagagaacatgacgatgggttcgtaccagtaggatgatgattgattgatgacgaaaacacggaattgacctgaaatggacgacctgcacgtaactggaagaagatcggtggatggctcgacaagtttgctgctgcgcttccgctatacagccagaacatggctcaggaggaacggcccctcagggctccacagatctcgtgtggaagtcttacctagtatgggtccgatgaccgatattgccactcccagggctcctgggagtgctcccctgatgagtgtgctcgtaccagctaagcacatgcacatgacacaagcaagtcgagcatttacctggaattaacagtaagtgaagtattcaagagagaagaagtgtcataccatcttctgaggtaatagattgccgcggggtgggggcccacacaggtgggaaagaccacacaagagccataatgggggcaacgatcggacccgggcaaccagaggaacgccaagtggcccggttgggggacagacgcggggaaagcatctcggcgccggggggccgccgaacaaacggagaggcgcgaattcaacttccacgaggagccggagttgacccgggctgagagcaatcagagcagcgagaacaaaacacagggggagtgagaaggatatcgattacccacgacgtctccccgggccccggtggtcacaaactaacacgaggacgagacacagacatcaacgaaagagacagatgcgcaggggaggaagagaaaacagagggggaactagcgagcccccaccgggaggaggaaaacgacgcccaccggagacatctgggcaccaccgcagacccaccaacgaggaccaacggtaagaggtagaaagtgaggaccaacgcgacagcaaggacacagaagcccaccacgacgaaccaaggcgcacgggggagaacgacccgctcgacacaaacacaacaaggc

SEQ ID NO: 600640 - DNA, 423 bp, Homo sapiens
tggctcatgcctgtaatcccagcactttgggaggcccaggcaggcggatcatgaggtcaggagttcaagaccagcctggccaatatggtgaaaccccgtctctaccaaaaatataaaaattagccgggtgtggtggtgggtgcctgtagtcccagctactcaggaggctgaggcagaagaattgcttgaacccaggaggcagaggttgcagtgagccaagatcgtgccactcgccactgctctccagcttgggcgacagagcaagactccgtctcatgaagttcatcttattaatttttttttgtcatttaggcttttgctattctgtttaagaaatcttggagccgggtgctgtggctcacacctgtaatcccagcactttgggaggctgaggtgggcggatcacgaggtcaggagttcgag

SEQ ID NO: 600641 - DNA, 398 bp, Homo sapiens
  misc_feature (28)..(28): n is a, c, g, or t
  misc_feature (31)..(31): n is a, c, g, or t
  misc_feature (34)..(35): n is a, c, g, or t
  misc_feature (37)..(37): n is a, c, g, or t
  misc_feature (40)..(40): n is a, c, g, or t
  misc_feature (43)..(43): n is a, c, g, or t
  misc_feature (74)..(74): n is a, c, g, or t
  misc_feature (79)..(79): n is a, c, g, or t
  misc_feature (85)..(85): n is a, c, g, or t
  misc_feature (88)..(88): n is a, c, g, or t
  misc_feature (94)..(95): n is a, c, g, or t
  misc_feature (100)..(101): n is a, c, g, or t
  misc_feature (268)..(268): n is a, c, g, or t
  misc_feature (272)..(273): n is a, c, g, or t
  misc_feature (277)..(277): n is a, c, g, or t
  misc_feature (293)..(293): n is a, c, g, or t
  misc_feature (298)..(299): n is a, c, g, or t
  misc_feature (333)..(333): n is a, c, g, or t
  misc_feature (336)..(336): n is a, c, g, or t
ttgtatggtctgacgtgtactcatgatnggngcnnanagnagnttacggcaacttgaattgacgggtcgcttgnattgncgggtncgnatcggnncaccnnctgtgaaaccacaggcaacgcccagccctggctatgaactcctacaaatgggaccattctcgagcgcgtgacgggggcacgctcgtttgccgtcgaggcgcttagttggagttggccggtgcgcacgcaggccgcggagggtacccgtggtcacacctgaccgccgngggnnctcntccggacccgtcaatncaagnngccgttaacagctgtatacctactctcaggcggncgnacgtgctagctacatgtgggccctttaacgcccatatgagtgacgatattcttaactcaggt

SEQ ID NO: 600642 - DNA, 215 bp, Homo sapiens
acggacgcatcatttgttatgtatcagtagtcatcaggagcaggtgtgaaatttctcccattctttatttgctgttcactctgatggtagtttcttttgctgctgagaacgtcttgagtttaattagattccatttgtcaattttggcttttgttgccattgcttttggtgtattggacataaagtccttgtccatgcctatgtcctgaatgcgt

SEQ ID NO: 600643 - DNA, 247 bp, Homo sapiens
ttcccccttttttttccccataaaaaacccgggggcggtccaccccccgggttttttgcttgggccgcggggggggttacttttttcccccgggaaccgttttgccccttgggccttttttggggccccttttgacccggtttgtcccaaaaagccggttgggcccggtccggttttcccggggtttttttgccccccgggtccccccccgggtccccgggcgggtgggtttaattttggattccca

SEQ ID NO: 600644 - DNA, 334 bp, Homo sapiens
gtcgacctgggatctgatgagttggaaggaagacagttatggtggtgaataaagatacacagccaagtgcagtggctcattcctgtaatcccagaacttttgaggccaaggctggaggactgcttgaggcaaagacttccagaccagcctgggaaacatagggaaactccacctctataaaaaataaaaaatctagcctggtgtggtggtgcatgcctgtagtcccagctacttgggaggctgaggtgagaggattgcttgggcctgggaggtcaatgaacagtgagccgtgatcatactactgcacttcagcttgggtgacagagcgtcgacg

SEQ ID NO: 600645 - DNA, 530 bp, Homo sapiens
ggtaaactaatcattttattatatataaaaatataaatgtctttattaatattttattatatctaaaacactgtccatgcatttattaatcttttaaattaatgtaagagataggaagaggccaggtgtagtggctcatgcctgtaatcctagcactttgagagaccgagataggcggattgcttgagcccaggagtttgagggcagcctgggaaacatggctaaatccgtgttcaaaaaatacaaaaattagctaggcatggtggcgtgcacctatagtcccagctattcaggaggctgaggtgggaggattgcttgagcccagcaggttgaggctgtggtgatttgtgattgcgccaccactgcactccagcctgggcaacagagtgagaccctgtctcaaaaaaaaaaaaaaaaaaaaaaggagagaagaaaataaagaaggctaatatataatttttcttaatagctgagttgtgattcattttaccattatattcagaattgaccttaatttgttttccagaatc

SEQ ID NO: 600646 - DNA, 109 bp, Homo sapiens
cccaggaacgctcagcctgaccttgccaggtgacaataatgcctccagcaagggctacggcggcgccgatgcgttgcttccagataagacggttggtgagggcagggcg

SEQ ID NO: 600647 - DNA, 139 bp, Homo sapiens
cttcacaacgctatacttcctcaacgctttatactccctctacgcttatacttcctacaaaaacatacaagcaggaaagcgtggagaagtataaagcgtggagaagtataaagcgtggaggaagtataaaggcgtggag

SEQ ID NO: 600648 - DNA, 147 bp, Homo sapiens
gctacgagggagacataacggaatgctccaaatgggtggcgtaggaactgatggtcccatcctcatatctcttgactaacaccaagtccacaaaatctcgtggagagtaaatgagtcttcatggcatgcggagaggagatggaggat

SEQ ID NO: 600649 - DNA, 310 bp, Homo sapiens
gatactaactagtatggataacggggtgtaggtgtgcttgtggtatgaagtgggctagggcattttaatcttagagcgaaagcttatatcactgcgcccgtcataaggggatggccatggttaggtttatagatagttgggtggttggtgtaaatgagtgaggcaggagtccgaggaggtaagttgtggcaataaaaatgattaaggatactaagtataagagatcaggttcgtcctttagtgttgtgtatggttatcattagtatagaggtaagtaagattagtaaatcgtgagtacgtaatgtgagaa

SEQ ID NO: 600650 - DNA, 292 bp, Homo sapiens
tgatgaggatctgacagtccggggatgcgtcttccaggcctccccatcagcgtagggatgccttcctctaggtcctttaggaggtgatagtcatcgcgtgtccgaggtgtcatacacacaggtagttggcgaacatactcctgaggaccccgcacggtgctccagaccacgactcgatgacggcgcacgggacgactgcggagcacgcctctagactgggactttcctgtctgcgtctttcatccatgattggacgggatgtcggaactagacgtctgacgaacgcacgaca

SEQ ID NO: 600651 - DNA, 384 bp, Homo sapiens
  misc_feature (3)..(4): n is a, c, g, or t
  misc_feature (6)..(6): n is a, c, g, or t
  misc_feature (149)..(149): n is a, c, g, or t
  misc_feature (195)..(195): n is a, c, g, or t
  misc_feature (279)..(279): n is a, c, g, or t
cannantcgggccactgcactccagccatgggcaacagagcgagactccgtctcagacaaaaaccaaaaaaccataaaacaccgtggggcgcccaggctccaccatggcgtctctgcagccacctgggccatgggtggcacaggccagntgttcccgtctgcgctcagaaccgtcccaccatcgtgcacagtgtntgcatacagaggctgagaatactcaaatgtccactgtaggaggacggagcaagtgcatcagccccgggacgatgcccaggtggngaggacgtaccccaccacgtggccatggcaaggcagtgtgactgggccccgcgttctgggtgctgcatgctgggcatggctggcgatggggccagggttgggctt

SEQ ID NO: 600652 - DNA, 1045 bp, Homo sapiens
  misc_feature (704)..(704): n is a, c, g, or t
atttaccatctcacttctagagaactactagtatatcgctcactagcctcatatcctgccctactatgcctcagaaggaatggttactattcgctgttcgttatagctactctcatagccctcaaccacccacgtcccttctgttagccaatgagttgtgcctatgtgccagtactagtctttgccgccctgcggaagcagcgggtgggcctagcgccatacgtgagtcgtcagatctccagagcacgatatggccctagacgtacgtagcaatggaccctagacctagcatccagatgctaaaaactaaatcagtccacacacaaagttagtatttacatactccaccttgacgattcgactcttcgcgaaaacacaacgagcaagtagattttgacatccaagcaactagacgcaccctcgacgaggccttgacatgccatctaagcggatcaatccccttgctacttaattttttttaacccaacaatcgaaacaatccaaaccctatttaggcctggtgtcccccccaaaggccgttttctctctgccggacacccccgcttaaaggaaacccctcccgttccggtgagagttacgttaagacgtcacccgtgggaggttgctataaccccaatccaacgaagttgcgatgaggcgaaggccaaaacggcgccagcgttgtattgccggggtgaaaggcnactttaatctccgttcatgagaaaatagcttcttaagcaatcttcgtagttaacttaaattcggtcgcccttggactaagattccgtccttgtcatagtttatttgaaacctagtttcaagcaagccccagcggagaaacctaatggtccactagtatgtgtgcatgattcttatacataacgggagagtggcatacaacgttttattccccgcgaccgtttggggcgtaattcaattccagccccgaatggaaggcgcaaaaatcaaggtccgaagacacccgaccgtggaaaacgccgaggggcgcctattccttgtcccataatttccttagaaaacg

SEQ ID NO: 600653 - DNA, 219 bp, Homo sapiens
gataaatcccaaattagtttgggtagcaggatcttctgtattggtatgaactggagcctgctggtgtaaatattttctcgacccggggctgctcgggcccctgcacagcacaggctgcggctgcagctgctgggcggcgccggcggttctttgttccggtggctaaggtcttcatctgggccggccggacagcagccggggcccacagcagcggaacca

SEQ ID NO: 600654 - DNA, 880 bp, Homo sapiens
  misc_feature (377)..(377): n is a, c, g, or t
gtgcgaacaccaatcggacgtggagtggtgaccggtacctcgattgtcagtgtgcgatccttctgggtagatcagtgacttcgactgtgagttactaatagaaggagtgactacacagtaccatagcgtcgtcaaagcgatttctattgtccatggtcgtcgaacttattgacccgggatctcatagagcgtgtggtacctagggcgagttgcagcgtgtttccagggaaatggcacggacgattgcctgtgggagtacgtgtagcatccacgtgtctatgtgtattgccctgccagaggattcgggtgtgcgctcattgtgggtgctatctcttgcacatgtctcctctctagtcacaaaacgctcttaacattantcccctgagttgaaggttcagagagggggagactacagtactcctctgagtgagaaccttgaacatacctatgtattgtacatgtgctgtgaatacgtactatgttgcgtatctttgcacgttatatgtatgtcgatgccatgtaattctgttcttcaactaacctacgttggagcagcttacatggggcgttacacaaagagggttaaccctccatgtaccgaacgagcaaattatccgtgcaaaaagcttggctcgccgaagggttccccacggtgcttaactcatgcttaggggcatcatggtctcaaaaaatattgtgcctaattttttgcgaccttttgctggtcctgttaaatcttggagtgggtctcttggaaagtttggtggccgcggttggagggcacctcaatccctttaaccaagtttcgacggaaagaattcccctccgggtggggtctgcgactgtgcgtcggtagcaaccccgtatgtggcggaagaac

SEQ ID NO: 600655 - DNA, 272 bp, Homo sapiens
  misc_feature (68)..(68): n is a, c, g, or t
  misc_feature (205)..(205): n is a, c, g, or t
gatctcacgatatgtacaatctatctgataactaactgtgctgagaatagtaggctcacagtactgtnagagaggaataaatactgagcaaggctgcaggaagatgtgtgcttttgtgagcagcgtaacacgggagcctgcctggcagcagggtttttcaaagacaaaccttgggaggaagagaaagaagtggagaagagcaganccccttttccctgcaggtatcccctggagctccagaggacagagggcagctgcgggcttaagtgata

SEQ ID NO: 600656 - DNA, 119 bp, Homo sapiens
taccctcacaagacctgacctctccttcataaattatacttcctacactattaaagtttaccacaaccaccaccccatcatactctttcacccaccacagctatcgctggcccccaacg

SEQ ID NO: 600657 - DNA, 442 bp, Homo sapiens
tcatagtgtccaaagagcggtccctctctagactatcagctagatcctcaagcagatgcagagggatctgctgggcaattcaaagttgagctaacattctatgctgggcaaggagatatcagcagactcggtagatttgtcgcctgtcaccataaatgctcccagtattatgctacatagacgagtgaggtctttaaatgctctgaagtagctagtcatgaccacaggagtattagcttgcactgtccttacaaagttatctctaggaatctcaccatacagcaggtatatgggttagtccaggttataaacgtcgtgataatggcatctcatcgatcccagttggtaatatctatatcgcgacaggtttcgacatcaattgcgtatactgcagttacagaaacgggccgggtatggtcgtcaggtagtaagttggagagag

SEQ ID NO: 600658 - DNA, 354 bp, Homo sapiens
cgcggagcacctgtgatctatacacaatggaatcgacttaatgtgagataacttcaaacaaagaaatgggccatggagggtagagacccttgagacttgaaaaaaggtggacccaaaaaaggcccacaatgagctggatttaaggtgaaattaaaggaaaaagaagggcccttgaaaccaaaagaagaaccaggtccgcccccaaaaccaaaacctgggtgcccaccaaggttttgcttgcacattaatgggaaatacacttgttttaacttggccagttgtttttcccattccaacttttattgggaaaggaaggggggttccagggccaaaacagaaaacaagggggtttgc

SEQ ID NO: 600659 - DNA, 588 bp, Homo sapiens
cgtgacaggttgctcattgtgtgatccaggctgaagtgcagagtgataatcatgtttgactacagccttgaactcctgggttcaagcgatcttcccacctcacagcctcccaagcagctaggagtacaggtgcacaccaccatgtccggctaatttttaaattttttgtagagacagggttgcactttgttgcccaagctggtctcgaactcctgacatcaggtgatccacctgcctcggcctccgaaggtgctgggattacaggcgtgagccaccatgcctggctggttttgaagaagcaagccacatgagttccacagtttgcatggaaataaattctgccaacaaacatgtgaggttgggagaagaccccaagcctcatatgagacactaattccagccaacaccttgatcacaaccttgtaagtacctaagcagagggccagctaaactgcaccccagacccctgaccacaggacaggagattaatagatggatgattaagctgctaaattgtgttgattcgtatgcagcttagaaatgaatacatcatccattttacaaatctaagctatcacaccatcgatt

SEQ ID NO: 600660 - DNA, 125 bp, Homo sapiens
tacgggtgaggtacagtctacgtggtgagtgtacagctacgggatgaggtacagctgccttgatgtgtgactgaccaggcaacgatttgttcctggcccttcctctttgtagacttgtaagaacc

SEQ ID NO: 600661 - DNA, 803 bp, Homo sapiens
atggcgccttcctctgtccttcctgctctttcttctctgcccagtgcctgctgcagctgcacatgcctctgctacacctgggctgcctgggagtgcttcctgtgtgtggtgtctggaccccacgtgccttgtgtgtcatcactgtgtgcattggtcttggggtgtggggtgtcttgtttgttgtgtctcttccagctggttgtcatgttgtgccttgaatgtccctctgctattttgtgtgtggtgtgtgtgtgtctcttcaacccccatgtgccacattatgtggccaggtggtagagggttcccatctattgtctgtggcaggtgctgatgtggctggggattgctctgtagaccccatgcttggagcccacacctaagagggcttggcaatccagcatcaatttcaccctgcagttgaaggtgaaagatgtgccaccaagtgttggcatgcaacatgccacagcccgtatccccagctgtcaagagacgtgatgtggcacaggctggggtagctcaggcaggccagtctcttgagcctggtggctcctatccagtgagcttgagaatccaagcctgttctccagtcttcctttgccttgcctggggtagctcagttgccccaatgcagaggcaccggtggatcaggggggtccacttgtggctcttggccctacacttaagggaaagcatttcttccccagtgtctctttgtaggtgggtccccagagttggcgacccttgccgtttgccagcgggttctgctgccggagtggtccttctgctgaccccttggtgctgtg

SEQ ID NO: 600662 - DNA, 143 bp, Homo sapiens
tagtacatctgcaatggattgtgtgaggaactgctccagtttcctgatcaatagtaataagccgacctatagctctgagcccaataagttgaaggcgccgcacttccttccggtacaacggactgatacaccgcaagactgtg

SEQ ID NO: 600663 - DNA, 1168 bp, Homo sapiens
  misc_feature (351)..(351): n is a, c, g, or t
actcctagccttactaccagcacaaccgttagtccaacaccatttacccgaaattaaagtataggcgactagaacattgaacacctggccgcagtagtatataagtaccgacacagggaacagatgaacaaattatgaaccaagcataacatagccaaggtactaacccctataccttctgcataatgtaattaatctagaaataactttgcaaggaagagccaaagctaagacccccgaaaccatgacgagctatcctaagaacagctaatcagagcacacccgtctattgtagcaaaatagtgggagagattgtatacggtagacggcgacaaacctactcgagcctgngtgatcagcgtgtgttgtccaacgatcaagtacactctttagttcacaccttgtagcattctgcccacgaggaaccctctaaatccccttgtagaatttaactgttagtccaaagcaggagacagcctctttggacactaggcaaagagaactcttgtagagagaggtatcaagaatttaactacccatagtaggcctagaagcaggcaccagattacgaaccgcgttcgaaggctcaagcaacgcactagcgctaagaagaatccgcaaacgttataactgaactcctcacagccaatgggatgcaatctatcaccctatagcaagtaactgaatgttagtataagtaacatgaaagacttcgtcctccgcagtaagcctggcgtcagatttaaagacactggaactgacagattaagccagccccagtatcttacaatccaaccacaagtcattatttaccctccacgtgtcaaacccagcacaaggcatgcccataagggaaaggttcaaaaacggtaaacaggaatccggaaaatttttccccggacgtgtttaccgaaaaaattaccctttgacatcaccaggaatagagggacacgcgtgccaagtagacgttttaacggccccagaatccctaacggccaaagggggacaatacaaggcccaaaagggcacgaaaaaagaccccaggagcgagcccattattaacggaaagacgcccccaagggagaacaaaaaaagacaggcaatttatagagcaacacacaccaaaacaacacagggggggagaaacaacactacatacaacgacaga

SEQ ID NO: 600664 - DNA, 407 bp, Homo sapiens
ctacccttccggtcttccagggtttgtactacagagcagaattggctacggccgctccgatgtgataggtgaatctctggaccggatccagaagtcttggaactcatcctgaccctgctacctgcaaatccacgccagttacctcatccatatacaaaagaagacatggtttcgtcctcctgaatgaggtcagagggctataggaatgacagacggccatgtatggacatgctctctaaagtagacagtgagctggacgggtggaatggcccccgcccatgtctttgacggacaagccagtgcagtgacaaacagggcgtgtgtgcactgtctgtgtgacatatgtggcacgtgttgcattggacagagacggtctatgaccctcatgaccgtgtgtacctgaatgt

SEQ ID NO: 600665 - DNA, 198 bp, Homo sapiens
agaggcctgccaccacacccgactaattttcgtatttttagtagagacggggtttctccatgttggccaggctgttcttgaactcctgacctcaagtgctcacctgcgttggcttccaaagtgctgggatacaggagtgagcactgcgcttgctgatccagcacttttaaaatgatgcgctaaaggcgtacttggctt

SEQ ID NO: 600666 - DNA, 110 bp, Homo sapiens
cccactgttacagccttgaggtaaatataactttttcccagaaaagcttcctagcaccccagaggcagctacaatagctgcatctgagcgcataggcttagtactctgta

SEQ ID NO: 600667 - DNA, 116 bp, Homo sapiens
  misc_feature (88)..(88): n is a, c, g, or t
acttgcttcagcctcccaaagttctgggattaacaggtgcgagccactgcagccagcctatatttaactatatgttttttttcttttnggctaaaatttttcagattagtttacaa

SEQ ID NO: 600668 - DNA, 1462 bp, Homo sapiens
tcaagaatttggtttaatttaattatgggctagaaagacagggtgttatagccaaaatcgggcaatggacactaagaagaaatcctacggggtcttgttcaatatggcagaattattatttgcttcccaaggatgttggccctgggtggtggatcttccaagatgttcatggtgtaacttcctttacggtggagaacttctcctgtttctcttatagtgtgggtggatattctcgtgtgagaagacgccggtggcgccatgtgaacagagctgtgtgcctataaggtttgtggcgcgcagggtgacactctccttgtgaaagtgttctctgtggcaagatagagcgtagtgttacactctgtgtggcgcgtggccaaagtggagcccaggcgagagatccccattcgcgtggagcgaggggcggagcgtgagtggagtgaggtatgagaaaagacagtatgtgtggacacgaaggctccccacacccctcgagggggaacagcgccggggaggacgtctctctccctctgcggagcctcggtgggagcaggacgatgcgcatattattctctctcgcgtgagcgtgggcgagacagacgcctgctggctgctgagaaataccgtggaagatgtgtattcgcgtggcgtgagcgtgaagagagagattacaacatagagattatatctccgctacaagggtgatatagtgggatgagtagaggagtaaatatataagacgccgatcaatatcacttgcggtgggaggagcattaccactactatcgtacaatagttcgccgaacctctccggtgggctcccccaaacttcacaggggcaaaactcagtggtggtaagaaatatattctttatacccccaccacaaaatggggaacatgtgggcagttggcttggggggccaaaggagggtgtgctggagacgacaacaatatctacgacggggtgtattaacatctaccgggggggcaaaacacaacgggtgttggaaacgaattcaccattatattctacaacaaagatgttacgcccccacacaattataaggggaacaatctttggacatcccacgcaagtggtgttggaaaattttaattaaactgttaccaaaagatgggggacacgcattttcttttcaagacacctgtggctaacgctcccaacacggcgggtggaacaacatctcgaggcacatagatacagccaacaggggggcctaccaagggggcgaaaaacgaccaactcccatcttatgtacctatatgacaaaaagagttccccccaagacacggctaacagaacgagaccacggtcctagcggaaaggcccttataagatggagaaaagaagaaaatcctgatgggcgcagaagtgatagagggggagcacaacaaccagcgtcgacaccggaagagacgatcactcaaacggagactacacaggaga

SEQ ID NO: 600669 - DNA, 148 bp, Homo sapiens
  misc_feature (54)..(54): n is a, c, g, or t
tttttctgcctttagggtagtacagctggcatttgttttatagactcttgtctntggaattaggggtatggtttttttttttcaatctgttatatgttctgtgtttaatgaagaaaacctatttattaatgaaaaatataatacatat

SEQ ID NO: 600670 - DNA, 85 bp, Homo sapiens
cctagcctacatggctccctgtttgttgttaaaaacttttgttttttggggttttttttttctgaattacaacaatgattctact

SEQ ID NO: 600671 - DNA, 358 bp, Homo sapiens
tttttgagacaaggtacttgctccgtcacccaggctggaatacagtggcacaataacagctcactgtagtgacctccagactcaactgatctttccacctcagcctcccaagtagctagggccatagctgtgcgcatgccaccatgcctggctaattttttattttttatagagacagggtctccttatgttagccaggttggtctcaaacacctgggttcaaatgattctcctgcctcagcctcctgaaatgctaggactacaagcatgagccaccacacccagccaacagagtcttttgggtatccattaggattcttatattatctagctcctatttacatttgctatgtcgacg

SEQ ID NO: 600672 - DNA, 458 bp, Homo sapiens
atcgagggtctgtcctgttcgggcttctgctcgtcctggcgtgtcttctgccattcaggtcattgcttgcaatgctctgactgtcctaccccggttgctgattgtcctactgccgtcaattgttcatcttattttgatgcgtgtctcattaccataagctgggttacatagctgtatgacaagtgttggacacttcgagcattgcaatttcaacgacgtcacaatccgcttgaggtcaaatgagctatcgtactactgctgcaagaaggacctgtgttactttaacgaccagtcttgaagctggtgggacatccttatcagagaagacagttcttctggtggtgactccttttctggcagcagcctggagccttcatccctgtgtcgacaccaggagagcttctcccagactccccgttcctgcgtattccgctttctcttgctgccacattctatag

SEQ ID NO: 600673 - DNA, 96 bp, Homo sapiens
taagagtgacaaaaagtttattctgtgcttctcgcagcataaggcaggggataaaactggagagagggccgggtgtggaggtggagtggaggacgg

SEQ ID NO: 600674 - DNA, 678 bp, Homo sapiens
gacatactccatagatattaatggctatattctgtgtatcctgttacatcaatcaaaagtttggaagtgattaaagttatccatggcaaatagtaggatatggtggggacaagtgacaaatacctattatgttggtctgggaataagaaagaccgtgcagtatggaacagggtgatcagttatgacatgaacgggaatagtcgttggacagagatcttggagatgcagcgttttgtggaatctgtctgtcgtaagagaagatatcagatctgcatgtggatgttgtgtcgaaggattaatttcggaggttagaataataggattggacgggggcagcgtgtcacaagggaagctcttcaggcgtcggggatgatgatttctgcatgcaaagcgtgaggacactgggaatatattctacctgaaagaagctaactgcccgtctctcgcttgaagactgaactagtgcttctttttatgcttcctgttaaccatgaatggatatcatttgggtcagagctgcccgtcacctgtcagattatgtaagtctgagtcgtgtgcaaagtgatgttcagttccattttcaacatgtttaagcaatcatattttcaatttatatatggtattcttaatattatgaccaagaatttatcgggattaatttttcagggtaaggtagtg

SEQ ID NO: 600675 - DNA, 1359 bp, Homo sapiens
cgcatcttcagttgtgtatatgtgctacgcgcttgttgccctccaccttcgtgtgctcccttattggggtgtgtgctacacacggtgtagtcgttcttgctatataatagcgaccaattttttttgtctgccccccccgcgcgtcttttcgtgtgctaggattgtcgctcgttggttgtcacccattgtgcgcgcacgatgcccaatgtggttccacggtaaccaccaattttttggtgtgaagcgcccccgttagcttctcattacggggggcccccccacccctttagatgtgttttcgtgaacccacagaacgggggtgatatacccgcccctccttttggcgtgggcaatacccaatggggaggttcaatttttgcatgttttgtcccacgttgcgttgagtgtgccaaagccgcaggtgtccgtgaaatctgtgtggatttgccgagctcagtattttcgccgggctaagtgcagcacaccccttttttttatgggttcaacggcccattgttgcgtcccaaaggtggttgctactgttataacagtttggtgtccaacagattttgtggttatacaggaatgttgtaactcccggtgtcccctttcttggaatatctatgaaatcgccactgaggataatcatcttgcccaccccagttgtacccggaatataggggatagctcgtttgaataaaatatggtgcacctgcaatagttggttctgagagaacccactttgtgtaagagcctctaaaggaccccacgctccatgtctcgcctcgatagccccactataaagtataattggcgacgtattttctctttcaaagggagactctctgatttctcggaataatgtccacaggagatatgtagtagccacgtttaagccacaggcttcttttcctgcttataataggagataaaatagaaaaaagaaaatagagagacaataatagataataacaggagggcacacagatataaggtatacaccaggatagaaagatatgtaagaaatacaccaacaccttgatagggagatattcgggaactacccacggaggatgtaagaatgtaagaaggagaaatgtatgaagaatttggggcccagaagttccccattagacacctccttagtgccaacccacccacccacttacgtattggtaatctctgcaacatctgcaacagttcacacaatgtgtttgggaaaaaaagggcccaatgtggtgacaactcccagcccccatcgggaaaataagaagaaccaaaccaaagagaacccctcctacagcacactttaattttaccaggaccaacatatgtctttagccccaccaaaggcagata

SEQ ID NO: 600676 - DNA, 496 bp, Homo sapiens
caagcagttaatatagactcacggtgaaggctatgttaacgcccaatgacgggtgctatcgtaggaggttgcactggaaggttactacaaggacaagctctttgaccagcggatagctccgtttggagaattggcgaggggaagaacctggatctgcctaatggtcgggagagggccatccagcgctatggagaagggagacctattccatggggtacctcagagcccgagctaatgctaaggggaccgtgtaggaaaggcaaatgttccaatatcccacccaaatgctgacgggacaatatgaattaccactctcaagagtttggaaaaggcccaaggactctggggcacatgaattcgagacagcagcaagctggacaagaagcaccatagtgacaccacgggccacctgtgtacttcagggcaagtgtaaatacaagcaagcttaactacagtataagaggatcgtgtctgggctggcatatgagtctgtata

SEQ ID NO: 600677 - DNA, 855 bp, Homo sapiens
  misc_feature (78)..(78): n is a, c, g, or t
  misc_feature (322)..(322): n is a, c, g, or t
cacgacgcgtgctgcgcgcacaagattacgtggtcccccgagaccgcaatagggtcgccgcgttggggcccacgccancgtgacctggttgcccgccctgttacttgggacccttggagtcccccgtgtgccgtccgccggtttaatcccgcgccagggtcatatacgggtttatttactggacagcgtctcacccggggtgaccaagcaccgtgaccagacgtgtgagggccagaaaaaaggtggttccaaacccttattaaaatagcccacctggggggctctttacctcgtgcagcacccttaatcctgttgcccgtgngaattatgtttttccccccacggaaaaaatgcctctcgagtttcttcaccctctcgaagccagagtccagggcgtcaccccgagctcattggtactcccccccaccccagatttttctcggagaccattagcccccgccgtcaatggcaccctggcacgattcccgtcgaacagtaatatgtgagaaaccccttcaggtgcacatctctgggccccgctcaagggcatgttcagaattttttgtataaagggttaccccactaaaaggtctttacagcgagtttcctactcaacccccccaaagagtgtccccacttactctgtgcaacccctgtggggttaacagcgggtacccctgcgtgggaagaggccccacaggctacaatcagatttgccccatgtggcgcttaaggcagttgctgcgagatgcagtgtcgcttcatcatcatcacacatgactcagcggggcagcgatgtaataataagggacacacccccgcacataaaaaatttaccttcgatttcaccccaca

SEQ ID NO: 600678 - DNA, 458 bp, Homo sapiens
  misc_feature (191)..(191): n is a, c, g, or t
  misc_feature (261)..(261): n is a, c, g, or t
  misc_feature (298)..(298): n is a, c, g, or t
  misc_feature (348)..(348): n is a, c, g, or t
  misc_feature (362)..(362): n is a, c, g, or t
  misc_feature (376)..(377): n is a, c, g, or t
  misc_feature (423)..(423): n is a, c, g, or t
  misc_feature (444)..(444): n is a, c, g, or t
ttcctacaactggatggtagaaggacatttgcggtagcggttagacctcctcttattgaagagggcgagggataagaggtggtccccaaggggccagaaattcccaagttgttcacaggcggcttaagagtgagtgtcatggttatacggatttcgtttcagcctgcctcagtgtgggcgttcaaagaccngataatctcagtctccccaacccacccccaaggagctgtgggaggctttgtgttatctgtgaaactccanaacaggggtgttgcggagaagggagagttcaaggcanacgcaaggactggacttagctccctaggtgccacagtcagatgccggacncggatttatatatnaatatatatatatnnatatattatactcactcatcacggccatctttgttgtaaccatttntgtgtttataaatgcattatntctgagaattttca

SEQ ID NO: 600679 - DNA, 438 bp, Homo sapiens
  misc_feature (4)..(4): n is a, c, g, or t
  misc_feature (14)..(14): n is a, c, g, or t
  misc_feature (36)..(36): n is a, c, g, or t
  misc_feature (48)..(48): n is a, c, g, or t
  misc_feature (166)..(166): n is a, c, g, or t
  misc_feature (182)..(182): n is a, c, g, or t
  misc_feature (185)..(186): n is a, c, g, or t
  misc_feature (241)..(241): n is a, c, g, or t
  misc_feature (278)..(278): n is a, c, g, or t
  misc_feature (328)..(328): n is a, c, g, or t
  misc_feature (342)..(342): n is a, c, g, or t
  misc_feature (356)..(357): n is a, c, g, or t
  misc_feature (403)..(403): n is a, c, g, or t
  misc_feature (424)..(424): n is a, c, g, or t
ttgnaaggggggcnaagggcctgaaaatggtggggncccccaaggggncccagaaaaatcccccaagtgggtccaacaggtggccttaagaaagtgtgtgttaatggttttaacggatttcccttgaaagccctcctcctcccttcctcctgccctacaaagagcncctatactcctcagancanncccaacccacccccaaggagctgtgggaggctttgtgttatctgtgaaactccanaacaggggtgttgcggagaagggagagttcaaggcanacgcaaggactggacttagctccctaggtgccacagtcagatgccggacncggatttatatatnaatatatatatatnnatatattatactcactcatcacggccatctttgttgtaaccatttntgtgtttataaatgcattatntctgagaattttca

SEQ ID NO: 600680 - DNA, 321 bp, Homo sapiens
gatgcatttgcgattttgtcgttagatggactttgagccacaaaaaaaatacgcaggctttcctatttctccaactgattgtactatatgcattttgtaccagtggaccttattatactggagattaaacaacaaatggaaatttttgtggcttgctctggtgggccccttcccactgactgatttcacagtttgcatttcgggttgcttgcattgcattgcattgctcagcaaagcacagtagcttttcttttgcagcaattaaaacctttggcttgatttctttatatcccttggcttatatccagcattagcaatttt

SEQ ID NO: 600681 - DNA, 740 bp, Homo sapiens
gaggcaataattaatagcctaccaaccaaaaaagtccatggaccagatgaattaacagccgaattctaccgagagtgtacacaacgacggcagctggtaccattccttcaaagaactacctcgcgaagactaataggataagcgagggaatcctccctaactcatttgatgagaccagcatcatcggctgataccaataatctgtgctagagacagaacaacaacagagaagaatttcaggccaatatcactgatgaacatctatgtgaaaatcgctcagataaacgtactggcaaaccaaagtccagcagcacatcaaaaagcttatccaccacggatcaagtcaggcttcatccctgggatgcaaggctggttcaacatacacaaatcatgtaaacgataagtccatcactataaacatgaacgcgaatgacaaaagaccaccgtgattatctcaataaatgcagaaaaggccttcgacaaaattcaacaccccttcatgctaaaactctcaataaacttggtatcgatggaacgtgtctcaaaataataagagctacttatgaaataggcaatttcaaatttcaaaatgttctgaaaaactggacaatcatctggatttcaggtattattctatcaaacacgaaaaaatatacagtgccttctcctcttactgtgaaatttgcgttctagagtcatgtgtactagtatctagtctctctgtcaatcttctaggagga

SEQ ID NO: 600682 - DNA, 168 bp, Homo sapiens
ccgcggtctgtcttacgttatgaaatacttatggcagcttctgtggaacgagggttatttttttggttaagaactaggaattcaagctggcattctttatttctaggcctactcaggtcaaaaatcagtgcgggcttcgcgctgtgcgttagacattaccgcgggggc

SEQ ID NO: 600683 - DNA, 286 bp, Homo sapiens
  misc_feature (18)..(18): n is a, c, g, or t
ggggcggtatctctcacncagtctggagtgcaacagcgtggtctccgctcactgcaacctccacctcccagattcaaatgattcttgtgcctcagcctcctgagtagctgggactacaggcatgtgacactatgcctggctaatttttttgctatttttaagtagagacggggttttgccatgttggcccgaggcaggtggatcacttgaggccagaattcgagaccagcctggccaatgtggtgaaaccctgtatcactcttttaggcccttctgtcgtcttctc

SEQ ID NO: 600684 - DNA, 460 bp, Homo sapiens
  misc_feature (136)..(136): n is a, c, g, or t
  misc_feature (163)..(163): n is a, c, g, or t
  misc_feature (184)..(184): n is a, c, g, or t
  misc_feature (253)..(253): n is a, c, g, or t
  misc_feature (263)..(263): n is a, c, g, or t
gtctgttcttgaagtgctaataatcccaagtaagtttctggtggtcactaaatcatattgaaacacacacacacacacacacacacacacacacgatctgtcgccttgtcaatcccaatataaaggcaataatttnttacctcattaatggatctgtcctttntcttttcaaactcttccttangttagccatgaaatctagctggggctgtgtggtttctgattccccctggcttattctttactttttccnacttttccangctcagcagggagctgctggatgagaaagggcctgaagtcttggaggactcagaggatagatgttattcaactccttcaggtggtcttgaactgagtgactcatgccagccctagagaagtgccttttatatattggagcaagagcgtgttggcttggctattgacatggatggtgagtacctatctatgagggtga

SEQ ID NO: 600685 - DNA, 360 bp, Homo sapiens
cactgagcctggcctggcgcgggcctggatgggctgctgtctccgggggtgcccctcaagacactcaccttctgaaggtggacagcaaccttggtgacccggggatgagcttgcacaggggctgccaggcccaggacccactttcccccccagtgccccactagcctggagtcagtccctcccacacctttggccttgggcagtggggatgctgccacttcccggcctggctcttgcatgggcctgggcagcacatgcagcctgaggttcccacagagtgcagaggccttggggtaggccccagatggccattcctcagccctgcttcaggagctgatatggtgaagggaaaggtccctg

SEQ ID NO: 600686 - DNA, 181 bp, Homo sapiens
  misc_feature (168)..(168): n is a, c, g, or t
ggtctccccatgccggctgcgcttctcttctcccgtgcgatggccatcagtatgacggctgctgctttcgtatcatccatggcgaccaccatctccgtgacgtggactatcgctatgccgattgccagtctctccgtgactgtgacggctgctgccccgtgttctcangtatatttctctc

SEQ ID NO: 600687 - DNA, 908 bp, Homo sapiens
gactctgtaggcgcgcagggccggatgatgctgtagacccggaccggagcagtcggaggcggtgaataatagctcttcaagtctgcaaatagaaaatggctccaacaaaaggtacattgcaaaagaatgggagaaaaacagaatgggcacgagtaaaaacagtgtaaggaggcagagccttgaaggaaatgtgtcgtgggaagccaagtgcctatgatcgacggtgttagttgaatggcgcacagtggatatatattcctgaaggtgcaagggggattacggatgctgtacaaatattgggggaaaccttgaaggaacaaattgagatgtgtccaagcaatagattgaaggcgttggctttaatgtctcagaaagcggggcaatgaaaaaagatgtttacaaaaaagaaaatctcttaatcttgagcagtgaatcgtgaggtgacggcattttcaagagatggaacaacagagatgttgtgaaatggcaaagaggattttgccagaggtctagaatctgtgaagaaaatacttggtggcaaaagtacagctagtggaagaagttgttgtgttctcattgaagtgtgacacggattccagattgaagtcatgagtgtgggtctggggatcatgcgggcaaatatgaacttgtcctccaagttggtcattgttgctattgagagaggactacttgcgattcttgtacaggaggattaatgttgactaatggtacattggtcttatatataatgattatttttttaaaagtggtctaataagataataggggcacataatctctcattgaacatttgatggggtgacaaggtggaaagtgtagggttctgtccaacgggtttggacaaacaagagtgtgatagaaatgacggaatgaaaaatatggaggca

SEQ ID NO: 600688 - DNA, 414 bp, Homo sapiens
acctgggtactggtcgtatggcctctctcctttgagacctcacacttactcaagacagccatagagaaatcggcctatcacaagtcagacagaaacgggaaactgccacttatgaggcagaatccacgtcctgtttacttccaccaagcagcagtggtagcaaagaagaaagtccaagaatcctaatagcctgtcctcttggaaagccaagactcatcccaaaggcacttgcagaagaaccactcccgaatactaactgaactcttacatccacaaagagttggggggaacaaattttacaactgagaggaacaaattaagaagattgggggaaccaatgactcaggacagcatgtgggactaatgtaccaccccatagaccaactttagctcccgggatacactaccgactgc

SEQ ID NO: 600689 - DNA, 324 bp, Homo sapiens
gaagcggcaggaggcaggaccactcgggtcttgtgctggcacagcatggcgggcgcgttggtgcggaagcggcggacatttgtcaagcaaggatttcgggacatcctatgagatcgacttcttgggccagatgcaacttgggtcttccattgcagcatcaatgatttaaaagtcttccagagattctcagtggcggatgacatttgccctctgttgctattcctttagacatcatgagtttgccacaaggacagcctcggaactgcttgttgcagtccacgcacaattgagtgccagctcatccaggaggcggcttatcaacac

SEQ ID NO: 600690 - DNA, 1286 bp, Homo sapiens
  misc_feature (16)..(16): n is a, c, g, or t
  misc_feature (25)..(25): n is a, c, g, or t
  misc_feature (87)..(87): n is a, c, g, or t
  misc_feature (238)..(238): n is a, c, g, or t
  misc_feature (251)..(251): n is a, c, g, or t
  misc_feature (304)..(304): n is a, c, g, or t
  misc_feature (321)..(321): n is a, c, g, or t
  misc_feature (324)..(324): n is a, c, g, or t
  misc_feature (446)..(446): n is a, c, g, or t
  misc_feature (521)..(521): n is a, c, g, or t
  misc_feature (557)..(557): n is a, c, g, or t
  misc_feature (580)..(580): n is a, c, g, or t
  misc_feature (644)..(644): n is a, c, g, or t
  misc_feature (699)..(699): n is a, c, g, or t
  misc_feature (720)..(720): n is a, c, g, or t
  misc_feature (866)..(866): n is a, c, g, or t
tatttttctctttttntatttcccntattttttttattttatatttatttttttaaactttataatttatacagtccccttccctanttatgggtatgaaaaaacttagaggcctaagcggccgaacacacagctacgcgaacacacgcgtagacaacgacgacggctctcaaacggtgcgtttgccgtctacgtcgtacttattactctcgcccctggtggctcgttgcgcgtcaanctcacacccagtngacaaagccacgccgggccgcgccgcgccgcgccgcgcccccacacccaacanaggaggagcgggaggangcncagaggagagaaactaagaaagacgaacgcaaaaaaacaaaacgccggacccgcggcatacgaccaccccgcgcacgcgcgagggcggcggcgagagaaggaagggctatgcaagttaattngtgtgtatgcgcgttgttcacctcacatcagctctcgccgaccactagtcagagagacgaaacacggcggagagnatagagaagaagagtatacatactatcattataacncatcactcaactaacgcagtaangcacaccactagcgagcacatatacatcttgatgattcttctcgcacacggcttgctaaatgcnggctatgcgatgtccggtgtgtgggtgagaagacggtctgtatcaacacagaggncatacacacaagatgagagangtgagagacgcgcgacgcgcgagaggagagatgcgagcgagtgcgcgtcgagctcgagtactcgcatgatcagctcagcgacggacacatggtatttgtactaattctatacgtacgagcacgacgaacaagcgtggccgtggtancggtgcggccgccgacgctgtatacgcgtcagtgagaacggaggcgttgcacacggcagagcatagcacgaagcgaagtgggacggtgcgagaaagagaggagcggcaggcgtgatgcgagacaccagagtatcctgcaacaatatagcaacccgtggtagtgtgatgtcggatgcagtaactgccctgaatccggtacgtcatatacactagatctagtcgacacgcgccaacacgtcaagagagtcgttcggtctgaaagcgacggcggctgtgcaccgtctccgcattcagcgcggccatgccacacggcggccgcagcgacccgtctcagatcgacggtcggcacgacatatgagctgtacgatagcgtacgcggggtgatgtcactagcataatgcagcaaggtgagtcgcgcgt

SEQ ID NO: 600691 - DNA, 105 bp, Homo sapiens
gtcaagatctctgctgctcctcttcagctccccgagtgctggaactacgggcatgccactacacccggctaacttttgtattttttgtagagacgggtctcgccg

SEQ ID NO: 600692 - DNA, 646 bp, Homo sapiens
tagtgtaacagtatatggatattagcatagacacatgattgtatattgtgctctggtaaaataggtatatatgcagagtgattaatatggtgagaaaaagtgatgggaaagcaatgtgaggtagtaactagtaatatagggtagctggtgaggtgataagatttgtgagtttcataatgacttgtattaatccgtgtcaaagaaaaaattagacctcttggtttctccagggcatagaaatttcagtttcaacccaggattaacgaactttataacagtgtagtccagtggtgaaacagaatccttggtaatttagaaatatttccttcttaagacctttagaattttaatctgatagttctgcttattatattttttatttcccaaagtgaacggttcaaagaataccattaacggtcatttggtattacaatccttccattagtcaaaattaaagattggaaaataatttgatagtccatttggtatactaaggttggattcttaaagaatctgaagcaaattatgtcttttctattaacatttcctaaatcaactcacatgaaaattaatagattatcatcatacatgacgatcggttttctctcactgcgcataggaatatgttccctttactacttatcgg

SEQ ID NO: 600693 - DNA, 900 bp, Homo sapiens
gaagagatgattctgctagtggatggttaaaagttgttagacgggtctcaatgaatatttcagctatactgtaaccctaagatgatgtcttgggggttatgaagtcagtaagtgcggatatattccccagttctttcaaatggggtcatgtaatggagcatgtctagtttagggtggtatgatggattccagaccatatatggctgctaagggaaatggtctaccttttctctcctgcacctggttccatttatgtaacagttgagatgtagagggaagtcattttctatcatcaatcgtgtgtaaatccctcttcaagaagggtattcagcgagcttaaagttagatgctaaattgtttttaatattaagggaaggtgtaatgcggttgtgagattctgaaattaatgagaatactgatttcagaaatgtcatttgaatgcgtttttcttcttgtgacgagtgacgcaagatcagcttgaattccgatatgtccctgagttatttgtgatcatgaagccacaaatgtgttataagcaaggcaagttgtaatatatataatcctgaactcatgaccagtgtctcagggtataaatgtcgccttgggatggaacacgtacgtgacattcagggtgtcgtgacacgcaactgtcctatttatgtgttcgaattcacttaacggtggagctttttatgtaaaagacgtctgggattgggatgcttaccggtggcaattgccaaggcggtatccattggggtgggcacggcacagatataaccgcccattggccaaacacgtgggggaatttccaccaaggtctcgggtcgcggaaacagcgtggaggagaaacaccagagggaagcagcgaggccaacaaaatggataagagggacccagaaa

SEQ ID NO: 600694 - DNA, 715 bp, Homo sapiens
atcaagcataatggagttggaccactctgtaattgacccaggatgagacggagtgtacttctggatggtgacgtgagaatgtgagcctcagaatgaaatgtaagaacagcaggctccatgaggactggctgcagccacaaactgcaggtcactgtatcacaggtgctcaggtaggaagagagagaggctctgtgagcttttgtgtatttcacccagatggaaactatgcattcataaaatgatttgagactgggtgatggataggcaggcgtccgtaactcccagactactcgggactgcggaacgccggagcaaacgtcctcacaaccttgggacgcctgacctgaggctttccaacctctaggaaagccccggaagaaattctgctgccatgtcaaacgccagcctatggggaccacagaaccaagacttggctctccaacagaaaagatagtatatagtaggactaggactagtaccacgtacccacaggcggcaccaaccgtcccccctacgtagctagtacactctccccaggtacagcaacatcagcaatacggcaaaagaccgagccccgcggcgcacggagcgcaagccacgcaggcgctggccgtgacgagagcatgagcacacgccacgccgggcgagccaagcgcgactatgcggaccgcgcaagcgcaacaaagaacacaaagacaggggccccaccggccgc

SEQ ID NO: 600695 - DNA, 689 bp, Homo sapiens
  misc_feature (24)..(24): n is a, c, g, or t
  misc_feature (29)..(29): n is a, c, g, or t
  misc_feature (276)..(276): n is a, c, g, or t
  misc_feature (341)..(341): n is a, c, g, or t
  misc_feature (384)..(384): n is a, c, g, or t
  misc_feature (389)..(389): n is a, c, g, or t
  misc_feature (412)..(412): n is a, c, g, or t
  misc_feature (436)..(436): n is a, c, g, or t
  misc_feature (492)..(492): n is a, c, g, or t
  misc_feature (539)..(539): n is a, c, g, or t
taatagaggcatgggtctcacggntgttngcccaggcgggtctgaaactttggggctcaagcgatcctcccaaaacgcggggattacagtcatgagccaccggtgcccagcctaattcctggacttctctatacagagtcttcactggataggcactcgtctggtagtaactcagttggaatatctttagaaaatggtttagaatttatttggtaacaagatgggtaaggaataagattatcccatatgcatttctggtagagcagaattgggatnagcttagtggtctcaatctttttggaaaataaatggtttacctggtcatcagatttaattaaaanttatacttagtaattggcactattacttagttaatttttggtntggtntgggaaatatgggtagtactacnttggggaacctggttacggacaantggatgtcattaacaaaaggcctagtgggattagatgtttccatttctctaatttntggctggtttaaaagtgcaccttactggttctggagataccgggcanaagtctttacaaatggtttggtactagacccagggttgtacatataccataggctgggggtgagagaccctggaactgtgtaatacccttaatgttccccatttttctagtgtatcctgggtctttaaagcaactggtcattgttgtctg

SEQ ID NO: 600696 - DNA, 744 bp, Homo sapiens
  misc_feature (35)..(35): n is a, c, g, or t
  misc_feature (44)..(44): n is a, c, g, or t
  misc_feature (70)..(70): n is a, c, g, or t
  misc_feature (170)..(170): n is a, c, g, or t
  misc_feature (182)..(182): n is a, c, g, or t
  misc_feature (196)..(196): n is a, c, g, or t
  misc_feature (201)..(201): n is a, c, g, or t
  misc_feature (210)..(210): n is a, c, g, or t
  misc_feature (213)..(214): n is a, c, g, or t
  misc_feature (217)..(218): n is a, c, g, or t
  misc_feature (221)..(221): n is a, c, g, or t
  misc_feature (232)..(232): n is a, c, g, or t
  misc_feature (249)..(249): n is a, c, g, or t
  misc_feature (260)..(260): n is a, c, g, or t
  misc_feature (271)..(271): n is a, c, g, or t
  misc_feature (300)..(301): n is a, c, g, or t
  misc_feature (303)..(303): n is a, c, g, or t
  misc_feature (309)..(309): n is a, c, g, or t
  misc_feature (314)..(314): n is a, c, g, or t
  misc_feature (319)..(319): n is a, c, g, or t
  misc_feature (351)..(351): n is a, c, g, or t
  misc_feature (355)..(355): n is a, c, g, or t
  misc_feature (357)..(357): n is a, c, g, or t
  misc_feature (360)..(360): n is a, c, g, or t
  misc_feature (364)..(364): n is a, c, g, or t
  misc_feature (368)..(368): n is a, c, g, or t
  misc_feature (383)..(383): n is a, c, g, or t
  misc_feature (447)..(447): n is a, c, g, or t
  misc_feature (452)..(453): n is a, c, g, or t
  misc_feature (469)..(469): n is a, c, g, or t
  misc_feature (471)..(471): n is a, c, g, or t
  misc_feature (482)..(484): n is a, c, g, or t
  misc_feature (487)..(487): n is a, c, g, or t
  misc_feature (500)..(500): n is a, c, g, or t
  misc_feature (503)..(503): n is a, c, g, or t
  misc_feature (505)..(505): n is a, c, g, or t
  misc_feature (511)..(511): n is a, c, g, or t
  misc_feature (515)..(515): n is a, c, g, or t
  misc_feature (524)..(524): n is a, c, g, or t
  misc_feature (526)..(526): n is a, c, g, or t
  misc_feature (531)..(531): n is a, c, g, or t
  misc_feature (533)..(533): n is a, c, g, or t
  misc_feature (539)..(539): n is a, c, g, or t
  misc_feature (546)..(546): n is a, c, g, or t
  misc_feature (552)..(552): n is a, c, g, or t
  misc_feature (559)..(559): n is a, c, g, or t
  misc_feature (561)..(561): n is a, c, g, or t
  misc_feature (568)..(568): n is a, c, g, or t
  misc_feature (582)..(582): n is a, c, g, or t
  misc_feature (589)..(589): n is a, c, g, or t
  misc_feature (598)..(598): n is a, c, g, or t
  misc_feature (619)..(619): n is a, c, g, or t
  misc_feature (624)..(624): n is a, c, g, or t
  misc_feature (626)..(627): n is a, c, g, or t
  misc_feature (629)..(629): n is a, c, g, or t
  misc_feature (632)..(632): n is a, c, g, or t
  misc_feature (635)..(635): n is a, c, g, or t
  misc_feature (644)..(644): n is a, c, g, or t
  misc_feature (652)..(652): n is a, c, g, or t
  misc_feature (661)..(661): n is a, c, g, or t
  misc_feature (664)..(664): n is a, c, g, or t
  misc_feature (675)..(675): n is a, c, g, or t
  misc_feature (681)..(681): n is a, c, g, or t
  misc_feature (686)..(687): n is a, c, g, or t
  misc_feature (693)..(693): n is a, c, g, or t
  misc_feature (702)..(702): n is a, c, g, or t
cccaggcccaggctcaagctcaagcccaggctcangctcaggcncaagcccaggcccaggcccaggcctnccaggcatcacagcagcagcagcagcagcagcagcagcagcagcagcagcagcaacagccaccaccacacttccagtctcctggggcagccccccagggngggggtggtggngacagcaagcccanccctncaccccagngtnnctnnganctgaccccgtntaagacggcggagcatnataaggacatntgcctcactgncaccaccagcaccatccaggtggagcacnngnccagcncttanagatncgtgctgccacccactgggaagaggaagaagnggcncnggngtcntctntctgcaactctcggngggaaaagtcctttgcttagttgacaggccttggctccatactattgggcctctggaaaggatntcctnnacaggataccatcctntntcgaactctcnnnaanaggaacatcagcnctncngatggnggantactgagcngntgggngnatccancagcctnccctcncaagcanancttctanaactgggggtcggngctcaanggaaggatntgctatgacctcatagaaccntgtgnanngnggncantaccctatncttacccnccttatacngtntgggctgatgngactanaggcnngccctnccagatcangcacggagccccatgtggcaccaggcttttgtgctttactgc

SEQ ID NO: 600697 - DNA, 689 bp, Homo sapiens
  misc_feature (35)..(35): n is a, c, g, or t
  misc_feature (44)..(44): n is a, c, g, or t
  misc_feature (70)..(70): n is a, c, g, or t
  misc_feature (170)..(170): n is a, c, g, or t
  misc_feature (182)..(182): n is a, c, g, or t
  misc_feature (196)..(196): n is a, c, g, or t
  misc_feature (201)..(201): n is a, c, g, or t
  misc_feature (210)..(210): n is a, c, g, or t
  misc_feature (213)..(214): n is a, c, g, or t
  misc_feature (217)..(218): n is a, c, g, or t
  misc_feature (221)..(221): n is a, c, g, or t
  misc_feature (232)..(232): n is a, c, g, or t
  misc_feature (249)..(249): n is a, c, g, or t
  misc_feature (260)..(260): n is a, c, g, or t
  misc_feature (271)..(271): n is a, c, g, or t
  misc_feature (300)..(301): n is a, c, g, or t
  misc_feature (303)..(303): n is a, c, g, or t
  misc_feature (309)..(309): n is a, c, g, or t
  misc_feature (314)..(314): n is a, c, g, or t
  misc_feature (319)..(319): n is a, c, g, or t
  misc_feature (351)..(351): n is a, c, g, or t
  misc_feature (355)..(355): n is a, c, g, or t
  misc_feature (357)..(357): n is a, c, g, or t
  misc_feature (360)..(360): n is a, c, g, or t
  misc_feature (364)..(364): n is a, c, g, or t
  misc_feature (368)..(368): n is a, c, g, or t
  misc_feature (383)..(383): n is a, c, g, or t
  misc_feature (392)..(392): n is a, c, g, or t
  misc_feature (397)..(398): n is a, c, g, or t
  misc_feature (414)..(414): n is a, c, g, or t
  misc_feature (416)..(416): n is a, c, g, or t
  misc_feature (427)..(429): n is a, c, g, or t
  misc_feature (432)..(432): n is a, c, g, or t
  misc_feature (445)..(445): n is a, c, g, or t
  misc_feature (448)..(448): n is a, c, g, or t
  misc_feature (450)..(450): n is a, c, g, or t
  misc_feature (456)..(456): n is a, c, g, or t
  misc_feature (460)..(460): n is a, c, g, or t
  misc_feature (469)..(469): n is a, c, g, or t
  misc_feature (471)..(471): n is a, c, g, or t
  misc_feature (476)..(476): n is a, c, g, or t
  misc_feature (478)..(478): n is a, c, g, or t
  misc_feature (484)..(484): n is a, c, g, or t
  misc_feature (491)..(491): n is a, c, g, or t
  misc_feature (497)..(497): n is a, c, g, or t
  misc_feature (504)..(504): n is a, c, g, or t
  misc_feature (506)..(506): n is a, c, g, or t
  misc_feature (513)..(513): n is a, c, g, or t
  misc_feature (527)..(527): n is a, c, g, or t
  misc_feature (534)..(534): n is a, c, g, or t
  misc_feature (543)..(543): n is a, c, g, or t
  misc_feature (564)..(564): n is a, c, g, or t
  misc_feature (569)..(569): n is a, c, g, or t
  misc_feature (571)..(572): n is a, c, g, or t
  misc_feature (574)..(574): n is a, c, g, or t
  misc_feature (577)..(577): n is a, c, g, or t
  misc_feature (580)..(580): n is a, c, g, or t
  misc_feature (589)..(589): n is a, c, g, or t
  misc_feature (597)..(597): n is a, c, g, or t
  misc_feature (606)..(606): n is a, c, g, or t
  misc_feature (609)..(609): n is a, c, g, or t
  misc_feature (620)..(620): n is a, c, g, or t
  misc_feature (626)..(626): n is a, c, g, or t
  misc_feature (631)..(632): n is a, c, g, or t
  misc_feature (638)..(638): n is a, c, g, or t
  misc_feature (647)..(647): n is a, c, g, or t
cccaggcccaggctcaagctcaagcccaggctcangctcaggcncaagcccaggcccaggcccaggcctnccaggcatcacagcagcagcagcagcagcagcagcagcagcagcagcagcagcaacagccaccaccacacttccagtctcctggggcagccccccagggngggggtggtggngacagcaagcccanccctncaccccagngtnnctnnganctgaccccgtntaagacggcggagcatnataaggacatntgcctcactgncaccaccagcaccatccaggtggagcacnngnccagcncttanagatncgtgctgccacccactgggaagaggaagaagnggcncnggngtcntctntctgcaactctcggngggaggatntcctnnacaggataccatcctntntcgaactctcnnnaanaggaacatcagcnctncngatggnggantactgagcngntgggngnatccancagcctnccctcncaagcanancttctanaactgggggtcggngctcaanggaaggatntgctatgacctcatagaaccntgtgnanngnggncantaccctatncttacccnccttatacngtntgggctgatgngactanaggcnngccctnccagatcangcacggagccccatgtggcaccaggcttttgtgctttactgc

SEQ ID NO: 600698 - DNA, 117 bp, Homo sapiens
  misc_feature (49)..(49): n is a, c, g, or t
  misc_feature (51)..(51): n is a, c, g, or t
gatctatataatttaatgtatcaccttcattgtaaatttagcaggaaangnatcacaattatgatttttttttttgcaccagtgaaacaataaagatgctattaccaatttgggggc

SEQ ID NO: 600699 - DNA, 1080 bp, Homo sapiens
  misc_feature (490)..(490): n is a, c, g, or t
tagggttgggggggaaaggggggccaattccaaaaaaacgggggggtaaaaaaggggttgtgggggacaaaatttttggggtaaattccgggggaaaggcggctccattgtggtgggtcccaagagaaaaaagtgaggaggcgggggcaggggggttaatcaataaccaatcagtgaggtggtattcgcggaactattgaaacaaattggggggcaagagggagcactgaagaagcgaaattccacagtgacttgcagacacctggagaatctatatctcgagaacaccacccatcagcgaaaaggcacaacaggggaggttacggtagggaccactacacaacggtggcaaacaacaaaccatatatacaggcgcgcacagcggcggaactcaggagtggagcagagcagaacaaacagagaagcggcggccactacgaatggtgcggagaacaagaggtgagggacgaacagatcaacagagaaagcnccaccatactaccagacaacgagctcgacacaagcatcaaaccagtgacagagtcatcagaggagacgacccacaataatcaaacaccgtacgacgacccaccaaccacaaccaccacaccgagagccagacacatcaaggacaagcaccaaccgacgagacgcccaccagaccagcctcaccccacgctactaacacagcagacaatggtaaccaacaacagagccaccagccatacacgagggtgcaacacaaacaacagcgagaggaccccaaacgagcagaacgcacactcaccaacaagacgccaacctaaacaaagccccaacgagagataatacaaacgcacagcacgacaccctaattagaaccaaccaccaacatacaacccatccgtaaccagagacaccacatgcaccaacacatcacaccacgtcactaaaaccagccaacacaaccccagcaactcctctactgacacacaacacgcgcacaccaccaacaccgctagcaatccacccaacaactgcatctgacttcacaccactccatgcagcacacacacaaacaccacctgtcccacaacacac

SEQ ID NO: 600700 - DNA, 424 bp, Homo sapiens
gattaacgtatgagtatcacgactgggcattaactttcattttaaattcaggagtacatgtgcaggatgtgcaggttgttacacaggtaaatgtgtgtcgtgggggtttgttgtacagattatttcatcacccaggtattaagcctagtatctattagttgtttttcctgatcctctccctcctcccaccttctaccttctgataggctccagtgtttgttgttcccctctatgtgtccaagtgttctcagcatttagctcccacttataagtgagaacatgctgtatttggtttcctgtttctgcattagtttgctaaggataatagcctctggctccattcatgtccctgcaaaggacatgattttgttcctttttattggatgcatactattccatgttttgtatttttttcagacttctg

SEQ ID NO: 600701 - DNA, 275 bp, Homo sapiens
gaagcccaaagggggtcaaggagggagggtccaagttggctgaatgtacctctccagctctggttcctgcttgagtccctcaccgtttcttccccagaccctcagatttatatttcctatttctctgtgtatttatatacaacatttattaaatataaatatccccagggacagaaaccaagtgcccgagctcagggcagctgtgctgggtgagctcttccaggagcaccttgccaccattcttcccgttctaactttgaaccggcgttgcgcgt

SEQ ID NO: 600702 - DNA, 152 bp, Homo sapiens
gcgcattacgtcccagaagttccacaatcctcgttacgactcctgatagttctttatttttcaaaatgtatttgccatgggatgctaattagcaataggtgtcataatgagaataacccaaactggtctaacatgtgacaacatgattgaca

SEQ ID NO: 600703 - DNA, 330 bp, Homo sapiens
ctacggacaatctcttgctctcccgcttctagaacatgcacacggactcagggggacacgtgagctagcgtggacgatactttcacacttacacatgaaatactggaacgccttggacttcacacggctcttaatacctttgcagatgaggagcgcgtcctgggaagctcatcaaaccagtgctctctgtttttcttggccttccccttccacgcacgcaccttcgtacgactctcgtacaccgtcctttacggatgacgacgggggtgtgtcgtcctgcttacgggccttaccggtacgctacgcgctccctggcactcatccggggct

SEQ ID NO: 600704 - DNA, 123 bp, Homo sapiens
  misc_feature (59)..(59): n is a, c, g, or t
  misc_feature (101)..(101): n is a, c, g, or t
  misc_feature (108)..(108): n is a, c, g, or t
ctgggcaggatgtgagtacactcagaaacagaagtagttctcatcaagaacgtatgtcntgcctccacgaaatgtgaggtggccctgcactagaggatcanggtcccnagccctacaaaacag

SEQ ID NO: 600705 - DNA, 372 bp, Homo sapiens
taatcaccccagatgtctctagcagtttctagttgtgtcagcttaacaagtcttcccttcttctgtgaaaaacttccctctattccaactgtaatgttctagtgagggtatctttccttcctggccactgtgaccacagaggtatagacactggattaaagttaagctaatcagatttctccctaccatggggaacttaagaaacagaaagaagacatcccaaatgttttctaattgtgaagcagggacatgtgagcttggaagttagtgatggccatgtttttcgctaagtgagaaagacactctgaaagattaaaggagaagaacagagaaaactggaaagaaaagtagtaacagcagtggtattggtgg

SEQ ID NO: 600706 - DNA, 128 bp, Homo sapiens
ttcgactctgactccccagcacgcaattacatggcagccaatgtacattcttctttatatggaaacaaggtcttgctcgtgctgcccaggctgccagtgcagtggctatgactctcgtgctcactgcc

SEQ ID NO: 600707 - DNA, 1076 bp, Homo sapiens
ttcagccctcagctgcccggggagcatggaccatctgcgggcgcatcgggagccgactgcctgtggagccctgaggatgggtatcgccgcttcctgtgaaacccccccaccctaacgaactgaactccgccctgttgagcatgtcgcgcaccttgagcccttccaccatcagccctgtccccctaccaggcttgcctgtcttcccaagggctgcggcaaatctacagggaccctgagaccctcgtgttccgaggactcctcttcgtggcagttggggcaggacttcactgacgcaccctcgggtgctgaccgtgggatgacccagcacccgtgagatgagacatgctggacgactccagggcccgccgaggaacttgatggtctgtagcaatctttacgtatttggaggagcacatacggcattctgctgcccagaaaagggcaacagagtactgataacaccagataccatggaaacactccaagcctccaaaattgcctaccccaccataacgtcatttaaatcatcgggcatgtgccacaaggtatcatcatctcctaacctacgttggaacgagagcagcacttcccccatgggatgccccgaacacccggaaaagtggatacccaatggcccctaaccatccagccaggaatccctcgcatgagcgccagccatgagtggacatacagaccacacagaagacgaagagagcgagcccacctggccccccctgagggggaccccggtagcgacagcgtggggagagcagaccagcccccaaggaaaaggagaccacaggcgcatgagcccaccactggcagggcgccagccggtacattcgcacaggacggagacaaacgaccaggagtcaacagcaggaacgaacaaatcgggcacgctccgtacgcgcatagcacgaacgggaaggagcgaggcagataagccacacgagaaggaggggcagaacagaccggtaggaaagcgcaccaccaggcacaaggcgcggccagtcagcactgacacagcgaacgacggcacagacgatcggagcgacgcggcagccacccgcacc

SEQ ID NO: 600708 - DNA, 265 bp, Homo sapiens
aaatgattccccccttttttaaaaccttttttttgacccccccttgcccccccctgtttttgtttttcccgggtttcaaccagttgggggcaaaattgggggattcgctaattggactgattgtttaagggggccttagttggttttcccccggtaatttgtaggtttttggggggcggggcccccctttccaaaaaataaaaaaaggccctccccttttttgcccagggtcccgggcccctggggggcggtaggggggccccca

SEQ ID NO: 600709 - DNA, 148 bp, Homo sapiens
cgcaaggattctgctgggcaccagaaatgcaccgcgcgacaccttactgtgacactatgaaatgctacacgcgtgagtgccgagtcattaccaagagcgctcaggggcaggcagccagttgttagttacttgcccgcggggcacctgc

SEQ ID NO: 600710 - DNA, 116 bp, Homo sapiens
gtcgactgctcactcacctgggattgggaggctgttgacagacaggctgacagcagcattcagtgagtcatagtgagggcacatagcttctggatgtatgaggggcttctgggtgt

SEQ ID NO: 600711 - DNA, 171 bp, Homo sapiens
tgctgggattacaggtgtgagtatctcagctgagcaaggggtgactttgaatagaatgagaggcaggtttgccctgagcagttcccagcttgacttttccctttagcttagtgatttgggggccccaagattgattttcctttcacaggtggttgttgagtggggagcaga

SEQ ID NO: 600712 - DNA, 216 bp, Homo sapiens
  misc_feature (43)..(43): n is a, c, g, or t
ttggggggcccccccccccccgggggtttggcaattaaagggntcttttttggggggggtttttttttttagggggttttccttttcacccccggggggggggcccccttttttttcaaaaaaaccccccccggggggggggggggttttttttttcccctttttttccccccccgggggggttttccccctttttagggggggggggttggcgga

SEQ ID NO: 600713 - DNA, 98 bp, Homo sapiens
  misc_feature (34)..(34): n is a, c, g, or t
taagagtggcaaaatttttaaatttagaaatttnttttttttaaactaaagctatataaagcttgtggattaaacagaataaatttctaaatttaaaa

SEQ ID NO: 600714 - DNA, 751 bp, Homo sapiens
ggatctggagcatgtagaggttttacagaagaaatttgaagagtttcaaacgagatatggctgctcatgaagaaagagttaatgaagtgaaccagtttgctgccgaatactcatactaggagctactaccctgaggaggaactgatcaagactaagcaggatgaagtcaatgcagcctggtgagcggctgaagggcctggctctgcagtaggcaggggaatgctctttggggcagcgagaagttcgagcgctttaacagggatgtggatgagactatcagttggattaaggaaaaggagcggttaatggcctctgatgattatggccgtagacctggcaagtgttcaggctctgcttcggaagcacgagggtctggagagagatcttgctgctctagaagacaaggtcaagagccctgtgtgctgaggctgaccgctgcaaagtccgcaccttctgagtgcaacacagattcaggtggaagcgagaggaagtgattacaaagtggggagcagatccagacctgtggtggaagagagacatgcacggctcaatggatccatacaggtttgcaacgcttccttggtgatttcgtgaactcacaggtgggtgactgagatgaaagcctcatcaatgagatgagcttgcagtgatgtagtggggtgaagccctgtagatagagacaagagcaaaaggtgaaattgatgccatgaagaagttgaaattggggatgaattggacaggattgttggtt

SEQ ID NO: 600715 - DNA, 831 bp, Homo sapiens
tggttggttggttttccatgaggttatcggaccaggggctgacctcaggcactttctgtaggaaactgtaatttctgtaaaaatggttatttaaccctcctccaccccatcagcggtggccctgagggctgacccggaggccagtggagctgccggggtgtccacgggggagggccaaggcctgctgagctgattctccagttgctgccccagcctttccgcctgcacagcacagagggtggtcaccccgaggaacagccaggcacctgctcctctggcccttccggggggaggggagctgccttctgtcccgtgtaactgcttccttatggcccagccgggccactcagactggttggaagctgcacgggcagcttttgggtctcctgtggggtattcacaacagccggggactggatttggatgtatttaaaaccacttttaaaataaaagagtcggtggccttaaaaaaaaagaactaaaaataagaaactaaagaagaatgaaacaacataacaccaacatgacaaaaaatctaagctataaaaaacaaacgacggggggggggggagcaaaataataccacgcgggggcagcaccccagactacgcccgaccccacctttctgcgaacaaagaggggcccccaaatgagagggcacttaaacaccgacacgaccgcccgccatacaaccgacgcgacgaagaacacaccaccgcggcactggggaacaaccccaccgggcgggacaacgggcacccccacagaaaaccgcggaaaaaaacggagcgccgggcacaccgcatctggcaaatcgccggcatcacaatc

SEQ ID NO: 600716 - DNA, 310 bp, Homo sapiens
caagatcagactcggaatacagcaagctataagcaagccaattacacagagaaggtatccataaattatttcaggccaaagggtctaactgtcagataaattttgtttggtttcgtttgagagcagggactcatggtcgcccaggctggagtgcagtaggcagatcttcgctcactgtaacctccggctcccagattcaagcaaatctcccgcctctactaaaaatagcaaaattagctgcgcgtggtggcacatgcctgtgatcccagctccttgggaggctgaggcacgagaattgcttgttccgctg

SEQ ID NO: 600717 - DNA, 256 bp, Homo sapiens
actgattctgcgaaaataccccctttttattagtggcatgctcattcactttatctttatattcaaataagttatttcgctttcactgttttaacaaaaaaaaaaaaaaaaaaaaaatacagccctccccaatcgaagatttcaactttttaattcacacggaaaaaccaagacaatttcacaacttctggacacaaccatcaacacaggacattttttttacaggcaaatcacttaaaacaaaaaagatcccaga

SEQ ID NO: 600718 - DNA, 80 bp, Homo sapiens
atggggcatggaggagaaggcggggccagcgccagctgccgggagccgccggccccccgagggccgcgccgtcgcgtact

SEQ ID NO: 600719 - DNA, 239 bp, Homo sapiens
gcttagctgcaactggcaaaggagaagggtagatttaggtgtgacaacagtttgcttcagagaggtaagggtctgtttctctatctccatgtgacatctttcaacagctttcgcctgacaacgactgtttcctatgtagaagccaccttgtgtttttaagcagaggcaaacctctctcttctcctctgtttcgtgaaggcaggggacacagattggagagattgagccacgatcagcct

SEQ ID NO: 600720 - DNA, 944 bp, Homo sapiens
ctataaacatgtaggagaattatagccagtcttcagttataaccactccaccctcctcactttctctctctctctctcttttctttctcctgctactgggatttaatgggaacacatatgtaaaaccctgtcactagatcagcgtggctcttcttccctatgaactctatacagtacctttctccatccgtcgtctctcacataatgaccacagagcctgcagtataccaacgaaaaccaatattcgcattacaggttgctcctgtcacttccagacagctttcctgcctgtgtgactcaacctaattctggcacagttccataacatccacgattcgctcagcaccaatgcccatccacatatgtaccatgtaccactccatggcgaagagctacatgcatcgacccacgacttcctaggagcttgggaccatactgcattaccttaatccacatgtcctagatggacctattcgcgtggaaggaactctcacactcctgtcatcacatgatcgggcattcctatcggcggattcagcaccccatgctccatgccctttatggccaccaattccttaaacaaaaattctacagacgacatatgtgttcgcataaagacttcccctaattttacaacttaccaccaacatcgggaccccgctctcacaacaccctatgacccggtcgcatgctttctcaatcccgcgcggcgaggcatctatggactaattccccgtccgccagactatagcacaattcacacgggagttaaacaaacgttcgcgttcacgctcctattcaacggatggtccccaaggacgtcaacgtcaagcttctcacgctacgacctctgcatccctcacaagtcactacgtactgctagcagttcagccatcacagcgtccacgaccaacgtcacccatcgttcgatatcagaacacgca

SEQ ID NO: 600721 - DNA, 310 bp, Homo sapiens
atggatagaaggagttcgacttggatgacctgtagggtatagatgacctggaaaccatgccagatgaccttctgaccacgtagaatgacactatgtgaatctactattgcccccctagtccaggagactaataagcagcccccccagacggtgaacccaattggccatctcccagaaagtttaacaaaaaccgaccaggttgcccccttcaccttcttacaacctcttcccctttccccaggggtcctgtcctccactccatcatacctttaatttagagctgggcagtgaagtggatatcactgaagga

SEQ ID NO: 600722 - DNA, 378 bp, Homo sapiens
gacttgctagtgtggtaaactgcctcacaaaatacatggtaataacttttctttaaaaaaaaaaaaaaaagacagcctttacaccatttctagttggcacactattttggcaatggttatgcaccatttcaattcccccattgtgacccctatcacttcatttgatatccctttttgacccacccatctcctttcattatatgggcattgttccatagatttgacaaagaaagtttacactttttgaattaaagatgcaaagttatgcaaaaactttaattactgttgtgaaaaattaaaaaataaaagagaaacaaggcagaggaagagggtgttaagctctcctcgacctgttggattggtggttaacagattgat

SEQ ID NO: 600723 - DNA, 261 bp, Homo sapiens
ctaagactttgtgcgtaactcgtggtttggtttaatccacctcaaccgcctgctatgatggataagattgagagagtgaggagaatggcttacgatctagtgagggagacgatttggtatatgattgagatgggggctagtttttgtcatactggaaagaaccatagtctaccatgtgataagattgagagagtgaggagaaggcttacgtctagtgagggagagatttggtctatgattgagatgggggctagtatcagt

SEQ ID NO: 600724 - DNA, 410 bp, Homo sapiens
gtttttgagggcttcacttgataatgaccatgggaagaatctggggtgcaaagttccacgtgcattagccgaaattattcattcaactagaaagacaattttgcatccactaatacataaaaatcagaaaggagaattgggaaaaagcatattcttagaataacatttagcatccaccaaagtgaaggacataggtttctggcacagttgaaaccttagttggaaaaccaaaccttggcacagtgccaattatttatcttttgatcaggacatttgaaataggcagagaccaccaaaaaaggacaaagtattgaaaagtagctgctcattttttactgccaatattcctgaactttaaagaatatcacatctaatcaaccgcaatagaattgggcattcagacgtcgacg

SEQ ID NO: 600725 - DNA, 435 bp, Homo sapiens
  misc_feature (39)..(39): n is a, c, g, or t
ctccctctattatccacaacaagccatcgtgtttgccangtcagtggggagagattatatgactggggtttacgaggatatatagtcatagaagatttgtggaaggagaactttcaaaagccaggaaatgtgaagaattcacctggaactaagtagaaaacttcatgctctgccatcttaatcagttataggtaaacattggaaactccatagaataaatcagtatttctacagaaaaatggcatagaagtcagtattgaatgtattaaattggctttcttcttcaggaaaaactagaccagacctctgttatcttctgtgaaatcatcctacaagcaaactaacctggaatcccttcacctagagataatgtacaagccttagaactcctcattctcatgttgctatttatgtacctaattaaaacccaagtta

SEQ ID NO: 600726 - DNA, 458 bp, Homo sapiens
  misc_feature (75)..(75): n is a, c, g, or t
tgtgtagtatgagtatgtctacccaatgatgagctagaacatgaacacattaaggagctgttacacaacaacatntagagaggacataagtgactgatggaactgaaaaacaagaatcagaacttcaaacgcaaccacaagtatcaataactgagtagacgaagcaaggaaagaacttcagagcttgaagacaatcttgctgaaataaaacaggcagacaagattgaagaaaaaagaataaacgggaatgagagaaatctccgaggtctatgagattatgtaaaaagaccgaacctatgactgactggggtaccttaaatagatagggagaatggaaccaagttagaaaacatccttcaggatatcatccagaagaacttttccaacctaacaagaaaggccaacattcaaattcagaaaatccagaaaaccccagtaagatactccatgagaagatc

SEQ ID NO: 600727 - DNA, 467 bp, Homo sapiens
  misc_feature (39)..(39): n is a, c, g, or t
  misc_feature (446)..(447): n is a, c, g, or t
  misc_feature (449)..(449): n is a, c, g, or t
ctccctctattatccacaacaagccatcgtgtttgccangtcagtggggagagattatatgactggggtttacgaggatatatagtcatagaagatttgtggaaggagaactttcaaaagccaggaaatgtgaagaattcacctggaactaagtagaaaacttcatgctctgccatcttaatcagttataggtaaacattggaaactccatagaataaatcagtatttctacagaaaaatggcatagaagtcagtattgaatgtattaaattggctttcttcttcaggaaaaactagaccagacctctgttatcttctgtgaaatcatcctacaagcaaactaacctggaatcccttcacctagagataatgtacaagccttagaactcctcattctcatgttgctatttatgtacctaattaaaacccaagttaaaaaaaaaacnnanatggcctcgctggcctca

SEQ ID NO: 600728 - DNA, 868 bp, Homo sapiens
  misc_feature (35)..(35): n is a, c, g, or t
  misc_feature (73)..(73): n is a, c, g, or t
  misc_feature (92)..(92): n is a, c, g, or t
  misc_feature (97)..(97): n is a, c, g, or t
  misc_feature (114)..(114): n is a, c, g, or t
  misc_feature (117)..(117): n is a, c, g, or t
  misc_feature (126)..(126): n is a, c, g, or t
  misc_feature (150)..(151): n is a, c, g, or t
  misc_feature (196)..(196): n is a, c, g, or t
  misc_feature (219)..(219): n is a, c, g, or t
  misc_feature (236)..(236): n is a, c, g, or t
  misc_feature (242)..(244): n is a, c, g, or t
  misc_feature (255)..(255): n is a, c, g, or t
  misc_feature (257)..(257): n is a, c, g, or t
  misc_feature (291)..(291): n is a, c, g, or t
  misc_feature (301)..(301): n is a, c, g, or t
  misc_feature (389)..(389): n is a, c, g, or t
  misc_feature (416)..(416): n is a, c, g, or t
  misc_feature (502)..(503): n is a, c, g, or t
  misc_feature (510)..(510): n is a, c, g, or t
  misc_feature (514)..(515): n is a, c, g, or t
  misc_feature (517)..(518): n is a, c, g, or t
  misc_feature (524)..(524): n is a, c, g, or t
  misc_feature (526)..(526): n is a, c, g, or t
  misc_feature (528)..(529): n is a, c, g, or t
  misc_feature (531)..(531): n is a, c, g, or t
  misc_feature (537)..(537): n is a, c, g, or t
  misc_feature (539)..(539): n is a, c, g, or t
  misc_feature (543)..(544): n is a, c, g, or t
  misc_feature (554)..(556): n is a, c, g, or t
  misc_feature (567)..(567): n is a, c, g, or t
  misc_feature (573)..(573): n is a, c, g, or t
  misc_feature (576)..(576): n is a, c, g, or t
  misc_feature (578)..(578): n is a, c, g, or t
  misc_feature (580)..(582): n is a, c, g, or t
  misc_feature (585)..(585): n is a, c, g, or t
  misc_feature (589)..(589): n is a, c, g, or t
  misc_feature (592)..(595): n is a, c, g, or t
  misc_feature (597)..(597): n is a, c, g, or t
  misc_feature (603)..(603): n is a, c, g, or t
  misc_feature (605)..(605): n is a, c, g, or t
  misc_feature (611)..(611): n is a, c, g, or t
  misc_feature (621)..(622): n is a, c, g, or t
  misc_feature (625)..(625): n is a, c, g, or t
  misc_feature (628)..(628): n is a, c, g, or t
  misc_feature (630)..(630): n is a, c, g, or t
  misc_feature (639)..(639): n is a, c, g, or t
  misc_feature (641)..(642): n is a, c, g, or t
  misc_feature (646)..(646): n is a, c, g, or t
  misc_feature (649)..(649): n is a, c, g, or t
  misc_feature (661)..(661): n is a, c, g, or t
  misc_feature (665)..(665): n is a, c, g, or t
  misc_feature (670)..(673): n is a, c, g, or t
  misc_feature (675)..(675): n is a, c, g, or t
  misc_feature (677)..(677): n is a, c, g, or t
  misc_feature (679)..(681): n is a, c, g, or t
  misc_feature (683)..(683): n is a, c, g, or t
  misc_feature (685)..(685): n is a, c, g, or t
  misc_feature (687)..(690): n is a, c, g, or t
  misc_feature (694)..(694): n is a, c, g, or t
  misc_feature (696)..(696): n is a, c, g, or t
  misc_feature (700)..(700): n is a, c, g, or t
  misc_feature (703)..(703): n is a, c, g, or t
  misc_feature (707)..(708): n is a, c, g, or t
  misc_feature (711)..(711): n is a, c, g, or t
  misc_feature (716)..(716): n is a, c, g, or t
  misc_feature (724)..(724): n is a, c, g, or t
  misc_feature (729)..(729): n is a, c, g, or t
  misc_feature (734)..(734): n is a, c, g, or t
  misc_feature (736)..(736): n is a, c, g, or t
  misc_feature (741)..(741): n is a, c, g, or t
  misc_feature (745)..(745): n is a, c, g, or t
  misc_feature (749)..(749): n is a, c, g, or t
  misc_feature (761)..(763): n is a, c, g, or t
  misc_feature (765)..(765): n is a, c, g, or t
  misc_feature (781)..(781): n is a, c, g, or t
  misc_feature (783)..(783): n is a, c, g, or t
  misc_feature (861)..(861): n is a, c, g, or t
aaaaaacagtcctttctactatttttttcctctgnacctcaagcacatcccttttcatctatttttttttcanggtggcaaaaactcaccanaaatntcagcttaaaagatggnganaatctcaanacccttcccctccaaacataagannccttccaaaggctcctactagttttcaaaatacatgcccaaaaanttttaggatgcaaggcagatttnaccactttgtggaaatntctcannnccagcactgtntntcactctcttgggctgggcctatgaacatggaangcagcagttncatgcgtttttttctccattccacacagaacacagagcagacgctgcccagcttcagacatgtgtggtgaccaaacctgatccctgtngactcacacaaacgtggcatgtaaggnggagcgttacaagaataacaaaaatagctcctcaaaaaacaaaaggcttcatgtatgcaacagcattagttttgaagctcatatgnnctttatnttannanntttttnananntnaaaatntnaatnnttttttattnnnttttttaattntttttnaantnannnttnaaanatnnnnanaaaatnanaaaatnaaaaaaaaannatnatntnataatttantnnaaantanaattataaaaantaanatttnnnntnantnnnantnannnnaaanantttnttnatannatntatanaataattntttcnataantnttttntttntaanaattttaaaacnnncnaaatttaaaaaaaatnanaaaatcccacaaatcacaacataactcttcaatcatctcaccacacatttcattcccactaaaaactaaaactcatanattttaa

SEQ ID NO: 600729 - DNA, 333 bp, Homo sapiens
  misc_feature (39)..(39): n is a, c, g, or t
ctccctctattatccacaacaagccatcgtgtttgccangtcagtggggagagattatatgactggggtttacgaggatatatagtcatagaagatttgtggaaggagaactttcaaaagccaggaaatgtgaagaattcacctggaactaagtagaaaacttcatgctctgccatcttaatcaggaaaaactagaccagacctctgttatcttctgtgaaatcatcctacaagcaaactaacctggaatcccttcacctagagataatgtacaagccttagaactcctcattctcatgttgctatttatgtacctaattaaaacccaagtta

SEQ ID NO: 600730 - DNA, 199 bp, Homo sapiens
agcaggctgtagaacatgagcgtatggccaggggaggtgcagctgacgtcagccctcctgcctgagcgaggaggacgagttgctgtgcctttttggggagtcgcctgcacacccctgccgcgtggagggcgaggccggtcaatcttggcaactcccccaatggaggatttcccggtcacaccggcaggccaaggaccac

SEQ ID NO: 600731 - DNA, 634 bp, Homo sapiens
  misc_feature (212)..(212): n is a, c, g, or t
atctatgctgatgaatgaatgaacttgttttacataacatattgtgtaagtatttccctgtcagtacttaatagagctacgcattccttctctagttgcttaatgatttcctagtatggactaccatgatctacttaatccttaccaacataggttgtttccagtttttagtttttaacaatgctataaatctatcaaattcctggggaagncaaaagcagattaataaactgagatagaaaaaataagctagtagtttacatgtttaagaatttttggttgtatattaaaagatcaagtgaatagtcactggcctctaaaatatttagaaatctccaattgtgccgggcacggtggctcatacctgtaatcccagcactttgggaggctgaggcgggtgaatcacctcaggtcaggagttcgagaccagcctgcccaacatggtgaaaccacatctctactaaaaatacaaaaaattagccgggcgtggtggcgcctgcctgtaatcccagctactcaggaggctgaggcaggagaattgcttgaacccgggagatggaggttgcggtgaaccgagaggacgccactgtactccagcctgggcaacaagagtgaaactccgtctcaaaaaaaa

SEQ ID NO: 600732 - DNA, 365 bp, Homo sapiens
  misc_feature (39)..(39): n is a, c, g, or t
  misc_feature (344)..(345): n is a, c, g, or t
  misc_feature (347)..(347): n is a, c, g, or t
ctccctctattatccacaacaagccatcgtgtttgccangtcagtggggagagattatatgactggggtttacgaggatatatagtcatagaagatttgtggaaggagaactttcaaaagccaggaaatgtgaagaattcacctggaactaagtagaaaacttcatgctctgccatcttaatcaggaaaaactagaccagacctctgttatcttctgtgaaatcatcctacaagcaaactaacctggaatcccttcacctagagataatgtacaagccttagaactcctcattctcatgttgctatttatgtacctaattaaaacccaagttaaaaaaaaaacnnanatggcctcgctggcctca

SEQ ID NO: 600733 - DNA, 687 bp, Homo sapiens
  misc_feature (212)..(212): n is a, c, g, or t
atctatgctgatgaatgaatgaacttgttttacataacatattgtgtaagtatttccctgtcagtacttaatagagctacgcattccttctctagttgcttaatgatttcctagtatggactaccatgatctacttaatccttaccaacataggttgtttccagtttttagtttttaacaatgctataaatctatcaaattcctggggaagncaaaagcagattaataaactgagatagaaaaaataagctagtagtttacatgtttaagaatttttggttgtatattaaaagatcaagtgaatagtcactggcctctaaaatatttagaaatctccaccgcgcctggcctggtttctctatttaaatctgaagaattttcataatgccaaattttttctggcacagttacttatgtttttcttttctttctttcagttataggtaaacattggaaactccatagaataaatcagtatttctacagaaaaatggcatagaagtcagtattgaatgtattaaattggctttcttcttcaggaaaaactagaccagacctctgttatcttctgtgaaatcatcctacaagcaaactaacctggaatcccttcacctagagataatgtacaagccttagaactcctcattctcatgttgctatttatgtacctaattaaaacccaagtta

SEQ ID NO: 600734 - DNA, 1117 bp, Homo sapiens
ggcgcggccttcatgagtgtacggctgtcgtggtaagggatcatggactacttgcactccgccttggattcggttttcgtctatcagacattcaggtacctccaatgatgggtggatactaatgtagatccaggagtctatagggcaaagaagcaggctggatggtcatctgcggctgtaaccattctatgaggggtacaagctacgtttgagagtgacctggtcagttcttcttgctactgacacattgggctacagaggctctgacccaggactagataacagacgctgcagagactcgggttgacaagggccttaaggaaaggatagcctgctataataggattccgtgttcggccaggggtggtgccgagaatagcgcccacgggtccgtaatgggtaggcagtctttagcgggcgcactccgttgtcccgtacaatgtgtcgtggaagctcagggcgtcacataggtttggctcccaaggtcgtgcagggtcgcggttagccgaaggaaagcagaggcttggaccgtcacatctagagagggcctcgtgaagcaagtgacgtgtatagtgtctttacatggtgtctagggttgacgatgattacgcagcagtaactgggactgcggtgaaggaagcgtataatccgtacaatgtcgtagtccaatttccgatacagagaataatcaggaaggaaatcggtgaagcgatcccaaggtgggatcgagccagaagccaagataccgaacaaaagtgaccagggagacggacttgcccgttgtgtgcttcgaccattctttgtcagagacaggcacaagaagaccagtcgcgcgccctatgtggaaagacgggagcgccaacaagagggtttgctaaggcaatgaagcataagttaggggttgggagatacatcagggtaggagggctaagcatttgggaaggaaaagggtgtgcgaaagaaaggttcgtaaccaaaggtttcgcaacacgattaatcgggttaaagtattacggataaaaggggtattcggtaaatagatttcacgtacattgaagattgatagcgaaaatattatcgggaacaaaggtacataagagaggaagagcgagaatac

SEQ ID NO: 600735 - DNA, 133 bp, Homo sapiens
gagaggggaaccagagagggaccagaagggaggagacaaagcagcaagcagtggatttctccttgacgacgccagcattagctcctttctgcaccaccaccgtgagctttctccctttactagcagttcagct

SEQ ID NO: 600736 - DNA, 617 bp, Homo sapiens
ggaaggcagtgcatgctctgacttactgttggagggggctgggcctgctggaacccccccaaataaagacctaccccaccaaaaaaaaaaaaaaaaaaaaaaaaaaaaaaaaaaaaaaaaaaaaaaaaaaaaaaaaaaaaaaaaaaaaaaaaaaaaaaaaaaaaaaaaaaaaaagaacaaaaaaaaaactaaaaacaaaaaaaagggggcggggctgctctttcatccagtctggagagcatgaccagtgccctccctcacctgagtttgtttggtggataagacgaccatctccagggcagtgtttatattacggagtgagtgctctggaggttaatgacgccacgaggattgcatgaaaacccaaccaagacatcctgttgttgcagacaaggacatcacactcaggcgtgggagagtcaagaaccagcggagaccccgctcaatccaaaaattgaataattcacggaacaagtgagacatgcaatgcaactctggaatggccagttgggggagcatgacaaaccagaagtatctagctggtggcatgaacatgtgctttgaagctgccacttattgtacaatgtaattcacaagcgggggtaaattgaatatga

SEQ ID NO: 600737 - DNA, 350 bp, Homo sapiens
aaggtagctgtactgggtgctccagtcacctcccttctatctagtaagtgtatccctgtgctggagccacactgcctcatgcactgatgtgagtaataagcctgcaccattgtatgtcgaattcttcctgcatcttcttatccatcaaaaatcactttgactttgctagtccctttactcttccatatcaatagtttatccaaccatcaggttccaggaaaaagcctgtaagtagttttcattgggacttacatggaattggtagatatagaaaaaacagatatttttatgagtcttcctattcataaaaatagtatgtctccatttacttatgtctttaagatgtattt

SEQ ID NO: 600738 - DNA, 165 bp, Homo sapiens
taggattaagtataaactgcagttttgcccttaaaactaaaaaattattgtttgaacactagttgctgaggcaggagaatcgcttgaacctgggaggcagaggttgcagcgagattgcgccaccggactccagcctgggctacagtgtgagattccgtctcaaac

SEQ ID NO: 600739 - DNA, 200 bp, Homo sapiens
ccccccccggttttttttttgggggggggggggggaaaattttttccccaggaaaacatttttccccttgggccttttttgggggccccttaaaaccggttttttcaaaaaaagcgggggggcggggggggttttccccggttttttttcccccccggggggcccccggggggcccccccgggggcccccccgggggcca

SEQ ID NO: 600740 - DNA, 174 bp, Homo sapiens
ggcgcaggaatgtaagatagagtacgtggaatacagtgtcacggacagagctcctggcctcaagtgatgcctcctgatctatcgctgggcctaggacgaccaacactggtgatgatgatgagcagaatggtcatgaagatgcccaaaaatcagggccccagatgtacaggcact

SEQ ID NO: 600741 - DNA, 1628 bp, Homo sapiens
  misc_feature (27)..(27): n is a, c, g, or t
caaagtccatgtcattactactctctngtcatcttattactggccagaactgaatgtcagatatacgttgacccatttcatggtgcgcaacatcaccaacagagaactgcgtggcatgatacttagtgttagcgatgggtacctggttcgcccttaacacaggaatcagagtcgtaactctaatcagtatattgacaatattattaatattaccctctgataactcaccatgtgacattgggactaacatgtgatcgtacccctataagacaaagtatcccccattatcagccttacatttaatgatctgagattaaacactctggtatgtgagaggtctagagtccagagattctatgtcacactctggcaattgacagagactgatagagtcgaatcttggaagcgatatgatccatgggactcatcttttgcttatggtaagaaaaagaattgacatagatacttgcataaatataaatcgataaaatttacgatatacatctcctatgtatacaaaaatctcgcgagctatgcttcacgatgtccaaactttttcgatgtattatgtttagttagagaatatatggtcctaaattattgaacctctgtgggtttctcatcgatagaagaaaataataatagatacatacattcccttagacaaaacttggggcatctattatcccttttccagggggtattggtacccagagttgtcaaggaacaaacacactcgggggttggtagaagcgtaggaagaaaaccctggttctgggacgaaactggtagggaccacgcgcaaaacgggggggtcatgcggaatttgtggttacccctaccgttttcgattacctttttactgctaggattagcctttcccctggaacacccccacttgagcataggagccagaaaattgccaccaaggcaaacaccaccttgaaggttgtgggcccatttgggcccccccctgttcagttgaggtaacgttatagaggggtatggccaaaagtcttggtgtctggttctctggttgacagggtttcccgcgtagggccctcaaaaggaaaaaggtctaggagaaaaaccccttggcgctgtgggtgccctatcggttggccctctcgatgcaaaactgggggatatccacacccacttctggaaattatgtgtgtccctccaaaatatctgcacaacaccggtacaaccacaccaccttcttttgaacaccccatactcggatgggcgggaaagcggcacatattccttttacaagtggaagaaaaccaatttcttttccattcggattatttggggcttaaccgtagagaggtctttatattccatgttgaggagccccccacttgggaacaatttgtgttaagtatgtgcccccgtgccgacagggaaagtatcacacggcgccatttgcgtgggggccccatggtatagaggcaaccctttgtcaacaaggaggcgcaaaaaacgccccacctccaaaaggcgcattggggccctgagatttcaacaattgctagcacaaccttaaaccccacgtgcttgtgtaacacgcgttccacaactactccacagaaagacactttgtcgtgaaaaaaattggcacc

SEQ ID NO: 600742 - DNA, 424 bp, Homo sapiens
actggtcctggtttcctatccatggccaatcaaggccagaataccaataattctcaatttgttatacccctgaaaaaaccagaccctttggcctttaagcatgtagtatttgggtttgttaaggatggcatggatcctgtgaaaaaaattgaatcctttggttctcccaaagggtctgtttgtcgaaaaataactatcccagaatgtggccagatataaaatcattgttgttcatagaaaatttcatctgtataaccagttggattgaagcttagctattcccatttgatagttatgttcagcttttgaaaatgggcgtttcccatttccaaatgtaaaattccagcttaaagctgttgtccctttttaatgtgttataattgcccctgcatggtgtgaaataaaagtttaacccctggtgtta

SEQ ID NO: 600743 - DNA, 754 bp, Homo sapiens
ggtttttcatgtagaaacagtagtcggtatcttagtttctaaaatattcagtaccatctaattaaatatgttcaacacaatttacatttcaacaacctggagaacttcgctttttacactacgtagtaattgcttttaaaaagttacttctgtgcataggcaggctattgatttgtgggagaaaatgctttgtcttgcttgtattcagagccagtactagttctacttcgatttcagttttttaatattcaaagttggctgggaacagtggctcatgcctgtagtcccggcattttggggggccaagacgggtggatcacctgaggtcagaagtttgagaccagcctagccaagatggtgaaaccccgtctctagtaaagataacaaaaaattagctgggcttgatggcatgcgcctgtaatcccagctactcgggaggttgaggcaggagaatcgcttaaacccaggcggcagaggttgcagtgagccaagatcgcgccactgcactccagcctcagcaatagagtgagactgtctcaaaaaaaaaaaaaaaaaaacctgccatttttcaaactataccggagagattatttccaggtgccattcttatagtatacgccagcaggcctttaactctgctgtttgcccagatgccgctgggccatgggtttggggtgcccggactttcccaatggcacattcatcaggatgccttatggattgatcgacagggcatagccctgggggatattac

SEQ ID NO: 600744 - DNA, 474 bp, Homo sapiens
tctagaggatcgtggctcagtgatctcccacctcagccttctgagtagctgggactacaggcatgagtcaccagttttaagaaataatacagaaggatcccatgtaacctttacccagtttcccctcgtggtcatatcttgcaatgtggtacattatcacattgtgtacacttgcaatgatggtacactatcacaacaggatattgacattggtacagtcaagatccagaacattttccatctccacaaggatccctcaacttgcacttagatagctgggactacaggcatgagtcaccagttttaagaaataatacagaaggatcccatgtaacctttacccagtttcccctcgtggtcatatcttgcaatgtggtacattatcacattgtgtacacttgcaatgatggtacactatcacaacaggatattgacattggtacagtcaagatccagaacattttccatctccac

SEQ ID NO: 600745 - DNA, 111 bp, Homo sapiens
ctccttctgtgaattctagtacagcagaggatagccatactgcacttctcaaaaacgttagtgtattcttcaataatgcatgcctccttagatgcagaacgtccaggtatg

SEQ ID NO: 600746 - DNA, 120 bp, Homo sapiens
caggactcgaagcactggggagcagtgggcctccagggggcagctccttcctccagctcccggagccagtcggcagcggtcaccccgtcatccaccacctcttccacccgtgccttccat

SEQ ID NO: 600747 - DNA, 687 bp, Homo sapiens
gcagtatggatgtggaggtaacagaggtcttgaggactccaaaatacgaagcgtcgggtaaataactattgaatatggcacatggaaatcagggaagaatgtaataagcatcatcgatggacgggatgagctgggagatcgtggcaagtttaaaggctaatgggaagttggcaagccaaaaaagtcctgtcttgcgaatggccaggaaatcgccaagaaaacctttagaaaacatggttaaagatggagaaacccggatgactccctggtttctgaagaggtgcttaggcatcgaagtgagactgacgagacttcacactgtacccttcagaagggcagacactcacgagatcatcaaccacggctccctcgctgggaggcagacacagagctggaggcggcggccacaaactaggtgggcagagaggcgtcagcatcgggacttgcgggaggccctgggaaggaacagggagcggtggggcctggacagccctggggaaaggaagttacttggaggagaccaggggcttgcatttgggccaaaaacaaggacaagagatcagctggtcccagggaactctggagcccaacaccacatcacgggtgcaggggcctgacaacccaagagagggctgtgggcacgggcaccagctgtggcggtctgaggctgtgccagcacaatgtctg

SEQ ID NO: 600748 - DNA, 270 bp, Homo sapiens
tcttcctctcaaatcagtgtggggggctaggcttaagggagggggataatcggcccagtggtctcagatttccagagccccaaagatgaggtggtttcccatctcttcccatcttcttcttccctctttccgcgggaatccatattccaaaccacatttcccagggcagcggggaaacctcccttccccggtatagcctcttcacttcctggatcgggcaaaaaatttcttggcacacacccattgcaatggagaagccaccactctttg

SEQ ID NO: 600749 - DNA, 413 bp, Homo sapiens
  misc_feature (2)..(2): n is a, c, g, or t
angatacacgtagcacatgattgctgtgggagggtaggaggaggtgcttagaacagctaagagatctatgtgaggataagaaaatctcggggatctcaaaaagaggaaacaggtgtgttttgcatcttccagggaagttctgattttaaacatttggtctcattgtcttcttaagcatacttaagcttctgttagattgttgttgtgatacctgggcaagagaaatacggtatcatgaggtaaaattaatctgttgatttgctaattgaaaagagagtcaggaaaaggaaggtacaaagagactgaatagaatgataagaatttatcctaatgggaactttcaacctagtagaatagtctgacagtacaagtcagagagaagccaatatatgaaaaatttaaatgaaacataa

SEQ ID NO: 600750 - DNA, 884 bp, Homo sapiens
tcatgcctcccacacatagtcgcagatttggagagatgggaggcaagtttatgaaaagccaggtgctaagccaggtctaccataaccagagtcagggactcttatcccgagctgtcaaggacagtcgaaggatatgccaactcggttgcctacgaaaggacagcttaagtgccagagtgagattggcctgaggcctgctcagattcgttcctacgtgaagtaaccattctggtgccaaagcttcatgccccagataacgtactgattcctcctagtgtgcacaaccaacaggcactcaaacaccaactctgggacagacaccgtcgagcttggtctcaagaactagatccaccacttatccaggcaacatagcctgccgaagaaccagtgaaaagccaccaccgtcgccaggcaagagactcctgttgaagtaactgataactgttgtgactgatgtatctaaaatgagtggtacatatgctaatgaggctgtcaatggtgtaggagaaggtgagggctcctatgcacgtttccttcctgagatgttaaggcgaagtattcatcctgtcactagatagaacgcgatgaagcatagcgaacaagcatagtgctttgatcagtttactcaaacaggaacgggataagccgcaagtgacaacttcatgcaggctttcctgcaatgtattggaccaggtgtccgaaactgggaggtttgaacatccctttgtggtgaaatccctagtttagcaccacttttgcagctcgtggccgtcatttcagaacctggtgagacatgtcagaaactagcttcaacactagatacgtggcaccaaattctctcttctactttgtttcagccagttgttcagttaaagatcgaaatg

SEQ ID NO: 600751 - DNA, 827 bp, Homo sapiens
  misc_feature (76)..(77): n is a, c, g, or t
  misc_feature (91)..(91): n is a, c, g, or t
  misc_feature (105)..(105): n is a, c, g, or t
  misc_feature (111)..(111): n is a, c, g, or t
  misc_feature (251)..(251): n is a, c, g, or t
  misc_feature (280)..(280): n is a, c, g, or t
  misc_feature (398)..(398): n is a, c, g, or t
  misc_feature (599)..(599): n is a, c, g, or t
  misc_feature (616)..(616): n is a, c, g, or t
  misc_feature (618)..(618): n is a, c, g, or t
  misc_feature (827)..(827): n is a, c, g, or t
ctgtaagcactatcctttgtactccctcaacgtggcctccatgtgggtgaagctagggagactctacatgggcctnnaacacgggcggggngggagaaaacactnaaaaangccattgcaatcatggaagtagctcacgggaaagatcatccatatatttctgagatcaaacaggagattgagagcgcctgagactatgcagcatttcagttttcatttaaacacttagttcagaaaccgggggggggttnaatatttcaaattgcgcacatcactccancatctctgtaaaataatgtggaatgagaatacttcttggacttaaccactggacatgccggactttgaggggaggctgaatcttgaactttaataccaaattaattttgaatgctttntggtcctaagagataatggcatgggttcatatggtatactttggacagacagagttttaaaaatggaattattttttctttcatgcctcttggaatggtctgaacaaacttgaatgatgaaagtgttaaagagatatcagtaaaaagaaaaagaggaggggggggggaggaggggagggagagagggagaggggagggggngggggaaagggagggangnaaaaaaagagggccggtggcggcaaggggggaggacttgggggccttccctgggggggggggtaataatggggttttgggagtggctgcgtgggcgtgggcgggggggggggcgaggggggcaaggtcagtgggggggggagtggcgtttcccaagggggagggaaagcgaggagaacgtggtgacagggggccggaaggggtcttccn

SEQ ID NO: 600752 - DNA, 157 bp, Homo sapiens
  misc_feature (44)..(44): n is a, c, g, or t
tccaaaaagcctcctttgcccagatttccaaccgggtttggggntgggtttcggaggggagggtttggggggccccccttttcccccaacttccctttcccctttttttttccccattgcagggtttggaataaaccatgtttttttgcccccccca

SEQ ID NO: 600753 - DNA, 386 bp, Homo sapiens
  misc_feature (1)..(1): n is a, c, g, or t
  misc_feature (57)..(57): n is a, c, g, or t
  misc_feature (181)..(181): n is a, c, g, or t
naaaaaaaaaaagcgggactgcactctcagactgagcaattcacatcatcaggtacngaatcaccctaagtgtccatcaacggtaatggataagaatgtgtcctggctgggcgcggtggctcacatctgtaatcccagcactttgggaggcagaggcaggtggattgcttgaggtcaggantttgaggccagcttggccaacatggtggaaccccgtctctactaaaaatacaaaaattagccaggagtggtggtgggtgcctgtaatcccagctacttggggggttgaggcaggagaatcacttcaacccaggaggctgaggttgcagtgagccaagattgagacactgcactccagcctgggtgacagagtgagattccatctc

SEQ ID NO: 600754 - DNA, 292 bp, Homo sapiens
  misc_feature (226)..(226): n is a, c, g, or t
catgcacactataggcctgccagcaccaagtaaggggaggcgggcctgcgcaggctcggtacggtacctcggggtgcggtcctgtctggagtgcctgaggccgccatggggttgtgacagcgtggtgaccctggctctgtgggcttgggaactgagtggcacatgcagagagaaggctcagtgcctatgccccagtgcctggctgtgcccatgcttgggtggtgcnctacagtgtcagagtggttccaccaatgcccccatggtagcctgtgagacagcagtgtgtcagccc

SEQ ID NO: 600755 - DNA, 216 bp, Homo sapiens
ggaacacccattcgagacccagattaaacagacctccagcactccaggatcctagaatactcatctctgactggcggtatgtacgatggtgatttggattcaaggaagacagacaagaatgtgcatcaattaaggaacaacattctggaatactcaggagtagtaatctggcacacttaaccctaagggccagcaggccccgagggcaaccaccca

SEQ ID NO: 600756 - DNA, 510 bp, Homo sapiens
  misc_feature (366)..(366): n is a, c, g, or t
gaaaatgtcaagcgccgtgtcgtcgtcacgaccaacgtgcgcggtcgggacttgggcactttcgtgacggaagcgcgggagcgcatcgcaacgcaggtcaagctgccgaccggttactggatcggttacggcggcacgttcgaacaactggcctccgctgcaaagcggctgcaggtggtcgttcccctgtcactgttaatgattttcgggttgttgttcatgacgttcaattcggcaaaggatgccctggtggtattcagcggagtacctcatgcactgaccggcggtatcgcggccctgtggctgcgggatattccgttgtcaatttccgccggcatcggcttcatcacgctgtccggtgtggcngcagtcacgagtgtggtcatggtggagagaaaccgtgacctgcgcgcccagggcatggcaatcgatgaagcgattgaaacaggggccttgatgcgcctgcggccgatcctgatggtggccctggacgccagcctgggattacct

SEQ ID NO: 600757 - DNA, 663 bp, Homo sapiens
gcctgggtgacagagcaagacttgtcaaaaaagaaagaaagaaagagagagagagagagagagagagggagcagcagagcagagcaaagcccagcaccagcaaagccaagcaaagcaccagaacagtaatagcaaagagcagaccagcaacagcaaagcacagcacacgcagatgcagcaacagagcacaatgaaagcaagaaagcaaagcaaagcacatgacaaagagacacagcaaaagcgaaaggccgagcaaaagcgcgaagagaggactaatttcgtgatagtggcgtagtcgcttaaacatatcgtgggagcacctcatttataaagagtcaagagaagatgaaacacgtaattggcttgagaggaaggggatgtaggaggaaaagtaagagaaaccggcaattataagtaacaatacgtgataaggggtggggggaatggattaattagaaggattgaaaagataatgcgaggaccaaaatatgggggggaacacagcaacaggggtgtggaagggaaaatttcctgcaagttagtcgtagaaagctagtaaaggaggaatgtggagcacaggaaagtctcatgagggggataatatactcaaaggattataaatcatgctatatattgagacacatgcgagagatatgtggtatg

SEQ ID NO: 600758 - DNA, 626 bp, Homo sapiens
cgcccttttatttatttattggtaaaaatacatctttaaataaactttaagaagtacagcgcactttaattgaggtttacattgtagttaacagcaaatatactatccatggtagtgtatatgtacaagtaaagtaactataggttgagtttctctcccaatggctggataaaccaaatctgatacatccacattaaaggttgtattatccaagtgggttctccataaagggccttataacaataataggctttataacaagcaaaaaggtatccctcccatcacaagtgagagctagatgagggctccaaaagttgctcttcaaaaacgtgtcaagataataatttgacctgggaacggctatcacacaacagctatcagatagcaaatcagaaacacataaagaaaaaagacaagtaaggaaacaggatgtgagagtcaaagtgacatccaataataaatcccaattggaggactataagattacaaagccaaaagtatactgtatagagaaagtacacggttaatatatacaacccccgtggacctaagagaacgacgggacaaatcctctaaacgactgagtcatacctgtaattaacacatggttaatacagaaagacccc

SEQ ID NO: 600759 - DNA, 1216 bp, Homo sapiens
tgggtttctctccagcagtttgacaatacagtttcacaaaaaaatccctttccctttaaaaacccccatctggttttctccttcctcgcgtgaatttcctccccggggttccccattgttggatctcccgtgggtgtggtctcccattgctttcatttccgtgcccgtgtatactttggcctcgtgctctcagtttgctgcacaatctcccccaccctttccgtgcgtgggtcccactaggggctctctaggcaaagttttgccccaagtctgtcttcactctccctgccaggtcctgttgctctagaggccctatgcggaatttcccccctgagggtcgtggtcctcgcctattctcggccacccgttgtgggatgccttctctgatgcagcgcgcccaattcacagggtctgtgcccacccagggtgttctctgttctctgtgtctccagctttcctggtgtcctctcgtgaaccccgtatgtgtgagggacgcttgtattattgggggcgagtataaaaacaacccccaacaaaccaacactgacaaccaccttccacagttctactgctcggggcaacagctagttacaaccaatttggattccctttgttgaatcccctaacaaatctattcacctctctctacacatgagtttcaaccagagggtcacttttccaaagtggcaaaactcacaactcctcttgacaactaatcatttgtcgcacaacaaacacagcaaccctttgtttccaccggggggggcactcttcttctccccacacccgagaatcttgtcggctctcacgaatgtgtgtttccactccccacaatttttgtgaggcgaacacacacttacaacccatttctagttgctgagacgctcctctcccgcgggcgcttttgttggaacacccttgggcgatccttccaacaccacttgtgtgcccactcaagtcggaggcgcccccccgtaacttttctaacaaaaattatagtctttctctcttacgggctaattctacaaccactttttaacaccacaccccctttccgcacaccaactttttcgttgccaaccgcgtttttcactcccacctaaataacacctgtcacaaccctctttgggtacactctccttgatacaccccatgtcccaccccattaacatttaccactccaattatcttcccctccttgagaaatatatacgcc

SEQ ID NO: 600760 - DNA, 303 bp, Homo sapiens
gtatcaccttcacgagcataaatcaactggatcaacaggagataggtagttggctgtattgctactatgttccgcgattctaacgtgcaagaagagatatctagagagaagaaaaagtgtcagtcaaaaataaagtcgcagagcacctatgccaccacagaacatggctcgtcctacatattcattcagccagtgtttatccagtcctcgcgctatatgtcacgctgtaaatctttagcgcctttactcccgttcctctatccctcttatcagaacttcacttatcaatccaggatctatctc

SEQ ID NO: 600761 - DNA, 333 bp, Homo sapiens
  misc_feature (5)..(5): n is a, c, g, or t
aacanaaatactacaaccaaattcagcagcacattaaaagtaaaatacaacatgacctagtagaatttatccttgggtataaattgggatggctcaatatacaaaaatcaattaaggctcaatatacaaaaatcaattaatgagatcaggtgcagtggtgcacacctgtaatcccagcactctgggcgtcttacgcaggcagactgcttgagtccaggagttcgagaccagtctaggcaatgtagcaaaaccccttctctacaaaacatacaaaaatgtgtgaggcatggtggcatatgcctgtagtcccgactactcaagaggctgaggcac

SEQ ID NO: 600762 - DNA, 180 bp, Homo sapiens
  misc_feature (134)..(134): n is a, c, g, or t
tgggcggatctatctcaaaaagaaaagaaaaaaaaatagtctttggctaggcaaggtggctcatgcctgtaatcccagcactttgggaggacgcaggaggatctcctgaggccaggtgttcaagatcaacctgngcaacatagtgagacccctgttcctactagaaaattaaaaaattag

SEQ ID NO: 600763 - DNA, 722 bp, Homo sapiens
  misc_feature (25)..(25): n is a, c, g, or t
  misc_feature (44)..(44): n is a, c, g, or t
  misc_feature (53)..(53): n is a, c, g, or t
  misc_feature (71)..(71): n is a, c, g, or t
  misc_feature (74)..(75): n is a, c, g, or t
  misc_feature (116)..(116): n is a, c, g, or t
  misc_feature (121)..(121): n is a, c, g, or t
  misc_feature (125)..(127): n is a, c, g, or t
  misc_feature (129)..(129): n is a, c, g, or t
  misc_feature (143)..(143): n is a, c, g, or t
  misc_feature (150)..(150): n is a, c, g, or t
  misc_feature (158)..(158): n is a, c, g, or t
  misc_feature (163)..(163): n is a, c, g, or t
  misc_feature (167)..(167): n is a, c, g, or t
  misc_feature (174)..(174): n is a, c, g, or t
  misc_feature (184)..(184): n is a, c, g, or t
  misc_feature (203)..(203): n is a, c, g, or t
  misc_feature (207)..(207): n is a, c, g, or t
  misc_feature (209)..(209): n is a, c, g, or t
  misc_feature (211)..(211): n is a, c, g, or t
  misc_feature (256)..(256): n is a, c, g, or t
  misc_feature (258)..(258): n is a, c, g, or t
  misc_feature (260)..(260): n is a, c, g, or t
  misc_feature (263)..(263): n is a, c, g, or t
  misc_feature (268)..(269): n is a, c, g, or t
  misc_feature (278)..(278): n is a, c, g, or t
  misc_feature (280)..(280): n is a, c, g, or t
  misc_feature (286)..(286): n is a, c, g, or t
  misc_feature (296)..(296): n is a, c, g, or t
  misc_feature (308)..(308): n is a, c, g, or t
  misc_feature (313)..(314): n is a, c, g, or t
  misc_feature (317)..(317): n is a, c, g, or t
  misc_feature (327)..(327): n is a, c, g, or t
  misc_feature (334)..(334): n is a, c, g, or t
  misc_feature (345)..(346): n is a, c, g, or t
  misc_feature (365)..(365): n is a, c, g, or t
  misc_feature (374)..(374): n is a, c, g, or t
  misc_feature (378)..(378): n is a, c, g, or t
  misc_feature (383)..(383): n is a, c, g, or t
  misc_feature (386)..(386): n is a, c, g, or t
  misc_feature (388)..(388): n is a, c, g, or t
  misc_feature (397)..(397): n is a, c, g, or t
  misc_feature (412)..(413): n is a, c, g, or t
  misc_feature (420)..(420): n is a, c, g, or t
  misc_feature (428)..(429): n is a, c, g, or t
  misc_feature (449)..(449): n is a, c, g, or t
  misc_feature (465)..(465): n is a, c, g, or t
  misc_feature (473)..(473): n is a, c, g, or t
  misc_feature (475)..(475): n is a, c, g, or t
  misc_feature (478)..(479): n is a, c, g, or t
  misc_feature (481)..(481): n is a, c, g, or t
  misc_feature (484)..(484): n is a, c, g, or t
  misc_feature (489)..(489): n is a, c, g, or t
  misc_feature (491)..(491): n is a, c, g, or t
  misc_feature (496)..(496): n is a, c, g, or t
  misc_feature (612)..(612): n is a, c, g, or t
  misc_feature (649)..(649): n is a, c, g, or t
  misc_feature (652)..(652): n is a, c, g, or t
  misc_feature (719)..(719): n is a, c, g, or t
ggagaaggcggacgtacagctcatnatgagacgacgactcctanagccaccanaacggcctcgaataagcnganncagaaaagatcgcggactaggaccaggaccgggatccccanaggancaannngnatctcaagcagagncttcgangatgtgancgcanaaanggtaganaaagaaaacnttatgaaaaaatgtggaanatgnancnatgcccatcatttgaaaataaaaaaaaaagtaaatgtaaaaaatnantnaangtgtnnatggccatnancctggncttcattganggaattctcttngacannctnaaatgtctgnacatctngattttaaagnnttttgtaaaaacacatgcntaatggttnagcntacanagnanaaaaaaaanaaaaatgtgaaaaannttaaaantgctccanngtgtaagagcgtaggaagangcttctcttctgtcancctgcaantnaannangantgaananaaagnccccaggtctggagattgggatactgtaatacttctttgttattataacataaaagcaccactgttctgttcatttcctagctgttctaattaagaaaactattaagatgagcaancacatttagaaatgtttattgacaggtcttttcaaanaangcttttctaattaatagccaaagatttcatatctaactttgtaaccagaattatacagtaagttganaca

SEQ ID NO: 600764 - DNA, 1040 bp, Homo sapiens
gctcaggtcgccgctgcgaagggagccgcggcatgtcgtgcgacatctgcagatggatggtcgtgcggaactgcatcacagttttccttgatcatacgaggaataagcagaccgtacagtgacgtagtaaggcccaataatcttgaatggtcgcccgcagaggttcgcttgccgctagctagacgcgactgtagttctccagcataggtactgtgtggacgtggagccggcaagccggactggcgatacggtgtccgtggagtggtctacttatagacggaaggatccgtgccagacggaaacgcactgtcgcgacgctgcgctcatggtggccgggaccaccaatgctgagcatagcaactgcttcgtcgcctagcgctcgagcgagcgatgcagaacacatggagtccgcaagagacaagtgaccgagcgccgaccgggcgcactcgggcagggccaatcgccggcaagggtcgcatggcggcccacttctcttcgctgcaacgacgcaggtacaggccctagtgaactcggggtgaaagggaaggaaaaaggcgggaagcacgggtcccccatcccacacgaagcttgccatgcacgtcgcacacgcatgctcccccaagaggtcgacactaaaaggttcaagcatggccttgtttcgttccgaggagcttcggagagaatgaagatctcttggacaaggacacatcatatcaaaaagacagacaccacaggcccaggacacaaaattgttccaaaaccaccaagatcaccccttccacatagggagcccgcacaaagtatatatggtggggaggagcgagaaaaccaaacatgacaggggcatgggacacgcagccaacctacaaagaccccgttatgggaaaggggttggcctcggcacagggcatgatagacaagcccgccaagacccttgagggtgggctaggcaagaaaggaaccaacaggaacccctgggggcctggagactgggcggtgaacaccttggggcctgaccaaccaccgtgggcaaaacccag

SEQ ID NO: 600765 - DNA, 929 bp, Homo sapiens
acatggcatctatgccactgcgatcagattaaagcattaacaatgcccagtagatccgagtcgtgtctgaaacactatctctctgctgctctgatgtggatgtaaagcggaaccttgccgaaggattactctggggcagacatgtatcgtaaaaaccataaggagtgctgctacattatcattctatgctgaaacattggtatgcgcataaagacattcgctggttaaacccttgaagggactcgtgtgaaccaatggtggcgtgccacttgtgtgcacgaagcctatggcatgagattagtcctacttgcagtacatcatccgggttgggtgggtggaccctacatattcatgtattttgagactgtaatggtgcacctttacaagcaatggcttaaggagaataaaatacctgtaacttgtcatcgtgcatgtcccgacatttttccgtcattttgaattatgttgctctaccagtatgctacatcagttggatactgtatctgtaagatggatcaggtgtattagggggcaatgatctatttgtaggattcggatgaaagatggatttagtgcatttttaaagggtgtgtgatttatgctagctaaggaacgcatttggaatattgggtttcttaggggattagacagattatcaagttattgaacaagcgcgcgtgttgtcatatacgtaagtgcaaactgcgttatcggatgtggttagcccaggtgggccaccgcttaggcagttcgtgtggcaagtacaggaccttgactctgtcttgataaactctggtacactaggggcaggccgctaaataagtggaaaagaaggcgcccctctcaagaaaaaaagcaggggccaaaaaaaggagcagaggggaaagaccaagggggggaccattttagcaaacaccccgcggggtacg

SEQ ID NO: 600766 - DNA, 732 bp, Homo sapiens
  misc_feature (121)..(122): n is a, c, g, or t
  misc_feature (208)..(208): n is a, c, g, or t
  misc_feature (215)..(215): n is a, c, g, or t
  misc_feature (219)..(219): n is a, c, g, or t
ggggcgaagggagcaatgctgtggttcagggcgccatccgcccgccatccgacgcaaaaaaggaacggcgcgggtcttcgtggtgttcgtggcaggtgatgatgacagtctaccagattgnntgcaagttgggaagatgataaagtacagaaggcatcttcaaccagttttgttgctattaaaatcgataccaaagttgaagcctgcntacagtnttcncaaatctatcctgtagtgtgtgttccatccagtttctttattggagacagtggaattcccttggaagtaatagcaggaagtgtttctgcagatgaacttgttacaagaattcacaaggtccgacagatgcatttgctaaaaagtgaaacatcagtagcaaatggcagtcagtcagaaagttcagtgtctactccatctgcgtcatttgaacctaacaacacttgtgaaaactctcagtccagaaatgcagagctttgtgagataccacccacttctgatacaaagtcagatactgcaccaggaggagaaagtgcaggccatgccacttcctctcaggagcctagtggatgctcagatcagagacctgcagaggacctcaacatccgagtggaaagactaacaaaaaaacttgaagaaaggagagaagagaaaagaaaagaggaagaacagagagaaattaagaaggaaattgagaggagaaaaactggaaaagaaatgttggattataaaaga

SEQ ID NO: 600767 - DNA, 263 bp, Homo sapiens
ttatataaaataggtagccccaattaactgacactaaactagcttcttggcctggcgcagtggctcacgcctgtaatccaaacactttgggaggccgatgcgggtgtatcgcttgggctcaggaattcaaggccagcctgggcaacatgttaaaaccctctttctataaaatatacaaaaattagccaggcatggtgtgtgcctgtagtcccagatactcaggaggctgaggcacgagaatcatgttaaccttgccagagggt

SEQ ID NO: 600768 - DNA, 117 bp, Homo sapiens
tgcatgtccacagtgccagaggcagcgcaccgatgggcgcacagaatacaactttgtgtaggaacaatggctagcggctgggtgagtgggcgtctgctgtatcggacgcgtgggtca

SEQ ID NO: 600769 - DNA, 789 bp, Homo sapiens
  misc_feature (121)..(122): n is a, c, g, or t
  misc_feature (208)..(208): n is a, c, g, or t
  misc_feature (215)..(215): n is a, c, g, or t
  misc_feature (219)..(219): n is a, c, g, or t
ggggcgaagggagcaatgctgtggttcagggcgccatccgcccgccatccgacgcaaaaaaggaacggcgcgggtcttcgtggtgttcgtggcaggtgatgatgacagtctaccagattgnntgcaagttgggaagatgataaagtacagaaggcatcttcaaccagttttgttgctattaaaatcgataccaaagttgaagcctgcntacagtnttcncaaatctatcctgtagtgtgtgttccatccagtttctttattggagacagtggaattcccttggaagtaatagcaggaagtgtttctgcagatgaacttgttacaagaattcacaaggtccgacagatgcatttgctaaaaagtgaaacatcagtagcaaatggcagtcagtcagaaagttcagtgtctactccatctgcgtcatttgaacctaacaacacttgtgaaaactctcagtccagaaatgcagagctttgtgagataccacccacttctgatacaaagtcagatactgcaccaggaggagaaagtgcaggccatgccacttcctctcaggagcctagtggatgctcagatcagagacctgcagaggacctcaacatccgagtggaaagactagtggatgctcgagatcagagacctgcagaggacctcaacatccgagtggaaagactaacaaaaaaacttgaagaaaggagagaagagaaaagaaaagaggaagaacagagagaaattaagaaggaaattgagaggagaaaaactggaaaagaaatgttggattataaaaga

SEQ ID NO: 600770 - DNA, 395 bp, Homo sapiens
  misc_feature (3)..(3): n is a, c, g, or t
  misc_feature (6)..(6): n is a, c, g, or t
  misc_feature (368)..(368): n is a, c, g, or t
  misc_feature (381)..(381): n is a, c, g, or t
ttnganacatttcgcatcggtttttatttatttatttatttttgagacggagtttcactcttgttgcccaggctggatctcggctcaccacaacctccacctcccaggttcaagcagttctcctgcctcagccttcctgagtagctgggattacaggcatgtgccaccacacccggctaattttgtatttttagtagagatggggttttttccatgttggtcaggctggtctcgaactcctgacctcagatgatccacccacctgggcctcccaaaatgctgggattacaggcatgagccactgtgcctggccggtcacacttatttctatcagcaggattttgtgccatcctgttgtacagcttaancaaaatacatttntatgtgccacagtc

SEQ ID NO: 600771 - DNA, 388 bp, Homo sapiens
aggaaacaattcgtacatccagcctgttcctgccgggatgatttgatcgtacaccgcctcttctattttgcgcggactttctactgtatgaaacatcgtcatttcctccttgtattcaactttgctcagttgcagttgatcaattgataatactcccacgtattttcaaatgcacgccgattttccggacaaaagttgacgcaataatcgtcaagatttgttggcacagcattaaacacttccatcgtgacaggcacggaaggataaggtgttcttgggtctaaaggattcggtgtattggacaacacaagcaatacatccatttctgtacgcagcgtgacggtagctcctttctggcaatgccctacaacaaagtgcatgtcaccag

SEQ ID NO: 600772 - DNA, 662 bp, Homo sapiens
gtgtgtgttcacagaccagtactgtgtgtgcatatgtgtgtgttcacagatcagtactgtgtgtgcgcccgtgtgtgttcacagatcagtactggtgtgcatgcgtgttaacagaccagtgctgtgtgtgcacatgtgtgttcacagatcagtactggtgcacatgcatgtgtgttcacagaccagtgctgtgtgtgcccataagtatatgttcacagaccaggactctcaagaacatagatgcaaaaatacttcacaaaatattagccaactaagtattactgagactcctgttctccacaagttgacgcagagatgcagtgcagtcccactcagagctcccacggcttttctagaaatgggcacacaaagctccaaagcgtgtgtggaaatgcagatgacctgggagacccaaaacaactccttgacaaagagcaggatttcaagacttaccagaaagctacagtaaccaaggcaggtggtgtcagcatgaggatacaatagagcagtgggatggaatagaaagtacagaaacaaaaaattccatacccaaaggggcagggggccgggacacaggcacaggattcagtgaggaaaacgagcacggaagtccttttgggagacggggcctcctcggttgaccaggtgaatggcaaacggtg

SEQ ID NO: 600773 - DNA, 119 bp, Homo sapiens
gcggtgactctagaggtccctgagagacgtgtttgcaatgtaggaagcctgatggttttcagtgtgcgacagaatgtggaccacaacaagcccctcacacattgcaatacggtctctca

SEQ ID NO: 600774 - DNA, 168 bp, Homo sapiens
gccaaacccagcagctcagaaaaaagggtaccatcccagccagttggtccattccgaccaaccgaaagtccataacccgttaggaagaagcattggccgttgtttcctttaatttttggaaggattaattgccaggggagtccataagttgaaccaaataaaaagggc

SEQ ID NO: 600775 - DNA, 688 bp, Homo sapiens
  misc_feature (600)..(600): n is a, c, g, or t
  misc_feature (628)..(628): n is a, c, g, or t
cagcttcagtgttatgtaacagtgagttgcactcctcattcttgtatgctgtggtgagcaggagggaggattagctcctcatcctgtcctttttctgtcattcactcctcttcccttttttggactgacatttttattttggctgcagtgctggggaaatgtccacttgagactaggtcacaagaatgtttaataactacttgttgattgaataaccagaagattgtaacttcattaaccctcctactcaaatgcaggcctggagtctttgtccttgagatttggcagttttttctaggtgttccacttttcttcttcactctcagtcaactagatagtctgagacaatgaatgttgccaactgttataggttgacacagtgagcactggtgaggcagggatttggggtttaattccaggctgcagccccatggttagaaactatgcagacctacatggtactcttaactgctctaggatgaatgagtatccttgagcagtagggtaccaggttggagagtgtagaagtgttcagggcaggatgtgtaattagggaagattagggatataattttatattatcatatgttttaatttggnggttattcaaattgtcaaccttaaatantgcatttcagaggatatgattaagtatgggagttatttgagtgcaagcttgaggatgcca
